(19) United States
(12) Patent Application Publication
(10) Pub. No.: US 2019/0038771 A1
(43) Pub. Date: Feb. 7, 2019

(54) MATERIALS AND METHODS FOR TREATMENT OF SEVERE COMBINED IMMUNODEFICIENCY (SCID) OR OMENN SYNDROME

(71) Applicant: CRISPR THERAPEUTICS AG, Basel (CH)

(72) Inventors: Thomas James CRADICK, Cambridge, MA (US); Chad Albert COWAN, Cambridge, MA (US); Ante Sven LUNDBERG, Cambridge, MA (US); Gregory Joseph COST, Cambridge, MA (US)

(21) Appl. No.: 16/074,743

(22) PCT Filed: Feb. 2, 2017
(86) PCT No.: PCT/IB2017/000185

§ 371 Date: Aug. 1, 2018

Related U.S. Application Data
(60) Provisional application No. 62/324,032, filed on Apr. 18, 2016.
(60) Provisional application No. 62/290,277, filed on Feb. 2, 2016.

(51) Int. Cl. A61K 48/00; C12N 5/0789; A61P 37/00

(52) U.S. Cl. CPC A61K 48/005; A61K 48/0075; A61P 37/00; A61K 48/0083; C12N 5/0647; A61K 48/0091

(57) ABSTRACT

The present application provides materials and methods for treating a patient with severe combined immunodeficiency (SCID) or Omenn Syndrome, both ex vive and in vive. In addition, the present application provides materials and methods for editing to modulate the expression, function or activity of the Recombination Activating Gene 1 (RAG1) gene in a cell by genome editing.

### RELATED APPLICATIONS

[0001] This application claims the benefit of U.S. Provisional Application No. 62/290,277, filed Feb. 2, 2016; and U.S. Provisional Application No. 62/324,032, filed Apr. 18, 2016; the contents of each of which are incorporated herein by reference in their entirety.

[0002] The present application provides materials and methods for treating a patient with severe combined immunodeficiency (SCID) or Omenn Syndrome, both ex vivo and in vivo. In addition, the present application provides materials and methods for genome editing to modulate the expression, function or activity of the Recombination Activating Gene 1 (RAG1) gene in a cell.

### INCORPORATION BY REFERENCE OF SEQUENCE LISTING

[0003] This application contains a Sequence Listing in computer readable form (filename: CRIS012001WO_ST25; 13,301,918 bytes—ASCII text file; created Jan. 26, 2017), which is incorporated herein by reference in its entirety and forms part of the disclosure.

### BACKGROUND

[0004] Severe combined immunodeficiency (SCID) is a monogenic disease that affects approximately 1.7/100,000 people in the United States, with about 40-100 new cases per year (J. Allergy Clin Immunol 2007; 120: 760-8). Mutations in more than 20 different genes have been identified as causing SCID, including, but not limited to, IL2RG, ADA, RAG1, RAG2, IL7R, JAK3, CDLRE1, and others. SCID causes disturbed development of functional T cells and B cells. Infants with SCID develop infections starting at approximately three months. The disease is almost universally fatal in the first two years. Existing treatment for SCID is hematopoietic stem cell transplant, which at best has a 5 year survival rate of 74% overall or greater than 90% for a matched sibling donor (N. Engl. J. Med. 214; 371: 434-46).

[0005] Mutations in the Recombination Activating Gene 1 (RAG1) can result in a number of severe combined immunodeficiencies (SCID), which include increased vulnerability to infectious diseases and shortened life expectancy. The impaired number and function of B and T cells in these patients is attributed to the key role of RAG1 (and RAG2) in the V(D)J recombination process that leads to the generation of diversity and assembly of the immunoglobulin (Ig) and T cell receptor (TCR) genes, in B cells and T cells, respectively. Depending on the types of mutation(s), the symptoms can range from SCID to autoimmunity resulting from dysregulation of the B and T cells.

[0006] RAG1 is the catalytic component of the RAG complex, a multiprotein complex that mediates the DNA cleavage phase during V(D)J recombination (McBlane, J. F. et al. Cell 83, 387-395 (1995)). V(D)J recombination allows formation of the extensive repertoire of antigen-specific receptors. V(D)J stands for Variability, Diversity and Joining, the segments in the genes encoding Ig and TCR proteins. V(D)J recombination adds both combinatorial and junctional diversity. The combinatorial assembly results in a diverse range of Ig and TCR genes in developing B and T cells through the rearrangement of different pairings of V (variable), in some cases D (diversity), and J (joining) gene segments into fusion genes. The RAG proteins are part of a system that ensures that DNA rearrangements take place at the correct locations relative to the V, D, and J gene segment coding regions. The sites of V(D)J recombination are determined by highly conserved recombination signal sequences (RSSs). The RSS includes one heptamer and one nonamer motif flanking either a 12- or 23-base pair spacer. The so-called “12/23 rule” promotes the efficient rearrangements that generally occur only between RSSs on the same chromosome with the heptamer and nonamer separated by differing spacer lengths (Eastman, Q. M., Leu, T. M. & Schatz, D. G. Nature 380, 85-88 (1996)). RAG1 mediates DNA binding to the recombination signal sequences (RSS) catalyzing the DNA cleavage activity through introduction of a double-strand break between the RSS and an adjacent coding segment. V(D)J recombination is essential for the development of lymphocytes. Junctional diversity further expands the repertoire through end processing of the segment ends at the borders of the V, D, and J elements. There are no mature lymphocytes without V(D)J recombination. Mutations in recombinase-activating genes 1 or 2 (RAG1/2) represent approximately 17% of all SCID cases due to this requirement for V(D)J rearrangement for functional B and T cell receptors. (Fischer, A. et al., “Severe combined immunodeficiencies and related disorders.” Nat Rev Dis Primers, vol. 1: 15061 (2015)).

[0007] RAG1 mutations can result in alpha/beta T-cell lymphopenia with gamma/delta T-cell expansion, severe cytomegalovirus (CMV) infection, and autoimmunity (Niehues, T., Perez-Becker, R. & Schuetz, C. Clin Immunol 135, 183-192 (2010) and Kalman, L. et al. Genet Med 6, 16-26 (2004)). Mutations resulting in complete RAG deficiency (RAGD or RAGΔ) with no V(D)J (<1% recombination activity of wild type) is associated with classical SCID and absence of T and B cells. A range of phenotypes present with hypomorphic mutations resulting in >1% of wild type activity: RAGD with skin inflammation and αβT-cell expansion (classical Omenn Syndrome), RAGD with skin inflammation and without T-cell expansion (incomplete Omenn Syndrome), RAGD with γδ T-cell expansion and RAGD with granulomas, early onset autoimmunity, idiophatic CD4 lymphopenia and a phenotype resembling common variable immunodeficiency (Geier, C. B. et al. PLoS One 10, e0133220 (2015)).

[0008] Omenn Syndrome has particular symptoms related to the limited amounts of recombination present and dysregulation of T and B cell functions. Symptoms are similar to graft-versus-host disease (GVHD), as the patients can have abnormal T cells with affinity for self-antigens. These auto reactive cells can target the patient resulting in symptoms similar to GVHD, including chronic inflammation of the skin, eosinophilia, failure to thrive, swollen lymph nodes, swollen spleen, diarrhea and enlarged liver. These patients have low immunoglobulin levels (except immunoglobulin E, which is elevated), low T cell levels (of low diversity), and no B cells. An additional disease, distinct from classic SCID and from Omenn Syndrome, is combined cellular and humoral deficiencies and multiple granulomas (Boissel, S. et al. Nucleic Acids Res 42, 2591-2601 (2014)).

[0009] Allogeneic bone marrow (BM) transplantation is a curative treatment that displays a high survival rate when a HLA compatible donor is available. There are complications with morbidity and mortality directly related to conditioning chemotherapy and graft-versus-host disease, which are reduced in newer protocols. There is a much poorer prognosis when the donor is partially compatible. There are large numbers of patients for whom HLA-matched donors are unavailable, which is a major challenge. An autologous procedure based on genetic correction of hematopoietic stem and progenitor cells is a highly attractive option, particularly for these patients.

[0010] Early gene therapy methods used autologous hematopoietic stem cells modified to express the therapeutic gene via γ-retroviral vectors. There is increased risk from this type of treatment, as the level of expression of RAG1 can be dangerous as it is a nuclease whose function is controlling genetic rearrangements. In addition, using viral insertion as a means of cDNA delivery carries the significant risks of insertional mutagenesis, as gamma retrovirus preferentially target transcribed regions. This is avoided by targeting the cDNA to a defined “safe harbor” using nucleases for site-specific editing or ideally directly correcting the gene in situ, enabling correct transcriptional control.

[0011] Genome engineering refers to the strategies and techniques for the targeted, specific modification of the genetic information (genome) of living organisms. Genome engineering is a very active field of research because of the wide range of possible applications, particularly in the areas of human health; the correction of a gene carrying a harmful mutation, for example, or to explore the function of a gene. Early technologies developed to insert a transgene into a living cell were often limited by the random nature of the insertion of the new sequence into the genome. Random insertions into the genome may result in disrupting normal regulation of neighboring genes leading to severe unwanted effects. Furthermore, random integration technologies offer little reproducibility, as there is no guarantee that the sequence would be inserted at the same place in two different cells. Recent genome engineering strategies, such as ZFNs, TALENs, HEs and MegaTALs, enable a specific area of the DNA to be modified, thereby increasing the precision of the correction or insertion compared to early technologies. These newer platforms offer a much larger degree of reproducibility.

[0012] Despite efforts from researchers and medical professionals worldwide who have been trying to address SCID and Omenn Syndrome, and despite the promise of genome engineering approaches, there still remains a critical need for developing safe and effective treatments for SCID and Omenn Syndrome.

[0013] The present invention presents an approach to correct the genetic basis of SCID and Omenn Syndrome. By using genome engineering tools to create permanent changes to the genome that can correct the RAG1 gene and restore RAG1 protein activity with a single treatment, the resulting therapy should stop the disease progression completely.

### SUMMARY

[0014] Provided herein are cellular, ex vivo and in vivo methods for creating permanent changes to the genome by deleting, inserting, correcting or modulating the expression of or function of one or more mutations or exons within or near the Recombination Activating Gene 1 (RAG1) gene or other DNA sequences that encode regulatory elements of the RAG1 gene or knocking in RAG1 cDNA or minigene into a safe harbor locus by genome editing and restoring RAG1 protein activity, which can be used to treat severe combined immunodeficiency (SCID) or Omenn Syndrome. Also provided are components, kits and compositions for performing such methods. Also provided are cells produced by them.

[0015] Provided herein is a method for editing a RAG1 gene in a human cell by genome editing, the method comprising the step of introducing into the human cell one or more deoxyribonucleic acid (DNA) endonucleases to effect one or more single-strand breaks (SSBs) or one or more double-strand breaks (DSBs) within or near the RAG1 gene or other DNA sequences that encode regulatory elements of the RAG1 gene that results in at least one of a permanent insertion, deletion, correction, or modulation of expression or function of one or more mutations or exons within or near or affecting the expression or function of the RAG1 gene, or within or near a safe harbor locus that results in a permanent insertion of the RAG1 gene or minigene, and results in restoration of RAG1 protein activity.

[0016] Also provided herein is a method for inserting a RAG1 gene in a human cell by genome editing, the method comprising the step of: introducing into the human cell one or more deoxyribonucleic acid (DNA) endonucleases to effect one or more single-strand breaks (SSBs) or double-strand breaks (DSBs) within or near a safe harbor locus that results in a permanent insertion of the RAG1 gene or minigene, and results in restoration of RAG1 protein activity.

[0017] In one aspect, provided herein is a method for editing the Recombination Activating Gene 1 (RAG1) gene in a human cell by genome editing comprising introducing into the cell one or more deoxyribonucleic acid (DNA) endonucleases to effect one or more single-strand breaks (SSBs) or double-strand breaks (DSBs) within or near the RAG1 gene or other DNA sequences that encode regulatory elements of the RAG1 gene of the cell that results in permanent deletion, insertion, or correction of one or more mutations within or near the RAG1 gene, or within or near a safe harbor locus that results in permanent insertion of the RAG1 gene or minigene, and restoration of RAG1 protein activity.

[0018] In another aspect, provided herein is an ex vivo method for treating a patient with severe combined immunodeficiency (SCID) or Omenn Syndrome comprising the steps of: i) creating a patient specific induced pluripotent stem cell (iPSC); ii) editing within or near the Recombination Activating Gene 1 (RAG1) gene of the iPSC or other DNA sequences that encode regulatory elements of the RAG1 gene of the iPSC or editing within or near a safe harbor locus of the iPSC; iii) differentiating the genome edited iPSC into a hematopoietic progenitor cell or a white blood cell; and iv) implanting the hematopoietic progenitor cell or white blood cell into the patient. As used herein, the term “hematopoietic progenitor cell” includes hematopoietic stem cells.

[0019] In some embodiments, the step of creating a patient specific induced pluripotent stem cell (iPSC) comprises: a) isolating a somatic cell from the patient; and b) introducing a set of pluripotency-associated genes into the somatic cell to induce the cell to become a pluripotent stem cell. In some embodiments, the somatic cell is a fibroblast. In some embodiments, the set of pluripotency-associated genes is one or more of the genes selected from the group consisting of OCT4, SOX2, KLF4, Lin28, NANOG and cMYC.

[0020] The step of editing within or near a RAG1 gene or other DNA sequences that encode regulatory elements of the RAG1 gene of the iPSC or editing within or near a safe harbor locus of the RAG1 gene of the iPSC or editing within or near a locus of the first exon of the RAG1 gene of the iPSC can comprise introducing into the iPSC one or more deoxyribonucleic acid (DNA) endonucleases to effect one or more single-strand breaks (SSBs) or double-strand breaks (DSBs) within or near the RAG1 gene or other DNA sequences that encode regulatory elements of the RAG1 gene that results in a permanent insertion, correction, deletion, or modulation of expression or function of one or more mutations or exons within or near or affecting the expression or function of the RAG1 gene or within or near a safe harbor locus that results in a permanent insertion of the RAG1 gene resulting in restoration of RAG1 protein activity. The safe harbor locus can be selected from the group consisting of AAVS1 (PPP1R12C), ALB, Angptl3, ApoC3, ASGR2, CCR5, FIX (F9), G6PC, Gys2, HGD, Lp(a), Pcsk9, Serpinal, TF, and TTR. The safe harbor locus can be selected from the group consisting of: exon 1-2 of AAVS1 (PPP1R12C), exon 1-2 of ALB, exon 1-2 of Angptl3, exon 1-2 of ApoC3, exon 1-2 of ASGR2, exon 1-2 of CCR5, exon 1-2 of FIX (F9), exon 1-2 of G6PC, exon 1-2 of Gys2, exon 1-2 of HGD, exon 1-2 of Lp(a), exon 1-2 of Pcsk9, exon 1-2 of Serpinal, exon 1-2 of TF, and exon 1-2 of TTR.

[0021] In some embodiments, the step of editing the Recombination Activating Gene 1 (RAG1) gene of the iPSC comprises introducing into the iPSC one or more deoxyribonucleic acid (DNA) endonucleases to effect one or more single-strand breaks (SSBs) or double-strand breaks (DSBs) within or near the RAG1 gene that results in permanent deletion, insertion, or correction of one or more mutations within or near the RAG1 gene and restoration of RAG1 protein activity.

[0022] In some embodiments, the step of differentiating the genome edited iPSC into a hematopoietic progenitor cell or a white blood cell comprises one or more of the following: treatment with a combination of small molecules or delivery of master transcription factors.

[0023] In some embodiments, the step of implanting the hematopoietic progenitor cell or white blood cell into the patient comprises implanting the hematopoietic progenitor cell or white blood cell into the patient by transplantation, local injection, or systemic infusion, or combinations thereof.

[0024] In another aspect, provided herein is an ex vivo method for treating a patient with severe combined immunodeficiency (SCID) or Omenn Syndrome comprising the steps of: i) isolating a white blood cell from the patient; ii) editing within or near the Recombination Activating Gene 1 (RAG1) gene or other DNA sequences that encode regulatory elements of the RAG1 gene of the white blood cell or editing within or near a safe harbor locus of the white blood cell; and iii) implanting the genome-edited white blood cell into the patient.

[0025] In some embodiments, the step of isolating a white blood cell from the patient comprises: cell differential centrifugation, cell culturing, or combinations thereof.

[0026] In some embodiments, the step of editing within or near the Recombination Activating Gene 1 (RAG1) gene of the white blood cell or other DNA sequences that encode regulatory elements of the RAG1 gene of the white blood cell or editing within or near a safe harbor locus of the white blood cell comprises introducing into the white blood cell one or more deoxyribonucleic acid (DNA) endonucleases to effect one or more single-strand breaks (SSBs) or double-strand breaks (DSBs) within or near the RAG1 gene or other DNA sequences that encode regulatory elements of the RAG1 gene that results in permanent insertion, correction, deletion, or modulation of expression or function of one or more mutations or exons within or near or affecting the expression or function of the RAG1 gene or editing within or near a safe harbor locus that results in permanent deletion, insertion, or correction of one or more mutations within or near the RAG1 gene and restoration of RAG1 protein activity. The safe harbor locus can be selected from the group consisting of AAVS1 (PPP1R12C), ALB, Angptl3, ApoC3, ASGR2, CCR5, FIX (F9), G6PC, Gys2, HGD, Lp(a), Pcsk9, Serpinal, TF, and TTR. The safe harbor locus can be selected from the group consisting of: exon 1-2 of AAVS1 (PPP1R12C), exon 1-2 of ALB, exon 1-2 of Angptl3, exon 1-2 of ApoC3, exon 1-2 of ASGR2, exon 1-2 of CCR5, exon 1-2 of FIX (F9), exon 1-2 of G6PC, exon 1-2 of Gys2, exon 1-2 of HGD, exon 1-2 of Lp(a), exon 1-2 of Pcsk9, exon 1-2 of Serpinal, exon 1-2 of TF, and exon 1-2 of TTR.

[0027] In some embodiments, the step of implanting the edited white blood cell into the patient comprises implanting the edited white blood cell into the patient by transplantation, local injection, or systemic infusion, or combinations thereof.

[0028] In an aspect, provided herein is an ex vivo method for treating a patient with severe combined immunodeficiency (SCID) or Omenn Syndrome comprising the steps of i) isolating a mesenchymal stem cell from the patient; ii) editing within or near the Recombination Activating Gene 1 (RAG1) gene of the stem cell or other DNA sequences that encode regulatory elements of the RAG1 gene of the mesenchymal stem cell or editing within or near a safe harbor locus of the RAG1 gene of the mesenchymal stem cell; iii) differentiating the genome-edited stem cell into a hematopoietic progenitor cell or white blood cell; and iv) implanting the hematopoietic progenitor cell or white blood cell into the patient.

[0029] In some embodiments, the stem cell is isolated from the patients bone marrow or peripheral blood. In some embodiments, the step of isolating a mesenchymal stem cell from the patient comprises: aspiration of bone marrow and isolation of mesenchymal cells by density centrifugation using Percoll™.

[0030] In some embodiments, the step of editing within or near the Recombination Activating Gene 1 (RAG1) gene of the stem cell or other DNA sequences that encode regulatory elements of the RAG1 gene of the mesenchymal stem cell comprises introducing into the mesenchymal stem cell one or more deoxyribonucleic acid (DNA) endonucleases to effect one or more single-strand breaks (SSBs) or double-strand breaks (DSBs) within or near the RAG1 gene or other DNA sequences that encode regulatory elements of the RAG1 gene that results in permanent deletion, insertion, correction or modulation of expression or function of one or more mutations within or near or affecting the expression or function of the RAG1 gene or within or near a safe harbor locus that results and restoration of RAG1 protein activity. The safe harbor locus can be selected from the group consisting of: AAVS1 (PPP1R12C), ALB, Angptl3, ApoC3, ASGR2, CCR5, FIX (F9), G6PC, Gys2, HGD, Lp(a), Pcsk9, Serpinal, TF, and TTR. The safe harbor locus can be selected from the group consisting of: exon 1-2 of AAVS1 (PPP1R12C), exon 1-2 of ALB, exon 1-2 of Angptl3, exon 1-2 of ApoC3, exon 1-2 of ASGR2, exon 1-2 of CCR5, exon 1-2 of FIX (F9), exon 1-2 of G6PC, exon 1-2 of Gys2, exon 1-2 of HGD, exon 1-2 of Lp(a), exon 1-2 of Pcsk9, exon 1-2 of Serpinal, exon 1-2 of TF, and exon 1-2 of TTR.

[0031] In some embodiments, the step of differentiating the genome-edited mesenchymal stem cell into a hematopoietic progenitor cell or white blood cell comprises one or more of the following: treatment with a combination of small molecules or delivery of master transcription factors.

[0032] In some embodiments, the step of implanting the hematopoietic progenitor cell or white blood cell into the patient comprises implanting the cell into the patient by transplantation, local injection, or systemic infusion, or combinations thereof.

[0033] In another aspect, provided herein is an ex vivo method for treating a patient with severe combined immunodeficiency (SCID) or Omenn Syndrome comprising the steps of: i) isolating a hematopoietic progenitor cell from the patient; ii) editing the Recombination Activating Gene 1 (RAG1) gene of the hematopoietic progenitor cell, or other DNA sequences that encode regulatory elements of the RAG1 gene, or editing within or near a safe harbor locus of the cell; and iii) implanting the cell into the patient.

[0034] In some embodiments, the method further comprises treating the patient with granulocyte colony stimulating factor (GCSF) prior to the step of isolating a hematopoietic progenitor cell from the patient. In some embodiments, step of treating the patient with granulocyte colony stimulating factor (GCSF) is performed in combination with Plerixaflor.

[0035] In some embodiments, the step of isolating a hematopoietic progenitor cell from the patient comprises isolating CD34+ cells.

[0036] In some embodiments, the step of editing the Recombination Activating Gene 1 (RAG1) gene of the hematopoietic progenitor cell comprises introducing into the progenitor cell one or more deoxyribonucleic acid (DNA) endonucleases to effect one or more single-strand breaks (SSBs) or double-strand breaks (DSBs) within or near the RAG1 gene or other DNA sequences that encode regulatory elements of the RAG1 gene that results in permanent deletion, insertion, correction, modulation of one or more mutations or exons within or near the RAG1 gene that results in permanent insertion of the RAG1 gene or minigene, and restoration of RAG1 protein activity.

[0037] In some embodiments, the step of implanting the cell into the patient comprises implanting the progenitor cell into the patient by transplantation, local injection, or systemic infusion, or combinations thereof.

[0038] In yet another aspect, provided herein is an in vivo method for treating a patient with severe combined immunodeficiency (SCID) or Omenn Syndrome comprising the step of editing the Recombination Activating Gene 1 (RAG1) gene in a cell of the patient.

[0039] In some embodiments, the step of editing the Recombination Activating Gene 1 (RAG1) gene in a cell of the patient comprises introducing into the cell one or more deoxyribonudeic acid (DNA) endonucleases to effect one or more single-strand breaks (SSBs) or double-strand breaks (DSBs) within or near the RAG1 gene or DNA sequences that encode regulatory elements of the RAG1 gene or editing within or near a safe harbor locus of the RAG1 gene that results in permanent deletion, insertion, correction, or modulation of expression or function of one or more mutations or exons within or near the RAG1 gene and restoration of RAG1 protein activity. In some embodiments, the cell is a bone marrow cell, a hematopoietic progenitor cell, or a CD34+ cell.

[0040] In some embodiments, the one or more DNA endonucleases is a Cas1, Cas1B, Cas2, Cas3, Cas4, Cas5, Cas6, Cas7, Cas8, Cas9 (also known as Csn1 and Csx12), Cas100, Csy1, Csy2, Csy3, Cse1, Cse2, Csc1, Csc2, Csa5, Csn2, Csm2, Csm3, Csm4, Csm5, Csm6, Cmr1, Cmr3, Cmr4, Cmr5, Cmr6, Csb1, Csb2, Csb3, Csx17, Csx14, Csx10, Csx16, CsaX, Csx3, Csx1, Csx15, Csf1, Csf2, Csf3, Csf4, or Cpf1 endonuclease; a homolog thereof, recombination of the naturally occurring molecule, codon-optimized, or modified version thereof, and combinations of any of the foregoing.

[0041] In some embodiments, the method comprises introducing into the cell one or more polynucleotides encoding the one or more DNA endonucleases. In some embodiments, the method comprises introducing into the cell one or more ribonucleic acids (RNAs) encoding the one or more DNA endonucleases. In some embodiments, the one or more polynucleotides or one or more RNAs is one or more modified polynucleotides or one or more modified RNAs. In some embodiments, the method comprises introducing into the cell one or more DNA endonucleases wherein the endonuclease is a protein or polypeptide.

[0042] In some embodiments, the method further comprises introducing into the cell one or more guide ribonucleic acids (gRNAs). In some embodiments, the one or more gRNAs are single-molecule guide RNA (sgRNAs). In some embodiments, the one or more gRNAs or one or more sgRNAs is one or more modified gRNAs or one or more modified sgRNAs, or combinations thereof. In some embodiments, the one or more DNA endonucleases is pre-complexed with one or more gRNAs or one or more sgRNAs, or combinations thereof.

[0043] In some embodiments, the method further comprises introducing into the cell a polynucleotide donor template comprising at least a portion of the wild-type RAG1 gene or minigene (comprised of, natural or synthetic enhancer and promoter, one or more exons, and natural or synthetic introns, and natural or synthetic 3′UTR and polyadenylation signal), DNA sequences that encode wild-type regulatory elements of the RAG1 gene, and/or cDNA. In some embodiments, the part of the wild-type RAG1 gene or cDNA is exon 1, exon 2, intronic regions, fragments or combinations thereof, or the entire RAG1 gene or cDNA. In some embodiments, the donor template is either a single or double stranded polynucleotide. In some embodiments, the donor template has homologous arms to the 11p13 region.

[0044] In some embodiments, the method further comprises introducing into the cell one guide ribonucleic acid (gRNA) and a polynucleotide donor template comprising at least a portion of the wild-type RAG1 gene. In some embodiments, the method further comprises introducing into the cell one guide ribonucleic acid (gRNA) and a polynucleotide donor template comprising at least a portion of a codon optimized or modified RAG1 gene. The one or more DNA endonucleases is one or more Cas9 or Cpf1 endonucleases that effect one single-strand break (SSB) or double-strand break (DSB) at a locus within or near the RAG1 gene (or codon optimized or modified RAG1 gene) or other DNA sequences that encode regulatory elements of the RAG1 gene, or within or near a safe harbor locus that facilitates insertion of a new sequence from the polynucleotide donor template into the chromosomal DNA at the locus or safe harbor locus that results in a permanent insertion or correction of a part of the chromosomal DNA of the RAG1 gene or other DNA sequences that encode regulatory elements of the RAG1 gene proximal to the locus or safe harbor locus, and wherein the gRNA comprises a spacer sequence that is complementary to a segment of the locus or safe harbor locus. In some embodiments, proximal means nucleotides both upstream and downstream of the locus or safe harbor locus.

[0045] In some embodiments, the method further comprises introducing into the cell two guide ribonucleic acid (gRNAs) and a polynucleotide donor template comprising at least a portion of the wild-type RAG1 gene, and wherein the one or more DNA endonucleases is two or more Cas9 or Cpf1 endonucleases that effect a pair of single-strand breaks (SSBs) or double-strand breaks (DSBs), the first at a 5′ locus and the second at a 3′ locus, within or near the RAG1 gene or other DNA sequences that encode regulatory elements of the RAG1 gene, or within or near a safe harbor locus that facilitates insertion of a new sequence from the polynucleotide donor template into the chromosomal DNA between the 5′ locus and the 3′ locus that results in permanent insertion or correction of the chromosomal DNA between the 5′ locus and the 3′ locus within or near the RAG1 gene or other DNA sequences that encode regulatory elements of the RAG1 gene, or within or near a safe harbor locus and restoration of RAG1 protein activity, and wherein the first guide RNA comprises a spacer sequence that is complementary to a segment of the 5′ locus and the second guide RNA comprises a spacer sequence that is complementary to a segment of the 3′ locus.

[0046] In some embodiments, the one or more gRNAs are one or more single-molecule guide RNA (sgRNAs). In some embodiments, the one or more gRNAs or one or more sgRNAs is one or more modified gRNAs or one or more modified sgRNAs. In some embodiments, the one or more DNA endonucleases is pre-complexed with one more two gRNAs or one or more sgRNAs.

[0047] In some embodiments, the part of the wild-type RAG1 gene or cDNA is exon 1, intron 1, exon 2, combinations thereof, or the entire RAG1 gene or cDNA.

[0048] In some embodiments, the donor template is either a single or double stranded polynucleotide. In some embodiments, the donor template has homologous arms to the 11p13 region.

[0049] In some embodiments, the locus, or 5′ locus and 3′ locus are in the first or second exon, first intron, or both the first exon and first intron of the RAG1 of the RAG1 gene.

[0050] In some embodiments, the insertion or correction is by homology directed repair (HDR).

[0051] In some embodiments, the method further comprises introducing into the cell two guide ribonucleic acid (gRNAs), and wherein the one or more DNA endonucleases is two or more Cas9 or Cpf1 endonucleases that effect a pair of double-strand breaks (DSBs), the first at a 5′ DSB locus and the second at a 3′ DSB locus, within or near the RAG1 gene or other DNA sequences that encode regulatory elements of the RAG1 gene, or within or near a safe harbor locus that that causes a deletion of the chromosomal DNA between the 5′ DSB locus and the 3′ DSB locus that results in permanent deletion of the chromosomal DNA between the 5′ DSB locus and the 3′ DSB locus within or near the RAG1 gene or other DNA sequences that encode regulatory elements of the RAG1 gene, or within or near a safe harbor locus and restoration of RAG1 protein activity, and wherein the first guide RNA comprises a spacer sequence that is complementary to a segment of the 5′ DSB locus and the second guide RNA comprises a spacer sequence that is complementary to a segment of the 3′ DSB locus.

[0052] In some embodiments, the two gRNAs are two single-molecule guide RNA (sgRNAs). In some embodiments, the two gRNAs or two sgRNAs are two modified gRNAs or two modified sgRNAs. In some embodiments, the one or more DNA endonucleases is pre-complexed with one or two gRNAs or one or two sgRNAs.

[0053] In some embodiments, both the 5′ DSB and 3′ DSB are in or near either the first exon, first intron, or second exon of the RAG1 gene.

[0054] In some embodiments, the correction is by homology directed repair (HDR).

[0055] In some embodiments, the correction is by non-homologous end joining (NHEJ).

[0056] In some embodiments, the deletion is a deletion of 1 kb or less.

[0057] In some embodiments, the Cas9 or Cpf1 mRNA, gRNA, and donor template are either each formulated separately into lipid nanoparticles or all co-formulated into a lipid nanoparticle.

[0058] In some embodiments, the Cas9 or Cpf1 mRNA, gRNA, and donor template are formulated into separate exosomes or are co-formulated into an exosome.

[0059] In some embodiments, the Cas9 or Cpf1 mRNA is formulated into a lipid nanoparticle, and both the gRNA and donor template are delivered to the cell by a viral vector. In some embodiments, the viral vector is an adeno-associated virus (AAV) vector. In some embodiments, the AAV vector is an AAV6 vector.

[0060] The Cas9 or Cpf1 mRNA can be formulated into a lipid nanoparticle, and the gRNA can be delivered to the cell by electroporation and donor template can be delivered to the cell by a viral vector. In some embodiments, the viral vector is an adeno-associated virus (AAV) vector. In some embodiments, the AAV vector is an AAV6 vector. In some embodiments, the gRNA is delivered to the cell by electroporation and donor template is delivered to the cell by an adeno-associated virus (AAV) vector. In some embodiments, the AAV vector is an AAV6 vector.

[0061] In some embodiments, the RAG1 gene is located on Chromosome 11: 36,510,372-36,593,156 (Genome Reference Consortium—GRCh38/hg38). In some embodiments, the RAG1 gene is located within a location on Chromosome 11, plus or minus 3 KB on either end: 36568013-36579760 (Genome Reference Consortium—GRCh38/hg38). In some embodiments, the RAG1 gene is located on Chromosome 11: 36568013-36579760 (Genome Reference Consortium—GRCh38/hg38).

[0062] The restoration of RAG1 protein activity can be compared to wild-type or normal RAG1 protein activity.

[0063] In another aspect, provided herein is one or more guide ribonucleic acids (gRNAs) comprising a spacer sequence selected from the group consisting of the nucleic acid sequences in SEQ ID NOs: 54,860-66,285 editing the RAG1 gene in a cell from a patient with severe combined immunodeficiency (SCID) or Omenn Syndrome. In some embodiments, the one or more gRNAs are one or more single-molecule guide RNAs (sgRNAs). In some embodiments, the one or more gRNAs or one or more sgRNAs is one or more modified gRNAs or one or more modified sgRNAs.

[0064] In another aspect, provided herein is one or more guide ribonucleic acids (gRNAs) comprising a spacer sequence selected from the group consisting of the nucleic acid sequences in SEQ ID NOs: 1-54,859 for editing a safe harbor locus in a cell from a patient with severe combined immunodeficiency (SCID) or Omenn Syndrome, wherein the safe harbor locus is selected from the group consisting of AAVS1 (PPP1R12C), ALB, Angptl3, ApoC3, ASGR2, CCR5, FIX (F9), G6PC, Gys2, HGD, Lp(a), Pcsk9, Serpinal, TF, and TTR. In some embodiments, the one or more gRNAs are one or more single-molecule guide RNAs (sgRNAs). In some embodiments, the one or more gRNAs or one or more sgRNAs is one or more modified gRNAs or one or more modified sgRNAs.

[0065] In another aspect, provided herein are cells that have been modified by the preceding methods to permanently correct one or more mutations within the RAG1 gene and restore RAG1 protein activity. Further provided herein are methods for ameliorating severe combined immunodeficiency (SCID) or Omenn Syndrome by the administration of cells that have been modified by the preceding methods to a SCID or Omenn Syndrome patient.

[0066] In some embodiments, the methods and compositions of the disclosure comprise one or more modified guide ribonucleic acids (gRNAs). Non-limiting examples of modifications can comprise one or more nucleotides modified at the 2′ position of the sugar, in some embodiments a 2′-O-alkyl, 2′-O-alkyl-O-alkyl, or 2′-fluoro-modified nucleotide. In some embodiments, RNA modifications include 2′-fluoro, 2′-amino or 2′ O-methyl modifications on the ribose of pyrimidines, abasic residues, desoxy nucleotides, or an inverted base at the 3′ end of the RNA.

[0067] In some embodiments, the one or more modified guide ribonucleic acids (gRNAs) comprise a modification that makes the modified gRNA more resistant to nuclease digestion than the native oligonucleotide. Non-limiting examples of such modifications include those comprising modified backbones, for example, phosphorothioates, phosphorothyos, phosphotriesters, methyl phosphonates, short chain alkyl or cycloalkyl intersugar linkages or short chain heteroatomic or heterocyclic intersugar linkages.

[0068] Various other aspects are described and exemplified herein.

### BRIEF DESCRIPTION OF THE DRAWINGS

[0069] Various aspects of materials and methods for treatment of severe combined immunodeficiency (SCID) or Omenn Syndrome disclosed and described in this specification can be better understood by reference to the accompanying figures, in which:

[0070] FIG. 1A is an illustration depicting the type II CRISPR/Cas system.

[0071] FIG. 1B is another illustration depicting the type II CRISPR/Cas system.

[0072] FIG. 2 is a graph depicting cutting efficiencies of gRNAs transcribed in vitro and transfected in primary human mobilized Peripheral Blood CD34+ cells (mPB CD34) that constitutively express Cas9, as evaluated using TIDE analysis.

### BRIEF DESCRIPTION OF THE SEQUENCE LISTING

[0073] SEQ ID NOs: 1-2,032 are 20 bp spacer sequences for targeting exons 1-2 of an AAVS1 (PPP1R12C) gene with a S. pyogenes Cas9 endonuclease.

[0074] SEQ ID NOs: 2,033-2,203 are 20 bp spacer sequences for targeting exons 1-2 of an AAVS1 (PPP1R12C) gene with a S. aureus Cas9 endonuclease.

[0075] SEQ ID NOs: 2,204-2,221 are 20 bp spacer sequences for targeting exons 1-2 of an AAVS1 (PPP1R12C) gene with a S. thermophilus Cas9 endonuclease.

[0076] SEQ ID NOs: 2,222-2,230 are 20 bp spacer sequences for targeting exons 1-2 of an AAVS1 (PPP1R12C) gene with a T. denticola Cas9 endonuclease.

[0077] SEQ ID NOs: 2,231-2,305 are 20 bp spacer sequences for targeting exons 1-2 of an AAVS1 (PPP1R12C) gene with a N. meningitides Cas9 endonuclease.

[0078] SEQ ID NOs: 2,306-3,481 are 22 bp spacer sequences for targeting exons 1-2 of an AAVS1 (PPP1R12C) gene with an Acidominococcus, Lachnospiraceae, and Francisella novicida Cpf1 endonuclease.

[0079] SEQ ID NOs: 3,482-3,649 are 20 bp spacer sequences for targeting exons 1-2 of an Alb gene with a S. pyogenes Cas9 endonuclease.

[0080] SEQ ID NOs: 3,650-3,677 are 20 bp spacer sequences for targeting exons 1-2 of an Alb gene with a S. aureus Cas9 endonuclease.

[0081] SEQ ID NOs: 3,678-3,695 are 20 bp spacer sequences for targeting exons 1-2 of an Alb gene with a S. thermophilus Cas9 endonuclease.

[0082] SEQ ID NOs: 3,696-3,700 are 20 bp spacer sequences for targeting exons 1-2 of an Alb gene with a T. denticola Cas9 endonuclease.

[0083] SEQ ID NOs: 3,701-3,724 are 20 bp spacer sequences for targeting exons 1-2 of an Alb gene with a N. meningitides Cas9 endonuclease.

[0084] SEQ ID NOs: 3,725-4,103 are 22 bp spacer sequences for targeting exons 1-2 of an Alb gene with an Acidominococcus, Lachnospiraceae, and Francisella novicida Cpf1 endonuclease.

[0085] SEQ ID NOs: 4,104-4,448 are 20 bp spacer sequences for targeting exons 1-2 of an Angpt13 gene with a S. pyogenes Cas9 endonuclease.

[0086] SEQ ID NOs: 4,449-4,484 are 20 bp spacer sequences for targeting exons 1-2 of an Angpt13 gene with a S. aureus Cas9 endonuclease.

[0087] SEQ ID NOs: 4,485-4,507 are 20 bp spacer sequences for targeting exons 1-2 of an Angpt13 gene with a S. thermophilus Cas9 endonuclease.

[0088] SEQ ID NOs: 4,508-4,520 are 20 bp spacer sequences for targeting exons 1-2 of an Angpt13 gene with a T. denticola Cas9 endonuclease.

[0089] SEQ ID NOs: 4,521-4,583 are 20 bp spacer sequences for targeting exons 1-2 of an Angpt13 gene with a N. meningitides Cas9 endonuclease.

[0090] SEQ ID NOs: 4,584-5,431 are 22 bp spacer sequences for targeting exons 1-2 of an Angpt13 gene with an Acidominococcus, Lachnospiraceae, and Francisella novicida Cpf1 endonuclease.

[0091] SEQ ID NOs: 5,432-5,834 are 20 bp spacer sequences for targeting exons 1-2 of an ApoC3 gene with a S. pyogenes Cas9 endonuclease.

[0092] SEQ ID NOs: 5,835-5,859 are 20 bp spacer sequences for targeting exons 1-2 of an ApoC3 gene with a S. aureus Cas9 endonuclease.

[0093] SEQ ID NOs: 5,860-5,862 are 20 bp spacer sequences for targeting exons 1-2 of an ApoC3 gene with a S. thermophilus Cas9 endonuclease.

[0094] SEQ ID NOs: 5,863-5,864 are 20 bp spacer sequences for targeting exons 1-2 of an ApoC3 gene with a T. denticola Cas9 endonuclease.

[0095] SEQ ID NOs: 5,865-5,876 are 20 bp spacer sequences for targeting exons 1-2 of an ApoC3 gene with a N. meningitides Cas9 endonuclease.

[0096] SEQ ID NOs: 5,877-6,108 are 22 bp spacer sequences for targeting exons 1-2 of an ApoC3 gene with an Acidominococcus, Lachnospiraceae, and Francisella novicida Cpf1 endonuclease.

[0097] SEQ ID NOs: 6,109-7,876 are 20 bp spacer sequences for targeting exons 1-2 of an ASGR2 gene with a S. pyogenes Cas9 endonuclease.

[0098] SEQ ID NOs: 7,877-8,082 are 20 bp spacer sequences for targeting exons 1-2 of an ASGR2 gene with a S. aureus Cas9 endonuclease.

[0099] SEQ ID NOs: 8,083-8,106 are 20 bp spacer sequences for targeting exons 1-2 of an ASGR2 gene with a S. thermophilus Cas9 endonuclease.

[0100] SEQ ID NOs: 8,107-8,118 are 20 bp spacer sequences for targeting exons 1-2 of an ASGR2 gene with a T. denticola Cas9 endonuclease.

[0101] SEQ ID NOs: 8,119-8,201 are 20 bp spacer sequences for targeting exons 1-2 of an ASGR2 gene with a N. meningitides Cas9 endonuclease.

[0102] SEQ ID NOs: 8,202-9,641 are 22 bp spacer sequences for targeting exons 1-2 of an ASGR2 gene with an Acidominococcus, Lachnospiraceae, and Francisella novicida Cpf1 endonuclease.

[0103] SEQ ID NOs: 9,642-9,844 are 20 bp spacer sequences for targeting exons 1-2 of a CCR5 gene with a S. pyogenes Cas9 endonuclease.

[0104] SEQ ID NOs: 9,845-9,876 are 20 bp spacer sequences for targeting exons 1-2 of a CCR5 gene with a S. aureus Cas9 endonuclease.

[0105] SEQ ID NOs: 9,877-9,890 are 20 bp spacer sequences for targeting exons 1-2 of a CCR5 gene with a S. thermophilus Cas9 endonuclease.

[0106] SEQ ID NOs: 9,891-9,892 are 20 bp spacer sequences for targeting exons 1-2 of a CCR5 gene with a T. denticola Cas9 endonuclease.

[0107] SEQ ID NOs: 9,893-9,920 are 20 bp spacer sequences for targeting exons 1-2 of a CCR5 gene with a N. meningitides Cas9 endonuclease.

[0108] SEQ ID NOs: 9,921-10,220 are 22 bp spacer sequences for targeting exons 1-2 of a CCR5 gene with an Acidominococcus, Lachnospiraceae, and Francisella novicida Cpf1 endonuclease.

[0109] SEQ ID NOs: 10,221-11,686 are 20 bp spacer sequences for targeting exons 1-2 of an F9 gene with a S. pyogenes Cas9 endonuclease.

[0110] SEQ ID NOs: 11,687-11,849 are 20 bp spacer sequences for targeting exons 1-2 of an F9 gene with a S. aureus Cas9 endonuclease.

[0111] SEQ ID NOs: 11,850-11,910 are 20 bp spacer sequences for targeting exons 1-2 of an F9 gene with a S. thermophilus Cas9 endonuclease.

[0112] SEQ ID NOs: 11,911-11,935 are 20 bp spacer sequences for targeting exons 1-2 of an F9 gene with a T. denticola Cas9 endonuclease.

[0113] SEQ ID NOs: 11,936-12,088 are 20 bp spacer sequences for targeting exons 1-2 of an F9 gene with a N. meningitides Cas9 endonuclease.

[0114] SEQ ID NOs: 12,089-14,229 are 22 bp spacer sequences for targeting exons 1-2 of an F9 gene with an Acidominococcus, Lachnospiraceae, and Francisella novicida Cpf1 endonuclease.

[0115] SEQ ID NOs: 14,230-15,245 are 20 bp spacer sequences for targeting exons 1-2 of a G6PC gene with a S. pyogenes Cas9 endonuclease.

[0116] SEQ ID NOs: 15,246-15,362 are 20 bp spacer sequences for targeting exons 1-2 of a G6PC gene with a S. aureus Cas9 endonuclease.

[0117] SEQ ID NOs: 15,363-15,386 are 20 bp spacer sequences for targeting exons 1-2 of a G6PC gene with a S. thermophilus Cas9 endonuclease.

[0118] SEQ ID NOs: 15,387-15,395 are 20 bp spacer sequences for targeting exons 1-2 of a G6PC gene with a T. denticola Cas9 endonuclease.

[0119] SEQ ID NOs: 15,396-15,485 are 20 bp spacer sequences for targeting exons 1-2 of a G6PC gene with a N. meningitides Cas9 endonuclease.

[0120] SEQ ID NOs: 15,486-16,580 are 22 bp spacer sequences for targeting exons 1-2 of a G6PC gene with an Acidominococcus, Lachnospiraceae, and Francisella novicida Cpf1 endonuclease.

[0121] SEQ ID NOs: 16,581-22,073 are 20 bp spacer sequences for targeting exons 1-2 of a Gys2 gene with a S. pyogenes Cas9 endonuclease.

[0122] SEQ ID NOs: 22,074-22,749 are 20 bp spacer sequences for targeting exons 1-2 of a Gys2 gene with a S. aureus Cas9 endonuclease.

[0123] SEQ ID NOs: 22,750-23,027 are 20 bp spacer sequences for targeting exons 1-2 of a Gys2 gene with a S. thermophilus Cas9 endonuclease.

[0124] SEQ ID NOs: 23,028-23,141 are 20 bp spacer sequences for targeting exons 1-2 of a Gys2 gene with a T. denticola Cas9 endonuclease.

[0125] SEQ ID NOs: 23,142-23,821 are 20 bp spacer sequences for targeting exons 1-2 of a Gys2 gene with a N. meningitides Cas9 endonuclease.

[0126] SEQ ID NOs: 23,822-32,253 are 22 bp spacer sequences for targeting exons 1-2 of a Gys2 gene with an Acidominococcus, Lachnospiraceae, and Francisella novicida Cpf1 endonuclease.

[0127] SEQ ID NOs: 32,254-33,946 are 20 bp spacer sequences for targeting exons 1-2 of an HGD gene with a S. pyogenes Cas9 endonuclease.

[0128] SEQ ID NOs: 33,947-34,160 are 20 bp spacer sequences for targeting exons 1-2 of an HGD gene with a S. aureus Cas9 endonuclease.

[0129] SEQ ID NOs: 34,161-34,243 are 20 bp spacer sequences for targeting exons 1-2 of an HGD gene with a S. thermophilus Cas9 endonuclease.

[0130] SEQ ID NOs: 34,244-34,262 are 20 bp spacer sequences for targeting exons 1-2 of an HGD gene with a T. denticola Cas9 endonuclease.

[0131] SEQ ID NOs: 34,263-34,463 are 20 bp spacer sequences for targeting exons 1-2 of an HGD gene with a N. meningitides Cas9 endonuclease.

[0132] SEQ ID NOs: 34,464-36,788 are 22 bp spacer sequences for targeting exons 1-2 of an HGD gene with an Acidominococcus, Lachnospiraceae, and Francisella novicida Cpf1 endonuclease.

[0133] SEQ ID NOs: 36,789-40,583 are 20 bp spacer sequences for targeting exons 1-2 of an Lp(a) gene with a S. pyogenes Cas9 endonuclease.

[0134] SEQ ID NOs: 40,584-40,993 are 20 bp spacer sequences for targeting exons 1-2 of an Lp(a) gene with a S. aureus Cas9 endonuclease.

[0135] SEQ ID NOs: 40,994-41,129 are 20 bp spacer sequences for targeting exons 1-2 of an Lp(a) gene with a S. thermophilus Cas9 endonuclease.

[0136] SEQ ID NOs: 41,130-41,164 are 20 bp spacer sequences for targeting exons 1-2 of an Lp(a) gene with a T. denticola Cas9 endonuclease.

[0137] SEQ ID NOs: 41,165-41,532 are 20 bp spacer sequences for targeting exons 1-2 of an Lp(a) gene with a N. meningitides Cas9 endonuclease.

[0138] SEQ ID NOs: 41,533-46,153 are 22 bp spacer sequences for targeting exons 1-2 of an Lp(a) gene with an Acidominococcus, Lachnospiraceae, and Francisella novicida Cpf1 endonuclease.

[0139] SEQ ID NOs: 46,154-48,173 are 20 bp spacer sequences for targeting exons 1-2 of a PCSK9 gene with a S. pyogenes Cas9 endonuclease.

[0140] SEQ ID NOs: 48,174-48,360 are 20 bp spacer sequences for targeting exons 1-2 of a PCSK9 gene with a S. aureus Cas9 endonuclease.

[0141] SEQ ID NOs: 48,361-48,396 are 20 bp spacer sequences for targeting exons 1-2 of a PCSK9 gene with a S. thermophilus Cas9 endonuclease.

[0142] SEQ ID NOs: 48,397-48,410 are 20 bp spacer sequences for targeting exons 1-2 of a PCSK9 gene with a T. denticola Cas9 endonuclease.

[0143] SEQ ID NOs: 48,411-48,550 are 20 bp spacer sequences for targeting exons 1-2 of a PCSK9 gene with a N. meningitides Cas9 endonuclease.

[0144] SEQ ID NOs: 48,551-50,344 are 22 bp spacer sequences for targeting exons 1-2 of a PCSK9 gene with an Acidominococcus, Lachnospiraceae, and Francisella novicida Cpf1 endonuclease.

[0145] SEQ ID NOs: 50,345-51,482 are 20 bp spacer sequences for targeting exons 1-2 of a Serpinal gene with a S. pyogenes Cas9 endonuclease.

[0146] SEQ ID NOs: 51,483-51,575 are 20 bp spacer sequences for targeting exons 1-2 of a Serpinal gene with a S. aureus Cas9 endonuclease.

[0147] SEQ ID NOs: 51,576-51,587 are 20 bp spacer sequences for targeting exons 1-2 of a Serpinal gene with a S. thermophilus Cas9 endonuclease.

[0148] SEQ ID NOs: 51,588-51,590 are 20 bp spacer sequences for targeting exons 1-2 of a Serpinal gene with a T. denticola Cas9 endonuclease.

[0149] SEQ ID NOs: 51,591-51,641 are 20 bp spacer sequences for targeting exons 1-2 of a Serpinal gene with a N. meningitides Cas9 endonuclease.

[0150] SEQ ID NOs: 51,642-52,445 are 22 bp spacer sequences for targeting exons 1-2 of a Serpinal gene with an Acidominococcus, Lachnospiraceae, and Francisella novicida Cpf1 endonuclease.

[0151] SEQ ID NOs: 52,446-53,277 are 20 bp spacer sequences for targeting exons 1-2 of a TF gene with a S. pyogenes Cas9 endonuclease.

[0152] SEQ ID NOs: 53,278-53,363 are 20 bp spacer sequences for targeting exons 1-2 of a TF gene with a S. aureus Cas9 endonuclease.

[0153] SEQ ID NOs: 53,364-53,375 are 20 bp spacer sequences for targeting exons 1-2 of a TF gene with a S. thermophilus Cas9 endonuclease.

[0154] SEQ ID NOs: 53,376-53,382 are 20 bp spacer sequences for targeting exons 1-2 of a TF gene with a T. denticola Cas9 endonuclease.

[0155] SEQ ID NOs: 53,383-53,426 are 20 bp spacer sequences for targeting exons 1-2 of a TF gene with a N. meningitides Cas9 endonuclease.

[0156] SEQ ID NOs: 53,427-54,062 are 22 bp spacer sequences for targeting exons 1-2 of a TF gene with an Acidominococcus, Lachnospiraceae, and Francisella novicida Cpf1 endonuclease.

[0157] SEQ ID NOs: 54,063-54,362 are 20 bp spacer sequences for targeting exons 1-2 of a TTR gene with a S. pyogenes Cas9 endonuclease.

[0158] SEQ ID NOs: 54,363-54,403 are 20 bp spacer sequences for targeting exons 1-2 of a TTR gene with a S. aureus Cas9 endonuclease.

[0159] SEQ ID NOs: 54,404-54,420 are 20 bp spacer sequences for targeting exons 1-2 of a TTR gene with a S. thermophilus Cas9 endonuclease.

[0160] SEQ ID NOs: 54,421-54,422 are 20 bp spacer sequences for targeting exons 1-2 of a TTR gene with a T. denticola Cas9 endonuclease.

[0161] SEQ ID NOs: 54,423-54,457 are 20 bp spacer sequences for targeting exons 1-2 of a TTR gene with a N. meningitides Cas9 endonuclease.

[0162] SEQ ID NOs: 54,458-54,859 are 22 bp spacer sequences for targeting exons 1-2 of a TTR gene with an Acidominococcus, Lachnospiraceae, and Francisella novicida Cpf1 endonuclease.

[0163] SEQ ID NOs: 54,860-59,105 are 20 bp spacer sequences for targeting exons 1-2 of a Recombination Activating Gene 1 (RAG1) gene with a S. pyogenes Cas9 endonuclease.

[0164] SEQ ID NOs: 59,106-59,602 are 20 bp spacer sequences for targeting exons 1-2 of a Recombination Activating Gene 1 (RAG1) gene with a S. aureus Cas9 endonuclease.

[0165] SEQ ID NOs: 59,603-59,759 are 20 bp spacer sequences for targeting exons 1-2 of a Recombination Activating Gene 1 (RAG1) gene with a S. thermophilus Cas9 endonuclease.

[0166] SEQ ID NOs: 59,760-59,824 are 20 bp spacer sequences for targeting exons 1-2 of a Recombination Activating Gene 1 (RAG1) gene with a T. denticola Cas9 endonuclease.

[0167] SEQ ID NOs: 59,825-60,308 are 20 bp spacer sequences for targeting exons 1-2 of a Recombination Activating Gene 1 (RAG1) gene with a N. meningitides Cas9 endonuclease.

[0168] SEQ ID NOs: 60,309-66,285 are 22 bp spacer sequences for targeting exons 1-2 of a Recombination Activating Gene 1 (RAG1) gene with an Acidominococcus, Lachnospiraceae, and Francisella novicida Cpf1 endonuclease.

### DETAILED DESCRIPTION

[0169] Recombination Activating Gene 1 (RAG1)

[0170] Recombination Activating Gene 1 (RAG1) is also known as RING Finger Protein 74 or V(D)J Recombination-Activating Protein 1, and located on Chromosome 11, starting: 36,510,372 bp from the p terminus and ending 36,593,156 bp from the p terminus on the plus strand (GRCh38/hg38). In GRCh37/hg19, the coordinates are 11:36,589,563-36,601,310. The size of the RAG1 gene is 82,785 bases, while the cDNA (from one mRNA) is 6.6 kb. The RAG1 gene contains 2 exons. RAG2 is also located near RAG1 on human chromosome 11p13.

[0171] The human RAG1 protein consists of 1043 amino acids in two domains, the N-terminal non-core domain and the C-terminal core RAG domain, each has conserved regions essential for RAG1 recombination activity. Ace View (NCBI) lists: 12 distinct gt-ag introns, 5 different mRNAs, 3 alternatively spliced variants and 2 unspliced forms resulting in “good proteins” from 2 spliced and the unspliced mRNAs. The coordinates of the 5 mRNAs on Chromosome 11: 36589556 to 36601312, 36537008 to 36614700, 36594749 to 36596265, 36599345 to 36601312 and 36532200 to 36557562.

[0172] Therapeutic Approach

[0173] As the known forms of SCID are monogenic disorders with recessive inheritance, it is likely that correcting one of the mutant alleles per cell will be sufficient for correction and restoration or partial restoration of RAG1 function. The correction of one allele can coincide with one copy that remains with the original mutation, or a copy that was cleaved and repaired by non-homologous end joining (NHEJ) and therefore was not properly corrected. Bi-allelic correction can also occur. Various editing strategies that can be employed for specific mutations are discussed below.

[0174] Correction of one or possibly both of the mutant alleles provides an important improvement over existing or potential therapies, such as introduction of RAG1 expression cassettes through lentivirus delivery and integration. Gene editing has the advantage of precise genome modification and lower adverse effects, and for restoration of correct expression levels and temporal control. Sequencing the patients RAG1 alleles allows for design of the gene editing strategy to best correct the identified mutation(s).

[0175] For example, the mutation can be corrected by the insertions or deletions that arise due to the NHEJ repair pathway. If the patients RAG1 gene has an inserted or deleted base, a targeted cleavage can result in a NHEJ-mediated insertion or deletion that restores the frame. Missense mutations can also be corrected through NHEJ-mediated correction using one or more guide RNA. The ability or likelihood of the cut(s) to correct the mutation may be designed or evaluated based on the local sequence and micro-homologies. NHEJ can also be used to delete segments of the gene, either directly or by altering splice donor or acceptor sites through cleavage by one gRNA targeting several locations, or several gRNAs. This may be useful if an amino acid, domain or exon contains the mutations and can be removed or inverted, or if the deletion otherwise restored function to the protein. Pairs of guide strands have been used for deletions and corrections of inversions. NHEJ can also be used to promote targeted transgene integration at the cleaved locus, especially if the transgene donor template has been cleaved within the cell as well.

[0176] Alternatively, the donor for correction by HDR contains the corrected sequence with small or large flanking homology arms to allow for annealing. HDR is essentially an error-free mechanism that uses a supplied homologous DNA sequence as a template during DSB repair. The rate of homology directed repair (HDR) is a function of the distance between the mutation and the cut site so choosing overlapping or nearby target sites is important. Templates can include extra sequences flanked by the homologous regions or can contain a sequence that differs from the genomic sequence, thus allowing sequence editing.

[0177] In addition to correcting mutations by NHEJ or HDR, a range of other options are possible. If there are small or large deletions or multiple mutations, a cDNA can be knocked in that contains the exons affected. A full length cDNA can be knocked into any “safe harbor”—i.e., non-deleterious insertion point that is not the RAG1 gene itself, with or without suitable regulatory sequences. If this construct is knocked-in near the RAG1 regulatory elements, it will have physiological control, similar to the normal gene. Two or more (e.g., a pair of nucleases) can be used to delete mutated gene regions, though a donor would usually have to be provided to restore function. In this case two gRNA and one donor sequence would be supplied.

[0178] Provided herein are methods to correct the specific mutation in the gene by inducing a double stranded break with Cas9 and a sgRNA or a pair of double stranded breaks around the mutation using two appropriate sgRNAs, and to provide a donor DNA template to induce Homology-Directed Repair (HDR). In some embodiments, the donor DNA template can be a short single stranded oligonucleotide, a short double stranded oligonucleotide, a long single or double stranded DNA molecule. These methods use gRNAs and donor DNA molecules for each of the variants of RAG1.

[0179] Provided herein are methods to knock-in RAG1 cDNA or a minigene (comprised of one or more exons and introns or natural or synthetic introns) into the locus of the corresponding gene. These methods use a pair of sgRNA targeting the first exon and/or the first intron of the RAG1 gene. In some embodiments, the donor DNA is single or double stranded DNA having homologous arms to the 11p13 region.

[0180] Provided herein are methods to knock-in RAG1 cDNA or a minigene (comprised of one or more exons and introns or natural or synthetic introns) into the locus of the hot-spot, e.g., CCR5 gene. These methods use a pair of sgRNA targeting the first exon and/or the first intron of the gene located in the liver hotspot. In some embodiments, the donor DNA is single or double stranded DNA having homologous arms to the corresponding region.

[0181] Provided herein are cellular, ex vivo and in vivo methods for using genome engineering tools to create permanent changes to the genome by: 1) correcting, by insertions or deletions that arise due to the imprecise NHEJ pathway, one or more mutations within or near the RAG1 gene or other DNA sequences that encode regulatory elements of the RAG1 gene, 2) correcting, by HDR, one or more mutations within or near the RAG1 gene or other DNA sequences that encode regulatory elements of the RAG1 gene, or 3) deletion of the mutant region and/or knocking-in RAG1 cDNA or minigene (comprised of, natural or synthetic enhancer and promoter, one or more exons, and natural or synthetic introns, and natural or synthetic 3′UTR and polyadenylation signal) into the gene locus or a safe harbor locus of the RAG1 gene, and restoring RAG1 protein activity. Such methods use endonucleases, such as CRISPR-associated (CRISPR/Cas9, Cpf1 and the like) nucleases, to permanently delete, insert, edit, correct, or replace one or more exons or portions thereof (i.e., mutations within or near the coding and/or splicing sequences) or insert in the genomic locus of the RAG1 gene or other DNA sequences that encode regulatory elements of the RAG1 gene. In this way, the examples set forth in the present disclosure restore the reading frame or the wild-type sequence of, or otherwise corrects, the gene with a single treatment (rather than deliver potential therapies for the lifetime of the patient).

[0182] Provided herein are methods for treating a patient with severe combined immunodeficiency or Omenn Syndrome. An embodiment of such method is an ex vivo cell-based therapy. For example, a patient specific induced pluripotent stem cell (iPSC) is created. Then, the chromosomal DNA of these iPS cells is edited using the materials and methods described herein. Next, the genome-edited iPSCs are differentiated into hematopoietic progenitor cells or white blood cells. Finally, the hematopoietic progenitor cells or white blood cells are implanted into the patient.

[0183] Another embodiment of such method is an ex vivo cell-based therapy. For example, a white blood cell is isolated from the patient Next, the chromosomal DNA of these white blood cells is edited using the materials and methods described herein. Finally, the edited white blood cells are implanted into the patient.

[0184] Yet another embodiment of such method is an ex vivo cell-based therapy. For example, a mesenchymal stem cell is isolated from the patient, which may be isolated from the patient's bone marrow or peripheral blood. Next, the chromosomal DNA of these mesenchymal stem cells is edited using the materials and methods described herein. Next, the genome-edited stem cells are differentiated into hematopoietic progenitor cells or white blood cells. Finally, these hematopoietic progenitor cells or white blood cells are implanted into the patient.

[0185] A further embodiments of such method is an ex vivo cell-based therapy. For example, a hematopoietic progenitor cell, including by way of non-limiting example, a hematopoietic stem cell, is isolated from the patient Next, the chromosomal DNA of these cells is edited using the materials and methods described herein. Finally, the edited cells are implanted into the patient.

[0186] One advantage of an ex vivo cell therapy approach is the ability to conduct a comprehensive analysis of the therapeutic prior to administration. All nuclease-based therapeutics have some level of off-target effects. Performing gene correction ex vivo allows one to fully characterize the corrected cell population prior to implantation. Aspects of the disclosure include sequencing the entire genome of the corrected cells to ensure that the off-target cuts, if any, are in genomic locations associated with minimal risk to the patient. Furthermore, populations of specific cells, including clonal populations, can be isolated prior to implantation.

[0187] Another advantage of ex vivo cell therapy relates to genetic correction in iPSCs compared to other primary cell sources. iPSCs are prolific, making it easy to obtain the large number of cells that will be required for a cell-based therapy. Furthermore, iPSCs are an ideal cell type for performing clonal isolations. This allows screening for the correct genomic correction, without risking a decrease in viability. In contrast, other primary cells are viable for only a few passages and difficult to clonally expand. Thus, manipulation of iPSCs for the treatment of SCID or Omenn Syndrome will be much easier, and will shorten the amount of time needed to make the desired genetic correction.

[0188] For ex vivo therapy, transplantation requires clearance of bone-marrow niches or the donor HSCs to engraft. Current methods rely on radiation and/or chemotherapy. Due to the limitations these impose, safer conditioning regiments have been and are being developed, such as immunodepletion of bone marrow cells by antibodies or antibody toxin conjugates directed against hematopoietic cell surface markers for example CD117, c-kit and others. Success of HSC transplantation depends upon efficient homing to bone marrow, subsequent engraftment, and bone marrow repopulation. The level of gene-edited cells engrafted is important, as is the ability of the cells' multilineage engraftment.

[0189] Hematopoietic stem cells (HSCs) are an important target for ex vivo gene therapy as they provide a prolonged source of the corrected cells. Treated CD34+ cells would be returned to the patient.

[0190] Another embodiment of such method is an in vivo based therapy. In this method, the chromosomal DNA of the cells in the patient is corrected using the materials and methods described herein. In some embodiments, the cells are white blood cells, bone marrow cells, hematopoietic progenitor cells, or CD34+ cells.

[0191] Although blood cells present an attractive target for ex vivo treatment and therapy, increased efficacy in delivery may permit direct in vivo delivery to the hematopoietic stem cells (HSCs) and/or other B and T cell progenitors, such as CD34+ cells. Ideally the targeting and editing would be directed to the relevant cells. Cleavage in other cells may also be prevented by the use of promoters only active in certain cells and or developmental stages. Additional promoters are inducible, and therefore can be temporally controlled if the nuclease is delivered as a plasmid. The amount of time that delivered RNA and protein remain in the cell can also be adjusted using treatments or domains added to change the half-life. In vivo treatment would eliminate a number of treatment steps, but a lower rate of delivery may require higher rates of editing. In vivo treatment may eliminate problems and losses from ex vivo treatment and engraftment.

[0192] An advantage of in vivo gene therapy is the ease of therapeutic production and administration. The same therapeutic approach and therapy will have the potential to be used to treat more than one patient, for example a number of patients who share the same or similar genotype or allele. In contrast, ex vivo cell therapy typically requires using a patients own cells, which are isolated, manipulated and returned to the same patient.

[0193] Also provided herein is a cellular method for editing the RAG1 gene in a cell by genome editing. For example, a cell is isolated from a patient or animal. Then, the chromosomal DNA of the cell is edited using the materials and methods described herein.

[0194] The methods of the disclosure, regardless of whether a cellular or ex vivo or in vivo method, involves one or a combination of the following: 1) correcting, by insertions or deletions that arise due to the imprecise NHEJ pathway, one or more mutations within or near the RAG1 gene or other DNA sequences that encode regulatory elements of the RAG1 gene, 2) correcting, by HDR or NHEJ, one or more mutations within or near the RAG1 gene or other DNA sequences that encode regulatory elements of the RAG1 gene, or 3) deletion of the mutant region and/or knocking-in RAG1 cDNA or a minigene (comprised of one or more exons or introns or natural or synthetic introns) or introducing exogenous RAG1 DNA or cDNA sequence or a fragment thereof into the locus of the gene or at a heterologous location in the genome (such as a safe harbor locus, such as, e.g., targeting an AAVS1 (PPPIR12C), an ALB gene, an Angptl3 gene, an ApoC3 gene, an ASGR2 gene, a CCR5 gene, a FIX (F9) gene, a G6PC gene, a Gys2 gene, an HGD gene, a Lp(a) gene, a Pcsk9 gene, a Serpinal gene, a TF gene, and a TTR gene). Assessment of efficiency of HDR/NHEJ mediated knock-in of cDNA into the first exon can utilize cDNA knock-in into “safe harbor” sites such as: single-stranded or double-stranded DNA having homologous arms to one of the following regions, for example: ApoC3 (chr11:116829908-116833071), Angptl3 (chr1:62,597,487-62,606,305), Serpinal (chr14:94376747-94390692), Lp(a) (chr6:160531483-160664259), Pcsk9 (chr1:55,039,475-55,064,852), FIX (chrX:139,530,736-139,563,458), ALB (chr4:73,404,254-73,421,411), TTR (chr1 8:31,591,766-31,599,023), TF (chr3:133,661,997-133,779,005), G6PC (chr17:42,900,796-42,914,432), Gys2 (chr12:21,536,188-21,604,857), AAVS1 (PPP1R12C) (chr19:55,090,912-55,117,599), HGD (chr3:120,628,167-120,682,570), CCR5 (chr3:46,370,854-46,376,206), ASGR2 (chr17:7,101,322-7,114,310). Both the correction and knock-in strategies utilize a donor DNA template in Homology-Directed Repair (HDR) or Non-Homologous End Joining (NHEJ). HDR in either strategy may be accomplished by making one or more double-stranded breaks (DSBs) at specific sites in the genome by using one or more endonucleases.

[0195] For example, an NHEJ correction strategy can involve restoring the reading frame in the RAG1 gene by inducing one single stranded break or double stranded break in the gene of interest with one or more CRISPR endonucleases and a gRNA (e.g., crRNA+tracrRNA, or sgRNA), or two or more single stranded breaks or double stranded breaks in the gene of interest with two or more CRISPR endonucleases and two or more sgRNAs. This approach can require development and optimization of sgRNAs for the RAG1 gene.

[0196] For example, the HDR correction strategy involves restoring the reading frame in the RAG1 gene by inducing one single stranded break or double stranded break in the gene of interest with one or more CRISPR endonucleases and a gRNA (e.g., crRNA+tracrRNA, or sgRNA), or two or more single stranded breaks or double stranded breaks in the gene of interest with one or more CRISPR endonucleases and two or more appropriate sgRNAs, in the presence of a donor DNA template introduced exogenously to direct the cellular DSB response to Homology-Directed Repair (the donor DNA template can be a short single stranded oligonucleotide, a short double stranded oligonucleotide, a long single or double stranded DNA molecule). This approach requires development and optimization of gRNAS and donor DNA molecules for the RAG1 gene.

[0197] For example, the knock-in strategy involves knocking-in RAG1 cDNA or a minigene (comprised of, natural or synthetic enhancer and promoter, one or more exons, and natural or synthetic introns, and natural or synthetic 3′UTR and polyadenylation signal) into the locus of the gene using a gRNA (e.g., crRNA+tracrRNA, or sgRNA) or a pair of sgRNAs targeting upstream of or in the first or other exon and/or intron of the RAG1 gene, or in a safe harbor site (such as AAVS1 (PPP1R12C), ALB, Angptl3, ApoC3, ASGR2, CCR5, FIX (F9), G6PC, Gys2, HGD, Lp(a), Pcsk9, Serpinal, TF, and/or TTR). The donor DNA will be single or double stranded DNA having homologous arms to the 11p13 region.

[0198] For example, the deletion strategy involves deleting one or more mutations in one or more of the five exons of the RAG1 gene using one or more endonucleases and two or more gRNAs or sgRNAs.

[0199] The advantages for the above strategies (correction and knock-in) are similar, including in principle both short and long term beneficial clinical and laboratory effects. Another advantage for all strategies is that most patients have low-level gene and protein activity, therefore suggesting that additional protein expression, for example following gene correction, should not necessarily lead to an immune response against the target gene product. The knock-in approach does provide one advantage over the correction or deletion approach—the ability to treat all patients versus only a subset of patients. While there are common mutations in this gene, there are also many other possible mutations, and using the knock-in method could treat all of them. The other issue with gene editing in this manner is the need for a DNA donor for HDR.

[0200] In addition to the above genome editing strategies, another strategy involves modulating expression, function, or activity of RAG1 by editing in the regulatory sequence.

[0201] In addition to the editing options listed above, Cas9 or similar proteins can be used to target effector domains to the same target sites that may be identified for editing, or additional target sites within range of the effector domain. A range of chromatin modifying enzymes, methylases or demethlyases can be used to alter expression of the target gene. One possibility is increasing the expression of the RAG1 protein if the mutation leads to lower activity. These types of epigenetic regulation have some advantages, particularly as they are limited in possible off-target effects.

[0202] A number of types of genomic target sites are present in addition to mutations in the coding and splicing sequences.

[0203] The regulation of transcription and translation implicates a number of different classes of sites that interact with cellular proteins or nucleotides. Often the DNA binding sites of transcription factors or other proteins can be targeted for mutation or deletion to study the role of the site, though they can also be targeted to change gene expression. Sites can be added through non-homologous end joining (NHEJ) or direct genome editing by homology directed repair (HDR). Increased use of genome sequencing, RNA expression and genome-wide studies of transcription factor binding have increased the ability to identify how the sites lead to developmental or temporal gene regulation. These control systems may be direct or may involve extensive cooperative regulation that can require the integration of activities from multiple enhancers. Transcription factors typically bind 6-12 bp-long degenerate DNA sequences. The low level of specificity provided by individual sites suggests that complex interactions and rules are involved in binding and the functional outcome. Binding sites with less degeneracy may provide simpler means of regulation. Artificial transcription factors can be designed to specify longer sequences that have less similar sequences in the genome and have lower potential for off-target cleavage. Any of these types of binding sites can be mutated, deleted or even created to enable changes in gene regulation or expression (Canver, M. C. et al., Nature (2015)).

[0204] Another class of gene regulatory regions having these features is microRNA (miRNA) binding sites. miRNAs are non-coding RNAs that play key roles in post-transcriptional gene regulation. miRNA may regulate the expression of 30% of all mammalian protein-encoding genes. Specific and potent gene silencing by double stranded RNA (RNAi) was discovered, plus additional small noncoding RNA (Canver, M. C. et al., Nature (2015)). The largest class of noncoding RNAs important for gene silencing are miRNAs. In mammals, miRNAs are first transcribed as a long RNA transcripts, which can be separate transcriptional units, part of protein introns, or other transcripts. The long transcripts are called primary miRNA (pri-miRNA) that include imperfectly base-paired hairpin structures. These pri-miRNA are cleaved into one or more shorter precursor miRNAs (pre-miRNAs) by Microprocessor, a protein complex in the nucleus, involving Drosha.

[0205] Pre-miRNAs are short stem loops ˜70 nucleotides in length with a 2-nucleotide 3′-overhang that are exported, into the mature 19-25 nucleotide miRNA:miRNA* duplexes. The miRNA strand with lower base pairing stability (the guide strand) is loaded onto the RNA-induced silencing complex (RISC). The passenger guide strand (marked with *), may be functional, but is usually degraded. The mature miRNA tethers RISC to partly complementary sequence motifs in target mRNAs predominantly found within the 3′ untranslated regions (UTRs) and induces posttranscriptional gene silencing (Bartel, D. P. Cell 136, 215-233 (2009); Saj, A. & Lai, E. C. Curr Opin Genet Dev 21, 504-510 (2011)).

[0206] miRNAs are important in development, differentiation, cell cycle and growth control, and in virtually all biological pathways in mammals and other multicellular organisms. miRNAs are also involved in cell cycle control, apoptosis and stem cell differentiation, hematopoiesis, hypoxia, muscle development, neurogenesis, insulin secretion, cholesterol metabolism, aging, viral replication and immune responses.

[0207] A single miRNA can target hundreds of different mRNA transcripts, while an individual transcript can be targeted by many different miRNAs. More than 28645 microRNAs have been annotated in the latest release of miRBase (v.21). Some miRNAs are encoded by multiple loci, some of which are expressed from tandemly co-transcribed clusters. The features allow for complex regulatory networks with multiple pathways and feedback controls. miRNAs are integral parts of these feedback and regulatory circuits and can help regulate gene expression by keeping protein production within limits (Herranz, H. & Cohen, S. M. Genes Dev 24, 1339-1344 (2010); Posadas, D. M. & Carthew, R. W. Curr Opin Genet Dev 27, 1-6 (2014)).

[0208] miRNA are also important in a large number of human diseases that are associated with abnormal miRNA expression. This association underscores the importance of the miRNA regulatory pathway. Recent miRNA deletion studies have linked miRNA with regulation of the immune responses (Stem-Ginossar, N. et al., Science 317, 376-381 (2007)).

[0209] miRNA also have a strong link to cancer and may play a role in different types of cancer. miRNAs have been found to be downregulated in a number of tumors. miRNA are important in the regulation of key cancer-related pathways, such as cell cycle control and the DNA damage response, and are therefore used in diagnosis and are being targeted clinically. MicroRNAs delicately regulate the balance of angiogenesis, such that experiments depleting all microRNAs suppresses tumor angiogenesis (Chen, S. et al., Genes Dev 28, 1054-1067 (2014)).

[0210] As has been shown for protein coding genes, miRNA genes are also subject to epigenetic changes occurring with cancer. Many miRNA loci are associated with CpG islands increasing their opportunity for regulation by DNA methylation (Weber, B., Stresemann, C., Brueckner, B. & Lyko, F. Cell Cycle 6, 1001-1005 (2007)). The majority of studies have used treatment with chromatin remodeling drugs to reveal epigenetically silenced miRNAs.

[0211] In addition to their role in RNA silencing, miRNA can also activate translation (Posadas, D. M. & Carthew, R. W. Curr Opin Genet Dev 27, 1-6 (2014)). Knocking out these sites may lead to decreased expression of the targeted gene, while introducing these sites may increase expression.

[0212] Individual miRNA can be knocked out most effectively by mutating the seed sequence (bases 2-8 of the microRNA), which is important for binding specificity. Cleavage in this region, followed by mis-repair by NHEJ can effectively abolish miRNA function by blocking binding to target sites. miRNA could also be inhibited by specific targeting of the special loop region adjacent to the palindromic sequence. Catalytically inactive Cas9 can also be used to inhibit shRNA expression (Zhao, Y. et al., Sci Rep 4, 3943 (2014)). In addition to targeting the miRNA, the binding sites can also be targeted and mutated to prevent the silencing by miRNA.

[0213] Human Cells

[0214] For ameliorating SCID or Omenn Syndrome, as described and illustrated herein, the principal targets for gene editing are human cells. For example, in the ex vivo methods, the human cells are somatic cells, which after being modified using the techniques as described, can give rise to white blood cells or hematopoietic progenitor cells, such as, by way of non-limiting example, hematopoietic stem cells. For example, in the in vivo methods, the human cells are white blood cells.

[0215] By performing gene editing in autologous cells that are derived from and therefore already completely immunologically matched with the patient in need, it is possible to generate cells that can be safely re-introduced into the patient, and effectively give rise to a population of cells that will be effective in ameliorating one or more clinical conditions associated with the patients disease.

[0216] Progenitor cells (also referred to as stem cells herein) are capable of both proliferation and giving rise to more progenitor cells, these in turn having the ability to generate a large number of mother cells that can in turn give rise to differentiated or differentiable daughter cells. The daughter cells themselves can be induced to proliferate and produce progeny that subsequently differentiate into one or more mature cell types, while also retaining one or more cells with parental developmental potential. The term “stem cell” refers then, to a cell with the capacity or potential, under particular circumstances, to differentiate to a more specialized or differentiated phenotype, and which retains the capacity, under certain circumstances, to proliferate without substantially differentiating. In one embodiment, the term progenitor or stem cell refers to a generalized mother cell whose descendants (progeny) specialize, often in different directions, by differentiation, e.g., by acquiring completely individual characters, as occurs in progressive diversification of embryonic cells and tissues. Cellular differentiation is a complex process typically occurring through many cell divisions. A differentiated cell may derive from a multipotent cell that itself is derived from a multipotent cell, and so on. While each of these multipotent cells may be considered stem cells, the range of cell types that each can give rise to may vary considerably. Some differentiated cells also have the capacity to give rise to cells of greater developmental potential. Such capacity may be natural or may be induced artificially upon treatment with various factors. In many biological instances, stem cells are also “multipotent” because they can produce progeny of more than one distinct cell type, but this is not required for “stem-ness.”

[0217] Self-renewal is another important aspect of the stem cell. In theory, self-renewal can occur by either of two major mechanisms. Stem cells may divide asymmetrically, with one daughter retaining the stem state and the other daughter expressing some distinct other specific function and phenotype. Alternatively, some of the stem cells in a population can divide symmetrically into two stems, thus maintaining some stem cells in the population as a whole, while other cells in the population give rise to differentiated progeny only. Generally, “progenitor cells” have a cellular phenotype that is more primitive (i.e., is at an earlier step along a developmental pathway or progression than is a fully differentiated cell). Often, progenitor cells also have significant or very high proliferative potential. Progenitor cells can give rise to multiple distinct differentiated cell types or to a single differentiated cell type, depending on the developmental pathway and on the environment in which the cells develop and differentiate.

[0218] In the context of cell ontogeny, the adjective “differentiated,” or “differentiating” is a relative term. A “differentiated cell” is a cell that has progressed further down the developmental pathway than the cell to which it is being compared. Thus, stem cells can differentiate into lineage-restricted precursor cells (such as a myocyte progenitor cell), which in turn can differentiate into other types of precursor cells further down the pathway (such as a myocyte precursor), and then to an end-stage differentiated cell, such as a myocyte, which plays a characteristic role in a certain tissue type, and may or may not retain the capacity to proliferate further.

[0219] The term “hematopoietic progenitor cell” refers to cells of a stem cell lineage that give rise to all the blood cell types, including erythroid (erythrocytes or red blood cells (RBCs)), myeloid (monocytes and macrophages, neutrophils, basophils, eosinophils, megakaryocytes/platelets, and dendritic cells), and lymphoid (T-cells, B-cells, NK-cells).

[0220] A “cell of the erythroid lineage” indicates that the cell being contacted is a cell that undergoes erythropoiesis, such that upon final differentiation it forms an erythrocyte or red blood cell. Such cells originate from bone marrow hematopoietic progenitor cells. Upon exposure to specific growth factors and other components of the hematopoietic microenvironment, hematopoietic progenitor cells can mature through a series of intermediate differentiation cellular types, all intermediates of the erythroid lineage, into RBCs. Thus, cells of the “erythroid lineage” comprise hematopoietic progenitor cells, rubriblasts, prorubricytes, erythroblasts, metarubricytes, reticulocytes, and erythrocytes.

[0221] In some embodiments, the hematopoietic progenitor cell, including, by way of non-limiting example, a hematopoietic stem cell, expresses at least one of the following cell surface markers characteristic of hematopoietic progenitor cells: CD34+, CD59+, Thyl/CD90+, CD381o/−, and C-kit/CDI 17+. In some embodiments, the hematopoietic progenitors are CD34+.

[0222] In some embodiments, the hematopoietic progenitor cell, including, by way of non-limiting example, a hematopoietic stem cell, is a peripheral blood stem cell obtained from the patient after the patient has been treated with one or more factors such as granulocyte colony stimulating factor (optionally in combination with Plerixaflor). In illustrative embodiments, CD34+ cells are enriched using CliniMACS® Cell Selection System (Miltenyi Biotec). In some embodiments, CD34+ cells are stimulated in serum-free medium (e.g., CellGrow SCGM media, CellGenix) with cytokines (e.g., SCF, rhTPO, rhFLT3) before genome editing. In some embodiments, addition of SR1 and dmPGE2 and/or other factors is contemplated to improve long-term engraftment.

[0223] In some embodiments, the hematopoietic progenitor cells of the erythroid lineage, including, by way of non-limiting example, hematopoietic stem cells of the erythroid lineage, have a cell surface marker characteristic of the erythroid lineage: such as CD71 and Ten 19.

[0224] Hematopoietic stem cells (HSCs) are an important target for gene therapy as they provide a prolonged source of the corrected cells. HSCs give rise to both the myeloid and lymphoid lineages of blood cells. Mature blood cells have a finite life-span and must be continuously replaced throughout life. Blood cells are continually produced by the proliferation and differentiation of a population of pluripotent HSCs that can replenished by self-renewal. Bone marrow (BM) is the major site of hematopoiesis in humans and a good source for hematopoietic stem and progenitor cells (HSPCs). HSPCs can be found in small numbers in the peripheral blood (PB). In some indications or treatments their numbers increase. The progeny of HSCs mature through stages, generating multi-potential and lineage-committed progenitor cells including the lymphoid progenitor cells giving rise to the cells expressing RAG1. B and T cell progenitors are the two cell populations requiring the activity of RAG1, so they could be edited at the stages prior to re-arrangement, though correcting progenitors has the advantage of continuing to be a source of corrected cells. Treated cells, such as CD34+ cells would be returned to the patient. The level of engraftment is important, as is the ability of the cells' multilineage engraftment of gene-edited cells following CD34+ infusion in vivo.

[0225] Induced Pluripotent Stem Cells

[0226] In some embodiments, the genetically engineered human cells described herein are induced pluripotent stem cells (iPSCs). An advantage of using iPSCs is that the cells can be derived from the same subject to which the progenitor cells are to be administered. That is, a somatic cell can be obtained from a subject, reprogrammed to an induced pluripotent stem cell, and then re-differentiated into a progenitor cell to be administered to the subject (e.g., autologous cells). Because the progenitors are essentially derived from an autologous source, the risk of engraftment rejection or allergic response is reduced compared to the use of cells from another subject or group of subjects. In addition, the use of iPSCs negates the need for cells obtained from an embryonic source. Thus, in one embodiment, the stem cells used in the disclosed methods are not embryonic stem cells.

[0227] Although differentiation is generally irreversible under physiological contexts, several methods have been recently developed to reprogram somatic cells to iPSCs. Exemplary methods are known to those of skill in the art and are described briefly herein below.

[0228] The term “reprogramming” refers to a process that alters or reverses the differentiation state of a differentiated cell (e.g., a somatic cell). Stated another way, reprogramming refers to a process of driving the differentiation of a cell backwards to a more undifferentiated or more primitive type of cell. It should be noted that placing many primary cells in culture can lead to some loss of fully differentiated characteristics. Thus, simply culturing such cells included in the term differentiated cells does not render these cells non-differentiated cells (e.g., undifferentiated cells) or pluripotent cells. The transition of a differentiated cell to pluripotency requires a reprogramming stimulus beyond the stimuli that lead to partial loss of differentiated character in culture. Reprogrammed cells also have the characteristic of the capacity of extended passaging without loss of growth potential, relative to primary cell parents, which generally have capacity for only a limited number of divisions in culture.

[0229] The cell to be reprogrammed can be either partially or terminally differentiated prior to reprogramming. In some embodiments, reprogramming encompasses complete reversion of the differentiation state of a differentiated cell (e.g., a somatic cell) to a pluripotent state or a multipotent state. In some embodiments, reprogramming encompasses complete or partial reversion of the differentiation state of a differentiated cell (e.g., a somatic cell) to an undifferentiated cell (e.g., an embryonic-like cell). Reprogramming can result in expression of particular genes by the cells, the expression of which further contributes to reprogramming. In certain embodiments described herein, reprogramming of a differentiated cell (e.g., a somatic cell) causes the differentiated cell to assume an undifferentiated state (e.g., is an undifferentiated cell). The resulting cells are referred to as “reprogrammed cells,” or “induced pluripotent stem cells (iPSCs or iPS cells).”

[0230] Reprogramming can involve alteration, e.g., reversal, of at least some of the heritable patterns of nucleic acid modification (e.g., methylation), chromatin condensation, epigenetic changes, genomic imprinting, etc., that occur during cellular differentiation. Reprogramming is distinct from simply maintaining the existing undifferentiated state of a cell that is already pluripotent or maintaining the existing less than fully differentiated state of a cell that is already a multipotent cell (e.g., a hematopoietic stem cell). Reprogramming is also distinct from promoting the self-renewal or proliferation of cells that are already pluripotent or multipotent, although the compositions and methods described herein can also be of use for such purposes, in some embodiments.

[0231] Many methods are known in the art that can be used to generate pluripotent stem cells from somatic cells. Any such method that reprograms a somatic cell to the pluripotent phenotype would be appropriate for use in the methods described herein.

[0232] Reprogramming methodologies for generating pluripotent cells using defined combinations of transcription factors have been described. Mouse somatic cells can be converted to ES cell-like cells with expanded developmental potential by the direct transduction of Oct4, Sox2, Klf4, and c-Myc; see, e.g., Takahashi and Yamanaka, Cell 126(4): 663-76 (2006). iPSCs resemble ES cells, as they restore the pluripotency-associated transcriptional circuitry and much of the epigenetic landscape. In addition, mouse iPSCs satisfy all the standard assays for pluripotency: specifically, in vitro differentiation into cell types of the three germ layers, teratoma formation, contribution to chimeras, germline transmission [see, e.g., Maherali and Hochedlinger, Cell Stem Cell. 3(6):595-605 (2008)], and tetraploid complementation.

[0233] Human iPSCs can be obtained using similar transduction methods, and the transcription factor trio, OCT4, SOX2, and NANOG, has been established as the core set of transcription factors that govern pluripotency; see, e.g., Budniatzky and Gepstein, Stem Cells Transl Med. 3(4):448-57 (2014); Barrett et al., Stem Cells Trans Med 3:1-6 sctm. 2014-0121 (2014); Focosi et al., Blood Cancer Journal 4: e211 (2014); and references cited therein. The production of iPSCs can be achieved by the introduction of nucleic acid sequences encoding stem cell-associated genes into an adult, somatic cell, historically using viral vectors.

[0234] iPSCs can be generated or derived from terminally differentiated somatic cells, as well as from adult stem cells, or somatic stem cells. That is, a non-pluripotent progenitor cell can be rendered pluripotent or multipotent by reprogramming. In such instances, it may not be necessary to include as many reprogramming factors as required to reprogram a terminally differentiated cell. Further, reprogramming can be induced by the non-viral introduction of reprogramming factors, e.g., by introducing the proteins themselves, or by introducing nucleic acids that encode the reprogramming factors, or by introducing messenger RNAs that upon translation produce the reprogramming factors (see e.g., Warren et al., Cell Stem Cell, 7(5):618-30 (2010). Reprogramming can be achieved by introducing a combination of nucleic acids encoding stem cell-associated genes, including, for example, Oct-4 (also known as Oct-3/4 or Pouf51), SoxI, Sox2, Sox3, Sox 15, Sox 18, NANOG, KIfI, Klf2, Klf4, Klf5, NR5A2, c-Myc, 1-Myc, n-Myc, Rem2, Tert, and LIN28. In one embodiment, reprogramming using the methods and compositions described herein can further comprise introducing one or more of Oct-3/4, a member of the Sox family, a member of the Klf family, and a member of the Myc family to a somatic cell. In one embodiment, the methods and compositions described herein further comprise introducing one or more of each of Oct-4, Sox2, Nanog, c-MYC and Klf4 for reprogramming. As noted above, the exact method used for reprogramming is not necessarily critical to the methods and compositions described herein. However, where cells differentiated from the reprogrammed cells are to be used in, e.g., human therapy, in one embodiment the reprogramming is not effected by a method that alters the genome. Thus, in such embodiments, reprogramming is achieved, e.g., without the use of viral or plasmid vectors.

[0235] The efficiency of reprogramming (i.e., the number of reprogrammed cells) derived from a population of starting cells can be enhanced by the addition of various agents, e.g., small molecules, as shown by Shi et al., Cell-Stem Cell 2:525-528 (2008); Huangfu et al., Nature Biotechnology 26(7):795-797 (2008) and Marson et al., Cell-Stem Cell 3: 132-135 (2008). Thus, an agent or combination of agents that enhance the efficiency or rate of induced pluripotent stem cell production can be used in the production of patient-specific or disease-specific iPSCs. Some non-limiting examples of agents that enhance reprogramming efficiency include soluble Wnt, Wnt conditioned media, BIX-01294 (a G9a histone methyltransferase), PD0325901 (a MEK inhibitor), DNA methyltransferase inhibitors, histone deacetylase (HDAC) inhibitors, valproic acid, 5′-azacytidine, dexamethasone, suberoylanilide, hydroxamic acid (SAHA), vitamin C, and trichostatin (TSA), among others.

[0236] Other non-limiting examples of reprogramming enhancing agents include: Suberoylanilide Hydroxamic Acid (SAHA (e.g., MK0683, vorinostat) and other hydroxamic acids), BML-210, Depudecin (e.g., (−)-Depudecin), HC Toxin, Nullscript (4-(1,3-Dioxo-IH,3H-benzo[de]isoquinolin-2-yl)-N-hydroxybutanamide), Phenylbutyrate (e.g., sodium phenylbutyrate) and Valproic Acid ((VP A) and other short chain fatty acids), Scriptaid, Suramin Sodium, Trichostatin A (TSA), APHA Compound 8, Apicidin, Sodium Butyrate, pivaloyloxymethyl butyrate (Pivanex, AN-9), Trapoxin B, Chlamydocin, Depsipeptide (also known as FR901228 or FK228), benzamides (e.g., CI-994 (e.g., N-acetyl dinaline) and MS-27-275), MGCD0103, NVP-LAQ-824, CBHA (m-carboxycinnaminic acid bishydroxamic acid), JNJ16241199, Tubacin, A-161906, proxamide, oxamflatin, 3-CI-UCHA (e.g., 6-(3-chlorophenylureido)caproic hydroxamic acid), AOE (2-amino-8-oxo-9, 10-epoxydecanoic acid), CHAP31 and CHAP 50. Other reprogramming enhancing agents include, for example, dominant negative forms of the HDACs (e.g., catalytically inactive forms), siRNA inhibitors of the HDACs, and antibodies that specifically bind to the HDACs. Such inhibitors are available, e.g., from BIOMOL International, Fukasawa, Merck Biosciences, Novartis, Gloucester Pharmaceuticals, Titan Pharmaceuticals, MethylGene, and Sigma Aldrich.

[0237] To confirm the induction of pluripotent stem cells for use with the methods described herein, isolated clones can be tested for the expression of a stem cell marker. Such expression in a cell derived from a somatic cell identifies the cells as induced pluripotent stem cells. Stem cell markers are selected from the non-limiting group including SSEA3, SSEA4, CD9, Nanog, FbxI5, EcatI, EsgI, Eras, Gdf3, Fgf4, Cripto, DaxI, Zpf296, Slc2a3, RexI, UtfI, and NatI. In one embodiment, a cell that expresses Oct4 or Nanog is identified as pluripotent. Methods for detecting the expression of such markers can include, for example, RT-PCR and immunological methods that detect the presence of the encoded polypeptides, such as Western blots or flow cytometric analyses. In some embodiments, detection involves not only RT-PCR, but also includes detection of protein markers. Intracellular markers may be best identified via RT-PCR, or protein detection methods such as immunocytochemistry, while cell surface markers are readily identified, e.g., by immunocytochemistry.

[0238] The pluripotent stem cell character of isolated cells can be confirmed by tests evaluating the ability of the iPSCs to differentiate into cells of each of the three germ layers. As one example, teratoma formation in nude mice can be used to evaluate the pluripotent character of the isolated clones. The cells are introduced into nude mice and histology and/or immunohistochemistry is performed on a tumor arising from the cells. The growth of a tumor comprising cells from all three germ layers, for example, further indicates that the cells are pluripotent stem cells.

[0239] Creating Patient Specific IPSCs

[0240] One step of the ex vivo methods of the disclosure involves creating a patient specific iPS cell, patient specific iPS cells, or a patient specific iPS cell line. There are many established methods in the art for creating patient specific iPS cells, as described in Takahashi and Yamanaka 2006; Takahashi, Tanabe et al. 2007. For example, the creating step comprises: a) isolating a somatic cell, such as a skin cell or fibroblast, from the patient; and b) introducing a set of pluripotency-associated genes into the somatic cell in order to induce the cell to become a pluripotent stem cell. In some embodiments, the set of pluripotency-associated genes is one or more of the genes selected from the group consisting of OCT4, SOX2, KLF4, Lin28, NANOG, and cMYC.

[0241] Performing a Biopsy or Aspirate of the Patient's Bone Marrow

[0242] A biopsy or aspirate is a sample of tissue or fluid taken from the body. There are many different kinds of biopsies or aspirates. Nearly all of them involve using a sharp tool to remove a small amount of tissue. If the biopsy will be on the skin or other sensitive area, numbing medicine can be applied first. A biopsy or aspirate may be performed according to any of the known methods in the art. For example, in a bone marrow aspirate, a large needle is used to enter the pelvis bone to collect bone marrow.

[0243] Isolating a White Blood Cell

[0244] White blood cells may be isolated according to any method known in the art. For example, white blood cells may be isolated from a liquid sample by centrifugation and cell culturing.

[0245] Isolating a Mesenchymal Stem Cell

[0246] Mesenchymal stem cells may be isolated according to any method known in the art, such as from a patients bone marrow or peripheral blood. For example, marrow aspirate is collected into a syringe with heparin. Cells are washed and centrifuged on a Percoll™. The cells are cultured in Dulbecco's modified Eagle's medium (DMEM) (low glucose) containing 10% fetal bovine serum (FBS) (Pittinger M F, Mackay A M, Beck S C et al., Science 1999; 284:143-147).

[0247] Treating a Patient with GCSF

[0248] A patient may optionally be treated with granulocyte colony stimulating factor (GCSF) in accordance with any method known in the art. In some embodiments, the GCSF is administered in combination with Plerixaflor.

[0249] Isolating a Hematopoletic Progenitor Cell from a Patient

[0250] A hematopoietic progenitor cell may be isolated from a patient by any method known in the art. CD34+ cells are enriched using CliniMACS® Cell Selection System (Miltenyi Biotec). In some embodiments, CD34+ cells are weakly stimulated in serum-free medium (e.g., CellGrow SCGM media, CellGenix) with cytokines (e.g., SCF, rhTPO, rhFLT3) before genome editing.

[0251] Genome Editing

[0252] Genome editing generally refers to the process of modifying the nucleotide sequence of a genome, preferably in a precise or pre-determined manner. Examples of methods of genome editing described herein include methods of using site-directed nucleases to cut deoxyribonucleic acid (DNA) at precise target locations in the genome, thereby creating single-strand or double-strand DNA breaks at particular locations within the genome. Such breaks can be and regularly are repaired by natural, endogenous cellular processes, such as homology-directed repair (HDR) and non-homologous end-joining (NHEJ), as recently reviewed in Cox et al., Nature Medicine 21(2), 121-31 (2015). These two main DNA repair processes consist of a family of alternative pathways. NHEJ directly joins the DNA ends resulting from a double-strand break, sometimes with the loss or addition of nucleotide sequence, which may disrupt or enhance gene expression. HDR utilizes a homologous sequence, or donor sequence, as a template for inserting a defined DNA sequence at the break point. The homologous sequence may be in the endogenous genome, such as a sister chromatid. Alternatively, the donor may be an exogenous nucleic acid, such as a plasmid, a single-strand oligonucleotide, a double-stranded oligonucleotide, a duplex oligonucleotide or a virus, that has regions of high homology with the nuclease-cleaved locus, but which may also contain additional sequence or sequence changes including deletions that can be incorporated into the cleaved target locus. A third repair mechanism is microhomology-mediated end joining (MMEJ), also referred to as “Alternative NHEJ”, in which the genetic outcome is similar to NHEJ in that small deletions and insertions can occur at the cleavage site. MMEJ makes use of homologous sequences of a few basepairs flanking the DNA break site to drive a more favored DNA end joining repair outcome, and recent reports have further elucidated the molecular mechanism of this process; see, e.g., Cho and Greenberg, Nature 518, 174-76 (2015); Kent et al., Nature Structural and Molecular Biology, Adv. Online doi: 10.1038/nsmb.2961 (2015); Mateos-Gomez et al., Nature 518, 254-57 (2015); Ceccaldi et al., Nature 528, 258-62 (2015). In some instances it may be possible to predict likely repair outcomes based on analysis of potential microhomologies at the site of the DNA break.

[0253] Each of these genome editing mechanisms can be used to create desired genomic alterations. A step in the genome editing process is to create one or two DNA breaks, the latter as double-strand breaks or as two single-stranded breaks, in the target locus as close as possible to the site of intended mutation. This can be achieved via the use of site-directed polypeptides, as described and illustrated herein.

[0254] Site-directed polypeptides, such as a DNA endonuclease, can introduce double-strand breaks or single-strand breaks in nucleic acids, e.g., genomic DNA. The double-strand break can stimulate a cell's endogenous DNA-repair pathways (e.g., homology-dependent repair or non-homologous end joining or alternative non-homologous end joining (A-NHEJ) or microhomology-mediated end joining). NHEJ can repair cleaved target nucleic acid without the need for a homologous template. This can sometimes result in small deletions or insertions (indels) in the target nucleic acid at the site of cleavage, and can lead to disruption or alteration of gene expression. HDR can occur when a homologous repair template, or donor, is available. The homologous donor template comprises sequences that are homologous to sequences flanking the target nucleic acid cleavage site. The sister chromatid is generally used by the cell as the repair template. However, for the purposes of genome editing, the repair template is often supplied as an exogenous nucleic acid, such as a plasmid, duplex oligonucleotide, single-strand oligonucleotide, double-stranded oligonucleotide, or viral nucleic acid. With exogenous donor templates, it is common to introduce an additional nucleic acid sequence (such as a transgene) or modification (such as a single or multiple base change or a deletion) between the flanking regions of homology so that the additional or altered nucleic acid sequence also becomes incorporated into the target locus. MMEJ results in a genetic outcome that is similar to NHEJ in that small deletions and insertions can occur at the cleavage site. MMEJ makes use of homologous sequences of a few basepairs flanking the cleavage site to drive a favored end-joining DNA repair outcome. In some instances it may be possible to predict likely repair outcomes based on analysis of potential microhomologies in the nuclease target regions.

[0255] Thus, in some cases, homologous recombination is used to insert an exogenous polynucleotide sequence into the target nucleic acid cleavage site. An exogenous polynucleotide sequence is termed a donor polynucleotide (or donor or donor sequence or polynucleotide donor template) herein. In some embodiments, the donor polynucleotide, a portion of the donor polynucleotide, a copy of the donor polynucleotide, or a portion of a copy of the donor polynucleotide is inserted into the target nucleic acid cleavage site. In some embodiments, the donor polynucleotide is an exogenous polynucleotide sequence, i.e., a sequence that does not naturally occur at the target nucleic acid cleavage site.

[0256] The modifications of the target DNA due to NHEJ and/or HDR can lead to, for example, mutations, deletions, alterations, integrations, gene correction, gene replacement, gene tagging, transgene insertion, nucleotide deletion, gene disruption, translocations and/or gene mutation. The processes of deleting genomic DNA and integrating non-native nucleic acid into genomic DNA are examples of genome editing.

[0257] CRISPR Endonuclease System

[0258] A CRISPR (Clustered Regularly Interspaced Short Palindromic Repeats) genomic locus can be found in the genomes of many prokaryotes (e.g., bacteria and archaea). In prokaryotes, the CRISPR locus encodes products that function as a type of immune system to help defend the prokaryotes against foreign invaders, such as virus and phage. There are three stages of CRISPR locus function: integration of new sequences into the CRISPR locus, expression of CRISPR RNA (crRNA), and silencing of foreign invader nucleic acid. Five types of CRISPR systems (e.g., Type I, Type II, Type III, Type U, and Type V) have been identified.

[0259] A CRISPR locus includes a number of short repeating sequences referred to as “repeats.” When expressed, the repeats can form secondary hairpin structures (e.g., hairpins) and/or comprise unstructured single-stranded sequences. The repeats usually occur in clusters and frequently diverge between species. The repeats are regularly interspaced with unique intervening sequences referred to as “spacers,” resulting in a repeat-spacer-repeat locus architecture. The spacers are identical to or have high homology with known foreign invader sequences. A spacer-repeat unit encodes a crisprRNA (crRNA), which is processed into a mature form of the spacer-repeat unit. A crRNA comprises a “seed” or spacer sequence that is involved in targeting a target nucleic acid (in the naturally occurring form in prokaryotes, the spacer sequence targets the foreign invader nucleic acid). A spacer sequence is located at the 5′ or 3′ end of the crRNA.

[0260] A CRISPR locus also comprises polynucleotide sequences encoding CRISPR Associated (Cas) genes. Cas genes encode endonucleases involved in the biogenesis and the interference stages of crRNA function in prokaryotes. Some Cas genes comprise homologous secondary and/or tertiary structures.

[0261] Type II CRISPR Systems

[0262] crRNA biogenesis in a Type II CRISPR system in nature requires a trans-activating CRISPR RNA (tracrRNA). The tracrRNA is modified by endogenous RNaseIII, and then hybridizes to a crRNA repeat in the pre-crRNA array. Endogenous RNaseIII is recruited to cleave the pre-crRNA. Cleaved crRNAs are subjected to exoribonuclease trimming to produce the mature crRNA form (e.g., 5′ trimming). The tracrRNA remains hybridized to the crRNA, and the tracrRNA and the crRNA associate with a site-directed polypeptide (e.g., Cas9). The crRNA of the crRNA-tracrRNA-Cas9 complex guides the complex to a target nucleic acid to which the crRNA can hybridize. Hybridization of the crRNA to the target nucleic acid activates Cas9 for targeted nucleic acid cleavage. The target nucleic acid in a Type II CRISPR system is referred to as a protospacer adjacent motif (PAM). In nature, the PAM is essential to facilitate binding of a site-directed polypeptide (e.g., Cas9) to the target nucleic acid. Type II systems (also referred to as Nmeni or CASS4) are further subdivided into Type II-A (CASS4) and II-B (CASS4a). Jinek et al., Science, 337(6096):816-821 (2012) showed that the CRISPR/Cas9 system is useful for RNA-programmable genome editing, and international patent application publication number WO 2013/176772 provides numerous examples and applications of the CRISPR/Cas endonuclease system for site-specific gene editing.

[0263] Type V CRISPR Systems

[0264] Type V CRISPR systems have several important differences from Type II systems. For example, Cpf1 is a single RNA-guided endonuclease that, in contrast to Type II systems, lacks tracrRNA. In fact, Cpf1-associated CRISPR arrays are processed into mature crRNAS without the requirement of an additional trans-activating tracrRNA. The Type V CRISPR array is processed into short mature crRNAs of 42-44 nucleotides in length, with each mature crRNA beginning with 19 nucleotides of direct repeat followed by 23-25 nucleotides of spacer sequence. In contrast, mature crRNAs in Type II systems start with 20-24 nucleotides of spacer sequence followed by about 22 nucleotides of direct repeat. Also, Cpf1 utilizes a T-rich protospacer-adjacent motif such that Cpf1-crRNA complexes efficiently cleave target DNA preceded by a short T-rich PAM, which is in contrast to the G-rich PAM following the target DNA for Type II systems. Thus, Type V systems cleave at a point that is distant from the PAM, while Type II systems cleave at a point that is adjacent to the PAM. In addition, in contrast to Type II systems, Cpf1 cleaves DNA via a staggered DNA double-stranded break with a 4 or 5 nucleotide 5′ overhang. Type II systems cleave via a blunt double-stranded break. Similar to Type II systems, Cpf1 contains a predicted RuvC-like endonuclease domain, but lacks a second HNH endonuclease domain, which is in contrast to Type II systems.

[0265] Cas Genes/Polypeptides and Protospacer Adjacent Motifs

[0266] Exemplary CRISPR/Cas polypeptides include the Cas9 polypeptides in FIG. 1 of Fonfara et al., Nucleic Acids Research, 42: 2577-2590 (2014). The CRISPR/Cas gene naming system has undergone extensive rewriting since the Cas genes were discovered. FIG. 5 of Fonfara, supra, provides PAM sequences for the Cas9 polypeptides from various species.

[0267] Site-Directed Polypeptides

[0268] A site-directed polypeptide is a nuclease used in genome editing to cleave DNA. The site-directed may be administered to a cell or a patient as either one or more polypeptides, or one or more mRNAs encoding the polypeptide.

[0269] In the context of a CRISPR/Cas or CRISPR/Cpf1 system, the site-directed polypeptide can bind to a guide RNA that, in turn, specifies the site in the target DNA to which the polypeptide is directed. In embodiments of CRISPR/Cas or CRISPR/Cpf1 systems herein, the site-directed polypeptide is an endonuclease, such as a DNA endonuclease.

[0270] In some embodiments, a site-directed polypeptide comprises a plurality of nucleic acid-cleaving (i.e., nuclease) domains. Two or more nucleic acid-cleaving domains can be linked together via a linker. In some embodiments, the linker comprises a flexible linker. Linkers may comprise 1, 2, 3, 4, 5, 6, 7, 8, 9, 10, 11, 12, 13, 14, 15, 16, 17, 18, 19, 20, 21, 22, 23, 24, 25, 30, 35, 40 or more amino acids in length.

[0271] Naturally-occurring wild-type Cas9 enzymes comprise two nuclease domains, a HNH nuclease domain and a RuvC domain. Herein, the “Cas9” refers to both naturally-occurring and recombinant Cas9s. Cas9 enzymes contemplated herein comprises a HNH or HNH-like nuclease domain, and/or a RuvC or RuvC-like nuclease domain.

[0272] HNH or HNH-like domains comprise a McrA-like fold. HNH or HNH-like domains comprises two antiparallel β-strands and an α-helix. HNH or HNH-like domains comprises a metal binding site (e.g., a divalent cation binding site). HNH or HNH-like domains can cleave one strand of a target nucleic acid (e.g., the complementary strand of the crRNA targeted strand).

[0273] RuvC or RuvC-like domains comprise an RNaseH or RNaseH-like fold. RuvC/RNaseH domains are involved in a diverse set of nucleic acid-based functions including acting on both RNA and DNA. The RNaseH domain comprises 5 β-strands surrounded by a plurality of α-helices. RuvC/RNaseH or RuvC/RNaseH-like domains comprise a metal binding site (e.g., a divalent cation binding site). RuvC/RNaseH or RuvC/RNaseH-like domains can cleave one strand of a target nucleic acid (e.g., the non-complementary strand of a double-stranded target DNA).

[0274] Site-directed polypeptides can introduce double-strand breaks or single-strand breaks in nucleic acids, e.g., genomic DNA. The double-strand break can stimulate a cell's endogenous DNA-repair pathways (e.g., homology-dependent repair (HDR) or non-homologous end joining (NHEJ) or alternative non-homologous end joining (A-NHEJ) or microhomology-mediated end joining (MMEJ)). NHEJ can repair cleaved target nucleic acid without the need for a homologous template. This can sometimes result in small deletions or insertions (indels) in the target nucleic acid at the site of cleavage, and can lead to disruption or alteration of gene expression. HDR can occur when a homologous repair template, or donor, is available. The homologous donor template comprises sequences that are homologous to sequences flanking the target nucleic acid cleavage site. The sister chromatid is generally used by the cell as the repair template. However, for the purposes of genome editing, the repair template is often supplied as an exogenous nucleic acid, such as a plasmid, duplex oligonucleotide, single-strand oligonucleotide or viral nucleic acid. With exogenous donor templates, it is common to introduce an additional nucleic acid sequence (such as a transgene) or modification (such as a single or multiple base change or a deletion) between the flanking regions of homology so that the additional or altered nucleic acid sequence also becomes incorporated into the target locus. MMEJ results in a genetic outcome that is similar to NHEJ in that small deletions and insertions can occur at the cleavage site. MMEJ makes use of homologous sequences of a few basepairs flanking the cleavage site to drive a favored end-joining DNA repair outcome. In some instances it may be possible to predict likely repair outcomes based on analysis of potential microhomologies in the nuclease target regions.

[0275] Thus, in some cases, homologous recombination is used to insert an exogenous polynucleotide sequence into the target nucleic acid cleavage site. An exogenous polynucleotide sequence is termed a donor polynucleotide (or donor or donor sequence) herein. In some embodiments, the donor polynucleotide, a portion of the donor polynucleotide, a copy of the donor polynucleotide, or a portion of a copy of the donor polynucleotide is inserted into the target nucleic acid cleavage site. In some embodiments, the donor polynucleotide is an exogenous polynucleotide sequence, i.e., a sequence that does not naturally occur at the target nucleic acid cleavage site.

[0276] The modifications of the target DNA due to NHEJ and/or HDR can lead to, for example, mutations, deletions, alterations, integrations, gene correction, gene replacement, gene tagging, transgene insertion, nucleotide deletion, gene disruption, translocations and/or gene mutation. The processes of deleting genomic DNA and integrating non-native nucleic acid into genomic DNA are examples of genome editing.

[0277] In some embodiments, the site-directed polypeptide comprises an amino acid sequence having at least 10%, at least 15%, at least 20%, at least 30%, at least 40%, at least 50%, at least 60%, at least 70%, at least 75%, at least 80%, at least 85%, at least 90%, at least 95%, at least 99%, or 100% amino acid sequence identity to a wild-type exemplary site-directed polypeptide [e.g., Cas9 from S. pyogenes, US2014/0068797 Sequence ID No. 8 or Sapranauskas et al., Nucleic Acids Res, 39(21): 9275-9282 (2011)], and various other site-directed polypeptides).

[0278] In some embodiments, the site-directed polypeptide comprises an amino acid sequence having at least 10%, at least 15%, at least 20%, at least 30%, at least 40%, at least 50%, at least 60%, at least 70%, at least 75%, at least 80%, at least 85%, at least 90%, at least 95%, at least 99%, or 100% amino acid sequence identity to the nuclease domain of a wild-type exemplary site-directed polypeptide (e.g., Cas9 from S. pyogenes, supra).

[0279] In some embodiments, a site-directed polypeptide comprises at least 70, 75, 80, 85, 90, 95, 97, 99, or 100% identity to a wild-type site-directed polypeptide (e.g., Cas9 from S. pyogenes, supra) over 10 contiguous amino acids. In some embodiments, a site-directed polypeptide comprises at most: 70, 75, 80, 85, 90, 95, 97, 99, or 100% identity to a wild-type site-directed polypeptide (e.g., Cas9 from S. pyogenes, supra) over 10 contiguous amino acids. In some embodiments, a site-directed polypeptide comprises at least: 70, 75, 80, 85, 90, 95, 97, 99, or 100% identity to a wild-type site-directed polypeptide (e.g., Cas9 from S. pyogenes, supra) over 10 contiguous amino acids in a HNH nuclease domain of the site-directed polypeptide. In some embodiments, a site-directed polypeptide comprises at most: 70, 75, 80, 85, 90, 95, 97, 99, or 100% identity to a wild-type site-directed polypeptide (e.g., Cas9 from S. pyogenes, supra) over 10 contiguous amino acids in a HNH nuclease domain of the site-directed polypeptide. In some embodiments, a site-directed polypeptide comprises at least: 70, 75, 80, 85, 90, 95, 97, 99, or 100% identity to a wild-type site-directed polypeptide (e.g., Cas9 from S. pyogenes, supra) over 10 contiguous amino acids in a RuvC nuclease domain of the site-directed polypeptide. In some embodiments, a site-directed polypeptide comprises at most: 70, 75, 80, 85, 90, 95, 97, 99, or 100% identity to a wild-type site-directed polypeptide (e.g., Cas9 from S. pyogenes, supra) over 10 contiguous amino acids in a RuvC nuclease domain of the site-directed polypeptide.

[0280] In some embodiments, the site-directed polypeptide comprises a modified form of a wild-type exemplary site-directed polypeptide. The modified form of the wild-type exemplary site-directed polypeptide comprises a mutation that reduces the nucleic acid-cleaving activity of the site-directed polypeptide. In some embodiments, the modified form of the wild-type exemplary site-directed polypeptide has less than 90%, less than 80%, less than 70%, less than 60%, less than 50%, less than 40%, less than 30%, less than 20%, less than 10%, less than 5%, or less than 1% of the nucleic acid-cleaving activity of the wild-type exemplary site-directed polypeptide (e.g., Cas9 from S. pyogenes, supra). The modified form of the site-directed polypeptide can have no substantial nucleic acid-cleaving activity. When a site-directed polypeptide is a modified form that has no substantial nucleic acid-cleaving activity, it is referred to herein as “enzymatically inactive.”

[0281] In some embodiments, the modified form of the site-directed polypeptide comprises a mutation such that it can induce a single-strand break (SSB) on a target nucleic acid (e.g., by cutting only one of the sugar-phosphate backbones of a double-strand target nucleic acid). In some embodiments, the mutation results in less than 90%, less than 80%, less than 70%, less than 60%, less than 50%, less than 40%, less than 30%, less than 20%, less than 10%, less than 5%, or less than 1% of the nucleic acid-cleaving activity in one or more of the plurality of nucleic acid-cleaving domains of the wild-type site directed polypeptide (e.g., Cas9 from S. pyogenes, supra). In some embodiments, the mutation results in one or more of the plurality of nucleic acid-cleaving domains retaining the ability to cleave the complementary strand of the target nucleic acid, but reducing its ability to cleave the non-complementary strand of the target nucleic acid. In some embodiments, the mutation results in one or more of the plurality of nucleic acid-cleaving domains retaining the ability to cleave the non-complementary strand of the target nucleic acid, but reducing its ability to cleave the complementary strand of the target nucleic acid. For example, residues in the wild-type exemplary S. pyogenes Cas9 polypeptide, such as Asp10, His840, Asn854 and Asn856, are mutated to inactivate one or more of the plurality of nucleic acid-cleaving domains (e.g., nuclease domains). In some embodiments, the residues to be mutated correspond to residues Asp10, His840, Asn854 and Asn856 in the wild-type exemplary S. pyogenes Cas9 polypeptide (e.g., as determined by sequence and/or structural alignment). Non-limiting examples of mutations include D10A, H840A, N854A or N856A. One skilled in the art will recognize that mutations other than alanine substitutions are suitable.

[0282] In some embodiments, a D10A mutation is combined with one or more of H840A, N854A, or N856A mutations to produce a site-directed polypeptide substantially lacking DNA cleavage activity. In some embodiments, a H840A mutation is combined with one or more of D10A, N854A, or N856A mutations to produce a site-directed polypeptide substantially lacking DNA cleavage activity. In some embodiments, a N854A mutation is combined with one or more of H840A, D1 OA, or N856A mutations to produce a site-directed polypeptide substantially lacking DNA cleavage activity. In some embodiments, a N856A mutation is combined with one or more of H840A, N854A, or D10A mutations to produce a site-directed polypeptide substantially lacking DNA cleavage activity. Site-directed polypeptides that comprise one substantially inactive nuclease domain are referred to as “nickases”.

[0283] Nickase variants of RNA-guided endonucleases, for example Cas9, can be used to increase the specificity of CRISPR-mediated genome editing. Wild type Cas9 is typically guided by a single guide RNA designed to hybridize with a specified ˜20 nucleotide sequence in the target sequence (such as an endogenous genomic locus). However, several mismatches can be tolerated between the guide RNA and the target locus, effectively reducing the length of required homology in the target site to, for example, as little as 13 nt of homology, and thereby resulting in elevated potential for binding and double-strand nucleic acid cleavage by the CRISPR/Cas9 complex elsewhere in the target genome—also known as off-target cleavage. Because nickase variants of Cas9 each only cut one strand, in order to create a double-strand break it is necessary for a pair of nickases to bind in close proximity and on opposite strands of the target nucleic acid, thereby creating a pair of nicks, which is the equivalent of a double-strand break. This requires that two separate guide RNAs—one for each nickase—must bind in close proximity and on opposite strands of the target nucleic acid. This requirement essentially doubles the minimum length of homology needed for the double-strand break to occur, thereby reducing the likelihood that a double-strand cleavage event will occur elsewhere in the genome, where the two guide RNA sites—if they exist—are unlikely to be sufficiently close to each other to enable the double-strand break to form. As described in the art, nickases can also be used to promote HDR versus NHEJ. HDR can be used to introduce selected changes into target sites in the genome through the use of specific donor sequences that effectively mediate the desired changes. Descriptions of various CRISPR/Cas systems for use in gene editing can be found, e.g., in international patent application publication number WO2013/176772, and in Nature Biotechnology 32, 347-355 (2014), and references cited therein.

[0284] Mutations contemplated include substitutions, additions, and deletions, or any combination thereof. In some embodiments, the mutation converts the mutated amino acid to alanine. In some embodiments, the mutation converts the mutated amino acid to another amino acid (e.g., glycine, serine, threonine, cysteine, valine, leucine, isoleucine, methionine, proline, phenylalanine, tyrosine, tryptophan, aspartic acid, glutamic acid, asparagines, glutamine, histidine, lysine, or arginine). In some embodiments, the mutation converts the mutated amino acid to a non-natural amino acid (e.g., selenomethionine). In some embodiments, the mutation converts the mutated amino acid to amino acid mimics (e.g., phosphomimics). In some embodiments, the mutation is a conservative mutation. For example, the mutation can convert the mutated amino acid to amino acids that resemble the size, shape, charge, polarity, conformation, and/or rotamers of the mutated amino acids (e.g., cysteine/serine mutation, lysine/asparagine mutation, histidine/phenylalanine mutation). In some embodiments, the mutation causes a shift in reading frame and/or the creation of a premature stop codon. In some embodiments, mutations cause changes to regulatory regions of genes or loci that affect expression of one or more genes.

[0285] In some embodiments, the site-directed polypeptide (e.g., variant, mutated, enzymatically inactive and/or conditionally enzymatically inactive site-directed polypeptide) targets nucleic acid. In some embodiments, the site-directed polypeptide (e.g., variant, mutated, enzymatically inactive and/or conditionally enzymatically inactive endoribonuclease) targets DNA. In some embodiments, the site-directed polypeptide (e.g., variant, mutated, enzymatically inactive and/or conditionally enzymatically inactive endoribonuclease) targets RNA.

[0286] In some embodiments, the site-directed polypeptide comprises one or more non-native sequences (e.g., the site-directed polypeptide is a fusion protein).

[0287] In some embodiments, the site-directed polypeptide comprises an amino acid sequence comprising at least 15% amino acid identity to a Cas9 from a bacterium (e.g., S. pyogenes), a nucleic acid binding domain, and two nucleic acid cleaving domains (i.e., a HNH domain and a RuvC domain).

[0288] In some embodiments, the site-directed polypeptide comprises an amino acid sequence comprising at least 15% amino acid identity to a Cas9 from a bacterium (e.g., S. pyogenes), and two nucleic acid cleaving domains (i.e., a HNH domain and a RuvC domain).

[0289] In some embodiments, the site-directed polypeptide comprises an amino acid sequence comprising at least 15% amino acid identity to a Cas9 from a bacterium (e.g., S. pyogenes), and two nucleic acid cleaving domains, wherein one or both of the nucleic acid cleaving domains comprise at least 50% amino acid identity to a nuclease domain from Cas9 from a bacterium (e.g., S. pyogenes).

[0290] In some embodiments, the site-directed polypeptide comprises an amino acid sequence comprising at least 15% amino acid identity to a Cas9 from a bacterium (e.g., S. pyogenes), two nucleic acid cleaving domains (i.e., a HNH domain and a RuvC domain), and non-native sequence (for example, a nuclear localization signal) or a linker linking the site-directed polypeptide to a non-native sequence.

[0291] In some embodiments, the site-directed polypeptide comprises an amino acid sequence comprising at least 15% amino acid identity to a Cas9 from a bacterium (e.g., S. pyogenes), two nucleic acid cleaving domains (i.e., a HNH domain and a RuvC domain), wherein the site-directed polypeptide comprises a mutation in one or both of the nucleic acid cleaving domains that reduces the cleaving activity of the nuclease domains by at least 50%.

[0292] In some embodiments, the site-directed polypeptide comprises an amino acid sequence comprising at least 15% amino acid identity to a Cas9 from a bacterium (e.g., S. pyogenes), and two nucleic acid cleaving domains (i.e., a HNH domain and a RuvC domain), wherein one of the nuclease domains comprises mutation of aspartic acid 10, and/or wherein one of the nuclease domains comprises mutation of histidine 840, and wherein the mutation reduces the cleaving activity of the nuclease domain(s) by at least 50%.

[0293] In some embodiments of the disclosure, the one or more site-directed polypeptides, e.g. DNA endonucleases, include two nickases that together effect one double-strand break at a specific locus in the genome, or four nickases that together effect two double-strand breaks at specific loci in the genome. Alternatively, one site-directed polypeptide, e.g. DNA endonuclease, effects one double-strand break at a specific locus in the genome.

[0294] Genome-Targeting Nucleic Acid

[0295] The present disclosure provides a genome-targeting nucleic acid that can direct the activities of an associated polypeptide (e.g., a site-directed polypeptide) to a specific target sequence within a target nucleic acid. In some embodiments, the genome-targeting nucleic acid is an RNA. A genome-targeting RNA is referred to as a “guide RNA” or “gRNA” herein. A guide RNA comprises at least a spacer sequence that hybridizes to a target nucleic acid sequence of interest, and a CRISPR repeat sequence. In Type II systems, the gRNA also comprises a second RNA called the tracrRNA sequence. In the Type II guide RNA (gRNA), the CRISPR repeat sequence and tracrRNA sequence hybridize to each other to form a duplex. In the Type V guide RNA (gRNA), the crRNA forms a duplex. In both systems, the duplex binds a site-directed polypeptide, such that the guide RNA and site-direct polypeptide form a complex. The genome-targeting nucleic acid provides target specificity to the complex by virtue of its association with the site-directed polypeptide. The genome-targeting nucleic acid thus directs the activity of the site-directed polypeptide.

[0296] Exemplary guide RNAs include the spacer sequences in SEQ ID NOs: 1-66,285, for example, in SEQ ID NOs: 54,860-66,285, shown with the genome location of their target sequence and the associated Cas9 or Cpf1 cut site, wherein the genome location is based on the GRCh38/hg38 human genome assembly. As is understood by the person of ordinary skill in the art, each guide RNA is designed to include a spacer sequence complementary to its genomic target sequence. For example, each of the spacer sequences in SEQ ID NOs: 1-66,285, for example, in SEQ ID NOs: 54,860-66,285 may be put into a single RNA chimera or a crRNA (along with a corresponding tracrRNA). See Jinek et al., Science, 337, 816-821 (2012) and Deltcheva et al., Nature, 471, 602-607 (2011).

[0297] In some embodiments, the genome-targeting nucleic acid is a double-molecule guide RNA. In some embodiments, the genome-targeting nucleic acid is a single-molecule guide RNA.

[0298] A double-molecule guide RNA comprises two strands of RNA. The first strand comprises in the 5′ to 3′ direction, an optional spacer extension sequence, a spacer sequence and a minimum CRISPR repeat sequence. The second strand comprises a minimum tracrRNA sequence (complementary to the minimum CRISPR repeat sequence), a 3′ tracrRNA sequence and an optional tracrRNA extension sequence.

[0299] A single-molecule guide RNA (sgRNA) in a Type II system comprises, in the 5′ to 3′ direction, an optional spacer extension sequence, a spacer sequence, a minimum CRISPR repeat sequence, a single-molecule guide linker, a minimum tracrRNA sequence, a 3′ tracrRNA sequence and an optional tracrRNA extension sequence. The optional tracrRNA extension may comprise elements that contribute additional functionality (e.g., stability) to the guide RNA. The single-molecule guide linker links the minimum CRISPR repeat and the minimum tracrRNA sequence to form a hairpin structure. The optional tracrRNA extension comprises one or more hairpins.

[0300] A single-molecule guide RNA (sgRNA) in a Type V system comprises, in the 5′ to 3′ direction, a minimum CRISPR repeat sequence and a spacer sequence.

[0301] By way of illustration, guide RNAs used in the CRISPR/Cas/Cpf1 system, or other smaller RNAs can be readily synthesized by chemical means, as illustrated below and described in the art. While chemical synthetic procedures are continually expanding, purifications of such RNAs by procedures such as high performance liquid chromatography (HPLC, which avoids the use of gels such as PAGE) tends to become more challenging as polynucleotide lengths increase significantly beyond a hundred or so nucleotides. One approach used for generating RNAs of greater length is to produce two or more molecules that are ligated together. Much longer RNAs, such as those encoding a Cas9 or Cpf1 endonuclease, are more readily generated enzymatically. Various types of RNA modifications can be introduced during or after chemical synthesis and/or enzymatic generation of RNAs, e.g., modifications that enhance stability, reduce the likelihood or degree of innate immune response, and/or enhance other attributes, as described in the art.

[0302] Spacer Extension Sequence

[0303] In some embodiments of genome-targeting nucleic acids, a spacer extension sequence can modify activity, provide stability and/or provide a location for modifications of a genome-targeting nucleic acid. A spacer extension sequence may modify on- or off-target activity or specificity. In some embodiments, a spacer extension sequence is provided. A spacer extension sequence may have a length of more than 1, 5, 10, 15, 20, 25, 30, 35, 40, 45, 50, 60, 70, 80, 90, 100, 120, 140, 160, 180, 200, 220, 240, 260, 280, 300, 320, 340, 360, 380, 400, 1000, 2000, 3000, 4000, 5000, 6000, or 7000 or more nucleotides. A spacer extension sequence may have a length of less than 1, 5, 10, 15, 20, 25, 30, 35, 40, 45, 50, 60, 70, 80, 90, 100, 120, 140, 160, 180, 200, 220, 240, 260, 280, 300, 320, 340, 360, 380, 400, 1000, 2000, 3000, 4000, 5000, 6000, 7000 or more nucleotides. In some embodiments, a spacer extension sequence is less than 10 nucleotides in length. In some embodiments, a spacer extension sequence is between 10-30 nucleotides in length. In some embodiments, a spacer extension sequence is between 30-70 nucleotides in length.

[0304] In some embodiments, the spacer extension sequence comprises another moiety (e.g., a stability control sequence, an endoribonuclease binding sequence, a ribozyme). In some embodiments, the moiety decreases or increases the stability of a nucleic acid targeting nucleic acid. In some embodiments, the moiety is a transcriptional terminator segment (i.e., a transcription termination sequence). In some embodiments, the moiety functions in a eukaryotic cell. In some embodiments, the moiety functions in a prokaryotic cell. In some embodiments, the moiety functions in both eukaryotic and prokaryotic cells. Non-limiting examples of suitable moieties include: a 5′ cap (e.g., a 7-methylguanylate cap (m7 G)), a riboswitch sequence (e.g., to allow for regulated stability and/or regulated accessibility by proteins and protein complexes), a sequence that forms a dsRNA duplex (i.e., a hairpin), a sequence that targets the RNA to a subcellular location (e.g., nucleus, mitochondria, chloroplasts, and the like), a modification or sequence that provides for tracking (e.g., direct conjugation to a fluorescent molecule, conjugation to a moiety that facilitates fluorescent detection, a sequence that allows for fluorescent detection, etc.), and/or a modification or sequence that provides a binding site for proteins (e.g., proteins that act on DNA, including transcriptional activators, transcriptional repressors, DNA methyltransferases, DNA demethylases, histone acetyltransferases, histone deacetylases, and the like).

[0305] Spacer Sequence

[0306] The spacer sequence hybridizes to a sequence in a target nucleic acid of interest. The spacer of a genome-targeting nucleic acid interacts with a target nucleic acid in a sequence-specific manner via hybridization (i.e., base pairing). The nucleotide sequence of the spacer thus varies depending on the sequence of the target nucleic acid of interest.

[0307] In a CRISPR/Cas system herein, the spacer sequence is designed to hybridize to a target nucleic acid that is located 5′ of a PAM of the Cas9 enzyme used in the system. The spacer may perfectly match the target sequence or may have mismatches. Each Cas9 enzyme has a particular PAM sequence that it recognizes in a target DNA. For example, S. pyogenes recognizes in a target nucleic acid a PAM that comprises the sequence 5′-NRG-3′, where R comprises either A or G, where N is any nucleotide and N is immediately 3′ of the target nucleic acid sequence targeted by the spacer sequence.

[0308] In some embodiments, the target nucleic acid sequence comprises 20 nucleotides. In some embodiments, the target nucleic acid comprises less than 20 nucleotides. In some embodiments, the target nucleic acid comprises more than 20 nucleotides. In some embodiments, the target nucleic acid comprises at least: 5, 10, 15, 16, 17, 18, 19, 20, 21, 22, 23, 24, 25, 30 or more nucleotides. In some embodiments, the target nucleic acid comprises at most: 5, 10, 15, 16, 17, 18, 19, 20, 21, 22, 23, 24, 25, 30 or more nucleotides. In some embodiments, the target nucleic acid sequence comprises 20 bases immediately 5′ of the first nucleotide of the PAM. For example, in a sequence comprising 5′-NNNNNNNNNNNNNNNNNNNNNRG-3′ (SEQ ID NO: 66,286), the target nucleic acid comprises the sequence that corresponds to the Ns, wherein N is any nucleotide, and the underlined NRG sequence is the S. pyogenes PAM.

[0309] In some embodiments, the spacer sequence that hybridizes to the target nucleic acid has a length of at least about 6 nucleotides (nt). The spacer sequence can be at least about 6 nt, at least about 10 nt, at least about 15 nt, at least about 18 nt, at least about 19 nt, at least about 20 nt, at least about 25 nt, at least about 30 nt, at least about 35 nt or at least about 40 nt, from about 6 nt to about 80 nt, from about 6 nt to about 50 nt, from about 6 nt to about 45 nt, from about 6 nt to about 40 nt, from about 6 nt to about 35 nt, from about 6 nt to about 30 nt, from about 6 nt to about 25 nt, from about 6 nt to about 20 nt, from about 6 nt to about 19 nt, from about 10 nt to about 50 nt, from about 10 nt to about 45 nt, from about 10 nt to about 40 nt, from about 10 nt to about 35 nt, from about 10 nt to about 30 nt, from about 10 nt to about 25 nt, from about 10 nt to about 20 nt, from about 10 nt to about 19 nt, from about 19 nt to about 25 nt, from about 19 nt to about 30 nt, from about 19 nt to about 35 nt, from about 19 nt to about 40 nt, from about 19 nt to about 45 nt, from about 19 nt to about 50 nt, from about 19 nt to about 60 nt, from about 20 nt to about 25 nt, from about 20 nt to about 30 nt, from about 20 nt to about 35 nt, from about 20 nt to about 40 nt, from about 20 nt to about 45 nt, from about 20 nt to about 50 nt, or from about 20 nt to about 60 nt. In some embodiments, the spacer sequence comprises 20 nucleotides. In some embodiments, the spacer comprises 19 nucleotides.

[0310] In some embodiments, the percent complementarity between the spacer sequence and the target nucleic acid is at least about 30%, at least about 40%, at least about 50%, at least about 60%, at least about 65%, at least about 70%, at least about 75%, at least about 80%, at least about 85%, at least about 90%, at least about 95%, at least about 97%, at least about 98%, at least about 99%, or 100%. In some embodiments, the percent complementarity between the spacer sequence and the target nucleic acid is at most about 30%, at most about 40%, at most about 50%, at most about 60%, at most about 65%, at most about 70%, at most about 75%, at most about 80%, at most about 85%, at most about 90%, at most about 95%, at most about 97%, at most about 98%, at most about 99%, or 100%. In some embodiments, the percent complementarity between the spacer sequence and the target nucleic acid is 100% over the six contiguous 5′-most nucleotides of the target sequence of the complementary strand of the target nucleic acid. In some embodiments, the percent complementarity between the spacer sequence and the target nucleic acid is at least 60% over about 20 contiguous nucleotides. In some embodiments, the length of the spacer sequence and the target nucleic acid can differ by 1 to 6 nucleotides, which may be thought of as a bulge or bulges.

[0311] In some embodiments, a spacer sequence is designed or chosen using a computer program. The computer program can use variables, such as predicted melting temperature, secondary structure formation, predicted annealing temperature, sequence identity, genomic context, chromatin accessibility, % GC, frequency of genomic occurrence (e.g., of sequences that are identical or are similar but vary in one or more spots as a result of mismatch, insertion or deletion), methylation status, presence of SNPs, and the like.

[0312] Minimum CRISPR Repeat Sequence

[0313] In some embodiments, a minimum CRISPR repeat sequence is a sequence with at least about 30%, about 40%, about 50%, about 60%, about 65%, about 70%, about 75%, about 80%, about 85%, about 90%, about 95%, or 100% sequence identity to a reference CRISPR repeat sequence (e.g., crRNA from S. pyogenes).

[0314] A minimum CRISPR repeat sequence comprises nucleotides that can hybridize to a minimum tracrRNA sequence in a cell. The minimum CRISPR repeat sequence and a minimum tracrRNA sequence form a duplex, i.e. a base-paired double-stranded structure. Together, the minimum CRISPR repeat sequence and the minimum tracrRNA sequence bind to the site-directed polypeptide. At least a part of the minimum CRISPR repeat sequence hybridizes to the minimum tracrRNA sequence. In some embodiments, at least a part of the minimum CRISPR repeat sequence comprises at least about 30%, about 40%, about 50%, about 60%, about 65%, about 70%, about 75%, about 80%, about 85%, about 90%, about 95%, or 100% complementary to the minimum tracrRNA sequence. In some embodiments, at least a part of the minimum CRISPR repeat sequence comprises at most about 30%, about 40%, about 50%, about 60%, about 65%, about 70%, about 75%, about 80%, about 85%, about 90%, about 95%, or 100% complementary to the minimum tracrRNA sequence.

[0315] The minimum CRISPR repeat sequence can have a length from about 7 nucleotides to about 100 nucleotides. For example, the length of the minimum CRISPR repeat sequence is from about 7 nucleotides (nt) to about 50 nt, from about 7 nt to about 40 nt, from about 7 nt to about 30 nt, from about 7 nt to about 25 nt, from about 7 nt to about 20 nt, from about 7 nt to about 15 nt, from about 8 nt to about 40 nt, from about 8 nt to about 30 nt, from about 8 nt to about 25 nt, from about 8 nt to about 20 nt, from about 8 nt to about 15 nt, from about 15 nt to about 100 nt, from about 15 nt to about 80 nt, from about 15 nt to about 50 nt, from about 15 nt to about 40 nt, from about 15 nt to about 30 nt, or from about 15 nt to about 25 nt. In some embodiments, the minimum CRISPR repeat sequence is approximately 9 nucleotides in length. In some embodiments, the minimum CRISPR repeat sequence is approximately 12 nucleotides in length.

[0316] In some embodiments, the minimum CRISPR repeat sequence is at least about 60% identical to a reference minimum CRISPR repeat sequence (e.g., wild-type crRNA from S. pyogenes) over a stretch of at least 6, 7, or 8 contiguous nucleotides. For example, the minimum CRISPR repeat sequence is at least about 65% identical, at least about 70% identical, at least about 75% identical, at least about 80% identical, at least about 85% identical, at least about 90% identical, at least about 95% identical, at least about 98% identical, at least about 99% identical or 100% identical to a reference minimum CRISPR repeat sequence over a stretch of at least 6, 7, or 8 contiguous nucleotides.

[0317] Minimum tracrRNA Sequence

[0318] In some embodiments, a minimum tracrRNA sequence is a sequence with at least about 30%, about 40%, about 50%, about 60%, about 65%, about 70%, about 75%, about 80%, about 85%, about 90%, about 95%, or 100% sequence identity to a reference tracrRNA sequence (e.g., wild type tracrRNA from S. pyogenes).

[0319] A minimum tracrRNA sequence comprises nucleotides that hybridize to a minimum CRISPR repeat sequence in a cell. A minimum tracrRNA sequence and a minimum CRISPR repeat sequence form a duplex, i.e. a base-paired double-stranded structure. Together, the minimum tracrRNA sequence and the minimum CRISPR repeat bind to a site-directed polypeptide. At least a part of the minimum tracrRNA sequence can hybridize to the minimum CRISPR repeat sequence. In some embodiments, the minimum tracrRNA sequence is at least about 30%, about 40%, about 50%, about 60%, about 65%, about 70%, about 75%, about 80%, about 85%, about 90%, about 95%, or 100% complementary to the minimum CRISPR repeat sequence.

[0320] The minimum tracrRNA sequence can have a length from about 7 nucleotides to about 100 nucleotides. For example, the minimum tracrRNA sequence can be from about 7 nucleotides (nt) to about 50 nt, from about 7 nt to about 40 nt, from about 7 nt to about 30 nt, from about 7 nt to about 25 nt, from about 7 nt to about 20 nt, from about 7 nt to about 15 nt, from about 8 nt to about 40 nt, from about 8 nt to about 30 nt, from about 8 nt to about 25 nt, from about 8 nt to about 20 nt, from about 8 nt to about 15 nt, from about 15 nt to about 100 nt, from about 15 nt to about 80 nt, from about 15 nt to about 50 nt, from about 15 nt to about 40 nt, from about 15 nt to about 30 nt or from about 15 nt to about 25 nt long. In some embodiments, the minimum tracrRNA sequence is approximately 9 nucleotides in length. In some embodiments, the minimum tracrRNA sequence is approximately 12 nucleotides. In some embodiments, the minimum tracrRNA consists of tracrRNA nt 23-48 described in Jinek et al., supra.

[0321] In some embodiments, the minimum tracrRNA sequence is at least about 60% identical to a reference minimum tracrRNA (e.g., wild type, tracrRNA from S. pyogenes) sequence over a stretch of at least 6, 7, or 8 contiguous nucleotides. For example, the minimum tracrRNA sequence is at least about 65% identical, about 70% identical, about 75% identical, about 80% identical, about 85% identical, about 90% identical, about 95% identical, about 98% identical, about 99% identical or 100% identical to a reference minimum tracrRNA sequence over a stretch of at least 6, 7, or 8 contiguous nucleotides.

[0322] In some embodiments, the duplex between the minimum CRISPR RNA and the minimum tracrRNA comprises a double helix. In some embodiments, the duplex between the minimum CRISPR RNA and the minimum tracrRNA comprises at least about 1, 2, 3, 4, 5, 6, 7, 8, 9, or 10 or more nucleotides. In some embodiments, the duplex between the minimum CRISPR RNA and the minimum tracrRNA comprises at most about 1, 2, 3, 4, 5, 6, 7, 8, 9, or 10 or more nucleotides.

[0323] In some embodiments, the duplex comprises a mismatch (i.e., the two strands of the duplex are not 100% complementary). In some embodiments, the duplex comprises at least about 1, 2, 3, 4, or 5 or mismatches. In some embodiments, the duplex comprises at most about 1, 2, 3, 4, or 5 or mismatches. In some embodiments, the duplex comprises no more than 2 mismatches.

[0324] Bulges

[0325] In some embodiments, there is a “bulge” in the duplex between the minimum CRISPR RNA and the minimum tracrRNA. The bulge is an unpaired region of nucleotides within the duplex. In some embodiments, the bulge contributes to the binding of the duplex to the site-directed polypeptide. A bulge comprises, on one side of the duplex, an unpaired 5′-XXXY-3′ where X is any purine and Y comprises a nucleotide that can form a wobble pair with a nucleotide on the opposite strand, and an unpaired nucleotide region on the other side of the duplex. The number of unpaired nucleotides on the two sides of the duplex can be different.

[0326] In one example, the bulge comprises an unpaired purine (e.g., adenine) on the minimum CRISPR repeat strand of the bulge. In some embodiments, a bulge comprises an unpaired 5′-AAGY-3′ of the minimum tracrRNA sequence strand of the bulge, where Y comprises a nucleotide that can form a wobble pairing with a nucleotide on the minimum CRISPR repeat strand.

[0327] In some embodiments, a bulge on the minimum CRISPR repeat side of the duplex comprises at least 1, 2, 3, 4, or 5 or more unpaired nucleotides. In some embodiments, a bulge on the minimum CRISPR repeat side of the duplex comprises at most 1, 2, 3, 4, or 5 or more unpaired nucleotides. In some embodiments, a bulge on the minimum CRISPR repeat side of the duplex comprises 1 unpaired nucleotide.

[0328] In some embodiments, a bulge on the minimum tracrRNA sequence side of the duplex comprises at least 1, 2, 3, 4, 5, 6, 7, 8, 9, or 10 or more unpaired nucleotides. In some embodiments, a bulge on the minimum tracrRNA sequence side of the duplex comprises at most 1, 2, 3, 4, 5, 6, 7, 8, 9, or 10 or more unpaired nucleotides. In some embodiments, a bulge on a second side of the duplex (e.g., the minimum tracrRNA sequence side of the duplex) comprises 4 unpaired nucleotides.

[0329] In some embodiments, a bulge comprises at least one wobble pairing. In some embodiments, a bulge comprises at most one wobble pairing. In some embodiments, a bulge comprises at least one purine nucleotide. In some embodiments, a bulge comprises at least 3 purine nucleotides. In some embodiments, a bulge sequence comprises at least 5 purine nucleotides. In some embodiments, a bulge sequence comprises at least one guanine nucleotide. In some embodiments, a bulge sequence comprises at least one adenine nucleotide.

[0330] Hairpins

[0331] In various embodiments, one or more hairpins are located 3′ to the minimum tracrRNA in the 3′ tracrRNA sequence.

[0332] In some embodiments, the hairpin starts at least about 1, 2, 3, 4, 5, 6, 7, 8, 9, 10, 15, or 20 or more nucleotides 3′ from the last paired nucleotide in the minimum CRISPR repeat and minimum tracrRNA sequence duplex. In some embodiments, the hairpin can start at most about 1, 2, 3, 4, 5, 6, 7, 8, 9 or 10 or more nucleotides 3′ of the last paired nucleotide in the minimum CRISPR repeat and minimum tracrRNA sequence duplex.

[0333] In some embodiments, a hairpin comprises at least about 1, 2, 3, 4, 5, 6, 7, 8, 9, 10, 15, or 20 or more consecutive nucleotides. In some embodiments, a hairpin comprises at most about 1, 2, 3, 4, 5, 6, 7, 8, 9, 10, 15, or more consecutive nucleotides.

[0334] In some embodiments, a hairpin comprises a CC dinucleotide (i.e., two consecutive cytosine nucleotides).

[0335] In some embodiments, a hairpin comprises duplexed nucleotides (e.g., nucleotides in a hairpin, hybridized together). For example, a hairpin comprises a CC dinucleotide that is hybridized to a GG dinucleotide in a hairpin duplex of the 3′ tracrRNA sequence.

[0336] One or more of the hairpins can interact with guide RNA-interacting regions of a site-directed polypeptide.

[0337] In some embodiments, there are two or more hairpins, and in some embodiments there are three or more hairpins.

[0338] 3′ tracrRNA Sequence

[0339] In some embodiments, a 3′ tracrRNA sequence comprises a sequence with at least about 30%, about 40%, about 50%, about 60%, about 65%, about 70%, about 75%, about 80%, about 85%, about 90%, about 95%, or 100% sequence identity to a reference tracrRNA sequence (e.g., a tracrRNA from S. pyogenes).

[0340] In some embodiments, the 3′ tracrRNA sequence has a length from about 6 nucleotides to about 100 nucleotides. For example, the 3′ tracrRNA sequence can have a length from about 6 nucleotides (nt) to about 50 nt, from about 6 nt to about 40 nt, from about 6 nt to about 30 nt, from about 6 nt to about 25 nt, from about 6 nt to about 20 nt, from about 6 nt to about 15 nt, from about 8 nt to about 40 nt, from about 8 nt to about 30 nt, from about 8 nt to about 25 nt, from about 8 nt to about 20 nt, from about 8 nt to about 15 nt, from about 15 nt to about 100 nt, from about 15 nt to about 80 nt, from about 15 nt to about 50 nt, from about 15 nt to about 40 nt, from about 15 nt to about 30 nt, or from about 15 nt to about 25 nt. In some embodiments, the 3′ tracrRNA sequence has a length of approximately 14 nucleotides.

[0341] In some embodiments, the 3′ tracrRNA sequence is at least about 60% identical to a reference 3′ tracrRNA sequence (e.g., wild type 3′ tracrRNA sequence from S. pyogenes) over a stretch of at least 6, 7, or 8 contiguous nucleotides. For example, the 3′ tracrRNA sequence is at least about 60% identical, about 65% identical, about 70% identical, about 75% identical, about 80% identical, about 85% identical, about 90% identical, about 95% identical, about 98% identical, about 99% identical, or 100% identical, to a reference 3′ tracrRNA sequence (e.g., wild type 3′ tracrRNA sequence from S. pyogenes) over a stretch of at least 6, 7, or 8 contiguous nucleotides.

[0342] In some embodiments, a 3′ tracrRNA sequence comprises more than one duplexed region (e.g., hairpin, hybridized region). In some embodiments, a 3′ tracrRNA sequence comprises two duplexed regions.

[0343] In some embodiments, the 3′ tracrRNA sequence comprises a stem loop structure. In some embodiments, a stem loop structure in the 3′ tracrRNA comprises at least 1, 2, 3, 4, 5, 6, 7, 8, 9, 10, 15 or 20 or more nucleotides. In some embodiments, the stem loop structure in the 3′ tracrRNA comprises at most 1, 2, 3, 4, 5, 6, 7, 8, 9 or 10 or more nucleotides. In some embodiments, the stem loop structure comprises a functional moiety. For example, the stem loop structure may comprise an aptamer, a ribozyme, a protein-interacting hairpin, a CRISPR array, an intron, or an exon. In some embodiments, the stem loop structure comprises at least about 1, 2, 3, 4, or 5 or more functional moieties. In some embodiments, the stem loop structure comprises at most about 1, 2, 3, 4, or 5 or more functional moieties.

[0344] In some embodiments, the hairpin in the 3′ tracrRNA sequence comprises a P-domain. In some embodiments, the P-domain comprises a double-stranded region in the hairpin.

[0345] tracrRNA Extension Sequence

[0346] A tracrRNA extension sequence may be provided whether the tracrRNA is in the context of single-molecule guides or double-molecule guides. In some embodiments, a tracrRNA extension sequence has a length from about 1 nucleotide to about 400 nucleotides. In some embodiments, a tracrRNA extension sequence has a length of more than 1, 5, 10, 15, 20, 25, 30, 35, 40, 45, 50, 60, 70, 80, 90, 100, 120, 140, 160, 180, 200, 220, 240, 260, 280, 300, 320, 340, 360, 380, or 400 nucleotides. In some embodiments, a tracrRNA extension sequence has a length from about 20 to about 5000 or more nucleotides. In some embodiments, a tracrRNA extension sequence has a length of more than 1000 nucleotides. In some embodiments, a tracrRNA extension sequence has a length of less than 1, 5, 10, 15, 20, 25, 30, 35, 40, 45, 50, 60, 70, 80, 90, 100, 120, 140, 160, 180, 200, 220, 240, 260, 280, 300, 320, 340, 360, 380, 400 or more nucleotides. In some embodiments, a tracrRNA extension sequence can have a length of less than 1000 nucleotides. In some embodiments, a tracrRNA extension sequence comprises less than 10 nucleotides in length. In some embodiments, a tracrRNA extension sequence is 10-30 nucleotides in length. In some embodiments, tracrRNA extension sequence is 30-70 nucleotides in length.

[0347] In some embodiments, the tracrRNA extension sequence comprises a functional moiety (e.g., a stability control sequence, ribozyme, endoribonuclease binding sequence). In some embodiments, the functional moiety comprises a transcriptional terminator segment (i.e., a transcription termination sequence). In some embodiments, the functional moiety has a total length from about 10 nucleotides (nt) to about 100 nucleotides, from about 10 nt to about 20 nt, from about 20 nt to about 30 nt, from about 30 nt to about 40 nt, from about 40 nt to about 50 nt, from about 50 nt to about 60 nt, from about 60 nt to about 70 nt, from about 70 nt to about 80 nt, from about 80 nt to about 90 nt, or from about 90 nt to about 100 nt, from about 15 nt to about 80 nt, from about 15 nt to about 50 nt, from about 15 nt to about 40 nt, from about 15 nt to about 30 nt, or from about 15 nt to about 25 nt. In some embodiments, the functional moiety functions in a eukaryotic cell. In some embodiments, the functional moiety functions in a prokaryotic cell. In some embodiments, the functional moiety functions in both eukaryotic and prokaryotic cells.

[0348] Non-limiting examples of suitable tracrRNA extension functional moieties include a 3′ poly-adenylated tail, a riboswitch sequence (e.g., to allow for regulated stability and/or regulated accessibility by proteins and protein complexes), a sequence that forms a dsRNA duplex (i.e., a hairpin), a sequence that targets the RNA to a subcellular location (e.g., nucleus, mitochondria, chloroplasts, and the like), a modification or sequence that provides for tracking (e.g., direct conjugation to a fluorescent molecule, conjugation to a moiety that facilitates fluorescent detection, a sequence that allows for fluorescent detection, etc.), and/or a modification or sequence that provides a binding site for proteins (e.g., proteins that act on DNA, including transcriptional activators, transcriptional repressors, DNA methyltransferases, DNA demethylases, histone acetyltransferases, histone deacetylases, and the like). In some embodiments, a tracrRNA extension sequence comprises a primer binding site or a molecular index (e.g., barcode sequence). In some embodiments, the tracrRNA extension sequence comprises one or more affinity tags.

[0349] Single-Molecule Guide Linker Sequence

[0350] In some embodiments, the linker sequence of a single-molecule guide nucleic acid has a length from about 3 nucleotides to about 100 nucleotides. In Jinek et al., supra, for example, a simple 4 nucleotide “tetraloop” (-GAAA-) was used, Science, 337(6096):816-821 (2012). An illustrative linker has a length from about 3 nucleotides (nt) to about 90 nt, from about 3 nt to about 80 nt, from about 3 nt to about 70 nt, from about 3 nt to about 60 nt, from about 3 nt to about 50 nt, from about 3 nt to about 40 nt, from about 3 nt to about 30 nt, from about 3 nt to about 20 nt, from about 3 nt to about 10 nt. For example, the linker can have a length from about 3 nt to about 5 nt, from about 5 nt to about 10 nt, from about 10 nt to about 15 nt, from about 15 nt to about 20 nt, from about 20 nt to about 25 nt, from about 25 nt to about 30 nt, from about 30 nt to about 35 nt, from about 35 nt to about 40 nt, from about 40 nt to about 50 nt, from about 50 nt to about 60 nt, from about 60 nt to about 70 nt, from about 70 nt to about 80 nt, from about 80 nt to about 90 nt, or from about 90 nt to about 100 nt. In some embodiments, the linker of a single-molecule guide nucleic acid is between 4 and 40 nucleotides. In some embodiments, a linker is at least about 100, 500, 1000, 1500, 2000, 2500, 3000, 3500, 4000, 4500, 5000, 5500, 6000, 6500, or 7000 or more nucleotides. In some embodiments, a linker is at most about 100, 500, 1000, 1500, 2000, 2500, 3000, 3500, 4000, 4500, 5000, 5500, 6000, 6500, or 7000 or more nucleotides.

[0351] Linkers can comprise any of a variety of sequences, although in some embodiments, the linker will not comprise sequences that have extensive regions of homology with other portions of the guide RNA, which might cause intramolecular binding that could interfere with other functional regions of the guide. In Jinek et al., supra, a simple 4 nucleotide sequence -GAAA- was used, Science, 337(6096):816-821 (2012), but numerous other sequences, including longer sequences can likewise be used.

[0352] In some embodiments, the linker sequence comprises a functional moiety. For example, the linker sequence may comprise one or more features, including an aptamer, a ribozyme, a protein-interacting hairpin, a protein binding site, a CRISPR array, an intron, or an exon. In some embodiments, the linker sequence comprises at least about 1, 2, 3, 4, or 5 or more functional moieties. In some embodiments, the linker sequence comprises at most about 1, 2, 3, 4, or 5 or more functional moieties.

[0353] Genome Engineering Strategies to Correct Cells by Deletion, Insertion, Correction, or Replacement of One or More Mutations or Exons within or Near the Gene, or by Knocking-in RAG1 cDNA or Minigene into the Locus of the Corresponding Gene or Safe Harbor Site

[0354] The methods of the disclosure involve correction of one or both of the mutant alleles. Gene editing to correct the mutation has the advantage of restoration of correct expression levels and temporal control. Sequencing the patient's RAG1 alleles allows for design of the gene editing strategy to best correct the identified mutation(s).

[0355] A step of the ex vivo methods of the disclosure involves editing/correcting the patient specific iPS cells using genome engineering. Alternatively, a step of the ex vivo methods of the disclosure involves editing/correcting the white blood cell, mesenchymal stem cell, or hematopoietic progenitor cell, including, by way of non-limiting example, a hematopoietic stem cell. Likewise, a step of the in vivo methods of the disclosure involves editing/correcting the cells in a SCID or Omenn Syndrome patient using genome engineering. Similarly, a step in the cellular methods of the disclosure involves editing/correcting the RAG1 gene in a human cell by genome engineering.

[0356] SCID and/or Omenn Syndrome patients exhibit one or more mutations in the RAG1 gene. Any CRISPR endonuclease may be used in the methods of the disclosure, each CRISPR endonuclease having its own associated PAM, which may or may not be disease specific. For example, gRNA spacer sequences for targeting the RAG1 gene with a CRISPR/Cas9 endonuclease from S. pyogenes have been identified in SEQ ID NOs: 54,860-59,105. gRNA spacer sequences for targeting the RAG1 gene with a CRISPR/Cas9 endonuclease from S. aureus have been identified in SEQ ID NOs: 59,106-59,602. gRNA spacer sequences for targeting the RAG1 gene with a CRISPR/Cas9 endonuclease from S. thermophilus have been identified in SEQ ID NOs: 59,603-59,759. gRNA spacer sequences for targeting the RAG1 gene with a CRISPR/Cas9 endonuclease from T. denticola have been identified in SEQ ID NOs: 59,760-59,824. gRNA spacer sequences for targeting the RAG1 gene with a CRISPR/Cas9 endonuclease from N. meningitides have been identified in SEQ ID NOs: 59,825-60,308. gRNA spacer sequences for targeting the RAG1 gene with a CRISPR/Cpf1 endonuclease from Acidominococcus, Lachnospiraceae, and Francisella novicida have been identified in SEQ ID NOs: 60,309-66,285. gRNA spacer sequences for targeting, e.g., targeting exon 1-2 of AAVS1 (PPP1R12C), ALB, Angptl3, ApoC3, ASGR2, CCR5, FIX (F9), G6PC, Gys2, HGD, Lp(a), Pcsk9, Serpinal, TF, and TTR with a CRISPR/Cas9 endonuclease from S. pyogenes have been identified in Example 7. gRNA spacer sequences for targeting, e.g., targeting exon 1-2 of, AAVS1 (PPP1R12C), ALB, Angptl3, ApoC3, ASGR2, CCR5, FIX (F9), G6PC, Gys2, HGD, Lp(a), Pcsk9, Serpinal, TF, and TTR with a CRISPR/Cas9 endonuclease from S. aureus have been identified in Example 8. gRNA spacer sequences for targeting, e.g., targeting exon 1-2 of, AAVS1 (PPP1R12C), ALB, Angptl3, ApoC3, ASGR2, CCR5, FIX (F9), G6PC, Gys2, HGD, Lp(a), Pcsk9, Serpinal, TF, and TTR with a CRISPR/Cas9 endonuclease from S. thermophilus have been identified in Example 9. gRNA spacer sequences for targeting, e.g., targeting exon 1-2 of, AAVS1 (PPP1R12C), ALB, Angptl3, ApoC3, ASGR2, CCR5, FIX (F9), G6PC, Gys2, HGD, Lp(a), Pcsk9, Serpinal, TF, and TTR with a CRISPR/Cas9 endonuclease from T. denticola have been identified in Example 10. gRNA spacer sequences for targeting, e.g., targeting exon 1-2 of, AAVS1 (PPP1R12C), ALB, Angptl3, ApoC3, ASGR2, CCR5, FIX (F9), G6PC, Gys2, HGD, Lp(a), Pcsk9, Serpinal, TF, and TTR with a CRISPR/Cas9 endonuclease from N. meningitides have been identified in Example 11. gRNA spacer sequences for targeting, e.g., targeting exon 1-2 of, AAVS1 (PPP1R12C), ALB, Angptl3, ApoC3, ASGR2, CCR5, FIX (F9), G6PC, Gys2, HGD, Lp(a), Pcsk9, Serpinal, TF, and TTR with a CRISPR/Cas9 endonuclease from Acidominococcus, Lachnospiraceae, and Francisella novicida have been identified in Example 12.

[0357] For example, the mutation can be corrected by the insertions or deletions that arise due to the imprecise NHEJ repair pathway. If the patient's RAG1 gene has an inserted or deleted base, a targeted cleavage can result in a NHEJ-mediated insertion or deletion that restores the frame. Missense mutations can also be corrected through NHEJ-mediated correction using one or more guide RNA. The ability or likelihood of the cut(s) to correct the mutation may be designed or evaluated based on the local sequence and micro-homologies. NHEJ can also be used to delete segments of the gene, either directly or by altering splice donor or acceptor sites through cleavage by one gRNA targeting several locations, or several gRNAs. This may be useful if an amino acid, domain or exon contains the mutations and can be removed or inverted, or if the deletion otherwise restored function to the protein. Pairs of guide strands have been used for deletions and corrections of inversions. NHEJ can also be used to promote targeted transgene integration at the cleaved locus, especially if the transgene donor template has been cleaved within the cell as well.

[0358] Alternatively, the donor for correction by HDR contains the corrected sequence with small or large flanking homology arms to allow for annealing. HDR is essentially an error-free mechanism that uses a supplied homologous DNA sequence as a template during DSB repair. The rate of homology directed repair (HDR) is a function of the distance between the mutation and the cut site so choosing overlapping or nearest target sites is important. Templates can include extra sequences flanked by the homologous regions or can contain a sequence that differs from the genomic sequence, thus allowing sequence editing.

[0359] In addition to correcting mutations by NHEJ or HDR, a range of other options are possible. If there are small or large deletions or multiple mutations, a cDNA can be knocked in that contains the exons affected. A full length cDNA can be knocked into any “safe harbor”, but must use a supplied or other promoter. If this construct is knocked into the correct location, it will have physiological control, similar to the normal gene. Pairs of nucleases can be used to delete mutated gene regions, though a donor would usually have to be provided to restore function. In this case two gRNA would be supplied and one donor sequence.

[0360] Some genome engineering strategies involve correction of one or more mutations in or near the RAG1 gene, or deleting the mutant RAG1 DNA and/or knocking-in RAG1 cDNA or a minigene (comprised of one or more exons and introns or natural or synthetic introns) into the locus of the corresponding gene or a safe harbor locus by homology directed repair (HDR), which is also known as homologous recombination (HR). Homology directed repair is one strategy for treating patients that have one or more mutations in or near the RAG1 gene. This strategy will restore the RAG1 gene and completely reverse, treat, and/or mitigate the diseased state. These strategies will require a more custom approach based on the location of the patients mutation(s). Donor nucleotides for correcting mutations are small (<300 bp). This is advantageous, as HDR efficiencies may be inversely related to the size of the donor molecule. Also, it is expected that the donor templates can fit into size constrained viral vector molecules, e.g., adeno-associated virus (AAV) molecules, which have been shown to be an effective means of donor template delivery. Also, it is expected that the donor templates can fit into other size constrained molecules, including, by way of non-limiting example, platelets and/or exosomes or other microvesicles.

[0361] Homology direct repair is a cellular mechanism for repairing double-stranded breaks (DSBs). The most common form is homologous recombination. There are additional pathways for HDR, including single-strand annealing and alternative-HDR. Genome engineering tools allow researchers to manipulate the cellular homologous recombination pathways to create site-specific modifications to the genome. It has been found that cells can repair a double-stranded break using a synthetic donor molecule provided in trans. Therefore, by introducing a double-stranded break near a specific mutation and providing a suitable donor, targeted changes can be made in the genome. Specific cleavage increases the rate of HDR more than 1,000 fold above the rate of 1 in 10⁶ cells receiving a homologous donor alone. The rate of homology directed repair (HDR) at a particular nucleotide is a function of the distance to the cut site, so choosing overlapping or nearest target sites is important. Gene editing offers the advantage over gene addition, as correcting in situ leaves the rest of the genome unperturbed.

[0362] Supplied donors for editing by HDR vary markedly but generally contain the intended sequence with small or large flanking homology arms to allow annealing to the genomic DNA. The homology regions flanking the introduced genetic changes can be 30 bp or smaller, or as large as a multi-kilobase cassette that can contain promoters, cDNAs, etc. Both single-stranded and double-stranded oligonucleotide donors have been used. These oligonucleotides range in size from less than 100 nt to over many kb, though longer ssDNA can also be generated and used. Double-stranded donors are often used, including PCR amplicons, plasmids, and mini-circles. In general, it has been found that an AAV vector is a very effective means of delivery of a donor template, though the packaging limits for individual donors is <5 kb. Active transcription of the donor increased HDR three-fold, indicating the inclusion of promoter may increase conversion. Conversely, CpG methylation of the donor decreased gene expression and HDR.

[0363] In addition to wildtype endonucleases, such as Cas9, nickase variants exist that have one or the other nuclease domain inactivated resulting in cutting of only one DNA strand. HDR can be directed from individual Cas nickases or using pairs of nickases that flank the target area. Donors can be single-stranded, nicked, or dsDNA.

[0364] The donor DNA can be supplied with the nuclease or independently by a variety of different methods, for example by transfection, nano-particle, micro-injection, or viral transduction. A range of tethering options has been proposed to increase the availability of the donors for HDR. Examples include attaching the donor to the nuclease, attaching to DNA binding proteins that bind nearby, or attaching to proteins that are involved in DNA end binding or repair.

[0365] The repair pathway choice can be guided by a number of culture conditions, such as those that influence cell cycling, or by targeting of DNA repair and associated proteins. For example, to increase HDR, key NHEJ molecules can be suppressed, such as KU70, KU80 or DNA ligase IV.

[0366] Without a donor present, the ends from a DNA break or ends from different breaks can be joined using the several nonhomologous repair pathways in which the DNA ends are joined with little or no base-pairing at the junction. In addition to canonical NHEJ, there are similar repair mechanisms, such as alt-NHEJ. If there are two breaks, the intervening segment can be deleted or inverted. NHEJ repair pathways can lead to insertions, deletions or mutations at the joints.

[0367] NHEJ was used to insert a gene expression cassette into a defined locus in human cell lines after nuclease cleavage of both the chromosome and the donor molecule. (Cristea, et al., Biotechnology and Bioengineering 110:871-880 (2012); Maresca, M., Lin, V. G., Guo, N. & Yang, Y., Genome Res 23, 539-546 (2013)).

[0368] In addition to genome editing by NHEJ or HDR, site-specific gene insertions have been conducted that use both the NHEJ pathway and HR. A combination approach may be applicable in certain settings, possibly including intron/exon borders. NHEJ may prove effective for ligation in the intron, while the error-free HDR may be better suited in the coding region.

[0369] As stated previously, the RAG1 gene contains 2 exons. Any one or more of the 2 exons or nearby introns may be repaired in order to correct a mutation and restore RAG1 protein activity. Alternatively, there are various mutations associated with SCID and/or Omenn Syndrome, which are a combination of insertions, deletions, missense, nonsense, frameshift and other mutations, with the common effect of inactivating RAG1. Any one or more of the mutations may be repaired in order to restore the inactive RAG1. As a further alternative, RAG1 cDNA or minigene (comprised of, natural or synthetic enhancer and promoter, one or more exons, and natural or synthetic introns, and natural or synthetic 3′UTR and polyadenylation signal) may be knocked-in to the locus of the corresponding gene or knocked-in to a safe harbor site, such as AAVS1 (PPP1R12C), ALB, Angptl3, ApoC3, ASGR2, CCR5, FIX (F9), G6PC, Gys2, HGD, Lp(a), Pcsk9, Serpinal, TF, and/or TTR. The safe harbor locus can be selected from the group consisting of: exon 1-2 of AAVS1 (PPP1R12C), exon 1-2 of ALB, exon 1-2 of Angptl3, exon 1-2 of ApoC3, exon 1-2 of ASGR2, exon 1-2 of CCR5, exon 1-2 of FIX (F9), exon 1-2 of G6PC, exon 1-2 of Gys2, exon 1-2 of HGD, exon 1-2 of Lp(a), exon 1-2 of Pcsk9, exon 1-2 of Serpinal, exon 1-2 of TF, and exon 1-2 of TTR. In some embodiments, the methods provide one gRNA or a pair of gRNAs that can be used to facilitate incorporation of a new sequence from a polynucleotide donor template to correct one or more mutations or to knock-in a part of or the entire RAG1 gene or cDNA.

[0370] Some embodiments of the methods provide gRNA pairs that make a deletion by cutting the gene twice, one gRNA cutting at the 5′ end of one or more mutations and the other gRNA cutting at the 3′ end of one or more mutations that facilitates insertion of a new sequence from a polynucleotide donor template to replace the one or more mutations, or deletion may exclude mutant amino acids or amino acids adjacent to it (e.g., premature stop codon) and lead to expression of a functional protein, or restore an open reading frame. The cutting may be accomplished by a pair of DNA endonucleases that each makes a DSB in the genome, or by multiple nickases that together make a DSB in the genome.

[0371] Alternatively, some embodiments of the methods provide one gRNA to make one double-strand cut around one or more mutations that facilitates insertion of a new sequence from a polynucleotide donor template to replace the one or more mutations. The double-strand cut may be made by a single DNA endonuclease or multiple nickases that together make a DSB in the genome, or single gRNA may lead to deletion (MMEJ), which may exclude mutant amino acid (e.g., premature stop codon) and lead to expression of a functional protein, or restore an open reading frame.

[0372] Illustrative modifications within the RAG1 gene include replacements within or near (proximal) to the mutations referred to above, such as within the region of less than 3 kb, less than 2 kb, less than 1 kb, less than 0.5 kb upstream or downstream of the specific mutation. Given the relatively wide variations of mutations in the RAG1 gene, it will be appreciated that numerous variations of the replacements referenced above (including without limitation larger as well as smaller deletions), would be expected to result in restoration of the RAG1 gene.

[0373] Such variants include replacements that are larger in the 5′ and/or 3′ direction than the specific mutation in question, or smaller in either direction. Accordingly, by “near” or “proximal” with respect to specific replacements, it is intended that the SSB or DSB locus associated with a desired replacement boundary (also referred to herein as an endpoint) may be within a region that is less than about 3 kb from the reference locus noted. In some embodiments, the DSB locus is more proximal and within 2 kb, within 1 kb, within 0.5 kb, or within 0.1 kb. In the case of small replacement, the desired endpoint is at or “adjacent to” the reference locus, by which it is intended that the endpoint is within 100 bp, within 50 bp, within 25 bp, or less than about 10 bp to 5 bp from the reference locus.

[0374] Embodiments comprising larger or smaller replacements are expected to provide the same benefit, as long as the RAG1 protein activity is restored. It is thus expected that many variations of the replacements described and illustrated herein will be effective for ameliorating SCID and/or Omenn Syndrome.

[0375] Another genome engineering strategy involves exon deletion. Targeted deletion of specific exons is an attractive strategy for treating a large subset of patients with a single therapeutic cocktail. Deletions can either be single exon deletions or multi-exon deletions. While multi-exon deletions can reach a larger number of patients, for larger deletions the efficiency of deletion greatly decreases with increased size. Therefore, deletions range can be from 40 to 10,000 base pairs (bp) in size. For example, deletions may range from 40-100; 100-300; 300-500; 500-1,000; 1,000-2,000; 2,000-3,000; 3,000-5,000; or 5,000-10,000 base pairs in size.

[0376] Deletions can occur in enhancer, promoter, 1st intron, and/or 3′UTR leading to upregulation of the gene expression, and/or through deletion of the regulatory elements.

[0377] As stated previously, the RAG1 gene contains 2 exons. Any one or more of the 2 exons, or aberrant intronic splice acceptor or donor sites, may be deleted in order to restore the RAG1 reading frame. In some embodiments, the methods provide gRNA pairs that can be used to delete exons 1, 2, or any combination of them.

[0378] In order to ensure that the pre-mRNA is properly processed following exon deletion, the surrounding splicing signals can be deleted. Splicing donor and acceptors are generally within 100 base pairs of the neighboring intron. Therefore, in some embodiments, methods can provide all gRNAs that cut approximately +/−100-3100 bp with respect to each exon/intron junction of interest.

[0379] For any of the genome editing strategies, gene editing can be confirmed by sequencing or PCR analysis.

[0380] Target Sequence Selection

[0381] Shifts in the location of the 5′ boundary and/or the 3′ boundary relative to particular reference loci are used to facilitate or enhance particular applications of gene editing, which depend in part on the endonuclease system selected for the editing, as further described and illustrated herein.

[0382] In a first, non-limiting aspect of such target sequence selection, many endonuclease systems have rules or criteria that guide the initial selection of potential target sites for cleavage, such as the requirement of a PAM sequence motif in a particular position adjacent to the DNA cleavage sites in the case of CRISPR Type II or Type V endonucleases.

[0383] In another, non-limiting aspect of target sequence selection or optimization, the frequency of “off-target” activity for a particular combination of target sequence and gene editing endonuclease (i.e. the frequency of DSBs occurring at sites other than the selected target sequence) is assessed relative to the frequency of on-target activity. In some cases, cells that have been correctly edited at the desired locus may have a selective advantage relative to other cells. Illustrative, but nonlimiting, examples of a selective advantage include the acquisition of attributes such as enhanced rates of replication, persistence, resistance to certain conditions, enhanced rates of successful engraftment or persistence in vivo following introduction into a patient, and other attributes associated with the maintenance or increased numbers or viability of such cells. In other cases, cells that have been correctly edited at the desired locus may be positively selected for by one or more screening methods used to identify, sort or otherwise select for cells that have been correctly edited. Both selective advantage and directed selection methods may take advantage of the phenotype associated with the correction. In some embodiments, cells may be edited two or more times in order to create a second modification that creates a new phenotype that is used to select or purify the intended population of cells. Such a second modification could be created by adding a second gRNA for a selectable or screenable marker. In some cases, cells can be correctly edited at the desired locus using a DNA fragment that contains the cDNA and also a selectable marker.

[0384] Whether any selective advantage is applicable or any directed selection is to be applied in a particular case, target sequence selection is also guided by consideration of off-target frequencies in order to enhance the effectiveness of the application and/or reduce the potential for undesired alterations at sites other than the desired target. As described further and illustrated herein and in the art, the occurrence of off-target activity is influenced by a number of factors including similarities and dissimilarities between the target site and various off-target sites, as well as the particular endonuclease used. Bioinformatics tools are available that assist in the prediction of off-target activity, and frequently such tools can also be used to identify the most likely sites of off-target activity, which can then be assessed in experimental settings to evaluate relative frequencies of off-target to on-target activity, thereby allowing the selection of sequences that have higher relative on-target activities. Illustrative examples of such techniques are provided herein, and others are known in the art.

[0385] Another aspect of target sequence selection relates to homologous recombination events. Sequences sharing regions of homology can serve as focal points for homologous recombination events that result in deletion of intervening sequences. Such recombination events occur during the normal course of replication of chromosomes and other DNA sequences, and also at other times when DNA sequences are being synthesized, such as in the case of repairs of double-strand breaks (DSBs), which occur on a regular basis during the normal cell replication cycle but may also be enhanced by the occurrence of various events (such as UV light and other inducers of DNA breakage) or the presence of certain agents (such as various chemical inducers). Many such inducers cause DSBs to occur indiscriminately in the genome, and DSBs are regularly being induced and repaired in normal cells. During repair, the original sequence may be reconstructed with complete fidelity, however, in some cases, small insertions or deletions (referred to as “indels”) are introduced at the DSB site.

[0386] DSBs may also be specifically induced at particular locations, as in the case of the endonucleases systems described herein, which can be used to cause directed or preferential gene modification events at selected chromosomal locations. The tendency for homologous sequences to be subject to recombination in the context of DNA repair (as well as replication) can be taken advantage of in a number of circumstances, and is the basis for one application of gene editing systems, such as CRISPR, in which homology directed repair is used to insert a sequence of interest, provided through use of a “donor” polynucleotide, into a desired chromosomal location.

[0387] Regions of homology between particular sequences, which can be small regions of “microhomology” that may comprise as few as ten basepairs or less, can also be used to bring about desired deletions. For example, a single DSB is introduced at a site that exhibits microhomology with a nearby sequence. During the normal course of repair of such DSB, a result that occurs with high frequency is the deletion of the intervening sequence as a result of recombination being facilitated by the DSB and concomitant cellular repair process.

[0388] In some circumstances, however, selecting target sequences within regions of homology can also give rise to much larger deletions, including gene fusions (when the deletions are in coding regions), which may or may not be desired given the particular circumstances.

[0389] The examples provided herein further illustrate the selection of various target regions for the creation of DSBs designed to induce replacements that result in restoration of RAG1 protein activity, as well as the selection of specific target sequences within such regions that are designed to minimize off-target events relative to on-target events.

[0390] Nucleic Acid Modifications

[0391] In some embodiments, polynucleotides introduced into cells comprise one or more modifications that can be used individually or in combination, for example, to enhance activity, stability or specificity, alter delivery, reduce innate immune responses in host cells, or for other enhancements, as further described herein and known in the art.

[0392] In certain embodiments, modified polynucleotides are used in the CRISPR/Cas9/Cpf1 system, in which case the guide RNAs (either single-molecule guides or double-molecule guides) and/or a DNA or an RNA encoding a Cas or Cpf1 endonuclease introduced into a cell can be modified, as described and illustrated below. Such modified polynucleotides can be used in the CRISPR/Cas9/Cpf1 system to edit any one or more genomic loci.

[0393] Using the CRISPR/Cas9/Cpf1 system for purposes of nonlimiting illustrations of such uses, modifications of guide RNAs can be used to enhance the formation or stability of the CRISPR/Cas9/Cpf1 genome editing complex comprising guide RNAs, which may be single-molecule guides or double-molecule, and a Cas or Cpf1 endonuclease. Modifications of guide RNAs can also or alternatively be used to enhance the initiation, stability or kinetics of interactions between the genome editing complex with the target sequence in the genome, which can be used, for example, to enhance on-target activity. Modifications of guide RNAs can also or alternatively be used to enhance specificity, e.g., the relative rates of genome editing at the on-target site as compared to effects at other (off-target) sites.

[0394] Modifications can also or alternatively be used to increase the stability of a guide RNA, e.g., by increasing its resistance to degradation by ribonucleases (RNases) present in a cell, thereby causing its half-life in the cell to be increased. Modifications enhancing guide RNA half-life can be particularly useful in embodiments in which a Cas or Cpf1 endonuclease is introduced into the cell to be edited via an RNA that needs to be translated in order to generate endonuclease, because increasing the half-life of guide RNAs introduced at the same time as the RNA encoding the endonuclease can be used to increase the time that the guide RNAs and the encoded Cas or Cpf1 endonuclease co-exist in the cell.

[0395] Modifications can also or alternatively be used to decrease the likelihood or degree to which RNAs introduced into cells elicit innate immune responses. Such responses, which have been well characterized in the context of RNA interference (RNAi), including small-interfering RNAs (siRNAs), as described below and in the art, tend to be associated with reduced half-life of the RNA and/or the elicitation of cytokines or other factors associated with immune responses.

[0396] One or more types of modifications can also be made to RNAs encoding an endonuclease that are introduced into a cell, including, without limitation, modifications that enhance the stability of the RNA (such as by increasing its degradation by RNAses present in the cell), modifications that enhance translation of the resulting product (i.e. the endonuclease), and/or modifications that decrease the likelihood or degree to which the RNAs introduced into cells elicit innate immune responses.

[0397] Combinations of modifications, such as the foregoing and others, can likewise be used. In the case of CRISPR/Cas9/Cpf1, for example, one or more types of modifications can be made to guide RNAs (including those exemplified above), and/or one or more types of modifications can be made to RNAs encoding Cas endonuclease (including those exemplified above).

[0398] By way of illustration, guide RNAs used in the CRISPR/Cas9/Cpf1 system, or other smaller RNAs can be readily synthesized by chemical means, enabling a number of modifications to be readily incorporated, as illustrated below and described in the art. While chemical synthetic procedures are continually expanding, purifications of such RNAs by procedures such as high performance liquid chromatography (HPLC, which avoids the use of gels such as PAGE) tends to become more challenging as polynucleotide lengths increase significantly beyond a hundred or so nucleotides. One approach used for generating chemically-modified RNAs of greater length is to produce two or more molecules that are ligated together. Much longer RNAs, such as those encoding a Cas9 endonuclease, are more readily generated enzymatically. While fewer types of modifications are generally available for use in enzymatically produced RNAs, there are still modifications that can be used to, e.g., enhance stability, reduce the likelihood or degree of innate immune response, and/or enhance other attributes, as described further below and in the art; and new types of modifications are regularly being developed.

[0399] By way of illustration of various types of modifications, especially those used frequently with smaller chemically synthesized RNAs, modifications can comprise one or more nucleotides modified at the 2′ position of the sugar, in some embodiments a 2′-O-alkyl, 2′-O-alkyl-O-alkyl, or 2′-fluoro-modified nucleotide. In some embodiments, RNA modifications include 2′-fluoro, 2′-amino or 2′ O-methyl modifications on the ribose of pyrimidines, abasic residues, or an inverted base at the 3′ end of the RNA. Such modifications are routinely incorporated into oligonucleotides and these oligonucleotides have been shown to have a higher Tm (i.e., higher target binding affinity) than 2′-deoxyoligonucleotides against a given target.

[0400] A number of nucleotide and nucleoside modifications have been shown to make the oligonucleotide into which they are incorporated more resistant to nuclease digestion than the native oligonucleotide; these modified oligos survive intact for a longer time than unmodified oligonucleotides. Specific examples of modified oligonucleotides include those comprising modified backbones, for example, phosphorothioates, phosphotriesters, methyl phosphonates, short chain alkyl or cycloalkyl intersugar linkages or short chain heteroatomic or heterocyclic intersugar linkages. Some oligonucleotides are oligonucleotides with phosphorothioate backbones and those with heteroatom backbones, particularly CH2-NH—O—CH2, CH,˜N(CH3)˜O˜CH2 (known as a methylene(methylimino) or MMI backbone), CH2-O—N(CH3)-CH2, CH2-N(CH3)-N(CH3)-CH2 and O—N (CH3)-CH2-CH2 backbones, wherein the native phosphodiester backbone is represented as O— P— O— CH); amide backbones [see De Mesmaeker et al., Ace. Chem. Res., 28:366-374 (1995)]; morpholino backbone structures (see Summerton and Weller, U.S. Pat. No. 5,034,506); peptide nucleic acid (PNA) backbone (wherein the phosphodiester backbone of the oligonucleotide is replaced with a polyamide backbone, the nucleotides being bound directly or indirectly to the aza nitrogen atoms of the polyamide backbone, see Nielsen et al., Science 1991, 254, 1497). Phosphorus-containing linkages include, but are not limited to, phosphorothioates, chiral phosphorothioates, phosphorodithioates, phosphotriesters, aminoalkylphosphotriesters, methyl and other alkyl phosphonates comprising 3′alkylene phosphonates and chiral phosphonates, phosphinates, phosphoramidates comprising 3′-amino phosphoramidate and aminoalkylphosphoramidates, thionophosphoramidates, thionoalkylphosphonates, thionoalkylphosphotriesters, and boranophosphates having normal 3′-5′ linkages, 2′-5′ linked analogs of these, and those having inverted polarity wherein the adjacent pairs of nucleoside units are linked 3′-5′ to 5′-3′ or 2′-5′ to 5′-2′; see U.S. Pat. Nos. 3,687,808; 4,469,863; 4,476,301; 5,023,243; 5,177,196; 5,188,897; 5,264,423; 5,276,019; 5,278,302; 5,286,717; 5,321,131; 5,399,676; 5,405,939; 5,453,496; 5,455,233; 5,466,677; 5,476,925; 5,519,126; 5,536,821; 5,541,306; 5,550,111; 5,563,253; 5,571,799; 5,587,361; and 5,625,050.

[0401] Morpholino-based oligomeric compounds are described in Braasch and David Corey, Biochemistry, 41(14): 4503-4510 (2002); Genesis, Volume 30, Issue 3, (2001); Heasman, Dev. Biol., 243: 209-214 (2002); Nasevicius et al., Nat. Genet., 26:216-220 (2000); Lacerra et al., Proc. Natl. Acad. Sci., 97: 9591-9596 (2000); and U.S. Pat. No. 5,034,506, issued Jul. 23, 1991.

[0402] Cyclohexenyl nucleic acid oligonucleotide mimetics are described in Wang et al., J. Am. Chem. Soc., 122: 8595-8602 (2000).

[0403] Modified oligonucleotide backbones that do not include a phosphorus atom therein have backbones that are formed by short chain alkyl or cycloalkyl intemucleoside linkages, mixed heteroatom and alkyl or cycloalkyl internucleoside linkages, or one or more short chain heteroatomic or heterocyclic internucleoside linkages. These comprise those having morpholino linkages (formed in part from the sugar portion of a nucleoside); siloxane backbones; sulfide, sulfoxide and sulfone backbones; formacetyl and thioformacetyl backbones; methylene formacetyl and thioformacetyl backbones; alkene containing backbones; sulfamate backbones; methyleneimino and methylenehydrazino backbones; sulfonate and sulfonamide backbones; amide backbones; and others having mixed N, O, S, and CH2 component parts; see U.S. Pat. Nos. 5,034,506; 5,166,315; 5,185,444; 5,214,134; 5,216,141; 5,235,033; 5,264,562; 5,264,564; 5,405,938; 5,434,257; 5,466,677; 5,470,967; 5,489,677; 5,541,307; 5,561,225; 5,596,086; 5,602,240; 5,610,289; 5,602,240; 5,608,046; 5,610,289; 5,618,704; 5,623,070; 5,663,312; 5,633,360; 5,677,437; and 5,677,439, each of which is herein incorporated by reference.

[0404] One or more substituted sugar moieties can also be included, e.g., one of the following at the 2′ position: OH, SH, SCH3, F, OCN, OCH3 OCH3, OCH3 O(CH2)n CH3, O(CH2)n NH2, or O(CH2)n CH3, where n is from 1 to about 10; C1 to C10 lower alkyl, alkoxyalkoxy, substituted lower alkyl, alkaryl or aralkyl; CI; Br; CN; CF3; OCF3; O-, S-, or N-alkyl; O-, S-, or N-alkenyl; SOCH3; SO2 CH3; ONO2; NO2; N3; NH2; heterocycloalkyl; heterocycloalkaryl; aminoalkylamino; polyalkylamino; substituted silyl; an RNA cleaving group; a reporter group; an intercalator; a group for improving the pharmacokinetic properties of an oligonucleotide; or a group for improving the pharmacodynamic properties of an oligonucleotide and other substituents having similar properties. In some embodiments, a modification includes 2′-methoxyethoxy (2′-0-CH2CH2OCH3, also known as 2′-O-(2-methoxyethyl)) (Martin et al, Helv. Chim. Acta, 1995, 78, 486). Other modifications include 2′-methoxy (2′-0-CH3), 2′-propoxy (2′-OCH2 CH2CH3) and 2′-fluoro (2′-F). Similar modifications may also be made at other positions on the oligonucleotide, particularly the 3′ position of the sugar on the 3′ terminal nucleotide and the 5′ position of 5′ terminal nucleotide. Oligonucleotides may also have sugar mimetics, such as cyclobutyls in place of the pentofuranosyl group.

[0405] In some embodiments, both a sugar and an intemucleoside linkage, i.e., the backbone, of the nucleotide units are replaced with novel groups. The base units are maintained for hybridization with an appropriate nucleic acid target compound. One such oligomeric compound, an oligonucleotide mimetic that has been shown to have excellent hybridization properties, is referred to as a peptide nucleic acid (PNA). In PNA compounds, the sugar-backbone of an oligonucleotide is replaced with an amide containing backbone, for example, an aminoethylglycine backbone. The nucleobases are retained and are bound directly or indirectly to aza nitrogen atoms of the amide portion of the backbone. Representative United States patents that teach the preparation of PNA compounds comprise, but are not limited to, U.S. Pat. Nos. 5,539,082; 5,714,331; and 5,719,262. Further teaching of PNA compounds can be found in Nielsen et al, Science, 254: 1497-1500 (1991).

[0406] Guide RNAs can also include, additionally or alternatively, nucleobase (often referred to in the art simply as “base”) modifications or substitutions. As used herein, “unmodified” or “natural” nucleobases include adenine (A), guanine (G), thymine (T), cytosine (C), and uracil (U). Modified nucleobases include nucleobases found only infrequently or transiently in natural nucleic acids, e.g., hypoxanthine, 6-methyladenine, 5-Me pyrimidines, particularly 5-methylcytosine (also referred to as 5-methyl-2′ deoxycytosine and often referred to in the art as 5-Me-C), 5-hydroxymethylcytosine (HMC), glycosyl HMC and gentobiosyl HMC, as well as synthetic nucleobases, e.g., 2-aminoadenine, 2-(methylamino)adenine, 2-(imidazolylalkyl)adenine, 2-(aminoalklyamino)adenine or other heterosubstituted alkyladenines, 2-thiouracil, 2-thiothymine, 5-bromouracil, 5-hydroxymethyluracil, 8-azaguanine, 7-deazaguanine, N6 (6-aminohexyl)adenine, and 2,6-diaminopurine. Komberg, A., DNA Replication, W. H. Freeman & Co., San Francisco, pp 75-77 (1980); Gebeyehu et al., Nucl. Acids Res. 15:4513 (1997). A “universal” base known in the art, e.g., inosine, can also be included. 5-Me-C substitutions have been shown to increase nucleic acid duplex stability by 0.6-1.2° C. (Sanghvi, Y. S., in Crooke, S. T. and Lebleu, B., eds., Antisense Research and Applications, CRC Press, Boca Raton, 1993, pp. 276-278) and are embodiments of base substitutions.

[0407] Modified nucleobases comprise other synthetic and natural nucleobases, such as 5-methylcytosine (5-me-C), 5-hydroxymethyl cytosine, xanthine, hypoxanthine, 2-aminoadenine, 6-methyl and other alkyl derivatives of adenine and guanine, 2-propyl and other alkyl derivatives of adenine and guanine, 2-thiouracil, 2-thiothymine and 2-thiocytosine, 5-halouracil and cytosine, 5-propynyl uracil and cytosine, 6-azo uracil, cytosine and thymine, 5-uracil (pseudo-uracil), 4-thiouracil, 8-halo, 8-amino, 8-thiol, 8-thioalkyl, 8-hydroxyl and other 8-substituted adenines and guanines, 5-halo particularly 5-bromo, 5-trifluoromethyl and other 5-substituted uracils and cytosines, 7-methylquanine and 7-methyladenine, 8-azaguanine and 8-azaadenine, 7-deazaguanine and 7-deazaadenine, and 3-deazaguanine and 3-deazaadenine.

[0408] Further, nucleobases comprise those disclosed in U.S. Pat. No. 3,687,808, those disclosed in ‘The Concise Encyclopedia of Polymer Science And Engineering’, pages 858-859, Kroschwitz, J. I., ed. John Wiley & Sons, 1990, those disclosed by Englisch et al., Angewandle Chemie, International Edition’, 1991, 30, page 613, and those disclosed by Sanghvi, Y. S., Chapter 15, Antisense Research and Applications', pages 289-302, Crooke, S. T. and Lebleu, B. ea., CRC Press, 1993. Certain of these nucleobases are particularly useful for increasing the binding affinity of the oligomeric compounds of the disclosure. These include 5-substituted pyrimidines, 6-azapyrimidines and N-2, N-6 and 0-6 substituted purines, comprising 2-aminopropyladenine, 5-propynyluracil and 5-propynylcytosine. 5-methylcytosine substitutions have been shown to increase nucleic acid duplex stability by 0.6-1.2C (Sanghvi, Y. S., Crooke, S. T. and Lebleu, B., eds, ‘Antisense Research and Applications’, CRC Press, Boca Raton, 1993, pp. 276-278) and are embodiments of base substitutions, even more particularly when combined with 2′-O-methoxyethyl sugar modifications. Modified nucleobases are described in U.S. Pat. No. 3,687,808, as well as U.S. Pat. Nos. 4,845,205; 5,130,302; 5,134,066; 5,175,273; 5,367,066; 5,432,272; 5,457,187; 5,459,255; 5,484,908; 5,502,177; 5,525,711; 5,552,540; 5,587,469; 5,596,091; 5,614,617; 5,681,941; 5,750,692; 5,763,588; 5,830,653; 6,005,096; and U.S. Patent Application Publication 2003/0158403.

[0409] Thus, the term “modified” refers to a non-natural sugar, phosphate, or base that is incorporated into a guide RNA, an endonuclease, or both a guide RNA and an endonuclease. It is not necessary for all positions in a given oligonucleotide to be uniformly modified, and in fact more than one of the aforementioned modifications may be incorporated in a single oligonucleotide, or even in a single nucleoside within an oligonucleotide.

[0410] In some embodiments, the guide RNAs and/or mRNA (or DNA) encoding an endonuclease are chemically linked to one or more moieties or conjugates that enhance the activity, cellular distribution, or cellular uptake of the oligonucleotide. Such moieties comprise, but are not limited to, lipid moieties such as a cholesterol moiety [Letsinger et al., Proc. Natl. Acad. Sci. USA, 86: 6553-6556 (1989)]; cholic acid [Manoharan et al., Bioorg. Med. Chem. Let., 4: 1053-1060 (1994)]; a thioether, e.g., hexyl-S-trityithiol [Manoharan et al, Ann. N. Y. Acad. Sci., 660: 306-309 (1992) and Manoharan et al., Bioorg. Med. Chem. Let., 3: 2765-2770 (1993)]; a thiocholesterol [Oberhauser et al., Nucl. Acids Res., 20: 533-538 (1992)]; an aliphatic chain, e.g., dodecandiol or undecyl residues [Kabanov et al., FEBS Lett., 259: 327-330 (1990) and Svinarchuk et al., Biochimie, 75: 49-54 (1993)]; a phospholipid, e.g., di-hexadecyl-rac-glycerol or triethylammonium 1,2-di-O-hexadecyl-rac-glycero-3-H-phosphonate [Manoharan et al., Tetrahedron Lett., 36: 3651-3654 (1995) and Shea et al., Nucl. Acids Res., 18: 3777-3783 (1990)]; a polyamine or a polyethylene glycol chain [Mancharan et al., Nucleosides & Nucleotides, 14: 969-973 (1995)]; adamantane acetic acid [Manoharan et al., Tetrahedron Lett., 36: 3651-3654 (1995)]; a palmityl moiety [(Mishra et al., Biochim. Biophys. Acta, 1264: 229-237 (1995)]; or an octadecylamine or hexylamino-carbonyl-t oxycholesterol moiety [Crooke et al., J. Pharmacol. Exp. Ther., 277: 923-937 (1996)]. See also U.S. Pat. Nos. 4,828,979; 4,948,882; 5,218,105; 5,525,465; 5,541,313; 5,545,730; 5,552,538; 5,578,717, 5,580,731; 5,580,731; 5,591,584; 5,109,124; 5,118,802; 5,138,045; 5,414,077; 5,486,603; 5,512,439; 5,578,718; 5,608,046; 4,587,044; 4,605,735; 4,667,025; 4,762,779; 4,789,737; 4,824,941; 4,835,263; 4,876,335; 4,904,582; 4,958,013; 5,082,830; 5,112,963; 5,214,136; 5,082,830; 5,112,963; 5,214,136; 5,245,022; 5,254,469; 5,258,506; 5,262,536; 5,272,250; 5,292,873; 5,317,098; 5,371,241, 5,391,723; 5,416,203, 5,451,463; 5,510,475; 5,512,667; 5,514,785; 5,565,552; 5,567,810; 5,574,142; 5,585,481; 5,587,371; 5,595,726; 5,597,696; 5,599,923; 5,599, 928 and 5,688,941.

[0411] Sugars and other moieties can be used to target proteins and complexes comprising nucleotides, such as cationic polysomes and liposomes, to particular sites. For example, hepatic cell directed transfer can be mediated via asialoglycoprotein receptors (ASGPRs); see, e.g., Hu, et al., Protein Pept Lett. 21 (10):1025-30 (2014). Other systems known in the art and regularly developed can be used to target biomolecules of use in the present case and/or complexes thereof to particular target cells of interest.

[0412] These targeting moieties or conjugates can include conjugate groups covalently bound to functional groups, such as primary or secondary hydroxyl groups. Conjugate groups of the disclosure include intercalators, reporter molecules, polyamines, polyamides, polyethylene glycols, polyethers, groups that enhance the pharmacodynamic properties of oligomers, and groups that enhance the pharmacokinetic properties of oligomers. Typical conjugate groups include cholesterols, lipids, phospholipids, biotin, phenazine, folate, phenanthridine, anthraquinone, acridine, fluoresceins, rhodamines, coumarins, and dyes. Groups that enhance the pharmacodynamic properties, in the context of this disclosure, include groups that improve uptake, enhance resistance to degradation, and/or strengthen sequence-specific hybridization with the target nucleic acid. Groups that enhance the pharmacokinetic properties, in the context of this disclosure, include groups that improve uptake, distribution, metabolism or excretion of the compounds of the present disclosure. Representative conjugate groups are disclosed in International Patent Application No. PCT/US92/09196, filed Oct. 23, 1992, and U.S. Pat. No. 6,287,860, which are incorporated herein by reference. Conjugate moieties include, but are not limited to, lipid moieties such as a cholesterol moiety, cholic acid, a thioether, e.g., hexyl-5-tritylthiol, a thiocholesterol, an aliphatic chain, e.g., dodecandiol or undecyl residues, a phospholipid, e.g., di-hexadecyl-rac-glycerol or triethylammonium I,2-di-O-hexadecyl-rac-glycero-3-H-phosphonate, a polyamine or a polyethylene glycol chain, or adamantane acetic acid, a palmityl moiety, or an octadecylamine or hexylamino-carbonyl-oxy cholesterol moiety. See, e.g., U.S. Pat. Nos. 4,828,979; 4,948,882; 5,218,105; 5,525,465; 5,541,313; 5,545,730; 5,552,538; 5,578,717, 5,580,731; 5,580,731; 5,591,584; 5,109,124; 5,118,802; 5,138,045; 5,414,077; 5,486,603; 5,512,439; 5,578,718; 5,608,046; 4,587,044; 4,605,735; 4,667,025; 4,762,779; 4,789,737; 4,824,941; 4,835,263; 4,876,335; 4,904,582; 4,958,013; 5,082,830; 5,112,963; 5,214,136; 5,082,830; 5,112,963; 5,214,136; 5,245,022; 5,254,469; 5,258,506; 5,262,536; 5,272,250; 5,292,873; 5,317,098; 5,371,241, 5,391,723; 5,416,203, 5,451,463; 5,510,475; 5,512,667; 5,514,785; 5,565,552; 5,567,810; 5,574,142; 5,585,481; 5,587,371; 5,595,726; 5,597,696; 5,599,923; 5,599,928 and 5,688,941.

[0413] Longer polynucleotides that are less amenable to chemical synthesis and are typically produced by enzymatic synthesis can also be modified by various means. Such modifications can include, for example, the introduction of certain nucleotide analogs, the incorporation of particular sequences or other moieties at the 5′ or 3′ ends of molecules, and other modifications. By way of illustration, the mRNA encoding Cas9 is approximately 4 kb in length and can be synthesized by in vitro transcription. Modifications to the mRNA can be applied to, e.g., increase its translation or stability (such as by increasing its resistance to degradation with a cell), or to reduce the tendency of the RNA to elicit an innate immune response that is often observed in cells following introduction of exogenous RNAs, particularly longer RNAs such as that encoding Cas9.

[0414] Numerous such modifications have been described in the art, such as polyA tails, 5′ cap analogs (e.g., Anti Reverse Cap Analog (ARCA) or m7G(5′)ppp(5′)G (mCAP)), modified 5′ or 3′ untranslated regions (UTRs), use of modified bases (such as Pseudo-UTP, 2-Thio-UTP, 5-Methylcytidine-5′-Triphosphate (5-Methyl-CTP) or N6-Methyl-ATP), or treatment with phosphatase to remove 5′ terminal phosphates. These and other modifications are known in the art, and new modifications of RNAs are regularly being developed.

[0415] There are numerous commercial suppliers of modified RNAs, including for example, TriLink Biotech, AxoLabs, Bio-Synthesis Inc., Dharmacon and many others. As described by TriLink, for example, 5-Methyl-CTP can be used to impart desirable characteristics, such as increased nuclease stability, increased translation or reduced interaction of innate immune receptors with in vitro transcribed RNA. 5-Methylcytidine-5′-Triphosphate (5-Methyl-CTP), N6-Methyl-ATP, as well as Pseudo-UTP and 2-Thio-UTP, have also been shown to reduce innate immune stimulation in culture and in vivo while enhancing translation, as illustrated in publications by Kormann et al. and Warren et al. referred to below.

[0416] It has been shown that chemically modified mRNA delivered in vivo can be used to achieve improved therapeutic effects; see, e.g., Kormann et al., Nature Biotechnology 29, 154-157 (2011). Such modifications can be used, for example, to increase the stability of the RNA molecule and/or reduce its immunogenicity. Using chemical modifications such as Pseudo-U, N6-Methyl-A, 2-Thio-U and 5-Methyl-C, it was found that substituting just one quarter of the uridine and cytidine residues with 2-Thio-U and 5-Methyl-C respectively resulted in a significant decrease in toll-like receptor (TLR) mediated recognition of the mRNA in mice. By reducing the activation of the innate immune system, these modifications can be used to effectively increase the stability and longevity of the mRNA in vivo; see, e.g., Kormann et al., supra.

[0417] It has also been shown that repeated administration of synthetic messenger RNAs incorporating modifications designed to bypass innate anti-viral responses can reprogram differentiated human cells to pluripotency. See, e.g., Warren, et al., Cell Stem Cell, 7(5):618-30 (2010). Such modified mRNAs that act as primary reprogramming proteins can be an efficient means of reprogramming multiple human cell types. Such cells are referred to as induced pluripotency stem cells (iPSCs), and it was found that enzymatically synthesized RNA incorporating 5-Methyl-CTP, Pseudo-UTP and an Anti Reverse Cap Analog (ARCA) could be used to effectively evade the cell's antiviral response; see, e.g., Warren et al., supra.

[0418] Other modifications of polynucleotides described in the art include, for example, the use of polyA tails, the addition of 5′ cap analogs (such as m7G(5′)ppp(5′)G (mCAP)), modifications of 5′ or 3′ untranslated regions (UTRs), or treatment with phosphatase to remove 5′ terminal phosphates—and new approaches are regularly being developed.

[0419] A number of compositions and techniques applicable to the generation of modified RNAs for use herein have been developed in connection with the modification of RNA interference (RNAi), including small-interfering RNAs (siRNAs). siRNAs present particular challenges in vivo because their effects on gene silencing via mRNA interference are generally transient, which can require repeat administration. In addition, siRNAs are double-stranded RNAs (dsRNA) and mammalian cells have immune responses that have evolved to detect and neutralize dsRNA, which is often a by-product of viral infection. Thus, there are mammalian enzymes such as PKR (dsRNA-responsive kinase), and potentially retinoic acid-inducible gene I (RIG-I), that can mediate cellular responses to dsRNA, as well as Toll-like receptors (such as TLR3, TLR7 and TLR8) that can trigger the induction of cytokines in response to such molecules; see, e.g., the reviews by Angart et al., Pharmaceuticals (Basel) 6(4): 440-468 (2013); Kanasty et al., Molecular Therapy 20(3): 513-524 (2012); Burnett et al., Biotechnol J. 6(9):1130-46 (2011); Judge and MacLachlan, Hum Gene Ther 19(2):111-24 (2008); and references cited therein.

[0420] A large variety of modifications have been developed and applied to enhance RNA stability, reduce innate immune responses, and/or achieve other benefits that can be useful in connection with the introduction of polynucleotides into human cells, as described herein; see, e.g., the reviews by Whitehead K A et al., Annual Review of Chemical and Biomolecular Engineering, 2: 77-96 (2011); Gaglione and Messere, Mini Rev Med Chem, 10(7):578-95 (2010); Chemolovskaya et al, Curr Opin Mol Ther., 12(2):158-67 (2010); Deleavey et al., Curr Protoc Nucleic Acid Chem Chapter 16:Unit 16.3 (2009); Behlke, Oligonucleotides 18(4):305-19 (2008); Fucini et al., Nucleic Acid Ther 22(3): 205-210 (2012); Bremsen et al., Front Genet 3:154 (2012).

[0421] As noted above, there are a number of commercial suppliers of modified RNAs, many of which have specialized in modifications designed to improve the effectiveness of siRNAs. A variety of approaches are offered based on various findings reported in the literature. For example, Dharmacon notes that replacement of a non-bridging oxygen with sulfur (phosphorothioate, PS) has been extensively used to improve nuclease resistance of siRNAs, as reported by Kole, Nature Reviews Drug Discovery 11:125-140 (2012). Modifications of the 2′-position of the ribose have been reported to improve nuclease resistance of the intemucleotide phosphate bond while increasing duplex stability (Tm), which has also been shown to provide protection from immune activation. A combination of moderate PS backbone modifications with small, well-tolerated 2′-substitutions (2′-O-Methyl, 2′-Fluoro, 2′-Hydro) have been associated with highly stable siRNAs for applications in vivo, as reported by Soutschek et al. Nature 432:173-178 (2004); and 2′-O-Methyl modifications have been reported to be effective in improving stability as reported by Volkov, Oligonucleotides 19:191-202 (2009). With respect to decreasing the induction of innate immune responses, modifying specific sequences with 2′-O-Methyl, 2′-Fluoro, 2′-Hydro have been reported to reduce TLR7/TLR8 interaction while generally preserving silencing activity; see, e.g., Judge et al., Mol. Ther. 13:494-505 (2006); and Cekaite et al., J. Mol. Biol. 365:90-108 (2007). Additional modifications, such as 2-thiouracil, pseudouracil, 5-methylcytosine, 5-methyluracil, and N6-methyladenosine have also been shown to minimize the immune effects mediated by TLR3, TLR7, and TLR8; see, e.g., Kariko, K. et al., Immunity 23:165-175 (2005).

[0422] As is also known in the art, and commercially available, a number of conjugates can be applied to polynucleotides, such as RNAs, for use herein that can enhance their delivery and/or uptake by cells, including for example, cholesterol, tocopherol and folic acid, lipids, peptides, polymers, linkers and aptamers; see, e.g., the review by Winkler, Ther. Deliv. 4:791-809 (2013), and references cited therein.

[0423] Codon-Optimization

[0424] In some embodiments, a polynucleotide encoding a site-directed polypeptide is codon-optimized according to methods standard in the art for expression in the cell containing the target DNA of interest. For example, if the intended target nucleic acid is in a human cell, a human codon-optimized polynucleotide encoding Cas9 is contemplated for use for producing the Cas9 polypeptide.

[0425] Complexes of a Genome-Targeting Nucleic Acid and a Site-Directed Polypeptide

[0426] A genome-targeting nucleic acid interacts with a site-directed polypeptide (e.g., a nucleic acid-guided nuclease such as Cas9), thereby forming a complex. The genome-targeting nucleic acid guides the site-directed polypeptide to a target nucleic acid.

[0427] RNPs

[0428] As stated previously, the site-directed polypeptide and genome-targeting nucleic acid may each be administered separately to a cell or a patient. On the other hand, the site-directed polypeptide may be pre-complexed with one or more guide RNAs, or one or more crRNA together with a tracrRNA. The pre-complexed material may then be administered to a cell or a patient. Such pre-complexed material is known as a ribonucleoprotein particle (RNP).

[0429] Nucleic Acids Encoding System Components

[0430] In another aspect, the present disclosure provides a nucleic acid comprising a nucleotide sequence encoding a genome-targeting nucleic acid of the disclosure, a site-directed polypeptide of the disclosure, and/or any nucleic acid or proteinaceous molecule necessary to carry out the embodiments of the methods of the disclosure.

[0431] In some embodiments, the nucleic acid encoding a genome-targeting nucleic acid of the disclosure, a site-directed polypeptide of the disclosure, and/or any nucleic acid or proteinaceous molecule necessary to carry out the embodiments of the methods of the disclosure comprises a vector (e.g., a recombinant expression vector).

[0432] The term “vector” refers to a nucleic acid molecule capable of transporting another nucleic acid to which it has been linked. One type of vector is a “plasmid”, which refers to a circular double-stranded DNA loop into which additional nucleic acid segments can be ligated. Another type of vector is a viral vector, wherein additional nucleic acid segments can be ligated into the viral genome. Certain vectors are capable of autonomous replication in a host cell into which they are introduced (e.g., bacterial vectors having a bacterial origin of replication and episomal mammalian vectors). Other vectors (e.g., non-episomal mammalian vectors) are integrated into the genome of a host cell upon introduction into the host cell, and thereby are replicated along with the host genome.

[0433] In some embodiments, vectors are capable of directing the expression of nucleic acids to which they are operatively linked. Such vectors are referred to herein as “recombinant expression vectors”, or more simply “expression vectors”, which serve equivalent functions.

[0434] The term “operably linked” means that the nucleotide sequence of interest is linked to regulatory sequence(s) in a manner that allows for expression of the nucleotide sequence. The term “regulatory sequence” is intended to include, for example, promoters, enhancers and other expression control elements (e.g., polyadenylation signals). Such regulatory sequences are well known in the art and are described, for example, in Goeddel; Gene Expression Technology: Methods in Enzymology 185, Academic Press, San Diego, Calif. (1990). Regulatory sequences include those that direct constitutive expression of a nucleotide sequence in many types of host cells, and those that direct expression of the nucleotide sequence only in certain host cells (e.g., tissue-specific regulatory sequences). It will be appreciated by those skilled in the art that the design of the expression vector can depend on such factors as the choice of the target cell, the level of expression desired, and the like.

[0435] Expression vectors contemplated include, but are not limited to, viral vectors based on vaccinia virus, poliovirus, adenovirus, adeno-associated virus, SV40, herpes simplex virus, human immunodeficiency virus, retrovirus (e.g., Murine Leukemia Virus, spleen necrosis virus, and vectors derived from retroviruses such as Rous Sarcoma Virus, Harvey Sarcoma Virus, avian leukosis virus, a lentivirus, human immunodeficiency virus, myeloproliferative sarcoma virus, and mammary tumor virus) and other recombinant vectors. Other vectors contemplated for eukaryotic target cells include, but are not limited to, the vectors pXT1, pSG5, pSVK3, pBPV, pMSG, and pSVLSV40 (Pharmacia). Additional vectors contemplated for eukaryotic target cells include, but are not limited to, the vectors pCTx-1, pCTx-2, and pCTx-3. Other vectors may be used so long as they are compatible with the host cell.

[0436] In some embodiments, a vector comprises one or more transcription and/or translation control elements. Depending on the host/vector system utilized, any of a number of suitable transcription and translation control elements, including constitutive and inducible promoters, transcription enhancer elements, transcription terminators, etc. may be used in the expression vector. In some embodiments, the vector is a self-inactivating vector that either inactivates the viral sequences or the components of the CRISPR machinery or other elements.

[0437] Non-limiting examples of suitable eukaryotic promoters (i.e., promoters functional in a eukaryotic cell) include those from cytomegalovirus (CMV) immediate early, herpes simplex virus (HSV) thymidine kinase, early and late SV40, long terminal repeats (LTRs) from retrovirus, human elongation factor-1 promoter (EF1), a hybrid construct comprising the cytomegalovirus (CMV) enhancer fused to the chicken beta-actin promoter (CAG), murine stem cell virus promoter (MSCV), phosphoglycerate kinase-1 locus promoter (PGK), and mouse metallothionein-I.

[0438] For expressing small RNAs, including guide RNAs used in connection with Cas endonuclease, various promoters such as RNA polymerase III promoters, including for example U6 and H1, can be advantageous. Descriptions of and parameters for enhancing the use of such promoters are known in art, and additional information and approaches are regularly being described; see, e.g., Ma, H. et al., Molecular Therapy—Nucleic Acids 3, el 61 (2014) doi:10.1038/mtna.2014.12.

[0439] The expression vector may also contain a ribosome binding site for translation initiation and a transcription terminator. The expression vector may also include appropriate sequences for amplifying expression. The expression vector may also include nucleotide sequences encoding non-native tags (e.g., histidine tag, hemagglutinin tag, green fluorescent protein, etc.) that are fused to the site-directed polypeptide, thus resulting in a fusion protein.

[0440] In some embodiments, a promoter is an inducible promoter (e.g., a heat shock promoter, tetracycline-regulated promoter, steroid-regulated promoter, metal-regulated promoter, estrogen receptor-regulated promoter, etc.). In some embodiments, a promoter is a constitutive promoter (e.g., CMV promoter, UBC promoter). In some embodiments, the promoter is a spatially restricted and/or temporally restricted promoter (e.g., a tissue specific promoter, a cell type specific promoter, etc.).

[0441] In some embodiments, the nucleic acid encoding a genome-targeting nucleic acid of the disclosure and/or a site-directed polypeptide are packaged into or on the surface of delivery vehicles for delivery to cells. Delivery vehicles contemplated include, but are not limited to, nanospheres, liposomes, quantum dots, nanoparticles, polyethylene glycol particles, hydrogels, and micelles. As described in the art, a variety of targeting moieties can be used to enhance the preferential interaction of such vehicles with desired cell types or locations.

[0442] Introduction of the complexes, polypeptides, and nucleic acids of the disclosure into cells can occur by viral or bacteriophage infection, transfection, conjugation, protoplast fusion, lipofection, electroporation, nucleofection, calcium phosphate precipitation, polyethyleneimine (PEI)-mediated transfection, DEAE-dextran mediated transfection, liposome-mediated transfection, particle gun technology, calcium phosphate precipitation, direct micro-injection, nanoparticle-mediated nucleic acid delivery, and the like.

[0443] Delivery

[0444] Guide RNA polynucleotides (RNA or DNA) and/or endonuclease polynucleotide(s) (RNA or DNA) can be delivered by viral or non-viral delivery vehicles known in the art. Alternatively, endonuclease polypeptide(s) may be delivered by viral or non-viral delivery vehicles known in the art, such as electroporation or lipid nanoparticles. In some embodiments, the DNA endonuclease may be delivered as one or more polypeptides, either alone or pre-complexed with one or more guide RNAs, or one or more crRNA together with a tracrRNA.

[0445] Polynucleotides may be delivered by non-viral delivery vehicles including, but not limited to, nanoparticles, liposomes, ribonucleoproteins, positively charged peptides, small molecule RNA-conjugates, aptamer-RNA chimeras, and RNA-fusion protein complexes. Some exemplary non-viral delivery vehicles are described in Peer and Lieberman, Gene Therapy, 18: 1127-1133 (2011) (which focuses on non-viral delivery vehicles for siRNA that are also useful for delivery of other polynucleotides).

[0446] Polynucleotides, such as guide RNA, sgRNA, and mRNA encoding an endonuclease, may be delivered to a cell or a patient by a lipid nanoparticle (LNP).

[0447] A LNP refers to any particle having a diameter of less than 1000 nm, 500 nm, 250 nm, 200 nm, 150 nm, 100 nm, 75 nm, 50 nm, or 25 nm. Alternatively, a nanoparticle may range in size from 1-1000 nm, 1-500 nm, 1-250 nm, 25-200 nm, 25-100 nm, 35-75 nm, or 25-60 nm.

[0448] LNPs may be made from cationic, anionic, or neutral lipids. Neutral lipids, such as the fusogenic phospholipid DOPE or the membrane component cholesterol, may be included in LNPs as ‘helper lipids’ to enhance transfection activity and nanoparticle stability. Limitations of cationic lipids include low efficacy owing to poor stability and rapid clearance, as well as the generation of inflammatory or anti-inflammatory responses.

[0449] LNPs may also be comprised of hydrophobic lipids, hydrophilic lipids, or both hydrophobic and hydrophilic lipids.

[0450] Any lipid or combination of lipids that are known in the art may be used to produce a LNP. Examples of lipids used to produce LNPs are: DOTMA, DOSPA, DOTAP, DMRIE, DC-cholesterol, DOTAP-cholesterol, GAP-DMORIE-DPyPE, and GL67A-DOPE-DMPE-polyethylene glycol (PEG). Examples of cationic lipids are: 98N12-5, C12-200, DLin-KC2-DMA (KC2), DLin-MC3-DMA (MC3), XTC, MD1, and 7C1. Examples of neutral lipids are: DPSC, DPPC, POPC, DOPE, and SM. Examples of PEG-modified lipids are: PEG-DMG, PEG-CerC14, and PEG-CerC20.

[0451] The lipids may be combined in any number of molar ratios to produce a LNP. In addition, the polynucleotide(s) may be combined with lipid(s) in a wide range of molar ratios to produce a LNP.

[0452] As stated previously, the site-directed polypeptide and genome-targeting nucleic acid may each be administered separately to a cell or a patient. On the other hand, the site-directed polypeptide may be pre-complexed with one or more guide RNAs, or one or more crRNA together with a tracrRNA. The pre-complexed material may then be administered to a cell or a patient. Such pre-complexed material is known as a ribonucleoprotein particle (RNP).

[0453] RNA is capable of forming specific interactions with RNA or DNA. While this property is exploited in many biological processes, it also comes with the risk of promiscuous interactions in a nucleic acid-rich cellular environment One solution to this problem is the formation of ribonucleoprotein particles (RNPs), in which the RNA is pre-complexed with an endonuclease. Another benefit of the RNP is protection of the RNA from degradation.

[0454] The endonuclease in the RNP may be modified or unmodified. Likewise, the gRNA, crRNA, tracrRNA, or sgRNA may be modified or unmodified. Numerous modifications are known in the art and may be used.

[0455] The endonuclease and sgRNA can be generally combined in a 1:1 molar ratio. Alternatively, the endonuclease, crRNA and tracrRNA can be generally combined in a 1:1:1 molar ratio. However, a wide range of molar ratios may be used to produce a RNP.

[0456] A recombinant adeno-associated virus (AAV) vector may be used for delivery. Techniques to produce rAAV particles, in which an AAV genome to be packaged that includes the polynucleotide to be delivered, rep and cap genes, and helper virus functions are provided to a cell are standard in the art. Production of rAAV requires that the following components are present within a single cell (denoted herein as a packaging cell): a rAAV genome, AAV rep and cap genes separate from (i.e., not in) the rAAV genome, and helper virus functions. The AAV rep and cap genes may be from any AAV serotype for which recombinant virus can be derived, and may be from a different AAV serotype than the rAAV genome ITRs, including, but not limited to, AAV serotypes AAV-1, AAV-2, AAV-3, AAV-4, AAV-5, AAV-6, AAV-7, AAV-8, AAV-9, AAV-10, AAV-11, AAV-12, AAV-13 and AAV rh.74. Production of pseudotyped rAAV is disclosed in, for example, international patent application publication number WO 01/83692. See Table 1.

TABLE 1

| AAV Serotype | Genbank Accession No. |
|---|---|
| AAV-1 | NC_002077.1 |
| AAV-2 | NC_001401.2 |
| AAV-3 | NC_001729.1 |
| AAV-3B | AF028705.1 |
| AAV-4 | NC_001829.1 |
| AAV-5 | NC_006152.1 |
| AAV-6 | AF028704.1 |
| AAV-7 | NC_006260.1 |
| AAV-8 | NC_006261.1 |
| AAV-9 | AX753250.1 |
| AAV-10 | AY631965.1 |
| AAV-11 | AY631966.1 |
| AAV-12 | DQ813647.1 |
| AAV-13 | EU285562.1 |

[0457] A method of generating a packaging cell involves creating a cell line that stably expresses all of the necessary components for AAV particle production. For example, a plasmid (or multiple plasmids) comprising a rAAV genome lacking AAV rep and cap genes, AAV rep and cap genes separate from the rAAV genome, and a selectable marker, such as a neomycin resistance gene, are integrated into the genome of a cell. AAV genomes have been introduced into bacterial plasmids by procedures such as GC tailing (Samulski et al., 1982, Proc. Natl. Acad. S6. USA, 79:2077-2081), addition of synthetic linkers containing restriction endonuclease cleavage sites (Laughlin et al., 1983, Gene, 23:65-73) or by direct, blunt-end ligation (Senapathy & Carter, 1984, J. Biol. Chem., 259:4661-4666). The packaging cell line is then infected with a helper virus, such as adenovirus. The advantages of this method are that the cells are selectable and are suitable for large-scale production of rAAV. Other examples of suitable methods employ adenovirus or baculovirus, rather than plasmids, to introduce rAAV genomes and/or rep and cap genes into packaging cells.

[0458] General principles of rAAV production are reviewed in, for example, Carter, 1992, Current Opinions in Biotechnology, 1533-539; and Muzyczka, 1992, Curr. Topics in Microbial. and Immunol., 158:97-129). Various approaches are described in Ratschin et al., Mol. Cell. Biol. 4:2072 (1984); Hermonat et al., Proc. Natl. Acad. Sci. USA, 81:6466 (1984); Tratschin et al., Mol. Cell. Biol. 5:3251 (1985); McLaughlin et al., J. Virol., 62:1963 (1988); and Lebkowski et al., 1988 Mol. Cell. Biol., 7:349 (1988). Samulski et al. (1989, J. Virol., 63:3822-3828); U.S. Pat. No. 5,173,414; WO 95/13365 and corresponding U.S. Pat. No. 5,658,776; WO 95/13392; WO 96/17947; PCT/US98/18600; WO 97/09441 (PCT/US96/14423); WO 97/08298 (PCT/US96/13872); WO 97/21825 (PCT/US96/20777); WO 97/06243 (PCT/FR96/01064); WO 99/11764; Perrin et al. (1995) Vaccine 13:1244-1250; Paul et al. (1993) Human Gene Therapy 4:609-615; Clark et al. (1996) Gene Therapy 3:1124-1132; U.S. Pat. No. 5,786,211; U.S. Pat. No. 5,871,982; and U.S. Pat. No. 6,258,595.

[0459] AAV vector serotypes can be matched to target cell types. For example, the following exemplary cell types may be transduced by the indicated AAV serotypes among others. See Table 2.

TABLE 2

| Tissue/Cell Type | Serotype |
|---|---|
| Liver | AAV3, AAV5, AAV8, AAV9 |
| Skeletal muscle | AAV1, AAV7, AAV6, AAV8, AAV9 |
| Central nervous system | AAV5, AAV1, AAV4 |
| RPE | AAV5, AAV4 |
| Photoreceptor cells | AAV5 |
| Lung | AAV9 |
| Heart | AAV8 |
| Pancreas | AAV8 |
| Kidney | AAV2, AAV8 |
| Hematopoietic stem cells | AAV6 |

[0460] In addition to adeno-associated viral vectors, other viral vectors can be used. Such viral vectors include, but are not limited to, lentivirus, alphavirus, enterovirus, pestivirus, baculovirus, herpesvirus, Epstein Barr virus, papovavirusr, poxvirus, vaccinia virus, and herpes simplex virus.

[0461] In some embodiments, Cas9 mRNA, sgRNA targeting one or two loci in RAG1 genes, and donor DNA are each separately formulated into lipid nanoparticles, or are all co-formulated into one lipid nanoparticle, or co-formulated into two or more lipid nanoparticles.

[0462] In some embodiments, Cas9 mRNA is formulated in a lipid nanoparticle, while sgRNA and donor DNA are delivered in an AAV vector. In some embodiments, Cas9 mRNA and sgRNA are co-formulated in a lipid nanoparticle, while donor DNA is delivered in an AAV vector.

[0463] Options are available to deliver the Cas9 nuclease as a DNA plasmid, as mRNA or as a protein. The guide RNA can be expressed from the same DNA, or can also be delivered as an RNA. The RNA can be chemically modified to alter or improve its half-life, or decrease the likelihood or degree of immune response. The endonuclease protein can be complexed with the gRNA prior to delivery. Viral vectors allow efficient delivery; split versions of Cas9 and smaller orthologs of Cas9 can be packaged in AAV, as can donors for HDR. A range of non-viral delivery methods also exist that can deliver each of these components, or non-viral and viral methods can be employed in tandem. For example, nano-particles can be used to deliver the protein and guide RNA, while AAV can be used to deliver a donor DNA.

[0464] Exosomes

[0465] Exosomes, a type of microvesicle bound by phospholipid bilayer, can be used to deliver nucleic acids to specific tissue. Many different types of cells within the body naturally secrete exosomes. Exosomes form within the cytoplasm when endosomes invaginate and form multivesicular-endosomes (MVE). When the MVE fuses with the cellular membrane, the exosomes are secreted in the extracellular space. Ranging between 30-120 nm in diameter, exosomes can shuttle various molecules from one cell to another in a form of cell-to-cell communication. Cells that naturally produce exosomes, such as mast cells, can be genetically altered to produce exosomes with surface proteins that target specific tissues, alternatively exosomes can be isolated from the bloodstream. Specific nucleic acids can be placed within the engineered exosomes with electroporation. When introduced systemically, the exosomes can deliver the nucleic acids to the specific target tissue.

[0466] Genetically Modified Cells

[0467] The term “genetically modified cell” refers to a cell that comprises at least one genetic modification introduced by genome editing (e.g., using the CRISPR/Cas9/Cpf1 system). In some ex vivo embodiments herein, the genetically modified cell is a genetically modified progenitor cell. In some in vivo embodiments herein, the genetically modified cell is a genetically modified hematopoietic progenitor cell. A genetically modified cell comprising an exogenous genome-targeting nucleic acid and/or an exogenous nucleic acid encoding a genome-targeting nucleic acid is contemplated herein.

[0468] The term “control treated population” describes a population of cells that has been treated with identical media, viral induction, nucleic acid sequences, temperature, confluency, flask size, pH, etc., with the exception of the addition of the genome editing components. Any method known in the art can be used to measure restoration of RAG1 gene or protein expression or activity, for example Western Blot analysis of the RAG1 protein or quantifying RAG1 mRNA.

[0469] The term “isolated cell” refers to a cell that has been removed from an organism in which it was originally found, or a descendant of such a cell. Optionally, the cell has been cultured in vitro, e.g., under defined conditions or in the presence of other cells. Optionally, the cell is later introduced into a second organism or re-introduced into the organism from which it (or the cell from which it is descended) was isolated.

[0470] The term “isolated population” with respect to an isolated population of cells refers to a population of cells that has been removed and separated from a mixed or heterogeneous population of cells. In some embodiments, an isolated population is a substantially pure population of cells, as compared to the heterogeneous population from which the cells were isolated or enriched. In some embodiments, the isolated population is an isolated population of human progenitor cells, e.g., a substantially pure population of human progenitor cells, as compared to a heterogeneous population of cells comprising human progenitor cells and cells from which the human progenitor cells were derived.

[0471] The term “substantially enhanced,” with respect to a particular cell population, refers to a population of cells in which the occurrence of a particular type of cell is increased relative to pre-existing or reference levels, by at least 2-fold, at least 3-, at least 4-, at least 5-, at least 6-, at least 7-, at least 8-, at least 9, at least 10-, at least 20-, at least 50-, at least 100-, at least 400-, at least 1000-, at least 5000-, at least 20000-, at least 100000- or more fold depending, e.g., on the desired levels of such cells for ameliorating SCID and/or Omenn Syndrome.

[0472] The term “substantially enriched” with respect to a particular cell population, refers to a population of cells that is at least about 10%, about 20%, about 30%, about 40%, about 50%, about 60%, about 70% or more with respect to the cells making up a total cell population.

[0473] The terms “substantially enriched” or “substantially pure” with respect to a particular cell population, refers to a population of cells that is at least about 75%, at least about 85%, at least about 90%, or at least about 95% pure, with respect to the cells making up a total cell population. That is, the terms “substantially pure” or “essentially purified,” with regard to a population of progenitor cells, refers to a population of cells that contain fewer than about 20%, about 15%, about 10%, about 9%, about 8%, about 7%, about 6%, about 5%, about 4%, about 3%, about 2%, about 1%, or less than 1%, of cells that are not progenitor cells as defined by the terms herein.

[0474] Differentiation of Genome Edited IPSCs into Hematopoletic Progenitor Cells or White Blood Cells

[0475] Another step of the ex vivo methods of the disclosure involves differentiating the genome edited iPSCs into hematopoietic progenitor cells or white blood cells. The differentiating step may be performed according to any method known in the art.

[0476] Differentiation of Genome Edited Mesenchymal Stem Cells into Hematopoietic Progenitor Cells or White Blood Cells

[0477] Another step of the ex vivo methods of the disclosure involves differentiating the genome edited mesenchymal stem cells into hematopoietic progenitor cells or white blood cells. The differentiating step may be performed according to any method known in the art.

[0478] Implanting Cells into Patients

[0479] Another step of the ex vivo methods of the disclosure involves implanting the cells into patients. This implanting step may be accomplished using any method of implantation known in the art. For example, the genetically modified cells may be injected directly in the patients blood or otherwise administered to the patient.

[0480] Pharmaceutically Acceptable Carriers

[0481] The ex vivo methods of administering progenitor cells to a subject contemplated herein involve the use of therapeutic compositions comprising progenitor cells.

[0482] Therapeutic compositions contain a physiologically tolerable carrier together with the cell composition, and optionally at least one additional bioactive agent as described herein, dissolved or dispersed therein as an active ingredient. In some embodiments, the therapeutic composition is not substantially immunogenic when administered to a mammal or human patient for therapeutic purposes, unless so desired.

[0483] In general, the progenitor cells described herein are administered as a suspension with a pharmaceutically acceptable carrier. One of skill in the art will recognize that a pharmaceutically acceptable carrier to be used in a cell composition will not include buffers, compounds, cryopreservation agents, preservatives, or other agents in amounts that substantially interfere with the viability of the cells to be delivered to the subject. A formulation comprising cells can include e.g., osmotic buffers that permit cell membrane integrity to be maintained, and optionally, nutrients to maintain cell viability or enhance engraftment upon administration. Such formulations and suspensions are known to those of skill in the art and/or can be adapted for use with the progenitor cells, as described herein, using routine experimentation.

[0484] A cell composition can also be emulsified or presented as a liposome composition, provided that the emulsification procedure does not adversely affect cell viability. The cells and any other active ingredient can be mixed with excipients that are pharmaceutically acceptable and compatible with the active ingredient, and in amounts suitable for use in the therapeutic methods described herein.

[0485] Additional agents included in a cell composition can include pharmaceutically acceptable salts of the components therein. Pharmaceutically acceptable salts include the acid addition salts (formed with the free amino groups of the polypeptide) that are formed with inorganic acids, such as, for example, hydrochloric or phosphoric acids, or such organic acids as acetic, tartaric, mandelic and the like. Salts formed with the free carboxyl groups can also be derived from inorganic bases, such as, for example, sodium, potassium, ammonium, calcium or ferric hydroxides, and such organic bases as isopropylamine, trimethylamine, 2-ethylamino ethanol, histidine, procaine and the like.

[0486] Physiologically tolerable carriers are well known in the art. Exemplary liquid carriers are sterile aqueous solutions that contain no materials in addition to the active ingredients and water, or contain a buffer such as sodium phosphate at physiological pH value, physiological saline or both, such as phosphate-buffered saline. Still further, aqueous carriers can contain more than one buffer salt, as well as salts such as sodium and potassium chlorides, dextrose, polyethylene glycol and other solutes. Liquid compositions can also contain liquid phases in addition to and to the exclusion of water. Exemplary of such additional liquid phases are glycerin, vegetable oils such as cottonseed oil, and water-oil emulsions. The amount of an active compound used in the cell compositions that is effective in the treatment of a particular disorder or condition will depend on the nature of the disorder or condition, and can be determined by standard clinical techniques.

[0487] Administration & Efficacy

[0488] The terms “administering,” “introducing” and “transplanting” are used interchangeably in the context of the placement of cells, e.g., progenitor cells, into a subject, by a method or route that results in at least partial localization of the introduced cells at a desired site, such as a site of injury or repair, such that a desired effect(s) is produced. The cells e.g., progenitor cells, or their differentiated progeny can be administered by any appropriate route that results in delivery to a desired location in the subject where at least a portion of the implanted cells or components of the cells remain viable. The period of viability of the cells after administration to a subject can be as short as a few hours, e.g., twenty-four hours, to a few days, to as long as several years, or even the life time of the patient, i.e., long-term engraftment. For example, in some embodiments described herein, an effective amount of myogenic progenitor cells is administered via a systemic route of administration, such as an intraperitoneal or intravenous route.

[0489] The terms “individual”, “subject,” “host” and “patient” are used interchangeably herein and refer to any subject for whom diagnosis, treatment or therapy is desired. In some embodiments, the subject is a mammal. In some embodiments, the subject is a human being.

[0490] When provided prophylactically, progenitor cells described herein can be administered to a subject in advance of any symptom of SCID and/or Omenn Syndrome, e.g., prior to the development of alpha/beta T-cell lymphopenia with gamma/delta T-cell expansion, severe cytomegalovirus (CMV) infection, autoimmunity, chronic inflammation of the skin, eosinophilia, failure to thrive, swollen lymph nodes, swollen spleen, diarrhea and enlarged liver. Accordingly, the prophylactic administration of a hematopoietic progenitor cell population serves to prevent SCID and/or Omenn Syndrome.

[0491] When provided therapeutically, hematopoietic progenitor cells are provided at (or after) the onset of a symptom or indication of SCID and/or Omenn Syndrome, e.g., upon the onset of disease.

[0492] In some embodiments described herein, the hematopoietic progenitor cell population being administered according to the methods described herein comprises allogeneic hematopoietic progenitor cells obtained from one or more donors. “Allogeneic” refers to a hematopoietic progenitor cell or biological samples comprising hematopoietic progenitor cells obtained from one or more different donors of the same species, where the genes at one or more loci are not identical. For example, a hematopoietic progenitor cell population being administered to a subject can be derived from one more unrelated donor subjects, or from one or more non-identical siblings. In some embodiments, syngeneic hematopoietic progenitor cell populations can be used, such as those obtained from genetically identical animals, or from identical twins. In other embodiments, the hematopoietic progenitor cells are autologous cells; that is, the hematopoietic progenitor cells are obtained or isolated from a subject and administered to the same subject, i.e., the donor and recipient are the same.

[0493] In one embodiment, the term “effective amount” refers to the amount of a population of progenitor cells or their progeny needed to prevent or alleviate at least one or more signs or symptoms of SCID and/or Omenn Syndrome, and relates to a sufficient amount of a composition to provide the desired effect, e.g., to treat a subject having SCID and/or Omenn Syndrome. The term “therapeutically effective amount” therefore refers to an amount of progenitor cells or a composition comprising progenitor cells that is sufficient to promote a particular effect when administered to a typical subject, such as one who has or is at risk for SCID and/or Omenn Syndrome. An effective amount would also include an amount sufficient to prevent or delay the development of a symptom of the disease, alter the course of a symptom of the disease (for example but not limited to, slow the progression of a symptom of the disease), or reverse a symptom of the disease. It is understood that for any given case, an appropriate “effective amount” can be determined by one of ordinary skill in the art using routine experimentation.

[0494] For use in the various embodiments described herein, an effective amount of progenitor cells comprises at least 10² progenitor cells, at least 5×10² progenitor cells, at least 10³ progenitor cells, at least 5×10³ progenitor cells, at least 10⁴ progenitor cells, at least 5×10⁴ progenitor cells, at least 10⁵ progenitor cells, at least 2×10⁵ progenitor cells, at least 3×10⁵ progenitor cells, at least 4×10⁵ progenitor cells, at least 5×10⁵ progenitor cells, at least 6×10⁵ progenitor cells, at least 7×10⁵ progenitor cells, at least 8×10⁵ progenitor cells, at least 9×10⁵ progenitor cells, at least 1×10 progenitor cells, at least 2×10 progenitor cells, at least 3×10⁶ progenitor cells, at least 4×10⁶ progenitor cells, at least 5×10⁶ progenitor cells, at least 6×10⁶ progenitor cells, at least 7×10⁶ progenitor cells, at least 8×10⁶ progenitor cells, at least 9×10⁶ progenitor cells, or multiples thereof. The progenitor cells are derived from one or more donors, or are obtained from an autologous source. In some embodiments described herein, the progenitor cells are expanded in culture prior to administration to a subject in need thereof.

[0495] Modest and incremental increases in the levels of functional RAG1 expressed in cells of patients having SCID and/or Omenn Syndrome can be beneficial for ameliorating one or more symptoms of the disease, for increasing long-term survival, and/or for reducing side effects associated with other treatments. Upon administration of such cells to human patients, the presence of hematopoietic progenitors that are producing increased levels of functional RAG1 is beneficial. In some embodiments, effective treatment of a subject gives rise to at least about 3%, 5% or 7% functional RAG1 relative to total RAG1 in the treated subject. In some embodiments, functional RAG1 will be at least about 10% of total RAG1. In some embodiments, functional RAG1 will be at least about 20% to 30% of total RAG1. Similarly, the introduction of even relatively limited subpopulations of cells having significantly elevated levels of functional RAG1 can be beneficial in various patients because in some situations normalized cells will have a selective advantage relative to diseased cells. However, even modest levels of hematopoietic progenitors with elevated levels of functional RAG1 can be beneficial for ameliorating one or more aspects of SCID and/or Omenn Syndrome in patients. In some embodiments, about 10%, about 20%, about 30%, about 40%, about 50%, about 60%, about 70%, about 80%, about 90% or more of the hematopoietic progenitors in patients to whom such cells are administered are producing increased levels of functional RAG1.

[0496] “Administered” refers to the delivery of a progenitor cell composition into a subject by a method or route that results in at least partial localization of the cell composition at a desired site. A cell composition can be administered by any appropriate route that results in effective treatment in the subject, i.e. administration results in delivery to a desired location in the subject where at least a portion of the composition delivered, i.e. at least 1×10⁴ cells are delivered to the desired site for a period of time. Modes of administration include injection, infusion, instillation, or ingestion. “Injection” includes, without limitation, intravenous, intramuscular, intra-arterial, intrathecal, intraventricular, intracapsular, intraorbital, intracardiac, intradermal, intraperitoneal, transtracheal, subcutaneous, subcuticular, intraarticular, sub capsular, subarachnoid, intraspinal, intracerebro spinal, and intrasternal injection and infusion. In some embodiments, the route is intravenous. For the delivery of cells, administration by injection or infusion can be made.

[0497] In one embodiment, the cells are administered systemically. The phrases “systemic administration,” “administered systemically”, “peripheral administration” and “administered peripherally” refer to the administration of a population of progenitor cells other than directly into a target site, tissue, or organ, such that it enters, instead, the subject's circulatory system and, thus, is subject to metabolism and other like processes.

[0498] The efficacy of a treatment comprising a composition for the treatment of SCID and/or Omenn Syndrome can be determined by the skilled clinician. However, a treatment is considered “effective treatment,” if any one or all of the signs or symptoms of, as but one example, levels of functional RAG1 are altered in a beneficial manner (e.g., increased by at least 10%), or other clinically accepted symptoms or markers of disease are improved or ameliorated. Efficacy can also be measured by failure of an individual to worsen as assessed by hospitalization or need for medical interventions (e.g., progression of the disease is halted or at least slowed). Methods of measuring these indicators are known to those of skill in the art and/or described herein. Treatment includes any treatment of a disease in an individual or an animal (some non-limiting examples include a human, or a mammal) and includes: (1) inhibiting the disease, e.g., arresting, or slowing the progression of symptoms; or (2) relieving the disease, e.g., causing regression of symptoms; and (3) preventing or reducing the likelihood of the development of symptoms.

[0499] The treatment according to the present disclosure ameliorates one or more symptoms associated with SCID and/or Omenn Syndrome by increasing the amount of functional RAG1 in the individual. Early signs typically associated with SCID and/or Omenn Syndrome include for example, development of alpha/beta T-cell lymphopenia with gamma/delta T-cell expansion, severe cytomegalovirus (CMV) infection, autoimmunity, chronic inflammation of the skin, eosinophilia, failure to thrive, swollen lymph nodes, swollen spleen, diarrhea and enlarged liver.

[0500] Kits

[0501] The present disclosure provides kits for carrying out the methods of the invention. A kit can include one or more of a genome-targeting nucleic acid, a polynucleotide encoding a genome-targeting nucleic acid, a site-directed polypeptide, a polynucleotide encoding a site-directed polypeptide, and/or any nucleic acid or proteinaceous molecule necessary to carry out the embodiments of the methods of the disclosure, or any combination thereof.

[0502] In some embodiments, a kit comprises: (1) a vector comprising a nucleotide sequence encoding a genome-targeting nucleic acid, and (2) the site-directed polypeptide or a vector comprising a nucleotide sequence encoding the site-directed polypeptide and (3) a reagent for reconstitution and/or dilution of the vector(s) and or polypeptide.

[0503] In some embodiments, a kit comprises: (1) a vector comprising (i) a nucleotide sequence encoding a genome-targeting nucleic acid, and (ii) a nucleotide sequence encoding the site-directed polypeptide and (2) a reagent for reconstitution and/or dilution of the vector.

[0504] In some embodiments of any of the above kits, the kit comprises a single-molecule guide genome-targeting nucleic acid. In some embodiments of any of the above kits, the kit comprises a double-molecule genome-targeting nucleic acid. In some embodiments of any of the above kits, the kit comprises two or more double-molecule guides or single-molecule guides. In some embodiments, the kits comprise a vector that encodes the nucleic acid targeting nucleic acid.

[0505] In some embodiments of any of the above kits, the kit can further comprise a polynucleotide to be inserted to effect the desired genetic modification.

[0506] Components of a kit may be in separate containers, or combined in a single container.

[0507] In some embodiments, a kit described above further comprises one or more additional reagents, where such additional reagents are selected from a buffer, a buffer for introducing a polypeptide or polynucleotide into a cell, a wash buffer, a control reagent, a control vector, a control RNA polynucleotide, a reagent for in vitro production of the polypeptide from DNA, adaptors for sequencing and the like. A buffer can be a stabilization buffer, a reconstituting buffer, a diluting buffer, or the like. In some embodiments, a kit can also include one or more components that may be used to facilitate or enhance the on-target binding or the cleavage of DNA by the endonuclease, or improve the specificity of targeting.

[0508] In addition to the above-mentioned components, a kit can further include instructions for using the components of the kit to practice the methods. The instructions for practicing the methods are generally recorded on a suitable recording medium. For example, the instructions may be printed on a substrate, such as paper or plastic, etc. The instructions may be present in the kits as a package insert, in the labeling of the container of the kit or components thereof (i.e., associated with the packaging or subpackaging), etc. The instructions can be present as an electronic storage data file present on a suitable computer readable storage medium, e.g. CD-ROM, diskette, flash drive, etc. In some instances, the actual instructions are not present in the kit, but means for obtaining the instructions from a remote source (e.g. via the Internet), can be provided. An example of this embodiment is a kit that includes a web address where the instructions can be viewed and/or from which the instructions can be downloaded. As with the instructions, this means for obtaining the instructions can be recorded on a suitable substrate.

[0509] Guide RNA Formulation

[0510] Guide RNAs of the disclosure are formulated with pharmaceutically acceptable excipients such as carriers, solvents, stabilizers, adjuvants, diluents, etc., depending upon the particular mode of administration and dosage form. Guide RNA compositions are generally formulated to achieve a physiologically compatible pH, and range from a pH of about 3 to a pH of about 11, about pH 3 to about pH 7, depending on the formulation and route of administration. In some embodiments, the pH is adjusted to a range from about pH 5.0 to about pH 8. In some embodiments, the compositions comprise a therapeutically effective amount of at least one compound as described herein, together with one or more pharmaceutically acceptable excipients. Optionally, the compositions comprise a combination of the compounds described herein, or may include a second active ingredient useful in the treatment or prevention of bacterial growth (for example and without limitation, anti-bacterial or anti-microbial agents), or may include a combination of reagents of the disclosure.

[0511] Suitable excipients include, for example, carrier molecules that include large, slowly metabolized macromolecules such as proteins, polysaccharides, polylactic acids, polyglycolic acids, polymeric amino acids, amino acid copolymers, and inactive virus particles. Other exemplary excipients include antioxidants (for example and without limitation, ascorbic acid), chelating agents (for example and without limitation, EDTA), carbohydrates (for example and without limitation, dextrin, hydroxyalkylcellulose, and hydroxyalkylmethylcellulose), stearic acid, liquids (for example and without limitation, oils, water, saline, glycerol and ethanol), wetting or emulsifying agents, pH buffering substances, and the like.

[0512] Other Possible Therapeutic Approaches

[0513] Gene editing can be conducted using nucleases engineered to target specific sequences. To date there are four major types of nucleases: meganucleases and their derivatives, zinc finger nucleases (ZFNs), transcription activator like effector nucleases (TALENs), and CRISPR-Cas9 nuclease systems. The nuclease platforms vary in difficulty of design, targeting density and mode of action, particularly as the specificity of ZFNs and TALENs is through protein-DNA interactions, while RNA-DNA interactions primarily guide Cas9. Cas9 cleavage also requires an adjacent motif, the PAM, which differs between different CRISPR systems. Cas9 from Streptococcus pyogenes cleaves using a NRG PAM, CRISPR from Neisseria meningitidis can cleave at sites with PAMs including NNNNGATT, NNNNNGTTT and NNNNGCTT. A number of other Cas9 orthologs target protospacer adjacent to alternative PAMs.

[0514] CRISPR endonucleases, such as Cas9, can be used in the methods of the disclosure. However, the teachings described herein, such as therapeutic target sites, could be applied to other forms of endonucleases, such as ZFNs, TALENs, HEs, or MegaTALs, or using combinations of nucleases. However, in order to apply the teachings of the present disclosure to such endonucleases, one would need to, among other things, engineer proteins directed to the specific target sites.

[0515] Additional binding domains may be fused to the Cas9 protein to increase specificity. The target sites of these constructs would map to the identified gRNA specified site, but would require additional binding motifs, such as for a zinc finger domain. In the case of Mega-TAL, a meganuclease can be fused to a TALE DNA-binding domain. The meganuclease domain can increase specificity and provide the cleavage. Similarly, inactivated or dead Cas9 (dCas9) can be fused to a cleavage domain and require the sgRNA/Cas9 target site and adjacent binding site for the fused DNA-binding domain. This likely would require some protein engineering of the dCas9, in addition to the catalytic inactivation, to decrease binding without the additional binding site.

[0516] Zinc Finger Nucleases

[0517] Zinc finger nucleases (ZFNs) are modular proteins comprised of an engineered zinc finger DNA binding domain linked to the catalytic domain of the type II endonuclease FokI. Because FokI functions only as a dimer, a pair of ZFNs must be engineered to bind to cognate target “half-site” sequences on opposite DNA strands and with precise spacing between them to enable the catalytically active FokI dimer to form. Upon dimerization of the FokI domain, which itself has no sequence specificity per se, a DNA double-strand break is generated between the ZFN half-sites as the initiating step in genome editing.

[0518] The DNA binding domain of each ZFN is typically comprised of 3-6 zinc fingers of the abundant Cys2-His2 architecture, with each finger primarily recognizing a triplet of nucleotides on one strand of the target DNA sequence, although cross-strand interaction with a fourth nucleotide also can be important. Alteration of the amino acids of a finger in positions that make key contacts with the DNA alters the sequence specificity of a given finger. Thus, a four-finger zinc finger protein will selectively recognize a 12 bp target sequence, where the target sequence is a composite of the triplet preferences contributed by each finger, although triplet preference can be influenced to varying degrees by neighboring fingers. An important aspect of ZFNs is that they can be readily re-targeted to almost any genomic address simply by modifying individual fingers, although considerable expertise is required to do this well. In most applications of ZFNs, proteins of 4-6 fingers are used, recognizing 12-18 bp respectively. Hence, a pair of ZFNs will typically recognize a combined target sequence of 24-36 bp, not including the 5-7 bp spacer between half-sites. The binding sites can be separated further with larger spacers, including 15-17 bp. A target sequence of this length is likely to be unique in the human genome, assuming repetitive sequences or gene homologs are excluded during the design process. Nevertheless, the ZFN protein-DNA interactions are not absolute in their specificity so off-target binding and cleavage events do occur, either as a heterodimer between the two ZFNs, or as a homodimer of one or the other of the ZFNs. The latter possibility has been effectively eliminated by engineering the dimerization interface of the FokI domain to create “plus” and “minus” variants, also known as obligate heterodimer variants, which can only dimerize with each other, and not with themselves. Forcing the obligate heterodimer prevents formation of the homodimer. This has greatly enhanced specificity of ZFNs, as well as any other nuclease that adopts these FokI variants.

[0519] A variety of ZFN-based systems have been described in the art, modifications thereof are regularly reported, and numerous references describe rules and parameters that are used to guide the design of ZFNs; see, e.g., Segal et al., Proc Natl Acad Sci USA 96(6):2758-63 (1999); Dreier B et al., J Mol Biol. 303(4):489-502 (2000); Liu Q et al., J Biol Chem. 277(6):3850-6 (2002); Dreier et al., J Biol Chem 280(42):35588-97 (2005); and Dreier et al., J Biol Chem. 276(31):29466-78 (2001).

[0520] Transcription Activator-Like Effector Nucleases (TALENs)

[0521] TALENs represent another format of modular nucleases whereby, as with ZFNs, an engineered DNA binding domain is linked to the FokI nuclease domain, and a pair of TALENs operate in tandem to achieve targeted DNA cleavage. The major difference from ZFNs is the nature of the DNA binding domain and the associated target DNA sequence recognition properties. The TALEN DNA binding domain derives from TALE proteins, which were originally described in the plant bacterial pathogen Xanthomonas sp. TALEs are comprised of tandem arrays of 33-35 amino acid repeats, with each repeat recognizing a single basepair in the target DNA sequence that is typically up to 20 bp in length, giving a total target sequence length of up to 40 bp. Nucleotide specificity of each repeat is determined by the repeat variable diresidue (RVD), which includes just two amino acids at positions 12 and 13. The bases guanine, adenine, cytosine and thymine are predominantly recognized by the four RVDs: Asn-Asn, Asn-Ille, His-Asp and Asn-Gly, respectively. This constitutes a much simpler recognition code than for zinc fingers, and thus represents an advantage over the latter for nuclease design. Nevertheless, as with ZFNs, the protein-DNA interactions of TALENs are not absolute in their specificity, and TALENs have also benefited from the use of obligate heterodimer variants of the FokI domain to reduce off-target activity.

[0522] Additional variants of the FokI domain have been created that are deactivated in their catalytic function. If one half of either a TALEN or a ZFN pair contains an inactive FokI domain, then only single-strand DNA cleavage (nicking) will occur at the target site, rather than a DSB. The outcome is comparable to the use of CRISPR/Cas9/Cpf1 “nickase” mutants in which one of the Cas9 cleavage domains has been deactivated. DNA nicks can be used to drive genome editing by HDR, but at lower efficiency than with a DSB. The main benefit is that off-target nicks are quickly and accurately repaired, unlike the DSB, which is prone to NHEJ-mediated mis-repair.

[0523] A variety of TALEN-based systems have been described in the art, and modifications thereof are regularly reported; see, e.g., Boch, Science 326(5959):1509-12 (2009); Mak et al., Science 335(6069):716-9 (2012); and Moscou et al., Science 326(5959):1501 (2009). The use of TALENs based on the “Golden Gate” platform, or cloning scheme, has been described by multiple groups; see, e.g., Cermak et al., Nucleic Acids Res. 39(12):e82 (2011); Li et al., Nucleic Acids Res. 39(14):6315-25 (2011); Weber et al., PLoS One. 6(2):e16765 (2011); Wang et al., J Genet Genomics 41(6):339-47, Epub 2014 May 17 (2014); and Cermak T et al., Methods Mol Biol. 1239:133-59 (2015).

[0524] Homing Endonucleases

[0525] Homing endonucleases (HEs) are sequence-specific endonucleases that have long recognition sequences (14-44 base pairs) and cleave DNA with high specificity—often at sites unique in the genome. There are at least six known families of HEs as classified by their structure, including LAGLIDADG (SEQ ID NO: 66,287), GIY-YIG, His-Cis box, H-N-H, PD-(D/E)xK, and Vsr-like that are derived from a broad range of hosts, including eukarya, protists, bacteria, archaea, cyanobacteria and phage. As with ZFNs and TALENs, HEs can be used to create a DSB at a target locus as the initial step in genome editing. In addition, some natural and engineered HEs cut only a single strand of DNA, thereby functioning as site-specific nickases. The large target sequence of HEs and the specificity that they offer have made them attractive candidates to create site-specific DSBs.

[0526] A variety of HE-based systems have been described in the art, and modifications thereof are regularly reported; see, e.g., the reviews by Steentoft et al., Glycobiology 24(8):663-80 (2014); Belfort and Bonocora, Methods Mol Biol. 1123:1-26 (2014); Hafez and Hausner, Genome 55(8):553-69 (2012); and references cited therein.

[0527] MegaTAL/Tev-mTALEN/MegaTev

[0528] As further examples of hybrid nucleases, the MegaTAL platform and Tev-mTALEN platform use a fusion of TALE DNA binding domains and catalytically active HEs, taking advantage of both the tunable DNA binding and specificity of the TALE, as well as the cleavage sequence specificity of the HE; see, e.g., Boissel et al., NAR 42: 2591-2601 (2014); Kleinstiver et al., G3 4:1155-65 (2014); and Boissel and Scharenberg, Methods Mol. Biol. 1239: 171-96 (2015).

[0529] In a further variation, the MegaTev architecture is the fusion of a meganuclease (Mega) with the nuclease domain derived from the GIY-YIG homing endonuclease I-TevI (Tev). The two active sites are positioned ˜30 bp apart on a DNA substrate and generate two DSBs with non-compatible cohesive ends; see, e.g., Wolfs et al., NAR 42, 8816-29 (2014). It is anticipated that other combinations of existing nuclease-based approaches will evolve and be useful in achieving the targeted genome modifications described herein.

[0530] dCas9-FokI or dCpf1-Fok1 and Other Nucleases

[0531] Combining the structural and functional properties of the nuclease platforms described above offers a further approach to genome editing that can potentially overcome some of the inherent deficiencies. As an example, the CRISPR genome editing system typically uses a single Cas9 endonuclease to create a DSB. The specificity of targeting is driven by a 20 or 22 nucleotide sequence in the guide RNA that undergoes Watson-Crick base-pairing with the target DNA (plus an additional 2 bases in the adjacent NAG or NGG PAM sequence in the case of Cas9 from S. pyogenes). Such a sequence is long enough to be unique in the human genome, however, the specificity of the RNA/DNA interaction is not absolute, with significant promiscuity sometimes tolerated, particularly in the 5′ half of the target sequence, effectively reducing the number of bases that drive specificity. One solution to this has been to completely deactivate the Cas9 or Cpf1 catalytic function—retaining only the RNA-guided DNA binding function—and instead fusing a FokI domain to the deactivated Cas9; see, e.g., Tsai et al., Nature Biotech 32: 569-76 (2014); and Guilinger et al., Nature Biotech. 32: 577-82 (2014). Because FokI must dimerize to become catalytically active, two guide RNAs are required to tether two FokI fusions in close proximity to form the dimer and cleave DNA. This essentially doubles the number of bases in the combined target sites, thereby increasing the stringency of targeting by CRISPR-based systems.

[0532] As further example, fusion of the TALE DNA binding domain to a catalytically active HE, such as I-TevI, takes advantage of both the tunable DNA binding and specificity of the TALE, as well as the cleavage sequence specificity of I-TevI, with the expectation that off-target cleavage may be further reduced.

[0533] Methods and Compositions of the Invention

[0534] Accordingly, the present disclosure relates in particular to the following non-limiting inventions: In a first method, Method 1, the present disclosure provides a method for editing the Recombination Activating Gene 1 (RAG1) gene in a human cell by genome editing, the method comprising the step of introducing into the human cell one or more deoxyribonucleic acid (DNA) endonucleases to effect one or more single-strand breaks (SSBs) or double-strand breaks (DSBs) within or near the RAG1 gene or other DNA sequences that encode regulatory elements of the RAG1 gene that results in a permanent deletion, insertion, correction, or modulation of expression or function of one or more mutations or exons within or near or affecting the expression or function of the RAG1 gene or other DNA sequences that encode regulatory elements of the RAG1 gene and restoration of RAG1 protein activity.

[0535] In another method, Method 2, the present disclosure provides a method for inserting a RAG1 gene in a human cell by genome editing, the method comprising introducing into the human cell one or more deoxyribonucleic acid (DNA) endonucleases to effect one or more single-strand breaks (SSBs) or double-strand breaks (DSBs) within or near a safe harbor locus that results in a permanent insertion of the RAG1 gene or minigene, and results in restoration of RAG1 activity.

[0536] In another method, Method 3, the present disclosure provides an ex vivo method for treating a patient with severe combined immunodeficiency (SCID) or Omenn Syndrome comprising the steps of: i) creating a patient specific induced pluripotent stem cell (iPSC); ii) editing within or near the Recombination Activating Gene 1 (RAG1) gene of the iPSC or other DNA sequences that encode regulatory elements of the RAG1 gene of the iPSC or within or near a safe harbor locus of the iPSC; iii) differentiating the genome edited iPSC into a hematopoietic progenitor cell or a white blood cell; and iv) implanting the hematopoietic progenitor cell or white blood cell into the patient.

[0537] In another method, Method 4, the present disclosure provides the method of Method 3, wherein the creating step comprises: a) isolating a somatic cell from the patient; and b) introducing a set of pluripotency-associated genes into the somatic cell to induce the somatic cell to become a pluripotent stem cell.

[0538] In another method, Method 5, the present disclosure provides the method of Method 4, wherein the somatic cell is a fibroblast.

[0539] In another method, Method 6, the present disclosure provides the method of Method 4, wherein the set of pluripotency-associated genes is one or more of the genes selected from the group consisting of OCT4, SOX2, KLF4, Lin28, NANOG and cMYC.

[0540] In another method, Method 7, the present disclosure provides the method of any one of Methods 3-6, wherein the editing step comprises introducing into the iPSC one or more deoxyribonucleic acid (DNA) endonucleases to effect one or more single-strand breaks (SSBs) or double-strand breaks (DSBs) within or near the RAG1 gene or other DNA sequences that encode regulatory elements of the RAG1 gene that results in permanent deletion, insertion, correction, or modulation of expression or function of one or more mutations or exons within or near or affecting the expression or function of the RAG1 gene or other DNA sequences that encode regulatory elements of the RAG1 gene, or within or near a safe harbor locus that results in permanent insertion of the RAG1 gene or minigene, and restoration of RAG1 protein activity.

[0541] In another method, Method 8, the present disclosure provides the method of Method 7, wherein the safe harbor locus is selected from the group consisting of AAVS1 (PPP1R12C), ALB, Angptl3, ApoC3, ASGR2, CCR5, FIX (F9), G6PC, Gys2, HGD, Lp(a), Pcsk9, Serpinal, TF, and TTR.

[0542] In another method, Method 9, the present disclosure provides the method of any one of Methods 3-8, wherein the differentiating step comprises one or more of the following to differentiate the genome edited iPSC into a hematopoietic progenitor cell or a white blood cell: treatment with a combination of small molecules or delivery of master transcription factors.

[0543] In another method, Method 10, the present disclosure provides the method of any one of Methods 3-9, wherein the implanting step comprises implanting the hematopoietic progenitor cell or white blood cell into the patient by transplantation, local injection, or systemic infusion, or combinations thereof.

[0544] In another method, Method 11, the present disclosure provides an ex vivo method for treating a patient with severe combined immunodeficiency (SCID) or Omenn Syndrome comprising the steps of: i) isolating a white blood cell from the patient; ii) editing within or near the Recombination Activating Gene 1 (RAG1) gene of the white blood cell or other DNA sequences that encode regulatory elements of the RAG1 gene of the white blood cell or editing within or near a safe harbor locus of the white blood cell; and iii) implanting the genome-edited white blood cell into the patient.

[0545] In another method, Method 12, the present disclosure provides the method of Method 11, wherein the isolating step comprises: cell differential centrifugation, cell culturing, and combinations thereof.

[0546] In another method, Method 13, the present disclosure provides the method of any one of Methods 11-12, wherein the editing step comprises introducing into the white blood cell one or more deoxyribonucleic acid (DNA) endonucleases to effect one or more single-strand breaks (SSBs) or double-strand breaks (DSBs) within or near the RAG1 gene or other DNA sequences that encode regulatory elements of the RAG1 gene that results in a permanent deletion, insertion, correction, or modulation of expression or function of one or more mutations or exons within or near or affecting the expression or function the RAG1 gene or other DNA sequences that encode regulatory elements of the RAG1 gene, or within or near a safe harbor locus that results in permanent insertion of the RAG1 gene or minigene and restoration of RAG1 protein activity.

[0547] In another method, Method 14, the present disclosure provides the method of Method 13, wherein the safe harbor locus is selected from the group consisting of AAVS1 (PPP1R12C), ALB, Angptl3, ApoC3, ASGR2, CCR5, FIX (F9), G6PC, Gys2, HGD, Lp(a), Pcsk9, Serpinal, TF, and TTR.

[0548] In another method, Method 15, the present disclosure provides the method of any one of Methods 11-14, wherein the implanting step comprises implanting the genome-edited white blood cell into the patient by transplantation, local injection, or systemic infusion, or combinations thereof.

[0549] In another method, Method 16, the present disclosure provides an ex vivo method for treating a patient with severe combined immunodeficiency (SCID) or Omenn Syndrome comprising the steps of: i) isolating a mesenchymal stem cell from the patient; ii) editing within or near the Recombination Activating Gene 1 (RAG1) gene of the mesenchymal stem cell or other DNA sequences that encode regulatory elements of the RAG1 gene of the mesenchymal stem cell or editing within or near a safe harbor locus of the mesenchymal stem cell; iii) differentiating the genome-edited mesenchymal stem cell into a hematopoietic progenitor cell or white blood cell; and iv) implanting the hematopoietic progenitor cell or white blood cell into the patient.

[0550] In another method, Method 17, the present disclosure provides the method of Method 16, wherein the mesenchymal stem cell is isolated from the patients bone marrow or peripheral blood.

[0551] In another method, Method 18, the present disclosure provides the method of Method 16, wherein the isolating step comprises: aspiration of bone marrow and isolation of mesenchymal cells by density centrifugation using Percoll™.

[0552] In another method, Method 19, the present disclosure provides the method of any one of Methods 16-18, wherein the editing step comprises introducing into the mesenchymal stem cell one or more deoxyribonucleic acid (DNA) endonucleases to effect one or more single-strand breaks (SSBs) or double-strand breaks (DSBs) within or near the RAG1 gene or other DNA sequences that encode regulatory elements of the RAG1 gene that results in a permanent deletion, insertion, correction, or modulation of expression or function of one or more mutations or exons within or near or affecting the expression or function of the RAG1 gene or other DNA sequences that encode regulatory elements of the RAG1 gene, or within or near a safe harbor locus that results in permanent insertion of the RAG1 gene or minigene, and restoration of RAG1 protein activity.

[0553] In another method, Method 20, the present disclosure provides the method of Method 19, wherein the safe harbor locus is selected from the group consisting of AAVS1 (PPP1R12C), ALB, Angptl3, ApoC3, ASGR2, CCR5, FIX (F9), G6PC, Gys2, HGD, Lp(a), Pcsk9, Serpinal, TF, and TTR.

[0554] In another method, Method 21, the present disclosure provides the method of any one of Methods 16-19, wherein the differentiating step comprises one or more of the following to differentiate the genome edited stem cell into a hematopoietic progenitor cell or white blood cell: treatment with a combination of small molecules or delivery of master transcription factors.

[0555] In another method, Method 22, the present disclosure provides the method of any one of Methods 16-21, wherein the implanting step comprises implanting the cell into the patient by transplantation, local injection, or systemic infusion, or combinations thereof.

[0556] In another method, Method 23, the present disclosure provides an ex vivo method for treating a patient with severe combined immunodeficiency (SCID) or Omenn Syndrome comprising the steps of: i) isolating a hematopoietic progenitor cell from the patient; ii) editing the Recombination Activating Gene 1 (RAG1) gene of the hematopoietic progenitor cell or other DNA sequences that encode regulatory elements of the RAG1 gene of the hematopoietic progenitor cell or editing within or near a safe harbor locus of the hematopoietic progenitor cell; and iii) implanting the cell into the patient.

[0557] In another method, Method 24, the present disclosure provides the method of Method 23, wherein the method further comprises treating the patient with granulocyte colony stimulating factor (GCSF) prior to the isolating step.

[0558] In another method, Method 25, the present disclosure provides the method of Method 24, wherein the treating step is performed in combination with Plerixaflor.

[0559] In another method, Method 26, the present disclosure provides the method of any one of Methods 23-25, wherein the isolating step comprises isolating CD34+ cells.

[0560] In another method, Method 27, the present disclosure provides the method of any one of Methods 23-26, wherein the editing step comprises introducing into the progenitor cell one or more deoxyribonucleic acid (DNA) endonucleases to effect one or more single-strand breaks (SSBs) or double-strand breaks (DSBs) within or near the RAG1 gene or other DNA sequences that encode regulatory elements of the RAG1 gene that results in a permanent deletion, insertion, correction, or modulation of expression or function of one or more mutations or exons within or near or affecting the expression or function of the RAG1 gene or other DNA sequences that encode regulatory elements of the RAG1 gene, or within or near a safe harbor locus that results in permanent insertion of the RAG1 gene or minigene and restoration of RAG1 protein activity.

[0561] In another method, Method 28, the present disclosure provides the method of Method 27, wherein the safe harbor locus is selected from the group consisting of AAVS1 (PPP1R12C), ALB, Angptl3, ApoC3, ASGR2, CCR5, FIX (F9), G6PC, Gys2, HGD, Lp(a), Pcsk9, Serpinal, TF, and TTR.

[0562] In another method, Method 29, the present disclosure provides the method of any one of Methods 23-28, wherein the implanting step comprises implanting the progenitor cell into the patient by transplantation, local injection, or systemic infusion, or combinations thereof.

[0563] In another method, Method 30, the present disclosure provides an in vivo method for treating a patient with severe combined immunodeficiency (SCID) or Omenn Syndrome comprising the step of editing the Recombination Activating Gene 1 (RAG1) gene in a cell of the patient, or other DNA sequences that encode regulatory elements of the RAG1 gene, or editing within or near a safe harbor locus in a cell of the patient.

[0564] In another method, Method 31, the present disclosure provides the method of Method 30, wherein the editing step comprises introducing into the cell one or more deoxyribonucleic acid (DNA) endonucleases to effect one or more single-strand breaks (SSBs) or double-strand breaks (DSBs) within or near the RAG1 gene or other DNA sequences that encode regulatory elements of the RAG1 gene that results in a permanent deletion, insertion, correction, or modulation of one or more mutations or exons within or near the RAG1 gene or other DNA sequences that encode regulatory elements of the RAG1 gene, or within or near a safe harbor locus that results in permanent insertion of the RAG1 gene or minigene, and restoration of RAG1 protein activity.

[0565] In another method, Method 32, the present disclosure provides the method of Method 31, wherein the safe harbor locus is selected from the group consisting of AAVS1 (PPP1R12C), ALB, Angptl3, ApoC3, ASGR2, CCR5, FIX (F9), G6PC, Gys2, HGD, Lp(a), Pcsk9, Serpinal, TF, and TTR.

[0566] In another method, Method 33, the present disclosure provides the method of any one of Methods 30-32, wherein the cell is a bone marrow cell, a hematopoietic progenitor cell, or a CD34+ cell.

[0567] In another method, Method 34, the present disclosure provides the method of any one of Methods 1, 2, 7, 13, 19, 27, or 31, wherein the one or more DNA endonucleases is a Cas1, Cas1B, Cas2, Cas3, Cas4, Cas5, Cas6, Cas7, Cas8, Cas9 (also known as Csn1 and Csx12), Cas100, Csy1, Csy2, Csy3, Cse1, Cse2, Csc1, Csc2, Csa5, Csn2, Csm2, Csm3, Csm4, Csm5, Csm6, Cmr1, Cmr3, Cmr4, Cmr5, Cmr6, Csb1, Csb2, Csb3, Csx17, Csx14, Csx10, Csx16, CsaX, Csx3, Csx1, Csx15, Csf1, Csf2, Csf3, Csf4, or Cpf1 endonuclease; or a homolog thereof, recombination of the naturally occurring molecule, codon-optimized, or modified version thereof, and combinations thereof.

[0568] In another method, Method 35, the present disclosure provides the method of Method 34, wherein the method comprises introducing into the cell one or more polynucleotides encoding the one or more DNA endonucleases.

[0569] In another method, Method 36, the present disclosure provides the method of Method 34, wherein the method comprises introducing into the cell one or more ribonucleic acids (RNAs) encoding the one or more DNA endonucleases.

[0570] In another method, Method 37, the present disclosure provides the method of any one of Methods 35 or 36, wherein the one or more polynucleotides or one or more RNAs is one or more modified polynucleotides or one or more modified RNAs.

[0571] In another method, Method 38, the present disclosure provides the method of Method 35, wherein the DNA endonuclease is a protein or polypeptide.

[0572] In another method, Method 39, the present disclosure provides the method of any one of the preceding Methods, wherein the method further comprises introducing into the cell one or more guide ribonucleic acids (gRNAs).

[0573] In another method, Method 40, the present disclosure provides the method of Method 39, wherein the one or more gRNAs are single-molecule guide RNA (sgRNAs).

[0574] In another method, Method 41, the present disclosure provides the method of any one of Methods 39-40, wherein the one or more gRNAs or one or more sgRNAs is one or more modified gRNAs or one or more modified sgRNAs.

[0575] In another method, Method 42, the present disclosure provides the method of any one of Methods 39-41, wherein the one or more DNA endonucleases is pre-complexed with one or more gRNAs or one or more sgRNAs.

[0576] In another method, Method 43, the present disclosure provides the method of any one of the preceding Methods, wherein the method further comprises introducing into the cell a polynucleotide donor template comprising at least a portion of the wild-type RAG1 gene or minigene or cDNA.

[0577] In another method, Method 44, the present disclosure provides the method of Method 43, wherein the at least a portion of the wild-type RAG1 gene or minigene or cDNA is exon 1, exon 2, intronic regions, fragments or combinations thereof, or the entire RAG1 gene, DNA sequences that encode wild type regulatory elements of the RAG1 gene, minigene or cDNA.

[0578] In another method, Method 45, the present disclosure provides the method of any one of Methods 43-44, wherein the donor template is either a single or double stranded polynucleotide.

[0579] In another method, Method 46, the present disclosure provides the method of any one of Methods 43-45, wherein the donor template has arms homologous to the 11p13 region.

[0580] In another method, Method 47, the present disclosure provides the method of any one of Methods 1, 2, 7, 13, 19, 27 or 31, wherein the method further comprises introducing into the cell one guide ribonucleic acid (gRNA) and a polynucleotide donor template comprising at least a portion of the wild-type RAG1 gene, and wherein the one or more DNA endonucleases is one or more Cas9 or Cpf1 endonucleases that effect one single-strand breaks (SSBs) or double-strand break (DSB) at a locus within or near the RAG1 gene or other DNA sequences that encode regulatory elements of the RAG1 gene, or within or near a safe harbor locus that facilitates insertion of a new sequence from the polynucleotide donor template into the chromosomal DNA at the locus or safe harbor locus that results in permanent insertion or correction of a part of the chromosomal DNA of the RAG1 gene or other DNA sequences that encode regulatory elements of the RAG1 gene proximal to the locus or safe harbor locus and restoration of RAG1 protein activity, and wherein the gRNA comprises a spacer sequence that is complementary to a segment of the locus or safe harbor locus.

[0581] In another method, Method 48, the present disclosure provides the method of Method 47, wherein proximal means nucleotides both upstream and downstream of the locus or safe harbor locus.

[0582] In another method, Method 49, the present disclosure provides the method of any one of Methods 1, 2, 7, 13, 19, 27 or 31, wherein the method further comprises introducing into the cell two guide ribonucleic acid (gRNAs) and a polynucleotide donor template comprising at least a portion of the wild-type RAG1 gene, and wherein the one or more DNA endonucleases is two or more Cas9 or Cpf1 endonucleases that effect a pair of single-strand breaks (SSBs) or double-strand breaks (DSBs), the first at a 5′ locus and the second at a 3′ locus, within or near the RAG1 gene or other DNA sequences that encode regulatory elements of the RAG1 gene, or within or near a safe harbor locus that facilitates insertion of a new sequence from the polynucleotide donor template into the chromosomal DNA between the 5′ locus and the 3′ locus that results in permanent insertion or correction of the chromosomal DNA between the 5′ locus and the 3′ locus within or near the RAG1 gene or other DNA sequences that encode regulatory elements of the RAG1 gene, or within or near a safe harbor locus and restoration of RAG1 protein activity, and wherein the first guide RNA comprises a spacer sequence that is complementary to a segment of the 5′ locus and the second guide RNA comprises a spacer sequence that is complementary to a segment of the 3′ locus.

[0583] In another method, Method 50, the present disclosure provides the method of any one of Methods 47-49, wherein the one or two gRNAs are one or two single-molecule guide RNA (sgRNAs).

[0584] In another method, Method 51, the present disclosure provides the method of any one of Methods 47-50, wherein the one or two gRNAs or one or two sgRNAs is one or two modified gRNAs or one or two modified sgRNAs.

[0585] In another method, Method 52, the present disclosure provides the method of any one of Methods 47-51, wherein the one or more DNA endonucleases is pre-complexed with one or two gRNAs or one or two sgRNAs.

[0586] In another method, Method 53, the present disclosure provides the method of any one of Methods 47-52, wherein the at least a portion of the wild-type RAG1 gene or cDNA is exon 1, exon 2, intronic regions, fragments or combinations thereof, the entire RAG1 gene, DNA sequences that encode wildtype regulatory elements of the RAG1 gene, minigene, or cDNA.

[0587] In another method, Method 54, the present disclosure provides the method of any one of Methods 47-53, wherein the donor template is either a single or double stranded polynucleotide.

[0588] In another method, Method 55, the present disclosure provides the method of any one of Methods 40-47, wherein the donor template has arms homologous to the 11p13 region.

[0589] In another method, Method 56, the present disclosure provides the method of Method 53, wherein the locus, or 5′ locus and 3′ locus are in the first or second exon or intron of the RAG1 gene.

[0590] In another method, Method 57, the present disclosure provides the method of any one of Methods 1, 2, 7, 13, 19, 27 or 31-56, wherein the insertion or correction is by homology directed repair (HDR) or nonhomologous end joining (NHEJ).

[0591] In another method, Method 58, the present disclosure provides the method of any one of Methods 1, 2, 7, 13, 19, 27 or 31, wherein the method further comprises introducing into the cell two guide ribonucleic acid (gRNAs), and wherein the one or more DNA endonucleases is two or more Cas9 or Cpf1 endonucleases that effect a pair of double-strand breaks (DSBs), the first at a 5′ locus and the second at a 3′ locus, within or near the RAG1 gene that causes a deletion of the chromosomal DNA between the 5′ locus and the 3′ locus that results in permanent deletion of the chromosomal DNA between the 5′ locus and the 3′ locus within or near the RAG1 gene and restoration of RAG1 protein activity, and wherein the first guide RNA comprises a spacer sequence that is complementary to a segment of the 5′ locus and the second guide RNA comprises a spacer sequence that is complementary to a segment of the 3′ locus.

[0592] In another method, Method 59, the present disclosure provides the method of Method 58, wherein the two gRNAs are two single-molecule guide RNA (sgRNAs).

[0593] In another method, Method 60, the present disclosure provides the method of any one of Methods 58-59, wherein the two gRNAs or two sgRNAs are two modified gRNAs or two modified sgRNAs.

[0594] In another method, Method 61, the present disclosure provides the method of any one of Methods 58-60, wherein the one or more DNA endonucleases is pre-complexed with one or two gRNAs or one or two sgRNAs.

[0595] In another method, Method 62, the present disclosure provides the method of any one of Methods 58-61, wherein both the 5′ locus and 3′ locus are in or near either the first exon, first intron, or second exon of the RAG1 gene.

[0596] In another method, Method 63, the present disclosure provides the method of any one of Method 58-61, wherein the deletion is a deletion of 1 kb or less.

[0597] In another method, Method 64, the present disclosure provides the method of any one of Methods 1, 2, 7, 13, 19, 27 or 31-63, wherein the Cas9 or Cpf1 mRNA, gRNA, and donor template are either each formulated into separate lipid nanoparticles or all co-formulated into a lipid nanoparticle.

[0598] In another method, Method 65, the present disclosure provides the method of any one of Methods 1, 2, 7, 13, 19, 27 or 31-63, wherein the Cas9 or Cpf1 mRNA is formulated into a lipid nanoparticle, and both the gRNA and donor template are delivered by a viral vector.

[0599] In another method, Method 66, the present disclosure provides the method of Method 65, wherein the viral vector is an adeno-associated virus (AAV) vector.

[0600] In another method, Method 67, the present disclosure provides the method of Method 66, wherein the AAV vector is an AAV6 vector.

[0601] In another method, Method 68, the present disclosure provides the method of any one of Methods 1, 2, 7, 13, 19, 27 or 31-63, wherein the Cas9 or Cpf1 mRNA, gRNA and a donor template are either each formulated into separate exosomes or all co-formulated into an exosome.

[0602] In another method, Method 69, the present disclosure provides the method of any one of Methods 1, 2, 7, 13, 19, 27 or 31-63, wherein the Cas9 or Cpf1 mRNA is formulated into a lipid nanoparticle, and the gRNA is delivered to the cell by electroporation and donor template is delivered to the cell by a viral vector.

[0603] In another method, Method 70, the present disclosure provides the method of Method 69, wherein the viral vector is an adeno-associated virus (AAV) vector.

[0604] In another method, Method 71, the present disclosure provides the method of Method 70, wherein the AAV vector is an AAV6 vector.

[0605] In another method, Method 72, the present disclosure provides the method of any one of Methods 1, 2, 5, 12, or 16-43, wherein the gRNA is delivered to the cell by electroporation and donor template is delivered to the cell by a viral vector.

[0606] In another method, Method 73, the present disclosure provides the method of Method 72, wherein the viral vector is an adeno-associated virus (AAV) vector.

[0607] In another method, Method 74, the present disclosure provides the method of Method 73, wherein the AAV vector is an AAV6 vector.

[0608] In another method, Method 75, the present disclosure provides the method of any one of the preceding Methods, wherein the RAG1 gene is located on Chromosome 11: 36,510,372-36,593,156 (Genome Reference Consortium—GRCh38/hg38).

[0609] In another method, Method 76, the present disclosure provides the method of any one of Methods 1, 2, 7, 13, 19, 27 or 31-63, wherein the restoration of RAG1 protein activity is compared to wild-type or normal RAG1 protein activity.

[0610] In another method, Method 77, the present disclosure provides the method of Method 1, wherein the human cell is a hematopoietic progenitor cell or a white blood cell.

[0611] In another method, Method 78, the present disclosure provides the method of Method 30, wherein the cell is a hematopoietic progenitor cell or a white blood cell.

[0612] In another method, Method 79, the present disclosure provides the method of any one of Methods 1, 2, 7, 13, 19, 27 or 31-63, wherein the RAG1 gene is operably linked to an exogenous promoter that drives expression of the RAG1 gene.

[0613] In another method, Method 80, the present disclosure provides the method of any one of Methods 1, 2, 7, 13, 19, 27 or 31-63, wherein the one or more loci occurs at a location immediately 3′ to an endogenous promoter locus.

[0614] In another method, Method 81, the present disclosure provides the method of any one of the preceding Methods, wherein the donor contains one or more target sites for the endonuclease:gRNA.

[0615] In another method, Method 82, the present disclosure provides the method of any one of the preceding Methods, wherein the donor molecule or a molecule derived from the donor molecule is cleaved one or more times by the endonuclease:gRNA.

[0616] The present disclosure also provides a composition, Composition 1, of one or more guide ribonucleic acids (gRNAs) for editing a RAG1 gene in a cell from a patient with severe combined immunodeficiency (SCID) or Omenn Syndrome, the one or more gRNAs comprising a spacer sequence selected from the group consisting of the nucleic acid sequences in SEQ ID NOs: 54,860-66,285 for editing the RAG1 gene in a cell from a patient with severe combined immunodeficiency (SCID) or Omenn Syndrome.

[0617] In another composition, Composition 2, the present disclosure provides the one or more gRNAs of Composition 1, wherein the one or more gRNAs are one or more single-molecule guide RNAs (sgRNAs).

[0618] In another composition, Composition 3, the present disclosure provides the one or more gRNAs or sgRNAs of Composition 1 or Composition 2, wherein the one or more gRNAs or one or more sgRNAs is one or more modified gRNAs or one or more modified sgRNAs.

[0619] The present disclosure also provides a composition, Composition 4, of one or more guide ribonucleic acids (gRNAs) for editing a safe harbor locus in a cell from a patient with severe combined immunodeficiency (SCID) or Omenn Syndrome, the one or more gRNAs comprising a spacer sequence selected from the group consisting of the nucleic acid sequences in SEQ ID NOs: 1-54,859 for editing the safe harbor locus in a cell from a patient with severe combined immunodeficiency (SCID) or Omenn Syndrome, wherein the safe harbor locus is selected from the group consisting of AAVS1 (PPP1R12C), ALB, Angptl3, ApoC3, ASGR2, CCR5, FIX (F9), G6PC, Gys2, HGD, Lp(a), Pcsk9, Serpinal, TF, and TTR.

[0620] In another composition, Composition 5, the present disclosure provides the one or more gRNAs of Composition 4, wherein the one or more gRNAs are single-molecule guide RNAs (sgRNAs).

[0621] In another composition, Composition 6, the present disclosure provides the one or more gRNAs of Composition 4 or Composition 5, wherein the one or more gRNAs or one or more sgRNAs is one or more modified gRNAs or one or more modified sgRNAs.

### Definitions

[0622] The term “comprising” or “comprises” is used in reference to compositions, methods, and respective component(s) thereof, that are essential to the invention, yet open to the inclusion of unspecified elements, whether essential or not.

[0623] The term “consisting essentially of” refers to those elements required for a given embodiment. The term permits the presence of additional elements that do not materially affect the basic and novel or functional characteristic(s) of that embodiment of the invention.

[0624] The term “consisting of” refers to compositions, methods, and respective components thereof as described herein, which are exclusive of any element not recited in that description of the embodiment.

[0625] The singular forms “a,” “an,” and “the” include plural references, unless the context dearly dictates otherwise.

[0626] Certain numerical values presented herein are preceded by the term “about.” The term “about” is used to provide literal support for the numerical value the term “about” precedes, as well as a numerical value that is approximately the numerical value, that is the approximating unrecited numerical value may be a number which, in the context it is presented, is the substantial equivalent of the specifically recited numerical value. The term “about” means numerical values within ±10% of the recited numerical value.

[0627] When a range of numerical values is presented herein, it is contemplated that each intervening value between the lower and upper limit of the range, the values that are the upper and lower limits of the range, and all stated values with the range are encompassed within the disclosure. All the possible sub-ranges within the lower and upper limits of the range are also contemplated by the disclosure.

### EXAMPLES

[0628] The invention will be more fully understood by reference to the following examples, which provide illustrative non-limiting embodiments of the invention.

[0629] The examples describe the use of the CRISPR system as an illustrative genome editing technique to create defined therapeutic genomic deletions, insertions, or replacements, termed “genomic modifications” herein, in the RAG1 gene that lead to permanent correction of mutations in the genomic locus, or expression at a heterologous locus, that restore RAG1 protein activity. Introduction of the defined therapeutic modifications represents a novel therapeutic strategy for the potential amelioration of SCID and/or Omenn Syndrome, as described and illustrated herein.

### Example 1—CRISPR/SpCas9 Target Sites for the RAG1 Gene

[0630] Regions of the RAG1 gene were scanned for target sites. Each area was scanned for a protospacer adjacent motif (PAM) having the sequence NRG. gRNA 20 bp spacer sequences corresponding to the PAM were identified, as shown in SEQ ID NOs: 54,860-59,105.

### Example 2—CRISPR/SaCas9 Target Sites for the RAG1 Gene

[0631] Regions of the RAG1 gene were scanned for target sites. Each area was scanned for a protospacer adjacent motif (PAM) having the sequence NNGRRT. gRNA 20 bp spacer sequences corresponding to the PAM were identified, as shown in SEQ ID NOs: 59,106-59,602.

### Example 3—CRISPR/StCas9 Target Sites for the RAG1 Gene

[0632] Regions of the RAG1 gene were scanned for target sites. Each area was scanned for a protospacer adjacent motif (PAM) having the sequence NNAGAAW. gRNA 20 bp spacer sequences corresponding to the PAM were identified, as shown in SEQ ID NOs: 59,603-59,759.

### Example 4—CRISPR/TdCas9 Target Sites for the RAG1 Gene

[0633] Regions of the RAG1 gene were scanned for target sites. Each area was scanned for a protospacer adjacent motif (PAM) having the sequence NAAAAC. gRNA 20 bp spacer sequences corresponding to the PAM were identified, as shown in SEQ ID NOs: 59,760-59,824.

### Example 6—CRISPR/NmCas9 Target Sites for the RAG1 Gene

[0634] Regions of the RAG1 gene were scanned for target sites. Each area was scanned for a protospacer adjacent motif (PAM) having the sequence NNNNGHTT. gRNA 20 bp spacer sequences corresponding to the PAM were identified, as shown in SEQ ID NOs: 59,825-60,308.

### Example 6—CRISPR/Cpf1 Target Sites for the RAG1 Gene

[0635] Regions of the RAG1 gene were scanned for target sites. Each area was scanned for a protospacer adjacent motif (PAM) having the sequence YTN. gRNA 22 bp spacer sequences corresponding to the PAM were identified, as shown in SEQ ID NOs: 60,309-66,285.

### Example 7—CRISPR/SpCas9 Target Sites for Safe Harbor Loci

[0636] The following safe harbor loci were scanned for target sites: Exons 1-2 of AAVS1 (PPP1R12C), Exons 1-2 of ALB, Exons 1-2 of Angptl3, Exons 1-2 of ApoC3, Exons 1-2 of ASGR2, Exons 1-2 of CCR5, Exons 1-2 of FIX (F9), Exons 1-2 of G6PC, Exons 1-2 of Gys2, Exons 1-2 of HGD, Exons 1-2 of Lp(a), Exons 1-2 of Pcsk9, Exons 1-2 of Serpinal, Exons 1-2 of TF, and Exons 1-2 of TTR. Each area was scanned for a protospacer adjacent motif (PAM) having the sequence NRG. gRNA 20 bp spacer sequences corresponding to the PAM were identified, as shown in the following sequences: AAVS1 (PPP1R12C): SEQ ID NOs: 1-2,032; ALB: SEQ ID NOs: 3,482-3,649; Angptl3: SEQ ID NOs: 4,104-4,448; ApoC3: SEQ ID NOs: 5,432-5,834; ASGR2: SEQ ID NOs: 6,109-7,876; CCR5: SEQ ID NOs: 9,642-9,844; FIX (F9): SEQ ID NOs: 10,221-11,686; G6PC: SEQ ID NOs: 14,230-15,245; Gys2: SEQ ID NOs: 16,581-22,073; HGD: SEQ ID NOs: 32,254-33,946; Lp(a): SEQ ID NOs: 36,789-40,583; Pcsk9: SEQ ID NOs: 46,154-48,173; Serpinal: SEQ ID NOs: 50,345-51,482; TF: SEQ ID NOs: 52,446-53,277; and TTR: SEQ ID NOs: 54,063-54,362. Note that the SEQ ID NOs represent the DNA sequence of the genomic target, while the gRNA or sgRNA spacer sequence will be the RNA version of the DNA sequence.

### Example 8—CRISPR/SaCas9 Target Sites for Safe Harbor Loci

[0637] The following safe harbor loci were scanned for target sites: Exons 1-2 of AAVS1 (PPP1R12C), Exons 1-2 of ALB, Exons 1-2 of Angptl3, Exons 1-2 of ApoC3, Exons 1-2 of ASGR2, Exons 1-2 of CCR5, Exons 1-2 of FIX (F9), Exons 1-2 of G6PC, Exons 1-2 of Gys2, Exons 1-2 of HGD, Exons 1-2 of Lp(a), Exons 1-2 of Pcsk9, Exons 1-2 of Serpinal, Exons 1-2 of TF, and Exons 1-2 of TTR. Each area was scanned for a protospacer adjacent motif (PAM) having the sequence NNGRRT. gRNA 20 bp spacer sequences corresponding to the PAM were identified, as shown in the following sequences: AAVS1 (PPP1R12C): SEQ ID NOs: 2,033-2,203; ALB: SEQ ID NOs: 3,650-3,677; Angptl3: SEQ ID NOs: 4,449-4,484; ApoC3: SEQ ID NOs: 5,835-5,859; ASGR2: SEQ ID NOs: 7,877-8,082; CCR5: SEQ ID NOs: 9,845-9,876; FIX (F9): SEQ ID NOs: 11,687-11,849; G6PC: SEQ ID NOs: 15,246-15,362; Gys2: SEQ ID NOs: 22,074-22,749; HGD: SEQ ID NOs: 33,947-34,160; Lp(a): SEQ ID NOs: 40,584-40,993; Pcsk9: SEQ ID NOs: 48,174-48,360; Serpinal: SEQ ID NOs: 51,483-51,575; TF: SEQ ID NOs: 53,278-53,363; and TTR: SEQ ID NOs: 54,363-54,403. Note that the SEQ ID NOs represent the DNA sequence of the genomic target, while the gRNA or sgRNA spacer sequence will be the RNA version of the DNA sequence.

### Example 9—CRISPR/StCas9 Target Sites for Safe Harbor Loci

[0638] The following safe harbor loci were scanned for target sites: Exons 1-2 of AAVS1 (PPP1R12C), Exons 1-2 of ALB, Exons 1-2 of Angptl3, Exons 1-2 of ApoC3, Exons 1-2 of ASGR2, Exons 1-2 of CCR5, Exons 1-2 of FIX (F9), Exons 1-2 of G6PC, Exons 1-2 of Gys2, Exons 1-2 of HGD, Exons 1-2 of Lp(a), Exons 1-2 of Pcsk9, Exons 1-2 of Serpinal, Exons 1-2 of TF, and Exons 1-2 of TTR. Each area was scanned for a protospacer adjacent motif (PAM) having the sequence NNAGAAW. gRNA 20 bp spacer sequences corresponding to the PAM were identified, as shown in the following sequences: AAVS1 (PPP1R12C): SEQ ID NOs: 2,204-2,221; ALB: SEQ ID NOs: 3,678-3,695; Angptl3: SEQ ID NOs: 4,485-4,507; ApoC3: SEQ ID NOs: 5,860-5,862; ASGR2: SEQ ID NOs: 8,083-8,106; CCR5: SEQ ID NOs: 9,877-9,890; FIX (F9): SEQ ID NOs: 11,850-11,910; G6PC: SEQ ID NOs: 15,363-15,386; Gys2: SEQ ID NOs: 22,750-20,327; HGD: SEQ ID NOs: 34,161-34,243; Lp(a): SEQ ID NOs: 40,994-41,129; Pcsk9: SEQ ID NOs: 48,361-48,396; Serpinal: SEQ ID NOs: 51,576-51,587; TF: SEQ ID NOs: 53,364-53,375; and TTR: SEQ ID NOs: 54,404-54,420. Note that the SEQ ID NOs represent the DNA sequence of the genomic target, while the gRNA or sgRNA spacer sequence will be the RNA version of the DNA sequence.

### Example 10—CRISPR/TdCas9 Target Sites for Safe Harbor Loci

[0639] The following safe harbor loci were scanned for target sites: Exons 1-2 of AAVS1 (PPP1R12C), Exons 1-2 of ALB, Exons 1-2 of Angptl3, Exons 1-2 of ApoC3, Exons 1-2 of ASGR2, Exons 1-2 of CCR5, Exons 1-2 of FIX (F9), Exons 1-2 of G6PC, Exons 1-2 of Gys2, Exons 1-2 of HGD, Exons 1-2 of Lp(a), Exons 1-2 of Pcsk9, Exons 1-2 of Serpinal, Exons 1-2 of TF, and Exons 1-2 of TTR. Each area was scanned for a protospacer adjacent motif (PAM) having the sequence NAAAAC. gRNA 20 bp spacer sequences corresponding to the PAM were identified, as shown in the following sequences: AAVS1 (PPP1R12C): SEQ ID NOs: 2,222-2,230; ALB: SEQ ID NOs: 3,696-3,700; Angptl3: SEQ ID NOs: 4,508-4,520; ApoC3: SEQ ID NOs: 5,863-5,864; ASGR2: SEQ ID NOs: 8,107-8,118; CCR5: SEQ ID NOs: 9,891-9,892; FIX (F9): SEQ ID NOs: 11,911-11,935; G6PC: SEQ ID NOs: 15,387-15,395; Gys2: SEQ ID NOs: 23,028-23,141; HGD: SEQ ID NOs: 34,244-34,262; Lp(a): SEQ ID NOs: 41,130-41,164; Pcsk9: SEQ ID NOs: 48,397-48,410; Serpinal: SEQ ID NOs: 51,588-51,590; TF: SEQ ID NOs: 53,376-53,382; and TTR: SEQ ID NOs: 54,421-54,422. Note that the SEQ ID NOs represent the DNA sequence of the genomic target, while the gRNA or sgRNA spacer sequence will be the RNA version of the DNA sequence.

### Example 11—CRISPR/NmCas9 Target Sites for Safe Harbor Loci

[0640] The following safe harbor loci were scanned for target sites: Exons 1-2 of AAVS1 (PPP1R12C), Exons 1-2 of ALB, Exons 1-2 of Angptl3, Exons 1-2 of ApoC3, Exons 1-2 of ASGR2, Exons 1-2 of CCR5, Exons 1-2 of FIX (F9), Exons 1-2 of G6PC, Exons 1-2 of Gys2, Exons 1-2 of HGD, Exons 1-2 of Lp(a), Exons 1-2 of Pcsk9, Exons 1-2 of Serpinal, Exons 1-2 of TF, and Exons 1-2 of TTR. Each area was scanned for a protospacer adjacent motif (PAM) having the sequence NNNNGHTT. gRNA 20 bp spacer sequences corresponding to the PAM were identified, as shown in the following sequences: AAVS1 (PPP1R12C): SEQ ID NOs: 2,231-2,305; ALB: SEQ ID NOs: 3,701-3,724; Angptl3: SEQ ID NOs: 4,521-4,583; ApoC3: SEQ ID NOs: 5,865-5,876; ASGR2: SEQ ID NOs: 8,119-8,201; CCR5: SEQ ID NOs: 9,893-9,920; FIX (F9): SEQ ID NOs: 11,936-12,088; G6PC: SEQ ID NOs: 15,396-15,485; Gys2: SEQ ID NOs: 23,142-23,821; HGD: SEQ ID NOs: 34,263-34,463; Lp(a): SEQ ID NOs: 41,165-41,532; Pcsk9: SEQ ID NOs: 48,411-48,550; Serpinal: SEQ ID NOs: 51,591-51,641; TF: SEQ ID NOs: 53,383-53,426; and TTR: SEQ ID NOs: 54,423-54,457. Note that the SEQ ID NOs represent the DNA sequence of the genomic target, while the gRNA or sgRNA spacer sequence will be the RNA version of the DNA sequence.

### Example 12—CRISPR/Cpf1 Target Sites for Safe Harbor Loci

[0641] The following safe harbor loci were scanned for target sites: Exons 1-2 of AAVS1 (PPP1R12C), Exons 1-2 of ALB, Exons 1-2 of Angptl3, Exons 1-2 of ApoC3, Exons 1-2 of ASGR2, Exons 1-2 of CCR5, Exons 1-2 of FIX (F9), Exons 1-2 of G6PC, Exons 1-2 of Gys2, Exons 1-2 of HGD, Exons 1-2 of Lp(a), Exons 1-2 of Pcsk9, Exons 1-2 of Serpinal, Exons 1-2 of TF, and Exons 1-2 of TTR. Each area was scanned for a protospacer adjacent motif (PAM) having the sequence YTN. gRNA 22 bp spacer sequences corresponding to the PAM were identified, as shown in the following sequences: AAVS1 (PPP1R12C): SEQ ID NOs: 2,306-3,481; ALB: SEQ ID NOs: 3,725-4,103; Angptl3: SEQ ID NOs: 4,584-5,431; ApoC3: SEQ ID NOs: 5,877-6,108; ASGR2: SEQ ID NOs: 8,202-9,641; CCR5: SEQ ID NOs: 9,921-10,220; FIX (F9): SEQ ID NOs: 12,089-14,229; G6PC: SEQ ID NOs: 15,486-16,580; Gys2: SEQ ID NOs: 23,822-32,253; HGD: SEQ ID NOs: 34,464-36,788; Lp(a): SEQ ID NOs: 41,533-46,153; Pcsk9: SEQ ID NOs: 48,551-50,344; Serpinal: SEQ ID NOs: 51,642-52,445; TF: SEQ ID NOs: 53,427-54,062; and TTR: SEQ ID NOs: 54,458-54,859. Note that the SEQ ID NOs represent the DNA sequence of the genomic target, while the gRNA or sgRNA spacer sequence will be the RNA version of the DNA sequence.

### Example 13—Screening of gRNAs

[0642] To identify a large spectrum of pairs of gRNAs able to edit the RAG1 DNA target region, an in vitro transcribed (IVT) gRNA screen was conducted. RAG1 genomic sequence was submitted for analysis using a gRNA design software. The resulting list of gRNAs were narrowed to a list of about 257 gRNAs based on uniqueness of sequence—only gRNAs without a perfect match somewhere else in the genome were screened—and minimal predicted off targets. This set of gRNAs were in vitro transcribed, and transfected together with spCas9 protein in primary human mobilized Peripheral Blood CD34+ cells (mPB CD34) using electroporation (Lonza 4D with 96 well shuttle). Cells were harvested 48 hours post transfection, the genomic DNA was isolated, and cutting efficiency was evaluated using TIDE analysis. The cutting efficiency of the gRNA (% indels) is listed in Table 3. Two biological experiments were performed, and an average cutting efficiency of gRNA was presented in FIG. 2.

[0643] It was found that about 12% of the tested gRNAs induced cutting efficiencies over 40%.

TABLE 3
gRNA sequences and cutting efficiencies in mPB
CD34- cells

| SEQ | | | Donor1 | Donor2 | Avg |
|---|---|---|---|---|---|
| ID | | N + Guide Sequence | (indel | (indel | (indel |
| NO: | Guide Name | (20mer) | %) | %) | %) |
| 56,371 | CTX-R13_T39 | TCAGAACAGGAGTAACTGCA | 76 | 73.8 | 74.9 |
| 58,636 | 2ndCTX-R15- | TCGGGATCTCAAAGGCTGAG | 70.6 | 67.2 | 68.9 |
| | 3rd-t21-T142 | | | | |
| 56,316 | CTX-R13_T3 | GCAAGCTTAGGGGACCCATT | 67.2 | 62.1 | 64.65 |
| 55,498 | 2ndCTX-R15- | AAAGAAAGAAAAGCTAAGGG | 66.6 | 55.85 | 61.225 |
| | 3rd-t84-T205 | | | | |
| 58,634 | 2ndCTX-R15- | GACCAGCCTCGGGATCTCAA | 63.7 | 58.15 | 60.925 |
| | 3rd-t3-T124 | | | | |
| 55,475 | 2ndCTX-R15- | ACTCAGCCTTTGAGATCCCG | 66 | 54.1 | 60.05 |
| | 3rd-t2-T123 | | | | |
| 57,806 | CTX-R13_T46 | AAACTTCTGGAGGTATTTGG | 54.1 | 64.7 | 59.4 |
| 56,320 | CTX-R13_T9 | ATTAGGCATAGAGGACTCTC | 56.3 | 59.2 | 57.75 |
| 56,312 | CTX-R13_T16 | ATGAACCCTCAGGCAAGCTT | 50.7 | 63.6 | 57.15 |
| 55,436 | 2ndCTX-R15- | TATGTGTGTGGGTATAGGGT | 59.45 | 46.25 | 52.85 |
| | 3rd-t52-T173 | | | | |
| 58,279 | 2ndCTX-R15- | GAATGCTGTTGTAAATTATA | 58.8 | 43.45 | 51.125 |
| | 1st-t38-T80 | | | | |
| 57,775 | CTX-R13 T26 | GCCCCATACACAGCAGTAAA | 44.7 | 55 | 49.85 |
| 57,790 | CTX-R13_T12 | AGAGAGTCCTCTATGCCTAA | 42.1 | 52.5 | 47.3 |
| 58,292 | 2ndCTX-R15- | GTTTCAGATAAAACTCACAC | 48.2 | 45.9 | 47.05 |
| | 1st-t26-T68 | | | | |
| 58,620 | 2ndCTX-R15- | CCTGTAGACAGCATGAAGTT | 45.6 | 48.1 | 46.85 |
| | 3rd-t65-T186 | | | | |
| 55,757 | 2ndCTX-R15- | TGTTACTTGATATAACTGGT | 52.6 | 40.8 | 46.7 |
| | 1st-t13-T55 | | | | |
| 56,367 | CTX-R13_T43 | AAAGCTCAGTAACTCAGAAC | 49.8 | 43.1 | 46.45 |
| 55,462 | 2ndCTX-R15- | TGGCAATGTCGAGATGGCAG | 46.7 | 46 | 46.35 |
| | 3rd-t16-T137 | | | | |
| 57,791 | CTX-R13_T2 | GAGAGTCCTCTATGCCTAAT | 40.5 | 50.1 | 45.3 |
| 56,342 | CTX-R13_T28 | ATGGGGCTTCACCATCCAAG | 38.7 | 51.5 | 45.1 |
| 55,815 | 2ndCTX-R15- | GAAATAAACAACCAACCCCC | 48.1 | 41.3 | 44.7 |
| | 1st-t15-T57 | | | | |
| 56,314 | CTX-R13_T14 | GAACCCTCAGGCAAGCTTAG | 40.2 | 48.4 | 44.3 |
| 55,796 | 2ndCTX-R15- | ATCTCAGTCTATGTACACTC | 50.25 | 37 | 43.625 |
| | 1st-t3-T45 | | | | |
| 56,343 | CTX-R13_T22 | GGGCTTCACCATCCAAGAGG | 36.4 | 50.1 | 43.25 |
| 57,782 | CTX-R13_T31 | AAGCCCTCAATGCAACCCAG | 39.1 | 47.1 | 43.1 |
| 55,648 | 2ndCTX-R15- | AGAGCAAGTGCTTTAAGTAT | 48.3 | 36.35 | 42.325 |
| | 2nd-t12-T101 | | | | |
| 55,663 | 2ndCTX-R15- | GGGGTTGAGTTCAACCTAAG | 47.85 | 36.5 | 42.175 |
| | 2nd-t1-T90 | | | | |
| 58,615 | 2ndCTX-R15- | GGAGAAAGCAGGCTAAAATA | 43.25 | 39.2 | 41.225 |
| | 3rd-t53-T174 | | | | |
| 56,345 | CTX-R13_T20 | TTCACCATCCAAGAGGTGGT | 44.6 | 37.7 | 41.15 |
| 55,778 | 2ndCTX-R15- | TCTAGAGAGTACACTTCACA | 46.7 | 34.25 | 40.475 |
| | 1st-t14-T56 | | | | |
| 55,460 | 2ndCTX-R15- | GTCAGATGGCAATGTCGAGA | 42.55 | 38.2 | 40.375 |
| | 3rd-t6-T127 | | | | |
| 55,411 | 2ndCTX-R15- | GGAACAGGTGTGATAATGAG | 31 | 49.25 | 40.125 |
| | 3rd-t28-T149 | | | | |
| 55,678 | 2ndCTX-R15- | ACCTGCCACAGAAGAGAATT | 41 | 37.05 | 39.025 |
| | 2nd-t15-T104 | | | | |
| 58,623 | 2ndCTX-R15- | GGATTGTGAAAGAGTTATCT | 39.55 | 36 | 37.775 |
| | 3rd-t33-T154 | | | | |
| 58,303 | 2ndCTX-R15- | GTAACATAATAAGAAGAGGT | 43.8 | 30.85 | 37.325 |
| | 1st-t36-T78 | | | | |
| 56,372 | CTX-R13_T42 | CAGAACAGGAGTAACTGCAG | 31.4 | 43.2 | 37.3 |
| 55,469 | 2ndCTX-R15- | GGCAGTGGCCGGTGGGGACA | 37.15 | 36.5 | 36.825 |
| | 3rd-t57-T178 | | | | |
| 55,671 | 2ndCTX-R15- | TAAGAGGCAGGGGAGCCACA | 33.65 | 39.6 | 36.625 |
| | 2nd-t30-T118 | | | | |
| 57,783 | CTX-R13_T15 | AGCCCTCAATGCAACCCAGA | 35.6 | 36.6 | 36.1 |
| 56,313 | CTX-R13_T11 | TGAACCCTCAGGCAAGCTTA | 32 | 39.2 | 35.6 |
| 56,337 | CTX-R13_T13 | GCACCCTTTACTGCTGTGTA | 35.1 | 35.7 | 35.4 |
| 55,764 | 2ndCTX-R15- | CCAGGCAAATTTGAGATAGG | 41.35 | 28.6 | 34.975 |
| | 1st-t8-T50 | | | | |
| 55,667 | 2ndCTX-R15- | GAGTTCAACCTAAGAGGCAG | 38.4 | 31.15 | 34.775 |
| | 2nd-t34-T121 | | | | |
| 56,388 | CTX-R13_T45 | TTGTCAAAGAACAGCCAGTG | 32.4 | 35.5 | 33.95 |
| 58,650 | 2ndCTX-R15- | CATTTTGACAAACTAGTTTG | 33.55 | 34.2 | 33.875 |
| | 3rd-t45-T166 | | | | |
| 55,455 | 2ndCTX-R15- | AATCTGTGCTGTGTGGAGGG | 35.75 | 31.1 | 33.425 |
| | 3rd-t61-T182 | | | | |
| 55,431 | 2ndCTX-R15- | GTAACGGGGTGTATGTGTGT | 38.3 | 28.35 | 33.325 |
| | 3rd-t80-T201 | | | | |
| 56,319 | CTX-R13_T1 | AGGGGACCCATTAGGCATAG | 27.2 | 37.1 | 32.15 |
| 57,794 | CTX-R13_T6 | GGGTCCCCTAAGCTTGCCTG | 29.4 | 34.4 | 31.9 |
| 57,796 | CTX-R13_T32 | TAAGCTTGCCTGAGGGTTCA | 29.8 | 33.7 | 31.75 |
| 57,760 | 2ndCTX-R15- | TGGGTCAAAAGAATTAACCC | 38.8 | 23.9 | 31.35 |
| | 1st-t7-T49 | | | | |
| 58,301 | 2ndCTX-R15- | GTTTGTAACATAATAAGAAG | 34.35 | 25.2 | 29.775 |
| | 1st-t37-T79 | | | | |
| 55,490 | 2ndCTX-R15- | CCTAACTTCATGCTGTCTAC | 31.65 | 26.55 | 29.1 |
| | 3rd-t82-T203 | | | | |
| 57,768 | CTX-R13_T41 | TACTCCAACCTACCACCTCT | 22.7 | 34.5 | 28.6 |
| 55,422 | 2ndCTX-R15- | CTAAGTTGAAGATGTTAGGA | 19.5 | 36.9 | 28.2 |
| | 3rd-t48-T169 | | | | |
| 56,309 | CTX-R13_T8 | TGGGTTTACCATGAACCCTC | 24.9 | 30.8 | 27.85 |
| 58,644 | 2ndCTX-R15- | CCATCTGACATCAGAGCTAC | 31.6 | 24 | 27.8 |
| | 3rd-t34-T155 | | | | |
| 58,294 | 2ndCTX-R15- | GTCATCCTGAAAGTCACTGT | 34.2 | 20.4 | 27.3 |
| | 1st-t17-T59 | | | | |
| 55,763 | 2ndCTX-R15- | AACCCAGGCAAATTTGAGAT | 28.45 | 26.05 | 27.25 |
| | 1st-t32-T74 | | | | |
| 58,637 | 2ndCTX-R15- | GATCTCAAAGGCTGAGTGGT | 29.7 | 24.65 | 27.175 |
| | 3rd-t31-T152 | | | | |
| 56,332 | CTX-R13_T48 | TTGCAATTGAGTTTCCCTCT | 28.5 | 25.8 | 27.15 |
| 55,659 | 2ndCTX-R15- | AAGGAATGAGAAGGCATTTG | 28.65 | 25.4 | 27.025 |
| | 2nd-t28-T117 | | | | |
| 57,804 | CTX-R13_T38 | CATAAACTTCTGGAGGTATT | 22.1 | 28.6 | 25.35 |
| 55,765 | 2ndCTX-R15- | GCAAATTTGAGATAGGTGGA | 27.25 | 22.7 | 24.975 |
| | 1st-t27-T69 | | | | |
| 58,432 | 2ndCTX-R15- | AGGTGCTAGGTCTTTCCCTG | 26.05 | 23.65 | 24.85 |
| | 2nd-t13-T102 | | | | |
| 56,346 | CTX-R13_T19 | CCATCCAAGAGGTGGTAGGT | 31.7 | 17.6 | 24.65 |
| 55,755 | 2ndCTX-R15- | CATATGTTACTTGATATAAC | 29.3 | 19.9 | 24.6 |
| | 1st-t22-T64 | | | | |
| 55,406 | 2ndCTX-R15- | TTGCAGAGTGAATGAATAAG | 23.45 | 25.5 | 24.475 |
| | 3rd-t75-T196 | | | | |
| 57,752 | CTX-R13_T33 | TGGCTGTTCTTTGACAACCT | 21.6 | 26.3 | 23.95 |
| 56,352 | CTX-R13_T4 | GCTACAGATGCTCTCAAGTC | 24.2 | 23.5 | 23.85 |
| 55,766 | 2ndCTX-R15- | CAAATTTGAGATAGGTGGAT | 26.55 | 21.15 | 23.85 |
| | 1st-t10-T52 | | | | |
| 57,755 | CTX-R13_T49 | CACAGATCTTTGCTCATCTC | 19.2 | 28 | 23.6 |
| 55,445 | 2ndCTX-R15- | GCAGCTGGGATGGAAATGGG | 26.9 | 19.5 | 23.2 |
| | 3rd-t73-T194 | | | | |
| 57,769 | CTX-R13_T21 | CCAACCTACCACCTCTTGGA | 13.7 | 31.5 | 22.6 |
| 55,696 | 2ndCTX-R15- | TGCATAGGGAACAATCTAAT | 28.15 | 15.6 | 21.875 |
| | 2nd-t10-T99 | | | | |
| 55,486 | 2ndCTX-R15- | GAGGAGATCAAGCATTTGCA | 25.1 | 18.5 | 21.8 |
| | 3rd-t29-T150 | | | | |
| 55,391 | 2ndCTX-R15- | TCATGCAAGAGGTTGTCTGA | 20.7 | 22.75 | 21.725 |
| | 3rd-t15-T136 | | | | |
| 58,424 | 2ndCTX-R15- | TGCAAGAGTTAAACAATACA | 25.3 | 17.85 | 21.575 |
| | 2nd-t16-T105 | | | | |
| 57,774 | CTX-R13_T24 | AGCCCCATACACAGCAGTAA | 20.5 | 22.3 | 21.4 |
| 58,640 | 2ndCTX-R15- | TGGCTCAGCCCTGTCCCCAC | 20.85 | 21.55 | 21.2 |
| | 3rd-t71-T192 | | | | |
| 55,408 | 2ndCTX-R15- | AGTGAATGAATAAGTGGAAC | 15.15 | 26.85 | 21 |
| | 3rd-t49-T170 | | | | |
| 55,767 | 2ndCTX-R15- | GAGATAGGTGGATGGGATGA | 22.15 | 19.55 | 20.85 |
| | 1st-t47-T89 | | | | |
| 58,651 | 2ndCTX-R15- | TTTGACAAACTAGTTTGGGG | 22.75 | 18.9 | 20.825 |
| | 3rd-t25-T146 | | | | |
| 58,658 | 2ndCTX-R15- | AGTGCAGGAACAGTAGTTTC | 21.95 | 19.55 | 20.75 |
| | 3rd-t17-T138 | | | | |
| 58,267 | 2ndCTX-R15- | TCTTCCAAATGGGTCATAAA | 22.1 | 19.35 | 20.725 |
| | 1st-t24-T66 | | | | |
| 55,656 | 2ndCTX-R15- | AAAATGCTAAAGGAATGAGA | 24.7 | 16.75 | 20.725 |
| | 2nd-t31-T119 | | | | |
| 57,777 | CTX-R13_T35 | ACACAGCAGTAAAGGGTGCT | 21.5 | 19.7 | 20.6 |
| 55,658 | 2ndCTX-R15- | AAAGGAATGAGAAGGCATTT | 23.05 | 17.2 | 20.125 |
| | 2nd-t27-T116 | | | | |
| 58,434 | 2ndCTX-R15- | CTGTGGCTCCCCTGCCTCTT | 24.9 | 14.75 | 19.825 |
| | 2nd-t18-T107 | | | | |
| 57,745 | 2ndCTX-R13- | ATACAAAATATAATCAATCA | 24.1 | 15.5 | 19.8 |
| | t13-T73 | | | | |
| 57,733 | 2ndCTX-R13- | GCATTGAGAGCACTTTGTAA | 25.4 | 13.9 | 19.65 |
| | t6-T66 | | | | |
| 58,306 | 2ndCTX-R15- | TCTCTTCTGGTAAAAAACAT | 26.9 | 11.9 | 19.4 |
| | 1st-t34-T76 | | | | |
| 58,427 | 2ndCTX-R15- | TGCTTCCTAATTCTCTTCTG | 21.1 | 17.5 | 19.3 |
| | 2nd-t25-T114 | | | | |
| 58,286 | 2ndCTX-R15- | GTACATAGACTGAGATTCTA | 22.9 | 15.5 | 19.2 |
| | 1st-t21-T63 | | | | |
| 55,482 | 2ndCTX-R15- | GAGACCTTTTGTTAGAAGAG | 20.5 | 17.9 | 19.2 |
| | 3rd-t38-T159 | | | | |
| 56,334 | CTX-R13_T37 | TTTCCCTCTGGGTTGCATTG | 18.6 | 19.7 | 19.15 |
| 56,335 | CTX-R13_T23 | TTCCCTCTGGGTTGCATTGA | 20.2 | 17.2 | 18.7 |
| 55,452 | 2ndCTX-R15- | AATGAATCTGTGCTGTGTGG | 18.85 | 18.55 | 18.7 |
| | 3rd-t60-T181 | | | | |
| 55,443 | 2ndCTX-R15- | GGGCAGCTGGGATGGAAATG | 20.5 | 16.7 | 18.6 |
| | 3rd-t83-T204 | | | | |
| 55,450 | 2ndCTX-R15- | CAAAATGAATCTGTGCTGTG | 18.85 | 18.25 | 18.55 |
| | 3rd-t42-T163 | | | | |
| 58,287 | 2ndCTX-R15- | TACATAGACTGAGATTCTAA | 23.45 | 13.1 | 18.275 |
| | 1st-t33-T75 | | | | |
| 55,756 | 2ndCTX-R15- | ATGTTACTTGATATAACTGG | 21.3 | 14.9 | 18.1 |
| | 1st-t20-T62 | | | | |
| 55,425 | 2ndCTX-R15- | ATGTTAGGAGGGAAGATTGT | 20.45 | 15.75 | 18.1 |
| | 3rd-t39-T160 | | | | |
| 57,795 | CTX-R13_T5 | GGTCCCCTAAGCTTGCCTGA | 12 | 23.7 | 17.85 |
| 58,302 | 2ndCTX-R15- | TGTAACATAATAAGAAGAGG | 21.55 | 13.85 | 17.7 |
| | 1st-t45-T87 | | | | |
| 55,389 | 2ndCTX-R15- | TCTGAAGTGGTTCATGCAAG | 22.25 | 12.95 | 17.6 |
| | 3rd-t11-T132 | | | | |
| 55,419 | 2ndCTX-R15- | CAGACTAAGTTGAAGATGTT | 16.9 | 17.8 | 17.35 |
| | 3rd-t32-T153 | | | | |
| 55,463 | 2ndCTX-R15- | AATGTCGAGATGGCAGTGGC | 17.7 | 14.05 | 15.875 |
| | 3rd-t24-T145 | | | | |
| 58,638 | 2ndCTX-R15- | AAAGGCTGAGTGGTTGGTGC | 17.8 | 13.85 | 15.825 |
| | 3rd-t35-T156 | | | | |
| 55,453 | 2ndCTX-R15- | ATGAATCTGTGCTGTGTGGA | 15.85 | 15.55 | 15.7 |
| | 3rd-t55-T176 | | | | |
| 56,323 | CTX-R13_T44 | TCTGGAAAGCCAAGATTCAA | 11.8 | 19.2 | 15.5 |
| 57,729 | 2ndCTX-R13- | AACATATTTATATAACGAAT | 19.6 | 11.2 | 15.4 |
| | t9-T69 | | | | |
| 56,409 | 2ndCTX-R13- | TATTGTAACCTTCAGAGTTT | 18.6 | 12.2 | 15.4 |
| | t7-T67 | | | | |
| 55,771 | 2ndCTX-R15- | AATCATGTACTAAGTAATTT | 14.5 | 16.2 | 15.35 |
| | 1st-t39-T81 | | | | |
| 55,429 | 2ndCTX-R15- | AGATTGTGGGCCAAGTAACG | 17.2 | 13.05 | 15.125 |
| | 3rd-t1-T122 | | | | |
| 55,433 | 2ndCTX-R15- | GGGTGTATGTGTGTGGGTAT | 19.5 | 10.7 | 15.1 |
| | 3rd-t92-T213 | | | | |
| 58,614 | 2ndCTX-R15- | CGGATGAACATGGAGAAAGC | 16.75 | 13.25 | 15 |
| | 3rd-t77-T198 | | | | |
| 57,785 | CTX-R13_T36 | TGCAAAAACCAACTCATAAG | 9.6 | 20.2 | 14.9 |
| 56,390 | CTX-R13_T58 | AAAGAACAGCCAGTGAGGCC | 22.1 | 7.6 | 14.85 |
| 55,434 | 2ndCTX-R15- | GGTGTATGTGTGTGGGTATA | 19.25 | 10 | 14.625 |
| | 3rd-t67-T188 | | | | |
| 58,662 | 2ndCTX-R15- | GTGAGTGATATCATTAGTTC | 14.25 | 14.45 | 14.35 |
| | 3rd-t7-T128 | | | | |
| 55,414 | 2ndCTX-R15- | TTGAGCACACAGTTATTACT | 14.6 | 13.95 | 14.275 |
| | 3rd-t23-T144 | | | | |
| 55,444 | 2ndCTX-R15- | GGCAGCTGGGATGGAAATGG | 16.45 | 11.35 | 13.9 |
| | 3rd-t85-T206 | | | | |
| 56,329 | CTX-R13_T30 | TAGGGCAACCACTTATGAGT | 10 | 17.2 | 13.6 |
| 56,370 | CTX-R13_T25 | CTCAGAACAGGAGTAACTGC | 8.1 | 18.9 | 13.5 |
| 56,356 | CTX-R13_T34 | ACTGATGAGCTGATTGCTTG | 10.5 | 15.3 | 12.9 |
| 55,421 | 2ndCTX-R15- | ACTAAGTTGAAGATGTTAGG | 13.45 | 12.25 | 12.85 |
| | 3rd-t30-T151 | | | | |
| 55,465 | 2ndCTX-R15- | TCGAGATGGCAGTGGCCGGT | 13.85 | 11.1 | 12.475 |
| | 3rd-t5-T126 | | | | |
| 56,411 | 2ndCTX-R13- | TGTAACCTTCAGAGTTTAGG | 14.6 | 10.3 | 12.45 |
| | t5-T65 | | | | |
| 56,377 | CTX-R13_T60 | GAGCAAAGATCTGTGTGTGT | 14.2 | 10.1 | 12.15 |
| 55,464 | 2ndCTX-R15- | GTCGAGATGGCAGTGGCCGG | 13.5 | 10.1 | 11.8 |
| | 3rd-t14-T135 | | | | |
| 55,666 | 2ndCTX-R15- | TGAGTTCAACCTAAGAGGCA | 14.75 | 8.45 | 11.6 |
| | 2nd-t33-T120 | | | | |
| 58,271 | 2ndCTX-R15- | CTAATTATTCACTACTTGAA | 13.25 | 9 | 11.125 |
| | 1st-t25-T67 | | | | |
| 57,723 | 2ndCTX-R13- | GATGACCTCCTAAACTCTGA | 12.1 | 9.9 | 11 |
| | t3-T63 | | | | |
| 55,685 | 2ndCTX-R15- | GCAATTTTGAGGTGTTCGTT | 2.5 | 19.35 | 10.925 |
| | 2nd-t3-T92 | | | | |
| 55,424 | 2ndCTX-R15- | GATGTTAGGAGGGAAGATTG | 11.2 | 10.3 | 10.75 |
| | 3rd-t59-T180 | | | | |
| 55,650 | 2ndCTX-R15- | AAGTGCTTTAAGTATAGGCT | 11.15 | 10.1 | 10.625 |
| | 2nd-t9-T98 | | | | |
| 55,813 | 2ndCTX-R15- | TCATCCTTTTATGACCCATT | 11.9 | 8.95 | 10.425 |
| | 1st-t12-T54 | | | | |
| 58,295 | 2ndCTX-R15- | TGAAAGTCACTGTTGGTCGA | 10.8 | 9.7 | 10.25 |
| | 1st-t1-T43 | | | | |
| 55,428 | 2ndCTX-R15- | AAGATTGTGGGCCAAGTAAC | 10.9 | 9 | 9.95 |
| | 3rd-t8-T129 | | | | |
| 58,431 | 2ndCTX-R15- | TCTCTTCTGTGGCAGGTGCT | 13.15 | 6.6 | 9.875 |
| | 2nd-t22-T111 | | | | |
| 55,694 | 2ndCTX-R15- | CTCTTGCATAGTCCTGCATA | 10.9 | 8.6 | 9.75 |
| | 2nd-t4-T93 | | | | |
| 56,326 | CTX-R13_T51 | GATTCAATGGAATTTTAAGT | 8.1 | 11.2 | 9.65 |
| 56,339 | CTX-R13_T29 | ACCCTTTACTGCTGTGTATG | 8.7 | 10.5 | 9.6 |
| 56,338 | CTX-R13_T10 | CACCCTTTACTGCTGTGTAT | 8.5 | 10.4 | 9.45 |
| 58,305 | 2ndCTX-R15- | TGGGAGTAATGTTTCTCTTC | 10.95 | 7.8 | 9.375 |
| | 1st-t29-T71 | | | | |
| 58,215 | CTX-R15_T16 | AACTGAGTCCCAAGGTGGGT | 9.6 | 8.9 | 9.25 |
| 55,441 | 2ndCTX-R15- | GTGGGCAGCTGGGATGGAAA | 9.3 | 8.7 | 9 |
| | 3rd-t66-T187 | | | | |
| 55,427 | 2ndCTX-R15- | GAAGATTGTGGGCCAAGTAA | 9.9 | 7.65 | 8.775 |
| | 3rd-t10-T131 | | | | |
| 58,664 | 2ndCTX-R15- | AGTGATATCATTAGTTCAGG | 9.1 | 8.35 | 8.725 |
| | 3rd-t22-T143 | | | | |
| 55,442 | 2ndCTX-R15- | TGGGCAGCTGGGATGGAAAT | 9.3 | 7.55 | 8.425 |
| | 3rd-t62-T183 | | | | |
| 55,435 | 2ndCTX-R15- | GTATGTGTGTGGGTATAGGG | 10.95 | 5.15 | 8.05 |
| | 3rd-t69-T190 | | | | |
| 55,499 | 2ndCTX-R15- | GAAAGAAAAGCTAAGGGTGG | 9.7 | 6.35 | 8.025 |
| | 3rd-t87-T208 | | | | |
| 55,782 | 2ndCTX-R15- | CATTACAACTCAAATCAGTC | 8.65 | 6.7 | 7.675 |
| | 1st-t19-T61 | | | | |
| 55,497 | 2ndCTX-R15- | CGAAAAGAAAGAAAAGCTAA | 8.15 | 6.8 | 7.475 |
| | 3rd-t88-T209 | | | | |
| 58,275 | 2ndCTX-R15- | CAAACTAATAATAAGTATCG | 8.45 | 6.45 | 7.45 |
| | 1st-t11-T53 | | | | |
| 55,439 | 2ndCTX-R15- | TGGGTATAGGGTGGGCAGCT | 8.6 | 6.05 | 7.325 |
| | 3rd-t44-T165 | | | | |
| 57,810 | CTX-R13_T17 | TGTACAACCAGTGGTGTTTC | 7.3 | | 7.3 |
| 57,801 | CTX-R13_T40 | TATGAGCATTCATAAACTTC | 7.2 | 7.2 | 7.2 |
| 57,748 | 2ndCTX-R13- | CAAAATATAATCAATCAAGG | 7.9 | 6 | 6.95 |
| | t10-T70 | | | | |
| 57,799 | CTX-R13_T27 | AGGGTTCATGGTAAACCCAG | 6.7 | 7 | 6.85 |
| 55,446 | 2ndCTX-R15- | CTGCTGCTGCTGCTGCACCC | 6.45 | 7.2 | 6.825 |
| | 3rd-t89-T210 | | | | |
| 56,361 | CTX-R13_T7 | AGTGAGTTCCGAAAAGCAAC | 1.9 | 11.7 | 6.8 |
| 55,641 | 2ndCTX-R15- | AATTACTCAAAATATTGTCT | 6.7 | 6.8 | 6.75 |
| | 2nd-t21-T110 | | | | |
| 55,790 | 2ndCTX-R15- | ATCGACCAACAGTGACTTTC | 7.45 | 5.95 | 6.7 |
| | 1st-t4-T46 | | | | |
| 55,400 | 2ndCTX-R15- | CATTTTTGATACATGATGTT | 8.6 | 4.5 | 6.55 |
| | 3rd-t64-T185 | | | | |
| 57,743 | 2ndCTX-R13- | TTATTCAAAAATGAAATAGA | 8.6 | 4.4 | 6.5 |
| | t15-T75 | | | | |
| 55,466 | 2ndCTX-R15- | CGAGATGGCAGTGGCCGGTG | 8.15 | 4.85 | 6.5 |
| | 3rd-t19-T140 | | | | |
| 58,674 | 2ndCTX-R15- | CACACATACACCCCGTTACT | 8.2 | 4.6 | 6.4 |
| | 3rd-t4-T125 | | | | |
| 58,289 | 2ndCTX-R15- | TTTAAGATGAAAAATTCACA | 3.3 | 9.2 | 6.25 |
| | 1st-t46-T88 | | | | |
| 58,323 | 2ndCTX-R15- | CCACCTATCTCAAATTTGCC | 6.15 | 6.1 | 6.125 |
| | 1st-t6-T48 | | | | |
| 58,607 | 2ndCTX-R15- | CCCCAGAAAAACTTAAGATC | 7.6 | 4.5 | 6.05 |
| | 3rd-t18-T139 | | | | |
| 55,399 | 2ndCTX-R15- | GATACTTGAGACTTATAAAA | 7.95 | 4 | 5.975 |
| | 3rd-t54-T175 | | | | |
| 55,504 | 2ndCTX-R15- | GCCAGATCTTAAGTTTTTCT | 7.25 | 4.5 | 5.875 |
| | 3rd-t40-T161 | | | | |
| 55,754 | 2ndCTX-R15- | TTTGTTAGTTGATCAATTGA | 6.9 | 4.7 | 5.8 |
| | 1st-t41-T83 | | | | |
| 57,746 | 2ndCTX-R13- | TACAAAATATAATCAATCAA | 8.5 | 2.75 | 5.625 |
| | t14-T74 | | | | |
| 58,597 | 2ndCTX-R15- | ATAGAATTGGCATTGATAAG | 7.1 | 4.15 | 5.625 |
| | 3rd-t27-T148 | | | | |
| 58,324 | 2ndCTX-R15- | CACCTATCTCAAATTTGCCT | 6.25 | 5 | 5.625 |
| | 1st-t23-T65 | | | | |
| 55,509 | 2ndCTX-R15- | GGGAAATTTAGAAGAAAATA | 5.35 | 5.9 | 5.625 |
| | 3rd-t79-T200 | | | | |
| 58,655 | 2ndCTX-R15- | TGGGGTGGCTTGGACAGTGC | 5.6 | 5.4 | 5.5 |
| | 3rd-t26-T147 | | | | |
| 55,458 | 2ndCTX-R15- | CCTGTAGCTCTGATGTCAGA | 5.55 | 5.35 | 5.45 |
| | 3rd-t63-T184 | | | | |
| 58,265 | 2ndCTX-R15- | GTTGTTTATTTCTTCCAAAT | 5.85 | 4.95 | 5.4 |
| | 1st-t44-T86 | | | | |
| 55,783 | 2ndCTX-R15- | CTCAAATCAGTCGGGTTTCC | 7 | 3.7 | 5.35 |
| | 1st-t2-T44 | | | | |
| 58,610 | 2ndCTX-R15- | TCTTTCTTTTCGGATGAACA | 6.7 | 4 | 5.35 |
| | 3rd-t13-T134 | | | | |
| 55,438 | 2ndCTX-R15- | GTGGGTATAGGGTGGGCAGC | 5.15 | 5.5 | 5.325 |
| | 3rd-t56-T177 | | | | |
| 55,440 | 2ndCTX-R15- | TATAGGGTGGGCAGCTGGGA | 4.4 | 6.2 | 5.3 |
| | 3rd-t58-T179 | | | | |
| 58,318 | 2ndCTX-R15- | CAAATTACTTAGTACATGAT | 5.3 | 4.85 | 5.075 |
| | 1st-t35-T77 | | | | |
| 55,773 | 2ndCTX-R15- | TTGGGAAAGATTGATCTAAT | 5 | 5.1 | 5.05 |
| | 1st-t18-T60 | | | | |
| 55,798 | 2ndCTX-R15- | TGTACACTCAGGTTTGTTGC | 6.55 | 3.5 | 5.025 |
| | 1st-t9-T51 | | | | |
| 58,667 | 2ndCTX-R15- | ATCATTAGTTCAGGAGGCCA | 5 | 4.8 | 4.9 |
| | 3rd-t74-T195 | | | | |
| 58,632 | 2ndCTX-R15- | CTCAGCAGTAGACCAGCCTC | 7.25 | 2.5 | 4.875 |
| | 3rd-t9-T130 | | | | |
| 55,670 | 2ndCTX-R15- | CTAAGAGGCAGGGGAGCCAC | 4.9 | 4.7 | 4.8 |
| | 2nd-t20-T109 | | | | |
| 55,963 | 2ndCTX-R15- | ACTCTTGCATAGTCCTGCAT | 4.95 | 4.25 | 4.6 |
| | 2nd-t5-T94 | | | | |
| 55,476 | 2ndCTX-R15- | AGCCTTTGAGATCCCGAGGC | 5.85 | 3.3 | 4.575 |
| | 3rd-t93-T214 | | | | |
| 58,421 | 2ndCTX-R15- | TATTAGATTGTTCCCTATGC | 5.4 | 3.6 | 4.5 |
| | 2nd-t8-T97 | | | | |
| 57,747 | 2ndCTX-R13- | ACAAAATATAATCAATCAAG | 6.5 | 2.4 | 4.45 |
| | t12-T72 | | | | |
| 55,841 | CTX-R15_T11 | GACCTTAAGGTTTTTGTGGA | 3.5 | 5.3 | 4.4 |
| 58,609 | 2ndCTX-R15- | CCTTAGCTTTTCTTTCTTTT | 5.3 | 3.5 | 4.4 |
| | 3rd-t91-T212 | | | | |
| 55,774 | 2ndCTX-R15- | TGGGAAAGATTGATCTAATT | 5.05 | 3.65 | 4.35 |
| | 1st-t28-T70 | | | | |
| 55,468 | 2ndCTX-R15- | TGGCAGTGGCCGGTGGGGAC | 4.8 | 3.65 | 4.225 |
| | 3rd-t43-T164 | | | | |
| 58,601 | 2ndCTX-R15- | ATTTTGTGATACATTTATTT | 3.3 | 5.05 | 4.175 |
| | 3rd-t68-T189 | | | | |
| 55,430 | 2ndCTX-R15- | AGTAACGGGGTGTATGTGTG | 5.5 | 2.8 | 4.15 |
| | 3rd-t46-T167 | | | | |
| 55,505 | 2ndCTX-R15- | CCAGATCTTAAGTTTTTCTG | 4.7 | 3.45 | 4.075 |
| | 3rd-t51-T172 | | | | |
| 58,666 | 2ndCTX-R15- | TATCATTAGTTCAGGAGGCC | 4.25 | 3.5 | 3.875 |
| | 3rd-t90-T211 | | | | |
| 55,683 | 2ndCTX-R15- | TTGAACTATAAGCAATTTTG | 3.9 | 3.85 | 3.875 |
| | 2nd-t19-T108 | | | | |
| 55,653 | 2ndCTX-R15- | GCTGGGAAGTAAAATGCTAA | 4.8 | 2.9 | 3.85 |
| | 2nd-t14-T103 | | | | |
| 58,308 | 2ndCTX-R15- | CATTGGCAATTACATATGCC | 3.7 | 4 | 3.85 |
| | 1st-t5-T47 | | | | |
| 55,684 | 2ndCTX-R15- | AGCAATTTTGAGGTGTTCGT | 3.5 | 4.05 | 3.775 |
| | 2nd-t2-T91 | | | | |
| 56,306 | CTX-R13_T47 | CATAATGCATTAAAAACCTC | 3.7 | 3.6 | 3.65 |
| 55,386 | 2ndCTX-R15- | ATATATTTCTCTTTCTGAAG | 7 | 0.3 | 3.65 |
| | 3rd-t72-T193 | | | | |
| 55,503 | 2ndCTX-R15- | AGCCAGATCTTAAGTTTTTC | 5.2 | 2.05 | 3.625 |
| | 3rd-t36-T157 | | | | |
| 58,648 | 2ndCTX-R15- | TTCATTTTGACAAACTAGTT | 3.2 | 4 | 3.6 |
| | 3rd-t37-T158 | | | | |
| 55,690 | 2ndCTX-R15- | GGTTAATGAGACATTTGAAA | 3.6 | 3.5 | 3.55 |
| | 2nd-t23-T112 | | | | |
| 55,781 | 2ndCTX-R15- | GCATTACAACTCAAATCAGT | 3.45 | 3.5 | 3.475 |
| | 1st-t16-T58 | | | | |
| 55,396 | 2ndCTX-R15- | AGAATTGTAGTGTTATTTTG | 5.15 | 1.45 | 3.3 |
| | 3rd-t70-T191 | | | | |
| 55,830 | CTX-R15_T1 | TAATGTATACTGGGACCCTT | 4.4 | 2 | 3.2 |
| 55,838 | CTX-R15_T37 | TTCTGTCCTTAAAGACCTTA | 3.3 | 3.1 | 3.2 |
| 58,631 | 2ndCTX-R15- | TCTCAGCAGTAGACCAGCCT | 6.15 | 0.2 | 3.175 |
| | 3rd-t20-T141 | | | | |
| 55,770 | 2ndCTX-R15- | CAATCATGTACTAAGTAATT | 3.5 | 2.8 | 3.15 |
| | 1st-t30-T72 | | | | |
| 57,786 | CTX-R13_T50 | CTTAAAATTCCATTGAATCT | 3.9 | 2.1 | 3 |
| 55,665 | 2ndCTX-R15- | TTGAGTTCAACCTAAGAGGC | 2.2 | 3.8 | 3 |
| | 2nd-t7-T96 | | | | |
| 55,831 | CTX-R15_T6 | AATGTATACTGGGACCCTTG | 3.5 | 2.3 | 2.9 |
| 58,235 | CTX-R15_T20 | TTCCTTCCACAAAAACCTTA | 2.9 | 2.9 | 2.9 |
| 55,852 | CTX-R15_T10 | GCACCTAACATGATATATTA | 4 | 1.8 | 2.9 |
| 55,862 | CTX-R15_T36 | GACTTGTTTTCATTGTTCTC | 4.1 | 1.7 | 2.9 |
| 55,811 | 2ndCTX-R15- | AGTGAATAATTAGTTTCTTT | 3.45 | 2.35 | 2.9 |
| | 1st-t43-T85 | | | | |
| 58,649 | 2ndCTX-R15- | TCATTTTGACAAACTAGTTT | 2.95 | 2.7 | 2.825 |
| | 3rd-t50-T171 | | | | |
| 58,438 | 2ndCTX-R15- | TACTTAAAGCACTTGCTCTC | 4.1 | 1.5 | 2.8 |
| | 2nd-t11-T100 | | | | |
| 55,875 | CTX-R15_T18 | AATGGAAATTTAAGCTGTTC | 3.2 | 2.2 | 2.7 |
| 55,506 | 2ndCTX-R15- | CAGATCTTAAGTTTTTCTGG | 3.05 | 2.25 | 2.65 |
| | 3rd-t47-T168 | | | | |
| 55,496 | 2ndCTX-R15- | CCGAAAAGAAAGAAAAGCTA | 1.6 | 3.65 | 2.625 |
| | 3rd-t86-T207 | | | | |
| 58,244 | CTX-R15_T4 | CAAGGGTCCCAGTATACATT | 2.9 | 2.3 | 2.6 |
| 56,412 | 2ndCTX-R13- | TAGGAGGTCATCTGCTGTCA | 2.4 | 2.8 | 2.6 |
| | t2-T62 | | | | |
| 55,688 | 2ndCTX-R15- | TGCAGTTGAAATATTTTTTG | 2.75 | 2.3 | 2.525 |
| | 2nd-t26-T115 | | | | |
| 58,241 | CTX-R15 T30 | ATTCATCTTTGCCTCCCCAA | 3.4 | 1.6 | 2.5 |
| 58,240 | CTX-R15_T32 | GATTCATCTTTGCCTCCCCA | 3 | 1.8 | 2.4 |
| 55,833 | CTX-R15_T3 | GTATACTGGGACCCTTGGGG | 2.6 | 2 | 2.3 |
| 55,860 | CTX-R15_T5 | CATCAGTGGGATATTGATAT | 2.7 | 1.7 | 2.2 |
| 58,207 | CTX-R15 T22 | TGGGTGCTGAATTTCATCTG | 3.4 | 0.8 | 2.1 |
| 58,626 | 2ndCTX-R15- | ATCTCCTCTCTTCTAACAAA | 4.1 | 0.1 | 2.1 |
| | 3rd-t78-T199 | | | | |
| 55,844 | CTX-R15_T7 | AGCACTTATATGTGTGTAAC | 1.6 | 2.5 | 2.05 |
| 58,237 | CTX-R15_T27 | CAAAAACCTTAAGGTCTTTA | 1.7 | 2.3 | 2 |
| 58,227 | CTX-R15_T19 | CTACCTTAATATATCATGTT | 1.7 | 2.1 | 1.9 |
| 58,204 | CTX-R15_T39 | ATTCTGAAAATTTAATATGT | 2.5 | 1.3 | 1.9 |
| 58,652 | 2ndCTX-R15- | CAAACTAGTTTGGGGTGGCT | 3.15 | 0.6 | 1.875 |
| | 3rd-t12-T133 | | | | |
| 55,829 | CTX-R15_T2 | CTAATGTATACTGGGACCCT | 1.9 | 1.8 | 1.85 |
| 58,205 | CTX-R15_T8 | TGTGGGTGCTGAATTTCATC | 3 | 0.7 | 1.85 |
| 55,657 | 2ndCTX-R15- | TAAAGGAATGAGAAGGCATT | 2.55 | 1.15 | 1.85 |
| | 2nd-t24-T113 | | | | |
| 55,649 | 2ndCTX-R15- | CAAGTGCTTTAAGTATAGGC | 2.1 | 1.55 | 1.825 |
| | 2nd-t6-T95 | | | | |
| 58,201 | CTX-R15_T9 | TCTTTTCAAAGGATCTCACC | 2.7 | 0.9 | 1.8 |
| 58,429 | 2ndCTX-R15- | TCCTAATTCTCTTCTGTGGC | 1.95 | 1.6 | 1.775 |
| | 2nd-t17-T106 | | | | |
| 55,518 | 2ndCTX-R15- | AATAAAATAAAAAGTGCAAA | 2.05 | 1.5 | 1.775 |
| | 3rd-t76-T197 | | | | |
| 55,865 | CTX-R15_T21 | CTCAGGTACCTCAGCCAGCA | 1.6 | 1.7 | 1.65 |
| 58,264 | 2ndCTX-R15- | GGTTGTTTATTTCTTCCAAA | 1.8 | 1.5 | 1.65 |
| | 1st-t42-T84 | | | | |
| 55,859 | CTX-R15_T25 | TATTTATAAGATACATCAGT | 1.3 | 1.9 | 1.6 |
| 55,873 | CTX-R15_T40 | CACATATTAAATTTTCAGAA | 2.7 | 0.5 | 1.6 |
| 55,839 | CTX-R15_T29 | TAAAGACCTTAAGGTTTTTG | 0.9 | 2.3 | 1.6 |
| 58,213 | CTX-R15_T12 | GCAGAACTGAGTCCCAAGGT | 2.9 | 0.3 | 1.6 |
| 55,868 | CTX-R15_T24 | GCCTCTTTCCCACCCACCTT | 2.7 | 0.4 | 1.55 |
| 58,206 | CTX-R15_T17 | GTGGGTGCTGAATTTCATCT | 2.3 | 0.8 | 1.55 |
| 55,810 | 2ndCTX-R15- | TAGTGAATAATTAGTTTCTT | 1.45 | 1.6 | 1.525 |
| | 1st-t40-T82 | | | | |
| 58,231 | CTX-R15_T13 | TCCTCTTCTGACAGTGTTTA | 1.2 | 1.8 | 1.5 |
| 56,403 | 2ndCTX-R13- | TTATATAAATATGTTACATC | 1.3 | 1.6 | 1.45 |
| | t11-T71 | | | | |
| 58,218 | CTX-R15_T33 | TCCCAAGGTGGGTGGGAAAG | 1.7 | 1.2 | 1.45 |
| 55,867 | CTX-R15_T26 | AGCCTCTTTCCCACCCACCT | 2.6 | 0.3 | 1.45 |
| 58,214 | CTX-R15_T15 | GAACTGAGTCCCAAGGTGGG | 2.6 | 0.1 | 1.35 |
| 58,219 | CTX-R15_T23 | TGGGAAAGAGGCTGCCATGC | | 1.3 | 1.3 |
| 58,211 | CTX-R15_T42 | TGGGGCAGAACTGAGTCCCA | 2.4 | 0.2 | 1.3 |
| 58,200 | CTX-R15_T35 | TTCTTCAGGTGTCTTTTCAA | 2.3 | 0.2 | 1.25 |
| 58,598 | 2ndCTX-R15- | TAGAATTGGCATTGATAAGA | 1.25 | 1 | 1.125 |
| | 3rd-t41-T162 | | | | |
| 55,858 | CTX-R15_T34 | TTATTTATAAGATACATCAG | 1.2 | 1 | 1.1 |
| 55,753 | 2ndCTX-R15- | TTTTGTTAGTTGATCAATTG | 1.1 | 1 | 1.05 |
| | 1st-t31-T73 | | | | |
| 55,849 | CTX-R15_T14 | ACCATAAACACTGTCAGAAG | 1 | 1 | 1 |
| 58,212 | CTX-R15_T31 | GGCAGAACTGAGTCCCAAGG | 1.8 | 0.2 | 1 |
| 58,594 | 2ndCTX-R15- | ATTTCTGAAAAAAATAGAAT | 1 | 0.9 | 0.95 |
| | 3rd-t81-T202 | | | | |
| 57,728 | 2ndCTX-R13- | TAACATATTTATATAACGAA | 0.8 | 0.9 | 0.85 |
| | t8-T68 | | | | |

Note that the SEQ ID NOs represent the DNA sequence of the genomic target, while the gRNA or sgRNA spacer sequence will be the RNA version of the DNA sequence.

### Example 14—Bioinformatics Analysis of the Guide Strands

[0644] Candidate guides will be screened and selected in a multi-step process that involves both theoretical binding and experimentally assessed activity. By way of illustration, candidate guides having sequences that match a particular on-target site, such as a site within the RAG1 gene, with adjacent PAM can be assessed for their potential to cleave at off-target sites having similar sequences, using one or more of a variety of bioinformatics tools available for assessing off-target binding, as described and illustrated in more detail below, in order to assess the likelihood of effects at chromosomal positions other than those intended. Candidates predicted to have relatively lower potential for off-target activity can then be assessed experimentally to measure their on-target activity, and then off-target activities at various sites. Suitable guides have sufficiently high on-target activity to achieve desired levels of gene editing at the selected locus, and relatively lower off-target activity to reduce the likelihood of alterations at other chromosomal loci. The ratio of on-target to off-target activity is often referred to as the “specificity” of a guide.

[0645] For initial screening of predicted off-target activities, there are a number of bioinformatics tools known and publicly available that can be used to predict the most likely off-target sites; and since binding to target sites in the CRISPR/Cas9/Cpf1 nuclease system is driven by Watson-Crick base pairing between complementary sequences, the degree of dissimilarity (and therefore reduced potential for off-target binding) is essentially related to primary sequence differences: mismatches and bulges, i.e. bases that are changed to a non-complementary base, and insertions or deletions of bases in the potential off-target site relative to the target site. An exemplary bioinformatics tool called COSMID (CRISPR Off-target Sites with Mismatches, Insertions and Deletions) (available on the web at crispr.bme.gatech.edu) compiles such similarities. Other bioinformatics tools include, but are not limited to, GUIDO, autoCOSMID, and CCtop.

[0646] Bioinformatics were used to minimize off-target cleavage in order to reduce the detrimental effects of mutations and chromosomal rearrangements. Studies on CRISPR/Cas9 systems suggested the possibility of high off-target activity due to nonspecific hybridization of the guide strand to DNA sequences with base pair mismatches and/or bulges, particularly at positions distal from the PAM region. Therefore, it is important to have a bioinformatics tool that can identify potential off-target sites that have insertions and/or deletions between the RNA guide strand and genomic sequences, in addition to base-pair mismatches. The bioinformatics-based tool, COSMID (CRISPR Off-target Sites with Mismatches, Insertions and Deletions) was therefore used to search genomes for potential CRISPR off-target sites (available on the web at crispr.bme.gatech.edu). COSMID output ranked lists of the potential off-target sites based on the number and location of mismatches, allowing more informed choice of target sites, and avoiding the use of sites with more likely off-target cleavage.

[0647] Additional bioinformatics pipelines were employed that weigh the estimated on- and/or off-target activity of gRNA targeting sites in a region. Other features that may be used to predict activity include information about the cell type in question, DNA accessibility, chromatin state, transcription factor binding sites, transcription factor binding data, and other CHIP-seq data. Additional factors are weighed that predict editing efficiency, such as relative positions and directions of pairs of gRNAs, local sequence features and micro-homologies.

### Example 15—Testing of Preferred Guides in Cells for On-Target Activity

[0648] The gRNAs predicted to have the lowest off-target activity will then be tested for on-target activity in a model cell line, such as HEK293T or K562, and evaluated for indel frequency using TIDE or next generation sequencing. TIDE is a web tool to rapidly assess genome editing by CRISPR-Cas9 of a target locus determined by a guide RNA (gRNA or sgRNA). Based on the quantitative sequence trace data from two standard capillary sequencing reactions, the TIDE software quantifies the editing efficacy and identifies the predominant types of insertions and deletions (indels) in the DNA of a targeted cell pool. See Brinkman et al, Nucl. Acids Res. (2014) for a detailed explanation and examples. Next-generation sequencing (NGS), also known as high-throughput sequencing, is the catch-all term used to describe a number of different modern sequencing technologies including: Illumina (Solexa) sequencing, Roche 454 sequencing, Ion torrent: Proton/PGM sequencing, and SOLiD sequencing. These recent technologies allow one to sequence DNA and RNA much more quickly and cheaply than the previously used Sanger sequencing, and as such have revolutionized the study of genomics and molecular biology.

[0649] Transfection of tissue culture cells allows screening of different constructs and a robust means of testing activity and specificity. Tissue culture cell lines, such as K562 or 293T are easily transfected and result in high activity. These or other cell lines will be evaluated to determine the cell lines that match with CD34+ and provide the best surrogate. These cells will then be used for many early stage tests. For example, individual gRNAs for S. pyogenes Cas9 will be transfected into the cells using plasmids, such as, for example, CTx-1, CTx-2, or CTx-3, which are suitable for expression in human cells. Several days later, the genomic DNA is harvested and the target site amplified by PCR. The cutting activity can be measured by the rate of insertions, deletions and mutations introduced by NHEJ repair of the free DNA ends. Although this method cannot differentiate correctly repaired sequences from uncleaved DNA, the level of cutting can be gauged by the amount of mis-repair. Off-target activity can be observed by amplifying identified putative off-target sites and using similar methods to detect cleavage. Translocation can also be assayed using primers flanking cut sites, to determine if specific cutting and translocations happen. Un-guided assays have been developed allowing complementary testing of off-target cleavage including guide-seq. The gRNA or pairs of gRNA with significant activity can then be followed up in cultured cells to measure correction of the RAG1 mutation. Off-target events can be followed again. Similarly, CD34+ cells can be transfected and the level of gene correction and possible off-target events measured. These experiments allow optimization of nuclease and donor design and delivery.

### Example 16—Testing of Preferred Guides in Cells for Off-Target Activity

[0650] The gRNAs having the best on-target activity from the TIDE and next generation sequencing studies in the above example will then be tested for off-target activity using whole genome sequencing. Candidate gRNAs will be more completely evaluated in CD34+ cells or iPSCs.

### Example 17—Testing Different Approaches for HDR Gene Editing

[0651] After testing the gRNAs for both on-target activity and off-target activity, the mutation correction and knock-in strategies will be tested for HDR gene editing.

[0652] For the mutation correction approach, the donor DNA template will be provided as a short single-stranded oligonucleotide, a short double-stranded oligonucleotide (PAM sequence intact/PAM sequence mutated), a long single-stranded DNA molecule (PAM sequence intact/PAM sequence mutated) or a long double-stranded DNA molecule (PAM sequence intact/PAM sequence mutated). In addition, the donor DNA template will be delivered by AAV.

[0653] For the cDNA knock-in approach, a single-stranded or double-stranded DNA having homologous arms to the 11p13 region may include more than 40 nt of the first exon (the first coding exon) of the RAG1 gene, the complete CDS of the RAG1 gene and 3′UTR of the RAG1 gene, and at least 40 nt of the following intergenic region. The single-stranded or double-stranded DNA having homologous arms to the 11p13 region, which includes more than 80 nt of the first exon of the RAG1 gene, the complete CDS of the RAG1 gene and 3′UTR of the RAG1 gene, and at least 80 nt of the following intergenic region. The single-stranded or double-stranded DNA having homologous arms to the 11p13 region may include more than 100 nt of the first exon of the RAG1 gene, the complete CDS of the RAG1 gene and 3′UTR of the RAG1 gene, and at least 100 nt of the following intergenic region. The single-stranded or double-stranded DNA having homologous arms to the 11p13 region may include more than 150 nt of the first exon of the RAG1 gene, the complete CDS of the RAG1 gene and 3′UTR of the RAG1 gene, and at least 150 nt of the following intergenic region. The single-stranded or double-stranded DNA having homologous arms to the 11p13 region may include more than 300 nt of the first exon of the RAG1 gene, the complete CDS of the RAG1 gene and 3′UTR of the RAG1 gene, and at least 300 nt of the following intergenic region. The single-stranded or double-stranded DNA having homologous arms to the 11p13 region may include more than 400 nt of the first exon of the RAG1 gene, the complete CDS of the RAG1 gene and 3′UTR of the RAG1 gene, and at least 400 nt of the following the first intergenic region. In some embodiments, the DNA template will be delivered by AAV.

[0654] For the cDNA or minigene knock-in approach, a single-stranded or double-stranded DNA having homologous arms to the 11p13, which includes more than 80 nt of the second exon (the first coding exon) of the RAG1 gene, the complete CDS of the RAG1 gene and 3′UTR of the RAG1 gene, and at least 80 nt of the following intergenic region. Alternatively, the DNA template will be delivered by AAV.

### Example 18—Re-Assessment of Lead CRISPR-Cas9/DNA Donor Combinations

[0655] After testing the different strategies for HDR or NHEJ gene editing, the lead CRISPR-Cas9/DNA donor combinations will be re-assessed in primary human cells for efficiency of deletion, recombination, and off-target specificity. Cas9 mRNA or RNP will be formulated into lipid nanoparticles for delivery, sgRNAs will be formulated into nanoparticles or delivered as AAV, and donor DNA will be formulated into nanoparticles or delivered as AAV.

### Example 19—In Vivo Testing in Relevant Animal Model

[0656] After the CRISPR-Cas9/DNA donor combinations have been re-assessed, the lead formulations will be tested in vivo in an animal model.

[0657] Culture in human cells allows direct testing on the human target and the background human genome, as described above.

[0658] Preclinical efficacy and safety evaluations can be observed through engraftment of modified mouse or human CD34+ cells in NSG (NOD/SCID/gamma(c)(null)), or similar mice. The modified cells can be observed in the months after engraftment.

### Example 20—Clinical Expectations

[0659] Gene therapy would result in developing B and T cells in central lymphoid organs and in the appearance of B and T cells in peripheral blood. Serum Ig levels can be measured and compared to the range found in patients without immunodeficiencies. Ig and TCR Vβ gene segment usage in B- and T-cells, respectively, should be substantially greater than control conditions in which RAG1 is deficient, as a measure of the intended RAG-mediated gene editing. Animal models have indicated that even low frequencies of B cells produced WT levels of serum immunoglobulins. T cell function can be assayed through TCR stimulation and cytokine measurement, and compared to both fully deficient and WT levels.

[0660] Clinical testing would include long term evaluation of B- and T-cells from a RAG1-corrected cell type to determine if there are any resulting growth abnormalities or signs of oncogene activation.

### NOTE REGARDING ILLUSTRATIVE EMBODIMENTS

[0661] While the present disclosure provides descriptions of various specific embodiments for the purpose of illustrating various aspects of the present invention and/or its potential applications, it is understood that variations and modifications will occur to those skilled in the art. Accordingly, the invention or inventions described herein should be understood to be at least as broad as they are claimed, and not as more narrowly defined by particular illustrative embodiments provided herein.

[0662] Any patent, publication, or other disclosure material identified herein is incorporated by reference into this specification in its entirety unless otherwise indicated, but only to the extent that the incorporated material does not conflict with existing descriptions, definitions, statements, or other disclosure material expressly set forth in this specification. As such, and to the extent necessary, the express disclosure as set forth in this specification supersedes any conflicting material incorporated by reference. Any material, or portion thereof, that is said to be incorporated by reference into this specification, but which conflicts with existing definitions, statements, or other disclosure material set forth herein, is only incorporated to the extent that no conflict arises between that incorporated material and the existing disclosure material. Applicants reserve the right to amend this specification to expressly recite any subject matter, or portion thereof, incorporated by reference herein.

What is claimed is:

1. A method for editing the Recombination Activating Gene 1 (RAG1) gene in a human cell by genome editing, the method comprising the step of introducing into the human cell one or more deoxyribonucleic acid (DNA) endonucleases to effect one or more single-strand breaks (SSBs) or double-strand breaks (DSBs) within or near the RAG1 gene or other DNA sequences that encode regulatory elements of the RAG1 gene that results in a permanent deletion, insertion, correction, or modulation of expression or function of one or more mutations or exons within or near or affecting the expression or function of the RAG1 gene or other DNA sequences that encode regulatory elements of the RAG1 gene and restoration of RAG1 protein activity.

2. A method for inserting a RAG1 gene in a human cell by genome editing, the method comprising introducing into the human cell one or more deoxyribonucleic acid (DNA) endonucleases to effect one or more single-strand breaks (SSBs) or double-strand breaks (DSBs) within or near a safe harbor locus that results in a permanent insertion of the RAG1 gene or minigene, and results in restoration of RAG1 activity.

3. An ex vivo method for treating a patient with severe combined immunodeficiency (SCID) or Omenn Syndrome comprising the steps of:
i) isolating a white blood cell from the patient;
ii) editing within or near the Recombination Activating Gene 1 (RAG1) gene of the white blood cell or other DNA sequences that encode regulatory elements of the RAG1 gene of the white blood cell or editing within or near a safe harbor locus of the white blood cell; and
iii) implanting the genome-edited white blood cell into the patient.

4. The method of claim 3, wherein the isolating step comprises: cell differential centrifugation, cell culturing, and combinations thereof.

5. The method of any one of claims 3-4, wherein the editing step comprises introducing into the white blood cell one or more deoxyribonucleic acid (DNA) endonucleases to effect one or more single-strand breaks (SSBs) or double-strand breaks (DSBs) within or near the RAG1 gene or other DNA sequences that encode regulatory elements of the RAG1 gene that results in a permanent deletion, insertion, correction, or modulation of expression or function of one or more mutations or exons within or near or affecting the expression or function the RAG1 gene or other DNA sequences that encode regulatory elements of the RAG1 gene, or within or near a safe harbor locus that results in permanent insertion of the RAG1 gene or minigene and restoration of RAG1 protein activity.

6. The method of claim 5, wherein the safe harbor locus is selected from the group consisting of AAVS1 (PPP1R12C), ALB, Angptl3, ApoC3, ASGR2, CCR5, FIX (F9), G6PC, Gys2, HGD, Lp(a), Pcsk9, Serpinal, TF, and TTR.

7. The method of any one of claims 3-6, wherein the implanting step comprises implanting the genome-edited white blood cell into the patient by transplantation, local injection, or systemic infusion, or combinations thereof.

8. An ex vivo method for treating a patient with severe combined immunodeficiency (SCID) or Omenn Syndrome comprising the steps of:
i) isolating a hematopoietic progenitor cell from the patient;
ii) editing the Recombination Activating Gene 1 (RAG1) gene of the hematopoietic progenitor cell or other DNA sequences that encode regulatory elements of the RAG1 gene of the hematopoietic progenitor cell or editing within or near a safe harbor locus of the hematopoietic progenitor cell; and
iii) implanting the cell into the patient.

9. The method of claim 8, wherein the method further comprises treating the patient with granulocyte colony stimulating factor (GCSF) prior to the isolating step.

10. The method of claim 9, wherein the treating step is performed in combination with Plerixaflor.

11. The method of any one of claims 8-10, wherein the isolating step comprises isolating CD34+ cells.

12. The method of any one of claims 8-11, wherein the editing step comprises introducing into the progenitor cell one or more deoxyribonucleic acid (DNA) endonucleases to effect one or more single-strand breaks (SSBs) or double-strand breaks (DSBs) within or near the RAG1 gene or other DNA sequences that encode regulatory elements of the RAG1 gene that results in a permanent deletion, insertion, correction, or modulation of expression or function of one or more mutations or exons within or near or affecting the expression or function of the RAG1 gene or other DNA sequences that encode regulatory elements of the RAG1 gene, or within or near a safe harbor locus that results in permanent insertion of the RAG1 gene or minigene and restoration of RAG1 protein activity.

13. The method of claim 12, wherein the safe harbor locus is selected from the group consisting of AAVS1 (PPP1R12C), ALB, Angptl3, ApoC3, ASGR2, CCR5, FIX (F9), G6PC, Gys2, HGD, Lp(a), Pcsk9, Serpinal, TF, and TTR.

14. The method of any one of claims 8-13, wherein the implanting step comprises implanting the progenitor cell into the patient by transplantation, local injection, or systemic infusion, or combinations thereof.

15. An in vivo method for treating a patient with severe combined immunodeficiency (SCID) or Omenn Syndrome comprising the step of editing the Recombination Activating Gene 1 (RAG1) gene in a cell of the patient, or other DNA sequences that encode regulatory elements of the RAG1 gene, or editing within or near a safe harbor locus in a cell of the patient.

16. The method of claim 15, wherein the editing step comprises introducing into the cell one or more deoxyribonucleic acid (DNA) endonucleases to effect one or more single-strand breaks (SSBs) or double-strand breaks (DSBs) within or near the RAG1 gene or other DNA sequences that encode regulatory elements of the RAG1 gene that results in a permanent deletion, insertion, correction, or modulation of one or more mutations or exons within or near the RAG1 gene or other DNA sequences that encode regulatory elements of the RAG1 gene, or within or near a safe harbor locus that results in permanent insertion of the RAG1 gene or minigene, and restoration of RAG1 protein activity.

17. The method of claim 16, wherein the safe harbor locus is selected from the group consisting of AAVS1 (PPP1R12C), ALB, Angptl3, ApoC3, ASGR2, CCR5, FIX (F9), G6PC, Gys2, HGD, Lp(a), Pcsk9, Serpinal, TF, and TTR.

18. The method of any one of claims 15-17, wherein the cell is a bone marrow cell, a hematopoietic progenitor cell, or a CD34+ cell.

19. The method of any one of claims 1, 2, 5, 12, or 16, wherein the one or more DNA endonucleases is a Cas1, Cas1B, Cas2, Cas3, Cas4, Cas5, Cas6, Cas7, Cas8, Cas9 (also known as Csn1 and Csx12), Cas100, Csy1, Csy2, Csy3, Cse1, Cse2, Csc1, Csc2, Csa5, Csn2, Csm2, Csm3, Csm4, Csm5, Csm6, Cmr1, Cmr3, Cmr4, Cmr5, Cmr6, Csb1, Csb2, Csb3, Csx17, Csx14, Csx10, Csx16, CsaX, Csx3, Csx1, Csx15, Csf1, Csf2, Csf3, Csf4, or Cpf1 endonuclease; or a homolog thereof, recombination of the naturally occurring molecule, codon-optimized, or modified version thereof, and combinations thereof.

20. The method of claim 19, wherein the method comprises introducing into the cell one or more polynucleotides encoding the one or more DNA endonucleases.

21. The method of claim 19, wherein the method comprises introducing into the cell one or more ribonucleic acids (RNAs) encoding the one or more DNA endonucleases.

22. The method of any one of claims 20 or 21, wherein the one or more polynucleotides or one or more RNAs is one or more modified polynucleotides or one or more modified RNAs.

23. The method of claim 20, wherein the DNA endonuclease is a protein or polypeptide.

24. The method of any one of the preceding claims, wherein the method further comprises introducing into the cell one or more guide ribonucleic acids (gRNAs).

25. The method of claim 24, wherein the one or more gRNAs are single-molecule guide RNA (sgRNAs).

26. The method of any one of claims 24-25, wherein the one or more gRNAs or one or more sgRNAs is one or more modified gRNAs or one or more modified sgRNAs.

27. The method of any one of claims 24-26, wherein the one or more DNA endonucleases is pre-complexed with one or more gRNAs or one or more sgRNAs.

28. The method of any one of the preceding claims, wherein the method further comprises introducing into the cell a polynucleotide donor template comprising at least a portion of the wild-type RAG1 gene or minigene or cDNA.

29. The method of claim 28, wherein the at least a portion of the wild-type RAG1 gene or minigene or cDNA is exon 1, exon 2, intronic regions, fragments or combinations thereof, or the entire RAG1 gene, DNA sequences that encode wild type regulatory elements of the RAG1 gene, minigene or cDNA.

30. The method of any one of claims 28-29, wherein the donor template is either a single or double stranded polynucleotide.

31. The method of any one of claims 28-30, wherein the donor template has arms homologous to the 11p13 region.

32. The method of any one of claims 1, 2, 5, 12, or 16, wherein the method further comprises introducing into the cell one guide ribonucleic acid (gRNA) and a polynucleotide donor template comprising at least a portion of the wild-type RAG1 gene, and wherein the one or more DNA endonucleases is one or more Cas9 or Cpf1 endonucleases that effect one single-strand breaks (SSBs) or double-strand break (DSB) at a locus within or near the RAG1 gene or other DNA sequences that encode regulatory elements of the RAG1 gene, or within or near a safe harbor locus that facilitates insertion of a new sequence from the polynucleotide donor template into the chromosomal DNA at the locus or safe harbor locus that results in permanent insertion or correction of a part of the chromosomal DNA of the RAG1 gene or other DNA sequences that encode regulatory elements of the RAG1 gene proximal to the locus or safe harbor locus and restoration of RAG1 protein activity, and wherein the gRNA comprises a spacer sequence that is complementary to a segment of the locus or safe harbor locus.

33. The method of claim 32, wherein proximal means nucleotides both upstream and downstream of the locus or safe harbor locus.

34. The method of any one of claims 1, 2, 5, 12, or 16, wherein the method further comprises introducing into the cell two guide ribonucleic acid (gRNAs) and a polynucleotide donor template comprising at least a portion of the wild-type RAG1 gene, and wherein the one or more DNA endonucleases is two or more Cas9 or Cpf1 endonucleases that effect a pair of single-strand breaks (SSBs) or double-strand breaks (DSBs), the first at a 5′ locus and the second at a 3′ locus, within or near the RAG1 gene or other DNA sequences that encode regulatory elements of the RAG1 gene, or within or near a safe harbor locus that facilitates insertion of a new sequence from the polynucleotide donor template into the chromosomal DNA between the 5′ locus and the 3′ locus that results in permanent insertion or correction of the chromosomal DNA between the 5′ locus and the 3′ locus within or near the RAG1 gene or other DNA sequences that encode regulatory elements of the RAG1 gene, or within or near a safe harbor locus and restoration of RAG1 protein activity, and wherein the first guide RNA comprises a spacer sequence that is complementary to a segment of the 5′ locus and the second guide RNA comprises a spacer sequence that is complementary to a segment of the 3′ locus.

35. The method of any one of claims 32-34, wherein the one or two gRNAs are one or two single-molecule guide RNA (sgRNAs).

36. The method of any one of claims 32-35, wherein the one or two gRNAs or one or two sgRNAs is one or two modified gRNAs or one or two modified sgRNAs.

37. The method of any one of claims 32-36, wherein the one or more DNA endonucleases is pre-complexed with one or two gRNAs or one or two sgRNAs.

38. The method of any one of claims 32-37, wherein the at least a portion of the wild-type RAG1 gene or cDNA is exon 1, exon 2, intronic regions, fragments or combinations thereof, the entire RAG1 gene, DNA sequences that encode wildtype regulatory elements of the RAG1 gene, minigene, or cDNA.

39. The method of any one of claims 32-38, wherein the donor template is either a single or double stranded polynucleotide.

40. The method of any one of claims 25-32, wherein the donor template has arms homologous to the 11p13 region.

41. The method of claim 38, wherein the locus, or 5′ locus and 3′ locus are in the first or second exon or intron of the RAG1 gene.

42. The method of any one of claims 1, 2, 5, 12, or 16-41, wherein the insertion or correction is by homology directed repair (HDR) or non-homologous end joining (NHEJ).

43. The method of any one of claims 1, 2, 5, 12, or 16, wherein the method further comprises introducing into the cell two guide ribonucleic acid (gRNAs), and wherein the one or more DNA endonucleases is two or more Cas9 or Cpf1 endonucleases that effect a pair of double-strand breaks (DSBs), the first at a 5′ locus and the second at a 3′ locus, within or near the RAG1 gene that causes a deletion of the chromosomal DNA between the 5′ locus and the 3′ locus that results in permanent deletion of the chromosomal DNA between the 5′ locus and the 3′ locus within or near the RAG1 gene and restoration of RAG1 protein activity, and wherein the first guide RNA comprises a spacer sequence that is complementary to a segment of the 5′ locus and the second guide RNA comprises a spacer sequence that is complementary to a segment of the 3′ locus.

44. The method of claim 43, wherein the two gRNAs are two single-molecule guide RNA (sgRNAs).

45. The method of any one of claims 43-44, wherein the two gRNAs or two sgRNAs are two modified gRNAs or two modified sgRNAs.

46. The method of any one of claims 43-45, wherein the one or more DNA endonucleases is pre-complexed with one or two gRNAs or one or two sgRNAs.

47. The method of any one of claims 43-46, wherein both the 5′ locus and 3′ locus are in or near either the first exon, first intron, or second exon of the RAG1 gene.

48. The method of any one of claim 43-46, wherein the deletion is a deletion of 1 kb or less.

49. The method of any one of claims 1, 2, 5, 12, or 16-43, wherein the Cas9 or Cpf1 mRNA, gRNA, and donor template are either each formulated into separate lipid nanoparticles or all co-formulated into a lipid nanoparticle.

50. The method of any one of claims 1, 2, 5, 12, or 16-43, wherein the Cas9 or Cpf1 mRNA is formulated into a lipid nanoparticle, and both the gRNA and donor template are delivered by a viral vector.

51. The method of claim 50, wherein the viral vector is an adeno-associated virus (AAV) vector.

52. The method of claim 51, wherein the AAV vector is an AAV6 vector.

53. The method of any one of claims 1, 2, 5, 12, or 16-43, wherein the Cas9 or Cpf1 mRNA, gRNA and a donor template are either each formulated into separate exosomes or all co-formulated into an exosome.

54. The method of any one of claims 1, 2, 5, 12, or 16-43, wherein the Cas9 or Cpf1 mRNA is formulated into a lipid nanoparticle, and the gRNA is delivered to the cell by electroporation and donor template is delivered to the cell by a viral vector.

55. The method of claim 54, wherein the viral vector is an adeno-associated virus (AAV) vector.

56. The method of claim 55, wherein the AAV vector is an AAV6 vector.

57. The method of any one of claims 1, 2, 5, 12, or 16-43, wherein the gRNA is delivered to the cell by electroporation and donor template is delivered to the cell by a viral vector.

58. The method of claim 57, wherein the viral vector is an adeno-associated virus (AAV) vector.

59. The method of claim 58, wherein the AAV vector is an AAV6 vector.

60. The method of any one of the preceding claims, wherein the RAG1 gene is located on Chromosome 11: 36,510,372-36,593,156 (Genome Reference Consortium—GRCh38/hg38).

61. The method of any one of claims 1, 2, 5, 12, or 16-43, wherein the restoration of RAG1 protein activity is compared to wild-type or normal RAG1 protein activity.

62. The method of claim 1, wherein the human cell is a hematopoietic progenitor cell or a white blood cell.

63. The method of claim 30, wherein the cell is a hematopoietic progenitor cell or a white blood cell.

64. The method of any one of claims 1, 2, 5, 12, or 16-43, wherein the RAG1 gene is operably linked to an exogenous promoter that drives expression of the RAG1 gene.

65. The method of any one of claims 1, 2, 5, 12, or 16-43, wherein the one or more loci occurs at a location immediately 3′ to an endogenous promoter locus.

66. The method of any one of the preceding claims, wherein the donor molecule contains one or more target sites for the endonuclease:gRNA.

67. The method of any one of the preceding claims, wherein the donor molecule or a molecule derived from the donor molecule is cleaved one or more times by the endonuclease:gRNA.

68. One or more guide ribonucleic acids (gRNAs) for editing a RAG1 gene in a cell from a patient with severe combined immunodeficiency (SCID) or Omenn Syndrome, the one or more gRNAs comprising a spacer sequence selected from the group consisting of the nucleic acid sequences in SEQ ID NOs: 54,860-66,285 for editing the RAG1 gene in a cell from a patient with severe combined immunodeficiency (SCID) or Omenn Syndrome.

69. The one or more gRNAs of claim 68, wherein the one or more gRNAs are one or more single-molecule guide RNAs (sgRNAs).

70. The one or more gRNAs or sgRNAs of claim 68 or 69, wherein the one or more gRNAs or one or more sgRNAs is one or more modified gRNAs or one or more modified sgRNAs.

71. One or more guide ribonucleic acids (gRNAs) for editing a safe harbor locus in a cell from a patient with severe combined immunodeficiency (SCID) or Omenn Syndrome, the one or more gRNAs comprising a spacer sequence selected from the group consisting of the nucleic acid sequences in SEQ ID NOs: 1-54,859 for editing the safe harbor locus in a cell from a patient with severe combined immunodeficiency (SCID) or Omenn Syndrome, wherein the safe harbor locus is selected from the group consisting of AAVS1 (PPP1R12C), ALB, Angptl3, ApoC3, ASGR2, CCR5, FIX (F9), G6PC, Gys2, HGD, Lp(a), Pcsk9, Serpinal, TF, and TTR.

72. The one or more gRNAs of claim 71, wherein the one or more gRNAs are one or more single-molecule guide RNAs (sgRNAs).

73. The one or more gRNAs or sgRNAs of claim 71 or 72, wherein the one or more gRNAs or one or more sgRNAs is one or more modified gRNAs or one or more modified sgRNAs.

The application's sequence listing, which the Patent Office published only in electronic form, follows.

SEQUENCE LISTING (66287 sequences)

SEQ ID NO: 1 - DNA, 20 bp, Artificial Sequence
  chemically synthesized
tggcgatatctaggtagcca

SEQ ID NO: 2 - DNA, 20 bp, Artificial Sequence
  chemically synthesized
ggcgatatctaggtagccac

SEQ ID NO: 3 - DNA, 20 bp, Artificial Sequence
  chemically synthesized
cgatatctaggtagccacag

SEQ ID NO: 4 - DNA, 20 bp, Artificial Sequence
  chemically synthesized
gatatctaggtagccacagg

SEQ ID NO: 5 - DNA, 20 bp, Artificial Sequence
  chemically synthesized
atctaggtagccacaggagg

SEQ ID NO: 6 - DNA, 20 bp, Artificial Sequence
  chemically synthesized
ccacaggaggcggccacgtg

SEQ ID NO: 7 - DNA, 20 bp, Artificial Sequence
  chemically synthesized
caggaggcggccacgtgcag

SEQ ID NO: 8 - DNA, 20 bp, Artificial Sequence
  chemically synthesized
cggccacgtgcagtggcgtc

SEQ ID NO: 9 - DNA, 20 bp, Artificial Sequence
  chemically synthesized
tccagccctcgttgtctgcc

SEQ ID NO: 10 - DNA, 20 bp, Artificial Sequence
  chemically synthesized
ctcgttgtctgcctggttca

SEQ ID NO: 11 - DNA, 20 bp, Artificial Sequence
  chemically synthesized
gttgtctgcctggttcacag

SEQ ID NO: 12 - DNA, 20 bp, Artificial Sequence
  chemically synthesized
cagtggcgccctgctccacc

SEQ ID NO: 13 - DNA, 20 bp, Artificial Sequence
  chemically synthesized
tggcgccctgctccaccaag

SEQ ID NO: 14 - DNA, 20 bp, Artificial Sequence
  chemically synthesized
accaagaagcgcaccacctc

SEQ ID NO: 15 - DNA, 20 bp, Artificial Sequence
  chemically synthesized
ccaagaagcgcaccacctcc

SEQ ID NO: 16 - DNA, 20 bp, Artificial Sequence
  chemically synthesized
cctccaggttctcatcaatg

SEQ ID NO: 17 - DNA, 20 bp, Artificial Sequence
  chemically synthesized
ctccaggttctcatcaatgc

SEQ ID NO: 18 - DNA, 20 bp, Artificial Sequence
  chemically synthesized
ggttctcatcaatgcaggcc

SEQ ID NO: 19 - DNA, 20 bp, Artificial Sequence
  chemically synthesized
gttctcatcaatgcaggcct

SEQ ID NO: 20 - DNA, 20 bp, Artificial Sequence
  chemically synthesized
ttctcatcaatgcaggcctg

SEQ ID NO: 21 - DNA, 20 bp, Artificial Sequence
  chemically synthesized
tctcatcaatgcaggcctgg

SEQ ID NO: 22 - DNA, 20 bp, Artificial Sequence
  chemically synthesized
catcaatgcaggcctggggg

SEQ ID NO: 23 - DNA, 20 bp, Artificial Sequence
  chemically synthesized
atcaatgcaggcctgggggt

SEQ ID NO: 24 - DNA, 20 bp, Artificial Sequence
  chemically synthesized
gcaggcctgggggtgggaaa

SEQ ID NO: 25 - DNA, 20 bp, Artificial Sequence
  chemically synthesized
tgggggtgggaaacagccgt

SEQ ID NO: 26 - DNA, 20 bp, Artificial Sequence
  chemically synthesized
gccgtcagccgcacctaccc

SEQ ID NO: 27 - DNA, 20 bp, Artificial Sequence
  chemically synthesized
agccgcacctaccccagcca

SEQ ID NO: 28 - DNA, 20 bp, Artificial Sequence
  chemically synthesized
ctaccccagccacggtgtcc

SEQ ID NO: 29 - DNA, 20 bp, Artificial Sequence
  chemically synthesized
cccagccacggtgtcccagc

SEQ ID NO: 30 - DNA, 20 bp, Artificial Sequence
  chemically synthesized
gccacggtgtcccagcaagt

SEQ ID NO: 31 - DNA, 20 bp, Artificial Sequence
  chemically synthesized
ccacggtgtcccagcaagtc

SEQ ID NO: 32 - DNA, 20 bp, Artificial Sequence
  chemically synthesized
gtcccagcaagtcgggactc

SEQ ID NO: 33 - DNA, 20 bp, Artificial Sequence
  chemically synthesized
cccagcaagtcgggactcca

SEQ ID NO: 34 - DNA, 20 bp, Artificial Sequence
  chemically synthesized
ccagcaagtcgggactccag

SEQ ID NO: 35 - DNA, 20 bp, Artificial Sequence
  chemically synthesized
cagcaagtcgggactccaga

SEQ ID NO: 36 - DNA, 20 bp, Artificial Sequence
  chemically synthesized
gcaagtcgggactccagagg

SEQ ID NO: 37 - DNA, 20 bp, Artificial Sequence
  chemically synthesized
tccagagggagccacgaaaa

SEQ ID NO: 38 - DNA, 20 bp, Artificial Sequence
  chemically synthesized
gggagccacgaaaacagatc

SEQ ID NO: 39 - DNA, 20 bp, Artificial Sequence
  chemically synthesized
ggagccacgaaaacagatcc

SEQ ID NO: 40 - DNA, 20 bp, Artificial Sequence
  chemically synthesized
gagccacgaaaacagatcca

SEQ ID NO: 41 - DNA, 20 bp, Artificial Sequence
  chemically synthesized
cgaaaacagatccagggaca

SEQ ID NO: 42 - DNA, 20 bp, Artificial Sequence
  chemically synthesized
cagatccagggacacggtgc

SEQ ID NO: 43 - DNA, 20 bp, Artificial Sequence
  chemically synthesized
agatccagggacacggtgct

SEQ ID NO: 44 - DNA, 20 bp, Artificial Sequence
  chemically synthesized
ccagggacacggtgctagga

SEQ ID NO: 45 - DNA, 20 bp, Artificial Sequence
  chemically synthesized
gggacacggtgctaggacag

SEQ ID NO: 46 - DNA, 20 bp, Artificial Sequence
  chemically synthesized
ggacacggtgctaggacagt

SEQ ID NO: 47 - DNA, 20 bp, Artificial Sequence
  chemically synthesized
gacacggtgctaggacagtg

SEQ ID NO: 48 - DNA, 20 bp, Artificial Sequence
  chemically synthesized
cagtggggaaaatgacccaa

SEQ ID NO: 49 - DNA, 20 bp, Artificial Sequence
  chemically synthesized
gaaaatgacccaacagcctc

SEQ ID NO: 50 - DNA, 20 bp, Artificial Sequence
  chemically synthesized
acccaacagcctctggccac

SEQ ID NO: 51 - DNA, 20 bp, Artificial Sequence
  chemically synthesized
cctctggccactggctgttt

SEQ ID NO: 52 - DNA, 20 bp, Artificial Sequence
  chemically synthesized
ctggctgtttaagatacgcc

SEQ ID NO: 53 - DNA, 20 bp, Artificial Sequence
  chemically synthesized
ttaagatacgcctggttgcc

SEQ ID NO: 54 - DNA, 20 bp, Artificial Sequence
  chemically synthesized
agatacgcctggttgcccag

SEQ ID NO: 55 - DNA, 20 bp, Artificial Sequence
  chemically synthesized
acgcctggttgcccagtggt

SEQ ID NO: 56 - DNA, 20 bp, Artificial Sequence
  chemically synthesized
cgcctggttgcccagtggtc

SEQ ID NO: 57 - DNA, 20 bp, Artificial Sequence
  chemically synthesized
tggttgcccagtggtcaggc

SEQ ID NO: 58 - DNA, 20 bp, Artificial Sequence
  chemically synthesized
tgcccagtggtcaggccggc

SEQ ID NO: 59 - DNA, 20 bp, Artificial Sequence
  chemically synthesized
gcccagtggtcaggccggcc

SEQ ID NO: 60 - DNA, 20 bp, Artificial Sequence
  chemically synthesized
ggtcaggccggccaggcctt

SEQ ID NO: 61 - DNA, 20 bp, Artificial Sequence
  chemically synthesized
ccggccaggccttcagtgct

SEQ ID NO: 62 - DNA, 20 bp, Artificial Sequence
  chemically synthesized
gccaggccttcagtgctcag

SEQ ID NO: 63 - DNA, 20 bp, Artificial Sequence
  chemically synthesized
gtgctcagtggaaaccacga

SEQ ID NO: 64 - DNA, 20 bp, Artificial Sequence
  chemically synthesized
tgctcagtggaaaccacgaa

SEQ ID NO: 65 - DNA, 20 bp, Artificial Sequence
  chemically synthesized
ggaaaccacgaaaggactcc

SEQ ID NO: 66 - DNA, 20 bp, Artificial Sequence
  chemically synthesized
gactcctggctatctgcaaa

SEQ ID NO: 67 - DNA, 20 bp, Artificial Sequence
  chemically synthesized
actcctggctatctgcaaac

SEQ ID NO: 68 - DNA, 20 bp, Artificial Sequence
  chemically synthesized
cctggctatctgcaaacagg

SEQ ID NO: 69 - DNA, 20 bp, Artificial Sequence
  chemically synthesized
atctgcaaacaggaagtgaa

SEQ ID NO: 70 - DNA, 20 bp, Artificial Sequence
  chemically synthesized
tctgcaaacaggaagtgaac

SEQ ID NO: 71 - DNA, 20 bp, Artificial Sequence
  chemically synthesized
ctgcaaacaggaagtgaacg

SEQ ID NO: 72 - DNA, 20 bp, Artificial Sequence
  chemically synthesized
caaacaggaagtgaacgggg

SEQ ID NO: 73 - DNA, 20 bp, Artificial Sequence
  chemically synthesized
aaacaggaagtgaacgggga

SEQ ID NO: 74 - DNA, 20 bp, Artificial Sequence
  chemically synthesized
aacaggaagtgaacggggaa

SEQ ID NO: 75 - DNA, 20 bp, Artificial Sequence
  chemically synthesized
caggaagtgaacggggaagg

SEQ ID NO: 76 - DNA, 20 bp, Artificial Sequence
  chemically synthesized
aggaagtgaacggggaaggg

SEQ ID NO: 77 - DNA, 20 bp, Artificial Sequence
  chemically synthesized
ggaagtgaacggggaaggga

SEQ ID NO: 78 - DNA, 20 bp, Artificial Sequence
  chemically synthesized
gaagtgaacggggaagggag

SEQ ID NO: 79 - DNA, 20 bp, Artificial Sequence
  chemically synthesized
aagtgaacggggaagggagg

SEQ ID NO: 80 - DNA, 20 bp, Artificial Sequence
  chemically synthesized
aagggagggggcttctcatc

SEQ ID NO: 81 - DNA, 20 bp, Artificial Sequence
  chemically synthesized
agggagggggcttctcatct

SEQ ID NO: 82 - DNA, 20 bp, Artificial Sequence
  chemically synthesized
gggggcttctcatctgggtg

SEQ ID NO: 83 - DNA, 20 bp, Artificial Sequence
  chemically synthesized
ggggcttctcatctgggtgc

SEQ ID NO: 84 - DNA, 20 bp, Artificial Sequence
  chemically synthesized
ctgggtgcgggaaccccaca

SEQ ID NO: 85 - DNA, 20 bp, Artificial Sequence
  chemically synthesized
gaaccccacatggtacctgt

SEQ ID NO: 86 - DNA, 20 bp, Artificial Sequence
  chemically synthesized
cacatggtacctgttagaca

SEQ ID NO: 87 - DNA, 20 bp, Artificial Sequence
  chemically synthesized
aaaacccccgtcaccaccca

SEQ ID NO: 88 - DNA, 20 bp, Artificial Sequence
  chemically synthesized
aaacccccgtcaccacccac

SEQ ID NO: 89 - DNA, 20 bp, Artificial Sequence
  chemically synthesized
cccccgtcaccacccacagg

SEQ ID NO: 90 - DNA, 20 bp, Artificial Sequence
  chemically synthesized
ccacccacaggtggcgcttc

SEQ ID NO: 91 - DNA, 20 bp, Artificial Sequence
  chemically synthesized
caggtggcgcttccagtgct

SEQ ID NO: 92 - DNA, 20 bp, Artificial Sequence
  chemically synthesized
ggcgcttccagtgctcagac

SEQ ID NO: 93 - DNA, 20 bp, Artificial Sequence
  chemically synthesized
gcgcttccagtgctcagact

SEQ ID NO: 94 - DNA, 20 bp, Artificial Sequence
  chemically synthesized
cgcttccagtgctcagacta

SEQ ID NO: 95 - DNA, 20 bp, Artificial Sequence
  chemically synthesized
ttccagtgctcagactaggg

SEQ ID NO: 96 - DNA, 20 bp, Artificial Sequence
  chemically synthesized
ccagtgctcagactagggaa

SEQ ID NO: 97 - DNA, 20 bp, Artificial Sequence
  chemically synthesized
cagtgctcagactagggaag

SEQ ID NO: 98 - DNA, 20 bp, Artificial Sequence
  chemically synthesized
tcagactagggaagaggttc

SEQ ID NO: 99 - DNA, 20 bp, Artificial Sequence
  chemically synthesized
ggttccagcccctcctcctt

SEQ ID NO: 100 - DNA, 20 bp, Artificial Sequence
  chemically synthesized
ttccagcccctcctccttca

SEQ ID NO: 101 - DNA, 20 bp, Artificial Sequence
  chemically synthesized
agcccctcctccttcagagc

SEQ ID NO: 102 - DNA, 20 bp, Artificial Sequence
  chemically synthesized
gcccctcctccttcagagcc

SEQ ID NO: 103 - DNA, 20 bp, Artificial Sequence
  chemically synthesized
ccctcctccttcagagccag

SEQ ID NO: 104 - DNA, 20 bp, Artificial Sequence
  chemically synthesized
tccttcagagccaggagtcc

SEQ ID NO: 105 - DNA, 20 bp, Artificial Sequence
  chemically synthesized
gagccaggagtcctggcccc

SEQ ID NO: 106 - DNA, 20 bp, Artificial Sequence
  chemically synthesized
agcccctcctgccttaaacc

SEQ ID NO: 107 - DNA, 20 bp, Artificial Sequence
  chemically synthesized
cctcctgccttaaacccagc

SEQ ID NO: 108 - DNA, 20 bp, Artificial Sequence
  chemically synthesized
ctcctgccttaaacccagcc

SEQ ID NO: 109 - DNA, 20 bp, Artificial Sequence
  chemically synthesized
aaacccagccaggtccttcc

SEQ ID NO: 110 - DNA, 20 bp, Artificial Sequence
  chemically synthesized
aacccagccaggtccttcca

SEQ ID NO: 111 - DNA, 20 bp, Artificial Sequence
  chemically synthesized
acccagccaggtccttccaa

SEQ ID NO: 112 - DNA, 20 bp, Artificial Sequence
  chemically synthesized
gccaggtccttccaagggtc

SEQ ID NO: 113 - DNA, 20 bp, Artificial Sequence
  chemically synthesized
gtccttccaagggtcaagct

SEQ ID NO: 114 - DNA, 20 bp, Artificial Sequence
  chemically synthesized
gtcaagctcggaaaccaccc

SEQ ID NO: 115 - DNA, 20 bp, Artificial Sequence
  chemically synthesized
aagctcggaaaccaccccag

SEQ ID NO: 116 - DNA, 20 bp, Artificial Sequence
  chemically synthesized
ccaccccagcagatactctg

SEQ ID NO: 117 - DNA, 20 bp, Artificial Sequence
  chemically synthesized
caccccagcagatactctgc

SEQ ID NO: 118 - DNA, 20 bp, Artificial Sequence
  chemically synthesized
gcagatactctgcaggaacg

SEQ ID NO: 119 - DNA, 20 bp, Artificial Sequence
  chemically synthesized
actctgcaggaacgaagccg

SEQ ID NO: 120 - DNA, 20 bp, Artificial Sequence
  chemically synthesized
ctctgcaggaacgaagccgt

SEQ ID NO: 121 - DNA, 20 bp, Artificial Sequence
  chemically synthesized
caggaacgaagccgtgggcc

SEQ ID NO: 122 - DNA, 20 bp, Artificial Sequence
  chemically synthesized
aggaacgaagccgtgggccc

SEQ ID NO: 123 - DNA, 20 bp, Artificial Sequence
  chemically synthesized
ggaacgaagccgtgggccca

SEQ ID NO: 124 - DNA, 20 bp, Artificial Sequence
  chemically synthesized
gccgtgggcccagggctatg

SEQ ID NO: 125 - DNA, 20 bp, Artificial Sequence
  chemically synthesized
ccgtgggcccagggctatgc

SEQ ID NO: 126 - DNA, 20 bp, Artificial Sequence
  chemically synthesized
cgtgggcccagggctatgca

SEQ ID NO: 127 - DNA, 20 bp, Artificial Sequence
  chemically synthesized
gggcccagggctatgcaggg

SEQ ID NO: 128 - DNA, 20 bp, Artificial Sequence
  chemically synthesized
gcccagggctatgcagggtg

SEQ ID NO: 129 - DNA, 20 bp, Artificial Sequence
  chemically synthesized
cccagggctatgcagggtgg

SEQ ID NO: 130 - DNA, 20 bp, Artificial Sequence
  chemically synthesized
agggctatgcagggtggagg

SEQ ID NO: 131 - DNA, 20 bp, Artificial Sequence
  chemically synthesized
gggctatgcagggtggagga

SEQ ID NO: 132 - DNA, 20 bp, Artificial Sequence
  chemically synthesized
ggaggaaggccaccctgtgc

SEQ ID NO: 133 - DNA, 20 bp, Artificial Sequence
  chemically synthesized
gaggaaggccaccctgtgct

SEQ ID NO: 134 - DNA, 20 bp, Artificial Sequence
  chemically synthesized
aaggccaccctgtgctggga

SEQ ID NO: 135 - DNA, 20 bp, Artificial Sequence
  chemically synthesized
accctgtgctgggacagact

SEQ ID NO: 136 - DNA, 20 bp, Artificial Sequence
  chemically synthesized
ccctgtgctgggacagactc

SEQ ID NO: 137 - DNA, 20 bp, Artificial Sequence
  chemically synthesized
cctgtgctgggacagactca

SEQ ID NO: 138 - DNA, 20 bp, Artificial Sequence
  chemically synthesized
ctgtgctgggacagactcag

SEQ ID NO: 139 - DNA, 20 bp, Artificial Sequence
  chemically synthesized
ctgggacagactcaggggcc

SEQ ID NO: 140 - DNA, 20 bp, Artificial Sequence
  chemically synthesized
tgggacagactcaggggcct

SEQ ID NO: 141 - DNA, 20 bp, Artificial Sequence
  chemically synthesized
gacagactcaggggcctggg

SEQ ID NO: 142 - DNA, 20 bp, Artificial Sequence
  chemically synthesized
acagactcaggggcctgggc

SEQ ID NO: 143 - DNA, 20 bp, Artificial Sequence
  chemically synthesized
aggggcctgggcgggactcc

SEQ ID NO: 144 - DNA, 20 bp, Artificial Sequence
  chemically synthesized
gggcctgggcgggactccca

SEQ ID NO: 145 - DNA, 20 bp, Artificial Sequence
  chemically synthesized
ggcctgggcgggactcccag

SEQ ID NO: 146 - DNA, 20 bp, Artificial Sequence
  chemically synthesized
gcctgggcgggactcccaga

SEQ ID NO: 147 - DNA, 20 bp, Artificial Sequence
  chemically synthesized
cctgggcgggactcccagag

SEQ ID NO: 148 - DNA, 20 bp, Artificial Sequence
  chemically synthesized
ggcgggactcccagaggggt

SEQ ID NO: 149 - DNA, 20 bp, Artificial Sequence
  chemically synthesized
ggactcccagaggggtgaga

SEQ ID NO: 150 - DNA, 20 bp, Artificial Sequence
  chemically synthesized
cagctgcacacctgtgtgcc

SEQ ID NO: 151 - DNA, 20 bp, Artificial Sequence
  chemically synthesized
agctgcacacctgtgtgcct

SEQ ID NO: 152 - DNA, 20 bp, Artificial Sequence
  chemically synthesized
acacctgtgtgcctgggccc

SEQ ID NO: 153 - DNA, 20 bp, Artificial Sequence
  chemically synthesized
cacctgtgtgcctgggcccc

SEQ ID NO: 154 - DNA, 20 bp, Artificial Sequence
  chemically synthesized
ggccccaggctgtcacactc

SEQ ID NO: 155 - DNA, 20 bp, Artificial Sequence
  chemically synthesized
ctgtcacactccagttcact

SEQ ID NO: 156 - DNA, 20 bp, Artificial Sequence
  chemically synthesized
tgtcacactccagttcactg

SEQ ID NO: 157 - DNA, 20 bp, Artificial Sequence
  chemically synthesized
tcactgaggccccctctgca

SEQ ID NO: 158 - DNA, 20 bp, Artificial Sequence
  chemically synthesized
cactgaggccccctctgcac

SEQ ID NO: 159 - DNA, 20 bp, Artificial Sequence
  chemically synthesized
actgaggccccctctgcacg

SEQ ID NO: 160 - DNA, 20 bp, Artificial Sequence
  chemically synthesized
cccctctgcacggggccctg

SEQ ID NO: 161 - DNA, 20 bp, Artificial Sequence
  chemically synthesized
tctgcacggggccctgcagc

SEQ ID NO: 162 - DNA, 20 bp, Artificial Sequence
  chemically synthesized
ctgcacggggccctgcagcc

SEQ ID NO: 163 - DNA, 20 bp, Artificial Sequence
  chemically synthesized
tgcacggggccctgcagcca

SEQ ID NO: 164 - DNA, 20 bp, Artificial Sequence
  chemically synthesized
gcacggggccctgcagccag

SEQ ID NO: 165 - DNA, 20 bp, Artificial Sequence
  chemically synthesized
cctgcagccaggggctgaca

SEQ ID NO: 166 - DNA, 20 bp, Artificial Sequence
  chemically synthesized
ctgcagccaggggctgacac

SEQ ID NO: 167 - DNA, 20 bp, Artificial Sequence
  chemically synthesized
accgtttctcattcttccct

SEQ ID NO: 168 - DNA, 20 bp, Artificial Sequence
  chemically synthesized
ccgtttctcattcttccctt

SEQ ID NO: 169 - DNA, 20 bp, Artificial Sequence
  chemically synthesized
cgtttctcattcttccctta

SEQ ID NO: 170 - DNA, 20 bp, Artificial Sequence
  chemically synthesized
gtttctcattcttcccttag

SEQ ID NO: 171 - DNA, 20 bp, Artificial Sequence
  chemically synthesized
tcccttaggggtccaaaact

SEQ ID NO: 172 - DNA, 20 bp, Artificial Sequence
  chemically synthesized
cccttaggggtccaaaactt

SEQ ID NO: 173 - DNA, 20 bp, Artificial Sequence
  chemically synthesized
ccttaggggtccaaaacttg

SEQ ID NO: 174 - DNA, 20 bp, Artificial Sequence
  chemically synthesized
cttaggggtccaaaacttgg

SEQ ID NO: 175 - DNA, 20 bp, Artificial Sequence
  chemically synthesized
ttaggggtccaaaacttggg

SEQ ID NO: 176 - DNA, 20 bp, Artificial Sequence
  chemically synthesized
tccaaaacttggggggacaa

SEQ ID NO: 177 - DNA, 20 bp, Artificial Sequence
  chemically synthesized
acttggggggacaaaagccg

SEQ ID NO: 178 - DNA, 20 bp, Artificial Sequence
  chemically synthesized
gggggacaaaagccgaagtc

SEQ ID NO: 179 - DNA, 20 bp, Artificial Sequence
  chemically synthesized
ggggacaaaagccgaagtcc

SEQ ID NO: 180 - DNA, 20 bp, Artificial Sequence
  chemically synthesized
gggacaaaagccgaagtcca

SEQ ID NO: 181 - DNA, 20 bp, Artificial Sequence
  chemically synthesized
ggacaaaagccgaagtccag

SEQ ID NO: 182 - DNA, 20 bp, Artificial Sequence
  chemically synthesized
gacaaaagccgaagtccagg

SEQ ID NO: 183 - DNA, 20 bp, Artificial Sequence
  chemically synthesized
aaagccgaagtccagggggt

SEQ ID NO: 184 - DNA, 20 bp, Artificial Sequence
  chemically synthesized
agccgaagtccagggggtcg

SEQ ID NO: 185 - DNA, 20 bp, Artificial Sequence
  chemically synthesized
gccgaagtccagggggtcgg

SEQ ID NO: 186 - DNA, 20 bp, Artificial Sequence
  chemically synthesized
cgaagtccagggggtcggag

SEQ ID NO: 187 - DNA, 20 bp, Artificial Sequence
  chemically synthesized
gaagtccagggggtcggagg

SEQ ID NO: 188 - DNA, 20 bp, Artificial Sequence
  chemically synthesized
aagtccagggggtcggagga

SEQ ID NO: 189 - DNA, 20 bp, Artificial Sequence
  chemically synthesized
gtcggaggagggacttgccc

SEQ ID NO: 190 - DNA, 20 bp, Artificial Sequence
  chemically synthesized
tcggaggagggacttgcccc

SEQ ID NO: 191 - DNA, 20 bp, Artificial Sequence
  chemically synthesized
gggacttgccccaggccttg

SEQ ID NO: 192 - DNA, 20 bp, Artificial Sequence
  chemically synthesized
gccccaggccttgtggacac

SEQ ID NO: 193 - DNA, 20 bp, Artificial Sequence
  chemically synthesized
ccccaggccttgtggacact

SEQ ID NO: 194 - DNA, 20 bp, Artificial Sequence
  chemically synthesized
caggccttgtggacactggg

SEQ ID NO: 195 - DNA, 20 bp, Artificial Sequence
  chemically synthesized
aggccttgtggacactgggt

SEQ ID NO: 196 - DNA, 20 bp, Artificial Sequence
  chemically synthesized
tgtggacactgggtgggctc

SEQ ID NO: 197 - DNA, 20 bp, Artificial Sequence
  chemically synthesized
gtggacactgggtgggctcc

SEQ ID NO: 198 - DNA, 20 bp, Artificial Sequence
  chemically synthesized
gtgggctccgggacctgaac

SEQ ID NO: 199 - DNA, 20 bp, Artificial Sequence
  chemically synthesized
gggctccgggacctgaactg

SEQ ID NO: 200 - DNA, 20 bp, Artificial Sequence
  chemically synthesized
ccgggacctgaactggagct

SEQ ID NO: 201 - DNA, 20 bp, Artificial Sequence
  chemically synthesized
cgggacctgaactggagctg

SEQ ID NO: 202 - DNA, 20 bp, Artificial Sequence
  chemically synthesized
gacctgaactggagctgagg

SEQ ID NO: 203 - DNA, 20 bp, Artificial Sequence
  chemically synthesized
acctgaactggagctgagga

SEQ ID NO: 204 - DNA, 20 bp, Artificial Sequence
  chemically synthesized
ctgaactggagctgaggaag

SEQ ID NO: 205 - DNA, 20 bp, Artificial Sequence
  chemically synthesized
ctggagctgaggaaggagtg

SEQ ID NO: 206 - DNA, 20 bp, Artificial Sequence
  chemically synthesized
aaggagtgaagctaaactcc

SEQ ID NO: 207 - DNA, 20 bp, Artificial Sequence
  chemically synthesized
aagctaaactcctagatcca

SEQ ID NO: 208 - DNA, 20 bp, Artificial Sequence
  chemically synthesized
agctaaactcctagatccac

SEQ ID NO: 209 - DNA, 20 bp, Artificial Sequence
  chemically synthesized
cacgggataaattacccccc

SEQ ID NO: 210 - DNA, 20 bp, Artificial Sequence
  chemically synthesized
ccaagtccctcacctctcca

SEQ ID NO: 211 - DNA, 20 bp, Artificial Sequence
  chemically synthesized
cctctccaaagctgcccatc

SEQ ID NO: 212 - DNA, 20 bp, Artificial Sequence
  chemically synthesized
tctccaaagctgcccatctg

SEQ ID NO: 213 - DNA, 20 bp, Artificial Sequence
  chemically synthesized
ctccaaagctgcccatctgg

SEQ ID NO: 214 - DNA, 20 bp, Artificial Sequence
  chemically synthesized
ccaaagctgcccatctggag

SEQ ID NO: 215 - DNA, 20 bp, Artificial Sequence
  chemically synthesized
caaagctgcccatctggagg

SEQ ID NO: 216 - DNA, 20 bp, Artificial Sequence
  chemically synthesized
agctgcccatctggaggagg

SEQ ID NO: 217 - DNA, 20 bp, Artificial Sequence
  chemically synthesized
gctgcccatctggaggaggc

SEQ ID NO: 218 - DNA, 20 bp, Artificial Sequence
  chemically synthesized
tgcccatctggaggaggcgg

SEQ ID NO: 219 - DNA, 20 bp, Artificial Sequence
  chemically synthesized
gcccatctggaggaggcggg

SEQ ID NO: 220 - DNA, 20 bp, Artificial Sequence
  chemically synthesized
cccatctggaggaggcggga

SEQ ID NO: 221 - DNA, 20 bp, Artificial Sequence
  chemically synthesized
catctggaggaggcgggagg

SEQ ID NO: 222 - DNA, 20 bp, Artificial Sequence
  chemically synthesized
aggaggcgggagggagctac

SEQ ID NO: 223 - DNA, 20 bp, Artificial Sequence
  chemically synthesized
ggaggcgggagggagctacg

SEQ ID NO: 224 - DNA, 20 bp, Artificial Sequence
  chemically synthesized
gaggcgggagggagctacga

SEQ ID NO: 225 - DNA, 20 bp, Artificial Sequence
  chemically synthesized
gggagggagctacgagggcc

SEQ ID NO: 226 - DNA, 20 bp, Artificial Sequence
  chemically synthesized
gagggagctacgagggccaa

SEQ ID NO: 227 - DNA, 20 bp, Artificial Sequence
  chemically synthesized
gctacgagggccaagagcat

SEQ ID NO: 228 - DNA, 20 bp, Artificial Sequence
  chemically synthesized
ctacgagggccaagagcatg

SEQ ID NO: 229 - DNA, 20 bp, Artificial Sequence
  chemically synthesized
gggccaagagcatgaggtca

SEQ ID NO: 230 - DNA, 20 bp, Artificial Sequence
  chemically synthesized
agcatgaggtcatggaaact

SEQ ID NO: 231 - DNA, 20 bp, Artificial Sequence
  chemically synthesized
gcatgaggtcatggaaactc

SEQ ID NO: 232 - DNA, 20 bp, Artificial Sequence
  chemically synthesized
tcatggaaactcgggctgtg

SEQ ID NO: 233 - DNA, 20 bp, Artificial Sequence
  chemically synthesized
catggaaactcgggctgtga

SEQ ID NO: 234 - DNA, 20 bp, Artificial Sequence
  chemically synthesized
atggaaactcgggctgtgaa

SEQ ID NO: 235 - DNA, 20 bp, Artificial Sequence
  chemically synthesized
tggaaactcgggctgtgaag

SEQ ID NO: 236 - DNA, 20 bp, Artificial Sequence
  chemically synthesized
tgaaggggccgcacgtgccc

SEQ ID NO: 237 - DNA, 20 bp, Artificial Sequence
  chemically synthesized
gaaggggccgcacgtgccct

SEQ ID NO: 238 - DNA, 20 bp, Artificial Sequence
  chemically synthesized
ggccgcacgtgccctgggaa

SEQ ID NO: 239 - DNA, 20 bp, Artificial Sequence
  chemically synthesized
gccgcacgtgccctgggaac

SEQ ID NO: 240 - DNA, 20 bp, Artificial Sequence
  chemically synthesized
ccctgggaacgggatgaact

SEQ ID NO: 241 - DNA, 20 bp, Artificial Sequence
  chemically synthesized
tcggctcgtttatttccacc

SEQ ID NO: 242 - DNA, 20 bp, Artificial Sequence
  chemically synthesized
ttatttccacccagttgtca

SEQ ID NO: 243 - DNA, 20 bp, Artificial Sequence
  chemically synthesized
ccacccagttgtcatggcga

SEQ ID NO: 244 - DNA, 20 bp, Artificial Sequence
  chemically synthesized
cacccagttgtcatggcgat

SEQ ID NO: 245 - DNA, 20 bp, Artificial Sequence
  chemically synthesized
acccagttgtcatggcgata

SEQ ID NO: 246 - DNA, 20 bp, Artificial Sequence
  chemically synthesized
cccagttgtcatggcgatag

SEQ ID NO: 247 - DNA, 20 bp, Artificial Sequence
  chemically synthesized
cagttgtcatggcgataggg

SEQ ID NO: 248 - DNA, 20 bp, Artificial Sequence
  chemically synthesized
agttgtcatggcgatagggg

SEQ ID NO: 249 - DNA, 20 bp, Artificial Sequence
  chemically synthesized
gttgtcatggcgatagggga

SEQ ID NO: 250 - DNA, 20 bp, Artificial Sequence
  chemically synthesized
ttgtcatggcgataggggag

SEQ ID NO: 251 - DNA, 20 bp, Artificial Sequence
  chemically synthesized
tgtcatggcgataggggagg

SEQ ID NO: 252 - DNA, 20 bp, Artificial Sequence
  chemically synthesized
gtcatggcgataggggaggg

SEQ ID NO: 253 - DNA, 20 bp, Artificial Sequence
  chemically synthesized
tggcgataggggaggggggc

SEQ ID NO: 254 - DNA, 20 bp, Artificial Sequence
  chemically synthesized
ggcgataggggaggggggca

SEQ ID NO: 255 - DNA, 20 bp, Artificial Sequence
  chemically synthesized
cgataggggaggggggcaag

SEQ ID NO: 256 - DNA, 20 bp, Artificial Sequence
  chemically synthesized
ataggggaggggggcaagga

SEQ ID NO: 257 - DNA, 20 bp, Artificial Sequence
  chemically synthesized
gaggggggcaaggagagcaa

SEQ ID NO: 258 - DNA, 20 bp, Artificial Sequence
  chemically synthesized
aggggggcaaggagagcaat

SEQ ID NO: 259 - DNA, 20 bp, Artificial Sequence
  chemically synthesized
gcaatgggcctttccctttc

SEQ ID NO: 260 - DNA, 20 bp, Artificial Sequence
  chemically synthesized
caatgggcctttccctttca

SEQ ID NO: 261 - DNA, 20 bp, Artificial Sequence
  chemically synthesized
ttccctttcaaggacctgcc

SEQ ID NO: 262 - DNA, 20 bp, Artificial Sequence
  chemically synthesized
tttcaaggacctgcccagta

SEQ ID NO: 263 - DNA, 20 bp, Artificial Sequence
  chemically synthesized
ttcaaggacctgcccagtac

SEQ ID NO: 264 - DNA, 20 bp, Artificial Sequence
  chemically synthesized
cagtacaggcatccctgtga

SEQ ID NO: 265 - DNA, 20 bp, Artificial Sequence
  chemically synthesized
catccctgtgaaagatgcct

SEQ ID NO: 266 - DNA, 20 bp, Artificial Sequence
  chemically synthesized
atccctgtgaaagatgcctg

SEQ ID NO: 267 - DNA, 20 bp, Artificial Sequence
  chemically synthesized
tgtgaaagatgcctgaggcc

SEQ ID NO: 268 - DNA, 20 bp, Artificial Sequence
  chemically synthesized
gtgaaagatgcctgaggcct

SEQ ID NO: 269 - DNA, 20 bp, Artificial Sequence
  chemically synthesized
gatgcctgaggcctgggcac

SEQ ID NO: 270 - DNA, 20 bp, Artificial Sequence
  chemically synthesized
atgcctgaggcctgggcacc

SEQ ID NO: 271 - DNA, 20 bp, Artificial Sequence
  chemically synthesized
tgcctgaggcctgggcacca

SEQ ID NO: 272 - DNA, 20 bp, Artificial Sequence
  chemically synthesized
ggcctgggcaccagggactc

SEQ ID NO: 273 - DNA, 20 bp, Artificial Sequence
  chemically synthesized
cctgggcaccagggactcca

SEQ ID NO: 274 - DNA, 20 bp, Artificial Sequence
  chemically synthesized
gcaccagggactccagagtc

SEQ ID NO: 275 - DNA, 20 bp, Artificial Sequence
  chemically synthesized
caccagggactccagagtcc

SEQ ID NO: 276 - DNA, 20 bp, Artificial Sequence
  chemically synthesized
caacccctccccattcaacc

SEQ ID NO: 277 - DNA, 20 bp, Artificial Sequence
  chemically synthesized
aacccctccccattcaaccc

SEQ ID NO: 278 - DNA, 20 bp, Artificial Sequence
  chemically synthesized
cccctccccattcaacccag

SEQ ID NO: 279 - DNA, 20 bp, Artificial Sequence
  chemically synthesized
ccctccccattcaacccagg

SEQ ID NO: 280 - DNA, 20 bp, Artificial Sequence
  chemically synthesized
ccccattcaacccaggaggc

SEQ ID NO: 281 - DNA, 20 bp, Artificial Sequence
  chemically synthesized
cccattcaacccaggaggcc

SEQ ID NO: 282 - DNA, 20 bp, Artificial Sequence
  chemically synthesized
caacccaggaggccaggccc

SEQ ID NO: 283 - DNA, 20 bp, Artificial Sequence
  chemically synthesized
ggccccagcccttccgccct

SEQ ID NO: 284 - DNA, 20 bp, Artificial Sequence
  chemically synthesized
agcccttccgccctcagatg

SEQ ID NO: 285 - DNA, 20 bp, Artificial Sequence
  chemically synthesized
gcccttccgccctcagatga

SEQ ID NO: 286 - DNA, 20 bp, Artificial Sequence
  chemically synthesized
ccttccgccctcagatgaag

SEQ ID NO: 287 - DNA, 20 bp, Artificial Sequence
  chemically synthesized
cgccctcagatgaaggagtc

SEQ ID NO: 288 - DNA, 20 bp, Artificial Sequence
  chemically synthesized
gccctcagatgaaggagtcc

SEQ ID NO: 289 - DNA, 20 bp, Artificial Sequence
  chemically synthesized
gatgaaggagtccaggcccc

SEQ ID NO: 290 - DNA, 20 bp, Artificial Sequence
  chemically synthesized
gcccccagcctctccccatt

SEQ ID NO: 291 - DNA, 20 bp, Artificial Sequence
  chemically synthesized
agcctctccccattcagacc

SEQ ID NO: 292 - DNA, 20 bp, Artificial Sequence
  chemically synthesized
gcctctccccattcagaccc

SEQ ID NO: 293 - DNA, 20 bp, Artificial Sequence
  chemically synthesized
cctctccccattcagaccca

SEQ ID NO: 294 - DNA, 20 bp, Artificial Sequence
  chemically synthesized
ctctccccattcagacccag

SEQ ID NO: 295 - DNA, 20 bp, Artificial Sequence
  chemically synthesized
cccattcagacccaggggtc

SEQ ID NO: 296 - DNA, 20 bp, Artificial Sequence
  chemically synthesized
ccattcagacccaggggtcc

SEQ ID NO: 297 - DNA, 20 bp, Artificial Sequence
  chemically synthesized
cagacccaggggtccaggcc

SEQ ID NO: 298 - DNA, 20 bp, Artificial Sequence
  chemically synthesized
aggcccagccccgcctccct

SEQ ID NO: 299 - DNA, 20 bp, Artificial Sequence
  chemically synthesized
agccccgcctccctaagacc

SEQ ID NO: 300 - DNA, 20 bp, Artificial Sequence
  chemically synthesized
cccgcctccctaagacccag

SEQ ID NO: 301 - DNA, 20 bp, Artificial Sequence
  chemically synthesized
ctccctaagacccagaagtc

SEQ ID NO: 302 - DNA, 20 bp, Artificial Sequence
  chemically synthesized
tccctaagacccagaagtcc

SEQ ID NO: 303 - DNA, 20 bp, Artificial Sequence
  chemically synthesized
gacccagaagtccaggcccc

SEQ ID NO: 304 - DNA, 20 bp, Artificial Sequence
  chemically synthesized
gcccccagcccctcctccct

SEQ ID NO: 305 - DNA, 20 bp, Artificial Sequence
  chemically synthesized
ccctcctccctcagacccac

SEQ ID NO: 306 - DNA, 20 bp, Artificial Sequence
  chemically synthesized
ctccctcagacccacgagtc

SEQ ID NO: 307 - DNA, 20 bp, Artificial Sequence
  chemically synthesized
tccctcagacccacgagtcc

SEQ ID NO: 308 - DNA, 20 bp, Artificial Sequence
  chemically synthesized
agacccacgagtccaggccc

SEQ ID NO: 309 - DNA, 20 bp, Artificial Sequence
  chemically synthesized
ggccccagcccctcctccct

SEQ ID NO: 310 - DNA, 20 bp, Artificial Sequence
  chemically synthesized
agcccctcctccctcggacc

SEQ ID NO: 311 - DNA, 20 bp, Artificial Sequence
  chemically synthesized
gcccctcctccctcggaccc

SEQ ID NO: 312 - DNA, 20 bp, Artificial Sequence
  chemically synthesized
ccctcctccctcggacccag

SEQ ID NO: 313 - DNA, 20 bp, Artificial Sequence
  chemically synthesized
ctccctcggacccaggagtc

SEQ ID NO: 314 - DNA, 20 bp, Artificial Sequence
  chemically synthesized
tccctcggacccaggagtcc

SEQ ID NO: 315 - DNA, 20 bp, Artificial Sequence
  chemically synthesized
gacccaggagtccaggcccc

SEQ ID NO: 316 - DNA, 20 bp, Artificial Sequence
  chemically synthesized
gcccccagtccctccaccct

SEQ ID NO: 317 - DNA, 20 bp, Artificial Sequence
  chemically synthesized
agtccctccaccctcagacc

SEQ ID NO: 318 - DNA, 20 bp, Artificial Sequence
  chemically synthesized
gtccctccaccctcagaccc

SEQ ID NO: 319 - DNA, 20 bp, Artificial Sequence
  chemically synthesized
ccctccaccctcagacccag

SEQ ID NO: 320 - DNA, 20 bp, Artificial Sequence
  chemically synthesized
caccctcagacccaggagtc

SEQ ID NO: 321 - DNA, 20 bp, Artificial Sequence
  chemically synthesized
accctcagacccaggagtcc

SEQ ID NO: 322 - DNA, 20 bp, Artificial Sequence
  chemically synthesized
agacccaggagtccaggccc

SEQ ID NO: 323 - DNA, 20 bp, Artificial Sequence
  chemically synthesized
ggccccagcccctcctccct

SEQ ID NO: 324 - DNA, 20 bp, Artificial Sequence
  chemically synthesized
agcccctcctccctcggacc

SEQ ID NO: 325 - DNA, 20 bp, Artificial Sequence
  chemically synthesized
gcccctcctccctcggaccc

SEQ ID NO: 326 - DNA, 20 bp, Artificial Sequence
  chemically synthesized
ccctcctccctcggacccag

SEQ ID NO: 327 - DNA, 20 bp, Artificial Sequence
  chemically synthesized
ctccctcggacccaggagtc

SEQ ID NO: 328 - DNA, 20 bp, Artificial Sequence
  chemically synthesized
tccctcggacccaggagtcc

SEQ ID NO: 329 - DNA, 20 bp, Artificial Sequence
  chemically synthesized
ggacccaggagtccaggccc

SEQ ID NO: 330 - DNA, 20 bp, Artificial Sequence
  chemically synthesized
agcccctcctctctcaaacc

SEQ ID NO: 331 - DNA, 20 bp, Artificial Sequence
  chemically synthesized
gcccctcctctctcaaaccc

SEQ ID NO: 332 - DNA, 20 bp, Artificial Sequence
  chemically synthesized
ccctcctctctcaaacccag

SEQ ID NO: 333 - DNA, 20 bp, Artificial Sequence
  chemically synthesized
ctctctcaaacccaggagcc

SEQ ID NO: 334 - DNA, 20 bp, Artificial Sequence
  chemically synthesized
tctctcaaacccaggagccc

SEQ ID NO: 335 - DNA, 20 bp, Artificial Sequence
  chemically synthesized
aacccaggagcccaggcccc

SEQ ID NO: 336 - DNA, 20 bp, Artificial Sequence
  chemically synthesized
gcccccagctcttctctgtt

SEQ ID NO: 337 - DNA, 20 bp, Artificial Sequence
  chemically synthesized
gctcttctctgttcagccct

SEQ ID NO: 338 - DNA, 20 bp, Artificial Sequence
  chemically synthesized
ctgttcagccctaagaatcc

SEQ ID NO: 339 - DNA, 20 bp, Artificial Sequence
  chemically synthesized
agccctaagaatcctggctc

SEQ ID NO: 340 - DNA, 20 bp, Artificial Sequence
  chemically synthesized
ggctccagcccctcctactc

SEQ ID NO: 341 - DNA, 20 bp, Artificial Sequence
  chemically synthesized
tactctagcccccaaccccc

SEQ ID NO: 342 - DNA, 20 bp, Artificial Sequence
  chemically synthesized
cccccaaccccctagccact

SEQ ID NO: 343 - DNA, 20 bp, Artificial Sequence
  chemically synthesized
ccccaaccccctagccacta

SEQ ID NO: 344 - DNA, 20 bp, Artificial Sequence
  chemically synthesized
cccctagccactaaggcaat

SEQ ID NO: 345 - DNA, 20 bp, Artificial Sequence
  chemically synthesized
ccctagccactaaggcaatt

SEQ ID NO: 346 - DNA, 20 bp, Artificial Sequence
  chemically synthesized
cctagccactaaggcaattg

SEQ ID NO: 347 - DNA, 20 bp, Artificial Sequence
  chemically synthesized
ccactaaggcaattggggtg

SEQ ID NO: 348 - DNA, 20 bp, Artificial Sequence
  chemically synthesized
cactaaggcaattggggtgc

SEQ ID NO: 349 - DNA, 20 bp, Artificial Sequence
  chemically synthesized
aggcaattggggtgcaggaa

SEQ ID NO: 350 - DNA, 20 bp, Artificial Sequence
  chemically synthesized
ggcaattggggtgcaggaat

SEQ ID NO: 351 - DNA, 20 bp, Artificial Sequence
  chemically synthesized
gcaattggggtgcaggaatg

SEQ ID NO: 352 - DNA, 20 bp, Artificial Sequence
  chemically synthesized
caattggggtgcaggaatgg

SEQ ID NO: 353 - DNA, 20 bp, Artificial Sequence
  chemically synthesized
ttggggtgcaggaatggggg

SEQ ID NO: 354 - DNA, 20 bp, Artificial Sequence
  chemically synthesized
tggggtgcaggaatgggggc

SEQ ID NO: 355 - DNA, 20 bp, Artificial Sequence
  chemically synthesized
ggggtgcaggaatgggggca

SEQ ID NO: 356 - DNA, 20 bp, Artificial Sequence
  chemically synthesized
caggaatgggggcagggtac

SEQ ID NO: 357 - DNA, 20 bp, Artificial Sequence
  chemically synthesized
ggcagggtaccagcctcacc

SEQ ID NO: 358 - DNA, 20 bp, Artificial Sequence
  chemically synthesized
agggtaccagcctcaccaag

SEQ ID NO: 359 - DNA, 20 bp, Artificial Sequence
  chemically synthesized
aagtggttgataaacccacg

SEQ ID NO: 360 - DNA, 20 bp, Artificial Sequence
  chemically synthesized
agtggttgataaacccacgt

SEQ ID NO: 361 - DNA, 20 bp, Artificial Sequence
  chemically synthesized
gtggttgataaacccacgtg

SEQ ID NO: 362 - DNA, 20 bp, Artificial Sequence
  chemically synthesized
aaacccacgtggggtaccct

SEQ ID NO: 363 - DNA, 20 bp, Artificial Sequence
  chemically synthesized
cgtggggtaccctaagaact

SEQ ID NO: 364 - DNA, 20 bp, Artificial Sequence
  chemically synthesized
gtggggtaccctaagaactt

SEQ ID NO: 365 - DNA, 20 bp, Artificial Sequence
  chemically synthesized
gtaccctaagaacttgggaa

SEQ ID NO: 366 - DNA, 20 bp, Artificial Sequence
  chemically synthesized
taagaacttgggaacagcca

SEQ ID NO: 367 - DNA, 20 bp, Artificial Sequence
  chemically synthesized
gaacttgggaacagccacag

SEQ ID NO: 368 - DNA, 20 bp, Artificial Sequence
  chemically synthesized
aacttgggaacagccacagc

SEQ ID NO: 369 - DNA, 20 bp, Artificial Sequence
  chemically synthesized
acttgggaacagccacagca

SEQ ID NO: 370 - DNA, 20 bp, Artificial Sequence
  chemically synthesized
cttgggaacagccacagcag

SEQ ID NO: 371 - DNA, 20 bp, Artificial Sequence
  chemically synthesized
ttgggaacagccacagcagg

SEQ ID NO: 372 - DNA, 20 bp, Artificial Sequence
  chemically synthesized
tgggaacagccacagcaggg

SEQ ID NO: 373 - DNA, 20 bp, Artificial Sequence
  chemically synthesized
cacagcaggggggcgatgct

SEQ ID NO: 374 - DNA, 20 bp, Artificial Sequence
  chemically synthesized
acagcaggggggcgatgctt

SEQ ID NO: 375 - DNA, 20 bp, Artificial Sequence
  chemically synthesized
cagcaggggggcgatgcttg

SEQ ID NO: 376 - DNA, 20 bp, Artificial Sequence
  chemically synthesized
gcgatgcttggggacctgcc

SEQ ID NO: 377 - DNA, 20 bp, Artificial Sequence
  chemically synthesized
gatgcttggggacctgcctg

SEQ ID NO: 378 - DNA, 20 bp, Artificial Sequence
  chemically synthesized
gcttggggacctgcctggag

SEQ ID NO: 379 - DNA, 20 bp, Artificial Sequence
  chemically synthesized
cttggggacctgcctggaga

SEQ ID NO: 380 - DNA, 20 bp, Artificial Sequence
  chemically synthesized
gacctgcctggagaaggatg

SEQ ID NO: 381 - DNA, 20 bp, Artificial Sequence
  chemically synthesized
acctgcctggagaaggatgc

SEQ ID NO: 382 - DNA, 20 bp, Artificial Sequence
  chemically synthesized
cctggagaaggatgcaggac

SEQ ID NO: 383 - DNA, 20 bp, Artificial Sequence
  chemically synthesized
aggatgcaggacgagaaaca

SEQ ID NO: 384 - DNA, 20 bp, Artificial Sequence
  chemically synthesized
caggacgagaaacacagccc

SEQ ID NO: 385 - DNA, 20 bp, Artificial Sequence
  chemically synthesized
aggacgagaaacacagcccc

SEQ ID NO: 386 - DNA, 20 bp, Artificial Sequence
  chemically synthesized
acgagaaacacagccccagg

SEQ ID NO: 387 - DNA, 20 bp, Artificial Sequence
  chemically synthesized
gagaaacacagccccaggtg

SEQ ID NO: 388 - DNA, 20 bp, Artificial Sequence
  chemically synthesized
acagccccaggtggagaaac

SEQ ID NO: 389 - DNA, 20 bp, Artificial Sequence
  chemically synthesized
ccccaggtggagaaactggc

SEQ ID NO: 390 - DNA, 20 bp, Artificial Sequence
  chemically synthesized
cccaggtggagaaactggcc

SEQ ID NO: 391 - DNA, 20 bp, Artificial Sequence
  chemically synthesized
ggagaaactggccgggaatc

SEQ ID NO: 392 - DNA, 20 bp, Artificial Sequence
  chemically synthesized
agaaactggccgggaatcaa

SEQ ID NO: 393 - DNA, 20 bp, Artificial Sequence
  chemically synthesized
gccgggaatcaagagtcacc

SEQ ID NO: 394 - DNA, 20 bp, Artificial Sequence
  chemically synthesized
cgggaatcaagagtcaccca

SEQ ID NO: 395 - DNA, 20 bp, Artificial Sequence
  chemically synthesized
aatcaagagtcacccagaga

SEQ ID NO: 396 - DNA, 20 bp, Artificial Sequence
  chemically synthesized
accaaccatccctgttttcc

SEQ ID NO: 397 - DNA, 20 bp, Artificial Sequence
  chemically synthesized
ccaaccatccctgttttcct

SEQ ID NO: 398 - DNA, 20 bp, Artificial Sequence
  chemically synthesized
atccctgttttcctaggact

SEQ ID NO: 399 - DNA, 20 bp, Artificial Sequence
  chemically synthesized
tccctgttttcctaggactg

SEQ ID NO: 400 - DNA, 20 bp, Artificial Sequence
  chemically synthesized
ccctgttttcctaggactga

SEQ ID NO: 401 - DNA, 20 bp, Artificial Sequence
  chemically synthesized
tttcctaggactgagggttt

SEQ ID NO: 402 - DNA, 20 bp, Artificial Sequence
  chemically synthesized
gagggtttcagtgctaaaac

SEQ ID NO: 403 - DNA, 20 bp, Artificial Sequence
  chemically synthesized
agggtttcagtgctaaaact

SEQ ID NO: 404 - DNA, 20 bp, Artificial Sequence
  chemically synthesized
gtgctaaaactaggctgtcc

SEQ ID NO: 405 - DNA, 20 bp, Artificial Sequence
  chemically synthesized
tgctaaaactaggctgtcct

SEQ ID NO: 406 - DNA, 20 bp, Artificial Sequence
  chemically synthesized
actaggctgtcctgggcaaa

SEQ ID NO: 407 - DNA, 20 bp, Artificial Sequence
  chemically synthesized
ctgtcctgggcaaacagcat

SEQ ID NO: 408 - DNA, 20 bp, Artificial Sequence
  chemically synthesized
cctgggcaaacagcataagc

SEQ ID NO: 409 - DNA, 20 bp, Artificial Sequence
  chemically synthesized
taagctggtcaccccacacc

SEQ ID NO: 410 - DNA, 20 bp, Artificial Sequence
  chemically synthesized
acccagacctgacccaaacc

SEQ ID NO: 411 - DNA, 20 bp, Artificial Sequence
  chemically synthesized
aacccagctcccctgcttct

SEQ ID NO: 412 - DNA, 20 bp, Artificial Sequence
  chemically synthesized
gcttcttggccacgtaacct

SEQ ID NO: 413 - DNA, 20 bp, Artificial Sequence
  chemically synthesized
tcttggccacgtaacctgag

SEQ ID NO: 414 - DNA, 20 bp, Artificial Sequence
  chemically synthesized
cttggccacgtaacctgaga

SEQ ID NO: 415 - DNA, 20 bp, Artificial Sequence
  chemically synthesized
ttggccacgtaacctgagaa

SEQ ID NO: 416 - DNA, 20 bp, Artificial Sequence
  chemically synthesized
aatccctcctctctgaaccc

SEQ ID NO: 417 - DNA, 20 bp, Artificial Sequence
  chemically synthesized
cccagcccaccccaatgctc

SEQ ID NO: 418 - DNA, 20 bp, Artificial Sequence
  chemically synthesized
ccagcccaccccaatgctcc

SEQ ID NO: 419 - DNA, 20 bp, Artificial Sequence
  chemically synthesized
ccccaatgctccaggcctcc

SEQ ID NO: 420 - DNA, 20 bp, Artificial Sequence
  chemically synthesized
cccaatgctccaggcctcct

SEQ ID NO: 421 - DNA, 20 bp, Artificial Sequence
  chemically synthesized
aggcctcctgggataccccg

SEQ ID NO: 422 - DNA, 20 bp, Artificial Sequence
  chemically synthesized
gcctcctgggataccccgaa

SEQ ID NO: 423 - DNA, 20 bp, Artificial Sequence
  chemically synthesized
cctgggataccccgaagagt

SEQ ID NO: 424 - DNA, 20 bp, Artificial Sequence
  chemically synthesized
ccccgaagagtgagtttgcc

SEQ ID NO: 425 - DNA, 20 bp, Artificial Sequence
  chemically synthesized
cgaagagtgagtttgccaag

SEQ ID NO: 426 - DNA, 20 bp, Artificial Sequence
  chemically synthesized
tttgccaagcagtcacccca

SEQ ID NO: 427 - DNA, 20 bp, Artificial Sequence
  chemically synthesized
ccaagcagtcaccccacagt

SEQ ID NO: 428 - DNA, 20 bp, Artificial Sequence
  chemically synthesized
aagcagtcaccccacagttg

SEQ ID NO: 429 - DNA, 20 bp, Artificial Sequence
  chemically synthesized
agcagtcaccccacagttgg

SEQ ID NO: 430 - DNA, 20 bp, Artificial Sequence
  chemically synthesized
cagtcaccccacagttggag

SEQ ID NO: 431 - DNA, 20 bp, Artificial Sequence
  chemically synthesized
ttggaggagaatccacccaa

SEQ ID NO: 432 - DNA, 20 bp, Artificial Sequence
  chemically synthesized
tggaggagaatccacccaaa

SEQ ID NO: 433 - DNA, 20 bp, Artificial Sequence
  chemically synthesized
aggagaatccacccaaaagg

SEQ ID NO: 434 - DNA, 20 bp, Artificial Sequence
  chemically synthesized
aatccacccaaaaggcagcc

SEQ ID NO: 435 - DNA, 20 bp, Artificial Sequence
  chemically synthesized
ccacccaaaaggcagcctgg

SEQ ID NO: 436 - DNA, 20 bp, Artificial Sequence
  chemically synthesized
ccaaaaggcagcctggtaga

SEQ ID NO: 437 - DNA, 20 bp, Artificial Sequence
  chemically synthesized
caaaaggcagcctggtagac

SEQ ID NO: 438 - DNA, 20 bp, Artificial Sequence
  chemically synthesized
aaaaggcagcctggtagaca

SEQ ID NO: 439 - DNA, 20 bp, Artificial Sequence
  chemically synthesized
ggcagcctggtagacagggc

SEQ ID NO: 440 - DNA, 20 bp, Artificial Sequence
  chemically synthesized
gcagcctggtagacagggct

SEQ ID NO: 441 - DNA, 20 bp, Artificial Sequence
  chemically synthesized
cagcctggtagacagggctg

SEQ ID NO: 442 - DNA, 20 bp, Artificial Sequence
  chemically synthesized
cctggtagacagggctgggg

SEQ ID NO: 443 - DNA, 20 bp, Artificial Sequence
  chemically synthesized
agggctggggtggcctctcg

SEQ ID NO: 444 - DNA, 20 bp, Artificial Sequence
  chemically synthesized
gggctggggtggcctctcgt

SEQ ID NO: 445 - DNA, 20 bp, Artificial Sequence
  chemically synthesized
ggctggggtggcctctcgtg

SEQ ID NO: 446 - DNA, 20 bp, Artificial Sequence
  chemically synthesized
gggtggcctctcgtggggtc

SEQ ID NO: 447 - DNA, 20 bp, Artificial Sequence
  chemically synthesized
ggtggcctctcgtggggtcc

SEQ ID NO: 448 - DNA, 20 bp, Artificial Sequence
  chemically synthesized
cctctcgtggggtccaggcc

SEQ ID NO: 449 - DNA, 20 bp, Artificial Sequence
  chemically synthesized
ctcgtggggtccaggccaag

SEQ ID NO: 450 - DNA, 20 bp, Artificial Sequence
  chemically synthesized
tcgtggggtccaggccaagt

SEQ ID NO: 451 - DNA, 20 bp, Artificial Sequence
  chemically synthesized
tggggtccaggccaagtagg

SEQ ID NO: 452 - DNA, 20 bp, Artificial Sequence
  chemically synthesized
tccaggccaagtaggtggcc

SEQ ID NO: 453 - DNA, 20 bp, Artificial Sequence
  chemically synthesized
ccaggccaagtaggtggcct

SEQ ID NO: 454 - DNA, 20 bp, Artificial Sequence
  chemically synthesized
caggccaagtaggtggcctg

SEQ ID NO: 455 - DNA, 20 bp, Artificial Sequence
  chemically synthesized
agtaggtggcctggggcctc

SEQ ID NO: 456 - DNA, 20 bp, Artificial Sequence
  chemically synthesized
gtaggtggcctggggcctct

SEQ ID NO: 457 - DNA, 20 bp, Artificial Sequence
  chemically synthesized
taggtggcctggggcctctg

SEQ ID NO: 458 - DNA, 20 bp, Artificial Sequence
  chemically synthesized
aggtggcctggggcctctgg

SEQ ID NO: 459 - DNA, 20 bp, Artificial Sequence
  chemically synthesized
cctggggcctctgggggatg

SEQ ID NO: 460 - DNA, 20 bp, Artificial Sequence
  chemically synthesized
ctggggcctctgggggatgc

SEQ ID NO: 461 - DNA, 20 bp, Artificial Sequence
  chemically synthesized
tggggcctctgggggatgca

SEQ ID NO: 462 - DNA, 20 bp, Artificial Sequence
  chemically synthesized
ggggcctctgggggatgcag

SEQ ID NO: 463 - DNA, 20 bp, Artificial Sequence
  chemically synthesized
gcctctgggggatgcagggg

SEQ ID NO: 464 - DNA, 20 bp, Artificial Sequence
  chemically synthesized
cctctgggggatgcagggga

SEQ ID NO: 465 - DNA, 20 bp, Artificial Sequence
  chemically synthesized
ctctgggggatgcaggggaa

SEQ ID NO: 466 - DNA, 20 bp, Artificial Sequence
  chemically synthesized
tctgggggatgcaggggaag

SEQ ID NO: 467 - DNA, 20 bp, Artificial Sequence
  chemically synthesized
ctgggggatgcaggggaagg

SEQ ID NO: 468 - DNA, 20 bp, Artificial Sequence
  chemically synthesized
gatgcaggggaagggggatg

SEQ ID NO: 469 - DNA, 20 bp, Artificial Sequence
  chemically synthesized
atgcaggggaagggggatgc

SEQ ID NO: 470 - DNA, 20 bp, Artificial Sequence
  chemically synthesized
tgcaggggaagggggatgca

SEQ ID NO: 471 - DNA, 20 bp, Artificial Sequence
  chemically synthesized
gcaggggaagggggatgcag

SEQ ID NO: 472 - DNA, 20 bp, Artificial Sequence
  chemically synthesized
ggaagggggatgcaggggaa

SEQ ID NO: 473 - DNA, 20 bp, Artificial Sequence
  chemically synthesized
gaagggggatgcaggggaac

SEQ ID NO: 474 - DNA, 20 bp, Artificial Sequence
  chemically synthesized
aagggggatgcaggggaacg

SEQ ID NO: 475 - DNA, 20 bp, Artificial Sequence
  chemically synthesized
gatgcaggggaacggggatg

SEQ ID NO: 476 - DNA, 20 bp, Artificial Sequence
  chemically synthesized
atgcaggggaacggggatgc

SEQ ID NO: 477 - DNA, 20 bp, Artificial Sequence
  chemically synthesized
tgcaggggaacggggatgca

SEQ ID NO: 478 - DNA, 20 bp, Artificial Sequence
  chemically synthesized
gcaggggaacggggatgcag

SEQ ID NO: 479 - DNA, 20 bp, Artificial Sequence
  chemically synthesized
ggaacggggatgcaggggaa

SEQ ID NO: 480 - DNA, 20 bp, Artificial Sequence
  chemically synthesized
gaacggggatgcaggggaac

SEQ ID NO: 481 - DNA, 20 bp, Artificial Sequence
  chemically synthesized
aacggggatgcaggggaacg

SEQ ID NO: 482 - DNA, 20 bp, Artificial Sequence
  chemically synthesized
ggatgcaggggaacggggct

SEQ ID NO: 483 - DNA, 20 bp, Artificial Sequence
  chemically synthesized
ggggaacggggctcagtctg

SEQ ID NO: 484 - DNA, 20 bp, Artificial Sequence
  chemically synthesized
ggaacggggctcagtctgaa

SEQ ID NO: 485 - DNA, 20 bp, Artificial Sequence
  chemically synthesized
acggggctcagtctgaagag

SEQ ID NO: 486 - DNA, 20 bp, Artificial Sequence
  chemically synthesized
ggggctcagtctgaagagca

SEQ ID NO: 487 - DNA, 20 bp, Artificial Sequence
  chemically synthesized
ctcagtctgaagagcagagc

SEQ ID NO: 488 - DNA, 20 bp, Artificial Sequence
  chemically synthesized
tcagtctgaagagcagagcc

SEQ ID NO: 489 - DNA, 20 bp, Artificial Sequence
  chemically synthesized
agcagagccaggaacccctg

SEQ ID NO: 490 - DNA, 20 bp, Artificial Sequence
  chemically synthesized
gcagagccaggaacccctgt

SEQ ID NO: 491 - DNA, 20 bp, Artificial Sequence
  chemically synthesized
cagagccaggaacccctgta

SEQ ID NO: 492 - DNA, 20 bp, Artificial Sequence
  chemically synthesized
agccaggaacccctgtaggg

SEQ ID NO: 493 - DNA, 20 bp, Artificial Sequence
  chemically synthesized
gccaggaacccctgtaggga

SEQ ID NO: 494 - DNA, 20 bp, Artificial Sequence
  chemically synthesized
ccaggaacccctgtagggaa

SEQ ID NO: 495 - DNA, 20 bp, Artificial Sequence
  chemically synthesized
caggaacccctgtagggaag

SEQ ID NO: 496 - DNA, 20 bp, Artificial Sequence
  chemically synthesized
gaacccctgtagggaagggg

SEQ ID NO: 497 - DNA, 20 bp, Artificial Sequence
  chemically synthesized
aacccctgtagggaaggggc

SEQ ID NO: 498 - DNA, 20 bp, Artificial Sequence
  chemically synthesized
cccctgtagggaaggggcag

SEQ ID NO: 499 - DNA, 20 bp, Artificial Sequence
  chemically synthesized
cctgtagggaaggggcagga

SEQ ID NO: 500 - DNA, 20 bp, Artificial Sequence
  chemically synthesized
tagggaaggggcaggagagc

SEQ ID NO: 501 - DNA, 20 bp, Artificial Sequence
  chemically synthesized
agggaaggggcaggagagcc

SEQ ID NO: 502 - DNA, 20 bp, Artificial Sequence
  chemically synthesized
gggaaggggcaggagagcca

SEQ ID NO: 503 - DNA, 20 bp, Artificial Sequence
  chemically synthesized
ggaaggggcaggagagccag

SEQ ID NO: 504 - DNA, 20 bp, Artificial Sequence
  chemically synthesized
ggcaggagagccaggggcat

SEQ ID NO: 505 - DNA, 20 bp, Artificial Sequence
  chemically synthesized
ggagagccaggggcatgaga

SEQ ID NO: 506 - DNA, 20 bp, Artificial Sequence
  chemically synthesized
gagccaggggcatgagatgg

SEQ ID NO: 507 - DNA, 20 bp, Artificial Sequence
  chemically synthesized
aggggcatgagatggtggac

SEQ ID NO: 508 - DNA, 20 bp, Artificial Sequence
  chemically synthesized
ggggcatgagatggtggacg

SEQ ID NO: 509 - DNA, 20 bp, Artificial Sequence
  chemically synthesized
gcatgagatggtggacgagg

SEQ ID NO: 510 - DNA, 20 bp, Artificial Sequence
  chemically synthesized
catgagatggtggacgagga

SEQ ID NO: 511 - DNA, 20 bp, Artificial Sequence
  chemically synthesized
atgagatggtggacgaggaa

SEQ ID NO: 512 - DNA, 20 bp, Artificial Sequence
  chemically synthesized
tgagatggtggacgaggaag

SEQ ID NO: 513 - DNA, 20 bp, Artificial Sequence
  chemically synthesized
gagatggtggacgaggaagg

SEQ ID NO: 514 - DNA, 20 bp, Artificial Sequence
  chemically synthesized
tggtggacgaggaaggggga

SEQ ID NO: 515 - DNA, 20 bp, Artificial Sequence
  chemically synthesized
ggtggacgaggaagggggac

SEQ ID NO: 516 - DNA, 20 bp, Artificial Sequence
  chemically synthesized
gtggacgaggaagggggaca

SEQ ID NO: 517 - DNA, 20 bp, Artificial Sequence
  chemically synthesized
gacgaggaagggggacaggg

SEQ ID NO: 518 - DNA, 20 bp, Artificial Sequence
  chemically synthesized
gaagggggacagggaagcct

SEQ ID NO: 519 - DNA, 20 bp, Artificial Sequence
  chemically synthesized
ggaagcctgagcgcctctcc

SEQ ID NO: 520 - DNA, 20 bp, Artificial Sequence
  chemically synthesized
gaagcctgagcgcctctcct

SEQ ID NO: 521 - DNA, 20 bp, Artificial Sequence
  chemically synthesized
gcgcctctcctgggcttgcc

SEQ ID NO: 522 - DNA, 20 bp, Artificial Sequence
  chemically synthesized
cgcctctcctgggcttgcca

SEQ ID NO: 523 - DNA, 20 bp, Artificial Sequence
  chemically synthesized
gcttgccaaggactcaaacc

SEQ ID NO: 524 - DNA, 20 bp, Artificial Sequence
  chemically synthesized
tgccaaggactcaaacccag

SEQ ID NO: 525 - DNA, 20 bp, Artificial Sequence
  chemically synthesized
aggactcaaacccagaagcc

SEQ ID NO: 526 - DNA, 20 bp, Artificial Sequence
  chemically synthesized
gactcaaacccagaagccca

SEQ ID NO: 527 - DNA, 20 bp, Artificial Sequence
  chemically synthesized
tcaaacccagaagcccagag

SEQ ID NO: 528 - DNA, 20 bp, Artificial Sequence
  chemically synthesized
caaacccagaagcccagagc

SEQ ID NO: 529 - DNA, 20 bp, Artificial Sequence
  chemically synthesized
aaacccagaagcccagagca

SEQ ID NO: 530 - DNA, 20 bp, Artificial Sequence
  chemically synthesized
agaagcccagagcagggcct

SEQ ID NO: 531 - DNA, 20 bp, Artificial Sequence
  chemically synthesized
gaagcccagagcagggcctt

SEQ ID NO: 532 - DNA, 20 bp, Artificial Sequence
  chemically synthesized
aagcccagagcagggcctta

SEQ ID NO: 533 - DNA, 20 bp, Artificial Sequence
  chemically synthesized
cccagagcagggccttaggg

SEQ ID NO: 534 - DNA, 20 bp, Artificial Sequence
  chemically synthesized
agagcagggccttagggaag

SEQ ID NO: 535 - DNA, 20 bp, Artificial Sequence
  chemically synthesized
gagcagggccttagggaagc

SEQ ID NO: 536 - DNA, 20 bp, Artificial Sequence
  chemically synthesized
agggaagcgggaccctgctc

SEQ ID NO: 537 - DNA, 20 bp, Artificial Sequence
  chemically synthesized
gggaagcgggaccctgctct

SEQ ID NO: 538 - DNA, 20 bp, Artificial Sequence
  chemically synthesized
aagcgggaccctgctctggg

SEQ ID NO: 539 - DNA, 20 bp, Artificial Sequence
  chemically synthesized
gcgggaccctgctctgggcg

SEQ ID NO: 540 - DNA, 20 bp, Artificial Sequence
  chemically synthesized
cgggaccctgctctgggcgg

SEQ ID NO: 541 - DNA, 20 bp, Artificial Sequence
  chemically synthesized
ctgggcggaggaatatgtcc

SEQ ID NO: 542 - DNA, 20 bp, Artificial Sequence
  chemically synthesized
gcggaggaatatgtcccaga

SEQ ID NO: 543 - DNA, 20 bp, Artificial Sequence
  chemically synthesized
gaatatgtcccagatagcac

SEQ ID NO: 544 - DNA, 20 bp, Artificial Sequence
  chemically synthesized
aatatgtcccagatagcact

SEQ ID NO: 545 - DNA, 20 bp, Artificial Sequence
  chemically synthesized
atatgtcccagatagcactg

SEQ ID NO: 546 - DNA, 20 bp, Artificial Sequence
  chemically synthesized
gatagcactggggactcttt

SEQ ID NO: 547 - DNA, 20 bp, Artificial Sequence
  chemically synthesized
atagcactggggactcttta

SEQ ID NO: 548 - DNA, 20 bp, Artificial Sequence
  chemically synthesized
cactggggactctttaagga

SEQ ID NO: 549 - DNA, 20 bp, Artificial Sequence
  chemically synthesized
tggggactctttaaggaaag

SEQ ID NO: 550 - DNA, 20 bp, Artificial Sequence
  chemically synthesized
ggggactctttaaggaaaga

SEQ ID NO: 551 - DNA, 20 bp, Artificial Sequence
  chemically synthesized
actctttaaggaaagaagga

SEQ ID NO: 552 - DNA, 20 bp, Artificial Sequence
  chemically synthesized
tctttaaggaaagaaggatg

SEQ ID NO: 553 - DNA, 20 bp, Artificial Sequence
  chemically synthesized
taaggaaagaaggatggaga

SEQ ID NO: 554 - DNA, 20 bp, Artificial Sequence
  chemically synthesized
aggaaagaaggatggagaaa

SEQ ID NO: 555 - DNA, 20 bp, Artificial Sequence
  chemically synthesized
aagaaggatggagaaagaga

SEQ ID NO: 556 - DNA, 20 bp, Artificial Sequence
  chemically synthesized
agaaggatggagaaagagaa

SEQ ID NO: 557 - DNA, 20 bp, Artificial Sequence
  chemically synthesized
gaaggatggagaaagagaaa

SEQ ID NO: 558 - DNA, 20 bp, Artificial Sequence
  chemically synthesized
aggatggagaaagagaaagg

SEQ ID NO: 559 - DNA, 20 bp, Artificial Sequence
  chemically synthesized
atggagaaagagaaagggag

SEQ ID NO: 560 - DNA, 20 bp, Artificial Sequence
  chemically synthesized
ggagaaagagaaagggagta

SEQ ID NO: 561 - DNA, 20 bp, Artificial Sequence
  chemically synthesized
gagaaagagaaagggagtag

SEQ ID NO: 562 - DNA, 20 bp, Artificial Sequence
  chemically synthesized
aaagagaaagggagtagagg

SEQ ID NO: 563 - DNA, 20 bp, Artificial Sequence
  chemically synthesized
gagtagaggcggccacgacc

SEQ ID NO: 564 - DNA, 20 bp, Artificial Sequence
  chemically synthesized
gccacgacctggtgaacacc

SEQ ID NO: 565 - DNA, 20 bp, Artificial Sequence
  chemically synthesized
ccacgacctggtgaacacct

SEQ ID NO: 566 - DNA, 20 bp, Artificial Sequence
  chemically synthesized
taggacgcaccattctcaca

SEQ ID NO: 567 - DNA, 20 bp, Artificial Sequence
  chemically synthesized
aggacgcaccattctcacaa

SEQ ID NO: 568 - DNA, 20 bp, Artificial Sequence
  chemically synthesized
ggacgcaccattctcacaaa

SEQ ID NO: 569 - DNA, 20 bp, Artificial Sequence
  chemically synthesized
acgcaccattctcacaaagg

SEQ ID NO: 570 - DNA, 20 bp, Artificial Sequence
  chemically synthesized
cacaaagggagttttccaca

SEQ ID NO: 571 - DNA, 20 bp, Artificial Sequence
  chemically synthesized
ggacacccccctcctcacca

SEQ ID NO: 572 - DNA, 20 bp, Artificial Sequence
  chemically synthesized
cctcctcaccacagccctgc

SEQ ID NO: 573 - DNA, 20 bp, Artificial Sequence
  chemically synthesized
ctcctcaccacagccctgcc

SEQ ID NO: 574 - DNA, 20 bp, Artificial Sequence
  chemically synthesized
tcaccacagccctgccagga

SEQ ID NO: 575 - DNA, 20 bp, Artificial Sequence
  chemically synthesized
caccacagccctgccaggac

SEQ ID NO: 576 - DNA, 20 bp, Artificial Sequence
  chemically synthesized
accacagccctgccaggacg

SEQ ID NO: 577 - DNA, 20 bp, Artificial Sequence
  chemically synthesized
cagccctgccaggacggggc

SEQ ID NO: 578 - DNA, 20 bp, Artificial Sequence
  chemically synthesized
gccaggacggggctggctac

SEQ ID NO: 579 - DNA, 20 bp, Artificial Sequence
  chemically synthesized
tggctactggccttatctca

SEQ ID NO: 580 - DNA, 20 bp, Artificial Sequence
  chemically synthesized
ggctactggccttatctcac

SEQ ID NO: 581 - DNA, 20 bp, Artificial Sequence
  chemically synthesized
tcacaggtaaaactgacgca

SEQ ID NO: 582 - DNA, 20 bp, Artificial Sequence
  chemically synthesized
acaggtaaaactgacgcacg

SEQ ID NO: 583 - DNA, 20 bp, Artificial Sequence
  chemically synthesized
caggtaaaactgacgcacgg

SEQ ID NO: 584 - DNA, 20 bp, Artificial Sequence
  chemically synthesized
cacggaggaacaatataaat

SEQ ID NO: 585 - DNA, 20 bp, Artificial Sequence
  chemically synthesized
acggaggaacaatataaatt

SEQ ID NO: 586 - DNA, 20 bp, Artificial Sequence
  chemically synthesized
cggaggaacaatataaattg

SEQ ID NO: 587 - DNA, 20 bp, Artificial Sequence
  chemically synthesized
gaacaatataaattggggac

SEQ ID NO: 588 - DNA, 20 bp, Artificial Sequence
  chemically synthesized
aatataaattggggactaga

SEQ ID NO: 589 - DNA, 20 bp, Artificial Sequence
  chemically synthesized
atataaattggggactagaa

SEQ ID NO: 590 - DNA, 20 bp, Artificial Sequence
  chemically synthesized
aattggggactagaaaggtg

SEQ ID NO: 591 - DNA, 20 bp, Artificial Sequence
  chemically synthesized
ttggggactagaaaggtgaa

SEQ ID NO: 592 - DNA, 20 bp, Artificial Sequence
  chemically synthesized
actagaaaggtgaagagcca

SEQ ID NO: 593 - DNA, 20 bp, Artificial Sequence
  chemically synthesized
gaaaggtgaagagccaaagt

SEQ ID NO: 594 - DNA, 20 bp, Artificial Sequence
  chemically synthesized
gaagagccaaagttagaact

SEQ ID NO: 595 - DNA, 20 bp, Artificial Sequence
  chemically synthesized
aagagccaaagttagaactc

SEQ ID NO: 596 - DNA, 20 bp, Artificial Sequence
  chemically synthesized
ttccaaactgcttctcctct

SEQ ID NO: 597 - DNA, 20 bp, Artificial Sequence
  chemically synthesized
tccaaactgcttctcctctt

SEQ ID NO: 598 - DNA, 20 bp, Artificial Sequence
  chemically synthesized
aaactgcttctcctcttggg

SEQ ID NO: 599 - DNA, 20 bp, Artificial Sequence
  chemically synthesized
cttctcctcttgggaagtgt

SEQ ID NO: 600 - DNA, 20 bp, Artificial Sequence
  chemically synthesized
ttctcctcttgggaagtgta

SEQ ID NO: 601 - DNA, 20 bp, Artificial Sequence
  chemically synthesized
tcctcttgggaagtgtaagg

SEQ ID NO: 602 - DNA, 20 bp, Artificial Sequence
  chemically synthesized
tgggaagtgtaaggaagctg

SEQ ID NO: 603 - DNA, 20 bp, Artificial Sequence
  chemically synthesized
gtgtaaggaagctgcagcac

SEQ ID NO: 604 - DNA, 20 bp, Artificial Sequence
  chemically synthesized
tgtaaggaagctgcagcacc

SEQ ID NO: 605 - DNA, 20 bp, Artificial Sequence
  chemically synthesized
ggaagctgcagcaccaggat

SEQ ID NO: 606 - DNA, 20 bp, Artificial Sequence
  chemically synthesized
ccaggatcagtgaaacgcac

SEQ ID NO: 607 - DNA, 20 bp, Artificial Sequence
  chemically synthesized
gatcagtgaaacgcaccaga

SEQ ID NO: 608 - DNA, 20 bp, Artificial Sequence
  chemically synthesized
aacgcaccagacggccgcgt

SEQ ID NO: 609 - DNA, 20 bp, Artificial Sequence
  chemically synthesized
cgcaccagacggccgcgtca

SEQ ID NO: 610 - DNA, 20 bp, Artificial Sequence
  chemically synthesized
accagacggccgcgtcagag

SEQ ID NO: 611 - DNA, 20 bp, Artificial Sequence
  chemically synthesized
acggccgcgtcagagcagct

SEQ ID NO: 612 - DNA, 20 bp, Artificial Sequence
  chemically synthesized
cggccgcgtcagagcagctc

SEQ ID NO: 613 - DNA, 20 bp, Artificial Sequence
  chemically synthesized
cgtcagagcagctcaggttc

SEQ ID NO: 614 - DNA, 20 bp, Artificial Sequence
  chemically synthesized
gtcagagcagctcaggttct

SEQ ID NO: 615 - DNA, 20 bp, Artificial Sequence
  chemically synthesized
cagagcagctcaggttctgg

SEQ ID NO: 616 - DNA, 20 bp, Artificial Sequence
  chemically synthesized
gagcagctcaggttctggga

SEQ ID NO: 617 - DNA, 20 bp, Artificial Sequence
  chemically synthesized
agcagctcaggttctgggag

SEQ ID NO: 618 - DNA, 20 bp, Artificial Sequence
  chemically synthesized
gcagctcaggttctgggaga

SEQ ID NO: 619 - DNA, 20 bp, Artificial Sequence
  chemically synthesized
gctcaggttctgggagaggg

SEQ ID NO: 620 - DNA, 20 bp, Artificial Sequence
  chemically synthesized
ggttctgggagagggtagcg

SEQ ID NO: 621 - DNA, 20 bp, Artificial Sequence
  chemically synthesized
gttctgggagagggtagcgc

SEQ ID NO: 622 - DNA, 20 bp, Artificial Sequence
  chemically synthesized
ttctgggagagggtagcgca

SEQ ID NO: 623 - DNA, 20 bp, Artificial Sequence
  chemically synthesized
tgggagagggtagcgcaggg

SEQ ID NO: 624 - DNA, 20 bp, Artificial Sequence
  chemically synthesized
ggtagcgcagggtggccact

SEQ ID NO: 625 - DNA, 20 bp, Artificial Sequence
  chemically synthesized
gcagggtggccactgagaac

SEQ ID NO: 626 - DNA, 20 bp, Artificial Sequence
  chemically synthesized
cagggtggccactgagaacc

SEQ ID NO: 627 - DNA, 20 bp, Artificial Sequence
  chemically synthesized
ggtggccactgagaaccggg

SEQ ID NO: 628 - DNA, 20 bp, Artificial Sequence
  chemically synthesized
gtggccactgagaaccgggc

SEQ ID NO: 629 - DNA, 20 bp, Artificial Sequence
  chemically synthesized
cttccctcccaccccctgcc

SEQ ID NO: 630 - DNA, 20 bp, Artificial Sequence
  chemically synthesized
ccctgccaagctctccctcc

SEQ ID NO: 631 - DNA, 20 bp, Artificial Sequence
  chemically synthesized
cctgccaagctctccctccc

SEQ ID NO: 632 - DNA, 20 bp, Artificial Sequence
  chemically synthesized
ctccctcccaggatcctctc

SEQ ID NO: 633 - DNA, 20 bp, Artificial Sequence
  chemically synthesized
atcctctctggctccatcgt

SEQ ID NO: 634 - DNA, 20 bp, Artificial Sequence
  chemically synthesized
gctccatcgtaagcaaacct

SEQ ID NO: 635 - DNA, 20 bp, Artificial Sequence
  chemically synthesized
tccatcgtaagcaaacctta

SEQ ID NO: 636 - DNA, 20 bp, Artificial Sequence
  chemically synthesized
ccatcgtaagcaaaccttag

SEQ ID NO: 637 - DNA, 20 bp, Artificial Sequence
  chemically synthesized
taagcaaaccttagaggttc

SEQ ID NO: 638 - DNA, 20 bp, Artificial Sequence
  chemically synthesized
caaaccttagaggttctggc

SEQ ID NO: 639 - DNA, 20 bp, Artificial Sequence
  chemically synthesized
aaaccttagaggttctggca

SEQ ID NO: 640 - DNA, 20 bp, Artificial Sequence
  chemically synthesized
accttagaggttctggcaag

SEQ ID NO: 641 - DNA, 20 bp, Artificial Sequence
  chemically synthesized
cttagaggttctggcaagga

SEQ ID NO: 642 - DNA, 20 bp, Artificial Sequence
  chemically synthesized
tagaggttctggcaaggaga

SEQ ID NO: 643 - DNA, 20 bp, Artificial Sequence
  chemically synthesized
ggttctggcaaggagagaga

SEQ ID NO: 644 - DNA, 20 bp, Artificial Sequence
  chemically synthesized
ggcaaggagagagatggctc

SEQ ID NO: 645 - DNA, 20 bp, Artificial Sequence
  chemically synthesized
gcaaggagagagatggctcc

SEQ ID NO: 646 - DNA, 20 bp, Artificial Sequence
  chemically synthesized
agagagatggctccaggaaa

SEQ ID NO: 647 - DNA, 20 bp, Artificial Sequence
  chemically synthesized
gagagatggctccaggaaat

SEQ ID NO: 648 - DNA, 20 bp, Artificial Sequence
  chemically synthesized
agagatggctccaggaaatg

SEQ ID NO: 649 - DNA, 20 bp, Artificial Sequence
  chemically synthesized
gagatggctccaggaaatgg

SEQ ID NO: 650 - DNA, 20 bp, Artificial Sequence
  chemically synthesized
aggaaatgggggtgtgtcac

SEQ ID NO: 651 - DNA, 20 bp, Artificial Sequence
  chemically synthesized
atgggggtgtgtcaccagat

SEQ ID NO: 652 - DNA, 20 bp, Artificial Sequence
  chemically synthesized
tgggggtgtgtcaccagata

SEQ ID NO: 653 - DNA, 20 bp, Artificial Sequence
  chemically synthesized
cagataaggaatctgcctaa

SEQ ID NO: 654 - DNA, 20 bp, Artificial Sequence
  chemically synthesized
agataaggaatctgcctaac

SEQ ID NO: 655 - DNA, 20 bp, Artificial Sequence
  chemically synthesized
ataaggaatctgcctaacag

SEQ ID NO: 656 - DNA, 20 bp, Artificial Sequence
  chemically synthesized
taaggaatctgcctaacagg

SEQ ID NO: 657 - DNA, 20 bp, Artificial Sequence
  chemically synthesized
ggaatctgcctaacaggagg

SEQ ID NO: 658 - DNA, 20 bp, Artificial Sequence
  chemically synthesized
gaatctgcctaacaggaggt

SEQ ID NO: 659 - DNA, 20 bp, Artificial Sequence
  chemically synthesized
aatctgcctaacaggaggtg

SEQ ID NO: 660 - DNA, 20 bp, Artificial Sequence
  chemically synthesized
atctgcctaacaggaggtgg

SEQ ID NO: 661 - DNA, 20 bp, Artificial Sequence
  chemically synthesized
gcctaacaggaggtgggggt

SEQ ID NO: 662 - DNA, 20 bp, Artificial Sequence
  chemically synthesized
gtgggggttagacccaatat

SEQ ID NO: 663 - DNA, 20 bp, Artificial Sequence
  chemically synthesized
tgggggttagacccaatatc

SEQ ID NO: 664 - DNA, 20 bp, Artificial Sequence
  chemically synthesized
ggggttagacccaatatcag

SEQ ID NO: 665 - DNA, 20 bp, Artificial Sequence
  chemically synthesized
tagacccaatatcaggagac

SEQ ID NO: 666 - DNA, 20 bp, Artificial Sequence
  chemically synthesized
agacccaatatcaggagact

SEQ ID NO: 667 - DNA, 20 bp, Artificial Sequence
  chemically synthesized
cccaatatcaggagactagg

SEQ ID NO: 668 - DNA, 20 bp, Artificial Sequence
  chemically synthesized
ccaatatcaggagactagga

SEQ ID NO: 669 - DNA, 20 bp, Artificial Sequence
  chemically synthesized
aatatcaggagactaggaag

SEQ ID NO: 670 - DNA, 20 bp, Artificial Sequence
  chemically synthesized
atatcaggagactaggaagg

SEQ ID NO: 671 - DNA, 20 bp, Artificial Sequence
  chemically synthesized
atcaggagactaggaaggag

SEQ ID NO: 672 - DNA, 20 bp, Artificial Sequence
  chemically synthesized
tcaggagactaggaaggagg

SEQ ID NO: 673 - DNA, 20 bp, Artificial Sequence
  chemically synthesized
gactaggaaggaggaggcct

SEQ ID NO: 674 - DNA, 20 bp, Artificial Sequence
  chemically synthesized
actaggaaggaggaggccta

SEQ ID NO: 675 - DNA, 20 bp, Artificial Sequence
  chemically synthesized
ggaaggaggaggcctaagga

SEQ ID NO: 676 - DNA, 20 bp, Artificial Sequence
  chemically synthesized
gaaggaggaggcctaaggat

SEQ ID NO: 677 - DNA, 20 bp, Artificial Sequence
  chemically synthesized
aaggaggaggcctaaggatg

SEQ ID NO: 678 - DNA, 20 bp, Artificial Sequence
  chemically synthesized
tctgtcaccaatcctgtccc

SEQ ID NO: 679 - DNA, 20 bp, Artificial Sequence
  chemically synthesized
gtcaccaatcctgtccctag

SEQ ID NO: 680 - DNA, 20 bp, Artificial Sequence
  chemically synthesized
tgtccctagtggccccactg

SEQ ID NO: 681 - DNA, 20 bp, Artificial Sequence
  chemically synthesized
gtccctagtggccccactgt

SEQ ID NO: 682 - DNA, 20 bp, Artificial Sequence
  chemically synthesized
tccctagtggccccactgtg

SEQ ID NO: 683 - DNA, 20 bp, Artificial Sequence
  chemically synthesized
ctagtggccccactgtgggg

SEQ ID NO: 684 - DNA, 20 bp, Artificial Sequence
  chemically synthesized
agtggccccactgtggggtg

SEQ ID NO: 685 - DNA, 20 bp, Artificial Sequence
  chemically synthesized
gtggccccactgtggggtgg

SEQ ID NO: 686 - DNA, 20 bp, Artificial Sequence
  chemically synthesized
tggccccactgtggggtgga

SEQ ID NO: 687 - DNA, 20 bp, Artificial Sequence
  chemically synthesized
ggccccactgtggggtggag

SEQ ID NO: 688 - DNA, 20 bp, Artificial Sequence
  chemically synthesized
ccactgtggggtggagggga

SEQ ID NO: 689 - DNA, 20 bp, Artificial Sequence
  chemically synthesized
ggggtggaggggacagataa

SEQ ID NO: 690 - DNA, 20 bp, Artificial Sequence
  chemically synthesized
aggggacagataaaagtacc

SEQ ID NO: 691 - DNA, 20 bp, Artificial Sequence
  chemically synthesized
cagataaaagtacccagaac

SEQ ID NO: 692 - DNA, 20 bp, Artificial Sequence
  chemically synthesized
gataaaagtacccagaacca

SEQ ID NO: 693 - DNA, 20 bp, Artificial Sequence
  chemically synthesized
agaaccagagccacattaac

SEQ ID NO: 694 - DNA, 20 bp, Artificial Sequence
  chemically synthesized
agagccacattaaccggccc

SEQ ID NO: 695 - DNA, 20 bp, Artificial Sequence
  chemically synthesized
gagccacattaaccggccct

SEQ ID NO: 696 - DNA, 20 bp, Artificial Sequence
  chemically synthesized
ttaaccggccctgggaatat

SEQ ID NO: 697 - DNA, 20 bp, Artificial Sequence
  chemically synthesized
taaccggccctgggaatata

SEQ ID NO: 698 - DNA, 20 bp, Artificial Sequence
  chemically synthesized
ccggccctgggaatataagg

SEQ ID NO: 699 - DNA, 20 bp, Artificial Sequence
  chemically synthesized
ctgggaatataaggtggtcc

SEQ ID NO: 700 - DNA, 20 bp, Artificial Sequence
  chemically synthesized
aatataaggtggtcccagct

SEQ ID NO: 701 - DNA, 20 bp, Artificial Sequence
  chemically synthesized
atataaggtggtcccagctc

SEQ ID NO: 702 - DNA, 20 bp, Artificial Sequence
  chemically synthesized
tataaggtggtcccagctcg

SEQ ID NO: 703 - DNA, 20 bp, Artificial Sequence
  chemically synthesized
gtggtcccagctcggggaca

SEQ ID NO: 704 - DNA, 20 bp, Artificial Sequence
  chemically synthesized
tggtcccagctcggggacac

SEQ ID NO: 705 - DNA, 20 bp, Artificial Sequence
  chemically synthesized
gctcggggacacaggatccc

SEQ ID NO: 706 - DNA, 20 bp, Artificial Sequence
  chemically synthesized
tcggggacacaggatccctg

SEQ ID NO: 707 - DNA, 20 bp, Artificial Sequence
  chemically synthesized
cggggacacaggatccctgg

SEQ ID NO: 708 - DNA, 20 bp, Artificial Sequence
  chemically synthesized
ggacacaggatccctggagg

SEQ ID NO: 709 - DNA, 20 bp, Artificial Sequence
  chemically synthesized
gcagcaaacatgctgtcctg

SEQ ID NO: 710 - DNA, 20 bp, Artificial Sequence
  chemically synthesized
gcaaacatgctgtcctgaag

SEQ ID NO: 711 - DNA, 20 bp, Artificial Sequence
  chemically synthesized
atgctgtcctgaagtggaca

SEQ ID NO: 712 - DNA, 20 bp, Artificial Sequence
  chemically synthesized
tgctgtcctgaagtggacat

SEQ ID NO: 713 - DNA, 20 bp, Artificial Sequence
  chemically synthesized
gctgtcctgaagtggacata

SEQ ID NO: 714 - DNA, 20 bp, Artificial Sequence
  chemically synthesized
ctgtcctgaagtggacatag

SEQ ID NO: 715 - DNA, 20 bp, Artificial Sequence
  chemically synthesized
ctgaagtggacataggggcc

SEQ ID NO: 716 - DNA, 20 bp, Artificial Sequence
  chemically synthesized
tgaagtggacataggggccc

SEQ ID NO: 717 - DNA, 20 bp, Artificial Sequence
  chemically synthesized
gtggacataggggcccgggt

SEQ ID NO: 718 - DNA, 20 bp, Artificial Sequence
  chemically synthesized
ggacataggggcccgggttg

SEQ ID NO: 719 - DNA, 20 bp, Artificial Sequence
  chemically synthesized
gacataggggcccgggttgg

SEQ ID NO: 720 - DNA, 20 bp, Artificial Sequence
  chemically synthesized
ataggggcccgggttggagg

SEQ ID NO: 721 - DNA, 20 bp, Artificial Sequence
  chemically synthesized
ggggcccgggttggaggaag

SEQ ID NO: 722 - DNA, 20 bp, Artificial Sequence
  chemically synthesized
ccgggttggaggaagaagac

SEQ ID NO: 723 - DNA, 20 bp, Artificial Sequence
  chemically synthesized
ttggaggaagaagactagct

SEQ ID NO: 724 - DNA, 20 bp, Artificial Sequence
  chemically synthesized
aagaagactagctgagctct

SEQ ID NO: 725 - DNA, 20 bp, Artificial Sequence
  chemically synthesized
tagctgagctctcggacccc

SEQ ID NO: 726 - DNA, 20 bp, Artificial Sequence
  chemically synthesized
ctgagctctcggacccctgg

SEQ ID NO: 727 - DNA, 20 bp, Artificial Sequence
  chemically synthesized
acccctggaagatgccatga

SEQ ID NO: 728 - DNA, 20 bp, Artificial Sequence
  chemically synthesized
cccctggaagatgccatgac

SEQ ID NO: 729 - DNA, 20 bp, Artificial Sequence
  chemically synthesized
ccctggaagatgccatgaca

SEQ ID NO: 730 - DNA, 20 bp, Artificial Sequence
  chemically synthesized
cctggaagatgccatgacag

SEQ ID NO: 731 - DNA, 20 bp, Artificial Sequence
  chemically synthesized
ctggaagatgccatgacagg

SEQ ID NO: 732 - DNA, 20 bp, Artificial Sequence
  chemically synthesized
aagatgccatgacagggggc

SEQ ID NO: 733 - DNA, 20 bp, Artificial Sequence
  chemically synthesized
atgccatgacagggggctgg

SEQ ID NO: 734 - DNA, 20 bp, Artificial Sequence
  chemically synthesized
gccatgacagggggctggaa

SEQ ID NO: 735 - DNA, 20 bp, Artificial Sequence
  chemically synthesized
tgacagggggctggaagagc

SEQ ID NO: 736 - DNA, 20 bp, Artificial Sequence
  chemically synthesized
gggggctggaagagctagca

SEQ ID NO: 737 - DNA, 20 bp, Artificial Sequence
  chemically synthesized
ctggaagagctagcacagac

SEQ ID NO: 738 - DNA, 20 bp, Artificial Sequence
  chemically synthesized
ggaagagctagcacagacta

SEQ ID NO: 739 - DNA, 20 bp, Artificial Sequence
  chemically synthesized
aagagctagcacagactaga

SEQ ID NO: 740 - DNA, 20 bp, Artificial Sequence
  chemically synthesized
agagctagcacagactagag

SEQ ID NO: 741 - DNA, 20 bp, Artificial Sequence
  chemically synthesized
ctagcacagactagagaggt

SEQ ID NO: 742 - DNA, 20 bp, Artificial Sequence
  chemically synthesized
tagcacagactagagaggta

SEQ ID NO: 743 - DNA, 20 bp, Artificial Sequence
  chemically synthesized
agcacagactagagaggtaa

SEQ ID NO: 744 - DNA, 20 bp, Artificial Sequence
  chemically synthesized
gcacagactagagaggtaag

SEQ ID NO: 745 - DNA, 20 bp, Artificial Sequence
  chemically synthesized
cacagactagagaggtaagg

SEQ ID NO: 746 - DNA, 20 bp, Artificial Sequence
  chemically synthesized
acagactagagaggtaaggg

SEQ ID NO: 747 - DNA, 20 bp, Artificial Sequence
  chemically synthesized
gactagagaggtaagggggg

SEQ ID NO: 748 - DNA, 20 bp, Artificial Sequence
  chemically synthesized
actagagaggtaaggggggt

SEQ ID NO: 749 - DNA, 20 bp, Artificial Sequence
  chemically synthesized
ctagagaggtaaggggggta

SEQ ID NO: 750 - DNA, 20 bp, Artificial Sequence
  chemically synthesized
tagagaggtaaggggggtag

SEQ ID NO: 751 - DNA, 20 bp, Artificial Sequence
  chemically synthesized
gagaggtaaggggggtaggg

SEQ ID NO: 752 - DNA, 20 bp, Artificial Sequence
  chemically synthesized
taggggagctgcccaaatga

SEQ ID NO: 753 - DNA, 20 bp, Artificial Sequence
  chemically synthesized
aggggagctgcccaaatgaa

SEQ ID NO: 754 - DNA, 20 bp, Artificial Sequence
  chemically synthesized
gggagctgcccaaatgaaag

SEQ ID NO: 755 - DNA, 20 bp, Artificial Sequence
  chemically synthesized
gctgcccaaatgaaaggagt

SEQ ID NO: 756 - DNA, 20 bp, Artificial Sequence
  chemically synthesized
tgcccaaatgaaaggagtga

SEQ ID NO: 757 - DNA, 20 bp, Artificial Sequence
  chemically synthesized
gcccaaatgaaaggagtgag

SEQ ID NO: 758 - DNA, 20 bp, Artificial Sequence
  chemically synthesized
tgagaggtgacccgaatcca

SEQ ID NO: 759 - DNA, 20 bp, Artificial Sequence
  chemically synthesized
gagaggtgacccgaatccac

SEQ ID NO: 760 - DNA, 20 bp, Artificial Sequence
  chemically synthesized
gaggtgacccgaatccacag

SEQ ID NO: 761 - DNA, 20 bp, Artificial Sequence
  chemically synthesized
gacccgaatccacaggagaa

SEQ ID NO: 762 - DNA, 20 bp, Artificial Sequence
  chemically synthesized
acccgaatccacaggagaac

SEQ ID NO: 763 - DNA, 20 bp, Artificial Sequence
  chemically synthesized
cccgaatccacaggagaacg

SEQ ID NO: 764 - DNA, 20 bp, Artificial Sequence
  chemically synthesized
ccacaggagaacggggtgtc

SEQ ID NO: 765 - DNA, 20 bp, Artificial Sequence
  chemically synthesized
cacaggagaacggggtgtcc

SEQ ID NO: 766 - DNA, 20 bp, Artificial Sequence
  chemically synthesized
gagaacggggtgtccaggca

SEQ ID NO: 767 - DNA, 20 bp, Artificial Sequence
  chemically synthesized
acggggtgtccaggcaaaga

SEQ ID NO: 768 - DNA, 20 bp, Artificial Sequence
  chemically synthesized
ggtgtccaggcaaagaaagc

SEQ ID NO: 769 - DNA, 20 bp, Artificial Sequence
  chemically synthesized
tgtccaggcaaagaaagcaa

SEQ ID NO: 770 - DNA, 20 bp, Artificial Sequence
  chemically synthesized
gtccaggcaaagaaagcaag

SEQ ID NO: 771 - DNA, 20 bp, Artificial Sequence
  chemically synthesized
aggcaaagaaagcaagagga

SEQ ID NO: 772 - DNA, 20 bp, Artificial Sequence
  chemically synthesized
gcaaagaaagcaagaggatg

SEQ ID NO: 773 - DNA, 20 bp, Artificial Sequence
  chemically synthesized
aaagaaagcaagaggatgga

SEQ ID NO: 774 - DNA, 20 bp, Artificial Sequence
  chemically synthesized
aagaaagcaagaggatggag

SEQ ID NO: 775 - DNA, 20 bp, Artificial Sequence
  chemically synthesized
aaagcaagaggatggagagg

SEQ ID NO: 776 - DNA, 20 bp, Artificial Sequence
  chemically synthesized
agaggatggagaggtggcta

SEQ ID NO: 777 - DNA, 20 bp, Artificial Sequence
  chemically synthesized
gatggagaggtggctaaagc

SEQ ID NO: 778 - DNA, 20 bp, Artificial Sequence
  chemically synthesized
atggagaggtggctaaagcc

SEQ ID NO: 779 - DNA, 20 bp, Artificial Sequence
  chemically synthesized
tggagaggtggctaaagcca

SEQ ID NO: 780 - DNA, 20 bp, Artificial Sequence
  chemically synthesized
gagaggtggctaaagccagg

SEQ ID NO: 781 - DNA, 20 bp, Artificial Sequence
  chemically synthesized
ggtggctaaagccagggaga

SEQ ID NO: 782 - DNA, 20 bp, Artificial Sequence
  chemically synthesized
gtggctaaagccagggagac

SEQ ID NO: 783 - DNA, 20 bp, Artificial Sequence
  chemically synthesized
tggctaaagccagggagacg

SEQ ID NO: 784 - DNA, 20 bp, Artificial Sequence
  chemically synthesized
gccagggagacggggtactt

SEQ ID NO: 785 - DNA, 20 bp, Artificial Sequence
  chemically synthesized
ccagggagacggggtacttt

SEQ ID NO: 786 - DNA, 20 bp, Artificial Sequence
  chemically synthesized
cagggagacggggtactttg

SEQ ID NO: 787 - DNA, 20 bp, Artificial Sequence
  chemically synthesized
cggggtactttggggttgtc

SEQ ID NO: 788 - DNA, 20 bp, Artificial Sequence
  chemically synthesized
tttggggttgtccagaaaaa

SEQ ID NO: 789 - DNA, 20 bp, Artificial Sequence
  chemically synthesized
ccagaaaaacggtgatgatg

SEQ ID NO: 790 - DNA, 20 bp, Artificial Sequence
  chemically synthesized
cagaaaaacggtgatgatgc

SEQ ID NO: 791 - DNA, 20 bp, Artificial Sequence
  chemically synthesized
cggtgatgatgcaggcctac

SEQ ID NO: 792 - DNA, 20 bp, Artificial Sequence
  chemically synthesized
tgatgatgcaggcctacaag

SEQ ID NO: 793 - DNA, 20 bp, Artificial Sequence
  chemically synthesized
gatgatgcaggcctacaaga

SEQ ID NO: 794 - DNA, 20 bp, Artificial Sequence
  chemically synthesized
atgatgcaggcctacaagaa

SEQ ID NO: 795 - DNA, 20 bp, Artificial Sequence
  chemically synthesized
tgatgcaggcctacaagaag

SEQ ID NO: 796 - DNA, 20 bp, Artificial Sequence
  chemically synthesized
atgcaggcctacaagaaggg

SEQ ID NO: 797 - DNA, 20 bp, Artificial Sequence
  chemically synthesized
tgcaggcctacaagaagggg

SEQ ID NO: 798 - DNA, 20 bp, Artificial Sequence
  chemically synthesized
aggcctacaagaaggggagg

SEQ ID NO: 799 - DNA, 20 bp, Artificial Sequence
  chemically synthesized
ggcctacaagaaggggaggc

SEQ ID NO: 800 - DNA, 20 bp, Artificial Sequence
  chemically synthesized
aagaaggggaggcgggacgc

SEQ ID NO: 801 - DNA, 20 bp, Artificial Sequence
  chemically synthesized
agaaggggaggcgggacgca

SEQ ID NO: 802 - DNA, 20 bp, Artificial Sequence
  chemically synthesized
gaaggggaggcgggacgcaa

SEQ ID NO: 803 - DNA, 20 bp, Artificial Sequence
  chemically synthesized
aggggaggcgggacgcaagg

SEQ ID NO: 804 - DNA, 20 bp, Artificial Sequence
  chemically synthesized
gacgcaagggagacatccgt

SEQ ID NO: 805 - DNA, 20 bp, Artificial Sequence
  chemically synthesized
cgcaagggagacatccgtcg

SEQ ID NO: 806 - DNA, 20 bp, Artificial Sequence
  chemically synthesized
aagggagacatccgtcggag

SEQ ID NO: 807 - DNA, 20 bp, Artificial Sequence
  chemically synthesized
agggagacatccgtcggaga

SEQ ID NO: 808 - DNA, 20 bp, Artificial Sequence
  chemically synthesized
ccgtcggagaaggccatcct

SEQ ID NO: 809 - DNA, 20 bp, Artificial Sequence
  chemically synthesized
agaaggccatcctaagaaac

SEQ ID NO: 810 - DNA, 20 bp, Artificial Sequence
  chemically synthesized
aaggccatcctaagaaacga

SEQ ID NO: 811 - DNA, 20 bp, Artificial Sequence
  chemically synthesized
ccatcctaagaaacgagaga

SEQ ID NO: 812 - DNA, 20 bp, Artificial Sequence
  chemically synthesized
ctaagaaacgagagatggca

SEQ ID NO: 813 - DNA, 20 bp, Artificial Sequence
  chemically synthesized
taagaaacgagagatggcac

SEQ ID NO: 814 - DNA, 20 bp, Artificial Sequence
  chemically synthesized
acgagagatggcacaggccc

SEQ ID NO: 815 - DNA, 20 bp, Artificial Sequence
  chemically synthesized
agagatggcacaggccccag

SEQ ID NO: 816 - DNA, 20 bp, Artificial Sequence
  chemically synthesized
gagatggcacaggccccaga

SEQ ID NO: 817 - DNA, 20 bp, Artificial Sequence
  chemically synthesized
gatggcacaggccccagaag

SEQ ID NO: 818 - DNA, 20 bp, Artificial Sequence
  chemically synthesized
ggcacaggccccagaaggag

SEQ ID NO: 819 - DNA, 20 bp, Artificial Sequence
  chemically synthesized
gcacaggccccagaaggaga

SEQ ID NO: 820 - DNA, 20 bp, Artificial Sequence
  chemically synthesized
ggccccagaaggagaaggaa

SEQ ID NO: 821 - DNA, 20 bp, Artificial Sequence
  chemically synthesized
gccccagaaggagaaggaaa

SEQ ID NO: 822 - DNA, 20 bp, Artificial Sequence
  chemically synthesized
ccccagaaggagaaggaaaa

SEQ ID NO: 823 - DNA, 20 bp, Artificial Sequence
  chemically synthesized
aggagaaggaaaagggaacc

SEQ ID NO: 824 - DNA, 20 bp, Artificial Sequence
  chemically synthesized
gaaggaaaagggaacccagc

SEQ ID NO: 825 - DNA, 20 bp, Artificial Sequence
  chemically synthesized
aaaagggaacccagcgagtg

SEQ ID NO: 826 - DNA, 20 bp, Artificial Sequence
  chemically synthesized
gggaacccagcgagtgaaga

SEQ ID NO: 827 - DNA, 20 bp, Artificial Sequence
  chemically synthesized
cccagcgagtgaagacggca

SEQ ID NO: 828 - DNA, 20 bp, Artificial Sequence
  chemically synthesized
ccagcgagtgaagacggcat

SEQ ID NO: 829 - DNA, 20 bp, Artificial Sequence
  chemically synthesized
cagcgagtgaagacggcatg

SEQ ID NO: 830 - DNA, 20 bp, Artificial Sequence
  chemically synthesized
gagtgaagacggcatggggt

SEQ ID NO: 831 - DNA, 20 bp, Artificial Sequence
  chemically synthesized
agtgaagacggcatggggtt

SEQ ID NO: 832 - DNA, 20 bp, Artificial Sequence
  chemically synthesized
aagacggcatggggttgggt

SEQ ID NO: 833 - DNA, 20 bp, Artificial Sequence
  chemically synthesized
agacggcatggggttgggtg

SEQ ID NO: 834 - DNA, 20 bp, Artificial Sequence
  chemically synthesized
gacggcatggggttgggtga

SEQ ID NO: 835 - DNA, 20 bp, Artificial Sequence
  chemically synthesized
cggcatggggttgggtgagg

SEQ ID NO: 836 - DNA, 20 bp, Artificial Sequence
  chemically synthesized
ggcatggggttgggtgaggg

SEQ ID NO: 837 - DNA, 20 bp, Artificial Sequence
  chemically synthesized
catggggttgggtgagggag

SEQ ID NO: 838 - DNA, 20 bp, Artificial Sequence
  chemically synthesized
tggggttgggtgagggagga

SEQ ID NO: 839 - DNA, 20 bp, Artificial Sequence
  chemically synthesized
ggtgagggaggagagatgcc

SEQ ID NO: 840 - DNA, 20 bp, Artificial Sequence
  chemically synthesized
tgagggaggagagatgcccg

SEQ ID NO: 841 - DNA, 20 bp, Artificial Sequence
  chemically synthesized
agggaggagagatgcccgga

SEQ ID NO: 842 - DNA, 20 bp, Artificial Sequence
  chemically synthesized
gggaggagagatgcccggag

SEQ ID NO: 843 - DNA, 20 bp, Artificial Sequence
  chemically synthesized
agagatgcccggagaggacc

SEQ ID NO: 844 - DNA, 20 bp, Artificial Sequence
  chemically synthesized
gcccggagaggacccagaca

SEQ ID NO: 845 - DNA, 20 bp, Artificial Sequence
  chemically synthesized
cccggagaggacccagacac

SEQ ID NO: 846 - DNA, 20 bp, Artificial Sequence
  chemically synthesized
ccggagaggacccagacacg

SEQ ID NO: 847 - DNA, 20 bp, Artificial Sequence
  chemically synthesized
ggagaggacccagacacggg

SEQ ID NO: 848 - DNA, 20 bp, Artificial Sequence
  chemically synthesized
gagaggacccagacacgggg

SEQ ID NO: 849 - DNA, 20 bp, Artificial Sequence
  chemically synthesized
agacacggggaggatccgct

SEQ ID NO: 850 - DNA, 20 bp, Artificial Sequence
  chemically synthesized
acacggggaggatccgctca

SEQ ID NO: 851 - DNA, 20 bp, Artificial Sequence
  chemically synthesized
cacggggaggatccgctcag

SEQ ID NO: 852 - DNA, 20 bp, Artificial Sequence
  chemically synthesized
tccgctcagaggacatcacg

SEQ ID NO: 853 - DNA, 20 bp, Artificial Sequence
  chemically synthesized
tcagaggacatcacgtggtg

SEQ ID NO: 854 - DNA, 20 bp, Artificial Sequence
  chemically synthesized
acatcacgtggtgcagcgcc

SEQ ID NO: 855 - DNA, 20 bp, Artificial Sequence
  chemically synthesized
tcacgtggtgcagcgccgag

SEQ ID NO: 856 - DNA, 20 bp, Artificial Sequence
  chemically synthesized
cacgtggtgcagcgccgaga

SEQ ID NO: 857 - DNA, 20 bp, Artificial Sequence
  chemically synthesized
gtggtgcagcgccgagaagg

SEQ ID NO: 858 - DNA, 20 bp, Artificial Sequence
  chemically synthesized
gcgccgagaaggaagtgctc

SEQ ID NO: 859 - DNA, 20 bp, Artificial Sequence
  chemically synthesized
cgagaaggaagtgctccgga

SEQ ID NO: 860 - DNA, 20 bp, Artificial Sequence
  chemically synthesized
agaaggaagtgctccggaaa

SEQ ID NO: 861 - DNA, 20 bp, Artificial Sequence
  chemically synthesized
tgctccggaaagagcatcct

SEQ ID NO: 862 - DNA, 20 bp, Artificial Sequence
  chemically synthesized
gctccggaaagagcatcctt

SEQ ID NO: 863 - DNA, 20 bp, Artificial Sequence
  chemically synthesized
ccggaaagagcatccttggg

SEQ ID NO: 864 - DNA, 20 bp, Artificial Sequence
  chemically synthesized
agcatccttgggcagcaaca

SEQ ID NO: 865 - DNA, 20 bp, Artificial Sequence
  chemically synthesized
atccttgggcagcaacacag

SEQ ID NO: 866 - DNA, 20 bp, Artificial Sequence
  chemically synthesized
ccttgggcagcaacacagca

SEQ ID NO: 867 - DNA, 20 bp, Artificial Sequence
  chemically synthesized
ttgggcagcaacacagcaga

SEQ ID NO: 868 - DNA, 20 bp, Artificial Sequence
  chemically synthesized
gcagcaacacagcagagagc

SEQ ID NO: 869 - DNA, 20 bp, Artificial Sequence
  chemically synthesized
cagcaacacagcagagagca

SEQ ID NO: 870 - DNA, 20 bp, Artificial Sequence
  chemically synthesized
agcaacacagcagagagcaa

SEQ ID NO: 871 - DNA, 20 bp, Artificial Sequence
  chemically synthesized
gcaacacagcagagagcaag

SEQ ID NO: 872 - DNA, 20 bp, Artificial Sequence
  chemically synthesized
acacagcagagagcaagggg

SEQ ID NO: 873 - DNA, 20 bp, Artificial Sequence
  chemically synthesized
acagcagagagcaaggggaa

SEQ ID NO: 874 - DNA, 20 bp, Artificial Sequence
  chemically synthesized
cagcagagagcaaggggaag

SEQ ID NO: 875 - DNA, 20 bp, Artificial Sequence
  chemically synthesized
agcagagagcaaggggaaga

SEQ ID NO: 876 - DNA, 20 bp, Artificial Sequence
  chemically synthesized
cagagagcaaggggaagagg

SEQ ID NO: 877 - DNA, 20 bp, Artificial Sequence
  chemically synthesized
agagcaaggggaagagggag

SEQ ID NO: 878 - DNA, 20 bp, Artificial Sequence
  chemically synthesized
agcaaggggaagagggagtg

SEQ ID NO: 879 - DNA, 20 bp, Artificial Sequence
  chemically synthesized
gcaaggggaagagggagtgg

SEQ ID NO: 880 - DNA, 20 bp, Artificial Sequence
  chemically synthesized
aggggaagagggagtggagg

SEQ ID NO: 881 - DNA, 20 bp, Artificial Sequence
  chemically synthesized
gaagagggagtggaggaaga

SEQ ID NO: 882 - DNA, 20 bp, Artificial Sequence
  chemically synthesized
gtggaggaagacggaacctg

SEQ ID NO: 883 - DNA, 20 bp, Artificial Sequence
  chemically synthesized
tggaggaagacggaacctga

SEQ ID NO: 884 - DNA, 20 bp, Artificial Sequence
  chemically synthesized
gaggaagacggaacctgaag

SEQ ID NO: 885 - DNA, 20 bp, Artificial Sequence
  chemically synthesized
aggaagacggaacctgaagg

SEQ ID NO: 886 - DNA, 20 bp, Artificial Sequence
  chemically synthesized
aagacggaacctgaaggagg

SEQ ID NO: 887 - DNA, 20 bp, Artificial Sequence
  chemically synthesized
acggaacctgaaggaggcgg

SEQ ID NO: 888 - DNA, 20 bp, Artificial Sequence
  chemically synthesized
cggaacctgaaggaggcggc

SEQ ID NO: 889 - DNA, 20 bp, Artificial Sequence
  chemically synthesized
ggaacctgaaggaggcggca

SEQ ID NO: 890 - DNA, 20 bp, Artificial Sequence
  chemically synthesized
acctgaaggaggcggcaggg

SEQ ID NO: 891 - DNA, 20 bp, Artificial Sequence
  chemically synthesized
cctgaaggaggcggcaggga

SEQ ID NO: 892 - DNA, 20 bp, Artificial Sequence
  chemically synthesized
ggaggcggcagggaaggatc

SEQ ID NO: 893 - DNA, 20 bp, Artificial Sequence
  chemically synthesized
gaggcggcagggaaggatct

SEQ ID NO: 894 - DNA, 20 bp, Artificial Sequence
  chemically synthesized
cggcagggaaggatctgggc

SEQ ID NO: 895 - DNA, 20 bp, Artificial Sequence
  chemically synthesized
ggaaggatctgggccagccg

SEQ ID NO: 896 - DNA, 20 bp, Artificial Sequence
  chemically synthesized
aaggatctgggccagccgta

SEQ ID NO: 897 - DNA, 20 bp, Artificial Sequence
  chemically synthesized
aggatctgggccagccgtag

SEQ ID NO: 898 - DNA, 20 bp, Artificial Sequence
  chemically synthesized
ggccagccgtagaggtgacc

SEQ ID NO: 899 - DNA, 20 bp, Artificial Sequence
  chemically synthesized
gccagccgtagaggtgaccc

SEQ ID NO: 900 - DNA, 20 bp, Artificial Sequence
  chemically synthesized
gtagaggtgacccaggccac

SEQ ID NO: 901 - DNA, 20 bp, Artificial Sequence
  chemically synthesized
gtgacccaggccacaagctg

SEQ ID NO: 902 - DNA, 20 bp, Artificial Sequence
  chemically synthesized
cccaggccacaagctgcaga

SEQ ID NO: 903 - DNA, 20 bp, Artificial Sequence
  chemically synthesized
ggccacaagctgcagacaga

SEQ ID NO: 904 - DNA, 20 bp, Artificial Sequence
  chemically synthesized
cacaagctgcagacagaaag

SEQ ID NO: 905 - DNA, 20 bp, Artificial Sequence
  chemically synthesized
gctgcagacagaaagcggca

SEQ ID NO: 906 - DNA, 20 bp, Artificial Sequence
  chemically synthesized
ctgcagacagaaagcggcac

SEQ ID NO: 907 - DNA, 20 bp, Artificial Sequence
  chemically synthesized
gacagaaagcggcacaggcc

SEQ ID NO: 908 - DNA, 20 bp, Artificial Sequence
  chemically synthesized
acagaaagcggcacaggccc

SEQ ID NO: 909 - DNA, 20 bp, Artificial Sequence
  chemically synthesized
cagaaagcggcacaggccca

SEQ ID NO: 910 - DNA, 20 bp, Artificial Sequence
  chemically synthesized
agaaagcggcacaggcccag

SEQ ID NO: 911 - DNA, 20 bp, Artificial Sequence
  chemically synthesized
aaagcggcacaggcccaggg

SEQ ID NO: 912 - DNA, 20 bp, Artificial Sequence
  chemically synthesized
agcggcacaggcccagggga

SEQ ID NO: 913 - DNA, 20 bp, Artificial Sequence
  chemically synthesized
caggcccaggggagagaatg

SEQ ID NO: 914 - DNA, 20 bp, Artificial Sequence
  chemically synthesized
aggcccaggggagagaatgc

SEQ ID NO: 915 - DNA, 20 bp, Artificial Sequence
  chemically synthesized
ccaggggagagaatgcaggt

SEQ ID NO: 916 - DNA, 20 bp, Artificial Sequence
  chemically synthesized
aggggagagaatgcaggtca

SEQ ID NO: 917 - DNA, 20 bp, Artificial Sequence
  chemically synthesized
gagagaatgcaggtcagaga

SEQ ID NO: 918 - DNA, 20 bp, Artificial Sequence
  chemically synthesized
agaatgcaggtcagagaaag

SEQ ID NO: 919 - DNA, 20 bp, Artificial Sequence
  chemically synthesized
gaatgcaggtcagagaaagc

SEQ ID NO: 920 - DNA, 20 bp, Artificial Sequence
  chemically synthesized
cagagaaagcaggacctgcc

SEQ ID NO: 921 - DNA, 20 bp, Artificial Sequence
  chemically synthesized
agagaaagcaggacctgcct

SEQ ID NO: 922 - DNA, 20 bp, Artificial Sequence
  chemically synthesized
gaaagcaggacctgcctggg

SEQ ID NO: 923 - DNA, 20 bp, Artificial Sequence
  chemically synthesized
aaagcaggacctgcctggga

SEQ ID NO: 924 - DNA, 20 bp, Artificial Sequence
  chemically synthesized
aagcaggacctgcctgggaa

SEQ ID NO: 925 - DNA, 20 bp, Artificial Sequence
  chemically synthesized
agcaggacctgcctgggaag

SEQ ID NO: 926 - DNA, 20 bp, Artificial Sequence
  chemically synthesized
acctgcctgggaaggggaaa

SEQ ID NO: 927 - DNA, 20 bp, Artificial Sequence
  chemically synthesized
tgcctgggaaggggaaacag

SEQ ID NO: 928 - DNA, 20 bp, Artificial Sequence
  chemically synthesized
gcctgggaaggggaaacagt

SEQ ID NO: 929 - DNA, 20 bp, Artificial Sequence
  chemically synthesized
gggaaggggaaacagtgggc

SEQ ID NO: 930 - DNA, 20 bp, Artificial Sequence
  chemically synthesized
gaaggggaaacagtgggcca

SEQ ID NO: 931 - DNA, 20 bp, Artificial Sequence
  chemically synthesized
aaggggaaacagtgggccag

SEQ ID NO: 932 - DNA, 20 bp, Artificial Sequence
  chemically synthesized
gggaaacagtgggccagagg

SEQ ID NO: 933 - DNA, 20 bp, Artificial Sequence
  chemically synthesized
acagtgggccagaggcggcg

SEQ ID NO: 934 - DNA, 20 bp, Artificial Sequence
  chemically synthesized
gtgggccagaggcggcgcag

SEQ ID NO: 935 - DNA, 20 bp, Artificial Sequence
  chemically synthesized
gccagaggcggcgcagaagc

SEQ ID NO: 936 - DNA, 20 bp, Artificial Sequence
  chemically synthesized
agaggcggcgcagaagccag

SEQ ID NO: 937 - DNA, 20 bp, Artificial Sequence
  chemically synthesized
aggcggcgcagaagccagta

SEQ ID NO: 938 - DNA, 20 bp, Artificial Sequence
  chemically synthesized
gcagaagccagtagagctca

SEQ ID NO: 939 - DNA, 20 bp, Artificial Sequence
  chemically synthesized
gaagccagtagagctcaaag

SEQ ID NO: 940 - DNA, 20 bp, Artificial Sequence
  chemically synthesized
cagtagagctcaaagtggtc

SEQ ID NO: 941 - DNA, 20 bp, Artificial Sequence
  chemically synthesized
agctcaaagtggtccggact

SEQ ID NO: 942 - DNA, 20 bp, Artificial Sequence
  chemically synthesized
gctcaaagtggtccggactc

SEQ ID NO: 943 - DNA, 20 bp, Artificial Sequence
  chemically synthesized
tcaaagtggtccggactcag

SEQ ID NO: 944 - DNA, 20 bp, Artificial Sequence
  chemically synthesized
aaagtggtccggactcagga

SEQ ID NO: 945 - DNA, 20 bp, Artificial Sequence
  chemically synthesized
agtggtccggactcaggaga

SEQ ID NO: 946 - DNA, 20 bp, Artificial Sequence
  chemically synthesized
gtccggactcaggagagaga

SEQ ID NO: 947 - DNA, 20 bp, Artificial Sequence
  chemically synthesized
cggactcaggagagagacgg

SEQ ID NO: 948 - DNA, 20 bp, Artificial Sequence
  chemically synthesized
caggagagagacggcagcgt

SEQ ID NO: 949 - DNA, 20 bp, Artificial Sequence
  chemically synthesized
ggagagagacggcagcgtta

SEQ ID NO: 950 - DNA, 20 bp, Artificial Sequence
  chemically synthesized
gagagagacggcagcgttag

SEQ ID NO: 951 - DNA, 20 bp, Artificial Sequence
  chemically synthesized
agagagacggcagcgttaga

SEQ ID NO: 952 - DNA, 20 bp, Artificial Sequence
  chemically synthesized
gagacggcagcgttagaggg

SEQ ID NO: 953 - DNA, 20 bp, Artificial Sequence
  chemically synthesized
gacggcagcgttagagggca

SEQ ID NO: 954 - DNA, 20 bp, Artificial Sequence
  chemically synthesized
agcgttagagggcagagttc

SEQ ID NO: 955 - DNA, 20 bp, Artificial Sequence
  chemically synthesized
gttagagggcagagttccgg

SEQ ID NO: 956 - DNA, 20 bp, Artificial Sequence
  chemically synthesized
agggcagagttccggcggca

SEQ ID NO: 957 - DNA, 20 bp, Artificial Sequence
  chemically synthesized
cagagttccggcggcacagc

SEQ ID NO: 958 - DNA, 20 bp, Artificial Sequence
  chemically synthesized
agagttccggcggcacagca

SEQ ID NO: 959 - DNA, 20 bp, Artificial Sequence
  chemically synthesized
gagttccggcggcacagcaa

SEQ ID NO: 960 - DNA, 20 bp, Artificial Sequence
  chemically synthesized
ggcggcacagcaagggcact

SEQ ID NO: 961 - DNA, 20 bp, Artificial Sequence
  chemically synthesized
gcggcacagcaagggcactc

SEQ ID NO: 962 - DNA, 20 bp, Artificial Sequence
  chemically synthesized
cggcacagcaagggcactcg

SEQ ID NO: 963 - DNA, 20 bp, Artificial Sequence
  chemically synthesized
ggcacagcaagggcactcgg

SEQ ID NO: 964 - DNA, 20 bp, Artificial Sequence
  chemically synthesized
cagcaagggcactcgggggc

SEQ ID NO: 965 - DNA, 20 bp, Artificial Sequence
  chemically synthesized
gcaagggcactcgggggcga

SEQ ID NO: 966 - DNA, 20 bp, Artificial Sequence
  chemically synthesized
caagggcactcgggggcgag

SEQ ID NO: 967 - DNA, 20 bp, Artificial Sequence
  chemically synthesized
agggcactcgggggcgagag

SEQ ID NO: 968 - DNA, 20 bp, Artificial Sequence
  chemically synthesized
gggcactcgggggcgagagg

SEQ ID NO: 969 - DNA, 20 bp, Artificial Sequence
  chemically synthesized
ggcactcgggggcgagagga

SEQ ID NO: 970 - DNA, 20 bp, Artificial Sequence
  chemically synthesized
actcgggggcgagaggaggg

SEQ ID NO: 971 - DNA, 20 bp, Artificial Sequence
  chemically synthesized
ggcgagaggagggcagcgca

SEQ ID NO: 972 - DNA, 20 bp, Artificial Sequence
  chemically synthesized
agggcagcgcaaagtgacaa

SEQ ID NO: 973 - DNA, 20 bp, Artificial Sequence
  chemically synthesized
cagcgcaaagtgacaatggc

SEQ ID NO: 974 - DNA, 20 bp, Artificial Sequence
  chemically synthesized
agcgcaaagtgacaatggcc

SEQ ID NO: 975 - DNA, 20 bp, Artificial Sequence
  chemically synthesized
gcgcaaagtgacaatggcca

SEQ ID NO: 976 - DNA, 20 bp, Artificial Sequence
  chemically synthesized
aaagtgacaatggccagggc

SEQ ID NO: 977 - DNA, 20 bp, Artificial Sequence
  chemically synthesized
aagtgacaatggccagggcc

SEQ ID NO: 978 - DNA, 20 bp, Artificial Sequence
  chemically synthesized
tgacaatggccagggccagg

SEQ ID NO: 979 - DNA, 20 bp, Artificial Sequence
  chemically synthesized
aatggccagggccaggcaga

SEQ ID NO: 980 - DNA, 20 bp, Artificial Sequence
  chemically synthesized
ccagggccaggcagatagac

SEQ ID NO: 981 - DNA, 20 bp, Artificial Sequence
  chemically synthesized
ccaggcagatagaccagact

SEQ ID NO: 982 - DNA, 20 bp, Artificial Sequence
  chemically synthesized
agatagaccagactgagcta

SEQ ID NO: 983 - DNA, 20 bp, Artificial Sequence
  chemically synthesized
gatagaccagactgagctat

SEQ ID NO: 984 - DNA, 20 bp, Artificial Sequence
  chemically synthesized
tagaccagactgagctatgg

SEQ ID NO: 985 - DNA, 20 bp, Artificial Sequence
  chemically synthesized
ccagactgagctatgggagc

SEQ ID NO: 986 - DNA, 20 bp, Artificial Sequence
  chemically synthesized
ctgagctatgggagctggct

SEQ ID NO: 987 - DNA, 20 bp, Artificial Sequence
  chemically synthesized
tgagctatgggagctggctc

SEQ ID NO: 988 - DNA, 20 bp, Artificial Sequence
  chemically synthesized
tatgggagctggctcaggtt

SEQ ID NO: 989 - DNA, 20 bp, Artificial Sequence
  chemically synthesized
atgggagctggctcaggttc

SEQ ID NO: 990 - DNA, 20 bp, Artificial Sequence
  chemically synthesized
gggagctggctcaggttcag

SEQ ID NO: 991 - DNA, 20 bp, Artificial Sequence
  chemically synthesized
gagctggctcaggttcagga

SEQ ID NO: 992 - DNA, 20 bp, Artificial Sequence
  chemically synthesized
agctggctcaggttcaggag

SEQ ID NO: 993 - DNA, 20 bp, Artificial Sequence
  chemically synthesized
gctggctcaggttcaggaga

SEQ ID NO: 994 - DNA, 20 bp, Artificial Sequence
  chemically synthesized
ggctcaggttcaggagaggg

SEQ ID NO: 995 - DNA, 20 bp, Artificial Sequence
  chemically synthesized
gctcaggttcaggagagggc

SEQ ID NO: 996 - DNA, 20 bp, Artificial Sequence
  chemically synthesized
ctcaggttcaggagagggca

SEQ ID NO: 997 - DNA, 20 bp, Artificial Sequence
  chemically synthesized
aggttcaggagagggcaggg

SEQ ID NO: 998 - DNA, 20 bp, Artificial Sequence
  chemically synthesized
ggttcaggagagggcagggc

SEQ ID NO: 999 - DNA, 20 bp, Artificial Sequence
  chemically synthesized
gttcaggagagggcagggca

SEQ ID NO: 1000 - DNA, 20 bp, Artificial Sequence
  chemically synthesized
caggagagggcagggcaggg

SEQ ID NO: 1001 - DNA, 20 bp, Artificial Sequence
  chemically synthesized
aggagagggcagggcaggga

SEQ ID NO: 1002 - DNA, 20 bp, Artificial Sequence
  chemically synthesized
gagagggcagggcagggaag

SEQ ID NO: 1003 - DNA, 20 bp, Artificial Sequence
  chemically synthesized
gcagggcagggaaggagaca

SEQ ID NO: 1004 - DNA, 20 bp, Artificial Sequence
  chemically synthesized
gcagggaaggagacaaagtc

SEQ ID NO: 1005 - DNA, 20 bp, Artificial Sequence
  chemically synthesized
cagggaaggagacaaagtcc

SEQ ID NO: 1006 - DNA, 20 bp, Artificial Sequence
  chemically synthesized
aaggagacaaagtccaggac

SEQ ID NO: 1007 - DNA, 20 bp, Artificial Sequence
  chemically synthesized
agacaaagtccaggaccggc

SEQ ID NO: 1008 - DNA, 20 bp, Artificial Sequence
  chemically synthesized
acaaagtccaggaccggctg

SEQ ID NO: 1009 - DNA, 20 bp, Artificial Sequence
  chemically synthesized
caaagtccaggaccggctgg

SEQ ID NO: 1010 - DNA, 20 bp, Artificial Sequence
  chemically synthesized
aaagtccaggaccggctgga

SEQ ID NO: 1011 - DNA, 20 bp, Artificial Sequence
  chemically synthesized
aagtccaggaccggctggag

SEQ ID NO: 1012 - DNA, 20 bp, Artificial Sequence
  chemically synthesized
cggctggaggggctcaacat

SEQ ID NO: 1013 - DNA, 20 bp, Artificial Sequence
  chemically synthesized
ctggaggggctcaacatcgg

SEQ ID NO: 1014 - DNA, 20 bp, Artificial Sequence
  chemically synthesized
ggaggggctcaacatcggaa

SEQ ID NO: 1015 - DNA, 20 bp, Artificial Sequence
  chemically synthesized
gaggggctcaacatcggaag

SEQ ID NO: 1016 - DNA, 20 bp, Artificial Sequence
  chemically synthesized
aggggctcaacatcggaaga

SEQ ID NO: 1017 - DNA, 20 bp, Artificial Sequence
  chemically synthesized
ggggctcaacatcggaagag

SEQ ID NO: 1018 - DNA, 20 bp, Artificial Sequence
  chemically synthesized
gctcaacatcggaagagggg

SEQ ID NO: 1019 - DNA, 20 bp, Artificial Sequence
  chemically synthesized
acatcggaagaggggaagtc

SEQ ID NO: 1020 - DNA, 20 bp, Artificial Sequence
  chemically synthesized
catcggaagaggggaagtcg

SEQ ID NO: 1021 - DNA, 20 bp, Artificial Sequence
  chemically synthesized
atcggaagaggggaagtcga

SEQ ID NO: 1022 - DNA, 20 bp, Artificial Sequence
  chemically synthesized
cggaagaggggaagtcgagg

SEQ ID NO: 1023 - DNA, 20 bp, Artificial Sequence
  chemically synthesized
ggaagaggggaagtcgaggg

SEQ ID NO: 1024 - DNA, 20 bp, Artificial Sequence
  chemically synthesized
gaagaggggaagtcgaggga

SEQ ID NO: 1025 - DNA, 20 bp, Artificial Sequence
  chemically synthesized
aggggaagtcgagggaggga

SEQ ID NO: 1026 - DNA, 20 bp, Artificial Sequence
  chemically synthesized
gaagtcgagggagggatggt

SEQ ID NO: 1027 - DNA, 20 bp, Artificial Sequence
  chemically synthesized
aagtcgagggagggatggta

SEQ ID NO: 1028 - DNA, 20 bp, Artificial Sequence
  chemically synthesized
gtcgagggagggatggtaag

SEQ ID NO: 1029 - DNA, 20 bp, Artificial Sequence
  chemically synthesized
tcgagggagggatggtaagg

SEQ ID NO: 1030 - DNA, 20 bp, Artificial Sequence
  chemically synthesized
ggatggtaaggaggactgca

SEQ ID NO: 1031 - DNA, 20 bp, Artificial Sequence
  chemically synthesized
gatggtaaggaggactgcat

SEQ ID NO: 1032 - DNA, 20 bp, Artificial Sequence
  chemically synthesized
gtaaggaggactgcatgggt

SEQ ID NO: 1033 - DNA, 20 bp, Artificial Sequence
  chemically synthesized
gaggactgcatgggtcagca

SEQ ID NO: 1034 - DNA, 20 bp, Artificial Sequence
  chemically synthesized
aggactgcatgggtcagcac

SEQ ID NO: 1035 - DNA, 20 bp, Artificial Sequence
  chemically synthesized
tgggtcagcacaggctgcca

SEQ ID NO: 1036 - DNA, 20 bp, Artificial Sequence
  chemically synthesized
tcagcacaggctgccaaagc

SEQ ID NO: 1037 - DNA, 20 bp, Artificial Sequence
  chemically synthesized
cagcacaggctgccaaagcc

SEQ ID NO: 1038 - DNA, 20 bp, Artificial Sequence
  chemically synthesized
agcacaggctgccaaagcca

SEQ ID NO: 1039 - DNA, 20 bp, Artificial Sequence
  chemically synthesized
caggctgccaaagccagggc

SEQ ID NO: 1040 - DNA, 20 bp, Artificial Sequence
  chemically synthesized
gccaaagccagggccagtta

SEQ ID NO: 1041 - DNA, 20 bp, Artificial Sequence
  chemically synthesized
cagttaaagcgactccaatg

SEQ ID NO: 1042 - DNA, 20 bp, Artificial Sequence
  chemically synthesized
ttaaagcgactccaatgcgg

SEQ ID NO: 1043 - DNA, 20 bp, Artificial Sequence
  chemically synthesized
aaagcgactccaatgcggaa

SEQ ID NO: 1044 - DNA, 20 bp, Artificial Sequence
  chemically synthesized
agcgactccaatgcggaaga

SEQ ID NO: 1045 - DNA, 20 bp, Artificial Sequence
  chemically synthesized
gactccaatgcggaagagag

SEQ ID NO: 1046 - DNA, 20 bp, Artificial Sequence
  chemically synthesized
actccaatgcggaagagagt

SEQ ID NO: 1047 - DNA, 20 bp, Artificial Sequence
  chemically synthesized
atgcggaagagagtaggtcg

SEQ ID NO: 1048 - DNA, 20 bp, Artificial Sequence
  chemically synthesized
tgcggaagagagtaggtcga

SEQ ID NO: 1049 - DNA, 20 bp, Artificial Sequence
  chemically synthesized
gcggaagagagtaggtcgaa

SEQ ID NO: 1050 - DNA, 20 bp, Artificial Sequence
  chemically synthesized
cggaagagagtaggtcgaag

SEQ ID NO: 1051 - DNA, 20 bp, Artificial Sequence
  chemically synthesized
gagagtaggtcgaaggggaa

SEQ ID NO: 1052 - DNA, 20 bp, Artificial Sequence
  chemically synthesized
gtaggtcgaaggggaatggt

SEQ ID NO: 1053 - DNA, 20 bp, Artificial Sequence
  chemically synthesized
taggtcgaaggggaatggta

SEQ ID NO: 1054 - DNA, 20 bp, Artificial Sequence
  chemically synthesized
ggtcgaaggggaatggtaag

SEQ ID NO: 1055 - DNA, 20 bp, Artificial Sequence
  chemically synthesized
gtcgaaggggaatggtaagg

SEQ ID NO: 1056 - DNA, 20 bp, Artificial Sequence
  chemically synthesized
aggggaatggtaaggaggcc

SEQ ID NO: 1057 - DNA, 20 bp, Artificial Sequence
  chemically synthesized
ggggaatggtaaggaggcct

SEQ ID NO: 1058 - DNA, 20 bp, Artificial Sequence
  chemically synthesized
gggaatggtaaggaggcctg

SEQ ID NO: 1059 - DNA, 20 bp, Artificial Sequence
  chemically synthesized
aatggtaaggaggcctgggg

SEQ ID NO: 1060 - DNA, 20 bp, Artificial Sequence
  chemically synthesized
tggtaaggaggcctggggca

SEQ ID NO: 1061 - DNA, 20 bp, Artificial Sequence
  chemically synthesized
taaggaggcctggggcagag

SEQ ID NO: 1062 - DNA, 20 bp, Artificial Sequence
  chemically synthesized
gaggcctggggcagagtggt

SEQ ID NO: 1063 - DNA, 20 bp, Artificial Sequence
  chemically synthesized
ctggggcagagtggtcagca

SEQ ID NO: 1064 - DNA, 20 bp, Artificial Sequence
  chemically synthesized
ggggcagagtggtcagcaca

SEQ ID NO: 1065 - DNA, 20 bp, Artificial Sequence
  chemically synthesized
gcagagtggtcagcacagag

SEQ ID NO: 1066 - DNA, 20 bp, Artificial Sequence
  chemically synthesized
gtggtcagcacagagtggct

SEQ ID NO: 1067 - DNA, 20 bp, Artificial Sequence
  chemically synthesized
cagcacagagtggctaagcc

SEQ ID NO: 1068 - DNA, 20 bp, Artificial Sequence
  chemically synthesized
agcacagagtggctaagccc

SEQ ID NO: 1069 - DNA, 20 bp, Artificial Sequence
  chemically synthesized
gcacagagtggctaagccca

SEQ ID NO: 1070 - DNA, 20 bp, Artificial Sequence
  chemically synthesized
agagtggctaagcccagggc

SEQ ID NO: 1071 - DNA, 20 bp, Artificial Sequence
  chemically synthesized
gctaagcccagggccagttg

SEQ ID NO: 1072 - DNA, 20 bp, Artificial Sequence
  chemically synthesized
aagcccagggccagttgaag

SEQ ID NO: 1073 - DNA, 20 bp, Artificial Sequence
  chemically synthesized
cagttgaagcggctccaatt

SEQ ID NO: 1074 - DNA, 20 bp, Artificial Sequence
  chemically synthesized
ttgaagcggctccaattcgg

SEQ ID NO: 1075 - DNA, 20 bp, Artificial Sequence
  chemically synthesized
aagcggctccaattcggaag

SEQ ID NO: 1076 - DNA, 20 bp, Artificial Sequence
  chemically synthesized
agcggctccaattcggaagt

SEQ ID NO: 1077 - DNA, 20 bp, Artificial Sequence
  chemically synthesized
gcggctccaattcggaagtg

SEQ ID NO: 1078 - DNA, 20 bp, Artificial Sequence
  chemically synthesized
gctccaattcggaagtgggg

SEQ ID NO: 1079 - DNA, 20 bp, Artificial Sequence
  chemically synthesized
attcggaagtggggtggtcg

SEQ ID NO: 1080 - DNA, 20 bp, Artificial Sequence
  chemically synthesized
ttcggaagtggggtggtcga

SEQ ID NO: 1081 - DNA, 20 bp, Artificial Sequence
  chemically synthesized
tcggaagtggggtggtcgaa

SEQ ID NO: 1082 - DNA, 20 bp, Artificial Sequence
  chemically synthesized
cggaagtggggtggtcgaag

SEQ ID NO: 1083 - DNA, 20 bp, Artificial Sequence
  chemically synthesized
gtggggtggtcgaaggggaa

SEQ ID NO: 1084 - DNA, 20 bp, Artificial Sequence
  chemically synthesized
ggtggtcgaaggggaatggt

SEQ ID NO: 1085 - DNA, 20 bp, Artificial Sequence
  chemically synthesized
gtggtcgaaggggaatggta

SEQ ID NO: 1086 - DNA, 20 bp, Artificial Sequence
  chemically synthesized
tggtcgaaggggaatggtaa

SEQ ID NO: 1087 - DNA, 20 bp, Artificial Sequence
  chemically synthesized
ggtcgaaggggaatggtaag

SEQ ID NO: 1088 - DNA, 20 bp, Artificial Sequence
  chemically synthesized
gtcgaaggggaatggtaagg

SEQ ID NO: 1089 - DNA, 20 bp, Artificial Sequence
  chemically synthesized
aggggaatggtaagggggac

SEQ ID NO: 1090 - DNA, 20 bp, Artificial Sequence
  chemically synthesized
ggggaatggtaagggggact

SEQ ID NO: 1091 - DNA, 20 bp, Artificial Sequence
  chemically synthesized
aatggtaagggggactggga

SEQ ID NO: 1092 - DNA, 20 bp, Artificial Sequence
  chemically synthesized
atggtaagggggactgggac

SEQ ID NO: 1093 - DNA, 20 bp, Artificial Sequence
  chemically synthesized
tggtaagggggactgggacg

SEQ ID NO: 1094 - DNA, 20 bp, Artificial Sequence
  chemically synthesized
gggggactgggacggggtgt

SEQ ID NO: 1095 - DNA, 20 bp, Artificial Sequence
  chemically synthesized
actgggacggggtgtcagca

SEQ ID NO: 1096 - DNA, 20 bp, Artificial Sequence
  chemically synthesized
ctgggacggggtgtcagcat

SEQ ID NO: 1097 - DNA, 20 bp, Artificial Sequence
  chemically synthesized
tgggacggggtgtcagcata

SEQ ID NO: 1098 - DNA, 20 bp, Artificial Sequence
  chemically synthesized
gacggggtgtcagcataggg

SEQ ID NO: 1099 - DNA, 20 bp, Artificial Sequence
  chemically synthesized
ggtgtcagcatagggtggca

SEQ ID NO: 1100 - DNA, 20 bp, Artificial Sequence
  chemically synthesized
cagcatagggtggcaaagcc

SEQ ID NO: 1101 - DNA, 20 bp, Artificial Sequence
  chemically synthesized
agcatagggtggcaaagccc

SEQ ID NO: 1102 - DNA, 20 bp, Artificial Sequence
  chemically synthesized
gcatagggtggcaaagccca

SEQ ID NO: 1103 - DNA, 20 bp, Artificial Sequence
  chemically synthesized
agggtggcaaagcccagggc

SEQ ID NO: 1104 - DNA, 20 bp, Artificial Sequence
  chemically synthesized
gggtggcaaagcccagggcc

SEQ ID NO: 1105 - DNA, 20 bp, Artificial Sequence
  chemically synthesized
aagcccagggccaggaacga

SEQ ID NO: 1106 - DNA, 20 bp, Artificial Sequence
  chemically synthesized
agcccagggccaggaacgac

SEQ ID NO: 1107 - DNA, 20 bp, Artificial Sequence
  chemically synthesized
gcccagggccaggaacgacg

SEQ ID NO: 1108 - DNA, 20 bp, Artificial Sequence
  chemically synthesized
cagggccaggaacgacgggg

SEQ ID NO: 1109 - DNA, 20 bp, Artificial Sequence
  chemically synthesized
caggaacgacggggcggatc

SEQ ID NO: 1110 - DNA, 20 bp, Artificial Sequence
  chemically synthesized
acgacggggcggatcgagac

SEQ ID NO: 1111 - DNA, 20 bp, Artificial Sequence
  chemically synthesized
gggcggatcgagactggcaa

SEQ ID NO: 1112 - DNA, 20 bp, Artificial Sequence
  chemically synthesized
ggcggatcgagactggcaac

SEQ ID NO: 1113 - DNA, 20 bp, Artificial Sequence
  chemically synthesized
gcggatcgagactggcaacg

SEQ ID NO: 1114 - DNA, 20 bp, Artificial Sequence
  chemically synthesized
gatcgagactggcaacgggg

SEQ ID NO: 1115 - DNA, 20 bp, Artificial Sequence
  chemically synthesized
atcgagactggcaacgggga

SEQ ID NO: 1116 - DNA, 20 bp, Artificial Sequence
  chemically synthesized
cgagactggcaacggggaag

SEQ ID NO: 1117 - DNA, 20 bp, Artificial Sequence
  chemically synthesized
gagactggcaacggggaagg

SEQ ID NO: 1118 - DNA, 20 bp, Artificial Sequence
  chemically synthesized
aacggggaaggaggatgccc

SEQ ID NO: 1119 - DNA, 20 bp, Artificial Sequence
  chemically synthesized
acggggaaggaggatgcccc

SEQ ID NO: 1120 - DNA, 20 bp, Artificial Sequence
  chemically synthesized
gggaaggaggatgccccagg

SEQ ID NO: 1121 - DNA, 20 bp, Artificial Sequence
  chemically synthesized
ggaggatgccccaggtggcg

SEQ ID NO: 1122 - DNA, 20 bp, Artificial Sequence
  chemically synthesized
ggatgccccaggtggcgcag

SEQ ID NO: 1123 - DNA, 20 bp, Artificial Sequence
  chemically synthesized
atgccccaggtggcgcagca

SEQ ID NO: 1124 - DNA, 20 bp, Artificial Sequence
  chemically synthesized
tgccccaggtggcgcagcag

SEQ ID NO: 1125 - DNA, 20 bp, Artificial Sequence
  chemically synthesized
gccccaggtggcgcagcaga

SEQ ID NO: 1126 - DNA, 20 bp, Artificial Sequence
  chemically synthesized
ccaggtggcgcagcagaggg

SEQ ID NO: 1127 - DNA, 20 bp, Artificial Sequence
  chemically synthesized
ggcgcagcagagggtggacc

SEQ ID NO: 1128 - DNA, 20 bp, Artificial Sequence
  chemically synthesized
gcagagggtggacctggccc

SEQ ID NO: 1129 - DNA, 20 bp, Artificial Sequence
  chemically synthesized
cagagggtggacctggcccc

SEQ ID NO: 1130 - DNA, 20 bp, Artificial Sequence
  chemically synthesized
gagggtggacctggccccgg

SEQ ID NO: 1131 - DNA, 20 bp, Artificial Sequence
  chemically synthesized
gacctggccccgggagacgc

SEQ ID NO: 1132 - DNA, 20 bp, Artificial Sequence
  chemically synthesized
acctggccccgggagacgcc

SEQ ID NO: 1133 - DNA, 20 bp, Artificial Sequence
  chemically synthesized
tggccccgggagacgccggg

SEQ ID NO: 1134 - DNA, 20 bp, Artificial Sequence
  chemically synthesized
ggccccgggagacgccgggc

SEQ ID NO: 1135 - DNA, 20 bp, Artificial Sequence
  chemically synthesized
gccccgggagacgccgggcg

SEQ ID NO: 1136 - DNA, 20 bp, Artificial Sequence
  chemically synthesized
ccccgggagacgccgggcgg

SEQ ID NO: 1137 - DNA, 20 bp, Artificial Sequence
  chemically synthesized
cccgggagacgccgggcggg

SEQ ID NO: 1138 - DNA, 20 bp, Artificial Sequence
  chemically synthesized
ccgggcggggggcgctgacc

SEQ ID NO: 1139 - DNA, 20 bp, Artificial Sequence
  chemically synthesized
cggggggcgctgacctggtg

SEQ ID NO: 1140 - DNA, 20 bp, Artificial Sequence
  chemically synthesized
ggggggcgctgacctggtgc

SEQ ID NO: 1141 - DNA, 20 bp, Artificial Sequence
  chemically synthesized
gggggcgctgacctggtgca

SEQ ID NO: 1142 - DNA, 20 bp, Artificial Sequence
  chemically synthesized
gtgcagggcgctgataccgt

SEQ ID NO: 1143 - DNA, 20 bp, Artificial Sequence
  chemically synthesized
ggcgctgataccgtcggcgt

SEQ ID NO: 1144 - DNA, 20 bp, Artificial Sequence
  chemically synthesized
gctgataccgtcggcgttgg

SEQ ID NO: 1145 - DNA, 20 bp, Artificial Sequence
  chemically synthesized
tgataccgtcggcgttggtg

SEQ ID NO: 1146 - DNA, 20 bp, Artificial Sequence
  chemically synthesized
ccgtcggcgttggtggagtc

SEQ ID NO: 1147 - DNA, 20 bp, Artificial Sequence
  chemically synthesized
ggcgttggtggagtccagca

SEQ ID NO: 1148 - DNA, 20 bp, Artificial Sequence
  chemically synthesized
tggtggagtccagcacggcg

SEQ ID NO: 1149 - DNA, 20 bp, Artificial Sequence
  chemically synthesized
ggtggagtccagcacggcgc

SEQ ID NO: 1150 - DNA, 20 bp, Artificial Sequence
  chemically synthesized
ggagtccagcacggcgcggg

SEQ ID NO: 1151 - DNA, 20 bp, Artificial Sequence
  chemically synthesized
gagtccagcacggcgcgggc

SEQ ID NO: 1152 - DNA, 20 bp, Artificial Sequence
  chemically synthesized
tccagcacggcgcgggcggg

SEQ ID NO: 1153 - DNA, 20 bp, Artificial Sequence
  chemically synthesized
agcacggcgcgggcgggcgg

SEQ ID NO: 1154 - DNA, 20 bp, Artificial Sequence
  chemically synthesized
ggcgcgggcgggcggcggcg

SEQ ID NO: 1155 - DNA, 20 bp, Artificial Sequence
  chemically synthesized
gcgggcgggcggcggcgcgg

SEQ ID NO: 1156 - DNA, 20 bp, Artificial Sequence
  chemically synthesized
cgggcgggcggcggcgcggc

SEQ ID NO: 1157 - DNA, 20 bp, Artificial Sequence
  chemically synthesized
gggcgggcggcggcgcggcg

SEQ ID NO: 1158 - DNA, 20 bp, Artificial Sequence
  chemically synthesized
ggcggcggcgcggcggggtc

SEQ ID NO: 1159 - DNA, 20 bp, Artificial Sequence
  chemically synthesized
cggcgcggcggggtcgagct

SEQ ID NO: 1160 - DNA, 20 bp, Artificial Sequence
  chemically synthesized
ggcggggtcgagctcggcgc

SEQ ID NO: 1161 - DNA, 20 bp, Artificial Sequence
  chemically synthesized
gcggggtcgagctcggcgcc

SEQ ID NO: 1162 - DNA, 20 bp, Artificial Sequence
  chemically synthesized
cggggtcgagctcggcgccg

SEQ ID NO: 1163 - DNA, 20 bp, Artificial Sequence
  chemically synthesized
gtcgagctcggcgccggggc

SEQ ID NO: 1164 - DNA, 20 bp, Artificial Sequence
  chemically synthesized
tcgagctcggcgccggggcc

SEQ ID NO: 1165 - DNA, 20 bp, Artificial Sequence
  chemically synthesized
cgagctcggcgccggggcca

SEQ ID NO: 1166 - DNA, 20 bp, Artificial Sequence
  chemically synthesized
ctcggcgccggggccagggt

SEQ ID NO: 1167 - DNA, 20 bp, Artificial Sequence
  chemically synthesized
ggcgccggggccagggtcgg

SEQ ID NO: 1168 - DNA, 20 bp, Artificial Sequence
  chemically synthesized
gggccagggtcggcggcgcg

SEQ ID NO: 1169 - DNA, 20 bp, Artificial Sequence
  chemically synthesized
gggtcggcggcgcgcagcat

SEQ ID NO: 1170 - DNA, 20 bp, Artificial Sequence
  chemically synthesized
agcatcagacgcgcctcgtc

SEQ ID NO: 1171 - DNA, 20 bp, Artificial Sequence
  chemically synthesized
gcatcagacgcgcctcgtcc

SEQ ID NO: 1172 - DNA, 20 bp, Artificial Sequence
  chemically synthesized
cgtccaggtcgccgcccgca

SEQ ID NO: 1173 - DNA, 20 bp, Artificial Sequence
  chemically synthesized
gtccaggtcgccgcccgcac

SEQ ID NO: 1174 - DNA, 20 bp, Artificial Sequence
  chemically synthesized
tcgccgcccgcacaggccgc

SEQ ID NO: 1175 - DNA, 20 bp, Artificial Sequence
  chemically synthesized
cgccgcccgcacaggccgcc

SEQ ID NO: 1176 - DNA, 20 bp, Artificial Sequence
  chemically synthesized
cgcacaggccgccaggaact

SEQ ID NO: 1177 - DNA, 20 bp, Artificial Sequence
  chemically synthesized
acaggccgccaggaactcgg

SEQ ID NO: 1178 - DNA, 20 bp, Artificial Sequence
  chemically synthesized
ggaactcggcggcgcgctcg

SEQ ID NO: 1179 - DNA, 20 bp, Artificial Sequence
  chemically synthesized
actcggcggcgcgctcgaag

SEQ ID NO: 1180 - DNA, 20 bp, Artificial Sequence
  chemically synthesized
ggcggcgcgctcgaagcgga

SEQ ID NO: 1181 - DNA, 20 bp, Artificial Sequence
  chemically synthesized
cgcgctcgaagcggacggtg

SEQ ID NO: 1182 - DNA, 20 bp, Artificial Sequence
  chemically synthesized
gcgctcgaagcggacggtgc

SEQ ID NO: 1183 - DNA, 20 bp, Artificial Sequence
  chemically synthesized
cgaagcggacggtgcgggcg

SEQ ID NO: 1184 - DNA, 20 bp, Artificial Sequence
  chemically synthesized
ggtgcgggcgcggcgctctc

SEQ ID NO: 1185 - DNA, 20 bp, Artificial Sequence
  chemically synthesized
gtgcgggcgcggcgctctcc

SEQ ID NO: 1186 - DNA, 20 bp, Artificial Sequence
  chemically synthesized
tgcgggcgcggcgctctccg

SEQ ID NO: 1187 - DNA, 20 bp, Artificial Sequence
  chemically synthesized
ggcgcggcgctctccggggc

SEQ ID NO: 1188 - DNA, 20 bp, Artificial Sequence
  chemically synthesized
gcgcggcgctctccggggcc

SEQ ID NO: 1189 - DNA, 20 bp, Artificial Sequence
  chemically synthesized
gcgctctccggggccaggct

SEQ ID NO: 1190 - DNA, 20 bp, Artificial Sequence
  chemically synthesized
gcccgcgccccccactgccg

SEQ ID NO: 1191 - DNA, 20 bp, Artificial Sequence
  chemically synthesized
gctgctcccgtcgccgctcc

SEQ ID NO: 1192 - DNA, 20 bp, Artificial Sequence
  chemically synthesized
ctgctcccgtcgccgctccc

SEQ ID NO: 1193 - DNA, 20 bp, Artificial Sequence
  chemically synthesized
ctcccgtcgccgctcccggg

SEQ ID NO: 1194 - DNA, 20 bp, Artificial Sequence
  chemically synthesized
gcagccgccgccgccgcccc

SEQ ID NO: 1195 - DNA, 20 bp, Artificial Sequence
  chemically synthesized
cagccgccgccgccgccccc

SEQ ID NO: 1196 - DNA, 20 bp, Artificial Sequence
  chemically synthesized
cgccgccgccgcccccgggc

SEQ ID NO: 1197 - DNA, 20 bp, Artificial Sequence
  chemically synthesized
gccgcccccgggccagccgc

SEQ ID NO: 1198 - DNA, 20 bp, Artificial Sequence
  chemically synthesized
ccgcccccgggccagccgcc

SEQ ID NO: 1199 - DNA, 20 bp, Artificial Sequence
  chemically synthesized
agccgccgggccatcctctc

SEQ ID NO: 1200 - DNA, 20 bp, Artificial Sequence
  chemically synthesized
catcgcaccgcccgcccgcc

SEQ ID NO: 1201 - DNA, 20 bp, Artificial Sequence
  chemically synthesized
gcaccgcccgcccgcccagc

SEQ ID NO: 1202 - DNA, 20 bp, Artificial Sequence
  chemically synthesized
cgcccgcccgcccagcgagc

SEQ ID NO: 1203 - DNA, 20 bp, Artificial Sequence
  chemically synthesized
cgcccgcccagcgagcgagc

SEQ ID NO: 1204 - DNA, 20 bp, Artificial Sequence
  chemically synthesized
ccagcgagcgagcgagcgcc

SEQ ID NO: 1205 - DNA, 20 bp, Artificial Sequence
  chemically synthesized
tggtggcggcggttggggct

SEQ ID NO: 1206 - DNA, 20 bp, Artificial Sequence
  chemically synthesized
ctcggcgctcgctcgctcgc

SEQ ID NO: 1207 - DNA, 20 bp, Artificial Sequence
  chemically synthesized
tcggcgctcgctcgctcgct

SEQ ID NO: 1208 - DNA, 20 bp, Artificial Sequence
  chemically synthesized
gcgctcgctcgctcgctggg

SEQ ID NO: 1209 - DNA, 20 bp, Artificial Sequence
  chemically synthesized
cgctcgctcgctcgctgggc

SEQ ID NO: 1210 - DNA, 20 bp, Artificial Sequence
  chemically synthesized
tcgctcgctcgctgggcggg

SEQ ID NO: 1211 - DNA, 20 bp, Artificial Sequence
  chemically synthesized
cgctcgctcgctgggcgggc

SEQ ID NO: 1212 - DNA, 20 bp, Artificial Sequence
  chemically synthesized
tcgctcgctgggcgggcggg

SEQ ID NO: 1213 - DNA, 20 bp, Artificial Sequence
  chemically synthesized
cgggcgggcggtgcgatgtc

SEQ ID NO: 1214 - DNA, 20 bp, Artificial Sequence
  chemically synthesized
ggcgggcggtgcgatgtccg

SEQ ID NO: 1215 - DNA, 20 bp, Artificial Sequence
  chemically synthesized
cgggcggtgcgatgtccgga

SEQ ID NO: 1216 - DNA, 20 bp, Artificial Sequence
  chemically synthesized
gggcggtgcgatgtccggag

SEQ ID NO: 1217 - DNA, 20 bp, Artificial Sequence
  chemically synthesized
ggtgcgatgtccggagagga

SEQ ID NO: 1218 - DNA, 20 bp, Artificial Sequence
  chemically synthesized
gatgtccggagaggatggcc

SEQ ID NO: 1219 - DNA, 20 bp, Artificial Sequence
  chemically synthesized
gtccggagaggatggcccgg

SEQ ID NO: 1220 - DNA, 20 bp, Artificial Sequence
  chemically synthesized
ggagaggatggcccggcggc

SEQ ID NO: 1221 - DNA, 20 bp, Artificial Sequence
  chemically synthesized
ggatggcccggcggctggcc

SEQ ID NO: 1222 - DNA, 20 bp, Artificial Sequence
  chemically synthesized
gatggcccggcggctggccc

SEQ ID NO: 1223 - DNA, 20 bp, Artificial Sequence
  chemically synthesized
atggcccggcggctggcccg

SEQ ID NO: 1224 - DNA, 20 bp, Artificial Sequence
  chemically synthesized
tggcccggcggctggcccgg

SEQ ID NO: 1225 - DNA, 20 bp, Artificial Sequence
  chemically synthesized
cccggcggctggcccggggg

SEQ ID NO: 1226 - DNA, 20 bp, Artificial Sequence
  chemically synthesized
ggcggctggcccgggggcgg

SEQ ID NO: 1227 - DNA, 20 bp, Artificial Sequence
  chemically synthesized
ggctggcccgggggcggcgg

SEQ ID NO: 1228 - DNA, 20 bp, Artificial Sequence
  chemically synthesized
tggcccgggggcggcggcgg

SEQ ID NO: 1229 - DNA, 20 bp, Artificial Sequence
  chemically synthesized
gggcggcggcggcggctgcc

SEQ ID NO: 1230 - DNA, 20 bp, Artificial Sequence
  chemically synthesized
ggcggcggcggcggctgccc

SEQ ID NO: 1231 - DNA, 20 bp, Artificial Sequence
  chemically synthesized
cggcggcggcggctgcccgg

SEQ ID NO: 1232 - DNA, 20 bp, Artificial Sequence
  chemically synthesized
cggcggcggctgcccgggag

SEQ ID NO: 1233 - DNA, 20 bp, Artificial Sequence
  chemically synthesized
cggctgcccgggagcggcga

SEQ ID NO: 1234 - DNA, 20 bp, Artificial Sequence
  chemically synthesized
ggctgcccgggagcggcgac

SEQ ID NO: 1235 - DNA, 20 bp, Artificial Sequence
  chemically synthesized
ctgcccgggagcggcgacgg

SEQ ID NO: 1236 - DNA, 20 bp, Artificial Sequence
  chemically synthesized
cccgggagcggcgacgggag

SEQ ID NO: 1237 - DNA, 20 bp, Artificial Sequence
  chemically synthesized
agcggcgacgggagcagctg

SEQ ID NO: 1238 - DNA, 20 bp, Artificial Sequence
  chemically synthesized
ggcgacgggagcagctgcgg

SEQ ID NO: 1239 - DNA, 20 bp, Artificial Sequence
  chemically synthesized
gacgggagcagctgcggcag

SEQ ID NO: 1240 - DNA, 20 bp, Artificial Sequence
  chemically synthesized
acgggagcagctgcggcagt

SEQ ID NO: 1241 - DNA, 20 bp, Artificial Sequence
  chemically synthesized
cgggagcagctgcggcagtg

SEQ ID NO: 1242 - DNA, 20 bp, Artificial Sequence
  chemically synthesized
gggagcagctgcggcagtgg

SEQ ID NO: 1243 - DNA, 20 bp, Artificial Sequence
  chemically synthesized
ggagcagctgcggcagtggg

SEQ ID NO: 1244 - DNA, 20 bp, Artificial Sequence
  chemically synthesized
agctgcggcagtggggggcg

SEQ ID NO: 1245 - DNA, 20 bp, Artificial Sequence
  chemically synthesized
gctgcggcagtggggggcgc

SEQ ID NO: 1246 - DNA, 20 bp, Artificial Sequence
  chemically synthesized
gcggcagtggggggcgcggg

SEQ ID NO: 1247 - DNA, 20 bp, Artificial Sequence
  chemically synthesized
cggcagtggggggcgcgggc

SEQ ID NO: 1248 - DNA, 20 bp, Artificial Sequence
  chemically synthesized
ggggggcgcgggcgggcgcc

SEQ ID NO: 1249 - DNA, 20 bp, Artificial Sequence
  chemically synthesized
gcgcgggcgggcgccgagcc

SEQ ID NO: 1250 - DNA, 20 bp, Artificial Sequence
  chemically synthesized
gcgggcgccgagcctggccc

SEQ ID NO: 1251 - DNA, 20 bp, Artificial Sequence
  chemically synthesized
gggcgccgagcctggccccg

SEQ ID NO: 1252 - DNA, 20 bp, Artificial Sequence
  chemically synthesized
gcgccgagcctggccccgga

SEQ ID NO: 1253 - DNA, 20 bp, Artificial Sequence
  chemically synthesized
gcgcccgcaccgtccgcttc

SEQ ID NO: 1254 - DNA, 20 bp, Artificial Sequence
  chemically synthesized
tccgcttcgagcgcgccgcc

SEQ ID NO: 1255 - DNA, 20 bp, Artificial Sequence
  chemically synthesized
cgagcgcgccgccgagttcc

SEQ ID NO: 1256 - DNA, 20 bp, Artificial Sequence
  chemically synthesized
gcgcgccgccgagttcctgg

SEQ ID NO: 1257 - DNA, 20 bp, Artificial Sequence
  chemically synthesized
cgagttcctggcggcctgtg

SEQ ID NO: 1258 - DNA, 20 bp, Artificial Sequence
  chemically synthesized
gagttcctggcggcctgtgc

SEQ ID NO: 1259 - DNA, 20 bp, Artificial Sequence
  chemically synthesized
ttcctggcggcctgtgcggg

SEQ ID NO: 1260 - DNA, 20 bp, Artificial Sequence
  chemically synthesized
ggcctgtgcgggcggcgacc

SEQ ID NO: 1261 - DNA, 20 bp, Artificial Sequence
  chemically synthesized
gtgcgggcggcgacctggac

SEQ ID NO: 1262 - DNA, 20 bp, Artificial Sequence
  chemically synthesized
tgcgggcggcgacctggacg

SEQ ID NO: 1263 - DNA, 20 bp, Artificial Sequence
  chemically synthesized
atgctgcgcgccgccgaccc

SEQ ID NO: 1264 - DNA, 20 bp, Artificial Sequence
  chemically synthesized
cgcgccgccgaccctggccc

SEQ ID NO: 1265 - DNA, 20 bp, Artificial Sequence
  chemically synthesized
ccgaccctggccccggcgcc

SEQ ID NO: 1266 - DNA, 20 bp, Artificial Sequence
  chemically synthesized
gccgcccgcccgcgccgtgc

SEQ ID NO: 1267 - DNA, 20 bp, Artificial Sequence
  chemically synthesized
ctggactccaccaacgccga

SEQ ID NO: 1268 - DNA, 20 bp, Artificial Sequence
  chemically synthesized
tccaccaacgccgacggtat

SEQ ID NO: 1269 - DNA, 20 bp, Artificial Sequence
  chemically synthesized
acggtatcagcgccctgcac

SEQ ID NO: 1270 - DNA, 20 bp, Artificial Sequence
  chemically synthesized
cggtatcagcgccctgcacc

SEQ ID NO: 1271 - DNA, 20 bp, Artificial Sequence
  chemically synthesized
atcagcgccctgcaccaggt

SEQ ID NO: 1272 - DNA, 20 bp, Artificial Sequence
  chemically synthesized
ccaggtcagcgccccccgcc

SEQ ID NO: 1273 - DNA, 20 bp, Artificial Sequence
  chemically synthesized
gccccccgcccggcgtctcc

SEQ ID NO: 1274 - DNA, 20 bp, Artificial Sequence
  chemically synthesized
ccccccgcccggcgtctccc

SEQ ID NO: 1275 - DNA, 20 bp, Artificial Sequence
  chemically synthesized
cccccgcccggcgtctcccg

SEQ ID NO: 1276 - DNA, 20 bp, Artificial Sequence
  chemically synthesized
cgcccggcgtctcccggggc

SEQ ID NO: 1277 - DNA, 20 bp, Artificial Sequence
  chemically synthesized
gcccggcgtctcccggggcc

SEQ ID NO: 1278 - DNA, 20 bp, Artificial Sequence
  chemically synthesized
ccaccctctgctgcgccacc

SEQ ID NO: 1279 - DNA, 20 bp, Artificial Sequence
  chemically synthesized
caccctctgctgcgccacct

SEQ ID NO: 1280 - DNA, 20 bp, Artificial Sequence
  chemically synthesized
accctctgctgcgccacctg

SEQ ID NO: 1281 - DNA, 20 bp, Artificial Sequence
  chemically synthesized
gcatcctccttccccgttgc

SEQ ID NO: 1282 - DNA, 20 bp, Artificial Sequence
  chemically synthesized
tcgatccgccccgtcgttcc

SEQ ID NO: 1283 - DNA, 20 bp, Artificial Sequence
  chemically synthesized
cgccccgtcgttcctggccc

SEQ ID NO: 1284 - DNA, 20 bp, Artificial Sequence
  chemically synthesized
gccccgtcgttcctggccct

SEQ ID NO: 1285 - DNA, 20 bp, Artificial Sequence
  chemically synthesized
cctatgctgacaccccgtcc

SEQ ID NO: 1286 - DNA, 20 bp, Artificial Sequence
  chemically synthesized
cgaccaccccacttccgaat

SEQ ID NO: 1287 - DNA, 20 bp, Artificial Sequence
  chemically synthesized
accaccccacttccgaattg

SEQ ID NO: 1288 - DNA, 20 bp, Artificial Sequence
  chemically synthesized
cgaattggagccgcttcaac

SEQ ID NO: 1289 - DNA, 20 bp, Artificial Sequence
  chemically synthesized
ggagccgcttcaactggccc

SEQ ID NO: 1290 - DNA, 20 bp, Artificial Sequence
  chemically synthesized
gagccgcttcaactggccct

SEQ ID NO: 1291 - DNA, 20 bp, Artificial Sequence
  chemically synthesized
gcttcaactggccctgggct

SEQ ID NO: 1292 - DNA, 20 bp, Artificial Sequence
  chemically synthesized
ctgtgctgaccactctgccc

SEQ ID NO: 1293 - DNA, 20 bp, Artificial Sequence
  chemically synthesized
tgtgctgaccactctgcccc

SEQ ID NO: 1294 - DNA, 20 bp, Artificial Sequence
  chemically synthesized
cgacctactctcttccgcat

SEQ ID NO: 1295 - DNA, 20 bp, Artificial Sequence
  chemically synthesized
acctactctcttccgcattg

SEQ ID NO: 1296 - DNA, 20 bp, Artificial Sequence
  chemically synthesized
cgcattggagtcgctttaac

SEQ ID NO: 1297 - DNA, 20 bp, Artificial Sequence
  chemically synthesized
ggagtcgctttaactggccc

SEQ ID NO: 1298 - DNA, 20 bp, Artificial Sequence
  chemically synthesized
gctttaactggccctggctt

SEQ ID NO: 1299 - DNA, 20 bp, Artificial Sequence
  chemically synthesized
ttaactggccctggctttgg

SEQ ID NO: 1300 - DNA, 20 bp, Artificial Sequence
  chemically synthesized
gcagcctgtgctgacccatg

SEQ ID NO: 1301 - DNA, 20 bp, Artificial Sequence
  chemically synthesized
acttcccctcttccgatgtt

SEQ ID NO: 1302 - DNA, 20 bp, Artificial Sequence
  chemically synthesized
cttccgatgttgagcccctc

SEQ ID NO: 1303 - DNA, 20 bp, Artificial Sequence
  chemically synthesized
cgatgttgagcccctccagc

SEQ ID NO: 1304 - DNA, 20 bp, Artificial Sequence
  chemically synthesized
tgagcccctccagccggtcc

SEQ ID NO: 1305 - DNA, 20 bp, Artificial Sequence
  chemically synthesized
ccctgccctctcctgaacct

SEQ ID NO: 1306 - DNA, 20 bp, Artificial Sequence
  chemically synthesized
gccctctcctgaacctgagc

SEQ ID NO: 1307 - DNA, 20 bp, Artificial Sequence
  chemically synthesized
tgaacctgagccagctccca

SEQ ID NO: 1308 - DNA, 20 bp, Artificial Sequence
  chemically synthesized
ctgagccagctcccatagct

SEQ ID NO: 1309 - DNA, 20 bp, Artificial Sequence
  chemically synthesized
ccagctcccatagctcagtc

SEQ ID NO: 1310 - DNA, 20 bp, Artificial Sequence
  chemically synthesized
ctcagtctggtctatctgcc

SEQ ID NO: 1311 - DNA, 20 bp, Artificial Sequence
  chemically synthesized
ctggtctatctgcctggccc

SEQ ID NO: 1312 - DNA, 20 bp, Artificial Sequence
  chemically synthesized
gctgccctcctctcgccccc

SEQ ID NO: 1313 - DNA, 20 bp, Artificial Sequence
  chemically synthesized
gagtgcccttgctgtgccgc

SEQ ID NO: 1314 - DNA, 20 bp, Artificial Sequence
  chemically synthesized
aacgctgccgtctctctcct

SEQ ID NO: 1315 - DNA, 20 bp, Artificial Sequence
  chemically synthesized
tgccgtctctctcctgagtc

SEQ ID NO: 1316 - DNA, 20 bp, Artificial Sequence
  chemically synthesized
tcctgagtccggaccacttt

SEQ ID NO: 1317 - DNA, 20 bp, Artificial Sequence
  chemically synthesized
cggaccactttgagctctac

SEQ ID NO: 1318 - DNA, 20 bp, Artificial Sequence
  chemically synthesized
actggcttctgcgccgcctc

SEQ ID NO: 1319 - DNA, 20 bp, Artificial Sequence
  chemically synthesized
ggcccactgtttccccttcc

SEQ ID NO: 1320 - DNA, 20 bp, Artificial Sequence
  chemically synthesized
gcccactgtttccccttccc

SEQ ID NO: 1321 - DNA, 20 bp, Artificial Sequence
  chemically synthesized
cactgtttccccttcccagg

SEQ ID NO: 1322 - DNA, 20 bp, Artificial Sequence
  chemically synthesized
actgtttccccttcccaggc

SEQ ID NO: 1323 - DNA, 20 bp, Artificial Sequence
  chemically synthesized
ctgacctgcattctctcccc

SEQ ID NO: 1324 - DNA, 20 bp, Artificial Sequence
  chemically synthesized
tgacctgcattctctcccct

SEQ ID NO: 1325 - DNA, 20 bp, Artificial Sequence
  chemically synthesized
cctgtgccgctttctgtctg

SEQ ID NO: 1326 - DNA, 20 bp, Artificial Sequence
  chemically synthesized
cgctttctgtctgcagcttg

SEQ ID NO: 1327 - DNA, 20 bp, Artificial Sequence
  chemically synthesized
tctgtctgcagcttgtggcc

SEQ ID NO: 1328 - DNA, 20 bp, Artificial Sequence
  chemically synthesized
ctgtctgcagcttgtggcct

SEQ ID NO: 1329 - DNA, 20 bp, Artificial Sequence
  chemically synthesized
tgtggcctgggtcacctcta

SEQ ID NO: 1330 - DNA, 20 bp, Artificial Sequence
  chemically synthesized
gcctgggtcacctctacggc

SEQ ID NO: 1331 - DNA, 20 bp, Artificial Sequence
  chemically synthesized
ggtcacctctacggctggcc

SEQ ID NO: 1332 - DNA, 20 bp, Artificial Sequence
  chemically synthesized
tccttccctgccgcctcctt

SEQ ID NO: 1333 - DNA, 20 bp, Artificial Sequence
  chemically synthesized
ccttccctgccgcctccttc

SEQ ID NO: 1334 - DNA, 20 bp, Artificial Sequence
  chemically synthesized
tctctgctgtgttgctgccc

SEQ ID NO: 1335 - DNA, 20 bp, Artificial Sequence
  chemically synthesized
ctctgctgtgttgctgccca

SEQ ID NO: 1336 - DNA, 20 bp, Artificial Sequence
  chemically synthesized
ctgcccaaggatgctctttc

SEQ ID NO: 1337 - DNA, 20 bp, Artificial Sequence
  chemically synthesized
gcccaaggatgctctttccg

SEQ ID NO: 1338 - DNA, 20 bp, Artificial Sequence
  chemically synthesized
tttccggagcacttccttct

SEQ ID NO: 1339 - DNA, 20 bp, Artificial Sequence
  chemically synthesized
tgcaccacgtgatgtcctct

SEQ ID NO: 1340 - DNA, 20 bp, Artificial Sequence
  chemically synthesized
accacgtgatgtcctctgag

SEQ ID NO: 1341 - DNA, 20 bp, Artificial Sequence
  chemically synthesized
gagcggatcctccccgtgtc

SEQ ID NO: 1342 - DNA, 20 bp, Artificial Sequence
  chemically synthesized
agcggatcctccccgtgtct

SEQ ID NO: 1343 - DNA, 20 bp, Artificial Sequence
  chemically synthesized
ccccgtgtctgggtcctctc

SEQ ID NO: 1344 - DNA, 20 bp, Artificial Sequence
  chemically synthesized
cccgtgtctgggtcctctcc

SEQ ID NO: 1345 - DNA, 20 bp, Artificial Sequence
  chemically synthesized
cccatgccgtcttcactcgc

SEQ ID NO: 1346 - DNA, 20 bp, Artificial Sequence
  chemically synthesized
ccatgccgtcttcactcgct

SEQ ID NO: 1347 - DNA, 20 bp, Artificial Sequence
  chemically synthesized
ttcccttttccttctccttc

SEQ ID NO: 1348 - DNA, 20 bp, Artificial Sequence
  chemically synthesized
tcccttttccttctccttct

SEQ ID NO: 1349 - DNA, 20 bp, Artificial Sequence
  chemically synthesized
cccttttccttctccttctg

SEQ ID NO: 1350 - DNA, 20 bp, Artificial Sequence
  chemically synthesized
ctgtgccatctctcgtttct

SEQ ID NO: 1351 - DNA, 20 bp, Artificial Sequence
  chemically synthesized
tgtgccatctctcgtttctt

SEQ ID NO: 1352 - DNA, 20 bp, Artificial Sequence
  chemically synthesized
ccatctctcgtttcttagga

SEQ ID NO: 1353 - DNA, 20 bp, Artificial Sequence
  chemically synthesized
cttaggatggccttctccga

SEQ ID NO: 1354 - DNA, 20 bp, Artificial Sequence
  chemically synthesized
cgtcccgcctccccttcttg

SEQ ID NO: 1355 - DNA, 20 bp, Artificial Sequence
  chemically synthesized
gtcccgcctccccttcttgt

SEQ ID NO: 1356 - DNA, 20 bp, Artificial Sequence
  chemically synthesized
ctgcatcatcaccgtttttc

SEQ ID NO: 1357 - DNA, 20 bp, Artificial Sequence
  chemically synthesized
cgtttttctggacaacccca

SEQ ID NO: 1358 - DNA, 20 bp, Artificial Sequence
  chemically synthesized
cccaaagtaccccgtctccc

SEQ ID NO: 1359 - DNA, 20 bp, Artificial Sequence
  chemically synthesized
gtaccccgtctccctggctt

SEQ ID NO: 1360 - DNA, 20 bp, Artificial Sequence
  chemically synthesized
atcctcttgctttctttgcc

SEQ ID NO: 1361 - DNA, 20 bp, Artificial Sequence
  chemically synthesized
ctggacaccccgttctcctg

SEQ ID NO: 1362 - DNA, 20 bp, Artificial Sequence
  chemically synthesized
accccgttctcctgtggatt

SEQ ID NO: 1363 - DNA, 20 bp, Artificial Sequence
  chemically synthesized
ccccgttctcctgtggattc

SEQ ID NO: 1364 - DNA, 20 bp, Artificial Sequence
  chemically synthesized
cacctctcactcctttcatt

SEQ ID NO: 1365 - DNA, 20 bp, Artificial Sequence
  chemically synthesized
acctctcactcctttcattt

SEQ ID NO: 1366 - DNA, 20 bp, Artificial Sequence
  chemically synthesized
tctcactcctttcatttggg

SEQ ID NO: 1367 - DNA, 20 bp, Artificial Sequence
  chemically synthesized
ccctaccccccttacctctc

SEQ ID NO: 1368 - DNA, 20 bp, Artificial Sequence
  chemically synthesized
cttacctctctagtctgtgc

SEQ ID NO: 1369 - DNA, 20 bp, Artificial Sequence
  chemically synthesized
ctagtctgtgctagctcttc

SEQ ID NO: 1370 - DNA, 20 bp, Artificial Sequence
  chemically synthesized
gctcttccagccccctgtca

SEQ ID NO: 1371 - DNA, 20 bp, Artificial Sequence
  chemically synthesized
ccccctgtcatggcatcttc

SEQ ID NO: 1372 - DNA, 20 bp, Artificial Sequence
  chemically synthesized
cccctgtcatggcatcttcc

SEQ ID NO: 1373 - DNA, 20 bp, Artificial Sequence
  chemically synthesized
ccctgtcatggcatcttcca

SEQ ID NO: 1374 - DNA, 20 bp, Artificial Sequence
  chemically synthesized
cctgtcatggcatcttccag

SEQ ID NO: 1375 - DNA, 20 bp, Artificial Sequence
  chemically synthesized
atggcatcttccaggggtcc

SEQ ID NO: 1376 - DNA, 20 bp, Artificial Sequence
  chemically synthesized
ggcatcttccaggggtccga

SEQ ID NO: 1377 - DNA, 20 bp, Artificial Sequence
  chemically synthesized
cttccaggggtccgagagct

SEQ ID NO: 1378 - DNA, 20 bp, Artificial Sequence
  chemically synthesized
caggggtccgagagctcagc

SEQ ID NO: 1379 - DNA, 20 bp, Artificial Sequence
  chemically synthesized
ctagtcttcttcctccaacc

SEQ ID NO: 1380 - DNA, 20 bp, Artificial Sequence
  chemically synthesized
tagtcttcttcctccaaccc

SEQ ID NO: 1381 - DNA, 20 bp, Artificial Sequence
  chemically synthesized
ccgggcccctatgtccactt

SEQ ID NO: 1382 - DNA, 20 bp, Artificial Sequence
  chemically synthesized
cgggcccctatgtccacttc

SEQ ID NO: 1383 - DNA, 20 bp, Artificial Sequence
  chemically synthesized
cccctatgtccacttcagga

SEQ ID NO: 1384 - DNA, 20 bp, Artificial Sequence
  chemically synthesized
gacagcatgtttgctgcctc

SEQ ID NO: 1385 - DNA, 20 bp, Artificial Sequence
  chemically synthesized
acagcatgtttgctgcctcc

SEQ ID NO: 1386 - DNA, 20 bp, Artificial Sequence
  chemically synthesized
cagcatgtttgctgcctcca

SEQ ID NO: 1387 - DNA, 20 bp, Artificial Sequence
  chemically synthesized
tccagggatcctgtgtcccc

SEQ ID NO: 1388 - DNA, 20 bp, Artificial Sequence
  chemically synthesized
gggatcctgtgtccccgagc

SEQ ID NO: 1389 - DNA, 20 bp, Artificial Sequence
  chemically synthesized
ggatcctgtgtccccgagct

SEQ ID NO: 1390 - DNA, 20 bp, Artificial Sequence
  chemically synthesized
ctgggaccaccttatattcc

SEQ ID NO: 1391 - DNA, 20 bp, Artificial Sequence
  chemically synthesized
tgggaccaccttatattccc

SEQ ID NO: 1392 - DNA, 20 bp, Artificial Sequence
  chemically synthesized
gggaccaccttatattccca

SEQ ID NO: 1393 - DNA, 20 bp, Artificial Sequence
  chemically synthesized
ccaccttatattcccagggc

SEQ ID NO: 1394 - DNA, 20 bp, Artificial Sequence
  chemically synthesized
attcccagggccggttaatg

SEQ ID NO: 1395 - DNA, 20 bp, Artificial Sequence
  chemically synthesized
agggccggttaatgtggctc

SEQ ID NO: 1396 - DNA, 20 bp, Artificial Sequence
  chemically synthesized
ggttaatgtggctctggttc

SEQ ID NO: 1397 - DNA, 20 bp, Artificial Sequence
  chemically synthesized
gttaatgtggctctggttct

SEQ ID NO: 1398 - DNA, 20 bp, Artificial Sequence
  chemically synthesized
tatctgtcccctccacccca

SEQ ID NO: 1399 - DNA, 20 bp, Artificial Sequence
  chemically synthesized
ctgtcccctccaccccacag

SEQ ID NO: 1400 - DNA, 20 bp, Artificial Sequence
  chemically synthesized
tgtcccctccaccccacagt

SEQ ID NO: 1401 - DNA, 20 bp, Artificial Sequence
  chemically synthesized
gtcccctccaccccacagtg

SEQ ID NO: 1402 - DNA, 20 bp, Artificial Sequence
  chemically synthesized
ccaccccacagtggggccac

SEQ ID NO: 1403 - DNA, 20 bp, Artificial Sequence
  chemically synthesized
caccccacagtggggccact

SEQ ID NO: 1404 - DNA, 20 bp, Artificial Sequence
  chemically synthesized
accccacagtggggccacta

SEQ ID NO: 1405 - DNA, 20 bp, Artificial Sequence
  chemically synthesized
cacagtggggccactaggga

SEQ ID NO: 1406 - DNA, 20 bp, Artificial Sequence
  chemically synthesized
acagtggggccactagggac

SEQ ID NO: 1407 - DNA, 20 bp, Artificial Sequence
  chemically synthesized
ggggccactagggacaggat

SEQ ID NO: 1408 - DNA, 20 bp, Artificial Sequence
  chemically synthesized
actagggacaggattggtga

SEQ ID NO: 1409 - DNA, 20 bp, Artificial Sequence
  chemically synthesized
ggacaggattggtgacagaa

SEQ ID NO: 1410 - DNA, 20 bp, Artificial Sequence
  chemically synthesized
tgacagaaaagccccatcct

SEQ ID NO: 1411 - DNA, 20 bp, Artificial Sequence
  chemically synthesized
gacagaaaagccccatcctt

SEQ ID NO: 1412 - DNA, 20 bp, Artificial Sequence
  chemically synthesized
tccttaggcctcctccttcc

SEQ ID NO: 1413 - DNA, 20 bp, Artificial Sequence
  chemically synthesized
ccttcctagtctcctgatat

SEQ ID NO: 1414 - DNA, 20 bp, Artificial Sequence
  chemically synthesized
cttcctagtctcctgatatt

SEQ ID NO: 1415 - DNA, 20 bp, Artificial Sequence
  chemically synthesized
gtctaacccccacctcctgt

SEQ ID NO: 1416 - DNA, 20 bp, Artificial Sequence
  chemically synthesized
tctaacccccacctcctgtt

SEQ ID NO: 1417 - DNA, 20 bp, Artificial Sequence
  chemically synthesized
aacccccacctcctgttagg

SEQ ID NO: 1418 - DNA, 20 bp, Artificial Sequence
  chemically synthesized
tgttaggcagattccttatc

SEQ ID NO: 1419 - DNA, 20 bp, Artificial Sequence
  chemically synthesized
ggtgacacacccccatttcc

SEQ ID NO: 1420 - DNA, 20 bp, Artificial Sequence
  chemically synthesized
tgacacacccccatttcctg

SEQ ID NO: 1421 - DNA, 20 bp, Artificial Sequence
  chemically synthesized
ggagccatctctctccttgc

SEQ ID NO: 1422 - DNA, 20 bp, Artificial Sequence
  chemically synthesized
ctctccttgccagaacctct

SEQ ID NO: 1423 - DNA, 20 bp, Artificial Sequence
  chemically synthesized
tctccttgccagaacctcta

SEQ ID NO: 1424 - DNA, 20 bp, Artificial Sequence
  chemically synthesized
cctctaaggtttgcttacga

SEQ ID NO: 1425 - DNA, 20 bp, Artificial Sequence
  chemically synthesized
tctaaggtttgcttacgatg

SEQ ID NO: 1426 - DNA, 20 bp, Artificial Sequence
  chemically synthesized
aggtttgcttacgatggagc

SEQ ID NO: 1427 - DNA, 20 bp, Artificial Sequence
  chemically synthesized
gtttgcttacgatggagcca

SEQ ID NO: 1428 - DNA, 20 bp, Artificial Sequence
  chemically synthesized
ttgcttacgatggagccaga

SEQ ID NO: 1429 - DNA, 20 bp, Artificial Sequence
  chemically synthesized
tgcttacgatggagccagag

SEQ ID NO: 1430 - DNA, 20 bp, Artificial Sequence
  chemically synthesized
gatggagccagagaggatcc

SEQ ID NO: 1431 - DNA, 20 bp, Artificial Sequence
  chemically synthesized
atggagccagagaggatcct

SEQ ID NO: 1432 - DNA, 20 bp, Artificial Sequence
  chemically synthesized
ggagccagagaggatcctgg

SEQ ID NO: 1433 - DNA, 20 bp, Artificial Sequence
  chemically synthesized
gagccagagaggatcctggg

SEQ ID NO: 1434 - DNA, 20 bp, Artificial Sequence
  chemically synthesized
agccagagaggatcctggga

SEQ ID NO: 1435 - DNA, 20 bp, Artificial Sequence
  chemically synthesized
ccagagaggatcctgggagg

SEQ ID NO: 1436 - DNA, 20 bp, Artificial Sequence
  chemically synthesized
agagaggatcctgggaggga

SEQ ID NO: 1437 - DNA, 20 bp, Artificial Sequence
  chemically synthesized
ggatcctgggagggagagct

SEQ ID NO: 1438 - DNA, 20 bp, Artificial Sequence
  chemically synthesized
tcctgggagggagagcttgg

SEQ ID NO: 1439 - DNA, 20 bp, Artificial Sequence
  chemically synthesized
cctgggagggagagcttggc

SEQ ID NO: 1440 - DNA, 20 bp, Artificial Sequence
  chemically synthesized
ctgggagggagagcttggca

SEQ ID NO: 1441 - DNA, 20 bp, Artificial Sequence
  chemically synthesized
tgggagggagagcttggcag

SEQ ID NO: 1442 - DNA, 20 bp, Artificial Sequence
  chemically synthesized
gggagggagagcttggcagg

SEQ ID NO: 1443 - DNA, 20 bp, Artificial Sequence
  chemically synthesized
agggagagcttggcaggggg

SEQ ID NO: 1444 - DNA, 20 bp, Artificial Sequence
  chemically synthesized
gggagagcttggcagggggt

SEQ ID NO: 1445 - DNA, 20 bp, Artificial Sequence
  chemically synthesized
gagagcttggcagggggtgg

SEQ ID NO: 1446 - DNA, 20 bp, Artificial Sequence
  chemically synthesized
agagcttggcagggggtggg

SEQ ID NO: 1447 - DNA, 20 bp, Artificial Sequence
  chemically synthesized
gagcttggcagggggtggga

SEQ ID NO: 1448 - DNA, 20 bp, Artificial Sequence
  chemically synthesized
cttggcagggggtgggaggg

SEQ ID NO: 1449 - DNA, 20 bp, Artificial Sequence
  chemically synthesized
ttggcagggggtgggaggga

SEQ ID NO: 1450 - DNA, 20 bp, Artificial Sequence
  chemically synthesized
tggcagggggtgggagggaa

SEQ ID NO: 1451 - DNA, 20 bp, Artificial Sequence
  chemically synthesized
ggcagggggtgggagggaag

SEQ ID NO: 1452 - DNA, 20 bp, Artificial Sequence
  chemically synthesized
gcagggggtgggagggaagg

SEQ ID NO: 1453 - DNA, 20 bp, Artificial Sequence
  chemically synthesized
cagggggtgggagggaaggg

SEQ ID NO: 1454 - DNA, 20 bp, Artificial Sequence
  chemically synthesized
agggggtgggagggaagggg

SEQ ID NO: 1455 - DNA, 20 bp, Artificial Sequence
  chemically synthesized
ggggggatgcgtgacctgcc

SEQ ID NO: 1456 - DNA, 20 bp, Artificial Sequence
  chemically synthesized
tgcgtgacctgcccggttct

SEQ ID NO: 1457 - DNA, 20 bp, Artificial Sequence
  chemically synthesized
gtgacctgcccggttctcag

SEQ ID NO: 1458 - DNA, 20 bp, Artificial Sequence
  chemically synthesized
caccctgcgctaccctctcc

SEQ ID NO: 1459 - DNA, 20 bp, Artificial Sequence
  chemically synthesized
gctaccctctcccagaacct

SEQ ID NO: 1460 - DNA, 20 bp, Artificial Sequence
  chemically synthesized
gaacctgagctgctctgacg

SEQ ID NO: 1461 - DNA, 20 bp, Artificial Sequence
  chemically synthesized
gctgctctgacgcggccgtc

SEQ ID NO: 1462 - DNA, 20 bp, Artificial Sequence
  chemically synthesized
ctggtgcgtttcactgatcc

SEQ ID NO: 1463 - DNA, 20 bp, Artificial Sequence
  chemically synthesized
tttcactgatcctggtgctg

SEQ ID NO: 1464 - DNA, 20 bp, Artificial Sequence
  chemically synthesized
gcagcttccttacacttccc

SEQ ID NO: 1465 - DNA, 20 bp, Artificial Sequence
  chemically synthesized
agcttccttacacttcccaa

SEQ ID NO: 1466 - DNA, 20 bp, Artificial Sequence
  chemically synthesized
gcttccttacacttcccaag

SEQ ID NO: 1467 - DNA, 20 bp, Artificial Sequence
  chemically synthesized
ttccttacacttcccaagag

SEQ ID NO: 1468 - DNA, 20 bp, Artificial Sequence
  chemically synthesized
cttacacttcccaagaggag

SEQ ID NO: 1469 - DNA, 20 bp, Artificial Sequence
  chemically synthesized
acacttcccaagaggagaag

SEQ ID NO: 1470 - DNA, 20 bp, Artificial Sequence
  chemically synthesized
tcccaagaggagaagcagtt

SEQ ID NO: 1471 - DNA, 20 bp, Artificial Sequence
  chemically synthesized
gcagtttggaaaaacaaaat

SEQ ID NO: 1472 - DNA, 20 bp, Artificial Sequence
  chemically synthesized
tggaaaaacaaaatcagaat

SEQ ID NO: 1473 - DNA, 20 bp, Artificial Sequence
  chemically synthesized
aaaacaaaatcagaataagt

SEQ ID NO: 1474 - DNA, 20 bp, Artificial Sequence
  chemically synthesized
aatcagaataagttggtcct

SEQ ID NO: 1475 - DNA, 20 bp, Artificial Sequence
  chemically synthesized
ttggtcctgagttctaactt

SEQ ID NO: 1476 - DNA, 20 bp, Artificial Sequence
  chemically synthesized
actttggctcttcacctttc

SEQ ID NO: 1477 - DNA, 20 bp, Artificial Sequence
  chemically synthesized
tatattgttcctccgtgcgt

SEQ ID NO: 1478 - DNA, 20 bp, Artificial Sequence
  chemically synthesized
cgtgcgtcagttttacctgt

SEQ ID NO: 1479 - DNA, 20 bp, Artificial Sequence
  chemically synthesized
gtcagttttacctgtgagat

SEQ ID NO: 1480 - DNA, 20 bp, Artificial Sequence
  chemically synthesized
tcagttttacctgtgagata

SEQ ID NO: 1481 - DNA, 20 bp, Artificial Sequence
  chemically synthesized
ttttacctgtgagataaggc

SEQ ID NO: 1482 - DNA, 20 bp, Artificial Sequence
  chemically synthesized
tacctgtgagataaggccag

SEQ ID NO: 1483 - DNA, 20 bp, Artificial Sequence
  chemically synthesized
tgtgagataaggccagtagc

SEQ ID NO: 1484 - DNA, 20 bp, Artificial Sequence
  chemically synthesized
gccagtagccagccccgtcc

SEQ ID NO: 1485 - DNA, 20 bp, Artificial Sequence
  chemically synthesized
agtagccagccccgtcctgg

SEQ ID NO: 1486 - DNA, 20 bp, Artificial Sequence
  chemically synthesized
gtagccagccccgtcctggc

SEQ ID NO: 1487 - DNA, 20 bp, Artificial Sequence
  chemically synthesized
tagccagccccgtcctggca

SEQ ID NO: 1488 - DNA, 20 bp, Artificial Sequence
  chemically synthesized
gccccgtcctggcagggctg

SEQ ID NO: 1489 - DNA, 20 bp, Artificial Sequence
  chemically synthesized
cgtcctggcagggctgtggt

SEQ ID NO: 1490 - DNA, 20 bp, Artificial Sequence
  chemically synthesized
gtcctggcagggctgtggtg

SEQ ID NO: 1491 - DNA, 20 bp, Artificial Sequence
  chemically synthesized
cctggcagggctgtggtgag

SEQ ID NO: 1492 - DNA, 20 bp, Artificial Sequence
  chemically synthesized
ctggcagggctgtggtgagg

SEQ ID NO: 1493 - DNA, 20 bp, Artificial Sequence
  chemically synthesized
tggcagggctgtggtgagga

SEQ ID NO: 1494 - DNA, 20 bp, Artificial Sequence
  chemically synthesized
ggcagggctgtggtgaggag

SEQ ID NO: 1495 - DNA, 20 bp, Artificial Sequence
  chemically synthesized
gcagggctgtggtgaggagg

SEQ ID NO: 1496 - DNA, 20 bp, Artificial Sequence
  chemically synthesized
cagggctgtggtgaggaggg

SEQ ID NO: 1497 - DNA, 20 bp, Artificial Sequence
  chemically synthesized
tgaggaggggggtgtccgtg

SEQ ID NO: 1498 - DNA, 20 bp, Artificial Sequence
  chemically synthesized
gtgtggaaaactccctttgt

SEQ ID NO: 1499 - DNA, 20 bp, Artificial Sequence
  chemically synthesized
gaaaactccctttgtgagaa

SEQ ID NO: 1500 - DNA, 20 bp, Artificial Sequence
  chemically synthesized
tttgtgagaatggtgcgtcc

SEQ ID NO: 1501 - DNA, 20 bp, Artificial Sequence
  chemically synthesized
ttgtgagaatggtgcgtcct

SEQ ID NO: 1502 - DNA, 20 bp, Artificial Sequence
  chemically synthesized
ggtgcgtcctaggtgttcac

SEQ ID NO: 1503 - DNA, 20 bp, Artificial Sequence
  chemically synthesized
gtgcgtcctaggtgttcacc

SEQ ID NO: 1504 - DNA, 20 bp, Artificial Sequence
  chemically synthesized
cctaggtgttcaccaggtcg

SEQ ID NO: 1505 - DNA, 20 bp, Artificial Sequence
  chemically synthesized
tctccatccttctttcctta

SEQ ID NO: 1506 - DNA, 20 bp, Artificial Sequence
  chemically synthesized
tccatccttctttccttaaa

SEQ ID NO: 1507 - DNA, 20 bp, Artificial Sequence
  chemically synthesized
ttctttccttaaagagtccc

SEQ ID NO: 1508 - DNA, 20 bp, Artificial Sequence
  chemically synthesized
aaagagtccccagtgctatc

SEQ ID NO: 1509 - DNA, 20 bp, Artificial Sequence
  chemically synthesized
aagagtccccagtgctatct

SEQ ID NO: 1510 - DNA, 20 bp, Artificial Sequence
  chemically synthesized
ctgggacatattcctccgcc

SEQ ID NO: 1511 - DNA, 20 bp, Artificial Sequence
  chemically synthesized
gggacatattcctccgccca

SEQ ID NO: 1512 - DNA, 20 bp, Artificial Sequence
  chemically synthesized
acatattcctccgcccagag

SEQ ID NO: 1513 - DNA, 20 bp, Artificial Sequence
  chemically synthesized
catattcctccgcccagagc

SEQ ID NO: 1514 - DNA, 20 bp, Artificial Sequence
  chemically synthesized
atattcctccgcccagagca

SEQ ID NO: 1515 - DNA, 20 bp, Artificial Sequence
  chemically synthesized
gagcagggtcccgcttccct

SEQ ID NO: 1516 - DNA, 20 bp, Artificial Sequence
  chemically synthesized
agcagggtcccgcttcccta

SEQ ID NO: 1517 - DNA, 20 bp, Artificial Sequence
  chemically synthesized
gcttccctaaggccctgctc

SEQ ID NO: 1518 - DNA, 20 bp, Artificial Sequence
  chemically synthesized
cttccctaaggccctgctct

SEQ ID NO: 1519 - DNA, 20 bp, Artificial Sequence
  chemically synthesized
aaggccctgctctgggcttc

SEQ ID NO: 1520 - DNA, 20 bp, Artificial Sequence
  chemically synthesized
aggccctgctctgggcttct

SEQ ID NO: 1521 - DNA, 20 bp, Artificial Sequence
  chemically synthesized
tgctctgggcttctgggttt

SEQ ID NO: 1522 - DNA, 20 bp, Artificial Sequence
  chemically synthesized
ggcttctgggtttgagtcct

SEQ ID NO: 1523 - DNA, 20 bp, Artificial Sequence
  chemically synthesized
tctgggtttgagtccttggc

SEQ ID NO: 1524 - DNA, 20 bp, Artificial Sequence
  chemically synthesized
gtttgagtccttggcaagcc

SEQ ID NO: 1525 - DNA, 20 bp, Artificial Sequence
  chemically synthesized
tttgagtccttggcaagccc

SEQ ID NO: 1526 - DNA, 20 bp, Artificial Sequence
  chemically synthesized
tgagtccttggcaagcccag

SEQ ID NO: 1527 - DNA, 20 bp, Artificial Sequence
  chemically synthesized
agtccttggcaagcccagga

SEQ ID NO: 1528 - DNA, 20 bp, Artificial Sequence
  chemically synthesized
gtccttggcaagcccaggag

SEQ ID NO: 1529 - DNA, 20 bp, Artificial Sequence
  chemically synthesized
gcaagcccaggagaggcgct

SEQ ID NO: 1530 - DNA, 20 bp, Artificial Sequence
  chemically synthesized
caagcccaggagaggcgctc

SEQ ID NO: 1531 - DNA, 20 bp, Artificial Sequence
  chemically synthesized
cgtccaccatctcatgcccc

SEQ ID NO: 1532 - DNA, 20 bp, Artificial Sequence
  chemically synthesized
gctctcctgccccttcccta

SEQ ID NO: 1533 - DNA, 20 bp, Artificial Sequence
  chemically synthesized
ctctcctgccccttccctac

SEQ ID NO: 1534 - DNA, 20 bp, Artificial Sequence
  chemically synthesized
tctcctgccccttccctaca

SEQ ID NO: 1535 - DNA, 20 bp, Artificial Sequence
  chemically synthesized
ctcctgccccttccctacag

SEQ ID NO: 1536 - DNA, 20 bp, Artificial Sequence
  chemically synthesized
cccttccctacaggggttcc

SEQ ID NO: 1537 - DNA, 20 bp, Artificial Sequence
  chemically synthesized
gggttcctggctctgctctt

SEQ ID NO: 1538 - DNA, 20 bp, Artificial Sequence
  chemically synthesized
ctggctctgctcttcagact

SEQ ID NO: 1539 - DNA, 20 bp, Artificial Sequence
  chemically synthesized
cccccttcccctgcatcccc

SEQ ID NO: 1540 - DNA, 20 bp, Artificial Sequence
  chemically synthesized
cccttcccctgcatccccca

SEQ ID NO: 1541 - DNA, 20 bp, Artificial Sequence
  chemically synthesized
ccttcccctgcatcccccag

SEQ ID NO: 1542 - DNA, 20 bp, Artificial Sequence
  chemically synthesized
cctgcatcccccagaggccc

SEQ ID NO: 1543 - DNA, 20 bp, Artificial Sequence
  chemically synthesized
ctgcatcccccagaggcccc

SEQ ID NO: 1544 - DNA, 20 bp, Artificial Sequence
  chemically synthesized
gaggccccaggccacctact

SEQ ID NO: 1545 - DNA, 20 bp, Artificial Sequence
  chemically synthesized
cccaggccacctacttggcc

SEQ ID NO: 1546 - DNA, 20 bp, Artificial Sequence
  chemically synthesized
ctacttggcctggaccccac

SEQ ID NO: 1547 - DNA, 20 bp, Artificial Sequence
  chemically synthesized
acttggcctggaccccacga

SEQ ID NO: 1548 - DNA, 20 bp, Artificial Sequence
  chemically synthesized
cttggcctggaccccacgag

SEQ ID NO: 1549 - DNA, 20 bp, Artificial Sequence
  chemically synthesized
gaccccacgagaggccaccc

SEQ ID NO: 1550 - DNA, 20 bp, Artificial Sequence
  chemically synthesized
gccaccccagccctgtctac

SEQ ID NO: 1551 - DNA, 20 bp, Artificial Sequence
  chemically synthesized
ccaccccagccctgtctacc

SEQ ID NO: 1552 - DNA, 20 bp, Artificial Sequence
  chemically synthesized
ctgtctaccaggctgccttt

SEQ ID NO: 1553 - DNA, 20 bp, Artificial Sequence
  chemically synthesized
tgtctaccaggctgcctttt

SEQ ID NO: 1554 - DNA, 20 bp, Artificial Sequence
  chemically synthesized
ctaccaggctgccttttggg

SEQ ID NO: 1555 - DNA, 20 bp, Artificial Sequence
  chemically synthesized
ggtggattctcctccaactg

SEQ ID NO: 1556 - DNA, 20 bp, Artificial Sequence
  chemically synthesized
gtggattctcctccaactgt

SEQ ID NO: 1557 - DNA, 20 bp, Artificial Sequence
  chemically synthesized
tggattctcctccaactgtg

SEQ ID NO: 1558 - DNA, 20 bp, Artificial Sequence
  chemically synthesized
ccaactgtggggtgactgct

SEQ ID NO: 1559 - DNA, 20 bp, Artificial Sequence
  chemically synthesized
tgcttggcaaactcactctt

SEQ ID NO: 1560 - DNA, 20 bp, Artificial Sequence
  chemically synthesized
gcttggcaaactcactcttc

SEQ ID NO: 1561 - DNA, 20 bp, Artificial Sequence
  chemically synthesized
cttggcaaactcactcttcg

SEQ ID NO: 1562 - DNA, 20 bp, Artificial Sequence
  chemically synthesized
actcactcttcggggtatcc

SEQ ID NO: 1563 - DNA, 20 bp, Artificial Sequence
  chemically synthesized
ctcactcttcggggtatccc

SEQ ID NO: 1564 - DNA, 20 bp, Artificial Sequence
  chemically synthesized
cactcttcggggtatcccag

SEQ ID NO: 1565 - DNA, 20 bp, Artificial Sequence
  chemically synthesized
actcttcggggtatcccagg

SEQ ID NO: 1566 - DNA, 20 bp, Artificial Sequence
  chemically synthesized
tcggggtatcccaggaggcc

SEQ ID NO: 1567 - DNA, 20 bp, Artificial Sequence
  chemically synthesized
ggggtatcccaggaggcctg

SEQ ID NO: 1568 - DNA, 20 bp, Artificial Sequence
  chemically synthesized
tcccaggaggcctggagcat

SEQ ID NO: 1569 - DNA, 20 bp, Artificial Sequence
  chemically synthesized
cccaggaggcctggagcatt

SEQ ID NO: 1570 - DNA, 20 bp, Artificial Sequence
  chemically synthesized
ccaggaggcctggagcattg

SEQ ID NO: 1571 - DNA, 20 bp, Artificial Sequence
  chemically synthesized
ggaggcctggagcattgggg

SEQ ID NO: 1572 - DNA, 20 bp, Artificial Sequence
  chemically synthesized
gaggcctggagcattggggt

SEQ ID NO: 1573 - DNA, 20 bp, Artificial Sequence
  chemically synthesized
cctggagcattggggtgggc

SEQ ID NO: 1574 - DNA, 20 bp, Artificial Sequence
  chemically synthesized
ctggagcattggggtgggct

SEQ ID NO: 1575 - DNA, 20 bp, Artificial Sequence
  chemically synthesized
tggagcattggggtgggctg

SEQ ID NO: 1576 - DNA, 20 bp, Artificial Sequence
  chemically synthesized
cattggggtgggctggggtt

SEQ ID NO: 1577 - DNA, 20 bp, Artificial Sequence
  chemically synthesized
ttggggtgggctggggttca

SEQ ID NO: 1578 - DNA, 20 bp, Artificial Sequence
  chemically synthesized
ggggtgggctggggttcaga

SEQ ID NO: 1579 - DNA, 20 bp, Artificial Sequence
  chemically synthesized
gggtgggctggggttcagag

SEQ ID NO: 1580 - DNA, 20 bp, Artificial Sequence
  chemically synthesized
gtgggctggggttcagagag

SEQ ID NO: 1581 - DNA, 20 bp, Artificial Sequence
  chemically synthesized
tgggctggggttcagagagg

SEQ ID NO: 1582 - DNA, 20 bp, Artificial Sequence
  chemically synthesized
gggctggggttcagagagga

SEQ ID NO: 1583 - DNA, 20 bp, Artificial Sequence
  chemically synthesized
gagaggagggattcccttct

SEQ ID NO: 1584 - DNA, 20 bp, Artificial Sequence
  chemically synthesized
agaggagggattcccttctc

SEQ ID NO: 1585 - DNA, 20 bp, Artificial Sequence
  chemically synthesized
gattcccttctcaggttacg

SEQ ID NO: 1586 - DNA, 20 bp, Artificial Sequence
  chemically synthesized
ccttctcaggttacgtggcc

SEQ ID NO: 1587 - DNA, 20 bp, Artificial Sequence
  chemically synthesized
tctcaggttacgtggccaag

SEQ ID NO: 1588 - DNA, 20 bp, Artificial Sequence
  chemically synthesized
caggttacgtggccaagaag

SEQ ID NO: 1589 - DNA, 20 bp, Artificial Sequence
  chemically synthesized
aggttacgtggccaagaagc

SEQ ID NO: 1590 - DNA, 20 bp, Artificial Sequence
  chemically synthesized
ggttacgtggccaagaagca

SEQ ID NO: 1591 - DNA, 20 bp, Artificial Sequence
  chemically synthesized
gttacgtggccaagaagcag

SEQ ID NO: 1592 - DNA, 20 bp, Artificial Sequence
  chemically synthesized
tacgtggccaagaagcaggg

SEQ ID NO: 1593 - DNA, 20 bp, Artificial Sequence
  chemically synthesized
tggccaagaagcaggggagc

SEQ ID NO: 1594 - DNA, 20 bp, Artificial Sequence
  chemically synthesized
ggccaagaagcaggggagct

SEQ ID NO: 1595 - DNA, 20 bp, Artificial Sequence
  chemically synthesized
agaagcaggggagctgggtt

SEQ ID NO: 1596 - DNA, 20 bp, Artificial Sequence
  chemically synthesized
gaagcaggggagctgggttt

SEQ ID NO: 1597 - DNA, 20 bp, Artificial Sequence
  chemically synthesized
caggggagctgggtttgggt

SEQ ID NO: 1598 - DNA, 20 bp, Artificial Sequence
  chemically synthesized
aggggagctgggtttgggtc

SEQ ID NO: 1599 - DNA, 20 bp, Artificial Sequence
  chemically synthesized
agctgggtttgggtcaggtc

SEQ ID NO: 1600 - DNA, 20 bp, Artificial Sequence
  chemically synthesized
gctgggtttgggtcaggtct

SEQ ID NO: 1601 - DNA, 20 bp, Artificial Sequence
  chemically synthesized
gtttgggtcaggtctgggtg

SEQ ID NO: 1602 - DNA, 20 bp, Artificial Sequence
  chemically synthesized
tttgggtcaggtctgggtgt

SEQ ID NO: 1603 - DNA, 20 bp, Artificial Sequence
  chemically synthesized
ttgggtcaggtctgggtgtg

SEQ ID NO: 1604 - DNA, 20 bp, Artificial Sequence
  chemically synthesized
aggtctgggtgtggggtgac

SEQ ID NO: 1605 - DNA, 20 bp, Artificial Sequence
  chemically synthesized
accagcttatgctgtttgcc

SEQ ID NO: 1606 - DNA, 20 bp, Artificial Sequence
  chemically synthesized
ccagcttatgctgtttgccc

SEQ ID NO: 1607 - DNA, 20 bp, Artificial Sequence
  chemically synthesized
cttatgctgtttgcccagga

SEQ ID NO: 1608 - DNA, 20 bp, Artificial Sequence
  chemically synthesized
gctgtttgcccaggacagcc

SEQ ID NO: 1609 - DNA, 20 bp, Artificial Sequence
  chemically synthesized
tgcccaggacagcctagttt

SEQ ID NO: 1610 - DNA, 20 bp, Artificial Sequence
  chemically synthesized
agttttagcactgaaaccct

SEQ ID NO: 1611 - DNA, 20 bp, Artificial Sequence
  chemically synthesized
agcactgaaaccctcagtcc

SEQ ID NO: 1612 - DNA, 20 bp, Artificial Sequence
  chemically synthesized
gcactgaaaccctcagtcct

SEQ ID NO: 1613 - DNA, 20 bp, Artificial Sequence
  chemically synthesized
aaccctcagtcctaggaaaa

SEQ ID NO: 1614 - DNA, 20 bp, Artificial Sequence
  chemically synthesized
accctcagtcctaggaaaac

SEQ ID NO: 1615 - DNA, 20 bp, Artificial Sequence
  chemically synthesized
ccctcagtcctaggaaaaca

SEQ ID NO: 1616 - DNA, 20 bp, Artificial Sequence
  chemically synthesized
cagtcctaggaaaacaggga

SEQ ID NO: 1617 - DNA, 20 bp, Artificial Sequence
  chemically synthesized
cctaggaaaacagggatggt

SEQ ID NO: 1618 - DNA, 20 bp, Artificial Sequence
  chemically synthesized
ggatggttggtcactgtctc

SEQ ID NO: 1619 - DNA, 20 bp, Artificial Sequence
  chemically synthesized
gatggttggtcactgtctct

SEQ ID NO: 1620 - DNA, 20 bp, Artificial Sequence
  chemically synthesized
tctgggtgactcttgattcc

SEQ ID NO: 1621 - DNA, 20 bp, Artificial Sequence
  chemically synthesized
ggtgactcttgattcccggc

SEQ ID NO: 1622 - DNA, 20 bp, Artificial Sequence
  chemically synthesized
tcccggccagtttctccacc

SEQ ID NO: 1623 - DNA, 20 bp, Artificial Sequence
  chemically synthesized
cccggccagtttctccacct

SEQ ID NO: 1624 - DNA, 20 bp, Artificial Sequence
  chemically synthesized
ccggccagtttctccacctg

SEQ ID NO: 1625 - DNA, 20 bp, Artificial Sequence
  chemically synthesized
tctcgtcctgcatccttctc

SEQ ID NO: 1626 - DNA, 20 bp, Artificial Sequence
  chemically synthesized
ctcgtcctgcatccttctcc

SEQ ID NO: 1627 - DNA, 20 bp, Artificial Sequence
  chemically synthesized
gtcctgcatccttctccagg

SEQ ID NO: 1628 - DNA, 20 bp, Artificial Sequence
  chemically synthesized
tcctgcatccttctccaggc

SEQ ID NO: 1629 - DNA, 20 bp, Artificial Sequence
  chemically synthesized
ccttctccaggcaggtcccc

SEQ ID NO: 1630 - DNA, 20 bp, Artificial Sequence
  chemically synthesized
caagcatcgcccccctgctg

SEQ ID NO: 1631 - DNA, 20 bp, Artificial Sequence
  chemically synthesized
cccctgctgtggctgttccc

SEQ ID NO: 1632 - DNA, 20 bp, Artificial Sequence
  chemically synthesized
tgtggctgttcccaagttct

SEQ ID NO: 1633 - DNA, 20 bp, Artificial Sequence
  chemically synthesized
gtggctgttcccaagttctt

SEQ ID NO: 1634 - DNA, 20 bp, Artificial Sequence
  chemically synthesized
tggctgttcccaagttctta

SEQ ID NO: 1635 - DNA, 20 bp, Artificial Sequence
  chemically synthesized
agttcttagggtaccccacg

SEQ ID NO: 1636 - DNA, 20 bp, Artificial Sequence
  chemically synthesized
gttcttagggtaccccacgt

SEQ ID NO: 1637 - DNA, 20 bp, Artificial Sequence
  chemically synthesized
acgtgggtttatcaaccact

SEQ ID NO: 1638 - DNA, 20 bp, Artificial Sequence
  chemically synthesized
gggtttatcaaccacttggt

SEQ ID NO: 1639 - DNA, 20 bp, Artificial Sequence
  chemically synthesized
ggtttatcaaccacttggtg

SEQ ID NO: 1640 - DNA, 20 bp, Artificial Sequence
  chemically synthesized
tatcaaccacttggtgaggc

SEQ ID NO: 1641 - DNA, 20 bp, Artificial Sequence
  chemically synthesized
ttcctgcaccccaattgcct

SEQ ID NO: 1642 - DNA, 20 bp, Artificial Sequence
  chemically synthesized
ctgcaccccaattgccttag

SEQ ID NO: 1643 - DNA, 20 bp, Artificial Sequence
  chemically synthesized
accccaattgccttagtggc

SEQ ID NO: 1644 - DNA, 20 bp, Artificial Sequence
  chemically synthesized
ccccaattgccttagtggct

SEQ ID NO: 1645 - DNA, 20 bp, Artificial Sequence
  chemically synthesized
cccaattgccttagtggcta

SEQ ID NO: 1646 - DNA, 20 bp, Artificial Sequence
  chemically synthesized
ccaattgccttagtggctag

SEQ ID NO: 1647 - DNA, 20 bp, Artificial Sequence
  chemically synthesized
caattgccttagtggctagg

SEQ ID NO: 1648 - DNA, 20 bp, Artificial Sequence
  chemically synthesized
tgccttagtggctagggggt

SEQ ID NO: 1649 - DNA, 20 bp, Artificial Sequence
  chemically synthesized
gccttagtggctagggggtt

SEQ ID NO: 1650 - DNA, 20 bp, Artificial Sequence
  chemically synthesized
ccttagtggctagggggttg

SEQ ID NO: 1651 - DNA, 20 bp, Artificial Sequence
  chemically synthesized
cttagtggctagggggttgg

SEQ ID NO: 1652 - DNA, 20 bp, Artificial Sequence
  chemically synthesized
gtggctagggggttgggggc

SEQ ID NO: 1653 - DNA, 20 bp, Artificial Sequence
  chemically synthesized
ggctagggggttgggggcta

SEQ ID NO: 1654 - DNA, 20 bp, Artificial Sequence
  chemically synthesized
tagggggttgggggctagag

SEQ ID NO: 1655 - DNA, 20 bp, Artificial Sequence
  chemically synthesized
agggggttgggggctagagt

SEQ ID NO: 1656 - DNA, 20 bp, Artificial Sequence
  chemically synthesized
ggggttgggggctagagtag

SEQ ID NO: 1657 - DNA, 20 bp, Artificial Sequence
  chemically synthesized
gggttgggggctagagtagg

SEQ ID NO: 1658 - DNA, 20 bp, Artificial Sequence
  chemically synthesized
ggttgggggctagagtagga

SEQ ID NO: 1659 - DNA, 20 bp, Artificial Sequence
  chemically synthesized
gttgggggctagagtaggag

SEQ ID NO: 1660 - DNA, 20 bp, Artificial Sequence
  chemically synthesized
ggggctagagtaggaggggc

SEQ ID NO: 1661 - DNA, 20 bp, Artificial Sequence
  chemically synthesized
ggctagagtaggaggggctg

SEQ ID NO: 1662 - DNA, 20 bp, Artificial Sequence
  chemically synthesized
agagtaggaggggctggagc

SEQ ID NO: 1663 - DNA, 20 bp, Artificial Sequence
  chemically synthesized
gagtaggaggggctggagcc

SEQ ID NO: 1664 - DNA, 20 bp, Artificial Sequence
  chemically synthesized
ggggctggagccaggattct

SEQ ID NO: 1665 - DNA, 20 bp, Artificial Sequence
  chemically synthesized
gggctggagccaggattctt

SEQ ID NO: 1666 - DNA, 20 bp, Artificial Sequence
  chemically synthesized
ggctggagccaggattctta

SEQ ID NO: 1667 - DNA, 20 bp, Artificial Sequence
  chemically synthesized
ccaggattcttagggctgaa

SEQ ID NO: 1668 - DNA, 20 bp, Artificial Sequence
  chemically synthesized
aggattcttagggctgaaca

SEQ ID NO: 1669 - DNA, 20 bp, Artificial Sequence
  chemically synthesized
attcttagggctgaacagag

SEQ ID NO: 1670 - DNA, 20 bp, Artificial Sequence
  chemically synthesized
tcttagggctgaacagagaa

SEQ ID NO: 1671 - DNA, 20 bp, Artificial Sequence
  chemically synthesized
agggctgaacagagaagagc

SEQ ID NO: 1672 - DNA, 20 bp, Artificial Sequence
  chemically synthesized
gggctgaacagagaagagct

SEQ ID NO: 1673 - DNA, 20 bp, Artificial Sequence
  chemically synthesized
ggctgaacagagaagagctg

SEQ ID NO: 1674 - DNA, 20 bp, Artificial Sequence
  chemically synthesized
gctgaacagagaagagctgg

SEQ ID NO: 1675 - DNA, 20 bp, Artificial Sequence
  chemically synthesized
acagagaagagctgggggcc

SEQ ID NO: 1676 - DNA, 20 bp, Artificial Sequence
  chemically synthesized
cagagaagagctgggggcct

SEQ ID NO: 1677 - DNA, 20 bp, Artificial Sequence
  chemically synthesized
gagctgggggcctgggctcc

SEQ ID NO: 1678 - DNA, 20 bp, Artificial Sequence
  chemically synthesized
agctgggggcctgggctcct

SEQ ID NO: 1679 - DNA, 20 bp, Artificial Sequence
  chemically synthesized
gggcctgggctcctgggttt

SEQ ID NO: 1680 - DNA, 20 bp, Artificial Sequence
  chemically synthesized
gcctgggctcctgggtttga

SEQ ID NO: 1681 - DNA, 20 bp, Artificial Sequence
  chemically synthesized
ctgggctcctgggtttgaga

SEQ ID NO: 1682 - DNA, 20 bp, Artificial Sequence
  chemically synthesized
tgggctcctgggtttgagag

SEQ ID NO: 1683 - DNA, 20 bp, Artificial Sequence
  chemically synthesized
ggctcctgggtttgagagag

SEQ ID NO: 1684 - DNA, 20 bp, Artificial Sequence
  chemically synthesized
gctcctgggtttgagagagg

SEQ ID NO: 1685 - DNA, 20 bp, Artificial Sequence
  chemically synthesized
ctcctgggtttgagagagga

SEQ ID NO: 1686 - DNA, 20 bp, Artificial Sequence
  chemically synthesized
tcctgggtttgagagaggag

SEQ ID NO: 1687 - DNA, 20 bp, Artificial Sequence
  chemically synthesized
gggtttgagagaggaggggc

SEQ ID NO: 1688 - DNA, 20 bp, Artificial Sequence
  chemically synthesized
ggtttgagagaggaggggct

SEQ ID NO: 1689 - DNA, 20 bp, Artificial Sequence
  chemically synthesized
gtttgagagaggaggggctg

SEQ ID NO: 1690 - DNA, 20 bp, Artificial Sequence
  chemically synthesized
agagaggaggggctggggcc

SEQ ID NO: 1691 - DNA, 20 bp, Artificial Sequence
  chemically synthesized
ggggctggggcctggactcc

SEQ ID NO: 1692 - DNA, 20 bp, Artificial Sequence
  chemically synthesized
gggctggggcctggactcct

SEQ ID NO: 1693 - DNA, 20 bp, Artificial Sequence
  chemically synthesized
gggcctggactcctgggtcc

SEQ ID NO: 1694 - DNA, 20 bp, Artificial Sequence
  chemically synthesized
ggcctggactcctgggtccg

SEQ ID NO: 1695 - DNA, 20 bp, Artificial Sequence
  chemically synthesized
gcctggactcctgggtccga

SEQ ID NO: 1696 - DNA, 20 bp, Artificial Sequence
  chemically synthesized
ctggactcctgggtccgagg

SEQ ID NO: 1697 - DNA, 20 bp, Artificial Sequence
  chemically synthesized
tggactcctgggtccgaggg

SEQ ID NO: 1698 - DNA, 20 bp, Artificial Sequence
  chemically synthesized
gactcctgggtccgagggag

SEQ ID NO: 1699 - DNA, 20 bp, Artificial Sequence
  chemically synthesized
actcctgggtccgagggagg

SEQ ID NO: 1700 - DNA, 20 bp, Artificial Sequence
  chemically synthesized
ctcctgggtccgagggagga

SEQ ID NO: 1701 - DNA, 20 bp, Artificial Sequence
  chemically synthesized
tcctgggtccgagggaggag

SEQ ID NO: 1702 - DNA, 20 bp, Artificial Sequence
  chemically synthesized
gggtccgagggaggaggggc

SEQ ID NO: 1703 - DNA, 20 bp, Artificial Sequence
  chemically synthesized
ggtccgagggaggaggggct

SEQ ID NO: 1704 - DNA, 20 bp, Artificial Sequence
  chemically synthesized
gtccgagggaggaggggctg

SEQ ID NO: 1705 - DNA, 20 bp, Artificial Sequence
  chemically synthesized
agggaggaggggctggggcc

SEQ ID NO: 1706 - DNA, 20 bp, Artificial Sequence
  chemically synthesized
ggggctggggcctggactcc

SEQ ID NO: 1707 - DNA, 20 bp, Artificial Sequence
  chemically synthesized
gggctggggcctggactcct

SEQ ID NO: 1708 - DNA, 20 bp, Artificial Sequence
  chemically synthesized
gggcctggactcctgggtct

SEQ ID NO: 1709 - DNA, 20 bp, Artificial Sequence
  chemically synthesized
ggcctggactcctgggtctg

SEQ ID NO: 1710 - DNA, 20 bp, Artificial Sequence
  chemically synthesized
gcctggactcctgggtctga

SEQ ID NO: 1711 - DNA, 20 bp, Artificial Sequence
  chemically synthesized
tggactcctgggtctgaggg

SEQ ID NO: 1712 - DNA, 20 bp, Artificial Sequence
  chemically synthesized
gactcctgggtctgagggtg

SEQ ID NO: 1713 - DNA, 20 bp, Artificial Sequence
  chemically synthesized
actcctgggtctgagggtgg

SEQ ID NO: 1714 - DNA, 20 bp, Artificial Sequence
  chemically synthesized
ctcctgggtctgagggtgga

SEQ ID NO: 1715 - DNA, 20 bp, Artificial Sequence
  chemically synthesized
gggtctgagggtggagggac

SEQ ID NO: 1716 - DNA, 20 bp, Artificial Sequence
  chemically synthesized
ggtctgagggtggagggact

SEQ ID NO: 1717 - DNA, 20 bp, Artificial Sequence
  chemically synthesized
gtctgagggtggagggactg

SEQ ID NO: 1718 - DNA, 20 bp, Artificial Sequence
  chemically synthesized
tctgagggtggagggactgg

SEQ ID NO: 1719 - DNA, 20 bp, Artificial Sequence
  chemically synthesized
gggtggagggactgggggcc

SEQ ID NO: 1720 - DNA, 20 bp, Artificial Sequence
  chemically synthesized
ggactgggggcctggactcc

SEQ ID NO: 1721 - DNA, 20 bp, Artificial Sequence
  chemically synthesized
gactgggggcctggactcct

SEQ ID NO: 1722 - DNA, 20 bp, Artificial Sequence
  chemically synthesized
gggcctggactcctgggtcc

SEQ ID NO: 1723 - DNA, 20 bp, Artificial Sequence
  chemically synthesized
ggcctggactcctgggtccg

SEQ ID NO: 1724 - DNA, 20 bp, Artificial Sequence
  chemically synthesized
gcctggactcctgggtccga

SEQ ID NO: 1725 - DNA, 20 bp, Artificial Sequence
  chemically synthesized
ctggactcctgggtccgagg

SEQ ID NO: 1726 - DNA, 20 bp, Artificial Sequence
  chemically synthesized
tggactcctgggtccgaggg

SEQ ID NO: 1727 - DNA, 20 bp, Artificial Sequence
  chemically synthesized
gactcctgggtccgagggag

SEQ ID NO: 1728 - DNA, 20 bp, Artificial Sequence
  chemically synthesized
actcctgggtccgagggagg

SEQ ID NO: 1729 - DNA, 20 bp, Artificial Sequence
  chemically synthesized
ctcctgggtccgagggagga

SEQ ID NO: 1730 - DNA, 20 bp, Artificial Sequence
  chemically synthesized
tcctgggtccgagggaggag

SEQ ID NO: 1731 - DNA, 20 bp, Artificial Sequence
  chemically synthesized
gggtccgagggaggaggggc

SEQ ID NO: 1732 - DNA, 20 bp, Artificial Sequence
  chemically synthesized
ggtccgagggaggaggggct

SEQ ID NO: 1733 - DNA, 20 bp, Artificial Sequence
  chemically synthesized
gtccgagggaggaggggctg

SEQ ID NO: 1734 - DNA, 20 bp, Artificial Sequence
  chemically synthesized
agggaggaggggctggggcc

SEQ ID NO: 1735 - DNA, 20 bp, Artificial Sequence
  chemically synthesized
ggggctggggcctggactcg

SEQ ID NO: 1736 - DNA, 20 bp, Artificial Sequence
  chemically synthesized
gggctggggcctggactcgt

SEQ ID NO: 1737 - DNA, 20 bp, Artificial Sequence
  chemically synthesized
gggcctggactcgtgggtct

SEQ ID NO: 1738 - DNA, 20 bp, Artificial Sequence
  chemically synthesized
ggcctggactcgtgggtctg

SEQ ID NO: 1739 - DNA, 20 bp, Artificial Sequence
  chemically synthesized
gcctggactcgtgggtctga

SEQ ID NO: 1740 - DNA, 20 bp, Artificial Sequence
  chemically synthesized
ctggactcgtgggtctgagg

SEQ ID NO: 1741 - DNA, 20 bp, Artificial Sequence
  chemically synthesized
tggactcgtgggtctgaggg

SEQ ID NO: 1742 - DNA, 20 bp, Artificial Sequence
  chemically synthesized
gactcgtgggtctgagggag

SEQ ID NO: 1743 - DNA, 20 bp, Artificial Sequence
  chemically synthesized
actcgtgggtctgagggagg

SEQ ID NO: 1744 - DNA, 20 bp, Artificial Sequence
  chemically synthesized
ctcgtgggtctgagggagga

SEQ ID NO: 1745 - DNA, 20 bp, Artificial Sequence
  chemically synthesized
tcgtgggtctgagggaggag

SEQ ID NO: 1746 - DNA, 20 bp, Artificial Sequence
  chemically synthesized
gggtctgagggaggaggggc

SEQ ID NO: 1747 - DNA, 20 bp, Artificial Sequence
  chemically synthesized
ggtctgagggaggaggggct

SEQ ID NO: 1748 - DNA, 20 bp, Artificial Sequence
  chemically synthesized
gtctgagggaggaggggctg

SEQ ID NO: 1749 - DNA, 20 bp, Artificial Sequence
  chemically synthesized
tctgagggaggaggggctgg

SEQ ID NO: 1750 - DNA, 20 bp, Artificial Sequence
  chemically synthesized
gggaggaggggctgggggcc

SEQ ID NO: 1751 - DNA, 20 bp, Artificial Sequence
  chemically synthesized
gggctgggggcctggacttc

SEQ ID NO: 1752 - DNA, 20 bp, Artificial Sequence
  chemically synthesized
ggctgggggcctggacttct

SEQ ID NO: 1753 - DNA, 20 bp, Artificial Sequence
  chemically synthesized
gggcctggacttctgggtct

SEQ ID NO: 1754 - DNA, 20 bp, Artificial Sequence
  chemically synthesized
ggcctggacttctgggtctt

SEQ ID NO: 1755 - DNA, 20 bp, Artificial Sequence
  chemically synthesized
gcctggacttctgggtctta

SEQ ID NO: 1756 - DNA, 20 bp, Artificial Sequence
  chemically synthesized
ctggacttctgggtcttagg

SEQ ID NO: 1757 - DNA, 20 bp, Artificial Sequence
  chemically synthesized
tggacttctgggtcttaggg

SEQ ID NO: 1758 - DNA, 20 bp, Artificial Sequence
  chemically synthesized
acttctgggtcttagggagg

SEQ ID NO: 1759 - DNA, 20 bp, Artificial Sequence
  chemically synthesized
cttctgggtcttagggaggc

SEQ ID NO: 1760 - DNA, 20 bp, Artificial Sequence
  chemically synthesized
ttctgggtcttagggaggcg

SEQ ID NO: 1761 - DNA, 20 bp, Artificial Sequence
  chemically synthesized
gggtcttagggaggcggggc

SEQ ID NO: 1762 - DNA, 20 bp, Artificial Sequence
  chemically synthesized
ggtcttagggaggcggggct

SEQ ID NO: 1763 - DNA, 20 bp, Artificial Sequence
  chemically synthesized
tagggaggcggggctgggcc

SEQ ID NO: 1764 - DNA, 20 bp, Artificial Sequence
  chemically synthesized
cggggctgggcctggacccc

SEQ ID NO: 1765 - DNA, 20 bp, Artificial Sequence
  chemically synthesized
ggggctgggcctggacccct

SEQ ID NO: 1766 - DNA, 20 bp, Artificial Sequence
  chemically synthesized
cctggacccctgggtctgaa

SEQ ID NO: 1767 - DNA, 20 bp, Artificial Sequence
  chemically synthesized
ctggacccctgggtctgaat

SEQ ID NO: 1768 - DNA, 20 bp, Artificial Sequence
  chemically synthesized
tggacccctgggtctgaatg

SEQ ID NO: 1769 - DNA, 20 bp, Artificial Sequence
  chemically synthesized
gacccctgggtctgaatggg

SEQ ID NO: 1770 - DNA, 20 bp, Artificial Sequence
  chemically synthesized
cccctgggtctgaatgggga

SEQ ID NO: 1771 - DNA, 20 bp, Artificial Sequence
  chemically synthesized
ccctgggtctgaatggggag

SEQ ID NO: 1772 - DNA, 20 bp, Artificial Sequence
  chemically synthesized
gggtctgaatggggagaggc

SEQ ID NO: 1773 - DNA, 20 bp, Artificial Sequence
  chemically synthesized
ggtctgaatggggagaggct

SEQ ID NO: 1774 - DNA, 20 bp, Artificial Sequence
  chemically synthesized
gtctgaatggggagaggctg

SEQ ID NO: 1775 - DNA, 20 bp, Artificial Sequence
  chemically synthesized
tctgaatggggagaggctgg

SEQ ID NO: 1776 - DNA, 20 bp, Artificial Sequence
  chemically synthesized
atggggagaggctgggggcc

SEQ ID NO: 1777 - DNA, 20 bp, Artificial Sequence
  chemically synthesized
gggcctggactccttcatct

SEQ ID NO: 1778 - DNA, 20 bp, Artificial Sequence
  chemically synthesized
ggcctggactccttcatctg

SEQ ID NO: 1779 - DNA, 20 bp, Artificial Sequence
  chemically synthesized
gcctggactccttcatctga

SEQ ID NO: 1780 - DNA, 20 bp, Artificial Sequence
  chemically synthesized
tggactccttcatctgaggg

SEQ ID NO: 1781 - DNA, 20 bp, Artificial Sequence
  chemically synthesized
actccttcatctgagggcgg

SEQ ID NO: 1782 - DNA, 20 bp, Artificial Sequence
  chemically synthesized
ctccttcatctgagggcgga

SEQ ID NO: 1783 - DNA, 20 bp, Artificial Sequence
  chemically synthesized
tccttcatctgagggcggaa

SEQ ID NO: 1784 - DNA, 20 bp, Artificial Sequence
  chemically synthesized
tcatctgagggcggaagggc

SEQ ID NO: 1785 - DNA, 20 bp, Artificial Sequence
  chemically synthesized
catctgagggcggaagggct

SEQ ID NO: 1786 - DNA, 20 bp, Artificial Sequence
  chemically synthesized
atctgagggcggaagggctg

SEQ ID NO: 1787 - DNA, 20 bp, Artificial Sequence
  chemically synthesized
agggcggaagggctggggcc

SEQ ID NO: 1788 - DNA, 20 bp, Artificial Sequence
  chemically synthesized
agggctggggcctggcctcc

SEQ ID NO: 1789 - DNA, 20 bp, Artificial Sequence
  chemically synthesized
gggctggggcctggcctcct

SEQ ID NO: 1790 - DNA, 20 bp, Artificial Sequence
  chemically synthesized
gcctggcctcctgggttgaa

SEQ ID NO: 1791 - DNA, 20 bp, Artificial Sequence
  chemically synthesized
cctggcctcctgggttgaat

SEQ ID NO: 1792 - DNA, 20 bp, Artificial Sequence
  chemically synthesized
ctggcctcctgggttgaatg

SEQ ID NO: 1793 - DNA, 20 bp, Artificial Sequence
  chemically synthesized
ggcctcctgggttgaatggg

SEQ ID NO: 1794 - DNA, 20 bp, Artificial Sequence
  chemically synthesized
gcctcctgggttgaatgggg

SEQ ID NO: 1795 - DNA, 20 bp, Artificial Sequence
  chemically synthesized
cctcctgggttgaatgggga

SEQ ID NO: 1796 - DNA, 20 bp, Artificial Sequence
  chemically synthesized
ctcctgggttgaatggggag

SEQ ID NO: 1797 - DNA, 20 bp, Artificial Sequence
  chemically synthesized
tgggttgaatggggaggggt

SEQ ID NO: 1798 - DNA, 20 bp, Artificial Sequence
  chemically synthesized
gggttgaatggggaggggtt

SEQ ID NO: 1799 - DNA, 20 bp, Artificial Sequence
  chemically synthesized
gaatggggaggggttgggcc

SEQ ID NO: 1800 - DNA, 20 bp, Artificial Sequence
  chemically synthesized
gaggggttgggcctggactc

SEQ ID NO: 1801 - DNA, 20 bp, Artificial Sequence
  chemically synthesized
ggggttgggcctggactctg

SEQ ID NO: 1802 - DNA, 20 bp, Artificial Sequence
  chemically synthesized
ggcctggactctggagtccc

SEQ ID NO: 1803 - DNA, 20 bp, Artificial Sequence
  chemically synthesized
actctggagtccctggtgcc

SEQ ID NO: 1804 - DNA, 20 bp, Artificial Sequence
  chemically synthesized
ctctggagtccctggtgccc

SEQ ID NO: 1805 - DNA, 20 bp, Artificial Sequence
  chemically synthesized
agtccctggtgcccaggcct

SEQ ID NO: 1806 - DNA, 20 bp, Artificial Sequence
  chemically synthesized
gtccctggtgcccaggcctc

SEQ ID NO: 1807 - DNA, 20 bp, Artificial Sequence
  chemically synthesized
caggcctcaggcatctttca

SEQ ID NO: 1808 - DNA, 20 bp, Artificial Sequence
  chemically synthesized
aggcctcaggcatctttcac

SEQ ID NO: 1809 - DNA, 20 bp, Artificial Sequence
  chemically synthesized
ggcctcaggcatctttcaca

SEQ ID NO: 1810 - DNA, 20 bp, Artificial Sequence
  chemically synthesized
tttcacagggatgcctgtac

SEQ ID NO: 1811 - DNA, 20 bp, Artificial Sequence
  chemically synthesized
ttcacagggatgcctgtact

SEQ ID NO: 1812 - DNA, 20 bp, Artificial Sequence
  chemically synthesized
acagggatgcctgtactggg

SEQ ID NO: 1813 - DNA, 20 bp, Artificial Sequence
  chemically synthesized
cagggatgcctgtactgggc

SEQ ID NO: 1814 - DNA, 20 bp, Artificial Sequence
  chemically synthesized
tgtactgggcaggtccttga

SEQ ID NO: 1815 - DNA, 20 bp, Artificial Sequence
  chemically synthesized
gtactgggcaggtccttgaa

SEQ ID NO: 1816 - DNA, 20 bp, Artificial Sequence
  chemically synthesized
tactgggcaggtccttgaaa

SEQ ID NO: 1817 - DNA, 20 bp, Artificial Sequence
  chemically synthesized
gggcaggtccttgaaaggga

SEQ ID NO: 1818 - DNA, 20 bp, Artificial Sequence
  chemically synthesized
ggcaggtccttgaaagggaa

SEQ ID NO: 1819 - DNA, 20 bp, Artificial Sequence
  chemically synthesized
tcccctatcgccatgacaac

SEQ ID NO: 1820 - DNA, 20 bp, Artificial Sequence
  chemically synthesized
cccctatcgccatgacaact

SEQ ID NO: 1821 - DNA, 20 bp, Artificial Sequence
  chemically synthesized
ctatcgccatgacaactggg

SEQ ID NO: 1822 - DNA, 20 bp, Artificial Sequence
  chemically synthesized
acaactgggtggaaataaac

SEQ ID NO: 1823 - DNA, 20 bp, Artificial Sequence
  chemically synthesized
tgggtggaaataaacgagcc

SEQ ID NO: 1824 - DNA, 20 bp, Artificial Sequence
  chemically synthesized
agccgagttcatcccgttcc

SEQ ID NO: 1825 - DNA, 20 bp, Artificial Sequence
  chemically synthesized
gccgagttcatcccgttccc

SEQ ID NO: 1826 - DNA, 20 bp, Artificial Sequence
  chemically synthesized
ccgagttcatcccgttccca

SEQ ID NO: 1827 - DNA, 20 bp, Artificial Sequence
  chemically synthesized
tcccgttcccagggcacgtg

SEQ ID NO: 1828 - DNA, 20 bp, Artificial Sequence
  chemically synthesized
gggcacgtgcggccccttca

SEQ ID NO: 1829 - DNA, 20 bp, Artificial Sequence
  chemically synthesized
gtgcggccccttcacagccc

SEQ ID NO: 1830 - DNA, 20 bp, Artificial Sequence
  chemically synthesized
tttccatgacctcatgctct

SEQ ID NO: 1831 - DNA, 20 bp, Artificial Sequence
  chemically synthesized
cctcatgctcttggccctcg

SEQ ID NO: 1832 - DNA, 20 bp, Artificial Sequence
  chemically synthesized
tagctccctcccgcctcctc

SEQ ID NO: 1833 - DNA, 20 bp, Artificial Sequence
  chemically synthesized
tccctcccgcctcctccaga

SEQ ID NO: 1834 - DNA, 20 bp, Artificial Sequence
  chemically synthesized
ccctcccgcctcctccagat

SEQ ID NO: 1835 - DNA, 20 bp, Artificial Sequence
  chemically synthesized
tcccgcctcctccagatggg

SEQ ID NO: 1836 - DNA, 20 bp, Artificial Sequence
  chemically synthesized
ctcctccagatgggcagctt

SEQ ID NO: 1837 - DNA, 20 bp, Artificial Sequence
  chemically synthesized
cctccagatgggcagctttg

SEQ ID NO: 1838 - DNA, 20 bp, Artificial Sequence
  chemically synthesized
tccagatgggcagctttgga

SEQ ID NO: 1839 - DNA, 20 bp, Artificial Sequence
  chemically synthesized
ccagatgggcagctttggag

SEQ ID NO: 1840 - DNA, 20 bp, Artificial Sequence
  chemically synthesized
atgggcagctttggagaggt

SEQ ID NO: 1841 - DNA, 20 bp, Artificial Sequence
  chemically synthesized
tgggcagctttggagaggtg

SEQ ID NO: 1842 - DNA, 20 bp, Artificial Sequence
  chemically synthesized
gggcagctttggagaggtga

SEQ ID NO: 1843 - DNA, 20 bp, Artificial Sequence
  chemically synthesized
ctttggagaggtgagggact

SEQ ID NO: 1844 - DNA, 20 bp, Artificial Sequence
  chemically synthesized
tttggagaggtgagggactt

SEQ ID NO: 1845 - DNA, 20 bp, Artificial Sequence
  chemically synthesized
ttggagaggtgagggacttg

SEQ ID NO: 1846 - DNA, 20 bp, Artificial Sequence
  chemically synthesized
tggagaggtgagggacttgg

SEQ ID NO: 1847 - DNA, 20 bp, Artificial Sequence
  chemically synthesized
ggagaggtgagggacttggg

SEQ ID NO: 1848 - DNA, 20 bp, Artificial Sequence
  chemically synthesized
ttggggggtaatttatcccg

SEQ ID NO: 1849 - DNA, 20 bp, Artificial Sequence
  chemically synthesized
ggtaatttatcccgtggatc

SEQ ID NO: 1850 - DNA, 20 bp, Artificial Sequence
  chemically synthesized
gtaatttatcccgtggatct

SEQ ID NO: 1851 - DNA, 20 bp, Artificial Sequence
  chemically synthesized
aatttatcccgtggatctag

SEQ ID NO: 1852 - DNA, 20 bp, Artificial Sequence
  chemically synthesized
atcccgtggatctaggagtt

SEQ ID NO: 1853 - DNA, 20 bp, Artificial Sequence
  chemically synthesized
gtttagcttcactccttcct

SEQ ID NO: 1854 - DNA, 20 bp, Artificial Sequence
  chemically synthesized
cttcactccttcctcagctc

SEQ ID NO: 1855 - DNA, 20 bp, Artificial Sequence
  chemically synthesized
ctccttcctcagctccagtt

SEQ ID NO: 1856 - DNA, 20 bp, Artificial Sequence
  chemically synthesized
tccttcctcagctccagttc

SEQ ID NO: 1857 - DNA, 20 bp, Artificial Sequence
  chemically synthesized
ctcagctccagttcaggtcc

SEQ ID NO: 1858 - DNA, 20 bp, Artificial Sequence
  chemically synthesized
cagctccagttcaggtcccg

SEQ ID NO: 1859 - DNA, 20 bp, Artificial Sequence
  chemically synthesized
ttcaggtcccggagcccacc

SEQ ID NO: 1860 - DNA, 20 bp, Artificial Sequence
  chemically synthesized
ggagcccacccagtgtccac

SEQ ID NO: 1861 - DNA, 20 bp, Artificial Sequence
  chemically synthesized
gagcccacccagtgtccaca

SEQ ID NO: 1862 - DNA, 20 bp, Artificial Sequence
  chemically synthesized
cacccagtgtccacaaggcc

SEQ ID NO: 1863 - DNA, 20 bp, Artificial Sequence
  chemically synthesized
acccagtgtccacaaggcct

SEQ ID NO: 1864 - DNA, 20 bp, Artificial Sequence
  chemically synthesized
cccagtgtccacaaggcctg

SEQ ID NO: 1865 - DNA, 20 bp, Artificial Sequence
  chemically synthesized
gtgtccacaaggcctggggc

SEQ ID NO: 1866 - DNA, 20 bp, Artificial Sequence
  chemically synthesized
aagtccctcctccgaccccc

SEQ ID NO: 1867 - DNA, 20 bp, Artificial Sequence
  chemically synthesized
tcctccgaccccctggactt

SEQ ID NO: 1868 - DNA, 20 bp, Artificial Sequence
  chemically synthesized
acttcggcttttgtcccccc

SEQ ID NO: 1869 - DNA, 20 bp, Artificial Sequence
  chemically synthesized
gcttttgtccccccaagttt

SEQ ID NO: 1870 - DNA, 20 bp, Artificial Sequence
  chemically synthesized
cccccaagttttggacccct

SEQ ID NO: 1871 - DNA, 20 bp, Artificial Sequence
  chemically synthesized
ccccaagttttggaccccta

SEQ ID NO: 1872 - DNA, 20 bp, Artificial Sequence
  chemically synthesized
cccaagttttggacccctaa

SEQ ID NO: 1873 - DNA, 20 bp, Artificial Sequence
  chemically synthesized
aagttttggacccctaaggg

SEQ ID NO: 1874 - DNA, 20 bp, Artificial Sequence
  chemically synthesized
tggacccctaagggaagaat

SEQ ID NO: 1875 - DNA, 20 bp, Artificial Sequence
  chemically synthesized
cctaagggaagaatgagaaa

SEQ ID NO: 1876 - DNA, 20 bp, Artificial Sequence
  chemically synthesized
aagggaagaatgagaaacgg

SEQ ID NO: 1877 - DNA, 20 bp, Artificial Sequence
  chemically synthesized
tgagaaacggtggcccgtgt

SEQ ID NO: 1878 - DNA, 20 bp, Artificial Sequence
  chemically synthesized
cggtggcccgtgtcagcccc

SEQ ID NO: 1879 - DNA, 20 bp, Artificial Sequence
  chemically synthesized
cccgtgtcagcccctggctg

SEQ ID NO: 1880 - DNA, 20 bp, Artificial Sequence
  chemically synthesized
ccgtgtcagcccctggctgc

SEQ ID NO: 1881 - DNA, 20 bp, Artificial Sequence
  chemically synthesized
cgtgtcagcccctggctgca

SEQ ID NO: 1882 - DNA, 20 bp, Artificial Sequence
  chemically synthesized
cctggctgcagggccccgtg

SEQ ID NO: 1883 - DNA, 20 bp, Artificial Sequence
  chemically synthesized
tggctgcagggccccgtgca

SEQ ID NO: 1884 - DNA, 20 bp, Artificial Sequence
  chemically synthesized
ggctgcagggccccgtgcag

SEQ ID NO: 1885 - DNA, 20 bp, Artificial Sequence
  chemically synthesized
gctgcagggccccgtgcaga

SEQ ID NO: 1886 - DNA, 20 bp, Artificial Sequence
  chemically synthesized
ctgcagggccccgtgcagag

SEQ ID NO: 1887 - DNA, 20 bp, Artificial Sequence
  chemically synthesized
tgcagggccccgtgcagagg

SEQ ID NO: 1888 - DNA, 20 bp, Artificial Sequence
  chemically synthesized
gccccgtgcagagggggcct

SEQ ID NO: 1889 - DNA, 20 bp, Artificial Sequence
  chemically synthesized
cagagggggcctcagtgaac

SEQ ID NO: 1890 - DNA, 20 bp, Artificial Sequence
  chemically synthesized
gagggggcctcagtgaactg

SEQ ID NO: 1891 - DNA, 20 bp, Artificial Sequence
  chemically synthesized
ctcagtgaactggagtgtga

SEQ ID NO: 1892 - DNA, 20 bp, Artificial Sequence
  chemically synthesized
tgaactggagtgtgacagcc

SEQ ID NO: 1893 - DNA, 20 bp, Artificial Sequence
  chemically synthesized
gaactggagtgtgacagcct

SEQ ID NO: 1894 - DNA, 20 bp, Artificial Sequence
  chemically synthesized
aactggagtgtgacagcctg

SEQ ID NO: 1895 - DNA, 20 bp, Artificial Sequence
  chemically synthesized
gagtgtgacagcctggggcc

SEQ ID NO: 1896 - DNA, 20 bp, Artificial Sequence
  chemically synthesized
agtgtgacagcctggggccc

SEQ ID NO: 1897 - DNA, 20 bp, Artificial Sequence
  chemically synthesized
cagcctggggcccaggcaca

SEQ ID NO: 1898 - DNA, 20 bp, Artificial Sequence
  chemically synthesized
agcctggggcccaggcacac

SEQ ID NO: 1899 - DNA, 20 bp, Artificial Sequence
  chemically synthesized
ggcccaggcacacaggtgtg

SEQ ID NO: 1900 - DNA, 20 bp, Artificial Sequence
  chemically synthesized
gtgcagctgtctcacccctc

SEQ ID NO: 1901 - DNA, 20 bp, Artificial Sequence
  chemically synthesized
tgcagctgtctcacccctct

SEQ ID NO: 1902 - DNA, 20 bp, Artificial Sequence
  chemically synthesized
cagctgtctcacccctctgg

SEQ ID NO: 1903 - DNA, 20 bp, Artificial Sequence
  chemically synthesized
acccctctgggagtcccgcc

SEQ ID NO: 1904 - DNA, 20 bp, Artificial Sequence
  chemically synthesized
cccctctgggagtcccgccc

SEQ ID NO: 1905 - DNA, 20 bp, Artificial Sequence
  chemically synthesized
ggagtcccgcccaggcccct

SEQ ID NO: 1906 - DNA, 20 bp, Artificial Sequence
  chemically synthesized
ccaggcccctgagtctgtcc

SEQ ID NO: 1907 - DNA, 20 bp, Artificial Sequence
  chemically synthesized
cccctgagtctgtcccagca

SEQ ID NO: 1908 - DNA, 20 bp, Artificial Sequence
  chemically synthesized
ccctgagtctgtcccagcac

SEQ ID NO: 1909 - DNA, 20 bp, Artificial Sequence
  chemically synthesized
cctgagtctgtcccagcaca

SEQ ID NO: 1910 - DNA, 20 bp, Artificial Sequence
  chemically synthesized
gagtctgtcccagcacaggg

SEQ ID NO: 1911 - DNA, 20 bp, Artificial Sequence
  chemically synthesized
tggccttcctccaccctgca

SEQ ID NO: 1912 - DNA, 20 bp, Artificial Sequence
  chemically synthesized
tcctccaccctgcatagccc

SEQ ID NO: 1913 - DNA, 20 bp, Artificial Sequence
  chemically synthesized
cctccaccctgcatagccct

SEQ ID NO: 1914 - DNA, 20 bp, Artificial Sequence
  chemically synthesized
cctgcatagccctgggccca

SEQ ID NO: 1915 - DNA, 20 bp, Artificial Sequence
  chemically synthesized
ggcccacggcttcgttcctg

SEQ ID NO: 1916 - DNA, 20 bp, Artificial Sequence
  chemically synthesized
cccacggcttcgttcctgca

SEQ ID NO: 1917 - DNA, 20 bp, Artificial Sequence
  chemically synthesized
cgttcctgcagagtatctgc

SEQ ID NO: 1918 - DNA, 20 bp, Artificial Sequence
  chemically synthesized
gttcctgcagagtatctgct

SEQ ID NO: 1919 - DNA, 20 bp, Artificial Sequence
  chemically synthesized
ttcctgcagagtatctgctg

SEQ ID NO: 1920 - DNA, 20 bp, Artificial Sequence
  chemically synthesized
ctgcagagtatctgctgggg

SEQ ID NO: 1921 - DNA, 20 bp, Artificial Sequence
  chemically synthesized
tatctgctggggtggtttcc

SEQ ID NO: 1922 - DNA, 20 bp, Artificial Sequence
  chemically synthesized
tggtttccgagcttgaccct

SEQ ID NO: 1923 - DNA, 20 bp, Artificial Sequence
  chemically synthesized
tttccgagcttgacccttgg

SEQ ID NO: 1924 - DNA, 20 bp, Artificial Sequence
  chemically synthesized
ttccgagcttgacccttgga

SEQ ID NO: 1925 - DNA, 20 bp, Artificial Sequence
  chemically synthesized
gcttgacccttggaaggacc

SEQ ID NO: 1926 - DNA, 20 bp, Artificial Sequence
  chemically synthesized
gacccttggaaggacctggc

SEQ ID NO: 1927 - DNA, 20 bp, Artificial Sequence
  chemically synthesized
acccttggaaggacctggct

SEQ ID NO: 1928 - DNA, 20 bp, Artificial Sequence
  chemically synthesized
ggaaggacctggctgggttt

SEQ ID NO: 1929 - DNA, 20 bp, Artificial Sequence
  chemically synthesized
gaaggacctggctgggttta

SEQ ID NO: 1930 - DNA, 20 bp, Artificial Sequence
  chemically synthesized
ggacctggctgggtttaagg

SEQ ID NO: 1931 - DNA, 20 bp, Artificial Sequence
  chemically synthesized
gacctggctgggtttaaggc

SEQ ID NO: 1932 - DNA, 20 bp, Artificial Sequence
  chemically synthesized
cctggctgggtttaaggcag

SEQ ID NO: 1933 - DNA, 20 bp, Artificial Sequence
  chemically synthesized
ctggctgggtttaaggcagg

SEQ ID NO: 1934 - DNA, 20 bp, Artificial Sequence
  chemically synthesized
tggctgggtttaaggcagga

SEQ ID NO: 1935 - DNA, 20 bp, Artificial Sequence
  chemically synthesized
ggctgggtttaaggcaggag

SEQ ID NO: 1936 - DNA, 20 bp, Artificial Sequence
  chemically synthesized
gggtttaaggcaggaggggc

SEQ ID NO: 1937 - DNA, 20 bp, Artificial Sequence
  chemically synthesized
ggtttaaggcaggaggggct

SEQ ID NO: 1938 - DNA, 20 bp, Artificial Sequence
  chemically synthesized
gtttaaggcaggaggggctg

SEQ ID NO: 1939 - DNA, 20 bp, Artificial Sequence
  chemically synthesized
tttaaggcaggaggggctgg

SEQ ID NO: 1940 - DNA, 20 bp, Artificial Sequence
  chemically synthesized
aggcaggaggggctgggggc

SEQ ID NO: 1941 - DNA, 20 bp, Artificial Sequence
  chemically synthesized
ggcaggaggggctgggggcc

SEQ ID NO: 1942 - DNA, 20 bp, Artificial Sequence
  chemically synthesized
gggctgggggccaggactcc

SEQ ID NO: 1943 - DNA, 20 bp, Artificial Sequence
  chemically synthesized
ggccaggactcctggctctg

SEQ ID NO: 1944 - DNA, 20 bp, Artificial Sequence
  chemically synthesized
gccaggactcctggctctga

SEQ ID NO: 1945 - DNA, 20 bp, Artificial Sequence
  chemically synthesized
caggactcctggctctgaag

SEQ ID NO: 1946 - DNA, 20 bp, Artificial Sequence
  chemically synthesized
aggactcctggctctgaagg

SEQ ID NO: 1947 - DNA, 20 bp, Artificial Sequence
  chemically synthesized
gactcctggctctgaaggag

SEQ ID NO: 1948 - DNA, 20 bp, Artificial Sequence
  chemically synthesized
actcctggctctgaaggagg

SEQ ID NO: 1949 - DNA, 20 bp, Artificial Sequence
  chemically synthesized
ctcctggctctgaaggagga

SEQ ID NO: 1950 - DNA, 20 bp, Artificial Sequence
  chemically synthesized
tcctggctctgaaggaggag

SEQ ID NO: 1951 - DNA, 20 bp, Artificial Sequence
  chemically synthesized
ggctctgaaggaggaggggc

SEQ ID NO: 1952 - DNA, 20 bp, Artificial Sequence
  chemically synthesized
aggggctggaacctcttccc

SEQ ID NO: 1953 - DNA, 20 bp, Artificial Sequence
  chemically synthesized
tggaacctcttccctagtct

SEQ ID NO: 1954 - DNA, 20 bp, Artificial Sequence
  chemically synthesized
ctcttccctagtctgagcac

SEQ ID NO: 1955 - DNA, 20 bp, Artificial Sequence
  chemically synthesized
ttccctagtctgagcactgg

SEQ ID NO: 1956 - DNA, 20 bp, Artificial Sequence
  chemically synthesized
agcactggaagcgccacctg

SEQ ID NO: 1957 - DNA, 20 bp, Artificial Sequence
  chemically synthesized
gcactggaagcgccacctgt

SEQ ID NO: 1958 - DNA, 20 bp, Artificial Sequence
  chemically synthesized
ctggaagcgccacctgtggg

SEQ ID NO: 1959 - DNA, 20 bp, Artificial Sequence
  chemically synthesized
gcgccacctgtgggtggtga

SEQ ID NO: 1960 - DNA, 20 bp, Artificial Sequence
  chemically synthesized
cgccacctgtgggtggtgac

SEQ ID NO: 1961 - DNA, 20 bp, Artificial Sequence
  chemically synthesized
gccacctgtgggtggtgacg

SEQ ID NO: 1962 - DNA, 20 bp, Artificial Sequence
  chemically synthesized
ccacctgtgggtggtgacgg

SEQ ID NO: 1963 - DNA, 20 bp, Artificial Sequence
  chemically synthesized
gggggttttgccgtgtctaa

SEQ ID NO: 1964 - DNA, 20 bp, Artificial Sequence
  chemically synthesized
ggggttttgccgtgtctaac

SEQ ID NO: 1965 - DNA, 20 bp, Artificial Sequence
  chemically synthesized
cgtgtctaacaggtaccatg

SEQ ID NO: 1966 - DNA, 20 bp, Artificial Sequence
  chemically synthesized
gtgtctaacaggtaccatgt

SEQ ID NO: 1967 - DNA, 20 bp, Artificial Sequence
  chemically synthesized
tgtctaacaggtaccatgtg

SEQ ID NO: 1968 - DNA, 20 bp, Artificial Sequence
  chemically synthesized
ccatgtggggttcccgcacc

SEQ ID NO: 1969 - DNA, 20 bp, Artificial Sequence
  chemically synthesized
tggggttcccgcacccagat

SEQ ID NO: 1970 - DNA, 20 bp, Artificial Sequence
  chemically synthesized
ggttcccgcacccagatgag

SEQ ID NO: 1971 - DNA, 20 bp, Artificial Sequence
  chemically synthesized
ccccgttcacttcctgtttg

SEQ ID NO: 1972 - DNA, 20 bp, Artificial Sequence
  chemically synthesized
gttcacttcctgtttgcaga

SEQ ID NO: 1973 - DNA, 20 bp, Artificial Sequence
  chemically synthesized
acttcctgtttgcagatagc

SEQ ID NO: 1974 - DNA, 20 bp, Artificial Sequence
  chemically synthesized
cttcctgtttgcagatagcc

SEQ ID NO: 1975 - DNA, 20 bp, Artificial Sequence
  chemically synthesized
tcctgtttgcagatagccag

SEQ ID NO: 1976 - DNA, 20 bp, Artificial Sequence
  chemically synthesized
gatagccaggagtcctttcg

SEQ ID NO: 1977 - DNA, 20 bp, Artificial Sequence
  chemically synthesized
gtcctttcgtggtttccact

SEQ ID NO: 1978 - DNA, 20 bp, Artificial Sequence
  chemically synthesized
gtggtttccactgagcactg

SEQ ID NO: 1979 - DNA, 20 bp, Artificial Sequence
  chemically synthesized
tggtttccactgagcactga

SEQ ID NO: 1980 - DNA, 20 bp, Artificial Sequence
  chemically synthesized
tccactgagcactgaaggcc

SEQ ID NO: 1981 - DNA, 20 bp, Artificial Sequence
  chemically synthesized
ctgagcactgaaggcctggc

SEQ ID NO: 1982 - DNA, 20 bp, Artificial Sequence
  chemically synthesized
ggcctggccggcctgaccac

SEQ ID NO: 1983 - DNA, 20 bp, Artificial Sequence
  chemically synthesized
gcctggccggcctgaccact

SEQ ID NO: 1984 - DNA, 20 bp, Artificial Sequence
  chemically synthesized
cggcctgaccactgggcaac

SEQ ID NO: 1985 - DNA, 20 bp, Artificial Sequence
  chemically synthesized
ggcctgaccactgggcaacc

SEQ ID NO: 1986 - DNA, 20 bp, Artificial Sequence
  chemically synthesized
gcaaccaggcgtatcttaaa

SEQ ID NO: 1987 - DNA, 20 bp, Artificial Sequence
  chemically synthesized
ccaggcgtatcttaaacagc

SEQ ID NO: 1988 - DNA, 20 bp, Artificial Sequence
  chemically synthesized
ggcgtatcttaaacagccag

SEQ ID NO: 1989 - DNA, 20 bp, Artificial Sequence
  chemically synthesized
tatcttaaacagccagtggc

SEQ ID NO: 1990 - DNA, 20 bp, Artificial Sequence
  chemically synthesized
tcttaaacagccagtggcca

SEQ ID NO: 1991 - DNA, 20 bp, Artificial Sequence
  chemically synthesized
cttaaacagccagtggccag

SEQ ID NO: 1992 - DNA, 20 bp, Artificial Sequence
  chemically synthesized
agccagtggccagaggctgt

SEQ ID NO: 1993 - DNA, 20 bp, Artificial Sequence
  chemically synthesized
gccagtggccagaggctgtt

SEQ ID NO: 1994 - DNA, 20 bp, Artificial Sequence
  chemically synthesized
ggtcattttccccactgtcc

SEQ ID NO: 1995 - DNA, 20 bp, Artificial Sequence
  chemically synthesized
ctgtcctagcaccgtgtccc

SEQ ID NO: 1996 - DNA, 20 bp, Artificial Sequence
  chemically synthesized
tgtccctggatctgttttcg

SEQ ID NO: 1997 - DNA, 20 bp, Artificial Sequence
  chemically synthesized
tctgttttcgtggctccctc

SEQ ID NO: 1998 - DNA, 20 bp, Artificial Sequence
  chemically synthesized
tgttttcgtggctccctctg

SEQ ID NO: 1999 - DNA, 20 bp, Artificial Sequence
  chemically synthesized
cctctggagtcccgacttgc

SEQ ID NO: 2000 - DNA, 20 bp, Artificial Sequence
  chemically synthesized
ctctggagtcccgacttgct

SEQ ID NO: 2001 - DNA, 20 bp, Artificial Sequence
  chemically synthesized
cccgacttgctgggacaccg

SEQ ID NO: 2002 - DNA, 20 bp, Artificial Sequence
  chemically synthesized
acttgctgggacaccgtggc

SEQ ID NO: 2003 - DNA, 20 bp, Artificial Sequence
  chemically synthesized
cttgctgggacaccgtggct

SEQ ID NO: 2004 - DNA, 20 bp, Artificial Sequence
  chemically synthesized
ttgctgggacaccgtggctg

SEQ ID NO: 2005 - DNA, 20 bp, Artificial Sequence
  chemically synthesized
ctgggacaccgtggctgggg

SEQ ID NO: 2006 - DNA, 20 bp, Artificial Sequence
  chemically synthesized
tgggacaccgtggctggggt

SEQ ID NO: 2007 - DNA, 20 bp, Artificial Sequence
  chemically synthesized
caccgtggctggggtaggtg

SEQ ID NO: 2008 - DNA, 20 bp, Artificial Sequence
  chemically synthesized
gctggggtaggtgcggctga

SEQ ID NO: 2009 - DNA, 20 bp, Artificial Sequence
  chemically synthesized
tgacggctgtttcccacccc

SEQ ID NO: 2010 - DNA, 20 bp, Artificial Sequence
  chemically synthesized
gacggctgtttcccaccccc

SEQ ID NO: 2011 - DNA, 20 bp, Artificial Sequence
  chemically synthesized
acccccaggcctgcattgat

SEQ ID NO: 2012 - DNA, 20 bp, Artificial Sequence
  chemically synthesized
ggcctgcattgatgagaacc

SEQ ID NO: 2013 - DNA, 20 bp, Artificial Sequence
  chemically synthesized
cctgcattgatgagaacctg

SEQ ID NO: 2014 - DNA, 20 bp, Artificial Sequence
  chemically synthesized
ctgcattgatgagaacctgg

SEQ ID NO: 2015 - DNA, 20 bp, Artificial Sequence
  chemically synthesized
cattgatgagaacctggagg

SEQ ID NO: 2016 - DNA, 20 bp, Artificial Sequence
  chemically synthesized
cctggaggtggtgcgcttct

SEQ ID NO: 2017 - DNA, 20 bp, Artificial Sequence
  chemically synthesized
ggaggtggtgcgcttcttgg

SEQ ID NO: 2018 - DNA, 20 bp, Artificial Sequence
  chemically synthesized
aggtggtgcgcttcttggtg

SEQ ID NO: 2019 - DNA, 20 bp, Artificial Sequence
  chemically synthesized
tggtgcgcttcttggtggag

SEQ ID NO: 2020 - DNA, 20 bp, Artificial Sequence
  chemically synthesized
ggtgcgcttcttggtggagc

SEQ ID NO: 2021 - DNA, 20 bp, Artificial Sequence
  chemically synthesized
gtgcgcttcttggtggagca

SEQ ID NO: 2022 - DNA, 20 bp, Artificial Sequence
  chemically synthesized
agcagggcgccactgtgaac

SEQ ID NO: 2023 - DNA, 20 bp, Artificial Sequence
  chemically synthesized
gcagggcgccactgtgaacc

SEQ ID NO: 2024 - DNA, 20 bp, Artificial Sequence
  chemically synthesized
gggcgccactgtgaaccagg

SEQ ID NO: 2025 - DNA, 20 bp, Artificial Sequence
  chemically synthesized
ctgtgaaccaggcagacaac

SEQ ID NO: 2026 - DNA, 20 bp, Artificial Sequence
  chemically synthesized
tgtgaaccaggcagacaacg

SEQ ID NO: 2027 - DNA, 20 bp, Artificial Sequence
  chemically synthesized
gtgaaccaggcagacaacga

SEQ ID NO: 2028 - DNA, 20 bp, Artificial Sequence
  chemically synthesized
accaggcagacaacgagggc

SEQ ID NO: 2029 - DNA, 20 bp, Artificial Sequence
  chemically synthesized
gggctggacgccactgcacg

SEQ ID NO: 2030 - DNA, 20 bp, Artificial Sequence
  chemically synthesized
ctgcacgtggccgcctcctg

SEQ ID NO: 2031 - DNA, 20 bp, Artificial Sequence
  chemically synthesized
ggccgcctcctgtggctacc

SEQ ID NO: 2032 - DNA, 20 bp, Artificial Sequence
  chemically synthesized
tgtggctacctagatatcgc

SEQ ID NO: 2033 - DNA, 20 bp, Artificial Sequence
  chemically synthesized
gttctcatcaatgcaggcct

SEQ ID NO: 2034 - DNA, 20 bp, Artificial Sequence
  chemically synthesized
gaagggagggggcttctcat

SEQ ID NO: 2035 - DNA, 20 bp, Artificial Sequence
  chemically synthesized
gcccctcctccttcagagcc

SEQ ID NO: 2036 - DNA, 20 bp, Artificial Sequence
  chemically synthesized
aaacccagccaggtccttcc

SEQ ID NO: 2037 - DNA, 20 bp, Artificial Sequence
  chemically synthesized
gccgtgggcccagggctatg

SEQ ID NO: 2038 - DNA, 20 bp, Artificial Sequence
  chemically synthesized
ggcctgggcgggactcccag

SEQ ID NO: 2039 - DNA, 20 bp, Artificial Sequence
  chemically synthesized
ccgtttctcattcttccctt

SEQ ID NO: 2040 - DNA, 20 bp, Artificial Sequence
  chemically synthesized
gggacaaaagccgaagtcca

SEQ ID NO: 2041 - DNA, 20 bp, Artificial Sequence
  chemically synthesized
tgccccaggccttgtggaca

SEQ ID NO: 2042 - DNA, 20 bp, Artificial Sequence
  chemically synthesized
acctgaactggagctgagga

SEQ ID NO: 2043 - DNA, 20 bp, Artificial Sequence
  chemically synthesized
aagctaaactcctagatcca

SEQ ID NO: 2044 - DNA, 20 bp, Artificial Sequence
  chemically synthesized
ggccgcacgtgccctgggaa

SEQ ID NO: 2045 - DNA, 20 bp, Artificial Sequence
  chemically synthesized
ggcctgggcaccagggactc

SEQ ID NO: 2046 - DNA, 20 bp, Artificial Sequence
  chemically synthesized
gcccttccgccctcagatga

SEQ ID NO: 2047 - DNA, 20 bp, Artificial Sequence
  chemically synthesized
gcctctccccattcagaccc

SEQ ID NO: 2048 - DNA, 20 bp, Artificial Sequence
  chemically synthesized
gcccctcctccctcagaccc

SEQ ID NO: 2049 - DNA, 20 bp, Artificial Sequence
  chemically synthesized
gcccctcctccctcggaccc

SEQ ID NO: 2050 - DNA, 20 bp, Artificial Sequence
  chemically synthesized
gtccctccaccctcagaccc

SEQ ID NO: 2051 - DNA, 20 bp, Artificial Sequence
  chemically synthesized
gcccctcctccctcggaccc

SEQ ID NO: 2052 - DNA, 20 bp, Artificial Sequence
  chemically synthesized
gctcttctctgttcagccct

SEQ ID NO: 2053 - DNA, 20 bp, Artificial Sequence
  chemically synthesized
cccctagccactaaggcaat

SEQ ID NO: 2054 - DNA, 20 bp, Artificial Sequence
  chemically synthesized
cactaaggcaattggggtgc

SEQ ID NO: 2055 - DNA, 20 bp, Artificial Sequence
  chemically synthesized
ttggggtgcaggaatggggg

SEQ ID NO: 2056 - DNA, 20 bp, Artificial Sequence
  chemically synthesized
aagtggttgataaacccacg

SEQ ID NO: 2057 - DNA, 20 bp, Artificial Sequence
  chemically synthesized
gcttggggacctgcctggag

SEQ ID NO: 2058 - DNA, 20 bp, Artificial Sequence
  chemically synthesized
cccaggtggagaaactggcc

SEQ ID NO: 2059 - DNA, 20 bp, Artificial Sequence
  chemically synthesized
ggagaaactggccgggaatc

SEQ ID NO: 2060 - DNA, 20 bp, Artificial Sequence
  chemically synthesized
atccctgttttcctaggact

SEQ ID NO: 2061 - DNA, 20 bp, Artificial Sequence
  chemically synthesized
ttggccacgtaacctgagaa

SEQ ID NO: 2062 - DNA, 20 bp, Artificial Sequence
  chemically synthesized
ccccaatgctccaggcctcc

SEQ ID NO: 2063 - DNA, 20 bp, Artificial Sequence
  chemically synthesized
aggcctcctgggataccccg

SEQ ID NO: 2064 - DNA, 20 bp, Artificial Sequence
  chemically synthesized
ctcctgggataccccgaaga

SEQ ID NO: 2065 - DNA, 20 bp, Artificial Sequence
  chemically synthesized
cagtcaccccacagttggag

SEQ ID NO: 2066 - DNA, 20 bp, Artificial Sequence
  chemically synthesized
ggcagcctggtagacagggc

SEQ ID NO: 2067 - DNA, 20 bp, Artificial Sequence
  chemically synthesized
agggctggggtggcctctcg

SEQ ID NO: 2068 - DNA, 20 bp, Artificial Sequence
  chemically synthesized
taggtggcctggggcctctg

SEQ ID NO: 2069 - DNA, 20 bp, Artificial Sequence
  chemically synthesized
tctgggggatgcaggggaag

SEQ ID NO: 2070 - DNA, 20 bp, Artificial Sequence
  chemically synthesized
gaagggggatgcaggggaac

SEQ ID NO: 2071 - DNA, 20 bp, Artificial Sequence
  chemically synthesized
cgggaccctgctctgggcgg

SEQ ID NO: 2072 - DNA, 20 bp, Artificial Sequence
  chemically synthesized
tggggactctttaaggaaag

SEQ ID NO: 2073 - DNA, 20 bp, Artificial Sequence
  chemically synthesized
gaaggatggagaaagagaaa

SEQ ID NO: 2074 - DNA, 20 bp, Artificial Sequence
  chemically synthesized
ggacgcaccattctcacaaa

SEQ ID NO: 2075 - DNA, 20 bp, Artificial Sequence
  chemically synthesized
gtgtaaggaagctgcagcac

SEQ ID NO: 2076 - DNA, 20 bp, Artificial Sequence
  chemically synthesized
gagcagctcaggttctggga

SEQ ID NO: 2077 - DNA, 20 bp, Artificial Sequence
  chemically synthesized
ggttctgggagagggtagcg

SEQ ID NO: 2078 - DNA, 20 bp, Artificial Sequence
  chemically synthesized
ccctgccaagctctccctcc

SEQ ID NO: 2079 - DNA, 20 bp, Artificial Sequence
  chemically synthesized
gagagatggctccaggaaat

SEQ ID NO: 2080 - DNA, 20 bp, Artificial Sequence
  chemically synthesized
tgggggtgtgtcaccagata

SEQ ID NO: 2081 - DNA, 20 bp, Artificial Sequence
  chemically synthesized
gaatctgcctaacaggaggt

SEQ ID NO: 2082 - DNA, 20 bp, Artificial Sequence
  chemically synthesized
gactaggaaggaggaggcct

SEQ ID NO: 2083 - DNA, 20 bp, Artificial Sequence
  chemically synthesized
tgtccctagtggccccactg

SEQ ID NO: 2084 - DNA, 20 bp, Artificial Sequence
  chemically synthesized
gagccacattaaccggccct

SEQ ID NO: 2085 - DNA, 20 bp, Artificial Sequence
  chemically synthesized
gtggtcccagctcggggaca

SEQ ID NO: 2086 - DNA, 20 bp, Artificial Sequence
  chemically synthesized
cctgaagtggacataggggc

SEQ ID NO: 2087 - DNA, 20 bp, Artificial Sequence
  chemically synthesized
gcacagactagagaggtaag

SEQ ID NO: 2088 - DNA, 20 bp, Artificial Sequence
  chemically synthesized
aggggagctgcccaaatgaa

SEQ ID NO: 2089 - DNA, 20 bp, Artificial Sequence
  chemically synthesized
tgaaaggagtgagaggtgac

SEQ ID NO: 2090 - DNA, 20 bp, Artificial Sequence
  chemically synthesized
gacccgaatccacaggagaa

SEQ ID NO: 2091 - DNA, 20 bp, Artificial Sequence
  chemically synthesized
tgtccaggcaaagaaagcaa

SEQ ID NO: 2092 - DNA, 20 bp, Artificial Sequence
  chemically synthesized
ggtggctaaagccagggaga

SEQ ID NO: 2093 - DNA, 20 bp, Artificial Sequence
  chemically synthesized
gccagggagacggggtactt

SEQ ID NO: 2094 - DNA, 20 bp, Artificial Sequence
  chemically synthesized
gagaaggaaaagggaaccca

SEQ ID NO: 2095 - DNA, 20 bp, Artificial Sequence
  chemically synthesized
cccagcgagtgaagacggca

SEQ ID NO: 2096 - DNA, 20 bp, Artificial Sequence
  chemically synthesized
cgagtgaagacggcatgggg

SEQ ID NO: 2097 - DNA, 20 bp, Artificial Sequence
  chemically synthesized
ggagaggacccagacacggg

SEQ ID NO: 2098 - DNA, 20 bp, Artificial Sequence
  chemically synthesized
agcagagagcaaggggaaga

SEQ ID NO: 2099 - DNA, 20 bp, Artificial Sequence
  chemically synthesized
acctgaaggaggcggcaggg

SEQ ID NO: 2100 - DNA, 20 bp, Artificial Sequence
  chemically synthesized
agcggcacaggcccagggga

SEQ ID NO: 2101 - DNA, 20 bp, Artificial Sequence
  chemically synthesized
gagacggcagcgttagaggg

SEQ ID NO: 2102 - DNA, 20 bp, Artificial Sequence
  chemically synthesized
ggaagaggggaagtcgaggg

SEQ ID NO: 2103 - DNA, 20 bp, Artificial Sequence
  chemically synthesized
gggatggtaaggaggactgc

SEQ ID NO: 2104 - DNA, 20 bp, Artificial Sequence
  chemically synthesized
aaagcgactccaatgcggaa

SEQ ID NO: 2105 - DNA, 20 bp, Artificial Sequence
  chemically synthesized
cggaagagagtaggtcgaag

SEQ ID NO: 2106 - DNA, 20 bp, Artificial Sequence
  chemically synthesized
aatggtaaggaggcctgggg

SEQ ID NO: 2107 - DNA, 20 bp, Artificial Sequence
  chemically synthesized
ctggggcagagtggtcagca

SEQ ID NO: 2108 - DNA, 20 bp, Artificial Sequence
  chemically synthesized
aagcggctccaattcggaag

SEQ ID NO: 2109 - DNA, 20 bp, Artificial Sequence
  chemically synthesized
cggaagtggggtggtcgaag

SEQ ID NO: 2110 - DNA, 20 bp, Artificial Sequence
  chemically synthesized
aatggtaagggggactggga

SEQ ID NO: 2111 - DNA, 20 bp, Artificial Sequence
  chemically synthesized
actgggacggggtgtcagca

SEQ ID NO: 2112 - DNA, 20 bp, Artificial Sequence
  chemically synthesized
ccagggccaggaacgacggg

SEQ ID NO: 2113 - DNA, 20 bp, Artificial Sequence
  chemically synthesized
cgagactggcaacggggaag

SEQ ID NO: 2114 - DNA, 20 bp, Artificial Sequence
  chemically synthesized
atgccccaggtggcgcagca

SEQ ID NO: 2115 - DNA, 20 bp, Artificial Sequence
  chemically synthesized
gctgataccgtcggcgttgg

SEQ ID NO: 2116 - DNA, 20 bp, Artificial Sequence
  chemically synthesized
gcgggcgggcggcggcgcgg

SEQ ID NO: 2117 - DNA, 20 bp, Artificial Sequence
  chemically synthesized
gtcgagctcggcgccggggc

SEQ ID NO: 2118 - DNA, 20 bp, Artificial Sequence
  chemically synthesized
cgggcggtgcgatgtccgga

SEQ ID NO: 2119 - DNA, 20 bp, Artificial Sequence
  chemically synthesized
cgtccgcttcgagcgcgccg

SEQ ID NO: 2120 - DNA, 20 bp, Artificial Sequence
  chemically synthesized
ccccttcgaccaccccactt

SEQ ID NO: 2121 - DNA, 20 bp, Artificial Sequence
  chemically synthesized
cgacctactctcttccgcat

SEQ ID NO: 2122 - DNA, 20 bp, Artificial Sequence
  chemically synthesized
gcgctgccctcctctcgccc

SEQ ID NO: 2123 - DNA, 20 bp, Artificial Sequence
  chemically synthesized
ctaacgctgccgtctctctc

SEQ ID NO: 2124 - DNA, 20 bp, Artificial Sequence
  chemically synthesized
ttctgtctgcagcttgtggc

SEQ ID NO: 2125 - DNA, 20 bp, Artificial Sequence
  chemically synthesized
tctctgctgtgttgctgccc

SEQ ID NO: 2126 - DNA, 20 bp, Artificial Sequence
  chemically synthesized
caccacgtgatgtcctctga

SEQ ID NO: 2127 - DNA, 20 bp, Artificial Sequence
  chemically synthesized
tgagcggatcctccccgtgt

SEQ ID NO: 2128 - DNA, 20 bp, Artificial Sequence
  chemically synthesized
ccccatgccgtcttcactcg

SEQ ID NO: 2129 - DNA, 20 bp, Artificial Sequence
  chemically synthesized
ctgtgccatctctcgtttct

SEQ ID NO: 2130 - DNA, 20 bp, Artificial Sequence
  chemically synthesized
tcttaggatggccttctccg

SEQ ID NO: 2131 - DNA, 20 bp, Artificial Sequence
  chemically synthesized
cctggacaccccgttctcct

SEQ ID NO: 2132 - DNA, 20 bp, Artificial Sequence
  chemically synthesized
caccccgttctcctgtggat

SEQ ID NO: 2133 - DNA, 20 bp, Artificial Sequence
  chemically synthesized
cccctgtcatggcatcttcc

SEQ ID NO: 2134 - DNA, 20 bp, Artificial Sequence
  chemically synthesized
acagcatgtttgctgcctcc

SEQ ID NO: 2135 - DNA, 20 bp, Artificial Sequence
  chemically synthesized
cggttaatgtggctctggtt

SEQ ID NO: 2136 - DNA, 20 bp, Artificial Sequence
  chemically synthesized
cacagtggggccactaggga

SEQ ID NO: 2137 - DNA, 20 bp, Artificial Sequence
  chemically synthesized
tccttcctagtctcctgata

SEQ ID NO: 2138 - DNA, 20 bp, Artificial Sequence
  chemically synthesized
ttgcttacgatggagccaga

SEQ ID NO: 2139 - DNA, 20 bp, Artificial Sequence
  chemically synthesized
ctgggagggagagcttggca

SEQ ID NO: 2140 - DNA, 20 bp, Artificial Sequence
  chemically synthesized
cagggggtgggagggaaggg

SEQ ID NO: 2141 - DNA, 20 bp, Artificial Sequence
  chemically synthesized
gcagtttggaaaaacaaaat

SEQ ID NO: 2142 - DNA, 20 bp, Artificial Sequence
  chemically synthesized
aaaatcagaataagttggtc

SEQ ID NO: 2143 - DNA, 20 bp, Artificial Sequence
  chemically synthesized
ggcagggctgtggtgaggag

SEQ ID NO: 2144 - DNA, 20 bp, Artificial Sequence
  chemically synthesized
gtgtggaaaactccctttgt

SEQ ID NO: 2145 - DNA, 20 bp, Artificial Sequence
  chemically synthesized
tctccatccttctttcctta

SEQ ID NO: 2146 - DNA, 20 bp, Artificial Sequence
  chemically synthesized
acatattcctccgcccagag

SEQ ID NO: 2147 - DNA, 20 bp, Artificial Sequence
  chemically synthesized
taaggccctgctctgggctt

SEQ ID NO: 2148 - DNA, 20 bp, Artificial Sequence
  chemically synthesized
cctgctctgggcttctgggt

SEQ ID NO: 2149 - DNA, 20 bp, Artificial Sequence
  chemically synthesized
ctctcctgccccttccctac

SEQ ID NO: 2150 - DNA, 20 bp, Artificial Sequence
  chemically synthesized
cctgtctaccaggctgcctt

SEQ ID NO: 2151 - DNA, 20 bp, Artificial Sequence
  chemically synthesized
tctaccaggctgccttttgg

SEQ ID NO: 2152 - DNA, 20 bp, Artificial Sequence
  chemically synthesized
ggtggattctcctccaactg

SEQ ID NO: 2153 - DNA, 20 bp, Artificial Sequence
  chemically synthesized
tgcttggcaaactcactctt

SEQ ID NO: 2154 - DNA, 20 bp, Artificial Sequence
  chemically synthesized
tcccaggaggcctggagcat

SEQ ID NO: 2155 - DNA, 20 bp, Artificial Sequence
  chemically synthesized
cctggagcattggggtgggc

SEQ ID NO: 2156 - DNA, 20 bp, Artificial Sequence
  chemically synthesized
tgggctggggttcagagagg

SEQ ID NO: 2157 - DNA, 20 bp, Artificial Sequence
  chemically synthesized
gtggccaagaagcaggggag

SEQ ID NO: 2158 - DNA, 20 bp, Artificial Sequence
  chemically synthesized
aagaagcaggggagctgggt

SEQ ID NO: 2159 - DNA, 20 bp, Artificial Sequence
  chemically synthesized
gagctgggtttgggtcaggt

SEQ ID NO: 2160 - DNA, 20 bp, Artificial Sequence
  chemically synthesized
gtttgggtcaggtctgggtg

SEQ ID NO: 2161 - DNA, 20 bp, Artificial Sequence
  chemically synthesized
accctcagtcctaggaaaac

SEQ ID NO: 2162 - DNA, 20 bp, Artificial Sequence
  chemically synthesized
gggatggttggtcactgtct

SEQ ID NO: 2163 - DNA, 20 bp, Artificial Sequence
  chemically synthesized
tgtggctgttcccaagttct

SEQ ID NO: 2164 - DNA, 20 bp, Artificial Sequence
  chemically synthesized
aagttcttagggtaccccac

SEQ ID NO: 2165 - DNA, 20 bp, Artificial Sequence
  chemically synthesized
cccaattgccttagtggcta

SEQ ID NO: 2166 - DNA, 20 bp, Artificial Sequence
  chemically synthesized
gtggctagggggttgggggc

SEQ ID NO: 2167 - DNA, 20 bp, Artificial Sequence
  chemically synthesized
agagtaggaggggctggagc

SEQ ID NO: 2168 - DNA, 20 bp, Artificial Sequence
  chemically synthesized
agagctgggggcctgggctc

SEQ ID NO: 2169 - DNA, 20 bp, Artificial Sequence
  chemically synthesized
aggggctggggcctggactc

SEQ ID NO: 2170 - DNA, 20 bp, Artificial Sequence
  chemically synthesized
aggggctggggcctggactc

SEQ ID NO: 2171 - DNA, 20 bp, Artificial Sequence
  chemically synthesized
gggcctggactcctgggtct

SEQ ID NO: 2172 - DNA, 20 bp, Artificial Sequence
  chemically synthesized
gggactgggggcctggactc

SEQ ID NO: 2173 - DNA, 20 bp, Artificial Sequence
  chemically synthesized
aggggctggggcctggactc

SEQ ID NO: 2174 - DNA, 20 bp, Artificial Sequence
  chemically synthesized
ggggctgggggcctggactt

SEQ ID NO: 2175 - DNA, 20 bp, Artificial Sequence
  chemically synthesized
gcggggctgggcctggaccc

SEQ ID NO: 2176 - DNA, 20 bp, Artificial Sequence
  chemically synthesized
ctgggcctggacccctgggt

SEQ ID NO: 2177 - DNA, 20 bp, Artificial Sequence
  chemically synthesized
aagggctggggcctggcctc

SEQ ID NO: 2178 - DNA, 20 bp, Artificial Sequence
  chemically synthesized
ctggggcctggcctcctggg

SEQ ID NO: 2179 - DNA, 20 bp, Artificial Sequence
  chemically synthesized
gcctcctgggttgaatgggg

SEQ ID NO: 2180 - DNA, 20 bp, Artificial Sequence
  chemically synthesized
gaggggttgggcctggactc

SEQ ID NO: 2181 - DNA, 20 bp, Artificial Sequence
  chemically synthesized
aggcctcaggcatctttcac

SEQ ID NO: 2182 - DNA, 20 bp, Artificial Sequence
  chemically synthesized
ctcccctatcgccatgacaa

SEQ ID NO: 2183 - DNA, 20 bp, Artificial Sequence
  chemically synthesized
actgggtggaaataaacgag

SEQ ID NO: 2184 - DNA, 20 bp, Artificial Sequence
  chemically synthesized
acgtgcggccccttcacagc

SEQ ID NO: 2185 - DNA, 20 bp, Artificial Sequence
  chemically synthesized
ttggagaggtgagggacttg

SEQ ID NO: 2186 - DNA, 20 bp, Artificial Sequence
  chemically synthesized
cttggggggtaatttatccc

SEQ ID NO: 2187 - DNA, 20 bp, Artificial Sequence
  chemically synthesized
gtaatttatcccgtggatct

SEQ ID NO: 2188 - DNA, 20 bp, Artificial Sequence
  chemically synthesized
aagttttggacccctaaggg

SEQ ID NO: 2189 - DNA, 20 bp, Artificial Sequence
  chemically synthesized
cagagggggcctcagtgaac

SEQ ID NO: 2190 - DNA, 20 bp, Artificial Sequence
  chemically synthesized
tgcagctgtctcacccctct

SEQ ID NO: 2191 - DNA, 20 bp, Artificial Sequence
  chemically synthesized
tgggagtcccgcccaggccc

SEQ ID NO: 2192 - DNA, 20 bp, Artificial Sequence
  chemically synthesized
cccctgagtctgtcccagca

SEQ ID NO: 2193 - DNA, 20 bp, Artificial Sequence
  chemically synthesized
ggcccacggcttcgttcctg

SEQ ID NO: 2194 - DNA, 20 bp, Artificial Sequence
  chemically synthesized
cgttcctgcagagtatctgc

SEQ ID NO: 2195 - DNA, 20 bp, Artificial Sequence
  chemically synthesized
tgacccttggaaggacctgg

SEQ ID NO: 2196 - DNA, 20 bp, Artificial Sequence
  chemically synthesized
gagcactggaagcgccacct

SEQ ID NO: 2197 - DNA, 20 bp, Artificial Sequence
  chemically synthesized
cgccacctgtgggtggtgac

SEQ ID NO: 2198 - DNA, 20 bp, Artificial Sequence
  chemically synthesized
cgtgtctaacaggtaccatg

SEQ ID NO: 2199 - DNA, 20 bp, Artificial Sequence
  chemically synthesized
cttcctgtttgcagatagcc

SEQ ID NO: 2200 - DNA, 20 bp, Artificial Sequence
  chemically synthesized
cagccagtggccagaggctg

SEQ ID NO: 2201 - DNA, 20 bp, Artificial Sequence
  chemically synthesized
actgtcctagcaccgtgtcc

SEQ ID NO: 2202 - DNA, 20 bp, Artificial Sequence
  chemically synthesized
tctgttttcgtggctccctc

SEQ ID NO: 2203 - DNA, 20 bp, Artificial Sequence
  chemically synthesized
acttgctgggacaccgtggc

SEQ ID NO: 2204 - DNA, 20 bp, Artificial Sequence
  chemically synthesized
agctcttctctgttcagccc

SEQ ID NO: 2205 - DNA, 20 bp, Artificial Sequence
  chemically synthesized
gcctggagaaggatgcagga

SEQ ID NO: 2206 - DNA, 20 bp, Artificial Sequence
  chemically synthesized
cgagaaacacagccccaggt

SEQ ID NO: 2207 - DNA, 20 bp, Artificial Sequence
  chemically synthesized
gcagtcaccccacagttgga

SEQ ID NO: 2208 - DNA, 20 bp, Artificial Sequence
  chemically synthesized
ctctttaaggaaagaaggat

SEQ ID NO: 2209 - DNA, 20 bp, Artificial Sequence
  chemically synthesized
aaggaaagaaggatggagaa

SEQ ID NO: 2210 - DNA, 20 bp, Artificial Sequence
  chemically synthesized
ggaacaatataaattgggga

SEQ ID NO: 2211 - DNA, 20 bp, Artificial Sequence
  chemically synthesized
ggagaacggggtgtccaggc

SEQ ID NO: 2212 - DNA, 20 bp, Artificial Sequence
  chemically synthesized
acggggtactttggggttgt

SEQ ID NO: 2213 - DNA, 20 bp, Artificial Sequence
  chemically synthesized
tccgtcggagaaggccatcc

SEQ ID NO: 2214 - DNA, 20 bp, Artificial Sequence
  chemically synthesized
acccaggccacaagctgcag

SEQ ID NO: 2215 - DNA, 20 bp, Artificial Sequence
  chemically synthesized
aagcggcacaggcccagggg

SEQ ID NO: 2216 - DNA, 20 bp, Artificial Sequence
  chemically synthesized
caggggagagaatgcaggtc

SEQ ID NO: 2217 - DNA, 20 bp, Artificial Sequence
  chemically synthesized
cactagggacaggattggtg

SEQ ID NO: 2218 - DNA, 20 bp, Artificial Sequence
  chemically synthesized
agcagtttggaaaaacaaaa

SEQ ID NO: 2219 - DNA, 20 bp, Artificial Sequence
  chemically synthesized
cgtgtggaaaactccctttg

SEQ ID NO: 2220 - DNA, 20 bp, Artificial Sequence
  chemically synthesized
caagttttggacccctaagg

SEQ ID NO: 2221 - DNA, 20 bp, Artificial Sequence
  chemically synthesized
ttggacccctaagggaagaa

SEQ ID NO: 2222 - DNA, 20 bp, Artificial Sequence
  chemically synthesized
gggactccagagggagccac

SEQ ID NO: 2223 - DNA, 20 bp, Artificial Sequence
  chemically synthesized
atggtacctgttagacacgg

SEQ ID NO: 2224 - DNA, 20 bp, Artificial Sequence
  chemically synthesized
tcattcttcccttaggggtc

SEQ ID NO: 2225 - DNA, 20 bp, Artificial Sequence
  chemically synthesized
aggactgagggtttcagtgc

SEQ ID NO: 2226 - DNA, 20 bp, Artificial Sequence
  chemically synthesized
tactggccttatctcacagg

SEQ ID NO: 2227 - DNA, 20 bp, Artificial Sequence
  chemically synthesized
ggtactttggggttgtccag

SEQ ID NO: 2228 - DNA, 20 bp, Artificial Sequence
  chemically synthesized
caagaggagaagcagtttgg

SEQ ID NO: 2229 - DNA, 20 bp, Artificial Sequence
  chemically synthesized
aggaggggggtgtccgtgtg

SEQ ID NO: 2230 - DNA, 20 bp, Artificial Sequence
  chemically synthesized
actgaaaccctcagtcctag

SEQ ID NO: 2231 - DNA, 20 bp, Artificial Sequence
  chemically synthesized
cccaacagcctctggccact

SEQ ID NO: 2232 - DNA, 20 bp, Artificial Sequence
  chemically synthesized
ggaagtgaacggggaaggga

SEQ ID NO: 2233 - DNA, 20 bp, Artificial Sequence
  chemically synthesized
cccccgtcaccacccacagg

SEQ ID NO: 2234 - DNA, 20 bp, Artificial Sequence
  chemically synthesized
agccaggggctgacacgggc

SEQ ID NO: 2235 - DNA, 20 bp, Artificial Sequence
  chemically synthesized
ctgggaacgggatgaactcg

SEQ ID NO: 2236 - DNA, 20 bp, Artificial Sequence
  chemically synthesized
gaacagccacagcagggggg

SEQ ID NO: 2237 - DNA, 20 bp, Artificial Sequence
  chemically synthesized
cagagacagtgaccaaccat

SEQ ID NO: 2238 - DNA, 20 bp, Artificial Sequence
  chemically synthesized
atccctgttttcctaggact

SEQ ID NO: 2239 - DNA, 20 bp, Artificial Sequence
  chemically synthesized
acctgacccaaacccagctc

SEQ ID NO: 2240 - DNA, 20 bp, Artificial Sequence
  chemically synthesized
ctcctgggataccccgaaga

SEQ ID NO: 2241 - DNA, 20 bp, Artificial Sequence
  chemically synthesized
gggaagcctgagcgcctctc

SEQ ID NO: 2242 - DNA, 20 bp, Artificial Sequence
  chemically synthesized
ggacgcaccattctcacaaa

SEQ ID NO: 2243 - DNA, 20 bp, Artificial Sequence
  chemically synthesized
tagaactcaggaccaactta

SEQ ID NO: 2244 - DNA, 20 bp, Artificial Sequence
  chemically synthesized
tcaggaccaacttattctga

SEQ ID NO: 2245 - DNA, 20 bp, Artificial Sequence
  chemically synthesized
attctgattttgtttttcca

SEQ ID NO: 2246 - DNA, 20 bp, Artificial Sequence
  chemically synthesized
ggaaggaggaggcctaagga

SEQ ID NO: 2247 - DNA, 20 bp, Artificial Sequence
  chemically synthesized
gagagcgccgcgcccgcacc

SEQ ID NO: 2248 - DNA, 20 bp, Artificial Sequence
  chemically synthesized
ccgccccgtcgttcctggcc

SEQ ID NO: 2249 - DNA, 20 bp, Artificial Sequence
  chemically synthesized
ccaccccacttccgaattgg

SEQ ID NO: 2250 - DNA, 20 bp, Artificial Sequence
  chemically synthesized
tggagccgcttcaactggcc

SEQ ID NO: 2251 - DNA, 20 bp, Artificial Sequence
  chemically synthesized
cctactctcttccgcattgg

SEQ ID NO: 2252 - DNA, 20 bp, Artificial Sequence
  chemically synthesized
ttggagtcgctttaactggc

SEQ ID NO: 2253 - DNA, 20 bp, Artificial Sequence
  chemically synthesized
tccggaccactttgagctct

SEQ ID NO: 2254 - DNA, 20 bp, Artificial Sequence
  chemically synthesized
cttctgcgccgcctctggcc

SEQ ID NO: 2255 - DNA, 20 bp, Artificial Sequence
  chemically synthesized
gtttccccttcccaggcagg

SEQ ID NO: 2256 - DNA, 20 bp, Artificial Sequence
  chemically synthesized
cattctctcccctgggcctg

SEQ ID NO: 2257 - DNA, 20 bp, Artificial Sequence
  chemically synthesized
ggcctgtgccgctttctgtc

SEQ ID NO: 2258 - DNA, 20 bp, Artificial Sequence
  chemically synthesized
cttctggggcctgtgccatc

SEQ ID NO: 2259 - DNA, 20 bp, Artificial Sequence
  chemically synthesized
ttcttgtaggcctgcatcat

SEQ ID NO: 2260 - DNA, 20 bp, Artificial Sequence
  chemically synthesized
accccaaagtaccccgtctc

SEQ ID NO: 2261 - DNA, 20 bp, Artificial Sequence
  chemically synthesized
ctttagccacctctccatcc

SEQ ID NO: 2262 - DNA, 20 bp, Artificial Sequence
  chemically synthesized
gcctggacaccccgttctcc

SEQ ID NO: 2263 - DNA, 20 bp, Artificial Sequence
  chemically synthesized
cctatgtccacttcaggaca

SEQ ID NO: 2264 - DNA, 20 bp, Artificial Sequence
  chemically synthesized
ccacagtggggccactaggg

SEQ ID NO: 2265 - DNA, 20 bp, Artificial Sequence
  chemically synthesized
ctaacccccacctcctgtta

SEQ ID NO: 2266 - DNA, 20 bp, Artificial Sequence
  chemically synthesized
tctctccttgccagaacctc

SEQ ID NO: 2267 - DNA, 20 bp, Artificial Sequence
  chemically synthesized
tccttgccagaacctctaag

SEQ ID NO: 2268 - DNA, 20 bp, Artificial Sequence
  chemically synthesized
ccagagaggatcctgggagg

SEQ ID NO: 2269 - DNA, 20 bp, Artificial Sequence
  chemically synthesized
tgctctgacgcggccgtctg

SEQ ID NO: 2270 - DNA, 20 bp, Artificial Sequence
  chemically synthesized
cgtttcactgatcctggtgc

SEQ ID NO: 2271 - DNA, 20 bp, Artificial Sequence
  chemically synthesized
ttacacttcccaagaggaga

SEQ ID NO: 2272 - DNA, 20 bp, Artificial Sequence
  chemically synthesized
tttatattgttcctccgtgc

SEQ ID NO: 2273 - DNA, 20 bp, Artificial Sequence
  chemically synthesized
ttcctccgcccagagcaggg

SEQ ID NO: 2274 - DNA, 20 bp, Artificial Sequence
  chemically synthesized
cgcttccctaaggccctgct

SEQ ID NO: 2275 - DNA, 20 bp, Artificial Sequence
  chemically synthesized
taaggccctgctctgggctt

SEQ ID NO: 2276 - DNA, 20 bp, Artificial Sequence
  chemically synthesized
ggcaagcccaggagaggcgc

SEQ ID NO: 2277 - DNA, 20 bp, Artificial Sequence
  chemically synthesized
gtctaccaggctgccttttg

SEQ ID NO: 2278 - DNA, 20 bp, Artificial Sequence
  chemically synthesized
ttctcctccaactgtggggt

SEQ ID NO: 2279 - DNA, 20 bp, Artificial Sequence
  chemically synthesized
gtgggctggggttcagagag

SEQ ID NO: 2280 - DNA, 20 bp, Artificial Sequence
  chemically synthesized
gtggccaagaagcaggggag

SEQ ID NO: 2281 - DNA, 20 bp, Artificial Sequence
  chemically synthesized
tcaggtctgggtgtggggtg

SEQ ID NO: 2282 - DNA, 20 bp, Artificial Sequence
  chemically synthesized
ggtgtggggtgaccagctta

SEQ ID NO: 2283 - DNA, 20 bp, Artificial Sequence
  chemically synthesized
atgctgtttgcccaggacag

SEQ ID NO: 2284 - DNA, 20 bp, Artificial Sequence
  chemically synthesized
ggtcactgtctctgggtgac

SEQ ID NO: 2285 - DNA, 20 bp, Artificial Sequence
  chemically synthesized
tgggtgactcttgattcccg

SEQ ID NO: 2286 - DNA, 20 bp, Artificial Sequence
  chemically synthesized
gccagtttctccacctgggg

SEQ ID NO: 2287 - DNA, 20 bp, Artificial Sequence
  chemically synthesized
aagttcttagggtaccccac

SEQ ID NO: 2288 - DNA, 20 bp, Artificial Sequence
  chemically synthesized
tagagtaggaggggctggag

SEQ ID NO: 2289 - DNA, 20 bp, Artificial Sequence
  chemically synthesized
agagctgggggcctgggctc

SEQ ID NO: 2290 - DNA, 20 bp, Artificial Sequence
  chemically synthesized
acgtgcggccccttcacagc

SEQ ID NO: 2291 - DNA, 20 bp, Artificial Sequence
  chemically synthesized
cctcccgcctcctccagatg

SEQ ID NO: 2292 - DNA, 20 bp, Artificial Sequence
  chemically synthesized
gtaatttatcccgtggatct

SEQ ID NO: 2293 - DNA, 20 bp, Artificial Sequence
  chemically synthesized
ttatcccgtggatctaggag

SEQ ID NO: 2294 - DNA, 20 bp, Artificial Sequence
  chemically synthesized
cctcctccgaccccctggac

SEQ ID NO: 2295 - DNA, 20 bp, Artificial Sequence
  chemically synthesized
ggacttcggcttttgtcccc

SEQ ID NO: 2296 - DNA, 20 bp, Artificial Sequence
  chemically synthesized
accctgcatagccctgggcc

SEQ ID NO: 2297 - DNA, 20 bp, Artificial Sequence
  chemically synthesized
tcctgcagagtatctgctgg

SEQ ID NO: 2298 - DNA, 20 bp, Artificial Sequence
  chemically synthesized
agtatctgctggggtggttt

SEQ ID NO: 2299 - DNA, 20 bp, Artificial Sequence
  chemically synthesized
tgacccttggaaggacctgg

SEQ ID NO: 2300 - DNA, 20 bp, Artificial Sequence
  chemically synthesized
cgccacctgtgggtggtgac

SEQ ID NO: 2301 - DNA, 20 bp, Artificial Sequence
  chemically synthesized
ccctcccttccccgttcact

SEQ ID NO: 2302 - DNA, 20 bp, Artificial Sequence
  chemically synthesized
cagatagccaggagtccttt

SEQ ID NO: 2303 - DNA, 20 bp, Artificial Sequence
  chemically synthesized
tcctagcaccgtgtccctgg

SEQ ID NO: 2304 - DNA, 20 bp, Artificial Sequence
  chemically synthesized
ctggggtaggtgcggctgac

SEQ ID NO: 2305 - DNA, 20 bp, Artificial Sequence
  chemically synthesized
ttgatgagaacctggaggtg

SEQ ID NO: 2306 - DNA, 22 bp, Artificial Sequence
  chemically synthesized
gcgatatctaggtagccacagg

SEQ ID NO: 2307 - DNA, 22 bp, Artificial Sequence
  chemically synthesized
ggtagccacaggaggcggccac

SEQ ID NO: 2308 - DNA, 22 bp, Artificial Sequence
  chemically synthesized
gttgtctgcctggttcacagtg

SEQ ID NO: 2309 - DNA, 22 bp, Artificial Sequence
  chemically synthesized
tctgcctggttcacagtggcgc

SEQ ID NO: 2310 - DNA, 22 bp, Artificial Sequence
  chemically synthesized
cctggttcacagtggcgccctg

SEQ ID NO: 2311 - DNA, 22 bp, Artificial Sequence
  chemically synthesized
gttcacagtggcgccctgctcc

SEQ ID NO: 2312 - DNA, 22 bp, Artificial Sequence
  chemically synthesized
acagtggcgccctgctccacca

SEQ ID NO: 2313 - DNA, 22 bp, Artificial Sequence
  chemically synthesized
ctccaccaagaagcgcaccacc

SEQ ID NO: 2314 - DNA, 22 bp, Artificial Sequence
  chemically synthesized
caccaagaagcgcaccacctcc

SEQ ID NO: 2315 - DNA, 22 bp, Artificial Sequence
  chemically synthesized
caggttctcatcaatgcaggcc

SEQ ID NO: 2316 - DNA, 22 bp, Artificial Sequence
  chemically synthesized
tcatcaatgcaggcctgggggt

SEQ ID NO: 2317 - DNA, 22 bp, Artificial Sequence
  chemically synthesized
atcaatgcaggcctgggggtgg

SEQ ID NO: 2318 - DNA, 22 bp, Artificial Sequence
  chemically synthesized
ggggtgggaaacagccgtcagc

SEQ ID NO: 2319 - DNA, 22 bp, Artificial Sequence
  chemically synthesized
ccccagccacggtgtcccagca

SEQ ID NO: 2320 - DNA, 22 bp, Artificial Sequence
  chemically synthesized
cagagggagccacgaaaacaga

SEQ ID NO: 2321 - DNA, 22 bp, Artificial Sequence
  chemically synthesized
ggacagtggggaaaatgaccca

SEQ ID NO: 2322 - DNA, 22 bp, Artificial Sequence
  chemically synthesized
tggccactggctgtttaagata

SEQ ID NO: 2323 - DNA, 22 bp, Artificial Sequence
  chemically synthesized
gccactggctgtttaagatacg

SEQ ID NO: 2324 - DNA, 22 bp, Artificial Sequence
  chemically synthesized
gctgtttaagatacgcctggtt

SEQ ID NO: 2325 - DNA, 22 bp, Artificial Sequence
  chemically synthesized
tttaagatacgcctggttgccc

SEQ ID NO: 2326 - DNA, 22 bp, Artificial Sequence
  chemically synthesized
aagatacgcctggttgcccagt

SEQ ID NO: 2327 - DNA, 22 bp, Artificial Sequence
  chemically synthesized
agatacgcctggttgcccagtg

SEQ ID NO: 2328 - DNA, 22 bp, Artificial Sequence
  chemically synthesized
gttgcccagtggtcaggccggc

SEQ ID NO: 2329 - DNA, 22 bp, Artificial Sequence
  chemically synthesized
cccagtggtcaggccggccagg

SEQ ID NO: 2330 - DNA, 22 bp, Artificial Sequence
  chemically synthesized
cagtgctcagtggaaaccacga

SEQ ID NO: 2331 - DNA, 22 bp, Artificial Sequence
  chemically synthesized
agtgctcagtggaaaccacgaa

SEQ ID NO: 2332 - DNA, 22 bp, Artificial Sequence
  chemically synthesized
agtggaaaccacgaaaggactc

SEQ ID NO: 2333 - DNA, 22 bp, Artificial Sequence
  chemically synthesized
ctggctatctgcaaacaggaag

SEQ ID NO: 2334 - DNA, 22 bp, Artificial Sequence
  chemically synthesized
gctatctgcaaacaggaagtga

SEQ ID NO: 2335 - DNA, 22 bp, Artificial Sequence
  chemically synthesized
tctgcaaacaggaagtgaacgg

SEQ ID NO: 2336 - DNA, 22 bp, Artificial Sequence
  chemically synthesized
caaacaggaagtgaacggggaa

SEQ ID NO: 2337 - DNA, 22 bp, Artificial Sequence
  chemically synthesized
ctcatctgggtgcgggaacccc

SEQ ID NO: 2338 - DNA, 22 bp, Artificial Sequence
  chemically synthesized
tcatctgggtgcgggaacccca

SEQ ID NO: 2339 - DNA, 22 bp, Artificial Sequence
  chemically synthesized
atctgggtgcgggaaccccaca

SEQ ID NO: 2340 - DNA, 22 bp, Artificial Sequence
  chemically synthesized
ggtgcgggaaccccacatggta

SEQ ID NO: 2341 - DNA, 22 bp, Artificial Sequence
  chemically synthesized
ttagacacggcaaaacccccgt

SEQ ID NO: 2342 - DNA, 22 bp, Artificial Sequence
  chemically synthesized
gacacggcaaaacccccgtcac

SEQ ID NO: 2343 - DNA, 22 bp, Artificial Sequence
  chemically synthesized
ccagtgctcagactagggaaga

SEQ ID NO: 2344 - DNA, 22 bp, Artificial Sequence
  chemically synthesized
cagtgctcagactagggaagag

SEQ ID NO: 2345 - DNA, 22 bp, Artificial Sequence
  chemically synthesized
agactagggaagaggttccagc

SEQ ID NO: 2346 - DNA, 22 bp, Artificial Sequence
  chemically synthesized
gggaagaggttccagcccctcc

SEQ ID NO: 2347 - DNA, 22 bp, Artificial Sequence
  chemically synthesized
cagcccctcctccttcagagcc

SEQ ID NO: 2348 - DNA, 22 bp, Artificial Sequence
  chemically synthesized
ctccttcagagccaggagtcct

SEQ ID NO: 2349 - DNA, 22 bp, Artificial Sequence
  chemically synthesized
cttcagagccaggagtcctggc

SEQ ID NO: 2350 - DNA, 22 bp, Artificial Sequence
  chemically synthesized
cagagccaggagtcctggcccc

SEQ ID NO: 2351 - DNA, 22 bp, Artificial Sequence
  chemically synthesized
agagccaggagtcctggccccc

SEQ ID NO: 2352 - DNA, 22 bp, Artificial Sequence
  chemically synthesized
gcccccagcccctcctgcctta

SEQ ID NO: 2353 - DNA, 22 bp, Artificial Sequence
  chemically synthesized
ctgccttaaacccagccaggtc

SEQ ID NO: 2354 - DNA, 22 bp, Artificial Sequence
  chemically synthesized
ccttaaacccagccaggtcctt

SEQ ID NO: 2355 - DNA, 22 bp, Artificial Sequence
  chemically synthesized
aaacccagccaggtccttccaa

SEQ ID NO: 2356 - DNA, 22 bp, Artificial Sequence
  chemically synthesized
aacccagccaggtccttccaag

SEQ ID NO: 2357 - DNA, 22 bp, Artificial Sequence
  chemically synthesized
ccaagggtcaagctcggaaacc

SEQ ID NO: 2358 - DNA, 22 bp, Artificial Sequence
  chemically synthesized
caagggtcaagctcggaaacca

SEQ ID NO: 2359 - DNA, 22 bp, Artificial Sequence
  chemically synthesized
ggaaaccaccccagcagatact

SEQ ID NO: 2360 - DNA, 22 bp, Artificial Sequence
  chemically synthesized
tgcaggaacgaagccgtgggcc

SEQ ID NO: 2361 - DNA, 22 bp, Artificial Sequence
  chemically synthesized
caggaacgaagccgtgggccca

SEQ ID NO: 2362 - DNA, 22 bp, Artificial Sequence
  chemically synthesized
tgcagggtggaggaaggccacc

SEQ ID NO: 2363 - DNA, 22 bp, Artificial Sequence
  chemically synthesized
tgctgggacagactcaggggcc

SEQ ID NO: 2364 - DNA, 22 bp, Artificial Sequence
  chemically synthesized
ggacagactcaggggcctgggc

SEQ ID NO: 2365 - DNA, 22 bp, Artificial Sequence
  chemically synthesized
aggggcctgggcgggactccca

SEQ ID NO: 2366 - DNA, 22 bp, Artificial Sequence
  chemically synthesized
ggcgggactcccagaggggtga

SEQ ID NO: 2367 - DNA, 22 bp, Artificial Sequence
  chemically synthesized
ccagaggggtgagacagctgca

SEQ ID NO: 2368 - DNA, 22 bp, Artificial Sequence
  chemically synthesized
cacacctgtgtgcctgggcccc

SEQ ID NO: 2369 - DNA, 22 bp, Artificial Sequence
  chemically synthesized
tgtgcctgggccccaggctgtc

SEQ ID NO: 2370 - DNA, 22 bp, Artificial Sequence
  chemically synthesized
ggccccaggctgtcacactcca

SEQ ID NO: 2371 - DNA, 22 bp, Artificial Sequence
  chemically synthesized
tcacactccagttcactgaggc

SEQ ID NO: 2372 - DNA, 22 bp, Artificial Sequence
  chemically synthesized
cagttcactgaggccccctctg

SEQ ID NO: 2373 - DNA, 22 bp, Artificial Sequence
  chemically synthesized
actgaggccccctctgcacggg

SEQ ID NO: 2374 - DNA, 22 bp, Artificial Sequence
  chemically synthesized
aggccccctctgcacggggccc

SEQ ID NO: 2375 - DNA, 22 bp, Artificial Sequence
  chemically synthesized
tgcacggggccctgcagccagg

SEQ ID NO: 2376 - DNA, 22 bp, Artificial Sequence
  chemically synthesized
cacggggccctgcagccagggg

SEQ ID NO: 2377 - DNA, 22 bp, Artificial Sequence
  chemically synthesized
cagccaggggctgacacgggcc

SEQ ID NO: 2378 - DNA, 22 bp, Artificial Sequence
  chemically synthesized
acacgggccaccgtttctcatt

SEQ ID NO: 2379 - DNA, 22 bp, Artificial Sequence
  chemically synthesized
ctcattcttcccttaggggtcc

SEQ ID NO: 2380 - DNA, 22 bp, Artificial Sequence
  chemically synthesized
tcattcttcccttaggggtcca

SEQ ID NO: 2381 - DNA, 22 bp, Artificial Sequence
  chemically synthesized
attcttcccttaggggtccaaa

SEQ ID NO: 2382 - DNA, 22 bp, Artificial Sequence
  chemically synthesized
ttcccttaggggtccaaaactt

SEQ ID NO: 2383 - DNA, 22 bp, Artificial Sequence
  chemically synthesized
cccttaggggtccaaaacttgg

SEQ ID NO: 2384 - DNA, 22 bp, Artificial Sequence
  chemically synthesized
ccttaggggtccaaaacttggg

SEQ ID NO: 2385 - DNA, 22 bp, Artificial Sequence
  chemically synthesized
aggggtccaaaacttgggggga

SEQ ID NO: 2386 - DNA, 22 bp, Artificial Sequence
  chemically synthesized
ggggtccaaaacttggggggac

SEQ ID NO: 2387 - DNA, 22 bp, Artificial Sequence
  chemically synthesized
ggggggacaaaagccgaagtcc

SEQ ID NO: 2388 - DNA, 22 bp, Artificial Sequence
  chemically synthesized
gggggacaaaagccgaagtcca

SEQ ID NO: 2389 - DNA, 22 bp, Artificial Sequence
  chemically synthesized
gccccaggccttgtggacactg

SEQ ID NO: 2390 - DNA, 22 bp, Artificial Sequence
  chemically synthesized
ccccaggccttgtggacactgg

SEQ ID NO: 2391 - DNA, 22 bp, Artificial Sequence
  chemically synthesized
gtggacactgggtgggctccgg

SEQ ID NO: 2392 - DNA, 22 bp, Artificial Sequence
  chemically synthesized
tggacactgggtgggctccggg

SEQ ID NO: 2393 - DNA, 22 bp, Artificial Sequence
  chemically synthesized
ggtgggctccgggacctgaact

SEQ ID NO: 2394 - DNA, 22 bp, Artificial Sequence
  chemically synthesized
cgggacctgaactggagctgag

SEQ ID NO: 2395 - DNA, 22 bp, Artificial Sequence
  chemically synthesized
aactggagctgaggaaggagtg

SEQ ID NO: 2396 - DNA, 22 bp, Artificial Sequence
  chemically synthesized
gagctgaggaaggagtgaagct

SEQ ID NO: 2397 - DNA, 22 bp, Artificial Sequence
  chemically synthesized
aggaaggagtgaagctaaactc

SEQ ID NO: 2398 - DNA, 22 bp, Artificial Sequence
  chemically synthesized
aactcctagatccacgggataa

SEQ ID NO: 2399 - DNA, 22 bp, Artificial Sequence
  chemically synthesized
ctagatccacgggataaattac

SEQ ID NO: 2400 - DNA, 22 bp, Artificial Sequence
  chemically synthesized
gatccacgggataaattacccc

SEQ ID NO: 2401 - DNA, 22 bp, Artificial Sequence
  chemically synthesized
ccccccaagtccctcacctctc

SEQ ID NO: 2402 - DNA, 22 bp, Artificial Sequence
  chemically synthesized
acctctccaaagctgcccatct

SEQ ID NO: 2403 - DNA, 22 bp, Artificial Sequence
  chemically synthesized
tccaaagctgcccatctggagg

SEQ ID NO: 2404 - DNA, 22 bp, Artificial Sequence
  chemically synthesized
caaagctgcccatctggaggag

SEQ ID NO: 2405 - DNA, 22 bp, Artificial Sequence
  chemically synthesized
cccatctggaggaggcgggagg

SEQ ID NO: 2406 - DNA, 22 bp, Artificial Sequence
  chemically synthesized
gaggaggcgggagggagctacg

SEQ ID NO: 2407 - DNA, 22 bp, Artificial Sequence
  chemically synthesized
cgagggccaagagcatgaggtc

SEQ ID NO: 2408 - DNA, 22 bp, Artificial Sequence
  chemically synthesized
gggctgtgaaggggccgcacgt

SEQ ID NO: 2409 - DNA, 22 bp, Artificial Sequence
  chemically synthesized
tgaaggggccgcacgtgccctg

SEQ ID NO: 2410 - DNA, 22 bp, Artificial Sequence
  chemically synthesized
ggaacgggatgaactcggctcg

SEQ ID NO: 2411 - DNA, 22 bp, Artificial Sequence
  chemically synthesized
ggctcgtttatttccacccagt

SEQ ID NO: 2412 - DNA, 22 bp, Artificial Sequence
  chemically synthesized
gtttatttccacccagttgtca

SEQ ID NO: 2413 - DNA, 22 bp, Artificial Sequence
  chemically synthesized
atttccacccagttgtcatggc

SEQ ID NO: 2414 - DNA, 22 bp, Artificial Sequence
  chemically synthesized
tttccacccagttgtcatggcg

SEQ ID NO: 2415 - DNA, 22 bp, Artificial Sequence
  chemically synthesized
ccacccagttgtcatggcgata

SEQ ID NO: 2416 - DNA, 22 bp, Artificial Sequence
  chemically synthesized
cacccagttgtcatggcgatag

SEQ ID NO: 2417 - DNA, 22 bp, Artificial Sequence
  chemically synthesized
tcatggcgataggggagggggg

SEQ ID NO: 2418 - DNA, 22 bp, Artificial Sequence
  chemically synthesized
tccctttcaaggacctgcccag

SEQ ID NO: 2419 - DNA, 22 bp, Artificial Sequence
  chemically synthesized
ccctttcaaggacctgcccagt

SEQ ID NO: 2420 - DNA, 22 bp, Artificial Sequence
  chemically synthesized
cctttcaaggacctgcccagta

SEQ ID NO: 2421 - DNA, 22 bp, Artificial Sequence
  chemically synthesized
tcaaggacctgcccagtacagg

SEQ ID NO: 2422 - DNA, 22 bp, Artificial Sequence
  chemically synthesized
caaggacctgcccagtacaggc

SEQ ID NO: 2423 - DNA, 22 bp, Artificial Sequence
  chemically synthesized
aaggacctgcccagtacaggca

SEQ ID NO: 2424 - DNA, 22 bp, Artificial Sequence
  chemically synthesized
cccagtacaggcatccctgtga

SEQ ID NO: 2425 - DNA, 22 bp, Artificial Sequence
  chemically synthesized
tgaaagatgcctgaggcctggg

SEQ ID NO: 2426 - DNA, 22 bp, Artificial Sequence
  chemically synthesized
aggcctgggcaccagggactcc

SEQ ID NO: 2427 - DNA, 22 bp, Artificial Sequence
  chemically synthesized
ggcaccagggactccagagtcc

SEQ ID NO: 2428 - DNA, 22 bp, Artificial Sequence
  chemically synthesized
cagagtccaggcccaacccctc

SEQ ID NO: 2429 - DNA, 22 bp, Artificial Sequence
  chemically synthesized
cccattcaacccaggaggccag

SEQ ID NO: 2430 - DNA, 22 bp, Artificial Sequence
  chemically synthesized
aacccaggaggccaggccccag

SEQ ID NO: 2431 - DNA, 22 bp, Artificial Sequence
  chemically synthesized
ccgccctcagatgaaggagtcc

SEQ ID NO: 2432 - DNA, 22 bp, Artificial Sequence
  chemically synthesized
cgccctcagatgaaggagtcca

SEQ ID NO: 2433 - DNA, 22 bp, Artificial Sequence
  chemically synthesized
agatgaaggagtccaggccccc

SEQ ID NO: 2434 - DNA, 22 bp, Artificial Sequence
  chemically synthesized
tccccattcagacccaggggtc

SEQ ID NO: 2435 - DNA, 22 bp, Artificial Sequence
  chemically synthesized
cccattcagacccaggggtcca

SEQ ID NO: 2436 - DNA, 22 bp, Artificial Sequence
  chemically synthesized
agacccaggggtccaggcccag

SEQ ID NO: 2437 - DNA, 22 bp, Artificial Sequence
  chemically synthesized
cctaagacccagaagtccaggc

SEQ ID NO: 2438 - DNA, 22 bp, Artificial Sequence
  chemically synthesized
agacccagaagtccaggccccc

SEQ ID NO: 2439 - DNA, 22 bp, Artificial Sequence
  chemically synthesized
ctccctcagacccacgagtcca

SEQ ID NO: 2440 - DNA, 22 bp, Artificial Sequence
  chemically synthesized
cctcagacccacgagtccaggc

SEQ ID NO: 2441 - DNA, 22 bp, Artificial Sequence
  chemically synthesized
agacccacgagtccaggcccca

SEQ ID NO: 2442 - DNA, 22 bp, Artificial Sequence
  chemically synthesized
ctccctcggacccaggagtcca

SEQ ID NO: 2443 - DNA, 22 bp, Artificial Sequence
  chemically synthesized
cctcggacccaggagtccaggc

SEQ ID NO: 2444 - DNA, 22 bp, Artificial Sequence
  chemically synthesized
ggacccaggagtccaggccccc

SEQ ID NO: 2445 - DNA, 22 bp, Artificial Sequence
  chemically synthesized
caccctcagacccaggagtcca

SEQ ID NO: 2446 - DNA, 22 bp, Artificial Sequence
  chemically synthesized
agacccaggagtccaggcccca

SEQ ID NO: 2447 - DNA, 22 bp, Artificial Sequence
  chemically synthesized
ctccctcggacccaggagtcca

SEQ ID NO: 2448 - DNA, 22 bp, Artificial Sequence
  chemically synthesized
cctcggacccaggagtccaggc

SEQ ID NO: 2449 - DNA, 22 bp, Artificial Sequence
  chemically synthesized
ggacccaggagtccaggcccca

SEQ ID NO: 2450 - DNA, 22 bp, Artificial Sequence
  chemically synthesized
ctctctcaaacccaggagccca

SEQ ID NO: 2451 - DNA, 22 bp, Artificial Sequence
  chemically synthesized
tctcaaacccaggagcccaggc

SEQ ID NO: 2452 - DNA, 22 bp, Artificial Sequence
  chemically synthesized
tcaaacccaggagcccaggccc

SEQ ID NO: 2453 - DNA, 22 bp, Artificial Sequence
  chemically synthesized
aaacccaggagcccaggccccc

SEQ ID NO: 2454 - DNA, 22 bp, Artificial Sequence
  chemically synthesized
ttctctgttcagccctaagaat

SEQ ID NO: 2455 - DNA, 22 bp, Artificial Sequence
  chemically synthesized
ctctgttcagccctaagaatcc

SEQ ID NO: 2456 - DNA, 22 bp, Artificial Sequence
  chemically synthesized
tctgttcagccctaagaatcct

SEQ ID NO: 2457 - DNA, 22 bp, Artificial Sequence
  chemically synthesized
tgttcagccctaagaatcctgg

SEQ ID NO: 2458 - DNA, 22 bp, Artificial Sequence
  chemically synthesized
ttcagccctaagaatcctggct

SEQ ID NO: 2459 - DNA, 22 bp, Artificial Sequence
  chemically synthesized
agccctaagaatcctggctcca

SEQ ID NO: 2460 - DNA, 22 bp, Artificial Sequence
  chemically synthesized
agaatcctggctccagcccctc

SEQ ID NO: 2461 - DNA, 22 bp, Artificial Sequence
  chemically synthesized
gctccagcccctcctactctag

SEQ ID NO: 2462 - DNA, 22 bp, Artificial Sequence
  chemically synthesized
cagcccctcctactctagcccc

SEQ ID NO: 2463 - DNA, 22 bp, Artificial Sequence
  chemically synthesized
ctactctagcccccaaccccct

SEQ ID NO: 2464 - DNA, 22 bp, Artificial Sequence
  chemically synthesized
ctctagcccccaaccccctagc

SEQ ID NO: 2465 - DNA, 22 bp, Artificial Sequence
  chemically synthesized
tagcccccaaccccctagccac

SEQ ID NO: 2466 - DNA, 22 bp, Artificial Sequence
  chemically synthesized
gcccccaaccccctagccacta

SEQ ID NO: 2467 - DNA, 22 bp, Artificial Sequence
  chemically synthesized
gccactaaggcaattggggtgc

SEQ ID NO: 2468 - DNA, 22 bp, Artificial Sequence
  chemically synthesized
aggcaattggggtgcaggaatg

SEQ ID NO: 2469 - DNA, 22 bp, Artificial Sequence
  chemically synthesized
gggtgcaggaatgggggcaggg

SEQ ID NO: 2470 - DNA, 22 bp, Artificial Sequence
  chemically synthesized
accaagtggttgataaacccac

SEQ ID NO: 2471 - DNA, 22 bp, Artificial Sequence
  chemically synthesized
ataaacccacgtggggtaccct

SEQ ID NO: 2472 - DNA, 22 bp, Artificial Sequence
  chemically synthesized
agaacttgggaacagccacagc

SEQ ID NO: 2473 - DNA, 22 bp, Artificial Sequence
  chemically synthesized
gggaacagccacagcagggggg

SEQ ID NO: 2474 - DNA, 22 bp, Artificial Sequence
  chemically synthesized
ggaacagccacagcaggggggc

SEQ ID NO: 2475 - DNA, 22 bp, Artificial Sequence
  chemically synthesized
ggggacctgcctggagaaggat

SEQ ID NO: 2476 - DNA, 22 bp, Artificial Sequence
  chemically synthesized
gggacctgcctggagaaggatg

SEQ ID NO: 2477 - DNA, 22 bp, Artificial Sequence
  chemically synthesized
cctggagaaggatgcaggacga

SEQ ID NO: 2478 - DNA, 22 bp, Artificial Sequence
  chemically synthesized
gagaaggatgcaggacgagaaa

SEQ ID NO: 2479 - DNA, 22 bp, Artificial Sequence
  chemically synthesized
gccgggaatcaagagtcaccca

SEQ ID NO: 2480 - DNA, 22 bp, Artificial Sequence
  chemically synthesized
ttttcctaggactgagggtttc

SEQ ID NO: 2481 - DNA, 22 bp, Artificial Sequence
  chemically synthesized
tcctaggactgagggtttcagt

SEQ ID NO: 2482 - DNA, 22 bp, Artificial Sequence
  chemically synthesized
cctaggactgagggtttcagtg

SEQ ID NO: 2483 - DNA, 22 bp, Artificial Sequence
  chemically synthesized
ctaggactgagggtttcagtgc

SEQ ID NO: 2484 - DNA, 22 bp, Artificial Sequence
  chemically synthesized
ggactgagggtttcagtgctaa

SEQ ID NO: 2485 - DNA, 22 bp, Artificial Sequence
  chemically synthesized
agggtttcagtgctaaaactag

SEQ ID NO: 2486 - DNA, 22 bp, Artificial Sequence
  chemically synthesized
cagtgctaaaactaggctgtcc

SEQ ID NO: 2487 - DNA, 22 bp, Artificial Sequence
  chemically synthesized
agtgctaaaactaggctgtcct

SEQ ID NO: 2488 - DNA, 22 bp, Artificial Sequence
  chemically synthesized
aaactaggctgtcctgggcaaa

SEQ ID NO: 2489 - DNA, 22 bp, Artificial Sequence
  chemically synthesized
ggctgtcctgggcaaacagcat

SEQ ID NO: 2490 - DNA, 22 bp, Artificial Sequence
  chemically synthesized
tcctgggcaaacagcataagct

SEQ ID NO: 2491 - DNA, 22 bp, Artificial Sequence
  chemically synthesized
ggcaaacagcataagctggtca

SEQ ID NO: 2492 - DNA, 22 bp, Artificial Sequence
  chemically synthesized
gtcaccccacacccagacctga

SEQ ID NO: 2493 - DNA, 22 bp, Artificial Sequence
  chemically synthesized
acccaaacccagctcccctgct

SEQ ID NO: 2494 - DNA, 22 bp, Artificial Sequence
  chemically synthesized
ccctgcttcttggccacgtaac

SEQ ID NO: 2495 - DNA, 22 bp, Artificial Sequence
  chemically synthesized
cttcttggccacgtaacctgag

SEQ ID NO: 2496 - DNA, 22 bp, Artificial Sequence
  chemically synthesized
cttggccacgtaacctgagaag

SEQ ID NO: 2497 - DNA, 22 bp, Artificial Sequence
  chemically synthesized
ttggccacgtaacctgagaagg

SEQ ID NO: 2498 - DNA, 22 bp, Artificial Sequence
  chemically synthesized
ggccacgtaacctgagaaggga

SEQ ID NO: 2499 - DNA, 22 bp, Artificial Sequence
  chemically synthesized
gccacgtaacctgagaagggaa

SEQ ID NO: 2500 - DNA, 22 bp, Artificial Sequence
  chemically synthesized
agaagggaatccctcctctctg

SEQ ID NO: 2501 - DNA, 22 bp, Artificial Sequence
  chemically synthesized
ctctctgaaccccagcccaccc

SEQ ID NO: 2502 - DNA, 22 bp, Artificial Sequence
  chemically synthesized
tctgaaccccagcccaccccaa

SEQ ID NO: 2503 - DNA, 22 bp, Artificial Sequence
  chemically synthesized
tgaaccccagcccaccccaatg

SEQ ID NO: 2504 - DNA, 22 bp, Artificial Sequence
  chemically synthesized
aaccccagcccaccccaatgct

SEQ ID NO: 2505 - DNA, 22 bp, Artificial Sequence
  chemically synthesized
caggcctcctgggataccccga

SEQ ID NO: 2506 - DNA, 22 bp, Artificial Sequence
  chemically synthesized
ctgggataccccgaagagtgag

SEQ ID NO: 2507 - DNA, 22 bp, Artificial Sequence
  chemically synthesized
ggataccccgaagagtgagttt

SEQ ID NO: 2508 - DNA, 22 bp, Artificial Sequence
  chemically synthesized
gccaagcagtcaccccacagtt

SEQ ID NO: 2509 - DNA, 22 bp, Artificial Sequence
  chemically synthesized
ccaagcagtcaccccacagttg

SEQ ID NO: 2510 - DNA, 22 bp, Artificial Sequence
  chemically synthesized
gaggagaatccacccaaaaggc

SEQ ID NO: 2511 - DNA, 22 bp, Artificial Sequence
  chemically synthesized
gtagacagggctggggtggcct

SEQ ID NO: 2512 - DNA, 22 bp, Artificial Sequence
  chemically synthesized
gggtggcctctcgtggggtcca

SEQ ID NO: 2513 - DNA, 22 bp, Artificial Sequence
  chemically synthesized
tcgtggggtccaggccaagtag

SEQ ID NO: 2514 - DNA, 22 bp, Artificial Sequence
  chemically synthesized
gtggggtccaggccaagtaggt

SEQ ID NO: 2515 - DNA, 22 bp, Artificial Sequence
  chemically synthesized
gggcctctgggggatgcagggg

SEQ ID NO: 2516 - DNA, 22 bp, Artificial Sequence
  chemically synthesized
tgggggatgcaggggaaggggg

SEQ ID NO: 2517 - DNA, 22 bp, Artificial Sequence
  chemically synthesized
ggggatgcaggggaagggggat

SEQ ID NO: 2518 - DNA, 22 bp, Artificial Sequence
  chemically synthesized
agtctgaagagcagagccagga

SEQ ID NO: 2519 - DNA, 22 bp, Artificial Sequence
  chemically synthesized
aagagcagagccaggaacccct

SEQ ID NO: 2520 - DNA, 22 bp, Artificial Sequence
  chemically synthesized
tagggaaggggcaggagagcca

SEQ ID NO: 2521 - DNA, 22 bp, Artificial Sequence
  chemically synthesized
agcgcctctcctgggcttgcca

SEQ ID NO: 2522 - DNA, 22 bp, Artificial Sequence
  chemically synthesized
tcctgggcttgccaaggactca

SEQ ID NO: 2523 - DNA, 22 bp, Artificial Sequence
  chemically synthesized
ctgggcttgccaaggactcaaa

SEQ ID NO: 2524 - DNA, 22 bp, Artificial Sequence
  chemically synthesized
ggcttgccaaggactcaaaccc

SEQ ID NO: 2525 - DNA, 22 bp, Artificial Sequence
  chemically synthesized
gccaaggactcaaacccagaag

SEQ ID NO: 2526 - DNA, 22 bp, Artificial Sequence
  chemically synthesized
ccaaggactcaaacccagaagc

SEQ ID NO: 2527 - DNA, 22 bp, Artificial Sequence
  chemically synthesized
aaacccagaagcccagagcagg

SEQ ID NO: 2528 - DNA, 22 bp, Artificial Sequence
  chemically synthesized
agggaagcgggaccctgctctg

SEQ ID NO: 2529 - DNA, 22 bp, Artificial Sequence
  chemically synthesized
gggaagcgggaccctgctctgg

SEQ ID NO: 2530 - DNA, 22 bp, Artificial Sequence
  chemically synthesized
ctctgggcggaggaatatgtcc

SEQ ID NO: 2531 - DNA, 22 bp, Artificial Sequence
  chemically synthesized
tgggcggaggaatatgtcccag

SEQ ID NO: 2532 - DNA, 22 bp, Artificial Sequence
  chemically synthesized
ggcggaggaatatgtcccagat

SEQ ID NO: 2533 - DNA, 22 bp, Artificial Sequence
  chemically synthesized
gggactctttaaggaaagaagg

SEQ ID NO: 2534 - DNA, 22 bp, Artificial Sequence
  chemically synthesized
tttaaggaaagaaggatggaga

SEQ ID NO: 2535 - DNA, 22 bp, Artificial Sequence
  chemically synthesized
taaggaaagaaggatggagaaa

SEQ ID NO: 2536 - DNA, 22 bp, Artificial Sequence
  chemically synthesized
aaggaaagaaggatggagaaag

SEQ ID NO: 2537 - DNA, 22 bp, Artificial Sequence
  chemically synthesized
aggaaagaaggatggagaaaga

SEQ ID NO: 2538 - DNA, 22 bp, Artificial Sequence
  chemically synthesized
gtgaacacctaggacgcaccat

SEQ ID NO: 2539 - DNA, 22 bp, Artificial Sequence
  chemically synthesized
ggacgcaccattctcacaaagg

SEQ ID NO: 2540 - DNA, 22 bp, Artificial Sequence
  chemically synthesized
tcacaaagggagttttccacac

SEQ ID NO: 2541 - DNA, 22 bp, Artificial Sequence
  chemically synthesized
acaaagggagttttccacacgg

SEQ ID NO: 2542 - DNA, 22 bp, Artificial Sequence
  chemically synthesized
tccacacggacacccccctcct

SEQ ID NO: 2543 - DNA, 22 bp, Artificial Sequence
  chemically synthesized
ccacacggacacccccctcctc

SEQ ID NO: 2544 - DNA, 22 bp, Artificial Sequence
  chemically synthesized
cacacggacacccccctcctca

SEQ ID NO: 2545 - DNA, 22 bp, Artificial Sequence
  chemically synthesized
ctcaccacagccctgccaggac

SEQ ID NO: 2546 - DNA, 22 bp, Artificial Sequence
  chemically synthesized
accacagccctgccaggacggg

SEQ ID NO: 2547 - DNA, 22 bp, Artificial Sequence
  chemically synthesized
ccaggacggggctggctactgg

SEQ ID NO: 2548 - DNA, 22 bp, Artificial Sequence
  chemically synthesized
gctactggccttatctcacagg

SEQ ID NO: 2549 - DNA, 22 bp, Artificial Sequence
  chemically synthesized
ctggccttatctcacaggtaaa

SEQ ID NO: 2550 - DNA, 22 bp, Artificial Sequence
  chemically synthesized
gccttatctcacaggtaaaact

SEQ ID NO: 2551 - DNA, 22 bp, Artificial Sequence
  chemically synthesized
atctcacaggtaaaactgacgc

SEQ ID NO: 2552 - DNA, 22 bp, Artificial Sequence
  chemically synthesized
tctcacaggtaaaactgacgca

SEQ ID NO: 2553 - DNA, 22 bp, Artificial Sequence
  chemically synthesized
acaggtaaaactgacgcacgga

SEQ ID NO: 2554 - DNA, 22 bp, Artificial Sequence
  chemically synthesized
acgcacggaggaacaatataaa

SEQ ID NO: 2555 - DNA, 22 bp, Artificial Sequence
  chemically synthesized
gggactagaaaggtgaagagcc

SEQ ID NO: 2556 - DNA, 22 bp, Artificial Sequence
  chemically synthesized
gaaaggtgaagagccaaagtta

SEQ ID NO: 2557 - DNA, 22 bp, Artificial Sequence
  chemically synthesized
gaactcaggaccaacttattct

SEQ ID NO: 2558 - DNA, 22 bp, Artificial Sequence
  chemically synthesized
aggaccaacttattctgatttt

SEQ ID NO: 2559 - DNA, 22 bp, Artificial Sequence
  chemically synthesized
attctgattttgtttttccaaa

SEQ ID NO: 2560 - DNA, 22 bp, Artificial Sequence
  chemically synthesized
ttctgattttgtttttccaaac

SEQ ID NO: 2561 - DNA, 22 bp, Artificial Sequence
  chemically synthesized
tgattttgtttttccaaactgc

SEQ ID NO: 2562 - DNA, 22 bp, Artificial Sequence
  chemically synthesized
attttgtttttccaaactgctt

SEQ ID NO: 2563 - DNA, 22 bp, Artificial Sequence
  chemically synthesized
tgtttttccaaactgcttctcc

SEQ ID NO: 2564 - DNA, 22 bp, Artificial Sequence
  chemically synthesized
gtttttccaaactgcttctcct

SEQ ID NO: 2565 - DNA, 22 bp, Artificial Sequence
  chemically synthesized
tttttccaaactgcttctcctc

SEQ ID NO: 2566 - DNA, 22 bp, Artificial Sequence
  chemically synthesized
ttccaaactgcttctcctcttg

SEQ ID NO: 2567 - DNA, 22 bp, Artificial Sequence
  chemically synthesized
tccaaactgcttctcctcttgg

SEQ ID NO: 2568 - DNA, 22 bp, Artificial Sequence
  chemically synthesized
ccaaactgcttctcctcttggg

SEQ ID NO: 2569 - DNA, 22 bp, Artificial Sequence
  chemically synthesized
caaactgcttctcctcttggga

SEQ ID NO: 2570 - DNA, 22 bp, Artificial Sequence
  chemically synthesized
cttctcctcttgggaagtgtaa

SEQ ID NO: 2571 - DNA, 22 bp, Artificial Sequence
  chemically synthesized
ctcctcttgggaagtgtaagga

SEQ ID NO: 2572 - DNA, 22 bp, Artificial Sequence
  chemically synthesized
tcctcttgggaagtgtaaggaa

SEQ ID NO: 2573 - DNA, 22 bp, Artificial Sequence
  chemically synthesized
ctcttgggaagtgtaaggaagc

SEQ ID NO: 2574 - DNA, 22 bp, Artificial Sequence
  chemically synthesized
ttgggaagtgtaaggaagctgc

SEQ ID NO: 2575 - DNA, 22 bp, Artificial Sequence
  chemically synthesized
gggaagtgtaaggaagctgcag

SEQ ID NO: 2576 - DNA, 22 bp, Artificial Sequence
  chemically synthesized
ggaagtgtaaggaagctgcagc

SEQ ID NO: 2577 - DNA, 22 bp, Artificial Sequence
  chemically synthesized
cagcaccaggatcagtgaaacg

SEQ ID NO: 2578 - DNA, 22 bp, Artificial Sequence
  chemically synthesized
aggttctgggagagggtagcgc

SEQ ID NO: 2579 - DNA, 22 bp, Artificial Sequence
  chemically synthesized
tgggagagggtagcgcagggtg

SEQ ID NO: 2580 - DNA, 22 bp, Artificial Sequence
  chemically synthesized
ggagagggtagcgcagggtggc

SEQ ID NO: 2581 - DNA, 22 bp, Artificial Sequence
  chemically synthesized
agaaccgggcaggtcacgcatc

SEQ ID NO: 2582 - DNA, 22 bp, Artificial Sequence
  chemically synthesized
ccctcccaccccctgccaagct

SEQ ID NO: 2583 - DNA, 22 bp, Artificial Sequence
  chemically synthesized
cctcccaccccctgccaagctc

SEQ ID NO: 2584 - DNA, 22 bp, Artificial Sequence
  chemically synthesized
ccaccccctgccaagctctccc

SEQ ID NO: 2585 - DNA, 22 bp, Artificial Sequence
  chemically synthesized
ccaagctctccctcccaggatc

SEQ ID NO: 2586 - DNA, 22 bp, Artificial Sequence
  chemically synthesized
tccctcccaggatcctctctgg

SEQ ID NO: 2587 - DNA, 22 bp, Artificial Sequence
  chemically synthesized
cctcccaggatcctctctggct

SEQ ID NO: 2588 - DNA, 22 bp, Artificial Sequence
  chemically synthesized
ccaggatcctctctggctccat

SEQ ID NO: 2589 - DNA, 22 bp, Artificial Sequence
  chemically synthesized
tctggctccatcgtaagcaaac

SEQ ID NO: 2590 - DNA, 22 bp, Artificial Sequence
  chemically synthesized
tggctccatcgtaagcaaacct

SEQ ID NO: 2591 - DNA, 22 bp, Artificial Sequence
  chemically synthesized
gctccatcgtaagcaaacctta

SEQ ID NO: 2592 - DNA, 22 bp, Artificial Sequence
  chemically synthesized
catcgtaagcaaaccttagagg

SEQ ID NO: 2593 - DNA, 22 bp, Artificial Sequence
  chemically synthesized
agaggttctggcaaggagagag

SEQ ID NO: 2594 - DNA, 22 bp, Artificial Sequence
  chemically synthesized
gaggttctggcaaggagagaga

SEQ ID NO: 2595 - DNA, 22 bp, Artificial Sequence
  chemically synthesized
tggcaaggagagagatggctcc

SEQ ID NO: 2596 - DNA, 22 bp, Artificial Sequence
  chemically synthesized
gcaaggagagagatggctccag

SEQ ID NO: 2597 - DNA, 22 bp, Artificial Sequence
  chemically synthesized
caggaaatgggggtgtgtcacc

SEQ ID NO: 2598 - DNA, 22 bp, Artificial Sequence
  chemically synthesized
cctaacaggaggtgggggttag

SEQ ID NO: 2599 - DNA, 22 bp, Artificial Sequence
  chemically synthesized
acaggaggtgggggttagaccc

SEQ ID NO: 2600 - DNA, 22 bp, Artificial Sequence
  chemically synthesized
gacccaatatcaggagactagg

SEQ ID NO: 2601 - DNA, 22 bp, Artificial Sequence
  chemically synthesized
ggaaggaggaggcctaaggatg

SEQ ID NO: 2602 - DNA, 22 bp, Artificial Sequence
  chemically synthesized
aggatggggcttttctgtcacc

SEQ ID NO: 2603 - DNA, 22 bp, Artificial Sequence
  chemically synthesized
ttctgtcaccaatcctgtccct

SEQ ID NO: 2604 - DNA, 22 bp, Artificial Sequence
  chemically synthesized
tctgtcaccaatcctgtcccta

SEQ ID NO: 2605 - DNA, 22 bp, Artificial Sequence
  chemically synthesized
ctgtcaccaatcctgtccctag

SEQ ID NO: 2606 - DNA, 22 bp, Artificial Sequence
  chemically synthesized
tgtcaccaatcctgtccctagt

SEQ ID NO: 2607 - DNA, 22 bp, Artificial Sequence
  chemically synthesized
tcaccaatcctgtccctagtgg

SEQ ID NO: 2608 - DNA, 22 bp, Artificial Sequence
  chemically synthesized
tccctagtggccccactgtggg

SEQ ID NO: 2609 - DNA, 22 bp, Artificial Sequence
  chemically synthesized
gtggccccactgtggggtggag

SEQ ID NO: 2610 - DNA, 22 bp, Artificial Sequence
  chemically synthesized
tggggtggaggggacagataaa

SEQ ID NO: 2611 - DNA, 22 bp, Artificial Sequence
  chemically synthesized
accggccctgggaatataaggt

SEQ ID NO: 2612 - DNA, 22 bp, Artificial Sequence
  chemically synthesized
ggaatataaggtggtcccagct

SEQ ID NO: 2613 - DNA, 22 bp, Artificial Sequence
  chemically synthesized
ggggacacaggatccctggagg

SEQ ID NO: 2614 - DNA, 22 bp, Artificial Sequence
  chemically synthesized
gaggcagcaaacatgctgtcct

SEQ ID NO: 2615 - DNA, 22 bp, Artificial Sequence
  chemically synthesized
tcctgaagtggacataggggcc

SEQ ID NO: 2616 - DNA, 22 bp, Artificial Sequence
  chemically synthesized
aagtggacataggggcccgggt

SEQ ID NO: 2617 - DNA, 22 bp, Artificial Sequence
  chemically synthesized
gaggaagaagactagctgagct

SEQ ID NO: 2618 - DNA, 22 bp, Artificial Sequence
  chemically synthesized
gctgagctctcggacccctgga

SEQ ID NO: 2619 - DNA, 22 bp, Artificial Sequence
  chemically synthesized
agctctcggacccctggaagat

SEQ ID NO: 2620 - DNA, 22 bp, Artificial Sequence
  chemically synthesized
tcggacccctggaagatgccat

SEQ ID NO: 2621 - DNA, 22 bp, Artificial Sequence
  chemically synthesized
ggacccctggaagatgccatga

SEQ ID NO: 2622 - DNA, 22 bp, Artificial Sequence
  chemically synthesized
gaagatgccatgacagggggct

SEQ ID NO: 2623 - DNA, 22 bp, Artificial Sequence
  chemically synthesized
gaagagctagcacagactagag

SEQ ID NO: 2624 - DNA, 22 bp, Artificial Sequence
  chemically synthesized
gcacagactagagaggtaaggg

SEQ ID NO: 2625 - DNA, 22 bp, Artificial Sequence
  chemically synthesized
gagaggtaaggggggtagggga

SEQ ID NO: 2626 - DNA, 22 bp, Artificial Sequence
  chemically synthesized
cccaaatgaaaggagtgagagg

SEQ ID NO: 2627 - DNA, 22 bp, Artificial Sequence
  chemically synthesized
aagccagggagacggggtactt

SEQ ID NO: 2628 - DNA, 22 bp, Artificial Sequence
  chemically synthesized
tggggttgtccagaaaaacggt

SEQ ID NO: 2629 - DNA, 22 bp, Artificial Sequence
  chemically synthesized
ggggttgtccagaaaaacggtg

SEQ ID NO: 2630 - DNA, 22 bp, Artificial Sequence
  chemically synthesized
gggttgtccagaaaaacggtga

SEQ ID NO: 2631 - DNA, 22 bp, Artificial Sequence
  chemically synthesized
tccagaaaaacggtgatgatgc

SEQ ID NO: 2632 - DNA, 22 bp, Artificial Sequence
  chemically synthesized
caagaaggggaggcgggacgca

SEQ ID NO: 2633 - DNA, 22 bp, Artificial Sequence
  chemically synthesized
agaaacgagagatggcacaggc

SEQ ID NO: 2634 - DNA, 22 bp, Artificial Sequence
  chemically synthesized
ggtgagggaggagagatgcccg

SEQ ID NO: 2635 - DNA, 22 bp, Artificial Sequence
  chemically synthesized
agaggacatcacgtggtgcagc

SEQ ID NO: 2636 - DNA, 22 bp, Artificial Sequence
  chemically synthesized
cggaaagagcatccttgggcag

SEQ ID NO: 2637 - DNA, 22 bp, Artificial Sequence
  chemically synthesized
gggcagcaacacagcagagagc

SEQ ID NO: 2638 - DNA, 22 bp, Artificial Sequence
  chemically synthesized
ggcagcaacacagcagagagca

SEQ ID NO: 2639 - DNA, 22 bp, Artificial Sequence
  chemically synthesized
aaggaggcggcagggaaggatc

SEQ ID NO: 2640 - DNA, 22 bp, Artificial Sequence
  chemically synthesized
ggccagccgtagaggtgaccca

SEQ ID NO: 2641 - DNA, 22 bp, Artificial Sequence
  chemically synthesized
cagacagaaagcggcacaggcc

SEQ ID NO: 2642 - DNA, 22 bp, Artificial Sequence
  chemically synthesized
cctgggaaggggaaacagtggg

SEQ ID NO: 2643 - DNA, 22 bp, Artificial Sequence
  chemically synthesized
ggaaggggaaacagtgggccag

SEQ ID NO: 2644 - DNA, 22 bp, Artificial Sequence
  chemically synthesized
aaagtggtccggactcaggaga

SEQ ID NO: 2645 - DNA, 22 bp, Artificial Sequence
  chemically synthesized
aggagagagacggcagcgttag

SEQ ID NO: 2646 - DNA, 22 bp, Artificial Sequence
  chemically synthesized
gagggcagagttccggcggcac

SEQ ID NO: 2647 - DNA, 22 bp, Artificial Sequence
  chemically synthesized
cggcggcacagcaagggcactc

SEQ ID NO: 2648 - DNA, 22 bp, Artificial Sequence
  chemically synthesized
gggggcgagaggagggcagcgc

SEQ ID NO: 2649 - DNA, 22 bp, Artificial Sequence
  chemically synthesized
agctatgggagctggctcaggt

SEQ ID NO: 2650 - DNA, 22 bp, Artificial Sequence
  chemically synthesized
tgggagctggctcaggttcagg

SEQ ID NO: 2651 - DNA, 22 bp, Artificial Sequence
  chemically synthesized
gctcaggttcaggagagggcag

SEQ ID NO: 2652 - DNA, 22 bp, Artificial Sequence
  chemically synthesized
aggttcaggagagggcagggca

SEQ ID NO: 2653 - DNA, 22 bp, Artificial Sequence
  chemically synthesized
aggagagggcagggcagggaag

SEQ ID NO: 2654 - DNA, 22 bp, Artificial Sequence
  chemically synthesized
gaggggctcaacatcggaagag

SEQ ID NO: 2655 - DNA, 22 bp, Artificial Sequence
  chemically synthesized
aacatcggaagaggggaagtcg

SEQ ID NO: 2656 - DNA, 22 bp, Artificial Sequence
  chemically synthesized
catgggtcagcacaggctgcca

SEQ ID NO: 2657 - DNA, 22 bp, Artificial Sequence
  chemically synthesized
ccaaagccagggccagttaaag

SEQ ID NO: 2658 - DNA, 22 bp, Artificial Sequence
  chemically synthesized
aagcgactccaatgcggaagag

SEQ ID NO: 2659 - DNA, 22 bp, Artificial Sequence
  chemically synthesized
caatgcggaagagagtaggtcg

SEQ ID NO: 2660 - DNA, 22 bp, Artificial Sequence
  chemically synthesized
gggcagagtggtcagcacagag

SEQ ID NO: 2661 - DNA, 22 bp, Artificial Sequence
  chemically synthesized
agcccagggccagttgaagcgg

SEQ ID NO: 2662 - DNA, 22 bp, Artificial Sequence
  chemically synthesized
aagcggctccaattcggaagtg

SEQ ID NO: 2663 - DNA, 22 bp, Artificial Sequence
  chemically synthesized
caattcggaagtggggtggtcg

SEQ ID NO: 2664 - DNA, 22 bp, Artificial Sequence
  chemically synthesized
ggaagtggggtggtcgaagggg

SEQ ID NO: 2665 - DNA, 22 bp, Artificial Sequence
  chemically synthesized
ggacggggtgtcagcatagggt

SEQ ID NO: 2666 - DNA, 22 bp, Artificial Sequence
  chemically synthesized
gcaacggggaaggaggatgccc

SEQ ID NO: 2667 - DNA, 22 bp, Artificial Sequence
  chemically synthesized
gccccgggagacgccgggcggg

SEQ ID NO: 2668 - DNA, 22 bp, Artificial Sequence
  chemically synthesized
acctggtgcagggcgctgatac

SEQ ID NO: 2669 - DNA, 22 bp, Artificial Sequence
  chemically synthesized
gtgcagggcgctgataccgtcg

SEQ ID NO: 2670 - DNA, 22 bp, Artificial Sequence
  chemically synthesized
ataccgtcggcgttggtggagt

SEQ ID NO: 2671 - DNA, 22 bp, Artificial Sequence
  chemically synthesized
gtggagtccagcacggcgcggg

SEQ ID NO: 2672 - DNA, 22 bp, Artificial Sequence
  chemically synthesized
ggcgccggggccagggtcggcg

SEQ ID NO: 2673 - DNA, 22 bp, Artificial Sequence
  chemically synthesized
gtccaggtcgccgcccgcacag

SEQ ID NO: 2674 - DNA, 22 bp, Artificial Sequence
  chemically synthesized
ggcggcgcgctcgaagcggacg

SEQ ID NO: 2675 - DNA, 22 bp, Artificial Sequence
  chemically synthesized
gaagcggacggtgcgggcgcgg

SEQ ID NO: 2676 - DNA, 22 bp, Artificial Sequence
  chemically synthesized
tccggggccaggctcggcgccc

SEQ ID NO: 2677 - DNA, 22 bp, Artificial Sequence
  chemically synthesized
cggggccaggctcggcgcccgc

SEQ ID NO: 2678 - DNA, 22 bp, Artificial Sequence
  chemically synthesized
ggcgcccgcccgcgccccccac

SEQ ID NO: 2679 - DNA, 22 bp, Artificial Sequence
  chemically synthesized
ccgcagctgctcccgtcgccgc

SEQ ID NO: 2680 - DNA, 22 bp, Artificial Sequence
  chemically synthesized
ctcccgtcgccgctcccgggca

SEQ ID NO: 2681 - DNA, 22 bp, Artificial Sequence
  chemically synthesized
ccgtcgccgctcccgggcagcc

SEQ ID NO: 2682 - DNA, 22 bp, Artificial Sequence
  chemically synthesized
ccgggcagccgccgccgccgcc

SEQ ID NO: 2683 - DNA, 22 bp, Artificial Sequence
  chemically synthesized
tccggacatcgcaccgcccgcc

SEQ ID NO: 2684 - DNA, 22 bp, Artificial Sequence
  chemically synthesized
cggacatcgcaccgcccgcccg

SEQ ID NO: 2685 - DNA, 22 bp, Artificial Sequence
  chemically synthesized
gggctcggcgctcgctcgctcg

SEQ ID NO: 2686 - DNA, 22 bp, Artificial Sequence
  chemically synthesized
ggcgctcgctcgctcgctgggc

SEQ ID NO: 2687 - DNA, 22 bp, Artificial Sequence
  chemically synthesized
gctcgctcgctgggcgggcggg

SEQ ID NO: 2688 - DNA, 22 bp, Artificial Sequence
  chemically synthesized
gctcgctgggcgggcgggcggt

SEQ ID NO: 2689 - DNA, 22 bp, Artificial Sequence
  chemically synthesized
gctgggcgggcgggcggtgcga

SEQ ID NO: 2690 - DNA, 22 bp, Artificial Sequence
  chemically synthesized
ggcgggcgggcggtgcgatgtc

SEQ ID NO: 2691 - DNA, 22 bp, Artificial Sequence
  chemically synthesized
gcccgggggcggcggcggcggc

SEQ ID NO: 2692 - DNA, 22 bp, Artificial Sequence
  chemically synthesized
cccgggagcggcgacgggagca

SEQ ID NO: 2693 - DNA, 22 bp, Artificial Sequence
  chemically synthesized
cggcagtggggggcgcgggcgg

SEQ ID NO: 2694 - DNA, 22 bp, Artificial Sequence
  chemically synthesized
gccccggagagcgccgcgcccg

SEQ ID NO: 2695 - DNA, 22 bp, Artificial Sequence
  chemically synthesized
cgagcgcgccgccgagttcctg

SEQ ID NO: 2696 - DNA, 22 bp, Artificial Sequence
  chemically synthesized
gagcgcgccgccgagttcctgg

SEQ ID NO: 2697 - DNA, 22 bp, Artificial Sequence
  chemically synthesized
ctggcggcctgtgcgggcggcg

SEQ ID NO: 2698 - DNA, 22 bp, Artificial Sequence
  chemically synthesized
gcggcctgtgcgggcggcgacc

SEQ ID NO: 2699 - DNA, 22 bp, Artificial Sequence
  chemically synthesized
tgcgggcggcgacctggacgag

SEQ ID NO: 2700 - DNA, 22 bp, Artificial Sequence
  chemically synthesized
gacgaggcgcgtctgatgctgc

SEQ ID NO: 2701 - DNA, 22 bp, Artificial Sequence
  chemically synthesized
atgctgcgcgccgccgaccctg

SEQ ID NO: 2702 - DNA, 22 bp, Artificial Sequence
  chemically synthesized
cgcgccgccgaccctggccccg

SEQ ID NO: 2703 - DNA, 22 bp, Artificial Sequence
  chemically synthesized
gccccggcgccgagctcgaccc

SEQ ID NO: 2704 - DNA, 22 bp, Artificial Sequence
  chemically synthesized
gaccccgccgcgccgccgcccg

SEQ ID NO: 2705 - DNA, 22 bp, Artificial Sequence
  chemically synthesized
gactccaccaacgccgacggta

SEQ ID NO: 2706 - DNA, 22 bp, Artificial Sequence
  chemically synthesized
caccaacgccgacggtatcagc

SEQ ID NO: 2707 - DNA, 22 bp, Artificial Sequence
  chemically synthesized
caccaggtcagcgccccccgcc

SEQ ID NO: 2708 - DNA, 22 bp, Artificial Sequence
  chemically synthesized
ccggggccaggtccaccctctg

SEQ ID NO: 2709 - DNA, 22 bp, Artificial Sequence
  chemically synthesized
tgctgcgccacctggggcatcc

SEQ ID NO: 2710 - DNA, 22 bp, Artificial Sequence
  chemically synthesized
ctgcgccacctggggcatcctc

SEQ ID NO: 2711 - DNA, 22 bp, Artificial Sequence
  chemically synthesized
cgccacctggggcatcctcctt

SEQ ID NO: 2712 - DNA, 22 bp, Artificial Sequence
  chemically synthesized
gggcatcctccttccccgttgc

SEQ ID NO: 2713 - DNA, 22 bp, Artificial Sequence
  chemically synthesized
cttccccgttgccagtctcgat

SEQ ID NO: 2714 - DNA, 22 bp, Artificial Sequence
  chemically synthesized
ccccgttgccagtctcgatccg

SEQ ID NO: 2715 - DNA, 22 bp, Artificial Sequence
  chemically synthesized
cccgttgccagtctcgatccgc

SEQ ID NO: 2716 - DNA, 22 bp, Artificial Sequence
  chemically synthesized
ccagtctcgatccgccccgtcg

SEQ ID NO: 2717 - DNA, 22 bp, Artificial Sequence
  chemically synthesized
gatccgccccgtcgttcctggc

SEQ ID NO: 2718 - DNA, 22 bp, Artificial Sequence
  chemically synthesized
ctggccctgggctttgccaccc

SEQ ID NO: 2719 - DNA, 22 bp, Artificial Sequence
  chemically synthesized
gccctgggctttgccaccctat

SEQ ID NO: 2720 - DNA, 22 bp, Artificial Sequence
  chemically synthesized
ggctttgccaccctatgctgac

SEQ ID NO: 2721 - DNA, 22 bp, Artificial Sequence
  chemically synthesized
tgccaccctatgctgacacccc

SEQ ID NO: 2722 - DNA, 22 bp, Artificial Sequence
  chemically synthesized
gccaccctatgctgacaccccg

SEQ ID NO: 2723 - DNA, 22 bp, Artificial Sequence
  chemically synthesized
ccaccctatgctgacaccccgt

SEQ ID NO: 2724 - DNA, 22 bp, Artificial Sequence
  chemically synthesized
tgctgacaccccgtcccagtcc

SEQ ID NO: 2725 - DNA, 22 bp, Artificial Sequence
  chemically synthesized
acaccccgtcccagtccccctt

SEQ ID NO: 2726 - DNA, 22 bp, Artificial Sequence
  chemically synthesized
accattccccttcgaccacccc

SEQ ID NO: 2727 - DNA, 22 bp, Artificial Sequence
  chemically synthesized
ccattccccttcgaccacccca

SEQ ID NO: 2728 - DNA, 22 bp, Artificial Sequence
  chemically synthesized
cccttcgaccaccccacttccg

SEQ ID NO: 2729 - DNA, 22 bp, Artificial Sequence
  chemically synthesized
cgaccaccccacttccgaattg

SEQ ID NO: 2730 - DNA, 22 bp, Artificial Sequence
  chemically synthesized
gaccaccccacttccgaattgg

SEQ ID NO: 2731 - DNA, 22 bp, Artificial Sequence
  chemically synthesized
ccgaattggagccgcttcaact

SEQ ID NO: 2732 - DNA, 22 bp, Artificial Sequence
  chemically synthesized
cgaattggagccgcttcaactg

SEQ ID NO: 2733 - DNA, 22 bp, Artificial Sequence
  chemically synthesized
gagccgcttcaactggccctgg

SEQ ID NO: 2734 - DNA, 22 bp, Artificial Sequence
  chemically synthesized
caactggccctgggcttagcca

SEQ ID NO: 2735 - DNA, 22 bp, Artificial Sequence
  chemically synthesized
aactggccctgggcttagccac

SEQ ID NO: 2736 - DNA, 22 bp, Artificial Sequence
  chemically synthesized
gccctgggcttagccactctgt

SEQ ID NO: 2737 - DNA, 22 bp, Artificial Sequence
  chemically synthesized
ggcttagccactctgtgctgac

SEQ ID NO: 2738 - DNA, 22 bp, Artificial Sequence
  chemically synthesized
agccactctgtgctgaccactc

SEQ ID NO: 2739 - DNA, 22 bp, Artificial Sequence
  chemically synthesized
gccactctgtgctgaccactct

SEQ ID NO: 2740 - DNA, 22 bp, Artificial Sequence
  chemically synthesized
tgtgctgaccactctgccccag

SEQ ID NO: 2741 - DNA, 22 bp, Artificial Sequence
  chemically synthesized
tgctgaccactctgccccaggc

SEQ ID NO: 2742 - DNA, 22 bp, Artificial Sequence
  chemically synthesized
accactctgccccaggcctcct

SEQ ID NO: 2743 - DNA, 22 bp, Artificial Sequence
  chemically synthesized
tgccccaggcctccttaccatt

SEQ ID NO: 2744 - DNA, 22 bp, Artificial Sequence
  chemically synthesized
ccccaggcctccttaccattcc

SEQ ID NO: 2745 - DNA, 22 bp, Artificial Sequence
  chemically synthesized
cttaccattccccttcgaccta

SEQ ID NO: 2746 - DNA, 22 bp, Artificial Sequence
  chemically synthesized
accattccccttcgacctactc

SEQ ID NO: 2747 - DNA, 22 bp, Artificial Sequence
  chemically synthesized
ccattccccttcgacctactct

SEQ ID NO: 2748 - DNA, 22 bp, Artificial Sequence
  chemically synthesized
cccttcgacctactctcttccg

SEQ ID NO: 2749 - DNA, 22 bp, Artificial Sequence
  chemically synthesized
cgacctactctcttccgcattg

SEQ ID NO: 2750 - DNA, 22 bp, Artificial Sequence
  chemically synthesized
gacctactctcttccgcattgg

SEQ ID NO: 2751 - DNA, 22 bp, Artificial Sequence
  chemically synthesized
ctctcttccgcattggagtcgc

SEQ ID NO: 2752 - DNA, 22 bp, Artificial Sequence
  chemically synthesized
tcttccgcattggagtcgcttt

SEQ ID NO: 2753 - DNA, 22 bp, Artificial Sequence
  chemically synthesized
ttccgcattggagtcgctttaa

SEQ ID NO: 2754 - DNA, 22 bp, Artificial Sequence
  chemically synthesized
ccgcattggagtcgctttaact

SEQ ID NO: 2755 - DNA, 22 bp, Artificial Sequence
  chemically synthesized
cgcattggagtcgctttaactg

SEQ ID NO: 2756 - DNA, 22 bp, Artificial Sequence
  chemically synthesized
gagtcgctttaactggccctgg

SEQ ID NO: 2757 - DNA, 22 bp, Artificial Sequence
  chemically synthesized
taactggccctggctttggcag

SEQ ID NO: 2758 - DNA, 22 bp, Artificial Sequence
  chemically synthesized
aactggccctggctttggcagc

SEQ ID NO: 2759 - DNA, 22 bp, Artificial Sequence
  chemically synthesized
actggccctggctttggcagcc

SEQ ID NO: 2760 - DNA, 22 bp, Artificial Sequence
  chemically synthesized
gccctggctttggcagcctgtg

SEQ ID NO: 2761 - DNA, 22 bp, Artificial Sequence
  chemically synthesized
gctttggcagcctgtgctgacc

SEQ ID NO: 2762 - DNA, 22 bp, Artificial Sequence
  chemically synthesized
tggcagcctgtgctgacccatg

SEQ ID NO: 2763 - DNA, 22 bp, Artificial Sequence
  chemically synthesized
ggcagcctgtgctgacccatgc

SEQ ID NO: 2764 - DNA, 22 bp, Artificial Sequence
  chemically synthesized
gcagcctgtgctgacccatgca

SEQ ID NO: 2765 - DNA, 22 bp, Artificial Sequence
  chemically synthesized
tgctgacccatgcagtcctcct

SEQ ID NO: 2766 - DNA, 22 bp, Artificial Sequence
  chemically synthesized
acccatgcagtcctccttacca

SEQ ID NO: 2767 - DNA, 22 bp, Artificial Sequence
  chemically synthesized
cttaccatccctccctcgactt

SEQ ID NO: 2768 - DNA, 22 bp, Artificial Sequence
  chemically synthesized
accatccctccctcgacttccc

SEQ ID NO: 2769 - DNA, 22 bp, Artificial Sequence
  chemically synthesized
ccatccctccctcgacttcccc

SEQ ID NO: 2770 - DNA, 22 bp, Artificial Sequence
  chemically synthesized
cctcgacttcccctcttccgat

SEQ ID NO: 2771 - DNA, 22 bp, Artificial Sequence
  chemically synthesized
gacttcccctcttccgatgttg

SEQ ID NO: 2772 - DNA, 22 bp, Artificial Sequence
  chemically synthesized
cccctcttccgatgttgagccc

SEQ ID NO: 2773 - DNA, 22 bp, Artificial Sequence
  chemically synthesized
ccctcttccgatgttgagcccc

SEQ ID NO: 2774 - DNA, 22 bp, Artificial Sequence
  chemically synthesized
ttccgatgttgagcccctccag

SEQ ID NO: 2775 - DNA, 22 bp, Artificial Sequence
  chemically synthesized
ccgatgttgagcccctccagcc

SEQ ID NO: 2776 - DNA, 22 bp, Artificial Sequence
  chemically synthesized
cgatgttgagcccctccagccg

SEQ ID NO: 2777 - DNA, 22 bp, Artificial Sequence
  chemically synthesized
agcccctccagccggtcctgga

SEQ ID NO: 2778 - DNA, 22 bp, Artificial Sequence
  chemically synthesized
cagccggtcctggactttgtct

SEQ ID NO: 2779 - DNA, 22 bp, Artificial Sequence
  chemically synthesized
gactttgtctccttccctgccc

SEQ ID NO: 2780 - DNA, 22 bp, Artificial Sequence
  chemically synthesized
tgtctccttccctgccctgccc

SEQ ID NO: 2781 - DNA, 22 bp, Artificial Sequence
  chemically synthesized
gtctccttccctgccctgccct

SEQ ID NO: 2782 - DNA, 22 bp, Artificial Sequence
  chemically synthesized
tctccttccctgccctgccctc

SEQ ID NO: 2783 - DNA, 22 bp, Artificial Sequence
  chemically synthesized
cttccctgccctgccctctcct

SEQ ID NO: 2784 - DNA, 22 bp, Artificial Sequence
  chemically synthesized
ccctgccctgccctctcctgaa

SEQ ID NO: 2785 - DNA, 22 bp, Artificial Sequence
  chemically synthesized
cctgccctgccctctcctgaac

SEQ ID NO: 2786 - DNA, 22 bp, Artificial Sequence
  chemically synthesized
ccctgccctctcctgaacctga

SEQ ID NO: 2787 - DNA, 22 bp, Artificial Sequence
  chemically synthesized
ccctctcctgaacctgagccag

SEQ ID NO: 2788 - DNA, 22 bp, Artificial Sequence
  chemically synthesized
tcctgaacctgagccagctccc

SEQ ID NO: 2789 - DNA, 22 bp, Artificial Sequence
  chemically synthesized
ctgaacctgagccagctcccat

SEQ ID NO: 2790 - DNA, 22 bp, Artificial Sequence
  chemically synthesized
aacctgagccagctcccatagc

SEQ ID NO: 2791 - DNA, 22 bp, Artificial Sequence
  chemically synthesized
agccagctcccatagctcagtc

SEQ ID NO: 2792 - DNA, 22 bp, Artificial Sequence
  chemically synthesized
ccatagctcagtctggtctatc

SEQ ID NO: 2793 - DNA, 22 bp, Artificial Sequence
  chemically synthesized
agtctggtctatctgcctggcc

SEQ ID NO: 2794 - DNA, 22 bp, Artificial Sequence
  chemically synthesized
gtctatctgcctggccctggcc

SEQ ID NO: 2795 - DNA, 22 bp, Artificial Sequence
  chemically synthesized
tctgcctggccctggccattgt

SEQ ID NO: 2796 - DNA, 22 bp, Artificial Sequence
  chemically synthesized
cctggccctggccattgtcact

SEQ ID NO: 2797 - DNA, 22 bp, Artificial Sequence
  chemically synthesized
gccctggccattgtcactttgc

SEQ ID NO: 2798 - DNA, 22 bp, Artificial Sequence
  chemically synthesized
gccattgtcactttgcgctgcc

SEQ ID NO: 2799 - DNA, 22 bp, Artificial Sequence
  chemically synthesized
tcactttgcgctgccctcctct

SEQ ID NO: 2800 - DNA, 22 bp, Artificial Sequence
  chemically synthesized
tgcgctgccctcctctcgcccc

SEQ ID NO: 2801 - DNA, 22 bp, Artificial Sequence
  chemically synthesized
gcgctgccctcctctcgccccc

SEQ ID NO: 2802 - DNA, 22 bp, Artificial Sequence
  chemically synthesized
cgctgccctcctctcgcccccg

SEQ ID NO: 2803 - DNA, 22 bp, Artificial Sequence
  chemically synthesized
ccctcctctcgcccccgagtgc

SEQ ID NO: 2804 - DNA, 22 bp, Artificial Sequence
  chemically synthesized
ctctcgcccccgagtgcccttg

SEQ ID NO: 2805 - DNA, 22 bp, Artificial Sequence
  chemically synthesized
tcgcccccgagtgcccttgctg

SEQ ID NO: 2806 - DNA, 22 bp, Artificial Sequence
  chemically synthesized
gcccccgagtgcccttgctgtg

SEQ ID NO: 2807 - DNA, 22 bp, Artificial Sequence
  chemically synthesized
gctgtgccgccggaactctgcc

SEQ ID NO: 2808 - DNA, 22 bp, Artificial Sequence
  chemically synthesized
ctgtgccgccggaactctgccc

SEQ ID NO: 2809 - DNA, 22 bp, Artificial Sequence
  chemically synthesized
tgccgccggaactctgccctct

SEQ ID NO: 2810 - DNA, 22 bp, Artificial Sequence
  chemically synthesized
tgccctctaacgctgccgtctc

SEQ ID NO: 2811 - DNA, 22 bp, Artificial Sequence
  chemically synthesized
ccctctaacgctgccgtctctc

SEQ ID NO: 2812 - DNA, 22 bp, Artificial Sequence
  chemically synthesized
taacgctgccgtctctctcctg

SEQ ID NO: 2813 - DNA, 22 bp, Artificial Sequence
  chemically synthesized
acgctgccgtctctctcctgag

SEQ ID NO: 2814 - DNA, 22 bp, Artificial Sequence
  chemically synthesized
ccgtctctctcctgagtccgga

SEQ ID NO: 2815 - DNA, 22 bp, Artificial Sequence
  chemically synthesized
tctcctgagtccggaccacttt

SEQ ID NO: 2816 - DNA, 22 bp, Artificial Sequence
  chemically synthesized
tcctgagtccggaccactttga

SEQ ID NO: 2817 - DNA, 22 bp, Artificial Sequence
  chemically synthesized
ctgagtccggaccactttgagc

SEQ ID NO: 2818 - DNA, 22 bp, Artificial Sequence
  chemically synthesized
agtccggaccactttgagctct

SEQ ID NO: 2819 - DNA, 22 bp, Artificial Sequence
  chemically synthesized
tgagctctactggcttctgcgc

SEQ ID NO: 2820 - DNA, 22 bp, Artificial Sequence
  chemically synthesized
gagctctactggcttctgcgcc

SEQ ID NO: 2821 - DNA, 22 bp, Artificial Sequence
  chemically synthesized
agctctactggcttctgcgccg

SEQ ID NO: 2822 - DNA, 22 bp, Artificial Sequence
  chemically synthesized
tactggcttctgcgccgcctct

SEQ ID NO: 2823 - DNA, 22 bp, Artificial Sequence
  chemically synthesized
ctggcttctgcgccgcctctgg

SEQ ID NO: 2824 - DNA, 22 bp, Artificial Sequence
  chemically synthesized
gcttctgcgccgcctctggccc

SEQ ID NO: 2825 - DNA, 22 bp, Artificial Sequence
  chemically synthesized
ctgcgccgcctctggcccactg

SEQ ID NO: 2826 - DNA, 22 bp, Artificial Sequence
  chemically synthesized
tgcgccgcctctggcccactgt

SEQ ID NO: 2827 - DNA, 22 bp, Artificial Sequence
  chemically synthesized
cgccgcctctggcccactgttt

SEQ ID NO: 2828 - DNA, 22 bp, Artificial Sequence
  chemically synthesized
tggcccactgtttccccttccc

SEQ ID NO: 2829 - DNA, 22 bp, Artificial Sequence
  chemically synthesized
gcccactgtttccccttcccag

SEQ ID NO: 2830 - DNA, 22 bp, Artificial Sequence
  chemically synthesized
tttccccttcccaggcaggtcc

SEQ ID NO: 2831 - DNA, 22 bp, Artificial Sequence
  chemically synthesized
ccccttcccaggcaggtcctgc

SEQ ID NO: 2832 - DNA, 22 bp, Artificial Sequence
  chemically synthesized
cccttcccaggcaggtcctgct

SEQ ID NO: 2833 - DNA, 22 bp, Artificial Sequence
  chemically synthesized
cccaggcaggtcctgctttctc

SEQ ID NO: 2834 - DNA, 22 bp, Artificial Sequence
  chemically synthesized
ccaggcaggtcctgctttctct

SEQ ID NO: 2835 - DNA, 22 bp, Artificial Sequence
  chemically synthesized
ctttctctgacctgcattctct

SEQ ID NO: 2836 - DNA, 22 bp, Artificial Sequence
  chemically synthesized
tctctgacctgcattctctccc

SEQ ID NO: 2837 - DNA, 22 bp, Artificial Sequence
  chemically synthesized
ctctgacctgcattctctcccc

SEQ ID NO: 2838 - DNA, 22 bp, Artificial Sequence
  chemically synthesized
tctgacctgcattctctcccct

SEQ ID NO: 2839 - DNA, 22 bp, Artificial Sequence
  chemically synthesized
tgacctgcattctctcccctgg

SEQ ID NO: 2840 - DNA, 22 bp, Artificial Sequence
  chemically synthesized
acctgcattctctcccctgggc

SEQ ID NO: 2841 - DNA, 22 bp, Artificial Sequence
  chemically synthesized
cattctctcccctgggcctgtg

SEQ ID NO: 2842 - DNA, 22 bp, Artificial Sequence
  chemically synthesized
tctcccctgggcctgtgccgct

SEQ ID NO: 2843 - DNA, 22 bp, Artificial Sequence
  chemically synthesized
tcccctgggcctgtgccgcttt

SEQ ID NO: 2844 - DNA, 22 bp, Artificial Sequence
  chemically synthesized
ccctgggcctgtgccgctttct

SEQ ID NO: 2845 - DNA, 22 bp, Artificial Sequence
  chemically synthesized
ggcctgtgccgctttctgtctg

SEQ ID NO: 2846 - DNA, 22 bp, Artificial Sequence
  chemically synthesized
tgccgctttctgtctgcagctt

SEQ ID NO: 2847 - DNA, 22 bp, Artificial Sequence
  chemically synthesized
tctgtctgcagcttgtggcctg

SEQ ID NO: 2848 - DNA, 22 bp, Artificial Sequence
  chemically synthesized
ctgtctgcagcttgtggcctgg

SEQ ID NO: 2849 - DNA, 22 bp, Artificial Sequence
  chemically synthesized
tgtctgcagcttgtggcctggg

SEQ ID NO: 2850 - DNA, 22 bp, Artificial Sequence
  chemically synthesized
tctgcagcttgtggcctgggtc

SEQ ID NO: 2851 - DNA, 22 bp, Artificial Sequence
  chemically synthesized
cagcttgtggcctgggtcacct

SEQ ID NO: 2852 - DNA, 22 bp, Artificial Sequence
  chemically synthesized
gtggcctgggtcacctctacgg

SEQ ID NO: 2853 - DNA, 22 bp, Artificial Sequence
  chemically synthesized
tggcctgggtcacctctacggc

SEQ ID NO: 2854 - DNA, 22 bp, Artificial Sequence
  chemically synthesized
ggtcacctctacggctggccca

SEQ ID NO: 2855 - DNA, 22 bp, Artificial Sequence
  chemically synthesized
tacggctggcccagatccttcc

SEQ ID NO: 2856 - DNA, 22 bp, Artificial Sequence
  chemically synthesized
cggctggcccagatccttccct

SEQ ID NO: 2857 - DNA, 22 bp, Artificial Sequence
  chemically synthesized
gcccagatccttccctgccgcc

SEQ ID NO: 2858 - DNA, 22 bp, Artificial Sequence
  chemically synthesized
ccctgccgcctccttcaggttc

SEQ ID NO: 2859 - DNA, 22 bp, Artificial Sequence
  chemically synthesized
cctgccgcctccttcaggttcc

SEQ ID NO: 2860 - DNA, 22 bp, Artificial Sequence
  chemically synthesized
ccgcctccttcaggttccgtct

SEQ ID NO: 2861 - DNA, 22 bp, Artificial Sequence
  chemically synthesized
cttcaggttccgtcttcctcca

SEQ ID NO: 2862 - DNA, 22 bp, Artificial Sequence
  chemically synthesized
caggttccgtcttcctccactc

SEQ ID NO: 2863 - DNA, 22 bp, Artificial Sequence
  chemically synthesized
aggttccgtcttcctccactcc

SEQ ID NO: 2864 - DNA, 22 bp, Artificial Sequence
  chemically synthesized
cgtcttcctccactccctcttc

SEQ ID NO: 2865 - DNA, 22 bp, Artificial Sequence
  chemically synthesized
cctccactccctcttccccttg

SEQ ID NO: 2866 - DNA, 22 bp, Artificial Sequence
  chemically synthesized
ctccactccctcttccccttgc

SEQ ID NO: 2867 - DNA, 22 bp, Artificial Sequence
  chemically synthesized
cactccctcttccccttgctct

SEQ ID NO: 2868 - DNA, 22 bp, Artificial Sequence
  chemically synthesized
cctcttccccttgctctctgct

SEQ ID NO: 2869 - DNA, 22 bp, Artificial Sequence
  chemically synthesized
ttccccttgctctctgctgtgt

SEQ ID NO: 2870 - DNA, 22 bp, Artificial Sequence
  chemically synthesized
ccccttgctctctgctgtgttg

SEQ ID NO: 2871 - DNA, 22 bp, Artificial Sequence
  chemically synthesized
cccttgctctctgctgtgttgc

SEQ ID NO: 2872 - DNA, 22 bp, Artificial Sequence
  chemically synthesized
gctctctgctgtgttgctgccc

SEQ ID NO: 2873 - DNA, 22 bp, Artificial Sequence
  chemically synthesized
ctctctgctgtgttgctgccca

SEQ ID NO: 2874 - DNA, 22 bp, Artificial Sequence
  chemically synthesized
tctgctgtgttgctgcccaagg

SEQ ID NO: 2875 - DNA, 22 bp, Artificial Sequence
  chemically synthesized
tgctgtgttgctgcccaaggat

SEQ ID NO: 2876 - DNA, 22 bp, Artificial Sequence
  chemically synthesized
ctgtgttgctgcccaaggatgc

SEQ ID NO: 2877 - DNA, 22 bp, Artificial Sequence
  chemically synthesized
tgttgctgcccaaggatgctct

SEQ ID NO: 2878 - DNA, 22 bp, Artificial Sequence
  chemically synthesized
ctgcccaaggatgctctttccg

SEQ ID NO: 2879 - DNA, 22 bp, Artificial Sequence
  chemically synthesized
cccaaggatgctctttccggag

SEQ ID NO: 2880 - DNA, 22 bp, Artificial Sequence
  chemically synthesized
tttccggagcacttccttctcg

SEQ ID NO: 2881 - DNA, 22 bp, Artificial Sequence
  chemically synthesized
tccggagcacttccttctcggc

SEQ ID NO: 2882 - DNA, 22 bp, Artificial Sequence
  chemically synthesized
ccggagcacttccttctcggcg

SEQ ID NO: 2883 - DNA, 22 bp, Artificial Sequence
  chemically synthesized
cggagcacttccttctcggcgc

SEQ ID NO: 2884 - DNA, 22 bp, Artificial Sequence
  chemically synthesized
ccttctcggcgctgcaccacgt

SEQ ID NO: 2885 - DNA, 22 bp, Artificial Sequence
  chemically synthesized
cttctcggcgctgcaccacgtg

SEQ ID NO: 2886 - DNA, 22 bp, Artificial Sequence
  chemically synthesized
ctcggcgctgcaccacgtgatg

SEQ ID NO: 2887 - DNA, 22 bp, Artificial Sequence
  chemically synthesized
tcggcgctgcaccacgtgatgt

SEQ ID NO: 2888 - DNA, 22 bp, Artificial Sequence
  chemically synthesized
ggcgctgcaccacgtgatgtcc

SEQ ID NO: 2889 - DNA, 22 bp, Artificial Sequence
  chemically synthesized
caccacgtgatgtcctctgagc

SEQ ID NO: 2890 - DNA, 22 bp, Artificial Sequence
  chemically synthesized
tgagcggatcctccccgtgtct

SEQ ID NO: 2891 - DNA, 22 bp, Artificial Sequence
  chemically synthesized
agcggatcctccccgtgtctgg

SEQ ID NO: 2892 - DNA, 22 bp, Artificial Sequence
  chemically synthesized
cccgtgtctgggtcctctccgg

SEQ ID NO: 2893 - DNA, 22 bp, Artificial Sequence
  chemically synthesized
ggtcctctccgggcatctctcc

SEQ ID NO: 2894 - DNA, 22 bp, Artificial Sequence
  chemically synthesized
tccgggcatctctcctccctca

SEQ ID NO: 2895 - DNA, 22 bp, Artificial Sequence
  chemically synthesized
cgggcatctctcctccctcacc

SEQ ID NO: 2896 - DNA, 22 bp, Artificial Sequence
  chemically synthesized
tcctccctcacccaaccccatg

SEQ ID NO: 2897 - DNA, 22 bp, Artificial Sequence
  chemically synthesized
ctccctcacccaaccccatgcc

SEQ ID NO: 2898 - DNA, 22 bp, Artificial Sequence
  chemically synthesized
cctcacccaaccccatgccgtc

SEQ ID NO: 2899 - DNA, 22 bp, Artificial Sequence
  chemically synthesized
acccaaccccatgccgtcttca

SEQ ID NO: 2900 - DNA, 22 bp, Artificial Sequence
  chemically synthesized
cactcgctgggttcccttttcc

SEQ ID NO: 2901 - DNA, 22 bp, Artificial Sequence
  chemically synthesized
actcgctgggttcccttttcct

SEQ ID NO: 2902 - DNA, 22 bp, Artificial Sequence
  chemically synthesized
gctgggttcccttttccttctc

SEQ ID NO: 2903 - DNA, 22 bp, Artificial Sequence
  chemically synthesized
ggttcccttttccttctccttc

SEQ ID NO: 2904 - DNA, 22 bp, Artificial Sequence
  chemically synthesized
ccttttccttctccttctgggg

SEQ ID NO: 2905 - DNA, 22 bp, Artificial Sequence
  chemically synthesized
ttccttctccttctggggcctg

SEQ ID NO: 2906 - DNA, 22 bp, Artificial Sequence
  chemically synthesized
tccttctccttctggggcctgt

SEQ ID NO: 2907 - DNA, 22 bp, Artificial Sequence
  chemically synthesized
ccttctccttctggggcctgtg

SEQ ID NO: 2908 - DNA, 22 bp, Artificial Sequence
  chemically synthesized
cttctccttctggggcctgtgc

SEQ ID NO: 2909 - DNA, 22 bp, Artificial Sequence
  chemically synthesized
ctccttctggggcctgtgccat

SEQ ID NO: 2910 - DNA, 22 bp, Artificial Sequence
  chemically synthesized
tccttctggggcctgtgccatc

SEQ ID NO: 2911 - DNA, 22 bp, Artificial Sequence
  chemically synthesized
cttctggggcctgtgccatctc

SEQ ID NO: 2912 - DNA, 22 bp, Artificial Sequence
  chemically synthesized
ctggggcctgtgccatctctcg

SEQ ID NO: 2913 - DNA, 22 bp, Artificial Sequence
  chemically synthesized
tggggcctgtgccatctctcgt

SEQ ID NO: 2914 - DNA, 22 bp, Artificial Sequence
  chemically synthesized
gggcctgtgccatctctcgttt

SEQ ID NO: 2915 - DNA, 22 bp, Artificial Sequence
  chemically synthesized
tgccatctctcgtttcttagga

SEQ ID NO: 2916 - DNA, 22 bp, Artificial Sequence
  chemically synthesized
tcgtttcttaggatggccttct

SEQ ID NO: 2917 - DNA, 22 bp, Artificial Sequence
  chemically synthesized
gtttcttaggatggccttctcc

SEQ ID NO: 2918 - DNA, 22 bp, Artificial Sequence
  chemically synthesized
cttaggatggccttctccgacg

SEQ ID NO: 2919 - DNA, 22 bp, Artificial Sequence
  chemically synthesized
ttaggatggccttctccgacgg

SEQ ID NO: 2920 - DNA, 22 bp, Artificial Sequence
  chemically synthesized
aggatggccttctccgacggat

SEQ ID NO: 2921 - DNA, 22 bp, Artificial Sequence
  chemically synthesized
ggatggccttctccgacggatg

SEQ ID NO: 2922 - DNA, 22 bp, Artificial Sequence
  chemically synthesized
ctccgacggatgtctcccttgc

SEQ ID NO: 2923 - DNA, 22 bp, Artificial Sequence
  chemically synthesized
tccgacggatgtctcccttgcg

SEQ ID NO: 2924 - DNA, 22 bp, Artificial Sequence
  chemically synthesized
cgacggatgtctcccttgcgtc

SEQ ID NO: 2925 - DNA, 22 bp, Artificial Sequence
  chemically synthesized
ccttgcgtcccgcctccccttc

SEQ ID NO: 2926 - DNA, 22 bp, Artificial Sequence
  chemically synthesized
gcgtcccgcctccccttcttgt

SEQ ID NO: 2927 - DNA, 22 bp, Artificial Sequence
  chemically synthesized
cgtcccgcctccccttcttgta

SEQ ID NO: 2928 - DNA, 22 bp, Artificial Sequence
  chemically synthesized
cccttcttgtaggcctgcatca

SEQ ID NO: 2929 - DNA, 22 bp, Artificial Sequence
  chemically synthesized
cttgtaggcctgcatcatcacc

SEQ ID NO: 2930 - DNA, 22 bp, Artificial Sequence
  chemically synthesized
ttgtaggcctgcatcatcaccg

SEQ ID NO: 2931 - DNA, 22 bp, Artificial Sequence
  chemically synthesized
gtaggcctgcatcatcaccgtt

SEQ ID NO: 2932 - DNA, 22 bp, Artificial Sequence
  chemically synthesized
taggcctgcatcatcaccgttt

SEQ ID NO: 2933 - DNA, 22 bp, Artificial Sequence
  chemically synthesized
catcatcaccgtttttctggac

SEQ ID NO: 2934 - DNA, 22 bp, Artificial Sequence
  chemically synthesized
ttctggacaaccccaaagtacc

SEQ ID NO: 2935 - DNA, 22 bp, Artificial Sequence
  chemically synthesized
tctggacaaccccaaagtaccc

SEQ ID NO: 2936 - DNA, 22 bp, Artificial Sequence
  chemically synthesized
ctggacaaccccaaagtacccc

SEQ ID NO: 2937 - DNA, 22 bp, Artificial Sequence
  chemically synthesized
tggacaaccccaaagtaccccg

SEQ ID NO: 2938 - DNA, 22 bp, Artificial Sequence
  chemically synthesized
gacaaccccaaagtaccccgtc

SEQ ID NO: 2939 - DNA, 22 bp, Artificial Sequence
  chemically synthesized
cctggctttagccacctctcca

SEQ ID NO: 2940 - DNA, 22 bp, Artificial Sequence
  chemically synthesized
gctttagccacctctccatcct

SEQ ID NO: 2941 - DNA, 22 bp, Artificial Sequence
  chemically synthesized
tagccacctctccatcctcttg

SEQ ID NO: 2942 - DNA, 22 bp, Artificial Sequence
  chemically synthesized
agccacctctccatcctcttgc

SEQ ID NO: 2943 - DNA, 22 bp, Artificial Sequence
  chemically synthesized
gccacctctccatcctcttgct

SEQ ID NO: 2944 - DNA, 22 bp, Artificial Sequence
  chemically synthesized
tccatcctcttgctttctttgc

SEQ ID NO: 2945 - DNA, 22 bp, Artificial Sequence
  chemically synthesized
catcctcttgctttctttgcct

SEQ ID NO: 2946 - DNA, 22 bp, Artificial Sequence
  chemically synthesized
ttgctttctttgcctggacacc

SEQ ID NO: 2947 - DNA, 22 bp, Artificial Sequence
  chemically synthesized
gctttctttgcctggacacccc

SEQ ID NO: 2948 - DNA, 22 bp, Artificial Sequence
  chemically synthesized
ctttctttgcctggacaccccg

SEQ ID NO: 2949 - DNA, 22 bp, Artificial Sequence
  chemically synthesized
tctttgcctggacaccccgttc

SEQ ID NO: 2950 - DNA, 22 bp, Artificial Sequence
  chemically synthesized
ctttgcctggacaccccgttct

SEQ ID NO: 2951 - DNA, 22 bp, Artificial Sequence
  chemically synthesized
tttgcctggacaccccgttctc

SEQ ID NO: 2952 - DNA, 22 bp, Artificial Sequence
  chemically synthesized
tgcctggacaccccgttctcct

SEQ ID NO: 2953 - DNA, 22 bp, Artificial Sequence
  chemically synthesized
gcctggacaccccgttctcctg

SEQ ID NO: 2954 - DNA, 22 bp, Artificial Sequence
  chemically synthesized
cctggacaccccgttctcctgt

SEQ ID NO: 2955 - DNA, 22 bp, Artificial Sequence
  chemically synthesized
gacaccccgttctcctgtggat

SEQ ID NO: 2956 - DNA, 22 bp, Artificial Sequence
  chemically synthesized
tcctgtggattcgggtcacctc

SEQ ID NO: 2957 - DNA, 22 bp, Artificial Sequence
  chemically synthesized
ctgtggattcgggtcacctctc

SEQ ID NO: 2958 - DNA, 22 bp, Artificial Sequence
  chemically synthesized
tggattcgggtcacctctcact

SEQ ID NO: 2959 - DNA, 22 bp, Artificial Sequence
  chemically synthesized
gggtcacctctcactcctttca

SEQ ID NO: 2960 - DNA, 22 bp, Artificial Sequence
  chemically synthesized
tcactcctttcatttgggcagc

SEQ ID NO: 2961 - DNA, 22 bp, Artificial Sequence
  chemically synthesized
actcctttcatttgggcagctc

SEQ ID NO: 2962 - DNA, 22 bp, Artificial Sequence
  chemically synthesized
ctttcatttgggcagctcccct

SEQ ID NO: 2963 - DNA, 22 bp, Artificial Sequence
  chemically synthesized
tcatttgggcagctcccctacc

SEQ ID NO: 2964 - DNA, 22 bp, Artificial Sequence
  chemically synthesized
catttgggcagctcccctaccc

SEQ ID NO: 2965 - DNA, 22 bp, Artificial Sequence
  chemically synthesized
atttgggcagctcccctacccc

SEQ ID NO: 2966 - DNA, 22 bp, Artificial Sequence
  chemically synthesized
gggcagctcccctacccccctt

SEQ ID NO: 2967 - DNA, 22 bp, Artificial Sequence
  chemically synthesized
ggcagctcccctacccccctta

SEQ ID NO: 2968 - DNA, 22 bp, Artificial Sequence
  chemically synthesized
ccctaccccccttacctctcta

SEQ ID NO: 2969 - DNA, 22 bp, Artificial Sequence
  chemically synthesized
ccccccttacctctctagtctg

SEQ ID NO: 2970 - DNA, 22 bp, Artificial Sequence
  chemically synthesized
acctctctagtctgtgctagct

SEQ ID NO: 2971 - DNA, 22 bp, Artificial Sequence
  chemically synthesized
cctctctagtctgtgctagctc

SEQ ID NO: 2972 - DNA, 22 bp, Artificial Sequence
  chemically synthesized
tctagtctgtgctagctcttcc

SEQ ID NO: 2973 - DNA, 22 bp, Artificial Sequence
  chemically synthesized
tagtctgtgctagctcttccag

SEQ ID NO: 2974 - DNA, 22 bp, Artificial Sequence
  chemically synthesized
gtctgtgctagctcttccagcc

SEQ ID NO: 2975 - DNA, 22 bp, Artificial Sequence
  chemically synthesized
tgctagctcttccagccccctg

SEQ ID NO: 2976 - DNA, 22 bp, Artificial Sequence
  chemically synthesized
gctcttccagccccctgtcatg

SEQ ID NO: 2977 - DNA, 22 bp, Artificial Sequence
  chemically synthesized
ttccagccccctgtcatggcat

SEQ ID NO: 2978 - DNA, 22 bp, Artificial Sequence
  chemically synthesized
ccagccccctgtcatggcatct

SEQ ID NO: 2979 - DNA, 22 bp, Artificial Sequence
  chemically synthesized
cagccccctgtcatggcatctt

SEQ ID NO: 2980 - DNA, 22 bp, Artificial Sequence
  chemically synthesized
tcatggcatcttccaggggtcc

SEQ ID NO: 2981 - DNA, 22 bp, Artificial Sequence
  chemically synthesized
ccaggggtccgagagctcagct

SEQ ID NO: 2982 - DNA, 22 bp, Artificial Sequence
  chemically synthesized
caggggtccgagagctcagcta

SEQ ID NO: 2983 - DNA, 22 bp, Artificial Sequence
  chemically synthesized
agctagtcttcttcctccaacc

SEQ ID NO: 2984 - DNA, 22 bp, Artificial Sequence
  chemically synthesized
gtcttcttcctccaacccgggc

SEQ ID NO: 2985 - DNA, 22 bp, Artificial Sequence
  chemically synthesized
cttcctccaacccgggccccta

SEQ ID NO: 2986 - DNA, 22 bp, Artificial Sequence
  chemically synthesized
ttcctccaacccgggcccctat

SEQ ID NO: 2987 - DNA, 22 bp, Artificial Sequence
  chemically synthesized
cctccaacccgggcccctatgt

SEQ ID NO: 2988 - DNA, 22 bp, Artificial Sequence
  chemically synthesized
ctccaacccgggcccctatgtc

SEQ ID NO: 2989 - DNA, 22 bp, Artificial Sequence
  chemically synthesized
caacccgggcccctatgtccac

SEQ ID NO: 2990 - DNA, 22 bp, Artificial Sequence
  chemically synthesized
tgtccacttcaggacagcatgt

SEQ ID NO: 2991 - DNA, 22 bp, Artificial Sequence
  chemically synthesized
caggacagcatgtttgctgcct

SEQ ID NO: 2992 - DNA, 22 bp, Artificial Sequence
  chemically synthesized
aggacagcatgtttgctgcctc

SEQ ID NO: 2993 - DNA, 22 bp, Artificial Sequence
  chemically synthesized
gctgcctccagggatcctgtgt

SEQ ID NO: 2994 - DNA, 22 bp, Artificial Sequence
  chemically synthesized
ctgcctccagggatcctgtgtc

SEQ ID NO: 2995 - DNA, 22 bp, Artificial Sequence
  chemically synthesized
cctccagggatcctgtgtcccc

SEQ ID NO: 2996 - DNA, 22 bp, Artificial Sequence
  chemically synthesized
cagggatcctgtgtccccgagc

SEQ ID NO: 2997 - DNA, 22 bp, Artificial Sequence
  chemically synthesized
tgtccccgagctgggaccacct

SEQ ID NO: 2998 - DNA, 22 bp, Artificial Sequence
  chemically synthesized
ggaccaccttatattcccaggg

SEQ ID NO: 2999 - DNA, 22 bp, Artificial Sequence
  chemically synthesized
atattcccagggccggttaatg

SEQ ID NO: 3000 - DNA, 22 bp, Artificial Sequence
  chemically synthesized
tattcccagggccggttaatgt

SEQ ID NO: 3001 - DNA, 22 bp, Artificial Sequence
  chemically synthesized
ccagggccggttaatgtggctc

SEQ ID NO: 3002 - DNA, 22 bp, Artificial Sequence
  chemically synthesized
atgtggctctggttctgggtac

SEQ ID NO: 3003 - DNA, 22 bp, Artificial Sequence
  chemically synthesized
tggttctgggtacttttatctg

SEQ ID NO: 3004 - DNA, 22 bp, Artificial Sequence
  chemically synthesized
gttctgggtacttttatctgtc

SEQ ID NO: 3005 - DNA, 22 bp, Artificial Sequence
  chemically synthesized
tgggtacttttatctgtcccct

SEQ ID NO: 3006 - DNA, 22 bp, Artificial Sequence
  chemically synthesized
ggtacttttatctgtcccctcc

SEQ ID NO: 3007 - DNA, 22 bp, Artificial Sequence
  chemically synthesized
ttatctgtcccctccaccccac

SEQ ID NO: 3008 - DNA, 22 bp, Artificial Sequence
  chemically synthesized
tatctgtcccctccaccccaca

SEQ ID NO: 3009 - DNA, 22 bp, Artificial Sequence
  chemically synthesized
atctgtcccctccaccccacag

SEQ ID NO: 3010 - DNA, 22 bp, Artificial Sequence
  chemically synthesized
tctgtcccctccaccccacagt

SEQ ID NO: 3011 - DNA, 22 bp, Artificial Sequence
  chemically synthesized
tcccctccaccccacagtgggg

SEQ ID NO: 3012 - DNA, 22 bp, Artificial Sequence
  chemically synthesized
caccccacagtggggccactag

SEQ ID NO: 3013 - DNA, 22 bp, Artificial Sequence
  chemically synthesized
gggacaggattggtgacagaaa

SEQ ID NO: 3014 - DNA, 22 bp, Artificial Sequence
  chemically synthesized
gtgacagaaaagccccatcctt

SEQ ID NO: 3015 - DNA, 22 bp, Artificial Sequence
  chemically synthesized
aggcctcctccttcctagtctc

SEQ ID NO: 3016 - DNA, 22 bp, Artificial Sequence
  chemically synthesized
ggcctcctccttcctagtctcc

SEQ ID NO: 3017 - DNA, 22 bp, Artificial Sequence
  chemically synthesized
ctccttcctagtctcctgatat

SEQ ID NO: 3018 - DNA, 22 bp, Artificial Sequence
  chemically synthesized
cttcctagtctcctgatattgg

SEQ ID NO: 3019 - DNA, 22 bp, Artificial Sequence
  chemically synthesized
cctagtctcctgatattgggtc

SEQ ID NO: 3020 - DNA, 22 bp, Artificial Sequence
  chemically synthesized
ctagtctcctgatattgggtct

SEQ ID NO: 3021 - DNA, 22 bp, Artificial Sequence
  chemically synthesized
gtctcctgatattgggtctaac

SEQ ID NO: 3022 - DNA, 22 bp, Artificial Sequence
  chemically synthesized
ctgatattgggtctaaccccca

SEQ ID NO: 3023 - DNA, 22 bp, Artificial Sequence
  chemically synthesized
atattgggtctaacccccacct

SEQ ID NO: 3024 - DNA, 22 bp, Artificial Sequence
  chemically synthesized
ggtctaacccccacctcctgtt

SEQ ID NO: 3025 - DNA, 22 bp, Artificial Sequence
  chemically synthesized
acccccacctcctgttaggcag

SEQ ID NO: 3026 - DNA, 22 bp, Artificial Sequence
  chemically synthesized
ctgttaggcagattccttatct

SEQ ID NO: 3027 - DNA, 22 bp, Artificial Sequence
  chemically synthesized
ttaggcagattccttatctggt

SEQ ID NO: 3028 - DNA, 22 bp, Artificial Sequence
  chemically synthesized
ggcagattccttatctggtgac

SEQ ID NO: 3029 - DNA, 22 bp, Artificial Sequence
  chemically synthesized
cttatctggtgacacaccccca

SEQ ID NO: 3030 - DNA, 22 bp, Artificial Sequence
  chemically synthesized
atctggtgacacacccccattt

SEQ ID NO: 3031 - DNA, 22 bp, Artificial Sequence
  chemically synthesized
tctggtgacacacccccatttc

SEQ ID NO: 3032 - DNA, 22 bp, Artificial Sequence
  chemically synthesized
gtgacacacccccatttcctgg

SEQ ID NO: 3033 - DNA, 22 bp, Artificial Sequence
  chemically synthesized
cctggagccatctctctccttg

SEQ ID NO: 3034 - DNA, 22 bp, Artificial Sequence
  chemically synthesized
ctggagccatctctctccttgc

SEQ ID NO: 3035 - DNA, 22 bp, Artificial Sequence
  chemically synthesized
gagccatctctctccttgccag

SEQ ID NO: 3036 - DNA, 22 bp, Artificial Sequence
  chemically synthesized
tctccttgccagaacctctaag

SEQ ID NO: 3037 - DNA, 22 bp, Artificial Sequence
  chemically synthesized
tccttgccagaacctctaaggt

SEQ ID NO: 3038 - DNA, 22 bp, Artificial Sequence
  chemically synthesized
cttgccagaacctctaaggttt

SEQ ID NO: 3039 - DNA, 22 bp, Artificial Sequence
  chemically synthesized
gccagaacctctaaggtttgct

SEQ ID NO: 3040 - DNA, 22 bp, Artificial Sequence
  chemically synthesized
ccagaacctctaaggtttgctt

SEQ ID NO: 3041 - DNA, 22 bp, Artificial Sequence
  chemically synthesized
taaggtttgcttacgatggagc

SEQ ID NO: 3042 - DNA, 22 bp, Artificial Sequence
  chemically synthesized
aggtttgcttacgatggagcca

SEQ ID NO: 3043 - DNA, 22 bp, Artificial Sequence
  chemically synthesized
gcttacgatggagccagagagg

SEQ ID NO: 3044 - DNA, 22 bp, Artificial Sequence
  chemically synthesized
cttacgatggagccagagagga

SEQ ID NO: 3045 - DNA, 22 bp, Artificial Sequence
  chemically synthesized
acgatggagccagagaggatcc

SEQ ID NO: 3046 - DNA, 22 bp, Artificial Sequence
  chemically synthesized
cgatggagccagagaggatcct

SEQ ID NO: 3047 - DNA, 22 bp, Artificial Sequence
  chemically synthesized
ggagggagagcttggcaggggg

SEQ ID NO: 3048 - DNA, 22 bp, Artificial Sequence
  chemically synthesized
ggcagggggtgggagggaaggg

SEQ ID NO: 3049 - DNA, 22 bp, Artificial Sequence
  chemically synthesized
gcagggggtgggagggaagggg

SEQ ID NO: 3050 - DNA, 22 bp, Artificial Sequence
  chemically synthesized
cccggttctcagtggccaccct

SEQ ID NO: 3051 - DNA, 22 bp, Artificial Sequence
  chemically synthesized
tcagtggccaccctgcgctacc

SEQ ID NO: 3052 - DNA, 22 bp, Artificial Sequence
  chemically synthesized
agtggccaccctgcgctaccct

SEQ ID NO: 3053 - DNA, 22 bp, Artificial Sequence
  chemically synthesized
cgctaccctctcccagaacctg

SEQ ID NO: 3054 - DNA, 22 bp, Artificial Sequence
  chemically synthesized
ccctctcccagaacctgagctg

SEQ ID NO: 3055 - DNA, 22 bp, Artificial Sequence
  chemically synthesized
tcccagaacctgagctgctctg

SEQ ID NO: 3056 - DNA, 22 bp, Artificial Sequence
  chemically synthesized
ccagaacctgagctgctctgac

SEQ ID NO: 3057 - DNA, 22 bp, Artificial Sequence
  chemically synthesized
agctgctctgacgcggccgtct

SEQ ID NO: 3058 - DNA, 22 bp, Artificial Sequence
  chemically synthesized
ctctgacgcggccgtctggtgc

SEQ ID NO: 3059 - DNA, 22 bp, Artificial Sequence
  chemically synthesized
tgacgcggccgtctggtgcgtt

SEQ ID NO: 3060 - DNA, 22 bp, Artificial Sequence
  chemically synthesized
acgcggccgtctggtgcgtttc

SEQ ID NO: 3061 - DNA, 22 bp, Artificial Sequence
  chemically synthesized
gtgcgtttcactgatcctggtg

SEQ ID NO: 3062 - DNA, 22 bp, Artificial Sequence
  chemically synthesized
cactgatcctggtgctgcagct

SEQ ID NO: 3063 - DNA, 22 bp, Artificial Sequence
  chemically synthesized
actgatcctggtgctgcagctt

SEQ ID NO: 3064 - DNA, 22 bp, Artificial Sequence
  chemically synthesized
atcctggtgctgcagcttcctt

SEQ ID NO: 3065 - DNA, 22 bp, Artificial Sequence
  chemically synthesized
gtgctgcagcttccttacactt

SEQ ID NO: 3066 - DNA, 22 bp, Artificial Sequence
  chemically synthesized
cagcttccttacacttcccaag

SEQ ID NO: 3067 - DNA, 22 bp, Artificial Sequence
  chemically synthesized
ccttacacttcccaagaggaga

SEQ ID NO: 3068 - DNA, 22 bp, Artificial Sequence
  chemically synthesized
cttacacttcccaagaggagaa

SEQ ID NO: 3069 - DNA, 22 bp, Artificial Sequence
  chemically synthesized
acacttcccaagaggagaagca

SEQ ID NO: 3070 - DNA, 22 bp, Artificial Sequence
  chemically synthesized
cacttcccaagaggagaagcag

SEQ ID NO: 3071 - DNA, 22 bp, Artificial Sequence
  chemically synthesized
cccaagaggagaagcagtttgg

SEQ ID NO: 3072 - DNA, 22 bp, Artificial Sequence
  chemically synthesized
ccaagaggagaagcagtttgga

SEQ ID NO: 3073 - DNA, 22 bp, Artificial Sequence
  chemically synthesized
ggaaaaacaaaatcagaataag

SEQ ID NO: 3074 - DNA, 22 bp, Artificial Sequence
  chemically synthesized
gaaaaacaaaatcagaataagt

SEQ ID NO: 3075 - DNA, 22 bp, Artificial Sequence
  chemically synthesized
gtcctgagttctaactttggct

SEQ ID NO: 3076 - DNA, 22 bp, Artificial Sequence
  chemically synthesized
agttctaactttggctcttcac

SEQ ID NO: 3077 - DNA, 22 bp, Artificial Sequence
  chemically synthesized
taactttggctcttcacctttc

SEQ ID NO: 3078 - DNA, 22 bp, Artificial Sequence
  chemically synthesized
actttggctcttcacctttcta

SEQ ID NO: 3079 - DNA, 22 bp, Artificial Sequence
  chemically synthesized
tggctcttcacctttctagtcc

SEQ ID NO: 3080 - DNA, 22 bp, Artificial Sequence
  chemically synthesized
ggctcttcacctttctagtccc

SEQ ID NO: 3081 - DNA, 22 bp, Artificial Sequence
  chemically synthesized
gctcttcacctttctagtcccc

SEQ ID NO: 3082 - DNA, 22 bp, Artificial Sequence
  chemically synthesized
ttcacctttctagtccccaatt

SEQ ID NO: 3083 - DNA, 22 bp, Artificial Sequence
  chemically synthesized
cacctttctagtccccaattta

SEQ ID NO: 3084 - DNA, 22 bp, Artificial Sequence
  chemically synthesized
acctttctagtccccaatttat

SEQ ID NO: 3085 - DNA, 22 bp, Artificial Sequence
  chemically synthesized
tctagtccccaatttatattgt

SEQ ID NO: 3086 - DNA, 22 bp, Artificial Sequence
  chemically synthesized
ctagtccccaatttatattgtt

SEQ ID NO: 3087 - DNA, 22 bp, Artificial Sequence
  chemically synthesized
tagtccccaatttatattgttc

SEQ ID NO: 3088 - DNA, 22 bp, Artificial Sequence
  chemically synthesized
gtccccaatttatattgttcct

SEQ ID NO: 3089 - DNA, 22 bp, Artificial Sequence
  chemically synthesized
atattgttcctccgtgcgtcag

SEQ ID NO: 3090 - DNA, 22 bp, Artificial Sequence
  chemically synthesized
tattgttcctccgtgcgtcagt

SEQ ID NO: 3091 - DNA, 22 bp, Artificial Sequence
  chemically synthesized
ttcctccgtgcgtcagttttac

SEQ ID NO: 3092 - DNA, 22 bp, Artificial Sequence
  chemically synthesized
ctccgtgcgtcagttttacctg

SEQ ID NO: 3093 - DNA, 22 bp, Artificial Sequence
  chemically synthesized
cgtgcgtcagttttacctgtga

SEQ ID NO: 3094 - DNA, 22 bp, Artificial Sequence
  chemically synthesized
tacctgtgagataaggccagta

SEQ ID NO: 3095 - DNA, 22 bp, Artificial Sequence
  chemically synthesized
acctgtgagataaggccagtag

SEQ ID NO: 3096 - DNA, 22 bp, Artificial Sequence
  chemically synthesized
cctgtgagataaggccagtagc

SEQ ID NO: 3097 - DNA, 22 bp, Artificial Sequence
  chemically synthesized
tgagataaggccagtagccagc

SEQ ID NO: 3098 - DNA, 22 bp, Artificial Sequence
  chemically synthesized
gcagggctgtggtgaggagggg

SEQ ID NO: 3099 - DNA, 22 bp, Artificial Sequence
  chemically synthesized
tggtgaggaggggggtgtccgt

SEQ ID NO: 3100 - DNA, 22 bp, Artificial Sequence
  chemically synthesized
cctttgtgagaatggtgcgtcc

SEQ ID NO: 3101 - DNA, 22 bp, Artificial Sequence
  chemically synthesized
tgtgagaatggtgcgtcctagg

SEQ ID NO: 3102 - DNA, 22 bp, Artificial Sequence
  chemically synthesized
gtgagaatggtgcgtcctaggt

SEQ ID NO: 3103 - DNA, 22 bp, Artificial Sequence
  chemically synthesized
tgagaatggtgcgtcctaggtg

SEQ ID NO: 3104 - DNA, 22 bp, Artificial Sequence
  chemically synthesized
ggtgttcaccaggtcgtggccg

SEQ ID NO: 3105 - DNA, 22 bp, Artificial Sequence
  chemically synthesized
accaggtcgtggccgcctctac

SEQ ID NO: 3106 - DNA, 22 bp, Artificial Sequence
  chemically synthesized
tactccctttctctttctccat

SEQ ID NO: 3107 - DNA, 22 bp, Artificial Sequence
  chemically synthesized
ctccctttctctttctccatcc

SEQ ID NO: 3108 - DNA, 22 bp, Artificial Sequence
  chemically synthesized
cctttctctttctccatccttc

SEQ ID NO: 3109 - DNA, 22 bp, Artificial Sequence
  chemically synthesized
tctctttctccatccttctttc

SEQ ID NO: 3110 - DNA, 22 bp, Artificial Sequence
  chemically synthesized
ctctttctccatccttctttcc

SEQ ID NO: 3111 - DNA, 22 bp, Artificial Sequence
  chemically synthesized
tctttctccatccttctttcct

SEQ ID NO: 3112 - DNA, 22 bp, Artificial Sequence
  chemically synthesized
tttctccatccttctttcctta

SEQ ID NO: 3113 - DNA, 22 bp, Artificial Sequence
  chemically synthesized
tctccatccttctttccttaaa

SEQ ID NO: 3114 - DNA, 22 bp, Artificial Sequence
  chemically synthesized
ctccatccttctttccttaaag

SEQ ID NO: 3115 - DNA, 22 bp, Artificial Sequence
  chemically synthesized
tccatccttctttccttaaaga

SEQ ID NO: 3116 - DNA, 22 bp, Artificial Sequence
  chemically synthesized
catccttctttccttaaagagt

SEQ ID NO: 3117 - DNA, 22 bp, Artificial Sequence
  chemically synthesized
ctttccttaaagagtccccagt

SEQ ID NO: 3118 - DNA, 22 bp, Artificial Sequence
  chemically synthesized
tttccttaaagagtccccagtg

SEQ ID NO: 3119 - DNA, 22 bp, Artificial Sequence
  chemically synthesized
tccttaaagagtccccagtgct

SEQ ID NO: 3120 - DNA, 22 bp, Artificial Sequence
  chemically synthesized
ccttaaagagtccccagtgcta

SEQ ID NO: 3121 - DNA, 22 bp, Artificial Sequence
  chemically synthesized
cttaaagagtccccagtgctat

SEQ ID NO: 3122 - DNA, 22 bp, Artificial Sequence
  chemically synthesized
aaagagtccccagtgctatctg

SEQ ID NO: 3123 - DNA, 22 bp, Artificial Sequence
  chemically synthesized
aagagtccccagtgctatctgg

SEQ ID NO: 3124 - DNA, 22 bp, Artificial Sequence
  chemically synthesized
tctgggacatattcctccgccc

SEQ ID NO: 3125 - DNA, 22 bp, Artificial Sequence
  chemically synthesized
ggacatattcctccgcccagag

SEQ ID NO: 3126 - DNA, 22 bp, Artificial Sequence
  chemically synthesized
ctccgcccagagcagggtcccg

SEQ ID NO: 3127 - DNA, 22 bp, Artificial Sequence
  chemically synthesized
cgcccagagcagggtcccgctt

SEQ ID NO: 3128 - DNA, 22 bp, Artificial Sequence
  chemically synthesized
ccctaaggccctgctctgggct

SEQ ID NO: 3129 - DNA, 22 bp, Artificial Sequence
  chemically synthesized
cctaaggccctgctctgggctt

SEQ ID NO: 3130 - DNA, 22 bp, Artificial Sequence
  chemically synthesized
aggccctgctctgggcttctgg

SEQ ID NO: 3131 - DNA, 22 bp, Artificial Sequence
  chemically synthesized
ctctgggcttctgggtttgagt

SEQ ID NO: 3132 - DNA, 22 bp, Artificial Sequence
  chemically synthesized
tgggcttctgggtttgagtcct

SEQ ID NO: 3133 - DNA, 22 bp, Artificial Sequence
  chemically synthesized
ggcttctgggtttgagtccttg

SEQ ID NO: 3134 - DNA, 22 bp, Artificial Sequence
  chemically synthesized
ctgggtttgagtccttggcaag

SEQ ID NO: 3135 - DNA, 22 bp, Artificial Sequence
  chemically synthesized
tgggtttgagtccttggcaagc

SEQ ID NO: 3136 - DNA, 22 bp, Artificial Sequence
  chemically synthesized
ggtttgagtccttggcaagccc

SEQ ID NO: 3137 - DNA, 22 bp, Artificial Sequence
  chemically synthesized
gagtccttggcaagcccaggag

SEQ ID NO: 3138 - DNA, 22 bp, Artificial Sequence
  chemically synthesized
agtccttggcaagcccaggaga

SEQ ID NO: 3139 - DNA, 22 bp, Artificial Sequence
  chemically synthesized
ggcaagcccaggagaggcgctc

SEQ ID NO: 3140 - DNA, 22 bp, Artificial Sequence
  chemically synthesized
gcaagcccaggagaggcgctca

SEQ ID NO: 3141 - DNA, 22 bp, Artificial Sequence
  chemically synthesized
aggcttccctgtcccccttcct

SEQ ID NO: 3142 - DNA, 22 bp, Artificial Sequence
  chemically synthesized
ccctgtcccccttcctcgtcca

SEQ ID NO: 3143 - DNA, 22 bp, Artificial Sequence
  chemically synthesized
cctgtcccccttcctcgtccac

SEQ ID NO: 3144 - DNA, 22 bp, Artificial Sequence
  chemically synthesized
tcccccttcctcgtccaccatc

SEQ ID NO: 3145 - DNA, 22 bp, Artificial Sequence
  chemically synthesized
cctcgtccaccatctcatgccc

SEQ ID NO: 3146 - DNA, 22 bp, Artificial Sequence
  chemically synthesized
ctcgtccaccatctcatgcccc

SEQ ID NO: 3147 - DNA, 22 bp, Artificial Sequence
  chemically synthesized
gtccaccatctcatgcccctgg

SEQ ID NO: 3148 - DNA, 22 bp, Artificial Sequence
  chemically synthesized
atgcccctggctctcctgcccc

SEQ ID NO: 3149 - DNA, 22 bp, Artificial Sequence
  chemically synthesized
gctctcctgccccttccctaca

SEQ ID NO: 3150 - DNA, 22 bp, Artificial Sequence
  chemically synthesized
tcctgccccttccctacagggg

SEQ ID NO: 3151 - DNA, 22 bp, Artificial Sequence
  chemically synthesized
ctgccccttccctacaggggtt

SEQ ID NO: 3152 - DNA, 22 bp, Artificial Sequence
  chemically synthesized
ccccttccctacaggggttcct

SEQ ID NO: 3153 - DNA, 22 bp, Artificial Sequence
  chemically synthesized
ccctacaggggttcctggctct

SEQ ID NO: 3154 - DNA, 22 bp, Artificial Sequence
  chemically synthesized
cctacaggggttcctggctctg

SEQ ID NO: 3155 - DNA, 22 bp, Artificial Sequence
  chemically synthesized
caggggttcctggctctgctct

SEQ ID NO: 3156 - DNA, 22 bp, Artificial Sequence
  chemically synthesized
ctggctctgctcttcagactga

SEQ ID NO: 3157 - DNA, 22 bp, Artificial Sequence
  chemically synthesized
gctctgctcttcagactgagcc

SEQ ID NO: 3158 - DNA, 22 bp, Artificial Sequence
  chemically synthesized
tgctcttcagactgagccccgt

SEQ ID NO: 3159 - DNA, 22 bp, Artificial Sequence
  chemically synthesized
ctcttcagactgagccccgttc

SEQ ID NO: 3160 - DNA, 22 bp, Artificial Sequence
  chemically synthesized
ttcagactgagccccgttcccc

SEQ ID NO: 3161 - DNA, 22 bp, Artificial Sequence
  chemically synthesized
cagactgagccccgttcccctg

SEQ ID NO: 3162 - DNA, 22 bp, Artificial Sequence
  chemically synthesized
agactgagccccgttcccctgc

SEQ ID NO: 3163 - DNA, 22 bp, Artificial Sequence
  chemically synthesized
agccccgttcccctgcatcccc

SEQ ID NO: 3164 - DNA, 22 bp, Artificial Sequence
  chemically synthesized
ccctgcatccccgttcccctgc

SEQ ID NO: 3165 - DNA, 22 bp, Artificial Sequence
  chemically synthesized
catccccgttcccctgcatccc

SEQ ID NO: 3166 - DNA, 22 bp, Artificial Sequence
  chemically synthesized
ccctgcatcccccttcccctgc

SEQ ID NO: 3167 - DNA, 22 bp, Artificial Sequence
  chemically synthesized
catcccccttcccctgcatccc

SEQ ID NO: 3168 - DNA, 22 bp, Artificial Sequence
  chemically synthesized
cccctgcatcccccagaggccc

SEQ ID NO: 3169 - DNA, 22 bp, Artificial Sequence
  chemically synthesized
ccctgcatcccccagaggcccc

SEQ ID NO: 3170 - DNA, 22 bp, Artificial Sequence
  chemically synthesized
catcccccagaggccccaggcc

SEQ ID NO: 3171 - DNA, 22 bp, Artificial Sequence
  chemically synthesized
cttggcctggaccccacgagag

SEQ ID NO: 3172 - DNA, 22 bp, Artificial Sequence
  chemically synthesized
ggcctggaccccacgagaggcc

SEQ ID NO: 3173 - DNA, 22 bp, Artificial Sequence
  chemically synthesized
gcctggaccccacgagaggcca

SEQ ID NO: 3174 - DNA, 22 bp, Artificial Sequence
  chemically synthesized
gaccccacgagaggccacccca

SEQ ID NO: 3175 - DNA, 22 bp, Artificial Sequence
  chemically synthesized
tctaccaggctgccttttgggt

SEQ ID NO: 3176 - DNA, 22 bp, Artificial Sequence
  chemically synthesized
ccaggctgccttttgggtggat

SEQ ID NO: 3177 - DNA, 22 bp, Artificial Sequence
  chemically synthesized
ccttttgggtggattctcctcc

SEQ ID NO: 3178 - DNA, 22 bp, Artificial Sequence
  chemically synthesized
ttgggtggattctcctccaact

SEQ ID NO: 3179 - DNA, 22 bp, Artificial Sequence
  chemically synthesized
tgggtggattctcctccaactg

SEQ ID NO: 3180 - DNA, 22 bp, Artificial Sequence
  chemically synthesized
gggtggattctcctccaactgt

SEQ ID NO: 3181 - DNA, 22 bp, Artificial Sequence
  chemically synthesized
ggtggattctcctccaactgtg

SEQ ID NO: 3182 - DNA, 22 bp, Artificial Sequence
  chemically synthesized
tcctccaactgtggggtgactg

SEQ ID NO: 3183 - DNA, 22 bp, Artificial Sequence
  chemically synthesized
ctccaactgtggggtgactgct

SEQ ID NO: 3184 - DNA, 22 bp, Artificial Sequence
  chemically synthesized
caactgtggggtgactgcttgg

SEQ ID NO: 3185 - DNA, 22 bp, Artificial Sequence
  chemically synthesized
tggggtgactgcttggcaaact

SEQ ID NO: 3186 - DNA, 22 bp, Artificial Sequence
  chemically synthesized
cttggcaaactcactcttcggg

SEQ ID NO: 3187 - DNA, 22 bp, Artificial Sequence
  chemically synthesized
ggcaaactcactcttcggggta

SEQ ID NO: 3188 - DNA, 22 bp, Artificial Sequence
  chemically synthesized
gcaaactcactcttcggggtat

SEQ ID NO: 3189 - DNA, 22 bp, Artificial Sequence
  chemically synthesized
actcttcggggtatcccaggag

SEQ ID NO: 3190 - DNA, 22 bp, Artificial Sequence
  chemically synthesized
ttcggggtatcccaggaggcct

SEQ ID NO: 3191 - DNA, 22 bp, Artificial Sequence
  chemically synthesized
cggggtatcccaggaggcctgg

SEQ ID NO: 3192 - DNA, 22 bp, Artificial Sequence
  chemically synthesized
ggggtatcccaggaggcctgga

SEQ ID NO: 3193 - DNA, 22 bp, Artificial Sequence
  chemically synthesized
gagcattggggtgggctggggt

SEQ ID NO: 3194 - DNA, 22 bp, Artificial Sequence
  chemically synthesized
gggtgggctggggttcagagag

SEQ ID NO: 3195 - DNA, 22 bp, Artificial Sequence
  chemically synthesized
gggttcagagaggagggattcc

SEQ ID NO: 3196 - DNA, 22 bp, Artificial Sequence
  chemically synthesized
agagaggagggattcccttctc

SEQ ID NO: 3197 - DNA, 22 bp, Artificial Sequence
  chemically synthesized
ccttctcaggttacgtggccaa

SEQ ID NO: 3198 - DNA, 22 bp, Artificial Sequence
  chemically synthesized
ctcaggttacgtggccaagaag

SEQ ID NO: 3199 - DNA, 22 bp, Artificial Sequence
  chemically synthesized
tcaggttacgtggccaagaagc

SEQ ID NO: 3200 - DNA, 22 bp, Artificial Sequence
  chemically synthesized
aggttacgtggccaagaagcag

SEQ ID NO: 3201 - DNA, 22 bp, Artificial Sequence
  chemically synthesized
cgtggccaagaagcaggggagc

SEQ ID NO: 3202 - DNA, 22 bp, Artificial Sequence
  chemically synthesized
ggtttgggtcaggtctgggtgt

SEQ ID NO: 3203 - DNA, 22 bp, Artificial Sequence
  chemically synthesized
gggtcaggtctgggtgtggggt

SEQ ID NO: 3204 - DNA, 22 bp, Artificial Sequence
  chemically synthesized
ggtcaggtctgggtgtggggtg

SEQ ID NO: 3205 - DNA, 22 bp, Artificial Sequence
  chemically synthesized
ggtgtggggtgaccagcttatg

SEQ ID NO: 3206 - DNA, 22 bp, Artificial Sequence
  chemically synthesized
atgctgtttgcccaggacagcc

SEQ ID NO: 3207 - DNA, 22 bp, Artificial Sequence
  chemically synthesized
tgctgtttgcccaggacagcct

SEQ ID NO: 3208 - DNA, 22 bp, Artificial Sequence
  chemically synthesized
tttgcccaggacagcctagttt

SEQ ID NO: 3209 - DNA, 22 bp, Artificial Sequence
  chemically synthesized
gcccaggacagcctagttttag

SEQ ID NO: 3210 - DNA, 22 bp, Artificial Sequence
  chemically synthesized
cccaggacagcctagttttagc

SEQ ID NO: 3211 - DNA, 22 bp, Artificial Sequence
  chemically synthesized
gttttagcactgaaaccctcag

SEQ ID NO: 3212 - DNA, 22 bp, Artificial Sequence
  chemically synthesized
tagcactgaaaccctcagtcct

SEQ ID NO: 3213 - DNA, 22 bp, Artificial Sequence
  chemically synthesized
agcactgaaaccctcagtccta

SEQ ID NO: 3214 - DNA, 22 bp, Artificial Sequence
  chemically synthesized
gcactgaaaccctcagtcctag

SEQ ID NO: 3215 - DNA, 22 bp, Artificial Sequence
  chemically synthesized
aaaccctcagtcctaggaaaac

SEQ ID NO: 3216 - DNA, 22 bp, Artificial Sequence
  chemically synthesized
agtcctaggaaaacagggatgg

SEQ ID NO: 3217 - DNA, 22 bp, Artificial Sequence
  chemically synthesized
ggaaaacagggatggttggtca

SEQ ID NO: 3218 - DNA, 22 bp, Artificial Sequence
  chemically synthesized
gtcactgtctctgggtgactct

SEQ ID NO: 3219 - DNA, 22 bp, Artificial Sequence
  chemically synthesized
tctctgggtgactcttgattcc

SEQ ID NO: 3220 - DNA, 22 bp, Artificial Sequence
  chemically synthesized
tgggtgactcttgattcccggc

SEQ ID NO: 3221 - DNA, 22 bp, Artificial Sequence
  chemically synthesized
ggtgactcttgattcccggcca

SEQ ID NO: 3222 - DNA, 22 bp, Artificial Sequence
  chemically synthesized
ttgattcccggccagtttctcc

SEQ ID NO: 3223 - DNA, 22 bp, Artificial Sequence
  chemically synthesized
gattcccggccagtttctccac

SEQ ID NO: 3224 - DNA, 22 bp, Artificial Sequence
  chemically synthesized
attcccggccagtttctccacc

SEQ ID NO: 3225 - DNA, 22 bp, Artificial Sequence
  chemically synthesized
ccggccagtttctccacctggg

SEQ ID NO: 3226 - DNA, 22 bp, Artificial Sequence
  chemically synthesized
ctccacctggggctgtgtttct

SEQ ID NO: 3227 - DNA, 22 bp, Artificial Sequence
  chemically synthesized
tccacctggggctgtgtttctc

SEQ ID NO: 3228 - DNA, 22 bp, Artificial Sequence
  chemically synthesized
cacctggggctgtgtttctcgt

SEQ ID NO: 3229 - DNA, 22 bp, Artificial Sequence
  chemically synthesized
gggctgtgtttctcgtcctgca

SEQ ID NO: 3230 - DNA, 22 bp, Artificial Sequence
  chemically synthesized
tgtttctcgtcctgcatccttc

SEQ ID NO: 3231 - DNA, 22 bp, Artificial Sequence
  chemically synthesized
ctcgtcctgcatccttctccag

SEQ ID NO: 3232 - DNA, 22 bp, Artificial Sequence
  chemically synthesized
tcgtcctgcatccttctccagg

SEQ ID NO: 3233 - DNA, 22 bp, Artificial Sequence
  chemically synthesized
gtcctgcatccttctccaggca

SEQ ID NO: 3234 - DNA, 22 bp, Artificial Sequence
  chemically synthesized
catccttctccaggcaggtccc

SEQ ID NO: 3235 - DNA, 22 bp, Artificial Sequence
  chemically synthesized
ctccaggcaggtccccaagcat

SEQ ID NO: 3236 - DNA, 22 bp, Artificial Sequence
  chemically synthesized
tccaggcaggtccccaagcatc

SEQ ID NO: 3237 - DNA, 22 bp, Artificial Sequence
  chemically synthesized
caggcaggtccccaagcatcgc

SEQ ID NO: 3238 - DNA, 22 bp, Artificial Sequence
  chemically synthesized
ctgtggctgttcccaagttctt

SEQ ID NO: 3239 - DNA, 22 bp, Artificial Sequence
  chemically synthesized
tggctgttcccaagttcttagg

SEQ ID NO: 3240 - DNA, 22 bp, Artificial Sequence
  chemically synthesized
ttcccaagttcttagggtaccc

SEQ ID NO: 3241 - DNA, 22 bp, Artificial Sequence
  chemically synthesized
ccaagttcttagggtaccccac

SEQ ID NO: 3242 - DNA, 22 bp, Artificial Sequence
  chemically synthesized
ttagggtaccccacgtgggttt

SEQ ID NO: 3243 - DNA, 22 bp, Artificial Sequence
  chemically synthesized
agggtaccccacgtgggtttat

SEQ ID NO: 3244 - DNA, 22 bp, Artificial Sequence
  chemically synthesized
gggtaccccacgtgggtttatc

SEQ ID NO: 3245 - DNA, 22 bp, Artificial Sequence
  chemically synthesized
atcaaccacttggtgaggctgg

SEQ ID NO: 3246 - DNA, 22 bp, Artificial Sequence
  chemically synthesized
tcaaccacttggtgaggctggt

SEQ ID NO: 3247 - DNA, 22 bp, Artificial Sequence
  chemically synthesized
ggtgaggctggtaccctgcccc

SEQ ID NO: 3248 - DNA, 22 bp, Artificial Sequence
  chemically synthesized
gtgaggctggtaccctgccccc

SEQ ID NO: 3249 - DNA, 22 bp, Artificial Sequence
  chemically synthesized
gtaccctgcccccattcctgca

SEQ ID NO: 3250 - DNA, 22 bp, Artificial Sequence
  chemically synthesized
cccccattcctgcaccccaatt

SEQ ID NO: 3251 - DNA, 22 bp, Artificial Sequence
  chemically synthesized
ctgcaccccaattgccttagtg

SEQ ID NO: 3252 - DNA, 22 bp, Artificial Sequence
  chemically synthesized
caccccaattgccttagtggct

SEQ ID NO: 3253 - DNA, 22 bp, Artificial Sequence
  chemically synthesized
ccttagtggctagggggttggg

SEQ ID NO: 3254 - DNA, 22 bp, Artificial Sequence
  chemically synthesized
agtggctagggggttgggggct

SEQ ID NO: 3255 - DNA, 22 bp, Artificial Sequence
  chemically synthesized
gtggctagggggttgggggcta

SEQ ID NO: 3256 - DNA, 22 bp, Artificial Sequence
  chemically synthesized
gggggttgggggctagagtagg

SEQ ID NO: 3257 - DNA, 22 bp, Artificial Sequence
  chemically synthesized
ggggctagagtaggaggggctg

SEQ ID NO: 3258 - DNA, 22 bp, Artificial Sequence
  chemically synthesized
gagtaggaggggctggagccag

SEQ ID NO: 3259 - DNA, 22 bp, Artificial Sequence
  chemically synthesized
gagccaggattcttagggctga

SEQ ID NO: 3260 - DNA, 22 bp, Artificial Sequence
  chemically synthesized
ttagggctgaacagagaagagc

SEQ ID NO: 3261 - DNA, 22 bp, Artificial Sequence
  chemically synthesized
agggctgaacagagaagagctg

SEQ ID NO: 3262 - DNA, 22 bp, Artificial Sequence
  chemically synthesized
gggctgaacagagaagagctgg

SEQ ID NO: 3263 - DNA, 22 bp, Artificial Sequence
  chemically synthesized
aacagagaagagctgggggcct

SEQ ID NO: 3264 - DNA, 22 bp, Artificial Sequence
  chemically synthesized
ggggcctgggctcctgggtttg

SEQ ID NO: 3265 - DNA, 22 bp, Artificial Sequence
  chemically synthesized
ggctcctgggtttgagagagga

SEQ ID NO: 3266 - DNA, 22 bp, Artificial Sequence
  chemically synthesized
ctgggtttgagagaggaggggc

SEQ ID NO: 3267 - DNA, 22 bp, Artificial Sequence
  chemically synthesized
ggtttgagagaggaggggctgg

SEQ ID NO: 3268 - DNA, 22 bp, Artificial Sequence
  chemically synthesized
gagagaggaggggctggggcct

SEQ ID NO: 3269 - DNA, 22 bp, Artificial Sequence
  chemically synthesized
agagaggaggggctggggcctg

SEQ ID NO: 3270 - DNA, 22 bp, Artificial Sequence
  chemically synthesized
gggcctggactcctgggtccga

SEQ ID NO: 3271 - DNA, 22 bp, Artificial Sequence
  chemically synthesized
gactcctgggtccgagggagga

SEQ ID NO: 3272 - DNA, 22 bp, Artificial Sequence
  chemically synthesized
ctgggtccgagggaggaggggc

SEQ ID NO: 3273 - DNA, 22 bp, Artificial Sequence
  chemically synthesized
ggtccgagggaggaggggctgg

SEQ ID NO: 3274 - DNA, 22 bp, Artificial Sequence
  chemically synthesized
gggcctggactcctgggtctga

SEQ ID NO: 3275 - DNA, 22 bp, Artificial Sequence
  chemically synthesized
gactcctgggtctgagggtgga

SEQ ID NO: 3276 - DNA, 22 bp, Artificial Sequence
  chemically synthesized
ctgggtctgagggtggagggac

SEQ ID NO: 3277 - DNA, 22 bp, Artificial Sequence
  chemically synthesized
ggtctgagggtggagggactgg

SEQ ID NO: 3278 - DNA, 22 bp, Artificial Sequence
  chemically synthesized
agggtggagggactgggggcct

SEQ ID NO: 3279 - DNA, 22 bp, Artificial Sequence
  chemically synthesized
ggggcctggactcctgggtccg

SEQ ID NO: 3280 - DNA, 22 bp, Artificial Sequence
  chemically synthesized
gactcctgggtccgagggagga

SEQ ID NO: 3281 - DNA, 22 bp, Artificial Sequence
  chemically synthesized
ctgggtccgagggaggaggggc

SEQ ID NO: 3282 - DNA, 22 bp, Artificial Sequence
  chemically synthesized
ggtccgagggaggaggggctgg

SEQ ID NO: 3283 - DNA, 22 bp, Artificial Sequence
  chemically synthesized
gggcctggactcgtgggtctga

SEQ ID NO: 3284 - DNA, 22 bp, Artificial Sequence
  chemically synthesized
gactcgtgggtctgagggagga

SEQ ID NO: 3285 - DNA, 22 bp, Artificial Sequence
  chemically synthesized
gtgggtctgagggaggaggggc

SEQ ID NO: 3286 - DNA, 22 bp, Artificial Sequence
  chemically synthesized
agggaggaggggctgggggcct

SEQ ID NO: 3287 - DNA, 22 bp, Artificial Sequence
  chemically synthesized
ggggcctggacttctgggtctt

SEQ ID NO: 3288 - DNA, 22 bp, Artificial Sequence
  chemically synthesized
gacttctgggtcttagggaggc

SEQ ID NO: 3289 - DNA, 22 bp, Artificial Sequence
  chemically synthesized
ctgggtcttagggaggcggggc

SEQ ID NO: 3290 - DNA, 22 bp, Artificial Sequence
  chemically synthesized
tgggtcttagggaggcggggct

SEQ ID NO: 3291 - DNA, 22 bp, Artificial Sequence
  chemically synthesized
ggtcttagggaggcggggctgg

SEQ ID NO: 3292 - DNA, 22 bp, Artificial Sequence
  chemically synthesized
agggaggcggggctgggcctgg

SEQ ID NO: 3293 - DNA, 22 bp, Artificial Sequence
  chemically synthesized
gggaggcggggctgggcctgga

SEQ ID NO: 3294 - DNA, 22 bp, Artificial Sequence
  chemically synthesized
ggcctggacccctgggtctgaa

SEQ ID NO: 3295 - DNA, 22 bp, Artificial Sequence
  chemically synthesized
gacccctgggtctgaatgggga

SEQ ID NO: 3296 - DNA, 22 bp, Artificial Sequence
  chemically synthesized
ggtctgaatggggagaggctgg

SEQ ID NO: 3297 - DNA, 22 bp, Artificial Sequence
  chemically synthesized
aatggggagaggctgggggcct

SEQ ID NO: 3298 - DNA, 22 bp, Artificial Sequence
  chemically synthesized
ggggcctggactccttcatctg

SEQ ID NO: 3299 - DNA, 22 bp, Artificial Sequence
  chemically synthesized
gactccttcatctgagggcgga

SEQ ID NO: 3300 - DNA, 22 bp, Artificial Sequence
  chemically synthesized
cttcatctgagggcggaagggc

SEQ ID NO: 3301 - DNA, 22 bp, Artificial Sequence
  chemically synthesized
catctgagggcggaagggctgg

SEQ ID NO: 3302 - DNA, 22 bp, Artificial Sequence
  chemically synthesized
atctgagggcggaagggctggg

SEQ ID NO: 3303 - DNA, 22 bp, Artificial Sequence
  chemically synthesized
agggcggaagggctggggcctg

SEQ ID NO: 3304 - DNA, 22 bp, Artificial Sequence
  chemically synthesized
gggcctggcctcctgggttgaa

SEQ ID NO: 3305 - DNA, 22 bp, Artificial Sequence
  chemically synthesized
gcctcctgggttgaatggggag

SEQ ID NO: 3306 - DNA, 22 bp, Artificial Sequence
  chemically synthesized
ctgggttgaatggggaggggtt

SEQ ID NO: 3307 - DNA, 22 bp, Artificial Sequence
  chemically synthesized
ggttgaatggggaggggttggg

SEQ ID NO: 3308 - DNA, 22 bp, Artificial Sequence
  chemically synthesized
aatggggaggggttgggcctgg

SEQ ID NO: 3309 - DNA, 22 bp, Artificial Sequence
  chemically synthesized
ggcctggactctggagtccctg

SEQ ID NO: 3310 - DNA, 22 bp, Artificial Sequence
  chemically synthesized
gactctggagtccctggtgccc

SEQ ID NO: 3311 - DNA, 22 bp, Artificial Sequence
  chemically synthesized
tggagtccctggtgcccaggcc

SEQ ID NO: 3312 - DNA, 22 bp, Artificial Sequence
  chemically synthesized
gagtccctggtgcccaggcctc

SEQ ID NO: 3313 - DNA, 22 bp, Artificial Sequence
  chemically synthesized
gtgcccaggcctcaggcatctt

SEQ ID NO: 3314 - DNA, 22 bp, Artificial Sequence
  chemically synthesized
aggcatctttcacagggatgcc

SEQ ID NO: 3315 - DNA, 22 bp, Artificial Sequence
  chemically synthesized
tcacagggatgcctgtactggg

SEQ ID NO: 3316 - DNA, 22 bp, Artificial Sequence
  chemically synthesized
cacagggatgcctgtactgggc

SEQ ID NO: 3317 - DNA, 22 bp, Artificial Sequence
  chemically synthesized
acagggatgcctgtactgggca

SEQ ID NO: 3318 - DNA, 22 bp, Artificial Sequence
  chemically synthesized
tactgggcaggtccttgaaagg

SEQ ID NO: 3319 - DNA, 22 bp, Artificial Sequence
  chemically synthesized
ggcaggtccttgaaagggaaag

SEQ ID NO: 3320 - DNA, 22 bp, Artificial Sequence
  chemically synthesized
gaaagggaaaggcccattgctc

SEQ ID NO: 3321 - DNA, 22 bp, Artificial Sequence
  chemically synthesized
aaagggaaaggcccattgctct

SEQ ID NO: 3322 - DNA, 22 bp, Artificial Sequence
  chemically synthesized
ctctccttgcccccctccccta

SEQ ID NO: 3323 - DNA, 22 bp, Artificial Sequence
  chemically synthesized
tccttgcccccctcccctatcg

SEQ ID NO: 3324 - DNA, 22 bp, Artificial Sequence
  chemically synthesized
cttgcccccctcccctatcgcc

SEQ ID NO: 3325 - DNA, 22 bp, Artificial Sequence
  chemically synthesized
gcccccctcccctatcgccatg

SEQ ID NO: 3326 - DNA, 22 bp, Artificial Sequence
  chemically synthesized
cccccctcccctatcgccatga

SEQ ID NO: 3327 - DNA, 22 bp, Artificial Sequence
  chemically synthesized
ccctatcgccatgacaactggg

SEQ ID NO: 3328 - DNA, 22 bp, Artificial Sequence
  chemically synthesized
tcgccatgacaactgggtggaa

SEQ ID NO: 3329 - DNA, 22 bp, Artificial Sequence
  chemically synthesized
ggtggaaataaacgagccgagt

SEQ ID NO: 3330 - DNA, 22 bp, Artificial Sequence
  chemically synthesized
atcccgttcccagggcacgtgc

SEQ ID NO: 3331 - DNA, 22 bp, Artificial Sequence
  chemically synthesized
ccagggcacgtgcggccccttc

SEQ ID NO: 3332 - DNA, 22 bp, Artificial Sequence
  chemically synthesized
cacagcccgagtttccatgacc

SEQ ID NO: 3333 - DNA, 22 bp, Artificial Sequence
  chemically synthesized
acagcccgagtttccatgacct

SEQ ID NO: 3334 - DNA, 22 bp, Artificial Sequence
  chemically synthesized
ccatgacctcatgctcttggcc

SEQ ID NO: 3335 - DNA, 22 bp, Artificial Sequence
  chemically synthesized
catgacctcatgctcttggccc

SEQ ID NO: 3336 - DNA, 22 bp, Artificial Sequence
  chemically synthesized
atgctcttggccctcgtagctc

SEQ ID NO: 3337 - DNA, 22 bp, Artificial Sequence
  chemically synthesized
ttggccctcgtagctccctccc

SEQ ID NO: 3338 - DNA, 22 bp, Artificial Sequence
  chemically synthesized
ggccctcgtagctccctcccgc

SEQ ID NO: 3339 - DNA, 22 bp, Artificial Sequence
  chemically synthesized
gccctcgtagctccctcccgcc

SEQ ID NO: 3340 - DNA, 22 bp, Artificial Sequence
  chemically synthesized
gtagctccctcccgcctcctcc

SEQ ID NO: 3341 - DNA, 22 bp, Artificial Sequence
  chemically synthesized
cctcccgcctcctccagatggg

SEQ ID NO: 3342 - DNA, 22 bp, Artificial Sequence
  chemically synthesized
ccgcctcctccagatgggcagc

SEQ ID NO: 3343 - DNA, 22 bp, Artificial Sequence
  chemically synthesized
ctccagatgggcagctttggag

SEQ ID NO: 3344 - DNA, 22 bp, Artificial Sequence
  chemically synthesized
cagatgggcagctttggagagg

SEQ ID NO: 3345 - DNA, 22 bp, Artificial Sequence
  chemically synthesized
tggagaggtgagggacttgggg

SEQ ID NO: 3346 - DNA, 22 bp, Artificial Sequence
  chemically synthesized
ggagaggtgagggacttggggg

SEQ ID NO: 3347 - DNA, 22 bp, Artificial Sequence
  chemically synthesized
gagaggtgagggacttgggggg

SEQ ID NO: 3348 - DNA, 22 bp, Artificial Sequence
  chemically synthesized
ggggggtaatttatcccgtgga

SEQ ID NO: 3349 - DNA, 22 bp, Artificial Sequence
  chemically synthesized
gggggtaatttatcccgtggat

SEQ ID NO: 3350 - DNA, 22 bp, Artificial Sequence
  chemically synthesized
atcccgtggatctaggagttta

SEQ ID NO: 3351 - DNA, 22 bp, Artificial Sequence
  chemically synthesized
tcccgtggatctaggagtttag

SEQ ID NO: 3352 - DNA, 22 bp, Artificial Sequence
  chemically synthesized
ggagtttagcttcactccttcc

SEQ ID NO: 3353 - DNA, 22 bp, Artificial Sequence
  chemically synthesized
agcttcactccttcctcagctc

SEQ ID NO: 3354 - DNA, 22 bp, Artificial Sequence
  chemically synthesized
gcttcactccttcctcagctcc

SEQ ID NO: 3355 - DNA, 22 bp, Artificial Sequence
  chemically synthesized
cactccttcctcagctccagtt

SEQ ID NO: 3356 - DNA, 22 bp, Artificial Sequence
  chemically synthesized
actccttcctcagctccagttc

SEQ ID NO: 3357 - DNA, 22 bp, Artificial Sequence
  chemically synthesized
cttcctcagctccagttcaggt

SEQ ID NO: 3358 - DNA, 22 bp, Artificial Sequence
  chemically synthesized
cctcagctccagttcaggtccc

SEQ ID NO: 3359 - DNA, 22 bp, Artificial Sequence
  chemically synthesized
ctcagctccagttcaggtcccg

SEQ ID NO: 3360 - DNA, 22 bp, Artificial Sequence
  chemically synthesized
agctccagttcaggtcccggag

SEQ ID NO: 3361 - DNA, 22 bp, Artificial Sequence
  chemically synthesized
cagttcaggtcccggagcccac

SEQ ID NO: 3362 - DNA, 22 bp, Artificial Sequence
  chemically synthesized
aggtcccggagcccacccagtg

SEQ ID NO: 3363 - DNA, 22 bp, Artificial Sequence
  chemically synthesized
gggcaagtccctcctccgaccc

SEQ ID NO: 3364 - DNA, 22 bp, Artificial Sequence
  chemically synthesized
ctccgaccccctggacttcggc

SEQ ID NO: 3365 - DNA, 22 bp, Artificial Sequence
  chemically synthesized
cgaccccctggacttcggcttt

SEQ ID NO: 3366 - DNA, 22 bp, Artificial Sequence
  chemically synthesized
gacttcggcttttgtcccccca

SEQ ID NO: 3367 - DNA, 22 bp, Artificial Sequence
  chemically synthesized
cggcttttgtccccccaagttt

SEQ ID NO: 3368 - DNA, 22 bp, Artificial Sequence
  chemically synthesized
ggcttttgtccccccaagtttt

SEQ ID NO: 3369 - DNA, 22 bp, Artificial Sequence
  chemically synthesized
ttgtccccccaagttttggacc

SEQ ID NO: 3370 - DNA, 22 bp, Artificial Sequence
  chemically synthesized
tgtccccccaagttttggaccc

SEQ ID NO: 3371 - DNA, 22 bp, Artificial Sequence
  chemically synthesized
gtccccccaagttttggacccc

SEQ ID NO: 3372 - DNA, 22 bp, Artificial Sequence
  chemically synthesized
tccccccaagttttggacccct

SEQ ID NO: 3373 - DNA, 22 bp, Artificial Sequence
  chemically synthesized
tggacccctaagggaagaatga

SEQ ID NO: 3374 - DNA, 22 bp, Artificial Sequence
  chemically synthesized
ggacccctaagggaagaatgag

SEQ ID NO: 3375 - DNA, 22 bp, Artificial Sequence
  chemically synthesized
gacccctaagggaagaatgaga

SEQ ID NO: 3376 - DNA, 22 bp, Artificial Sequence
  chemically synthesized
agggaagaatgagaaacggtgg

SEQ ID NO: 3377 - DNA, 22 bp, Artificial Sequence
  chemically synthesized
gctgcagggccccgtgcagagg

SEQ ID NO: 3378 - DNA, 22 bp, Artificial Sequence
  chemically synthesized
cagggccccgtgcagagggggc

SEQ ID NO: 3379 - DNA, 22 bp, Artificial Sequence
  chemically synthesized
agtgaactggagtgtgacagcc

SEQ ID NO: 3380 - DNA, 22 bp, Artificial Sequence
  chemically synthesized
gagtgtgacagcctggggccca

SEQ ID NO: 3381 - DNA, 22 bp, Artificial Sequence
  chemically synthesized
gggcccaggcacacaggtgtgc

SEQ ID NO: 3382 - DNA, 22 bp, Artificial Sequence
  chemically synthesized
tctcacccctctgggagtcccg

SEQ ID NO: 3383 - DNA, 22 bp, Artificial Sequence
  chemically synthesized
acccctctgggagtcccgccca

SEQ ID NO: 3384 - DNA, 22 bp, Artificial Sequence
  chemically synthesized
tgggagtcccgcccaggcccct

SEQ ID NO: 3385 - DNA, 22 bp, Artificial Sequence
  chemically synthesized
ggagtcccgcccaggcccctga

SEQ ID NO: 3386 - DNA, 22 bp, Artificial Sequence
  chemically synthesized
agtctgtcccagcacagggtgg

SEQ ID NO: 3387 - DNA, 22 bp, Artificial Sequence
  chemically synthesized
tcccagcacagggtggccttcc

SEQ ID NO: 3388 - DNA, 22 bp, Artificial Sequence
  chemically synthesized
cctccaccctgcatagccctgg

SEQ ID NO: 3389 - DNA, 22 bp, Artificial Sequence
  chemically synthesized
ctccaccctgcatagccctggg

SEQ ID NO: 3390 - DNA, 22 bp, Artificial Sequence
  chemically synthesized
caccctgcatagccctgggccc

SEQ ID NO: 3391 - DNA, 22 bp, Artificial Sequence
  chemically synthesized
catagccctgggcccacggctt

SEQ ID NO: 3392 - DNA, 22 bp, Artificial Sequence
  chemically synthesized
ggcccacggcttcgttcctgca

SEQ ID NO: 3393 - DNA, 22 bp, Artificial Sequence
  chemically synthesized
cgttcctgcagagtatctgctg

SEQ ID NO: 3394 - DNA, 22 bp, Artificial Sequence
  chemically synthesized
gttcctgcagagtatctgctgg

SEQ ID NO: 3395 - DNA, 22 bp, Artificial Sequence
  chemically synthesized
ctgcagagtatctgctggggtg

SEQ ID NO: 3396 - DNA, 22 bp, Artificial Sequence
  chemically synthesized
cagagtatctgctggggtggtt

SEQ ID NO: 3397 - DNA, 22 bp, Artificial Sequence
  chemically synthesized
ctggggtggtttccgagcttga

SEQ ID NO: 3398 - DNA, 22 bp, Artificial Sequence
  chemically synthesized
gggtggtttccgagcttgaccc

SEQ ID NO: 3399 - DNA, 22 bp, Artificial Sequence
  chemically synthesized
ccgagcttgacccttggaagga

SEQ ID NO: 3400 - DNA, 22 bp, Artificial Sequence
  chemically synthesized
cgagcttgacccttggaaggac

SEQ ID NO: 3401 - DNA, 22 bp, Artificial Sequence
  chemically synthesized
gacccttggaaggacctggctg

SEQ ID NO: 3402 - DNA, 22 bp, Artificial Sequence
  chemically synthesized
acccttggaaggacctggctgg

SEQ ID NO: 3403 - DNA, 22 bp, Artificial Sequence
  chemically synthesized
ggaaggacctggctgggtttaa

SEQ ID NO: 3404 - DNA, 22 bp, Artificial Sequence
  chemically synthesized
gaaggacctggctgggtttaag

SEQ ID NO: 3405 - DNA, 22 bp, Artificial Sequence
  chemically synthesized
gctgggtttaaggcaggagggg

SEQ ID NO: 3406 - DNA, 22 bp, Artificial Sequence
  chemically synthesized
ggtttaaggcaggaggggctgg

SEQ ID NO: 3407 - DNA, 22 bp, Artificial Sequence
  chemically synthesized
aaggcaggaggggctgggggcc

SEQ ID NO: 3408 - DNA, 22 bp, Artificial Sequence
  chemically synthesized
aggcaggaggggctgggggcca

SEQ ID NO: 3409 - DNA, 22 bp, Artificial Sequence
  chemically synthesized
ggggccaggactcctggctctg

SEQ ID NO: 3410 - DNA, 22 bp, Artificial Sequence
  chemically synthesized
ctggctctgaaggaggaggggc

SEQ ID NO: 3411 - DNA, 22 bp, Artificial Sequence
  chemically synthesized
gctctgaaggaggaggggctgg

SEQ ID NO: 3412 - DNA, 22 bp, Artificial Sequence
  chemically synthesized
tgaaggaggaggggctggaacc

SEQ ID NO: 3413 - DNA, 22 bp, Artificial Sequence
  chemically synthesized
aaggaggaggggctggaacctc

SEQ ID NO: 3414 - DNA, 22 bp, Artificial Sequence
  chemically synthesized
gaacctcttccctagtctgagc

SEQ ID NO: 3415 - DNA, 22 bp, Artificial Sequence
  chemically synthesized
ttccctagtctgagcactggaa

SEQ ID NO: 3416 - DNA, 22 bp, Artificial Sequence
  chemically synthesized
ccctagtctgagcactggaagc

SEQ ID NO: 3417 - DNA, 22 bp, Artificial Sequence
  chemically synthesized
cctagtctgagcactggaagcg

SEQ ID NO: 3418 - DNA, 22 bp, Artificial Sequence
  chemically synthesized
gtctgagcactggaagcgccac

SEQ ID NO: 3419 - DNA, 22 bp, Artificial Sequence
  chemically synthesized
agcactggaagcgccacctgtg

SEQ ID NO: 3420 - DNA, 22 bp, Artificial Sequence
  chemically synthesized
gaagcgccacctgtgggtggtg

SEQ ID NO: 3421 - DNA, 22 bp, Artificial Sequence
  chemically synthesized
tgggtggtgacgggggttttgc

SEQ ID NO: 3422 - DNA, 22 bp, Artificial Sequence
  chemically synthesized
tgccgtgtctaacaggtaccat

SEQ ID NO: 3423 - DNA, 22 bp, Artificial Sequence
  chemically synthesized
gccgtgtctaacaggtaccatg

SEQ ID NO: 3424 - DNA, 22 bp, Artificial Sequence
  chemically synthesized
ccgtgtctaacaggtaccatgt

SEQ ID NO: 3425 - DNA, 22 bp, Artificial Sequence
  chemically synthesized
acaggtaccatgtggggttccc

SEQ ID NO: 3426 - DNA, 22 bp, Artificial Sequence
  chemically synthesized
ccgcacccagatgagaagcccc

SEQ ID NO: 3427 - DNA, 22 bp, Artificial Sequence
  chemically synthesized
ccttccccgttcacttcctgtt

SEQ ID NO: 3428 - DNA, 22 bp, Artificial Sequence
  chemically synthesized
ccccgttcacttcctgtttgca

SEQ ID NO: 3429 - DNA, 22 bp, Artificial Sequence
  chemically synthesized
cccgttcacttcctgtttgcag

SEQ ID NO: 3430 - DNA, 22 bp, Artificial Sequence
  chemically synthesized
acttcctgtttgcagatagcca

SEQ ID NO: 3431 - DNA, 22 bp, Artificial Sequence
  chemically synthesized
cctgtttgcagatagccaggag

SEQ ID NO: 3432 - DNA, 22 bp, Artificial Sequence
  chemically synthesized
ctgtttgcagatagccaggagt

SEQ ID NO: 3433 - DNA, 22 bp, Artificial Sequence
  chemically synthesized
tttgcagatagccaggagtcct

SEQ ID NO: 3434 - DNA, 22 bp, Artificial Sequence
  chemically synthesized
gcagatagccaggagtcctttc

SEQ ID NO: 3435 - DNA, 22 bp, Artificial Sequence
  chemically synthesized
cagatagccaggagtcctttcg

SEQ ID NO: 3436 - DNA, 22 bp, Artificial Sequence
  chemically synthesized
tcgtggtttccactgagcactg

SEQ ID NO: 3437 - DNA, 22 bp, Artificial Sequence
  chemically synthesized
cgtggtttccactgagcactga

SEQ ID NO: 3438 - DNA, 22 bp, Artificial Sequence
  chemically synthesized
gtggtttccactgagcactgaa

SEQ ID NO: 3439 - DNA, 22 bp, Artificial Sequence
  chemically synthesized
ccactgagcactgaaggcctgg

SEQ ID NO: 3440 - DNA, 22 bp, Artificial Sequence
  chemically synthesized
cactgagcactgaaggcctggc

SEQ ID NO: 3441 - DNA, 22 bp, Artificial Sequence
  chemically synthesized
agcactgaaggcctggccggcc

SEQ ID NO: 3442 - DNA, 22 bp, Artificial Sequence
  chemically synthesized
aaggcctggccggcctgaccac

SEQ ID NO: 3443 - DNA, 22 bp, Artificial Sequence
  chemically synthesized
gccggcctgaccactgggcaac

SEQ ID NO: 3444 - DNA, 22 bp, Artificial Sequence
  chemically synthesized
accactgggcaaccaggcgtat

SEQ ID NO: 3445 - DNA, 22 bp, Artificial Sequence
  chemically synthesized
ggcaaccaggcgtatcttaaac

SEQ ID NO: 3446 - DNA, 22 bp, Artificial Sequence
  chemically synthesized
aaacagccagtggccagaggct

SEQ ID NO: 3447 - DNA, 22 bp, Artificial Sequence
  chemically synthesized
aacagccagtggccagaggctg

SEQ ID NO: 3448 - DNA, 22 bp, Artificial Sequence
  chemically synthesized
ttgggtcattttccccactgtc

SEQ ID NO: 3449 - DNA, 22 bp, Artificial Sequence
  chemically synthesized
ggtcattttccccactgtccta

SEQ ID NO: 3450 - DNA, 22 bp, Artificial Sequence
  chemically synthesized
tccccactgtcctagcaccgtg

SEQ ID NO: 3451 - DNA, 22 bp, Artificial Sequence
  chemically synthesized
ccccactgtcctagcaccgtgt

SEQ ID NO: 3452 - DNA, 22 bp, Artificial Sequence
  chemically synthesized
cccactgtcctagcaccgtgtc

SEQ ID NO: 3453 - DNA, 22 bp, Artificial Sequence
  chemically synthesized
tcctagcaccgtgtccctggat

SEQ ID NO: 3454 - DNA, 22 bp, Artificial Sequence
  chemically synthesized
gcaccgtgtccctggatctgtt

SEQ ID NO: 3455 - DNA, 22 bp, Artificial Sequence
  chemically synthesized
gatctgttttcgtggctccctc

SEQ ID NO: 3456 - DNA, 22 bp, Artificial Sequence
  chemically synthesized
ttttcgtggctccctctggagt

SEQ ID NO: 3457 - DNA, 22 bp, Artificial Sequence
  chemically synthesized
tcgtggctccctctggagtccc

SEQ ID NO: 3458 - DNA, 22 bp, Artificial Sequence
  chemically synthesized
cgtggctccctctggagtcccg

SEQ ID NO: 3459 - DNA, 22 bp, Artificial Sequence
  chemically synthesized
gtggctccctctggagtcccga

SEQ ID NO: 3460 - DNA, 22 bp, Artificial Sequence
  chemically synthesized
cctctggagtcccgacttgctg

SEQ ID NO: 3461 - DNA, 22 bp, Artificial Sequence
  chemically synthesized
tggagtcccgacttgctgggac

SEQ ID NO: 3462 - DNA, 22 bp, Artificial Sequence
  chemically synthesized
gagtcccgacttgctgggacac

SEQ ID NO: 3463 - DNA, 22 bp, Artificial Sequence
  chemically synthesized
gctgggacaccgtggctggggt

SEQ ID NO: 3464 - DNA, 22 bp, Artificial Sequence
  chemically synthesized
ctgggacaccgtggctggggta

SEQ ID NO: 3465 - DNA, 22 bp, Artificial Sequence
  chemically synthesized
ggacaccgtggctggggtaggt

SEQ ID NO: 3466 - DNA, 22 bp, Artificial Sequence
  chemically synthesized
gggtaggtgcggctgacggctg

SEQ ID NO: 3467 - DNA, 22 bp, Artificial Sequence
  chemically synthesized
acggctgtttcccacccccagg

SEQ ID NO: 3468 - DNA, 22 bp, Artificial Sequence
  chemically synthesized
tttcccacccccaggcctgcat

SEQ ID NO: 3469 - DNA, 22 bp, Artificial Sequence
  chemically synthesized
cccacccccaggcctgcattga

SEQ ID NO: 3470 - DNA, 22 bp, Artificial Sequence
  chemically synthesized
ccacccccaggcctgcattgat

SEQ ID NO: 3471 - DNA, 22 bp, Artificial Sequence
  chemically synthesized
cattgatgagaacctggaggtg

SEQ ID NO: 3472 - DNA, 22 bp, Artificial Sequence
  chemically synthesized
atgagaacctggaggtggtgcg

SEQ ID NO: 3473 - DNA, 22 bp, Artificial Sequence
  chemically synthesized
gaggtggtgcgcttcttggtgg

SEQ ID NO: 3474 - DNA, 22 bp, Artificial Sequence
  chemically synthesized
cttggtggagcagggcgccact

SEQ ID NO: 3475 - DNA, 22 bp, Artificial Sequence
  chemically synthesized
ttggtggagcagggcgccactg

SEQ ID NO: 3476 - DNA, 22 bp, Artificial Sequence
  chemically synthesized
ggtggagcagggcgccactgtg

SEQ ID NO: 3477 - DNA, 22 bp, Artificial Sequence
  chemically synthesized
gtggagcagggcgccactgtga

SEQ ID NO: 3478 - DNA, 22 bp, Artificial Sequence
  chemically synthesized
tgaaccaggcagacaacgaggg

SEQ ID NO: 3479 - DNA, 22 bp, Artificial Sequence
  chemically synthesized
gacgccactgcacgtggccgcc

SEQ ID NO: 3480 - DNA, 22 bp, Artificial Sequence
  chemically synthesized
cacgtggccgcctcctgtggct

SEQ ID NO: 3481 - DNA, 22 bp, Artificial Sequence
  chemically synthesized
ctgtggctacctagatatcgcc

SEQ ID NO: 3482 - DNA, 20 bp, Artificial Sequence
  chemically synthesized
taatttccctccgtttgtcc

SEQ ID NO: 3483 - DNA, 20 bp, Artificial Sequence
  chemically synthesized
ctgtcaaccccacacgcctt

SEQ ID NO: 3484 - DNA, 20 bp, Artificial Sequence
  chemically synthesized
cacacgcctttggcacaatg

SEQ ID NO: 3485 - DNA, 20 bp, Artificial Sequence
  chemically synthesized
acgcctttggcacaatgaag

SEQ ID NO: 3486 - DNA, 20 bp, Artificial Sequence
  chemically synthesized
cgcctttggcacaatgaagt

SEQ ID NO: 3487 - DNA, 20 bp, Artificial Sequence
  chemically synthesized
atttcccttctttttctctt

SEQ ID NO: 3488 - DNA, 20 bp, Artificial Sequence
  chemically synthesized
ccttctttttctctttagct

SEQ ID NO: 3489 - DNA, 20 bp, Artificial Sequence
  chemically synthesized
ctctttagctcggcttattc

SEQ ID NO: 3490 - DNA, 20 bp, Artificial Sequence
  chemically synthesized
tctttagctcggcttattcc

SEQ ID NO: 3491 - DNA, 20 bp, Artificial Sequence
  chemically synthesized
ctttagctcggcttattcca

SEQ ID NO: 3492 - DNA, 20 bp, Artificial Sequence
  chemically synthesized
tttagctcggcttattccag

SEQ ID NO: 3493 - DNA, 20 bp, Artificial Sequence
  chemically synthesized
ttccaggggtgtgtttcgtc

SEQ ID NO: 3494 - DNA, 20 bp, Artificial Sequence
  chemically synthesized
tgtttcgtcgagatgcacgt

SEQ ID NO: 3495 - DNA, 20 bp, Artificial Sequence
  chemically synthesized
caacttttattctattttcc

SEQ ID NO: 3496 - DNA, 20 bp, Artificial Sequence
  chemically synthesized
tctattttcccagtaaaata

SEQ ID NO: 3497 - DNA, 20 bp, Artificial Sequence
  chemically synthesized
ttcccagtaaaataaagttt

SEQ ID NO: 3498 - DNA, 20 bp, Artificial Sequence
  chemically synthesized
tagtaaactctgcatcttta

SEQ ID NO: 3499 - DNA, 20 bp, Artificial Sequence
  chemically synthesized
gcatctttaaagaattattt

SEQ ID NO: 3500 - DNA, 20 bp, Artificial Sequence
  chemically synthesized
tttggcatttatttctaaaa

SEQ ID NO: 3501 - DNA, 20 bp, Artificial Sequence
  chemically synthesized
catttatttctaaaatggca

SEQ ID NO: 3502 - DNA, 20 bp, Artificial Sequence
  chemically synthesized
catagtattttgtatttgtg

SEQ ID NO: 3503 - DNA, 20 bp, Artificial Sequence
  chemically synthesized
ttgtatttgtgaagtcttac

SEQ ID NO: 3504 - DNA, 20 bp, Artificial Sequence
  chemically synthesized
tgtatttgtgaagtcttaca

SEQ ID NO: 3505 - DNA, 20 bp, Artificial Sequence
  chemically synthesized
ttaataaaattcaaacatcc

SEQ ID NO: 3506 - DNA, 20 bp, Artificial Sequence
  chemically synthesized
taataaaattcaaacatcct

SEQ ID NO: 3507 - DNA, 20 bp, Artificial Sequence
  chemically synthesized
atcctaggtaaaaaaaaaaa

SEQ ID NO: 3508 - DNA, 20 bp, Artificial Sequence
  chemically synthesized
tcctaggtaaaaaaaaaaaa

SEQ ID NO: 3509 - DNA, 20 bp, Artificial Sequence
  chemically synthesized
aggtaaaaaaaaaaaaaggt

SEQ ID NO: 3510 - DNA, 20 bp, Artificial Sequence
  chemically synthesized
aaaaaaaggtcagaattgtt

SEQ ID NO: 3511 - DNA, 20 bp, Artificial Sequence
  chemically synthesized
gtaattttcttttgcgcact

SEQ ID NO: 3512 - DNA, 20 bp, Artificial Sequence
  chemically synthesized
taattttcttttgcgcacta

SEQ ID NO: 3513 - DNA, 20 bp, Artificial Sequence
  chemically synthesized
tttcttttgcgcactaagga

SEQ ID NO: 3514 - DNA, 20 bp, Artificial Sequence
  chemically synthesized
tgcgcactaaggaaagtgca

SEQ ID NO: 3515 - DNA, 20 bp, Artificial Sequence
  chemically synthesized
aaggaaagtgcaaagtaact

SEQ ID NO: 3516 - DNA, 20 bp, Artificial Sequence
  chemically synthesized
ggaaagtgcaaagtaactta

SEQ ID NO: 3517 - DNA, 20 bp, Artificial Sequence
  chemically synthesized
ttagagtgactgaaacttca

SEQ ID NO: 3518 - DNA, 20 bp, Artificial Sequence
  chemically synthesized
gtgactgaaacttcacagaa

SEQ ID NO: 3519 - DNA, 20 bp, Artificial Sequence
  chemically synthesized
tgactgaaacttcacagaat

SEQ ID NO: 3520 - DNA, 20 bp, Artificial Sequence
  chemically synthesized
gactgaaacttcacagaata

SEQ ID NO: 3521 - DNA, 20 bp, Artificial Sequence
  chemically synthesized
aacttcacagaatagggttg

SEQ ID NO: 3522 - DNA, 20 bp, Artificial Sequence
  chemically synthesized
ttgaattcataactatccca

SEQ ID NO: 3523 - DNA, 20 bp, Artificial Sequence
  chemically synthesized
tgtgctgttgatctcataaa

SEQ ID NO: 3524 - DNA, 20 bp, Artificial Sequence
  chemically synthesized
atttatatttattttcattt

SEQ ID NO: 3525 - DNA, 20 bp, Artificial Sequence
  chemically synthesized
ttcattttagtctgtcttct

SEQ ID NO: 3526 - DNA, 20 bp, Artificial Sequence
  chemically synthesized
gtcttcttggttgctgttga

SEQ ID NO: 3527 - DNA, 20 bp, Artificial Sequence
  chemically synthesized
ttgctgttgatagacactaa

SEQ ID NO: 3528 - DNA, 20 bp, Artificial Sequence
  chemically synthesized
gctgttgatagacactaaaa

SEQ ID NO: 3529 - DNA, 20 bp, Artificial Sequence
  chemically synthesized
gatagacactaaaagagtat

SEQ ID NO: 3530 - DNA, 20 bp, Artificial Sequence
  chemically synthesized
aagagtattagatattatct

SEQ ID NO: 3531 - DNA, 20 bp, Artificial Sequence
  chemically synthesized
tattatctaagtttgaatat

SEQ ID NO: 3532 - DNA, 20 bp, Artificial Sequence
  chemically synthesized
attatctaagtttgaatata

SEQ ID NO: 3533 - DNA, 20 bp, Artificial Sequence
  chemically synthesized
atatttaataatttttaaaa

SEQ ID NO: 3534 - DNA, 20 bp, Artificial Sequence
  chemically synthesized
aatttttaaaatagtattct

SEQ ID NO: 3535 - DNA, 20 bp, Artificial Sequence
  chemically synthesized
ttgaattattcttctgttta

SEQ ID NO: 3536 - DNA, 20 bp, Artificial Sequence
  chemically synthesized
tgaattattcttctgtttaa

SEQ ID NO: 3537 - DNA, 20 bp, Artificial Sequence
  chemically synthesized
attattcttctgtttaaagg

SEQ ID NO: 3538 - DNA, 20 bp, Artificial Sequence
  chemically synthesized
attcttctgtttaaaggcag

SEQ ID NO: 3539 - DNA, 20 bp, Artificial Sequence
  chemically synthesized
aaataattgaacatcatcct

SEQ ID NO: 3540 - DNA, 20 bp, Artificial Sequence
  chemically synthesized
catcatcctgagtttttctg

SEQ ID NO: 3541 - DNA, 20 bp, Artificial Sequence
  chemically synthesized
atcatcctgagtttttctgt

SEQ ID NO: 3542 - DNA, 20 bp, Artificial Sequence
  chemically synthesized
ctgagtttttctgtaggaat

SEQ ID NO: 3543 - DNA, 20 bp, Artificial Sequence
  chemically synthesized
gagtttttctgtaggaatca

SEQ ID NO: 3544 - DNA, 20 bp, Artificial Sequence
  chemically synthesized
ttgaaacaaatgcataatct

SEQ ID NO: 3545 - DNA, 20 bp, Artificial Sequence
  chemically synthesized
aatgcataatctaagtcaaa

SEQ ID NO: 3546 - DNA, 20 bp, Artificial Sequence
  chemically synthesized
cataatctaagtcaaatgga

SEQ ID NO: 3547 - DNA, 20 bp, Artificial Sequence
  chemically synthesized
caaatggaaagaaatataaa

SEQ ID NO: 3548 - DNA, 20 bp, Artificial Sequence
  chemically synthesized
ttattacttcttgttttctt

SEQ ID NO: 3549 - DNA, 20 bp, Artificial Sequence
  chemically synthesized
cttttttttcttcccttgcc

SEQ ID NO: 3550 - DNA, 20 bp, Artificial Sequence
  chemically synthesized
ttttcttcccttgcccagac

SEQ ID NO: 3551 - DNA, 20 bp, Artificial Sequence
  chemically synthesized
ttcttcccttgcccagacaa

SEQ ID NO: 3552 - DNA, 20 bp, Artificial Sequence
  chemically synthesized
tcccttgcccagacaagagt

SEQ ID NO: 3553 - DNA, 20 bp, Artificial Sequence
  chemically synthesized
cccttgcccagacaagagtg

SEQ ID NO: 3554 - DNA, 20 bp, Artificial Sequence
  chemically synthesized
acaagagtgaggttgctcat

SEQ ID NO: 3555 - DNA, 20 bp, Artificial Sequence
  chemically synthesized
tgaggttgctcatcggttta

SEQ ID NO: 3556 - DNA, 20 bp, Artificial Sequence
  chemically synthesized
tgctcatcggtttaaagatt

SEQ ID NO: 3557 - DNA, 20 bp, Artificial Sequence
  chemically synthesized
gctcatcggtttaaagattt

SEQ ID NO: 3558 - DNA, 20 bp, Artificial Sequence
  chemically synthesized
tcatcggtttaaagatttgg

SEQ ID NO: 3559 - DNA, 20 bp, Artificial Sequence
  chemically synthesized
tcggtttaaagatttgggag

SEQ ID NO: 3560 - DNA, 20 bp, Artificial Sequence
  chemically synthesized
tttgggagaagaaaatttca

SEQ ID NO: 3561 - DNA, 20 bp, Artificial Sequence
  chemically synthesized
tcccaaatctttaaaccgat

SEQ ID NO: 3562 - DNA, 20 bp, Artificial Sequence
  chemically synthesized
tgagcaacctcactcttgtc

SEQ ID NO: 3563 - DNA, 20 bp, Artificial Sequence
  chemically synthesized
gagcaacctcactcttgtct

SEQ ID NO: 3564 - DNA, 20 bp, Artificial Sequence
  chemically synthesized
aacctcactcttgtctgggc

SEQ ID NO: 3565 - DNA, 20 bp, Artificial Sequence
  chemically synthesized
acctcactcttgtctgggca

SEQ ID NO: 3566 - DNA, 20 bp, Artificial Sequence
  chemically synthesized
cctcactcttgtctgggcaa

SEQ ID NO: 3567 - DNA, 20 bp, Artificial Sequence
  chemically synthesized
cactcttgtctgggcaaggg

SEQ ID NO: 3568 - DNA, 20 bp, Artificial Sequence
  chemically synthesized
ctgggcaagggaagaaaaaa

SEQ ID NO: 3569 - DNA, 20 bp, Artificial Sequence
  chemically synthesized
tgggcaagggaagaaaaaaa

SEQ ID NO: 3570 - DNA, 20 bp, Artificial Sequence
  chemically synthesized
aaaaggattgttaaatactg

SEQ ID NO: 3571 - DNA, 20 bp, Artificial Sequence
  chemically synthesized
tgttaaatactgaagaaaac

SEQ ID NO: 3572 - DNA, 20 bp, Artificial Sequence
  chemically synthesized
taaatactgaagaaaacaag

SEQ ID NO: 3573 - DNA, 20 bp, Artificial Sequence
  chemically synthesized
atatttctttccatttgact

SEQ ID NO: 3574 - DNA, 20 bp, Artificial Sequence
  chemically synthesized
atgcatttgtttcaaaatat

SEQ ID NO: 3575 - DNA, 20 bp, Artificial Sequence
  chemically synthesized
tgcatttgtttcaaaatatt

SEQ ID NO: 3576 - DNA, 20 bp, Artificial Sequence
  chemically synthesized
atattgggctctgattccta

SEQ ID NO: 3577 - DNA, 20 bp, Artificial Sequence
  chemically synthesized
ctgattcctacagaaaaact

SEQ ID NO: 3578 - DNA, 20 bp, Artificial Sequence
  chemically synthesized
tgattcctacagaaaaactc

SEQ ID NO: 3579 - DNA, 20 bp, Artificial Sequence
  chemically synthesized
ttatttcttctgcctttaaa

SEQ ID NO: 3580 - DNA, 20 bp, Artificial Sequence
  chemically synthesized
tttcttctgcctttaaacag

SEQ ID NO: 3581 - DNA, 20 bp, Artificial Sequence
  chemically synthesized
agaagaataattcaattacc

SEQ ID NO: 3582 - DNA, 20 bp, Artificial Sequence
  chemically synthesized
taaaaattattaaatattta

SEQ ID NO: 3583 - DNA, 20 bp, Artificial Sequence
  chemically synthesized
tatagccttatattcaaact

SEQ ID NO: 3584 - DNA, 20 bp, Artificial Sequence
  chemically synthesized
gataatatctaatactcttt

SEQ ID NO: 3585 - DNA, 20 bp, Artificial Sequence
  chemically synthesized
actcttttagtgtctatcaa

SEQ ID NO: 3586 - DNA, 20 bp, Artificial Sequence
  chemically synthesized
agtgtctatcaacagcaacc

SEQ ID NO: 3587 - DNA, 20 bp, Artificial Sequence
  chemically synthesized
gtctatcaacagcaaccaag

SEQ ID NO: 3588 - DNA, 20 bp, Artificial Sequence
  chemically synthesized
atcaacagcaaccaagaaga

SEQ ID NO: 3589 - DNA, 20 bp, Artificial Sequence
  chemically synthesized
atgaaaataaatataaatac

SEQ ID NO: 3590 - DNA, 20 bp, Artificial Sequence
  chemically synthesized
taaatacaagttctatttat

SEQ ID NO: 3591 - DNA, 20 bp, Artificial Sequence
  chemically synthesized
agttctatttatgagatcaa

SEQ ID NO: 3592 - DNA, 20 bp, Artificial Sequence
  chemically synthesized
tatttatgagatcaacagca

SEQ ID NO: 3593 - DNA, 20 bp, Artificial Sequence
  chemically synthesized
atttatgagatcaacagcac

SEQ ID NO: 3594 - DNA, 20 bp, Artificial Sequence
  chemically synthesized
gatcaacagcacaggttttg

SEQ ID NO: 3595 - DNA, 20 bp, Artificial Sequence
  chemically synthesized
ggttttgtggtttttaaata

SEQ ID NO: 3596 - DNA, 20 bp, Artificial Sequence
  chemically synthesized
tgtggtttttaaataaagca

SEQ ID NO: 3597 - DNA, 20 bp, Artificial Sequence
  chemically synthesized
ttaaataaagcatagtgcaa

SEQ ID NO: 3598 - DNA, 20 bp, Artificial Sequence
  chemically synthesized
ataaagcatagtgcaatgga

SEQ ID NO: 3599 - DNA, 20 bp, Artificial Sequence
  chemically synthesized
taaagcatagtgcaatggat

SEQ ID NO: 3600 - DNA, 20 bp, Artificial Sequence
  chemically synthesized
tagtgcaatggataggtctt

SEQ ID NO: 3601 - DNA, 20 bp, Artificial Sequence
  chemically synthesized
agtgcaatggataggtcttt

SEQ ID NO: 3602 - DNA, 20 bp, Artificial Sequence
  chemically synthesized
caatggataggtctttggga

SEQ ID NO: 3603 - DNA, 20 bp, Artificial Sequence
  chemically synthesized
atcttcaaccctattctgtg

SEQ ID NO: 3604 - DNA, 20 bp, Artificial Sequence
  chemically synthesized
aaccctattctgtgaagttt

SEQ ID NO: 3605 - DNA, 20 bp, Artificial Sequence
  chemically synthesized
tgtgaagtttcagtcactct

SEQ ID NO: 3606 - DNA, 20 bp, Artificial Sequence
  chemically synthesized
aagttactttgcactttcct

SEQ ID NO: 3607 - DNA, 20 bp, Artificial Sequence
  chemically synthesized
gcactttccttagtgcgcaa

SEQ ID NO: 3608 - DNA, 20 bp, Artificial Sequence
  chemically synthesized
tagtgcgcaaaagaaaatta

SEQ ID NO: 3609 - DNA, 20 bp, Artificial Sequence
  chemically synthesized
gacctttttttttttttacc

SEQ ID NO: 3610 - DNA, 20 bp, Artificial Sequence
  chemically synthesized
acctttttttttttttacct

SEQ ID NO: 3611 - DNA, 20 bp, Artificial Sequence
  chemically synthesized
gatgtttgaattttattaat

SEQ ID NO: 3612 - DNA, 20 bp, Artificial Sequence
  chemically synthesized
tattaataagataaccttgt

SEQ ID NO: 3613 - DNA, 20 bp, Artificial Sequence
  chemically synthesized
tacaaaatactatgccattt

SEQ ID NO: 3614 - DNA, 20 bp, Artificial Sequence
  chemically synthesized
aatgccaaaataattcttta

SEQ ID NO: 3615 - DNA, 20 bp, Artificial Sequence
  chemically synthesized
aaaataattctttaaagatg

SEQ ID NO: 3616 - DNA, 20 bp, Artificial Sequence
  chemically synthesized
aataattctttaaagatgca

SEQ ID NO: 3617 - DNA, 20 bp, Artificial Sequence
  chemically synthesized
ttactaaaactttattttac

SEQ ID NO: 3618 - DNA, 20 bp, Artificial Sequence
  chemically synthesized
tactaaaactttattttact

SEQ ID NO: 3619 - DNA, 20 bp, Artificial Sequence
  chemically synthesized
actttattttactgggaaaa

SEQ ID NO: 3620 - DNA, 20 bp, Artificial Sequence
  chemically synthesized
ttactgggaaaatagaataa

SEQ ID NO: 3621 - DNA, 20 bp, Artificial Sequence
  chemically synthesized
atagaataaaagttgaacaa

SEQ ID NO: 3622 - DNA, 20 bp, Artificial Sequence
  chemically synthesized
aaagttgaacaatagaaaaa

SEQ ID NO: 3623 - DNA, 20 bp, Artificial Sequence
  chemically synthesized
atctcgacgaaacacacccc

SEQ ID NO: 3624 - DNA, 20 bp, Artificial Sequence
  chemically synthesized
acgaaacacacccctggaat

SEQ ID NO: 3625 - DNA, 20 bp, Artificial Sequence
  chemically synthesized
acacacccctggaataagcc

SEQ ID NO: 3626 - DNA, 20 bp, Artificial Sequence
  chemically synthesized
ccctggaataagccgagcta

SEQ ID NO: 3627 - DNA, 20 bp, Artificial Sequence
  chemically synthesized
ctggaataagccgagctaaa

SEQ ID NO: 3628 - DNA, 20 bp, Artificial Sequence
  chemically synthesized
taagccgagctaaagagaaa

SEQ ID NO: 3629 - DNA, 20 bp, Artificial Sequence
  chemically synthesized
gccgagctaaagagaaaaag

SEQ ID NO: 3630 - DNA, 20 bp, Artificial Sequence
  chemically synthesized
ccgagctaaagagaaaaaga

SEQ ID NO: 3631 - DNA, 20 bp, Artificial Sequence
  chemically synthesized
cgagctaaagagaaaaagaa

SEQ ID NO: 3632 - DNA, 20 bp, Artificial Sequence
  chemically synthesized
agagaaaaagaagggaaata

SEQ ID NO: 3633 - DNA, 20 bp, Artificial Sequence
  chemically synthesized
gagaaaaagaagggaaataa

SEQ ID NO: 3634 - DNA, 20 bp, Artificial Sequence
  chemically synthesized
ttacccacttcattgtgcca

SEQ ID NO: 3635 - DNA, 20 bp, Artificial Sequence
  chemically synthesized
tacccacttcattgtgccaa

SEQ ID NO: 3636 - DNA, 20 bp, Artificial Sequence
  chemically synthesized
ttcattgtgccaaaggcgtg

SEQ ID NO: 3637 - DNA, 20 bp, Artificial Sequence
  chemically synthesized
tcattgtgccaaaggcgtgt

SEQ ID NO: 3638 - DNA, 20 bp, Artificial Sequence
  chemically synthesized
cattgtgccaaaggcgtgtg

SEQ ID NO: 3639 - DNA, 20 bp, Artificial Sequence
  chemically synthesized
ccaaaggcgtgtggggttga

SEQ ID NO: 3640 - DNA, 20 bp, Artificial Sequence
  chemically synthesized
aaggcgtgtggggttgacag

SEQ ID NO: 3641 - DNA, 20 bp, Artificial Sequence
  chemically synthesized
ggcgtgtggggttgacagaa

SEQ ID NO: 3642 - DNA, 20 bp, Artificial Sequence
  chemically synthesized
gtggggttgacagaagagaa

SEQ ID NO: 3643 - DNA, 20 bp, Artificial Sequence
  chemically synthesized
ggttgacagaagagaaaagc

SEQ ID NO: 3644 - DNA, 20 bp, Artificial Sequence
  chemically synthesized
gttgacagaagagaaaagct

SEQ ID NO: 3645 - DNA, 20 bp, Artificial Sequence
  chemically synthesized
aagagaaaagctaggacaaa

SEQ ID NO: 3646 - DNA, 20 bp, Artificial Sequence
  chemically synthesized
gagaaaagctaggacaaacg

SEQ ID NO: 3647 - DNA, 20 bp, Artificial Sequence
  chemically synthesized
agaaaagctaggacaaacgg

SEQ ID NO: 3648 - DNA, 20 bp, Artificial Sequence
  chemically synthesized
gaaaagctaggacaaacgga

SEQ ID NO: 3649 - DNA, 20 bp, Artificial Sequence
  chemically synthesized
taggacaaacggagggaaat

SEQ ID NO: 3650 - DNA, 20 bp, Artificial Sequence
  chemically synthesized
cacgcctttggcacaatgaa

SEQ ID NO: 3651 - DNA, 20 bp, Artificial Sequence
  chemically synthesized
tctttagctcggcttattcc

SEQ ID NO: 3652 - DNA, 20 bp, Artificial Sequence
  chemically synthesized
tagtaaactctgcatcttta

SEQ ID NO: 3653 - DNA, 20 bp, Artificial Sequence
  chemically synthesized
aggtaaaaaaaaaaaaaggt

SEQ ID NO: 3654 - DNA, 20 bp, Artificial Sequence
  chemically synthesized
aaggaaagtgcaaagtaact

SEQ ID NO: 3655 - DNA, 20 bp, Artificial Sequence
  chemically synthesized
ttagagtgactgaaacttca

SEQ ID NO: 3656 - DNA, 20 bp, Artificial Sequence
  chemically synthesized
gtgactgaaacttcacagaa

SEQ ID NO: 3657 - DNA, 20 bp, Artificial Sequence
  chemically synthesized
tcacagaatagggttgaaga

SEQ ID NO: 3658 - DNA, 20 bp, Artificial Sequence
  chemically synthesized
ttgctgttgatagacactaa

SEQ ID NO: 3659 - DNA, 20 bp, Artificial Sequence
  chemically synthesized
gtattagatattatctaagt

SEQ ID NO: 3660 - DNA, 20 bp, Artificial Sequence
  chemically synthesized
taaaatagtattcttggtaa

SEQ ID NO: 3661 - DNA, 20 bp, Artificial Sequence
  chemically synthesized
agaaataattgaacatcatc

SEQ ID NO: 3662 - DNA, 20 bp, Artificial Sequence
  chemically synthesized
atcatcctgagtttttctgt

SEQ ID NO: 3663 - DNA, 20 bp, Artificial Sequence
  chemically synthesized
ttttcttcccttgcccagac

SEQ ID NO: 3664 - DNA, 20 bp, Artificial Sequence
  chemically synthesized
ctgggcaagggaagaaaaaa

SEQ ID NO: 3665 - DNA, 20 bp, Artificial Sequence
  chemically synthesized
ctgattcctacagaaaaact

SEQ ID NO: 3666 - DNA, 20 bp, Artificial Sequence
  chemically synthesized
tttcttctgcctttaaacag

SEQ ID NO: 3667 - DNA, 20 bp, Artificial Sequence
  chemically synthesized
agaagaataattcaattacc

SEQ ID NO: 3668 - DNA, 20 bp, Artificial Sequence
  chemically synthesized
tttaaataaagcatagtgca

SEQ ID NO: 3669 - DNA, 20 bp, Artificial Sequence
  chemically synthesized
tagtgcaatggataggtctt

SEQ ID NO: 3670 - DNA, 20 bp, Artificial Sequence
  chemically synthesized
gataggtctttgggatagtt

SEQ ID NO: 3671 - DNA, 20 bp, Artificial Sequence
  chemically synthesized
gacctttttttttttttacc

SEQ ID NO: 3672 - DNA, 20 bp, Artificial Sequence
  chemically synthesized
tttttttttacctaggatgt

SEQ ID NO: 3673 - DNA, 20 bp, Artificial Sequence
  chemically synthesized
aaaataattctttaaagatg

SEQ ID NO: 3674 - DNA, 20 bp, Artificial Sequence
  chemically synthesized
actttattttactgggaaaa

SEQ ID NO: 3675 - DNA, 20 bp, Artificial Sequence
  chemically synthesized
aaaagttgaacaatagaaaa

SEQ ID NO: 3676 - DNA, 20 bp, Artificial Sequence
  chemically synthesized
atctcgacgaaacacacccc

SEQ ID NO: 3677 - DNA, 20 bp, Artificial Sequence
  chemically synthesized
ttcattgtgccaaaggcgtg

SEQ ID NO: 3678 - DNA, 20 bp, Artificial Sequence
  chemically synthesized
gtgtttcgtcgagatgcacg

SEQ ID NO: 3679 - DNA, 20 bp, Artificial Sequence
  chemically synthesized
ttagtaaactctgcatcttt

SEQ ID NO: 3680 - DNA, 20 bp, Artificial Sequence
  chemically synthesized
taggtaaaaaaaaaaaaagg

SEQ ID NO: 3681 - DNA, 20 bp, Artificial Sequence
  chemically synthesized
cttagagtgactgaaacttc

SEQ ID NO: 3682 - DNA, 20 bp, Artificial Sequence
  chemically synthesized
tattcttctgtttaaaggca

SEQ ID NO: 3683 - DNA, 20 bp, Artificial Sequence
  chemically synthesized
gcataatctaagtcaaatgg

SEQ ID NO: 3684 - DNA, 20 bp, Artificial Sequence
  chemically synthesized
atcggtttaaagatttggga

SEQ ID NO: 3685 - DNA, 20 bp, Artificial Sequence
  chemically synthesized
tcactcttgtctgggcaagg

SEQ ID NO: 3686 - DNA, 20 bp, Artificial Sequence
  chemically synthesized
aaaaaggattgttaaatact

SEQ ID NO: 3687 - DNA, 20 bp, Artificial Sequence
  chemically synthesized
aatattgggctctgattcct

SEQ ID NO: 3688 - DNA, 20 bp, Artificial Sequence
  chemically synthesized
atttcttctgcctttaaaca

SEQ ID NO: 3689 - DNA, 20 bp, Artificial Sequence
  chemically synthesized
cagaagaataattcaattac

SEQ ID NO: 3690 - DNA, 20 bp, Artificial Sequence
  chemically synthesized
tgcactttccttagtgcgca

SEQ ID NO: 3691 - DNA, 20 bp, Artificial Sequence
  chemically synthesized
atacaaaatactatgccatt

SEQ ID NO: 3692 - DNA, 20 bp, Artificial Sequence
  chemically synthesized
aactttattttactgggaaa

SEQ ID NO: 3693 - DNA, 20 bp, Artificial Sequence
  chemically synthesized
aatagaataaaagttgaaca

SEQ ID NO: 3694 - DNA, 20 bp, Artificial Sequence
  chemically synthesized
cctggaataagccgagctaa

SEQ ID NO: 3695 - DNA, 20 bp, Artificial Sequence
  chemically synthesized
aggcgtgtggggttgacaga

SEQ ID NO: 3696 - DNA, 20 bp, Artificial Sequence
  chemically synthesized
cattgcactatgctttattt

SEQ ID NO: 3697 - DNA, 20 bp, Artificial Sequence
  chemically synthesized
tatgctttatttaaaaacca

SEQ ID NO: 3698 - DNA, 20 bp, Artificial Sequence
  chemically synthesized
aaggattgttaaatactgaa

SEQ ID NO: 3699 - DNA, 20 bp, Artificial Sequence
  chemically synthesized
ttgggctctgattcctacag

SEQ ID NO: 3700 - DNA, 20 bp, Artificial Sequence
  chemically synthesized
tttaaagatgcagagtttac

SEQ ID NO: 3701 - DNA, 20 bp, Artificial Sequence
  chemically synthesized
gtatattagtgctaatttcc

SEQ ID NO: 3702 - DNA, 20 bp, Artificial Sequence
  chemically synthesized
gctaatttccctccgtttgt

SEQ ID NO: 3703 - DNA, 20 bp, Artificial Sequence
  chemically synthesized
tcccttctttttctctttag

SEQ ID NO: 3704 - DNA, 20 bp, Artificial Sequence
  chemically synthesized
tagctcggcttattccaggg

SEQ ID NO: 3705 - DNA, 20 bp, Artificial Sequence
  chemically synthesized
attctattttcccagtaaaa

SEQ ID NO: 3706 - DNA, 20 bp, Artificial Sequence
  chemically synthesized
taaaaaaaaaaaaaggtcag

SEQ ID NO: 3707 - DNA, 20 bp, Artificial Sequence
  chemically synthesized
gaaacttcacagaatagggt

SEQ ID NO: 3708 - DNA, 20 bp, Artificial Sequence
  chemically synthesized
ccaaagacctatccattgca

SEQ ID NO: 3709 - DNA, 20 bp, Artificial Sequence
  chemically synthesized
aaaagagtattagatattat

SEQ ID NO: 3710 - DNA, 20 bp, Artificial Sequence
  chemically synthesized
tcttggtaattgaattattc

SEQ ID NO: 3711 - DNA, 20 bp, Artificial Sequence
  chemically synthesized
agaaataattgaacatcatc

SEQ ID NO: 3712 - DNA, 20 bp, Artificial Sequence
  chemically synthesized
taaaaagtaacattattact

SEQ ID NO: 3713 - DNA, 20 bp, Artificial Sequence
  chemically synthesized
agacaagagtgaggttgctc

SEQ ID NO: 3714 - DNA, 20 bp, Artificial Sequence
  chemically synthesized
agtgaggttgctcatcggtt

SEQ ID NO: 3715 - DNA, 20 bp, Artificial Sequence
  chemically synthesized
tctgggcaagggaagaaaaa

SEQ ID NO: 3716 - DNA, 20 bp, Artificial Sequence
  chemically synthesized
ttatatttctttccatttga

SEQ ID NO: 3717 - DNA, 20 bp, Artificial Sequence
  chemically synthesized
ccatttgacttagattatgc

SEQ ID NO: 3718 - DNA, 20 bp, Artificial Sequence
  chemically synthesized
atttgtttcaaaatattggg

SEQ ID NO: 3719 - DNA, 20 bp, Artificial Sequence
  chemically synthesized
ctatttatgagatcaacagc

SEQ ID NO: 3720 - DNA, 20 bp, Artificial Sequence
  chemically synthesized
gagatcaacagcacaggttt

SEQ ID NO: 3721 - DNA, 20 bp, Artificial Sequence
  chemically synthesized
caatcttcaaccctattctg

SEQ ID NO: 3722 - DNA, 20 bp, Artificial Sequence
  chemically synthesized
cctttttttttttttaccta

SEQ ID NO: 3723 - DNA, 20 bp, Artificial Sequence
  chemically synthesized
aaaataattctttaaagatg

SEQ ID NO: 3724 - DNA, 20 bp, Artificial Sequence
  chemically synthesized
taaaagttgaacaatagaaa

SEQ ID NO: 3725 - DNA, 22 bp, Artificial Sequence
  chemically synthesized
gtgctaatttccctccgtttgt

SEQ ID NO: 3726 - DNA, 22 bp, Artificial Sequence
  chemically synthesized
atttccctccgtttgtcctagc

SEQ ID NO: 3727 - DNA, 22 bp, Artificial Sequence
  chemically synthesized
ccctccgtttgtcctagctttt

SEQ ID NO: 3728 - DNA, 22 bp, Artificial Sequence
  chemically synthesized
cctccgtttgtcctagcttttc

SEQ ID NO: 3729 - DNA, 22 bp, Artificial Sequence
  chemically synthesized
cgtttgtcctagcttttctctt

SEQ ID NO: 3730 - DNA, 22 bp, Artificial Sequence
  chemically synthesized
gtcctagcttttctcttctgtc

SEQ ID NO: 3731 - DNA, 22 bp, Artificial Sequence
  chemically synthesized
tcctagcttttctcttctgtca

SEQ ID NO: 3732 - DNA, 22 bp, Artificial Sequence
  chemically synthesized
gcttttctcttctgtcaacccc

SEQ ID NO: 3733 - DNA, 22 bp, Artificial Sequence
  chemically synthesized
ttctcttctgtcaaccccacac

SEQ ID NO: 3734 - DNA, 22 bp, Artificial Sequence
  chemically synthesized
tctcttctgtcaaccccacacg

SEQ ID NO: 3735 - DNA, 22 bp, Artificial Sequence
  chemically synthesized
ctcttctgtcaaccccacacgc

SEQ ID NO: 3736 - DNA, 22 bp, Artificial Sequence
  chemically synthesized
tcttctgtcaaccccacacgcc

SEQ ID NO: 3737 - DNA, 22 bp, Artificial Sequence
  chemically synthesized
ttctgtcaaccccacacgcctt

SEQ ID NO: 3738 - DNA, 22 bp, Artificial Sequence
  chemically synthesized
ctgtcaaccccacacgcctttg

SEQ ID NO: 3739 - DNA, 22 bp, Artificial Sequence
  chemically synthesized
tgtcaaccccacacgcctttgg

SEQ ID NO: 3740 - DNA, 22 bp, Artificial Sequence
  chemically synthesized
tcaaccccacacgcctttggca

SEQ ID NO: 3741 - DNA, 22 bp, Artificial Sequence
  chemically synthesized
tggcacaatgaagtgggtaacc

SEQ ID NO: 3742 - DNA, 22 bp, Artificial Sequence
  chemically synthesized
ggcacaatgaagtgggtaacct

SEQ ID NO: 3743 - DNA, 22 bp, Artificial Sequence
  chemically synthesized
gcacaatgaagtgggtaacctt

SEQ ID NO: 3744 - DNA, 22 bp, Artificial Sequence
  chemically synthesized
tatttcccttctttttctcttt

SEQ ID NO: 3745 - DNA, 22 bp, Artificial Sequence
  chemically synthesized
atttcccttctttttctcttta

SEQ ID NO: 3746 - DNA, 22 bp, Artificial Sequence
  chemically synthesized
tttcccttctttttctctttag

SEQ ID NO: 3747 - DNA, 22 bp, Artificial Sequence
  chemically synthesized
cccttctttttctctttagctc

SEQ ID NO: 3748 - DNA, 22 bp, Artificial Sequence
  chemically synthesized
ccttctttttctctttagctcg

SEQ ID NO: 3749 - DNA, 22 bp, Artificial Sequence
  chemically synthesized
ctttttctctttagctcggctt

SEQ ID NO: 3750 - DNA, 22 bp, Artificial Sequence
  chemically synthesized
tttttctctttagctcggctta

SEQ ID NO: 3751 - DNA, 22 bp, Artificial Sequence
  chemically synthesized
tttctctttagctcggcttatt

SEQ ID NO: 3752 - DNA, 22 bp, Artificial Sequence
  chemically synthesized
ttctctttagctcggcttattc

SEQ ID NO: 3753 - DNA, 22 bp, Artificial Sequence
  chemically synthesized
tctctttagctcggcttattcc

SEQ ID NO: 3754 - DNA, 22 bp, Artificial Sequence
  chemically synthesized
ctctttagctcggcttattcca

SEQ ID NO: 3755 - DNA, 22 bp, Artificial Sequence
  chemically synthesized
tctttagctcggcttattccag

SEQ ID NO: 3756 - DNA, 22 bp, Artificial Sequence
  chemically synthesized
tttagctcggcttattccaggg

SEQ ID NO: 3757 - DNA, 22 bp, Artificial Sequence
  chemically synthesized
tagctcggcttattccaggggt

SEQ ID NO: 3758 - DNA, 22 bp, Artificial Sequence
  chemically synthesized
agctcggcttattccaggggtg

SEQ ID NO: 3759 - DNA, 22 bp, Artificial Sequence
  chemically synthesized
gctcggcttattccaggggtgt

SEQ ID NO: 3760 - DNA, 22 bp, Artificial Sequence
  chemically synthesized
ggcttattccaggggtgtgttt

SEQ ID NO: 3761 - DNA, 22 bp, Artificial Sequence
  chemically synthesized
attccaggggtgtgtttcgtcg

SEQ ID NO: 3762 - DNA, 22 bp, Artificial Sequence
  chemically synthesized
ttccaggggtgtgtttcgtcga

SEQ ID NO: 3763 - DNA, 22 bp, Artificial Sequence
  chemically synthesized
caggggtgtgtttcgtcgagat

SEQ ID NO: 3764 - DNA, 22 bp, Artificial Sequence
  chemically synthesized
cgtcgagatgcacgtaagaaat

SEQ ID NO: 3765 - DNA, 22 bp, Artificial Sequence
  chemically synthesized
gtcgagatgcacgtaagaaatc

SEQ ID NO: 3766 - DNA, 22 bp, Artificial Sequence
  chemically synthesized
ttctattgttcaacttttattc

SEQ ID NO: 3767 - DNA, 22 bp, Artificial Sequence
  chemically synthesized
tctattgttcaacttttattct

SEQ ID NO: 3768 - DNA, 22 bp, Artificial Sequence
  chemically synthesized
ctattgttcaacttttattcta

SEQ ID NO: 3769 - DNA, 22 bp, Artificial Sequence
  chemically synthesized
tattgttcaacttttattctat

SEQ ID NO: 3770 - DNA, 22 bp, Artificial Sequence
  chemically synthesized
ttgttcaacttttattctattt

SEQ ID NO: 3771 - DNA, 22 bp, Artificial Sequence
  chemically synthesized
ttcaacttttattctattttcc

SEQ ID NO: 3772 - DNA, 22 bp, Artificial Sequence
  chemically synthesized
aacttttattctattttcccag

SEQ ID NO: 3773 - DNA, 22 bp, Artificial Sequence
  chemically synthesized
ttattctattttcccagtaaaa

SEQ ID NO: 3774 - DNA, 22 bp, Artificial Sequence
  chemically synthesized
tattctattttcccagtaaaat

SEQ ID NO: 3775 - DNA, 22 bp, Artificial Sequence
  chemically synthesized
attctattttcccagtaaaata

SEQ ID NO: 3776 - DNA, 22 bp, Artificial Sequence
  chemically synthesized
ttctattttcccagtaaaataa

SEQ ID NO: 3777 - DNA, 22 bp, Artificial Sequence
  chemically synthesized
tattttcccagtaaaataaagt

SEQ ID NO: 3778 - DNA, 22 bp, Artificial Sequence
  chemically synthesized
ttttcccagtaaaataaagttt

SEQ ID NO: 3779 - DNA, 22 bp, Artificial Sequence
  chemically synthesized
tcccagtaaaataaagttttag

SEQ ID NO: 3780 - DNA, 22 bp, Artificial Sequence
  chemically synthesized
cccagtaaaataaagttttagt

SEQ ID NO: 3781 - DNA, 22 bp, Artificial Sequence
  chemically synthesized
ccagtaaaataaagttttagta

SEQ ID NO: 3782 - DNA, 22 bp, Artificial Sequence
  chemically synthesized
tagtaaactctgcatctttaaa

SEQ ID NO: 3783 - DNA, 22 bp, Artificial Sequence
  chemically synthesized
agtaaactctgcatctttaaag

SEQ ID NO: 3784 - DNA, 22 bp, Artificial Sequence
  chemically synthesized
gtaaactctgcatctttaaaga

SEQ ID NO: 3785 - DNA, 22 bp, Artificial Sequence
  chemically synthesized
tgcatctttaaagaattatttt

SEQ ID NO: 3786 - DNA, 22 bp, Artificial Sequence
  chemically synthesized
catctttaaagaattattttgg

SEQ ID NO: 3787 - DNA, 22 bp, Artificial Sequence
  chemically synthesized
taaagaattattttggcattta

SEQ ID NO: 3788 - DNA, 22 bp, Artificial Sequence
  chemically synthesized
aaagaattattttggcatttat

SEQ ID NO: 3789 - DNA, 22 bp, Artificial Sequence
  chemically synthesized
aagaattattttggcatttatt

SEQ ID NO: 3790 - DNA, 22 bp, Artificial Sequence
  chemically synthesized
ttttggcatttatttctaaaat

SEQ ID NO: 3791 - DNA, 22 bp, Artificial Sequence
  chemically synthesized
tggcatttatttctaaaatggc

SEQ ID NO: 3792 - DNA, 22 bp, Artificial Sequence
  chemically synthesized
ggcatttatttctaaaatggca

SEQ ID NO: 3793 - DNA, 22 bp, Artificial Sequence
  chemically synthesized
gcatttatttctaaaatggcat

SEQ ID NO: 3794 - DNA, 22 bp, Artificial Sequence
  chemically synthesized
atttctaaaatggcatagtatt

SEQ ID NO: 3795 - DNA, 22 bp, Artificial Sequence
  chemically synthesized
tttctaaaatggcatagtattt

SEQ ID NO: 3796 - DNA, 22 bp, Artificial Sequence
  chemically synthesized
ctaaaatggcatagtattttgt

SEQ ID NO: 3797 - DNA, 22 bp, Artificial Sequence
  chemically synthesized
taaaatggcatagtattttgta

SEQ ID NO: 3798 - DNA, 22 bp, Artificial Sequence
  chemically synthesized
aaatggcatagtattttgtatt

SEQ ID NO: 3799 - DNA, 22 bp, Artificial Sequence
  chemically synthesized
tgtatttgtgaagtcttacaag

SEQ ID NO: 3800 - DNA, 22 bp, Artificial Sequence
  chemically synthesized
gtatttgtgaagtcttacaagg

SEQ ID NO: 3801 - DNA, 22 bp, Artificial Sequence
  chemically synthesized
tatttgtgaagtcttacaaggt

SEQ ID NO: 3802 - DNA, 22 bp, Artificial Sequence
  chemically synthesized
gtgaagtcttacaaggttatct

SEQ ID NO: 3803 - DNA, 22 bp, Artificial Sequence
  chemically synthesized
tgaagtcttacaaggttatctt

SEQ ID NO: 3804 - DNA, 22 bp, Artificial Sequence
  chemically synthesized
acaaggttatcttattaataaa

SEQ ID NO: 3805 - DNA, 22 bp, Artificial Sequence
  chemically synthesized
caaggttatcttattaataaaa

SEQ ID NO: 3806 - DNA, 22 bp, Artificial Sequence
  chemically synthesized
tcttattaataaaattcaaaca

SEQ ID NO: 3807 - DNA, 22 bp, Artificial Sequence
  chemically synthesized
attaataaaattcaaacatcct

SEQ ID NO: 3808 - DNA, 22 bp, Artificial Sequence
  chemically synthesized
ttaataaaattcaaacatccta

SEQ ID NO: 3809 - DNA, 22 bp, Artificial Sequence
  chemically synthesized
ataaaattcaaacatcctaggt

SEQ ID NO: 3810 - DNA, 22 bp, Artificial Sequence
  chemically synthesized
aaacatcctaggtaaaaaaaaa

SEQ ID NO: 3811 - DNA, 22 bp, Artificial Sequence
  chemically synthesized
ggtaaaaaaaaaaaaaggtcag

SEQ ID NO: 3812 - DNA, 22 bp, Artificial Sequence
  chemically synthesized
tttagtgactgtaattttcttt

SEQ ID NO: 3813 - DNA, 22 bp, Artificial Sequence
  chemically synthesized
agtgactgtaattttcttttgc

SEQ ID NO: 3814 - DNA, 22 bp, Artificial Sequence
  chemically synthesized
gtgactgtaattttcttttgcg

SEQ ID NO: 3815 - DNA, 22 bp, Artificial Sequence
  chemically synthesized
taattttcttttgcgcactaag

SEQ ID NO: 3816 - DNA, 22 bp, Artificial Sequence
  chemically synthesized
tcttttgcgcactaaggaaagt

SEQ ID NO: 3817 - DNA, 22 bp, Artificial Sequence
  chemically synthesized
cttttgcgcactaaggaaagtg

SEQ ID NO: 3818 - DNA, 22 bp, Artificial Sequence
  chemically synthesized
ttttgcgcactaaggaaagtgc

SEQ ID NO: 3819 - DNA, 22 bp, Artificial Sequence
  chemically synthesized
ttgcgcactaaggaaagtgcaa

SEQ ID NO: 3820 - DNA, 22 bp, Artificial Sequence
  chemically synthesized
tgcgcactaaggaaagtgcaaa

SEQ ID NO: 3821 - DNA, 22 bp, Artificial Sequence
  chemically synthesized
gcgcactaaggaaagtgcaaag

SEQ ID NO: 3822 - DNA, 22 bp, Artificial Sequence
  chemically synthesized
cgcactaaggaaagtgcaaagt

SEQ ID NO: 3823 - DNA, 22 bp, Artificial Sequence
  chemically synthesized
aggaaagtgcaaagtaacttag

SEQ ID NO: 3824 - DNA, 22 bp, Artificial Sequence
  chemically synthesized
agagtgactgaaacttcacaga

SEQ ID NO: 3825 - DNA, 22 bp, Artificial Sequence
  chemically synthesized
gagtgactgaaacttcacagaa

SEQ ID NO: 3826 - DNA, 22 bp, Artificial Sequence
  chemically synthesized
aaacttcacagaatagggttga

SEQ ID NO: 3827 - DNA, 22 bp, Artificial Sequence
  chemically synthesized
cacagaatagggttgaagattg

SEQ ID NO: 3828 - DNA, 22 bp, Artificial Sequence
  chemically synthesized
acagaatagggttgaagattga

SEQ ID NO: 3829 - DNA, 22 bp, Artificial Sequence
  chemically synthesized
aagattgaattcataactatcc

SEQ ID NO: 3830 - DNA, 22 bp, Artificial Sequence
  chemically synthesized
aattcataactatcccaaagac

SEQ ID NO: 3831 - DNA, 22 bp, Artificial Sequence
  chemically synthesized
ataactatcccaaagacctatc

SEQ ID NO: 3832 - DNA, 22 bp, Artificial Sequence
  chemically synthesized
tcccaaagacctatccattgca

SEQ ID NO: 3833 - DNA, 22 bp, Artificial Sequence
  chemically synthesized
tccattgcactatgctttattt

SEQ ID NO: 3834 - DNA, 22 bp, Artificial Sequence
  chemically synthesized
cactatgctttatttaaaaacc

SEQ ID NO: 3835 - DNA, 22 bp, Artificial Sequence
  chemically synthesized
tgctttatttaaaaaccacaaa

SEQ ID NO: 3836 - DNA, 22 bp, Artificial Sequence
  chemically synthesized
tatttaaaaaccacaaaacctg

SEQ ID NO: 3837 - DNA, 22 bp, Artificial Sequence
  chemically synthesized
atttaaaaaccacaaaacctgt

SEQ ID NO: 3838 - DNA, 22 bp, Artificial Sequence
  chemically synthesized
tttaaaaaccacaaaacctgtg

SEQ ID NO: 3839 - DNA, 22 bp, Artificial Sequence
  chemically synthesized
aaaaaccacaaaacctgtgctg

SEQ ID NO: 3840 - DNA, 22 bp, Artificial Sequence
  chemically synthesized
aaaaccacaaaacctgtgctgt

SEQ ID NO: 3841 - DNA, 22 bp, Artificial Sequence
  chemically synthesized
tgctgttgatctcataaataga

SEQ ID NO: 3842 - DNA, 22 bp, Artificial Sequence
  chemically synthesized
ttgatctcataaatagaacttg

SEQ ID NO: 3843 - DNA, 22 bp, Artificial Sequence
  chemically synthesized
atctcataaatagaacttgtat

SEQ ID NO: 3844 - DNA, 22 bp, Artificial Sequence
  chemically synthesized
ataaatagaacttgtatttata

SEQ ID NO: 3845 - DNA, 22 bp, Artificial Sequence
  chemically synthesized
gtatttatatttattttcattt

SEQ ID NO: 3846 - DNA, 22 bp, Artificial Sequence
  chemically synthesized
tatttatatttattttcatttt

SEQ ID NO: 3847 - DNA, 22 bp, Artificial Sequence
  chemically synthesized
atatttattttcattttagtct

SEQ ID NO: 3848 - DNA, 22 bp, Artificial Sequence
  chemically synthesized
tatttattttcattttagtctg

SEQ ID NO: 3849 - DNA, 22 bp, Artificial Sequence
  chemically synthesized
attttcattttagtctgtcttc

SEQ ID NO: 3850 - DNA, 22 bp, Artificial Sequence
  chemically synthesized
ttttcattttagtctgtcttct

SEQ ID NO: 3851 - DNA, 22 bp, Artificial Sequence
  chemically synthesized
tcattttagtctgtcttcttgg

SEQ ID NO: 3852 - DNA, 22 bp, Artificial Sequence
  chemically synthesized
cattttagtctgtcttcttggt

SEQ ID NO: 3853 - DNA, 22 bp, Artificial Sequence
  chemically synthesized
attttagtctgtcttcttggtt

SEQ ID NO: 3854 - DNA, 22 bp, Artificial Sequence
  chemically synthesized
tagtctgtcttcttggttgctg

SEQ ID NO: 3855 - DNA, 22 bp, Artificial Sequence
  chemically synthesized
agtctgtcttcttggttgctgt

SEQ ID NO: 3856 - DNA, 22 bp, Artificial Sequence
  chemically synthesized
gtctgtcttcttggttgctgtt

SEQ ID NO: 3857 - DNA, 22 bp, Artificial Sequence
  chemically synthesized
tcttcttggttgctgttgatag

SEQ ID NO: 3858 - DNA, 22 bp, Artificial Sequence
  chemically synthesized
cttggttgctgttgatagacac

SEQ ID NO: 3859 - DNA, 22 bp, Artificial Sequence
  chemically synthesized
ttggttgctgttgatagacact

SEQ ID NO: 3860 - DNA, 22 bp, Artificial Sequence
  chemically synthesized
ggttgctgttgatagacactaa

SEQ ID NO: 3861 - DNA, 22 bp, Artificial Sequence
  chemically synthesized
gttgctgttgatagacactaaa

SEQ ID NO: 3862 - DNA, 22 bp, Artificial Sequence
  chemically synthesized
ctgttgatagacactaaaagag

SEQ ID NO: 3863 - DNA, 22 bp, Artificial Sequence
  chemically synthesized
ttgatagacactaaaagagtat

SEQ ID NO: 3864 - DNA, 22 bp, Artificial Sequence
  chemically synthesized
atagacactaaaagagtattag

SEQ ID NO: 3865 - DNA, 22 bp, Artificial Sequence
  chemically synthesized
aaagagtattagatattatcta

SEQ ID NO: 3866 - DNA, 22 bp, Artificial Sequence
  chemically synthesized
gatattatctaagtttgaatat

SEQ ID NO: 3867 - DNA, 22 bp, Artificial Sequence
  chemically synthesized
tctaagtttgaatataaggcta

SEQ ID NO: 3868 - DNA, 22 bp, Artificial Sequence
  chemically synthesized
agtttgaatataaggctataaa

SEQ ID NO: 3869 - DNA, 22 bp, Artificial Sequence
  chemically synthesized
gaatataaggctataaatattt

SEQ ID NO: 3870 - DNA, 22 bp, Artificial Sequence
  chemically synthesized
aatataaggctataaatattta

SEQ ID NO: 3871 - DNA, 22 bp, Artificial Sequence
  chemically synthesized
taaatatttaataatttttaaa

SEQ ID NO: 3872 - DNA, 22 bp, Artificial Sequence
  chemically synthesized
aataatttttaaaatagtattc

SEQ ID NO: 3873 - DNA, 22 bp, Artificial Sequence
  chemically synthesized
ataatttttaaaatagtattct

SEQ ID NO: 3874 - DNA, 22 bp, Artificial Sequence
  chemically synthesized
ttaaaatagtattcttggtaat

SEQ ID NO: 3875 - DNA, 22 bp, Artificial Sequence
  chemically synthesized
taaaatagtattcttggtaatt

SEQ ID NO: 3876 - DNA, 22 bp, Artificial Sequence
  chemically synthesized
aaaatagtattcttggtaattg

SEQ ID NO: 3877 - DNA, 22 bp, Artificial Sequence
  chemically synthesized
aaatagtattcttggtaattga

SEQ ID NO: 3878 - DNA, 22 bp, Artificial Sequence
  chemically synthesized
ttggtaattgaattattcttct

SEQ ID NO: 3879 - DNA, 22 bp, Artificial Sequence
  chemically synthesized
ggtaattgaattattcttctgt

SEQ ID NO: 3880 - DNA, 22 bp, Artificial Sequence
  chemically synthesized
gtaattgaattattcttctgtt

SEQ ID NO: 3881 - DNA, 22 bp, Artificial Sequence
  chemically synthesized
aattattcttctgtttaaaggc

SEQ ID NO: 3882 - DNA, 22 bp, Artificial Sequence
  chemically synthesized
ttcttctgtttaaaggcagaag

SEQ ID NO: 3883 - DNA, 22 bp, Artificial Sequence
  chemically synthesized
ttctgtttaaaggcagaagaaa

SEQ ID NO: 3884 - DNA, 22 bp, Artificial Sequence
  chemically synthesized
ctgtttaaaggcagaagaaata

SEQ ID NO: 3885 - DNA, 22 bp, Artificial Sequence
  chemically synthesized
tgtttaaaggcagaagaaataa

SEQ ID NO: 3886 - DNA, 22 bp, Artificial Sequence
  chemically synthesized
tttaaaggcagaagaaataatt

SEQ ID NO: 3887 - DNA, 22 bp, Artificial Sequence
  chemically synthesized
aaaggcagaagaaataattgaa

SEQ ID NO: 3888 - DNA, 22 bp, Artificial Sequence
  chemically synthesized
aaggcagaagaaataattgaac

SEQ ID NO: 3889 - DNA, 22 bp, Artificial Sequence
  chemically synthesized
aacatcatcctgagtttttctg

SEQ ID NO: 3890 - DNA, 22 bp, Artificial Sequence
  chemically synthesized
agtttttctgtaggaatcagag

SEQ ID NO: 3891 - DNA, 22 bp, Artificial Sequence
  chemically synthesized
ttctgtaggaatcagagcccaa

SEQ ID NO: 3892 - DNA, 22 bp, Artificial Sequence
  chemically synthesized
tctgtaggaatcagagcccaat

SEQ ID NO: 3893 - DNA, 22 bp, Artificial Sequence
  chemically synthesized
ctgtaggaatcagagcccaata

SEQ ID NO: 3894 - DNA, 22 bp, Artificial Sequence
  chemically synthesized
tgtaggaatcagagcccaatat

SEQ ID NO: 3895 - DNA, 22 bp, Artificial Sequence
  chemically synthesized
taggaatcagagcccaatattt

SEQ ID NO: 3896 - DNA, 22 bp, Artificial Sequence
  chemically synthesized
tgaaacaaatgcataatctaag

SEQ ID NO: 3897 - DNA, 22 bp, Artificial Sequence
  chemically synthesized
gaaacaaatgcataatctaagt

SEQ ID NO: 3898 - DNA, 22 bp, Artificial Sequence
  chemically synthesized
aaacaaatgcataatctaagtc

SEQ ID NO: 3899 - DNA, 22 bp, Artificial Sequence
  chemically synthesized
agtcaaatggaaagaaatataa

SEQ ID NO: 3900 - DNA, 22 bp, Artificial Sequence
  chemically synthesized
ttacttcttgttttcttcagta

SEQ ID NO: 3901 - DNA, 22 bp, Artificial Sequence
  chemically synthesized
cttcttgttttcttcagtattt

SEQ ID NO: 3902 - DNA, 22 bp, Artificial Sequence
  chemically synthesized
cttgttttcttcagtatttaac

SEQ ID NO: 3903 - DNA, 22 bp, Artificial Sequence
  chemically synthesized
ttgttttcttcagtatttaaca

SEQ ID NO: 3904 - DNA, 22 bp, Artificial Sequence
  chemically synthesized
gttttcttcagtatttaacaat

SEQ ID NO: 3905 - DNA, 22 bp, Artificial Sequence
  chemically synthesized
ttttcttcagtatttaacaatc

SEQ ID NO: 3906 - DNA, 22 bp, Artificial Sequence
  chemically synthesized
tcttcagtatttaacaatcctt

SEQ ID NO: 3907 - DNA, 22 bp, Artificial Sequence
  chemically synthesized
cttcagtatttaacaatccttt

SEQ ID NO: 3908 - DNA, 22 bp, Artificial Sequence
  chemically synthesized
ttcagtatttaacaatcctttt

SEQ ID NO: 3909 - DNA, 22 bp, Artificial Sequence
  chemically synthesized
cagtatttaacaatcctttttt

SEQ ID NO: 3910 - DNA, 22 bp, Artificial Sequence
  chemically synthesized
agtatttaacaatccttttttt

SEQ ID NO: 3911 - DNA, 22 bp, Artificial Sequence
  chemically synthesized
aacaatccttttttttcttccc

SEQ ID NO: 3912 - DNA, 22 bp, Artificial Sequence
  chemically synthesized
acaatccttttttttcttccct

SEQ ID NO: 3913 - DNA, 22 bp, Artificial Sequence
  chemically synthesized
ttttttcttcccttgcccagac

SEQ ID NO: 3914 - DNA, 22 bp, Artificial Sequence
  chemically synthesized
tttttcttcccttgcccagaca

SEQ ID NO: 3915 - DNA, 22 bp, Artificial Sequence
  chemically synthesized
ttttcttcccttgcccagacaa

SEQ ID NO: 3916 - DNA, 22 bp, Artificial Sequence
  chemically synthesized
tttcttcccttgcccagacaag

SEQ ID NO: 3917 - DNA, 22 bp, Artificial Sequence
  chemically synthesized
ttcttcccttgcccagacaaga

SEQ ID NO: 3918 - DNA, 22 bp, Artificial Sequence
  chemically synthesized
tcttcccttgcccagacaagag

SEQ ID NO: 3919 - DNA, 22 bp, Artificial Sequence
  chemically synthesized
cttcccttgcccagacaagagt

SEQ ID NO: 3920 - DNA, 22 bp, Artificial Sequence
  chemically synthesized
ttcccttgcccagacaagagtg

SEQ ID NO: 3921 - DNA, 22 bp, Artificial Sequence
  chemically synthesized
cccttgcccagacaagagtgag

SEQ ID NO: 3922 - DNA, 22 bp, Artificial Sequence
  chemically synthesized
ccttgcccagacaagagtgagg

SEQ ID NO: 3923 - DNA, 22 bp, Artificial Sequence
  chemically synthesized
gcccagacaagagtgaggttgc

SEQ ID NO: 3924 - DNA, 22 bp, Artificial Sequence
  chemically synthesized
cccagacaagagtgaggttgct

SEQ ID NO: 3925 - DNA, 22 bp, Artificial Sequence
  chemically synthesized
ctcatcggtttaaagatttggg

SEQ ID NO: 3926 - DNA, 22 bp, Artificial Sequence
  chemically synthesized
atcggtttaaagatttgggaga

SEQ ID NO: 3927 - DNA, 22 bp, Artificial Sequence
  chemically synthesized
aaagatttgggagaagaaaatt

SEQ ID NO: 3928 - DNA, 22 bp, Artificial Sequence
  chemically synthesized
aagatttgggagaagaaaattt

SEQ ID NO: 3929 - DNA, 22 bp, Artificial Sequence
  chemically synthesized
gggagaagaaaatttcaaagcc

SEQ ID NO: 3930 - DNA, 22 bp, Artificial Sequence
  chemically synthesized
ggagaagaaaatttcaaagcct

SEQ ID NO: 3931 - DNA, 22 bp, Artificial Sequence
  chemically synthesized
tgaaattttcttctcccaaatc

SEQ ID NO: 3932 - DNA, 22 bp, Artificial Sequence
  chemically synthesized
gaaattttcttctcccaaatct

SEQ ID NO: 3933 - DNA, 22 bp, Artificial Sequence
  chemically synthesized
aaattttcttctcccaaatctt

SEQ ID NO: 3934 - DNA, 22 bp, Artificial Sequence
  chemically synthesized
tcttctcccaaatctttaaacc

SEQ ID NO: 3935 - DNA, 22 bp, Artificial Sequence
  chemically synthesized
cttctcccaaatctttaaaccg

SEQ ID NO: 3936 - DNA, 22 bp, Artificial Sequence
  chemically synthesized
ttctcccaaatctttaaaccga

SEQ ID NO: 3937 - DNA, 22 bp, Artificial Sequence
  chemically synthesized
ctcccaaatctttaaaccgatg

SEQ ID NO: 3938 - DNA, 22 bp, Artificial Sequence
  chemically synthesized
tcccaaatctttaaaccgatga

SEQ ID NO: 3939 - DNA, 22 bp, Artificial Sequence
  chemically synthesized
ccaaatctttaaaccgatgagc

SEQ ID NO: 3940 - DNA, 22 bp, Artificial Sequence
  chemically synthesized
taaaccgatgagcaacctcact

SEQ ID NO: 3941 - DNA, 22 bp, Artificial Sequence
  chemically synthesized
aaaccgatgagcaacctcactc

SEQ ID NO: 3942 - DNA, 22 bp, Artificial Sequence
  chemically synthesized
aaccgatgagcaacctcactct

SEQ ID NO: 3943 - DNA, 22 bp, Artificial Sequence
  chemically synthesized
actcttgtctgggcaagggaag

SEQ ID NO: 3944 - DNA, 22 bp, Artificial Sequence
  chemically synthesized
ttgtctgggcaagggaagaaaa

SEQ ID NO: 3945 - DNA, 22 bp, Artificial Sequence
  chemically synthesized
gtctgggcaagggaagaaaaaa

SEQ ID NO: 3946 - DNA, 22 bp, Artificial Sequence
  chemically synthesized
tctgggcaagggaagaaaaaaa

SEQ ID NO: 3947 - DNA, 22 bp, Artificial Sequence
  chemically synthesized
ggcaagggaagaaaaaaaagga

SEQ ID NO: 3948 - DNA, 22 bp, Artificial Sequence
  chemically synthesized
ttaaatactgaagaaaacaaga

SEQ ID NO: 3949 - DNA, 22 bp, Artificial Sequence
  chemically synthesized
aatactgaagaaaacaagaagt

SEQ ID NO: 3950 - DNA, 22 bp, Artificial Sequence
  chemically synthesized
aagaaaacaagaagtaataatg

SEQ ID NO: 3951 - DNA, 22 bp, Artificial Sequence
  chemically synthesized
ctttttatatttctttccattt

SEQ ID NO: 3952 - DNA, 22 bp, Artificial Sequence
  chemically synthesized
tttatatttctttccatttgac

SEQ ID NO: 3953 - DNA, 22 bp, Artificial Sequence
  chemically synthesized
ttatatttctttccatttgact

SEQ ID NO: 3954 - DNA, 22 bp, Artificial Sequence
  chemically synthesized
tatatttctttccatttgactt

SEQ ID NO: 3955 - DNA, 22 bp, Artificial Sequence
  chemically synthesized
atatttctttccatttgactta

SEQ ID NO: 3956 - DNA, 22 bp, Artificial Sequence
  chemically synthesized
tatttctttccatttgacttag

SEQ ID NO: 3957 - DNA, 22 bp, Artificial Sequence
  chemically synthesized
ctttccatttgacttagattat

SEQ ID NO: 3958 - DNA, 22 bp, Artificial Sequence
  chemically synthesized
tttccatttgacttagattatg

SEQ ID NO: 3959 - DNA, 22 bp, Artificial Sequence
  chemically synthesized
tccatttgacttagattatgca

SEQ ID NO: 3960 - DNA, 22 bp, Artificial Sequence
  chemically synthesized
ccatttgacttagattatgcat

SEQ ID NO: 3961 - DNA, 22 bp, Artificial Sequence
  chemically synthesized
catttgacttagattatgcatt

SEQ ID NO: 3962 - DNA, 22 bp, Artificial Sequence
  chemically synthesized
gacttagattatgcatttgttt

SEQ ID NO: 3963 - DNA, 22 bp, Artificial Sequence
  chemically synthesized
acttagattatgcatttgtttc

SEQ ID NO: 3964 - DNA, 22 bp, Artificial Sequence
  chemically synthesized
agattatgcatttgtttcaaaa

SEQ ID NO: 3965 - DNA, 22 bp, Artificial Sequence
  chemically synthesized
gattatgcatttgtttcaaaat

SEQ ID NO: 3966 - DNA, 22 bp, Artificial Sequence
  chemically synthesized
tgcatttgtttcaaaatattgg

SEQ ID NO: 3967 - DNA, 22 bp, Artificial Sequence
  chemically synthesized
gtttcaaaatattgggctctga

SEQ ID NO: 3968 - DNA, 22 bp, Artificial Sequence
  chemically synthesized
tttcaaaatattgggctctgat

SEQ ID NO: 3969 - DNA, 22 bp, Artificial Sequence
  chemically synthesized
caaaatattgggctctgattcc

SEQ ID NO: 3970 - DNA, 22 bp, Artificial Sequence
  chemically synthesized
aaaatattgggctctgattcct

SEQ ID NO: 3971 - DNA, 22 bp, Artificial Sequence
  chemically synthesized
ggctctgattcctacagaaaaa

SEQ ID NO: 3972 - DNA, 22 bp, Artificial Sequence
  chemically synthesized
tgattcctacagaaaaactcag

SEQ ID NO: 3973 - DNA, 22 bp, Artificial Sequence
  chemically synthesized
attcctacagaaaaactcagga

SEQ ID NO: 3974 - DNA, 22 bp, Artificial Sequence
  chemically synthesized
ctacagaaaaactcaggatgat

SEQ ID NO: 3975 - DNA, 22 bp, Artificial Sequence
  chemically synthesized
cagaaaaactcaggatgatgtt

SEQ ID NO: 3976 - DNA, 22 bp, Artificial Sequence
  chemically synthesized
aggatgatgttcaattatttct

SEQ ID NO: 3977 - DNA, 22 bp, Artificial Sequence
  chemically synthesized
aattatttcttctgcctttaaa

SEQ ID NO: 3978 - DNA, 22 bp, Artificial Sequence
  chemically synthesized
tttcttctgcctttaaacagaa

SEQ ID NO: 3979 - DNA, 22 bp, Artificial Sequence
  chemically synthesized
cttctgcctttaaacagaagaa

SEQ ID NO: 3980 - DNA, 22 bp, Artificial Sequence
  chemically synthesized
ttctgcctttaaacagaagaat

SEQ ID NO: 3981 - DNA, 22 bp, Artificial Sequence
  chemically synthesized
ctgcctttaaacagaagaataa

SEQ ID NO: 3982 - DNA, 22 bp, Artificial Sequence
  chemically synthesized
tgcctttaaacagaagaataat

SEQ ID NO: 3983 - DNA, 22 bp, Artificial Sequence
  chemically synthesized
cctttaaacagaagaataattc

SEQ ID NO: 3984 - DNA, 22 bp, Artificial Sequence
  chemically synthesized
taaacagaagaataattcaatt

SEQ ID NO: 3985 - DNA, 22 bp, Artificial Sequence
  chemically synthesized
aaacagaagaataattcaatta

SEQ ID NO: 3986 - DNA, 22 bp, Artificial Sequence
  chemically synthesized
aacagaagaataattcaattac

SEQ ID NO: 3987 - DNA, 22 bp, Artificial Sequence
  chemically synthesized
aattaccaagaatactatttta

SEQ ID NO: 3988 - DNA, 22 bp, Artificial Sequence
  chemically synthesized
ccaagaatactattttaaaaat

SEQ ID NO: 3989 - DNA, 22 bp, Artificial Sequence
  chemically synthesized
ttttaaaaattattaaatattt

SEQ ID NO: 3990 - DNA, 22 bp, Artificial Sequence
  chemically synthesized
taaaaattattaaatatttata

SEQ ID NO: 3991 - DNA, 22 bp, Artificial Sequence
  chemically synthesized
aaaaattattaaatatttatag

SEQ ID NO: 3992 - DNA, 22 bp, Artificial Sequence
  chemically synthesized
aaaattattaaatatttatagc

SEQ ID NO: 3993 - DNA, 22 bp, Artificial Sequence
  chemically synthesized
ttaaatatttatagccttatat

SEQ ID NO: 3994 - DNA, 22 bp, Artificial Sequence
  chemically synthesized
aatatttatagccttatattca

SEQ ID NO: 3995 - DNA, 22 bp, Artificial Sequence
  chemically synthesized
atagccttatattcaaacttag

SEQ ID NO: 3996 - DNA, 22 bp, Artificial Sequence
  chemically synthesized
tagccttatattcaaacttaga

SEQ ID NO: 3997 - DNA, 22 bp, Artificial Sequence
  chemically synthesized
atattcaaacttagataatatc

SEQ ID NO: 3998 - DNA, 22 bp, Artificial Sequence
  chemically synthesized
tattcaaacttagataatatct

SEQ ID NO: 3999 - DNA, 22 bp, Artificial Sequence
  chemically synthesized
aaacttagataatatctaatac

SEQ ID NO: 4000 - DNA, 22 bp, Artificial Sequence
  chemically synthesized
agataatatctaatactctttt

SEQ ID NO: 4001 - DNA, 22 bp, Artificial Sequence
  chemically synthesized
gataatatctaatactctttta

SEQ ID NO: 4002 - DNA, 22 bp, Artificial Sequence
  chemically synthesized
atactcttttagtgtctatcaa

SEQ ID NO: 4003 - DNA, 22 bp, Artificial Sequence
  chemically synthesized
ttttagtgtctatcaacagcaa

SEQ ID NO: 4004 - DNA, 22 bp, Artificial Sequence
  chemically synthesized
ttagtgtctatcaacagcaacc

SEQ ID NO: 4005 - DNA, 22 bp, Artificial Sequence
  chemically synthesized
tagtgtctatcaacagcaacca

SEQ ID NO: 4006 - DNA, 22 bp, Artificial Sequence
  chemically synthesized
agtgtctatcaacagcaaccaa

SEQ ID NO: 4007 - DNA, 22 bp, Artificial Sequence
  chemically synthesized
gtgtctatcaacagcaaccaag

SEQ ID NO: 4008 - DNA, 22 bp, Artificial Sequence
  chemically synthesized
tcaacagcaaccaagaagacag

SEQ ID NO: 4009 - DNA, 22 bp, Artificial Sequence
  chemically synthesized
aaatgaaaataaatataaatac

SEQ ID NO: 4010 - DNA, 22 bp, Artificial Sequence
  chemically synthesized
tatttatgagatcaacagcaca

SEQ ID NO: 4011 - DNA, 22 bp, Artificial Sequence
  chemically synthesized
tttatgagatcaacagcacagg

SEQ ID NO: 4012 - DNA, 22 bp, Artificial Sequence
  chemically synthesized
atgagatcaacagcacaggttt

SEQ ID NO: 4013 - DNA, 22 bp, Artificial Sequence
  chemically synthesized
tgagatcaacagcacaggtttt

SEQ ID NO: 4014 - DNA, 22 bp, Artificial Sequence
  chemically synthesized
tgtggtttttaaataaagcata

SEQ ID NO: 4015 - DNA, 22 bp, Artificial Sequence
  chemically synthesized
gtggtttttaaataaagcatag

SEQ ID NO: 4016 - DNA, 22 bp, Artificial Sequence
  chemically synthesized
tggtttttaaataaagcatagt

SEQ ID NO: 4017 - DNA, 22 bp, Artificial Sequence
  chemically synthesized
ttaaataaagcatagtgcaatg

SEQ ID NO: 4018 - DNA, 22 bp, Artificial Sequence
  chemically synthesized
taaataaagcatagtgcaatgg

SEQ ID NO: 4019 - DNA, 22 bp, Artificial Sequence
  chemically synthesized
aaataaagcatagtgcaatgga

SEQ ID NO: 4020 - DNA, 22 bp, Artificial Sequence
  chemically synthesized
aataaagcatagtgcaatggat

SEQ ID NO: 4021 - DNA, 22 bp, Artificial Sequence
  chemically synthesized
tgggatagttatgaattcaatc

SEQ ID NO: 4022 - DNA, 22 bp, Artificial Sequence
  chemically synthesized
gggatagttatgaattcaatct

SEQ ID NO: 4023 - DNA, 22 bp, Artificial Sequence
  chemically synthesized
ggatagttatgaattcaatctt

SEQ ID NO: 4024 - DNA, 22 bp, Artificial Sequence
  chemically synthesized
tgaattcaatcttcaaccctat

SEQ ID NO: 4025 - DNA, 22 bp, Artificial Sequence
  chemically synthesized
aatcttcaaccctattctgtga

SEQ ID NO: 4026 - DNA, 22 bp, Artificial Sequence
  chemically synthesized
caaccctattctgtgaagtttc

SEQ ID NO: 4027 - DNA, 22 bp, Artificial Sequence
  chemically synthesized
aaccctattctgtgaagtttca

SEQ ID NO: 4028 - DNA, 22 bp, Artificial Sequence
  chemically synthesized
ttctgtgaagtttcagtcactc

SEQ ID NO: 4029 - DNA, 22 bp, Artificial Sequence
  chemically synthesized
tgtgaagtttcagtcactctaa

SEQ ID NO: 4030 - DNA, 22 bp, Artificial Sequence
  chemically synthesized
tgaagtttcagtcactctaagt

SEQ ID NO: 4031 - DNA, 22 bp, Artificial Sequence
  chemically synthesized
cagtcactctaagttactttgc

SEQ ID NO: 4032 - DNA, 22 bp, Artificial Sequence
  chemically synthesized
agtcactctaagttactttgca

SEQ ID NO: 4033 - DNA, 22 bp, Artificial Sequence
  chemically synthesized
taagttactttgcactttcctt

SEQ ID NO: 4034 - DNA, 22 bp, Artificial Sequence
  chemically synthesized
agttactttgcactttccttag

SEQ ID NO: 4035 - DNA, 22 bp, Artificial Sequence
  chemically synthesized
ctttgcactttccttagtgcgc

SEQ ID NO: 4036 - DNA, 22 bp, Artificial Sequence
  chemically synthesized
tgcactttccttagtgcgcaaa

SEQ ID NO: 4037 - DNA, 22 bp, Artificial Sequence
  chemically synthesized
gcactttccttagtgcgcaaaa

SEQ ID NO: 4038 - DNA, 22 bp, Artificial Sequence
  chemically synthesized
cactttccttagtgcgcaaaag

SEQ ID NO: 4039 - DNA, 22 bp, Artificial Sequence
  chemically synthesized
tccttagtgcgcaaaagaaaat

SEQ ID NO: 4040 - DNA, 22 bp, Artificial Sequence
  chemically synthesized
ccttagtgcgcaaaagaaaatt

SEQ ID NO: 4041 - DNA, 22 bp, Artificial Sequence
  chemically synthesized
cttagtgcgcaaaagaaaatta

SEQ ID NO: 4042 - DNA, 22 bp, Artificial Sequence
  chemically synthesized
agtgcgcaaaagaaaattacag

SEQ ID NO: 4043 - DNA, 22 bp, Artificial Sequence
  chemically synthesized
gtgcgcaaaagaaaattacagt

SEQ ID NO: 4044 - DNA, 22 bp, Artificial Sequence
  chemically synthesized
cagtcactaaacaattctgacc

SEQ ID NO: 4045 - DNA, 22 bp, Artificial Sequence
  chemically synthesized
aacaattctgaccttttttttt

SEQ ID NO: 4046 - DNA, 22 bp, Artificial Sequence
  chemically synthesized
tgacctttttttttttttacct

SEQ ID NO: 4047 - DNA, 22 bp, Artificial Sequence
  chemically synthesized
acctttttttttttttacctag

SEQ ID NO: 4048 - DNA, 22 bp, Artificial Sequence
  chemically synthesized
tttttttttttacctaggatgt

SEQ ID NO: 4049 - DNA, 22 bp, Artificial Sequence
  chemically synthesized
ttttttttttacctaggatgtt

SEQ ID NO: 4050 - DNA, 22 bp, Artificial Sequence
  chemically synthesized
tttttttttacctaggatgttt

SEQ ID NO: 4051 - DNA, 22 bp, Artificial Sequence
  chemically synthesized
ttttttttacctaggatgtttg

SEQ ID NO: 4052 - DNA, 22 bp, Artificial Sequence
  chemically synthesized
tttttttacctaggatgtttga

SEQ ID NO: 4053 - DNA, 22 bp, Artificial Sequence
  chemically synthesized
ttttttacctaggatgtttgaa

SEQ ID NO: 4054 - DNA, 22 bp, Artificial Sequence
  chemically synthesized
tttttacctaggatgtttgaat

SEQ ID NO: 4055 - DNA, 22 bp, Artificial Sequence
  chemically synthesized
ttttacctaggatgtttgaatt

SEQ ID NO: 4056 - DNA, 22 bp, Artificial Sequence
  chemically synthesized
tttacctaggatgtttgaattt

SEQ ID NO: 4057 - DNA, 22 bp, Artificial Sequence
  chemically synthesized
ttacctaggatgtttgaatttt

SEQ ID NO: 4058 - DNA, 22 bp, Artificial Sequence
  chemically synthesized
tacctaggatgtttgaatttta

SEQ ID NO: 4059 - DNA, 22 bp, Artificial Sequence
  chemically synthesized
acctaggatgtttgaattttat

SEQ ID NO: 4060 - DNA, 22 bp, Artificial Sequence
  chemically synthesized
cctaggatgtttgaattttatt

SEQ ID NO: 4061 - DNA, 22 bp, Artificial Sequence
  chemically synthesized
ggatgtttgaattttattaata

SEQ ID NO: 4062 - DNA, 22 bp, Artificial Sequence
  chemically synthesized
gaattttattaataagataacc

SEQ ID NO: 4063 - DNA, 22 bp, Artificial Sequence
  chemically synthesized
aattttattaataagataacct

SEQ ID NO: 4064 - DNA, 22 bp, Artificial Sequence
  chemically synthesized
tattaataagataaccttgtaa

SEQ ID NO: 4065 - DNA, 22 bp, Artificial Sequence
  chemically synthesized
attaataagataaccttgtaag

SEQ ID NO: 4066 - DNA, 22 bp, Artificial Sequence
  chemically synthesized
ttaataagataaccttgtaaga

SEQ ID NO: 4067 - DNA, 22 bp, Artificial Sequence
  chemically synthesized
ataagataaccttgtaagactt

SEQ ID NO: 4068 - DNA, 22 bp, Artificial Sequence
  chemically synthesized
gtaagacttcacaaatacaaaa

SEQ ID NO: 4069 - DNA, 22 bp, Artificial Sequence
  chemically synthesized
taagacttcacaaatacaaaat

SEQ ID NO: 4070 - DNA, 22 bp, Artificial Sequence
  chemically synthesized
cacaaatacaaaatactatgcc

SEQ ID NO: 4071 - DNA, 22 bp, Artificial Sequence
  chemically synthesized
acaaatacaaaatactatgcca

SEQ ID NO: 4072 - DNA, 22 bp, Artificial Sequence
  chemically synthesized
tgccattttagaaataaatgcc

SEQ ID NO: 4073 - DNA, 22 bp, Artificial Sequence
  chemically synthesized
tagaaataaatgccaaaataat

SEQ ID NO: 4074 - DNA, 22 bp, Artificial Sequence
  chemically synthesized
agaaataaatgccaaaataatt

SEQ ID NO: 4075 - DNA, 22 bp, Artificial Sequence
  chemically synthesized
gaaataaatgccaaaataattc

SEQ ID NO: 4076 - DNA, 22 bp, Artificial Sequence
  chemically synthesized
tttaaagatgcagagtttacta

SEQ ID NO: 4077 - DNA, 22 bp, Artificial Sequence
  chemically synthesized
taaagatgcagagtttactaaa

SEQ ID NO: 4078 - DNA, 22 bp, Artificial Sequence
  chemically synthesized
aaagatgcagagtttactaaaa

SEQ ID NO: 4079 - DNA, 22 bp, Artificial Sequence
  chemically synthesized
aagatgcagagtttactaaaac

SEQ ID NO: 4080 - DNA, 22 bp, Artificial Sequence
  chemically synthesized
actaaaactttattttactggg

SEQ ID NO: 4081 - DNA, 22 bp, Artificial Sequence
  chemically synthesized
ctaaaactttattttactggga

SEQ ID NO: 4082 - DNA, 22 bp, Artificial Sequence
  chemically synthesized
aaactttattttactgggaaaa

SEQ ID NO: 4083 - DNA, 22 bp, Artificial Sequence
  chemically synthesized
tattttactgggaaaatagaat

SEQ ID NO: 4084 - DNA, 22 bp, Artificial Sequence
  chemically synthesized
attttactgggaaaatagaata

SEQ ID NO: 4085 - DNA, 22 bp, Artificial Sequence
  chemically synthesized
ttttactgggaaaatagaataa

SEQ ID NO: 4086 - DNA, 22 bp, Artificial Sequence
  chemically synthesized
tactgggaaaatagaataaaag

SEQ ID NO: 4087 - DNA, 22 bp, Artificial Sequence
  chemically synthesized
actgggaaaatagaataaaagt

SEQ ID NO: 4088 - DNA, 22 bp, Artificial Sequence
  chemically synthesized
ctgggaaaatagaataaaagtt

SEQ ID NO: 4089 - DNA, 22 bp, Artificial Sequence
  chemically synthesized
ggaaaatagaataaaagttgaa

SEQ ID NO: 4090 - DNA, 22 bp, Artificial Sequence
  chemically synthesized
aacaatagaaaaatggatttct

SEQ ID NO: 4091 - DNA, 22 bp, Artificial Sequence
  chemically synthesized
cttacgtgcatctcgacgaaac

SEQ ID NO: 4092 - DNA, 22 bp, Artificial Sequence
  chemically synthesized
ttacgtgcatctcgacgaaaca

SEQ ID NO: 4093 - DNA, 22 bp, Artificial Sequence
  chemically synthesized
acgtgcatctcgacgaaacaca

SEQ ID NO: 4094 - DNA, 22 bp, Artificial Sequence
  chemically synthesized
cgtgcatctcgacgaaacacac

SEQ ID NO: 4095 - DNA, 22 bp, Artificial Sequence
  chemically synthesized
gacgaaacacacccctggaata

SEQ ID NO: 4096 - DNA, 22 bp, Artificial Sequence
  chemically synthesized
gaataagccgagctaaagagaa

SEQ ID NO: 4097 - DNA, 22 bp, Artificial Sequence
  chemically synthesized
aagagaaaaagaagggaaataa

SEQ ID NO: 4098 - DNA, 22 bp, Artificial Sequence
  chemically synthesized
cccacttcattgtgccaaaggc

SEQ ID NO: 4099 - DNA, 22 bp, Artificial Sequence
  chemically synthesized
cattgtgccaaaggcgtgtggg

SEQ ID NO: 4100 - DNA, 22 bp, Artificial Sequence
  chemically synthesized
attgtgccaaaggcgtgtgggg

SEQ ID NO: 4101 - DNA, 22 bp, Artificial Sequence
  chemically synthesized
tgccaaaggcgtgtggggttga

SEQ ID NO: 4102 - DNA, 22 bp, Artificial Sequence
  chemically synthesized
acagaagagaaaagctaggaca

SEQ ID NO: 4103 - DNA, 22 bp, Artificial Sequence
  chemically synthesized
ggacaaacggagggaaattagc

SEQ ID NO: 4104 - DNA, 20 bp, Artificial Sequence
  chemically synthesized
aataaatttacccaacaaaa

SEQ ID NO: 4105 - DNA, 20 bp, Artificial Sequence
  chemically synthesized
aatctcttaaaatcataaaa

SEQ ID NO: 4106 - DNA, 20 bp, Artificial Sequence
  chemically synthesized
aaatcataaaaaagtaaaat

SEQ ID NO: 4107 - DNA, 20 bp, Artificial Sequence
  chemically synthesized
gtaaaattagcttttaaaaa

SEQ ID NO: 4108 - DNA, 20 bp, Artificial Sequence
  chemically synthesized
taaaattagcttttaaaaac

SEQ ID NO: 4109 - DNA, 20 bp, Artificial Sequence
  chemically synthesized
aattagcttttaaaaacagg

SEQ ID NO: 4110 - DNA, 20 bp, Artificial Sequence
  chemically synthesized
ttaaaaacaggtagtcacca

SEQ ID NO: 4111 - DNA, 20 bp, Artificial Sequence
  chemically synthesized
tcaccatagcattgaatgtg

SEQ ID NO: 4112 - DNA, 20 bp, Artificial Sequence
  chemically synthesized
tgaatgtgtagtttataata

SEQ ID NO: 4113 - DNA, 20 bp, Artificial Sequence
  chemically synthesized
gtgtagtttataatacagca

SEQ ID NO: 4114 - DNA, 20 bp, Artificial Sequence
  chemically synthesized
acaatttcaaattacctatt

SEQ ID NO: 4115 - DNA, 20 bp, Artificial Sequence
  chemically synthesized
tttcaaattacctattaagt

SEQ ID NO: 4116 - DNA, 20 bp, Artificial Sequence
  chemically synthesized
ctcatttctttgatttcatt

SEQ ID NO: 4117 - DNA, 20 bp, Artificial Sequence
  chemically synthesized
agcattgatctaactcaatg

SEQ ID NO: 4118 - DNA, 20 bp, Artificial Sequence
  chemically synthesized
attgatctaactcaatgtgg

SEQ ID NO: 4119 - DNA, 20 bp, Artificial Sequence
  chemically synthesized
gatctaactcaatgtggaag

SEQ ID NO: 4120 - DNA, 20 bp, Artificial Sequence
  chemically synthesized
atctaactcaatgtggaaga

SEQ ID NO: 4121 - DNA, 20 bp, Artificial Sequence
  chemically synthesized
gaagaaggttacattcgtgc

SEQ ID NO: 4122 - DNA, 20 bp, Artificial Sequence
  chemically synthesized
tacattcgtgcaagttaaca

SEQ ID NO: 4123 - DNA, 20 bp, Artificial Sequence
  chemically synthesized
cctaccaaccttaccttttc

SEQ ID NO: 4124 - DNA, 20 bp, Artificial Sequence
  chemically synthesized
ctaccaaccttaccttttct

SEQ ID NO: 4125 - DNA, 20 bp, Artificial Sequence
  chemically synthesized
taccttttctgggcaaatat

SEQ ID NO: 4126 - DNA, 20 bp, Artificial Sequence
  chemically synthesized
tgggcaaatattggtatata

SEQ ID NO: 4127 - DNA, 20 bp, Artificial Sequence
  chemically synthesized
ggcaaatattggtatatata

SEQ ID NO: 4128 - DNA, 20 bp, Artificial Sequence
  chemically synthesized
atattggtatatatagagtt

SEQ ID NO: 4129 - DNA, 20 bp, Artificial Sequence
  chemically synthesized
ttggtatatatagagttaag

SEQ ID NO: 4130 - DNA, 20 bp, Artificial Sequence
  chemically synthesized
atatatagagttaagaagtc

SEQ ID NO: 4131 - DNA, 20 bp, Artificial Sequence
  chemically synthesized
tatatagagttaagaagtct

SEQ ID NO: 4132 - DNA, 20 bp, Artificial Sequence
  chemically synthesized
aagaagtctaggtctgcttc

SEQ ID NO: 4133 - DNA, 20 bp, Artificial Sequence
  chemically synthesized
aagtctaggtctgcttccag

SEQ ID NO: 4134 - DNA, 20 bp, Artificial Sequence
  chemically synthesized
ggtctgcttccagaagaaaa

SEQ ID NO: 4135 - DNA, 20 bp, Artificial Sequence
  chemically synthesized
gttgcttgaaattgaaaatc

SEQ ID NO: 4136 - DNA, 20 bp, Artificial Sequence
  chemically synthesized
agataaaaatgttcacaatt

SEQ ID NO: 4137 - DNA, 20 bp, Artificial Sequence
  chemically synthesized
ccttctttttattgttcctc

SEQ ID NO: 4138 - DNA, 20 bp, Artificial Sequence
  chemically synthesized
gttcctctagttatttcctc

SEQ ID NO: 4139 - DNA, 20 bp, Artificial Sequence
  chemically synthesized
tatttcctccagaattgatc

SEQ ID NO: 4140 - DNA, 20 bp, Artificial Sequence
  chemically synthesized
atcatttgattctctatctc

SEQ ID NO: 4141 - DNA, 20 bp, Artificial Sequence
  chemically synthesized
catttgattctctatctcca

SEQ ID NO: 4142 - DNA, 20 bp, Artificial Sequence
  chemically synthesized
ctatctccagagccaaaatc

SEQ ID NO: 4143 - DNA, 20 bp, Artificial Sequence
  chemically synthesized
aaaatcaagatttgctatgt

SEQ ID NO: 4144 - DNA, 20 bp, Artificial Sequence
  chemically synthesized
gttagacgatgtaaaaattt

SEQ ID NO: 4145 - DNA, 20 bp, Artificial Sequence
  chemically synthesized
gatgtaaaaattttagccaa

SEQ ID NO: 4146 - DNA, 20 bp, Artificial Sequence
  chemically synthesized
ttttagccaatggcctcctt

SEQ ID NO: 4147 - DNA, 20 bp, Artificial Sequence
  chemically synthesized
agccaatggcctccttcagt

SEQ ID NO: 4148 - DNA, 20 bp, Artificial Sequence
  chemically synthesized
gccaatggcctccttcagtt

SEQ ID NO: 4149 - DNA, 20 bp, Artificial Sequence
  chemically synthesized
ggcctccttcagttgggaca

SEQ ID NO: 4150 - DNA, 20 bp, Artificial Sequence
  chemically synthesized
tcagttgggacatggtctta

SEQ ID NO: 4151 - DNA, 20 bp, Artificial Sequence
  chemically synthesized
gtcttaaagactttgtccat

SEQ ID NO: 4152 - DNA, 20 bp, Artificial Sequence
  chemically synthesized
aagactttgtccataagacg

SEQ ID NO: 4153 - DNA, 20 bp, Artificial Sequence
  chemically synthesized
agactttgtccataagacga

SEQ ID NO: 4154 - DNA, 20 bp, Artificial Sequence
  chemically synthesized
gactttgtccataagacgaa

SEQ ID NO: 4155 - DNA, 20 bp, Artificial Sequence
  chemically synthesized
aaaaactcaacatatttgat

SEQ ID NO: 4156 - DNA, 20 bp, Artificial Sequence
  chemically synthesized
tatgatctatcgctgcaaac

SEQ ID NO: 4157 - DNA, 20 bp, Artificial Sequence
  chemically synthesized
gctgcaaaccagtgaaatca

SEQ ID NO: 4158 - DNA, 20 bp, Artificial Sequence
  chemically synthesized
gcaaaccagtgaaatcaaag

SEQ ID NO: 4159 - DNA, 20 bp, Artificial Sequence
  chemically synthesized
aaccagtgaaatcaaagaag

SEQ ID NO: 4160 - DNA, 20 bp, Artificial Sequence
  chemically synthesized
gtgaaatcaaagaagaagaa

SEQ ID NO: 4161 - DNA, 20 bp, Artificial Sequence
  chemically synthesized
tgaaatcaaagaagaagaaa

SEQ ID NO: 4162 - DNA, 20 bp, Artificial Sequence
  chemically synthesized
aaagaagaagaaaaggaact

SEQ ID NO: 4163 - DNA, 20 bp, Artificial Sequence
  chemically synthesized
gaagaagaaaaggaactgag

SEQ ID NO: 4164 - DNA, 20 bp, Artificial Sequence
  chemically synthesized
aagaactacatataaactac

SEQ ID NO: 4165 - DNA, 20 bp, Artificial Sequence
  chemically synthesized
taaactacaagtcaaaaatg

SEQ ID NO: 4166 - DNA, 20 bp, Artificial Sequence
  chemically synthesized
aactacaagtcaaaaatgaa

SEQ ID NO: 4167 - DNA, 20 bp, Artificial Sequence
  chemically synthesized
actacaagtcaaaaatgaag

SEQ ID NO: 4168 - DNA, 20 bp, Artificial Sequence
  chemically synthesized
aagtcaaaaatgaagaggta

SEQ ID NO: 4169 - DNA, 20 bp, Artificial Sequence
  chemically synthesized
gaactcaactcaaaacttga

SEQ ID NO: 4170 - DNA, 20 bp, Artificial Sequence
  chemically synthesized
ctcaaaacttgaaagcctcc

SEQ ID NO: 4171 - DNA, 20 bp, Artificial Sequence
  chemically synthesized
aaaacttgaaagcctcctag

SEQ ID NO: 4172 - DNA, 20 bp, Artificial Sequence
  chemically synthesized
aaaaattctacttcaacaaa

SEQ ID NO: 4173 - DNA, 20 bp, Artificial Sequence
  chemically synthesized
tcaacaaaaagtgaaatatt

SEQ ID NO: 4174 - DNA, 20 bp, Artificial Sequence
  chemically synthesized
acaaaaagtgaaatatttag

SEQ ID NO: 4175 - DNA, 20 bp, Artificial Sequence
  chemically synthesized
aaaaagtgaaatatttagaa

SEQ ID NO: 4176 - DNA, 20 bp, Artificial Sequence
  chemically synthesized
tcaaaatcaacctgaaactc

SEQ ID NO: 4177 - DNA, 20 bp, Artificial Sequence
  chemically synthesized
acctgaaactccagaacacc

SEQ ID NO: 4178 - DNA, 20 bp, Artificial Sequence
  chemically synthesized
tgaaactccagaacacccag

SEQ ID NO: 4179 - DNA, 20 bp, Artificial Sequence
  chemically synthesized
cccagaagtaacttcactta

SEQ ID NO: 4180 - DNA, 20 bp, Artificial Sequence
  chemically synthesized
gaagtaacttcacttaaagt

SEQ ID NO: 4181 - DNA, 20 bp, Artificial Sequence
  chemically synthesized
gtaacttcacttaaagtaag

SEQ ID NO: 4182 - DNA, 20 bp, Artificial Sequence
  chemically synthesized
cttaaagtaagtagaaaata

SEQ ID NO: 4183 - DNA, 20 bp, Artificial Sequence
  chemically synthesized
taaagtaagtagaaaataaa

SEQ ID NO: 4184 - DNA, 20 bp, Artificial Sequence
  chemically synthesized
aaagtaagtagaaaataaag

SEQ ID NO: 4185 - DNA, 20 bp, Artificial Sequence
  chemically synthesized
aagtaagtagaaaataaaga

SEQ ID NO: 4186 - DNA, 20 bp, Artificial Sequence
  chemically synthesized
tcatgtttatgttttcaatg

SEQ ID NO: 4187 - DNA, 20 bp, Artificial Sequence
  chemically synthesized
cttttaaaaaaaatatttct

SEQ ID NO: 4188 - DNA, 20 bp, Artificial Sequence
  chemically synthesized
ttttaaaaaaaatatttcta

SEQ ID NO: 4189 - DNA, 20 bp, Artificial Sequence
  chemically synthesized
gttgaaatacttttttttcc

SEQ ID NO: 4190 - DNA, 20 bp, Artificial Sequence
  chemically synthesized
tttccaagaaaaataatctc

SEQ ID NO: 4191 - DNA, 20 bp, Artificial Sequence
  chemically synthesized
aaatttcctattataatttc

SEQ ID NO: 4192 - DNA, 20 bp, Artificial Sequence
  chemically synthesized
ttcctattataatttcaagt

SEQ ID NO: 4193 - DNA, 20 bp, Artificial Sequence
  chemically synthesized
tttatatgaaaattacaaat

SEQ ID NO: 4194 - DNA, 20 bp, Artificial Sequence
  chemically synthesized
atcggttaaattatacaatc

SEQ ID NO: 4195 - DNA, 20 bp, Artificial Sequence
  chemically synthesized
tacactattgtaaattactg

SEQ ID NO: 4196 - DNA, 20 bp, Artificial Sequence
  chemically synthesized
acactattgtaaattactga

SEQ ID NO: 4197 - DNA, 20 bp, Artificial Sequence
  chemically synthesized
tattgtaaattactgaaggt

SEQ ID NO: 4198 - DNA, 20 bp, Artificial Sequence
  chemically synthesized
aattactgaaggtaagtaaa

SEQ ID NO: 4199 - DNA, 20 bp, Artificial Sequence
  chemically synthesized
aaaaatttaaaactattctc

SEQ ID NO: 4200 - DNA, 20 bp, Artificial Sequence
  chemically synthesized
ctattctccagtgtttaaaa

SEQ ID NO: 4201 - DNA, 20 bp, Artificial Sequence
  chemically synthesized
ttaaaacagattaaataata

SEQ ID NO: 4202 - DNA, 20 bp, Artificial Sequence
  chemically synthesized
agattaaataatacagtaaa

SEQ ID NO: 4203 - DNA, 20 bp, Artificial Sequence
  chemically synthesized
aaataatacagtaaatggaa

SEQ ID NO: 4204 - DNA, 20 bp, Artificial Sequence
  chemically synthesized
ttattcatatgaaaatatgc

SEQ ID NO: 4205 - DNA, 20 bp, Artificial Sequence
  chemically synthesized
tattcatatgaaaatatgct

SEQ ID NO: 4206 - DNA, 20 bp, Artificial Sequence
  chemically synthesized
tgggctttttcttttaattg

SEQ ID NO: 4207 - DNA, 20 bp, Artificial Sequence
  chemically synthesized
tttttcttttaattgaagtt

SEQ ID NO: 4208 - DNA, 20 bp, Artificial Sequence
  chemically synthesized
aagttcagaaaatcaaattt

SEQ ID NO: 4209 - DNA, 20 bp, Artificial Sequence
  chemically synthesized
gttcagaaaatcaaatttta

SEQ ID NO: 4210 - DNA, 20 bp, Artificial Sequence
  chemically synthesized
agaaaatcaaattttagaga

SEQ ID NO: 4211 - DNA, 20 bp, Artificial Sequence
  chemically synthesized
tacaatttaaataaaatgtt

SEQ ID NO: 4212 - DNA, 20 bp, Artificial Sequence
  chemically synthesized
acaatttaaataaaatgtta

SEQ ID NO: 4213 - DNA, 20 bp, Artificial Sequence
  chemically synthesized
caaaaatatgtgctatttga

SEQ ID NO: 4214 - DNA, 20 bp, Artificial Sequence
  chemically synthesized
aaatatgtgctatttgaaag

SEQ ID NO: 4215 - DNA, 20 bp, Artificial Sequence
  chemically synthesized
gctatttgaaagaagcatac

SEQ ID NO: 4216 - DNA, 20 bp, Artificial Sequence
  chemically synthesized
ctatttgaaagaagcataca

SEQ ID NO: 4217 - DNA, 20 bp, Artificial Sequence
  chemically synthesized
tatttgaaagaagcatacaa

SEQ ID NO: 4218 - DNA, 20 bp, Artificial Sequence
  chemically synthesized
atttgaaagaagcatacaag

SEQ ID NO: 4219 - DNA, 20 bp, Artificial Sequence
  chemically synthesized
tgaaagaagcatacaagggg

SEQ ID NO: 4220 - DNA, 20 bp, Artificial Sequence
  chemically synthesized
gaaagaagcatacaagggga

SEQ ID NO: 4221 - DNA, 20 bp, Artificial Sequence
  chemically synthesized
tcatttttcaaatccattat

SEQ ID NO: 4222 - DNA, 20 bp, Artificial Sequence
  chemically synthesized
ccattattagtttaaaaatt

SEQ ID NO: 4223 - DNA, 20 bp, Artificial Sequence
  chemically synthesized
tttaaaaatttagattatga

SEQ ID NO: 4224 - DNA, 20 bp, Artificial Sequence
  chemically synthesized
tttagattatgatagtgtta

SEQ ID NO: 4225 - DNA, 20 bp, Artificial Sequence
  chemically synthesized
ttagattatgatagtgttac

SEQ ID NO: 4226 - DNA, 20 bp, Artificial Sequence
  chemically synthesized
atagtgttacaggaaattaa

SEQ ID NO: 4227 - DNA, 20 bp, Artificial Sequence
  chemically synthesized
gttacaggaaattaatagaa

SEQ ID NO: 4228 - DNA, 20 bp, Artificial Sequence
  chemically synthesized
caggaaattaatagaaaaga

SEQ ID NO: 4229 - DNA, 20 bp, Artificial Sequence
  chemically synthesized
ggaaattaatagaaaagaaa

SEQ ID NO: 4230 - DNA, 20 bp, Artificial Sequence
  chemically synthesized
gaaattaatagaaaagaaag

SEQ ID NO: 4231 - DNA, 20 bp, Artificial Sequence
  chemically synthesized
ttaatagaaaagaaagagga

SEQ ID NO: 4232 - DNA, 20 bp, Artificial Sequence
  chemically synthesized
accaacctactctctatatc

SEQ ID NO: 4233 - DNA, 20 bp, Artificial Sequence
  chemically synthesized
tctctatatccagacttttg

SEQ ID NO: 4234 - DNA, 20 bp, Artificial Sequence
  chemically synthesized
ccagacttttgtagaaaaac

SEQ ID NO: 4235 - DNA, 20 bp, Artificial Sequence
  chemically synthesized
tttgtagaaaaacaagataa

SEQ ID NO: 4236 - DNA, 20 bp, Artificial Sequence
  chemically synthesized
aaaacaagataatagcatca

SEQ ID NO: 4237 - DNA, 20 bp, Artificial Sequence
  chemically synthesized
atagcatcaaagaccttctc

SEQ ID NO: 4238 - DNA, 20 bp, Artificial Sequence
  chemically synthesized
caaagaccttctccagaccg

SEQ ID NO: 4239 - DNA, 20 bp, Artificial Sequence
  chemically synthesized
agaccttctccagaccgtgg

SEQ ID NO: 4240 - DNA, 20 bp, Artificial Sequence
  chemically synthesized
aatataaacaattaaaccaa

SEQ ID NO: 4241 - DNA, 20 bp, Artificial Sequence
  chemically synthesized
aaacaattaaaccaacagca

SEQ ID NO: 4242 - DNA, 20 bp, Artificial Sequence
  chemically synthesized
ccaacagcatagtcaaataa

SEQ ID NO: 4243 - DNA, 20 bp, Artificial Sequence
  chemically synthesized
gcatagtcaaataaaagaaa

SEQ ID NO: 4244 - DNA, 20 bp, Artificial Sequence
  chemically synthesized
aaataaaagaaatagaaaat

SEQ ID NO: 4245 - DNA, 20 bp, Artificial Sequence
  chemically synthesized
aataaaagaaatagaaaatc

SEQ ID NO: 4246 - DNA, 20 bp, Artificial Sequence
  chemically synthesized
aaagaaatagaaaatcaggt

SEQ ID NO: 4247 - DNA, 20 bp, Artificial Sequence
  chemically synthesized
aaatagaaaatcaggtaagt

SEQ ID NO: 4248 - DNA, 20 bp, Artificial Sequence
  chemically synthesized
caggtaagtcagtattttaa

SEQ ID NO: 4249 - DNA, 20 bp, Artificial Sequence
  chemically synthesized
ggtatgtcccatctttcaca

SEQ ID NO: 4250 - DNA, 20 bp, Artificial Sequence
  chemically synthesized
gtatgtcccatctttcacac

SEQ ID NO: 4251 - DNA, 20 bp, Artificial Sequence
  chemically synthesized
tgaatcctaaaattatttac

SEQ ID NO: 4252 - DNA, 20 bp, Artificial Sequence
  chemically synthesized
aattatttacaagctttaac

SEQ ID NO: 4253 - DNA, 20 bp, Artificial Sequence
  chemically synthesized
acaagctttaactggatcat

SEQ ID NO: 4254 - DNA, 20 bp, Artificial Sequence
  chemically synthesized
catgagtaaaattatcacat

SEQ ID NO: 4255 - DNA, 20 bp, Artificial Sequence
  chemically synthesized
cagcataactgttaaaattg

SEQ ID NO: 4256 - DNA, 20 bp, Artificial Sequence
  chemically synthesized
agcataactgttaaaattgc

SEQ ID NO: 4257 - DNA, 20 bp, Artificial Sequence
  chemically synthesized
tgttaaaattgcaggctctg

SEQ ID NO: 4258 - DNA, 20 bp, Artificial Sequence
  chemically synthesized
aactacctgcatttaaacca

SEQ ID NO: 4259 - DNA, 20 bp, Artificial Sequence
  chemically synthesized
tacttcacccctttatctct

SEQ ID NO: 4260 - DNA, 20 bp, Artificial Sequence
  chemically synthesized
gtttcctcacatatactaca

SEQ ID NO: 4261 - DNA, 20 bp, Artificial Sequence
  chemically synthesized
atatactacaaagataataa

SEQ ID NO: 4262 - DNA, 20 bp, Artificial Sequence
  chemically synthesized
aaagataataacagaactta

SEQ ID NO: 4263 - DNA, 20 bp, Artificial Sequence
  chemically synthesized
aagataataacagaacttat

SEQ ID NO: 4264 - DNA, 20 bp, Artificial Sequence
  chemically synthesized
agaacttataggattattgt

SEQ ID NO: 4265 - DNA, 20 bp, Artificial Sequence
  chemically synthesized
taagaaaaaaaattaattca

SEQ ID NO: 4266 - DNA, 20 bp, Artificial Sequence
  chemically synthesized
gaaaaaaaattaattcatag

SEQ ID NO: 4267 - DNA, 20 bp, Artificial Sequence
  chemically synthesized
catcttactaaaattcaaat

SEQ ID NO: 4268 - DNA, 20 bp, Artificial Sequence
  chemically synthesized
ctttgctcaaaaccacacaa

SEQ ID NO: 4269 - DNA, 20 bp, Artificial Sequence
  chemically synthesized
gctttccatttcactcatat

SEQ ID NO: 4270 - DNA, 20 bp, Artificial Sequence
  chemically synthesized
tttcactcatattggctctt

SEQ ID NO: 4271 - DNA, 20 bp, Artificial Sequence
  chemically synthesized
tcatattggctctttagacc

SEQ ID NO: 4272 - DNA, 20 bp, Artificial Sequence
  chemically synthesized
ttgggtaatcttggtctaaa

SEQ ID NO: 4273 - DNA, 20 bp, Artificial Sequence
  chemically synthesized
ttggtctaaagagccaatat

SEQ ID NO: 4274 - DNA, 20 bp, Artificial Sequence
  chemically synthesized
aagagccaatatgagtgaaa

SEQ ID NO: 4275 - DNA, 20 bp, Artificial Sequence
  chemically synthesized
gccaatatgagtgaaatgga

SEQ ID NO: 4276 - DNA, 20 bp, Artificial Sequence
  chemically synthesized
tgaaatggaaagctattgtg

SEQ ID NO: 4277 - DNA, 20 bp, Artificial Sequence
  chemically synthesized
gaaagctattgtgtggtttt

SEQ ID NO: 4278 - DNA, 20 bp, Artificial Sequence
  chemically synthesized
ctattgtgtggttttgagca

SEQ ID NO: 4279 - DNA, 20 bp, Artificial Sequence
  chemically synthesized
attgtgtggttttgagcaaa

SEQ ID NO: 4280 - DNA, 20 bp, Artificial Sequence
  chemically synthesized
acatgatctaatttgaattt

SEQ ID NO: 4281 - DNA, 20 bp, Artificial Sequence
  chemically synthesized
gatctaatttgaattttagt

SEQ ID NO: 4282 - DNA, 20 bp, Artificial Sequence
  chemically synthesized
gaattttagtaagatgacat

SEQ ID NO: 4283 - DNA, 20 bp, Artificial Sequence
  chemically synthesized
ttttcttacaataatcctat

SEQ ID NO: 4284 - DNA, 20 bp, Artificial Sequence
  chemically synthesized
aagttctgttattatctttg

SEQ ID NO: 4285 - DNA, 20 bp, Artificial Sequence
  chemically synthesized
attatctttgtagtatatgt

SEQ ID NO: 4286 - DNA, 20 bp, Artificial Sequence
  chemically synthesized
ttatctttgtagtatatgtg

SEQ ID NO: 4287 - DNA, 20 bp, Artificial Sequence
  chemically synthesized
gtagtatatgtgaggaaact

SEQ ID NO: 4288 - DNA, 20 bp, Artificial Sequence
  chemically synthesized
agtatatgtgaggaaactga

SEQ ID NO: 4289 - DNA, 20 bp, Artificial Sequence
  chemically synthesized
tgtgaggaaactgagagata

SEQ ID NO: 4290 - DNA, 20 bp, Artificial Sequence
  chemically synthesized
gtgaggaaactgagagataa

SEQ ID NO: 4291 - DNA, 20 bp, Artificial Sequence
  chemically synthesized
tgaggaaactgagagataaa

SEQ ID NO: 4292 - DNA, 20 bp, Artificial Sequence
  chemically synthesized
gaggaaactgagagataaag

SEQ ID NO: 4293 - DNA, 20 bp, Artificial Sequence
  chemically synthesized
aactgagagataaaggggtg

SEQ ID NO: 4294 - DNA, 20 bp, Artificial Sequence
  chemically synthesized
aggggtgaagtaatttattc

SEQ ID NO: 4295 - DNA, 20 bp, Artificial Sequence
  chemically synthesized
ggggtgaagtaatttattca

SEQ ID NO: 4296 - DNA, 20 bp, Artificial Sequence
  chemically synthesized
aatttattcaaggtcacaca

SEQ ID NO: 4297 - DNA, 20 bp, Artificial Sequence
  chemically synthesized
ttcaaggtcacacaaagttt

SEQ ID NO: 4298 - DNA, 20 bp, Artificial Sequence
  chemically synthesized
caaggtcacacaaagtttta

SEQ ID NO: 4299 - DNA, 20 bp, Artificial Sequence
  chemically synthesized
cacacaaagttttagagcca

SEQ ID NO: 4300 - DNA, 20 bp, Artificial Sequence
  chemically synthesized
ttagagccatggtttaaatg

SEQ ID NO: 4301 - DNA, 20 bp, Artificial Sequence
  chemically synthesized
tagagccatggtttaaatgc

SEQ ID NO: 4302 - DNA, 20 bp, Artificial Sequence
  chemically synthesized
agccatggtttaaatgcagg

SEQ ID NO: 4303 - DNA, 20 bp, Artificial Sequence
  chemically synthesized
tttaaatgcaggtagtttat

SEQ ID NO: 4304 - DNA, 20 bp, Artificial Sequence
  chemically synthesized
tgcaggtagtttattagctt

SEQ ID NO: 4305 - DNA, 20 bp, Artificial Sequence
  chemically synthesized
caggtagtttattagcttca

SEQ ID NO: 4306 - DNA, 20 bp, Artificial Sequence
  chemically synthesized
ttcagagcctgcaattttaa

SEQ ID NO: 4307 - DNA, 20 bp, Artificial Sequence
  chemically synthesized
tgataattttactcatgatc

SEQ ID NO: 4308 - DNA, 20 bp, Artificial Sequence
  chemically synthesized
ttttactcatgatccagtta

SEQ ID NO: 4309 - DNA, 20 bp, Artificial Sequence
  chemically synthesized
ttaaagcttgtaaataattt

SEQ ID NO: 4310 - DNA, 20 bp, Artificial Sequence
  chemically synthesized
taaagcttgtaaataatttt

SEQ ID NO: 4311 - DNA, 20 bp, Artificial Sequence
  chemically synthesized
ttgtaaataattttaggatt

SEQ ID NO: 4312 - DNA, 20 bp, Artificial Sequence
  chemically synthesized
tttaggattcagtgttttta

SEQ ID NO: 4313 - DNA, 20 bp, Artificial Sequence
  chemically synthesized
gtttttacagacctgtgtga

SEQ ID NO: 4314 - DNA, 20 bp, Artificial Sequence
  chemically synthesized
ttacagacctgtgtgaaaga

SEQ ID NO: 4315 - DNA, 20 bp, Artificial Sequence
  chemically synthesized
tacagacctgtgtgaaagat

SEQ ID NO: 4316 - DNA, 20 bp, Artificial Sequence
  chemically synthesized
cttttatttgactatgctgt

SEQ ID NO: 4317 - DNA, 20 bp, Artificial Sequence
  chemically synthesized
gttggtttaattgtttatat

SEQ ID NO: 4318 - DNA, 20 bp, Artificial Sequence
  chemically synthesized
ttgtttatattggtcttcca

SEQ ID NO: 4319 - DNA, 20 bp, Artificial Sequence
  chemically synthesized
tatattggtcttccacggtc

SEQ ID NO: 4320 - DNA, 20 bp, Artificial Sequence
  chemically synthesized
tattggtcttccacggtctg

SEQ ID NO: 4321 - DNA, 20 bp, Artificial Sequence
  chemically synthesized
tggtcttccacggtctggag

SEQ ID NO: 4322 - DNA, 20 bp, Artificial Sequence
  chemically synthesized
ggtcttccacggtctggaga

SEQ ID NO: 4323 - DNA, 20 bp, Artificial Sequence
  chemically synthesized
attatcttgtttttctacaa

SEQ ID NO: 4324 - DNA, 20 bp, Artificial Sequence
  chemically synthesized
cttgtttttctacaaaagtc

SEQ ID NO: 4325 - DNA, 20 bp, Artificial Sequence
  chemically synthesized
tttctacaaaagtctggata

SEQ ID NO: 4326 - DNA, 20 bp, Artificial Sequence
  chemically synthesized
tctacaaaagtctggatata

SEQ ID NO: 4327 - DNA, 20 bp, Artificial Sequence
  chemically synthesized
tacaaaagtctggatataga

SEQ ID NO: 4328 - DNA, 20 bp, Artificial Sequence
  chemically synthesized
aaaagtctggatatagagag

SEQ ID NO: 4329 - DNA, 20 bp, Artificial Sequence
  chemically synthesized
aaagtctggatatagagagt

SEQ ID NO: 4330 - DNA, 20 bp, Artificial Sequence
  chemically synthesized
tctggatatagagagtaggt

SEQ ID NO: 4331 - DNA, 20 bp, Artificial Sequence
  chemically synthesized
atagagagtaggttggttat

SEQ ID NO: 4332 - DNA, 20 bp, Artificial Sequence
  chemically synthesized
ctaaatttttaaactaataa

SEQ ID NO: 4333 - DNA, 20 bp, Artificial Sequence
  chemically synthesized
tggatttgaaaaatgaatat

SEQ ID NO: 4334 - DNA, 20 bp, Artificial Sequence
  chemically synthesized
ccttgtatgcttctttcaaa

SEQ ID NO: 4335 - DNA, 20 bp, Artificial Sequence
  chemically synthesized
attttctgaacttcaattaa

SEQ ID NO: 4336 - DNA, 20 bp, Artificial Sequence
  chemically synthesized
tgaacttcaattaaaagaaa

SEQ ID NO: 4337 - DNA, 20 bp, Artificial Sequence
  chemically synthesized
ttcaattaaaagaaaaagcc

SEQ ID NO: 4338 - DNA, 20 bp, Artificial Sequence
  chemically synthesized
atttaatctgttttaaacac

SEQ ID NO: 4339 - DNA, 20 bp, Artificial Sequence
  chemically synthesized
ttaatctgttttaaacactg

SEQ ID NO: 4340 - DNA, 20 bp, Artificial Sequence
  chemically synthesized
ctgttttaaacactggagaa

SEQ ID NO: 4341 - DNA, 20 bp, Artificial Sequence
  chemically synthesized
tttaactttttacttacctt

SEQ ID NO: 4342 - DNA, 20 bp, Artificial Sequence
  chemically synthesized
ttaccttcagtaatttacaa

SEQ ID NO: 4343 - DNA, 20 bp, Artificial Sequence
  chemically synthesized
tttacaatagtgtaatgaca

SEQ ID NO: 4344 - DNA, 20 bp, Artificial Sequence
  chemically synthesized
agtgtaatgacatagtgttc

SEQ ID NO: 4345 - DNA, 20 bp, Artificial Sequence
  chemically synthesized
tcatataaaatgcaaatttt

SEQ ID NO: 4346 - DNA, 20 bp, Artificial Sequence
  chemically synthesized
agtgttttcatatataacat

SEQ ID NO: 4347 - DNA, 20 bp, Artificial Sequence
  chemically synthesized
gtgttttcatatataacatt

SEQ ID NO: 4348 - DNA, 20 bp, Artificial Sequence
  chemically synthesized
tgttttcatatataacatta

SEQ ID NO: 4349 - DNA, 20 bp, Artificial Sequence
  chemically synthesized
aaactaacttgaaattataa

SEQ ID NO: 4350 - DNA, 20 bp, Artificial Sequence
  chemically synthesized
aactaacttgaaattataat

SEQ ID NO: 4351 - DNA, 20 bp, Artificial Sequence
  chemically synthesized
taataggaaattttattttc

SEQ ID NO: 4352 - DNA, 20 bp, Artificial Sequence
  chemically synthesized
ataggaaattttattttctg

SEQ ID NO: 4353 - DNA, 20 bp, Artificial Sequence
  chemically synthesized
tttctggagattatttttct

SEQ ID NO: 4354 - DNA, 20 bp, Artificial Sequence
  chemically synthesized
attatttttcttggaaaaaa

SEQ ID NO: 4355 - DNA, 20 bp, Artificial Sequence
  chemically synthesized
agtatttcaacaatgcaaca

SEQ ID NO: 4356 - DNA, 20 bp, Artificial Sequence
  chemically synthesized
atgcaacaaagtatttcaaa

SEQ ID NO: 4357 - DNA, 20 bp, Artificial Sequence
  chemically synthesized
gtatttcaaatggcatgcct

SEQ ID NO: 4358 - DNA, 20 bp, Artificial Sequence
  chemically synthesized
cttagaaatattttttttaa

SEQ ID NO: 4359 - DNA, 20 bp, Artificial Sequence
  chemically synthesized
ctttattttctacttacttt

SEQ ID NO: 4360 - DNA, 20 bp, Artificial Sequence
  chemically synthesized
ttttctacttactttaagtg

SEQ ID NO: 4361 - DNA, 20 bp, Artificial Sequence
  chemically synthesized
actttaagtgaagttacttc

SEQ ID NO: 4362 - DNA, 20 bp, Artificial Sequence
  chemically synthesized
ctttaagtgaagttacttct

SEQ ID NO: 4363 - DNA, 20 bp, Artificial Sequence
  chemically synthesized
gaagttacttctgggtgttc

SEQ ID NO: 4364 - DNA, 20 bp, Artificial Sequence
  chemically synthesized
agttacttctgggtgttctg

SEQ ID NO: 4365 - DNA, 20 bp, Artificial Sequence
  chemically synthesized
ttctgggtgttctggagttt

SEQ ID NO: 4366 - DNA, 20 bp, Artificial Sequence
  chemically synthesized
tctgggtgttctggagtttc

SEQ ID NO: 4367 - DNA, 20 bp, Artificial Sequence
  chemically synthesized
tttcaggttgattttgaatt

SEQ ID NO: 4368 - DNA, 20 bp, Artificial Sequence
  chemically synthesized
aggttgattttgaattaagt

SEQ ID NO: 4369 - DNA, 20 bp, Artificial Sequence
  chemically synthesized
tgattttgaattaagttagt

SEQ ID NO: 4370 - DNA, 20 bp, Artificial Sequence
  chemically synthesized
aaatatttcactttttgttg

SEQ ID NO: 4371 - DNA, 20 bp, Artificial Sequence
  chemically synthesized
tatttcactttttgttgaag

SEQ ID NO: 4372 - DNA, 20 bp, Artificial Sequence
  chemically synthesized
tgaagtagaattttttcttc

SEQ ID NO: 4373 - DNA, 20 bp, Artificial Sequence
  chemically synthesized
gaagtagaattttttcttct

SEQ ID NO: 4374 - DNA, 20 bp, Artificial Sequence
  chemically synthesized
agtagaattttttcttctag

SEQ ID NO: 4375 - DNA, 20 bp, Artificial Sequence
  chemically synthesized
gtagaattttttcttctagg

SEQ ID NO: 4376 - DNA, 20 bp, Artificial Sequence
  chemically synthesized
ttttcttctaggaggctttc

SEQ ID NO: 4377 - DNA, 20 bp, Artificial Sequence
  chemically synthesized
ctaggaggctttcaagtttt

SEQ ID NO: 4378 - DNA, 20 bp, Artificial Sequence
  chemically synthesized
aggctttcaagttttgagtt

SEQ ID NO: 4379 - DNA, 20 bp, Artificial Sequence
  chemically synthesized
tcaagttttgagttgagttc

SEQ ID NO: 4380 - DNA, 20 bp, Artificial Sequence
  chemically synthesized
acctcttcatttttgacttg

SEQ ID NO: 4381 - DNA, 20 bp, Artificial Sequence
  chemically synthesized
tttgacttgtagtttatatg

SEQ ID NO: 4382 - DNA, 20 bp, Artificial Sequence
  chemically synthesized
agtttatatgtagttcttct

SEQ ID NO: 4383 - DNA, 20 bp, Artificial Sequence
  chemically synthesized
ttcttcttctttgatttcac

SEQ ID NO: 4384 - DNA, 20 bp, Artificial Sequence
  chemically synthesized
tctttgatttcactggtttg

SEQ ID NO: 4385 - DNA, 20 bp, Artificial Sequence
  chemically synthesized
atttcactggtttgcagcga

SEQ ID NO: 4386 - DNA, 20 bp, Artificial Sequence
  chemically synthesized
ttgcagcgatagatcataaa

SEQ ID NO: 4387 - DNA, 20 bp, Artificial Sequence
  chemically synthesized
aaagactgatcaaatatgtt

SEQ ID NO: 4388 - DNA, 20 bp, Artificial Sequence
  chemically synthesized
tttgaaatatgtcattaatt

SEQ ID NO: 4389 - DNA, 20 bp, Artificial Sequence
  chemically synthesized
taatttggcccttcgtctta

SEQ ID NO: 4390 - DNA, 20 bp, Artificial Sequence
  chemically synthesized
ggcccttcgtcttatggaca

SEQ ID NO: 4391 - DNA, 20 bp, Artificial Sequence
  chemically synthesized
gtcttatggacaaagtcttt

SEQ ID NO: 4392 - DNA, 20 bp, Artificial Sequence
  chemically synthesized
ttaagaccatgtcccaactg

SEQ ID NO: 4393 - DNA, 20 bp, Artificial Sequence
  chemically synthesized
taagaccatgtcccaactga

SEQ ID NO: 4394 - DNA, 20 bp, Artificial Sequence
  chemically synthesized
agaccatgtcccaactgaag

SEQ ID NO: 4395 - DNA, 20 bp, Artificial Sequence
  chemically synthesized
gaccatgtcccaactgaagg

SEQ ID NO: 4396 - DNA, 20 bp, Artificial Sequence
  chemically synthesized
tcccaactgaaggaggccat

SEQ ID NO: 4397 - DNA, 20 bp, Artificial Sequence
  chemically synthesized
aatttttacatcgtctaaca

SEQ ID NO: 4398 - DNA, 20 bp, Artificial Sequence
  chemically synthesized
aacatagcaaatcttgattt

SEQ ID NO: 4399 - DNA, 20 bp, Artificial Sequence
  chemically synthesized
gcaaatcttgattttggctc

SEQ ID NO: 4400 - DNA, 20 bp, Artificial Sequence
  chemically synthesized
aaatcttgattttggctctg

SEQ ID NO: 4401 - DNA, 20 bp, Artificial Sequence
  chemically synthesized
cttgattttggctctggaga

SEQ ID NO: 4402 - DNA, 20 bp, Artificial Sequence
  chemically synthesized
tgattttggctctggagata

SEQ ID NO: 4403 - DNA, 20 bp, Artificial Sequence
  chemically synthesized
tgaattgtcttgatcaattc

SEQ ID NO: 4404 - DNA, 20 bp, Artificial Sequence
  chemically synthesized
aattgtcttgatcaattctg

SEQ ID NO: 4405 - DNA, 20 bp, Artificial Sequence
  chemically synthesized
attgtcttgatcaattctgg

SEQ ID NO: 4406 - DNA, 20 bp, Artificial Sequence
  chemically synthesized
tcaattctggaggaaataac

SEQ ID NO: 4407 - DNA, 20 bp, Artificial Sequence
  chemically synthesized
aattctggaggaaataacta

SEQ ID NO: 4408 - DNA, 20 bp, Artificial Sequence
  chemically synthesized
attctggaggaaataactag

SEQ ID NO: 4409 - DNA, 20 bp, Artificial Sequence
  chemically synthesized
ataactagaggaacaataaa

SEQ ID NO: 4410 - DNA, 20 bp, Artificial Sequence
  chemically synthesized
actagaggaacaataaaaag

SEQ ID NO: 4411 - DNA, 20 bp, Artificial Sequence
  chemically synthesized
ctagaggaacaataaaaaga

SEQ ID NO: 4412 - DNA, 20 bp, Artificial Sequence
  chemically synthesized
agaggaacaataaaaagaag

SEQ ID NO: 4413 - DNA, 20 bp, Artificial Sequence
  chemically synthesized
ttatcttgattttcaatttc

SEQ ID NO: 4414 - DNA, 20 bp, Artificial Sequence
  chemically synthesized
attttcaatttcaagcaacg

SEQ ID NO: 4415 - DNA, 20 bp, Artificial Sequence
  chemically synthesized
aacgtggaactgttttcttc

SEQ ID NO: 4416 - DNA, 20 bp, Artificial Sequence
  chemically synthesized
gtggaactgttttcttctgg

SEQ ID NO: 4417 - DNA, 20 bp, Artificial Sequence
  chemically synthesized
gaactgttttcttctggaag

SEQ ID NO: 4418 - DNA, 20 bp, Artificial Sequence
  chemically synthesized
ttttcttctggaagcagacc

SEQ ID NO: 4419 - DNA, 20 bp, Artificial Sequence
  chemically synthesized
tatatataccaatatttgcc

SEQ ID NO: 4420 - DNA, 20 bp, Artificial Sequence
  chemically synthesized
ataccaatatttgcccagaa

SEQ ID NO: 4421 - DNA, 20 bp, Artificial Sequence
  chemically synthesized
taccaatatttgcccagaaa

SEQ ID NO: 4422 - DNA, 20 bp, Artificial Sequence
  chemically synthesized
aatatttgcccagaaaaggt

SEQ ID NO: 4423 - DNA, 20 bp, Artificial Sequence
  chemically synthesized
atatttgcccagaaaaggta

SEQ ID NO: 4424 - DNA, 20 bp, Artificial Sequence
  chemically synthesized
ttgcccagaaaaggtaaggt

SEQ ID NO: 4425 - DNA, 20 bp, Artificial Sequence
  chemically synthesized
cccagaaaaggtaaggttgg

SEQ ID NO: 4426 - DNA, 20 bp, Artificial Sequence
  chemically synthesized
ccagaaaaggtaaggttggt

SEQ ID NO: 4427 - DNA, 20 bp, Artificial Sequence
  chemically synthesized
gtaaggttggtaggtgaaca

SEQ ID NO: 4428 - DNA, 20 bp, Artificial Sequence
  chemically synthesized
ggtgaacatagttaatcatt

SEQ ID NO: 4429 - DNA, 20 bp, Artificial Sequence
  chemically synthesized
atgtaaccttcttccacatt

SEQ ID NO: 4430 - DNA, 20 bp, Artificial Sequence
  chemically synthesized
aaccttcttccacattgagt

SEQ ID NO: 4431 - DNA, 20 bp, Artificial Sequence
  chemically synthesized
atcaatgctaaatgaaatca

SEQ ID NO: 4432 - DNA, 20 bp, Artificial Sequence
  chemically synthesized
ctaaatgaaatcaaagaaat

SEQ ID NO: 4433 - DNA, 20 bp, Artificial Sequence
  chemically synthesized
gaaatgagcaactaacttaa

SEQ ID NO: 4434 - DNA, 20 bp, Artificial Sequence
  chemically synthesized
aaatgagcaactaacttaat

SEQ ID NO: 4435 - DNA, 20 bp, Artificial Sequence
  chemically synthesized
aaactacacattcaatgcta

SEQ ID NO: 4436 - DNA, 20 bp, Artificial Sequence
  chemically synthesized
tggtgactacctgtttttaa

SEQ ID NO: 4437 - DNA, 20 bp, Artificial Sequence
  chemically synthesized
ttttacttttttatgatttt

SEQ ID NO: 4438 - DNA, 20 bp, Artificial Sequence
  chemically synthesized
ttacttttttatgattttaa

SEQ ID NO: 4439 - DNA, 20 bp, Artificial Sequence
  chemically synthesized
tatgattttaagagatttac

SEQ ID NO: 4440 - DNA, 20 bp, Artificial Sequence
  chemically synthesized
tcaaaaataaacttttttgt

SEQ ID NO: 4441 - DNA, 20 bp, Artificial Sequence
  chemically synthesized
caaaaataaacttttttgtt

SEQ ID NO: 4442 - DNA, 20 bp, Artificial Sequence
  chemically synthesized
gttgggtaaatttattatta

SEQ ID NO: 4443 - DNA, 20 bp, Artificial Sequence
  chemically synthesized
gtaaatttattattaaagtt

SEQ ID NO: 4444 - DNA, 20 bp, Artificial Sequence
  chemically synthesized
taaatttattattaaagttg

SEQ ID NO: 4445 - DNA, 20 bp, Artificial Sequence
  chemically synthesized
aaatttattattaaagttga

SEQ ID NO: 4446 - DNA, 20 bp, Artificial Sequence
  chemically synthesized
aatttattattaaagttgag

SEQ ID NO: 4447 - DNA, 20 bp, Artificial Sequence
  chemically synthesized
tattaaagttgaggggaaaa

SEQ ID NO: 4448 - DNA, 20 bp, Artificial Sequence
  chemically synthesized
ggggaaaaaagtaatgaatt

SEQ ID NO: 4449 - DNA, 20 bp, Artificial Sequence
  chemically synthesized
aacaggtagtcaccatagca

SEQ ID NO: 4450 - DNA, 20 bp, Artificial Sequence
  chemically synthesized
tgggcaaatattggtatata

SEQ ID NO: 4451 - DNA, 20 bp, Artificial Sequence
  chemically synthesized
gttcctctagttatttcctc

SEQ ID NO: 4452 - DNA, 20 bp, Artificial Sequence
  chemically synthesized
aagtcaaaaatgaagaggta

SEQ ID NO: 4453 - DNA, 20 bp, Artificial Sequence
  chemically synthesized
taaagtaagtagaaaataaa

SEQ ID NO: 4454 - DNA, 20 bp, Artificial Sequence
  chemically synthesized
ttcatgtttatgttttcaat

SEQ ID NO: 4455 - DNA, 20 bp, Artificial Sequence
  chemically synthesized
gaaagaagcatacaagggga

SEQ ID NO: 4456 - DNA, 20 bp, Artificial Sequence
  chemically synthesized
cacacaggtctgtaaaaaca

SEQ ID NO: 4457 - DNA, 20 bp, Artificial Sequence
  chemically synthesized
aaattatttacaagctttaa

SEQ ID NO: 4458 - DNA, 20 bp, Artificial Sequence
  chemically synthesized
ttacaagctttaactggatc

SEQ ID NO: 4459 - DNA, 20 bp, Artificial Sequence
  chemically synthesized
ctctaaaactttgtgtgacc

SEQ ID NO: 4460 - DNA, 20 bp, Artificial Sequence
  chemically synthesized
aaagataataacagaactta

SEQ ID NO: 4461 - DNA, 20 bp, Artificial Sequence
  chemically synthesized
tcttggtctaaagagccaat

SEQ ID NO: 4462 - DNA, 20 bp, Artificial Sequence
  chemically synthesized
aaagagaaacatgatctaat

SEQ ID NO: 4463 - DNA, 20 bp, Artificial Sequence
  chemically synthesized
gtaagatgacattggctgct

SEQ ID NO: 4464 - DNA, 20 bp, Artificial Sequence
  chemically synthesized
gtgaggaaactgagagataa

SEQ ID NO: 4465 - DNA, 20 bp, Artificial Sequence
  chemically synthesized
ttaaagcttgtaaataattt

SEQ ID NO: 4466 - DNA, 20 bp, Artificial Sequence
  chemically synthesized
tcttgtttttctacaaaagt

SEQ ID NO: 4467 - DNA, 20 bp, Artificial Sequence
  chemically synthesized
tctacaaaagtctggatata

SEQ ID NO: 4468 - DNA, 20 bp, Artificial Sequence
  chemically synthesized
tctaaatttttaaactaata

SEQ ID NO: 4469 - DNA, 20 bp, Artificial Sequence
  chemically synthesized
actaataatggatttgaaaa

SEQ ID NO: 4470 - DNA, 20 bp, Artificial Sequence
  chemically synthesized
aaagcccagcatattttcat

SEQ ID NO: 4471 - DNA, 20 bp, Artificial Sequence
  chemically synthesized
ttaatctgttttaaacactg

SEQ ID NO: 4472 - DNA, 20 bp, Artificial Sequence
  chemically synthesized
tactttaagtgaagttactt

SEQ ID NO: 4473 - DNA, 20 bp, Artificial Sequence
  chemically synthesized
gaagttacttctgggtgttc

SEQ ID NO: 4474 - DNA, 20 bp, Artificial Sequence
  chemically synthesized
tctggagtttcaggttgatt

SEQ ID NO: 4475 - DNA, 20 bp, Artificial Sequence
  chemically synthesized
tatttcactttttgttgaag

SEQ ID NO: 4476 - DNA, 20 bp, Artificial Sequence
  chemically synthesized
ttctaggaggctttcaagtt

SEQ ID NO: 4477 - DNA, 20 bp, Artificial Sequence
  chemically synthesized
ggaggctttcaagttttgag

SEQ ID NO: 4478 - DNA, 20 bp, Artificial Sequence
  chemically synthesized
aaaaagactgatcaaatatg

SEQ ID NO: 4479 - DNA, 20 bp, Artificial Sequence
  chemically synthesized
tgattttggctctggagata

SEQ ID NO: 4480 - DNA, 20 bp, Artificial Sequence
  chemically synthesized
tggagatagagaatcaaatg

SEQ ID NO: 4481 - DNA, 20 bp, Artificial Sequence
  chemically synthesized
attaagccgtgttaacttgc

SEQ ID NO: 4482 - DNA, 20 bp, Artificial Sequence
  chemically synthesized
gaatgtaaccttcttccaca

SEQ ID NO: 4483 - DNA, 20 bp, Artificial Sequence
  chemically synthesized
gtcaaaaataaacttttttg

SEQ ID NO: 4484 - DNA, 20 bp, Artificial Sequence
  chemically synthesized
aagttgaggggaaaaaagta

SEQ ID NO: 4485 - DNA, 20 bp, Artificial Sequence
  chemically synthesized
gaagtctaggtctgcttcca

SEQ ID NO: 4486 - DNA, 20 bp, Artificial Sequence
  chemically synthesized
tgttcctctagttatttcct

SEQ ID NO: 4487 - DNA, 20 bp, Artificial Sequence
  chemically synthesized
aaaccagtgaaatcaaagaa

SEQ ID NO: 4488 - DNA, 20 bp, Artificial Sequence
  chemically synthesized
caagtcaaaaatgaagaggt

SEQ ID NO: 4489 - DNA, 20 bp, Artificial Sequence
  chemically synthesized
caaaacttgaaagcctccta

SEQ ID NO: 4490 - DNA, 20 bp, Artificial Sequence
  chemically synthesized
agtaacttcacttaaagtaa

SEQ ID NO: 4491 - DNA, 20 bp, Artificial Sequence
  chemically synthesized
tgttgaaatacttttttttc

SEQ ID NO: 4492 - DNA, 20 bp, Artificial Sequence
  chemically synthesized
ttttccaagaaaaataatct

SEQ ID NO: 4493 - DNA, 20 bp, Artificial Sequence
  chemically synthesized
ctttttcttttaattgaagt

SEQ ID NO: 4494 - DNA, 20 bp, Artificial Sequence
  chemically synthesized
gatagtgttacaggaaatta

SEQ ID NO: 4495 - DNA, 20 bp, Artificial Sequence
  chemically synthesized
tgttacaggaaattaataga

SEQ ID NO: 4496 - DNA, 20 bp, Artificial Sequence
  chemically synthesized
ctctctatatccagactttt

SEQ ID NO: 4497 - DNA, 20 bp, Artificial Sequence
  chemically synthesized
accaacagcatagtcaaata

SEQ ID NO: 4498 - DNA, 20 bp, Artificial Sequence
  chemically synthesized
agcatagtcaaataaaagaa

SEQ ID NO: 4499 - DNA, 20 bp, Artificial Sequence
  chemically synthesized
cagaacttataggattattg

SEQ ID NO: 4500 - DNA, 20 bp, Artificial Sequence
  chemically synthesized
tattgtgtggttttgagcaa

SEQ ID NO: 4501 - DNA, 20 bp, Artificial Sequence
  chemically synthesized
gattttctgaacttcaatta

SEQ ID NO: 4502 - DNA, 20 bp, Artificial Sequence
  chemically synthesized
tttaatctgttttaaacact

SEQ ID NO: 4503 - DNA, 20 bp, Artificial Sequence
  chemically synthesized
agtatttcaaatggcatgcc

SEQ ID NO: 4504 - DNA, 20 bp, Artificial Sequence
  chemically synthesized
atatttcactttttgttgaa

SEQ ID NO: 4505 - DNA, 20 bp, Artificial Sequence
  chemically synthesized
ttgattttggctctggagat

SEQ ID NO: 4506 - DNA, 20 bp, Artificial Sequence
  chemically synthesized
ctatatataccaatatttgc

SEQ ID NO: 4507 - DNA, 20 bp, Artificial Sequence
  chemically synthesized
gatcaatgctaaatgaaatc

SEQ ID NO: 4508 - DNA, 20 bp, Artificial Sequence
  chemically synthesized
aaaaagtaaaattagctttt

SEQ ID NO: 4509 - DNA, 20 bp, Artificial Sequence
  chemically synthesized
gtctaggtctgcttccagaa

SEQ ID NO: 4510 - DNA, 20 bp, Artificial Sequence
  chemically synthesized
ccaaattaatgacatatttc

SEQ ID NO: 4511 - DNA, 20 bp, Artificial Sequence
  chemically synthesized
tatgtcacttgaactcaact

SEQ ID NO: 4512 - DNA, 20 bp, Artificial Sequence
  chemically synthesized
gtttccctaatgttatatat

SEQ ID NO: 4513 - DNA, 20 bp, Artificial Sequence
  chemically synthesized
gtaaaaagttaaaaaaaatt

SEQ ID NO: 4514 - DNA, 20 bp, Artificial Sequence
  chemically synthesized
taaaactattctccagtgtt

SEQ ID NO: 4515 - DNA, 20 bp, Artificial Sequence
  chemically synthesized
ctatatccagacttttgtag

SEQ ID NO: 4516 - DNA, 20 bp, Artificial Sequence
  chemically synthesized
catctttcacacaggtctgt

SEQ ID NO: 4517 - DNA, 20 bp, Artificial Sequence
  chemically synthesized
ctgcatttaaaccatggctc

SEQ ID NO: 4518 - DNA, 20 bp, Artificial Sequence
  chemically synthesized
agatcatgtttctctttgct

SEQ ID NO: 4519 - DNA, 20 bp, Artificial Sequence
  chemically synthesized
tatataacattagggaaaca

SEQ ID NO: 4520 - DNA, 20 bp, Artificial Sequence
  chemically synthesized
ttttttaaaagatccacatt

SEQ ID NO: 4521 - DNA, 20 bp, Artificial Sequence
  chemically synthesized
ataataaatttacccaacaa

SEQ ID NO: 4522 - DNA, 20 bp, Artificial Sequence
  chemically synthesized
taaaatcataaaaaagtaaa

SEQ ID NO: 4523 - DNA, 20 bp, Artificial Sequence
  chemically synthesized
agtcaccatagcattgaatg

SEQ ID NO: 4524 - DNA, 20 bp, Artificial Sequence
  chemically synthesized
attaagttagttgctcattt

SEQ ID NO: 4525 - DNA, 20 bp, Artificial Sequence
  chemically synthesized
gttacattcgtgcaagttaa

SEQ ID NO: 4526 - DNA, 20 bp, Artificial Sequence
  chemically synthesized
tcgtgcaagttaacacggct

SEQ ID NO: 4527 - DNA, 20 bp, Artificial Sequence
  chemically synthesized
tatagagttaagaagtctag

SEQ ID NO: 4528 - DNA, 20 bp, Artificial Sequence
  chemically synthesized
tccagaagaaaacagttcca

SEQ ID NO: 4529 - DNA, 20 bp, Artificial Sequence
  chemically synthesized
attgatcaagacaattcatc

SEQ ID NO: 4530 - DNA, 20 bp, Artificial Sequence
  chemically synthesized
ctctatctccagagccaaaa

SEQ ID NO: 4531 - DNA, 20 bp, Artificial Sequence
  chemically synthesized
aagtagaaaataaagagggt

SEQ ID NO: 4532 - DNA, 20 bp, Artificial Sequence
  chemically synthesized
aaaataaagagggttcatgt

SEQ ID NO: 4533 - DNA, 20 bp, Artificial Sequence
  chemically synthesized
atttcctattataatttcaa

SEQ ID NO: 4534 - DNA, 20 bp, Artificial Sequence
  chemically synthesized
attataatttcaagttagtt

SEQ ID NO: 4535 - DNA, 20 bp, Artificial Sequence
  chemically synthesized
aaaaatttaaaactattctc

SEQ ID NO: 4536 - DNA, 20 bp, Artificial Sequence
  chemically synthesized
aactattctccagtgtttaa

SEQ ID NO: 4537 - DNA, 20 bp, Artificial Sequence
  chemically synthesized
ttaaataatacagtaaatgg

SEQ ID NO: 4538 - DNA, 20 bp, Artificial Sequence
  chemically synthesized
tttattcatatgaaaatatg

SEQ ID NO: 4539 - DNA, 20 bp, Artificial Sequence
  chemically synthesized
attcatttttcaaatccatt

SEQ ID NO: 4540 - DNA, 20 bp, Artificial Sequence
  chemically synthesized
atccattattagtttaaaaa

SEQ ID NO: 4541 - DNA, 20 bp, Artificial Sequence
  chemically synthesized
actgaatcctaaaattattt

SEQ ID NO: 4542 - DNA, 20 bp, Artificial Sequence
  chemically synthesized
attacttcacccctttatct

SEQ ID NO: 4543 - DNA, 20 bp, Artificial Sequence
  chemically synthesized
caaagataataacagaactt

SEQ ID NO: 4544 - DNA, 20 bp, Artificial Sequence
  chemically synthesized
ttactaaaattcaaattaga

SEQ ID NO: 4545 - DNA, 20 bp, Artificial Sequence
  chemically synthesized
ctctttgctcaaaaccacac

SEQ ID NO: 4546 - DNA, 20 bp, Artificial Sequence
  chemically synthesized
actcatattggctctttaga

SEQ ID NO: 4547 - DNA, 20 bp, Artificial Sequence
  chemically synthesized
agtgaaatggaaagctattg

SEQ ID NO: 4548 - DNA, 20 bp, Artificial Sequence
  chemically synthesized
gtaatttattcaaggtcaca

SEQ ID NO: 4549 - DNA, 20 bp, Artificial Sequence
  chemically synthesized
gtcacacaaagttttagagc

SEQ ID NO: 4550 - DNA, 20 bp, Artificial Sequence
  chemically synthesized
agagccatggtttaaatgca

SEQ ID NO: 4551 - DNA, 20 bp, Artificial Sequence
  chemically synthesized
ggtttaaatgcaggtagttt

SEQ ID NO: 4552 - DNA, 20 bp, Artificial Sequence
  chemically synthesized
aattttactcatgatccagt

SEQ ID NO: 4553 - DNA, 20 bp, Artificial Sequence
  chemically synthesized
gttaaagcttgtaaataatt

SEQ ID NO: 4554 - DNA, 20 bp, Artificial Sequence
  chemically synthesized
ttgtaaataattttaggatt

SEQ ID NO: 4555 - DNA, 20 bp, Artificial Sequence
  chemically synthesized
taccattaaaatactgactt

SEQ ID NO: 4556 - DNA, 20 bp, Artificial Sequence
  chemically synthesized
ttcttttatttgactatgct

SEQ ID NO: 4557 - DNA, 20 bp, Artificial Sequence
  chemically synthesized
tttgactatgctgttggttt

SEQ ID NO: 4558 - DNA, 20 bp, Artificial Sequence
  chemically synthesized
gaaggtctttgatgctatta

SEQ ID NO: 4559 - DNA, 20 bp, Artificial Sequence
  chemically synthesized
tagagagtaggttggttata

SEQ ID NO: 4560 - DNA, 20 bp, Artificial Sequence
  chemically synthesized
atctaaatttttaaactaat

SEQ ID NO: 4561 - DNA, 20 bp, Artificial Sequence
  chemically synthesized
attggcaattccttcccctt

SEQ ID NO: 4562 - DNA, 20 bp, Artificial Sequence
  chemically synthesized
taaattgtactatctctaaa

SEQ ID NO: 4563 - DNA, 20 bp, Artificial Sequence
  chemically synthesized
tccatttactgtattattta

SEQ ID NO: 4564 - DNA, 20 bp, Artificial Sequence
  chemically synthesized
atctgttttaaacactggag

SEQ ID NO: 4565 - DNA, 20 bp, Artificial Sequence
  chemically synthesized
atagtgtaatgacatagtgt

SEQ ID NO: 4566 - DNA, 20 bp, Artificial Sequence
  chemically synthesized
tgttctagattgtataattt

SEQ ID NO: 4567 - DNA, 20 bp, Artificial Sequence
  chemically synthesized
tcatataaaatgcaaatttt

SEQ ID NO: 4568 - DNA, 20 bp, Artificial Sequence
  chemically synthesized
taataggaaattttattttc

SEQ ID NO: 4569 - DNA, 20 bp, Artificial Sequence
  chemically synthesized
gaagttacttctgggtgttc

SEQ ID NO: 4570 - DNA, 20 bp, Artificial Sequence
  chemically synthesized
ctgggtgttctggagtttca

SEQ ID NO: 4571 - DNA, 20 bp, Artificial Sequence
  chemically synthesized
aagtagaattttttcttcta

SEQ ID NO: 4572 - DNA, 20 bp, Artificial Sequence
  chemically synthesized
ttttttcttctaggaggctt

SEQ ID NO: 4573 - DNA, 20 bp, Artificial Sequence
  chemically synthesized
ttacctcttcatttttgact

SEQ ID NO: 4574 - DNA, 20 bp, Artificial Sequence
  chemically synthesized
tctcagttccttttcttctt

SEQ ID NO: 4575 - DNA, 20 bp, Artificial Sequence
  chemically synthesized
ttttcttcttctttgatttc

SEQ ID NO: 4576 - DNA, 20 bp, Artificial Sequence
  chemically synthesized
aaaaagactgatcaaatatg

SEQ ID NO: 4577 - DNA, 20 bp, Artificial Sequence
  chemically synthesized
acatcgtctaacatagcaaa

SEQ ID NO: 4578 - DNA, 20 bp, Artificial Sequence
  chemically synthesized
ctagaggaacaataaaaaga

SEQ ID NO: 4579 - DNA, 20 bp, Artificial Sequence
  chemically synthesized
cttaattgtgaacattttta

SEQ ID NO: 4580 - DNA, 20 bp, Artificial Sequence
  chemically synthesized
ttcaatttcaagcaacgtgg

SEQ ID NO: 4581 - DNA, 20 bp, Artificial Sequence
  chemically synthesized
cattcaatgctatggtgact

SEQ ID NO: 4582 - DNA, 20 bp, Artificial Sequence
  chemically synthesized
taaaagctaattttactttt

SEQ ID NO: 4583 - DNA, 20 bp, Artificial Sequence
  chemically synthesized
ttttacttttttatgatttt

SEQ ID NO: 4584 - DNA, 22 bp, Artificial Sequence
  chemically synthesized
aattcattacttttttcccctc

SEQ ID NO: 4585 - DNA, 22 bp, Artificial Sequence
  chemically synthesized
attcattacttttttcccctca

SEQ ID NO: 4586 - DNA, 22 bp, Artificial Sequence
  chemically synthesized
attacttttttcccctcaactt

SEQ ID NO: 4587 - DNA, 22 bp, Artificial Sequence
  chemically synthesized
cttttttcccctcaactttaat

SEQ ID NO: 4588 - DNA, 22 bp, Artificial Sequence
  chemically synthesized
ttttcccctcaactttaataat

SEQ ID NO: 4589 - DNA, 22 bp, Artificial Sequence
  chemically synthesized
tttcccctcaactttaataata

SEQ ID NO: 4590 - DNA, 22 bp, Artificial Sequence
  chemically synthesized
ttcccctcaactttaataataa

SEQ ID NO: 4591 - DNA, 22 bp, Artificial Sequence
  chemically synthesized
tcccctcaactttaataataaa

SEQ ID NO: 4592 - DNA, 22 bp, Artificial Sequence
  chemically synthesized
cccctcaactttaataataaat

SEQ ID NO: 4593 - DNA, 22 bp, Artificial Sequence
  chemically synthesized
ccctcaactttaataataaatt

SEQ ID NO: 4594 - DNA, 22 bp, Artificial Sequence
  chemically synthesized
aactttaataataaatttaccc

SEQ ID NO: 4595 - DNA, 22 bp, Artificial Sequence
  chemically synthesized
taataataaatttacccaacaa

SEQ ID NO: 4596 - DNA, 22 bp, Artificial Sequence
  chemically synthesized
aataataaatttacccaacaaa

SEQ ID NO: 4597 - DNA, 22 bp, Artificial Sequence
  chemically synthesized
ataataaatttacccaacaaaa

SEQ ID NO: 4598 - DNA, 22 bp, Artificial Sequence
  chemically synthesized
acccaacaaaaaagtttatttt

SEQ ID NO: 4599 - DNA, 22 bp, Artificial Sequence
  chemically synthesized
cccaacaaaaaagtttattttt

SEQ ID NO: 4600 - DNA, 22 bp, Artificial Sequence
  chemically synthesized
atttttgacttgtaaatctctt

SEQ ID NO: 4601 - DNA, 22 bp, Artificial Sequence
  chemically synthesized
tttttgacttgtaaatctctta

SEQ ID NO: 4602 - DNA, 22 bp, Artificial Sequence
  chemically synthesized
ttgacttgtaaatctcttaaaa

SEQ ID NO: 4603 - DNA, 22 bp, Artificial Sequence
  chemically synthesized
tgacttgtaaatctcttaaaat

SEQ ID NO: 4604 - DNA, 22 bp, Artificial Sequence
  chemically synthesized
gacttgtaaatctcttaaaatc

SEQ ID NO: 4605 - DNA, 22 bp, Artificial Sequence
  chemically synthesized
acttgtaaatctcttaaaatca

SEQ ID NO: 4606 - DNA, 22 bp, Artificial Sequence
  chemically synthesized
gtaaatctcttaaaatcataaa

SEQ ID NO: 4607 - DNA, 22 bp, Artificial Sequence
  chemically synthesized
taaatctcttaaaatcataaaa

SEQ ID NO: 4608 - DNA, 22 bp, Artificial Sequence
  chemically synthesized
ttaaaatcataaaaaagtaaaa

SEQ ID NO: 4609 - DNA, 22 bp, Artificial Sequence
  chemically synthesized
aaaatcataaaaaagtaaaatt

SEQ ID NO: 4610 - DNA, 22 bp, Artificial Sequence
  chemically synthesized
aaatcataaaaaagtaaaatta

SEQ ID NO: 4611 - DNA, 22 bp, Artificial Sequence
  chemically synthesized
gcttttaaaaacaggtagtcac

SEQ ID NO: 4612 - DNA, 22 bp, Artificial Sequence
  chemically synthesized
ttaaaaacaggtagtcaccata

SEQ ID NO: 4613 - DNA, 22 bp, Artificial Sequence
  chemically synthesized
taaaaacaggtagtcaccatag

SEQ ID NO: 4614 - DNA, 22 bp, Artificial Sequence
  chemically synthesized
aaaaacaggtagtcaccatagc

SEQ ID NO: 4615 - DNA, 22 bp, Artificial Sequence
  chemically synthesized
aaaacaggtagtcaccatagca

SEQ ID NO: 4616 - DNA, 22 bp, Artificial Sequence
  chemically synthesized
aatgtgtagtttataatacagc

SEQ ID NO: 4617 - DNA, 22 bp, Artificial Sequence
  chemically synthesized
ataatacagcaaagttaaatac

SEQ ID NO: 4618 - DNA, 22 bp, Artificial Sequence
  chemically synthesized
taatacagcaaagttaaataca

SEQ ID NO: 4619 - DNA, 22 bp, Artificial Sequence
  chemically synthesized
aatacaatttcaaattacctat

SEQ ID NO: 4620 - DNA, 22 bp, Artificial Sequence
  chemically synthesized
caaattacctattaagttagtt

SEQ ID NO: 4621 - DNA, 22 bp, Artificial Sequence
  chemically synthesized
aaattacctattaagttagttg

SEQ ID NO: 4622 - DNA, 22 bp, Artificial Sequence
  chemically synthesized
cctattaagttagttgctcatt

SEQ ID NO: 4623 - DNA, 22 bp, Artificial Sequence
  chemically synthesized
ttaagttagttgctcatttctt

SEQ ID NO: 4624 - DNA, 22 bp, Artificial Sequence
  chemically synthesized
agttagttgctcatttctttga

SEQ ID NO: 4625 - DNA, 22 bp, Artificial Sequence
  chemically synthesized
gttgctcatttctttgatttca

SEQ ID NO: 4626 - DNA, 22 bp, Artificial Sequence
  chemically synthesized
ctcatttctttgatttcattta

SEQ ID NO: 4627 - DNA, 22 bp, Artificial Sequence
  chemically synthesized
atttctttgatttcatttagca

SEQ ID NO: 4628 - DNA, 22 bp, Artificial Sequence
  chemically synthesized
ctttgatttcatttagcattga

SEQ ID NO: 4629 - DNA, 22 bp, Artificial Sequence
  chemically synthesized
tttgatttcatttagcattgat

SEQ ID NO: 4630 - DNA, 22 bp, Artificial Sequence
  chemically synthesized
tgatttcatttagcattgatct

SEQ ID NO: 4631 - DNA, 22 bp, Artificial Sequence
  chemically synthesized
gatttcatttagcattgatcta

SEQ ID NO: 4632 - DNA, 22 bp, Artificial Sequence
  chemically synthesized
atttcatttagcattgatctaa

SEQ ID NO: 4633 - DNA, 22 bp, Artificial Sequence
  chemically synthesized
catttagcattgatctaactca

SEQ ID NO: 4634 - DNA, 22 bp, Artificial Sequence
  chemically synthesized
atttagcattgatctaactcaa

SEQ ID NO: 4635 - DNA, 22 bp, Artificial Sequence
  chemically synthesized
agcattgatctaactcaatgtg

SEQ ID NO: 4636 - DNA, 22 bp, Artificial Sequence
  chemically synthesized
gcattgatctaactcaatgtgg

SEQ ID NO: 4637 - DNA, 22 bp, Artificial Sequence
  chemically synthesized
atctaactcaatgtggaagaag

SEQ ID NO: 4638 - DNA, 22 bp, Artificial Sequence
  chemically synthesized
actcaatgtggaagaaggttac

SEQ ID NO: 4639 - DNA, 22 bp, Artificial Sequence
  chemically synthesized
aatgtggaagaaggttacattc

SEQ ID NO: 4640 - DNA, 22 bp, Artificial Sequence
  chemically synthesized
cattcgtgcaagttaacacggc

SEQ ID NO: 4641 - DNA, 22 bp, Artificial Sequence
  chemically synthesized
gtgcaagttaacacggcttaat

SEQ ID NO: 4642 - DNA, 22 bp, Artificial Sequence
  chemically synthesized
acacggcttaatgattaactat

SEQ ID NO: 4643 - DNA, 22 bp, Artificial Sequence
  chemically synthesized
aatgattaactatgttcaccta

SEQ ID NO: 4644 - DNA, 22 bp, Artificial Sequence
  chemically synthesized
atgattaactatgttcacctac

SEQ ID NO: 4645 - DNA, 22 bp, Artificial Sequence
  chemically synthesized
actatgttcacctaccaacctt

SEQ ID NO: 4646 - DNA, 22 bp, Artificial Sequence
  chemically synthesized
tgttcacctaccaaccttacct

SEQ ID NO: 4647 - DNA, 22 bp, Artificial Sequence
  chemically synthesized
acctaccaaccttaccttttct

SEQ ID NO: 4648 - DNA, 22 bp, Artificial Sequence
  chemically synthesized
ccaaccttaccttttctgggca

SEQ ID NO: 4649 - DNA, 22 bp, Artificial Sequence
  chemically synthesized
accttttctgggcaaatattgg

SEQ ID NO: 4650 - DNA, 22 bp, Artificial Sequence
  chemically synthesized
ccttttctgggcaaatattggt

SEQ ID NO: 4651 - DNA, 22 bp, Artificial Sequence
  chemically synthesized
ttctgggcaaatattggtatat

SEQ ID NO: 4652 - DNA, 22 bp, Artificial Sequence
  chemically synthesized
tctgggcaaatattggtatata

SEQ ID NO: 4653 - DNA, 22 bp, Artificial Sequence
  chemically synthesized
ctgggcaaatattggtatatat

SEQ ID NO: 4654 - DNA, 22 bp, Artificial Sequence
  chemically synthesized
tgggcaaatattggtatatata

SEQ ID NO: 4655 - DNA, 22 bp, Artificial Sequence
  chemically synthesized
ggcaaatattggtatatataga

SEQ ID NO: 4656 - DNA, 22 bp, Artificial Sequence
  chemically synthesized
gtatatatagagttaagaagtc

SEQ ID NO: 4657 - DNA, 22 bp, Artificial Sequence
  chemically synthesized
agaagtctaggtctgcttccag

SEQ ID NO: 4658 - DNA, 22 bp, Artificial Sequence
  chemically synthesized
ggtctgcttccagaagaaaaca

SEQ ID NO: 4659 - DNA, 22 bp, Artificial Sequence
  chemically synthesized
cttccagaagaaaacagttcca

SEQ ID NO: 4660 - DNA, 22 bp, Artificial Sequence
  chemically synthesized
ccagaagaaaacagttccacgt

SEQ ID NO: 4661 - DNA, 22 bp, Artificial Sequence
  chemically synthesized
cagaagaaaacagttccacgtt

SEQ ID NO: 4662 - DNA, 22 bp, Artificial Sequence
  chemically synthesized
cacgttgcttgaaattgaaaat

SEQ ID NO: 4663 - DNA, 22 bp, Artificial Sequence
  chemically synthesized
cttgaaattgaaaatcaagata

SEQ ID NO: 4664 - DNA, 22 bp, Artificial Sequence
  chemically synthesized
gaaattgaaaatcaagataaaa

SEQ ID NO: 4665 - DNA, 22 bp, Artificial Sequence
  chemically synthesized
aaattgaaaatcaagataaaaa

SEQ ID NO: 4666 - DNA, 22 bp, Artificial Sequence
  chemically synthesized
aaaatcaagataaaaatgttca

SEQ ID NO: 4667 - DNA, 22 bp, Artificial Sequence
  chemically synthesized
acaattaagctccttcttttta

SEQ ID NO: 4668 - DNA, 22 bp, Artificial Sequence
  chemically synthesized
agctccttctttttattgttcc

SEQ ID NO: 4669 - DNA, 22 bp, Artificial Sequence
  chemically synthesized
cttctttttattgttcctctag

SEQ ID NO: 4670 - DNA, 22 bp, Artificial Sequence
  chemically synthesized
ctttttattgttcctctagtta

SEQ ID NO: 4671 - DNA, 22 bp, Artificial Sequence
  chemically synthesized
tttttattgttcctctagttat

SEQ ID NO: 4672 - DNA, 22 bp, Artificial Sequence
  chemically synthesized
tttattgttcctctagttattt

SEQ ID NO: 4673 - DNA, 22 bp, Artificial Sequence
  chemically synthesized
ttattgttcctctagttatttc

SEQ ID NO: 4674 - DNA, 22 bp, Artificial Sequence
  chemically synthesized
tattgttcctctagttatttcc

SEQ ID NO: 4675 - DNA, 22 bp, Artificial Sequence
  chemically synthesized
attgttcctctagttatttcct

SEQ ID NO: 4676 - DNA, 22 bp, Artificial Sequence
  chemically synthesized
ttgttcctctagttatttcctc

SEQ ID NO: 4677 - DNA, 22 bp, Artificial Sequence
  chemically synthesized
ttcctctagttatttcctccag

SEQ ID NO: 4678 - DNA, 22 bp, Artificial Sequence
  chemically synthesized
ctctagttatttcctccagaat

SEQ ID NO: 4679 - DNA, 22 bp, Artificial Sequence
  chemically synthesized
tagttatttcctccagaattga

SEQ ID NO: 4680 - DNA, 22 bp, Artificial Sequence
  chemically synthesized
gttatttcctccagaattgatc

SEQ ID NO: 4681 - DNA, 22 bp, Artificial Sequence
  chemically synthesized
tttcctccagaattgatcaaga

SEQ ID NO: 4682 - DNA, 22 bp, Artificial Sequence
  chemically synthesized
cctccagaattgatcaagacaa

SEQ ID NO: 4683 - DNA, 22 bp, Artificial Sequence
  chemically synthesized
ctccagaattgatcaagacaat

SEQ ID NO: 4684 - DNA, 22 bp, Artificial Sequence
  chemically synthesized
cagaattgatcaagacaattca

SEQ ID NO: 4685 - DNA, 22 bp, Artificial Sequence
  chemically synthesized
atcaagacaattcatcatttga

SEQ ID NO: 4686 - DNA, 22 bp, Artificial Sequence
  chemically synthesized
atcatttgattctctatctcca

SEQ ID NO: 4687 - DNA, 22 bp, Artificial Sequence
  chemically synthesized
gattctctatctccagagccaa

SEQ ID NO: 4688 - DNA, 22 bp, Artificial Sequence
  chemically synthesized
attctctatctccagagccaaa

SEQ ID NO: 4689 - DNA, 22 bp, Artificial Sequence
  chemically synthesized
tctatctccagagccaaaatca

SEQ ID NO: 4690 - DNA, 22 bp, Artificial Sequence
  chemically synthesized
tatctccagagccaaaatcaag

SEQ ID NO: 4691 - DNA, 22 bp, Artificial Sequence
  chemically synthesized
tctccagagccaaaatcaagat

SEQ ID NO: 4692 - DNA, 22 bp, Artificial Sequence
  chemically synthesized
cagagccaaaatcaagatttgc

SEQ ID NO: 4693 - DNA, 22 bp, Artificial Sequence
  chemically synthesized
gctatgttagacgatgtaaaaa

SEQ ID NO: 4694 - DNA, 22 bp, Artificial Sequence
  chemically synthesized
ctatgttagacgatgtaaaaat

SEQ ID NO: 4695 - DNA, 22 bp, Artificial Sequence
  chemically synthesized
tgttagacgatgtaaaaatttt

SEQ ID NO: 4696 - DNA, 22 bp, Artificial Sequence
  chemically synthesized
gacgatgtaaaaattttagcca

SEQ ID NO: 4697 - DNA, 22 bp, Artificial Sequence
  chemically synthesized
tagccaatggcctccttcagtt

SEQ ID NO: 4698 - DNA, 22 bp, Artificial Sequence
  chemically synthesized
agccaatggcctccttcagttg

SEQ ID NO: 4699 - DNA, 22 bp, Artificial Sequence
  chemically synthesized
gccaatggcctccttcagttgg

SEQ ID NO: 4700 - DNA, 22 bp, Artificial Sequence
  chemically synthesized
cttcagttgggacatggtctta

SEQ ID NO: 4701 - DNA, 22 bp, Artificial Sequence
  chemically synthesized
cagttgggacatggtcttaaag

SEQ ID NO: 4702 - DNA, 22 bp, Artificial Sequence
  chemically synthesized
agttgggacatggtcttaaaga

SEQ ID NO: 4703 - DNA, 22 bp, Artificial Sequence
  chemically synthesized
ggacatggtcttaaagactttg

SEQ ID NO: 4704 - DNA, 22 bp, Artificial Sequence
  chemically synthesized
aaagactttgtccataagacga

SEQ ID NO: 4705 - DNA, 22 bp, Artificial Sequence
  chemically synthesized
aagactttgtccataagacgaa

SEQ ID NO: 4706 - DNA, 22 bp, Artificial Sequence
  chemically synthesized
tgtccataagacgaagggccaa

SEQ ID NO: 4707 - DNA, 22 bp, Artificial Sequence
  chemically synthesized
gtccataagacgaagggccaaa

SEQ ID NO: 4708 - DNA, 22 bp, Artificial Sequence
  chemically synthesized
tccataagacgaagggccaaat

SEQ ID NO: 4709 - DNA, 22 bp, Artificial Sequence
  chemically synthesized
atgacatatttcaaaaactcaa

SEQ ID NO: 4710 - DNA, 22 bp, Artificial Sequence
  chemically synthesized
caaaaactcaacatatttgatc

SEQ ID NO: 4711 - DNA, 22 bp, Artificial Sequence
  chemically synthesized
aaaaactcaacatatttgatca

SEQ ID NO: 4712 - DNA, 22 bp, Artificial Sequence
  chemically synthesized
aacatatttgatcagtcttttt

SEQ ID NO: 4713 - DNA, 22 bp, Artificial Sequence
  chemically synthesized
gatcagtctttttatgatctat

SEQ ID NO: 4714 - DNA, 22 bp, Artificial Sequence
  chemically synthesized
atcagtctttttatgatctatc

SEQ ID NO: 4715 - DNA, 22 bp, Artificial Sequence
  chemically synthesized
tttatgatctatcgctgcaaac

SEQ ID NO: 4716 - DNA, 22 bp, Artificial Sequence
  chemically synthesized
ttatgatctatcgctgcaaacc

SEQ ID NO: 4717 - DNA, 22 bp, Artificial Sequence
  chemically synthesized
tatgatctatcgctgcaaacca

SEQ ID NO: 4718 - DNA, 22 bp, Artificial Sequence
  chemically synthesized
atgatctatcgctgcaaaccag

SEQ ID NO: 4719 - DNA, 22 bp, Artificial Sequence
  chemically synthesized
tgatctatcgctgcaaaccagt

SEQ ID NO: 4720 - DNA, 22 bp, Artificial Sequence
  chemically synthesized
tcgctgcaaaccagtgaaatca

SEQ ID NO: 4721 - DNA, 22 bp, Artificial Sequence
  chemically synthesized
caaaccagtgaaatcaaagaag

SEQ ID NO: 4722 - DNA, 22 bp, Artificial Sequence
  chemically synthesized
agaagaactacatataaactac

SEQ ID NO: 4723 - DNA, 22 bp, Artificial Sequence
  chemically synthesized
catataaactacaagtcaaaaa

SEQ ID NO: 4724 - DNA, 22 bp, Artificial Sequence
  chemically synthesized
caagtcaaaaatgaagaggtaa

SEQ ID NO: 4725 - DNA, 22 bp, Artificial Sequence
  chemically synthesized
gaactcaactcaaaacttgaaa

SEQ ID NO: 4726 - DNA, 22 bp, Artificial Sequence
  chemically synthesized
aactcaactcaaaacttgaaag

SEQ ID NO: 4727 - DNA, 22 bp, Artificial Sequence
  chemically synthesized
aactcaaaacttgaaagcctcc

SEQ ID NO: 4728 - DNA, 22 bp, Artificial Sequence
  chemically synthesized
aaaacttgaaagcctcctagaa

SEQ ID NO: 4729 - DNA, 22 bp, Artificial Sequence
  chemically synthesized
gaaagcctcctagaagaaaaaa

SEQ ID NO: 4730 - DNA, 22 bp, Artificial Sequence
  chemically synthesized
aaagcctcctagaagaaaaaat

SEQ ID NO: 4731 - DNA, 22 bp, Artificial Sequence
  chemically synthesized
ctagaagaaaaaattctacttc

SEQ ID NO: 4732 - DNA, 22 bp, Artificial Sequence
  chemically synthesized
gaagaaaaaattctacttcaac

SEQ ID NO: 4733 - DNA, 22 bp, Artificial Sequence
  chemically synthesized
tacttcaacaaaaagtgaaata

SEQ ID NO: 4734 - DNA, 22 bp, Artificial Sequence
  chemically synthesized
cttcaacaaaaagtgaaatatt

SEQ ID NO: 4735 - DNA, 22 bp, Artificial Sequence
  chemically synthesized
caacaaaaagtgaaatatttag

SEQ ID NO: 4736 - DNA, 22 bp, Artificial Sequence
  chemically synthesized
aacaaaaagtgaaatatttaga

SEQ ID NO: 4737 - DNA, 22 bp, Artificial Sequence
  chemically synthesized
agaagagcaactaactaactta

SEQ ID NO: 4738 - DNA, 22 bp, Artificial Sequence
  chemically synthesized
gaagagcaactaactaacttaa

SEQ ID NO: 4739 - DNA, 22 bp, Artificial Sequence
  chemically synthesized
actaacttaattcaaaatcaac

SEQ ID NO: 4740 - DNA, 22 bp, Artificial Sequence
  chemically synthesized
acttaattcaaaatcaacctga

SEQ ID NO: 4741 - DNA, 22 bp, Artificial Sequence
  chemically synthesized
aattcaaaatcaacctgaaact

SEQ ID NO: 4742 - DNA, 22 bp, Artificial Sequence
  chemically synthesized
attcaaaatcaacctgaaactc

SEQ ID NO: 4743 - DNA, 22 bp, Artificial Sequence
  chemically synthesized
aaaatcaacctgaaactccaga

SEQ ID NO: 4744 - DNA, 22 bp, Artificial Sequence
  chemically synthesized
aaactccagaacacccagaagt

SEQ ID NO: 4745 - DNA, 22 bp, Artificial Sequence
  chemically synthesized
cagaacacccagaagtaacttc

SEQ ID NO: 4746 - DNA, 22 bp, Artificial Sequence
  chemically synthesized
cacttaaagtaagtagaaaata

SEQ ID NO: 4747 - DNA, 22 bp, Artificial Sequence
  chemically synthesized
acttaaagtaagtagaaaataa

SEQ ID NO: 4748 - DNA, 22 bp, Artificial Sequence
  chemically synthesized
aaagtaagtagaaaataaagag

SEQ ID NO: 4749 - DNA, 22 bp, Artificial Sequence
  chemically synthesized
aagtaagtagaaaataaagagg

SEQ ID NO: 4750 - DNA, 22 bp, Artificial Sequence
  chemically synthesized
atgtttatgttttcaatgtgga

SEQ ID NO: 4751 - DNA, 22 bp, Artificial Sequence
  chemically synthesized
atgttttcaatgtggatctttt

SEQ ID NO: 4752 - DNA, 22 bp, Artificial Sequence
  chemically synthesized
tgttttcaatgtggatctttta

SEQ ID NO: 4753 - DNA, 22 bp, Artificial Sequence
  chemically synthesized
tcaatgtggatcttttaaaaaa

SEQ ID NO: 4754 - DNA, 22 bp, Artificial Sequence
  chemically synthesized
caatgtggatcttttaaaaaaa

SEQ ID NO: 4755 - DNA, 22 bp, Artificial Sequence
  chemically synthesized
aatgtggatcttttaaaaaaaa

SEQ ID NO: 4756 - DNA, 22 bp, Artificial Sequence
  chemically synthesized
ttaaaaaaaatatttctaaggc

SEQ ID NO: 4757 - DNA, 22 bp, Artificial Sequence
  chemically synthesized
taaaaaaaatatttctaaggca

SEQ ID NO: 4758 - DNA, 22 bp, Artificial Sequence
  chemically synthesized
aaaaaaaatatttctaaggcat

SEQ ID NO: 4759 - DNA, 22 bp, Artificial Sequence
  chemically synthesized
aaaaaaatatttctaaggcatg

SEQ ID NO: 4760 - DNA, 22 bp, Artificial Sequence
  chemically synthesized
ctaaggcatgccatttgaaata

SEQ ID NO: 4761 - DNA, 22 bp, Artificial Sequence
  chemically synthesized
taaggcatgccatttgaaatac

SEQ ID NO: 4762 - DNA, 22 bp, Artificial Sequence
  chemically synthesized
aggcatgccatttgaaatactt

SEQ ID NO: 4763 - DNA, 22 bp, Artificial Sequence
  chemically synthesized
gaaatactttgttgcattgttg

SEQ ID NO: 4764 - DNA, 22 bp, Artificial Sequence
  chemically synthesized
aaatactttgttgcattgttga

SEQ ID NO: 4765 - DNA, 22 bp, Artificial Sequence
  chemically synthesized
tgttgcattgttgaaatacttt

SEQ ID NO: 4766 - DNA, 22 bp, Artificial Sequence
  chemically synthesized
gttgcattgttgaaatactttt

SEQ ID NO: 4767 - DNA, 22 bp, Artificial Sequence
  chemically synthesized
ttgcattgttgaaatacttttt

SEQ ID NO: 4768 - DNA, 22 bp, Artificial Sequence
  chemically synthesized
cattgttgaaatactttttttt

SEQ ID NO: 4769 - DNA, 22 bp, Artificial Sequence
  chemically synthesized
ttgaaatacttttttttccaag

SEQ ID NO: 4770 - DNA, 22 bp, Artificial Sequence
  chemically synthesized
aaatacttttttttccaagaaa

SEQ ID NO: 4771 - DNA, 22 bp, Artificial Sequence
  chemically synthesized
ttttttccaagaaaaataatct

SEQ ID NO: 4772 - DNA, 22 bp, Artificial Sequence
  chemically synthesized
tttttccaagaaaaataatctc

SEQ ID NO: 4773 - DNA, 22 bp, Artificial Sequence
  chemically synthesized
ttttccaagaaaaataatctcc

SEQ ID NO: 4774 - DNA, 22 bp, Artificial Sequence
  chemically synthesized
tttccaagaaaaataatctcca

SEQ ID NO: 4775 - DNA, 22 bp, Artificial Sequence
  chemically synthesized
ttccaagaaaaataatctccag

SEQ ID NO: 4776 - DNA, 22 bp, Artificial Sequence
  chemically synthesized
tccaagaaaaataatctccaga

SEQ ID NO: 4777 - DNA, 22 bp, Artificial Sequence
  chemically synthesized
ccaagaaaaataatctccagaa

SEQ ID NO: 4778 - DNA, 22 bp, Artificial Sequence
  chemically synthesized
caagaaaaataatctccagaaa

SEQ ID NO: 4779 - DNA, 22 bp, Artificial Sequence
  chemically synthesized
cagaaaataaaatttcctatta

SEQ ID NO: 4780 - DNA, 22 bp, Artificial Sequence
  chemically synthesized
cctattataatttcaagttagt

SEQ ID NO: 4781 - DNA, 22 bp, Artificial Sequence
  chemically synthesized
ctattataatttcaagttagtt

SEQ ID NO: 4782 - DNA, 22 bp, Artificial Sequence
  chemically synthesized
ttataatttcaagttagttttt

SEQ ID NO: 4783 - DNA, 22 bp, Artificial Sequence
  chemically synthesized
taatttcaagttagttttttgt

SEQ ID NO: 4784 - DNA, 22 bp, Artificial Sequence
  chemically synthesized
caagttagttttttgtttccct

SEQ ID NO: 4785 - DNA, 22 bp, Artificial Sequence
  chemically synthesized
aagttagttttttgtttcccta

SEQ ID NO: 4786 - DNA, 22 bp, Artificial Sequence
  chemically synthesized
gttttttgtttccctaatgtta

SEQ ID NO: 4787 - DNA, 22 bp, Artificial Sequence
  chemically synthesized
tttgtttccctaatgttatata

SEQ ID NO: 4788 - DNA, 22 bp, Artificial Sequence
  chemically synthesized
ttgtttccctaatgttatatat

SEQ ID NO: 4789 - DNA, 22 bp, Artificial Sequence
  chemically synthesized
tgtttccctaatgttatatatg

SEQ ID NO: 4790 - DNA, 22 bp, Artificial Sequence
  chemically synthesized
gtttccctaatgttatatatga

SEQ ID NO: 4791 - DNA, 22 bp, Artificial Sequence
  chemically synthesized
tttccctaatgttatatatgaa

SEQ ID NO: 4792 - DNA, 22 bp, Artificial Sequence
  chemically synthesized
ccctaatgttatatatgaaaac

SEQ ID NO: 4793 - DNA, 22 bp, Artificial Sequence
  chemically synthesized
cctaatgttatatatgaaaaca

SEQ ID NO: 4794 - DNA, 22 bp, Artificial Sequence
  chemically synthesized
atgttatatatgaaaacactga

SEQ ID NO: 4795 - DNA, 22 bp, Artificial Sequence
  chemically synthesized
tatatgaaaacactgaaaattt

SEQ ID NO: 4796 - DNA, 22 bp, Artificial Sequence
  chemically synthesized
aaaatttgcattttatatgaaa

SEQ ID NO: 4797 - DNA, 22 bp, Artificial Sequence
  chemically synthesized
gcattttatatgaaaattacaa

SEQ ID NO: 4798 - DNA, 22 bp, Artificial Sequence
  chemically synthesized
cattttatatgaaaattacaaa

SEQ ID NO: 4799 - DNA, 22 bp, Artificial Sequence
  chemically synthesized
tatatgaaaattacaaatcggt

SEQ ID NO: 4800 - DNA, 22 bp, Artificial Sequence
  chemically synthesized
atatgaaaattacaaatcggtt

SEQ ID NO: 4801 - DNA, 22 bp, Artificial Sequence
  chemically synthesized
tatgaaaattacaaatcggtta

SEQ ID NO: 4802 - DNA, 22 bp, Artificial Sequence
  chemically synthesized
caaatcggttaaattatacaat

SEQ ID NO: 4803 - DNA, 22 bp, Artificial Sequence
  chemically synthesized
aattatacaatctagaacacta

SEQ ID NO: 4804 - DNA, 22 bp, Artificial Sequence
  chemically synthesized
tacaatctagaacactatgtca

SEQ ID NO: 4805 - DNA, 22 bp, Artificial Sequence
  chemically synthesized
gaacactatgtcattacactat

SEQ ID NO: 4806 - DNA, 22 bp, Artificial Sequence
  chemically synthesized
tgtcattacactattgtaaatt

SEQ ID NO: 4807 - DNA, 22 bp, Artificial Sequence
  chemically synthesized
cactattgtaaattactgaagg

SEQ ID NO: 4808 - DNA, 22 bp, Artificial Sequence
  chemically synthesized
ttgtaaattactgaaggtaagt

SEQ ID NO: 4809 - DNA, 22 bp, Artificial Sequence
  chemically synthesized
taaattactgaaggtaagtaaa

SEQ ID NO: 4810 - DNA, 22 bp, Artificial Sequence
  chemically synthesized
ctgaaggtaagtaaaaagttaa

SEQ ID NO: 4811 - DNA, 22 bp, Artificial Sequence
  chemically synthesized
aaggtaagtaaaaagttaaaaa

SEQ ID NO: 4812 - DNA, 22 bp, Artificial Sequence
  chemically synthesized
aaaaaaatttaaaactattctc

SEQ ID NO: 4813 - DNA, 22 bp, Artificial Sequence
  chemically synthesized
aaaactattctccagtgtttaa

SEQ ID NO: 4814 - DNA, 22 bp, Artificial Sequence
  chemically synthesized
aaactattctccagtgtttaaa

SEQ ID NO: 4815 - DNA, 22 bp, Artificial Sequence
  chemically synthesized
ttctccagtgtttaaaacagat

SEQ ID NO: 4816 - DNA, 22 bp, Artificial Sequence
  chemically synthesized
tccagtgtttaaaacagattaa

SEQ ID NO: 4817 - DNA, 22 bp, Artificial Sequence
  chemically synthesized
cagtgtttaaaacagattaaat

SEQ ID NO: 4818 - DNA, 22 bp, Artificial Sequence
  chemically synthesized
aaaacagattaaataatacagt

SEQ ID NO: 4819 - DNA, 22 bp, Artificial Sequence
  chemically synthesized
aaacagattaaataatacagta

SEQ ID NO: 4820 - DNA, 22 bp, Artificial Sequence
  chemically synthesized
aataatacagtaaatggaaaag

SEQ ID NO: 4821 - DNA, 22 bp, Artificial Sequence
  chemically synthesized
attcatatgaaaatatgctggg

SEQ ID NO: 4822 - DNA, 22 bp, Artificial Sequence
  chemically synthesized
ttcatatgaaaatatgctgggc

SEQ ID NO: 4823 - DNA, 22 bp, Artificial Sequence
  chemically synthesized
atatgaaaatatgctgggcttt

SEQ ID NO: 4824 - DNA, 22 bp, Artificial Sequence
  chemically synthesized
ggctttttcttttaattgaagt

SEQ ID NO: 4825 - DNA, 22 bp, Artificial Sequence
  chemically synthesized
tttcttttaattgaagttcaga

SEQ ID NO: 4826 - DNA, 22 bp, Artificial Sequence
  chemically synthesized
ttcttttaattgaagttcagaa

SEQ ID NO: 4827 - DNA, 22 bp, Artificial Sequence
  chemically synthesized
tcttttaattgaagttcagaaa

SEQ ID NO: 4828 - DNA, 22 bp, Artificial Sequence
  chemically synthesized
cttttaattgaagttcagaaaa

SEQ ID NO: 4829 - DNA, 22 bp, Artificial Sequence
  chemically synthesized
ttttaattgaagttcagaaaat

SEQ ID NO: 4830 - DNA, 22 bp, Artificial Sequence
  chemically synthesized
ttaattgaagttcagaaaatca

SEQ ID NO: 4831 - DNA, 22 bp, Artificial Sequence
  chemically synthesized
taattgaagttcagaaaatcaa

SEQ ID NO: 4832 - DNA, 22 bp, Artificial Sequence
  chemically synthesized
aattgaagttcagaaaatcaaa

SEQ ID NO: 4833 - DNA, 22 bp, Artificial Sequence
  chemically synthesized
attgaagttcagaaaatcaaat

SEQ ID NO: 4834 - DNA, 22 bp, Artificial Sequence
  chemically synthesized
aagttcagaaaatcaaatttta

SEQ ID NO: 4835 - DNA, 22 bp, Artificial Sequence
  chemically synthesized
agaaaatcaaattttagagata

SEQ ID NO: 4836 - DNA, 22 bp, Artificial Sequence
  chemically synthesized
tagagatagtacaatttaaata

SEQ ID NO: 4837 - DNA, 22 bp, Artificial Sequence
  chemically synthesized
agagatagtacaatttaaataa

SEQ ID NO: 4838 - DNA, 22 bp, Artificial Sequence
  chemically synthesized
gagatagtacaatttaaataaa

SEQ ID NO: 4839 - DNA, 22 bp, Artificial Sequence
  chemically synthesized
aaataaaatgttaaggacaaaa

SEQ ID NO: 4840 - DNA, 22 bp, Artificial Sequence
  chemically synthesized
aataaaatgttaaggacaaaaa

SEQ ID NO: 4841 - DNA, 22 bp, Artificial Sequence
  chemically synthesized
aggacaaaaatatgtgctattt

SEQ ID NO: 4842 - DNA, 22 bp, Artificial Sequence
  chemically synthesized
tttgaaagaagcatacaagggg

SEQ ID NO: 4843 - DNA, 22 bp, Artificial Sequence
  chemically synthesized
gaaagaagcatacaaggggaag

SEQ ID NO: 4844 - DNA, 22 bp, Artificial Sequence
  chemically synthesized
aaagaagcatacaaggggaagg

SEQ ID NO: 4845 - DNA, 22 bp, Artificial Sequence
  chemically synthesized
ccaatattcatttttcaaatcc

SEQ ID NO: 4846 - DNA, 22 bp, Artificial Sequence
  chemically synthesized
atttttcaaatccattattagt

SEQ ID NO: 4847 - DNA, 22 bp, Artificial Sequence
  chemically synthesized
ttcaaatccattattagtttaa

SEQ ID NO: 4848 - DNA, 22 bp, Artificial Sequence
  chemically synthesized
tcaaatccattattagtttaaa

SEQ ID NO: 4849 - DNA, 22 bp, Artificial Sequence
  chemically synthesized
caaatccattattagtttaaaa

SEQ ID NO: 4850 - DNA, 22 bp, Artificial Sequence
  chemically synthesized
aaatccattattagtttaaaaa

SEQ ID NO: 4851 - DNA, 22 bp, Artificial Sequence
  chemically synthesized
ttagtttaaaaatttagattat

SEQ ID NO: 4852 - DNA, 22 bp, Artificial Sequence
  chemically synthesized
gtttaaaaatttagattatgat

SEQ ID NO: 4853 - DNA, 22 bp, Artificial Sequence
  chemically synthesized
aaaaatttagattatgatagtg

SEQ ID NO: 4854 - DNA, 22 bp, Artificial Sequence
  chemically synthesized
aaaatttagattatgatagtgt

SEQ ID NO: 4855 - DNA, 22 bp, Artificial Sequence
  chemically synthesized
agattatgatagtgttacagga

SEQ ID NO: 4856 - DNA, 22 bp, Artificial Sequence
  chemically synthesized
gattatgatagtgttacaggaa

SEQ ID NO: 4857 - DNA, 22 bp, Artificial Sequence
  chemically synthesized
tgatagtgttacaggaaattaa

SEQ ID NO: 4858 - DNA, 22 bp, Artificial Sequence
  chemically synthesized
caggaaattaatagaaaagaaa

SEQ ID NO: 4859 - DNA, 22 bp, Artificial Sequence
  chemically synthesized
atagaaaagaaagaggaaagca

SEQ ID NO: 4860 - DNA, 22 bp, Artificial Sequence
  chemically synthesized
ataaccaacctactctctatat

SEQ ID NO: 4861 - DNA, 22 bp, Artificial Sequence
  chemically synthesized
taaccaacctactctctatatc

SEQ ID NO: 4862 - DNA, 22 bp, Artificial Sequence
  chemically synthesized
ctctctatatccagacttttgt

SEQ ID NO: 4863 - DNA, 22 bp, Artificial Sequence
  chemically synthesized
tctatatccagacttttgtaga

SEQ ID NO: 4864 - DNA, 22 bp, Artificial Sequence
  chemically synthesized
tatatccagacttttgtagaaa

SEQ ID NO: 4865 - DNA, 22 bp, Artificial Sequence
  chemically synthesized
tatccagacttttgtagaaaaa

SEQ ID NO: 4866 - DNA, 22 bp, Artificial Sequence
  chemically synthesized
ttgtagaaaaacaagataatag

SEQ ID NO: 4867 - DNA, 22 bp, Artificial Sequence
  chemically synthesized
tgtagaaaaacaagataatagc

SEQ ID NO: 4868 - DNA, 22 bp, Artificial Sequence
  chemically synthesized
gtagaaaaacaagataatagca

SEQ ID NO: 4869 - DNA, 22 bp, Artificial Sequence
  chemically synthesized
tagaaaaacaagataatagcat

SEQ ID NO: 4870 - DNA, 22 bp, Artificial Sequence
  chemically synthesized
ctccagaccgtggaagaccaat

SEQ ID NO: 4871 - DNA, 22 bp, Artificial Sequence
  chemically synthesized
tccagaccgtggaagaccaata

SEQ ID NO: 4872 - DNA, 22 bp, Artificial Sequence
  chemically synthesized
cagaccgtggaagaccaatata

SEQ ID NO: 4873 - DNA, 22 bp, Artificial Sequence
  chemically synthesized
aaccaacagcatagtcaaataa

SEQ ID NO: 4874 - DNA, 22 bp, Artificial Sequence
  chemically synthesized
taatggtatgtcccatctttca

SEQ ID NO: 4875 - DNA, 22 bp, Artificial Sequence
  chemically synthesized
aatggtatgtcccatctttcac

SEQ ID NO: 4876 - DNA, 22 bp, Artificial Sequence
  chemically synthesized
atggtatgtcccatctttcaca

SEQ ID NO: 4877 - DNA, 22 bp, Artificial Sequence
  chemically synthesized
tcacacaggtctgtaaaaacac

SEQ ID NO: 4878 - DNA, 22 bp, Artificial Sequence
  chemically synthesized
cacacaggtctgtaaaaacact

SEQ ID NO: 4879 - DNA, 22 bp, Artificial Sequence
  chemically synthesized
acacaggtctgtaaaaacactg

SEQ ID NO: 4880 - DNA, 22 bp, Artificial Sequence
  chemically synthesized
taaaaacactgaatcctaaaat

SEQ ID NO: 4881 - DNA, 22 bp, Artificial Sequence
  chemically synthesized
aatcctaaaattatttacaagc

SEQ ID NO: 4882 - DNA, 22 bp, Artificial Sequence
  chemically synthesized
aaattatttacaagctttaact

SEQ ID NO: 4883 - DNA, 22 bp, Artificial Sequence
  chemically synthesized
tttacaagctttaactggatca

SEQ ID NO: 4884 - DNA, 22 bp, Artificial Sequence
  chemically synthesized
acaagctttaactggatcatga

SEQ ID NO: 4885 - DNA, 22 bp, Artificial Sequence
  chemically synthesized
caagctttaactggatcatgag

SEQ ID NO: 4886 - DNA, 22 bp, Artificial Sequence
  chemically synthesized
taactggatcatgagtaaaatt

SEQ ID NO: 4887 - DNA, 22 bp, Artificial Sequence
  chemically synthesized
aactggatcatgagtaaaatta

SEQ ID NO: 4888 - DNA, 22 bp, Artificial Sequence
  chemically synthesized
actggatcatgagtaaaattat

SEQ ID NO: 4889 - DNA, 22 bp, Artificial Sequence
  chemically synthesized
gatcatgagtaaaattatcaca

SEQ ID NO: 4890 - DNA, 22 bp, Artificial Sequence
  chemically synthesized
tcacatcagcataactgttaaa

SEQ ID NO: 4891 - DNA, 22 bp, Artificial Sequence
  chemically synthesized
ttaaaattgcaggctctgaagc

SEQ ID NO: 4892 - DNA, 22 bp, Artificial Sequence
  chemically synthesized
aaattgcaggctctgaagctaa

SEQ ID NO: 4893 - DNA, 22 bp, Artificial Sequence
  chemically synthesized
caggctctgaagctaataaact

SEQ ID NO: 4894 - DNA, 22 bp, Artificial Sequence
  chemically synthesized
tgaagctaataaactacctgca

SEQ ID NO: 4895 - DNA, 22 bp, Artificial Sequence
  chemically synthesized
aagctaataaactacctgcatt

SEQ ID NO: 4896 - DNA, 22 bp, Artificial Sequence
  chemically synthesized
ataaactacctgcatttaaacc

SEQ ID NO: 4897 - DNA, 22 bp, Artificial Sequence
  chemically synthesized
cctgcatttaaaccatggctct

SEQ ID NO: 4898 - DNA, 22 bp, Artificial Sequence
  chemically synthesized
catttaaaccatggctctaaaa

SEQ ID NO: 4899 - DNA, 22 bp, Artificial Sequence
  chemically synthesized
aaaccatggctctaaaactttg

SEQ ID NO: 4900 - DNA, 22 bp, Artificial Sequence
  chemically synthesized
aaccatggctctaaaactttgt

SEQ ID NO: 4901 - DNA, 22 bp, Artificial Sequence
  chemically synthesized
taaaactttgtgtgaccttgaa

SEQ ID NO: 4902 - DNA, 22 bp, Artificial Sequence
  chemically synthesized
aaactttgtgtgaccttgaata

SEQ ID NO: 4903 - DNA, 22 bp, Artificial Sequence
  chemically synthesized
tgtgtgaccttgaataaattac

SEQ ID NO: 4904 - DNA, 22 bp, Artificial Sequence
  chemically synthesized
gtgtgaccttgaataaattact

SEQ ID NO: 4905 - DNA, 22 bp, Artificial Sequence
  chemically synthesized
tgtgaccttgaataaattactt

SEQ ID NO: 4906 - DNA, 22 bp, Artificial Sequence
  chemically synthesized
gaataaattacttcaccccttt

SEQ ID NO: 4907 - DNA, 22 bp, Artificial Sequence
  chemically synthesized
aataaattacttcaccccttta

SEQ ID NO: 4908 - DNA, 22 bp, Artificial Sequence
  chemically synthesized
cttcacccctttatctctcagt

SEQ ID NO: 4909 - DNA, 22 bp, Artificial Sequence
  chemically synthesized
cacccctttatctctcagtttc

SEQ ID NO: 4910 - DNA, 22 bp, Artificial Sequence
  chemically synthesized
acccctttatctctcagtttcc

SEQ ID NO: 4911 - DNA, 22 bp, Artificial Sequence
  chemically synthesized
tatctctcagtttcctcacata

SEQ ID NO: 4912 - DNA, 22 bp, Artificial Sequence
  chemically synthesized
atctctcagtttcctcacatat

SEQ ID NO: 4913 - DNA, 22 bp, Artificial Sequence
  chemically synthesized
tctctcagtttcctcacatata

SEQ ID NO: 4914 - DNA, 22 bp, Artificial Sequence
  chemically synthesized
tcagtttcctcacatatactac

SEQ ID NO: 4915 - DNA, 22 bp, Artificial Sequence
  chemically synthesized
agtttcctcacatatactacaa

SEQ ID NO: 4916 - DNA, 22 bp, Artificial Sequence
  chemically synthesized
cctcacatatactacaaagata

SEQ ID NO: 4917 - DNA, 22 bp, Artificial Sequence
  chemically synthesized
ctcacatatactacaaagataa

SEQ ID NO: 4918 - DNA, 22 bp, Artificial Sequence
  chemically synthesized
acatatactacaaagataataa

SEQ ID NO: 4919 - DNA, 22 bp, Artificial Sequence
  chemically synthesized
caaagataataacagaacttat

SEQ ID NO: 4920 - DNA, 22 bp, Artificial Sequence
  chemically synthesized
ataggattattgtaagaaaaaa

SEQ ID NO: 4921 - DNA, 22 bp, Artificial Sequence
  chemically synthesized
taggattattgtaagaaaaaaa

SEQ ID NO: 4922 - DNA, 22 bp, Artificial Sequence
  chemically synthesized
ttgtaagaaaaaaaattaattc

SEQ ID NO: 4923 - DNA, 22 bp, Artificial Sequence
  chemically synthesized
taagaaaaaaaattaattcata

SEQ ID NO: 4924 - DNA, 22 bp, Artificial Sequence
  chemically synthesized
attcatagcagccaatgtcatc

SEQ ID NO: 4925 - DNA, 22 bp, Artificial Sequence
  chemically synthesized
atagcagccaatgtcatcttac

SEQ ID NO: 4926 - DNA, 22 bp, Artificial Sequence
  chemically synthesized
actaaaattcaaattagatcat

SEQ ID NO: 4927 - DNA, 22 bp, Artificial Sequence
  chemically synthesized
ctaaaattcaaattagatcatg

SEQ ID NO: 4928 - DNA, 22 bp, Artificial Sequence
  chemically synthesized
aaattcaaattagatcatgttt

SEQ ID NO: 4929 - DNA, 22 bp, Artificial Sequence
  chemically synthesized
aaattagatcatgtttctcttt

SEQ ID NO: 4930 - DNA, 22 bp, Artificial Sequence
  chemically synthesized
gatcatgtttctctttgctcaa

SEQ ID NO: 4931 - DNA, 22 bp, Artificial Sequence
  chemically synthesized
ctctttgctcaaaaccacacaa

SEQ ID NO: 4932 - DNA, 22 bp, Artificial Sequence
  chemically synthesized
tctttgctcaaaaccacacaat

SEQ ID NO: 4933 - DNA, 22 bp, Artificial Sequence
  chemically synthesized
tttgctcaaaaccacacaatag

SEQ ID NO: 4934 - DNA, 22 bp, Artificial Sequence
  chemically synthesized
tgctcaaaaccacacaatagct

SEQ ID NO: 4935 - DNA, 22 bp, Artificial Sequence
  chemically synthesized
gctcaaaaccacacaatagctt

SEQ ID NO: 4936 - DNA, 22 bp, Artificial Sequence
  chemically synthesized
ctcaaaaccacacaatagcttt

SEQ ID NO: 4937 - DNA, 22 bp, Artificial Sequence
  chemically synthesized
aaaaccacacaatagctttcca

SEQ ID NO: 4938 - DNA, 22 bp, Artificial Sequence
  chemically synthesized
tccatttcactcatattggctc

SEQ ID NO: 4939 - DNA, 22 bp, Artificial Sequence
  chemically synthesized
ccatttcactcatattggctct

SEQ ID NO: 4940 - DNA, 22 bp, Artificial Sequence
  chemically synthesized
catttcactcatattggctctt

SEQ ID NO: 4941 - DNA, 22 bp, Artificial Sequence
  chemically synthesized
cactcatattggctctttagac

SEQ ID NO: 4942 - DNA, 22 bp, Artificial Sequence
  chemically synthesized
actcatattggctctttagacc

SEQ ID NO: 4943 - DNA, 22 bp, Artificial Sequence
  chemically synthesized
atattggctctttagaccaaga

SEQ ID NO: 4944 - DNA, 22 bp, Artificial Sequence
  chemically synthesized
gctctttagaccaagattaccc

SEQ ID NO: 4945 - DNA, 22 bp, Artificial Sequence
  chemically synthesized
ggtaatcttggtctaaagagcc

SEQ ID NO: 4946 - DNA, 22 bp, Artificial Sequence
  chemically synthesized
ggtctaaagagccaatatgagt

SEQ ID NO: 4947 - DNA, 22 bp, Artificial Sequence
  chemically synthesized
gtctaaagagccaatatgagtg

SEQ ID NO: 4948 - DNA, 22 bp, Artificial Sequence
  chemically synthesized
aagagccaatatgagtgaaatg

SEQ ID NO: 4949 - DNA, 22 bp, Artificial Sequence
  chemically synthesized
ttgtgtggttttgagcaaagag

SEQ ID NO: 4950 - DNA, 22 bp, Artificial Sequence
  chemically synthesized
tgtggttttgagcaaagagaaa

SEQ ID NO: 4951 - DNA, 22 bp, Artificial Sequence
  chemically synthesized
tgagcaaagagaaacatgatct

SEQ ID NO: 4952 - DNA, 22 bp, Artificial Sequence
  chemically synthesized
gagcaaagagaaacatgatcta

SEQ ID NO: 4953 - DNA, 22 bp, Artificial Sequence
  chemically synthesized
agcaaagagaaacatgatctaa

SEQ ID NO: 4954 - DNA, 22 bp, Artificial Sequence
  chemically synthesized
atttgaattttagtaagatgac

SEQ ID NO: 4955 - DNA, 22 bp, Artificial Sequence
  chemically synthesized
gaattttagtaagatgacattg

SEQ ID NO: 4956 - DNA, 22 bp, Artificial Sequence
  chemically synthesized
aattttagtaagatgacattgg

SEQ ID NO: 4957 - DNA, 22 bp, Artificial Sequence
  chemically synthesized
tagtaagatgacattggctgct

SEQ ID NO: 4958 - DNA, 22 bp, Artificial Sequence
  chemically synthesized
agtaagatgacattggctgcta

SEQ ID NO: 4959 - DNA, 22 bp, Artificial Sequence
  chemically synthesized
gtaagatgacattggctgctat

SEQ ID NO: 4960 - DNA, 22 bp, Artificial Sequence
  chemically synthesized
gctgctatgaattaattttttt

SEQ ID NO: 4961 - DNA, 22 bp, Artificial Sequence
  chemically synthesized
ctatgaattaattttttttctt

SEQ ID NO: 4962 - DNA, 22 bp, Artificial Sequence
  chemically synthesized
tgaattaattttttttcttaca

SEQ ID NO: 4963 - DNA, 22 bp, Artificial Sequence
  chemically synthesized
attttttttcttacaataatcc

SEQ ID NO: 4964 - DNA, 22 bp, Artificial Sequence
  chemically synthesized
tttttcttacaataatcctata

SEQ ID NO: 4965 - DNA, 22 bp, Artificial Sequence
  chemically synthesized
ttttcttacaataatcctataa

SEQ ID NO: 4966 - DNA, 22 bp, Artificial Sequence
  chemically synthesized
tttcttacaataatcctataag

SEQ ID NO: 4967 - DNA, 22 bp, Artificial Sequence
  chemically synthesized
ttcttacaataatcctataagt

SEQ ID NO: 4968 - DNA, 22 bp, Artificial Sequence
  chemically synthesized
tcttacaataatcctataagtt

SEQ ID NO: 4969 - DNA, 22 bp, Artificial Sequence
  chemically synthesized
cttacaataatcctataagttc

SEQ ID NO: 4970 - DNA, 22 bp, Artificial Sequence
  chemically synthesized
ttacaataatcctataagttct

SEQ ID NO: 4971 - DNA, 22 bp, Artificial Sequence
  chemically synthesized
acaataatcctataagttctgt

SEQ ID NO: 4972 - DNA, 22 bp, Artificial Sequence
  chemically synthesized
caataatcctataagttctgtt

SEQ ID NO: 4973 - DNA, 22 bp, Artificial Sequence
  chemically synthesized
taagttctgttattatctttgt

SEQ ID NO: 4974 - DNA, 22 bp, Artificial Sequence
  chemically synthesized
tgttattatctttgtagtatat

SEQ ID NO: 4975 - DNA, 22 bp, Artificial Sequence
  chemically synthesized
ttattatctttgtagtatatgt

SEQ ID NO: 4976 - DNA, 22 bp, Artificial Sequence
  chemically synthesized
ttatctttgtagtatatgtgag

SEQ ID NO: 4977 - DNA, 22 bp, Artificial Sequence
  chemically synthesized
tctttgtagtatatgtgaggaa

SEQ ID NO: 4978 - DNA, 22 bp, Artificial Sequence
  chemically synthesized
tgtagtatatgtgaggaaactg

SEQ ID NO: 4979 - DNA, 22 bp, Artificial Sequence
  chemically synthesized
gtagtatatgtgaggaaactga

SEQ ID NO: 4980 - DNA, 22 bp, Artificial Sequence
  chemically synthesized
tagtatatgtgaggaaactgag

SEQ ID NO: 4981 - DNA, 22 bp, Artificial Sequence
  chemically synthesized
agagataaaggggtgaagtaat

SEQ ID NO: 4982 - DNA, 22 bp, Artificial Sequence
  chemically synthesized
attcaaggtcacacaaagtttt

SEQ ID NO: 4983 - DNA, 22 bp, Artificial Sequence
  chemically synthesized
ttcaaggtcacacaaagtttta

SEQ ID NO: 4984 - DNA, 22 bp, Artificial Sequence
  chemically synthesized
aaggtcacacaaagttttagag

SEQ ID NO: 4985 - DNA, 22 bp, Artificial Sequence
  chemically synthesized
tagagccatggtttaaatgcag

SEQ ID NO: 4986 - DNA, 22 bp, Artificial Sequence
  chemically synthesized
agagccatggtttaaatgcagg

SEQ ID NO: 4987 - DNA, 22 bp, Artificial Sequence
  chemically synthesized
gagccatggtttaaatgcaggt

SEQ ID NO: 4988 - DNA, 22 bp, Artificial Sequence
  chemically synthesized
aaatgcaggtagtttattagct

SEQ ID NO: 4989 - DNA, 22 bp, Artificial Sequence
  chemically synthesized
aatgcaggtagtttattagctt

SEQ ID NO: 4990 - DNA, 22 bp, Artificial Sequence
  chemically synthesized
attagcttcagagcctgcaatt

SEQ ID NO: 4991 - DNA, 22 bp, Artificial Sequence
  chemically synthesized
ttagcttcagagcctgcaattt

SEQ ID NO: 4992 - DNA, 22 bp, Artificial Sequence
  chemically synthesized
gcttcagagcctgcaattttaa

SEQ ID NO: 4993 - DNA, 22 bp, Artificial Sequence
  chemically synthesized
cagagcctgcaattttaacagt

SEQ ID NO: 4994 - DNA, 22 bp, Artificial Sequence
  chemically synthesized
agagcctgcaattttaacagtt

SEQ ID NO: 4995 - DNA, 22 bp, Artificial Sequence
  chemically synthesized
caattttaacagttatgctgat

SEQ ID NO: 4996 - DNA, 22 bp, Artificial Sequence
  chemically synthesized
taacagttatgctgatgtgata

SEQ ID NO: 4997 - DNA, 22 bp, Artificial Sequence
  chemically synthesized
aacagttatgctgatgtgataa

SEQ ID NO: 4998 - DNA, 22 bp, Artificial Sequence
  chemically synthesized
acagttatgctgatgtgataat

SEQ ID NO: 4999 - DNA, 22 bp, Artificial Sequence
  chemically synthesized
tgctgatgtgataattttactc

SEQ ID NO: 5000 - DNA, 22 bp, Artificial Sequence
  chemically synthesized
atgtgataattttactcatgat

SEQ ID NO: 5001 - DNA, 22 bp, Artificial Sequence
  chemically synthesized
tactcatgatccagttaaagct

SEQ ID NO: 5002 - DNA, 22 bp, Artificial Sequence
  chemically synthesized
actcatgatccagttaaagctt

SEQ ID NO: 5003 - DNA, 22 bp, Artificial Sequence
  chemically synthesized
ctcatgatccagttaaagcttg

SEQ ID NO: 5004 - DNA, 22 bp, Artificial Sequence
  chemically synthesized
atgatccagttaaagcttgtaa

SEQ ID NO: 5005 - DNA, 22 bp, Artificial Sequence
  chemically synthesized
aagcttgtaaataattttagga

SEQ ID NO: 5006 - DNA, 22 bp, Artificial Sequence
  chemically synthesized
gtaaataattttaggattcagt

SEQ ID NO: 5007 - DNA, 22 bp, Artificial Sequence
  chemically synthesized
taaataattttaggattcagtg

SEQ ID NO: 5008 - DNA, 22 bp, Artificial Sequence
  chemically synthesized
taggattcagtgtttttacaga

SEQ ID NO: 5009 - DNA, 22 bp, Artificial Sequence
  chemically synthesized
aggattcagtgtttttacagac

SEQ ID NO: 5010 - DNA, 22 bp, Artificial Sequence
  chemically synthesized
ggattcagtgtttttacagacc

SEQ ID NO: 5011 - DNA, 22 bp, Artificial Sequence
  chemically synthesized
agtgtttttacagacctgtgtg

SEQ ID NO: 5012 - DNA, 22 bp, Artificial Sequence
  chemically synthesized
ttacagacctgtgtgaaagatg

SEQ ID NO: 5013 - DNA, 22 bp, Artificial Sequence
  chemically synthesized
tacagacctgtgtgaaagatgg

SEQ ID NO: 5014 - DNA, 22 bp, Artificial Sequence
  chemically synthesized
acagacctgtgtgaaagatggg

SEQ ID NO: 5015 - DNA, 22 bp, Artificial Sequence
  chemically synthesized
cagacctgtgtgaaagatggga

SEQ ID NO: 5016 - DNA, 22 bp, Artificial Sequence
  chemically synthesized
tgtgaaagatgggacataccat

SEQ ID NO: 5017 - DNA, 22 bp, Artificial Sequence
  chemically synthesized
aaatactgacttacctgatttt

SEQ ID NO: 5018 - DNA, 22 bp, Artificial Sequence
  chemically synthesized
acttacctgattttctatttct

SEQ ID NO: 5019 - DNA, 22 bp, Artificial Sequence
  chemically synthesized
acctgattttctatttctttta

SEQ ID NO: 5020 - DNA, 22 bp, Artificial Sequence
  chemically synthesized
cctgattttctatttcttttat

SEQ ID NO: 5021 - DNA, 22 bp, Artificial Sequence
  chemically synthesized
attttctatttcttttatttga

SEQ ID NO: 5022 - DNA, 22 bp, Artificial Sequence
  chemically synthesized
tctatttcttttatttgactat

SEQ ID NO: 5023 - DNA, 22 bp, Artificial Sequence
  chemically synthesized
ctatttcttttatttgactatg

SEQ ID NO: 5024 - DNA, 22 bp, Artificial Sequence
  chemically synthesized
tatttcttttatttgactatgc

SEQ ID NO: 5025 - DNA, 22 bp, Artificial Sequence
  chemically synthesized
tttcttttatttgactatgctg

SEQ ID NO: 5026 - DNA, 22 bp, Artificial Sequence
  chemically synthesized
cttttatttgactatgctgttg

SEQ ID NO: 5027 - DNA, 22 bp, Artificial Sequence
  chemically synthesized
ttttatttgactatgctgttgg

SEQ ID NO: 5028 - DNA, 22 bp, Artificial Sequence
  chemically synthesized
ttatttgactatgctgttggtt

SEQ ID NO: 5029 - DNA, 22 bp, Artificial Sequence
  chemically synthesized
tatttgactatgctgttggttt

SEQ ID NO: 5030 - DNA, 22 bp, Artificial Sequence
  chemically synthesized
atttgactatgctgttggttta

SEQ ID NO: 5031 - DNA, 22 bp, Artificial Sequence
  chemically synthesized
tttgactatgctgttggtttaa

SEQ ID NO: 5032 - DNA, 22 bp, Artificial Sequence
  chemically synthesized
gactatgctgttggtttaattg

SEQ ID NO: 5033 - DNA, 22 bp, Artificial Sequence
  chemically synthesized
actatgctgttggtttaattgt

SEQ ID NO: 5034 - DNA, 22 bp, Artificial Sequence
  chemically synthesized
tgctgttggtttaattgtttat

SEQ ID NO: 5035 - DNA, 22 bp, Artificial Sequence
  chemically synthesized
ttggtttaattgtttatattgg

SEQ ID NO: 5036 - DNA, 22 bp, Artificial Sequence
  chemically synthesized
gtttaattgtttatattggtct

SEQ ID NO: 5037 - DNA, 22 bp, Artificial Sequence
  chemically synthesized
aattgtttatattggtcttcca

SEQ ID NO: 5038 - DNA, 22 bp, Artificial Sequence
  chemically synthesized
attgtttatattggtcttccac

SEQ ID NO: 5039 - DNA, 22 bp, Artificial Sequence
  chemically synthesized
tttatattggtcttccacggtc

SEQ ID NO: 5040 - DNA, 22 bp, Artificial Sequence
  chemically synthesized
atattggtcttccacggtctgg

SEQ ID NO: 5041 - DNA, 22 bp, Artificial Sequence
  chemically synthesized
tattggtcttccacggtctgga

SEQ ID NO: 5042 - DNA, 22 bp, Artificial Sequence
  chemically synthesized
gtcttccacggtctggagaagg

SEQ ID NO: 5043 - DNA, 22 bp, Artificial Sequence
  chemically synthesized
ccacggtctggagaaggtcttt

SEQ ID NO: 5044 - DNA, 22 bp, Artificial Sequence
  chemically synthesized
cacggtctggagaaggtctttg

SEQ ID NO: 5045 - DNA, 22 bp, Artificial Sequence
  chemically synthesized
gagaaggtctttgatgctatta

SEQ ID NO: 5046 - DNA, 22 bp, Artificial Sequence
  chemically synthesized
tgatgctattatcttgtttttc

SEQ ID NO: 5047 - DNA, 22 bp, Artificial Sequence
  chemically synthesized
gatgctattatcttgtttttct

SEQ ID NO: 5048 - DNA, 22 bp, Artificial Sequence
  chemically synthesized
atgctattatcttgtttttcta

SEQ ID NO: 5049 - DNA, 22 bp, Artificial Sequence
  chemically synthesized
ttatcttgtttttctacaaaag

SEQ ID NO: 5050 - DNA, 22 bp, Artificial Sequence
  chemically synthesized
tcttgtttttctacaaaagtct

SEQ ID NO: 5051 - DNA, 22 bp, Artificial Sequence
  chemically synthesized
gtttttctacaaaagtctggat

SEQ ID NO: 5052 - DNA, 22 bp, Artificial Sequence
  chemically synthesized
tttttctacaaaagtctggata

SEQ ID NO: 5053 - DNA, 22 bp, Artificial Sequence
  chemically synthesized
ttctacaaaagtctggatatag

SEQ ID NO: 5054 - DNA, 22 bp, Artificial Sequence
  chemically synthesized
tctacaaaagtctggatataga

SEQ ID NO: 5055 - DNA, 22 bp, Artificial Sequence
  chemically synthesized
ctacaaaagtctggatatagag

SEQ ID NO: 5056 - DNA, 22 bp, Artificial Sequence
  chemically synthesized
tacaaaagtctggatatagaga

SEQ ID NO: 5057 - DNA, 22 bp, Artificial Sequence
  chemically synthesized
caaaagtctggatatagagagt

SEQ ID NO: 5058 - DNA, 22 bp, Artificial Sequence
  chemically synthesized
gatatagagagtaggttggtta

SEQ ID NO: 5059 - DNA, 22 bp, Artificial Sequence
  chemically synthesized
gttataagttgctttcctcttt

SEQ ID NO: 5060 - DNA, 22 bp, Artificial Sequence
  chemically synthesized
taagttgctttcctctttcttt

SEQ ID NO: 5061 - DNA, 22 bp, Artificial Sequence
  chemically synthesized
ctttcctctttcttttctatta

SEQ ID NO: 5062 - DNA, 22 bp, Artificial Sequence
  chemically synthesized
tcctctttcttttctattaatt

SEQ ID NO: 5063 - DNA, 22 bp, Artificial Sequence
  chemically synthesized
cctctttcttttctattaattt

SEQ ID NO: 5064 - DNA, 22 bp, Artificial Sequence
  chemically synthesized
ctctttcttttctattaatttc

SEQ ID NO: 5065 - DNA, 22 bp, Artificial Sequence
  chemically synthesized
tttcttttctattaatttcctg

SEQ ID NO: 5066 - DNA, 22 bp, Artificial Sequence
  chemically synthesized
tcttttctattaatttcctgta

SEQ ID NO: 5067 - DNA, 22 bp, Artificial Sequence
  chemically synthesized
cttttctattaatttcctgtaa

SEQ ID NO: 5068 - DNA, 22 bp, Artificial Sequence
  chemically synthesized
ttttctattaatttcctgtaac

SEQ ID NO: 5069 - DNA, 22 bp, Artificial Sequence
  chemically synthesized
ttctattaatttcctgtaacac

SEQ ID NO: 5070 - DNA, 22 bp, Artificial Sequence
  chemically synthesized
tctattaatttcctgtaacact

SEQ ID NO: 5071 - DNA, 22 bp, Artificial Sequence
  chemically synthesized
ctattaatttcctgtaacacta

SEQ ID NO: 5072 - DNA, 22 bp, Artificial Sequence
  chemically synthesized
tattaatttcctgtaacactat

SEQ ID NO: 5073 - DNA, 22 bp, Artificial Sequence
  chemically synthesized
ttaatttcctgtaacactatca

SEQ ID NO: 5074 - DNA, 22 bp, Artificial Sequence
  chemically synthesized
atttcctgtaacactatcataa

SEQ ID NO: 5075 - DNA, 22 bp, Artificial Sequence
  chemically synthesized
cctgtaacactatcataatcta

SEQ ID NO: 5076 - DNA, 22 bp, Artificial Sequence
  chemically synthesized
ctgtaacactatcataatctaa

SEQ ID NO: 5077 - DNA, 22 bp, Artificial Sequence
  chemically synthesized
taacactatcataatctaaatt

SEQ ID NO: 5078 - DNA, 22 bp, Artificial Sequence
  chemically synthesized
tcataatctaaatttttaaact

SEQ ID NO: 5079 - DNA, 22 bp, Artificial Sequence
  chemically synthesized
aatttttaaactaataatggat

SEQ ID NO: 5080 - DNA, 22 bp, Artificial Sequence
  chemically synthesized
ttaaactaataatggatttgaa

SEQ ID NO: 5081 - DNA, 22 bp, Artificial Sequence
  chemically synthesized
taaactaataatggatttgaaa

SEQ ID NO: 5082 - DNA, 22 bp, Artificial Sequence
  chemically synthesized
aaactaataatggatttgaaaa

SEQ ID NO: 5083 - DNA, 22 bp, Artificial Sequence
  chemically synthesized
aactaataatggatttgaaaaa

SEQ ID NO: 5084 - DNA, 22 bp, Artificial Sequence
  chemically synthesized
ataatggatttgaaaaatgaat

SEQ ID NO: 5085 - DNA, 22 bp, Artificial Sequence
  chemically synthesized
gaaaaatgaatattggcaattc

SEQ ID NO: 5086 - DNA, 22 bp, Artificial Sequence
  chemically synthesized
aaaaatgaatattggcaattcc

SEQ ID NO: 5087 - DNA, 22 bp, Artificial Sequence
  chemically synthesized
gcaattccttccccttgtatgc

SEQ ID NO: 5088 - DNA, 22 bp, Artificial Sequence
  chemically synthesized
cttccccttgtatgcttctttc

SEQ ID NO: 5089 - DNA, 22 bp, Artificial Sequence
  chemically synthesized
ccccttgtatgcttctttcaaa

SEQ ID NO: 5090 - DNA, 22 bp, Artificial Sequence
  chemically synthesized
cccttgtatgcttctttcaaat

SEQ ID NO: 5091 - DNA, 22 bp, Artificial Sequence
  chemically synthesized
gtatgcttctttcaaatagcac

SEQ ID NO: 5092 - DNA, 22 bp, Artificial Sequence
  chemically synthesized
tatgcttctttcaaatagcaca

SEQ ID NO: 5093 - DNA, 22 bp, Artificial Sequence
  chemically synthesized
ctttcaaatagcacatattttt

SEQ ID NO: 5094 - DNA, 22 bp, Artificial Sequence
  chemically synthesized
tttcaaatagcacatatttttg

SEQ ID NO: 5095 - DNA, 22 bp, Artificial Sequence
  chemically synthesized
tcaaatagcacatatttttgtc

SEQ ID NO: 5096 - DNA, 22 bp, Artificial Sequence
  chemically synthesized
caaatagcacatatttttgtcc

SEQ ID NO: 5097 - DNA, 22 bp, Artificial Sequence
  chemically synthesized
aaatagcacatatttttgtcct

SEQ ID NO: 5098 - DNA, 22 bp, Artificial Sequence
  chemically synthesized
ttgtccttaacattttatttaa

SEQ ID NO: 5099 - DNA, 22 bp, Artificial Sequence
  chemically synthesized
tgtccttaacattttatttaaa

SEQ ID NO: 5100 - DNA, 22 bp, Artificial Sequence
  chemically synthesized
gtccttaacattttatttaaat

SEQ ID NO: 5101 - DNA, 22 bp, Artificial Sequence
  chemically synthesized
tccttaacattttatttaaatt

SEQ ID NO: 5102 - DNA, 22 bp, Artificial Sequence
  chemically synthesized
aacattttatttaaattgtact

SEQ ID NO: 5103 - DNA, 22 bp, Artificial Sequence
  chemically synthesized
acattttatttaaattgtacta

SEQ ID NO: 5104 - DNA, 22 bp, Artificial Sequence
  chemically synthesized
tatttaaattgtactatctcta

SEQ ID NO: 5105 - DNA, 22 bp, Artificial Sequence
  chemically synthesized
atttaaattgtactatctctaa

SEQ ID NO: 5106 - DNA, 22 bp, Artificial Sequence
  chemically synthesized
tttaaattgtactatctctaaa

SEQ ID NO: 5107 - DNA, 22 bp, Artificial Sequence
  chemically synthesized
aaattgtactatctctaaaatt

SEQ ID NO: 5108 - DNA, 22 bp, Artificial Sequence
  chemically synthesized
aattgtactatctctaaaattt

SEQ ID NO: 5109 - DNA, 22 bp, Artificial Sequence
  chemically synthesized
tactatctctaaaatttgattt

SEQ ID NO: 5110 - DNA, 22 bp, Artificial Sequence
  chemically synthesized
tctctaaaatttgattttctga

SEQ ID NO: 5111 - DNA, 22 bp, Artificial Sequence
  chemically synthesized
taaaatttgattttctgaactt

SEQ ID NO: 5112 - DNA, 22 bp, Artificial Sequence
  chemically synthesized
aaatttgattttctgaacttca

SEQ ID NO: 5113 - DNA, 22 bp, Artificial Sequence
  chemically synthesized
gattttctgaacttcaattaaa

SEQ ID NO: 5114 - DNA, 22 bp, Artificial Sequence
  chemically synthesized
attttctgaacttcaattaaaa

SEQ ID NO: 5115 - DNA, 22 bp, Artificial Sequence
  chemically synthesized
tctgaacttcaattaaaagaaa

SEQ ID NO: 5116 - DNA, 22 bp, Artificial Sequence
  chemically synthesized
ctgaacttcaattaaaagaaaa

SEQ ID NO: 5117 - DNA, 22 bp, Artificial Sequence
  chemically synthesized
tgaacttcaattaaaagaaaaa

SEQ ID NO: 5118 - DNA, 22 bp, Artificial Sequence
  chemically synthesized
aacttcaattaaaagaaaaagc

SEQ ID NO: 5119 - DNA, 22 bp, Artificial Sequence
  chemically synthesized
caattaaaagaaaaagcccagc

SEQ ID NO: 5120 - DNA, 22 bp, Artificial Sequence
  chemically synthesized
aattaaaagaaaaagcccagca

SEQ ID NO: 5121 - DNA, 22 bp, Artificial Sequence
  chemically synthesized
aaagaaaaagcccagcatattt

SEQ ID NO: 5122 - DNA, 22 bp, Artificial Sequence
  chemically synthesized
tcatatgaataaatcttttcca

SEQ ID NO: 5123 - DNA, 22 bp, Artificial Sequence
  chemically synthesized
catatgaataaatcttttccat

SEQ ID NO: 5124 - DNA, 22 bp, Artificial Sequence
  chemically synthesized
atatgaataaatcttttccatt

SEQ ID NO: 5125 - DNA, 22 bp, Artificial Sequence
  chemically synthesized
ttccatttactgtattatttaa

SEQ ID NO: 5126 - DNA, 22 bp, Artificial Sequence
  chemically synthesized
tccatttactgtattatttaat

SEQ ID NO: 5127 - DNA, 22 bp, Artificial Sequence
  chemically synthesized
ccatttactgtattatttaatc

SEQ ID NO: 5128 - DNA, 22 bp, Artificial Sequence
  chemically synthesized
catttactgtattatttaatct

SEQ ID NO: 5129 - DNA, 22 bp, Artificial Sequence
  chemically synthesized
actgtattatttaatctgtttt

SEQ ID NO: 5130 - DNA, 22 bp, Artificial Sequence
  chemically synthesized
ctgtattatttaatctgtttta

SEQ ID NO: 5131 - DNA, 22 bp, Artificial Sequence
  chemically synthesized
tattatttaatctgttttaaac

SEQ ID NO: 5132 - DNA, 22 bp, Artificial Sequence
  chemically synthesized
tttaatctgttttaaacactgg

SEQ ID NO: 5133 - DNA, 22 bp, Artificial Sequence
  chemically synthesized
aatctgttttaaacactggaga

SEQ ID NO: 5134 - DNA, 22 bp, Artificial Sequence
  chemically synthesized
atctgttttaaacactggagaa

SEQ ID NO: 5135 - DNA, 22 bp, Artificial Sequence
  chemically synthesized
ttttaaacactggagaatagtt

SEQ ID NO: 5136 - DNA, 22 bp, Artificial Sequence
  chemically synthesized
taaacactggagaatagtttta

SEQ ID NO: 5137 - DNA, 22 bp, Artificial Sequence
  chemically synthesized
aaacactggagaatagttttaa

SEQ ID NO: 5138 - DNA, 22 bp, Artificial Sequence
  chemically synthesized
aacactggagaatagttttaaa

SEQ ID NO: 5139 - DNA, 22 bp, Artificial Sequence
  chemically synthesized
gagaatagttttaaattttttt

SEQ ID NO: 5140 - DNA, 22 bp, Artificial Sequence
  chemically synthesized
taaattttttttaactttttac

SEQ ID NO: 5141 - DNA, 22 bp, Artificial Sequence
  chemically synthesized
aaattttttttaactttttact

SEQ ID NO: 5142 - DNA, 22 bp, Artificial Sequence
  chemically synthesized
aattttttttaactttttactt

SEQ ID NO: 5143 - DNA, 22 bp, Artificial Sequence
  chemically synthesized
tttttaactttttacttacctt

SEQ ID NO: 5144 - DNA, 22 bp, Artificial Sequence
  chemically synthesized
ttttaactttttacttaccttc

SEQ ID NO: 5145 - DNA, 22 bp, Artificial Sequence
  chemically synthesized
tttaactttttacttaccttca

SEQ ID NO: 5146 - DNA, 22 bp, Artificial Sequence
  chemically synthesized
ttaactttttacttaccttcag

SEQ ID NO: 5147 - DNA, 22 bp, Artificial Sequence
  chemically synthesized
taactttttacttaccttcagt

SEQ ID NO: 5148 - DNA, 22 bp, Artificial Sequence
  chemically synthesized
aactttttacttaccttcagta

SEQ ID NO: 5149 - DNA, 22 bp, Artificial Sequence
  chemically synthesized
actttttacttaccttcagtaa

SEQ ID NO: 5150 - DNA, 22 bp, Artificial Sequence
  chemically synthesized
tttacttaccttcagtaattta

SEQ ID NO: 5151 - DNA, 22 bp, Artificial Sequence
  chemically synthesized
ttacttaccttcagtaatttac

SEQ ID NO: 5152 - DNA, 22 bp, Artificial Sequence
  chemically synthesized
tacttaccttcagtaatttaca

SEQ ID NO: 5153 - DNA, 22 bp, Artificial Sequence
  chemically synthesized
acttaccttcagtaatttacaa

SEQ ID NO: 5154 - DNA, 22 bp, Artificial Sequence
  chemically synthesized
cttaccttcagtaatttacaat

SEQ ID NO: 5155 - DNA, 22 bp, Artificial Sequence
  chemically synthesized
accttcagtaatttacaatagt

SEQ ID NO: 5156 - DNA, 22 bp, Artificial Sequence
  chemically synthesized
ccttcagtaatttacaatagtg

SEQ ID NO: 5157 - DNA, 22 bp, Artificial Sequence
  chemically synthesized
cagtaatttacaatagtgtaat

SEQ ID NO: 5158 - DNA, 22 bp, Artificial Sequence
  chemically synthesized
agtaatttacaatagtgtaatg

SEQ ID NO: 5159 - DNA, 22 bp, Artificial Sequence
  chemically synthesized
acaatagtgtaatgacatagtg

SEQ ID NO: 5160 - DNA, 22 bp, Artificial Sequence
  chemically synthesized
caatagtgtaatgacatagtgt

SEQ ID NO: 5161 - DNA, 22 bp, Artificial Sequence
  chemically synthesized
tagattgtataatttaaccgat

SEQ ID NO: 5162 - DNA, 22 bp, Artificial Sequence
  chemically synthesized
gattgtataatttaaccgattt

SEQ ID NO: 5163 - DNA, 22 bp, Artificial Sequence
  chemically synthesized
tataatttaaccgatttgtaat

SEQ ID NO: 5164 - DNA, 22 bp, Artificial Sequence
  chemically synthesized
aaccgatttgtaattttcatat

SEQ ID NO: 5165 - DNA, 22 bp, Artificial Sequence
  chemically synthesized
accgatttgtaattttcatata

SEQ ID NO: 5166 - DNA, 22 bp, Artificial Sequence
  chemically synthesized
gtaattttcatataaaatgcaa

SEQ ID NO: 5167 - DNA, 22 bp, Artificial Sequence
  chemically synthesized
taattttcatataaaatgcaaa

SEQ ID NO: 5168 - DNA, 22 bp, Artificial Sequence
  chemically synthesized
tcatataaaatgcaaattttca

SEQ ID NO: 5169 - DNA, 22 bp, Artificial Sequence
  chemically synthesized
catataaaatgcaaattttcag

SEQ ID NO: 5170 - DNA, 22 bp, Artificial Sequence
  chemically synthesized
atataaaatgcaaattttcagt

SEQ ID NO: 5171 - DNA, 22 bp, Artificial Sequence
  chemically synthesized
tcagtgttttcatatataacat

SEQ ID NO: 5172 - DNA, 22 bp, Artificial Sequence
  chemically synthesized
cagtgttttcatatataacatt

SEQ ID NO: 5173 - DNA, 22 bp, Artificial Sequence
  chemically synthesized
agtgttttcatatataacatta

SEQ ID NO: 5174 - DNA, 22 bp, Artificial Sequence
  chemically synthesized
tcatatataacattagggaaac

SEQ ID NO: 5175 - DNA, 22 bp, Artificial Sequence
  chemically synthesized
catatataacattagggaaaca

SEQ ID NO: 5176 - DNA, 22 bp, Artificial Sequence
  chemically synthesized
atatataacattagggaaacaa

SEQ ID NO: 5177 - DNA, 22 bp, Artificial Sequence
  chemically synthesized
gggaaacaaaaaactaacttga

SEQ ID NO: 5178 - DNA, 22 bp, Artificial Sequence
  chemically synthesized
acttgaaattataataggaaat

SEQ ID NO: 5179 - DNA, 22 bp, Artificial Sequence
  chemically synthesized
gaaattataataggaaatttta

SEQ ID NO: 5180 - DNA, 22 bp, Artificial Sequence
  chemically synthesized
aaattataataggaaattttat

SEQ ID NO: 5181 - DNA, 22 bp, Artificial Sequence
  chemically synthesized
taataggaaattttattttctg

SEQ ID NO: 5182 - DNA, 22 bp, Artificial Sequence
  chemically synthesized
tattttctggagattatttttc

SEQ ID NO: 5183 - DNA, 22 bp, Artificial Sequence
  chemically synthesized
attttctggagattatttttct

SEQ ID NO: 5184 - DNA, 22 bp, Artificial Sequence
  chemically synthesized
ttttctggagattatttttctt

SEQ ID NO: 5185 - DNA, 22 bp, Artificial Sequence
  chemically synthesized
tctggagattatttttcttgga

SEQ ID NO: 5186 - DNA, 22 bp, Artificial Sequence
  chemically synthesized
ctggagattatttttcttggaa

SEQ ID NO: 5187 - DNA, 22 bp, Artificial Sequence
  chemically synthesized
tggagattatttttcttggaaa

SEQ ID NO: 5188 - DNA, 22 bp, Artificial Sequence
  chemically synthesized
gagattatttttcttggaaaaa

SEQ ID NO: 5189 - DNA, 22 bp, Artificial Sequence
  chemically synthesized
tttttcttggaaaaaaaagtat

SEQ ID NO: 5190 - DNA, 22 bp, Artificial Sequence
  chemically synthesized
ttcttggaaaaaaaagtatttc

SEQ ID NO: 5191 - DNA, 22 bp, Artificial Sequence
  chemically synthesized
tcttggaaaaaaaagtatttca

SEQ ID NO: 5192 - DNA, 22 bp, Artificial Sequence
  chemically synthesized
cttggaaaaaaaagtatttcaa

SEQ ID NO: 5193 - DNA, 22 bp, Artificial Sequence
  chemically synthesized
ttggaaaaaaaagtatttcaac

SEQ ID NO: 5194 - DNA, 22 bp, Artificial Sequence
  chemically synthesized
ggaaaaaaaagtatttcaacaa

SEQ ID NO: 5195 - DNA, 22 bp, Artificial Sequence
  chemically synthesized
gaaaaaaaagtatttcaacaat

SEQ ID NO: 5196 - DNA, 22 bp, Artificial Sequence
  chemically synthesized
caacaatgcaacaaagtatttc

SEQ ID NO: 5197 - DNA, 22 bp, Artificial Sequence
  chemically synthesized
aacaatgcaacaaagtatttca

SEQ ID NO: 5198 - DNA, 22 bp, Artificial Sequence
  chemically synthesized
caaatggcatgccttagaaata

SEQ ID NO: 5199 - DNA, 22 bp, Artificial Sequence
  chemically synthesized
aaatggcatgccttagaaatat

SEQ ID NO: 5200 - DNA, 22 bp, Artificial Sequence
  chemically synthesized
agaaatattttttttaaaagat

SEQ ID NO: 5201 - DNA, 22 bp, Artificial Sequence
  chemically synthesized
gaaatattttttttaaaagatc

SEQ ID NO: 5202 - DNA, 22 bp, Artificial Sequence
  chemically synthesized
tttttaaaagatccacattgaa

SEQ ID NO: 5203 - DNA, 22 bp, Artificial Sequence
  chemically synthesized
ttttaaaagatccacattgaaa

SEQ ID NO: 5204 - DNA, 22 bp, Artificial Sequence
  chemically synthesized
tttaaaagatccacattgaaaa

SEQ ID NO: 5205 - DNA, 22 bp, Artificial Sequence
  chemically synthesized
ttaaaagatccacattgaaaac

SEQ ID NO: 5206 - DNA, 22 bp, Artificial Sequence
  chemically synthesized
taaaagatccacattgaaaaca

SEQ ID NO: 5207 - DNA, 22 bp, Artificial Sequence
  chemically synthesized
aaaagatccacattgaaaacat

SEQ ID NO: 5208 - DNA, 22 bp, Artificial Sequence
  chemically synthesized
aaagatccacattgaaaacata

SEQ ID NO: 5209 - DNA, 22 bp, Artificial Sequence
  chemically synthesized
aaaacataaacatgaaccctct

SEQ ID NO: 5210 - DNA, 22 bp, Artificial Sequence
  chemically synthesized
tttattttctacttactttaag

SEQ ID NO: 5211 - DNA, 22 bp, Artificial Sequence
  chemically synthesized
tattttctacttactttaagtg

SEQ ID NO: 5212 - DNA, 22 bp, Artificial Sequence
  chemically synthesized
attttctacttactttaagtga

SEQ ID NO: 5213 - DNA, 22 bp, Artificial Sequence
  chemically synthesized
ttttctacttactttaagtgaa

SEQ ID NO: 5214 - DNA, 22 bp, Artificial Sequence
  chemically synthesized
tctacttactttaagtgaagtt

SEQ ID NO: 5215 - DNA, 22 bp, Artificial Sequence
  chemically synthesized
ctacttactttaagtgaagtta

SEQ ID NO: 5216 - DNA, 22 bp, Artificial Sequence
  chemically synthesized
tacttactttaagtgaagttac

SEQ ID NO: 5217 - DNA, 22 bp, Artificial Sequence
  chemically synthesized
cttactttaagtgaagttactt

SEQ ID NO: 5218 - DNA, 22 bp, Artificial Sequence
  chemically synthesized
actttaagtgaagttacttctg

SEQ ID NO: 5219 - DNA, 22 bp, Artificial Sequence
  chemically synthesized
ctttaagtgaagttacttctgg

SEQ ID NO: 5220 - DNA, 22 bp, Artificial Sequence
  chemically synthesized
taagtgaagttacttctgggtg

SEQ ID NO: 5221 - DNA, 22 bp, Artificial Sequence
  chemically synthesized
aagtgaagttacttctgggtgt

SEQ ID NO: 5222 - DNA, 22 bp, Artificial Sequence
  chemically synthesized
agtgaagttacttctgggtgtt

SEQ ID NO: 5223 - DNA, 22 bp, Artificial Sequence
  chemically synthesized
cttctgggtgttctggagtttc

SEQ ID NO: 5224 - DNA, 22 bp, Artificial Sequence
  chemically synthesized
ctgggtgttctggagtttcagg

SEQ ID NO: 5225 - DNA, 22 bp, Artificial Sequence
  chemically synthesized
tgggtgttctggagtttcaggt

SEQ ID NO: 5226 - DNA, 22 bp, Artificial Sequence
  chemically synthesized
ggtgttctggagtttcaggttg

SEQ ID NO: 5227 - DNA, 22 bp, Artificial Sequence
  chemically synthesized
tggagtttcaggttgattttga

SEQ ID NO: 5228 - DNA, 22 bp, Artificial Sequence
  chemically synthesized
gagtttcaggttgattttgaat

SEQ ID NO: 5229 - DNA, 22 bp, Artificial Sequence
  chemically synthesized
caggttgattttgaattaagtt

SEQ ID NO: 5230 - DNA, 22 bp, Artificial Sequence
  chemically synthesized
aggttgattttgaattaagtta

SEQ ID NO: 5231 - DNA, 22 bp, Artificial Sequence
  chemically synthesized
attttgaattaagttagttagt

SEQ ID NO: 5232 - DNA, 22 bp, Artificial Sequence
  chemically synthesized
tgaattaagttagttagttgct

SEQ ID NO: 5233 - DNA, 22 bp, Artificial Sequence
  chemically synthesized
gaattaagttagttagttgctc

SEQ ID NO: 5234 - DNA, 22 bp, Artificial Sequence
  chemically synthesized
aattaagttagttagttgctct

SEQ ID NO: 5235 - DNA, 22 bp, Artificial Sequence
  chemically synthesized
agttagttagttgctcttctaa

SEQ ID NO: 5236 - DNA, 22 bp, Artificial Sequence
  chemically synthesized
gttagttgctcttctaaatatt

SEQ ID NO: 5237 - DNA, 22 bp, Artificial Sequence
  chemically synthesized
gttgctcttctaaatatttcac

SEQ ID NO: 5238 - DNA, 22 bp, Artificial Sequence
  chemically synthesized
ctcttctaaatatttcactttt

SEQ ID NO: 5239 - DNA, 22 bp, Artificial Sequence
  chemically synthesized
ttctaaatatttcactttttgt

SEQ ID NO: 5240 - DNA, 22 bp, Artificial Sequence
  chemically synthesized
ctaaatatttcactttttgttg

SEQ ID NO: 5241 - DNA, 22 bp, Artificial Sequence
  chemically synthesized
taaatatttcactttttgttga

SEQ ID NO: 5242 - DNA, 22 bp, Artificial Sequence
  chemically synthesized
aatatttcactttttgttgaag

SEQ ID NO: 5243 - DNA, 22 bp, Artificial Sequence
  chemically synthesized
cactttttgttgaagtagaatt

SEQ ID NO: 5244 - DNA, 22 bp, Artificial Sequence
  chemically synthesized
actttttgttgaagtagaattt

SEQ ID NO: 5245 - DNA, 22 bp, Artificial Sequence
  chemically synthesized
tttgttgaagtagaattttttc

SEQ ID NO: 5246 - DNA, 22 bp, Artificial Sequence
  chemically synthesized
ttgttgaagtagaattttttct

SEQ ID NO: 5247 - DNA, 22 bp, Artificial Sequence
  chemically synthesized
tgttgaagtagaattttttctt

SEQ ID NO: 5248 - DNA, 22 bp, Artificial Sequence
  chemically synthesized
gttgaagtagaattttttcttc

SEQ ID NO: 5249 - DNA, 22 bp, Artificial Sequence
  chemically synthesized
ttgaagtagaattttttcttct

SEQ ID NO: 5250 - DNA, 22 bp, Artificial Sequence
  chemically synthesized
aagtagaattttttcttctagg

SEQ ID NO: 5251 - DNA, 22 bp, Artificial Sequence
  chemically synthesized
tttcttctaggaggctttcaag

SEQ ID NO: 5252 - DNA, 22 bp, Artificial Sequence
  chemically synthesized
ttcttctaggaggctttcaagt

SEQ ID NO: 5253 - DNA, 22 bp, Artificial Sequence
  chemically synthesized
tcttctaggaggctttcaagtt

SEQ ID NO: 5254 - DNA, 22 bp, Artificial Sequence
  chemically synthesized
cttctaggaggctttcaagttt

SEQ ID NO: 5255 - DNA, 22 bp, Artificial Sequence
  chemically synthesized
ttctaggaggctttcaagtttt

SEQ ID NO: 5256 - DNA, 22 bp, Artificial Sequence
  chemically synthesized
ctaggaggctttcaagttttga

SEQ ID NO: 5257 - DNA, 22 bp, Artificial Sequence
  chemically synthesized
taggaggctttcaagttttgag

SEQ ID NO: 5258 - DNA, 22 bp, Artificial Sequence
  chemically synthesized
ggaggctttcaagttttgagtt

SEQ ID NO: 5259 - DNA, 22 bp, Artificial Sequence
  chemically synthesized
tcaagttttgagttgagttcaa

SEQ ID NO: 5260 - DNA, 22 bp, Artificial Sequence
  chemically synthesized
caagttttgagttgagttcaag

SEQ ID NO: 5261 - DNA, 22 bp, Artificial Sequence
  chemically synthesized
aagttttgagttgagttcaagt

SEQ ID NO: 5262 - DNA, 22 bp, Artificial Sequence
  chemically synthesized
tgagttgagttcaagtgacata

SEQ ID NO: 5263 - DNA, 22 bp, Artificial Sequence
  chemically synthesized
gagttgagttcaagtgacatat

SEQ ID NO: 5264 - DNA, 22 bp, Artificial Sequence
  chemically synthesized
agttgagttcaagtgacatatt

SEQ ID NO: 5265 - DNA, 22 bp, Artificial Sequence
  chemically synthesized
agttcaagtgacatattcttta

SEQ ID NO: 5266 - DNA, 22 bp, Artificial Sequence
  chemically synthesized
aagtgacatattctttacctct

SEQ ID NO: 5267 - DNA, 22 bp, Artificial Sequence
  chemically synthesized
tttacctcttcatttttgactt

SEQ ID NO: 5268 - DNA, 22 bp, Artificial Sequence
  chemically synthesized
tacctcttcatttttgacttgt

SEQ ID NO: 5269 - DNA, 22 bp, Artificial Sequence
  chemically synthesized
acctcttcatttttgacttgta

SEQ ID NO: 5270 - DNA, 22 bp, Artificial Sequence
  chemically synthesized
cctcttcatttttgacttgtag

SEQ ID NO: 5271 - DNA, 22 bp, Artificial Sequence
  chemically synthesized
ttcatttttgacttgtagttta

SEQ ID NO: 5272 - DNA, 22 bp, Artificial Sequence
  chemically synthesized
catttttgacttgtagtttata

SEQ ID NO: 5273 - DNA, 22 bp, Artificial Sequence
  chemically synthesized
atttttgacttgtagtttatat

SEQ ID NO: 5274 - DNA, 22 bp, Artificial Sequence
  chemically synthesized
ttgacttgtagtttatatgtag

SEQ ID NO: 5275 - DNA, 22 bp, Artificial Sequence
  chemically synthesized
tgacttgtagtttatatgtagt

SEQ ID NO: 5276 - DNA, 22 bp, Artificial Sequence
  chemically synthesized
gacttgtagtttatatgtagtt

SEQ ID NO: 5277 - DNA, 22 bp, Artificial Sequence
  chemically synthesized
acttgtagtttatatgtagttc

SEQ ID NO: 5278 - DNA, 22 bp, Artificial Sequence
  chemically synthesized
gtagtttatatgtagttcttct

SEQ ID NO: 5279 - DNA, 22 bp, Artificial Sequence
  chemically synthesized
tagtttatatgtagttcttctc

SEQ ID NO: 5280 - DNA, 22 bp, Artificial Sequence
  chemically synthesized
atatgtagttcttctcagttcc

SEQ ID NO: 5281 - DNA, 22 bp, Artificial Sequence
  chemically synthesized
tatgtagttcttctcagttcct

SEQ ID NO: 5282 - DNA, 22 bp, Artificial Sequence
  chemically synthesized
ttctcagttccttttcttcttc

SEQ ID NO: 5283 - DNA, 22 bp, Artificial Sequence
  chemically synthesized
ctcagttccttttcttcttctt

SEQ ID NO: 5284 - DNA, 22 bp, Artificial Sequence
  chemically synthesized
tcagttccttttcttcttcttt

SEQ ID NO: 5285 - DNA, 22 bp, Artificial Sequence
  chemically synthesized
agttccttttcttcttctttga

SEQ ID NO: 5286 - DNA, 22 bp, Artificial Sequence
  chemically synthesized
cttttcttcttctttgatttca

SEQ ID NO: 5287 - DNA, 22 bp, Artificial Sequence
  chemically synthesized
ttcttcttctttgatttcactg

SEQ ID NO: 5288 - DNA, 22 bp, Artificial Sequence
  chemically synthesized
tcttcttctttgatttcactgg

SEQ ID NO: 5289 - DNA, 22 bp, Artificial Sequence
  chemically synthesized
cttcttctttgatttcactggt

SEQ ID NO: 5290 - DNA, 22 bp, Artificial Sequence
  chemically synthesized
ttcttctttgatttcactggtt

SEQ ID NO: 5291 - DNA, 22 bp, Artificial Sequence
  chemically synthesized
cttctttgatttcactggtttg

SEQ ID NO: 5292 - DNA, 22 bp, Artificial Sequence
  chemically synthesized
ttctttgatttcactggtttgc

SEQ ID NO: 5293 - DNA, 22 bp, Artificial Sequence
  chemically synthesized
ctttgatttcactggtttgcag

SEQ ID NO: 5294 - DNA, 22 bp, Artificial Sequence
  chemically synthesized
tttgatttcactggtttgcagc

SEQ ID NO: 5295 - DNA, 22 bp, Artificial Sequence
  chemically synthesized
tgatttcactggtttgcagcga

SEQ ID NO: 5296 - DNA, 22 bp, Artificial Sequence
  chemically synthesized
gatttcactggtttgcagcgat

SEQ ID NO: 5297 - DNA, 22 bp, Artificial Sequence
  chemically synthesized
atttcactggtttgcagcgata

SEQ ID NO: 5298 - DNA, 22 bp, Artificial Sequence
  chemically synthesized
cactggtttgcagcgatagatc

SEQ ID NO: 5299 - DNA, 22 bp, Artificial Sequence
  chemically synthesized
actggtttgcagcgatagatca

SEQ ID NO: 5300 - DNA, 22 bp, Artificial Sequence
  chemically synthesized
gtttgcagcgatagatcataaa

SEQ ID NO: 5301 - DNA, 22 bp, Artificial Sequence
  chemically synthesized
gcagcgatagatcataaaaaga

SEQ ID NO: 5302 - DNA, 22 bp, Artificial Sequence
  chemically synthesized
cagcgatagatcataaaaagac

SEQ ID NO: 5303 - DNA, 22 bp, Artificial Sequence
  chemically synthesized
atcaaatatgttgagtttttga

SEQ ID NO: 5304 - DNA, 22 bp, Artificial Sequence
  chemically synthesized
agtttttgaaatatgtcattaa

SEQ ID NO: 5305 - DNA, 22 bp, Artificial Sequence
  chemically synthesized
ttgaaatatgtcattaatttgg

SEQ ID NO: 5306 - DNA, 22 bp, Artificial Sequence
  chemically synthesized
tgaaatatgtcattaatttggc

SEQ ID NO: 5307 - DNA, 22 bp, Artificial Sequence
  chemically synthesized
gaaatatgtcattaatttggcc

SEQ ID NO: 5308 - DNA, 22 bp, Artificial Sequence
  chemically synthesized
aaatatgtcattaatttggccc

SEQ ID NO: 5309 - DNA, 22 bp, Artificial Sequence
  chemically synthesized
atttggcccttcgtcttatgga

SEQ ID NO: 5310 - DNA, 22 bp, Artificial Sequence
  chemically synthesized
ggcccttcgtcttatggacaaa

SEQ ID NO: 5311 - DNA, 22 bp, Artificial Sequence
  chemically synthesized
gcccttcgtcttatggacaaag

SEQ ID NO: 5312 - DNA, 22 bp, Artificial Sequence
  chemically synthesized
cgtcttatggacaaagtcttta

SEQ ID NO: 5313 - DNA, 22 bp, Artificial Sequence
  chemically synthesized
gtcttatggacaaagtctttaa

SEQ ID NO: 5314 - DNA, 22 bp, Artificial Sequence
  chemically synthesized
atggacaaagtctttaagacca

SEQ ID NO: 5315 - DNA, 22 bp, Artificial Sequence
  chemically synthesized
tggacaaagtctttaagaccat

SEQ ID NO: 5316 - DNA, 22 bp, Artificial Sequence
  chemically synthesized
taagaccatgtcccaactgaag

SEQ ID NO: 5317 - DNA, 22 bp, Artificial Sequence
  chemically synthesized
aagaccatgtcccaactgaagg

SEQ ID NO: 5318 - DNA, 22 bp, Artificial Sequence
  chemically synthesized
agaccatgtcccaactgaagga

SEQ ID NO: 5319 - DNA, 22 bp, Artificial Sequence
  chemically synthesized
aaggaggccattggctaaaatt

SEQ ID NO: 5320 - DNA, 22 bp, Artificial Sequence
  chemically synthesized
gctaaaatttttacatcgtcta

SEQ ID NO: 5321 - DNA, 22 bp, Artificial Sequence
  chemically synthesized
aaatttttacatcgtctaacat

SEQ ID NO: 5322 - DNA, 22 bp, Artificial Sequence
  chemically synthesized
ttacatcgtctaacatagcaaa

SEQ ID NO: 5323 - DNA, 22 bp, Artificial Sequence
  chemically synthesized
tacatcgtctaacatagcaaat

SEQ ID NO: 5324 - DNA, 22 bp, Artificial Sequence
  chemically synthesized
acatcgtctaacatagcaaatc

SEQ ID NO: 5325 - DNA, 22 bp, Artificial Sequence
  chemically synthesized
catcgtctaacatagcaaatct

SEQ ID NO: 5326 - DNA, 22 bp, Artificial Sequence
  chemically synthesized
acatagcaaatcttgattttgg

SEQ ID NO: 5327 - DNA, 22 bp, Artificial Sequence
  chemically synthesized
gattttggctctggagatagag

SEQ ID NO: 5328 - DNA, 22 bp, Artificial Sequence
  chemically synthesized
attttggctctggagatagaga

SEQ ID NO: 5329 - DNA, 22 bp, Artificial Sequence
  chemically synthesized
tggctctggagatagagaatca

SEQ ID NO: 5330 - DNA, 22 bp, Artificial Sequence
  chemically synthesized
ggctctggagatagagaatcaa

SEQ ID NO: 5331 - DNA, 22 bp, Artificial Sequence
  chemically synthesized
gctctggagatagagaatcaaa

SEQ ID NO: 5332 - DNA, 22 bp, Artificial Sequence
  chemically synthesized
tggagatagagaatcaaatgat

SEQ ID NO: 5333 - DNA, 22 bp, Artificial Sequence
  chemically synthesized
gagatagagaatcaaatgatga

SEQ ID NO: 5334 - DNA, 22 bp, Artificial Sequence
  chemically synthesized
tcttgatcaattctggaggaaa

SEQ ID NO: 5335 - DNA, 22 bp, Artificial Sequence
  chemically synthesized
gatcaattctggaggaaataac

SEQ ID NO: 5336 - DNA, 22 bp, Artificial Sequence
  chemically synthesized
atcaattctggaggaaataact

SEQ ID NO: 5337 - DNA, 22 bp, Artificial Sequence
  chemically synthesized
tggaggaaataactagaggaac

SEQ ID NO: 5338 - DNA, 22 bp, Artificial Sequence
  chemically synthesized
gaggaaataactagaggaacaa

SEQ ID NO: 5339 - DNA, 22 bp, Artificial Sequence
  chemically synthesized
gaggaacaataaaaagaaggag

SEQ ID NO: 5340 - DNA, 22 bp, Artificial Sequence
  chemically synthesized
aattgtgaacatttttatcttg

SEQ ID NO: 5341 - DNA, 22 bp, Artificial Sequence
  chemically synthesized
attgtgaacatttttatcttga

SEQ ID NO: 5342 - DNA, 22 bp, Artificial Sequence
  chemically synthesized
tgaacatttttatcttgatttt

SEQ ID NO: 5343 - DNA, 22 bp, Artificial Sequence
  chemically synthesized
ttatcttgattttcaatttcaa

SEQ ID NO: 5344 - DNA, 22 bp, Artificial Sequence
  chemically synthesized
tatcttgattttcaatttcaag

SEQ ID NO: 5345 - DNA, 22 bp, Artificial Sequence
  chemically synthesized
atcttgattttcaatttcaagc

SEQ ID NO: 5346 - DNA, 22 bp, Artificial Sequence
  chemically synthesized
tcttgattttcaatttcaagca

SEQ ID NO: 5347 - DNA, 22 bp, Artificial Sequence
  chemically synthesized
gattttcaatttcaagcaacgt

SEQ ID NO: 5348 - DNA, 22 bp, Artificial Sequence
  chemically synthesized
attttcaatttcaagcaacgtg

SEQ ID NO: 5349 - DNA, 22 bp, Artificial Sequence
  chemically synthesized
tcaatttcaagcaacgtggaac

SEQ ID NO: 5350 - DNA, 22 bp, Artificial Sequence
  chemically synthesized
caatttcaagcaacgtggaact

SEQ ID NO: 5351 - DNA, 22 bp, Artificial Sequence
  chemically synthesized
aatttcaagcaacgtggaactg

SEQ ID NO: 5352 - DNA, 22 bp, Artificial Sequence
  chemically synthesized
caagcaacgtggaactgttttc

SEQ ID NO: 5353 - DNA, 22 bp, Artificial Sequence
  chemically synthesized
aagcaacgtggaactgttttct

SEQ ID NO: 5354 - DNA, 22 bp, Artificial Sequence
  chemically synthesized
ttttcttctggaagcagaccta

SEQ ID NO: 5355 - DNA, 22 bp, Artificial Sequence
  chemically synthesized
tcttctggaagcagacctagac

SEQ ID NO: 5356 - DNA, 22 bp, Artificial Sequence
  chemically synthesized
cttctggaagcagacctagact

SEQ ID NO: 5357 - DNA, 22 bp, Artificial Sequence
  chemically synthesized
ttctggaagcagacctagactt

SEQ ID NO: 5358 - DNA, 22 bp, Artificial Sequence
  chemically synthesized
ctggaagcagacctagacttct

SEQ ID NO: 5359 - DNA, 22 bp, Artificial Sequence
  chemically synthesized
tggaagcagacctagacttctt

SEQ ID NO: 5360 - DNA, 22 bp, Artificial Sequence
  chemically synthesized
gaagcagacctagacttcttaa

SEQ ID NO: 5361 - DNA, 22 bp, Artificial Sequence
  chemically synthesized
gacttcttaactctatatatac

SEQ ID NO: 5362 - DNA, 22 bp, Artificial Sequence
  chemically synthesized
cttaactctatatataccaata

SEQ ID NO: 5363 - DNA, 22 bp, Artificial Sequence
  chemically synthesized
ttaactctatatataccaatat

SEQ ID NO: 5364 - DNA, 22 bp, Artificial Sequence
  chemically synthesized
aactctatatataccaatattt

SEQ ID NO: 5365 - DNA, 22 bp, Artificial Sequence
  chemically synthesized
actctatatataccaatatttg

SEQ ID NO: 5366 - DNA, 22 bp, Artificial Sequence
  chemically synthesized
tatatataccaatatttgccca

SEQ ID NO: 5367 - DNA, 22 bp, Artificial Sequence
  chemically synthesized
tatataccaatatttgcccaga

SEQ ID NO: 5368 - DNA, 22 bp, Artificial Sequence
  chemically synthesized
gcccagaaaaggtaaggttggt

SEQ ID NO: 5369 - DNA, 22 bp, Artificial Sequence
  chemically synthesized
cccagaaaaggtaaggttggta

SEQ ID NO: 5370 - DNA, 22 bp, Artificial Sequence
  chemically synthesized
gtaggtgaacatagttaatcat

SEQ ID NO: 5371 - DNA, 22 bp, Artificial Sequence
  chemically synthesized
atcattaagccgtgttaacttg

SEQ ID NO: 5372 - DNA, 22 bp, Artificial Sequence
  chemically synthesized
agccgtgttaacttgcacgaat

SEQ ID NO: 5373 - DNA, 22 bp, Artificial Sequence
  chemically synthesized
acttgcacgaatgtaaccttct

SEQ ID NO: 5374 - DNA, 22 bp, Artificial Sequence
  chemically synthesized
gcacgaatgtaaccttcttcca

SEQ ID NO: 5375 - DNA, 22 bp, Artificial Sequence
  chemically synthesized
cacgaatgtaaccttcttccac

SEQ ID NO: 5376 - DNA, 22 bp, Artificial Sequence
  chemically synthesized
cttccacattgagttagatcaa

SEQ ID NO: 5377 - DNA, 22 bp, Artificial Sequence
  chemically synthesized
ttccacattgagttagatcaat

SEQ ID NO: 5378 - DNA, 22 bp, Artificial Sequence
  chemically synthesized
ccacattgagttagatcaatgc

SEQ ID NO: 5379 - DNA, 22 bp, Artificial Sequence
  chemically synthesized
cacattgagttagatcaatgct

SEQ ID NO: 5380 - DNA, 22 bp, Artificial Sequence
  chemically synthesized
agttagatcaatgctaaatgaa

SEQ ID NO: 5381 - DNA, 22 bp, Artificial Sequence
  chemically synthesized
gatcaatgctaaatgaaatcaa

SEQ ID NO: 5382 - DNA, 22 bp, Artificial Sequence
  chemically synthesized
aatgaaatcaaagaaatgagca

SEQ ID NO: 5383 - DNA, 22 bp, Artificial Sequence
  chemically synthesized
acttaataggtaatttgaaatt

SEQ ID NO: 5384 - DNA, 22 bp, Artificial Sequence
  chemically synthesized
aataggtaatttgaaattgtat

SEQ ID NO: 5385 - DNA, 22 bp, Artificial Sequence
  chemically synthesized
ataggtaatttgaaattgtatt

SEQ ID NO: 5386 - DNA, 22 bp, Artificial Sequence
  chemically synthesized
gaaattgtatttaactttgctg

SEQ ID NO: 5387 - DNA, 22 bp, Artificial Sequence
  chemically synthesized
aaattgtatttaactttgctgt

SEQ ID NO: 5388 - DNA, 22 bp, Artificial Sequence
  chemically synthesized
tatttaactttgctgtattata

SEQ ID NO: 5389 - DNA, 22 bp, Artificial Sequence
  chemically synthesized
aactttgctgtattataaacta

SEQ ID NO: 5390 - DNA, 22 bp, Artificial Sequence
  chemically synthesized
actttgctgtattataaactac

SEQ ID NO: 5391 - DNA, 22 bp, Artificial Sequence
  chemically synthesized
tgctgtattataaactacacat

SEQ ID NO: 5392 - DNA, 22 bp, Artificial Sequence
  chemically synthesized
gctgtattataaactacacatt

SEQ ID NO: 5393 - DNA, 22 bp, Artificial Sequence
  chemically synthesized
ctgtattataaactacacattc

SEQ ID NO: 5394 - DNA, 22 bp, Artificial Sequence
  chemically synthesized
tattataaactacacattcaat

SEQ ID NO: 5395 - DNA, 22 bp, Artificial Sequence
  chemically synthesized
taaactacacattcaatgctat

SEQ ID NO: 5396 - DNA, 22 bp, Artificial Sequence
  chemically synthesized
cacattcaatgctatggtgact

SEQ ID NO: 5397 - DNA, 22 bp, Artificial Sequence
  chemically synthesized
aatgctatggtgactacctgtt

SEQ ID NO: 5398 - DNA, 22 bp, Artificial Sequence
  chemically synthesized
tggtgactacctgtttttaaaa

SEQ ID NO: 5399 - DNA, 22 bp, Artificial Sequence
  chemically synthesized
cctgtttttaaaagctaatttt

SEQ ID NO: 5400 - DNA, 22 bp, Artificial Sequence
  chemically synthesized
tttttaaaagctaattttactt

SEQ ID NO: 5401 - DNA, 22 bp, Artificial Sequence
  chemically synthesized
ttaaaagctaattttacttttt

SEQ ID NO: 5402 - DNA, 22 bp, Artificial Sequence
  chemically synthesized
taaaagctaattttactttttt

SEQ ID NO: 5403 - DNA, 22 bp, Artificial Sequence
  chemically synthesized
aaaagctaattttactttttta

SEQ ID NO: 5404 - DNA, 22 bp, Artificial Sequence
  chemically synthesized
aaagctaattttacttttttat

SEQ ID NO: 5405 - DNA, 22 bp, Artificial Sequence
  chemically synthesized
attttacttttttatgatttta

SEQ ID NO: 5406 - DNA, 22 bp, Artificial Sequence
  chemically synthesized
tacttttttatgattttaagag

SEQ ID NO: 5407 - DNA, 22 bp, Artificial Sequence
  chemically synthesized
acttttttatgattttaagaga

SEQ ID NO: 5408 - DNA, 22 bp, Artificial Sequence
  chemically synthesized
cttttttatgattttaagagat

SEQ ID NO: 5409 - DNA, 22 bp, Artificial Sequence
  chemically synthesized
ttttatgattttaagagattta

SEQ ID NO: 5410 - DNA, 22 bp, Artificial Sequence
  chemically synthesized
tttatgattttaagagatttac

SEQ ID NO: 5411 - DNA, 22 bp, Artificial Sequence
  chemically synthesized
ttatgattttaagagatttaca

SEQ ID NO: 5412 - DNA, 22 bp, Artificial Sequence
  chemically synthesized
tatgattttaagagatttacaa

SEQ ID NO: 5413 - DNA, 22 bp, Artificial Sequence
  chemically synthesized
atgattttaagagatttacaag

SEQ ID NO: 5414 - DNA, 22 bp, Artificial Sequence
  chemically synthesized
tgattttaagagatttacaagt

SEQ ID NO: 5415 - DNA, 22 bp, Artificial Sequence
  chemically synthesized
taagagatttacaagtcaaaaa

SEQ ID NO: 5416 - DNA, 22 bp, Artificial Sequence
  chemically synthesized
aagagatttacaagtcaaaaat

SEQ ID NO: 5417 - DNA, 22 bp, Artificial Sequence
  chemically synthesized
agagatttacaagtcaaaaata

SEQ ID NO: 5418 - DNA, 22 bp, Artificial Sequence
  chemically synthesized
acaagtcaaaaataaacttttt

SEQ ID NO: 5419 - DNA, 22 bp, Artificial Sequence
  chemically synthesized
caagtcaaaaataaactttttt

SEQ ID NO: 5420 - DNA, 22 bp, Artificial Sequence
  chemically synthesized
ttttgttgggtaaatttattat

SEQ ID NO: 5421 - DNA, 22 bp, Artificial Sequence
  chemically synthesized
tttgttgggtaaatttattatt

SEQ ID NO: 5422 - DNA, 22 bp, Artificial Sequence
  chemically synthesized
ttgttgggtaaatttattatta

SEQ ID NO: 5423 - DNA, 22 bp, Artificial Sequence
  chemically synthesized
tgttgggtaaatttattattaa

SEQ ID NO: 5424 - DNA, 22 bp, Artificial Sequence
  chemically synthesized
gttgggtaaatttattattaaa

SEQ ID NO: 5425 - DNA, 22 bp, Artificial Sequence
  chemically synthesized
ttgggtaaatttattattaaag

SEQ ID NO: 5426 - DNA, 22 bp, Artificial Sequence
  chemically synthesized
ggtaaatttattattaaagttg

SEQ ID NO: 5427 - DNA, 22 bp, Artificial Sequence
  chemically synthesized
attattaaagttgaggggaaaa

SEQ ID NO: 5428 - DNA, 22 bp, Artificial Sequence
  chemically synthesized
ttattaaagttgaggggaaaaa

SEQ ID NO: 5429 - DNA, 22 bp, Artificial Sequence
  chemically synthesized
ttaaagttgaggggaaaaaagt

SEQ ID NO: 5430 - DNA, 22 bp, Artificial Sequence
  chemically synthesized
aagttgaggggaaaaaagtaat

SEQ ID NO: 5431 - DNA, 22 bp, Artificial Sequence
  chemically synthesized
aggggaaaaaagtaatgaatta

SEQ ID NO: 5432 - DNA, 20 bp, Artificial Sequence
  chemically synthesized
tcccgcccgcttgctgcatc

SEQ ID NO: 5433 - DNA, 20 bp, Artificial Sequence
  chemically synthesized
tgcatctggacaccctgcct

SEQ ID NO: 5434 - DNA, 20 bp, Artificial Sequence
  chemically synthesized
gcatctggacaccctgcctc

SEQ ID NO: 5435 - DNA, 20 bp, Artificial Sequence
  chemically synthesized
cctcaggccctcatctccac

SEQ ID NO: 5436 - DNA, 20 bp, Artificial Sequence
  chemically synthesized
aggccctcatctccactggt

SEQ ID NO: 5437 - DNA, 20 bp, Artificial Sequence
  chemically synthesized
ccctcatctccactggtcag

SEQ ID NO: 5438 - DNA, 20 bp, Artificial Sequence
  chemically synthesized
cctcatctccactggtcagc

SEQ ID NO: 5439 - DNA, 20 bp, Artificial Sequence
  chemically synthesized
gtcagcaggtgacctttgcc

SEQ ID NO: 5440 - DNA, 20 bp, Artificial Sequence
  chemically synthesized
gtgacctttgcccagcgccc

SEQ ID NO: 5441 - DNA, 20 bp, Artificial Sequence
  chemically synthesized
tgacctttgcccagcgccct

SEQ ID NO: 5442 - DNA, 20 bp, Artificial Sequence
  chemically synthesized
tgcccagcgccctgggtcct

SEQ ID NO: 5443 - DNA, 20 bp, Artificial Sequence
  chemically synthesized
gtcctcagtgcctgctgccc

SEQ ID NO: 5444 - DNA, 20 bp, Artificial Sequence
  chemically synthesized
cctcagtgcctgctgccctg

SEQ ID NO: 5445 - DNA, 20 bp, Artificial Sequence
  chemically synthesized
gccctggagatgatataaaa

SEQ ID NO: 5446 - DNA, 20 bp, Artificial Sequence
  chemically synthesized
ccctggagatgatataaaac

SEQ ID NO: 5447 - DNA, 20 bp, Artificial Sequence
  chemically synthesized
ggagatgatataaaacaggt

SEQ ID NO: 5448 - DNA, 20 bp, Artificial Sequence
  chemically synthesized
aaccctcctgcctgtctgct

SEQ ID NO: 5449 - DNA, 20 bp, Artificial Sequence
  chemically synthesized
ctgtctgctcagttcatccc

SEQ ID NO: 5450 - DNA, 20 bp, Artificial Sequence
  chemically synthesized
gtctgctcagttcatcccta

SEQ ID NO: 5451 - DNA, 20 bp, Artificial Sequence
  chemically synthesized
tctgctcagttcatccctag

SEQ ID NO: 5452 - DNA, 20 bp, Artificial Sequence
  chemically synthesized
gctcagttcatccctagagg

SEQ ID NO: 5453 - DNA, 20 bp, Artificial Sequence
  chemically synthesized
atccctagaggcagctgctc

SEQ ID NO: 5454 - DNA, 20 bp, Artificial Sequence
  chemically synthesized
tccctagaggcagctgctcc

SEQ ID NO: 5455 - DNA, 20 bp, Artificial Sequence
  chemically synthesized
ctgctccaggtaatgccctc

SEQ ID NO: 5456 - DNA, 20 bp, Artificial Sequence
  chemically synthesized
tgctccaggtaatgccctct

SEQ ID NO: 5457 - DNA, 20 bp, Artificial Sequence
  chemically synthesized
gctccaggtaatgccctctg

SEQ ID NO: 5458 - DNA, 20 bp, Artificial Sequence
  chemically synthesized
tccaggtaatgccctctggg

SEQ ID NO: 5459 - DNA, 20 bp, Artificial Sequence
  chemically synthesized
ccaggtaatgccctctgggg

SEQ ID NO: 5460 - DNA, 20 bp, Artificial Sequence
  chemically synthesized
caggtaatgccctctgggga

SEQ ID NO: 5461 - DNA, 20 bp, Artificial Sequence
  chemically synthesized
aggtaatgccctctggggag

SEQ ID NO: 5462 - DNA, 20 bp, Artificial Sequence
  chemically synthesized
aatgccctctggggagggga

SEQ ID NO: 5463 - DNA, 20 bp, Artificial Sequence
  chemically synthesized
tgccctctggggaggggaaa

SEQ ID NO: 5464 - DNA, 20 bp, Artificial Sequence
  chemically synthesized
gccctctggggaggggaaag

SEQ ID NO: 5465 - DNA, 20 bp, Artificial Sequence
  chemically synthesized
cctctggggaggggaaagag

SEQ ID NO: 5466 - DNA, 20 bp, Artificial Sequence
  chemically synthesized
ctctggggaggggaaagagg

SEQ ID NO: 5467 - DNA, 20 bp, Artificial Sequence
  chemically synthesized
tctggggaggggaaagagga

SEQ ID NO: 5468 - DNA, 20 bp, Artificial Sequence
  chemically synthesized
ctggggaggggaaagaggag

SEQ ID NO: 5469 - DNA, 20 bp, Artificial Sequence
  chemically synthesized
ggggaggggaaagaggaggg

SEQ ID NO: 5470 - DNA, 20 bp, Artificial Sequence
  chemically synthesized
gggaggggaaagaggagggg

SEQ ID NO: 5471 - DNA, 20 bp, Artificial Sequence
  chemically synthesized
gaggggaaagaggaggggag

SEQ ID NO: 5472 - DNA, 20 bp, Artificial Sequence
  chemically synthesized
aggggaaagaggaggggagg

SEQ ID NO: 5473 - DNA, 20 bp, Artificial Sequence
  chemically synthesized
aagaggaggggaggaggatg

SEQ ID NO: 5474 - DNA, 20 bp, Artificial Sequence
  chemically synthesized
gaggaggggaggaggatgaa

SEQ ID NO: 5475 - DNA, 20 bp, Artificial Sequence
  chemically synthesized
aggaggggaggaggatgaag

SEQ ID NO: 5476 - DNA, 20 bp, Artificial Sequence
  chemically synthesized
ggaggggaggaggatgaaga

SEQ ID NO: 5477 - DNA, 20 bp, Artificial Sequence
  chemically synthesized
gaggggaggaggatgaagag

SEQ ID NO: 5478 - DNA, 20 bp, Artificial Sequence
  chemically synthesized
ggaggaggatgaagaggggc

SEQ ID NO: 5479 - DNA, 20 bp, Artificial Sequence
  chemically synthesized
aggaggatgaagaggggcaa

SEQ ID NO: 5480 - DNA, 20 bp, Artificial Sequence
  chemically synthesized
ggaggatgaagaggggcaag

SEQ ID NO: 5481 - DNA, 20 bp, Artificial Sequence
  chemically synthesized
aggatgaagaggggcaagag

SEQ ID NO: 5482 - DNA, 20 bp, Artificial Sequence
  chemically synthesized
ggcaagaggagctccctgcc

SEQ ID NO: 5483 - DNA, 20 bp, Artificial Sequence
  chemically synthesized
gaggagctccctgcccagcc

SEQ ID NO: 5484 - DNA, 20 bp, Artificial Sequence
  chemically synthesized
agctccctgcccagcccagc

SEQ ID NO: 5485 - DNA, 20 bp, Artificial Sequence
  chemically synthesized
ccctgcccagcccagccagc

SEQ ID NO: 5486 - DNA, 20 bp, Artificial Sequence
  chemically synthesized
cccagcccagccagcaagcc

SEQ ID NO: 5487 - DNA, 20 bp, Artificial Sequence
  chemically synthesized
cagcccagccagcaagcctg

SEQ ID NO: 5488 - DNA, 20 bp, Artificial Sequence
  chemically synthesized
cccagccagcaagcctggag

SEQ ID NO: 5489 - DNA, 20 bp, Artificial Sequence
  chemically synthesized
aagcctggagaagcacttgc

SEQ ID NO: 5490 - DNA, 20 bp, Artificial Sequence
  chemically synthesized
gcctggagaagcacttgcta

SEQ ID NO: 5491 - DNA, 20 bp, Artificial Sequence
  chemically synthesized
gagaagcacttgctagagct

SEQ ID NO: 5492 - DNA, 20 bp, Artificial Sequence
  chemically synthesized
agaagcacttgctagagcta

SEQ ID NO: 5493 - DNA, 20 bp, Artificial Sequence
  chemically synthesized
agcacttgctagagctaagg

SEQ ID NO: 5494 - DNA, 20 bp, Artificial Sequence
  chemically synthesized
tgctagagctaaggaagcct

SEQ ID NO: 5495 - DNA, 20 bp, Artificial Sequence
  chemically synthesized
ctagagctaaggaagcctcg

SEQ ID NO: 5496 - DNA, 20 bp, Artificial Sequence
  chemically synthesized
agctaaggaagcctcggagc

SEQ ID NO: 5497 - DNA, 20 bp, Artificial Sequence
  chemically synthesized
aaggaagcctcggagctgga

SEQ ID NO: 5498 - DNA, 20 bp, Artificial Sequence
  chemically synthesized
aggaagcctcggagctggac

SEQ ID NO: 5499 - DNA, 20 bp, Artificial Sequence
  chemically synthesized
ccacccctcatcataacctg

SEQ ID NO: 5500 - DNA, 20 bp, Artificial Sequence
  chemically synthesized
tcatcataacctgaagaaca

SEQ ID NO: 5501 - DNA, 20 bp, Artificial Sequence
  chemically synthesized
atcataacctgaagaacatg

SEQ ID NO: 5502 - DNA, 20 bp, Artificial Sequence
  chemically synthesized
tcataacctgaagaacatgg

SEQ ID NO: 5503 - DNA, 20 bp, Artificial Sequence
  chemically synthesized
acctgaagaacatggaggcc

SEQ ID NO: 5504 - DNA, 20 bp, Artificial Sequence
  chemically synthesized
cctgaagaacatggaggccc

SEQ ID NO: 5505 - DNA, 20 bp, Artificial Sequence
  chemically synthesized
tgaagaacatggaggcccgg

SEQ ID NO: 5506 - DNA, 20 bp, Artificial Sequence
  chemically synthesized
gaagaacatggaggcccggg

SEQ ID NO: 5507 - DNA, 20 bp, Artificial Sequence
  chemically synthesized
aagaacatggaggcccggga

SEQ ID NO: 5508 - DNA, 20 bp, Artificial Sequence
  chemically synthesized
agaacatggaggcccgggag

SEQ ID NO: 5509 - DNA, 20 bp, Artificial Sequence
  chemically synthesized
ggaggggtgtcacttgccca

SEQ ID NO: 5510 - DNA, 20 bp, Artificial Sequence
  chemically synthesized
gtcacttgcccaaagctaca

SEQ ID NO: 5511 - DNA, 20 bp, Artificial Sequence
  chemically synthesized
tcacttgcccaaagctacac

SEQ ID NO: 5512 - DNA, 20 bp, Artificial Sequence
  chemically synthesized
cacttgcccaaagctacaca

SEQ ID NO: 5513 - DNA, 20 bp, Artificial Sequence
  chemically synthesized
acttgcccaaagctacacag

SEQ ID NO: 5514 - DNA, 20 bp, Artificial Sequence
  chemically synthesized
cttgcccaaagctacacagg

SEQ ID NO: 5515 - DNA, 20 bp, Artificial Sequence
  chemically synthesized
gcccaaagctacacaggggg

SEQ ID NO: 5516 - DNA, 20 bp, Artificial Sequence
  chemically synthesized
cccaaagctacacagggggt

SEQ ID NO: 5517 - DNA, 20 bp, Artificial Sequence
  chemically synthesized
ccaaagctacacagggggtg

SEQ ID NO: 5518 - DNA, 20 bp, Artificial Sequence
  chemically synthesized
agctacacagggggtggggc

SEQ ID NO: 5519 - DNA, 20 bp, Artificial Sequence
  chemically synthesized
tacacagggggtggggctgg

SEQ ID NO: 5520 - DNA, 20 bp, Artificial Sequence
  chemically synthesized
acagggggtggggctggaag

SEQ ID NO: 5521 - DNA, 20 bp, Artificial Sequence
  chemically synthesized
gtggggctggaagtggctcc

SEQ ID NO: 5522 - DNA, 20 bp, Artificial Sequence
  chemically synthesized
gctggaagtggctccaagtg

SEQ ID NO: 5523 - DNA, 20 bp, Artificial Sequence
  chemically synthesized
ctggaagtggctccaagtgc

SEQ ID NO: 5524 - DNA, 20 bp, Artificial Sequence
  chemically synthesized
caggttcccccctcattctt

SEQ ID NO: 5525 - DNA, 20 bp, Artificial Sequence
  chemically synthesized
aggttcccccctcattcttc

SEQ ID NO: 5526 - DNA, 20 bp, Artificial Sequence
  chemically synthesized
cccccctcattcttcaggct

SEQ ID NO: 5527 - DNA, 20 bp, Artificial Sequence
  chemically synthesized
ccccctcattcttcaggctt

SEQ ID NO: 5528 - DNA, 20 bp, Artificial Sequence
  chemically synthesized
cccctcattcttcaggctta

SEQ ID NO: 5529 - DNA, 20 bp, Artificial Sequence
  chemically synthesized
tcattcttcaggcttagggc

SEQ ID NO: 5530 - DNA, 20 bp, Artificial Sequence
  chemically synthesized
attcttcaggcttagggctg

SEQ ID NO: 5531 - DNA, 20 bp, Artificial Sequence
  chemically synthesized
ttcttcaggcttagggctgg

SEQ ID NO: 5532 - DNA, 20 bp, Artificial Sequence
  chemically synthesized
ttcaggcttagggctggagg

SEQ ID NO: 5533 - DNA, 20 bp, Artificial Sequence
  chemically synthesized
cttagggctggaggaagcct

SEQ ID NO: 5534 - DNA, 20 bp, Artificial Sequence
  chemically synthesized
gggctggaggaagccttaga

SEQ ID NO: 5535 - DNA, 20 bp, Artificial Sequence
  chemically synthesized
ggaggaagccttagacagcc

SEQ ID NO: 5536 - DNA, 20 bp, Artificial Sequence
  chemically synthesized
tagacagcccagtcctaccc

SEQ ID NO: 5537 - DNA, 20 bp, Artificial Sequence
  chemically synthesized
cagcccagtcctaccccaga

SEQ ID NO: 5538 - DNA, 20 bp, Artificial Sequence
  chemically synthesized
agcccagtcctaccccagac

SEQ ID NO: 5539 - DNA, 20 bp, Artificial Sequence
  chemically synthesized
gcccagtcctaccccagaca

SEQ ID NO: 5540 - DNA, 20 bp, Artificial Sequence
  chemically synthesized
ctaccccagacagggaaact

SEQ ID NO: 5541 - DNA, 20 bp, Artificial Sequence
  chemically synthesized
taccccagacagggaaactg

SEQ ID NO: 5542 - DNA, 20 bp, Artificial Sequence
  chemically synthesized
cagacagggaaactgaggcc

SEQ ID NO: 5543 - DNA, 20 bp, Artificial Sequence
  chemically synthesized
gacagggaaactgaggcctg

SEQ ID NO: 5544 - DNA, 20 bp, Artificial Sequence
  chemically synthesized
cagggaaactgaggcctgga

SEQ ID NO: 5545 - DNA, 20 bp, Artificial Sequence
  chemically synthesized
agggaaactgaggcctggag

SEQ ID NO: 5546 - DNA, 20 bp, Artificial Sequence
  chemically synthesized
gggaaactgaggcctggaga

SEQ ID NO: 5547 - DNA, 20 bp, Artificial Sequence
  chemically synthesized
aactgaggcctggagagggc

SEQ ID NO: 5548 - DNA, 20 bp, Artificial Sequence
  chemically synthesized
agagggccagaaatcaccca

SEQ ID NO: 5549 - DNA, 20 bp, Artificial Sequence
  chemically synthesized
agaaatcacccaaagacaca

SEQ ID NO: 5550 - DNA, 20 bp, Artificial Sequence
  chemically synthesized
cccaaagacacacagcatgt

SEQ ID NO: 5551 - DNA, 20 bp, Artificial Sequence
  chemically synthesized
aagacacacagcatgttggc

SEQ ID NO: 5552 - DNA, 20 bp, Artificial Sequence
  chemically synthesized
acacagcatgttggctggac

SEQ ID NO: 5553 - DNA, 20 bp, Artificial Sequence
  chemically synthesized
agcatgttggctggactgga

SEQ ID NO: 5554 - DNA, 20 bp, Artificial Sequence
  chemically synthesized
catgttggctggactggacg

SEQ ID NO: 5555 - DNA, 20 bp, Artificial Sequence
  chemically synthesized
tggctggactggacggagat

SEQ ID NO: 5556 - DNA, 20 bp, Artificial Sequence
  chemically synthesized
ggactggacggagatcagtc

SEQ ID NO: 5557 - DNA, 20 bp, Artificial Sequence
  chemically synthesized
acggagatcagtccagaccg

SEQ ID NO: 5558 - DNA, 20 bp, Artificial Sequence
  chemically synthesized
cggagatcagtccagaccgc

SEQ ID NO: 5559 - DNA, 20 bp, Artificial Sequence
  chemically synthesized
accgcaggtgccttgatgtt

SEQ ID NO: 5560 - DNA, 20 bp, Artificial Sequence
  chemically synthesized
aggtgccttgatgttcagtc

SEQ ID NO: 5561 - DNA, 20 bp, Artificial Sequence
  chemically synthesized
tgccttgatgttcagtctgg

SEQ ID NO: 5562 - DNA, 20 bp, Artificial Sequence
  chemically synthesized
gccttgatgttcagtctggt

SEQ ID NO: 5563 - DNA, 20 bp, Artificial Sequence
  chemically synthesized
ccatcccacccacctccctt

SEQ ID NO: 5564 - DNA, 20 bp, Artificial Sequence
  chemically synthesized
catcccacccacctcccttt

SEQ ID NO: 5565 - DNA, 20 bp, Artificial Sequence
  chemically synthesized
ctcgatccctcgcccctcac

SEQ ID NO: 5566 - DNA, 20 bp, Artificial Sequence
  chemically synthesized
ccctcaccagtcccccttct

SEQ ID NO: 5567 - DNA, 20 bp, Artificial Sequence
  chemically synthesized
ctcaccagtcccccttctga

SEQ ID NO: 5568 - DNA, 20 bp, Artificial Sequence
  chemically synthesized
ccccttctgagagcccgtat

SEQ ID NO: 5569 - DNA, 20 bp, Artificial Sequence
  chemically synthesized
cttctgagagcccgtattag

SEQ ID NO: 5570 - DNA, 20 bp, Artificial Sequence
  chemically synthesized
ttctgagagcccgtattagc

SEQ ID NO: 5571 - DNA, 20 bp, Artificial Sequence
  chemically synthesized
tctgagagcccgtattagca

SEQ ID NO: 5572 - DNA, 20 bp, Artificial Sequence
  chemically synthesized
tgagagcccgtattagcagg

SEQ ID NO: 5573 - DNA, 20 bp, Artificial Sequence
  chemically synthesized
agcccgtattagcagggagc

SEQ ID NO: 5574 - DNA, 20 bp, Artificial Sequence
  chemically synthesized
gagccggcccctactccttc

SEQ ID NO: 5575 - DNA, 20 bp, Artificial Sequence
  chemically synthesized
ccggcccctactccttctgg

SEQ ID NO: 5576 - DNA, 20 bp, Artificial Sequence
  chemically synthesized
cctactccttctggcagacc

SEQ ID NO: 5577 - DNA, 20 bp, Artificial Sequence
  chemically synthesized
tccttctggcagacccagct

SEQ ID NO: 5578 - DNA, 20 bp, Artificial Sequence
  chemically synthesized
ccttctggcagacccagcta

SEQ ID NO: 5579 - DNA, 20 bp, Artificial Sequence
  chemically synthesized
acccagctaaggttctacct

SEQ ID NO: 5580 - DNA, 20 bp, Artificial Sequence
  chemically synthesized
cccagctaaggttctacctt

SEQ ID NO: 5581 - DNA, 20 bp, Artificial Sequence
  chemically synthesized
ccagctaaggttctacctta

SEQ ID NO: 5582 - DNA, 20 bp, Artificial Sequence
  chemically synthesized
cagctaaggttctaccttag

SEQ ID NO: 5583 - DNA, 20 bp, Artificial Sequence
  chemically synthesized
taggggccacgccacctccc

SEQ ID NO: 5584 - DNA, 20 bp, Artificial Sequence
  chemically synthesized
aggggccacgccacctcccc

SEQ ID NO: 5585 - DNA, 20 bp, Artificial Sequence
  chemically synthesized
ggggccacgccacctcccca

SEQ ID NO: 5586 - DNA, 20 bp, Artificial Sequence
  chemically synthesized
ggccacgccacctccccagg

SEQ ID NO: 5587 - DNA, 20 bp, Artificial Sequence
  chemically synthesized
gccacgccacctccccaggg

SEQ ID NO: 5588 - DNA, 20 bp, Artificial Sequence
  chemically synthesized
ccacgccacctccccaggga

SEQ ID NO: 5589 - DNA, 20 bp, Artificial Sequence
  chemically synthesized
cacgccacctccccagggag

SEQ ID NO: 5590 - DNA, 20 bp, Artificial Sequence
  chemically synthesized
cacctccccagggaggggtc

SEQ ID NO: 5591 - DNA, 20 bp, Artificial Sequence
  chemically synthesized
cctccccagggaggggtcca

SEQ ID NO: 5592 - DNA, 20 bp, Artificial Sequence
  chemically synthesized
ctccccagggaggggtccag

SEQ ID NO: 5593 - DNA, 20 bp, Artificial Sequence
  chemically synthesized
cagggaggggtccagaggca

SEQ ID NO: 5594 - DNA, 20 bp, Artificial Sequence
  chemically synthesized
agggaggggtccagaggcat

SEQ ID NO: 5595 - DNA, 20 bp, Artificial Sequence
  chemically synthesized
gggaggggtccagaggcatg

SEQ ID NO: 5596 - DNA, 20 bp, Artificial Sequence
  chemically synthesized
ggtccagaggcatggggacc

SEQ ID NO: 5597 - DNA, 20 bp, Artificial Sequence
  chemically synthesized
gtccagaggcatggggacct

SEQ ID NO: 5598 - DNA, 20 bp, Artificial Sequence
  chemically synthesized
tccagaggcatggggacctg

SEQ ID NO: 5599 - DNA, 20 bp, Artificial Sequence
  chemically synthesized
gggacctggggtgcccctca

SEQ ID NO: 5600 - DNA, 20 bp, Artificial Sequence
  chemically synthesized
ggacctggggtgcccctcac

SEQ ID NO: 5601 - DNA, 20 bp, Artificial Sequence
  chemically synthesized
cctcacaggacacttccttg

SEQ ID NO: 5602 - DNA, 20 bp, Artificial Sequence
  chemically synthesized
ctcacaggacacttccttgc

SEQ ID NO: 5603 - DNA, 20 bp, Artificial Sequence
  chemically synthesized
aggacacttccttgcaggaa

SEQ ID NO: 5604 - DNA, 20 bp, Artificial Sequence
  chemically synthesized
gacacttccttgcaggaaca

SEQ ID NO: 5605 - DNA, 20 bp, Artificial Sequence
  chemically synthesized
acacttccttgcaggaacag

SEQ ID NO: 5606 - DNA, 20 bp, Artificial Sequence
  chemically synthesized
gcaggaacagaggtgccatg

SEQ ID NO: 5607 - DNA, 20 bp, Artificial Sequence
  chemically synthesized
acagaggtgccatgcagccc

SEQ ID NO: 5608 - DNA, 20 bp, Artificial Sequence
  chemically synthesized
cagaggtgccatgcagcccc

SEQ ID NO: 5609 - DNA, 20 bp, Artificial Sequence
  chemically synthesized
actccttgttgttgccctcc

SEQ ID NO: 5610 - DNA, 20 bp, Artificial Sequence
  chemically synthesized
tgttgccctcctggcgctcc

SEQ ID NO: 5611 - DNA, 20 bp, Artificial Sequence
  chemically synthesized
cgctcctggcctctgcccgt

SEQ ID NO: 5612 - DNA, 20 bp, Artificial Sequence
  chemically synthesized
ggcctctgcccgtaagcact

SEQ ID NO: 5613 - DNA, 20 bp, Artificial Sequence
  chemically synthesized
ctctgcccgtaagcacttgg

SEQ ID NO: 5614 - DNA, 20 bp, Artificial Sequence
  chemically synthesized
tctgcccgtaagcacttggt

SEQ ID NO: 5615 - DNA, 20 bp, Artificial Sequence
  chemically synthesized
ccgtaagcacttggtgggac

SEQ ID NO: 5616 - DNA, 20 bp, Artificial Sequence
  chemically synthesized
cgtaagcacttggtgggact

SEQ ID NO: 5617 - DNA, 20 bp, Artificial Sequence
  chemically synthesized
agcacttggtgggactgggc

SEQ ID NO: 5618 - DNA, 20 bp, Artificial Sequence
  chemically synthesized
gcacttggtgggactgggct

SEQ ID NO: 5619 - DNA, 20 bp, Artificial Sequence
  chemically synthesized
cacttggtgggactgggctg

SEQ ID NO: 5620 - DNA, 20 bp, Artificial Sequence
  chemically synthesized
acttggtgggactgggctgg

SEQ ID NO: 5621 - DNA, 20 bp, Artificial Sequence
  chemically synthesized
tggtgggactgggctggggg

SEQ ID NO: 5622 - DNA, 20 bp, Artificial Sequence
  chemically synthesized
ggtgggactgggctgggggc

SEQ ID NO: 5623 - DNA, 20 bp, Artificial Sequence
  chemically synthesized
gtgggactgggctgggggca

SEQ ID NO: 5624 - DNA, 20 bp, Artificial Sequence
  chemically synthesized
gcccccagcccagtcccacc

SEQ ID NO: 5625 - DNA, 20 bp, Artificial Sequence
  chemically synthesized
ccagtcccaccaagtgctta

SEQ ID NO: 5626 - DNA, 20 bp, Artificial Sequence
  chemically synthesized
cagtcccaccaagtgcttac

SEQ ID NO: 5627 - DNA, 20 bp, Artificial Sequence
  chemically synthesized
tcccaccaagtgcttacggg

SEQ ID NO: 5628 - DNA, 20 bp, Artificial Sequence
  chemically synthesized
ccaccaagtgcttacgggca

SEQ ID NO: 5629 - DNA, 20 bp, Artificial Sequence
  chemically synthesized
caccaagtgcttacgggcag

SEQ ID NO: 5630 - DNA, 20 bp, Artificial Sequence
  chemically synthesized
aagtgcttacgggcagaggc

SEQ ID NO: 5631 - DNA, 20 bp, Artificial Sequence
  chemically synthesized
agtgcttacgggcagaggcc

SEQ ID NO: 5632 - DNA, 20 bp, Artificial Sequence
  chemically synthesized
tgcttacgggcagaggccag

SEQ ID NO: 5633 - DNA, 20 bp, Artificial Sequence
  chemically synthesized
cgggcagaggccaggagcgc

SEQ ID NO: 5634 - DNA, 20 bp, Artificial Sequence
  chemically synthesized
gggcagaggccaggagcgcc

SEQ ID NO: 5635 - DNA, 20 bp, Artificial Sequence
  chemically synthesized
gcagaggccaggagcgccag

SEQ ID NO: 5636 - DNA, 20 bp, Artificial Sequence
  chemically synthesized
cagaggccaggagcgccagg

SEQ ID NO: 5637 - DNA, 20 bp, Artificial Sequence
  chemically synthesized
agaggccaggagcgccagga

SEQ ID NO: 5638 - DNA, 20 bp, Artificial Sequence
  chemically synthesized
agcgccaggagggcaacaac

SEQ ID NO: 5639 - DNA, 20 bp, Artificial Sequence
  chemically synthesized
gcgccaggagggcaacaaca

SEQ ID NO: 5640 - DNA, 20 bp, Artificial Sequence
  chemically synthesized
gccaggagggcaacaacaag

SEQ ID NO: 5641 - DNA, 20 bp, Artificial Sequence
  chemically synthesized
gggcaacaacaaggagtacc

SEQ ID NO: 5642 - DNA, 20 bp, Artificial Sequence
  chemically synthesized
ggcaacaacaaggagtaccc

SEQ ID NO: 5643 - DNA, 20 bp, Artificial Sequence
  chemically synthesized
gcaacaacaaggagtacccg

SEQ ID NO: 5644 - DNA, 20 bp, Artificial Sequence
  chemically synthesized
aaggagtacccggggctgca

SEQ ID NO: 5645 - DNA, 20 bp, Artificial Sequence
  chemically synthesized
catggcacctctgttcctgc

SEQ ID NO: 5646 - DNA, 20 bp, Artificial Sequence
  chemically synthesized
atggcacctctgttcctgca

SEQ ID NO: 5647 - DNA, 20 bp, Artificial Sequence
  chemically synthesized
gcacctctgttcctgcaagg

SEQ ID NO: 5648 - DNA, 20 bp, Artificial Sequence
  chemically synthesized
cctgcaaggaagtgtcctgt

SEQ ID NO: 5649 - DNA, 20 bp, Artificial Sequence
  chemically synthesized
ctgcaaggaagtgtcctgtg

SEQ ID NO: 5650 - DNA, 20 bp, Artificial Sequence
  chemically synthesized
tgcaaggaagtgtcctgtga

SEQ ID NO: 5651 - DNA, 20 bp, Artificial Sequence
  chemically synthesized
gcaaggaagtgtcctgtgag

SEQ ID NO: 5652 - DNA, 20 bp, Artificial Sequence
  chemically synthesized
gtgtcctgtgaggggcaccc

SEQ ID NO: 5653 - DNA, 20 bp, Artificial Sequence
  chemically synthesized
tgtcctgtgaggggcacccc

SEQ ID NO: 5654 - DNA, 20 bp, Artificial Sequence
  chemically synthesized
accccaggtccccatgcctc

SEQ ID NO: 5655 - DNA, 20 bp, Artificial Sequence
  chemically synthesized
catgcctctggacccctccc

SEQ ID NO: 5656 - DNA, 20 bp, Artificial Sequence
  chemically synthesized
atgcctctggacccctccct

SEQ ID NO: 5657 - DNA, 20 bp, Artificial Sequence
  chemically synthesized
tgcctctggacccctccctg

SEQ ID NO: 5658 - DNA, 20 bp, Artificial Sequence
  chemically synthesized
cctctggacccctccctggg

SEQ ID NO: 5659 - DNA, 20 bp, Artificial Sequence
  chemically synthesized
ctctggacccctccctgggg

SEQ ID NO: 5660 - DNA, 20 bp, Artificial Sequence
  chemically synthesized
tggacccctccctggggagg

SEQ ID NO: 5661 - DNA, 20 bp, Artificial Sequence
  chemically synthesized
ccctccctggggaggtggcg

SEQ ID NO: 5662 - DNA, 20 bp, Artificial Sequence
  chemically synthesized
ggggaggtggcgtggcccct

SEQ ID NO: 5663 - DNA, 20 bp, Artificial Sequence
  chemically synthesized
gggaggtggcgtggccccta

SEQ ID NO: 5664 - DNA, 20 bp, Artificial Sequence
  chemically synthesized
aggtggcgtggcccctaagg

SEQ ID NO: 5665 - DNA, 20 bp, Artificial Sequence
  chemically synthesized
tggcccctaaggtagaacct

SEQ ID NO: 5666 - DNA, 20 bp, Artificial Sequence
  chemically synthesized
ccctaaggtagaaccttagc

SEQ ID NO: 5667 - DNA, 20 bp, Artificial Sequence
  chemically synthesized
cctaaggtagaaccttagct

SEQ ID NO: 5668 - DNA, 20 bp, Artificial Sequence
  chemically synthesized
agaaccttagctgggtctgc

SEQ ID NO: 5669 - DNA, 20 bp, Artificial Sequence
  chemically synthesized
accttagctgggtctgccag

SEQ ID NO: 5670 - DNA, 20 bp, Artificial Sequence
  chemically synthesized
ccttagctgggtctgccaga

SEQ ID NO: 5671 - DNA, 20 bp, Artificial Sequence
  chemically synthesized
ttagctgggtctgccagaag

SEQ ID NO: 5672 - DNA, 20 bp, Artificial Sequence
  chemically synthesized
gctgggtctgccagaaggag

SEQ ID NO: 5673 - DNA, 20 bp, Artificial Sequence
  chemically synthesized
ctgggtctgccagaaggagt

SEQ ID NO: 5674 - DNA, 20 bp, Artificial Sequence
  chemically synthesized
tgggtctgccagaaggagta

SEQ ID NO: 5675 - DNA, 20 bp, Artificial Sequence
  chemically synthesized
gggtctgccagaaggagtag

SEQ ID NO: 5676 - DNA, 20 bp, Artificial Sequence
  chemically synthesized
ctgccagaaggagtaggggc

SEQ ID NO: 5677 - DNA, 20 bp, Artificial Sequence
  chemically synthesized
gggccggctccctgctaata

SEQ ID NO: 5678 - DNA, 20 bp, Artificial Sequence
  chemically synthesized
ggccggctccctgctaatac

SEQ ID NO: 5679 - DNA, 20 bp, Artificial Sequence
  chemically synthesized
tccctgctaatacgggctct

SEQ ID NO: 5680 - DNA, 20 bp, Artificial Sequence
  chemically synthesized
ctgctaatacgggctctcag

SEQ ID NO: 5681 - DNA, 20 bp, Artificial Sequence
  chemically synthesized
tgctaatacgggctctcaga

SEQ ID NO: 5682 - DNA, 20 bp, Artificial Sequence
  chemically synthesized
gctaatacgggctctcagaa

SEQ ID NO: 5683 - DNA, 20 bp, Artificial Sequence
  chemically synthesized
ctaatacgggctctcagaag

SEQ ID NO: 5684 - DNA, 20 bp, Artificial Sequence
  chemically synthesized
taatacgggctctcagaagg

SEQ ID NO: 5685 - DNA, 20 bp, Artificial Sequence
  chemically synthesized
cgggctctcagaagggggac

SEQ ID NO: 5686 - DNA, 20 bp, Artificial Sequence
  chemically synthesized
ctctcagaagggggactggt

SEQ ID NO: 5687 - DNA, 20 bp, Artificial Sequence
  chemically synthesized
tctcagaagggggactggtg

SEQ ID NO: 5688 - DNA, 20 bp, Artificial Sequence
  chemically synthesized
ctcagaagggggactggtga

SEQ ID NO: 5689 - DNA, 20 bp, Artificial Sequence
  chemically synthesized
tcagaagggggactggtgag

SEQ ID NO: 5690 - DNA, 20 bp, Artificial Sequence
  chemically synthesized
aagggggactggtgaggggc

SEQ ID NO: 5691 - DNA, 20 bp, Artificial Sequence
  chemically synthesized
agggggactggtgaggggcg

SEQ ID NO: 5692 - DNA, 20 bp, Artificial Sequence
  chemically synthesized
gggggactggtgaggggcga

SEQ ID NO: 5693 - DNA, 20 bp, Artificial Sequence
  chemically synthesized
ctggtgaggggcgagggatc

SEQ ID NO: 5694 - DNA, 20 bp, Artificial Sequence
  chemically synthesized
tggtgaggggcgagggatcg

SEQ ID NO: 5695 - DNA, 20 bp, Artificial Sequence
  chemically synthesized
gggcgagggatcgaggccca

SEQ ID NO: 5696 - DNA, 20 bp, Artificial Sequence
  chemically synthesized
ggcgagggatcgaggcccaa

SEQ ID NO: 5697 - DNA, 20 bp, Artificial Sequence
  chemically synthesized
gcgagggatcgaggcccaaa

SEQ ID NO: 5698 - DNA, 20 bp, Artificial Sequence
  chemically synthesized
gagggatcgaggcccaaagg

SEQ ID NO: 5699 - DNA, 20 bp, Artificial Sequence
  chemically synthesized
agggatcgaggcccaaaggg

SEQ ID NO: 5700 - DNA, 20 bp, Artificial Sequence
  chemically synthesized
gatcgaggcccaaagggagg

SEQ ID NO: 5701 - DNA, 20 bp, Artificial Sequence
  chemically synthesized
atcgaggcccaaagggaggt

SEQ ID NO: 5702 - DNA, 20 bp, Artificial Sequence
  chemically synthesized
gaggcccaaagggaggtggg

SEQ ID NO: 5703 - DNA, 20 bp, Artificial Sequence
  chemically synthesized
aggcccaaagggaggtgggt

SEQ ID NO: 5704 - DNA, 20 bp, Artificial Sequence
  chemically synthesized
ccaaagggaggtgggtggga

SEQ ID NO: 5705 - DNA, 20 bp, Artificial Sequence
  chemically synthesized
aaagggaggtgggtgggatg

SEQ ID NO: 5706 - DNA, 20 bp, Artificial Sequence
  chemically synthesized
gggaggtgggtgggatggag

SEQ ID NO: 5707 - DNA, 20 bp, Artificial Sequence
  chemically synthesized
ggatggagcagaaaacccac

SEQ ID NO: 5708 - DNA, 20 bp, Artificial Sequence
  chemically synthesized
aacccaccagactgaacatc

SEQ ID NO: 5709 - DNA, 20 bp, Artificial Sequence
  chemically synthesized
acccaccagactgaacatca

SEQ ID NO: 5710 - DNA, 20 bp, Artificial Sequence
  chemically synthesized
actgaacatcaaggcacctg

SEQ ID NO: 5711 - DNA, 20 bp, Artificial Sequence
  chemically synthesized
acatcaaggcacctgcggtc

SEQ ID NO: 5712 - DNA, 20 bp, Artificial Sequence
  chemically synthesized
ggtctggactgatctccgtc

SEQ ID NO: 5713 - DNA, 20 bp, Artificial Sequence
  chemically synthesized
ggactgatctccgtccagtc

SEQ ID NO: 5714 - DNA, 20 bp, Artificial Sequence
  chemically synthesized
gccaacatgctgtgtgtctt

SEQ ID NO: 5715 - DNA, 20 bp, Artificial Sequence
  chemically synthesized
ccaacatgctgtgtgtcttt

SEQ ID NO: 5716 - DNA, 20 bp, Artificial Sequence
  chemically synthesized
gtgtgtctttgggtgatttc

SEQ ID NO: 5717 - DNA, 20 bp, Artificial Sequence
  chemically synthesized
gggtgatttctggccctctc

SEQ ID NO: 5718 - DNA, 20 bp, Artificial Sequence
  chemically synthesized
ggtgatttctggccctctcc

SEQ ID NO: 5719 - DNA, 20 bp, Artificial Sequence
  chemically synthesized
ttctggccctctccaggcct

SEQ ID NO: 5720 - DNA, 20 bp, Artificial Sequence
  chemically synthesized
caggcctcagtttccctgtc

SEQ ID NO: 5721 - DNA, 20 bp, Artificial Sequence
  chemically synthesized
aggcctcagtttccctgtct

SEQ ID NO: 5722 - DNA, 20 bp, Artificial Sequence
  chemically synthesized
ggcctcagtttccctgtctg

SEQ ID NO: 5723 - DNA, 20 bp, Artificial Sequence
  chemically synthesized
ctcagtttccctgtctgggg

SEQ ID NO: 5724 - DNA, 20 bp, Artificial Sequence
  chemically synthesized
tcagtttccctgtctggggt

SEQ ID NO: 5725 - DNA, 20 bp, Artificial Sequence
  chemically synthesized
ttccctgtctggggtaggac

SEQ ID NO: 5726 - DNA, 20 bp, Artificial Sequence
  chemically synthesized
tccctgtctggggtaggact

SEQ ID NO: 5727 - DNA, 20 bp, Artificial Sequence
  chemically synthesized
ggggtaggactgggctgtct

SEQ ID NO: 5728 - DNA, 20 bp, Artificial Sequence
  chemically synthesized
gggtaggactgggctgtcta

SEQ ID NO: 5729 - DNA, 20 bp, Artificial Sequence
  chemically synthesized
gggctgtctaaggcttcctc

SEQ ID NO: 5730 - DNA, 20 bp, Artificial Sequence
  chemically synthesized
ctaaggcttcctccagccct

SEQ ID NO: 5731 - DNA, 20 bp, Artificial Sequence
  chemically synthesized
ttcctccagccctaagcctg

SEQ ID NO: 5732 - DNA, 20 bp, Artificial Sequence
  chemically synthesized
cagccctaagcctgaagaat

SEQ ID NO: 5733 - DNA, 20 bp, Artificial Sequence
  chemically synthesized
agccctaagcctgaagaatg

SEQ ID NO: 5734 - DNA, 20 bp, Artificial Sequence
  chemically synthesized
gccctaagcctgaagaatga

SEQ ID NO: 5735 - DNA, 20 bp, Artificial Sequence
  chemically synthesized
ccctaagcctgaagaatgag

SEQ ID NO: 5736 - DNA, 20 bp, Artificial Sequence
  chemically synthesized
cctaagcctgaagaatgagg

SEQ ID NO: 5737 - DNA, 20 bp, Artificial Sequence
  chemically synthesized
ctaagcctgaagaatgaggg

SEQ ID NO: 5738 - DNA, 20 bp, Artificial Sequence
  chemically synthesized
atgaggggggaacctgcact

SEQ ID NO: 5739 - DNA, 20 bp, Artificial Sequence
  chemically synthesized
gaggggggaacctgcacttg

SEQ ID NO: 5740 - DNA, 20 bp, Artificial Sequence
  chemically synthesized
cctgcacttggagccacttc

SEQ ID NO: 5741 - DNA, 20 bp, Artificial Sequence
  chemically synthesized
ttccagccccaccccctgtg

SEQ ID NO: 5742 - DNA, 20 bp, Artificial Sequence
  chemically synthesized
ccccaccccctgtgtagctt

SEQ ID NO: 5743 - DNA, 20 bp, Artificial Sequence
  chemically synthesized
cccaccccctgtgtagcttt

SEQ ID NO: 5744 - DNA, 20 bp, Artificial Sequence
  chemically synthesized
ccccctgtgtagctttgggc

SEQ ID NO: 5745 - DNA, 20 bp, Artificial Sequence
  chemically synthesized
tgggcaagtgacacccctcc

SEQ ID NO: 5746 - DNA, 20 bp, Artificial Sequence
  chemically synthesized
gggcaagtgacacccctccc

SEQ ID NO: 5747 - DNA, 20 bp, Artificial Sequence
  chemically synthesized
tcccgggcctccatgttctt

SEQ ID NO: 5748 - DNA, 20 bp, Artificial Sequence
  chemically synthesized
cccgggcctccatgttcttc

SEQ ID NO: 5749 - DNA, 20 bp, Artificial Sequence
  chemically synthesized
catgttcttcaggttatgat

SEQ ID NO: 5750 - DNA, 20 bp, Artificial Sequence
  chemically synthesized
atgttcttcaggttatgatg

SEQ ID NO: 5751 - DNA, 20 bp, Artificial Sequence
  chemically synthesized
tgttcttcaggttatgatga

SEQ ID NO: 5752 - DNA, 20 bp, Artificial Sequence
  chemically synthesized
gttcttcaggttatgatgag

SEQ ID NO: 5753 - DNA, 20 bp, Artificial Sequence
  chemically synthesized
cttcaggttatgatgagggg

SEQ ID NO: 5754 - DNA, 20 bp, Artificial Sequence
  chemically synthesized
ttcaggttatgatgaggggt

SEQ ID NO: 5755 - DNA, 20 bp, Artificial Sequence
  chemically synthesized
tcaggttatgatgaggggtg

SEQ ID NO: 5756 - DNA, 20 bp, Artificial Sequence
  chemically synthesized
caggttatgatgaggggtgg

SEQ ID NO: 5757 - DNA, 20 bp, Artificial Sequence
  chemically synthesized
aggttatgatgaggggtggg

SEQ ID NO: 5758 - DNA, 20 bp, Artificial Sequence
  chemically synthesized
aggggtggggggcacccgtc

SEQ ID NO: 5759 - DNA, 20 bp, Artificial Sequence
  chemically synthesized
gggggcacccgtccagctcc

SEQ ID NO: 5760 - DNA, 20 bp, Artificial Sequence
  chemically synthesized
ggggcacccgtccagctccg

SEQ ID NO: 5761 - DNA, 20 bp, Artificial Sequence
  chemically synthesized
gtccagctccgaggcttcct

SEQ ID NO: 5762 - DNA, 20 bp, Artificial Sequence
  chemically synthesized
ctccgaggcttccttagctc

SEQ ID NO: 5763 - DNA, 20 bp, Artificial Sequence
  chemically synthesized
gaggcttccttagctctagc

SEQ ID NO: 5764 - DNA, 20 bp, Artificial Sequence
  chemically synthesized
agctctagcaagtgcttctc

SEQ ID NO: 5765 - DNA, 20 bp, Artificial Sequence
  chemically synthesized
gctctagcaagtgcttctcc

SEQ ID NO: 5766 - DNA, 20 bp, Artificial Sequence
  chemically synthesized
aagtgcttctccaggcttgc

SEQ ID NO: 5767 - DNA, 20 bp, Artificial Sequence
  chemically synthesized
gcttctccaggcttgctggc

SEQ ID NO: 5768 - DNA, 20 bp, Artificial Sequence
  chemically synthesized
cttctccaggcttgctggct

SEQ ID NO: 5769 - DNA, 20 bp, Artificial Sequence
  chemically synthesized
tccaggcttgctggctgggc

SEQ ID NO: 5770 - DNA, 20 bp, Artificial Sequence
  chemically synthesized
ccaggcttgctggctgggct

SEQ ID NO: 5771 - DNA, 20 bp, Artificial Sequence
  chemically synthesized
ggcttgctggctgggctggg

SEQ ID NO: 5772 - DNA, 20 bp, Artificial Sequence
  chemically synthesized
gcttgctggctgggctgggc

SEQ ID NO: 5773 - DNA, 20 bp, Artificial Sequence
  chemically synthesized
cttgctggctgggctgggca

SEQ ID NO: 5774 - DNA, 20 bp, Artificial Sequence
  chemically synthesized
tgctggctgggctgggcagg

SEQ ID NO: 5775 - DNA, 20 bp, Artificial Sequence
  chemically synthesized
cccctcctctttcccctccc

SEQ ID NO: 5776 - DNA, 20 bp, Artificial Sequence
  chemically synthesized
cctcctctttcccctcccca

SEQ ID NO: 5777 - DNA, 20 bp, Artificial Sequence
  chemically synthesized
ctcctctttcccctccccag

SEQ ID NO: 5778 - DNA, 20 bp, Artificial Sequence
  chemically synthesized
tcctctttcccctccccaga

SEQ ID NO: 5779 - DNA, 20 bp, Artificial Sequence
  chemically synthesized
cctccccagagggcattacc

SEQ ID NO: 5780 - DNA, 20 bp, Artificial Sequence
  chemically synthesized
tccccagagggcattacctg

SEQ ID NO: 5781 - DNA, 20 bp, Artificial Sequence
  chemically synthesized
ccagagggcattacctggag

SEQ ID NO: 5782 - DNA, 20 bp, Artificial Sequence
  chemically synthesized
ttacctggagcagctgcctc

SEQ ID NO: 5783 - DNA, 20 bp, Artificial Sequence
  chemically synthesized
tacctggagcagctgcctct

SEQ ID NO: 5784 - DNA, 20 bp, Artificial Sequence
  chemically synthesized
acctggagcagctgcctcta

SEQ ID NO: 5785 - DNA, 20 bp, Artificial Sequence
  chemically synthesized
gctgcctctagggatgaact

SEQ ID NO: 5786 - DNA, 20 bp, Artificial Sequence
  chemically synthesized
gcctctagggatgaactgag

SEQ ID NO: 5787 - DNA, 20 bp, Artificial Sequence
  chemically synthesized
ctagggatgaactgagcaga

SEQ ID NO: 5788 - DNA, 20 bp, Artificial Sequence
  chemically synthesized
tagggatgaactgagcagac

SEQ ID NO: 5789 - DNA, 20 bp, Artificial Sequence
  chemically synthesized
ggatgaactgagcagacagg

SEQ ID NO: 5790 - DNA, 20 bp, Artificial Sequence
  chemically synthesized
gatgaactgagcagacaggc

SEQ ID NO: 5791 - DNA, 20 bp, Artificial Sequence
  chemically synthesized
tgaactgagcagacaggcag

SEQ ID NO: 5792 - DNA, 20 bp, Artificial Sequence
  chemically synthesized
gaactgagcagacaggcagg

SEQ ID NO: 5793 - DNA, 20 bp, Artificial Sequence
  chemically synthesized
aactgagcagacaggcagga

SEQ ID NO: 5794 - DNA, 20 bp, Artificial Sequence
  chemically synthesized
gacctgttttatatcatctc

SEQ ID NO: 5795 - DNA, 20 bp, Artificial Sequence
  chemically synthesized
acctgttttatatcatctcc

SEQ ID NO: 5796 - DNA, 20 bp, Artificial Sequence
  chemically synthesized
cctgttttatatcatctcca

SEQ ID NO: 5797 - DNA, 20 bp, Artificial Sequence
  chemically synthesized
gttttatatcatctccaggg

SEQ ID NO: 5798 - DNA, 20 bp, Artificial Sequence
  chemically synthesized
ttatatcatctccagggcag

SEQ ID NO: 5799 - DNA, 20 bp, Artificial Sequence
  chemically synthesized
tatatcatctccagggcagc

SEQ ID NO: 5800 - DNA, 20 bp, Artificial Sequence
  chemically synthesized
tctccagggcagcaggcact

SEQ ID NO: 5801 - DNA, 20 bp, Artificial Sequence
  chemically synthesized
ctccagggcagcaggcactg

SEQ ID NO: 5802 - DNA, 20 bp, Artificial Sequence
  chemically synthesized
ggcagcaggcactgaggacc

SEQ ID NO: 5803 - DNA, 20 bp, Artificial Sequence
  chemically synthesized
gcagcaggcactgaggaccc

SEQ ID NO: 5804 - DNA, 20 bp, Artificial Sequence
  chemically synthesized
cagcaggcactgaggaccca

SEQ ID NO: 5805 - DNA, 20 bp, Artificial Sequence
  chemically synthesized
gcactgaggacccagggcgc

SEQ ID NO: 5806 - DNA, 20 bp, Artificial Sequence
  chemically synthesized
cactgaggacccagggcgct

SEQ ID NO: 5807 - DNA, 20 bp, Artificial Sequence
  chemically synthesized
aggacccagggcgctgggca

SEQ ID NO: 5808 - DNA, 20 bp, Artificial Sequence
  chemically synthesized
ggacccagggcgctgggcaa

SEQ ID NO: 5809 - DNA, 20 bp, Artificial Sequence
  chemically synthesized
ggcaaaggtcacctgctgac

SEQ ID NO: 5810 - DNA, 20 bp, Artificial Sequence
  chemically synthesized
aaaggtcacctgctgaccag

SEQ ID NO: 5811 - DNA, 20 bp, Artificial Sequence
  chemically synthesized
aggtcacctgctgaccagtg

SEQ ID NO: 5812 - DNA, 20 bp, Artificial Sequence
  chemically synthesized
acctgctgaccagtggagat

SEQ ID NO: 5813 - DNA, 20 bp, Artificial Sequence
  chemically synthesized
cctgctgaccagtggagatg

SEQ ID NO: 5814 - DNA, 20 bp, Artificial Sequence
  chemically synthesized
ctgctgaccagtggagatga

SEQ ID NO: 5815 - DNA, 20 bp, Artificial Sequence
  chemically synthesized
accagtggagatgagggcct

SEQ ID NO: 5816 - DNA, 20 bp, Artificial Sequence
  chemically synthesized
ccagtggagatgagggcctg

SEQ ID NO: 5817 - DNA, 20 bp, Artificial Sequence
  chemically synthesized
gtggagatgagggcctgagg

SEQ ID NO: 5818 - DNA, 20 bp, Artificial Sequence
  chemically synthesized
tggagatgagggcctgaggc

SEQ ID NO: 5819 - DNA, 20 bp, Artificial Sequence
  chemically synthesized
ggagatgagggcctgaggca

SEQ ID NO: 5820 - DNA, 20 bp, Artificial Sequence
  chemically synthesized
agggcctgaggcagggtgtc

SEQ ID NO: 5821 - DNA, 20 bp, Artificial Sequence
  chemically synthesized
tgaggcagggtgtccagatg

SEQ ID NO: 5822 - DNA, 20 bp, Artificial Sequence
  chemically synthesized
gcagggtgtccagatgcagc

SEQ ID NO: 5823 - DNA, 20 bp, Artificial Sequence
  chemically synthesized
gggtgtccagatgcagcaag

SEQ ID NO: 5824 - DNA, 20 bp, Artificial Sequence
  chemically synthesized
ggtgtccagatgcagcaagc

SEQ ID NO: 5825 - DNA, 20 bp, Artificial Sequence
  chemically synthesized
gtccagatgcagcaagcggg

SEQ ID NO: 5826 - DNA, 20 bp, Artificial Sequence
  chemically synthesized
tccagatgcagcaagcgggc

SEQ ID NO: 5827 - DNA, 20 bp, Artificial Sequence
  chemically synthesized
cagatgcagcaagcgggcgg

SEQ ID NO: 5828 - DNA, 20 bp, Artificial Sequence
  chemically synthesized
gatgcagcaagcgggcggga

SEQ ID NO: 5829 - DNA, 20 bp, Artificial Sequence
  chemically synthesized
cagcaagcgggcgggagagt

SEQ ID NO: 5830 - DNA, 20 bp, Artificial Sequence
  chemically synthesized
agcaagcgggcgggagagtt

SEQ ID NO: 5831 - DNA, 20 bp, Artificial Sequence
  chemically synthesized
cgggagagttgggaaatccc

SEQ ID NO: 5832 - DNA, 20 bp, Artificial Sequence
  chemically synthesized
gggagagttgggaaatccct

SEQ ID NO: 5833 - DNA, 20 bp, Artificial Sequence
  chemically synthesized
gagagttgggaaatccctag

SEQ ID NO: 5834 - DNA, 20 bp, Artificial Sequence
  chemically synthesized
tgggaaatccctaggagact

SEQ ID NO: 5835 - DNA, 20 bp, Artificial Sequence
  chemically synthesized
ggtgacctttgcccagcgcc

SEQ ID NO: 5836 - DNA, 20 bp, Artificial Sequence
  chemically synthesized
gaggggaaagaggaggggag

SEQ ID NO: 5837 - DNA, 20 bp, Artificial Sequence
  chemically synthesized
taaggaagcctcggagctgg

SEQ ID NO: 5838 - DNA, 20 bp, Artificial Sequence
  chemically synthesized
gaagaacatggaggcccggg

SEQ ID NO: 5839 - DNA, 20 bp, Artificial Sequence
  chemically synthesized
cacttgcccaaagctacaca

SEQ ID NO: 5840 - DNA, 20 bp, Artificial Sequence
  chemically synthesized
gtgccttgatgttcagtctg

SEQ ID NO: 5841 - DNA, 20 bp, Artificial Sequence
  chemically synthesized
gccacgccacctccccaggg

SEQ ID NO: 5842 - DNA, 20 bp, Artificial Sequence
  chemically synthesized
ggtccagaggcatggggacc

SEQ ID NO: 5843 - DNA, 20 bp, Artificial Sequence
  chemically synthesized
aacagaggtgccatgcagcc

SEQ ID NO: 5844 - DNA, 20 bp, Artificial Sequence
  chemically synthesized
tggtgggactgggctggggg

SEQ ID NO: 5845 - DNA, 20 bp, Artificial Sequence
  chemically synthesized
gcgccaggagggcaacaaca

SEQ ID NO: 5846 - DNA, 20 bp, Artificial Sequence
  chemically synthesized
cccctaaggtagaaccttag

SEQ ID NO: 5847 - DNA, 20 bp, Artificial Sequence
  chemically synthesized
ccttagctgggtctgccaga

SEQ ID NO: 5848 - DNA, 20 bp, Artificial Sequence
  chemically synthesized
agggggactggtgaggggcg

SEQ ID NO: 5849 - DNA, 20 bp, Artificial Sequence
  chemically synthesized
ggatcgaggcccaaagggag

SEQ ID NO: 5850 - DNA, 20 bp, Artificial Sequence
  chemically synthesized
gaggcccaaagggaggtggg

SEQ ID NO: 5851 - DNA, 20 bp, Artificial Sequence
  chemically synthesized
agccaacatgctgtgtgtct

SEQ ID NO: 5852 - DNA, 20 bp, Artificial Sequence
  chemically synthesized
caggcctcagtttccctgtc

SEQ ID NO: 5853 - DNA, 20 bp, Artificial Sequence
  chemically synthesized
ttcctccagccctaagcctg

SEQ ID NO: 5854 - DNA, 20 bp, Artificial Sequence
  chemically synthesized
atgttcttcaggttatgatg

SEQ ID NO: 5855 - DNA, 20 bp, Artificial Sequence
  chemically synthesized
tacctggagcagctgcctct

SEQ ID NO: 5856 - DNA, 20 bp, Artificial Sequence
  chemically synthesized
tgaactgagcagacaggcag

SEQ ID NO: 5857 - DNA, 20 bp, Artificial Sequence
  chemically synthesized
gtggagatgagggcctgagg

SEQ ID NO: 5858 - DNA, 20 bp, Artificial Sequence
  chemically synthesized
cagatgcagcaagcgggcgg

SEQ ID NO: 5859 - DNA, 20 bp, Artificial Sequence
  chemically synthesized
gttgggaaatccctaggaga

SEQ ID NO: 5860 - DNA, 20 bp, Artificial Sequence
  chemically synthesized
aaactgaggcctggagaggg

SEQ ID NO: 5861 - DNA, 20 bp, Artificial Sequence
  chemically synthesized
agggaggtgggtgggatgga

SEQ ID NO: 5862 - DNA, 20 bp, Artificial Sequence
  chemically synthesized
cttcctccagccctaagcct

SEQ ID NO: 5863 - DNA, 20 bp, Artificial Sequence
  chemically synthesized
ctgctgccctggagatgata

SEQ ID NO: 5864 - DNA, 20 bp, Artificial Sequence
  chemically synthesized
gaggtgggtgggatggagca

SEQ ID NO: 5865 - DNA, 20 bp, Artificial Sequence
  chemically synthesized
agggatttcccaactctccc

SEQ ID NO: 5866 - DNA, 20 bp, Artificial Sequence
  chemically synthesized
gcaggttcccccctcattct

SEQ ID NO: 5867 - DNA, 20 bp, Artificial Sequence
  chemically synthesized
gtgccttgatgttcagtctg

SEQ ID NO: 5868 - DNA, 20 bp, Artificial Sequence
  chemically synthesized
gcccccagcccagtcccacc

SEQ ID NO: 5869 - DNA, 20 bp, Artificial Sequence
  chemically synthesized
ccaacatgctgtgtgtcttt

SEQ ID NO: 5870 - DNA, 20 bp, Artificial Sequence
  chemically synthesized
atttctggccctctccaggc

SEQ ID NO: 5871 - DNA, 20 bp, Artificial Sequence
  chemically synthesized
tggggtaggactgggctgtc

SEQ ID NO: 5872 - DNA, 20 bp, Artificial Sequence
  chemically synthesized
acttccagccccaccccctg

SEQ ID NO: 5873 - DNA, 20 bp, Artificial Sequence
  chemically synthesized
ggggggcacccgtccagctc

SEQ ID NO: 5874 - DNA, 20 bp, Artificial Sequence
  chemically synthesized
gaggcttccttagctctagc

SEQ ID NO: 5875 - DNA, 20 bp, Artificial Sequence
  chemically synthesized
tagctctagcaagtgcttct

SEQ ID NO: 5876 - DNA, 20 bp, Artificial Sequence
  chemically synthesized
agacaggcaggagggttctg

SEQ ID NO: 5877 - DNA, 22 bp, Artificial Sequence
  chemically synthesized
agtctcctagggatttcccaac

SEQ ID NO: 5878 - DNA, 22 bp, Artificial Sequence
  chemically synthesized
ctagggatttcccaactctccc

SEQ ID NO: 5879 - DNA, 22 bp, Artificial Sequence
  chemically synthesized
gggatttcccaactctcccgcc

SEQ ID NO: 5880 - DNA, 22 bp, Artificial Sequence
  chemically synthesized
cccaactctcccgcccgcttgc

SEQ ID NO: 5881 - DNA, 22 bp, Artificial Sequence
  chemically synthesized
ccaactctcccgcccgcttgct

SEQ ID NO: 5882 - DNA, 22 bp, Artificial Sequence
  chemically synthesized
tcccgcccgcttgctgcatctg

SEQ ID NO: 5883 - DNA, 22 bp, Artificial Sequence
  chemically synthesized
ccgcccgcttgctgcatctgga

SEQ ID NO: 5884 - DNA, 22 bp, Artificial Sequence
  chemically synthesized
gctgcatctggacaccctgcct

SEQ ID NO: 5885 - DNA, 22 bp, Artificial Sequence
  chemically synthesized
ctgcatctggacaccctgcctc

SEQ ID NO: 5886 - DNA, 22 bp, Artificial Sequence
  chemically synthesized
catctggacaccctgcctcagg

SEQ ID NO: 5887 - DNA, 22 bp, Artificial Sequence
  chemically synthesized
gacaccctgcctcaggccctca

SEQ ID NO: 5888 - DNA, 22 bp, Artificial Sequence
  chemically synthesized
cctcaggccctcatctccactg

SEQ ID NO: 5889 - DNA, 22 bp, Artificial Sequence
  chemically synthesized
aggccctcatctccactggtca

SEQ ID NO: 5890 - DNA, 22 bp, Artificial Sequence
  chemically synthesized
atctccactggtcagcaggtga

SEQ ID NO: 5891 - DNA, 22 bp, Artificial Sequence
  chemically synthesized
cactggtcagcaggtgaccttt

SEQ ID NO: 5892 - DNA, 22 bp, Artificial Sequence
  chemically synthesized
gtcagcaggtgacctttgccca

SEQ ID NO: 5893 - DNA, 22 bp, Artificial Sequence
  chemically synthesized
tgcccagcgccctgggtcctca

SEQ ID NO: 5894 - DNA, 22 bp, Artificial Sequence
  chemically synthesized
gcccagcgccctgggtcctcag

SEQ ID NO: 5895 - DNA, 22 bp, Artificial Sequence
  chemically synthesized
cccagcgccctgggtcctcagt

SEQ ID NO: 5896 - DNA, 22 bp, Artificial Sequence
  chemically synthesized
ggtcctcagtgcctgctgccct

SEQ ID NO: 5897 - DNA, 22 bp, Artificial Sequence
  chemically synthesized
agtgcctgctgccctggagatg

SEQ ID NO: 5898 - DNA, 22 bp, Artificial Sequence
  chemically synthesized
ctgccctggagatgatataaaa

SEQ ID NO: 5899 - DNA, 22 bp, Artificial Sequence
  chemically synthesized
ccctggagatgatataaaacag

SEQ ID NO: 5900 - DNA, 22 bp, Artificial Sequence
  chemically synthesized
gagatgatataaaacaggtcag

SEQ ID NO: 5901 - DNA, 22 bp, Artificial Sequence
  chemically synthesized
ctgcctgtctgctcagttcatc

SEQ ID NO: 5902 - DNA, 22 bp, Artificial Sequence
  chemically synthesized
cctgtctgctcagttcatccct

SEQ ID NO: 5903 - DNA, 22 bp, Artificial Sequence
  chemically synthesized
tctgctcagttcatccctagag

SEQ ID NO: 5904 - DNA, 22 bp, Artificial Sequence
  chemically synthesized
ctcagttcatccctagaggcag

SEQ ID NO: 5905 - DNA, 22 bp, Artificial Sequence
  chemically synthesized
agttcatccctagaggcagctg

SEQ ID NO: 5906 - DNA, 22 bp, Artificial Sequence
  chemically synthesized
atccctagaggcagctgctcca

SEQ ID NO: 5907 - DNA, 22 bp, Artificial Sequence
  chemically synthesized
gaggcagctgctccaggtaatg

SEQ ID NO: 5908 - DNA, 22 bp, Artificial Sequence
  chemically synthesized
ctccaggtaatgccctctgggg

SEQ ID NO: 5909 - DNA, 22 bp, Artificial Sequence
  chemically synthesized
caggtaatgccctctggggagg

SEQ ID NO: 5910 - DNA, 22 bp, Artificial Sequence
  chemically synthesized
tggggaggggaaagaggagggg

SEQ ID NO: 5911 - DNA, 22 bp, Artificial Sequence
  chemically synthesized
gggaggggaaagaggaggggag

SEQ ID NO: 5912 - DNA, 22 bp, Artificial Sequence
  chemically synthesized
cctgcccagcccagccagcaag

SEQ ID NO: 5913 - DNA, 22 bp, Artificial Sequence
  chemically synthesized
cccagcccagccagcaagcctg

SEQ ID NO: 5914 - DNA, 22 bp, Artificial Sequence
  chemically synthesized
gagaagcacttgctagagctaa

SEQ ID NO: 5915 - DNA, 22 bp, Artificial Sequence
  chemically synthesized
gctagagctaaggaagcctcgg

SEQ ID NO: 5916 - DNA, 22 bp, Artificial Sequence
  chemically synthesized
ctagagctaaggaagcctcgga

SEQ ID NO: 5917 - DNA, 22 bp, Artificial Sequence
  chemically synthesized
gagctaaggaagcctcggagct

SEQ ID NO: 5918 - DNA, 22 bp, Artificial Sequence
  chemically synthesized
aggaagcctcggagctggacgg

SEQ ID NO: 5919 - DNA, 22 bp, Artificial Sequence
  chemically synthesized
ggagctggacgggtgcccccca

SEQ ID NO: 5920 - DNA, 22 bp, Artificial Sequence
  chemically synthesized
gacgggtgccccccacccctca

SEQ ID NO: 5921 - DNA, 22 bp, Artificial Sequence
  chemically synthesized
atcataacctgaagaacatgga

SEQ ID NO: 5922 - DNA, 22 bp, Artificial Sequence
  chemically synthesized
aagaacatggaggcccgggagg

SEQ ID NO: 5923 - DNA, 22 bp, Artificial Sequence
  chemically synthesized
gcccaaagctacacagggggtg

SEQ ID NO: 5924 - DNA, 22 bp, Artificial Sequence
  chemically synthesized
cccaaagctacacagggggtgg

SEQ ID NO: 5925 - DNA, 22 bp, Artificial Sequence
  chemically synthesized
cacagggggtggggctggaagt

SEQ ID NO: 5926 - DNA, 22 bp, Artificial Sequence
  chemically synthesized
gaagtggctccaagtgcaggtt

SEQ ID NO: 5927 - DNA, 22 bp, Artificial Sequence
  chemically synthesized
caagtgcaggttcccccctcat

SEQ ID NO: 5928 - DNA, 22 bp, Artificial Sequence
  chemically synthesized
ccccctcattcttcaggcttag

SEQ ID NO: 5929 - DNA, 22 bp, Artificial Sequence
  chemically synthesized
attcttcaggcttagggctgga

SEQ ID NO: 5930 - DNA, 22 bp, Artificial Sequence
  chemically synthesized
ttcaggcttagggctggaggaa

SEQ ID NO: 5931 - DNA, 22 bp, Artificial Sequence
  chemically synthesized
caggcttagggctggaggaagc

SEQ ID NO: 5932 - DNA, 22 bp, Artificial Sequence
  chemically synthesized
aggcttagggctggaggaagcc

SEQ ID NO: 5933 - DNA, 22 bp, Artificial Sequence
  chemically synthesized
agggctggaggaagccttagac

SEQ ID NO: 5934 - DNA, 22 bp, Artificial Sequence
  chemically synthesized
gggctggaggaagccttagaca

SEQ ID NO: 5935 - DNA, 22 bp, Artificial Sequence
  chemically synthesized
gaggaagccttagacagcccag

SEQ ID NO: 5936 - DNA, 22 bp, Artificial Sequence
  chemically synthesized
agacagcccagtcctaccccag

SEQ ID NO: 5937 - DNA, 22 bp, Artificial Sequence
  chemically synthesized
gacagcccagtcctaccccaga

SEQ ID NO: 5938 - DNA, 22 bp, Artificial Sequence
  chemically synthesized
ccccagacagggaaactgaggc

SEQ ID NO: 5939 - DNA, 22 bp, Artificial Sequence
  chemically synthesized
aggcctggagagggccagaaat

SEQ ID NO: 5940 - DNA, 22 bp, Artificial Sequence
  chemically synthesized
gagagggccagaaatcacccaa

SEQ ID NO: 5941 - DNA, 22 bp, Artificial Sequence
  chemically synthesized
gctggactggacggagatcagt

SEQ ID NO: 5942 - DNA, 22 bp, Artificial Sequence
  chemically synthesized
gactggacggagatcagtccag

SEQ ID NO: 5943 - DNA, 22 bp, Artificial Sequence
  chemically synthesized
gacggagatcagtccagaccgc

SEQ ID NO: 5944 - DNA, 22 bp, Artificial Sequence
  chemically synthesized
gatgttcagtctggtgggtttt

SEQ ID NO: 5945 - DNA, 22 bp, Artificial Sequence
  chemically synthesized
atgttcagtctggtgggttttc

SEQ ID NO: 5946 - DNA, 22 bp, Artificial Sequence
  chemically synthesized
agtctggtgggttttctgctcc

SEQ ID NO: 5947 - DNA, 22 bp, Artificial Sequence
  chemically synthesized
gtgggttttctgctccatccca

SEQ ID NO: 5948 - DNA, 22 bp, Artificial Sequence
  chemically synthesized
tctgctccatcccacccacctc

SEQ ID NO: 5949 - DNA, 22 bp, Artificial Sequence
  chemically synthesized
ctgctccatcccacccacctcc

SEQ ID NO: 5950 - DNA, 22 bp, Artificial Sequence
  chemically synthesized
tgctccatcccacccacctccc

SEQ ID NO: 5951 - DNA, 22 bp, Artificial Sequence
  chemically synthesized
ctccatcccacccacctccctt

SEQ ID NO: 5952 - DNA, 22 bp, Artificial Sequence
  chemically synthesized
catcccacccacctccctttgg

SEQ ID NO: 5953 - DNA, 22 bp, Artificial Sequence
  chemically synthesized
cctttgggcctcgatccctcgc

SEQ ID NO: 5954 - DNA, 22 bp, Artificial Sequence
  chemically synthesized
tgggcctcgatccctcgcccct

SEQ ID NO: 5955 - DNA, 22 bp, Artificial Sequence
  chemically synthesized
gggcctcgatccctcgcccctc

SEQ ID NO: 5956 - DNA, 22 bp, Artificial Sequence
  chemically synthesized
ggcctcgatccctcgcccctca

SEQ ID NO: 5957 - DNA, 22 bp, Artificial Sequence
  chemically synthesized
gatccctcgcccctcaccagtc

SEQ ID NO: 5958 - DNA, 22 bp, Artificial Sequence
  chemically synthesized
gcccctcaccagtcccccttct

SEQ ID NO: 5959 - DNA, 22 bp, Artificial Sequence
  chemically synthesized
accagtcccccttctgagagcc

SEQ ID NO: 5960 - DNA, 22 bp, Artificial Sequence
  chemically synthesized
ctgagagcccgtattagcaggg

SEQ ID NO: 5961 - DNA, 22 bp, Artificial Sequence
  chemically synthesized
tgagagcccgtattagcaggga

SEQ ID NO: 5962 - DNA, 22 bp, Artificial Sequence
  chemically synthesized
agagcccgtattagcagggagc

SEQ ID NO: 5963 - DNA, 22 bp, Artificial Sequence
  chemically synthesized
gcagggagccggcccctactcc

SEQ ID NO: 5964 - DNA, 22 bp, Artificial Sequence
  chemically synthesized
ctccttctggcagacccagcta

SEQ ID NO: 5965 - DNA, 22 bp, Artificial Sequence
  chemically synthesized
cttctggcagacccagctaagg

SEQ ID NO: 5966 - DNA, 22 bp, Artificial Sequence
  chemically synthesized
ctggcagacccagctaaggttc

SEQ ID NO: 5967 - DNA, 22 bp, Artificial Sequence
  chemically synthesized
tggcagacccagctaaggttct

SEQ ID NO: 5968 - DNA, 22 bp, Artificial Sequence
  chemically synthesized
gcagacccagctaaggttctac

SEQ ID NO: 5969 - DNA, 22 bp, Artificial Sequence
  chemically synthesized
aggttctaccttaggggccacg

SEQ ID NO: 5970 - DNA, 22 bp, Artificial Sequence
  chemically synthesized
taccttaggggccacgccacct

SEQ ID NO: 5971 - DNA, 22 bp, Artificial Sequence
  chemically synthesized
ccttaggggccacgccacctcc

SEQ ID NO: 5972 - DNA, 22 bp, Artificial Sequence
  chemically synthesized
aggggccacgccacctccccag

SEQ ID NO: 5973 - DNA, 22 bp, Artificial Sequence
  chemically synthesized
ggggccacgccacctccccagg

SEQ ID NO: 5974 - DNA, 22 bp, Artificial Sequence
  chemically synthesized
cccagggaggggtccagaggca

SEQ ID NO: 5975 - DNA, 22 bp, Artificial Sequence
  chemically synthesized
gggtgcccctcacaggacactt

SEQ ID NO: 5976 - DNA, 22 bp, Artificial Sequence
  chemically synthesized
acaggacacttccttgcaggaa

SEQ ID NO: 5977 - DNA, 22 bp, Artificial Sequence
  chemically synthesized
ccttgcaggaacagaggtgcca

SEQ ID NO: 5978 - DNA, 22 bp, Artificial Sequence
  chemically synthesized
cttgcaggaacagaggtgccat

SEQ ID NO: 5979 - DNA, 22 bp, Artificial Sequence
  chemically synthesized
gcaggaacagaggtgccatgca

SEQ ID NO: 5980 - DNA, 22 bp, Artificial Sequence
  chemically synthesized
caggaacagaggtgccatgcag

SEQ ID NO: 5981 - DNA, 22 bp, Artificial Sequence
  chemically synthesized
cttgttgttgccctcctggcgc

SEQ ID NO: 5982 - DNA, 22 bp, Artificial Sequence
  chemically synthesized
gttgttgccctcctggcgctcc

SEQ ID NO: 5983 - DNA, 22 bp, Artificial Sequence
  chemically synthesized
ttgttgccctcctggcgctcct

SEQ ID NO: 5984 - DNA, 22 bp, Artificial Sequence
  chemically synthesized
ttgccctcctggcgctcctggc

SEQ ID NO: 5985 - DNA, 22 bp, Artificial Sequence
  chemically synthesized
ccctcctggcgctcctggcctc

SEQ ID NO: 5986 - DNA, 22 bp, Artificial Sequence
  chemically synthesized
ctggcgctcctggcctctgccc

SEQ ID NO: 5987 - DNA, 22 bp, Artificial Sequence
  chemically synthesized
gcgctcctggcctctgcccgta

SEQ ID NO: 5988 - DNA, 22 bp, Artificial Sequence
  chemically synthesized
ctggcctctgcccgtaagcact

SEQ ID NO: 5989 - DNA, 22 bp, Artificial Sequence
  chemically synthesized
gcctctgcccgtaagcacttgg

SEQ ID NO: 5990 - DNA, 22 bp, Artificial Sequence
  chemically synthesized
tgcccgtaagcacttggtggga

SEQ ID NO: 5991 - DNA, 22 bp, Artificial Sequence
  chemically synthesized
cccgtaagcacttggtgggact

SEQ ID NO: 5992 - DNA, 22 bp, Artificial Sequence
  chemically synthesized
ggtgggactgggctgggggcag

SEQ ID NO: 5993 - DNA, 22 bp, Artificial Sequence
  chemically synthesized
gtgggactgggctgggggcagg

SEQ ID NO: 5994 - DNA, 22 bp, Artificial Sequence
  chemically synthesized
cccccagcccagtcccaccaag

SEQ ID NO: 5995 - DNA, 22 bp, Artificial Sequence
  chemically synthesized
acgggcagaggccaggagcgcc

SEQ ID NO: 5996 - DNA, 22 bp, Artificial Sequence
  chemically synthesized
cgggcagaggccaggagcgcca

SEQ ID NO: 5997 - DNA, 22 bp, Artificial Sequence
  chemically synthesized
catggcacctctgttcctgcaa

SEQ ID NO: 5998 - DNA, 22 bp, Artificial Sequence
  chemically synthesized
tgttcctgcaaggaagtgtcct

SEQ ID NO: 5999 - DNA, 22 bp, Artificial Sequence
  chemically synthesized
ttcctgcaaggaagtgtcctgt

SEQ ID NO: 6000 - DNA, 22 bp, Artificial Sequence
  chemically synthesized
ctgcaaggaagtgtcctgtgag

SEQ ID NO: 6001 - DNA, 22 bp, Artificial Sequence
  chemically synthesized
caaggaagtgtcctgtgagggg

SEQ ID NO: 6002 - DNA, 22 bp, Artificial Sequence
  chemically synthesized
tgaggggcaccccaggtcccca

SEQ ID NO: 6003 - DNA, 22 bp, Artificial Sequence
  chemically synthesized
tggacccctccctggggaggtg

SEQ ID NO: 6004 - DNA, 22 bp, Artificial Sequence
  chemically synthesized
gacccctccctggggaggtggc

SEQ ID NO: 6005 - DNA, 22 bp, Artificial Sequence
  chemically synthesized
cctggggaggtggcgtggcccc

SEQ ID NO: 6006 - DNA, 22 bp, Artificial Sequence
  chemically synthesized
gggaggtggcgtggcccctaag

SEQ ID NO: 6007 - DNA, 22 bp, Artificial Sequence
  chemically synthesized
aggtagaaccttagctgggtct

SEQ ID NO: 6008 - DNA, 22 bp, Artificial Sequence
  chemically synthesized
agctgggtctgccagaaggagt

SEQ ID NO: 6009 - DNA, 22 bp, Artificial Sequence
  chemically synthesized
gctgggtctgccagaaggagta

SEQ ID NO: 6010 - DNA, 22 bp, Artificial Sequence
  chemically synthesized
ggtctgccagaaggagtagggg

SEQ ID NO: 6011 - DNA, 22 bp, Artificial Sequence
  chemically synthesized
ccagaaggagtaggggccggct

SEQ ID NO: 6012 - DNA, 22 bp, Artificial Sequence
  chemically synthesized
cctgctaatacgggctctcaga

SEQ ID NO: 6013 - DNA, 22 bp, Artificial Sequence
  chemically synthesized
ctaatacgggctctcagaaggg

SEQ ID NO: 6014 - DNA, 22 bp, Artificial Sequence
  chemically synthesized
atacgggctctcagaaggggga

SEQ ID NO: 6015 - DNA, 22 bp, Artificial Sequence
  chemically synthesized
tcagaagggggactggtgaggg

SEQ ID NO: 6016 - DNA, 22 bp, Artificial Sequence
  chemically synthesized
agaagggggactggtgaggggc

SEQ ID NO: 6017 - DNA, 22 bp, Artificial Sequence
  chemically synthesized
gtgaggggcgagggatcgaggc

SEQ ID NO: 6018 - DNA, 22 bp, Artificial Sequence
  chemically synthesized
aacatcaaggcacctgcggtct

SEQ ID NO: 6019 - DNA, 22 bp, Artificial Sequence
  chemically synthesized
cggtctggactgatctccgtcc

SEQ ID NO: 6020 - DNA, 22 bp, Artificial Sequence
  chemically synthesized
gactgatctccgtccagtccag

SEQ ID NO: 6021 - DNA, 22 bp, Artificial Sequence
  chemically synthesized
atctccgtccagtccagccaac

SEQ ID NO: 6022 - DNA, 22 bp, Artificial Sequence
  chemically synthesized
cgtccagtccagccaacatgct

SEQ ID NO: 6023 - DNA, 22 bp, Artificial Sequence
  chemically synthesized
tgtgtctttgggtgatttctgg

SEQ ID NO: 6024 - DNA, 22 bp, Artificial Sequence
  chemically synthesized
tgggtgatttctggccctctcc

SEQ ID NO: 6025 - DNA, 22 bp, Artificial Sequence
  chemically synthesized
gggtgatttctggccctctcca

SEQ ID NO: 6026 - DNA, 22 bp, Artificial Sequence
  chemically synthesized
ggtgatttctggccctctccag

SEQ ID NO: 6027 - DNA, 22 bp, Artificial Sequence
  chemically synthesized
ctggccctctccaggcctcagt

SEQ ID NO: 6028 - DNA, 22 bp, Artificial Sequence
  chemically synthesized
tggccctctccaggcctcagtt

SEQ ID NO: 6029 - DNA, 22 bp, Artificial Sequence
  chemically synthesized
gccctctccaggcctcagtttc

SEQ ID NO: 6030 - DNA, 22 bp, Artificial Sequence
  chemically synthesized
tccaggcctcagtttccctgtc

SEQ ID NO: 6031 - DNA, 22 bp, Artificial Sequence
  chemically synthesized
caggcctcagtttccctgtctg

SEQ ID NO: 6032 - DNA, 22 bp, Artificial Sequence
  chemically synthesized
agtttccctgtctggggtagga

SEQ ID NO: 6033 - DNA, 22 bp, Artificial Sequence
  chemically synthesized
ccctgtctggggtaggactggg

SEQ ID NO: 6034 - DNA, 22 bp, Artificial Sequence
  chemically synthesized
cctgtctggggtaggactgggc

SEQ ID NO: 6035 - DNA, 22 bp, Artificial Sequence
  chemically synthesized
tctggggtaggactgggctgtc

SEQ ID NO: 6036 - DNA, 22 bp, Artificial Sequence
  chemically synthesized
gggtaggactgggctgtctaag

SEQ ID NO: 6037 - DNA, 22 bp, Artificial Sequence
  chemically synthesized
ggctgtctaaggcttcctccag

SEQ ID NO: 6038 - DNA, 22 bp, Artificial Sequence
  chemically synthesized
tctaaggcttcctccagcccta

SEQ ID NO: 6039 - DNA, 22 bp, Artificial Sequence
  chemically synthesized
aggcttcctccagccctaagcc

SEQ ID NO: 6040 - DNA, 22 bp, Artificial Sequence
  chemically synthesized
cctccagccctaagcctgaaga

SEQ ID NO: 6041 - DNA, 22 bp, Artificial Sequence
  chemically synthesized
ctccagccctaagcctgaagaa

SEQ ID NO: 6042 - DNA, 22 bp, Artificial Sequence
  chemically synthesized
cagccctaagcctgaagaatga

SEQ ID NO: 6043 - DNA, 22 bp, Artificial Sequence
  chemically synthesized
agcctgaagaatgaggggggaa

SEQ ID NO: 6044 - DNA, 22 bp, Artificial Sequence
  chemically synthesized
aagaatgaggggggaacctgca

SEQ ID NO: 6045 - DNA, 22 bp, Artificial Sequence
  chemically synthesized
cacttggagccacttccagccc

SEQ ID NO: 6046 - DNA, 22 bp, Artificial Sequence
  chemically synthesized
ggagccacttccagccccaccc

SEQ ID NO: 6047 - DNA, 22 bp, Artificial Sequence
  chemically synthesized
gagccacttccagccccacccc

SEQ ID NO: 6048 - DNA, 22 bp, Artificial Sequence
  chemically synthesized
ccagccccaccccctgtgtagc

SEQ ID NO: 6049 - DNA, 22 bp, Artificial Sequence
  chemically synthesized
cagccccaccccctgtgtagct

SEQ ID NO: 6050 - DNA, 22 bp, Artificial Sequence
  chemically synthesized
tgtagctttgggcaagtgacac

SEQ ID NO: 6051 - DNA, 22 bp, Artificial Sequence
  chemically synthesized
tgggcaagtgacacccctcccg

SEQ ID NO: 6052 - DNA, 22 bp, Artificial Sequence
  chemically synthesized
gggcaagtgacacccctcccgg

SEQ ID NO: 6053 - DNA, 22 bp, Artificial Sequence
  chemically synthesized
ggcaagtgacacccctcccggg

SEQ ID NO: 6054 - DNA, 22 bp, Artificial Sequence
  chemically synthesized
ccgggcctccatgttcttcagg

SEQ ID NO: 6055 - DNA, 22 bp, Artificial Sequence
  chemically synthesized
catgttcttcaggttatgatga

SEQ ID NO: 6056 - DNA, 22 bp, Artificial Sequence
  chemically synthesized
ttcaggttatgatgaggggtgg

SEQ ID NO: 6057 - DNA, 22 bp, Artificial Sequence
  chemically synthesized
caggttatgatgaggggtgggg

SEQ ID NO: 6058 - DNA, 22 bp, Artificial Sequence
  chemically synthesized
aggttatgatgaggggtggggg

SEQ ID NO: 6059 - DNA, 22 bp, Artificial Sequence
  chemically synthesized
tgatgaggggtggggggcaccc

SEQ ID NO: 6060 - DNA, 22 bp, Artificial Sequence
  chemically synthesized
cgaggcttccttagctctagca

SEQ ID NO: 6061 - DNA, 22 bp, Artificial Sequence
  chemically synthesized
ccttagctctagcaagtgcttc

SEQ ID NO: 6062 - DNA, 22 bp, Artificial Sequence
  chemically synthesized
cttagctctagcaagtgcttct

SEQ ID NO: 6063 - DNA, 22 bp, Artificial Sequence
  chemically synthesized
agctctagcaagtgcttctcca

SEQ ID NO: 6064 - DNA, 22 bp, Artificial Sequence
  chemically synthesized
gctctagcaagtgcttctccag

SEQ ID NO: 6065 - DNA, 22 bp, Artificial Sequence
  chemically synthesized
tagcaagtgcttctccaggctt

SEQ ID NO: 6066 - DNA, 22 bp, Artificial Sequence
  chemically synthesized
gcaagtgcttctccaggcttgc

SEQ ID NO: 6067 - DNA, 22 bp, Artificial Sequence
  chemically synthesized
ctccaggcttgctggctgggct

SEQ ID NO: 6068 - DNA, 22 bp, Artificial Sequence
  chemically synthesized
tccaggcttgctggctgggctg

SEQ ID NO: 6069 - DNA, 22 bp, Artificial Sequence
  chemically synthesized
caggcttgctggctgggctggg

SEQ ID NO: 6070 - DNA, 22 bp, Artificial Sequence
  chemically synthesized
gctggctgggctgggcagggag

SEQ ID NO: 6071 - DNA, 22 bp, Artificial Sequence
  chemically synthesized
ctggctgggctgggcagggagc

SEQ ID NO: 6072 - DNA, 22 bp, Artificial Sequence
  chemically synthesized
gctgggctgggcagggagctcc

SEQ ID NO: 6073 - DNA, 22 bp, Artificial Sequence
  chemically synthesized
ggctgggcagggagctcctctt

SEQ ID NO: 6074 - DNA, 22 bp, Artificial Sequence
  chemically synthesized
ggcagggagctcctcttgcccc

SEQ ID NO: 6075 - DNA, 22 bp, Artificial Sequence
  chemically synthesized
ctcttgcccctcttcatcctcc

SEQ ID NO: 6076 - DNA, 22 bp, Artificial Sequence
  chemically synthesized
ttgcccctcttcatcctcctcc

SEQ ID NO: 6077 - DNA, 22 bp, Artificial Sequence
  chemically synthesized
gcccctcttcatcctcctcccc

SEQ ID NO: 6078 - DNA, 22 bp, Artificial Sequence
  chemically synthesized
cccctcttcatcctcctcccct

SEQ ID NO: 6079 - DNA, 22 bp, Artificial Sequence
  chemically synthesized
ttcatcctcctcccctcctctt

SEQ ID NO: 6080 - DNA, 22 bp, Artificial Sequence
  chemically synthesized
catcctcctcccctcctctttc

SEQ ID NO: 6081 - DNA, 22 bp, Artificial Sequence
  chemically synthesized
atcctcctcccctcctctttcc

SEQ ID NO: 6082 - DNA, 22 bp, Artificial Sequence
  chemically synthesized
ctcccctcctctttcccctccc

SEQ ID NO: 6083 - DNA, 22 bp, Artificial Sequence
  chemically synthesized
ccctcctctttcccctccccag

SEQ ID NO: 6084 - DNA, 22 bp, Artificial Sequence
  chemically synthesized
ctctttcccctccccagagggc

SEQ ID NO: 6085 - DNA, 22 bp, Artificial Sequence
  chemically synthesized
tttcccctccccagagggcatt

SEQ ID NO: 6086 - DNA, 22 bp, Artificial Sequence
  chemically synthesized
tcccctccccagagggcattac

SEQ ID NO: 6087 - DNA, 22 bp, Artificial Sequence
  chemically synthesized
cccctccccagagggcattacc

SEQ ID NO: 6088 - DNA, 22 bp, Artificial Sequence
  chemically synthesized
ccctccccagagggcattacct

SEQ ID NO: 6089 - DNA, 22 bp, Artificial Sequence
  chemically synthesized
cccagagggcattacctggagc

SEQ ID NO: 6090 - DNA, 22 bp, Artificial Sequence
  chemically synthesized
cctggagcagctgcctctaggg

SEQ ID NO: 6091 - DNA, 22 bp, Artificial Sequence
  chemically synthesized
gagcagctgcctctagggatga

SEQ ID NO: 6092 - DNA, 22 bp, Artificial Sequence
  chemically synthesized
cctctagggatgaactgagcag

SEQ ID NO: 6093 - DNA, 22 bp, Artificial Sequence
  chemically synthesized
tagggatgaactgagcagacag

SEQ ID NO: 6094 - DNA, 22 bp, Artificial Sequence
  chemically synthesized
gggatgaactgagcagacaggc

SEQ ID NO: 6095 - DNA, 22 bp, Artificial Sequence
  chemically synthesized
agcagacaggcaggagggttct

SEQ ID NO: 6096 - DNA, 22 bp, Artificial Sequence
  chemically synthesized
tgacctgttttatatcatctcc

SEQ ID NO: 6097 - DNA, 22 bp, Artificial Sequence
  chemically synthesized
acctgttttatatcatctccag

SEQ ID NO: 6098 - DNA, 22 bp, Artificial Sequence
  chemically synthesized
ttttatatcatctccagggcag

SEQ ID NO: 6099 - DNA, 22 bp, Artificial Sequence
  chemically synthesized
tatatcatctccagggcagcag

SEQ ID NO: 6100 - DNA, 22 bp, Artificial Sequence
  chemically synthesized
atatcatctccagggcagcagg

SEQ ID NO: 6101 - DNA, 22 bp, Artificial Sequence
  chemically synthesized
tatcatctccagggcagcaggc

SEQ ID NO: 6102 - DNA, 22 bp, Artificial Sequence
  chemically synthesized
cagggcagcaggcactgaggac

SEQ ID NO: 6103 - DNA, 22 bp, Artificial Sequence
  chemically synthesized
aggacccagggcgctgggcaaa

SEQ ID NO: 6104 - DNA, 22 bp, Artificial Sequence
  chemically synthesized
ggcaaaggtcacctgctgacca

SEQ ID NO: 6105 - DNA, 22 bp, Artificial Sequence
  chemically synthesized
ctgaccagtggagatgagggcc

SEQ ID NO: 6106 - DNA, 22 bp, Artificial Sequence
  chemically synthesized
accagtggagatgagggcctga

SEQ ID NO: 6107 - DNA, 22 bp, Artificial Sequence
  chemically synthesized
aggcagggtgtccagatgcagc

SEQ ID NO: 6108 - DNA, 22 bp, Artificial Sequence
  chemically synthesized
ggaaatccctaggagactgagt

SEQ ID NO: 6109 - DNA, 20 bp, Artificial Sequence
  chemically synthesized
taccccttgcccatccctgc

SEQ ID NO: 6110 - DNA, 20 bp, Artificial Sequence
  chemically synthesized
ggcccccgtgaccctcactt

SEQ ID NO: 6111 - DNA, 20 bp, Artificial Sequence
  chemically synthesized
gcccccgtgaccctcacttt

SEQ ID NO: 6112 - DNA, 20 bp, Artificial Sequence
  chemically synthesized
gtgaccctcactttgggacc

SEQ ID NO: 6113 - DNA, 20 bp, Artificial Sequence
  chemically synthesized
cactttgggacccagtcaca

SEQ ID NO: 6114 - DNA, 20 bp, Artificial Sequence
  chemically synthesized
ccagtcacacagatgaccac

SEQ ID NO: 6115 - DNA, 20 bp, Artificial Sequence
  chemically synthesized
gtcacacagatgaccaccag

SEQ ID NO: 6116 - DNA, 20 bp, Artificial Sequence
  chemically synthesized
acacagatgaccaccagcag

SEQ ID NO: 6117 - DNA, 20 bp, Artificial Sequence
  chemically synthesized
cacagatgaccaccagcagc

SEQ ID NO: 6118 - DNA, 20 bp, Artificial Sequence
  chemically synthesized
ccaccagcagcaggatgttg

SEQ ID NO: 6119 - DNA, 20 bp, Artificial Sequence
  chemically synthesized
agcagcaggatgttgaagct

SEQ ID NO: 6120 - DNA, 20 bp, Artificial Sequence
  chemically synthesized
gcagcaggatgttgaagctc

SEQ ID NO: 6121 - DNA, 20 bp, Artificial Sequence
  chemically synthesized
cagcaggatgttgaagctca

SEQ ID NO: 6122 - DNA, 20 bp, Artificial Sequence
  chemically synthesized
aggatgttgaagctcagggc

SEQ ID NO: 6123 - DNA, 20 bp, Artificial Sequence
  chemically synthesized
atgttgaagctcagggcaag

SEQ ID NO: 6124 - DNA, 20 bp, Artificial Sequence
  chemically synthesized
agctcagggcaagcagactg

SEQ ID NO: 6125 - DNA, 20 bp, Artificial Sequence
  chemically synthesized
tcagggcaagcagactgaag

SEQ ID NO: 6126 - DNA, 20 bp, Artificial Sequence
  chemically synthesized
aagcagactgaagcagacca

SEQ ID NO: 6127 - DNA, 20 bp, Artificial Sequence
  chemically synthesized
gcagactgaagcagaccatg

SEQ ID NO: 6128 - DNA, 20 bp, Artificial Sequence
  chemically synthesized
gactgaagcagaccatggag

SEQ ID NO: 6129 - DNA, 20 bp, Artificial Sequence
  chemically synthesized
ctgaagcagaccatggagca

SEQ ID NO: 6130 - DNA, 20 bp, Artificial Sequence
  chemically synthesized
atggagcagagacgctgtgc

SEQ ID NO: 6131 - DNA, 20 bp, Artificial Sequence
  chemically synthesized
tggagcagagacgctgtgcc

SEQ ID NO: 6132 - DNA, 20 bp, Artificial Sequence
  chemically synthesized
ggagcagagacgctgtgcca

SEQ ID NO: 6133 - DNA, 20 bp, Artificial Sequence
  chemically synthesized
gagcagagacgctgtgccag

SEQ ID NO: 6134 - DNA, 20 bp, Artificial Sequence
  chemically synthesized
agagacgctgtgccaggggc

SEQ ID NO: 6135 - DNA, 20 bp, Artificial Sequence
  chemically synthesized
gagacgctgtgccaggggct

SEQ ID NO: 6136 - DNA, 20 bp, Artificial Sequence
  chemically synthesized
acgctgtgccaggggctggg

SEQ ID NO: 6137 - DNA, 20 bp, Artificial Sequence
  chemically synthesized
cgctgtgccaggggctgggc

SEQ ID NO: 6138 - DNA, 20 bp, Artificial Sequence
  chemically synthesized
ctgtgccaggggctgggcag

SEQ ID NO: 6139 - DNA, 20 bp, Artificial Sequence
  chemically synthesized
tgtgccaggggctgggcagg

SEQ ID NO: 6140 - DNA, 20 bp, Artificial Sequence
  chemically synthesized
gccaggggctgggcaggagg

SEQ ID NO: 6141 - DNA, 20 bp, Artificial Sequence
  chemically synthesized
ctgggcaggaggtggccctg

SEQ ID NO: 6142 - DNA, 20 bp, Artificial Sequence
  chemically synthesized
tgggcaggaggtggccctgt

SEQ ID NO: 6143 - DNA, 20 bp, Artificial Sequence
  chemically synthesized
ggcaggaggtggccctgtgg

SEQ ID NO: 6144 - DNA, 20 bp, Artificial Sequence
  chemically synthesized
caggaggtggccctgtggga

SEQ ID NO: 6145 - DNA, 20 bp, Artificial Sequence
  chemically synthesized
aggaggtggccctgtgggag

SEQ ID NO: 6146 - DNA, 20 bp, Artificial Sequence
  chemically synthesized
ggaggtggccctgtgggaga

SEQ ID NO: 6147 - DNA, 20 bp, Artificial Sequence
  chemically synthesized
gaggtggccctgtgggagag

SEQ ID NO: 6148 - DNA, 20 bp, Artificial Sequence
  chemically synthesized
gccctgtgggagaggggcat

SEQ ID NO: 6149 - DNA, 20 bp, Artificial Sequence
  chemically synthesized
ccctgtgggagaggggcatc

SEQ ID NO: 6150 - DNA, 20 bp, Artificial Sequence
  chemically synthesized
ctgtgggagaggggcatcag

SEQ ID NO: 6151 - DNA, 20 bp, Artificial Sequence
  chemically synthesized
gggagaggggcatcaggagc

SEQ ID NO: 6152 - DNA, 20 bp, Artificial Sequence
  chemically synthesized
agaggggcatcaggagccgg

SEQ ID NO: 6153 - DNA, 20 bp, Artificial Sequence
  chemically synthesized
ggcatcaggagccggcagcc

SEQ ID NO: 6154 - DNA, 20 bp, Artificial Sequence
  chemically synthesized
gcatcaggagccggcagcct

SEQ ID NO: 6155 - DNA, 20 bp, Artificial Sequence
  chemically synthesized
aggagccggcagcctgggtg

SEQ ID NO: 6156 - DNA, 20 bp, Artificial Sequence
  chemically synthesized
ggagccggcagcctgggtgt

SEQ ID NO: 6157 - DNA, 20 bp, Artificial Sequence
  chemically synthesized
gagccggcagcctgggtgtg

SEQ ID NO: 6158 - DNA, 20 bp, Artificial Sequence
  chemically synthesized
gccggcagcctgggtgtggg

SEQ ID NO: 6159 - DNA, 20 bp, Artificial Sequence
  chemically synthesized
gcagcctgggtgtggggagc

SEQ ID NO: 6160 - DNA, 20 bp, Artificial Sequence
  chemically synthesized
agcctgggtgtggggagccg

SEQ ID NO: 6161 - DNA, 20 bp, Artificial Sequence
  chemically synthesized
gcctgggtgtggggagccgg

SEQ ID NO: 6162 - DNA, 20 bp, Artificial Sequence
  chemically synthesized
cctgggtgtggggagccgga

SEQ ID NO: 6163 - DNA, 20 bp, Artificial Sequence
  chemically synthesized
gtgtggggagccggagggta

SEQ ID NO: 6164 - DNA, 20 bp, Artificial Sequence
  chemically synthesized
ggggagccggagggtaaaga

SEQ ID NO: 6165 - DNA, 20 bp, Artificial Sequence
  chemically synthesized
gggagccggagggtaaagac

SEQ ID NO: 6166 - DNA, 20 bp, Artificial Sequence
  chemically synthesized
ggagccggagggtaaagaca

SEQ ID NO: 6167 - DNA, 20 bp, Artificial Sequence
  chemically synthesized
agggtaaagacagggcaccg

SEQ ID NO: 6168 - DNA, 20 bp, Artificial Sequence
  chemically synthesized
aagacagggcaccgaagcct

SEQ ID NO: 6169 - DNA, 20 bp, Artificial Sequence
  chemically synthesized
agacagggcaccgaagcctg

SEQ ID NO: 6170 - DNA, 20 bp, Artificial Sequence
  chemically synthesized
acagggcaccgaagcctgag

SEQ ID NO: 6171 - DNA, 20 bp, Artificial Sequence
  chemically synthesized
cagggcaccgaagcctgagg

SEQ ID NO: 6172 - DNA, 20 bp, Artificial Sequence
  chemically synthesized
aagcctgaggaggcataacc

SEQ ID NO: 6173 - DNA, 20 bp, Artificial Sequence
  chemically synthesized
agcctgaggaggcataacct

SEQ ID NO: 6174 - DNA, 20 bp, Artificial Sequence
  chemically synthesized
ctgaggaggcataacctggg

SEQ ID NO: 6175 - DNA, 20 bp, Artificial Sequence
  chemically synthesized
tgaggaggcataacctgggc

SEQ ID NO: 6176 - DNA, 20 bp, Artificial Sequence
  chemically synthesized
gaggaggcataacctgggcg

SEQ ID NO: 6177 - DNA, 20 bp, Artificial Sequence
  chemically synthesized
aggaggcataacctgggcgg

SEQ ID NO: 6178 - DNA, 20 bp, Artificial Sequence
  chemically synthesized
ggaggcataacctgggcggg

SEQ ID NO: 6179 - DNA, 20 bp, Artificial Sequence
  chemically synthesized
cataacctgggcggggggat

SEQ ID NO: 6180 - DNA, 20 bp, Artificial Sequence
  chemically synthesized
acctgggcggggggattggt

SEQ ID NO: 6181 - DNA, 20 bp, Artificial Sequence
  chemically synthesized
cctgggcggggggattggtt

SEQ ID NO: 6182 - DNA, 20 bp, Artificial Sequence
  chemically synthesized
ctgggcggggggattggttg

SEQ ID NO: 6183 - DNA, 20 bp, Artificial Sequence
  chemically synthesized
ggggggattggttggggcca

SEQ ID NO: 6184 - DNA, 20 bp, Artificial Sequence
  chemically synthesized
gggggattggttggggccat

SEQ ID NO: 6185 - DNA, 20 bp, Artificial Sequence
  chemically synthesized
ggggattggttggggccatg

SEQ ID NO: 6186 - DNA, 20 bp, Artificial Sequence
  chemically synthesized
gggattggttggggccatgg

SEQ ID NO: 6187 - DNA, 20 bp, Artificial Sequence
  chemically synthesized
ggattggttggggccatggg

SEQ ID NO: 6188 - DNA, 20 bp, Artificial Sequence
  chemically synthesized
gattggttggggccatgggg

SEQ ID NO: 6189 - DNA, 20 bp, Artificial Sequence
  chemically synthesized
attggttggggccatggggg

SEQ ID NO: 6190 - DNA, 20 bp, Artificial Sequence
  chemically synthesized
ttggttggggccatgggggg

SEQ ID NO: 6191 - DNA, 20 bp, Artificial Sequence
  chemically synthesized
gccatgggggggggtcatca

SEQ ID NO: 6192 - DNA, 20 bp, Artificial Sequence
  chemically synthesized
ccatgggggggggtcatcat

SEQ ID NO: 6193 - DNA, 20 bp, Artificial Sequence
  chemically synthesized
gtcatcataggctttgaccc

SEQ ID NO: 6194 - DNA, 20 bp, Artificial Sequence
  chemically synthesized
aggctttgaccccagcattt

SEQ ID NO: 6195 - DNA, 20 bp, Artificial Sequence
  chemically synthesized
catgtataaatatacacacg

SEQ ID NO: 6196 - DNA, 20 bp, Artificial Sequence
  chemically synthesized
atatacacacgcagctaatc

SEQ ID NO: 6197 - DNA, 20 bp, Artificial Sequence
  chemically synthesized
acacacccatgcacacgact

SEQ ID NO: 6198 - DNA, 20 bp, Artificial Sequence
  chemically synthesized
cacacccatgcacacgactc

SEQ ID NO: 6199 - DNA, 20 bp, Artificial Sequence
  chemically synthesized
acgactcaggatattcacat

SEQ ID NO: 6200 - DNA, 20 bp, Artificial Sequence
  chemically synthesized
attcacatcagctgtgtgca

SEQ ID NO: 6201 - DNA, 20 bp, Artificial Sequence
  chemically synthesized
catcagctgtgtgcaaagcc

SEQ ID NO: 6202 - DNA, 20 bp, Artificial Sequence
  chemically synthesized
tgtgtgcaaagcccggatcc

SEQ ID NO: 6203 - DNA, 20 bp, Artificial Sequence
  chemically synthesized
tgtgcaaagcccggatcctg

SEQ ID NO: 6204 - DNA, 20 bp, Artificial Sequence
  chemically synthesized
caaagcccggatcctggagc

SEQ ID NO: 6205 - DNA, 20 bp, Artificial Sequence
  chemically synthesized
aaagcccggatcctggagct

SEQ ID NO: 6206 - DNA, 20 bp, Artificial Sequence
  chemically synthesized
aagcccggatcctggagctg

SEQ ID NO: 6207 - DNA, 20 bp, Artificial Sequence
  chemically synthesized
agcccggatcctggagctgg

SEQ ID NO: 6208 - DNA, 20 bp, Artificial Sequence
  chemically synthesized
ggatcctggagctgggggac

SEQ ID NO: 6209 - DNA, 20 bp, Artificial Sequence
  chemically synthesized
gatcctggagctgggggact

SEQ ID NO: 6210 - DNA, 20 bp, Artificial Sequence
  chemically synthesized
tcctggagctgggggactgg

SEQ ID NO: 6211 - DNA, 20 bp, Artificial Sequence
  chemically synthesized
ctgggggactgggagacgca

SEQ ID NO: 6212 - DNA, 20 bp, Artificial Sequence
  chemically synthesized
tgggggactgggagacgcac

SEQ ID NO: 6213 - DNA, 20 bp, Artificial Sequence
  chemically synthesized
gggggactgggagacgcaca

SEQ ID NO: 6214 - DNA, 20 bp, Artificial Sequence
  chemically synthesized
ggggactgggagacgcacag

SEQ ID NO: 6215 - DNA, 20 bp, Artificial Sequence
  chemically synthesized
gggactgggagacgcacagg

SEQ ID NO: 6216 - DNA, 20 bp, Artificial Sequence
  chemically synthesized
actgggagacgcacaggggg

SEQ ID NO: 6217 - DNA, 20 bp, Artificial Sequence
  chemically synthesized
ctgggagacgcacagggggc

SEQ ID NO: 6218 - DNA, 20 bp, Artificial Sequence
  chemically synthesized
tgggagacgcacagggggcg

SEQ ID NO: 6219 - DNA, 20 bp, Artificial Sequence
  chemically synthesized
gggagacgcacagggggcgg

SEQ ID NO: 6220 - DNA, 20 bp, Artificial Sequence
  chemically synthesized
ggagacgcacagggggcggg

SEQ ID NO: 6221 - DNA, 20 bp, Artificial Sequence
  chemically synthesized
gagacgcacagggggcgggg

SEQ ID NO: 6222 - DNA, 20 bp, Artificial Sequence
  chemically synthesized
acgcacagggggcggggggg

SEQ ID NO: 6223 - DNA, 20 bp, Artificial Sequence
  chemically synthesized
agggggcgggggggcagacc

SEQ ID NO: 6224 - DNA, 20 bp, Artificial Sequence
  chemically synthesized
ggggcagacccggccctgcc

SEQ ID NO: 6225 - DNA, 20 bp, Artificial Sequence
  chemically synthesized
gggcagacccggccctgcct

SEQ ID NO: 6226 - DNA, 20 bp, Artificial Sequence
  chemically synthesized
cctgcctaggcacacatcct

SEQ ID NO: 6227 - DNA, 20 bp, Artificial Sequence
  chemically synthesized
gcctaggcacacatcctgag

SEQ ID NO: 6228 - DNA, 20 bp, Artificial Sequence
  chemically synthesized
cctaggcacacatcctgaga

SEQ ID NO: 6229 - DNA, 20 bp, Artificial Sequence
  chemically synthesized
ctaggcacacatcctgagaa

SEQ ID NO: 6230 - DNA, 20 bp, Artificial Sequence
  chemically synthesized
taggcacacatcctgagaag

SEQ ID NO: 6231 - DNA, 20 bp, Artificial Sequence
  chemically synthesized
aggcacacatcctgagaagg

SEQ ID NO: 6232 - DNA, 20 bp, Artificial Sequence
  chemically synthesized
tgagaagggggatctgtgaa

SEQ ID NO: 6233 - DNA, 20 bp, Artificial Sequence
  chemically synthesized
tgaatggttttcctcccatc

SEQ ID NO: 6234 - DNA, 20 bp, Artificial Sequence
  chemically synthesized
tggttttcctcccatccagc

SEQ ID NO: 6235 - DNA, 20 bp, Artificial Sequence
  chemically synthesized
ttttcctcccatccagccag

SEQ ID NO: 6236 - DNA, 20 bp, Artificial Sequence
  chemically synthesized
tcctcccatccagccagtgg

SEQ ID NO: 6237 - DNA, 20 bp, Artificial Sequence
  chemically synthesized
ctcccatccagccagtggca

SEQ ID NO: 6238 - DNA, 20 bp, Artificial Sequence
  chemically synthesized
tcccatccagccagtggcag

SEQ ID NO: 6239 - DNA, 20 bp, Artificial Sequence
  chemically synthesized
cagccagtggcagaggcctc

SEQ ID NO: 6240 - DNA, 20 bp, Artificial Sequence
  chemically synthesized
cagaggcctccagatcacct

SEQ ID NO: 6241 - DNA, 20 bp, Artificial Sequence
  chemically synthesized
agaggcctccagatcacctc

SEQ ID NO: 6242 - DNA, 20 bp, Artificial Sequence
  chemically synthesized
ctccagatcacctcgggcct

SEQ ID NO: 6243 - DNA, 20 bp, Artificial Sequence
  chemically synthesized
atcacctcgggccttagtct

SEQ ID NO: 6244 - DNA, 20 bp, Artificial Sequence
  chemically synthesized
gccttagtctcagctcttct

SEQ ID NO: 6245 - DNA, 20 bp, Artificial Sequence
  chemically synthesized
ccttagtctcagctcttcta

SEQ ID NO: 6246 - DNA, 20 bp, Artificial Sequence
  chemically synthesized
ttctaaggctcctgtcccct

SEQ ID NO: 6247 - DNA, 20 bp, Artificial Sequence
  chemically synthesized
aggctcctgtcccctcagat

SEQ ID NO: 6248 - DNA, 20 bp, Artificial Sequence
  chemically synthesized
gctcctgtcccctcagattg

SEQ ID NO: 6249 - DNA, 20 bp, Artificial Sequence
  chemically synthesized
tcccctcagattggagactc

SEQ ID NO: 6250 - DNA, 20 bp, Artificial Sequence
  chemically synthesized
cctcagattggagactccag

SEQ ID NO: 6251 - DNA, 20 bp, Artificial Sequence
  chemically synthesized
agattggagactccagaagc

SEQ ID NO: 6252 - DNA, 20 bp, Artificial Sequence
  chemically synthesized
gattggagactccagaagct

SEQ ID NO: 6253 - DNA, 20 bp, Artificial Sequence
  chemically synthesized
gttcttcctaaaatccatac

SEQ ID NO: 6254 - DNA, 20 bp, Artificial Sequence
  chemically synthesized
tcctaaaatccatactggaa

SEQ ID NO: 6255 - DNA, 20 bp, Artificial Sequence
  chemically synthesized
tcccctgccaaaattccatt

SEQ ID NO: 6256 - DNA, 20 bp, Artificial Sequence
  chemically synthesized
tccattgagatccttaaatc

SEQ ID NO: 6257 - DNA, 20 bp, Artificial Sequence
  chemically synthesized
ccattgagatccttaaatct

SEQ ID NO: 6258 - DNA, 20 bp, Artificial Sequence
  chemically synthesized
aaatctgggtcattccacca

SEQ ID NO: 6259 - DNA, 20 bp, Artificial Sequence
  chemically synthesized
tccaccatagcccactctcc

SEQ ID NO: 6260 - DNA, 20 bp, Artificial Sequence
  chemically synthesized
actctccaagcacaaccctc

SEQ ID NO: 6261 - DNA, 20 bp, Artificial Sequence
  chemically synthesized
ctctccaagcacaaccctcc

SEQ ID NO: 6262 - DNA, 20 bp, Artificial Sequence
  chemically synthesized
gtcctcatcccccaccacgc

SEQ ID NO: 6263 - DNA, 20 bp, Artificial Sequence
  chemically synthesized
tcctcatcccccaccacgca

SEQ ID NO: 6264 - DNA, 20 bp, Artificial Sequence
  chemically synthesized
accacgcaaggcctcctccc

SEQ ID NO: 6265 - DNA, 20 bp, Artificial Sequence
  chemically synthesized
gccctttgccctcgcttccc

SEQ ID NO: 6266 - DNA, 20 bp, Artificial Sequence
  chemically synthesized
cacactaaatttgctcccct

SEQ ID NO: 6267 - DNA, 20 bp, Artificial Sequence
  chemically synthesized
aaatttgctcccctcagccc

SEQ ID NO: 6268 - DNA, 20 bp, Artificial Sequence
  chemically synthesized
aatttgctcccctcagcccg

SEQ ID NO: 6269 - DNA, 20 bp, Artificial Sequence
  chemically synthesized
ctcagcccgaggtcatctca

SEQ ID NO: 6270 - DNA, 20 bp, Artificial Sequence
  chemically synthesized
tcagcccgaggtcatctcac

SEQ ID NO: 6271 - DNA, 20 bp, Artificial Sequence
  chemically synthesized
ttgatccatctgcaccctga

SEQ ID NO: 6272 - DNA, 20 bp, Artificial Sequence
  chemically synthesized
cacccacgtcttcctgcaca

SEQ ID NO: 6273 - DNA, 20 bp, Artificial Sequence
  chemically synthesized
cccacgtcttcctgcacaca

SEQ ID NO: 6274 - DNA, 20 bp, Artificial Sequence
  chemically synthesized
cgtcttcctgcacacagagc

SEQ ID NO: 6275 - DNA, 20 bp, Artificial Sequence
  chemically synthesized
gtcttcctgcacacagagct

SEQ ID NO: 6276 - DNA, 20 bp, Artificial Sequence
  chemically synthesized
ggctccctctctgctgcctc

SEQ ID NO: 6277 - DNA, 20 bp, Artificial Sequence
  chemically synthesized
ctctctgctgcctccagacc

SEQ ID NO: 6278 - DNA, 20 bp, Artificial Sequence
  chemically synthesized
ctctgctgcctccagaccca

SEQ ID NO: 6279 - DNA, 20 bp, Artificial Sequence
  chemically synthesized
tgctgcctccagacccagag

SEQ ID NO: 6280 - DNA, 20 bp, Artificial Sequence
  chemically synthesized
ctccagacccagagcagctc

SEQ ID NO: 6281 - DNA, 20 bp, Artificial Sequence
  chemically synthesized
cagagcagctccagttgtcc

SEQ ID NO: 6282 - DNA, 20 bp, Artificial Sequence
  chemically synthesized
gctccagttgtcccagccct

SEQ ID NO: 6283 - DNA, 20 bp, Artificial Sequence
  chemically synthesized
gccctgagctcctctctttg

SEQ ID NO: 6284 - DNA, 20 bp, Artificial Sequence
  chemically synthesized
ttgcagcatccacctgcaaa

SEQ ID NO: 6285 - DNA, 20 bp, Artificial Sequence
  chemically synthesized
cctgcaaacagaacaccttc

SEQ ID NO: 6286 - DNA, 20 bp, Artificial Sequence
  chemically synthesized
ctgcaaacagaacaccttct

SEQ ID NO: 6287 - DNA, 20 bp, Artificial Sequence
  chemically synthesized
acagaacaccttctaggcct

SEQ ID NO: 6288 - DNA, 20 bp, Artificial Sequence
  chemically synthesized
ggccttggaccctgactctg

SEQ ID NO: 6289 - DNA, 20 bp, Artificial Sequence
  chemically synthesized
attcctatcaccccccgacc

SEQ ID NO: 6290 - DNA, 20 bp, Artificial Sequence
  chemically synthesized
cctatcaccccccgacccag

SEQ ID NO: 6291 - DNA, 20 bp, Artificial Sequence
  chemically synthesized
ctatcaccccccgacccagc

SEQ ID NO: 6292 - DNA, 20 bp, Artificial Sequence
  chemically synthesized
gacccagcaggaccacatcc

SEQ ID NO: 6293 - DNA, 20 bp, Artificial Sequence
  chemically synthesized
acccagcaggaccacatcct

SEQ ID NO: 6294 - DNA, 20 bp, Artificial Sequence
  chemically synthesized
cccagcaggaccacatcctg

SEQ ID NO: 6295 - DNA, 20 bp, Artificial Sequence
  chemically synthesized
cagcaggaccacatcctggg

SEQ ID NO: 6296 - DNA, 20 bp, Artificial Sequence
  chemically synthesized
agcaggaccacatcctgggg

SEQ ID NO: 6297 - DNA, 20 bp, Artificial Sequence
  chemically synthesized
gaccacatcctggggaggct

SEQ ID NO: 6298 - DNA, 20 bp, Artificial Sequence
  chemically synthesized
acatcctggggaggctcagt

SEQ ID NO: 6299 - DNA, 20 bp, Artificial Sequence
  chemically synthesized
catcctggggaggctcagtc

SEQ ID NO: 6300 - DNA, 20 bp, Artificial Sequence
  chemically synthesized
atcctggggaggctcagtca

SEQ ID NO: 6301 - DNA, 20 bp, Artificial Sequence
  chemically synthesized
tcctggggaggctcagtcag

SEQ ID NO: 6302 - DNA, 20 bp, Artificial Sequence
  chemically synthesized
gggaggctcagtcaggggcc

SEQ ID NO: 6303 - DNA, 20 bp, Artificial Sequence
  chemically synthesized
gggcccagaatcttcctccc

SEQ ID NO: 6304 - DNA, 20 bp, Artificial Sequence
  chemically synthesized
ggcccagaatcttcctcccc

SEQ ID NO: 6305 - DNA, 20 bp, Artificial Sequence
  chemically synthesized
tcacttcctgccactgtcct

SEQ ID NO: 6306 - DNA, 20 bp, Artificial Sequence
  chemically synthesized
ttcctgccactgtcctgagt

SEQ ID NO: 6307 - DNA, 20 bp, Artificial Sequence
  chemically synthesized
gagtcagacactgcccctgt

SEQ ID NO: 6308 - DNA, 20 bp, Artificial Sequence
  chemically synthesized
actcttcatctttttcacac

SEQ ID NO: 6309 - DNA, 20 bp, Artificial Sequence
  chemically synthesized
gacttccaccttccccactg

SEQ ID NO: 6310 - DNA, 20 bp, Artificial Sequence
  chemically synthesized
ttccccactgcagccacact

SEQ ID NO: 6311 - DNA, 20 bp, Artificial Sequence
  chemically synthesized
tccccactgcagccacactc

SEQ ID NO: 6312 - DNA, 20 bp, Artificial Sequence
  chemically synthesized
actcaggaccccatttgacc

SEQ ID NO: 6313 - DNA, 20 bp, Artificial Sequence
  chemically synthesized
ctcaggaccccatttgaccc

SEQ ID NO: 6314 - DNA, 20 bp, Artificial Sequence
  chemically synthesized
tcaggaccccatttgaccca

SEQ ID NO: 6315 - DNA, 20 bp, Artificial Sequence
  chemically synthesized
aggaccccatttgacccagg

SEQ ID NO: 6316 - DNA, 20 bp, Artificial Sequence
  chemically synthesized
ggaccccatttgacccaggg

SEQ ID NO: 6317 - DNA, 20 bp, Artificial Sequence
  chemically synthesized
ccactgcccactcccgctct

SEQ ID NO: 6318 - DNA, 20 bp, Artificial Sequence
  chemically synthesized
gcccactcccgctctgagca

SEQ ID NO: 6319 - DNA, 20 bp, Artificial Sequence
  chemically synthesized
ctgcccccaccccttcctcc

SEQ ID NO: 6320 - DNA, 20 bp, Artificial Sequence
  chemically synthesized
tgcccccaccccttcctcca

SEQ ID NO: 6321 - DNA, 20 bp, Artificial Sequence
  chemically synthesized
cctttgcattcctctccatc

SEQ ID NO: 6322 - DNA, 20 bp, Artificial Sequence
  chemically synthesized
ttgcattcctctccatccag

SEQ ID NO: 6323 - DNA, 20 bp, Artificial Sequence
  chemically synthesized
ccagaagcgctccatgacca

SEQ ID NO: 6324 - DNA, 20 bp, Artificial Sequence
  chemically synthesized
tgaccacggtgttccccacc

SEQ ID NO: 6325 - DNA, 20 bp, Artificial Sequence
  chemically synthesized
cacggtgttccccaccaagc

SEQ ID NO: 6326 - DNA, 20 bp, Artificial Sequence
  chemically synthesized
cccaccaagctggccctcca

SEQ ID NO: 6327 - DNA, 20 bp, Artificial Sequence
  chemically synthesized
caagctggccctccatggct

SEQ ID NO: 6328 - DNA, 20 bp, Artificial Sequence
  chemically synthesized
gagtccctgactgctgtctt

SEQ ID NO: 6329 - DNA, 20 bp, Artificial Sequence
  chemically synthesized
tgtcttcagcaccctccact

SEQ ID NO: 6330 - DNA, 20 bp, Artificial Sequence
  chemically synthesized
tcttcagcaccctccactca

SEQ ID NO: 6331 - DNA, 20 bp, Artificial Sequence
  chemically synthesized
cttcagcaccctccactcag

SEQ ID NO: 6332 - DNA, 20 bp, Artificial Sequence
  chemically synthesized
ttcagcaccctccactcaga

SEQ ID NO: 6333 - DNA, 20 bp, Artificial Sequence
  chemically synthesized
gagggtcctgtcctgcttcc

SEQ ID NO: 6334 - DNA, 20 bp, Artificial Sequence
  chemically synthesized
gacttatcaactcccaatgc

SEQ ID NO: 6335 - DNA, 20 bp, Artificial Sequence
  chemically synthesized
acttatcaactcccaatgct

SEQ ID NO: 6336 - DNA, 20 bp, Artificial Sequence
  chemically synthesized
atcaactcccaatgctgggt

SEQ ID NO: 6337 - DNA, 20 bp, Artificial Sequence
  chemically synthesized
ctcccaatgctgggtcagcc

SEQ ID NO: 6338 - DNA, 20 bp, Artificial Sequence
  chemically synthesized
ctgtatatccaccctgaaac

SEQ ID NO: 6339 - DNA, 20 bp, Artificial Sequence
  chemically synthesized
ccctgaaaccagactgccca

SEQ ID NO: 6340 - DNA, 20 bp, Artificial Sequence
  chemically synthesized
cctgaaaccagactgcccac

SEQ ID NO: 6341 - DNA, 20 bp, Artificial Sequence
  chemically synthesized
ctgaaaccagactgcccaca

SEQ ID NO: 6342 - DNA, 20 bp, Artificial Sequence
  chemically synthesized
aaaccagactgcccacaggg

SEQ ID NO: 6343 - DNA, 20 bp, Artificial Sequence
  chemically synthesized
agactgcccacagggtagcc

SEQ ID NO: 6344 - DNA, 20 bp, Artificial Sequence
  chemically synthesized
gggtagcccagctgtgcctc

SEQ ID NO: 6345 - DNA, 20 bp, Artificial Sequence
  chemically synthesized
ggtagcccagctgtgcctcc

SEQ ID NO: 6346 - DNA, 20 bp, Artificial Sequence
  chemically synthesized
agcccagctgtgcctccagg

SEQ ID NO: 6347 - DNA, 20 bp, Artificial Sequence
  chemically synthesized
ctgtgcctccaggtagctct

SEQ ID NO: 6348 - DNA, 20 bp, Artificial Sequence
  chemically synthesized
gtagctctgagatcatgcac

SEQ ID NO: 6349 - DNA, 20 bp, Artificial Sequence
  chemically synthesized
ccattttctcgtgtgtaaaa

SEQ ID NO: 6350 - DNA, 20 bp, Artificial Sequence
  chemically synthesized
attttctcgtgtgtaaaatg

SEQ ID NO: 6351 - DNA, 20 bp, Artificial Sequence
  chemically synthesized
cgtgtgtaaaatggagatca

SEQ ID NO: 6352 - DNA, 20 bp, Artificial Sequence
  chemically synthesized
taaaatggagatcacagtcg

SEQ ID NO: 6353 - DNA, 20 bp, Artificial Sequence
  chemically synthesized
cacagtcgtagctacccgat

SEQ ID NO: 6354 - DNA, 20 bp, Artificial Sequence
  chemically synthesized
agctacccgattggattgct

SEQ ID NO: 6355 - DNA, 20 bp, Artificial Sequence
  chemically synthesized
gattggattgctcggataat

SEQ ID NO: 6356 - DNA, 20 bp, Artificial Sequence
  chemically synthesized
gattgctcggataattagat

SEQ ID NO: 6357 - DNA, 20 bp, Artificial Sequence
  chemically synthesized
aaaatatgtaatgtgcttct

SEQ ID NO: 6358 - DNA, 20 bp, Artificial Sequence
  chemically synthesized
aaatatgtaatgtgcttctt

SEQ ID NO: 6359 - DNA, 20 bp, Artificial Sequence
  chemically synthesized
gtaatgtgcttcttaggcaa

SEQ ID NO: 6360 - DNA, 20 bp, Artificial Sequence
  chemically synthesized
aggcaaaagtttgaacataa

SEQ ID NO: 6361 - DNA, 20 bp, Artificial Sequence
  chemically synthesized
aaaagtttgaacataaaaga

SEQ ID NO: 6362 - DNA, 20 bp, Artificial Sequence
  chemically synthesized
aaagtttgaacataaaagac

SEQ ID NO: 6363 - DNA, 20 bp, Artificial Sequence
  chemically synthesized
aagtttgaacataaaagaca

SEQ ID NO: 6364 - DNA, 20 bp, Artificial Sequence
  chemically synthesized
ataaaagacagggtctgccc

SEQ ID NO: 6365 - DNA, 20 bp, Artificial Sequence
  chemically synthesized
aagacagggtctgcccaaga

SEQ ID NO: 6366 - DNA, 20 bp, Artificial Sequence
  chemically synthesized
agacagggtctgcccaagat

SEQ ID NO: 6367 - DNA, 20 bp, Artificial Sequence
  chemically synthesized
cagggtctgcccaagatggg

SEQ ID NO: 6368 - DNA, 20 bp, Artificial Sequence
  chemically synthesized
gggtctgcccaagatgggaa

SEQ ID NO: 6369 - DNA, 20 bp, Artificial Sequence
  chemically synthesized
gggaagagttcttctctccc

SEQ ID NO: 6370 - DNA, 20 bp, Artificial Sequence
  chemically synthesized
agaaacaatcaaaacaaaaa

SEQ ID NO: 6371 - DNA, 20 bp, Artificial Sequence
  chemically synthesized
aaaacaaaaacagacaacta

SEQ ID NO: 6372 - DNA, 20 bp, Artificial Sequence
  chemically synthesized
aaacagacaactatagaaca

SEQ ID NO: 6373 - DNA, 20 bp, Artificial Sequence
  chemically synthesized
cagacaactatagaacatgg

SEQ ID NO: 6374 - DNA, 20 bp, Artificial Sequence
  chemically synthesized
tatagaacatggcagctttc

SEQ ID NO: 6375 - DNA, 20 bp, Artificial Sequence
  chemically synthesized
catggcagctttcaagactc

SEQ ID NO: 6376 - DNA, 20 bp, Artificial Sequence
  chemically synthesized
gctttcaagactctggacat

SEQ ID NO: 6377 - DNA, 20 bp, Artificial Sequence
  chemically synthesized
ctttcaagactctggacatc

SEQ ID NO: 6378 - DNA, 20 bp, Artificial Sequence
  chemically synthesized
caagactctggacatcaggc

SEQ ID NO: 6379 - DNA, 20 bp, Artificial Sequence
  chemically synthesized
aagactctggacatcaggca

SEQ ID NO: 6380 - DNA, 20 bp, Artificial Sequence
  chemically synthesized
gactctggacatcaggcaag

SEQ ID NO: 6381 - DNA, 20 bp, Artificial Sequence
  chemically synthesized
actctggacatcaggcaagg

SEQ ID NO: 6382 - DNA, 20 bp, Artificial Sequence
  chemically synthesized
tctggacatcaggcaaggag

SEQ ID NO: 6383 - DNA, 20 bp, Artificial Sequence
  chemically synthesized
acatcaggcaaggaggagta

SEQ ID NO: 6384 - DNA, 20 bp, Artificial Sequence
  chemically synthesized
aaggaggagtaaagatccct

SEQ ID NO: 6385 - DNA, 20 bp, Artificial Sequence
  chemically synthesized
aggaggagtaaagatccctg

SEQ ID NO: 6386 - DNA, 20 bp, Artificial Sequence
  chemically synthesized
ggaggagtaaagatccctga

SEQ ID NO: 6387 - DNA, 20 bp, Artificial Sequence
  chemically synthesized
agtaaagatccctgagggat

SEQ ID NO: 6388 - DNA, 20 bp, Artificial Sequence
  chemically synthesized
aaagatccctgagggataag

SEQ ID NO: 6389 - DNA, 20 bp, Artificial Sequence
  chemically synthesized
gagggataagaagcaaacaa

SEQ ID NO: 6390 - DNA, 20 bp, Artificial Sequence
  chemically synthesized
agggataagaagcaaacaac

SEQ ID NO: 6391 - DNA, 20 bp, Artificial Sequence
  chemically synthesized
caggaaccctccgatcaccc

SEQ ID NO: 6392 - DNA, 20 bp, Artificial Sequence
  chemically synthesized
gatcaccccagcttactgtt

SEQ ID NO: 6393 - DNA, 20 bp, Artificial Sequence
  chemically synthesized
tcaccccagcttactgtttg

SEQ ID NO: 6394 - DNA, 20 bp, Artificial Sequence
  chemically synthesized
accccagcttactgtttgga

SEQ ID NO: 6395 - DNA, 20 bp, Artificial Sequence
  chemically synthesized
cccagcttactgtttggaga

SEQ ID NO: 6396 - DNA, 20 bp, Artificial Sequence
  chemically synthesized
tactgtttggagagagtctg

SEQ ID NO: 6397 - DNA, 20 bp, Artificial Sequence
  chemically synthesized
actgtttggagagagtctgc

SEQ ID NO: 6398 - DNA, 20 bp, Artificial Sequence
  chemically synthesized
tggagagagtctgcaggtta

SEQ ID NO: 6399 - DNA, 20 bp, Artificial Sequence
  chemically synthesized
ggagagagtctgcaggttac

SEQ ID NO: 6400 - DNA, 20 bp, Artificial Sequence
  chemically synthesized
agagtctgcaggttacaggc

SEQ ID NO: 6401 - DNA, 20 bp, Artificial Sequence
  chemically synthesized
gagtctgcaggttacaggcc

SEQ ID NO: 6402 - DNA, 20 bp, Artificial Sequence
  chemically synthesized
ctgcaggttacaggccagga

SEQ ID NO: 6403 - DNA, 20 bp, Artificial Sequence
  chemically synthesized
tgcaggttacaggccaggaa

SEQ ID NO: 6404 - DNA, 20 bp, Artificial Sequence
  chemically synthesized
gcaggttacaggccaggaaa

SEQ ID NO: 6405 - DNA, 20 bp, Artificial Sequence
  chemically synthesized
ggttacaggccaggaaaggg

SEQ ID NO: 6406 - DNA, 20 bp, Artificial Sequence
  chemically synthesized
caggccaggaaagggaagtc

SEQ ID NO: 6407 - DNA, 20 bp, Artificial Sequence
  chemically synthesized
aggccaggaaagggaagtcc

SEQ ID NO: 6408 - DNA, 20 bp, Artificial Sequence
  chemically synthesized
ccaggaaagggaagtccagg

SEQ ID NO: 6409 - DNA, 20 bp, Artificial Sequence
  chemically synthesized
aggaaagggaagtccaggca

SEQ ID NO: 6410 - DNA, 20 bp, Artificial Sequence
  chemically synthesized
gggaagtccaggcagagccc

SEQ ID NO: 6411 - DNA, 20 bp, Artificial Sequence
  chemically synthesized
gaagtccaggcagagcccaa

SEQ ID NO: 6412 - DNA, 20 bp, Artificial Sequence
  chemically synthesized
cccaagagactccccacgtt

SEQ ID NO: 6413 - DNA, 20 bp, Artificial Sequence
  chemically synthesized
ccaagagactccccacgttg

SEQ ID NO: 6414 - DNA, 20 bp, Artificial Sequence
  chemically synthesized
aagagactccccacgttgag

SEQ ID NO: 6415 - DNA, 20 bp, Artificial Sequence
  chemically synthesized
gactccccacgttgaggaga

SEQ ID NO: 6416 - DNA, 20 bp, Artificial Sequence
  chemically synthesized
ctccccacgttgaggagatg

SEQ ID NO: 6417 - DNA, 20 bp, Artificial Sequence
  chemically synthesized
cacgttgaggagatggagct

SEQ ID NO: 6418 - DNA, 20 bp, Artificial Sequence
  chemically synthesized
cgttgaggagatggagctga

SEQ ID NO: 6419 - DNA, 20 bp, Artificial Sequence
  chemically synthesized
ggagatggagctgagagtcc

SEQ ID NO: 6420 - DNA, 20 bp, Artificial Sequence
  chemically synthesized
gagatggagctgagagtccg

SEQ ID NO: 6421 - DNA, 20 bp, Artificial Sequence
  chemically synthesized
gatggagctgagagtccgag

SEQ ID NO: 6422 - DNA, 20 bp, Artificial Sequence
  chemically synthesized
ccgaggagaccaaaacaatt

SEQ ID NO: 6423 - DNA, 20 bp, Artificial Sequence
  chemically synthesized
gaggagaccaaaacaattaa

SEQ ID NO: 6424 - DNA, 20 bp, Artificial Sequence
  chemically synthesized
caaacgatcaaactgactct

SEQ ID NO: 6425 - DNA, 20 bp, Artificial Sequence
  chemically synthesized
taagttgcttaactgcatcc

SEQ ID NO: 6426 - DNA, 20 bp, Artificial Sequence
  chemically synthesized
agttgcttaactgcatcccg

SEQ ID NO: 6427 - DNA, 20 bp, Artificial Sequence
  chemically synthesized
cttaactgcatcccggagca

SEQ ID NO: 6428 - DNA, 20 bp, Artificial Sequence
  chemically synthesized
tgcatcccggagcaaagctc

SEQ ID NO: 6429 - DNA, 20 bp, Artificial Sequence
  chemically synthesized
gagcaaagctcaagaacatt

SEQ ID NO: 6430 - DNA, 20 bp, Artificial Sequence
  chemically synthesized
gcaaagctcaagaacattta

SEQ ID NO: 6431 - DNA, 20 bp, Artificial Sequence
  chemically synthesized
caaagctcaagaacatttag

SEQ ID NO: 6432 - DNA, 20 bp, Artificial Sequence
  chemically synthesized
tagaggaatacaaaaatatc

SEQ ID NO: 6433 - DNA, 20 bp, Artificial Sequence
  chemically synthesized
aaaaatatccagcacccaac

SEQ ID NO: 6434 - DNA, 20 bp, Artificial Sequence
  chemically synthesized
aaaatatccagcacccaaca

SEQ ID NO: 6435 - DNA, 20 bp, Artificial Sequence
  chemically synthesized
aaggtgaaattgacaatgtc

SEQ ID NO: 6436 - DNA, 20 bp, Artificial Sequence
  chemically synthesized
gtgaaattgacaatgtctgg

SEQ ID NO: 6437 - DNA, 20 bp, Artificial Sequence
  chemically synthesized
caatgtctggcagccaatca

SEQ ID NO: 6438 - DNA, 20 bp, Artificial Sequence
  chemically synthesized
ggcagccaatcaaagattac

SEQ ID NO: 6439 - DNA, 20 bp, Artificial Sequence
  chemically synthesized
gcagccaatcaaagattaca

SEQ ID NO: 6440 - DNA, 20 bp, Artificial Sequence
  chemically synthesized
ttacaaggcatgcaatgaaa

SEQ ID NO: 6441 - DNA, 20 bp, Artificial Sequence
  chemically synthesized
tacaaggcatgcaatgaaac

SEQ ID NO: 6442 - DNA, 20 bp, Artificial Sequence
  chemically synthesized
gggaaaacacaatgcataac

SEQ ID NO: 6443 - DNA, 20 bp, Artificial Sequence
  chemically synthesized
ggaaaacacaatgcataacg

SEQ ID NO: 6444 - DNA, 20 bp, Artificial Sequence
  chemically synthesized
aaaacacaatgcataacgag

SEQ ID NO: 6445 - DNA, 20 bp, Artificial Sequence
  chemically synthesized
aaacacaatgcataacgagg

SEQ ID NO: 6446 - DNA, 20 bp, Artificial Sequence
  chemically synthesized
aggaggttcataaatatcaa

SEQ ID NO: 6447 - DNA, 20 bp, Artificial Sequence
  chemically synthesized
gaggttcataaatatcaaaa

SEQ ID NO: 6448 - DNA, 20 bp, Artificial Sequence
  chemically synthesized
cataaatatcaaaagagatc

SEQ ID NO: 6449 - DNA, 20 bp, Artificial Sequence
  chemically synthesized
aaagagatccagaactgaca

SEQ ID NO: 6450 - DNA, 20 bp, Artificial Sequence
  chemically synthesized
tccagaactgacacggatgc

SEQ ID NO: 6451 - DNA, 20 bp, Artificial Sequence
  chemically synthesized
actgacacggatgctagaat

SEQ ID NO: 6452 - DNA, 20 bp, Artificial Sequence
  chemically synthesized
gacacggatgctagaattag

SEQ ID NO: 6453 - DNA, 20 bp, Artificial Sequence
  chemically synthesized
acacggatgctagaattagc

SEQ ID NO: 6454 - DNA, 20 bp, Artificial Sequence
  chemically synthesized
ggatgctagaattagcaggc

SEQ ID NO: 6455 - DNA, 20 bp, Artificial Sequence
  chemically synthesized
gatgctagaattagcaggca

SEQ ID NO: 6456 - DNA, 20 bp, Artificial Sequence
  chemically synthesized
ctagaattagcaggcaagga

SEQ ID NO: 6457 - DNA, 20 bp, Artificial Sequence
  chemically synthesized
agcaggcaaggatggtaaaa

SEQ ID NO: 6458 - DNA, 20 bp, Artificial Sequence
  chemically synthesized
ggatggtaaaacagatatta

SEQ ID NO: 6459 - DNA, 20 bp, Artificial Sequence
  chemically synthesized
cccattatgttcaaaaaatt

SEQ ID NO: 6460 - DNA, 20 bp, Artificial Sequence
  chemically synthesized
attatgttcaaaaaattaag

SEQ ID NO: 6461 - DNA, 20 bp, Artificial Sequence
  chemically synthesized
caaaaaattaagtagaattg

SEQ ID NO: 6462 - DNA, 20 bp, Artificial Sequence
  chemically synthesized
aaaaattaagtagaattgtg

SEQ ID NO: 6463 - DNA, 20 bp, Artificial Sequence
  chemically synthesized
aaaattaagtagaattgtgg

SEQ ID NO: 6464 - DNA, 20 bp, Artificial Sequence
  chemically synthesized
tagaattgtggaggatattt

SEQ ID NO: 6465 - DNA, 20 bp, Artificial Sequence
  chemically synthesized
gaattgtggaggatatttaa

SEQ ID NO: 6466 - DNA, 20 bp, Artificial Sequence
  chemically synthesized
ggaggatatttaagagtccc

SEQ ID NO: 6467 - DNA, 20 bp, Artificial Sequence
  chemically synthesized
gaggatatttaagagtcccc

SEQ ID NO: 6468 - DNA, 20 bp, Artificial Sequence
  chemically synthesized
agagtccccaggtgaacttc

SEQ ID NO: 6469 - DNA, 20 bp, Artificial Sequence
  chemically synthesized
agtccccaggtgaacttcta

SEQ ID NO: 6470 - DNA, 20 bp, Artificial Sequence
  chemically synthesized
tctgaaatgaaaaaacacac

SEQ ID NO: 6471 - DNA, 20 bp, Artificial Sequence
  chemically synthesized
aaatgaaaaaacacactggc

SEQ ID NO: 6472 - DNA, 20 bp, Artificial Sequence
  chemically synthesized
aatgaaaaaacacactggcc

SEQ ID NO: 6473 - DNA, 20 bp, Artificial Sequence
  chemically synthesized
aacacactggccaggcgccg

SEQ ID NO: 6474 - DNA, 20 bp, Artificial Sequence
  chemically synthesized
caggcgccgtggctcacgcc

SEQ ID NO: 6475 - DNA, 20 bp, Artificial Sequence
  chemically synthesized
gtggctcacgcctggaatcc

SEQ ID NO: 6476 - DNA, 20 bp, Artificial Sequence
  chemically synthesized
cgcctggaatcccagcactg

SEQ ID NO: 6477 - DNA, 20 bp, Artificial Sequence
  chemically synthesized
gcctggaatcccagcactgt

SEQ ID NO: 6478 - DNA, 20 bp, Artificial Sequence
  chemically synthesized
ctggaatcccagcactgtgg

SEQ ID NO: 6479 - DNA, 20 bp, Artificial Sequence
  chemically synthesized
tggaatcccagcactgtggg

SEQ ID NO: 6480 - DNA, 20 bp, Artificial Sequence
  chemically synthesized
tcccagcactgtgggaggcc

SEQ ID NO: 6481 - DNA, 20 bp, Artificial Sequence
  chemically synthesized
cccagcactgtgggaggcca

SEQ ID NO: 6482 - DNA, 20 bp, Artificial Sequence
  chemically synthesized
agcactgtgggaggccaagg

SEQ ID NO: 6483 - DNA, 20 bp, Artificial Sequence
  chemically synthesized
gcactgtgggaggccaaggc

SEQ ID NO: 6484 - DNA, 20 bp, Artificial Sequence
  chemically synthesized
ctgtgggaggccaaggcggg

SEQ ID NO: 6485 - DNA, 20 bp, Artificial Sequence
  chemically synthesized
ggccaaggcgggcagatcat

SEQ ID NO: 6486 - DNA, 20 bp, Artificial Sequence
  chemically synthesized
gccaaggcgggcagatcatg

SEQ ID NO: 6487 - DNA, 20 bp, Artificial Sequence
  chemically synthesized
aggcgggcagatcatgaggt

SEQ ID NO: 6488 - DNA, 20 bp, Artificial Sequence
  chemically synthesized
ggcgggcagatcatgaggtc

SEQ ID NO: 6489 - DNA, 20 bp, Artificial Sequence
  chemically synthesized
cgggcagatcatgaggtcag

SEQ ID NO: 6490 - DNA, 20 bp, Artificial Sequence
  chemically synthesized
tcaggagatcgacaccatcc

SEQ ID NO: 6491 - DNA, 20 bp, Artificial Sequence
  chemically synthesized
cgacaccatcctggctaaca

SEQ ID NO: 6492 - DNA, 20 bp, Artificial Sequence
  chemically synthesized
ctactaaaaatacaaaaaat

SEQ ID NO: 6493 - DNA, 20 bp, Artificial Sequence
  chemically synthesized
taaaaatacaaaaaattagc

SEQ ID NO: 6494 - DNA, 20 bp, Artificial Sequence
  chemically synthesized
tacaaaaaattagccagacg

SEQ ID NO: 6495 - DNA, 20 bp, Artificial Sequence
  chemically synthesized
aaaaaattagccagacgtgg

SEQ ID NO: 6496 - DNA, 20 bp, Artificial Sequence
  chemically synthesized
aaattagccagacgtggtgg

SEQ ID NO: 6497 - DNA, 20 bp, Artificial Sequence
  chemically synthesized
aattagccagacgtggtggc

SEQ ID NO: 6498 - DNA, 20 bp, Artificial Sequence
  chemically synthesized
gacgtggtggcaggcgcctg

SEQ ID NO: 6499 - DNA, 20 bp, Artificial Sequence
  chemically synthesized
gtggcaggcgcctgtagtcc

SEQ ID NO: 6500 - DNA, 20 bp, Artificial Sequence
  chemically synthesized
cgcctgtagtcccagctact

SEQ ID NO: 6501 - DNA, 20 bp, Artificial Sequence
  chemically synthesized
gcctgtagtcccagctactc

SEQ ID NO: 6502 - DNA, 20 bp, Artificial Sequence
  chemically synthesized
ctgtagtcccagctactcgg

SEQ ID NO: 6503 - DNA, 20 bp, Artificial Sequence
  chemically synthesized
tgtagtcccagctactcggg

SEQ ID NO: 6504 - DNA, 20 bp, Artificial Sequence
  chemically synthesized
tcccagctactcgggaggct

SEQ ID NO: 6505 - DNA, 20 bp, Artificial Sequence
  chemically synthesized
cccagctactcgggaggctg

SEQ ID NO: 6506 - DNA, 20 bp, Artificial Sequence
  chemically synthesized
agctactcgggaggctgagg

SEQ ID NO: 6507 - DNA, 20 bp, Artificial Sequence
  chemically synthesized
gctactcgggaggctgaggc

SEQ ID NO: 6508 - DNA, 20 bp, Artificial Sequence
  chemically synthesized
tactcgggaggctgaggcag

SEQ ID NO: 6509 - DNA, 20 bp, Artificial Sequence
  chemically synthesized
gggaggctgaggcaggagaa

SEQ ID NO: 6510 - DNA, 20 bp, Artificial Sequence
  chemically synthesized
gcaggagaatggcatgaacc

SEQ ID NO: 6511 - DNA, 20 bp, Artificial Sequence
  chemically synthesized
caggagaatggcatgaaccc

SEQ ID NO: 6512 - DNA, 20 bp, Artificial Sequence
  chemically synthesized
ggagaatggcatgaacccgg

SEQ ID NO: 6513 - DNA, 20 bp, Artificial Sequence
  chemically synthesized
gagaatggcatgaacccggg

SEQ ID NO: 6514 - DNA, 20 bp, Artificial Sequence
  chemically synthesized
aatggcatgaacccgggagg

SEQ ID NO: 6515 - DNA, 20 bp, Artificial Sequence
  chemically synthesized
tggcatgaacccgggaggca

SEQ ID NO: 6516 - DNA, 20 bp, Artificial Sequence
  chemically synthesized
aacccgggaggcagagcttg

SEQ ID NO: 6517 - DNA, 20 bp, Artificial Sequence
  chemically synthesized
cgggaggcagagcttgcagt

SEQ ID NO: 6518 - DNA, 20 bp, Artificial Sequence
  chemically synthesized
ggcagagcttgcagtgagcc

SEQ ID NO: 6519 - DNA, 20 bp, Artificial Sequence
  chemically synthesized
aagatcgcgccactgcactc

SEQ ID NO: 6520 - DNA, 20 bp, Artificial Sequence
  chemically synthesized
cgcgccactgcactccggcc

SEQ ID NO: 6521 - DNA, 20 bp, Artificial Sequence
  chemically synthesized
gcgccactgcactccggcct

SEQ ID NO: 6522 - DNA, 20 bp, Artificial Sequence
  chemically synthesized
ctgcactccggcctgggcaa

SEQ ID NO: 6523 - DNA, 20 bp, Artificial Sequence
  chemically synthesized
gcactccggcctgggcaaca

SEQ ID NO: 6524 - DNA, 20 bp, Artificial Sequence
  chemically synthesized
tccggcctgggcaacagagc

SEQ ID NO: 6525 - DNA, 20 bp, Artificial Sequence
  chemically synthesized
ccgcctccaaaaaaaaaaaa

SEQ ID NO: 6526 - DNA, 20 bp, Artificial Sequence
  chemically synthesized
tccaaaaaaaaaaaaaagaa

SEQ ID NO: 6527 - DNA, 20 bp, Artificial Sequence
  chemically synthesized
aaaaaaaaaaaaagaaaaga

SEQ ID NO: 6528 - DNA, 20 bp, Artificial Sequence
  chemically synthesized
aaaaaaaagaaaagaaagaa

SEQ ID NO: 6529 - DNA, 20 bp, Artificial Sequence
  chemically synthesized
aaagaaaagaaaaaacacac

SEQ ID NO: 6530 - DNA, 20 bp, Artificial Sequence
  chemically synthesized
aaaagaaaaaacacactgga

SEQ ID NO: 6531 - DNA, 20 bp, Artificial Sequence
  chemically synthesized
aacacactggatggaaataa

SEQ ID NO: 6532 - DNA, 20 bp, Artificial Sequence
  chemically synthesized
acactggatggaaataatgg

SEQ ID NO: 6533 - DNA, 20 bp, Artificial Sequence
  chemically synthesized
ggatggaaataatggaagat

SEQ ID NO: 6534 - DNA, 20 bp, Artificial Sequence
  chemically synthesized
atggaagatgagaaatgcgt

SEQ ID NO: 6535 - DNA, 20 bp, Artificial Sequence
  chemically synthesized
agaaatgcgtaagaaaaatt

SEQ ID NO: 6536 - DNA, 20 bp, Artificial Sequence
  chemically synthesized
gaaatgcgtaagaaaaattt

SEQ ID NO: 6537 - DNA, 20 bp, Artificial Sequence
  chemically synthesized
aaatgcgtaagaaaaattta

SEQ ID NO: 6538 - DNA, 20 bp, Artificial Sequence
  chemically synthesized
gcgtaagaaaaatttagggc

SEQ ID NO: 6539 - DNA, 20 bp, Artificial Sequence
  chemically synthesized
cgtaagaaaaatttagggcc

SEQ ID NO: 6540 - DNA, 20 bp, Artificial Sequence
  chemically synthesized
aaatttagggccaggcactg

SEQ ID NO: 6541 - DNA, 20 bp, Artificial Sequence
  chemically synthesized
gtggatcacatctgtaatcc

SEQ ID NO: 6542 - DNA, 20 bp, Artificial Sequence
  chemically synthesized
catctgtaatcccagcactt

SEQ ID NO: 6543 - DNA, 20 bp, Artificial Sequence
  chemically synthesized
atctgtaatcccagcacttt

SEQ ID NO: 6544 - DNA, 20 bp, Artificial Sequence
  chemically synthesized
ctgtaatcccagcactttgg

SEQ ID NO: 6545 - DNA, 20 bp, Artificial Sequence
  chemically synthesized
tgtaatcccagcactttggg

SEQ ID NO: 6546 - DNA, 20 bp, Artificial Sequence
  chemically synthesized
agcactttgggaggtcgaca

SEQ ID NO: 6547 - DNA, 20 bp, Artificial Sequence
  chemically synthesized
gcactttgggaggtcgacac

SEQ ID NO: 6548 - DNA, 20 bp, Artificial Sequence
  chemically synthesized
cactttgggaggtcgacacg

SEQ ID NO: 6549 - DNA, 20 bp, Artificial Sequence
  chemically synthesized
actttgggaggtcgacacgg

SEQ ID NO: 6550 - DNA, 20 bp, Artificial Sequence
  chemically synthesized
ctttgggaggtcgacacggg

SEQ ID NO: 6551 - DNA, 20 bp, Artificial Sequence
  chemically synthesized
cgacacggggggaatcactt

SEQ ID NO: 6552 - DNA, 20 bp, Artificial Sequence
  chemically synthesized
cggggggaatcacttgagcc

SEQ ID NO: 6553 - DNA, 20 bp, Artificial Sequence
  chemically synthesized
ggggggaatcacttgagccc

SEQ ID NO: 6554 - DNA, 20 bp, Artificial Sequence
  chemically synthesized
ggggaatcacttgagcccag

SEQ ID NO: 6555 - DNA, 20 bp, Artificial Sequence
  chemically synthesized
tcacttgagcccaggagctc

SEQ ID NO: 6556 - DNA, 20 bp, Artificial Sequence
  chemically synthesized
tgagcccaggagctcaagac

SEQ ID NO: 6557 - DNA, 20 bp, Artificial Sequence
  chemically synthesized
ccaggagctcaagactagtc

SEQ ID NO: 6558 - DNA, 20 bp, Artificial Sequence
  chemically synthesized
caggagctcaagactagtct

SEQ ID NO: 6559 - DNA, 20 bp, Artificial Sequence
  chemically synthesized
gagctcaagactagtctggg

SEQ ID NO: 6560 - DNA, 20 bp, Artificial Sequence
  chemically synthesized
caagactagtctgggcagca

SEQ ID NO: 6561 - DNA, 20 bp, Artificial Sequence
  chemically synthesized
catggcaaaacccctctaca

SEQ ID NO: 6562 - DNA, 20 bp, Artificial Sequence
  chemically synthesized
tacaaaaaaaaatttttaat

SEQ ID NO: 6563 - DNA, 20 bp, Artificial Sequence
  chemically synthesized
aaaaaaaatttttaattagc

SEQ ID NO: 6564 - DNA, 20 bp, Artificial Sequence
  chemically synthesized
aaaaaaatttttaattagcc

SEQ ID NO: 6565 - DNA, 20 bp, Artificial Sequence
  chemically synthesized
aatttttaattagccaggtg

SEQ ID NO: 6566 - DNA, 20 bp, Artificial Sequence
  chemically synthesized
ggtgtggtgccacatgccta

SEQ ID NO: 6567 - DNA, 20 bp, Artificial Sequence
  chemically synthesized
gtgccacatgcctatagtcc

SEQ ID NO: 6568 - DNA, 20 bp, Artificial Sequence
  chemically synthesized
tgcctatagtcccagctacc

SEQ ID NO: 6569 - DNA, 20 bp, Artificial Sequence
  chemically synthesized
gcctatagtcccagctacct

SEQ ID NO: 6570 - DNA, 20 bp, Artificial Sequence
  chemically synthesized
ctatagtcccagctacctgg

SEQ ID NO: 6571 - DNA, 20 bp, Artificial Sequence
  chemically synthesized
tatagtcccagctacctggg

SEQ ID NO: 6572 - DNA, 20 bp, Artificial Sequence
  chemically synthesized
cccagctacctgggaggctg

SEQ ID NO: 6573 - DNA, 20 bp, Artificial Sequence
  chemically synthesized
agctacctgggaggctgaag

SEQ ID NO: 6574 - DNA, 20 bp, Artificial Sequence
  chemically synthesized
tacctgggaggctgaagtgg

SEQ ID NO: 6575 - DNA, 20 bp, Artificial Sequence
  chemically synthesized
acctgggaggctgaagtgga

SEQ ID NO: 6576 - DNA, 20 bp, Artificial Sequence
  chemically synthesized
ctgaagtggaaggatcgcct

SEQ ID NO: 6577 - DNA, 20 bp, Artificial Sequence
  chemically synthesized
gtggaaggatcgcctgagcc

SEQ ID NO: 6578 - DNA, 20 bp, Artificial Sequence
  chemically synthesized
tggaaggatcgcctgagccc

SEQ ID NO: 6579 - DNA, 20 bp, Artificial Sequence
  chemically synthesized
gaaggatcgcctgagcccag

SEQ ID NO: 6580 - DNA, 20 bp, Artificial Sequence
  chemically synthesized
aaggatcgcctgagcccagg

SEQ ID NO: 6581 - DNA, 20 bp, Artificial Sequence
  chemically synthesized
gatcgcctgagcccaggagg

SEQ ID NO: 6582 - DNA, 20 bp, Artificial Sequence
  chemically synthesized
tcgcctgagcccaggaggtg

SEQ ID NO: 6583 - DNA, 20 bp, Artificial Sequence
  chemically synthesized
cgcctgagcccaggaggtgg

SEQ ID NO: 6584 - DNA, 20 bp, Artificial Sequence
  chemically synthesized
agcccaggaggtggaggcca

SEQ ID NO: 6585 - DNA, 20 bp, Artificial Sequence
  chemically synthesized
caggaggtggaggccacagt

SEQ ID NO: 6586 - DNA, 20 bp, Artificial Sequence
  chemically synthesized
aggccacagtgagttgtgac

SEQ ID NO: 6587 - DNA, 20 bp, Artificial Sequence
  chemically synthesized
tgtgacaagctactgcattc

SEQ ID NO: 6588 - DNA, 20 bp, Artificial Sequence
  chemically synthesized
caagctactgcattccagcc

SEQ ID NO: 6589 - DNA, 20 bp, Artificial Sequence
  chemically synthesized
aagctactgcattccagcct

SEQ ID NO: 6590 - DNA, 20 bp, Artificial Sequence
  chemically synthesized
ctgcattccagcctgggcaa

SEQ ID NO: 6591 - DNA, 20 bp, Artificial Sequence
  chemically synthesized
gcattccagcctgggcaaca

SEQ ID NO: 6592 - DNA, 20 bp, Artificial Sequence
  chemically synthesized
tccagcctgggcaacagagt

SEQ ID NO: 6593 - DNA, 20 bp, Artificial Sequence
  chemically synthesized
cctgggcaacagagtgagat

SEQ ID NO: 6594 - DNA, 20 bp, Artificial Sequence
  chemically synthesized
tgggcaacagagtgagatga

SEQ ID NO: 6595 - DNA, 20 bp, Artificial Sequence
  chemically synthesized
ggcaacagagtgagatgaga

SEQ ID NO: 6596 - DNA, 20 bp, Artificial Sequence
  chemically synthesized
caacagagtgagatgagaga

SEQ ID NO: 6597 - DNA, 20 bp, Artificial Sequence
  chemically synthesized
acagagtgagatgagagaga

SEQ ID NO: 6598 - DNA, 20 bp, Artificial Sequence
  chemically synthesized
agagtgagatgagagagaga

SEQ ID NO: 6599 - DNA, 20 bp, Artificial Sequence
  chemically synthesized
gagtgagatgagagagagag

SEQ ID NO: 6600 - DNA, 20 bp, Artificial Sequence
  chemically synthesized
agtgagatgagagagagaga

SEQ ID NO: 6601 - DNA, 20 bp, Artificial Sequence
  chemically synthesized
gtgagatgagagagagagag

SEQ ID NO: 6602 - DNA, 20 bp, Artificial Sequence
  chemically synthesized
gagatgagagagagagaggg

SEQ ID NO: 6603 - DNA, 20 bp, Artificial Sequence
  chemically synthesized
agatgagagagagagagggg

SEQ ID NO: 6604 - DNA, 20 bp, Artificial Sequence
  chemically synthesized
gatgagagagagagagggga

SEQ ID NO: 6605 - DNA, 20 bp, Artificial Sequence
  chemically synthesized
atgagagagagagaggggag

SEQ ID NO: 6606 - DNA, 20 bp, Artificial Sequence
  chemically synthesized
agagagagagaggggagggg

SEQ ID NO: 6607 - DNA, 20 bp, Artificial Sequence
  chemically synthesized
agagagaggggaggggaagc

SEQ ID NO: 6608 - DNA, 20 bp, Artificial Sequence
  chemically synthesized
gagagaggggaggggaagcg

SEQ ID NO: 6609 - DNA, 20 bp, Artificial Sequence
  chemically synthesized
agagaggggaggggaagcga

SEQ ID NO: 6610 - DNA, 20 bp, Artificial Sequence
  chemically synthesized
gaggggaggggaagcgaggg

SEQ ID NO: 6611 - DNA, 20 bp, Artificial Sequence
  chemically synthesized
aggggaggggaagcgaggga

SEQ ID NO: 6612 - DNA, 20 bp, Artificial Sequence
  chemically synthesized
gaggggaagcgagggaagga

SEQ ID NO: 6613 - DNA, 20 bp, Artificial Sequence
  chemically synthesized
aggggaagcgagggaaggaa

SEQ ID NO: 6614 - DNA, 20 bp, Artificial Sequence
  chemically synthesized
gggaagcgagggaaggaaag

SEQ ID NO: 6615 - DNA, 20 bp, Artificial Sequence
  chemically synthesized
ggaagcgagggaaggaaagg

SEQ ID NO: 6616 - DNA, 20 bp, Artificial Sequence
  chemically synthesized
gaagcgagggaaggaaagga

SEQ ID NO: 6617 - DNA, 20 bp, Artificial Sequence
  chemically synthesized
aagcgagggaaggaaaggag

SEQ ID NO: 6618 - DNA, 20 bp, Artificial Sequence
  chemically synthesized
gcgagggaaggaaaggaggg

SEQ ID NO: 6619 - DNA, 20 bp, Artificial Sequence
  chemically synthesized
cgagggaaggaaaggagggg

SEQ ID NO: 6620 - DNA, 20 bp, Artificial Sequence
  chemically synthesized
gagggaaggaaaggagggga

SEQ ID NO: 6621 - DNA, 20 bp, Artificial Sequence
  chemically synthesized
agggaaggaaaggaggggag

SEQ ID NO: 6622 - DNA, 20 bp, Artificial Sequence
  chemically synthesized
ggaaggaaaggaggggaggg

SEQ ID NO: 6623 - DNA, 20 bp, Artificial Sequence
  chemically synthesized
gaaggaaaggaggggagggg

SEQ ID NO: 6624 - DNA, 20 bp, Artificial Sequence
  chemically synthesized
aaggaaaggaggggagggga

SEQ ID NO: 6625 - DNA, 20 bp, Artificial Sequence
  chemically synthesized
aggaaaggaggggaggggag

SEQ ID NO: 6626 - DNA, 20 bp, Artificial Sequence
  chemically synthesized
ggaaaggaggggaggggagg

SEQ ID NO: 6627 - DNA, 20 bp, Artificial Sequence
  chemically synthesized
aaaggaggggaggggagggg

SEQ ID NO: 6628 - DNA, 20 bp, Artificial Sequence
  chemically synthesized
aaggaggggaggggaggggg

SEQ ID NO: 6629 - DNA, 20 bp, Artificial Sequence
  chemically synthesized
aggaggggaggggaggggga

SEQ ID NO: 6630 - DNA, 20 bp, Artificial Sequence
  chemically synthesized
ggaggggaggggagggggag

SEQ ID NO: 6631 - DNA, 20 bp, Artificial Sequence
  chemically synthesized
ggggaggggagggggagggg

SEQ ID NO: 6632 - DNA, 20 bp, Artificial Sequence
  chemically synthesized
gggaggggagggggagggga

SEQ ID NO: 6633 - DNA, 20 bp, Artificial Sequence
  chemically synthesized
ggaggggagggggaggggaa

SEQ ID NO: 6634 - DNA, 20 bp, Artificial Sequence
  chemically synthesized
gaggggagggggaggggaag

SEQ ID NO: 6635 - DNA, 20 bp, Artificial Sequence
  chemically synthesized
ggaggggaaggggaaaattt

SEQ ID NO: 6636 - DNA, 20 bp, Artificial Sequence
  chemically synthesized
attttagttaacttaatgaa

SEQ ID NO: 6637 - DNA, 20 bp, Artificial Sequence
  chemically synthesized
aactctataaaatgaaacac

SEQ ID NO: 6638 - DNA, 20 bp, Artificial Sequence
  chemically synthesized
actctataaaatgaaacact

SEQ ID NO: 6639 - DNA, 20 bp, Artificial Sequence
  chemically synthesized
tctataaaatgaaacactgg

SEQ ID NO: 6640 - DNA, 20 bp, Artificial Sequence
  chemically synthesized
aatgaaacactgggagaaaa

SEQ ID NO: 6641 - DNA, 20 bp, Artificial Sequence
  chemically synthesized
gagaaaaaagaattaaaaaa

SEQ ID NO: 6642 - DNA, 20 bp, Artificial Sequence
  chemically synthesized
aaaaagaattaaaaaatgga

SEQ ID NO: 6643 - DNA, 20 bp, Artificial Sequence
  chemically synthesized
aaagaattaaaaaatggaaa

SEQ ID NO: 6644 - DNA, 20 bp, Artificial Sequence
  chemically synthesized
ttaaaaaatggaaagagaat

SEQ ID NO: 6645 - DNA, 20 bp, Artificial Sequence
  chemically synthesized
aaaatggaaagagaatgagt

SEQ ID NO: 6646 - DNA, 20 bp, Artificial Sequence
  chemically synthesized
gaaagagaatgagtgagctg

SEQ ID NO: 6647 - DNA, 20 bp, Artificial Sequence
  chemically synthesized
aaagagaatgagtgagctgt

SEQ ID NO: 6648 - DNA, 20 bp, Artificial Sequence
  chemically synthesized
tgcataattgaaatctttaa

SEQ ID NO: 6649 - DNA, 20 bp, Artificial Sequence
  chemically synthesized
attgaaatctttaaaagaaa

SEQ ID NO: 6650 - DNA, 20 bp, Artificial Sequence
  chemically synthesized
ttgaaatctttaaaagaaaa

SEQ ID NO: 6651 - DNA, 20 bp, Artificial Sequence
  chemically synthesized
tgaaatctttaaaagaaaaa

SEQ ID NO: 6652 - DNA, 20 bp, Artificial Sequence
  chemically synthesized
gaaatctttaaaagaaaaag

SEQ ID NO: 6653 - DNA, 20 bp, Artificial Sequence
  chemically synthesized
aaatctttaaaagaaaaagg

SEQ ID NO: 6654 - DNA, 20 bp, Artificial Sequence
  chemically synthesized
tctttaaaagaaaaaggggg

SEQ ID NO: 6655 - DNA, 20 bp, Artificial Sequence
  chemically synthesized
ttaaaagaaaaagggggtag

SEQ ID NO: 6656 - DNA, 20 bp, Artificial Sequence
  chemically synthesized
gggggtagcagaaaaaaatc

SEQ ID NO: 6657 - DNA, 20 bp, Artificial Sequence
  chemically synthesized
gcagaaaaaaatcaagtgct

SEQ ID NO: 6658 - DNA, 20 bp, Artificial Sequence
  chemically synthesized
aaaaaatcaagtgctgagac

SEQ ID NO: 6659 - DNA, 20 bp, Artificial Sequence
  chemically synthesized
aaatcaagtgctgagacaag

SEQ ID NO: 6660 - DNA, 20 bp, Artificial Sequence
  chemically synthesized
tcaagtgctgagacaagtgg

SEQ ID NO: 6661 - DNA, 20 bp, Artificial Sequence
  chemically synthesized
gtgctgagacaagtggaaga

SEQ ID NO: 6662 - DNA, 20 bp, Artificial Sequence
  chemically synthesized
tgctgagacaagtggaagat

SEQ ID NO: 6663 - DNA, 20 bp, Artificial Sequence
  chemically synthesized
gacaagtggaagatgggccc

SEQ ID NO: 6664 - DNA, 20 bp, Artificial Sequence
  chemically synthesized
agtggaagatgggccccggt

SEQ ID NO: 6665 - DNA, 20 bp, Artificial Sequence
  chemically synthesized
ggaagatgggccccggtgag

SEQ ID NO: 6666 - DNA, 20 bp, Artificial Sequence
  chemically synthesized
ggccccggtgagcagctgat

SEQ ID NO: 6667 - DNA, 20 bp, Artificial Sequence
  chemically synthesized
ggtgagcagctgatcagtgt

SEQ ID NO: 6668 - DNA, 20 bp, Artificial Sequence
  chemically synthesized
ctcccatgatgacgttcccc

SEQ ID NO: 6669 - DNA, 20 bp, Artificial Sequence
  chemically synthesized
ttcccccagcccccaccacc

SEQ ID NO: 6670 - DNA, 20 bp, Artificial Sequence
  chemically synthesized
tcccccagcccccaccaccc

SEQ ID NO: 6671 - DNA, 20 bp, Artificial Sequence
  chemically synthesized
gcccccaccacccgggctgc

SEQ ID NO: 6672 - DNA, 20 bp, Artificial Sequence
  chemically synthesized
ccccaccacccgggctgctg

SEQ ID NO: 6673 - DNA, 20 bp, Artificial Sequence
  chemically synthesized
cccaccacccgggctgctgg

SEQ ID NO: 6674 - DNA, 20 bp, Artificial Sequence
  chemically synthesized
ccaccacccgggctgctgga

SEQ ID NO: 6675 - DNA, 20 bp, Artificial Sequence
  chemically synthesized
cgggctgctggagggaaatg

SEQ ID NO: 6676 - DNA, 20 bp, Artificial Sequence
  chemically synthesized
gtgactttgctacatccctt

SEQ ID NO: 6677 - DNA, 20 bp, Artificial Sequence
  chemically synthesized
ctttgctacatcccttcaga

SEQ ID NO: 6678 - DNA, 20 bp, Artificial Sequence
  chemically synthesized
cccttcagacggtccctcac

SEQ ID NO: 6679 - DNA, 20 bp, Artificial Sequence
  chemically synthesized
ggtccctcactggtgtccct

SEQ ID NO: 6680 - DNA, 20 bp, Artificial Sequence
  chemically synthesized
gtccctcagcccattcgcgt

SEQ ID NO: 6681 - DNA, 20 bp, Artificial Sequence
  chemically synthesized
gctcactctcccattaattt

SEQ ID NO: 6682 - DNA, 20 bp, Artificial Sequence
  chemically synthesized
cccattaatttcagaaatcc

SEQ ID NO: 6683 - DNA, 20 bp, Artificial Sequence
  chemically synthesized
agaaatcctggcctctctcc

SEQ ID NO: 6684 - DNA, 20 bp, Artificial Sequence
  chemically synthesized
actctaaattctgtcaccct

SEQ ID NO: 6685 - DNA, 20 bp, Artificial Sequence
  chemically synthesized
ctaaattctgtcaccctcag

SEQ ID NO: 6686 - DNA, 20 bp, Artificial Sequence
  chemically synthesized
tctgtcaccctcagaagatt

SEQ ID NO: 6687 - DNA, 20 bp, Artificial Sequence
  chemically synthesized
gtcaccctcagaagattcag

SEQ ID NO: 6688 - DNA, 20 bp, Artificial Sequence
  chemically synthesized
cagcatcccgtattctctct

SEQ ID NO: 6689 - DNA, 20 bp, Artificial Sequence
  chemically synthesized
tctgagtgttcactatgtac

SEQ ID NO: 6690 - DNA, 20 bp, Artificial Sequence
  chemically synthesized
ctgagtgttcactatgtacc

SEQ ID NO: 6691 - DNA, 20 bp, Artificial Sequence
  chemically synthesized
actatgtaccgggtgccgtg

SEQ ID NO: 6692 - DNA, 20 bp, Artificial Sequence
  chemically synthesized
ctatgtaccgggtgccgtgt

SEQ ID NO: 6693 - DNA, 20 bp, Artificial Sequence
  chemically synthesized
accgggtgccgtgtgggcac

SEQ ID NO: 6694 - DNA, 20 bp, Artificial Sequence
  chemically synthesized
cgggtgccgtgtgggcactg

SEQ ID NO: 6695 - DNA, 20 bp, Artificial Sequence
  chemically synthesized
ccgtgtgggcactggagttg

SEQ ID NO: 6696 - DNA, 20 bp, Artificial Sequence
  chemically synthesized
gtgtgggcactggagttgca

SEQ ID NO: 6697 - DNA, 20 bp, Artificial Sequence
  chemically synthesized
tgtgggcactggagttgcag

SEQ ID NO: 6698 - DNA, 20 bp, Artificial Sequence
  chemically synthesized
tgggcactggagttgcagag

SEQ ID NO: 6699 - DNA, 20 bp, Artificial Sequence
  chemically synthesized
ggcactggagttgcagagga

SEQ ID NO: 6700 - DNA, 20 bp, Artificial Sequence
  chemically synthesized
ctggagttgcagaggagagt

SEQ ID NO: 6701 - DNA, 20 bp, Artificial Sequence
  chemically synthesized
tggagttgcagaggagagtg

SEQ ID NO: 6702 - DNA, 20 bp, Artificial Sequence
  chemically synthesized
agttgcagaggagagtgagg

SEQ ID NO: 6703 - DNA, 20 bp, Artificial Sequence
  chemically synthesized
gcagaggagagtgaggcgga

SEQ ID NO: 6704 - DNA, 20 bp, Artificial Sequence
  chemically synthesized
cagaggagagtgaggcggac

SEQ ID NO: 6705 - DNA, 20 bp, Artificial Sequence
  chemically synthesized
agaggagagtgaggcggaca

SEQ ID NO: 6706 - DNA, 20 bp, Artificial Sequence
  chemically synthesized
gcggacagggcctctgcctg

SEQ ID NO: 6707 - DNA, 20 bp, Artificial Sequence
  chemically synthesized
cggacagggcctctgcctgt

SEQ ID NO: 6708 - DNA, 20 bp, Artificial Sequence
  chemically synthesized
ggacagggcctctgcctgtg

SEQ ID NO: 6709 - DNA, 20 bp, Artificial Sequence
  chemically synthesized
ctgcctgtggggacaccgcc

SEQ ID NO: 6710 - DNA, 20 bp, Artificial Sequence
  chemically synthesized
cctgtggggacaccgcctgg

SEQ ID NO: 6711 - DNA, 20 bp, Artificial Sequence
  chemically synthesized
ctgtggggacaccgcctggt

SEQ ID NO: 6712 - DNA, 20 bp, Artificial Sequence
  chemically synthesized
tggggacaccgcctggtggg

SEQ ID NO: 6713 - DNA, 20 bp, Artificial Sequence
  chemically synthesized
acaccgcctggtgggaagtc

SEQ ID NO: 6714 - DNA, 20 bp, Artificial Sequence
  chemically synthesized
cgcctggtgggaagtccagc

SEQ ID NO: 6715 - DNA, 20 bp, Artificial Sequence
  chemically synthesized
gaagtccagccagcccccta

SEQ ID NO: 6716 - DNA, 20 bp, Artificial Sequence
  chemically synthesized
agtccagccagccccctaca

SEQ ID NO: 6717 - DNA, 20 bp, Artificial Sequence
  chemically synthesized
tccagccagccccctacaga

SEQ ID NO: 6718 - DNA, 20 bp, Artificial Sequence
  chemically synthesized
cagccagccccctacagaga

SEQ ID NO: 6719 - DNA, 20 bp, Artificial Sequence
  chemically synthesized
agccagccccctacagagag

SEQ ID NO: 6720 - DNA, 20 bp, Artificial Sequence
  chemically synthesized
ccagccccctacagagagag

SEQ ID NO: 6721 - DNA, 20 bp, Artificial Sequence
  chemically synthesized
acagagagaggagatgctac

SEQ ID NO: 6722 - DNA, 20 bp, Artificial Sequence
  chemically synthesized
gagatgctactggtgttcct

SEQ ID NO: 6723 - DNA, 20 bp, Artificial Sequence
  chemically synthesized
atgctactggtgttcctgag

SEQ ID NO: 6724 - DNA, 20 bp, Artificial Sequence
  chemically synthesized
tggtgttcctgagtggtcct

SEQ ID NO: 6725 - DNA, 20 bp, Artificial Sequence
  chemically synthesized
ggtgttcctgagtggtcctc

SEQ ID NO: 6726 - DNA, 20 bp, Artificial Sequence
  chemically synthesized
tgttcctgagtggtcctcgg

SEQ ID NO: 6727 - DNA, 20 bp, Artificial Sequence
  chemically synthesized
gttcctgagtggtcctcggg

SEQ ID NO: 6728 - DNA, 20 bp, Artificial Sequence
  chemically synthesized
ttcctgagtggtcctcggga

SEQ ID NO: 6729 - DNA, 20 bp, Artificial Sequence
  chemically synthesized
gtcccctgccctgccctgcc

SEQ ID NO: 6730 - DNA, 20 bp, Artificial Sequence
  chemically synthesized
tgccctgccctgcccagcac

SEQ ID NO: 6731 - DNA, 20 bp, Artificial Sequence
  chemically synthesized
gcccagcaccggccctccct

SEQ ID NO: 6732 - DNA, 20 bp, Artificial Sequence
  chemically synthesized
agcaccggccctccctcggt

SEQ ID NO: 6733 - DNA, 20 bp, Artificial Sequence
  chemically synthesized
ccggccctccctcggttggc

SEQ ID NO: 6734 - DNA, 20 bp, Artificial Sequence
  chemically synthesized
ctccctcggttggccagcct

SEQ ID NO: 6735 - DNA, 20 bp, Artificial Sequence
  chemically synthesized
tccctcggttggccagcctc

SEQ ID NO: 6736 - DNA, 20 bp, Artificial Sequence
  chemically synthesized
ggttggccagcctcaggaat

SEQ ID NO: 6737 - DNA, 20 bp, Artificial Sequence
  chemically synthesized
gttggccagcctcaggaatg

SEQ ID NO: 6738 - DNA, 20 bp, Artificial Sequence
  chemically synthesized
tggccagcctcaggaatgag

SEQ ID NO: 6739 - DNA, 20 bp, Artificial Sequence
  chemically synthesized
gaatgaggagtccctcattc

SEQ ID NO: 6740 - DNA, 20 bp, Artificial Sequence
  chemically synthesized
aggagtccctcattccagcc

SEQ ID NO: 6741 - DNA, 20 bp, Artificial Sequence
  chemically synthesized
agctaaccaatccccttcct

SEQ ID NO: 6742 - DNA, 20 bp, Artificial Sequence
  chemically synthesized
caatccccttcctaagctcc

SEQ ID NO: 6743 - DNA, 20 bp, Artificial Sequence
  chemically synthesized
ccctgctcctcctgcctcca

SEQ ID NO: 6744 - DNA, 20 bp, Artificial Sequence
  chemically synthesized
cctcctgcctccatggaacc

SEQ ID NO: 6745 - DNA, 20 bp, Artificial Sequence
  chemically synthesized
atggaacccggctccaccac

SEQ ID NO: 6746 - DNA, 20 bp, Artificial Sequence
  chemically synthesized
acctgacactcctccattcc

SEQ ID NO: 6747 - DNA, 20 bp, Artificial Sequence
  chemically synthesized
ctggctcttgcccttctgcc

SEQ ID NO: 6748 - DNA, 20 bp, Artificial Sequence
  chemically synthesized
cccttctgcctagcactgct

SEQ ID NO: 6749 - DNA, 20 bp, Artificial Sequence
  chemically synthesized
accttaaaatcttttcccac

SEQ ID NO: 6750 - DNA, 20 bp, Artificial Sequence
  chemically synthesized
aaaatcttttcccaccagcc

SEQ ID NO: 6751 - DNA, 20 bp, Artificial Sequence
  chemically synthesized
aaatcttttcccaccagcct

SEQ ID NO: 6752 - DNA, 20 bp, Artificial Sequence
  chemically synthesized
tcccaccagcctgggcaaca

SEQ ID NO: 6753 - DNA, 20 bp, Artificial Sequence
  chemically synthesized
accagcctgggcaacatagc

SEQ ID NO: 6754 - DNA, 20 bp, Artificial Sequence
  chemically synthesized
aaaaattttttttaatttgc

SEQ ID NO: 6755 - DNA, 20 bp, Artificial Sequence
  chemically synthesized
aaaattttttttaatttgcc

SEQ ID NO: 6756 - DNA, 20 bp, Artificial Sequence
  chemically synthesized
tttttttaatttgccaggca

SEQ ID NO: 6757 - DNA, 20 bp, Artificial Sequence
  chemically synthesized
ttttaatttgccaggcacag

SEQ ID NO: 6758 - DNA, 20 bp, Artificial Sequence
  chemically synthesized
gcacagtggtgcacacctgt

SEQ ID NO: 6759 - DNA, 20 bp, Artificial Sequence
  chemically synthesized
acctgtaagtcctaactact

SEQ ID NO: 6760 - DNA, 20 bp, Artificial Sequence
  chemically synthesized
cctgtaagtcctaactactt

SEQ ID NO: 6761 - DNA, 20 bp, Artificial Sequence
  chemically synthesized
tgtaagtcctaactacttgg

SEQ ID NO: 6762 - DNA, 20 bp, Artificial Sequence
  chemically synthesized
gtaagtcctaactacttggg

SEQ ID NO: 6763 - DNA, 20 bp, Artificial Sequence
  chemically synthesized
tcctaactacttgggaggct

SEQ ID NO: 6764 - DNA, 20 bp, Artificial Sequence
  chemically synthesized
cctaactacttgggaggctg

SEQ ID NO: 6765 - DNA, 20 bp, Artificial Sequence
  chemically synthesized
aactacttgggaggctgagg

SEQ ID NO: 6766 - DNA, 20 bp, Artificial Sequence
  chemically synthesized
actacttgggaggctgaggt

SEQ ID NO: 6767 - DNA, 20 bp, Artificial Sequence
  chemically synthesized
tacttgggaggctgaggtgg

SEQ ID NO: 6768 - DNA, 20 bp, Artificial Sequence
  chemically synthesized
acttgggaggctgaggtggg

SEQ ID NO: 6769 - DNA, 20 bp, Artificial Sequence
  chemically synthesized
gggaggctgaggtgggagga

SEQ ID NO: 6770 - DNA, 20 bp, Artificial Sequence
  chemically synthesized
ctgaggtgggaggatggctt

SEQ ID NO: 6771 - DNA, 20 bp, Artificial Sequence
  chemically synthesized
gtgggaggatggcttgagcc

SEQ ID NO: 6772 - DNA, 20 bp, Artificial Sequence
  chemically synthesized
tgggaggatggcttgagccc

SEQ ID NO: 6773 - DNA, 20 bp, Artificial Sequence
  chemically synthesized
ggaggatggcttgagcccag

SEQ ID NO: 6774 - DNA, 20 bp, Artificial Sequence
  chemically synthesized
tggcttgagcccaggagttc

SEQ ID NO: 6775 - DNA, 20 bp, Artificial Sequence
  chemically synthesized
ggcttgagcccaggagttcg

SEQ ID NO: 6776 - DNA, 20 bp, Artificial Sequence
  chemically synthesized
agcccaggagttcgaggttg

SEQ ID NO: 6777 - DNA, 20 bp, Artificial Sequence
  chemically synthesized
caggagttcgaggttgcagt

SEQ ID NO: 6778 - DNA, 20 bp, Artificial Sequence
  chemically synthesized
tctctaaaaaaaaaatgtcc

SEQ ID NO: 6779 - DNA, 20 bp, Artificial Sequence
  chemically synthesized
aaaaaaatgtccaagatact

SEQ ID NO: 6780 - DNA, 20 bp, Artificial Sequence
  chemically synthesized
aaaaaatgtccaagatactt

SEQ ID NO: 6781 - DNA, 20 bp, Artificial Sequence
  chemically synthesized
tccaagatacttaggtcctt

SEQ ID NO: 6782 - DNA, 20 bp, Artificial Sequence
  chemically synthesized
gatacttaggtccttcagtc

SEQ ID NO: 6783 - DNA, 20 bp, Artificial Sequence
  chemically synthesized
ccttcagtcaagatttatta

SEQ ID NO: 6784 - DNA, 20 bp, Artificial Sequence
  chemically synthesized
tcagtcaagatttattacag

SEQ ID NO: 6785 - DNA, 20 bp, Artificial Sequence
  chemically synthesized
cagtcaagatttattacaga

SEQ ID NO: 6786 - DNA, 20 bp, Artificial Sequence
  chemically synthesized
agatttattacagaaggatc

SEQ ID NO: 6787 - DNA, 20 bp, Artificial Sequence
  chemically synthesized
gatttattacagaaggatcc

SEQ ID NO: 6788 - DNA, 20 bp, Artificial Sequence
  chemically synthesized
atttattacagaaggatcca

SEQ ID NO: 6789 - DNA, 20 bp, Artificial Sequence
  chemically synthesized
tattacagaaggatccaggg

SEQ ID NO: 6790 - DNA, 20 bp, Artificial Sequence
  chemically synthesized
attacagaaggatccaggga

SEQ ID NO: 6791 - DNA, 20 bp, Artificial Sequence
  chemically synthesized
ttacagaaggatccagggaa

SEQ ID NO: 6792 - DNA, 20 bp, Artificial Sequence
  chemically synthesized
aaggatccagggaagggtct

SEQ ID NO: 6793 - DNA, 20 bp, Artificial Sequence
  chemically synthesized
aggatccagggaagggtctt

SEQ ID NO: 6794 - DNA, 20 bp, Artificial Sequence
  chemically synthesized
gatccagggaagggtcttgg

SEQ ID NO: 6795 - DNA, 20 bp, Artificial Sequence
  chemically synthesized
agggaagggtcttgggagat

SEQ ID NO: 6796 - DNA, 20 bp, Artificial Sequence
  chemically synthesized
ggaagggtcttgggagatga

SEQ ID NO: 6797 - DNA, 20 bp, Artificial Sequence
  chemically synthesized
gaagggtcttgggagatgag

SEQ ID NO: 6798 - DNA, 20 bp, Artificial Sequence
  chemically synthesized
agggtcttgggagatgagag

SEQ ID NO: 6799 - DNA, 20 bp, Artificial Sequence
  chemically synthesized
gtcttgggagatgagaggag

SEQ ID NO: 6800 - DNA, 20 bp, Artificial Sequence
  chemically synthesized
tcttgggagatgagaggagc

SEQ ID NO: 6801 - DNA, 20 bp, Artificial Sequence
  chemically synthesized
cttgggagatgagaggagca

SEQ ID NO: 6802 - DNA, 20 bp, Artificial Sequence
  chemically synthesized
tgagaggagcagggatcttc

SEQ ID NO: 6803 - DNA, 20 bp, Artificial Sequence
  chemically synthesized
gagaggagcagggatcttcc

SEQ ID NO: 6804 - DNA, 20 bp, Artificial Sequence
  chemically synthesized
cacaacatacacacatgcac

SEQ ID NO: 6805 - DNA, 20 bp, Artificial Sequence
  chemically synthesized
cacaacatacactcacacac

SEQ ID NO: 6806 - DNA, 20 bp, Artificial Sequence
  chemically synthesized
cattcactcacacacacaca

SEQ ID NO: 6807 - DNA, 20 bp, Artificial Sequence
  chemically synthesized
ttcactcacacacacacaca

SEQ ID NO: 6808 - DNA, 20 bp, Artificial Sequence
  chemically synthesized
cacacacacacacagagtcc

SEQ ID NO: 6809 - DNA, 20 bp, Artificial Sequence
  chemically synthesized
atacgtgcacacgcacatac

SEQ ID NO: 6810 - DNA, 20 bp, Artificial Sequence
  chemically synthesized
tacgtgcacacgcacatacg

SEQ ID NO: 6811 - DNA, 20 bp, Artificial Sequence
  chemically synthesized
atacgaggcacatgtgttct

SEQ ID NO: 6812 - DNA, 20 bp, Artificial Sequence
  chemically synthesized
tacgaggcacatgtgttctt

SEQ ID NO: 6813 - DNA, 20 bp, Artificial Sequence
  chemically synthesized
aggcacatgtgttcttgggt

SEQ ID NO: 6814 - DNA, 20 bp, Artificial Sequence
  chemically synthesized
ggcacatgtgttcttgggtt

SEQ ID NO: 6815 - DNA, 20 bp, Artificial Sequence
  chemically synthesized
cacatgtgttcttgggttgg

SEQ ID NO: 6816 - DNA, 20 bp, Artificial Sequence
  chemically synthesized
acatgtgttcttgggttggg

SEQ ID NO: 6817 - DNA, 20 bp, Artificial Sequence
  chemically synthesized
atgtgttcttgggttgggag

SEQ ID NO: 6818 - DNA, 20 bp, Artificial Sequence
  chemically synthesized
tgttcttgggttgggaggag

SEQ ID NO: 6819 - DNA, 20 bp, Artificial Sequence
  chemically synthesized
gttcttgggttgggaggaga

SEQ ID NO: 6820 - DNA, 20 bp, Artificial Sequence
  chemically synthesized
ttcttgggttgggaggagaa

SEQ ID NO: 6821 - DNA, 20 bp, Artificial Sequence
  chemically synthesized
ttgggttgggaggagaaggg

SEQ ID NO: 6822 - DNA, 20 bp, Artificial Sequence
  chemically synthesized
tgggttgggaggagaagggc

SEQ ID NO: 6823 - DNA, 20 bp, Artificial Sequence
  chemically synthesized
gttgggaggagaagggcagg

SEQ ID NO: 6824 - DNA, 20 bp, Artificial Sequence
  chemically synthesized
aagggcaggcagttatcttc

SEQ ID NO: 6825 - DNA, 20 bp, Artificial Sequence
  chemically synthesized
tccagatctccccacacctc

SEQ ID NO: 6826 - DNA, 20 bp, Artificial Sequence
  chemically synthesized
cctctggcacatgcctttcc

SEQ ID NO: 6827 - DNA, 20 bp, Artificial Sequence
  chemically synthesized
ctctggcacatgcctttcct

SEQ ID NO: 6828 - DNA, 20 bp, Artificial Sequence
  chemically synthesized
tctggcacatgcctttcctg

SEQ ID NO: 6829 - DNA, 20 bp, Artificial Sequence
  chemically synthesized
acatgcctttcctggggtcc

SEQ ID NO: 6830 - DNA, 20 bp, Artificial Sequence
  chemically synthesized
catgcctttcctggggtcct

SEQ ID NO: 6831 - DNA, 20 bp, Artificial Sequence
  chemically synthesized
atgcctttcctggggtcctg

SEQ ID NO: 6832 - DNA, 20 bp, Artificial Sequence
  chemically synthesized
cctttcctggggtcctgggg

SEQ ID NO: 6833 - DNA, 20 bp, Artificial Sequence
  chemically synthesized
tcctggggtcctggggtaga

SEQ ID NO: 6834 - DNA, 20 bp, Artificial Sequence
  chemically synthesized
cctggggtcctggggtagac

SEQ ID NO: 6835 - DNA, 20 bp, Artificial Sequence
  chemically synthesized
ggggtcctggggtagacagg

SEQ ID NO: 6836 - DNA, 20 bp, Artificial Sequence
  chemically synthesized
gggtcctggggtagacagga

SEQ ID NO: 6837 - DNA, 20 bp, Artificial Sequence
  chemically synthesized
cctggggtagacaggaaggt

SEQ ID NO: 6838 - DNA, 20 bp, Artificial Sequence
  chemically synthesized
ctggggtagacaggaaggtg

SEQ ID NO: 6839 - DNA, 20 bp, Artificial Sequence
  chemically synthesized
ggtagacaggaaggtgaggt

SEQ ID NO: 6840 - DNA, 20 bp, Artificial Sequence
  chemically synthesized
gtagacaggaaggtgaggtg

SEQ ID NO: 6841 - DNA, 20 bp, Artificial Sequence
  chemically synthesized
tagacaggaaggtgaggtga

SEQ ID NO: 6842 - DNA, 20 bp, Artificial Sequence
  chemically synthesized
ggaaggtgaggtgagggaac

SEQ ID NO: 6843 - DNA, 20 bp, Artificial Sequence
  chemically synthesized
aggtgaggtgagggaacaag

SEQ ID NO: 6844 - DNA, 20 bp, Artificial Sequence
  chemically synthesized
ggtgaggtgagggaacaagc

SEQ ID NO: 6845 - DNA, 20 bp, Artificial Sequence
  chemically synthesized
gtgaggtgagggaacaagcg

SEQ ID NO: 6846 - DNA, 20 bp, Artificial Sequence
  chemically synthesized
tgaggtgagggaacaagcgg

SEQ ID NO: 6847 - DNA, 20 bp, Artificial Sequence
  chemically synthesized
gagggaacaagcgggggtgt

SEQ ID NO: 6848 - DNA, 20 bp, Artificial Sequence
  chemically synthesized
agggaacaagcgggggtgtc

SEQ ID NO: 6849 - DNA, 20 bp, Artificial Sequence
  chemically synthesized
cgggggtgtcgggccctcct

SEQ ID NO: 6850 - DNA, 20 bp, Artificial Sequence
  chemically synthesized
ccctcctcagtccctgttca

SEQ ID NO: 6851 - DNA, 20 bp, Artificial Sequence
  chemically synthesized
ctcctcagtccctgttcaca

SEQ ID NO: 6852 - DNA, 20 bp, Artificial Sequence
  chemically synthesized
ctcagtccctgttcacagag

SEQ ID NO: 6853 - DNA, 20 bp, Artificial Sequence
  chemically synthesized
tcagtccctgttcacagagt

SEQ ID NO: 6854 - DNA, 20 bp, Artificial Sequence
  chemically synthesized
ccctgttcacagagtgggtg

SEQ ID NO: 6855 - DNA, 20 bp, Artificial Sequence
  chemically synthesized
tgttcacagagtgggtgcgg

SEQ ID NO: 6856 - DNA, 20 bp, Artificial Sequence
  chemically synthesized
ttcacagagtgggtgcggca

SEQ ID NO: 6857 - DNA, 20 bp, Artificial Sequence
  chemically synthesized
tgggtgcggcagagacctca

SEQ ID NO: 6858 - DNA, 20 bp, Artificial Sequence
  chemically synthesized
gggtgcggcagagacctcaa

SEQ ID NO: 6859 - DNA, 20 bp, Artificial Sequence
  chemically synthesized
ggtgcggcagagacctcaaa

SEQ ID NO: 6860 - DNA, 20 bp, Artificial Sequence
  chemically synthesized
cggcagagacctcaaaggga

SEQ ID NO: 6861 - DNA, 20 bp, Artificial Sequence
  chemically synthesized
gcagagacctcaaagggaca

SEQ ID NO: 6862 - DNA, 20 bp, Artificial Sequence
  chemically synthesized
caaagggacagagcaatcat

SEQ ID NO: 6863 - DNA, 20 bp, Artificial Sequence
  chemically synthesized
ggacagagcaatcatgagct

SEQ ID NO: 6864 - DNA, 20 bp, Artificial Sequence
  chemically synthesized
agagcaatcatgagctgaga

SEQ ID NO: 6865 - DNA, 20 bp, Artificial Sequence
  chemically synthesized
agcaatcatgagctgagaca

SEQ ID NO: 6866 - DNA, 20 bp, Artificial Sequence
  chemically synthesized
gcaatcatgagctgagacag

SEQ ID NO: 6867 - DNA, 20 bp, Artificial Sequence
  chemically synthesized
caatcatgagctgagacaga

SEQ ID NO: 6868 - DNA, 20 bp, Artificial Sequence
  chemically synthesized
aatcatgagctgagacagag

SEQ ID NO: 6869 - DNA, 20 bp, Artificial Sequence
  chemically synthesized
atcatgagctgagacagagg

SEQ ID NO: 6870 - DNA, 20 bp, Artificial Sequence
  chemically synthesized
catgagctgagacagagggg

SEQ ID NO: 6871 - DNA, 20 bp, Artificial Sequence
  chemically synthesized
gctgagacagagggggagca

SEQ ID NO: 6872 - DNA, 20 bp, Artificial Sequence
  chemically synthesized
acagagggggagcaaagccg

SEQ ID NO: 6873 - DNA, 20 bp, Artificial Sequence
  chemically synthesized
gcacacttgcctttcaaaaa

SEQ ID NO: 6874 - DNA, 20 bp, Artificial Sequence
  chemically synthesized
caaaaatggatttcctctcc

SEQ ID NO: 6875 - DNA, 20 bp, Artificial Sequence
  chemically synthesized
aaaaatggatttcctctcct

SEQ ID NO: 6876 - DNA, 20 bp, Artificial Sequence
  chemically synthesized
ggatttcctctcctgggatt

SEQ ID NO: 6877 - DNA, 20 bp, Artificial Sequence
  chemically synthesized
tctcctgggattcagcctgc

SEQ ID NO: 6878 - DNA, 20 bp, Artificial Sequence
  chemically synthesized
ggattcagcctgcgagtgcc

SEQ ID NO: 6879 - DNA, 20 bp, Artificial Sequence
  chemically synthesized
tgcctggcccctcaccttga

SEQ ID NO: 6880 - DNA, 20 bp, Artificial Sequence
  chemically synthesized
tggcccctcaccttgatgga

SEQ ID NO: 6881 - DNA, 20 bp, Artificial Sequence
  chemically synthesized
ggcccctcaccttgatggaa

SEQ ID NO: 6882 - DNA, 20 bp, Artificial Sequence
  chemically synthesized
cctcaccttgatggaaagga

SEQ ID NO: 6883 - DNA, 20 bp, Artificial Sequence
  chemically synthesized
aaggatggtcattttcctcc

SEQ ID NO: 6884 - DNA, 20 bp, Artificial Sequence
  chemically synthesized
tggtcattttcctccgagct

SEQ ID NO: 6885 - DNA, 20 bp, Artificial Sequence
  chemically synthesized
tttcctccgagctcagctgc

SEQ ID NO: 6886 - DNA, 20 bp, Artificial Sequence
  chemically synthesized
tcagctgctggatatcttga

SEQ ID NO: 6887 - DNA, 20 bp, Artificial Sequence
  chemically synthesized
ctggatatcttgaaagtcct

SEQ ID NO: 6888 - DNA, 20 bp, Artificial Sequence
  chemically synthesized
ttgaaagtccttggccatga

SEQ ID NO: 6889 - DNA, 20 bp, Artificial Sequence
  chemically synthesized
tgaaagtccttggccatgat

SEQ ID NO: 6890 - DNA, 20 bp, Artificial Sequence
  chemically synthesized
gaaagtccttggccatgatg

SEQ ID NO: 6891 - DNA, 20 bp, Artificial Sequence
  chemically synthesized
tccttggccatgatggggcc

SEQ ID NO: 6892 - DNA, 20 bp, Artificial Sequence
  chemically synthesized
ccttggccatgatggggccc

SEQ ID NO: 6893 - DNA, 20 bp, Artificial Sequence
  chemically synthesized
ggccatgatggggcccgggc

SEQ ID NO: 6894 - DNA, 20 bp, Artificial Sequence
  chemically synthesized
ccatgatggggcccgggctg

SEQ ID NO: 6895 - DNA, 20 bp, Artificial Sequence
  chemically synthesized
gatggggcccgggctggagc

SEQ ID NO: 6896 - DNA, 20 bp, Artificial Sequence
  chemically synthesized
tggggcccgggctggagctg

SEQ ID NO: 6897 - DNA, 20 bp, Artificial Sequence
  chemically synthesized
gcccgggctggagctggagc

SEQ ID NO: 6898 - DNA, 20 bp, Artificial Sequence
  chemically synthesized
ccgggctggagctggagctg

SEQ ID NO: 6899 - DNA, 20 bp, Artificial Sequence
  chemically synthesized
gctggagctggagctggagc

SEQ ID NO: 6900 - DNA, 20 bp, Artificial Sequence
  chemically synthesized
ctggagctggagctggagct

SEQ ID NO: 6901 - DNA, 20 bp, Artificial Sequence
  chemically synthesized
agctggagctggagctgggc

SEQ ID NO: 6902 - DNA, 20 bp, Artificial Sequence
  chemically synthesized
gctggagctggagctgggct

SEQ ID NO: 6903 - DNA, 20 bp, Artificial Sequence
  chemically synthesized
gagctggagctgggctgggc

SEQ ID NO: 6904 - DNA, 20 bp, Artificial Sequence
  chemically synthesized
agctggagctgggctgggct

SEQ ID NO: 6905 - DNA, 20 bp, Artificial Sequence
  chemically synthesized
gagctgggctgggctgggct

SEQ ID NO: 6906 - DNA, 20 bp, Artificial Sequence
  chemically synthesized
agctgggctgggctgggctg

SEQ ID NO: 6907 - DNA, 20 bp, Artificial Sequence
  chemically synthesized
ggctgggctgaggttgctct

SEQ ID NO: 6908 - DNA, 20 bp, Artificial Sequence
  chemically synthesized
gctgggctgaggttgctctg

SEQ ID NO: 6909 - DNA, 20 bp, Artificial Sequence
  chemically synthesized
ctgggctgaggttgctctga

SEQ ID NO: 6910 - DNA, 20 bp, Artificial Sequence
  chemically synthesized
gctgaggttgctctgagggc

SEQ ID NO: 6911 - DNA, 20 bp, Artificial Sequence
  chemically synthesized
ctgaggttgctctgagggct

SEQ ID NO: 6912 - DNA, 20 bp, Artificial Sequence
  chemically synthesized
tgaggttgctctgagggctg

SEQ ID NO: 6913 - DNA, 20 bp, Artificial Sequence
  chemically synthesized
gttgctctgagggctggggc

SEQ ID NO: 6914 - DNA, 20 bp, Artificial Sequence
  chemically synthesized
ttgctctgagggctggggct

SEQ ID NO: 6915 - DNA, 20 bp, Artificial Sequence
  chemically synthesized
tgctctgagggctggggctg

SEQ ID NO: 6916 - DNA, 20 bp, Artificial Sequence
  chemically synthesized
tctgagggctggggctgggg

SEQ ID NO: 6917 - DNA, 20 bp, Artificial Sequence
  chemically synthesized
tgagggctggggctggggca

SEQ ID NO: 6918 - DNA, 20 bp, Artificial Sequence
  chemically synthesized
gagggctggggctggggcag

SEQ ID NO: 6919 - DNA, 20 bp, Artificial Sequence
  chemically synthesized
ctggggctggggcagaggtg

SEQ ID NO: 6920 - DNA, 20 bp, Artificial Sequence
  chemically synthesized
ggcagaggtgcagattcacg

SEQ ID NO: 6921 - DNA, 20 bp, Artificial Sequence
  chemically synthesized
cagaggtgcagattcacgtg

SEQ ID NO: 6922 - DNA, 20 bp, Artificial Sequence
  chemically synthesized
agaggtgcagattcacgtgg

SEQ ID NO: 6923 - DNA, 20 bp, Artificial Sequence
  chemically synthesized
cagattcacgtggaggttga

SEQ ID NO: 6924 - DNA, 20 bp, Artificial Sequence
  chemically synthesized
attcacgtggaggttgatgg

SEQ ID NO: 6925 - DNA, 20 bp, Artificial Sequence
  chemically synthesized
ttcacgtggaggttgatggt

SEQ ID NO: 6926 - DNA, 20 bp, Artificial Sequence
  chemically synthesized
cgtggaggttgatggtggga

SEQ ID NO: 6927 - DNA, 20 bp, Artificial Sequence
  chemically synthesized
gttgatggtgggatggaacg

SEQ ID NO: 6928 - DNA, 20 bp, Artificial Sequence
  chemically synthesized
ttgatggtgggatggaacgc

SEQ ID NO: 6929 - DNA, 20 bp, Artificial Sequence
  chemically synthesized
tgatggtgggatggaacgca

SEQ ID NO: 6930 - DNA, 20 bp, Artificial Sequence
  chemically synthesized
ggtgggatggaacgcagggt

SEQ ID NO: 6931 - DNA, 20 bp, Artificial Sequence
  chemically synthesized
tgggatggaacgcagggtcg

SEQ ID NO: 6932 - DNA, 20 bp, Artificial Sequence
  chemically synthesized
gggatggaacgcagggtcgg

SEQ ID NO: 6933 - DNA, 20 bp, Artificial Sequence
  chemically synthesized
ggatggaacgcagggtcgga

SEQ ID NO: 6934 - DNA, 20 bp, Artificial Sequence
  chemically synthesized
gatggaacgcagggtcggag

SEQ ID NO: 6935 - DNA, 20 bp, Artificial Sequence
  chemically synthesized
aacgcagggtcggaggggtt

SEQ ID NO: 6936 - DNA, 20 bp, Artificial Sequence
  chemically synthesized
acgcagggtcggaggggttc

SEQ ID NO: 6937 - DNA, 20 bp, Artificial Sequence
  chemically synthesized
cgcagggtcggaggggttcg

SEQ ID NO: 6938 - DNA, 20 bp, Artificial Sequence
  chemically synthesized
agggtcggaggggttcgggg

SEQ ID NO: 6939 - DNA, 20 bp, Artificial Sequence
  chemically synthesized
gtcggaggggttcggggtgg

SEQ ID NO: 6940 - DNA, 20 bp, Artificial Sequence
  chemically synthesized
aggggttcggggtggtggcc

SEQ ID NO: 6941 - DNA, 20 bp, Artificial Sequence
  chemically synthesized
ggggttcggggtggtggcct

SEQ ID NO: 6942 - DNA, 20 bp, Artificial Sequence
  chemically synthesized
gttcggggtggtggcctggg

SEQ ID NO: 6943 - DNA, 20 bp, Artificial Sequence
  chemically synthesized
ttcggggtggtggcctgggt

SEQ ID NO: 6944 - DNA, 20 bp, Artificial Sequence
  chemically synthesized
tggtggcctgggtaggatct

SEQ ID NO: 6945 - DNA, 20 bp, Artificial Sequence
  chemically synthesized
ggtggcctgggtaggatctg

SEQ ID NO: 6946 - DNA, 20 bp, Artificial Sequence
  chemically synthesized
gcctgggtaggatctgaggt

SEQ ID NO: 6947 - DNA, 20 bp, Artificial Sequence
  chemically synthesized
tgccaacctcagatcctacc

SEQ ID NO: 6948 - DNA, 20 bp, Artificial Sequence
  chemically synthesized
gccaacctcagatcctaccc

SEQ ID NO: 6949 - DNA, 20 bp, Artificial Sequence
  chemically synthesized
gtgaatctgcacctctgccc

SEQ ID NO: 6950 - DNA, 20 bp, Artificial Sequence
  chemically synthesized
ctgcacctctgccccagccc

SEQ ID NO: 6951 - DNA, 20 bp, Artificial Sequence
  chemically synthesized
tctgccccagccccagccct

SEQ ID NO: 6952 - DNA, 20 bp, Artificial Sequence
  chemically synthesized
tgccccagccccagccctca

SEQ ID NO: 6953 - DNA, 20 bp, Artificial Sequence
  chemically synthesized
cccagccctcagagcaacct

SEQ ID NO: 6954 - DNA, 20 bp, Artificial Sequence
  chemically synthesized
ccctcagagcaacctcagcc

SEQ ID NO: 6955 - DNA, 20 bp, Artificial Sequence
  chemically synthesized
agagcaacctcagcccagcc

SEQ ID NO: 6956 - DNA, 20 bp, Artificial Sequence
  chemically synthesized
aacctcagcccagcccagcc

SEQ ID NO: 6957 - DNA, 20 bp, Artificial Sequence
  chemically synthesized
agcccagcccagcccagctc

SEQ ID NO: 6958 - DNA, 20 bp, Artificial Sequence
  chemically synthesized
gcccagcccagctccagctc

SEQ ID NO: 6959 - DNA, 20 bp, Artificial Sequence
  chemically synthesized
cccagctccagctccagctc

SEQ ID NO: 6960 - DNA, 20 bp, Artificial Sequence
  chemically synthesized
ctccagctccagctccagcc

SEQ ID NO: 6961 - DNA, 20 bp, Artificial Sequence
  chemically synthesized
tccagctccagctccagccc

SEQ ID NO: 6962 - DNA, 20 bp, Artificial Sequence
  chemically synthesized
ctccagcccgggccccatca

SEQ ID NO: 6963 - DNA, 20 bp, Artificial Sequence
  chemically synthesized
gcccgggccccatcatggcc

SEQ ID NO: 6964 - DNA, 20 bp, Artificial Sequence
  chemically synthesized
cccgggccccatcatggcca

SEQ ID NO: 6965 - DNA, 20 bp, Artificial Sequence
  chemically synthesized
catcatggccaaggactttc

SEQ ID NO: 6966 - DNA, 20 bp, Artificial Sequence
  chemically synthesized
ccaaggactttcaagatatc

SEQ ID NO: 6967 - DNA, 20 bp, Artificial Sequence
  chemically synthesized
aggactttcaagatatccag

SEQ ID NO: 6968 - DNA, 20 bp, Artificial Sequence
  chemically synthesized
tttcaagatatccagcagct

SEQ ID NO: 6969 - DNA, 20 bp, Artificial Sequence
  chemically synthesized
agatatccagcagctgagct

SEQ ID NO: 6970 - DNA, 20 bp, Artificial Sequence
  chemically synthesized
atatccagcagctgagctcg

SEQ ID NO: 6971 - DNA, 20 bp, Artificial Sequence
  chemically synthesized
tatccagcagctgagctcgg

SEQ ID NO: 6972 - DNA, 20 bp, Artificial Sequence
  chemically synthesized
aaatgaccatcctttccatc

SEQ ID NO: 6973 - DNA, 20 bp, Artificial Sequence
  chemically synthesized
aatgaccatcctttccatca

SEQ ID NO: 6974 - DNA, 20 bp, Artificial Sequence
  chemically synthesized
accatcctttccatcaaggt

SEQ ID NO: 6975 - DNA, 20 bp, Artificial Sequence
  chemically synthesized
ccatcctttccatcaaggtg

SEQ ID NO: 6976 - DNA, 20 bp, Artificial Sequence
  chemically synthesized
catcctttccatcaaggtga

SEQ ID NO: 6977 - DNA, 20 bp, Artificial Sequence
  chemically synthesized
atcctttccatcaaggtgag

SEQ ID NO: 6978 - DNA, 20 bp, Artificial Sequence
  chemically synthesized
tttccatcaaggtgaggggc

SEQ ID NO: 6979 - DNA, 20 bp, Artificial Sequence
  chemically synthesized
ttccatcaaggtgaggggcc

SEQ ID NO: 6980 - DNA, 20 bp, Artificial Sequence
  chemically synthesized
ggtgaggggccaggcactcg

SEQ ID NO: 6981 - DNA, 20 bp, Artificial Sequence
  chemically synthesized
gtgaggggccaggcactcgc

SEQ ID NO: 6982 - DNA, 20 bp, Artificial Sequence
  chemically synthesized
ggcactcgcaggctgaatcc

SEQ ID NO: 6983 - DNA, 20 bp, Artificial Sequence
  chemically synthesized
gcactcgcaggctgaatccc

SEQ ID NO: 6984 - DNA, 20 bp, Artificial Sequence
  chemically synthesized
actcgcaggctgaatcccag

SEQ ID NO: 6985 - DNA, 20 bp, Artificial Sequence
  chemically synthesized
tcgcaggctgaatcccagga

SEQ ID NO: 6986 - DNA, 20 bp, Artificial Sequence
  chemically synthesized
cgcaggctgaatcccaggag

SEQ ID NO: 6987 - DNA, 20 bp, Artificial Sequence
  chemically synthesized
gagaggaaatccatttttga

SEQ ID NO: 6988 - DNA, 20 bp, Artificial Sequence
  chemically synthesized
agaggaaatccatttttgaa

SEQ ID NO: 6989 - DNA, 20 bp, Artificial Sequence
  chemically synthesized
gaaatccatttttgaaaggc

SEQ ID NO: 6990 - DNA, 20 bp, Artificial Sequence
  chemically synthesized
atttttgaaaggcaagtgtg

SEQ ID NO: 6991 - DNA, 20 bp, Artificial Sequence
  chemically synthesized
aggcaagtgtgcagtttctg

SEQ ID NO: 6992 - DNA, 20 bp, Artificial Sequence
  chemically synthesized
gctttgctccccctctgtct

SEQ ID NO: 6993 - DNA, 20 bp, Artificial Sequence
  chemically synthesized
catgattgctctgtcccttt

SEQ ID NO: 6994 - DNA, 20 bp, Artificial Sequence
  chemically synthesized
atgattgctctgtccctttg

SEQ ID NO: 6995 - DNA, 20 bp, Artificial Sequence
  chemically synthesized
tgccgcacccactctgtgaa

SEQ ID NO: 6996 - DNA, 20 bp, Artificial Sequence
  chemically synthesized
gccgcacccactctgtgaac

SEQ ID NO: 6997 - DNA, 20 bp, Artificial Sequence
  chemically synthesized
ccgcacccactctgtgaaca

SEQ ID NO: 6998 - DNA, 20 bp, Artificial Sequence
  chemically synthesized
ccactctgtgaacagggact

SEQ ID NO: 6999 - DNA, 20 bp, Artificial Sequence
  chemically synthesized
cactctgtgaacagggactg

SEQ ID NO: 7000 - DNA, 20 bp, Artificial Sequence
  chemically synthesized
ctctgtgaacagggactgag

SEQ ID NO: 7001 - DNA, 20 bp, Artificial Sequence
  chemically synthesized
tctgtgaacagggactgagg

SEQ ID NO: 7002 - DNA, 20 bp, Artificial Sequence
  chemically synthesized
ctgtgaacagggactgagga

SEQ ID NO: 7003 - DNA, 20 bp, Artificial Sequence
  chemically synthesized
cctcaccttcctgtctaccc

SEQ ID NO: 7004 - DNA, 20 bp, Artificial Sequence
  chemically synthesized
ctcaccttcctgtctacccc

SEQ ID NO: 7005 - DNA, 20 bp, Artificial Sequence
  chemically synthesized
tcctgtctaccccaggaccc

SEQ ID NO: 7006 - DNA, 20 bp, Artificial Sequence
  chemically synthesized
cctgtctaccccaggacccc

SEQ ID NO: 7007 - DNA, 20 bp, Artificial Sequence
  chemically synthesized
tctaccccaggaccccagga

SEQ ID NO: 7008 - DNA, 20 bp, Artificial Sequence
  chemically synthesized
ctaccccaggaccccaggaa

SEQ ID NO: 7009 - DNA, 20 bp, Artificial Sequence
  chemically synthesized
accccaggaaaggcatgtgc

SEQ ID NO: 7010 - DNA, 20 bp, Artificial Sequence
  chemically synthesized
cccaggaaaggcatgtgcca

SEQ ID NO: 7011 - DNA, 20 bp, Artificial Sequence
  chemically synthesized
ccaggaaaggcatgtgccag

SEQ ID NO: 7012 - DNA, 20 bp, Artificial Sequence
  chemically synthesized
aaaggcatgtgccagaggtg

SEQ ID NO: 7013 - DNA, 20 bp, Artificial Sequence
  chemically synthesized
aaggcatgtgccagaggtgt

SEQ ID NO: 7014 - DNA, 20 bp, Artificial Sequence
  chemically synthesized
aggcatgtgccagaggtgtg

SEQ ID NO: 7015 - DNA, 20 bp, Artificial Sequence
  chemically synthesized
gcatgtgccagaggtgtggg

SEQ ID NO: 7016 - DNA, 20 bp, Artificial Sequence
  chemically synthesized
gccagaggtgtggggagatc

SEQ ID NO: 7017 - DNA, 20 bp, Artificial Sequence
  chemically synthesized
agaggtgtggggagatctgg

SEQ ID NO: 7018 - DNA, 20 bp, Artificial Sequence
  chemically synthesized
tgcccttctcctcccaaccc

SEQ ID NO: 7019 - DNA, 20 bp, Artificial Sequence
  chemically synthesized
gtgtgcacgtatgtgcatat

SEQ ID NO: 7020 - DNA, 20 bp, Artificial Sequence
  chemically synthesized
tgtgcacgtatgtgcatatg

SEQ ID NO: 7021 - DNA, 20 bp, Artificial Sequence
  chemically synthesized
gtatgtgcatatgaggaatg

SEQ ID NO: 7022 - DNA, 20 bp, Artificial Sequence
  chemically synthesized
gcatatgaggaatgcagatt

SEQ ID NO: 7023 - DNA, 20 bp, Artificial Sequence
  chemically synthesized
atgaggaatgcagattcagc

SEQ ID NO: 7024 - DNA, 20 bp, Artificial Sequence
  chemically synthesized
tgaggaatgcagattcagct

SEQ ID NO: 7025 - DNA, 20 bp, Artificial Sequence
  chemically synthesized
gggactctgtgtgtgtgtgt

SEQ ID NO: 7026 - DNA, 20 bp, Artificial Sequence
  chemically synthesized
gtgtgtgtgtatatgtgcgc

SEQ ID NO: 7027 - DNA, 20 bp, Artificial Sequence
  chemically synthesized
gtgtgtgtatatgtgcgcga

SEQ ID NO: 7028 - DNA, 20 bp, Artificial Sequence
  chemically synthesized
tgtgtgtatgtcgtgtatgt

SEQ ID NO: 7029 - DNA, 20 bp, Artificial Sequence
  chemically synthesized
tgtgtatgtcgtgtatgtga

SEQ ID NO: 7030 - DNA, 20 bp, Artificial Sequence
  chemically synthesized
gtgtatgtcgtgtatgtgag

SEQ ID NO: 7031 - DNA, 20 bp, Artificial Sequence
  chemically synthesized
tgtatgtcgtgtatgtgaga

SEQ ID NO: 7032 - DNA, 20 bp, Artificial Sequence
  chemically synthesized
tgagagggtatgttgtgtgt

SEQ ID NO: 7033 - DNA, 20 bp, Artificial Sequence
  chemically synthesized
agagggtatgttgtgtgtga

SEQ ID NO: 7034 - DNA, 20 bp, Artificial Sequence
  chemically synthesized
gttgtgtgtgtatgttgtgt

SEQ ID NO: 7035 - DNA, 20 bp, Artificial Sequence
  chemically synthesized
gttgtgtgtatcttgtgtgt

SEQ ID NO: 7036 - DNA, 20 bp, Artificial Sequence
  chemically synthesized
tgcatgtgtgtatgttgtgc

SEQ ID NO: 7037 - DNA, 20 bp, Artificial Sequence
  chemically synthesized
cgagtgtatgttgtgtatgt

SEQ ID NO: 7038 - DNA, 20 bp, Artificial Sequence
  chemically synthesized
tgtgtatgtatgttgtgtat

SEQ ID NO: 7039 - DNA, 20 bp, Artificial Sequence
  chemically synthesized
gttgtgtgtgtgtattgtgt

SEQ ID NO: 7040 - DNA, 20 bp, Artificial Sequence
  chemically synthesized
tgtatgtttgtgtgttgtgt

SEQ ID NO: 7041 - DNA, 20 bp, Artificial Sequence
  chemically synthesized
tgcgtgtgtgtatgttgtgc

SEQ ID NO: 7042 - DNA, 20 bp, Artificial Sequence
  chemically synthesized
gtgttgtgtgtgtatgttgt

SEQ ID NO: 7043 - DNA, 20 bp, Artificial Sequence
  chemically synthesized
gttatgtatgttgtgtgtgt

SEQ ID NO: 7044 - DNA, 20 bp, Artificial Sequence
  chemically synthesized
tgtgtgtgagtgtgttgcgt

SEQ ID NO: 7045 - DNA, 20 bp, Artificial Sequence
  chemically synthesized
tgttgcgtgagtgtgtgtgt

SEQ ID NO: 7046 - DNA, 20 bp, Artificial Sequence
  chemically synthesized
tgtgtgtgtgtgtgtgtgtg

SEQ ID NO: 7047 - DNA, 20 bp, Artificial Sequence
  chemically synthesized
tgtgtgtgtgtgtgtgtgta

SEQ ID NO: 7048 - DNA, 20 bp, Artificial Sequence
  chemically synthesized
gtgtgtgtgtgtgtgtgtag

SEQ ID NO: 7049 - DNA, 20 bp, Artificial Sequence
  chemically synthesized
tgtgtgtgtgtgtgtagagg

SEQ ID NO: 7050 - DNA, 20 bp, Artificial Sequence
  chemically synthesized
gtgtgtgtgtgtgtagaggt

SEQ ID NO: 7051 - DNA, 20 bp, Artificial Sequence
  chemically synthesized
tgtgtgtgtgtgtagaggtg

SEQ ID NO: 7052 - DNA, 20 bp, Artificial Sequence
  chemically synthesized
tgtgtgtgtagaggtggggt

SEQ ID NO: 7053 - DNA, 20 bp, Artificial Sequence
  chemically synthesized
tgtgtagaggtggggtgagt

SEQ ID NO: 7054 - DNA, 20 bp, Artificial Sequence
  chemically synthesized
gtgtagaggtggggtgagtt

SEQ ID NO: 7055 - DNA, 20 bp, Artificial Sequence
  chemically synthesized
agaggtggggtgagttggga

SEQ ID NO: 7056 - DNA, 20 bp, Artificial Sequence
  chemically synthesized
gaggtggggtgagttgggat

SEQ ID NO: 7057 - DNA, 20 bp, Artificial Sequence
  chemically synthesized
gtggggtgagttgggatggg

SEQ ID NO: 7058 - DNA, 20 bp, Artificial Sequence
  chemically synthesized
tggggtgagttgggatgggt

SEQ ID NO: 7059 - DNA, 20 bp, Artificial Sequence
  chemically synthesized
ggggtgagttgggatgggtg

SEQ ID NO: 7060 - DNA, 20 bp, Artificial Sequence
  chemically synthesized
gggtgagttgggatgggtgg

SEQ ID NO: 7061 - DNA, 20 bp, Artificial Sequence
  chemically synthesized
ttgggatgggtgggggacgt

SEQ ID NO: 7062 - DNA, 20 bp, Artificial Sequence
  chemically synthesized
atgggtgggggacgtgagca

SEQ ID NO: 7063 - DNA, 20 bp, Artificial Sequence
  chemically synthesized
gggtgggggacgtgagcaca

SEQ ID NO: 7064 - DNA, 20 bp, Artificial Sequence
  chemically synthesized
gtgggggacgtgagcacaga

SEQ ID NO: 7065 - DNA, 20 bp, Artificial Sequence
  chemically synthesized
acgtgagcacagagagatcc

SEQ ID NO: 7066 - DNA, 20 bp, Artificial Sequence
  chemically synthesized
tgagcacagagagatcctgg

SEQ ID NO: 7067 - DNA, 20 bp, Artificial Sequence
  chemically synthesized
ccctgctcctctcatctccc

SEQ ID NO: 7068 - DNA, 20 bp, Artificial Sequence
  chemically synthesized
catctcccaagacccttccc

SEQ ID NO: 7069 - DNA, 20 bp, Artificial Sequence
  chemically synthesized
tctgtaataaatcttgactg

SEQ ID NO: 7070 - DNA, 20 bp, Artificial Sequence
  chemically synthesized
ctgtaataaatcttgactga

SEQ ID NO: 7071 - DNA, 20 bp, Artificial Sequence
  chemically synthesized
aaatcttgactgaaggacct

SEQ ID NO: 7072 - DNA, 20 bp, Artificial Sequence
  chemically synthesized
actgaaggacctaagtatct

SEQ ID NO: 7073 - DNA, 20 bp, Artificial Sequence
  chemically synthesized
tatcttggacattttttttt

SEQ ID NO: 7074 - DNA, 20 bp, Artificial Sequence
  chemically synthesized
tcttggacatttttttttta

SEQ ID NO: 7075 - DNA, 20 bp, Artificial Sequence
  chemically synthesized
ggacattttttttttagaga

SEQ ID NO: 7076 - DNA, 20 bp, Artificial Sequence
  chemically synthesized
gacattttttttttagagac

SEQ ID NO: 7077 - DNA, 20 bp, Artificial Sequence
  chemically synthesized
cattttttttttagagacag

SEQ ID NO: 7078 - DNA, 20 bp, Artificial Sequence
  chemically synthesized
tttttttagagacaggagtg

SEQ ID NO: 7079 - DNA, 20 bp, Artificial Sequence
  chemically synthesized
ttttagagacaggagtgtag

SEQ ID NO: 7080 - DNA, 20 bp, Artificial Sequence
  chemically synthesized
tagagacaggagtgtagtgg

SEQ ID NO: 7081 - DNA, 20 bp, Artificial Sequence
  chemically synthesized
agagacaggagtgtagtggc

SEQ ID NO: 7082 - DNA, 20 bp, Artificial Sequence
  chemically synthesized
ggagtgtagtggcaggatca

SEQ ID NO: 7083 - DNA, 20 bp, Artificial Sequence
  chemically synthesized
tcactgcaacctcgaactcc

SEQ ID NO: 7084 - DNA, 20 bp, Artificial Sequence
  chemically synthesized
cactgcaacctcgaactcct

SEQ ID NO: 7085 - DNA, 20 bp, Artificial Sequence
  chemically synthesized
aacctcgaactcctgggctc

SEQ ID NO: 7086 - DNA, 20 bp, Artificial Sequence
  chemically synthesized
ctcaagccatcctcccacct

SEQ ID NO: 7087 - DNA, 20 bp, Artificial Sequence
  chemically synthesized
tcctcccacctcagcctccc

SEQ ID NO: 7088 - DNA, 20 bp, Artificial Sequence
  chemically synthesized
tcccacctcagcctcccaag

SEQ ID NO: 7089 - DNA, 20 bp, Artificial Sequence
  chemically synthesized
acctcagcctcccaagtagt

SEQ ID NO: 7090 - DNA, 20 bp, Artificial Sequence
  chemically synthesized
cctcagcctcccaagtagtt

SEQ ID NO: 7091 - DNA, 20 bp, Artificial Sequence
  chemically synthesized
tcccaagtagttaggactta

SEQ ID NO: 7092 - DNA, 20 bp, Artificial Sequence
  chemically synthesized
cccaagtagttaggacttac

SEQ ID NO: 7093 - DNA, 20 bp, Artificial Sequence
  chemically synthesized
caggtgtgcaccactgtgcc

SEQ ID NO: 7094 - DNA, 20 bp, Artificial Sequence
  chemically synthesized
gcaaattaaaaaaaattttt

SEQ ID NO: 7095 - DNA, 20 bp, Artificial Sequence
  chemically synthesized
aaattaaaaaaaatttttta

SEQ ID NO: 7096 - DNA, 20 bp, Artificial Sequence
  chemically synthesized
aaaaaaattttttagagaaa

SEQ ID NO: 7097 - DNA, 20 bp, Artificial Sequence
  chemically synthesized
aaaaaattttttagagaaat

SEQ ID NO: 7098 - DNA, 20 bp, Artificial Sequence
  chemically synthesized
aaaaattttttagagaaatg

SEQ ID NO: 7099 - DNA, 20 bp, Artificial Sequence
  chemically synthesized
tggggtcttgctatgttgcc

SEQ ID NO: 7100 - DNA, 20 bp, Artificial Sequence
  chemically synthesized
ggggtcttgctatgttgccc

SEQ ID NO: 7101 - DNA, 20 bp, Artificial Sequence
  chemically synthesized
tcttgctatgttgcccaggc

SEQ ID NO: 7102 - DNA, 20 bp, Artificial Sequence
  chemically synthesized
tgctatgttgcccaggctgg

SEQ ID NO: 7103 - DNA, 20 bp, Artificial Sequence
  chemically synthesized
gctatgttgcccaggctggt

SEQ ID NO: 7104 - DNA, 20 bp, Artificial Sequence
  chemically synthesized
gttgcccaggctggtgggaa

SEQ ID NO: 7105 - DNA, 20 bp, Artificial Sequence
  chemically synthesized
ggctggtgggaaaagatttt

SEQ ID NO: 7106 - DNA, 20 bp, Artificial Sequence
  chemically synthesized
gctggtgggaaaagatttta

SEQ ID NO: 7107 - DNA, 20 bp, Artificial Sequence
  chemically synthesized
gtgggaaaagattttaaggt

SEQ ID NO: 7108 - DNA, 20 bp, Artificial Sequence
  chemically synthesized
gggaaaagattttaaggtga

SEQ ID NO: 7109 - DNA, 20 bp, Artificial Sequence
  chemically synthesized
gaaaagattttaaggtgaga

SEQ ID NO: 7110 - DNA, 20 bp, Artificial Sequence
  chemically synthesized
ttttaaggtgagagagatct

SEQ ID NO: 7111 - DNA, 20 bp, Artificial Sequence
  chemically synthesized
taaggtgagagagatctgag

SEQ ID NO: 7112 - DNA, 20 bp, Artificial Sequence
  chemically synthesized
gagagagatctgagcagtgc

SEQ ID NO: 7113 - DNA, 20 bp, Artificial Sequence
  chemically synthesized
agagagatctgagcagtgct

SEQ ID NO: 7114 - DNA, 20 bp, Artificial Sequence
  chemically synthesized
gagatctgagcagtgctagg

SEQ ID NO: 7115 - DNA, 20 bp, Artificial Sequence
  chemically synthesized
atctgagcagtgctaggcag

SEQ ID NO: 7116 - DNA, 20 bp, Artificial Sequence
  chemically synthesized
tctgagcagtgctaggcaga

SEQ ID NO: 7117 - DNA, 20 bp, Artificial Sequence
  chemically synthesized
ctgagcagtgctaggcagaa

SEQ ID NO: 7118 - DNA, 20 bp, Artificial Sequence
  chemically synthesized
gcagtgctaggcagaagggc

SEQ ID NO: 7119 - DNA, 20 bp, Artificial Sequence
  chemically synthesized
agtgctaggcagaagggcaa

SEQ ID NO: 7120 - DNA, 20 bp, Artificial Sequence
  chemically synthesized
ctaggcagaagggcaagagc

SEQ ID NO: 7121 - DNA, 20 bp, Artificial Sequence
  chemically synthesized
taggcagaagggcaagagcc

SEQ ID NO: 7122 - DNA, 20 bp, Artificial Sequence
  chemically synthesized
agaagggcaagagccaggaa

SEQ ID NO: 7123 - DNA, 20 bp, Artificial Sequence
  chemically synthesized
aagggcaagagccaggaatg

SEQ ID NO: 7124 - DNA, 20 bp, Artificial Sequence
  chemically synthesized
agggcaagagccaggaatgg

SEQ ID NO: 7125 - DNA, 20 bp, Artificial Sequence
  chemically synthesized
ggcaagagccaggaatggag

SEQ ID NO: 7126 - DNA, 20 bp, Artificial Sequence
  chemically synthesized
agccaggaatggaggagtgt

SEQ ID NO: 7127 - DNA, 20 bp, Artificial Sequence
  chemically synthesized
gccaggaatggaggagtgtc

SEQ ID NO: 7128 - DNA, 20 bp, Artificial Sequence
  chemically synthesized
atggaggagtgtcaggtgtg

SEQ ID NO: 7129 - DNA, 20 bp, Artificial Sequence
  chemically synthesized
tggaggagtgtcaggtgtgt

SEQ ID NO: 7130 - DNA, 20 bp, Artificial Sequence
  chemically synthesized
agtgtcaggtgtgtgggtgc

SEQ ID NO: 7131 - DNA, 20 bp, Artificial Sequence
  chemically synthesized
gtcaggtgtgtgggtgctgg

SEQ ID NO: 7132 - DNA, 20 bp, Artificial Sequence
  chemically synthesized
aggtgtgtgggtgctggtgg

SEQ ID NO: 7133 - DNA, 20 bp, Artificial Sequence
  chemically synthesized
gtgtgtgggtgctggtggtg

SEQ ID NO: 7134 - DNA, 20 bp, Artificial Sequence
  chemically synthesized
gtgggtgctggtggtggagc

SEQ ID NO: 7135 - DNA, 20 bp, Artificial Sequence
  chemically synthesized
tgggtgctggtggtggagcc

SEQ ID NO: 7136 - DNA, 20 bp, Artificial Sequence
  chemically synthesized
ggtggtggagccgggttcca

SEQ ID NO: 7137 - DNA, 20 bp, Artificial Sequence
  chemically synthesized
tggtggagccgggttccatg

SEQ ID NO: 7138 - DNA, 20 bp, Artificial Sequence
  chemically synthesized
ggtggagccgggttccatgg

SEQ ID NO: 7139 - DNA, 20 bp, Artificial Sequence
  chemically synthesized
ggagccgggttccatggagg

SEQ ID NO: 7140 - DNA, 20 bp, Artificial Sequence
  chemically synthesized
gagccgggttccatggaggc

SEQ ID NO: 7141 - DNA, 20 bp, Artificial Sequence
  chemically synthesized
gccgggttccatggaggcag

SEQ ID NO: 7142 - DNA, 20 bp, Artificial Sequence
  chemically synthesized
ccgggttccatggaggcagg

SEQ ID NO: 7143 - DNA, 20 bp, Artificial Sequence
  chemically synthesized
gggttccatggaggcaggag

SEQ ID NO: 7144 - DNA, 20 bp, Artificial Sequence
  chemically synthesized
ttccatggaggcaggaggag

SEQ ID NO: 7145 - DNA, 20 bp, Artificial Sequence
  chemically synthesized
tccatggaggcaggaggagc

SEQ ID NO: 7146 - DNA, 20 bp, Artificial Sequence
  chemically synthesized
ccatggaggcaggaggagca

SEQ ID NO: 7147 - DNA, 20 bp, Artificial Sequence
  chemically synthesized
catggaggcaggaggagcag

SEQ ID NO: 7148 - DNA, 20 bp, Artificial Sequence
  chemically synthesized
aggcaggaggagcaggggct

SEQ ID NO: 7149 - DNA, 20 bp, Artificial Sequence
  chemically synthesized
gcaggaggagcaggggcttg

SEQ ID NO: 7150 - DNA, 20 bp, Artificial Sequence
  chemically synthesized
aggagcaggggcttggagct

SEQ ID NO: 7151 - DNA, 20 bp, Artificial Sequence
  chemically synthesized
ggagcaggggcttggagctt

SEQ ID NO: 7152 - DNA, 20 bp, Artificial Sequence
  chemically synthesized
gcaggggcttggagcttagg

SEQ ID NO: 7153 - DNA, 20 bp, Artificial Sequence
  chemically synthesized
caggggcttggagcttagga

SEQ ID NO: 7154 - DNA, 20 bp, Artificial Sequence
  chemically synthesized
aggggcttggagcttaggaa

SEQ ID NO: 7155 - DNA, 20 bp, Artificial Sequence
  chemically synthesized
ggggcttggagcttaggaag

SEQ ID NO: 7156 - DNA, 20 bp, Artificial Sequence
  chemically synthesized
ttggagcttaggaaggggat

SEQ ID NO: 7157 - DNA, 20 bp, Artificial Sequence
  chemically synthesized
agcttaggaaggggattggt

SEQ ID NO: 7158 - DNA, 20 bp, Artificial Sequence
  chemically synthesized
taggaaggggattggttagc

SEQ ID NO: 7159 - DNA, 20 bp, Artificial Sequence
  chemically synthesized
aggaaggggattggttagct

SEQ ID NO: 7160 - DNA, 20 bp, Artificial Sequence
  chemically synthesized
aggggattggttagctgggc

SEQ ID NO: 7161 - DNA, 20 bp, Artificial Sequence
  chemically synthesized
ttggttagctgggctggaat

SEQ ID NO: 7162 - DNA, 20 bp, Artificial Sequence
  chemically synthesized
tggttagctgggctggaatg

SEQ ID NO: 7163 - DNA, 20 bp, Artificial Sequence
  chemically synthesized
ggttagctgggctggaatga

SEQ ID NO: 7164 - DNA, 20 bp, Artificial Sequence
  chemically synthesized
atgagggactcctcattcct

SEQ ID NO: 7165 - DNA, 20 bp, Artificial Sequence
  chemically synthesized
tgagggactcctcattcctg

SEQ ID NO: 7166 - DNA, 20 bp, Artificial Sequence
  chemically synthesized
ggactcctcattcctgaggc

SEQ ID NO: 7167 - DNA, 20 bp, Artificial Sequence
  chemically synthesized
attcctgaggctggccaacc

SEQ ID NO: 7168 - DNA, 20 bp, Artificial Sequence
  chemically synthesized
ttcctgaggctggccaaccg

SEQ ID NO: 7169 - DNA, 20 bp, Artificial Sequence
  chemically synthesized
tcctgaggctggccaaccga

SEQ ID NO: 7170 - DNA, 20 bp, Artificial Sequence
  chemically synthesized
ctgaggctggccaaccgagg

SEQ ID NO: 7171 - DNA, 20 bp, Artificial Sequence
  chemically synthesized
tgaggctggccaaccgaggg

SEQ ID NO: 7172 - DNA, 20 bp, Artificial Sequence
  chemically synthesized
gaggctggccaaccgaggga

SEQ ID NO: 7173 - DNA, 20 bp, Artificial Sequence
  chemically synthesized
ctggccaaccgagggagggc

SEQ ID NO: 7174 - DNA, 20 bp, Artificial Sequence
  chemically synthesized
aaccgagggagggccggtgc

SEQ ID NO: 7175 - DNA, 20 bp, Artificial Sequence
  chemically synthesized
accgagggagggccggtgct

SEQ ID NO: 7176 - DNA, 20 bp, Artificial Sequence
  chemically synthesized
gagggagggccggtgctggg

SEQ ID NO: 7177 - DNA, 20 bp, Artificial Sequence
  chemically synthesized
agggagggccggtgctgggc

SEQ ID NO: 7178 - DNA, 20 bp, Artificial Sequence
  chemically synthesized
gggagggccggtgctgggca

SEQ ID NO: 7179 - DNA, 20 bp, Artificial Sequence
  chemically synthesized
agggccggtgctgggcaggg

SEQ ID NO: 7180 - DNA, 20 bp, Artificial Sequence
  chemically synthesized
gggccggtgctgggcagggc

SEQ ID NO: 7181 - DNA, 20 bp, Artificial Sequence
  chemically synthesized
ggccggtgctgggcagggca

SEQ ID NO: 7182 - DNA, 20 bp, Artificial Sequence
  chemically synthesized
cggtgctgggcagggcaggg

SEQ ID NO: 7183 - DNA, 20 bp, Artificial Sequence
  chemically synthesized
ggtgctgggcagggcagggc

SEQ ID NO: 7184 - DNA, 20 bp, Artificial Sequence
  chemically synthesized
gtgctgggcagggcagggca

SEQ ID NO: 7185 - DNA, 20 bp, Artificial Sequence
  chemically synthesized
tgctgggcagggcagggcag

SEQ ID NO: 7186 - DNA, 20 bp, Artificial Sequence
  chemically synthesized
gggcagggcagggcagggga

SEQ ID NO: 7187 - DNA, 20 bp, Artificial Sequence
  chemically synthesized
ggcagggcagggcaggggac

SEQ ID NO: 7188 - DNA, 20 bp, Artificial Sequence
  chemically synthesized
cagggcagggcaggggacag

SEQ ID NO: 7189 - DNA, 20 bp, Artificial Sequence
  chemically synthesized
agggcagggcaggggacagg

SEQ ID NO: 7190 - DNA, 20 bp, Artificial Sequence
  chemically synthesized
gggcagggcaggggacagga

SEQ ID NO: 7191 - DNA, 20 bp, Artificial Sequence
  chemically synthesized
agggcaggggacaggaggga

SEQ ID NO: 7192 - DNA, 20 bp, Artificial Sequence
  chemically synthesized
gggcaggggacaggagggat

SEQ ID NO: 7193 - DNA, 20 bp, Artificial Sequence
  chemically synthesized
gcaggggacaggagggatag

SEQ ID NO: 7194 - DNA, 20 bp, Artificial Sequence
  chemically synthesized
caggggacaggagggatagg

SEQ ID NO: 7195 - DNA, 20 bp, Artificial Sequence
  chemically synthesized
agggataggaggtccctccc

SEQ ID NO: 7196 - DNA, 20 bp, Artificial Sequence
  chemically synthesized
gggataggaggtccctcccg

SEQ ID NO: 7197 - DNA, 20 bp, Artificial Sequence
  chemically synthesized
ggtccctcccgaggaccact

SEQ ID NO: 7198 - DNA, 20 bp, Artificial Sequence
  chemically synthesized
gtccctcccgaggaccactc

SEQ ID NO: 7199 - DNA, 20 bp, Artificial Sequence
  chemically synthesized
cgaggaccactcaggaacac

SEQ ID NO: 7200 - DNA, 20 bp, Artificial Sequence
  chemically synthesized
ggaccactcaggaacaccag

SEQ ID NO: 7201 - DNA, 20 bp, Artificial Sequence
  chemically synthesized
agtagcatctcctctctctg

SEQ ID NO: 7202 - DNA, 20 bp, Artificial Sequence
  chemically synthesized
gtagcatctcctctctctgt

SEQ ID NO: 7203 - DNA, 20 bp, Artificial Sequence
  chemically synthesized
tagcatctcctctctctgta

SEQ ID NO: 7204 - DNA, 20 bp, Artificial Sequence
  chemically synthesized
agcatctcctctctctgtag

SEQ ID NO: 7205 - DNA, 20 bp, Artificial Sequence
  chemically synthesized
gcatctcctctctctgtagg

SEQ ID NO: 7206 - DNA, 20 bp, Artificial Sequence
  chemically synthesized
ctcctctctctgtagggggc

SEQ ID NO: 7207 - DNA, 20 bp, Artificial Sequence
  chemically synthesized
tctctctgtagggggctggc

SEQ ID NO: 7208 - DNA, 20 bp, Artificial Sequence
  chemically synthesized
gggctggctggacttcccac

SEQ ID NO: 7209 - DNA, 20 bp, Artificial Sequence
  chemically synthesized
ggctggctggacttcccacc

SEQ ID NO: 7210 - DNA, 20 bp, Artificial Sequence
  chemically synthesized
tggctggacttcccaccagg

SEQ ID NO: 7211 - DNA, 20 bp, Artificial Sequence
  chemically synthesized
cccaccaggcggtgtcccca

SEQ ID NO: 7212 - DNA, 20 bp, Artificial Sequence
  chemically synthesized
ccaccaggcggtgtccccac

SEQ ID NO: 7213 - DNA, 20 bp, Artificial Sequence
  chemically synthesized
ccaggcggtgtccccacagg

SEQ ID NO: 7214 - DNA, 20 bp, Artificial Sequence
  chemically synthesized
aggcggtgtccccacaggca

SEQ ID NO: 7215 - DNA, 20 bp, Artificial Sequence
  chemically synthesized
ggcggtgtccccacaggcag

SEQ ID NO: 7216 - DNA, 20 bp, Artificial Sequence
  chemically synthesized
ctcactctcctctgcaactc

SEQ ID NO: 7217 - DNA, 20 bp, Artificial Sequence
  chemically synthesized
ctgcaactccagtgcccaca

SEQ ID NO: 7218 - DNA, 20 bp, Artificial Sequence
  chemically synthesized
tccagtgcccacacggcacc

SEQ ID NO: 7219 - DNA, 20 bp, Artificial Sequence
  chemically synthesized
cccacacggcacccggtaca

SEQ ID NO: 7220 - DNA, 20 bp, Artificial Sequence
  chemically synthesized
cccggtacatagtgaacact

SEQ ID NO: 7221 - DNA, 20 bp, Artificial Sequence
  chemically synthesized
cggtacatagtgaacactca

SEQ ID NO: 7222 - DNA, 20 bp, Artificial Sequence
  chemically synthesized
gtacatagtgaacactcaga

SEQ ID NO: 7223 - DNA, 20 bp, Artificial Sequence
  chemically synthesized
gtgaacactcagagagaata

SEQ ID NO: 7224 - DNA, 20 bp, Artificial Sequence
  chemically synthesized
tgaacactcagagagaatac

SEQ ID NO: 7225 - DNA, 20 bp, Artificial Sequence
  chemically synthesized
gggatgctgctgaatcttct

SEQ ID NO: 7226 - DNA, 20 bp, Artificial Sequence
  chemically synthesized
ggatgctgctgaatcttctg

SEQ ID NO: 7227 - DNA, 20 bp, Artificial Sequence
  chemically synthesized
gatgctgctgaatcttctga

SEQ ID NO: 7228 - DNA, 20 bp, Artificial Sequence
  chemically synthesized
gctgaatcttctgagggtga

SEQ ID NO: 7229 - DNA, 20 bp, Artificial Sequence
  chemically synthesized
cttctgagggtgacagaatt

SEQ ID NO: 7230 - DNA, 20 bp, Artificial Sequence
  chemically synthesized
tctgagggtgacagaattta

SEQ ID NO: 7231 - DNA, 20 bp, Artificial Sequence
  chemically synthesized
ggtgacagaatttagagttt

SEQ ID NO: 7232 - DNA, 20 bp, Artificial Sequence
  chemically synthesized
gacagaatttagagtttgag

SEQ ID NO: 7233 - DNA, 20 bp, Artificial Sequence
  chemically synthesized
acagaatttagagtttgagc

SEQ ID NO: 7234 - DNA, 20 bp, Artificial Sequence
  chemically synthesized
agaatttagagtttgagcag

SEQ ID NO: 7235 - DNA, 20 bp, Artificial Sequence
  chemically synthesized
gaatttagagtttgagcagg

SEQ ID NO: 7236 - DNA, 20 bp, Artificial Sequence
  chemically synthesized
tagagtttgagcaggaggct

SEQ ID NO: 7237 - DNA, 20 bp, Artificial Sequence
  chemically synthesized
gagtttgagcaggaggcttg

SEQ ID NO: 7238 - DNA, 20 bp, Artificial Sequence
  chemically synthesized
gtttgagcaggaggcttgga

SEQ ID NO: 7239 - DNA, 20 bp, Artificial Sequence
  chemically synthesized
ttgagcaggaggcttggaga

SEQ ID NO: 7240 - DNA, 20 bp, Artificial Sequence
  chemically synthesized
tgagcaggaggcttggagag

SEQ ID NO: 7241 - DNA, 20 bp, Artificial Sequence
  chemically synthesized
caggaggcttggagagaggc

SEQ ID NO: 7242 - DNA, 20 bp, Artificial Sequence
  chemically synthesized
aggaggcttggagagaggcc

SEQ ID NO: 7243 - DNA, 20 bp, Artificial Sequence
  chemically synthesized
gccaggatttctgaaattaa

SEQ ID NO: 7244 - DNA, 20 bp, Artificial Sequence
  chemically synthesized
ccaggatttctgaaattaat

SEQ ID NO: 7245 - DNA, 20 bp, Artificial Sequence
  chemically synthesized
aggatttctgaaattaatgg

SEQ ID NO: 7246 - DNA, 20 bp, Artificial Sequence
  chemically synthesized
gatttctgaaattaatggga

SEQ ID NO: 7247 - DNA, 20 bp, Artificial Sequence
  chemically synthesized
tctgaaattaatgggagagt

SEQ ID NO: 7248 - DNA, 20 bp, Artificial Sequence
  chemically synthesized
ggagagtgagctcacgcgaa

SEQ ID NO: 7249 - DNA, 20 bp, Artificial Sequence
  chemically synthesized
gagagtgagctcacgcgaat

SEQ ID NO: 7250 - DNA, 20 bp, Artificial Sequence
  chemically synthesized
tgagctcacgcgaatgggct

SEQ ID NO: 7251 - DNA, 20 bp, Artificial Sequence
  chemically synthesized
gagctcacgcgaatgggctg

SEQ ID NO: 7252 - DNA, 20 bp, Artificial Sequence
  chemically synthesized
agctcacgcgaatgggctga

SEQ ID NO: 7253 - DNA, 20 bp, Artificial Sequence
  chemically synthesized
gcgaatgggctgagggacac

SEQ ID NO: 7254 - DNA, 20 bp, Artificial Sequence
  chemically synthesized
atgggctgagggacaccagt

SEQ ID NO: 7255 - DNA, 20 bp, Artificial Sequence
  chemically synthesized
tgggctgagggacaccagtg

SEQ ID NO: 7256 - DNA, 20 bp, Artificial Sequence
  chemically synthesized
gggctgagggacaccagtga

SEQ ID NO: 7257 - DNA, 20 bp, Artificial Sequence
  chemically synthesized
caccagtgagggaccgtctg

SEQ ID NO: 7258 - DNA, 20 bp, Artificial Sequence
  chemically synthesized
accagtgagggaccgtctga

SEQ ID NO: 7259 - DNA, 20 bp, Artificial Sequence
  chemically synthesized
ccagtgagggaccgtctgaa

SEQ ID NO: 7260 - DNA, 20 bp, Artificial Sequence
  chemically synthesized
agggaccgtctgaagggatg

SEQ ID NO: 7261 - DNA, 20 bp, Artificial Sequence
  chemically synthesized
ccgtctgaagggatgtagca

SEQ ID NO: 7262 - DNA, 20 bp, Artificial Sequence
  chemically synthesized
aaagtcaccgcatttccctc

SEQ ID NO: 7263 - DNA, 20 bp, Artificial Sequence
  chemically synthesized
gtcaccgcatttccctccag

SEQ ID NO: 7264 - DNA, 20 bp, Artificial Sequence
  chemically synthesized
cgcatttccctccagcagcc

SEQ ID NO: 7265 - DNA, 20 bp, Artificial Sequence
  chemically synthesized
gcatttccctccagcagccc

SEQ ID NO: 7266 - DNA, 20 bp, Artificial Sequence
  chemically synthesized
tttccctccagcagcccggg

SEQ ID NO: 7267 - DNA, 20 bp, Artificial Sequence
  chemically synthesized
ccctccagcagcccgggtgg

SEQ ID NO: 7268 - DNA, 20 bp, Artificial Sequence
  chemically synthesized
cctccagcagcccgggtggt

SEQ ID NO: 7269 - DNA, 20 bp, Artificial Sequence
  chemically synthesized
ctccagcagcccgggtggtg

SEQ ID NO: 7270 - DNA, 20 bp, Artificial Sequence
  chemically synthesized
tccagcagcccgggtggtgg

SEQ ID NO: 7271 - DNA, 20 bp, Artificial Sequence
  chemically synthesized
gcagcccgggtggtgggggc

SEQ ID NO: 7272 - DNA, 20 bp, Artificial Sequence
  chemically synthesized
cagcccgggtggtgggggct

SEQ ID NO: 7273 - DNA, 20 bp, Artificial Sequence
  chemically synthesized
agcccgggtggtgggggctg

SEQ ID NO: 7274 - DNA, 20 bp, Artificial Sequence
  chemically synthesized
gcccgggtggtgggggctgg

SEQ ID NO: 7275 - DNA, 20 bp, Artificial Sequence
  chemically synthesized
gggctgggggaacgtcatca

SEQ ID NO: 7276 - DNA, 20 bp, Artificial Sequence
  chemically synthesized
ggctgggggaacgtcatcat

SEQ ID NO: 7277 - DNA, 20 bp, Artificial Sequence
  chemically synthesized
ctgggggaacgtcatcatgg

SEQ ID NO: 7278 - DNA, 20 bp, Artificial Sequence
  chemically synthesized
tcatgggagctgacactgat

SEQ ID NO: 7279 - DNA, 20 bp, Artificial Sequence
  chemically synthesized
gacactgatcagctgctcac

SEQ ID NO: 7280 - DNA, 20 bp, Artificial Sequence
  chemically synthesized
acactgatcagctgctcacc

SEQ ID NO: 7281 - DNA, 20 bp, Artificial Sequence
  chemically synthesized
cactgatcagctgctcaccg

SEQ ID NO: 7282 - DNA, 20 bp, Artificial Sequence
  chemically synthesized
ggcccatcttccacttgtct

SEQ ID NO: 7283 - DNA, 20 bp, Artificial Sequence
  chemically synthesized
gctaccccctttttctttta

SEQ ID NO: 7284 - DNA, 20 bp, Artificial Sequence
  chemically synthesized
atttcaattatgcatgtatt

SEQ ID NO: 7285 - DNA, 20 bp, Artificial Sequence
  chemically synthesized
tttcaattatgcatgtatta

SEQ ID NO: 7286 - DNA, 20 bp, Artificial Sequence
  chemically synthesized
ttcaattatgcatgtattaa

SEQ ID NO: 7287 - DNA, 20 bp, Artificial Sequence
  chemically synthesized
tgcatgtattaagggtccca

SEQ ID NO: 7288 - DNA, 20 bp, Artificial Sequence
  chemically synthesized
tttttaattcttttttctcc

SEQ ID NO: 7289 - DNA, 20 bp, Artificial Sequence
  chemically synthesized
tctcccagtgtttcatttta

SEQ ID NO: 7290 - DNA, 20 bp, Artificial Sequence
  chemically synthesized
tcccagtgtttcattttata

SEQ ID NO: 7291 - DNA, 20 bp, Artificial Sequence
  chemically synthesized
tagagttattgctgttcatt

SEQ ID NO: 7292 - DNA, 20 bp, Artificial Sequence
  chemically synthesized
tctcatctcactctgttgcc

SEQ ID NO: 7293 - DNA, 20 bp, Artificial Sequence
  chemically synthesized
ctcatctcactctgttgccc

SEQ ID NO: 7294 - DNA, 20 bp, Artificial Sequence
  chemically synthesized
tctcactctgttgcccaggc

SEQ ID NO: 7295 - DNA, 20 bp, Artificial Sequence
  chemically synthesized
ctgttgcccaggctggaatg

SEQ ID NO: 7296 - DNA, 20 bp, Artificial Sequence
  chemically synthesized
ttgcccaggctggaatgcag

SEQ ID NO: 7297 - DNA, 20 bp, Artificial Sequence
  chemically synthesized
tagcttgtcacaactcactg

SEQ ID NO: 7298 - DNA, 20 bp, Artificial Sequence
  chemically synthesized
tcactgtggcctccacctcc

SEQ ID NO: 7299 - DNA, 20 bp, Artificial Sequence
  chemically synthesized
cactgtggcctccacctcct

SEQ ID NO: 7300 - DNA, 20 bp, Artificial Sequence
  chemically synthesized
tggcctccacctcctgggct

SEQ ID NO: 7301 - DNA, 20 bp, Artificial Sequence
  chemically synthesized
ggcctccacctcctgggctc

SEQ ID NO: 7302 - DNA, 20 bp, Artificial Sequence
  chemically synthesized
ctcaggcgatccttccactt

SEQ ID NO: 7303 - DNA, 20 bp, Artificial Sequence
  chemically synthesized
atccttccacttcagcctcc

SEQ ID NO: 7304 - DNA, 20 bp, Artificial Sequence
  chemically synthesized
tccttccacttcagcctccc

SEQ ID NO: 7305 - DNA, 20 bp, Artificial Sequence
  chemically synthesized
ttccacttcagcctcccagg

SEQ ID NO: 7306 - DNA, 20 bp, Artificial Sequence
  chemically synthesized
acttcagcctcccaggtagc

SEQ ID NO: 7307 - DNA, 20 bp, Artificial Sequence
  chemically synthesized
cttcagcctcccaggtagct

SEQ ID NO: 7308 - DNA, 20 bp, Artificial Sequence
  chemically synthesized
ctcccaggtagctgggacta

SEQ ID NO: 7309 - DNA, 20 bp, Artificial Sequence
  chemically synthesized
tcccaggtagctgggactat

SEQ ID NO: 7310 - DNA, 20 bp, Artificial Sequence
  chemically synthesized
tagctgggactataggcatg

SEQ ID NO: 7311 - DNA, 20 bp, Artificial Sequence
  chemically synthesized
taggcatgtggcaccacacc

SEQ ID NO: 7312 - DNA, 20 bp, Artificial Sequence
  chemically synthesized
taattaaaaatttttttttg

SEQ ID NO: 7313 - DNA, 20 bp, Artificial Sequence
  chemically synthesized
attaaaaatttttttttgta

SEQ ID NO: 7314 - DNA, 20 bp, Artificial Sequence
  chemically synthesized
aaaatttttttttgtagaga

SEQ ID NO: 7315 - DNA, 20 bp, Artificial Sequence
  chemically synthesized
gtagagacggttttgccatg

SEQ ID NO: 7316 - DNA, 20 bp, Artificial Sequence
  chemically synthesized
agagacggttttgccatgta

SEQ ID NO: 7317 - DNA, 20 bp, Artificial Sequence
  chemically synthesized
gagacggttttgccatgtag

SEQ ID NO: 7318 - DNA, 20 bp, Artificial Sequence
  chemically synthesized
agacggttttgccatgtaga

SEQ ID NO: 7319 - DNA, 20 bp, Artificial Sequence
  chemically synthesized
gacggttttgccatgtagag

SEQ ID NO: 7320 - DNA, 20 bp, Artificial Sequence
  chemically synthesized
aggggttttgccatgctgcc

SEQ ID NO: 7321 - DNA, 20 bp, Artificial Sequence
  chemically synthesized
ttttgccatgctgcccagac

SEQ ID NO: 7322 - DNA, 20 bp, Artificial Sequence
  chemically synthesized
atgctgcccagactagtctt

SEQ ID NO: 7323 - DNA, 20 bp, Artificial Sequence
  chemically synthesized
ccagactagtcttgagctcc

SEQ ID NO: 7324 - DNA, 20 bp, Artificial Sequence
  chemically synthesized
cagactagtcttgagctcct

SEQ ID NO: 7325 - DNA, 20 bp, Artificial Sequence
  chemically synthesized
agtcttgagctcctgggctc

SEQ ID NO: 7326 - DNA, 20 bp, Artificial Sequence
  chemically synthesized
ccccccgtgtcgacctccca

SEQ ID NO: 7327 - DNA, 20 bp, Artificial Sequence
  chemically synthesized
gtgtcgacctcccaaagtgc

SEQ ID NO: 7328 - DNA, 20 bp, Artificial Sequence
  chemically synthesized
tgtcgacctcccaaagtgct

SEQ ID NO: 7329 - DNA, 20 bp, Artificial Sequence
  chemically synthesized
ctcccaaagtgctgggatta

SEQ ID NO: 7330 - DNA, 20 bp, Artificial Sequence
  chemically synthesized
gggattacagatgtgatcca

SEQ ID NO: 7331 - DNA, 20 bp, Artificial Sequence
  chemically synthesized
cagatgtgatccacagtgcc

SEQ ID NO: 7332 - DNA, 20 bp, Artificial Sequence
  chemically synthesized
catcttccattatttccatc

SEQ ID NO: 7333 - DNA, 20 bp, Artificial Sequence
  chemically synthesized
tcttttcttttttttttttt

SEQ ID NO: 7334 - DNA, 20 bp, Artificial Sequence
  chemically synthesized
ttttcttttttttttttttg

SEQ ID NO: 7335 - DNA, 20 bp, Artificial Sequence
  chemically synthesized
tttcttttttttttttttgg

SEQ ID NO: 7336 - DNA, 20 bp, Artificial Sequence
  chemically synthesized
cttttttttttttttggagg

SEQ ID NO: 7337 - DNA, 20 bp, Artificial Sequence
  chemically synthesized
tttttttttttttggaggcg

SEQ ID NO: 7338 - DNA, 20 bp, Artificial Sequence
  chemically synthesized
cggagtctcgctctgttgcc

SEQ ID NO: 7339 - DNA, 20 bp, Artificial Sequence
  chemically synthesized
ggagtctcgctctgttgccc

SEQ ID NO: 7340 - DNA, 20 bp, Artificial Sequence
  chemically synthesized
tctcgctctgttgcccaggc

SEQ ID NO: 7341 - DNA, 20 bp, Artificial Sequence
  chemically synthesized
tcgctctgttgcccaggccg

SEQ ID NO: 7342 - DNA, 20 bp, Artificial Sequence
  chemically synthesized
ctgttgcccaggccggagtg

SEQ ID NO: 7343 - DNA, 20 bp, Artificial Sequence
  chemically synthesized
ttgcccaggccggagtgcag

SEQ ID NO: 7344 - DNA, 20 bp, Artificial Sequence
  chemically synthesized
ggagtgcagtggcgcgatct

SEQ ID NO: 7345 - DNA, 20 bp, Artificial Sequence
  chemically synthesized
gcgcgatcttggctcactgc

SEQ ID NO: 7346 - DNA, 20 bp, Artificial Sequence
  chemically synthesized
tcactgcaagctctgcctcc

SEQ ID NO: 7347 - DNA, 20 bp, Artificial Sequence
  chemically synthesized
cactgcaagctctgcctccc

SEQ ID NO: 7348 - DNA, 20 bp, Artificial Sequence
  chemically synthesized
ttcatgccattctcctgcct

SEQ ID NO: 7349 - DNA, 20 bp, Artificial Sequence
  chemically synthesized
ttctcctgcctcagcctccc

SEQ ID NO: 7350 - DNA, 20 bp, Artificial Sequence
  chemically synthesized
tcctgcctcagcctcccgag

SEQ ID NO: 7351 - DNA, 20 bp, Artificial Sequence
  chemically synthesized
gcctcagcctcccgagtagc

SEQ ID NO: 7352 - DNA, 20 bp, Artificial Sequence
  chemically synthesized
cctcagcctcccgagtagct

SEQ ID NO: 7353 - DNA, 20 bp, Artificial Sequence
  chemically synthesized
ctcccgagtagctgggacta

SEQ ID NO: 7354 - DNA, 20 bp, Artificial Sequence
  chemically synthesized
tcccgagtagctgggactac

SEQ ID NO: 7355 - DNA, 20 bp, Artificial Sequence
  chemically synthesized
caggcgcctgccaccacgtc

SEQ ID NO: 7356 - DNA, 20 bp, Artificial Sequence
  chemically synthesized
tggctaattttttgtatttt

SEQ ID NO: 7357 - DNA, 20 bp, Artificial Sequence
  chemically synthesized
ctaattttttgtatttttag

SEQ ID NO: 7358 - DNA, 20 bp, Artificial Sequence
  chemically synthesized
aattttttgtatttttagta

SEQ ID NO: 7359 - DNA, 20 bp, Artificial Sequence
  chemically synthesized
ttttgtatttttagtagaga

SEQ ID NO: 7360 - DNA, 20 bp, Artificial Sequence
  chemically synthesized
tttgtatttttagtagagat

SEQ ID NO: 7361 - DNA, 20 bp, Artificial Sequence
  chemically synthesized
ttgtatttttagtagagatg

SEQ ID NO: 7362 - DNA, 20 bp, Artificial Sequence
  chemically synthesized
gagatggggtttcaccatgt

SEQ ID NO: 7363 - DNA, 20 bp, Artificial Sequence
  chemically synthesized
tggggtttcaccatgttagc

SEQ ID NO: 7364 - DNA, 20 bp, Artificial Sequence
  chemically synthesized
ggggtttcaccatgttagcc

SEQ ID NO: 7365 - DNA, 20 bp, Artificial Sequence
  chemically synthesized
tttcaccatgttagccagga

SEQ ID NO: 7366 - DNA, 20 bp, Artificial Sequence
  chemically synthesized
acctcatgatctgcccgcct

SEQ ID NO: 7367 - DNA, 20 bp, Artificial Sequence
  chemically synthesized
ctgcccgccttggcctccca

SEQ ID NO: 7368 - DNA, 20 bp, Artificial Sequence
  chemically synthesized
gccttggcctcccacagtgc

SEQ ID NO: 7369 - DNA, 20 bp, Artificial Sequence
  chemically synthesized
ccttggcctcccacagtgct

SEQ ID NO: 7370 - DNA, 20 bp, Artificial Sequence
  chemically synthesized
ctcccacagtgctgggattc

SEQ ID NO: 7371 - DNA, 20 bp, Artificial Sequence
  chemically synthesized
tcccacagtgctgggattcc

SEQ ID NO: 7372 - DNA, 20 bp, Artificial Sequence
  chemically synthesized
agtgctgggattccaggcgt

SEQ ID NO: 7373 - DNA, 20 bp, Artificial Sequence
  chemically synthesized
gggattccaggcgtgagcca

SEQ ID NO: 7374 - DNA, 20 bp, Artificial Sequence
  chemically synthesized
caggcgtgagccacggcgcc

SEQ ID NO: 7375 - DNA, 20 bp, Artificial Sequence
  chemically synthesized
cgtgagccacggcgcctggc

SEQ ID NO: 7376 - DNA, 20 bp, Artificial Sequence
  chemically synthesized
gccagtgtgttttttcattt

SEQ ID NO: 7377 - DNA, 20 bp, Artificial Sequence
  chemically synthesized
ttttttcatttcagacattg

SEQ ID NO: 7378 - DNA, 20 bp, Artificial Sequence
  chemically synthesized
gacattgtagtttttatctc

SEQ ID NO: 7379 - DNA, 20 bp, Artificial Sequence
  chemically synthesized
attgtagtttttatctctag

SEQ ID NO: 7380 - DNA, 20 bp, Artificial Sequence
  chemically synthesized
tttatctctagaagttcacc

SEQ ID NO: 7381 - DNA, 20 bp, Artificial Sequence
  chemically synthesized
ttatctctagaagttcacct

SEQ ID NO: 7382 - DNA, 20 bp, Artificial Sequence
  chemically synthesized
tatctctagaagttcacctg

SEQ ID NO: 7383 - DNA, 20 bp, Artificial Sequence
  chemically synthesized
acttaattttttgaacataa

SEQ ID NO: 7384 - DNA, 20 bp, Artificial Sequence
  chemically synthesized
cttaattttttgaacataat

SEQ ID NO: 7385 - DNA, 20 bp, Artificial Sequence
  chemically synthesized
tttttgaacataatgggata

SEQ ID NO: 7386 - DNA, 20 bp, Artificial Sequence
  chemically synthesized
ccatccttgcctgctaattc

SEQ ID NO: 7387 - DNA, 20 bp, Artificial Sequence
  chemically synthesized
gctaattctagcatccgtgt

SEQ ID NO: 7388 - DNA, 20 bp, Artificial Sequence
  chemically synthesized
tctagcatccgtgtcagttc

SEQ ID NO: 7389 - DNA, 20 bp, Artificial Sequence
  chemically synthesized
catgccttgtaatctttgat

SEQ ID NO: 7390 - DNA, 20 bp, Artificial Sequence
  chemically synthesized
tgtaatctttgattggctgc

SEQ ID NO: 7391 - DNA, 20 bp, Artificial Sequence
  chemically synthesized
cattgtcaatttcaccttgt

SEQ ID NO: 7392 - DNA, 20 bp, Artificial Sequence
  chemically synthesized
attgtcaatttcaccttgtt

SEQ ID NO: 7393 - DNA, 20 bp, Artificial Sequence
  chemically synthesized
aatttcaccttgttgggtgc

SEQ ID NO: 7394 - DNA, 20 bp, Artificial Sequence
  chemically synthesized
gtattcctctaaatgttctt

SEQ ID NO: 7395 - DNA, 20 bp, Artificial Sequence
  chemically synthesized
aatgttcttgagctttgctc

SEQ ID NO: 7396 - DNA, 20 bp, Artificial Sequence
  chemically synthesized
atgttcttgagctttgctcc

SEQ ID NO: 7397 - DNA, 20 bp, Artificial Sequence
  chemically synthesized
ttgagctttgctccgggatg

SEQ ID NO: 7398 - DNA, 20 bp, Artificial Sequence
  chemically synthesized
ctttgctccgggatgcagtt

SEQ ID NO: 7399 - DNA, 20 bp, Artificial Sequence
  chemically synthesized
cgggatgcagttaagcaact

SEQ ID NO: 7400 - DNA, 20 bp, Artificial Sequence
  chemically synthesized
ggatgcagttaagcaactta

SEQ ID NO: 7401 - DNA, 20 bp, Artificial Sequence
  chemically synthesized
gcagttaagcaacttagagt

SEQ ID NO: 7402 - DNA, 20 bp, Artificial Sequence
  chemically synthesized
gtttgaactcttaattgttt

SEQ ID NO: 7403 - DNA, 20 bp, Artificial Sequence
  chemically synthesized
cttaattgttttggtctcct

SEQ ID NO: 7404 - DNA, 20 bp, Artificial Sequence
  chemically synthesized
ttttggtctcctcggactct

SEQ ID NO: 7405 - DNA, 20 bp, Artificial Sequence
  chemically synthesized
tcagctccatctcctcaacg

SEQ ID NO: 7406 - DNA, 20 bp, Artificial Sequence
  chemically synthesized
cagctccatctcctcaacgt

SEQ ID NO: 7407 - DNA, 20 bp, Artificial Sequence
  chemically synthesized
agctccatctcctcaacgtg

SEQ ID NO: 7408 - DNA, 20 bp, Artificial Sequence
  chemically synthesized
ctccatctcctcaacgtggg

SEQ ID NO: 7409 - DNA, 20 bp, Artificial Sequence
  chemically synthesized
cctcaacgtggggagtctct

SEQ ID NO: 7410 - DNA, 20 bp, Artificial Sequence
  chemically synthesized
ctcaacgtggggagtctctt

SEQ ID NO: 7411 - DNA, 20 bp, Artificial Sequence
  chemically synthesized
ggagtctcttgggctctgcc

SEQ ID NO: 7412 - DNA, 20 bp, Artificial Sequence
  chemically synthesized
ctgcctggacttccctttcc

SEQ ID NO: 7413 - DNA, 20 bp, Artificial Sequence
  chemically synthesized
ctttcctggcctgtaacctg

SEQ ID NO: 7414 - DNA, 20 bp, Artificial Sequence
  chemically synthesized
acctgcagactctctccaaa

SEQ ID NO: 7415 - DNA, 20 bp, Artificial Sequence
  chemically synthesized
gcagactctctccaaacagt

SEQ ID NO: 7416 - DNA, 20 bp, Artificial Sequence
  chemically synthesized
actctctccaaacagtaagc

SEQ ID NO: 7417 - DNA, 20 bp, Artificial Sequence
  chemically synthesized
ctctctccaaacagtaagct

SEQ ID NO: 7418 - DNA, 20 bp, Artificial Sequence
  chemically synthesized
tctctccaaacagtaagctg

SEQ ID NO: 7419 - DNA, 20 bp, Artificial Sequence
  chemically synthesized
aaacagtaagctggggtgat

SEQ ID NO: 7420 - DNA, 20 bp, Artificial Sequence
  chemically synthesized
acagtaagctggggtgatcg

SEQ ID NO: 7421 - DNA, 20 bp, Artificial Sequence
  chemically synthesized
cagtaagctggggtgatcgg

SEQ ID NO: 7422 - DNA, 20 bp, Artificial Sequence
  chemically synthesized
agtaagctggggtgatcgga

SEQ ID NO: 7423 - DNA, 20 bp, Artificial Sequence
  chemically synthesized
gttgtttgcttcttatccct

SEQ ID NO: 7424 - DNA, 20 bp, Artificial Sequence
  chemically synthesized
ttgtttgcttcttatccctc

SEQ ID NO: 7425 - DNA, 20 bp, Artificial Sequence
  chemically synthesized
tgtttgcttcttatccctca

SEQ ID NO: 7426 - DNA, 20 bp, Artificial Sequence
  chemically synthesized
actcctccttgcctgatgtc

SEQ ID NO: 7427 - DNA, 20 bp, Artificial Sequence
  chemically synthesized
tcctccttgcctgatgtcca

SEQ ID NO: 7428 - DNA, 20 bp, Artificial Sequence
  chemically synthesized
cctgatgtccagagtcttga

SEQ ID NO: 7429 - DNA, 20 bp, Artificial Sequence
  chemically synthesized
ttgaaagctgccatgttcta

SEQ ID NO: 7430 - DNA, 20 bp, Artificial Sequence
  chemically synthesized
gtttttgttttgattgtttc

SEQ ID NO: 7431 - DNA, 20 bp, Artificial Sequence
  chemically synthesized
tttttgttttgattgtttct

SEQ ID NO: 7432 - DNA, 20 bp, Artificial Sequence
  chemically synthesized
ttttgttttgattgtttctg

SEQ ID NO: 7433 - DNA, 20 bp, Artificial Sequence
  chemically synthesized
ttgttttgattgtttctggg

SEQ ID NO: 7434 - DNA, 20 bp, Artificial Sequence
  chemically synthesized
gttttgattgtttctgggga

SEQ ID NO: 7435 - DNA, 20 bp, Artificial Sequence
  chemically synthesized
ttgattgtttctggggagag

SEQ ID NO: 7436 - DNA, 20 bp, Artificial Sequence
  chemically synthesized
gagaagaactcttcccatct

SEQ ID NO: 7437 - DNA, 20 bp, Artificial Sequence
  chemically synthesized
agaagaactcttcccatctt

SEQ ID NO: 7438 - DNA, 20 bp, Artificial Sequence
  chemically synthesized
agaactcttcccatcttggg

SEQ ID NO: 7439 - DNA, 20 bp, Artificial Sequence
  chemically synthesized
ttatgttcaaacttttgcct

SEQ ID NO: 7440 - DNA, 20 bp, Artificial Sequence
  chemically synthesized
tgttcaaacttttgcctaag

SEQ ID NO: 7441 - DNA, 20 bp, Artificial Sequence
  chemically synthesized
tttaactcatctaattatcc

SEQ ID NO: 7442 - DNA, 20 bp, Artificial Sequence
  chemically synthesized
aattatccgagcaatccaat

SEQ ID NO: 7443 - DNA, 20 bp, Artificial Sequence
  chemically synthesized
attatccgagcaatccaatc

SEQ ID NO: 7444 - DNA, 20 bp, Artificial Sequence
  chemically synthesized
atccgagcaatccaatcggg

SEQ ID NO: 7445 - DNA, 20 bp, Artificial Sequence
  chemically synthesized
gtgatctccattttacacac

SEQ ID NO: 7446 - DNA, 20 bp, Artificial Sequence
  chemically synthesized
ccattttacacacgagaaaa

SEQ ID NO: 7447 - DNA, 20 bp, Artificial Sequence
  chemically synthesized
ttttacacacgagaaaatgg

SEQ ID NO: 7448 - DNA, 20 bp, Artificial Sequence
  chemically synthesized
cacacgagaaaatggaagca

SEQ ID NO: 7449 - DNA, 20 bp, Artificial Sequence
  chemically synthesized
cacgagaaaatggaagcatg

SEQ ID NO: 7450 - DNA, 20 bp, Artificial Sequence
  chemically synthesized
agcatggagaaattgaatgc

SEQ ID NO: 7451 - DNA, 20 bp, Artificial Sequence
  chemically synthesized
tgaatgctggtgcatgatct

SEQ ID NO: 7452 - DNA, 20 bp, Artificial Sequence
  chemically synthesized
aatgctggtgcatgatctca

SEQ ID NO: 7453 - DNA, 20 bp, Artificial Sequence
  chemically synthesized
tgcatgatctcagagctacc

SEQ ID NO: 7454 - DNA, 20 bp, Artificial Sequence
  chemically synthesized
catgatctcagagctacctg

SEQ ID NO: 7455 - DNA, 20 bp, Artificial Sequence
  chemically synthesized
atgatctcagagctacctgg

SEQ ID NO: 7456 - DNA, 20 bp, Artificial Sequence
  chemically synthesized
ctcagagctacctggaggca

SEQ ID NO: 7457 - DNA, 20 bp, Artificial Sequence
  chemically synthesized
gagctacctggaggcacagc

SEQ ID NO: 7458 - DNA, 20 bp, Artificial Sequence
  chemically synthesized
agctacctggaggcacagct

SEQ ID NO: 7459 - DNA, 20 bp, Artificial Sequence
  chemically synthesized
ggcacagctgggctaccctg

SEQ ID NO: 7460 - DNA, 20 bp, Artificial Sequence
  chemically synthesized
gcacagctgggctaccctgt

SEQ ID NO: 7461 - DNA, 20 bp, Artificial Sequence
  chemically synthesized
cagctgggctaccctgtggg

SEQ ID NO: 7462 - DNA, 20 bp, Artificial Sequence
  chemically synthesized
gggctaccctgtgggcagtc

SEQ ID NO: 7463 - DNA, 20 bp, Artificial Sequence
  chemically synthesized
ccctgtgggcagtctggttt

SEQ ID NO: 7464 - DNA, 20 bp, Artificial Sequence
  chemically synthesized
cctgtgggcagtctggtttc

SEQ ID NO: 7465 - DNA, 20 bp, Artificial Sequence
  chemically synthesized
ctgtgggcagtctggtttca

SEQ ID NO: 7466 - DNA, 20 bp, Artificial Sequence
  chemically synthesized
tgggcagtctggtttcaggg

SEQ ID NO: 7467 - DNA, 20 bp, Artificial Sequence
  chemically synthesized
ctggtttcagggtggatata

SEQ ID NO: 7468 - DNA, 20 bp, Artificial Sequence
  chemically synthesized
tggatatacagacacgttgc

SEQ ID NO: 7469 - DNA, 20 bp, Artificial Sequence
  chemically synthesized
ggatatacagacacgttgct

SEQ ID NO: 7470 - DNA, 20 bp, Artificial Sequence
  chemically synthesized
gacacgttgctgggctgacc

SEQ ID NO: 7471 - DNA, 20 bp, Artificial Sequence
  chemically synthesized
ttgctgggctgacccagcat

SEQ ID NO: 7472 - DNA, 20 bp, Artificial Sequence
  chemically synthesized
tgctgggctgacccagcatt

SEQ ID NO: 7473 - DNA, 20 bp, Artificial Sequence
  chemically synthesized
ctgggctgacccagcattgg

SEQ ID NO: 7474 - DNA, 20 bp, Artificial Sequence
  chemically synthesized
acccagcattgggagttgat

SEQ ID NO: 7475 - DNA, 20 bp, Artificial Sequence
  chemically synthesized
agcattgggagttgataagt

SEQ ID NO: 7476 - DNA, 20 bp, Artificial Sequence
  chemically synthesized
tgggagttgataagtcggac

SEQ ID NO: 7477 - DNA, 20 bp, Artificial Sequence
  chemically synthesized
gggagttgataagtcggact

SEQ ID NO: 7478 - DNA, 20 bp, Artificial Sequence
  chemically synthesized
agttgataagtcggactggg

SEQ ID NO: 7479 - DNA, 20 bp, Artificial Sequence
  chemically synthesized
tgataagtcggactgggaag

SEQ ID NO: 7480 - DNA, 20 bp, Artificial Sequence
  chemically synthesized
gataagtcggactgggaagc

SEQ ID NO: 7481 - DNA, 20 bp, Artificial Sequence
  chemically synthesized
agtcggactgggaagcagga

SEQ ID NO: 7482 - DNA, 20 bp, Artificial Sequence
  chemically synthesized
gtcggactgggaagcaggac

SEQ ID NO: 7483 - DNA, 20 bp, Artificial Sequence
  chemically synthesized
gaagcaggacaggaccctct

SEQ ID NO: 7484 - DNA, 20 bp, Artificial Sequence
  chemically synthesized
gcaggacaggaccctctgag

SEQ ID NO: 7485 - DNA, 20 bp, Artificial Sequence
  chemically synthesized
aggacaggaccctctgagtg

SEQ ID NO: 7486 - DNA, 20 bp, Artificial Sequence
  chemically synthesized
ggacaggaccctctgagtgg

SEQ ID NO: 7487 - DNA, 20 bp, Artificial Sequence
  chemically synthesized
gacaggaccctctgagtgga

SEQ ID NO: 7488 - DNA, 20 bp, Artificial Sequence
  chemically synthesized
cctctgagtggagggtgctg

SEQ ID NO: 7489 - DNA, 20 bp, Artificial Sequence
  chemically synthesized
tgagtggagggtgctgaaga

SEQ ID NO: 7490 - DNA, 20 bp, Artificial Sequence
  chemically synthesized
gtggagggtgctgaagacag

SEQ ID NO: 7491 - DNA, 20 bp, Artificial Sequence
  chemically synthesized
agggtgctgaagacagcagt

SEQ ID NO: 7492 - DNA, 20 bp, Artificial Sequence
  chemically synthesized
gggtgctgaagacagcagtc

SEQ ID NO: 7493 - DNA, 20 bp, Artificial Sequence
  chemically synthesized
ggtgctgaagacagcagtca

SEQ ID NO: 7494 - DNA, 20 bp, Artificial Sequence
  chemically synthesized
gaagacagcagtcagggact

SEQ ID NO: 7495 - DNA, 20 bp, Artificial Sequence
  chemically synthesized
agcagtcagggactcagcca

SEQ ID NO: 7496 - DNA, 20 bp, Artificial Sequence
  chemically synthesized
cagtcagggactcagccatg

SEQ ID NO: 7497 - DNA, 20 bp, Artificial Sequence
  chemically synthesized
agtcagggactcagccatgg

SEQ ID NO: 7498 - DNA, 20 bp, Artificial Sequence
  chemically synthesized
gtcagggactcagccatgga

SEQ ID NO: 7499 - DNA, 20 bp, Artificial Sequence
  chemically synthesized
gggactcagccatggagggc

SEQ ID NO: 7500 - DNA, 20 bp, Artificial Sequence
  chemically synthesized
tcagccatggagggccagct

SEQ ID NO: 7501 - DNA, 20 bp, Artificial Sequence
  chemically synthesized
gccatggagggccagcttgg

SEQ ID NO: 7502 - DNA, 20 bp, Artificial Sequence
  chemically synthesized
ccatggagggccagcttggt

SEQ ID NO: 7503 - DNA, 20 bp, Artificial Sequence
  chemically synthesized
catggagggccagcttggtg

SEQ ID NO: 7504 - DNA, 20 bp, Artificial Sequence
  chemically synthesized
cagcttggtggggaacaccg

SEQ ID NO: 7505 - DNA, 20 bp, Artificial Sequence
  chemically synthesized
ggtggggaacaccgtggtca

SEQ ID NO: 7506 - DNA, 20 bp, Artificial Sequence
  chemically synthesized
tggggaacaccgtggtcatg

SEQ ID NO: 7507 - DNA, 20 bp, Artificial Sequence
  chemically synthesized
ccgtggtcatggagcgcttc

SEQ ID NO: 7508 - DNA, 20 bp, Artificial Sequence
  chemically synthesized
ggtcatggagcgcttctgga

SEQ ID NO: 7509 - DNA, 20 bp, Artificial Sequence
  chemically synthesized
tcatggagcgcttctggatg

SEQ ID NO: 7510 - DNA, 20 bp, Artificial Sequence
  chemically synthesized
atggagcgcttctggatgga

SEQ ID NO: 7511 - DNA, 20 bp, Artificial Sequence
  chemically synthesized
tggagcgcttctggatggag

SEQ ID NO: 7512 - DNA, 20 bp, Artificial Sequence
  chemically synthesized
tctggatggagaggaatgca

SEQ ID NO: 7513 - DNA, 20 bp, Artificial Sequence
  chemically synthesized
ctggatggagaggaatgcaa

SEQ ID NO: 7514 - DNA, 20 bp, Artificial Sequence
  chemically synthesized
ggagaggaatgcaaaggcct

SEQ ID NO: 7515 - DNA, 20 bp, Artificial Sequence
  chemically synthesized
agaggaatgcaaaggccttg

SEQ ID NO: 7516 - DNA, 20 bp, Artificial Sequence
  chemically synthesized
gaggaatgcaaaggccttgg

SEQ ID NO: 7517 - DNA, 20 bp, Artificial Sequence
  chemically synthesized
gaatgcaaaggccttggagg

SEQ ID NO: 7518 - DNA, 20 bp, Artificial Sequence
  chemically synthesized
aatgcaaaggccttggagga

SEQ ID NO: 7519 - DNA, 20 bp, Artificial Sequence
  chemically synthesized
atgcaaaggccttggaggaa

SEQ ID NO: 7520 - DNA, 20 bp, Artificial Sequence
  chemically synthesized
tgcaaaggccttggaggaag

SEQ ID NO: 7521 - DNA, 20 bp, Artificial Sequence
  chemically synthesized
aaaggccttggaggaagggg

SEQ ID NO: 7522 - DNA, 20 bp, Artificial Sequence
  chemically synthesized
aaggccttggaggaaggggt

SEQ ID NO: 7523 - DNA, 20 bp, Artificial Sequence
  chemically synthesized
aggccttggaggaaggggtg

SEQ ID NO: 7524 - DNA, 20 bp, Artificial Sequence
  chemically synthesized
ggccttggaggaaggggtgg

SEQ ID NO: 7525 - DNA, 20 bp, Artificial Sequence
  chemically synthesized
cttggaggaaggggtggggg

SEQ ID NO: 7526 - DNA, 20 bp, Artificial Sequence
  chemically synthesized
gaggaaggggtgggggcagt

SEQ ID NO: 7527 - DNA, 20 bp, Artificial Sequence
  chemically synthesized
ggaaggggtgggggcagtga

SEQ ID NO: 7528 - DNA, 20 bp, Artificial Sequence
  chemically synthesized
gaaggggtgggggcagtgag

SEQ ID NO: 7529 - DNA, 20 bp, Artificial Sequence
  chemically synthesized
aaggggtgggggcagtgaga

SEQ ID NO: 7530 - DNA, 20 bp, Artificial Sequence
  chemically synthesized
ggggtgggggcagtgagagg

SEQ ID NO: 7531 - DNA, 20 bp, Artificial Sequence
  chemically synthesized
gggtgggggcagtgagaggg

SEQ ID NO: 7532 - DNA, 20 bp, Artificial Sequence
  chemically synthesized
ggtgggggcagtgagaggga

SEQ ID NO: 7533 - DNA, 20 bp, Artificial Sequence
  chemically synthesized
gggggcagtgagagggaggg

SEQ ID NO: 7534 - DNA, 20 bp, Artificial Sequence
  chemically synthesized
ggggcagtgagagggagggt

SEQ ID NO: 7535 - DNA, 20 bp, Artificial Sequence
  chemically synthesized
gggcagtgagagggagggtg

SEQ ID NO: 7536 - DNA, 20 bp, Artificial Sequence
  chemically synthesized
agggagggtggggctgtgct

SEQ ID NO: 7537 - DNA, 20 bp, Artificial Sequence
  chemically synthesized
ggagggtggggctgtgctca

SEQ ID NO: 7538 - DNA, 20 bp, Artificial Sequence
  chemically synthesized
gggtggggctgtgctcagag

SEQ ID NO: 7539 - DNA, 20 bp, Artificial Sequence
  chemically synthesized
ggtggggctgtgctcagagc

SEQ ID NO: 7540 - DNA, 20 bp, Artificial Sequence
  chemically synthesized
tggggctgtgctcagagcgg

SEQ ID NO: 7541 - DNA, 20 bp, Artificial Sequence
  chemically synthesized
ggctgtgctcagagcgggag

SEQ ID NO: 7542 - DNA, 20 bp, Artificial Sequence
  chemically synthesized
gctgtgctcagagcgggagt

SEQ ID NO: 7543 - DNA, 20 bp, Artificial Sequence
  chemically synthesized
gtgctcagagcgggagtggg

SEQ ID NO: 7544 - DNA, 20 bp, Artificial Sequence
  chemically synthesized
ctcagagcgggagtgggcag

SEQ ID NO: 7545 - DNA, 20 bp, Artificial Sequence
  chemically synthesized
cagagcgggagtgggcagtg

SEQ ID NO: 7546 - DNA, 20 bp, Artificial Sequence
  chemically synthesized
agagcgggagtgggcagtgg

SEQ ID NO: 7547 - DNA, 20 bp, Artificial Sequence
  chemically synthesized
ggagtgggcagtggaggtgt

SEQ ID NO: 7548 - DNA, 20 bp, Artificial Sequence
  chemically synthesized
agtgggcagtggaggtgtca

SEQ ID NO: 7549 - DNA, 20 bp, Artificial Sequence
  chemically synthesized
gtgggcagtggaggtgtcag

SEQ ID NO: 7550 - DNA, 20 bp, Artificial Sequence
  chemically synthesized
ggaggtgtcagaggcctccc

SEQ ID NO: 7551 - DNA, 20 bp, Artificial Sequence
  chemically synthesized
gaggtgtcagaggcctccct

SEQ ID NO: 7552 - DNA, 20 bp, Artificial Sequence
  chemically synthesized
agaggcctccctgggtcaaa

SEQ ID NO: 7553 - DNA, 20 bp, Artificial Sequence
  chemically synthesized
gaggcctccctgggtcaaat

SEQ ID NO: 7554 - DNA, 20 bp, Artificial Sequence
  chemically synthesized
aggcctccctgggtcaaatg

SEQ ID NO: 7555 - DNA, 20 bp, Artificial Sequence
  chemically synthesized
cctgggtcaaatggggtcct

SEQ ID NO: 7556 - DNA, 20 bp, Artificial Sequence
  chemically synthesized
gtcaaatggggtcctgagtg

SEQ ID NO: 7557 - DNA, 20 bp, Artificial Sequence
  chemically synthesized
tggggtcctgagtgtggctg

SEQ ID NO: 7558 - DNA, 20 bp, Artificial Sequence
  chemically synthesized
ggtcctgagtgtggctgcag

SEQ ID NO: 7559 - DNA, 20 bp, Artificial Sequence
  chemically synthesized
gtcctgagtgtggctgcagt

SEQ ID NO: 7560 - DNA, 20 bp, Artificial Sequence
  chemically synthesized
tcctgagtgtggctgcagtg

SEQ ID NO: 7561 - DNA, 20 bp, Artificial Sequence
  chemically synthesized
tgagtgtggctgcagtgggg

SEQ ID NO: 7562 - DNA, 20 bp, Artificial Sequence
  chemically synthesized
gagtgtggctgcagtgggga

SEQ ID NO: 7563 - DNA, 20 bp, Artificial Sequence
  chemically synthesized
tgtggctgcagtggggaagg

SEQ ID NO: 7564 - DNA, 20 bp, Artificial Sequence
  chemically synthesized
ggctgcagtggggaaggtgg

SEQ ID NO: 7565 - DNA, 20 bp, Artificial Sequence
  chemically synthesized
gtggggaaggtggaagtcac

SEQ ID NO: 7566 - DNA, 20 bp, Artificial Sequence
  chemically synthesized
tggaagtcactggtgtgaaa

SEQ ID NO: 7567 - DNA, 20 bp, Artificial Sequence
  chemically synthesized
tcactggtgtgaaaaagatg

SEQ ID NO: 7568 - DNA, 20 bp, Artificial Sequence
  chemically synthesized
actggtgtgaaaaagatgaa

SEQ ID NO: 7569 - DNA, 20 bp, Artificial Sequence
  chemically synthesized
gtgaaaaagatgaagagtta

SEQ ID NO: 7570 - DNA, 20 bp, Artificial Sequence
  chemically synthesized
aaaagatgaagagttatgga

SEQ ID NO: 7571 - DNA, 20 bp, Artificial Sequence
  chemically synthesized
gagttatggacagtcactta

SEQ ID NO: 7572 - DNA, 20 bp, Artificial Sequence
  chemically synthesized
agttatggacagtcacttac

SEQ ID NO: 7573 - DNA, 20 bp, Artificial Sequence
  chemically synthesized
gttatggacagtcacttaca

SEQ ID NO: 7574 - DNA, 20 bp, Artificial Sequence
  chemically synthesized
ttatggacagtcacttacag

SEQ ID NO: 7575 - DNA, 20 bp, Artificial Sequence
  chemically synthesized
tggacagtcacttacagggg

SEQ ID NO: 7576 - DNA, 20 bp, Artificial Sequence
  chemically synthesized
tacaggggcagtgtctgact

SEQ ID NO: 7577 - DNA, 20 bp, Artificial Sequence
  chemically synthesized
acaggggcagtgtctgactc

SEQ ID NO: 7578 - DNA, 20 bp, Artificial Sequence
  chemically synthesized
gggcagtgtctgactcagga

SEQ ID NO: 7579 - DNA, 20 bp, Artificial Sequence
  chemically synthesized
cagtgtctgactcaggacag

SEQ ID NO: 7580 - DNA, 20 bp, Artificial Sequence
  chemically synthesized
tgtctgactcaggacagtgg

SEQ ID NO: 7581 - DNA, 20 bp, Artificial Sequence
  chemically synthesized
gtctgactcaggacagtggc

SEQ ID NO: 7582 - DNA, 20 bp, Artificial Sequence
  chemically synthesized
tgactcaggacagtggcagg

SEQ ID NO: 7583 - DNA, 20 bp, Artificial Sequence
  chemically synthesized
gacagtggcaggaagtgacc

SEQ ID NO: 7584 - DNA, 20 bp, Artificial Sequence
  chemically synthesized
acagtggcaggaagtgacct

SEQ ID NO: 7585 - DNA, 20 bp, Artificial Sequence
  chemically synthesized
cagtggcaggaagtgacctg

SEQ ID NO: 7586 - DNA, 20 bp, Artificial Sequence
  chemically synthesized
gtggcaggaagtgacctggg

SEQ ID NO: 7587 - DNA, 20 bp, Artificial Sequence
  chemically synthesized
tggcaggaagtgacctgggg

SEQ ID NO: 7588 - DNA, 20 bp, Artificial Sequence
  chemically synthesized
caggaagtgacctggggagg

SEQ ID NO: 7589 - DNA, 20 bp, Artificial Sequence
  chemically synthesized
tgacctggggaggaagattc

SEQ ID NO: 7590 - DNA, 20 bp, Artificial Sequence
  chemically synthesized
gacctggggaggaagattct

SEQ ID NO: 7591 - DNA, 20 bp, Artificial Sequence
  chemically synthesized
aagattctgggcccctgact

SEQ ID NO: 7592 - DNA, 20 bp, Artificial Sequence
  chemically synthesized
ggcccctgactgagcctccc

SEQ ID NO: 7593 - DNA, 20 bp, Artificial Sequence
  chemically synthesized
gcccctgactgagcctcccc

SEQ ID NO: 7594 - DNA, 20 bp, Artificial Sequence
  chemically synthesized
gactgagcctccccaggatg

SEQ ID NO: 7595 - DNA, 20 bp, Artificial Sequence
  chemically synthesized
tccccaggatgtggtcctgc

SEQ ID NO: 7596 - DNA, 20 bp, Artificial Sequence
  chemically synthesized
ccccaggatgtggtcctgct

SEQ ID NO: 7597 - DNA, 20 bp, Artificial Sequence
  chemically synthesized
aggatgtggtcctgctgggt

SEQ ID NO: 7598 - DNA, 20 bp, Artificial Sequence
  chemically synthesized
ggatgtggtcctgctgggtc

SEQ ID NO: 7599 - DNA, 20 bp, Artificial Sequence
  chemically synthesized
gatgtggtcctgctgggtcg

SEQ ID NO: 7600 - DNA, 20 bp, Artificial Sequence
  chemically synthesized
atgtggtcctgctgggtcgg

SEQ ID NO: 7601 - DNA, 20 bp, Artificial Sequence
  chemically synthesized
tgtggtcctgctgggtcggg

SEQ ID NO: 7602 - DNA, 20 bp, Artificial Sequence
  chemically synthesized
cctgctgggtcggggggtga

SEQ ID NO: 7603 - DNA, 20 bp, Artificial Sequence
  chemically synthesized
ctgctgggtcggggggtgat

SEQ ID NO: 7604 - DNA, 20 bp, Artificial Sequence
  chemically synthesized
ggtcggggggtgataggaat

SEQ ID NO: 7605 - DNA, 20 bp, Artificial Sequence
  chemically synthesized
cggggggtgataggaatgag

SEQ ID NO: 7606 - DNA, 20 bp, Artificial Sequence
  chemically synthesized
ggtgataggaatgagaagac

SEQ ID NO: 7607 - DNA, 20 bp, Artificial Sequence
  chemically synthesized
gtgataggaatgagaagaca

SEQ ID NO: 7608 - DNA, 20 bp, Artificial Sequence
  chemically synthesized
ataggaatgagaagacaagg

SEQ ID NO: 7609 - DNA, 20 bp, Artificial Sequence
  chemically synthesized
tgagaagacaaggaagtcca

SEQ ID NO: 7610 - DNA, 20 bp, Artificial Sequence
  chemically synthesized
agaagacaaggaagtccaca

SEQ ID NO: 7611 - DNA, 20 bp, Artificial Sequence
  chemically synthesized
gacaaggaagtccacagagt

SEQ ID NO: 7612 - DNA, 20 bp, Artificial Sequence
  chemically synthesized
acaaggaagtccacagagtc

SEQ ID NO: 7613 - DNA, 20 bp, Artificial Sequence
  chemically synthesized
caaggaagtccacagagtca

SEQ ID NO: 7614 - DNA, 20 bp, Artificial Sequence
  chemically synthesized
agtccacagagtcagggtcc

SEQ ID NO: 7615 - DNA, 20 bp, Artificial Sequence
  chemically synthesized
gtccacagagtcagggtcca

SEQ ID NO: 7616 - DNA, 20 bp, Artificial Sequence
  chemically synthesized
cagagtcagggtccaaggcc

SEQ ID NO: 7617 - DNA, 20 bp, Artificial Sequence
  chemically synthesized
agtcagggtccaaggcctag

SEQ ID NO: 7618 - DNA, 20 bp, Artificial Sequence
  chemically synthesized
gtcagggtccaaggcctaga

SEQ ID NO: 7619 - DNA, 20 bp, Artificial Sequence
  chemically synthesized
cctagaaggtgttctgtttg

SEQ ID NO: 7620 - DNA, 20 bp, Artificial Sequence
  chemically synthesized
ctagaaggtgttctgtttgc

SEQ ID NO: 7621 - DNA, 20 bp, Artificial Sequence
  chemically synthesized
gaaggtgttctgtttgcagg

SEQ ID NO: 7622 - DNA, 20 bp, Artificial Sequence
  chemically synthesized
gtttgcaggtggatgctgca

SEQ ID NO: 7623 - DNA, 20 bp, Artificial Sequence
  chemically synthesized
ttgcaggtggatgctgcaaa

SEQ ID NO: 7624 - DNA, 20 bp, Artificial Sequence
  chemically synthesized
gcaggtggatgctgcaaaga

SEQ ID NO: 7625 - DNA, 20 bp, Artificial Sequence
  chemically synthesized
caggtggatgctgcaaagag

SEQ ID NO: 7626 - DNA, 20 bp, Artificial Sequence
  chemically synthesized
ggtggatgctgcaaagagag

SEQ ID NO: 7627 - DNA, 20 bp, Artificial Sequence
  chemically synthesized
atgctgcaaagagaggagct

SEQ ID NO: 7628 - DNA, 20 bp, Artificial Sequence
  chemically synthesized
tgctgcaaagagaggagctc

SEQ ID NO: 7629 - DNA, 20 bp, Artificial Sequence
  chemically synthesized
gctgcaaagagaggagctca

SEQ ID NO: 7630 - DNA, 20 bp, Artificial Sequence
  chemically synthesized
caaagagaggagctcagggc

SEQ ID NO: 7631 - DNA, 20 bp, Artificial Sequence
  chemically synthesized
aaagagaggagctcagggct

SEQ ID NO: 7632 - DNA, 20 bp, Artificial Sequence
  chemically synthesized
gagctcagggctgggacaac

SEQ ID NO: 7633 - DNA, 20 bp, Artificial Sequence
  chemically synthesized
gctcagggctgggacaactg

SEQ ID NO: 7634 - DNA, 20 bp, Artificial Sequence
  chemically synthesized
tgggacaactggagctgctc

SEQ ID NO: 7635 - DNA, 20 bp, Artificial Sequence
  chemically synthesized
gggacaactggagctgctct

SEQ ID NO: 7636 - DNA, 20 bp, Artificial Sequence
  chemically synthesized
aactggagctgctctgggtc

SEQ ID NO: 7637 - DNA, 20 bp, Artificial Sequence
  chemically synthesized
ctggagctgctctgggtctg

SEQ ID NO: 7638 - DNA, 20 bp, Artificial Sequence
  chemically synthesized
tggagctgctctgggtctgg

SEQ ID NO: 7639 - DNA, 20 bp, Artificial Sequence
  chemically synthesized
agctgctctgggtctggagg

SEQ ID NO: 7640 - DNA, 20 bp, Artificial Sequence
  chemically synthesized
tgctctgggtctggaggcag

SEQ ID NO: 7641 - DNA, 20 bp, Artificial Sequence
  chemically synthesized
ctctgggtctggaggcagca

SEQ ID NO: 7642 - DNA, 20 bp, Artificial Sequence
  chemically synthesized
ctgggtctggaggcagcaga

SEQ ID NO: 7643 - DNA, 20 bp, Artificial Sequence
  chemically synthesized
tgggtctggaggcagcagag

SEQ ID NO: 7644 - DNA, 20 bp, Artificial Sequence
  chemically synthesized
gggtctggaggcagcagaga

SEQ ID NO: 7645 - DNA, 20 bp, Artificial Sequence
  chemically synthesized
gtctggaggcagcagagagg

SEQ ID NO: 7646 - DNA, 20 bp, Artificial Sequence
  chemically synthesized
gaggcagcagagagggagcc

SEQ ID NO: 7647 - DNA, 20 bp, Artificial Sequence
  chemically synthesized
agggagcccagctctgtgtg

SEQ ID NO: 7648 - DNA, 20 bp, Artificial Sequence
  chemically synthesized
gggagcccagctctgtgtgc

SEQ ID NO: 7649 - DNA, 20 bp, Artificial Sequence
  chemically synthesized
agcccagctctgtgtgcagg

SEQ ID NO: 7650 - DNA, 20 bp, Artificial Sequence
  chemically synthesized
gctctgtgtgcaggaagacg

SEQ ID NO: 7651 - DNA, 20 bp, Artificial Sequence
  chemically synthesized
ctctgtgtgcaggaagacgt

SEQ ID NO: 7652 - DNA, 20 bp, Artificial Sequence
  chemically synthesized
gcaggaagacgtgggtgtgt

SEQ ID NO: 7653 - DNA, 20 bp, Artificial Sequence
  chemically synthesized
ggtgtgtgagtgtacgtgtg

SEQ ID NO: 7654 - DNA, 20 bp, Artificial Sequence
  chemically synthesized
gtgtgtgagtgtacgtgtgt

SEQ ID NO: 7655 - DNA, 20 bp, Artificial Sequence
  chemically synthesized
gtgtacgtgtgtgggtgtgt

SEQ ID NO: 7656 - DNA, 20 bp, Artificial Sequence
  chemically synthesized
tgtacgtgtgtgggtgtgtc

SEQ ID NO: 7657 - DNA, 20 bp, Artificial Sequence
  chemically synthesized
gtgtgtcaggtgtgtgtgtg

SEQ ID NO: 7658 - DNA, 20 bp, Artificial Sequence
  chemically synthesized
tgtgtcaggtgtgtgtgtgt

SEQ ID NO: 7659 - DNA, 20 bp, Artificial Sequence
  chemically synthesized
tgtcaggtgtgtgtgtgtgg

SEQ ID NO: 7660 - DNA, 20 bp, Artificial Sequence
  chemically synthesized
gtcaggtgtgtgtgtgtggg

SEQ ID NO: 7661 - DNA, 20 bp, Artificial Sequence
  chemically synthesized
tcaggtgtgtgtgtgtggga

SEQ ID NO: 7662 - DNA, 20 bp, Artificial Sequence
  chemically synthesized
aggtgtgtgtgtgtgggagg

SEQ ID NO: 7663 - DNA, 20 bp, Artificial Sequence
  chemically synthesized
gggagtatgaatgtgtgcat

SEQ ID NO: 7664 - DNA, 20 bp, Artificial Sequence
  chemically synthesized
tagcatgcatatgcacatgt

SEQ ID NO: 7665 - DNA, 20 bp, Artificial Sequence
  chemically synthesized
gcatgcatatgcacatgtga

SEQ ID NO: 7666 - DNA, 20 bp, Artificial Sequence
  chemically synthesized
tgcatatgcacatgtgagag

SEQ ID NO: 7667 - DNA, 20 bp, Artificial Sequence
  chemically synthesized
gcatatgcacatgtgagagt

SEQ ID NO: 7668 - DNA, 20 bp, Artificial Sequence
  chemically synthesized
tgcacatgtgagagtgggta

SEQ ID NO: 7669 - DNA, 20 bp, Artificial Sequence
  chemically synthesized
acatgtgagagtgggtacag

SEQ ID NO: 7670 - DNA, 20 bp, Artificial Sequence
  chemically synthesized
atgtgagagtgggtacagca

SEQ ID NO: 7671 - DNA, 20 bp, Artificial Sequence
  chemically synthesized
agagtgggtacagcagagcg

SEQ ID NO: 7672 - DNA, 20 bp, Artificial Sequence
  chemically synthesized
gtacagcagagcgtggtcat

SEQ ID NO: 7673 - DNA, 20 bp, Artificial Sequence
  chemically synthesized
gtgtgcaaatgtgtgttttt

SEQ ID NO: 7674 - DNA, 20 bp, Artificial Sequence
  chemically synthesized
caaatgtgtgtttttgagtg

SEQ ID NO: 7675 - DNA, 20 bp, Artificial Sequence
  chemically synthesized
tgtgtgtttttgagtgaagt

SEQ ID NO: 7676 - DNA, 20 bp, Artificial Sequence
  chemically synthesized
gagtgaagtgagcaatgtgt

SEQ ID NO: 7677 - DNA, 20 bp, Artificial Sequence
  chemically synthesized
tgagcaatgtgtgagtgtgt

SEQ ID NO: 7678 - DNA, 20 bp, Artificial Sequence
  chemically synthesized
gtgagtgtgtgagtgtgtgt

SEQ ID NO: 7679 - DNA, 20 bp, Artificial Sequence
  chemically synthesized
gtgagtgtgtgtgagtttgt

SEQ ID NO: 7680 - DNA, 20 bp, Artificial Sequence
  chemically synthesized
tgagtgtgtgtgagtttgtg

SEQ ID NO: 7681 - DNA, 20 bp, Artificial Sequence
  chemically synthesized
gagtgtgtgtgagtttgtga

SEQ ID NO: 7682 - DNA, 20 bp, Artificial Sequence
  chemically synthesized
gggcatgtgaatgtgtgtgt

SEQ ID NO: 7683 - DNA, 20 bp, Artificial Sequence
  chemically synthesized
aatgtgtgtgtcagtgctgt

SEQ ID NO: 7684 - DNA, 20 bp, Artificial Sequence
  chemically synthesized
atgtgtgtgtcagtgctgtc

SEQ ID NO: 7685 - DNA, 20 bp, Artificial Sequence
  chemically synthesized
tgtgtgtgtcagtgctgtca

SEQ ID NO: 7686 - DNA, 20 bp, Artificial Sequence
  chemically synthesized
gtgtcagtgctgtcagggtg

SEQ ID NO: 7687 - DNA, 20 bp, Artificial Sequence
  chemically synthesized
cagtgctgtcagggtgcaga

SEQ ID NO: 7688 - DNA, 20 bp, Artificial Sequence
  chemically synthesized
tgtcagggtgcagatggatc

SEQ ID NO: 7689 - DNA, 20 bp, Artificial Sequence
  chemically synthesized
gtcagggtgcagatggatca

SEQ ID NO: 7690 - DNA, 20 bp, Artificial Sequence
  chemically synthesized
tcagggtgcagatggatcaa

SEQ ID NO: 7691 - DNA, 20 bp, Artificial Sequence
  chemically synthesized
cagggtgcagatggatcaag

SEQ ID NO: 7692 - DNA, 20 bp, Artificial Sequence
  chemically synthesized
ggtgcagatggatcaagggg

SEQ ID NO: 7693 - DNA, 20 bp, Artificial Sequence
  chemically synthesized
gtgcagatggatcaaggggc

SEQ ID NO: 7694 - DNA, 20 bp, Artificial Sequence
  chemically synthesized
gcagatggatcaaggggcag

SEQ ID NO: 7695 - DNA, 20 bp, Artificial Sequence
  chemically synthesized
agatggatcaaggggcagga

SEQ ID NO: 7696 - DNA, 20 bp, Artificial Sequence
  chemically synthesized
gatggatcaaggggcaggag

SEQ ID NO: 7697 - DNA, 20 bp, Artificial Sequence
  chemically synthesized
ggggcaggagaggtacctgt

SEQ ID NO: 7698 - DNA, 20 bp, Artificial Sequence
  chemically synthesized
aggtacctgtgagatgacct

SEQ ID NO: 7699 - DNA, 20 bp, Artificial Sequence
  chemically synthesized
ggtacctgtgagatgacctc

SEQ ID NO: 7700 - DNA, 20 bp, Artificial Sequence
  chemically synthesized
ctgtgagatgacctcgggct

SEQ ID NO: 7701 - DNA, 20 bp, Artificial Sequence
  chemically synthesized
tgtgagatgacctcgggctg

SEQ ID NO: 7702 - DNA, 20 bp, Artificial Sequence
  chemically synthesized
gtgagatgacctcgggctga

SEQ ID NO: 7703 - DNA, 20 bp, Artificial Sequence
  chemically synthesized
tgagatgacctcgggctgag

SEQ ID NO: 7704 - DNA, 20 bp, Artificial Sequence
  chemically synthesized
agatgacctcgggctgaggg

SEQ ID NO: 7705 - DNA, 20 bp, Artificial Sequence
  chemically synthesized
cgggctgaggggagcaaatt

SEQ ID NO: 7706 - DNA, 20 bp, Artificial Sequence
  chemically synthesized
tgaggggagcaaatttagtg

SEQ ID NO: 7707 - DNA, 20 bp, Artificial Sequence
  chemically synthesized
gagcaaatttagtgtggaac

SEQ ID NO: 7708 - DNA, 20 bp, Artificial Sequence
  chemically synthesized
agcaaatttagtgtggaacg

SEQ ID NO: 7709 - DNA, 20 bp, Artificial Sequence
  chemically synthesized
ttagtgtggaacgaggtttc

SEQ ID NO: 7710 - DNA, 20 bp, Artificial Sequence
  chemically synthesized
tagtgtggaacgaggtttct

SEQ ID NO: 7711 - DNA, 20 bp, Artificial Sequence
  chemically synthesized
agtgtggaacgaggtttcta

SEQ ID NO: 7712 - DNA, 20 bp, Artificial Sequence
  chemically synthesized
gtggaacgaggtttctaggg

SEQ ID NO: 7713 - DNA, 20 bp, Artificial Sequence
  chemically synthesized
aacgaggtttctagggaagc

SEQ ID NO: 7714 - DNA, 20 bp, Artificial Sequence
  chemically synthesized
acgaggtttctagggaagcg

SEQ ID NO: 7715 - DNA, 20 bp, Artificial Sequence
  chemically synthesized
cgaggtttctagggaagcga

SEQ ID NO: 7716 - DNA, 20 bp, Artificial Sequence
  chemically synthesized
tttctagggaagcgagggca

SEQ ID NO: 7717 - DNA, 20 bp, Artificial Sequence
  chemically synthesized
ttctagggaagcgagggcaa

SEQ ID NO: 7718 - DNA, 20 bp, Artificial Sequence
  chemically synthesized
tctagggaagcgagggcaaa

SEQ ID NO: 7719 - DNA, 20 bp, Artificial Sequence
  chemically synthesized
gaagcgagggcaaagggcgc

SEQ ID NO: 7720 - DNA, 20 bp, Artificial Sequence
  chemically synthesized
aagcgagggcaaagggcgct

SEQ ID NO: 7721 - DNA, 20 bp, Artificial Sequence
  chemically synthesized
agcgagggcaaagggcgctg

SEQ ID NO: 7722 - DNA, 20 bp, Artificial Sequence
  chemically synthesized
cgagggcaaagggcgctggg

SEQ ID NO: 7723 - DNA, 20 bp, Artificial Sequence
  chemically synthesized
gagggcaaagggcgctgggg

SEQ ID NO: 7724 - DNA, 20 bp, Artificial Sequence
  chemically synthesized
gggcaaagggcgctggggag

SEQ ID NO: 7725 - DNA, 20 bp, Artificial Sequence
  chemically synthesized
ggcaaagggcgctggggagg

SEQ ID NO: 7726 - DNA, 20 bp, Artificial Sequence
  chemically synthesized
gctggggaggaggccttgcg

SEQ ID NO: 7727 - DNA, 20 bp, Artificial Sequence
  chemically synthesized
ggggaggaggccttgcgtgg

SEQ ID NO: 7728 - DNA, 20 bp, Artificial Sequence
  chemically synthesized
gggaggaggccttgcgtggt

SEQ ID NO: 7729 - DNA, 20 bp, Artificial Sequence
  chemically synthesized
ggaggaggccttgcgtggtg

SEQ ID NO: 7730 - DNA, 20 bp, Artificial Sequence
  chemically synthesized
gaggaggccttgcgtggtgg

SEQ ID NO: 7731 - DNA, 20 bp, Artificial Sequence
  chemically synthesized
ggccttgcgtggtgggggat

SEQ ID NO: 7732 - DNA, 20 bp, Artificial Sequence
  chemically synthesized
gccttgcgtggtgggggatg

SEQ ID NO: 7733 - DNA, 20 bp, Artificial Sequence
  chemically synthesized
gtggtgggggatgaggacaa

SEQ ID NO: 7734 - DNA, 20 bp, Artificial Sequence
  chemically synthesized
tggtgggggatgaggacaac

SEQ ID NO: 7735 - DNA, 20 bp, Artificial Sequence
  chemically synthesized
tgggggatgaggacaacagg

SEQ ID NO: 7736 - DNA, 20 bp, Artificial Sequence
  chemically synthesized
gggggatgaggacaacaggt

SEQ ID NO: 7737 - DNA, 20 bp, Artificial Sequence
  chemically synthesized
tgaggacaacaggtgggacc

SEQ ID NO: 7738 - DNA, 20 bp, Artificial Sequence
  chemically synthesized
aggacaacaggtgggacctg

SEQ ID NO: 7739 - DNA, 20 bp, Artificial Sequence
  chemically synthesized
ggacaacaggtgggacctgg

SEQ ID NO: 7740 - DNA, 20 bp, Artificial Sequence
  chemically synthesized
gacaacaggtgggacctgga

SEQ ID NO: 7741 - DNA, 20 bp, Artificial Sequence
  chemically synthesized
gggacctggagggttgtgct

SEQ ID NO: 7742 - DNA, 20 bp, Artificial Sequence
  chemically synthesized
gacctggagggttgtgcttg

SEQ ID NO: 7743 - DNA, 20 bp, Artificial Sequence
  chemically synthesized
cctggagggttgtgcttgga

SEQ ID NO: 7744 - DNA, 20 bp, Artificial Sequence
  chemically synthesized
ggagggttgtgcttggagag

SEQ ID NO: 7745 - DNA, 20 bp, Artificial Sequence
  chemically synthesized
gagggttgtgcttggagagt

SEQ ID NO: 7746 - DNA, 20 bp, Artificial Sequence
  chemically synthesized
tgtgcttggagagtgggcta

SEQ ID NO: 7747 - DNA, 20 bp, Artificial Sequence
  chemically synthesized
gcttggagagtgggctatgg

SEQ ID NO: 7748 - DNA, 20 bp, Artificial Sequence
  chemically synthesized
tgggctatggtggaatgacc

SEQ ID NO: 7749 - DNA, 20 bp, Artificial Sequence
  chemically synthesized
tggtggaatgacccagattt

SEQ ID NO: 7750 - DNA, 20 bp, Artificial Sequence
  chemically synthesized
ggtggaatgacccagattta

SEQ ID NO: 7751 - DNA, 20 bp, Artificial Sequence
  chemically synthesized
cccagatttaaggatctcaa

SEQ ID NO: 7752 - DNA, 20 bp, Artificial Sequence
  chemically synthesized
taaggatctcaatggaattt

SEQ ID NO: 7753 - DNA, 20 bp, Artificial Sequence
  chemically synthesized
ggatctcaatggaattttgg

SEQ ID NO: 7754 - DNA, 20 bp, Artificial Sequence
  chemically synthesized
gatctcaatggaattttggc

SEQ ID NO: 7755 - DNA, 20 bp, Artificial Sequence
  chemically synthesized
atctcaatggaattttggca

SEQ ID NO: 7756 - DNA, 20 bp, Artificial Sequence
  chemically synthesized
tctcaatggaattttggcag

SEQ ID NO: 7757 - DNA, 20 bp, Artificial Sequence
  chemically synthesized
tcaatggaattttggcaggg

SEQ ID NO: 7758 - DNA, 20 bp, Artificial Sequence
  chemically synthesized
caatggaattttggcagggg

SEQ ID NO: 7759 - DNA, 20 bp, Artificial Sequence
  chemically synthesized
aatggaattttggcagggga

SEQ ID NO: 7760 - DNA, 20 bp, Artificial Sequence
  chemically synthesized
tggcaggggagggactgttc

SEQ ID NO: 7761 - DNA, 20 bp, Artificial Sequence
  chemically synthesized
ggggagggactgttccagta

SEQ ID NO: 7762 - DNA, 20 bp, Artificial Sequence
  chemically synthesized
gactgttccagtatggattt

SEQ ID NO: 7763 - DNA, 20 bp, Artificial Sequence
  chemically synthesized
actgttccagtatggatttt

SEQ ID NO: 7764 - DNA, 20 bp, Artificial Sequence
  chemically synthesized
gttccagtatggattttagg

SEQ ID NO: 7765 - DNA, 20 bp, Artificial Sequence
  chemically synthesized
tatggattttaggaagaaca

SEQ ID NO: 7766 - DNA, 20 bp, Artificial Sequence
  chemically synthesized
atggattttaggaagaacac

SEQ ID NO: 7767 - DNA, 20 bp, Artificial Sequence
  chemically synthesized
tggattttaggaagaacaca

SEQ ID NO: 7768 - DNA, 20 bp, Artificial Sequence
  chemically synthesized
tttaggaagaacacagggcc

SEQ ID NO: 7769 - DNA, 20 bp, Artificial Sequence
  chemically synthesized
agaacacagggcccagcttc

SEQ ID NO: 7770 - DNA, 20 bp, Artificial Sequence
  chemically synthesized
aacacagggcccagcttctg

SEQ ID NO: 7771 - DNA, 20 bp, Artificial Sequence
  chemically synthesized
gcttctggagtctccaatct

SEQ ID NO: 7772 - DNA, 20 bp, Artificial Sequence
  chemically synthesized
cttctggagtctccaatctg

SEQ ID NO: 7773 - DNA, 20 bp, Artificial Sequence
  chemically synthesized
ttctggagtctccaatctga

SEQ ID NO: 7774 - DNA, 20 bp, Artificial Sequence
  chemically synthesized
tctggagtctccaatctgag

SEQ ID NO: 7775 - DNA, 20 bp, Artificial Sequence
  chemically synthesized
gagtctccaatctgagggga

SEQ ID NO: 7776 - DNA, 20 bp, Artificial Sequence
  chemically synthesized
agtctccaatctgaggggac

SEQ ID NO: 7777 - DNA, 20 bp, Artificial Sequence
  chemically synthesized
tctccaatctgaggggacag

SEQ ID NO: 7778 - DNA, 20 bp, Artificial Sequence
  chemically synthesized
atctgaggggacaggagcct

SEQ ID NO: 7779 - DNA, 20 bp, Artificial Sequence
  chemically synthesized
tgaggggacaggagccttag

SEQ ID NO: 7780 - DNA, 20 bp, Artificial Sequence
  chemically synthesized
aggggacaggagccttagaa

SEQ ID NO: 7781 - DNA, 20 bp, Artificial Sequence
  chemically synthesized
acaggagccttagaagagct

SEQ ID NO: 7782 - DNA, 20 bp, Artificial Sequence
  chemically synthesized
gccttagaagagctgagact

SEQ ID NO: 7783 - DNA, 20 bp, Artificial Sequence
  chemically synthesized
ccttagaagagctgagacta

SEQ ID NO: 7784 - DNA, 20 bp, Artificial Sequence
  chemically synthesized
aagagctgagactaaggccc

SEQ ID NO: 7785 - DNA, 20 bp, Artificial Sequence
  chemically synthesized
agagctgagactaaggcccg

SEQ ID NO: 7786 - DNA, 20 bp, Artificial Sequence
  chemically synthesized
gactaaggcccgaggtgatc

SEQ ID NO: 7787 - DNA, 20 bp, Artificial Sequence
  chemically synthesized
ctaaggcccgaggtgatctg

SEQ ID NO: 7788 - DNA, 20 bp, Artificial Sequence
  chemically synthesized
taaggcccgaggtgatctgg

SEQ ID NO: 7789 - DNA, 20 bp, Artificial Sequence
  chemically synthesized
gatctggaggcctctgccac

SEQ ID NO: 7790 - DNA, 20 bp, Artificial Sequence
  chemically synthesized
tggaggcctctgccactggc

SEQ ID NO: 7791 - DNA, 20 bp, Artificial Sequence
  chemically synthesized
ggcctctgccactggctgga

SEQ ID NO: 7792 - DNA, 20 bp, Artificial Sequence
  chemically synthesized
gcctctgccactggctggat

SEQ ID NO: 7793 - DNA, 20 bp, Artificial Sequence
  chemically synthesized
ctctgccactggctggatgg

SEQ ID NO: 7794 - DNA, 20 bp, Artificial Sequence
  chemically synthesized
tctgccactggctggatggg

SEQ ID NO: 7795 - DNA, 20 bp, Artificial Sequence
  chemically synthesized
gatgggaggaaaaccattca

SEQ ID NO: 7796 - DNA, 20 bp, Artificial Sequence
  chemically synthesized
cattcacagatcccccttct

SEQ ID NO: 7797 - DNA, 20 bp, Artificial Sequence
  chemically synthesized
attcacagatcccccttctc

SEQ ID NO: 7798 - DNA, 20 bp, Artificial Sequence
  chemically synthesized
cccttctcaggatgtgtgcc

SEQ ID NO: 7799 - DNA, 20 bp, Artificial Sequence
  chemically synthesized
ccttctcaggatgtgtgcct

SEQ ID NO: 7800 - DNA, 20 bp, Artificial Sequence
  chemically synthesized
tctcaggatgtgtgcctagg

SEQ ID NO: 7801 - DNA, 20 bp, Artificial Sequence
  chemically synthesized
ctcaggatgtgtgcctaggc

SEQ ID NO: 7802 - DNA, 20 bp, Artificial Sequence
  chemically synthesized
tcaggatgtgtgcctaggca

SEQ ID NO: 7803 - DNA, 20 bp, Artificial Sequence
  chemically synthesized
gatgtgtgcctaggcagggc

SEQ ID NO: 7804 - DNA, 20 bp, Artificial Sequence
  chemically synthesized
atgtgtgcctaggcagggcc

SEQ ID NO: 7805 - DNA, 20 bp, Artificial Sequence
  chemically synthesized
cccgccccctgtgcgtctcc

SEQ ID NO: 7806 - DNA, 20 bp, Artificial Sequence
  chemically synthesized
ctgtgcgtctcccagtcccc

SEQ ID NO: 7807 - DNA, 20 bp, Artificial Sequence
  chemically synthesized
gtctcccagtcccccagctc

SEQ ID NO: 7808 - DNA, 20 bp, Artificial Sequence
  chemically synthesized
tctcccagtcccccagctcc

SEQ ID NO: 7809 - DNA, 20 bp, Artificial Sequence
  chemically synthesized
agtcccccagctccaggatc

SEQ ID NO: 7810 - DNA, 20 bp, Artificial Sequence
  chemically synthesized
gtcccccagctccaggatcc

SEQ ID NO: 7811 - DNA, 20 bp, Artificial Sequence
  chemically synthesized
caggatccgggctttgcaca

SEQ ID NO: 7812 - DNA, 20 bp, Artificial Sequence
  chemically synthesized
acagctgatgtgaatatcct

SEQ ID NO: 7813 - DNA, 20 bp, Artificial Sequence
  chemically synthesized
aatatcctgagtcgtgtgca

SEQ ID NO: 7814 - DNA, 20 bp, Artificial Sequence
  chemically synthesized
atatcctgagtcgtgtgcat

SEQ ID NO: 7815 - DNA, 20 bp, Artificial Sequence
  chemically synthesized
gtgcatgggtgtgtgtgcac

SEQ ID NO: 7816 - DNA, 20 bp, Artificial Sequence
  chemically synthesized
tgggtgtgtgtgcaccagat

SEQ ID NO: 7817 - DNA, 20 bp, Artificial Sequence
  chemically synthesized
tgcgtgtgtatatttataca

SEQ ID NO: 7818 - DNA, 20 bp, Artificial Sequence
  chemically synthesized
tatatttatacatggtaata

SEQ ID NO: 7819 - DNA, 20 bp, Artificial Sequence
  chemically synthesized
atatttatacatggtaatat

SEQ ID NO: 7820 - DNA, 20 bp, Artificial Sequence
  chemically synthesized
atacatggtaatatgggtgc

SEQ ID NO: 7821 - DNA, 20 bp, Artificial Sequence
  chemically synthesized
taatatgggtgcgagtgtgt

SEQ ID NO: 7822 - DNA, 20 bp, Artificial Sequence
  chemically synthesized
atatgggtgcgagtgtgtaa

SEQ ID NO: 7823 - DNA, 20 bp, Artificial Sequence
  chemically synthesized
tgtgtgtaatgctcaaatgc

SEQ ID NO: 7824 - DNA, 20 bp, Artificial Sequence
  chemically synthesized
gtgtgtaatgctcaaatgct

SEQ ID NO: 7825 - DNA, 20 bp, Artificial Sequence
  chemically synthesized
tgtgtaatgctcaaatgctg

SEQ ID NO: 7826 - DNA, 20 bp, Artificial Sequence
  chemically synthesized
atgctcaaatgctggggtca

SEQ ID NO: 7827 - DNA, 20 bp, Artificial Sequence
  chemically synthesized
cctatgatgaccccccccca

SEQ ID NO: 7828 - DNA, 20 bp, Artificial Sequence
  chemically synthesized
ccccaaccaatccccccgcc

SEQ ID NO: 7829 - DNA, 20 bp, Artificial Sequence
  chemically synthesized
cccaaccaatccccccgccc

SEQ ID NO: 7830 - DNA, 20 bp, Artificial Sequence
  chemically synthesized
ccgcccaggttatgcctcct

SEQ ID NO: 7831 - DNA, 20 bp, Artificial Sequence
  chemically synthesized
cgcccaggttatgcctcctc

SEQ ID NO: 7832 - DNA, 20 bp, Artificial Sequence
  chemically synthesized
ggttatgcctcctcaggctt

SEQ ID NO: 7833 - DNA, 20 bp, Artificial Sequence
  chemically synthesized
ggtgccctgtctttaccctc

SEQ ID NO: 7834 - DNA, 20 bp, Artificial Sequence
  chemically synthesized
accctccggctccccacacc

SEQ ID NO: 7835 - DNA, 20 bp, Artificial Sequence
  chemically synthesized
ccctccggctccccacaccc

SEQ ID NO: 7836 - DNA, 20 bp, Artificial Sequence
  chemically synthesized
gctccccacacccaggctgc

SEQ ID NO: 7837 - DNA, 20 bp, Artificial Sequence
  chemically synthesized
ctcctgatgcccctctccca

SEQ ID NO: 7838 - DNA, 20 bp, Artificial Sequence
  chemically synthesized
tcctgatgcccctctcccac

SEQ ID NO: 7839 - DNA, 20 bp, Artificial Sequence
  chemically synthesized
cctgatgcccctctcccaca

SEQ ID NO: 7840 - DNA, 20 bp, Artificial Sequence
  chemically synthesized
ccacagggccacctcctgcc

SEQ ID NO: 7841 - DNA, 20 bp, Artificial Sequence
  chemically synthesized
gccacctcctgcccagcccc

SEQ ID NO: 7842 - DNA, 20 bp, Artificial Sequence
  chemically synthesized
ctcctgcccagcccctggca

SEQ ID NO: 7843 - DNA, 20 bp, Artificial Sequence
  chemically synthesized
ggcacagcgtctctgctcca

SEQ ID NO: 7844 - DNA, 20 bp, Artificial Sequence
  chemically synthesized
ctctgctccatggtctgctt

SEQ ID NO: 7845 - DNA, 20 bp, Artificial Sequence
  chemically synthesized
tgcttcagtctgcttgccct

SEQ ID NO: 7846 - DNA, 20 bp, Artificial Sequence
  chemically synthesized
gagcttcaacatcctgctgc

SEQ ID NO: 7847 - DNA, 20 bp, Artificial Sequence
  chemically synthesized
cttcaacatcctgctgctgg

SEQ ID NO: 7848 - DNA, 20 bp, Artificial Sequence
  chemically synthesized
ctggtggtcatctgtgtgac

SEQ ID NO: 7849 - DNA, 20 bp, Artificial Sequence
  chemically synthesized
tggtggtcatctgtgtgact

SEQ ID NO: 7850 - DNA, 20 bp, Artificial Sequence
  chemically synthesized
atctgtgtgactgggtccca

SEQ ID NO: 7851 - DNA, 20 bp, Artificial Sequence
  chemically synthesized
gtgtgactgggtcccaaagt

SEQ ID NO: 7852 - DNA, 20 bp, Artificial Sequence
  chemically synthesized
tgtgactgggtcccaaagtg

SEQ ID NO: 7853 - DNA, 20 bp, Artificial Sequence
  chemically synthesized
gtgactgggtcccaaagtga

SEQ ID NO: 7854 - DNA, 20 bp, Artificial Sequence
  chemically synthesized
gggtcccaaagtgagggtca

SEQ ID NO: 7855 - DNA, 20 bp, Artificial Sequence
  chemically synthesized
ggtcccaaagtgagggtcac

SEQ ID NO: 7856 - DNA, 20 bp, Artificial Sequence
  chemically synthesized
gtcccaaagtgagggtcacg

SEQ ID NO: 7857 - DNA, 20 bp, Artificial Sequence
  chemically synthesized
tcccaaagtgagggtcacgg

SEQ ID NO: 7858 - DNA, 20 bp, Artificial Sequence
  chemically synthesized
aaagtgagggtcacgggggc

SEQ ID NO: 7859 - DNA, 20 bp, Artificial Sequence
  chemically synthesized
gtgagggtcacgggggccag

SEQ ID NO: 7860 - DNA, 20 bp, Artificial Sequence
  chemically synthesized
tgagggtcacgggggccagc

SEQ ID NO: 7861 - DNA, 20 bp, Artificial Sequence
  chemically synthesized
gagggtcacgggggccagca

SEQ ID NO: 7862 - DNA, 20 bp, Artificial Sequence
  chemically synthesized
gtcacgggggccagcaggga

SEQ ID NO: 7863 - DNA, 20 bp, Artificial Sequence
  chemically synthesized
tcacgggggccagcagggat

SEQ ID NO: 7864 - DNA, 20 bp, Artificial Sequence
  chemically synthesized
gggggccagcagggatgggc

SEQ ID NO: 7865 - DNA, 20 bp, Artificial Sequence
  chemically synthesized
ggggccagcagggatgggca

SEQ ID NO: 7866 - DNA, 20 bp, Artificial Sequence
  chemically synthesized
gggccagcagggatgggcaa

SEQ ID NO: 7867 - DNA, 20 bp, Artificial Sequence
  chemically synthesized
ggccagcagggatgggcaag

SEQ ID NO: 7868 - DNA, 20 bp, Artificial Sequence
  chemically synthesized
cagcagggatgggcaagggg

SEQ ID NO: 7869 - DNA, 20 bp, Artificial Sequence
  chemically synthesized
agcagggatgggcaaggggt

SEQ ID NO: 7870 - DNA, 20 bp, Artificial Sequence
  chemically synthesized
gcagggatgggcaaggggta

SEQ ID NO: 7871 - DNA, 20 bp, Artificial Sequence
  chemically synthesized
ggatgggcaaggggtaggga

SEQ ID NO: 7872 - DNA, 20 bp, Artificial Sequence
  chemically synthesized
atgggcaaggggtagggaaa

SEQ ID NO: 7873 - DNA, 20 bp, Artificial Sequence
  chemically synthesized
aaggggtagggaaagagaca

SEQ ID NO: 7874 - DNA, 20 bp, Artificial Sequence
  chemically synthesized
aggggtagggaaagagacat

SEQ ID NO: 7875 - DNA, 20 bp, Artificial Sequence
  chemically synthesized
ggtagggaaagagacatggg

SEQ ID NO: 7876 - DNA, 20 bp, Artificial Sequence
  chemically synthesized
agggaaagagacatgggcag

SEQ ID NO: 7877 - DNA, 20 bp, Artificial Sequence
  chemically synthesized
acacagatgaccaccagcag

SEQ ID NO: 7878 - DNA, 20 bp, Artificial Sequence
  chemically synthesized
gggcatcaggagccggcagc

SEQ ID NO: 7879 - DNA, 20 bp, Artificial Sequence
  chemically synthesized
agcctgggtgtggggagccg

SEQ ID NO: 7880 - DNA, 20 bp, Artificial Sequence
  chemically synthesized
aggaggcataacctgggcgg

SEQ ID NO: 7881 - DNA, 20 bp, Artificial Sequence
  chemically synthesized
gattggttggggccatgggg

SEQ ID NO: 7882 - DNA, 20 bp, Artificial Sequence
  chemically synthesized
acacacccatgcacacgact

SEQ ID NO: 7883 - DNA, 20 bp, Artificial Sequence
  chemically synthesized
acatcagctgtgtgcaaagc

SEQ ID NO: 7884 - DNA, 20 bp, Artificial Sequence
  chemically synthesized
taggcacacatcctgagaag

SEQ ID NO: 7885 - DNA, 20 bp, Artificial Sequence
  chemically synthesized
catcctgagaagggggatct

SEQ ID NO: 7886 - DNA, 20 bp, Artificial Sequence
  chemically synthesized
ttccattgagatccttaaat

SEQ ID NO: 7887 - DNA, 20 bp, Artificial Sequence
  chemically synthesized
gggaggctcagtcaggggcc

SEQ ID NO: 7888 - DNA, 20 bp, Artificial Sequence
  chemically synthesized
ggtcacttcctgccactgtc

SEQ ID NO: 7889 - DNA, 20 bp, Artificial Sequence
  chemically synthesized
accaagctggccctccatgg

SEQ ID NO: 7890 - DNA, 20 bp, Artificial Sequence
  chemically synthesized
tcttcagcaccctccactca

SEQ ID NO: 7891 - DNA, 20 bp, Artificial Sequence
  chemically synthesized
cgacttatcaactcccaatg

SEQ ID NO: 7892 - DNA, 20 bp, Artificial Sequence
  chemically synthesized
ccctgaaaccagactgccca

SEQ ID NO: 7893 - DNA, 20 bp, Artificial Sequence
  chemically synthesized
tcacagtcgtagctacccga

SEQ ID NO: 7894 - DNA, 20 bp, Artificial Sequence
  chemically synthesized
tagctacccgattggattgc

SEQ ID NO: 7895 - DNA, 20 bp, Artificial Sequence
  chemically synthesized
tggattgctcggataattag

SEQ ID NO: 7896 - DNA, 20 bp, Artificial Sequence
  chemically synthesized
aaaagtttgaacataaaaga

SEQ ID NO: 7897 - DNA, 20 bp, Artificial Sequence
  chemically synthesized
cagggtctgcccaagatggg

SEQ ID NO: 7898 - DNA, 20 bp, Artificial Sequence
  chemically synthesized
actctggacatcaggcaagg

SEQ ID NO: 7899 - DNA, 20 bp, Artificial Sequence
  chemically synthesized
aggaggagtaaagatccctg

SEQ ID NO: 7900 - DNA, 20 bp, Artificial Sequence
  chemically synthesized
accccagcttactgtttgga

SEQ ID NO: 7901 - DNA, 20 bp, Artificial Sequence
  chemically synthesized
cacgttgaggagatggagct

SEQ ID NO: 7902 - DNA, 20 bp, Artificial Sequence
  chemically synthesized
ccgaggagaccaaaacaatt

SEQ ID NO: 7903 - DNA, 20 bp, Artificial Sequence
  chemically synthesized
caaagctcaagaacatttag

SEQ ID NO: 7904 - DNA, 20 bp, Artificial Sequence
  chemically synthesized
aaaagagatccagaactgac

SEQ ID NO: 7905 - DNA, 20 bp, Artificial Sequence
  chemically synthesized
tccagaactgacacggatgc

SEQ ID NO: 7906 - DNA, 20 bp, Artificial Sequence
  chemically synthesized
ggatgctagaattagcaggc

SEQ ID NO: 7907 - DNA, 20 bp, Artificial Sequence
  chemically synthesized
attatgttcaaaaaattaag

SEQ ID NO: 7908 - DNA, 20 bp, Artificial Sequence
  chemically synthesized
aaaaattaagtagaattgtg

SEQ ID NO: 7909 - DNA, 20 bp, Artificial Sequence
  chemically synthesized
tagaattgtggaggatattt

SEQ ID NO: 7910 - DNA, 20 bp, Artificial Sequence
  chemically synthesized
caggcgccgtggctcacgcc

SEQ ID NO: 7911 - DNA, 20 bp, Artificial Sequence
  chemically synthesized
tactcgggaggctgaggcag

SEQ ID NO: 7912 - DNA, 20 bp, Artificial Sequence
  chemically synthesized
gaaagaaaagaaaaaacaca

SEQ ID NO: 7913 - DNA, 20 bp, Artificial Sequence
  chemically synthesized
aaaatttagggccaggcact

SEQ ID NO: 7914 - DNA, 20 bp, Artificial Sequence
  chemically synthesized
ctttgggaggtcgacacggg

SEQ ID NO: 7915 - DNA, 20 bp, Artificial Sequence
  chemically synthesized
tacctgggaggctgaagtgg

SEQ ID NO: 7916 - DNA, 20 bp, Artificial Sequence
  chemically synthesized
cccaggaggtggaggccaca

SEQ ID NO: 7917 - DNA, 20 bp, Artificial Sequence
  chemically synthesized
ctgcattccagcctgggcaa

SEQ ID NO: 7918 - DNA, 20 bp, Artificial Sequence
  chemically synthesized
aatgaaacactgggagaaaa

SEQ ID NO: 7919 - DNA, 20 bp, Artificial Sequence
  chemically synthesized
aaagaattaaaaaatggaaa

SEQ ID NO: 7920 - DNA, 20 bp, Artificial Sequence
  chemically synthesized
aattaaaaaatggaaagaga

SEQ ID NO: 7921 - DNA, 20 bp, Artificial Sequence
  chemically synthesized
tgaaatctttaaaagaaaaa

SEQ ID NO: 7922 - DNA, 20 bp, Artificial Sequence
  chemically synthesized
agcagcatcccgtattctct

SEQ ID NO: 7923 - DNA, 20 bp, Artificial Sequence
  chemically synthesized
ctctgagtgttcactatgta

SEQ ID NO: 7924 - DNA, 20 bp, Artificial Sequence
  chemically synthesized
accgggtgccgtgtgggcac

SEQ ID NO: 7925 - DNA, 20 bp, Artificial Sequence
  chemically synthesized
tgggcactggagttgcagag

SEQ ID NO: 7926 - DNA, 20 bp, Artificial Sequence
  chemically synthesized
aggagatgctactggtgttc

SEQ ID NO: 7927 - DNA, 20 bp, Artificial Sequence
  chemically synthesized
tccctcggttggccagcctc

SEQ ID NO: 7928 - DNA, 20 bp, Artificial Sequence
  chemically synthesized
gttggccagcctcaggaatg

SEQ ID NO: 7929 - DNA, 20 bp, Artificial Sequence
  chemically synthesized
tacttgggaggctgaggtgg

SEQ ID NO: 7930 - DNA, 20 bp, Artificial Sequence
  chemically synthesized
tgggaggatggcttgagccc

SEQ ID NO: 7931 - DNA, 20 bp, Artificial Sequence
  chemically synthesized
tcagtcaagatttattacag

SEQ ID NO: 7932 - DNA, 20 bp, Artificial Sequence
  chemically synthesized
tattacagaaggatccaggg

SEQ ID NO: 7933 - DNA, 20 bp, Artificial Sequence
  chemically synthesized
tcttgggagatgagaggagc

SEQ ID NO: 7934 - DNA, 20 bp, Artificial Sequence
  chemically synthesized
tgagaggagcagggatcttc

SEQ ID NO: 7935 - DNA, 20 bp, Artificial Sequence
  chemically synthesized
cattcactcacacacacaca

SEQ ID NO: 7936 - DNA, 20 bp, Artificial Sequence
  chemically synthesized
acacacacacagagtcccag

SEQ ID NO: 7937 - DNA, 20 bp, Artificial Sequence
  chemically synthesized
catacgaggcacatgtgttc

SEQ ID NO: 7938 - DNA, 20 bp, Artificial Sequence
  chemically synthesized
cctctggcacatgcctttcc

SEQ ID NO: 7939 - DNA, 20 bp, Artificial Sequence
  chemically synthesized
acatgcctttcctggggtcc

SEQ ID NO: 7940 - DNA, 20 bp, Artificial Sequence
  chemically synthesized
ggtgaggtgagggaacaagc

SEQ ID NO: 7941 - DNA, 20 bp, Artificial Sequence
  chemically synthesized
ccctcctcagtccctgttca

SEQ ID NO: 7942 - DNA, 20 bp, Artificial Sequence
  chemically synthesized
cctcagtccctgttcacaga

SEQ ID NO: 7943 - DNA, 20 bp, Artificial Sequence
  chemically synthesized
tgcacacttgcctttcaaaa

SEQ ID NO: 7944 - DNA, 20 bp, Artificial Sequence
  chemically synthesized
caaaaatggatttcctctcc

SEQ ID NO: 7945 - DNA, 20 bp, Artificial Sequence
  chemically synthesized
cctctcctgggattcagcct

SEQ ID NO: 7946 - DNA, 20 bp, Artificial Sequence
  chemically synthesized
tggcccctcaccttgatgga

SEQ ID NO: 7947 - DNA, 20 bp, Artificial Sequence
  chemically synthesized
ttttcctccgagctcagctg

SEQ ID NO: 7948 - DNA, 20 bp, Artificial Sequence
  chemically synthesized
attcacgtggaggttgatgg

SEQ ID NO: 7949 - DNA, 20 bp, Artificial Sequence
  chemically synthesized
gttgatggtgggatggaacg

SEQ ID NO: 7950 - DNA, 20 bp, Artificial Sequence
  chemically synthesized
gggatggaacgcagggtcgg

SEQ ID NO: 7951 - DNA, 20 bp, Artificial Sequence
  chemically synthesized
aacgcagggtcggaggggtt

SEQ ID NO: 7952 - DNA, 20 bp, Artificial Sequence
  chemically synthesized
gaggggttcggggtggtggc

SEQ ID NO: 7953 - DNA, 20 bp, Artificial Sequence
  chemically synthesized
gttcggggtggtggcctggg

SEQ ID NO: 7954 - DNA, 20 bp, Artificial Sequence
  chemically synthesized
atcccaccatcaacctccac

SEQ ID NO: 7955 - DNA, 20 bp, Artificial Sequence
  chemically synthesized
aggggccaggcactcgcagg

SEQ ID NO: 7956 - DNA, 20 bp, Artificial Sequence
  chemically synthesized
tgtgcacgtatgtgcatatg

SEQ ID NO: 7957 - DNA, 20 bp, Artificial Sequence
  chemically synthesized
ctgggactctgtgtgtgtgt

SEQ ID NO: 7958 - DNA, 20 bp, Artificial Sequence
  chemically synthesized
gactctgtgtgtgtgtgtga

SEQ ID NO: 7959 - DNA, 20 bp, Artificial Sequence
  chemically synthesized
tgtgtatgtcgtgtatgtga

SEQ ID NO: 7960 - DNA, 20 bp, Artificial Sequence
  chemically synthesized
tgagagggtatgttgtgtgt

SEQ ID NO: 7961 - DNA, 20 bp, Artificial Sequence
  chemically synthesized
gtgttgtgtgtgtatgttgt

SEQ ID NO: 7962 - DNA, 20 bp, Artificial Sequence
  chemically synthesized
atgttgtgtgtatcttgtgt

SEQ ID NO: 7963 - DNA, 20 bp, Artificial Sequence
  chemically synthesized
tgtgcatgtgtgtatgttgt

SEQ ID NO: 7964 - DNA, 20 bp, Artificial Sequence
  chemically synthesized
tgcgagtgtatgttgtgtat

SEQ ID NO: 7965 - DNA, 20 bp, Artificial Sequence
  chemically synthesized
tgtgtgtatgtatgttgtgt

SEQ ID NO: 7966 - DNA, 20 bp, Artificial Sequence
  chemically synthesized
gtgttgtgtgtgtgtattgt

SEQ ID NO: 7967 - DNA, 20 bp, Artificial Sequence
  chemically synthesized
tatgtatgtttgtgtgttgt

SEQ ID NO: 7968 - DNA, 20 bp, Artificial Sequence
  chemically synthesized
tgtgcgtgtgtgtatgttgt

SEQ ID NO: 7969 - DNA, 20 bp, Artificial Sequence
  chemically synthesized
gtgtgttgtgtgtgtatgtt

SEQ ID NO: 7970 - DNA, 20 bp, Artificial Sequence
  chemically synthesized
gtgttatgtatgttgtgtgt

SEQ ID NO: 7971 - DNA, 20 bp, Artificial Sequence
  chemically synthesized
tgtgtgtgtgagtgtgttgc

SEQ ID NO: 7972 - DNA, 20 bp, Artificial Sequence
  chemically synthesized
tgtgtgtgtgtgtgtagagg

SEQ ID NO: 7973 - DNA, 20 bp, Artificial Sequence
  chemically synthesized
tgtgtgtgtgtagaggtggg

SEQ ID NO: 7974 - DNA, 20 bp, Artificial Sequence
  chemically synthesized
tgtgtagaggtggggtgagt

SEQ ID NO: 7975 - DNA, 20 bp, Artificial Sequence
  chemically synthesized
tagaggtggggtgagttggg

SEQ ID NO: 7976 - DNA, 20 bp, Artificial Sequence
  chemically synthesized
tcatctcccaagacccttcc

SEQ ID NO: 7977 - DNA, 20 bp, Artificial Sequence
  chemically synthesized
gacattttttttttagagac

SEQ ID NO: 7978 - DNA, 20 bp, Artificial Sequence
  chemically synthesized
tagagacaggagtgtagtgg

SEQ ID NO: 7979 - DNA, 20 bp, Artificial Sequence
  chemically synthesized
aaaaaaattttttagagaaa

SEQ ID NO: 7980 - DNA, 20 bp, Artificial Sequence
  chemically synthesized
taggcagaagggcaagagcc

SEQ ID NO: 7981 - DNA, 20 bp, Artificial Sequence
  chemically synthesized
agggcaagagccaggaatgg

SEQ ID NO: 7982 - DNA, 20 bp, Artificial Sequence
  chemically synthesized
aatggaggagtgtcaggtgt

SEQ ID NO: 7983 - DNA, 20 bp, Artificial Sequence
  chemically synthesized
tgtgggtgctggtggtggag

SEQ ID NO: 7984 - DNA, 20 bp, Artificial Sequence
  chemically synthesized
aggggcttggagcttaggaa

SEQ ID NO: 7985 - DNA, 20 bp, Artificial Sequence
  chemically synthesized
aggggattggttagctgggc

SEQ ID NO: 7986 - DNA, 20 bp, Artificial Sequence
  chemically synthesized
agggcagggcaggggacagg

SEQ ID NO: 7987 - DNA, 20 bp, Artificial Sequence
  chemically synthesized
gtacatagtgaacactcaga

SEQ ID NO: 7988 - DNA, 20 bp, Artificial Sequence
  chemically synthesized
gtgaacactcagagagaata

SEQ ID NO: 7989 - DNA, 20 bp, Artificial Sequence
  chemically synthesized
agagagaatacgggatgctg

SEQ ID NO: 7990 - DNA, 20 bp, Artificial Sequence
  chemically synthesized
gggatgctgctgaatcttct

SEQ ID NO: 7991 - DNA, 20 bp, Artificial Sequence
  chemically synthesized
gctgaatcttctgagggtga

SEQ ID NO: 7992 - DNA, 20 bp, Artificial Sequence
  chemically synthesized
cttctgagggtgacagaatt

SEQ ID NO: 7993 - DNA, 20 bp, Artificial Sequence
  chemically synthesized
caggaggcttggagagaggc

SEQ ID NO: 7994 - DNA, 20 bp, Artificial Sequence
  chemically synthesized
aggatttctgaaattaatgg

SEQ ID NO: 7995 - DNA, 20 bp, Artificial Sequence
  chemically synthesized
taatgggagagtgagctcac

SEQ ID NO: 7996 - DNA, 20 bp, Artificial Sequence
  chemically synthesized
accagtgagggaccgtctga

SEQ ID NO: 7997 - DNA, 20 bp, Artificial Sequence
  chemically synthesized
ccgcatttccctccagcagc

SEQ ID NO: 7998 - DNA, 20 bp, Artificial Sequence
  chemically synthesized
atttcaattatgcatgtatt

SEQ ID NO: 7999 - DNA, 20 bp, Artificial Sequence
  chemically synthesized
tctcccagtgtttcatttta

SEQ ID NO: 8000 - DNA, 20 bp, Artificial Sequence
  chemically synthesized
tctcactctgttgcccaggc

SEQ ID NO: 8001 - DNA, 20 bp, Artificial Sequence
  chemically synthesized
gagacggttttgccatgtag

SEQ ID NO: 8002 - DNA, 20 bp, Artificial Sequence
  chemically synthesized
gtgtcgacctcccaaagtgc

SEQ ID NO: 8003 - DNA, 20 bp, Artificial Sequence
  chemically synthesized
cttttttttttttttggagg

SEQ ID NO: 8004 - DNA, 20 bp, Artificial Sequence
  chemically synthesized
tctcgctctgttgcccaggc

SEQ ID NO: 8005 - DNA, 20 bp, Artificial Sequence
  chemically synthesized
ctcactgcaagctctgcctc

SEQ ID NO: 8006 - DNA, 20 bp, Artificial Sequence
  chemically synthesized
cattctcctgcctcagcctc

SEQ ID NO: 8007 - DNA, 20 bp, Artificial Sequence
  chemically synthesized
ttttgtatttttagtagaga

SEQ ID NO: 8008 - DNA, 20 bp, Artificial Sequence
  chemically synthesized
tggggtttcaccatgttagc

SEQ ID NO: 8009 - DNA, 20 bp, Artificial Sequence
  chemically synthesized
gccttggcctcccacagtgc

SEQ ID NO: 8010 - DNA, 20 bp, Artificial Sequence
  chemically synthesized
acttaattttttgaacataa

SEQ ID NO: 8011 - DNA, 20 bp, Artificial Sequence
  chemically synthesized
ttctagcatccgtgtcagtt

SEQ ID NO: 8012 - DNA, 20 bp, Artificial Sequence
  chemically synthesized
acattgtcaatttcaccttg

SEQ ID NO: 8013 - DNA, 20 bp, Artificial Sequence
  chemically synthesized
caatttcaccttgttgggtg

SEQ ID NO: 8014 - DNA, 20 bp, Artificial Sequence
  chemically synthesized
aatgttcttgagctttgctc

SEQ ID NO: 8015 - DNA, 20 bp, Artificial Sequence
  chemically synthesized
cgggatgcagttaagcaact

SEQ ID NO: 8016 - DNA, 20 bp, Artificial Sequence
  chemically synthesized
agctccatctcctcaacgtg

SEQ ID NO: 8017 - DNA, 20 bp, Artificial Sequence
  chemically synthesized
actctctccaaacagtaagc

SEQ ID NO: 8018 - DNA, 20 bp, Artificial Sequence
  chemically synthesized
acagtaagctggggtgatcg

SEQ ID NO: 8019 - DNA, 20 bp, Artificial Sequence
  chemically synthesized
ttgtttgcttcttatccctc

SEQ ID NO: 8020 - DNA, 20 bp, Artificial Sequence
  chemically synthesized
actcctccttgcctgatgtc

SEQ ID NO: 8021 - DNA, 20 bp, Artificial Sequence
  chemically synthesized
taattatccgagcaatccaa

SEQ ID NO: 8022 - DNA, 20 bp, Artificial Sequence
  chemically synthesized
aaaatggaagcatggagaaa

SEQ ID NO: 8023 - DNA, 20 bp, Artificial Sequence
  chemically synthesized
ccctgtgggcagtctggttt

SEQ ID NO: 8024 - DNA, 20 bp, Artificial Sequence
  chemically synthesized
gtgggcagtctggtttcagg

SEQ ID NO: 8025 - DNA, 20 bp, Artificial Sequence
  chemically synthesized
tgctgggctgacccagcatt

SEQ ID NO: 8026 - DNA, 20 bp, Artificial Sequence
  chemically synthesized
gggaagcaggacaggaccct

SEQ ID NO: 8027 - DNA, 20 bp, Artificial Sequence
  chemically synthesized
aggacaggaccctctgagtg

SEQ ID NO: 8028 - DNA, 20 bp, Artificial Sequence
  chemically synthesized
accgtggtcatggagcgctt

SEQ ID NO: 8029 - DNA, 20 bp, Artificial Sequence
  chemically synthesized
tggagcgcttctggatggag

SEQ ID NO: 8030 - DNA, 20 bp, Artificial Sequence
  chemically synthesized
aatgcaaaggccttggagga

SEQ ID NO: 8031 - DNA, 20 bp, Artificial Sequence
  chemically synthesized
ggggtgggggcagtgagagg

SEQ ID NO: 8032 - DNA, 20 bp, Artificial Sequence
  chemically synthesized
ggtggggctgtgctcagagc

SEQ ID NO: 8033 - DNA, 20 bp, Artificial Sequence
  chemically synthesized
tggaggtgtcagaggcctcc

SEQ ID NO: 8034 - DNA, 20 bp, Artificial Sequence
  chemically synthesized
agaggcctccctgggtcaaa

SEQ ID NO: 8035 - DNA, 20 bp, Artificial Sequence
  chemically synthesized
tccctgggtcaaatggggtc

SEQ ID NO: 8036 - DNA, 20 bp, Artificial Sequence
  chemically synthesized
tcactggtgtgaaaaagatg

SEQ ID NO: 8037 - DNA, 20 bp, Artificial Sequence
  chemically synthesized
ggcccctgactgagcctccc

SEQ ID NO: 8038 - DNA, 20 bp, Artificial Sequence
  chemically synthesized
ctccccaggatgtggtcctg

SEQ ID NO: 8039 - DNA, 20 bp, Artificial Sequence
  chemically synthesized
gatgtggtcctgctgggtcg

SEQ ID NO: 8040 - DNA, 20 bp, Artificial Sequence
  chemically synthesized
ctgctgggtcggggggtgat

SEQ ID NO: 8041 - DNA, 20 bp, Artificial Sequence
  chemically synthesized
tgagaagacaaggaagtcca

SEQ ID NO: 8042 - DNA, 20 bp, Artificial Sequence
  chemically synthesized
gacaaggaagtccacagagt

SEQ ID NO: 8043 - DNA, 20 bp, Artificial Sequence
  chemically synthesized
agaaggtgttctgtttgcag

SEQ ID NO: 8044 - DNA, 20 bp, Artificial Sequence
  chemically synthesized
ctgggacaactggagctgct

SEQ ID NO: 8045 - DNA, 20 bp, Artificial Sequence
  chemically synthesized
agctctgtgtgcaggaagac

SEQ ID NO: 8046 - DNA, 20 bp, Artificial Sequence
  chemically synthesized
gtgcaggaagacgtgggtgt

SEQ ID NO: 8047 - DNA, 20 bp, Artificial Sequence
  chemically synthesized
gggtgtgtgagtgtacgtgt

SEQ ID NO: 8048 - DNA, 20 bp, Artificial Sequence
  chemically synthesized
tcaggtgtgtgtgtgtggga

SEQ ID NO: 8049 - DNA, 20 bp, Artificial Sequence
  chemically synthesized
gtgtgtgtgtgggagggagt

SEQ ID NO: 8050 - DNA, 20 bp, Artificial Sequence
  chemically synthesized
tagcatgcatatgcacatgt

SEQ ID NO: 8051 - DNA, 20 bp, Artificial Sequence
  chemically synthesized
atgcatatgcacatgtgaga

SEQ ID NO: 8052 - DNA, 20 bp, Artificial Sequence
  chemically synthesized
gggtacagcagagcgtggtc

SEQ ID NO: 8053 - DNA, 20 bp, Artificial Sequence
  chemically synthesized
gtgtgtgcaaatgtgtgttt

SEQ ID NO: 8054 - DNA, 20 bp, Artificial Sequence
  chemically synthesized
ttgagtgaagtgagcaatgt

SEQ ID NO: 8055 - DNA, 20 bp, Artificial Sequence
  chemically synthesized
agtgagcaatgtgtgagtgt

SEQ ID NO: 8056 - DNA, 20 bp, Artificial Sequence
  chemically synthesized
gtgtgagtgtgtgagtgtgt

SEQ ID NO: 8057 - DNA, 20 bp, Artificial Sequence
  chemically synthesized
gtgtgagtttgtgagggcat

SEQ ID NO: 8058 - DNA, 20 bp, Artificial Sequence
  chemically synthesized
aatgtgtgtgtcagtgctgt

SEQ ID NO: 8059 - DNA, 20 bp, Artificial Sequence
  chemically synthesized
tcagtgctgtcagggtgcag

SEQ ID NO: 8060 - DNA, 20 bp, Artificial Sequence
  chemically synthesized
ggaggaggccttgcgtggtg

SEQ ID NO: 8061 - DNA, 20 bp, Artificial Sequence
  chemically synthesized
aggacaacaggtgggacctg

SEQ ID NO: 8062 - DNA, 20 bp, Artificial Sequence
  chemically synthesized
gacctggagggttgtgcttg

SEQ ID NO: 8063 - DNA, 20 bp, Artificial Sequence
  chemically synthesized
gcttggagagtgggctatgg

SEQ ID NO: 8064 - DNA, 20 bp, Artificial Sequence
  chemically synthesized
tggtggaatgacccagattt

SEQ ID NO: 8065 - DNA, 20 bp, Artificial Sequence
  chemically synthesized
cccagatttaaggatctcaa

SEQ ID NO: 8066 - DNA, 20 bp, Artificial Sequence
  chemically synthesized
aggggagggactgttccagt

SEQ ID NO: 8067 - DNA, 20 bp, Artificial Sequence
  chemically synthesized
agaacacagggcccagcttc

SEQ ID NO: 8068 - DNA, 20 bp, Artificial Sequence
  chemically synthesized
ctggaggcctctgccactgg

SEQ ID NO: 8069 - DNA, 20 bp, Artificial Sequence
  chemically synthesized
cattcacagatcccccttct

SEQ ID NO: 8070 - DNA, 20 bp, Artificial Sequence
  chemically synthesized
ggatgtgtgcctaggcaggg

SEQ ID NO: 8071 - DNA, 20 bp, Artificial Sequence
  chemically synthesized
gtctcccagtcccccagctc

SEQ ID NO: 8072 - DNA, 20 bp, Artificial Sequence
  chemically synthesized
gggctttgcacacagctgat

SEQ ID NO: 8073 - DNA, 20 bp, Artificial Sequence
  chemically synthesized
acacagctgatgtgaatatc

SEQ ID NO: 8074 - DNA, 20 bp, Artificial Sequence
  chemically synthesized
gaatatcctgagtcgtgtgc

SEQ ID NO: 8075 - DNA, 20 bp, Artificial Sequence
  chemically synthesized
gtatatttatacatggtaat

SEQ ID NO: 8076 - DNA, 20 bp, Artificial Sequence
  chemically synthesized
ttatacatggtaatatgggt

SEQ ID NO: 8077 - DNA, 20 bp, Artificial Sequence
  chemically synthesized
taatatgggtgcgagtgtgt

SEQ ID NO: 8078 - DNA, 20 bp, Artificial Sequence
  chemically synthesized
tgtgtgtaatgctcaaatgc

SEQ ID NO: 8079 - DNA, 20 bp, Artificial Sequence
  chemically synthesized
gctggtggtcatctgtgtga

SEQ ID NO: 8080 - DNA, 20 bp, Artificial Sequence
  chemically synthesized
gtgtgactgggtcccaaagt

SEQ ID NO: 8081 - DNA, 20 bp, Artificial Sequence
  chemically synthesized
tgagggtcacgggggccagc

SEQ ID NO: 8082 - DNA, 20 bp, Artificial Sequence
  chemically synthesized
ggggccagcagggatgggca

SEQ ID NO: 8083 - DNA, 20 bp, Artificial Sequence
  chemically synthesized
cgccctttgccctcgcttcc

SEQ ID NO: 8084 - DNA, 20 bp, Artificial Sequence
  chemically synthesized
ggggaggctcagtcaggggc

SEQ ID NO: 8085 - DNA, 20 bp, Artificial Sequence
  chemically synthesized
tgggaagagttcttctctcc

SEQ ID NO: 8086 - DNA, 20 bp, Artificial Sequence
  chemically synthesized
atccagaactgacacggatg

SEQ ID NO: 8087 - DNA, 20 bp, Artificial Sequence
  chemically synthesized
cattatgttcaaaaaattaa

SEQ ID NO: 8088 - DNA, 20 bp, Artificial Sequence
  chemically synthesized
ctactcgggaggctgaggca

SEQ ID NO: 8089 - DNA, 20 bp, Artificial Sequence
  chemically synthesized
tccgcctccaaaaaaaaaaa

SEQ ID NO: 8090 - DNA, 20 bp, Artificial Sequence
  chemically synthesized
ctccaaaaaaaaaaaaaaga

SEQ ID NO: 8091 - DNA, 20 bp, Artificial Sequence
  chemically synthesized
aaaaaaaaaaaaaagaaaag

SEQ ID NO: 8092 - DNA, 20 bp, Artificial Sequence
  chemically synthesized
aaaaaaaaagaaaagaaaga

SEQ ID NO: 8093 - DNA, 20 bp, Artificial Sequence
  chemically synthesized
tggatggaaataatggaaga

SEQ ID NO: 8094 - DNA, 20 bp, Artificial Sequence
  chemically synthesized
aatggaagatgagaaatgcg

SEQ ID NO: 8095 - DNA, 20 bp, Artificial Sequence
  chemically synthesized
ctctataaaatgaaacactg

SEQ ID NO: 8096 - DNA, 20 bp, Artificial Sequence
  chemically synthesized
aaatgaaacactgggagaaa

SEQ ID NO: 8097 - DNA, 20 bp, Artificial Sequence
  chemically synthesized
aaaagaattaaaaaatggaa

SEQ ID NO: 8098 - DNA, 20 bp, Artificial Sequence
  chemically synthesized
atgcataattgaaatcttta

SEQ ID NO: 8099 - DNA, 20 bp, Artificial Sequence
  chemically synthesized
tttaaaagaaaaagggggta

SEQ ID NO: 8100 - DNA, 20 bp, Artificial Sequence
  chemically synthesized
agctcactctcccattaatt

SEQ ID NO: 8101 - DNA, 20 bp, Artificial Sequence
  chemically synthesized
gacagagggggagcaaagcc

SEQ ID NO: 8102 - DNA, 20 bp, Artificial Sequence
  chemically synthesized
caaattaaaaaaaatttttt

SEQ ID NO: 8103 - DNA, 20 bp, Artificial Sequence
  chemically synthesized
ggtacatagtgaacactcag

SEQ ID NO: 8104 - DNA, 20 bp, Artificial Sequence
  chemically synthesized
tgctgaatcttctgagggtg

SEQ ID NO: 8105 - DNA, 20 bp, Artificial Sequence
  chemically synthesized
tgtgatctccattttacaca

SEQ ID NO: 8106 - DNA, 20 bp, Artificial Sequence
  chemically synthesized
acacgagaaaatggaagcat

SEQ ID NO: 8107 - DNA, 20 bp, Artificial Sequence
  chemically synthesized
acacattgctcacttcactc

SEQ ID NO: 8108 - DNA, 20 bp, Artificial Sequence
  chemically synthesized
cttctctccccagaaacaat

SEQ ID NO: 8109 - DNA, 20 bp, Artificial Sequence
  chemically synthesized
tccccagaaacaatcaaaac

SEQ ID NO: 8110 - DNA, 20 bp, Artificial Sequence
  chemically synthesized
agctgagagtccgaggagac

SEQ ID NO: 8111 - DNA, 20 bp, Artificial Sequence
  chemically synthesized
caaggcatgcaatgaaacgg

SEQ ID NO: 8112 - DNA, 20 bp, Artificial Sequence
  chemically synthesized
gaattagcaggcaaggatgg

SEQ ID NO: 8113 - DNA, 20 bp, Artificial Sequence
  chemically synthesized
ccaggtgaacttctagagat

SEQ ID NO: 8114 - DNA, 20 bp, Artificial Sequence
  chemically synthesized
aactacaatgtctgaaatga

SEQ ID NO: 8115 - DNA, 20 bp, Artificial Sequence
  chemically synthesized
aaaagaaaagaaagaaaaga

SEQ ID NO: 8116 - DNA, 20 bp, Artificial Sequence
  chemically synthesized
gactagtctgggcagcatgg

SEQ ID NO: 8117 - DNA, 20 bp, Artificial Sequence
  chemically synthesized
ggcaaaacccctctacatgg

SEQ ID NO: 8118 - DNA, 20 bp, Artificial Sequence
  chemically synthesized
tgccactggctggatgggag

SEQ ID NO: 8119 - DNA, 20 bp, Artificial Sequence
  chemically synthesized
gaggaggcataacctgggcg

SEQ ID NO: 8120 - DNA, 20 bp, Artificial Sequence
  chemically synthesized
ggccatgggggggggtcatc

SEQ ID NO: 8121 - DNA, 20 bp, Artificial Sequence
  chemically synthesized
cctgagaagggggatctgtg

SEQ ID NO: 8122 - DNA, 20 bp, Artificial Sequence
  chemically synthesized
tcttctaaggctcctgtccc

SEQ ID NO: 8123 - DNA, 20 bp, Artificial Sequence
  chemically synthesized
tcctccccagcgccctttgc

SEQ ID NO: 8124 - DNA, 20 bp, Artificial Sequence
  chemically synthesized
cctccactcagagggtcctg

SEQ ID NO: 8125 - DNA, 20 bp, Artificial Sequence
  chemically synthesized
tgcaccagcattcaatttct

SEQ ID NO: 8126 - DNA, 20 bp, Artificial Sequence
  chemically synthesized
tggagatcacagtcgtagct

SEQ ID NO: 8127 - DNA, 20 bp, Artificial Sequence
  chemically synthesized
atcacagtcgtagctacccg

SEQ ID NO: 8128 - DNA, 20 bp, Artificial Sequence
  chemically synthesized
tagatgagttaaaatatgta

SEQ ID NO: 8129 - DNA, 20 bp, Artificial Sequence
  chemically synthesized
atgtaatgtgcttcttaggc

SEQ ID NO: 8130 - DNA, 20 bp, Artificial Sequence
  chemically synthesized
aacagacaactatagaacat

SEQ ID NO: 8131 - DNA, 20 bp, Artificial Sequence
  chemically synthesized
aacaggaaccctccgatcac

SEQ ID NO: 8132 - DNA, 20 bp, Artificial Sequence
  chemically synthesized
accctccgatcaccccagct

SEQ ID NO: 8133 - DNA, 20 bp, Artificial Sequence
  chemically synthesized
aaacgatcaaactgactcta

SEQ ID NO: 8134 - DNA, 20 bp, Artificial Sequence
  chemically synthesized
gacaatgtctggcagccaat

SEQ ID NO: 8135 - DNA, 20 bp, Artificial Sequence
  chemically synthesized
aatggcatgaacccgggagg

SEQ ID NO: 8136 - DNA, 20 bp, Artificial Sequence
  chemically synthesized
ctctaaattctgtcaccctc

SEQ ID NO: 8137 - DNA, 20 bp, Artificial Sequence
  chemically synthesized
ttgggaggctgaggtgggag

SEQ ID NO: 8138 - DNA, 20 bp, Artificial Sequence
  chemically synthesized
aagatacttaggtccttcag

SEQ ID NO: 8139 - DNA, 20 bp, Artificial Sequence
  chemically synthesized
ctgcacacttgcctttcaaa

SEQ ID NO: 8140 - DNA, 20 bp, Artificial Sequence
  chemically synthesized
tcaaaaatggatttcctctc

SEQ ID NO: 8141 - DNA, 20 bp, Artificial Sequence
  chemically synthesized
ggctggggctggggcagagg

SEQ ID NO: 8142 - DNA, 20 bp, Artificial Sequence
  chemically synthesized
ccatttttgaaaggcaagtg

SEQ ID NO: 8143 - DNA, 20 bp, Artificial Sequence
  chemically synthesized
aaaggcaagtgtgcagtttc

SEQ ID NO: 8144 - DNA, 20 bp, Artificial Sequence
  chemically synthesized
tgctccccctctgtctcagc

SEQ ID NO: 8145 - DNA, 20 bp, Artificial Sequence
  chemically synthesized
gactgaggagggcccgacac

SEQ ID NO: 8146 - DNA, 20 bp, Artificial Sequence
  chemically synthesized
acgtatgtgcatatgaggaa

SEQ ID NO: 8147 - DNA, 20 bp, Artificial Sequence
  chemically synthesized
tgtgtattgtgtgagtgtat

SEQ ID NO: 8148 - DNA, 20 bp, Artificial Sequence
  chemically synthesized
gtgtgtgtgttagtgtgtgt

SEQ ID NO: 8149 - DNA, 20 bp, Artificial Sequence
  chemically synthesized
atgttgcccaggctggtggg

SEQ ID NO: 8150 - DNA, 20 bp, Artificial Sequence
  chemically synthesized
tccatggaggcaggaggagc

SEQ ID NO: 8151 - DNA, 20 bp, Artificial Sequence
  chemically synthesized
aggcaggaggagcaggggct

SEQ ID NO: 8152 - DNA, 20 bp, Artificial Sequence
  chemically synthesized
caggggcttggagcttagga

SEQ ID NO: 8153 - DNA, 20 bp, Artificial Sequence
  chemically synthesized
cttctgagggtgacagaatt

SEQ ID NO: 8154 - DNA, 20 bp, Artificial Sequence
  chemically synthesized
cagaatttagagtttgagca

SEQ ID NO: 8155 - DNA, 20 bp, Artificial Sequence
  chemically synthesized
gcaggaggcttggagagagg

SEQ ID NO: 8156 - DNA, 20 bp, Artificial Sequence
  chemically synthesized
catcttccacttgtctcagc

SEQ ID NO: 8157 - DNA, 20 bp, Artificial Sequence
  chemically synthesized
ctgctaccccctttttcttt

SEQ ID NO: 8158 - DNA, 20 bp, Artificial Sequence
  chemically synthesized
tttttaattcttttttctcc

SEQ ID NO: 8159 - DNA, 20 bp, Artificial Sequence
  chemically synthesized
cccctcccctcctttccttc

SEQ ID NO: 8160 - DNA, 20 bp, Artificial Sequence
  chemically synthesized
tgttgcccaggctggaatgc

SEQ ID NO: 8161 - DNA, 20 bp, Artificial Sequence
  chemically synthesized
taaaaatttttttttgtaga

SEQ ID NO: 8162 - DNA, 20 bp, Artificial Sequence
  chemically synthesized
gagacggttttgccatgtag

SEQ ID NO: 8163 - DNA, 20 bp, Artificial Sequence
  chemically synthesized
agtcttgagctcctgggctc

SEQ ID NO: 8164 - DNA, 20 bp, Artificial Sequence
  chemically synthesized
cgtgtcgacctcccaaagtg

SEQ ID NO: 8165 - DNA, 20 bp, Artificial Sequence
  chemically synthesized
tcttccattatttccatcca

SEQ ID NO: 8166 - DNA, 20 bp, Artificial Sequence
  chemically synthesized
ttttgtatttttagtagaga

SEQ ID NO: 8167 - DNA, 20 bp, Artificial Sequence
  chemically synthesized
cgccttggcctcccacagtg

SEQ ID NO: 8168 - DNA, 20 bp, Artificial Sequence
  chemically synthesized
tgagccacggcgcctggcca

SEQ ID NO: 8169 - DNA, 20 bp, Artificial Sequence
  chemically synthesized
tgttttttcatttcagacat

SEQ ID NO: 8170 - DNA, 20 bp, Artificial Sequence
  chemically synthesized
taatgggatatggctataat

SEQ ID NO: 8171 - DNA, 20 bp, Artificial Sequence
  chemically synthesized
atgaacctcctcgttatgca

SEQ ID NO: 8172 - DNA, 20 bp, Artificial Sequence
  chemically synthesized
cctcgttatgcattgtgttt

SEQ ID NO: 8173 - DNA, 20 bp, Artificial Sequence
  chemically synthesized
ttcattgcatgccttgtaat

SEQ ID NO: 8174 - DNA, 20 bp, Artificial Sequence
  chemically synthesized
ttgtattcctctaaatgttc

SEQ ID NO: 8175 - DNA, 20 bp, Artificial Sequence
  chemically synthesized
atgcagttaagcaacttaga

SEQ ID NO: 8176 - DNA, 20 bp, Artificial Sequence
  chemically synthesized
aagcaacttagagtcagttt

SEQ ID NO: 8177 - DNA, 20 bp, Artificial Sequence
  chemically synthesized
gtttgatcgtttgaactctt

SEQ ID NO: 8178 - DNA, 20 bp, Artificial Sequence
  chemically synthesized
tggggtgatcggagggttcc

SEQ ID NO: 8179 - DNA, 20 bp, Artificial Sequence
  chemically synthesized
gtgatcggagggttcctgtt

SEQ ID NO: 8180 - DNA, 20 bp, Artificial Sequence
  chemically synthesized
agctgccatgttctatagtt

SEQ ID NO: 8181 - DNA, 20 bp, Artificial Sequence
  chemically synthesized
catgttctatagttgtctgt

SEQ ID NO: 8182 - DNA, 20 bp, Artificial Sequence
  chemically synthesized
tctatagttgtctgtttttg

SEQ ID NO: 8183 - DNA, 20 bp, Artificial Sequence
  chemically synthesized
tagttgtctgtttttgtttt

SEQ ID NO: 8184 - DNA, 20 bp, Artificial Sequence
  chemically synthesized
ctgggctaccctgtgggcag

SEQ ID NO: 8185 - DNA, 20 bp, Artificial Sequence
  chemically synthesized
cagggactcagccatggagg

SEQ ID NO: 8186 - DNA, 20 bp, Artificial Sequence
  chemically synthesized
tggggaacaccgtggtcatg

SEQ ID NO: 8187 - DNA, 20 bp, Artificial Sequence
  chemically synthesized
ggcaggaagtgacctgggga

SEQ ID NO: 8188 - DNA, 20 bp, Artificial Sequence
  chemically synthesized
ggtccaaggcctagaaggtg

SEQ ID NO: 8189 - DNA, 20 bp, Artificial Sequence
  chemically synthesized
ggtcatgagtgtgtgcaaat

SEQ ID NO: 8190 - DNA, 20 bp, Artificial Sequence
  chemically synthesized
gtgtgagtgtgtgagtgtgt

SEQ ID NO: 8191 - DNA, 20 bp, Artificial Sequence
  chemically synthesized
ggagcaaatttagtgtggaa

SEQ ID NO: 8192 - DNA, 20 bp, Artificial Sequence
  chemically synthesized
aacaggtgggacctggaggg

SEQ ID NO: 8193 - DNA, 20 bp, Artificial Sequence
  chemically synthesized
agtgggctatggtggaatga

SEQ ID NO: 8194 - DNA, 20 bp, Artificial Sequence
  chemically synthesized
caggggagggactgttccag

SEQ ID NO: 8195 - DNA, 20 bp, Artificial Sequence
  chemically synthesized
attttaggaagaacacaggg

SEQ ID NO: 8196 - DNA, 20 bp, Artificial Sequence
  chemically synthesized
cagtcccccagctccaggat

SEQ ID NO: 8197 - DNA, 20 bp, Artificial Sequence
  chemically synthesized
gtgtgcatgggtgtgtgtgc

SEQ ID NO: 8198 - DNA, 20 bp, Artificial Sequence
  chemically synthesized
cccgcccaggttatgcctcc

SEQ ID NO: 8199 - DNA, 20 bp, Artificial Sequence
  chemically synthesized
cacagcgtctctgctccatg

SEQ ID NO: 8200 - DNA, 20 bp, Artificial Sequence
  chemically synthesized
ctgctccatggtctgcttca

SEQ ID NO: 8201 - DNA, 20 bp, Artificial Sequence
  chemically synthesized
tctgcttcagtctgcttgcc

SEQ ID NO: 8202 - DNA, 22 bp, Artificial Sequence
  chemically synthesized
cccatgtctctttccctacccc

SEQ ID NO: 8203 - DNA, 22 bp, Artificial Sequence
  chemically synthesized
tttccctaccccttgcccatcc

SEQ ID NO: 8204 - DNA, 22 bp, Artificial Sequence
  chemically synthesized
tccctaccccttgcccatccct

SEQ ID NO: 8205 - DNA, 22 bp, Artificial Sequence
  chemically synthesized
ccctaccccttgcccatccctg

SEQ ID NO: 8206 - DNA, 22 bp, Artificial Sequence
  chemically synthesized
cctaccccttgcccatccctgc

SEQ ID NO: 8207 - DNA, 22 bp, Artificial Sequence
  chemically synthesized
ccccttgcccatccctgctggc

SEQ ID NO: 8208 - DNA, 22 bp, Artificial Sequence
  chemically synthesized
gcccatccctgctggcccccgt

SEQ ID NO: 8209 - DNA, 22 bp, Artificial Sequence
  chemically synthesized
cccatccctgctggcccccgtg

SEQ ID NO: 8210 - DNA, 22 bp, Artificial Sequence
  chemically synthesized
ctggcccccgtgaccctcactt

SEQ ID NO: 8211 - DNA, 22 bp, Artificial Sequence
  chemically synthesized
gcccccgtgaccctcactttgg

SEQ ID NO: 8212 - DNA, 22 bp, Artificial Sequence
  chemically synthesized
actttgggacccagtcacacag

SEQ ID NO: 8213 - DNA, 22 bp, Artificial Sequence
  chemically synthesized
tgggacccagtcacacagatga

SEQ ID NO: 8214 - DNA, 22 bp, Artificial Sequence
  chemically synthesized
gggacccagtcacacagatgac

SEQ ID NO: 8215 - DNA, 22 bp, Artificial Sequence
  chemically synthesized
ggacccagtcacacagatgacc

SEQ ID NO: 8216 - DNA, 22 bp, Artificial Sequence
  chemically synthesized
aagctcagggcaagcagactga

SEQ ID NO: 8217 - DNA, 22 bp, Artificial Sequence
  chemically synthesized
agggcaagcagactgaagcaga

SEQ ID NO: 8218 - DNA, 22 bp, Artificial Sequence
  chemically synthesized
aagcagaccatggagcagagac

SEQ ID NO: 8219 - DNA, 22 bp, Artificial Sequence
  chemically synthesized
tgccaggggctgggcaggaggt

SEQ ID NO: 8220 - DNA, 22 bp, Artificial Sequence
  chemically synthesized
ggcaggaggtggccctgtggga

SEQ ID NO: 8221 - DNA, 22 bp, Artificial Sequence
  chemically synthesized
tgggagaggggcatcaggagcc

SEQ ID NO: 8222 - DNA, 22 bp, Artificial Sequence
  chemically synthesized
ggtgtggggagccggagggtaa

SEQ ID NO: 8223 - DNA, 22 bp, Artificial Sequence
  chemically synthesized
aggaggcataacctgggcgggg

SEQ ID NO: 8224 - DNA, 22 bp, Artificial Sequence
  chemically synthesized
ggcggggggattggttggggcc

SEQ ID NO: 8225 - DNA, 22 bp, Artificial Sequence
  chemically synthesized
gttggggccatgggggggggtc

SEQ ID NO: 8226 - DNA, 22 bp, Artificial Sequence
  chemically synthesized
gggccatgggggggggtcatca

SEQ ID NO: 8227 - DNA, 22 bp, Artificial Sequence
  chemically synthesized
tgaccccagcatttgagcatta

SEQ ID NO: 8228 - DNA, 22 bp, Artificial Sequence
  chemically synthesized
gaccccagcatttgagcattac

SEQ ID NO: 8229 - DNA, 22 bp, Artificial Sequence
  chemically synthesized
accccagcatttgagcattaca

SEQ ID NO: 8230 - DNA, 22 bp, Artificial Sequence
  chemically synthesized
gagcattacacacacactctta

SEQ ID NO: 8231 - DNA, 22 bp, Artificial Sequence
  chemically synthesized
agcattacacacacactcttac

SEQ ID NO: 8232 - DNA, 22 bp, Artificial Sequence
  chemically synthesized
cacacacactcttacacactcg

SEQ ID NO: 8233 - DNA, 22 bp, Artificial Sequence
  chemically synthesized
ttacacactcgcacccatatta

SEQ ID NO: 8234 - DNA, 22 bp, Artificial Sequence
  chemically synthesized
acacactcgcacccatattacc

SEQ ID NO: 8235 - DNA, 22 bp, Artificial Sequence
  chemically synthesized
cacactcgcacccatattacca

SEQ ID NO: 8236 - DNA, 22 bp, Artificial Sequence
  chemically synthesized
gcacccatattaccatgtataa

SEQ ID NO: 8237 - DNA, 22 bp, Artificial Sequence
  chemically synthesized
ccatgtataaatatacacacgc

SEQ ID NO: 8238 - DNA, 22 bp, Artificial Sequence
  chemically synthesized
atctggtgcacacacacccatg

SEQ ID NO: 8239 - DNA, 22 bp, Artificial Sequence
  chemically synthesized
gtgcacacacacccatgcacac

SEQ ID NO: 8240 - DNA, 22 bp, Artificial Sequence
  chemically synthesized
aggatattcacatcagctgtgt

SEQ ID NO: 8241 - DNA, 22 bp, Artificial Sequence
  chemically synthesized
acatcagctgtgtgcaaagccc

SEQ ID NO: 8242 - DNA, 22 bp, Artificial Sequence
  chemically synthesized
tgtgcaaagcccggatcctgga

SEQ ID NO: 8243 - DNA, 22 bp, Artificial Sequence
  chemically synthesized
gagctgggggactgggagacgc

SEQ ID NO: 8244 - DNA, 22 bp, Artificial Sequence
  chemically synthesized
ggggactgggagacgcacaggg

SEQ ID NO: 8245 - DNA, 22 bp, Artificial Sequence
  chemically synthesized
ggagacgcacagggggcggggg

SEQ ID NO: 8246 - DNA, 22 bp, Artificial Sequence
  chemically synthesized
cctaggcacacatcctgagaag

SEQ ID NO: 8247 - DNA, 22 bp, Artificial Sequence
  chemically synthesized
ggcacacatcctgagaaggggg

SEQ ID NO: 8248 - DNA, 22 bp, Artificial Sequence
  chemically synthesized
agaagggggatctgtgaatggt

SEQ ID NO: 8249 - DNA, 22 bp, Artificial Sequence
  chemically synthesized
tgaatggttttcctcccatcca

SEQ ID NO: 8250 - DNA, 22 bp, Artificial Sequence
  chemically synthesized
tcctcccatccagccagtggca

SEQ ID NO: 8251 - DNA, 22 bp, Artificial Sequence
  chemically synthesized
cctcccatccagccagtggcag

SEQ ID NO: 8252 - DNA, 22 bp, Artificial Sequence
  chemically synthesized
ctcccatccagccagtggcaga

SEQ ID NO: 8253 - DNA, 22 bp, Artificial Sequence
  chemically synthesized
ccatccagccagtggcagaggc

SEQ ID NO: 8254 - DNA, 22 bp, Artificial Sequence
  chemically synthesized
cagatcacctcgggccttagtc

SEQ ID NO: 8255 - DNA, 22 bp, Artificial Sequence
  chemically synthesized
gggccttagtctcagctcttct

SEQ ID NO: 8256 - DNA, 22 bp, Artificial Sequence
  chemically synthesized
agtctcagctcttctaaggctc

SEQ ID NO: 8257 - DNA, 22 bp, Artificial Sequence
  chemically synthesized
gtctcagctcttctaaggctcc

SEQ ID NO: 8258 - DNA, 22 bp, Artificial Sequence
  chemically synthesized
agctcttctaaggctcctgtcc

SEQ ID NO: 8259 - DNA, 22 bp, Artificial Sequence
  chemically synthesized
ttctaaggctcctgtcccctca

SEQ ID NO: 8260 - DNA, 22 bp, Artificial Sequence
  chemically synthesized
ctaaggctcctgtcccctcaga

SEQ ID NO: 8261 - DNA, 22 bp, Artificial Sequence
  chemically synthesized
taaggctcctgtcccctcagat

SEQ ID NO: 8262 - DNA, 22 bp, Artificial Sequence
  chemically synthesized
aggctcctgtcccctcagattg

SEQ ID NO: 8263 - DNA, 22 bp, Artificial Sequence
  chemically synthesized
ctgtcccctcagattggagact

SEQ ID NO: 8264 - DNA, 22 bp, Artificial Sequence
  chemically synthesized
tcccctcagattggagactcca

SEQ ID NO: 8265 - DNA, 22 bp, Artificial Sequence
  chemically synthesized
agattggagactccagaagctg

SEQ ID NO: 8266 - DNA, 22 bp, Artificial Sequence
  chemically synthesized
gagactccagaagctgggccct

SEQ ID NO: 8267 - DNA, 22 bp, Artificial Sequence
  chemically synthesized
cagaagctgggccctgtgttct

SEQ ID NO: 8268 - DNA, 22 bp, Artificial Sequence
  chemically synthesized
ggccctgtgttcttcctaaaat

SEQ ID NO: 8269 - DNA, 22 bp, Artificial Sequence
  chemically synthesized
tgttcttcctaaaatccatact

SEQ ID NO: 8270 - DNA, 22 bp, Artificial Sequence
  chemically synthesized
ttcctaaaatccatactggaac

SEQ ID NO: 8271 - DNA, 22 bp, Artificial Sequence
  chemically synthesized
cctaaaatccatactggaacag

SEQ ID NO: 8272 - DNA, 22 bp, Artificial Sequence
  chemically synthesized
ctaaaatccatactggaacagt

SEQ ID NO: 8273 - DNA, 22 bp, Artificial Sequence
  chemically synthesized
aaatccatactggaacagtccc

SEQ ID NO: 8274 - DNA, 22 bp, Artificial Sequence
  chemically synthesized
gaacagtccctcccctgccaaa

SEQ ID NO: 8275 - DNA, 22 bp, Artificial Sequence
  chemically synthesized
ccctgccaaaattccattgaga

SEQ ID NO: 8276 - DNA, 22 bp, Artificial Sequence
  chemically synthesized
ccaaaattccattgagatcctt

SEQ ID NO: 8277 - DNA, 22 bp, Artificial Sequence
  chemically synthesized
cattgagatccttaaatctggg

SEQ ID NO: 8278 - DNA, 22 bp, Artificial Sequence
  chemically synthesized
agatccttaaatctgggtcatt

SEQ ID NO: 8279 - DNA, 22 bp, Artificial Sequence
  chemically synthesized
aaatctgggtcattccaccata

SEQ ID NO: 8280 - DNA, 22 bp, Artificial Sequence
  chemically synthesized
aatctgggtcattccaccatag

SEQ ID NO: 8281 - DNA, 22 bp, Artificial Sequence
  chemically synthesized
ggtcattccaccatagcccact

SEQ ID NO: 8282 - DNA, 22 bp, Artificial Sequence
  chemically synthesized
caccatagcccactctccaagc

SEQ ID NO: 8283 - DNA, 22 bp, Artificial Sequence
  chemically synthesized
tccaagcacaaccctccaggtc

SEQ ID NO: 8284 - DNA, 22 bp, Artificial Sequence
  chemically synthesized
caagcacaaccctccaggtccc

SEQ ID NO: 8285 - DNA, 22 bp, Artificial Sequence
  chemically synthesized
caggtcccacctgttgtcctca

SEQ ID NO: 8286 - DNA, 22 bp, Artificial Sequence
  chemically synthesized
ttgtcctcatcccccaccacgc

SEQ ID NO: 8287 - DNA, 22 bp, Artificial Sequence
  chemically synthesized
tcctcatcccccaccacgcaag

SEQ ID NO: 8288 - DNA, 22 bp, Artificial Sequence
  chemically synthesized
atcccccaccacgcaaggcctc

SEQ ID NO: 8289 - DNA, 22 bp, Artificial Sequence
  chemically synthesized
ctccccagcgccctttgccctc

SEQ ID NO: 8290 - DNA, 22 bp, Artificial Sequence
  chemically synthesized
cccagcgccctttgccctcgct

SEQ ID NO: 8291 - DNA, 22 bp, Artificial Sequence
  chemically synthesized
tgccctcgcttccctagaaacc

SEQ ID NO: 8292 - DNA, 22 bp, Artificial Sequence
  chemically synthesized
gccctcgcttccctagaaacct

SEQ ID NO: 8293 - DNA, 22 bp, Artificial Sequence
  chemically synthesized
ccctcgcttccctagaaacctc

SEQ ID NO: 8294 - DNA, 22 bp, Artificial Sequence
  chemically synthesized
gcttccctagaaacctcgttcc

SEQ ID NO: 8295 - DNA, 22 bp, Artificial Sequence
  chemically synthesized
ccctagaaacctcgttccacac

SEQ ID NO: 8296 - DNA, 22 bp, Artificial Sequence
  chemically synthesized
cctagaaacctcgttccacact

SEQ ID NO: 8297 - DNA, 22 bp, Artificial Sequence
  chemically synthesized
gaaacctcgttccacactaaat

SEQ ID NO: 8298 - DNA, 22 bp, Artificial Sequence
  chemically synthesized
gttccacactaaatttgctccc

SEQ ID NO: 8299 - DNA, 22 bp, Artificial Sequence
  chemically synthesized
cacactaaatttgctcccctca

SEQ ID NO: 8300 - DNA, 22 bp, Artificial Sequence
  chemically synthesized
aatttgctcccctcagcccgag

SEQ ID NO: 8301 - DNA, 22 bp, Artificial Sequence
  chemically synthesized
gctcccctcagcccgaggtcat

SEQ ID NO: 8302 - DNA, 22 bp, Artificial Sequence
  chemically synthesized
ctcccctcagcccgaggtcatc

SEQ ID NO: 8303 - DNA, 22 bp, Artificial Sequence
  chemically synthesized
ccctcagcccgaggtcatctca

SEQ ID NO: 8304 - DNA, 22 bp, Artificial Sequence
  chemically synthesized
agcccgaggtcatctcacaggt

SEQ ID NO: 8305 - DNA, 22 bp, Artificial Sequence
  chemically synthesized
acaggtacctctcctgcccctt

SEQ ID NO: 8306 - DNA, 22 bp, Artificial Sequence
  chemically synthesized
tcctgccccttgatccatctgc

SEQ ID NO: 8307 - DNA, 22 bp, Artificial Sequence
  chemically synthesized
ctgccccttgatccatctgcac

SEQ ID NO: 8308 - DNA, 22 bp, Artificial Sequence
  chemically synthesized
ccccttgatccatctgcaccct

SEQ ID NO: 8309 - DNA, 22 bp, Artificial Sequence
  chemically synthesized
gatccatctgcaccctgacagc

SEQ ID NO: 8310 - DNA, 22 bp, Artificial Sequence
  chemically synthesized
atccatctgcaccctgacagca

SEQ ID NO: 8311 - DNA, 22 bp, Artificial Sequence
  chemically synthesized
caccctgacagcactgacacac

SEQ ID NO: 8312 - DNA, 22 bp, Artificial Sequence
  chemically synthesized
acagcactgacacacacattca

SEQ ID NO: 8313 - DNA, 22 bp, Artificial Sequence
  chemically synthesized
acacacacattcacatgccctc

SEQ ID NO: 8314 - DNA, 22 bp, Artificial Sequence
  chemically synthesized
acatgccctcacaaactcacac

SEQ ID NO: 8315 - DNA, 22 bp, Artificial Sequence
  chemically synthesized
acaaactcacacacactcacac

SEQ ID NO: 8316 - DNA, 22 bp, Artificial Sequence
  chemically synthesized
acacacactcacacactcacac

SEQ ID NO: 8317 - DNA, 22 bp, Artificial Sequence
  chemically synthesized
acacactcacacattgctcact

SEQ ID NO: 8318 - DNA, 22 bp, Artificial Sequence
  chemically synthesized
acacattgctcacttcactcaa

SEQ ID NO: 8319 - DNA, 22 bp, Artificial Sequence
  chemically synthesized
ctcacttcactcaaaaacacac

SEQ ID NO: 8320 - DNA, 22 bp, Artificial Sequence
  chemically synthesized
acttcactcaaaaacacacatt

SEQ ID NO: 8321 - DNA, 22 bp, Artificial Sequence
  chemically synthesized
cactcaaaaacacacatttgca

SEQ ID NO: 8322 - DNA, 22 bp, Artificial Sequence
  chemically synthesized
actcaaaaacacacatttgcac

SEQ ID NO: 8323 - DNA, 22 bp, Artificial Sequence
  chemically synthesized
aaaaacacacatttgcacacac

SEQ ID NO: 8324 - DNA, 22 bp, Artificial Sequence
  chemically synthesized
gcacacactcatgaccacgctc

SEQ ID NO: 8325 - DNA, 22 bp, Artificial Sequence
  chemically synthesized
cacacactcatgaccacgctct

SEQ ID NO: 8326 - DNA, 22 bp, Artificial Sequence
  chemically synthesized
atgaccacgctctgctgtaccc

SEQ ID NO: 8327 - DNA, 22 bp, Artificial Sequence
  chemically synthesized
tgctgtacccactctcacatgt

SEQ ID NO: 8328 - DNA, 22 bp, Artificial Sequence
  chemically synthesized
ctgtacccactctcacatgtgc

SEQ ID NO: 8329 - DNA, 22 bp, Artificial Sequence
  chemically synthesized
tacccactctcacatgtgcata

SEQ ID NO: 8330 - DNA, 22 bp, Artificial Sequence
  chemically synthesized
tcacatgtgcatatgcatgcta

SEQ ID NO: 8331 - DNA, 22 bp, Artificial Sequence
  chemically synthesized
acatgtgcatatgcatgctaat

SEQ ID NO: 8332 - DNA, 22 bp, Artificial Sequence
  chemically synthesized
atgcacacattcatactccctc

SEQ ID NO: 8333 - DNA, 22 bp, Artificial Sequence
  chemically synthesized
atactccctcccacacacacac

SEQ ID NO: 8334 - DNA, 22 bp, Artificial Sequence
  chemically synthesized
cctcccacacacacacacctga

SEQ ID NO: 8335 - DNA, 22 bp, Artificial Sequence
  chemically synthesized
ccacacacacacacctgacaca

SEQ ID NO: 8336 - DNA, 22 bp, Artificial Sequence
  chemically synthesized
acacacccacacacgtacactc

SEQ ID NO: 8337 - DNA, 22 bp, Artificial Sequence
  chemically synthesized
acacacccacgtcttcctgcac

SEQ ID NO: 8338 - DNA, 22 bp, Artificial Sequence
  chemically synthesized
cctgcacacagagctgggctcc

SEQ ID NO: 8339 - DNA, 22 bp, Artificial Sequence
  chemically synthesized
ctgcacacagagctgggctccc

SEQ ID NO: 8340 - DNA, 22 bp, Artificial Sequence
  chemically synthesized
cacacagagctgggctccctct

SEQ ID NO: 8341 - DNA, 22 bp, Artificial Sequence
  chemically synthesized
ggctccctctctgctgcctcca

SEQ ID NO: 8342 - DNA, 22 bp, Artificial Sequence
  chemically synthesized
cctctctgctgcctccagaccc

SEQ ID NO: 8343 - DNA, 22 bp, Artificial Sequence
  chemically synthesized
tctgctgcctccagacccagag

SEQ ID NO: 8344 - DNA, 22 bp, Artificial Sequence
  chemically synthesized
tgctgcctccagacccagagca

SEQ ID NO: 8345 - DNA, 22 bp, Artificial Sequence
  chemically synthesized
ctgcctccagacccagagcagc

SEQ ID NO: 8346 - DNA, 22 bp, Artificial Sequence
  chemically synthesized
cctccagacccagagcagctcc

SEQ ID NO: 8347 - DNA, 22 bp, Artificial Sequence
  chemically synthesized
cagacccagagcagctccagtt

SEQ ID NO: 8348 - DNA, 22 bp, Artificial Sequence
  chemically synthesized
cagttgtcccagccctgagctc

SEQ ID NO: 8349 - DNA, 22 bp, Artificial Sequence
  chemically synthesized
tcccagccctgagctcctctct

SEQ ID NO: 8350 - DNA, 22 bp, Artificial Sequence
  chemically synthesized
agctcctctctttgcagcatcc

SEQ ID NO: 8351 - DNA, 22 bp, Artificial Sequence
  chemically synthesized
ctctctttgcagcatccacctg

SEQ ID NO: 8352 - DNA, 22 bp, Artificial Sequence
  chemically synthesized
tctttgcagcatccacctgcaa

SEQ ID NO: 8353 - DNA, 22 bp, Artificial Sequence
  chemically synthesized
tttgcagcatccacctgcaaac

SEQ ID NO: 8354 - DNA, 22 bp, Artificial Sequence
  chemically synthesized
tgcagcatccacctgcaaacag

SEQ ID NO: 8355 - DNA, 22 bp, Artificial Sequence
  chemically synthesized
gcagcatccacctgcaaacaga

SEQ ID NO: 8356 - DNA, 22 bp, Artificial Sequence
  chemically synthesized
cagcatccacctgcaaacagaa

SEQ ID NO: 8357 - DNA, 22 bp, Artificial Sequence
  chemically synthesized
caaacagaacaccttctaggcc

SEQ ID NO: 8358 - DNA, 22 bp, Artificial Sequence
  chemically synthesized
ctaggccttggaccctgactct

SEQ ID NO: 8359 - DNA, 22 bp, Artificial Sequence
  chemically synthesized
taggccttggaccctgactctg

SEQ ID NO: 8360 - DNA, 22 bp, Artificial Sequence
  chemically synthesized
ggccttggaccctgactctgtg

SEQ ID NO: 8361 - DNA, 22 bp, Artificial Sequence
  chemically synthesized
ggaccctgactctgtggacttc

SEQ ID NO: 8362 - DNA, 22 bp, Artificial Sequence
  chemically synthesized
gaccctgactctgtggacttcc

SEQ ID NO: 8363 - DNA, 22 bp, Artificial Sequence
  chemically synthesized
actctgtggacttccttgtctt

SEQ ID NO: 8364 - DNA, 22 bp, Artificial Sequence
  chemically synthesized
tgtggacttccttgtcttctca

SEQ ID NO: 8365 - DNA, 22 bp, Artificial Sequence
  chemically synthesized
tggacttccttgtcttctcatt

SEQ ID NO: 8366 - DNA, 22 bp, Artificial Sequence
  chemically synthesized
ccttgtcttctcattcctatca

SEQ ID NO: 8367 - DNA, 22 bp, Artificial Sequence
  chemically synthesized
cttgtcttctcattcctatcac

SEQ ID NO: 8368 - DNA, 22 bp, Artificial Sequence
  chemically synthesized
gtcttctcattcctatcacccc

SEQ ID NO: 8369 - DNA, 22 bp, Artificial Sequence
  chemically synthesized
tcttctcattcctatcaccccc

SEQ ID NO: 8370 - DNA, 22 bp, Artificial Sequence
  chemically synthesized
ctcattcctatcaccccccgac

SEQ ID NO: 8371 - DNA, 22 bp, Artificial Sequence
  chemically synthesized
tcattcctatcaccccccgacc

SEQ ID NO: 8372 - DNA, 22 bp, Artificial Sequence
  chemically synthesized
attcctatcaccccccgaccca

SEQ ID NO: 8373 - DNA, 22 bp, Artificial Sequence
  chemically synthesized
ctatcaccccccgacccagcag

SEQ ID NO: 8374 - DNA, 22 bp, Artificial Sequence
  chemically synthesized
tcaccccccgacccagcaggac

SEQ ID NO: 8375 - DNA, 22 bp, Artificial Sequence
  chemically synthesized
gggaggctcagtcaggggccca

SEQ ID NO: 8376 - DNA, 22 bp, Artificial Sequence
  chemically synthesized
agtcaggggcccagaatcttcc

SEQ ID NO: 8377 - DNA, 22 bp, Artificial Sequence
  chemically synthesized
cctccccaggtcacttcctgcc

SEQ ID NO: 8378 - DNA, 22 bp, Artificial Sequence
  chemically synthesized
ctccccaggtcacttcctgcca

SEQ ID NO: 8379 - DNA, 22 bp, Artificial Sequence
  chemically synthesized
cccaggtcacttcctgccactg

SEQ ID NO: 8380 - DNA, 22 bp, Artificial Sequence
  chemically synthesized
cctgccactgtcctgagtcaga

SEQ ID NO: 8381 - DNA, 22 bp, Artificial Sequence
  chemically synthesized
ctgccactgtcctgagtcagac

SEQ ID NO: 8382 - DNA, 22 bp, Artificial Sequence
  chemically synthesized
ccactgtcctgagtcagacact

SEQ ID NO: 8383 - DNA, 22 bp, Artificial Sequence
  chemically synthesized
tcctgagtcagacactgcccct

SEQ ID NO: 8384 - DNA, 22 bp, Artificial Sequence
  chemically synthesized
agtcagacactgcccctgtaag

SEQ ID NO: 8385 - DNA, 22 bp, Artificial Sequence
  chemically synthesized
cccctgtaagtgactgtccata

SEQ ID NO: 8386 - DNA, 22 bp, Artificial Sequence
  chemically synthesized
taagtgactgtccataactctt

SEQ ID NO: 8387 - DNA, 22 bp, Artificial Sequence
  chemically synthesized
tccataactcttcatctttttc

SEQ ID NO: 8388 - DNA, 22 bp, Artificial Sequence
  chemically synthesized
ttcatctttttcacaccagtga

SEQ ID NO: 8389 - DNA, 22 bp, Artificial Sequence
  chemically synthesized
catctttttcacaccagtgact

SEQ ID NO: 8390 - DNA, 22 bp, Artificial Sequence
  chemically synthesized
atctttttcacaccagtgactt

SEQ ID NO: 8391 - DNA, 22 bp, Artificial Sequence
  chemically synthesized
tttcacaccagtgacttccacc

SEQ ID NO: 8392 - DNA, 22 bp, Artificial Sequence
  chemically synthesized
ttcacaccagtgacttccacct

SEQ ID NO: 8393 - DNA, 22 bp, Artificial Sequence
  chemically synthesized
tcacaccagtgacttccacctt

SEQ ID NO: 8394 - DNA, 22 bp, Artificial Sequence
  chemically synthesized
cacaccagtgacttccaccttc

SEQ ID NO: 8395 - DNA, 22 bp, Artificial Sequence
  chemically synthesized
acaccagtgacttccaccttcc

SEQ ID NO: 8396 - DNA, 22 bp, Artificial Sequence
  chemically synthesized
ccaccttccccactgcagccac

SEQ ID NO: 8397 - DNA, 22 bp, Artificial Sequence
  chemically synthesized
caccttccccactgcagccaca

SEQ ID NO: 8398 - DNA, 22 bp, Artificial Sequence
  chemically synthesized
ccccactgcagccacactcagg

SEQ ID NO: 8399 - DNA, 22 bp, Artificial Sequence
  chemically synthesized
cccactgcagccacactcagga

SEQ ID NO: 8400 - DNA, 22 bp, Artificial Sequence
  chemically synthesized
cagccacactcaggaccccatt

SEQ ID NO: 8401 - DNA, 22 bp, Artificial Sequence
  chemically synthesized
aggaccccatttgacccaggga

SEQ ID NO: 8402 - DNA, 22 bp, Artificial Sequence
  chemically synthesized
gacccagggaggcctctgacac

SEQ ID NO: 8403 - DNA, 22 bp, Artificial Sequence
  chemically synthesized
acccagggaggcctctgacacc

SEQ ID NO: 8404 - DNA, 22 bp, Artificial Sequence
  chemically synthesized
tgacacctccactgcccactcc

SEQ ID NO: 8405 - DNA, 22 bp, Artificial Sequence
  chemically synthesized
acacctccactgcccactcccg

SEQ ID NO: 8406 - DNA, 22 bp, Artificial Sequence
  chemically synthesized
cactgcccactcccgctctgag

SEQ ID NO: 8407 - DNA, 22 bp, Artificial Sequence
  chemically synthesized
cccactcccgctctgagcacag

SEQ ID NO: 8408 - DNA, 22 bp, Artificial Sequence
  chemically synthesized
ccgctctgagcacagccccacc

SEQ ID NO: 8409 - DNA, 22 bp, Artificial Sequence
  chemically synthesized
tgagcacagccccaccctccct

SEQ ID NO: 8410 - DNA, 22 bp, Artificial Sequence
  chemically synthesized
agcacagccccaccctccctct

SEQ ID NO: 8411 - DNA, 22 bp, Artificial Sequence
  chemically synthesized
cctctcactgcccccacccctt

SEQ ID NO: 8412 - DNA, 22 bp, Artificial Sequence
  chemically synthesized
tcactgcccccaccccttcctc

SEQ ID NO: 8413 - DNA, 22 bp, Artificial Sequence
  chemically synthesized
actgcccccaccccttcctcca

SEQ ID NO: 8414 - DNA, 22 bp, Artificial Sequence
  chemically synthesized
cccccaccccttcctccaaggc

SEQ ID NO: 8415 - DNA, 22 bp, Artificial Sequence
  chemically synthesized
cctccaaggcctttgcattcct

SEQ ID NO: 8416 - DNA, 22 bp, Artificial Sequence
  chemically synthesized
ctccaaggcctttgcattcctc

SEQ ID NO: 8417 - DNA, 22 bp, Artificial Sequence
  chemically synthesized
caaggcctttgcattcctctcc

SEQ ID NO: 8418 - DNA, 22 bp, Artificial Sequence
  chemically synthesized
tgcattcctctccatccagaag

SEQ ID NO: 8419 - DNA, 22 bp, Artificial Sequence
  chemically synthesized
gcattcctctccatccagaagc

SEQ ID NO: 8420 - DNA, 22 bp, Artificial Sequence
  chemically synthesized
cattcctctccatccagaagcg

SEQ ID NO: 8421 - DNA, 22 bp, Artificial Sequence
  chemically synthesized
ctctccatccagaagcgctcca

SEQ ID NO: 8422 - DNA, 22 bp, Artificial Sequence
  chemically synthesized
tccatccagaagcgctccatga

SEQ ID NO: 8423 - DNA, 22 bp, Artificial Sequence
  chemically synthesized
catccagaagcgctccatgacc

SEQ ID NO: 8424 - DNA, 22 bp, Artificial Sequence
  chemically synthesized
catgaccacggtgttccccacc

SEQ ID NO: 8425 - DNA, 22 bp, Artificial Sequence
  chemically synthesized
cccaccaagctggccctccatg

SEQ ID NO: 8426 - DNA, 22 bp, Artificial Sequence
  chemically synthesized
gccctccatggctgagtccctg

SEQ ID NO: 8427 - DNA, 22 bp, Artificial Sequence
  chemically synthesized
catggctgagtccctgactgct

SEQ ID NO: 8428 - DNA, 22 bp, Artificial Sequence
  chemically synthesized
agtccctgactgctgtcttcag

SEQ ID NO: 8429 - DNA, 22 bp, Artificial Sequence
  chemically synthesized
actgctgtcttcagcaccctcc

SEQ ID NO: 8430 - DNA, 22 bp, Artificial Sequence
  chemically synthesized
ctgtcttcagcaccctccactc

SEQ ID NO: 8431 - DNA, 22 bp, Artificial Sequence
  chemically synthesized
tcttcagcaccctccactcaga

SEQ ID NO: 8432 - DNA, 22 bp, Artificial Sequence
  chemically synthesized
cagcaccctccactcagagggt

SEQ ID NO: 8433 - DNA, 22 bp, Artificial Sequence
  chemically synthesized
agcaccctccactcagagggtc

SEQ ID NO: 8434 - DNA, 22 bp, Artificial Sequence
  chemically synthesized
cactcagagggtcctgtcctgc

SEQ ID NO: 8435 - DNA, 22 bp, Artificial Sequence
  chemically synthesized
agagggtcctgtcctgcttccc

SEQ ID NO: 8436 - DNA, 22 bp, Artificial Sequence
  chemically synthesized
tcctgcttcccagtccgactta

SEQ ID NO: 8437 - DNA, 22 bp, Artificial Sequence
  chemically synthesized
cttcccagtccgacttatcaac

SEQ ID NO: 8438 - DNA, 22 bp, Artificial Sequence
  chemically synthesized
cccagtccgacttatcaactcc

SEQ ID NO: 8439 - DNA, 22 bp, Artificial Sequence
  chemically synthesized
ccagtccgacttatcaactccc

SEQ ID NO: 8440 - DNA, 22 bp, Artificial Sequence
  chemically synthesized
atcaactcccaatgctgggtca

SEQ ID NO: 8441 - DNA, 22 bp, Artificial Sequence
  chemically synthesized
tcaactcccaatgctgggtcag

SEQ ID NO: 8442 - DNA, 22 bp, Artificial Sequence
  chemically synthesized
ccaatgctgggtcagcccagca

SEQ ID NO: 8443 - DNA, 22 bp, Artificial Sequence
  chemically synthesized
ggtcagcccagcaacgtgtctg

SEQ ID NO: 8444 - DNA, 22 bp, Artificial Sequence
  chemically synthesized
tatatccaccctgaaaccagac

SEQ ID NO: 8445 - DNA, 22 bp, Artificial Sequence
  chemically synthesized
aaaccagactgcccacagggta

SEQ ID NO: 8446 - DNA, 22 bp, Artificial Sequence
  chemically synthesized
cccacagggtagcccagctgtg

SEQ ID NO: 8447 - DNA, 22 bp, Artificial Sequence
  chemically synthesized
tgcctccaggtagctctgagat

SEQ ID NO: 8448 - DNA, 22 bp, Artificial Sequence
  chemically synthesized
caggtagctctgagatcatgca

SEQ ID NO: 8449 - DNA, 22 bp, Artificial Sequence
  chemically synthesized
tgagatcatgcaccagcattca

SEQ ID NO: 8450 - DNA, 22 bp, Artificial Sequence
  chemically synthesized
agatcatgcaccagcattcaat

SEQ ID NO: 8451 - DNA, 22 bp, Artificial Sequence
  chemically synthesized
aatttctccatgcttccatttt

SEQ ID NO: 8452 - DNA, 22 bp, Artificial Sequence
  chemically synthesized
ctccatgcttccattttctcgt

SEQ ID NO: 8453 - DNA, 22 bp, Artificial Sequence
  chemically synthesized
tccatgcttccattttctcgtg

SEQ ID NO: 8454 - DNA, 22 bp, Artificial Sequence
  chemically synthesized
catgcttccattttctcgtgtg

SEQ ID NO: 8455 - DNA, 22 bp, Artificial Sequence
  chemically synthesized
ccattttctcgtgtgtaaaatg

SEQ ID NO: 8456 - DNA, 22 bp, Artificial Sequence
  chemically synthesized
cattttctcgtgtgtaaaatgg

SEQ ID NO: 8457 - DNA, 22 bp, Artificial Sequence
  chemically synthesized
tctcgtgtgtaaaatggagatc

SEQ ID NO: 8458 - DNA, 22 bp, Artificial Sequence
  chemically synthesized
ctcgtgtgtaaaatggagatca

SEQ ID NO: 8459 - DNA, 22 bp, Artificial Sequence
  chemically synthesized
tcgtgtgtaaaatggagatcac

SEQ ID NO: 8460 - DNA, 22 bp, Artificial Sequence
  chemically synthesized
gtgtgtaaaatggagatcacag

SEQ ID NO: 8461 - DNA, 22 bp, Artificial Sequence
  chemically synthesized
cccgattggattgctcggataa

SEQ ID NO: 8462 - DNA, 22 bp, Artificial Sequence
  chemically synthesized
gattgctcggataattagatga

SEQ ID NO: 8463 - DNA, 22 bp, Artificial Sequence
  chemically synthesized
ctcggataattagatgagttaa

SEQ ID NO: 8464 - DNA, 22 bp, Artificial Sequence
  chemically synthesized
ggataattagatgagttaaaat

SEQ ID NO: 8465 - DNA, 22 bp, Artificial Sequence
  chemically synthesized
gatgagttaaaatatgtaatgt

SEQ ID NO: 8466 - DNA, 22 bp, Artificial Sequence
  chemically synthesized
aaatatgtaatgtgcttcttag

SEQ ID NO: 8467 - DNA, 22 bp, Artificial Sequence
  chemically synthesized
cttaggcaaaagtttgaacata

SEQ ID NO: 8468 - DNA, 22 bp, Artificial Sequence
  chemically synthesized
ttaggcaaaagtttgaacataa

SEQ ID NO: 8469 - DNA, 22 bp, Artificial Sequence
  chemically synthesized
aggcaaaagtttgaacataaaa

SEQ ID NO: 8470 - DNA, 22 bp, Artificial Sequence
  chemically synthesized
ggcaaaagtttgaacataaaag

SEQ ID NO: 8471 - DNA, 22 bp, Artificial Sequence
  chemically synthesized
gaacataaaagacagggtctgc

SEQ ID NO: 8472 - DNA, 22 bp, Artificial Sequence
  chemically synthesized
aacataaaagacagggtctgcc

SEQ ID NO: 8473 - DNA, 22 bp, Artificial Sequence
  chemically synthesized
cccaagatgggaagagttcttc

SEQ ID NO: 8474 - DNA, 22 bp, Artificial Sequence
  chemically synthesized
ttctctccccagaaacaatcaa

SEQ ID NO: 8475 - DNA, 22 bp, Artificial Sequence
  chemically synthesized
ctctccccagaaacaatcaaaa

SEQ ID NO: 8476 - DNA, 22 bp, Artificial Sequence
  chemically synthesized
tctccccagaaacaatcaaaac

SEQ ID NO: 8477 - DNA, 22 bp, Artificial Sequence
  chemically synthesized
tccccagaaacaatcaaaacaa

SEQ ID NO: 8478 - DNA, 22 bp, Artificial Sequence
  chemically synthesized
cccagaaacaatcaaaacaaaa

SEQ ID NO: 8479 - DNA, 22 bp, Artificial Sequence
  chemically synthesized
tagaacatggcagctttcaaga

SEQ ID NO: 8480 - DNA, 22 bp, Artificial Sequence
  chemically synthesized
tcaagactctggacatcaggca

SEQ ID NO: 8481 - DNA, 22 bp, Artificial Sequence
  chemically synthesized
caagactctggacatcaggcaa

SEQ ID NO: 8482 - DNA, 22 bp, Artificial Sequence
  chemically synthesized
aagactctggacatcaggcaag

SEQ ID NO: 8483 - DNA, 22 bp, Artificial Sequence
  chemically synthesized
tggacatcaggcaaggaggagt

SEQ ID NO: 8484 - DNA, 22 bp, Artificial Sequence
  chemically synthesized
gacatcaggcaaggaggagtaa

SEQ ID NO: 8485 - DNA, 22 bp, Artificial Sequence
  chemically synthesized
agggataagaagcaaacaacag

SEQ ID NO: 8486 - DNA, 22 bp, Artificial Sequence
  chemically synthesized
cgatcaccccagcttactgttt

SEQ ID NO: 8487 - DNA, 22 bp, Artificial Sequence
  chemically synthesized
actgtttggagagagtctgcag

SEQ ID NO: 8488 - DNA, 22 bp, Artificial Sequence
  chemically synthesized
ctgtttggagagagtctgcagg

SEQ ID NO: 8489 - DNA, 22 bp, Artificial Sequence
  chemically synthesized
tttggagagagtctgcaggtta

SEQ ID NO: 8490 - DNA, 22 bp, Artificial Sequence
  chemically synthesized
ggagagagtctgcaggttacag

SEQ ID NO: 8491 - DNA, 22 bp, Artificial Sequence
  chemically synthesized
gagagagtctgcaggttacagg

SEQ ID NO: 8492 - DNA, 22 bp, Artificial Sequence
  chemically synthesized
caggttacaggccaggaaaggg

SEQ ID NO: 8493 - DNA, 22 bp, Artificial Sequence
  chemically synthesized
caggccaggaaagggaagtcca

SEQ ID NO: 8494 - DNA, 22 bp, Artificial Sequence
  chemically synthesized
cccacgttgaggagatggagct

SEQ ID NO: 8495 - DNA, 22 bp, Artificial Sequence
  chemically synthesized
aggagatggagctgagagtccg

SEQ ID NO: 8496 - DNA, 22 bp, Artificial Sequence
  chemically synthesized
agagtccgaggagaccaaaaca

SEQ ID NO: 8497 - DNA, 22 bp, Artificial Sequence
  chemically synthesized
agagttcaaacgatcaaactga

SEQ ID NO: 8498 - DNA, 22 bp, Artificial Sequence
  chemically synthesized
aaacgatcaaactgactctaag

SEQ ID NO: 8499 - DNA, 22 bp, Artificial Sequence
  chemically synthesized
actctaagttgcttaactgcat

SEQ ID NO: 8500 - DNA, 22 bp, Artificial Sequence
  chemically synthesized
taagttgcttaactgcatcccg

SEQ ID NO: 8501 - DNA, 22 bp, Artificial Sequence
  chemically synthesized
agttgcttaactgcatcccgga

SEQ ID NO: 8502 - DNA, 22 bp, Artificial Sequence
  chemically synthesized
cttaactgcatcccggagcaaa

SEQ ID NO: 8503 - DNA, 22 bp, Artificial Sequence
  chemically synthesized
aactgcatcccggagcaaagct

SEQ ID NO: 8504 - DNA, 22 bp, Artificial Sequence
  chemically synthesized
actgcatcccggagcaaagctc

SEQ ID NO: 8505 - DNA, 22 bp, Artificial Sequence
  chemically synthesized
catcccggagcaaagctcaaga

SEQ ID NO: 8506 - DNA, 22 bp, Artificial Sequence
  chemically synthesized
aagaacatttagaggaatacaa

SEQ ID NO: 8507 - DNA, 22 bp, Artificial Sequence
  chemically synthesized
agaggaatacaaaaatatccag

SEQ ID NO: 8508 - DNA, 22 bp, Artificial Sequence
  chemically synthesized
gaggaatacaaaaatatccagc

SEQ ID NO: 8509 - DNA, 22 bp, Artificial Sequence
  chemically synthesized
acaatgtctggcagccaatcaa

SEQ ID NO: 8510 - DNA, 22 bp, Artificial Sequence
  chemically synthesized
gcagccaatcaaagattacaag

SEQ ID NO: 8511 - DNA, 22 bp, Artificial Sequence
  chemically synthesized
caaggcatgcaatgaaacggga

SEQ ID NO: 8512 - DNA, 22 bp, Artificial Sequence
  chemically synthesized
ataaatatcaaaagagatccag

SEQ ID NO: 8513 - DNA, 22 bp, Artificial Sequence
  chemically synthesized
acacggatgctagaattagcag

SEQ ID NO: 8514 - DNA, 22 bp, Artificial Sequence
  chemically synthesized
gaattagcaggcaaggatggta

SEQ ID NO: 8515 - DNA, 22 bp, Artificial Sequence
  chemically synthesized
gcaggcaaggatggtaaaacag

SEQ ID NO: 8516 - DNA, 22 bp, Artificial Sequence
  chemically synthesized
tagccatatcccattatgttca

SEQ ID NO: 8517 - DNA, 22 bp, Artificial Sequence
  chemically synthesized
tgttcaaaaaattaagtagaat

SEQ ID NO: 8518 - DNA, 22 bp, Artificial Sequence
  chemically synthesized
aaaaaattaagtagaattgtgg

SEQ ID NO: 8519 - DNA, 22 bp, Artificial Sequence
  chemically synthesized
agtagaattgtggaggatattt

SEQ ID NO: 8520 - DNA, 22 bp, Artificial Sequence
  chemically synthesized
tggaggatatttaagagtcccc

SEQ ID NO: 8521 - DNA, 22 bp, Artificial Sequence
  chemically synthesized
aagagtccccaggtgaacttct

SEQ ID NO: 8522 - DNA, 22 bp, Artificial Sequence
  chemically synthesized
agagtccccaggtgaacttcta

SEQ ID NO: 8523 - DNA, 22 bp, Artificial Sequence
  chemically synthesized
ctagagataaaaactacaatgt

SEQ ID NO: 8524 - DNA, 22 bp, Artificial Sequence
  chemically synthesized
tagagataaaaactacaatgtc

SEQ ID NO: 8525 - DNA, 22 bp, Artificial Sequence
  chemically synthesized
gagataaaaactacaatgtctg

SEQ ID NO: 8526 - DNA, 22 bp, Artificial Sequence
  chemically synthesized
caatgtctgaaatgaaaaaaca

SEQ ID NO: 8527 - DNA, 22 bp, Artificial Sequence
  chemically synthesized
aaatgaaaaaacacactggcca

SEQ ID NO: 8528 - DNA, 22 bp, Artificial Sequence
  chemically synthesized
gccaggcgccgtggctcacgcc

SEQ ID NO: 8529 - DNA, 22 bp, Artificial Sequence
  chemically synthesized
acgcctggaatcccagcactgt

SEQ ID NO: 8530 - DNA, 22 bp, Artificial Sequence
  chemically synthesized
gaatcccagcactgtgggaggc

SEQ ID NO: 8531 - DNA, 22 bp, Artificial Sequence
  chemically synthesized
tgggaggccaaggcgggcagat

SEQ ID NO: 8532 - DNA, 22 bp, Artificial Sequence
  chemically synthesized
gctaacatggtgaaaccccatc

SEQ ID NO: 8533 - DNA, 22 bp, Artificial Sequence
  chemically synthesized
acatggtgaaaccccatctcta

SEQ ID NO: 8534 - DNA, 22 bp, Artificial Sequence
  chemically synthesized
tactaaaaatacaaaaaattag

SEQ ID NO: 8535 - DNA, 22 bp, Artificial Sequence
  chemically synthesized
ctaaaaatacaaaaaattagcc

SEQ ID NO: 8536 - DNA, 22 bp, Artificial Sequence
  chemically synthesized
aaaatacaaaaaattagccaga

SEQ ID NO: 8537 - DNA, 22 bp, Artificial Sequence
  chemically synthesized
gccagacgtggtggcaggcgcc

SEQ ID NO: 8538 - DNA, 22 bp, Artificial Sequence
  chemically synthesized
tagtcccagctactcgggaggc

SEQ ID NO: 8539 - DNA, 22 bp, Artificial Sequence
  chemically synthesized
ctcgggaggctgaggcaggaga

SEQ ID NO: 8540 - DNA, 22 bp, Artificial Sequence
  chemically synthesized
gggaggctgaggcaggagaatg

SEQ ID NO: 8541 - DNA, 22 bp, Artificial Sequence
  chemically synthesized
aggcaggagaatggcatgaacc

SEQ ID NO: 8542 - DNA, 22 bp, Artificial Sequence
  chemically synthesized
gcagtgagccaagatcgcgcca

SEQ ID NO: 8543 - DNA, 22 bp, Artificial Sequence
  chemically synthesized
cagtgagccaagatcgcgccac

SEQ ID NO: 8544 - DNA, 22 bp, Artificial Sequence
  chemically synthesized
cactccggcctgggcaacagag

SEQ ID NO: 8545 - DNA, 22 bp, Artificial Sequence
  chemically synthesized
cggcctgggcaacagagcgaga

SEQ ID NO: 8546 - DNA, 22 bp, Artificial Sequence
  chemically synthesized
ggcaacagagcgagactccgcc

SEQ ID NO: 8547 - DNA, 22 bp, Artificial Sequence
  chemically synthesized
cgcctccaaaaaaaaaaaaaag

SEQ ID NO: 8548 - DNA, 22 bp, Artificial Sequence
  chemically synthesized
caaaaaaaaaaaaaagaaaaga

SEQ ID NO: 8549 - DNA, 22 bp, Artificial Sequence
  chemically synthesized
gatggaaataatggaagatgag

SEQ ID NO: 8550 - DNA, 22 bp, Artificial Sequence
  chemically synthesized
agggccaggcactgtggatcac

SEQ ID NO: 8551 - DNA, 22 bp, Artificial Sequence
  chemically synthesized
gggccaggcactgtggatcaca

SEQ ID NO: 8552 - DNA, 22 bp, Artificial Sequence
  chemically synthesized
tggatcacatctgtaatcccag

SEQ ID NO: 8553 - DNA, 22 bp, Artificial Sequence
  chemically synthesized
taatcccagcactttgggaggt

SEQ ID NO: 8554 - DNA, 22 bp, Artificial Sequence
  chemically synthesized
tgggaggtcgacacggggggaa

SEQ ID NO: 8555 - DNA, 22 bp, Artificial Sequence
  chemically synthesized
gggaggtcgacacggggggaat

SEQ ID NO: 8556 - DNA, 22 bp, Artificial Sequence
  chemically synthesized
ggaggtcgacacggggggaatc

SEQ ID NO: 8557 - DNA, 22 bp, Artificial Sequence
  chemically synthesized
gagcccaggagctcaagactag

SEQ ID NO: 8558 - DNA, 22 bp, Artificial Sequence
  chemically synthesized
agcccaggagctcaagactagt

SEQ ID NO: 8559 - DNA, 22 bp, Artificial Sequence
  chemically synthesized
aagactagtctgggcagcatgg

SEQ ID NO: 8560 - DNA, 22 bp, Artificial Sequence
  chemically synthesized
gtctgggcagcatggcaaaacc

SEQ ID NO: 8561 - DNA, 22 bp, Artificial Sequence
  chemically synthesized
ggcagcatggcaaaacccctct

SEQ ID NO: 8562 - DNA, 22 bp, Artificial Sequence
  chemically synthesized
tacatggcaaaaccgtctctac

SEQ ID NO: 8563 - DNA, 22 bp, Artificial Sequence
  chemically synthesized
catggcaaaaccgtctctacaa

SEQ ID NO: 8564 - DNA, 22 bp, Artificial Sequence
  chemically synthesized
tacaaaaaaaaatttttaatta

SEQ ID NO: 8565 - DNA, 22 bp, Artificial Sequence
  chemically synthesized
caaaaaaaaatttttaattagc

SEQ ID NO: 8566 - DNA, 22 bp, Artificial Sequence
  chemically synthesized
ttaattagccaggtgtggtgcc

SEQ ID NO: 8567 - DNA, 22 bp, Artificial Sequence
  chemically synthesized
taattagccaggtgtggtgcca

SEQ ID NO: 8568 - DNA, 22 bp, Artificial Sequence
  chemically synthesized
aattagccaggtgtggtgccac

SEQ ID NO: 8569 - DNA, 22 bp, Artificial Sequence
  chemically synthesized
attagccaggtgtggtgccaca

SEQ ID NO: 8570 - DNA, 22 bp, Artificial Sequence
  chemically synthesized
gccaggtgtggtgccacatgcc

SEQ ID NO: 8571 - DNA, 22 bp, Artificial Sequence
  chemically synthesized
tagtcccagctacctgggaggc

SEQ ID NO: 8572 - DNA, 22 bp, Artificial Sequence
  chemically synthesized
cctgggaggctgaagtggaagg

SEQ ID NO: 8573 - DNA, 22 bp, Artificial Sequence
  chemically synthesized
ggaggctgaagtggaaggatcg

SEQ ID NO: 8574 - DNA, 22 bp, Artificial Sequence
  chemically synthesized
aagtggaaggatcgcctgagcc

SEQ ID NO: 8575 - DNA, 22 bp, Artificial Sequence
  chemically synthesized
agcccaggaggtggaggccaca

SEQ ID NO: 8576 - DNA, 22 bp, Artificial Sequence
  chemically synthesized
tgacaagctactgcattccagc

SEQ ID NO: 8577 - DNA, 22 bp, Artificial Sequence
  chemically synthesized
ctgcattccagcctgggcaaca

SEQ ID NO: 8578 - DNA, 22 bp, Artificial Sequence
  chemically synthesized
cattccagcctgggcaacagag

SEQ ID NO: 8579 - DNA, 22 bp, Artificial Sequence
  chemically synthesized
cagcctgggcaacagagtgaga

SEQ ID NO: 8580 - DNA, 22 bp, Artificial Sequence
  chemically synthesized
ggcaacagagtgagatgagaga

SEQ ID NO: 8581 - DNA, 22 bp, Artificial Sequence
  chemically synthesized
tagttaacttaatgaacagcaa

SEQ ID NO: 8582 - DNA, 22 bp, Artificial Sequence
  chemically synthesized
agttaacttaatgaacagcaat

SEQ ID NO: 8583 - DNA, 22 bp, Artificial Sequence
  chemically synthesized
gttaacttaatgaacagcaata

SEQ ID NO: 8584 - DNA, 22 bp, Artificial Sequence
  chemically synthesized
acttaatgaacagcaataactc

SEQ ID NO: 8585 - DNA, 22 bp, Artificial Sequence
  chemically synthesized
aatgaacagcaataactctata

SEQ ID NO: 8586 - DNA, 22 bp, Artificial Sequence
  chemically synthesized
atgaacagcaataactctataa

SEQ ID NO: 8587 - DNA, 22 bp, Artificial Sequence
  chemically synthesized
tataaaatgaaacactgggaga

SEQ ID NO: 8588 - DNA, 22 bp, Artificial Sequence
  chemically synthesized
taaaatgaaacactgggagaaa

SEQ ID NO: 8589 - DNA, 22 bp, Artificial Sequence
  chemically synthesized
ggagaaaaaagaattaaaaaat

SEQ ID NO: 8590 - DNA, 22 bp, Artificial Sequence
  chemically synthesized
aaaaatggaaagagaatgagtg

SEQ ID NO: 8591 - DNA, 22 bp, Artificial Sequence
  chemically synthesized
tgggacccttaatacatgcata

SEQ ID NO: 8592 - DNA, 22 bp, Artificial Sequence
  chemically synthesized
aatacatgcataattgaaatct

SEQ ID NO: 8593 - DNA, 22 bp, Artificial Sequence
  chemically synthesized
atacatgcataattgaaatctt

SEQ ID NO: 8594 - DNA, 22 bp, Artificial Sequence
  chemically synthesized
aaatctttaaaagaaaaagggg

SEQ ID NO: 8595 - DNA, 22 bp, Artificial Sequence
  chemically synthesized
taaaagaaaaagggggtagcag

SEQ ID NO: 8596 - DNA, 22 bp, Artificial Sequence
  chemically synthesized
aaaagaaaaagggggtagcaga

SEQ ID NO: 8597 - DNA, 22 bp, Artificial Sequence
  chemically synthesized
aaagaaaaagggggtagcagaa

SEQ ID NO: 8598 - DNA, 22 bp, Artificial Sequence
  chemically synthesized
agacaagtggaagatgggcccc

SEQ ID NO: 8599 - DNA, 22 bp, Artificial Sequence
  chemically synthesized
atcagtgtcagctcccatgatg

SEQ ID NO: 8600 - DNA, 22 bp, Artificial Sequence
  chemically synthesized
ccatgatgacgttcccccagcc

SEQ ID NO: 8601 - DNA, 22 bp, Artificial Sequence
  chemically synthesized
ccccagcccccaccacccgggc

SEQ ID NO: 8602 - DNA, 22 bp, Artificial Sequence
  chemically synthesized
ctggagggaaatgcggtgactt

SEQ ID NO: 8603 - DNA, 22 bp, Artificial Sequence
  chemically synthesized
gagggaaatgcggtgactttgc

SEQ ID NO: 8604 - DNA, 22 bp, Artificial Sequence
  chemically synthesized
tgctacatcccttcagacggtc

SEQ ID NO: 8605 - DNA, 22 bp, Artificial Sequence
  chemically synthesized
gctacatcccttcagacggtcc

SEQ ID NO: 8606 - DNA, 22 bp, Artificial Sequence
  chemically synthesized
ctacatcccttcagacggtccc

SEQ ID NO: 8607 - DNA, 22 bp, Artificial Sequence
  chemically synthesized
catcccttcagacggtccctca

SEQ ID NO: 8608 - DNA, 22 bp, Artificial Sequence
  chemically synthesized
cagacggtccctcactggtgtc

SEQ ID NO: 8609 - DNA, 22 bp, Artificial Sequence
  chemically synthesized
agacggtccctcactggtgtcc

SEQ ID NO: 8610 - DNA, 22 bp, Artificial Sequence
  chemically synthesized
actggtgtccctcagcccattc

SEQ ID NO: 8611 - DNA, 22 bp, Artificial Sequence
  chemically synthesized
gtgtccctcagcccattcgcgt

SEQ ID NO: 8612 - DNA, 22 bp, Artificial Sequence
  chemically synthesized
agcccattcgcgtgagctcact

SEQ ID NO: 8613 - DNA, 22 bp, Artificial Sequence
  chemically synthesized
gcgtgagctcactctcccatta

SEQ ID NO: 8614 - DNA, 22 bp, Artificial Sequence
  chemically synthesized
actctcccattaatttcagaaa

SEQ ID NO: 8615 - DNA, 22 bp, Artificial Sequence
  chemically synthesized
tcccattaatttcagaaatcct

SEQ ID NO: 8616 - DNA, 22 bp, Artificial Sequence
  chemically synthesized
ccattaatttcagaaatcctgg

SEQ ID NO: 8617 - DNA, 22 bp, Artificial Sequence
  chemically synthesized
atttcagaaatcctggcctctc

SEQ ID NO: 8618 - DNA, 22 bp, Artificial Sequence
  chemically synthesized
cagaaatcctggcctctctcca

SEQ ID NO: 8619 - DNA, 22 bp, Artificial Sequence
  chemically synthesized
agaaatcctggcctctctccaa

SEQ ID NO: 8620 - DNA, 22 bp, Artificial Sequence
  chemically synthesized
gcctctctccaagcctcctgct

SEQ ID NO: 8621 - DNA, 22 bp, Artificial Sequence
  chemically synthesized
tctccaagcctcctgctcaaac

SEQ ID NO: 8622 - DNA, 22 bp, Artificial Sequence
  chemically synthesized
tccaagcctcctgctcaaactc

SEQ ID NO: 8623 - DNA, 22 bp, Artificial Sequence
  chemically synthesized
caagcctcctgctcaaactcta

SEQ ID NO: 8624 - DNA, 22 bp, Artificial Sequence
  chemically synthesized
ctgctcaaactctaaattctgt

SEQ ID NO: 8625 - DNA, 22 bp, Artificial Sequence
  chemically synthesized
ctcaaactctaaattctgtcac

SEQ ID NO: 8626 - DNA, 22 bp, Artificial Sequence
  chemically synthesized
aaactctaaattctgtcaccct

SEQ ID NO: 8627 - DNA, 22 bp, Artificial Sequence
  chemically synthesized
taaattctgtcaccctcagaag

SEQ ID NO: 8628 - DNA, 22 bp, Artificial Sequence
  chemically synthesized
aattctgtcaccctcagaagat

SEQ ID NO: 8629 - DNA, 22 bp, Artificial Sequence
  chemically synthesized
tgtcaccctcagaagattcagc

SEQ ID NO: 8630 - DNA, 22 bp, Artificial Sequence
  chemically synthesized
tcaccctcagaagattcagcag

SEQ ID NO: 8631 - DNA, 22 bp, Artificial Sequence
  chemically synthesized
agaagattcagcagcatcccgt

SEQ ID NO: 8632 - DNA, 22 bp, Artificial Sequence
  chemically synthesized
agcagcatcccgtattctctct

SEQ ID NO: 8633 - DNA, 22 bp, Artificial Sequence
  chemically synthesized
tctctgagtgttcactatgtac

SEQ ID NO: 8634 - DNA, 22 bp, Artificial Sequence
  chemically synthesized
tctgagtgttcactatgtaccg

SEQ ID NO: 8635 - DNA, 22 bp, Artificial Sequence
  chemically synthesized
tgagtgttcactatgtaccggg

SEQ ID NO: 8636 - DNA, 22 bp, Artificial Sequence
  chemically synthesized
agtgttcactatgtaccgggtg

SEQ ID NO: 8637 - DNA, 22 bp, Artificial Sequence
  chemically synthesized
actatgtaccgggtgccgtgtg

SEQ ID NO: 8638 - DNA, 22 bp, Artificial Sequence
  chemically synthesized
tgtaccgggtgccgtgtgggca

SEQ ID NO: 8639 - DNA, 22 bp, Artificial Sequence
  chemically synthesized
gagttgcagaggagagtgaggc

SEQ ID NO: 8640 - DNA, 22 bp, Artificial Sequence
  chemically synthesized
cagaggagagtgaggcggacag

SEQ ID NO: 8641 - DNA, 22 bp, Artificial Sequence
  chemically synthesized
tgcctgtggggacaccgcctgg

SEQ ID NO: 8642 - DNA, 22 bp, Artificial Sequence
  chemically synthesized
cctgtggggacaccgcctggtg

SEQ ID NO: 8643 - DNA, 22 bp, Artificial Sequence
  chemically synthesized
tggggacaccgcctggtgggaa

SEQ ID NO: 8644 - DNA, 22 bp, Artificial Sequence
  chemically synthesized
gtgggaagtccagccagccccc

SEQ ID NO: 8645 - DNA, 22 bp, Artificial Sequence
  chemically synthesized
cagagagaggagatgctactgg

SEQ ID NO: 8646 - DNA, 22 bp, Artificial Sequence
  chemically synthesized
ctggtgttcctgagtggtcctc

SEQ ID NO: 8647 - DNA, 22 bp, Artificial Sequence
  chemically synthesized
gtgttcctgagtggtcctcggg

SEQ ID NO: 8648 - DNA, 22 bp, Artificial Sequence
  chemically synthesized
ctgagtggtcctcgggagggac

SEQ ID NO: 8649 - DNA, 22 bp, Artificial Sequence
  chemically synthesized
agtggtcctcgggagggacctc

SEQ ID NO: 8650 - DNA, 22 bp, Artificial Sequence
  chemically synthesized
gggagggacctcctatccctcc

SEQ ID NO: 8651 - DNA, 22 bp, Artificial Sequence
  chemically synthesized
ctatccctcctgtcccctgccc

SEQ ID NO: 8652 - DNA, 22 bp, Artificial Sequence
  chemically synthesized
tccctcctgtcccctgccctgc

SEQ ID NO: 8653 - DNA, 22 bp, Artificial Sequence
  chemically synthesized
ctgtcccctgccctgccctgcc

SEQ ID NO: 8654 - DNA, 22 bp, Artificial Sequence
  chemically synthesized
tcccctgccctgccctgcccag

SEQ ID NO: 8655 - DNA, 22 bp, Artificial Sequence
  chemically synthesized
ccctgccctgcccagcaccggc

SEQ ID NO: 8656 - DNA, 22 bp, Artificial Sequence
  chemically synthesized
ccctgcccagcaccggccctcc

SEQ ID NO: 8657 - DNA, 22 bp, Artificial Sequence
  chemically synthesized
cccagcaccggccctccctcgg

SEQ ID NO: 8658 - DNA, 22 bp, Artificial Sequence
  chemically synthesized
cctcggttggccagcctcagga

SEQ ID NO: 8659 - DNA, 22 bp, Artificial Sequence
  chemically synthesized
ggttggccagcctcaggaatga

SEQ ID NO: 8660 - DNA, 22 bp, Artificial Sequence
  chemically synthesized
gccagcctcaggaatgaggagt

SEQ ID NO: 8661 - DNA, 22 bp, Artificial Sequence
  chemically synthesized
aggaatgaggagtccctcattc

SEQ ID NO: 8662 - DNA, 22 bp, Artificial Sequence
  chemically synthesized
attccagcccagctaaccaatc

SEQ ID NO: 8663 - DNA, 22 bp, Artificial Sequence
  chemically synthesized
cagcccagctaaccaatcccct

SEQ ID NO: 8664 - DNA, 22 bp, Artificial Sequence
  chemically synthesized
accaatccccttcctaagctcc

SEQ ID NO: 8665 - DNA, 22 bp, Artificial Sequence
  chemically synthesized
cctaagctccaagcccctgctc

SEQ ID NO: 8666 - DNA, 22 bp, Artificial Sequence
  chemically synthesized
ctaagctccaagcccctgctcc

SEQ ID NO: 8667 - DNA, 22 bp, Artificial Sequence
  chemically synthesized
agctccaagcccctgctcctcc

SEQ ID NO: 8668 - DNA, 22 bp, Artificial Sequence
  chemically synthesized
caagcccctgctcctcctgcct

SEQ ID NO: 8669 - DNA, 22 bp, Artificial Sequence
  chemically synthesized
ctcctcctgcctccatggaacc

SEQ ID NO: 8670 - DNA, 22 bp, Artificial Sequence
  chemically synthesized
ctcctgcctccatggaacccgg

SEQ ID NO: 8671 - DNA, 22 bp, Artificial Sequence
  chemically synthesized
ctgcctccatggaacccggctc

SEQ ID NO: 8672 - DNA, 22 bp, Artificial Sequence
  chemically synthesized
cctccatggaacccggctccac

SEQ ID NO: 8673 - DNA, 22 bp, Artificial Sequence
  chemically synthesized
catggaacccggctccaccacc

SEQ ID NO: 8674 - DNA, 22 bp, Artificial Sequence
  chemically synthesized
caccaccagcacccacacacct

SEQ ID NO: 8675 - DNA, 22 bp, Artificial Sequence
  chemically synthesized
acactcctccattcctggctct

SEQ ID NO: 8676 - DNA, 22 bp, Artificial Sequence
  chemically synthesized
ctccattcctggctcttgccct

SEQ ID NO: 8677 - DNA, 22 bp, Artificial Sequence
  chemically synthesized
cattcctggctcttgcccttct

SEQ ID NO: 8678 - DNA, 22 bp, Artificial Sequence
  chemically synthesized
ctggctcttgcccttctgccta

SEQ ID NO: 8679 - DNA, 22 bp, Artificial Sequence
  chemically synthesized
gctcttgcccttctgcctagca

SEQ ID NO: 8680 - DNA, 22 bp, Artificial Sequence
  chemically synthesized
ttgcccttctgcctagcactgc

SEQ ID NO: 8681 - DNA, 22 bp, Artificial Sequence
  chemically synthesized
gcccttctgcctagcactgctc

SEQ ID NO: 8682 - DNA, 22 bp, Artificial Sequence
  chemically synthesized
cccttctgcctagcactgctca

SEQ ID NO: 8683 - DNA, 22 bp, Artificial Sequence
  chemically synthesized
ctgcctagcactgctcagatct

SEQ ID NO: 8684 - DNA, 22 bp, Artificial Sequence
  chemically synthesized
tgcctagcactgctcagatctc

SEQ ID NO: 8685 - DNA, 22 bp, Artificial Sequence
  chemically synthesized
cctagcactgctcagatctctc

SEQ ID NO: 8686 - DNA, 22 bp, Artificial Sequence
  chemically synthesized
gcactgctcagatctctctcac

SEQ ID NO: 8687 - DNA, 22 bp, Artificial Sequence
  chemically synthesized
ctcagatctctctcaccttaaa

SEQ ID NO: 8688 - DNA, 22 bp, Artificial Sequence
  chemically synthesized
agatctctctcaccttaaaatc

SEQ ID NO: 8689 - DNA, 22 bp, Artificial Sequence
  chemically synthesized
tctcaccttaaaatcttttccc

SEQ ID NO: 8690 - DNA, 22 bp, Artificial Sequence
  chemically synthesized
tcaccttaaaatcttttcccac

SEQ ID NO: 8691 - DNA, 22 bp, Artificial Sequence
  chemically synthesized
accttaaaatcttttcccacca

SEQ ID NO: 8692 - DNA, 22 bp, Artificial Sequence
  chemically synthesized
aaaatcttttcccaccagcctg

SEQ ID NO: 8693 - DNA, 22 bp, Artificial Sequence
  chemically synthesized
aaatcttttcccaccagcctgg

SEQ ID NO: 8694 - DNA, 22 bp, Artificial Sequence
  chemically synthesized
ttcccaccagcctgggcaacat

SEQ ID NO: 8695 - DNA, 22 bp, Artificial Sequence
  chemically synthesized
tcccaccagcctgggcaacata

SEQ ID NO: 8696 - DNA, 22 bp, Artificial Sequence
  chemically synthesized
cccaccagcctgggcaacatag

SEQ ID NO: 8697 - DNA, 22 bp, Artificial Sequence
  chemically synthesized
ccaccagcctgggcaacatagc

SEQ ID NO: 8698 - DNA, 22 bp, Artificial Sequence
  chemically synthesized
ggcaacatagcaagaccccatt

SEQ ID NO: 8699 - DNA, 22 bp, Artificial Sequence
  chemically synthesized
ctctaaaaaattttttttaatt

SEQ ID NO: 8700 - DNA, 22 bp, Artificial Sequence
  chemically synthesized
tctaaaaaattttttttaattt

SEQ ID NO: 8701 - DNA, 22 bp, Artificial Sequence
  chemically synthesized
taaaaaattttttttaatttgc

SEQ ID NO: 8702 - DNA, 22 bp, Artificial Sequence
  chemically synthesized
aaaaattttttttaatttgcca

SEQ ID NO: 8703 - DNA, 22 bp, Artificial Sequence
  chemically synthesized
tttttaatttgccaggcacagt

SEQ ID NO: 8704 - DNA, 22 bp, Artificial Sequence
  chemically synthesized
ttttaatttgccaggcacagtg

SEQ ID NO: 8705 - DNA, 22 bp, Artificial Sequence
  chemically synthesized
tttaatttgccaggcacagtgg

SEQ ID NO: 8706 - DNA, 22 bp, Artificial Sequence
  chemically synthesized
ttaatttgccaggcacagtggt

SEQ ID NO: 8707 - DNA, 22 bp, Artificial Sequence
  chemically synthesized
taatttgccaggcacagtggtg

SEQ ID NO: 8708 - DNA, 22 bp, Artificial Sequence
  chemically synthesized
aatttgccaggcacagtggtgc

SEQ ID NO: 8709 - DNA, 22 bp, Artificial Sequence
  chemically synthesized
atttgccaggcacagtggtgca

SEQ ID NO: 8710 - DNA, 22 bp, Artificial Sequence
  chemically synthesized
gccaggcacagtggtgcacacc

SEQ ID NO: 8711 - DNA, 22 bp, Artificial Sequence
  chemically synthesized
ccaggcacagtggtgcacacct

SEQ ID NO: 8712 - DNA, 22 bp, Artificial Sequence
  chemically synthesized
taagtcctaactacttgggagg

SEQ ID NO: 8713 - DNA, 22 bp, Artificial Sequence
  chemically synthesized
actacttgggaggctgaggtgg

SEQ ID NO: 8714 - DNA, 22 bp, Artificial Sequence
  chemically synthesized
cttgggaggctgaggtgggagg

SEQ ID NO: 8715 - DNA, 22 bp, Artificial Sequence
  chemically synthesized
gggaggctgaggtgggaggatg

SEQ ID NO: 8716 - DNA, 22 bp, Artificial Sequence
  chemically synthesized
ggaggctgaggtgggaggatgg

SEQ ID NO: 8717 - DNA, 22 bp, Artificial Sequence
  chemically synthesized
aggtgggaggatggcttgagcc

SEQ ID NO: 8718 - DNA, 22 bp, Artificial Sequence
  chemically synthesized
gagcccaggagttcgaggttgc

SEQ ID NO: 8719 - DNA, 22 bp, Artificial Sequence
  chemically synthesized
agcccaggagttcgaggttgca

SEQ ID NO: 8720 - DNA, 22 bp, Artificial Sequence
  chemically synthesized
gaggttgcagtgagctatgatc

SEQ ID NO: 8721 - DNA, 22 bp, Artificial Sequence
  chemically synthesized
cagtgagctatgatcctgccac

SEQ ID NO: 8722 - DNA, 22 bp, Artificial Sequence
  chemically synthesized
tgatcctgccactacactcctg

SEQ ID NO: 8723 - DNA, 22 bp, Artificial Sequence
  chemically synthesized
ccactacactcctgtctctaaa

SEQ ID NO: 8724 - DNA, 22 bp, Artificial Sequence
  chemically synthesized
cactcctgtctctaaaaaaaaa

SEQ ID NO: 8725 - DNA, 22 bp, Artificial Sequence
  chemically synthesized
ctgtctctaaaaaaaaaatgtc

SEQ ID NO: 8726 - DNA, 22 bp, Artificial Sequence
  chemically synthesized
tctctaaaaaaaaaatgtccaa

SEQ ID NO: 8727 - DNA, 22 bp, Artificial Sequence
  chemically synthesized
taaaaaaaaaatgtccaagata

SEQ ID NO: 8728 - DNA, 22 bp, Artificial Sequence
  chemically synthesized
aaaaaaaaatgtccaagatact

SEQ ID NO: 8729 - DNA, 22 bp, Artificial Sequence
  chemically synthesized
aggtccttcagtcaagatttat

SEQ ID NO: 8730 - DNA, 22 bp, Artificial Sequence
  chemically synthesized
ggtccttcagtcaagatttatt

SEQ ID NO: 8731 - DNA, 22 bp, Artificial Sequence
  chemically synthesized
cagtcaagatttattacagaag

SEQ ID NO: 8732 - DNA, 22 bp, Artificial Sequence
  chemically synthesized
agtcaagatttattacagaagg

SEQ ID NO: 8733 - DNA, 22 bp, Artificial Sequence
  chemically synthesized
attacagaaggatccagggaag

SEQ ID NO: 8734 - DNA, 22 bp, Artificial Sequence
  chemically synthesized
ttacagaaggatccagggaagg

SEQ ID NO: 8735 - DNA, 22 bp, Artificial Sequence
  chemically synthesized
cagaaggatccagggaagggtc

SEQ ID NO: 8736 - DNA, 22 bp, Artificial Sequence
  chemically synthesized
gggagatgagaggagcagggat

SEQ ID NO: 8737 - DNA, 22 bp, Artificial Sequence
  chemically synthesized
ggagatgagaggagcagggatc

SEQ ID NO: 8738 - DNA, 22 bp, Artificial Sequence
  chemically synthesized
ccaggatctctctgtgctcacg

SEQ ID NO: 8739 - DNA, 22 bp, Artificial Sequence
  chemically synthesized
caggatctctctgtgctcacgt

SEQ ID NO: 8740 - DNA, 22 bp, Artificial Sequence
  chemically synthesized
tctgtgctcacgtcccccaccc

SEQ ID NO: 8741 - DNA, 22 bp, Artificial Sequence
  chemically synthesized
tgtgctcacgtcccccacccat

SEQ ID NO: 8742 - DNA, 22 bp, Artificial Sequence
  chemically synthesized
tgctcacgtcccccacccatcc

SEQ ID NO: 8743 - DNA, 22 bp, Artificial Sequence
  chemically synthesized
acgtcccccacccatcccaact

SEQ ID NO: 8744 - DNA, 22 bp, Artificial Sequence
  chemically synthesized
accccacctctacacacacaca

SEQ ID NO: 8745 - DNA, 22 bp, Artificial Sequence
  chemically synthesized
tacacacacacacacacacaca

SEQ ID NO: 8746 - DNA, 22 bp, Artificial Sequence
  chemically synthesized
cacacacacacacacacacata

SEQ ID NO: 8747 - DNA, 22 bp, Artificial Sequence
  chemically synthesized
acacacacactcacgcaacaca

SEQ ID NO: 8748 - DNA, 22 bp, Artificial Sequence
  chemically synthesized
acgcaacacactcacacacaca

SEQ ID NO: 8749 - DNA, 22 bp, Artificial Sequence
  chemically synthesized
acacacacaacatacataacac

SEQ ID NO: 8750 - DNA, 22 bp, Artificial Sequence
  chemically synthesized
acaacatacacacacaacacac

SEQ ID NO: 8751 - DNA, 22 bp, Artificial Sequence
  chemically synthesized
gcacaacatacacacacgcaca

SEQ ID NO: 8752 - DNA, 22 bp, Artificial Sequence
  chemically synthesized
acacaacacacaaacatacata

SEQ ID NO: 8753 - DNA, 22 bp, Artificial Sequence
  chemically synthesized
acacaatacacacacacaacac

SEQ ID NO: 8754 - DNA, 22 bp, Artificial Sequence
  chemically synthesized
atacacaacatacatacacaca

SEQ ID NO: 8755 - DNA, 22 bp, Artificial Sequence
  chemically synthesized
acatacacaacatacactcgca

SEQ ID NO: 8756 - DNA, 22 bp, Artificial Sequence
  chemically synthesized
gcacaacatacacacatgcaca

SEQ ID NO: 8757 - DNA, 22 bp, Artificial Sequence
  chemically synthesized
acacacaagatacacacaacat

SEQ ID NO: 8758 - DNA, 22 bp, Artificial Sequence
  chemically synthesized
acacaacatacacacacaacac

SEQ ID NO: 8759 - DNA, 22 bp, Artificial Sequence
  chemically synthesized
tcacacacaacataccctctca

SEQ ID NO: 8760 - DNA, 22 bp, Artificial Sequence
  chemically synthesized
acacacaacataccctctcaca

SEQ ID NO: 8761 - DNA, 22 bp, Artificial Sequence
  chemically synthesized
tcacatacacgacatacacaca

SEQ ID NO: 8762 - DNA, 22 bp, Artificial Sequence
  chemically synthesized
acatacacgacatacacacaca

SEQ ID NO: 8763 - DNA, 22 bp, Artificial Sequence
  chemically synthesized
tcgcgcacatatacacacacac

SEQ ID NO: 8764 - DNA, 22 bp, Artificial Sequence
  chemically synthesized
gcgcacatatacacacacacaa

SEQ ID NO: 8765 - DNA, 22 bp, Artificial Sequence
  chemically synthesized
actcacacacacacacagagtc

SEQ ID NO: 8766 - DNA, 22 bp, Artificial Sequence
  chemically synthesized
acacacacacacagagtcccag

SEQ ID NO: 8767 - DNA, 22 bp, Artificial Sequence
  chemically synthesized
aatctgcattcctcatatgcac

SEQ ID NO: 8768 - DNA, 22 bp, Artificial Sequence
  chemically synthesized
cattcctcatatgcacatacgt

SEQ ID NO: 8769 - DNA, 22 bp, Artificial Sequence
  chemically synthesized
ctcatatgcacatacgtgcaca

SEQ ID NO: 8770 - DNA, 22 bp, Artificial Sequence
  chemically synthesized
atatgcacatacgtgcacacgc

SEQ ID NO: 8771 - DNA, 22 bp, Artificial Sequence
  chemically synthesized
ttgggttgggaggagaagggca

SEQ ID NO: 8772 - DNA, 22 bp, Artificial Sequence
  chemically synthesized
gggttgggaggagaagggcagg

SEQ ID NO: 8773 - DNA, 22 bp, Artificial Sequence
  chemically synthesized
ggttgggaggagaagggcaggc

SEQ ID NO: 8774 - DNA, 22 bp, Artificial Sequence
  chemically synthesized
ggaggagaagggcaggcagtta

SEQ ID NO: 8775 - DNA, 22 bp, Artificial Sequence
  chemically synthesized
tcttccagatctccccacacct

SEQ ID NO: 8776 - DNA, 22 bp, Artificial Sequence
  chemically synthesized
ccagatctccccacacctctgg

SEQ ID NO: 8777 - DNA, 22 bp, Artificial Sequence
  chemically synthesized
cagatctccccacacctctggc

SEQ ID NO: 8778 - DNA, 22 bp, Artificial Sequence
  chemically synthesized
cccacacctctggcacatgcct

SEQ ID NO: 8779 - DNA, 22 bp, Artificial Sequence
  chemically synthesized
tggcacatgcctttcctggggt

SEQ ID NO: 8780 - DNA, 22 bp, Artificial Sequence
  chemically synthesized
gcacatgcctttcctggggtcc

SEQ ID NO: 8781 - DNA, 22 bp, Artificial Sequence
  chemically synthesized
tcctggggtcctggggtagaca

SEQ ID NO: 8782 - DNA, 22 bp, Artificial Sequence
  chemically synthesized
cctggggtcctggggtagacag

SEQ ID NO: 8783 - DNA, 22 bp, Artificial Sequence
  chemically synthesized
ctggggtcctggggtagacagg

SEQ ID NO: 8784 - DNA, 22 bp, Artificial Sequence
  chemically synthesized
gggtcctggggtagacaggaag

SEQ ID NO: 8785 - DNA, 22 bp, Artificial Sequence
  chemically synthesized
gggtagacaggaaggtgaggtg

SEQ ID NO: 8786 - DNA, 22 bp, Artificial Sequence
  chemically synthesized
ctcagtccctgttcacagagtg

SEQ ID NO: 8787 - DNA, 22 bp, Artificial Sequence
  chemically synthesized
agtccctgttcacagagtgggt

SEQ ID NO: 8788 - DNA, 22 bp, Artificial Sequence
  chemically synthesized
ttcacagagtgggtgcggcaga

SEQ ID NO: 8789 - DNA, 22 bp, Artificial Sequence
  chemically synthesized
acagagtgggtgcggcagagac

SEQ ID NO: 8790 - DNA, 22 bp, Artificial Sequence
  chemically synthesized
aaagggacagagcaatcatgag

SEQ ID NO: 8791 - DNA, 22 bp, Artificial Sequence
  chemically synthesized
agacagagggggagcaaagccg

SEQ ID NO: 8792 - DNA, 22 bp, Artificial Sequence
  chemically synthesized
cacacttgcctttcaaaaatgg

SEQ ID NO: 8793 - DNA, 22 bp, Artificial Sequence
  chemically synthesized
gcctttcaaaaatggatttcct

SEQ ID NO: 8794 - DNA, 22 bp, Artificial Sequence
  chemically synthesized
cctttcaaaaatggatttcctc

SEQ ID NO: 8795 - DNA, 22 bp, Artificial Sequence
  chemically synthesized
tcaaaaatggatttcctctcct

SEQ ID NO: 8796 - DNA, 22 bp, Artificial Sequence
  chemically synthesized
caaaaatggatttcctctcctg

SEQ ID NO: 8797 - DNA, 22 bp, Artificial Sequence
  chemically synthesized
aaaaatggatttcctctcctgg

SEQ ID NO: 8798 - DNA, 22 bp, Artificial Sequence
  chemically synthesized
cctctcctgggattcagcctgc

SEQ ID NO: 8799 - DNA, 22 bp, Artificial Sequence
  chemically synthesized
ctctcctgggattcagcctgcg

SEQ ID NO: 8800 - DNA, 22 bp, Artificial Sequence
  chemically synthesized
tcctgggattcagcctgcgagt

SEQ ID NO: 8801 - DNA, 22 bp, Artificial Sequence
  chemically synthesized
ctgggattcagcctgcgagtgc

SEQ ID NO: 8802 - DNA, 22 bp, Artificial Sequence
  chemically synthesized
ggattcagcctgcgagtgcctg

SEQ ID NO: 8803 - DNA, 22 bp, Artificial Sequence
  chemically synthesized
agcctgcgagtgcctggcccct

SEQ ID NO: 8804 - DNA, 22 bp, Artificial Sequence
  chemically synthesized
cgagtgcctggcccctcacctt

SEQ ID NO: 8805 - DNA, 22 bp, Artificial Sequence
  chemically synthesized
gcccctcaccttgatggaaagg

SEQ ID NO: 8806 - DNA, 22 bp, Artificial Sequence
  chemically synthesized
accttgatggaaaggatggtca

SEQ ID NO: 8807 - DNA, 22 bp, Artificial Sequence
  chemically synthesized
gatggaaaggatggtcattttc

SEQ ID NO: 8808 - DNA, 22 bp, Artificial Sequence
  chemically synthesized
atggaaaggatggtcattttcc

SEQ ID NO: 8809 - DNA, 22 bp, Artificial Sequence
  chemically synthesized
tcctccgagctcagctgctgga

SEQ ID NO: 8810 - DNA, 22 bp, Artificial Sequence
  chemically synthesized
cctccgagctcagctgctggat

SEQ ID NO: 8811 - DNA, 22 bp, Artificial Sequence
  chemically synthesized
ctccgagctcagctgctggata

SEQ ID NO: 8812 - DNA, 22 bp, Artificial Sequence
  chemically synthesized
cgagctcagctgctggatatct

SEQ ID NO: 8813 - DNA, 22 bp, Artificial Sequence
  chemically synthesized
agctgctggatatcttgaaagt

SEQ ID NO: 8814 - DNA, 22 bp, Artificial Sequence
  chemically synthesized
ctggatatcttgaaagtccttg

SEQ ID NO: 8815 - DNA, 22 bp, Artificial Sequence
  chemically synthesized
gatatcttgaaagtccttggcc

SEQ ID NO: 8816 - DNA, 22 bp, Artificial Sequence
  chemically synthesized
gaaagtccttggccatgatggg

SEQ ID NO: 8817 - DNA, 22 bp, Artificial Sequence
  chemically synthesized
aaagtccttggccatgatgggg

SEQ ID NO: 8818 - DNA, 22 bp, Artificial Sequence
  chemically synthesized
ggccatgatggggcccgggctg

SEQ ID NO: 8819 - DNA, 22 bp, Artificial Sequence
  chemically synthesized
gccatgatggggcccgggctgg

SEQ ID NO: 8820 - DNA, 22 bp, Artificial Sequence
  chemically synthesized
gagctggagctggagctgggct

SEQ ID NO: 8821 - DNA, 22 bp, Artificial Sequence
  chemically synthesized
gagctggagctgggctgggctg

SEQ ID NO: 8822 - DNA, 22 bp, Artificial Sequence
  chemically synthesized
gagctgggctgggctgggctga

SEQ ID NO: 8823 - DNA, 22 bp, Artificial Sequence
  chemically synthesized
ggctgggctgggctgaggttgc

SEQ ID NO: 8824 - DNA, 22 bp, Artificial Sequence
  chemically synthesized
ggctgggctgaggttgctctga

SEQ ID NO: 8825 - DNA, 22 bp, Artificial Sequence
  chemically synthesized
ggctgaggttgctctgagggct

SEQ ID NO: 8826 - DNA, 22 bp, Artificial Sequence
  chemically synthesized
aggttgctctgagggctggggc

SEQ ID NO: 8827 - DNA, 22 bp, Artificial Sequence
  chemically synthesized
ctctgagggctggggctggggc

SEQ ID NO: 8828 - DNA, 22 bp, Artificial Sequence
  chemically synthesized
tgagggctggggctggggcaga

SEQ ID NO: 8829 - DNA, 22 bp, Artificial Sequence
  chemically synthesized
agggctggggctggggcagagg

SEQ ID NO: 8830 - DNA, 22 bp, Artificial Sequence
  chemically synthesized
gggctggggcagaggtgcagat

SEQ ID NO: 8831 - DNA, 22 bp, Artificial Sequence
  chemically synthesized
gggcagaggtgcagattcacgt

SEQ ID NO: 8832 - DNA, 22 bp, Artificial Sequence
  chemically synthesized
acgtggaggttgatggtgggat

SEQ ID NO: 8833 - DNA, 22 bp, Artificial Sequence
  chemically synthesized
atggtgggatggaacgcagggt

SEQ ID NO: 8834 - DNA, 22 bp, Artificial Sequence
  chemically synthesized
ggggtggtggcctgggtaggat

SEQ ID NO: 8835 - DNA, 22 bp, Artificial Sequence
  chemically synthesized
agatcctacccaggccaccacc

SEQ ID NO: 8836 - DNA, 22 bp, Artificial Sequence
  chemically synthesized
cccaggccaccaccccgaaccc

SEQ ID NO: 8837 - DNA, 22 bp, Artificial Sequence
  chemically synthesized
cgaccctgcgttccatcccacc

SEQ ID NO: 8838 - DNA, 22 bp, Artificial Sequence
  chemically synthesized
cgttccatcccaccatcaacct

SEQ ID NO: 8839 - DNA, 22 bp, Artificial Sequence
  chemically synthesized
catcccaccatcaacctccacg

SEQ ID NO: 8840 - DNA, 22 bp, Artificial Sequence
  chemically synthesized
cacgtgaatctgcacctctgcc

SEQ ID NO: 8841 - DNA, 22 bp, Artificial Sequence
  chemically synthesized
cacctctgccccagccccagcc

SEQ ID NO: 8842 - DNA, 22 bp, Artificial Sequence
  chemically synthesized
tgccccagccccagccctcaga

SEQ ID NO: 8843 - DNA, 22 bp, Artificial Sequence
  chemically synthesized
ccccagccccagccctcagagc

SEQ ID NO: 8844 - DNA, 22 bp, Artificial Sequence
  chemically synthesized
agagcaacctcagcccagccca

SEQ ID NO: 8845 - DNA, 22 bp, Artificial Sequence
  chemically synthesized
agcccagcccagcccagctcca

SEQ ID NO: 8846 - DNA, 22 bp, Artificial Sequence
  chemically synthesized
cagctccagctccagcccgggc

SEQ ID NO: 8847 - DNA, 22 bp, Artificial Sequence
  chemically synthesized
cagctccagcccgggccccatc

SEQ ID NO: 8848 - DNA, 22 bp, Artificial Sequence
  chemically synthesized
cagcccgggccccatcatggcc

SEQ ID NO: 8849 - DNA, 22 bp, Artificial Sequence
  chemically synthesized
tcaagatatccagcagctgagc

SEQ ID NO: 8850 - DNA, 22 bp, Artificial Sequence
  chemically synthesized
caagatatccagcagctgagct

SEQ ID NO: 8851 - DNA, 22 bp, Artificial Sequence
  chemically synthesized
aagatatccagcagctgagctc

SEQ ID NO: 8852 - DNA, 22 bp, Artificial Sequence
  chemically synthesized
agctcggaggaaaatgaccatc

SEQ ID NO: 8853 - DNA, 22 bp, Artificial Sequence
  chemically synthesized
ggaggaaaatgaccatcctttc

SEQ ID NO: 8854 - DNA, 22 bp, Artificial Sequence
  chemically synthesized
tccatcaaggtgaggggccagg

SEQ ID NO: 8855 - DNA, 22 bp, Artificial Sequence
  chemically synthesized
ccatcaaggtgaggggccaggc

SEQ ID NO: 8856 - DNA, 22 bp, Artificial Sequence
  chemically synthesized
catcaaggtgaggggccaggca

SEQ ID NO: 8857 - DNA, 22 bp, Artificial Sequence
  chemically synthesized
gcaggctgaatcccaggagagg

SEQ ID NO: 8858 - DNA, 22 bp, Artificial Sequence
  chemically synthesized
aatcccaggagaggaaatccat

SEQ ID NO: 8859 - DNA, 22 bp, Artificial Sequence
  chemically synthesized
ttgaaaggcaagtgtgcagttt

SEQ ID NO: 8860 - DNA, 22 bp, Artificial Sequence
  chemically synthesized
tgaaaggcaagtgtgcagtttc

SEQ ID NO: 8861 - DNA, 22 bp, Artificial Sequence
  chemically synthesized
gaaaggcaagtgtgcagtttct

SEQ ID NO: 8862 - DNA, 22 bp, Artificial Sequence
  chemically synthesized
aaaggcaagtgtgcagtttctg

SEQ ID NO: 8863 - DNA, 22 bp, Artificial Sequence
  chemically synthesized
ctgcggctttgctccccctctg

SEQ ID NO: 8864 - DNA, 22 bp, Artificial Sequence
  chemically synthesized
tgcggctttgctccccctctgt

SEQ ID NO: 8865 - DNA, 22 bp, Artificial Sequence
  chemically synthesized
cggctttgctccccctctgtct

SEQ ID NO: 8866 - DNA, 22 bp, Artificial Sequence
  chemically synthesized
tgctccccctctgtctcagctc

SEQ ID NO: 8867 - DNA, 22 bp, Artificial Sequence
  chemically synthesized
gctccccctctgtctcagctca

SEQ ID NO: 8868 - DNA, 22 bp, Artificial Sequence
  chemically synthesized
ctccccctctgtctcagctcat

SEQ ID NO: 8869 - DNA, 22 bp, Artificial Sequence
  chemically synthesized
cccctctgtctcagctcatgat

SEQ ID NO: 8870 - DNA, 22 bp, Artificial Sequence
  chemically synthesized
tgtctcagctcatgattgctct

SEQ ID NO: 8871 - DNA, 22 bp, Artificial Sequence
  chemically synthesized
tctcagctcatgattgctctgt

SEQ ID NO: 8872 - DNA, 22 bp, Artificial Sequence
  chemically synthesized
agctcatgattgctctgtccct

SEQ ID NO: 8873 - DNA, 22 bp, Artificial Sequence
  chemically synthesized
atgattgctctgtccctttgag

SEQ ID NO: 8874 - DNA, 22 bp, Artificial Sequence
  chemically synthesized
ctctgtccctttgaggtctctg

SEQ ID NO: 8875 - DNA, 22 bp, Artificial Sequence
  chemically synthesized
tgtccctttgaggtctctgccg

SEQ ID NO: 8876 - DNA, 22 bp, Artificial Sequence
  chemically synthesized
tccctttgaggtctctgccgca

SEQ ID NO: 8877 - DNA, 22 bp, Artificial Sequence
  chemically synthesized
tgaggtctctgccgcacccact

SEQ ID NO: 8878 - DNA, 22 bp, Artificial Sequence
  chemically synthesized
gaggtctctgccgcacccactc

SEQ ID NO: 8879 - DNA, 22 bp, Artificial Sequence
  chemically synthesized
aggtctctgccgcacccactct

SEQ ID NO: 8880 - DNA, 22 bp, Artificial Sequence
  chemically synthesized
tgccgcacccactctgtgaaca

SEQ ID NO: 8881 - DNA, 22 bp, Artificial Sequence
  chemically synthesized
ccgcacccactctgtgaacagg

SEQ ID NO: 8882 - DNA, 22 bp, Artificial Sequence
  chemically synthesized
tgtgaacagggactgaggaggg

SEQ ID NO: 8883 - DNA, 22 bp, Artificial Sequence
  chemically synthesized
tgaacagggactgaggagggcc

SEQ ID NO: 8884 - DNA, 22 bp, Artificial Sequence
  chemically synthesized
aggagggcccgacacccccgct

SEQ ID NO: 8885 - DNA, 22 bp, Artificial Sequence
  chemically synthesized
gttccctcacctcaccttcctg

SEQ ID NO: 8886 - DNA, 22 bp, Artificial Sequence
  chemically synthesized
ttccctcacctcaccttcctgt

SEQ ID NO: 8887 - DNA, 22 bp, Artificial Sequence
  chemically synthesized
cctcacctcaccttcctgtcta

SEQ ID NO: 8888 - DNA, 22 bp, Artificial Sequence
  chemically synthesized
acctcaccttcctgtctacccc

SEQ ID NO: 8889 - DNA, 22 bp, Artificial Sequence
  chemically synthesized
accttcctgtctaccccaggac

SEQ ID NO: 8890 - DNA, 22 bp, Artificial Sequence
  chemically synthesized
cctgtctaccccaggaccccag

SEQ ID NO: 8891 - DNA, 22 bp, Artificial Sequence
  chemically synthesized
ctgtctaccccaggaccccagg

SEQ ID NO: 8892 - DNA, 22 bp, Artificial Sequence
  chemically synthesized
tctaccccaggaccccaggaaa

SEQ ID NO: 8893 - DNA, 22 bp, Artificial Sequence
  chemically synthesized
ccccaggaccccaggaaaggca

SEQ ID NO: 8894 - DNA, 22 bp, Artificial Sequence
  chemically synthesized
gaagataactgcctgcccttct

SEQ ID NO: 8895 - DNA, 22 bp, Artificial Sequence
  chemically synthesized
cctgcccttctcctcccaaccc

SEQ ID NO: 8896 - DNA, 22 bp, Artificial Sequence
  chemically synthesized
cccttctcctcccaacccaaga

SEQ ID NO: 8897 - DNA, 22 bp, Artificial Sequence
  chemically synthesized
ctcctcccaacccaagaacaca

SEQ ID NO: 8898 - DNA, 22 bp, Artificial Sequence
  chemically synthesized
tcctcccaacccaagaacacat

SEQ ID NO: 8899 - DNA, 22 bp, Artificial Sequence
  chemically synthesized
ctcccaacccaagaacacatgt

SEQ ID NO: 8900 - DNA, 22 bp, Artificial Sequence
  chemically synthesized
ccaacccaagaacacatgtgcc

SEQ ID NO: 8901 - DNA, 22 bp, Artificial Sequence
  chemically synthesized
gtatgtgcgtgtgcacgtatgt

SEQ ID NO: 8902 - DNA, 22 bp, Artificial Sequence
  chemically synthesized
agctgggactctgtgtgtgtgt

SEQ ID NO: 8903 - DNA, 22 bp, Artificial Sequence
  chemically synthesized
ggactctgtgtgtgtgtgtgag

SEQ ID NO: 8904 - DNA, 22 bp, Artificial Sequence
  chemically synthesized
tgtgtgtgtgtgtgagtgaatg

SEQ ID NO: 8905 - DNA, 22 bp, Artificial Sequence
  chemically synthesized
tgtgtgtgtgtgagtgaatgtt

SEQ ID NO: 8906 - DNA, 22 bp, Artificial Sequence
  chemically synthesized
tgtgtgtgtatatgtgcgcgag

SEQ ID NO: 8907 - DNA, 22 bp, Artificial Sequence
  chemically synthesized
tgtgtgtgtatgtcgtgtatgt

SEQ ID NO: 8908 - DNA, 22 bp, Artificial Sequence
  chemically synthesized
tgtgtgagagtgtgttgtgtgt

SEQ ID NO: 8909 - DNA, 22 bp, Artificial Sequence
  chemically synthesized
tgtgtgtatgttgtgtgagtat

SEQ ID NO: 8910 - DNA, 22 bp, Artificial Sequence
  chemically synthesized
tgtgagtatatgttgtgtgtat

SEQ ID NO: 8911 - DNA, 22 bp, Artificial Sequence
  chemically synthesized
tgtgtatcttgtgtgtgagtgt

SEQ ID NO: 8912 - DNA, 22 bp, Artificial Sequence
  chemically synthesized
gtgtgtgagtgtatgttgtgtg

SEQ ID NO: 8913 - DNA, 22 bp, Artificial Sequence
  chemically synthesized
tgtgtgagtgtatgttgtgtgt

SEQ ID NO: 8914 - DNA, 22 bp, Artificial Sequence
  chemically synthesized
tgtgttgtgtgtgtatcttgtg

SEQ ID NO: 8915 - DNA, 22 bp, Artificial Sequence
  chemically synthesized
tgtgtgtatcttgtgcatgtgt

SEQ ID NO: 8916 - DNA, 22 bp, Artificial Sequence
  chemically synthesized
gtgcatgtgtgtatgttgtgcg

SEQ ID NO: 8917 - DNA, 22 bp, Artificial Sequence
  chemically synthesized
tgcatgtgtgtatgttgtgcga

SEQ ID NO: 8918 - DNA, 22 bp, Artificial Sequence
  chemically synthesized
tgcgagtgtatgttgtgtatgt

SEQ ID NO: 8919 - DNA, 22 bp, Artificial Sequence
  chemically synthesized
tgtatgtgagtgtgtgtatgtt

SEQ ID NO: 8920 - DNA, 22 bp, Artificial Sequence
  chemically synthesized
tgtgtatgttgtgtgtatgtat

SEQ ID NO: 8921 - DNA, 22 bp, Artificial Sequence
  chemically synthesized
tgtgtatgtatgttgtgtatga

SEQ ID NO: 8922 - DNA, 22 bp, Artificial Sequence
  chemically synthesized
tgtatgagtgtgtgtatgttgt

SEQ ID NO: 8923 - DNA, 22 bp, Artificial Sequence
  chemically synthesized
tgtgtgtgtacgttgtgtatgt

SEQ ID NO: 8924 - DNA, 22 bp, Artificial Sequence
  chemically synthesized
tgtatgttgtgtgtgtgttgtg

SEQ ID NO: 8925 - DNA, 22 bp, Artificial Sequence
  chemically synthesized
tgtgtgtgttgtgtgtgtgtat

SEQ ID NO: 8926 - DNA, 22 bp, Artificial Sequence
  chemically synthesized
tgtgtgtgtattgtgtgagtgt

SEQ ID NO: 8927 - DNA, 22 bp, Artificial Sequence
  chemically synthesized
tgtgagtgtatgtatgtttgtg

SEQ ID NO: 8928 - DNA, 22 bp, Artificial Sequence
  chemically synthesized
gtgtgttgtgtgagtgttgtgt

SEQ ID NO: 8929 - DNA, 22 bp, Artificial Sequence
  chemically synthesized
tgtgttgtgtgagtgttgtgta

SEQ ID NO: 8930 - DNA, 22 bp, Artificial Sequence
  chemically synthesized
tgtgagtgttgtgtatgttgtg

SEQ ID NO: 8931 - DNA, 22 bp, Artificial Sequence
  chemically synthesized
tgtatgttgtgcgtgtgtgtat

SEQ ID NO: 8932 - DNA, 22 bp, Artificial Sequence
  chemically synthesized
tgcgtgtgtgtatgttgtgcga

SEQ ID NO: 8933 - DNA, 22 bp, Artificial Sequence
  chemically synthesized
tgcgagtgtgtgtgttgtgtgt

SEQ ID NO: 8934 - DNA, 22 bp, Artificial Sequence
  chemically synthesized
tgtgtgtatgttgtgagtgtgt

SEQ ID NO: 8935 - DNA, 22 bp, Artificial Sequence
  chemically synthesized
tgagtgtgttatgtatgttgtg

SEQ ID NO: 8936 - DNA, 22 bp, Artificial Sequence
  chemically synthesized
tgtatgttgtgtgtgtgagtgt

SEQ ID NO: 8937 - DNA, 22 bp, Artificial Sequence
  chemically synthesized
tgtgtgtgagtgtgttgcgtga

SEQ ID NO: 8938 - DNA, 22 bp, Artificial Sequence
  chemically synthesized
cgtgagtgtgtgtgttagtgtg

SEQ ID NO: 8939 - DNA, 22 bp, Artificial Sequence
  chemically synthesized
gtgtgtgtatgtgattgtatgt

SEQ ID NO: 8940 - DNA, 22 bp, Artificial Sequence
  chemically synthesized
tatgtgtgtgtgtgtgtgtgtg

SEQ ID NO: 8941 - DNA, 22 bp, Artificial Sequence
  chemically synthesized
ggatgggtgggggacgtgagca

SEQ ID NO: 8942 - DNA, 22 bp, Artificial Sequence
  chemically synthesized
gaagatccctgctcctctcatc

SEQ ID NO: 8943 - DNA, 22 bp, Artificial Sequence
  chemically synthesized
ctcctctcatctcccaagaccc

SEQ ID NO: 8944 - DNA, 22 bp, Artificial Sequence
  chemically synthesized
ctctcatctcccaagacccttc

SEQ ID NO: 8945 - DNA, 22 bp, Artificial Sequence
  chemically synthesized
tcatctcccaagacccttccct

SEQ ID NO: 8946 - DNA, 22 bp, Artificial Sequence
  chemically synthesized
atctcccaagacccttccctgg

SEQ ID NO: 8947 - DNA, 22 bp, Artificial Sequence
  chemically synthesized
ccaagacccttccctggatcct

SEQ ID NO: 8948 - DNA, 22 bp, Artificial Sequence
  chemically synthesized
ccctggatccttctgtaataaa

SEQ ID NO: 8949 - DNA, 22 bp, Artificial Sequence
  chemically synthesized
cctggatccttctgtaataaat

SEQ ID NO: 8950 - DNA, 22 bp, Artificial Sequence
  chemically synthesized
gatccttctgtaataaatcttg

SEQ ID NO: 8951 - DNA, 22 bp, Artificial Sequence
  chemically synthesized
ctgtaataaatcttgactgaag

SEQ ID NO: 8952 - DNA, 22 bp, Artificial Sequence
  chemically synthesized
tgtaataaatcttgactgaagg

SEQ ID NO: 8953 - DNA, 22 bp, Artificial Sequence
  chemically synthesized
taataaatcttgactgaaggac

SEQ ID NO: 8954 - DNA, 22 bp, Artificial Sequence
  chemically synthesized
gactgaaggacctaagtatctt

SEQ ID NO: 8955 - DNA, 22 bp, Artificial Sequence
  chemically synthesized
actgaaggacctaagtatcttg

SEQ ID NO: 8956 - DNA, 22 bp, Artificial Sequence
  chemically synthesized
aaggacctaagtatcttggaca

SEQ ID NO: 8957 - DNA, 22 bp, Artificial Sequence
  chemically synthesized
agtatcttggacattttttttt

SEQ ID NO: 8958 - DNA, 22 bp, Artificial Sequence
  chemically synthesized
ggacattttttttttagagaca

SEQ ID NO: 8959 - DNA, 22 bp, Artificial Sequence
  chemically synthesized
gacattttttttttagagacag

SEQ ID NO: 8960 - DNA, 22 bp, Artificial Sequence
  chemically synthesized
tttttttagagacaggagtgta

SEQ ID NO: 8961 - DNA, 22 bp, Artificial Sequence
  chemically synthesized
ttttttagagacaggagtgtag

SEQ ID NO: 8962 - DNA, 22 bp, Artificial Sequence
  chemically synthesized
tttttagagacaggagtgtagt

SEQ ID NO: 8963 - DNA, 22 bp, Artificial Sequence
  chemically synthesized
ttttagagacaggagtgtagtg

SEQ ID NO: 8964 - DNA, 22 bp, Artificial Sequence
  chemically synthesized
tttagagacaggagtgtagtgg

SEQ ID NO: 8965 - DNA, 22 bp, Artificial Sequence
  chemically synthesized
ttagagacaggagtgtagtggc

SEQ ID NO: 8966 - DNA, 22 bp, Artificial Sequence
  chemically synthesized
tagagacaggagtgtagtggca

SEQ ID NO: 8967 - DNA, 22 bp, Artificial Sequence
  chemically synthesized
agagacaggagtgtagtggcag

SEQ ID NO: 8968 - DNA, 22 bp, Artificial Sequence
  chemically synthesized
gagacaggagtgtagtggcagg

SEQ ID NO: 8969 - DNA, 22 bp, Artificial Sequence
  chemically synthesized
actgcaacctcgaactcctggg

SEQ ID NO: 8970 - DNA, 22 bp, Artificial Sequence
  chemically synthesized
caacctcgaactcctgggctca

SEQ ID NO: 8971 - DNA, 22 bp, Artificial Sequence
  chemically synthesized
gaactcctgggctcaagccatc

SEQ ID NO: 8972 - DNA, 22 bp, Artificial Sequence
  chemically synthesized
ctgggctcaagccatcctccca

SEQ ID NO: 8973 - DNA, 22 bp, Artificial Sequence
  chemically synthesized
ggctcaagccatcctcccacct

SEQ ID NO: 8974 - DNA, 22 bp, Artificial Sequence
  chemically synthesized
aagccatcctcccacctcagcc

SEQ ID NO: 8975 - DNA, 22 bp, Artificial Sequence
  chemically synthesized
ccacctcagcctcccaagtagt

SEQ ID NO: 8976 - DNA, 22 bp, Artificial Sequence
  chemically synthesized
agcctcccaagtagttaggact

SEQ ID NO: 8977 - DNA, 22 bp, Artificial Sequence
  chemically synthesized
ccaagtagttaggacttacagg

SEQ ID NO: 8978 - DNA, 22 bp, Artificial Sequence
  chemically synthesized
ggacttacaggtgtgcaccact

SEQ ID NO: 8979 - DNA, 22 bp, Artificial Sequence
  chemically synthesized
acaggtgtgcaccactgtgcct

SEQ ID NO: 8980 - DNA, 22 bp, Artificial Sequence
  chemically synthesized
caggtgtgcaccactgtgcctg

SEQ ID NO: 8981 - DNA, 22 bp, Artificial Sequence
  chemically synthesized
tgcctggcaaattaaaaaaaat

SEQ ID NO: 8982 - DNA, 22 bp, Artificial Sequence
  chemically synthesized
gcaaattaaaaaaaatttttta

SEQ ID NO: 8983 - DNA, 22 bp, Artificial Sequence
  chemically synthesized
aaaaaaattttttagagaaatg

SEQ ID NO: 8984 - DNA, 22 bp, Artificial Sequence
  chemically synthesized
tttagagaaatggggtcttgct

SEQ ID NO: 8985 - DNA, 22 bp, Artificial Sequence
  chemically synthesized
ttagagaaatggggtcttgcta

SEQ ID NO: 8986 - DNA, 22 bp, Artificial Sequence
  chemically synthesized
tagagaaatggggtcttgctat

SEQ ID NO: 8987 - DNA, 22 bp, Artificial Sequence
  chemically synthesized
agagaaatggggtcttgctatg

SEQ ID NO: 8988 - DNA, 22 bp, Artificial Sequence
  chemically synthesized
gagaaatggggtcttgctatgt

SEQ ID NO: 8989 - DNA, 22 bp, Artificial Sequence
  chemically synthesized
gctatgttgcccaggctggtgg

SEQ ID NO: 8990 - DNA, 22 bp, Artificial Sequence
  chemically synthesized
ctatgttgcccaggctggtggg

SEQ ID NO: 8991 - DNA, 22 bp, Artificial Sequence
  chemically synthesized
tgttgcccaggctggtgggaaa

SEQ ID NO: 8992 - DNA, 22 bp, Artificial Sequence
  chemically synthesized
cccaggctggtgggaaaagatt

SEQ ID NO: 8993 - DNA, 22 bp, Artificial Sequence
  chemically synthesized
gtgggaaaagattttaaggtga

SEQ ID NO: 8994 - DNA, 22 bp, Artificial Sequence
  chemically synthesized
taaggtgagagagatctgagca

SEQ ID NO: 8995 - DNA, 22 bp, Artificial Sequence
  chemically synthesized
aaggtgagagagatctgagcag

SEQ ID NO: 8996 - DNA, 22 bp, Artificial Sequence
  chemically synthesized
aggtgagagagatctgagcagt

SEQ ID NO: 8997 - DNA, 22 bp, Artificial Sequence
  chemically synthesized
agcagtgctaggcagaagggca

SEQ ID NO: 8998 - DNA, 22 bp, Artificial Sequence
  chemically synthesized
ggcagaagggcaagagccagga

SEQ ID NO: 8999 - DNA, 22 bp, Artificial Sequence
  chemically synthesized
gtggtggagccgggttccatgg

SEQ ID NO: 9000 - DNA, 22 bp, Artificial Sequence
  chemically synthesized
catggaggcaggaggagcaggg

SEQ ID NO: 9001 - DNA, 22 bp, Artificial Sequence
  chemically synthesized
ggagcttaggaaggggattggt

SEQ ID NO: 9002 - DNA, 22 bp, Artificial Sequence
  chemically synthesized
gagcttaggaaggggattggtt

SEQ ID NO: 9003 - DNA, 22 bp, Artificial Sequence
  chemically synthesized
aggaaggggattggttagctgg

SEQ ID NO: 9004 - DNA, 22 bp, Artificial Sequence
  chemically synthesized
ggaaggggattggttagctggg

SEQ ID NO: 9005 - DNA, 22 bp, Artificial Sequence
  chemically synthesized
gttagctgggctggaatgaggg

SEQ ID NO: 9006 - DNA, 22 bp, Artificial Sequence
  chemically synthesized
gctgggctggaatgagggactc

SEQ ID NO: 9007 - DNA, 22 bp, Artificial Sequence
  chemically synthesized
ggctggaatgagggactcctca

SEQ ID NO: 9008 - DNA, 22 bp, Artificial Sequence
  chemically synthesized
gaatgagggactcctcattcct

SEQ ID NO: 9009 - DNA, 22 bp, Artificial Sequence
  chemically synthesized
ctcattcctgaggctggccaac

SEQ ID NO: 9010 - DNA, 22 bp, Artificial Sequence
  chemically synthesized
attcctgaggctggccaaccga

SEQ ID NO: 9011 - DNA, 22 bp, Artificial Sequence
  chemically synthesized
ctgaggctggccaaccgaggga

SEQ ID NO: 9012 - DNA, 22 bp, Artificial Sequence
  chemically synthesized
aggctggccaaccgagggaggg

SEQ ID NO: 9013 - DNA, 22 bp, Artificial Sequence
  chemically synthesized
gccaaccgagggagggccggtg

SEQ ID NO: 9014 - DNA, 22 bp, Artificial Sequence
  chemically synthesized
ggcagggcagggcaggggacag

SEQ ID NO: 9015 - DNA, 22 bp, Artificial Sequence
  chemically synthesized
ccgaggaccactcaggaacacc

SEQ ID NO: 9016 - DNA, 22 bp, Artificial Sequence
  chemically synthesized
aggaacaccagtagcatctcct

SEQ ID NO: 9017 - DNA, 22 bp, Artificial Sequence
  chemically synthesized
ctctctctgtagggggctggct

SEQ ID NO: 9018 - DNA, 22 bp, Artificial Sequence
  chemically synthesized
tctctgtagggggctggctgga

SEQ ID NO: 9019 - DNA, 22 bp, Artificial Sequence
  chemically synthesized
tctgtagggggctggctggact

SEQ ID NO: 9020 - DNA, 22 bp, Artificial Sequence
  chemically synthesized
tgtagggggctggctggacttc

SEQ ID NO: 9021 - DNA, 22 bp, Artificial Sequence
  chemically synthesized
tagggggctggctggacttccc

SEQ ID NO: 9022 - DNA, 22 bp, Artificial Sequence
  chemically synthesized
gctggacttcccaccaggcggt

SEQ ID NO: 9023 - DNA, 22 bp, Artificial Sequence
  chemically synthesized
gacttcccaccaggcggtgtcc

SEQ ID NO: 9024 - DNA, 22 bp, Artificial Sequence
  chemically synthesized
cccaccaggcggtgtccccaca

SEQ ID NO: 9025 - DNA, 22 bp, Artificial Sequence
  chemically synthesized
ccaccaggcggtgtccccacag

SEQ ID NO: 9026 - DNA, 22 bp, Artificial Sequence
  chemically synthesized
tccgcctcactctcctctgcaa

SEQ ID NO: 9027 - DNA, 22 bp, Artificial Sequence
  chemically synthesized
actctcctctgcaactccagtg

SEQ ID NO: 9028 - DNA, 22 bp, Artificial Sequence
  chemically synthesized
tcctctgcaactccagtgccca

SEQ ID NO: 9029 - DNA, 22 bp, Artificial Sequence
  chemically synthesized
ctctgcaactccagtgcccaca

SEQ ID NO: 9030 - DNA, 22 bp, Artificial Sequence
  chemically synthesized
tgcaactccagtgcccacacgg

SEQ ID NO: 9031 - DNA, 22 bp, Artificial Sequence
  chemically synthesized
caactccagtgcccacacggca

SEQ ID NO: 9032 - DNA, 22 bp, Artificial Sequence
  chemically synthesized
cagtgcccacacggcacccggt

SEQ ID NO: 9033 - DNA, 22 bp, Artificial Sequence
  chemically synthesized
agagagaatacgggatgctgct

SEQ ID NO: 9034 - DNA, 22 bp, Artificial Sequence
  chemically synthesized
ctgaatcttctgagggtgacag

SEQ ID NO: 9035 - DNA, 22 bp, Artificial Sequence
  chemically synthesized
aatcttctgagggtgacagaat

SEQ ID NO: 9036 - DNA, 22 bp, Artificial Sequence
  chemically synthesized
ctgagggtgacagaatttagag

SEQ ID NO: 9037 - DNA, 22 bp, Artificial Sequence
  chemically synthesized
tgagggtgacagaatttagagt

SEQ ID NO: 9038 - DNA, 22 bp, Artificial Sequence
  chemically synthesized
agggtgacagaatttagagttt

SEQ ID NO: 9039 - DNA, 22 bp, Artificial Sequence
  chemically synthesized
agagtttgagcaggaggcttgg

SEQ ID NO: 9040 - DNA, 22 bp, Artificial Sequence
  chemically synthesized
gagtttgagcaggaggcttgga

SEQ ID NO: 9041 - DNA, 22 bp, Artificial Sequence
  chemically synthesized
gagcaggaggcttggagagagg

SEQ ID NO: 9042 - DNA, 22 bp, Artificial Sequence
  chemically synthesized
agcaggaggcttggagagaggc

SEQ ID NO: 9043 - DNA, 22 bp, Artificial Sequence
  chemically synthesized
ggagagaggccaggatttctga

SEQ ID NO: 9044 - DNA, 22 bp, Artificial Sequence
  chemically synthesized
gagagaggccaggatttctgaa

SEQ ID NO: 9045 - DNA, 22 bp, Artificial Sequence
  chemically synthesized
ctgaaattaatgggagagtgag

SEQ ID NO: 9046 - DNA, 22 bp, Artificial Sequence
  chemically synthesized
tgaaattaatgggagagtgagc

SEQ ID NO: 9047 - DNA, 22 bp, Artificial Sequence
  chemically synthesized
aaattaatgggagagtgagctc

SEQ ID NO: 9048 - DNA, 22 bp, Artificial Sequence
  chemically synthesized
atgggagagtgagctcacgcga

SEQ ID NO: 9049 - DNA, 22 bp, Artificial Sequence
  chemically synthesized
acgcgaatgggctgagggacac

SEQ ID NO: 9050 - DNA, 22 bp, Artificial Sequence
  chemically synthesized
agggacaccagtgagggaccgt

SEQ ID NO: 9051 - DNA, 22 bp, Artificial Sequence
  chemically synthesized
aagggatgtagcaaagtcaccg

SEQ ID NO: 9052 - DNA, 22 bp, Artificial Sequence
  chemically synthesized
ccctccagcagcccgggtggtg

SEQ ID NO: 9053 - DNA, 22 bp, Artificial Sequence
  chemically synthesized
cctccagcagcccgggtggtgg

SEQ ID NO: 9054 - DNA, 22 bp, Artificial Sequence
  chemically synthesized
cagcagcccgggtggtgggggc

SEQ ID NO: 9055 - DNA, 22 bp, Artificial Sequence
  chemically synthesized
ggggaacgtcatcatgggagct

SEQ ID NO: 9056 - DNA, 22 bp, Artificial Sequence
  chemically synthesized
acactgatcagctgctcaccgg

SEQ ID NO: 9057 - DNA, 22 bp, Artificial Sequence
  chemically synthesized
atcagctgctcaccggggccca

SEQ ID NO: 9058 - DNA, 22 bp, Artificial Sequence
  chemically synthesized
ctcaccggggcccatcttccac

SEQ ID NO: 9059 - DNA, 22 bp, Artificial Sequence
  chemically synthesized
accggggcccatcttccacttg

SEQ ID NO: 9060 - DNA, 22 bp, Artificial Sequence
  chemically synthesized
ccacttgtctcagcacttgatt

SEQ ID NO: 9061 - DNA, 22 bp, Artificial Sequence
  chemically synthesized
cacttgtctcagcacttgattt

SEQ ID NO: 9062 - DNA, 22 bp, Artificial Sequence
  chemically synthesized
gtctcagcacttgatttttttc

SEQ ID NO: 9063 - DNA, 22 bp, Artificial Sequence
  chemically synthesized
tctcagcacttgatttttttct

SEQ ID NO: 9064 - DNA, 22 bp, Artificial Sequence
  chemically synthesized
agcacttgatttttttctgcta

SEQ ID NO: 9065 - DNA, 22 bp, Artificial Sequence
  chemically synthesized
gatttttttctgctaccccctt

SEQ ID NO: 9066 - DNA, 22 bp, Artificial Sequence
  chemically synthesized
atttttttctgctacccccttt

SEQ ID NO: 9067 - DNA, 22 bp, Artificial Sequence
  chemically synthesized
ttttctgctaccccctttttct

SEQ ID NO: 9068 - DNA, 22 bp, Artificial Sequence
  chemically synthesized
tttctgctaccccctttttctt

SEQ ID NO: 9069 - DNA, 22 bp, Artificial Sequence
  chemically synthesized
ttctgctaccccctttttcttt

SEQ ID NO: 9070 - DNA, 22 bp, Artificial Sequence
  chemically synthesized
tctgctaccccctttttctttt

SEQ ID NO: 9071 - DNA, 22 bp, Artificial Sequence
  chemically synthesized
ctgctaccccctttttctttta

SEQ ID NO: 9072 - DNA, 22 bp, Artificial Sequence
  chemically synthesized
tgctaccccctttttcttttaa

SEQ ID NO: 9073 - DNA, 22 bp, Artificial Sequence
  chemically synthesized
ctaccccctttttcttttaaag

SEQ ID NO: 9074 - DNA, 22 bp, Artificial Sequence
  chemically synthesized
ccccctttttcttttaaagatt

SEQ ID NO: 9075 - DNA, 22 bp, Artificial Sequence
  chemically synthesized
tttcttttaaagatttcaatta

SEQ ID NO: 9076 - DNA, 22 bp, Artificial Sequence
  chemically synthesized
ttcttttaaagatttcaattat

SEQ ID NO: 9077 - DNA, 22 bp, Artificial Sequence
  chemically synthesized
tcttttaaagatttcaattatg

SEQ ID NO: 9078 - DNA, 22 bp, Artificial Sequence
  chemically synthesized
cttttaaagatttcaattatgc

SEQ ID NO: 9079 - DNA, 22 bp, Artificial Sequence
  chemically synthesized
ttttaaagatttcaattatgca

SEQ ID NO: 9080 - DNA, 22 bp, Artificial Sequence
  chemically synthesized
ttaaagatttcaattatgcatg

SEQ ID NO: 9081 - DNA, 22 bp, Artificial Sequence
  chemically synthesized
taaagatttcaattatgcatgt

SEQ ID NO: 9082 - DNA, 22 bp, Artificial Sequence
  chemically synthesized
aaagatttcaattatgcatgta

SEQ ID NO: 9083 - DNA, 22 bp, Artificial Sequence
  chemically synthesized
aagatttcaattatgcatgtat

SEQ ID NO: 9084 - DNA, 22 bp, Artificial Sequence
  chemically synthesized
caattatgcatgtattaagggt

SEQ ID NO: 9085 - DNA, 22 bp, Artificial Sequence
  chemically synthesized
aattatgcatgtattaagggtc

SEQ ID NO: 9086 - DNA, 22 bp, Artificial Sequence
  chemically synthesized
tgcatgtattaagggtcccaca

SEQ ID NO: 9087 - DNA, 22 bp, Artificial Sequence
  chemically synthesized
agggtcccacagctcactcatt

SEQ ID NO: 9088 - DNA, 22 bp, Artificial Sequence
  chemically synthesized
actcattctctttccatttttt

SEQ ID NO: 9089 - DNA, 22 bp, Artificial Sequence
  chemically synthesized
attctctttccattttttaatt

SEQ ID NO: 9090 - DNA, 22 bp, Artificial Sequence
  chemically synthesized
tctttccattttttaattcttt

SEQ ID NO: 9091 - DNA, 22 bp, Artificial Sequence
  chemically synthesized
tttccattttttaattcttttt

SEQ ID NO: 9092 - DNA, 22 bp, Artificial Sequence
  chemically synthesized
tccattttttaattcttttttc

SEQ ID NO: 9093 - DNA, 22 bp, Artificial Sequence
  chemically synthesized
ccattttttaattcttttttct

SEQ ID NO: 9094 - DNA, 22 bp, Artificial Sequence
  chemically synthesized
cattttttaattcttttttctc

SEQ ID NO: 9095 - DNA, 22 bp, Artificial Sequence
  chemically synthesized
tttaattcttttttctcccagt

SEQ ID NO: 9096 - DNA, 22 bp, Artificial Sequence
  chemically synthesized
ttaattcttttttctcccagtg

SEQ ID NO: 9097 - DNA, 22 bp, Artificial Sequence
  chemically synthesized
taattcttttttctcccagtgt

SEQ ID NO: 9098 - DNA, 22 bp, Artificial Sequence
  chemically synthesized
aattcttttttctcccagtgtt

SEQ ID NO: 9099 - DNA, 22 bp, Artificial Sequence
  chemically synthesized
attcttttttctcccagtgttt

SEQ ID NO: 9100 - DNA, 22 bp, Artificial Sequence
  chemically synthesized
ttttttctcccagtgtttcatt

SEQ ID NO: 9101 - DNA, 22 bp, Artificial Sequence
  chemically synthesized
ttttctcccagtgtttcatttt

SEQ ID NO: 9102 - DNA, 22 bp, Artificial Sequence
  chemically synthesized
tttctcccagtgtttcatttta

SEQ ID NO: 9103 - DNA, 22 bp, Artificial Sequence
  chemically synthesized
ttctcccagtgtttcattttat

SEQ ID NO: 9104 - DNA, 22 bp, Artificial Sequence
  chemically synthesized
tctcccagtgtttcattttata

SEQ ID NO: 9105 - DNA, 22 bp, Artificial Sequence
  chemically synthesized
ctcccagtgtttcattttatag

SEQ ID NO: 9106 - DNA, 22 bp, Artificial Sequence
  chemically synthesized
tcccagtgtttcattttataga

SEQ ID NO: 9107 - DNA, 22 bp, Artificial Sequence
  chemically synthesized
ccagtgtttcattttatagagt

SEQ ID NO: 9108 - DNA, 22 bp, Artificial Sequence
  chemically synthesized
cattttatagagttattgctgt

SEQ ID NO: 9109 - DNA, 22 bp, Artificial Sequence
  chemically synthesized
attttatagagttattgctgtt

SEQ ID NO: 9110 - DNA, 22 bp, Artificial Sequence
  chemically synthesized
tatagagttattgctgttcatt

SEQ ID NO: 9111 - DNA, 22 bp, Artificial Sequence
  chemically synthesized
atagagttattgctgttcatta

SEQ ID NO: 9112 - DNA, 22 bp, Artificial Sequence
  chemically synthesized
tagagttattgctgttcattaa

SEQ ID NO: 9113 - DNA, 22 bp, Artificial Sequence
  chemically synthesized
ttgctgttcattaagttaacta

SEQ ID NO: 9114 - DNA, 22 bp, Artificial Sequence
  chemically synthesized
ctgttcattaagttaactaaaa

SEQ ID NO: 9115 - DNA, 22 bp, Artificial Sequence
  chemically synthesized
ttcattaagttaactaaaattt

SEQ ID NO: 9116 - DNA, 22 bp, Artificial Sequence
  chemically synthesized
attaagttaactaaaattttcc

SEQ ID NO: 9117 - DNA, 22 bp, Artificial Sequence
  chemically synthesized
agttaactaaaattttcccctt

SEQ ID NO: 9118 - DNA, 22 bp, Artificial Sequence
  chemically synthesized
actaaaattttccccttcccct

SEQ ID NO: 9119 - DNA, 22 bp, Artificial Sequence
  chemically synthesized
aaattttccccttcccctcccc

SEQ ID NO: 9120 - DNA, 22 bp, Artificial Sequence
  chemically synthesized
tccccttcccctccccctcccc

SEQ ID NO: 9121 - DNA, 22 bp, Artificial Sequence
  chemically synthesized
ccccttcccctccccctcccct

SEQ ID NO: 9122 - DNA, 22 bp, Artificial Sequence
  chemically synthesized
cccttcccctccccctcccctc

SEQ ID NO: 9123 - DNA, 22 bp, Artificial Sequence
  chemically synthesized
cccctccccctcccctcccctc

SEQ ID NO: 9124 - DNA, 22 bp, Artificial Sequence
  chemically synthesized
ccctccccctcccctcccctcc

SEQ ID NO: 9125 - DNA, 22 bp, Artificial Sequence
  chemically synthesized
cccctcccctcccctcctttcc

SEQ ID NO: 9126 - DNA, 22 bp, Artificial Sequence
  chemically synthesized
ccctcccctcctttccttccct

SEQ ID NO: 9127 - DNA, 22 bp, Artificial Sequence
  chemically synthesized
ccctcctttccttccctcgctt

SEQ ID NO: 9128 - DNA, 22 bp, Artificial Sequence
  chemically synthesized
ctttccttccctcgcttcccct

SEQ ID NO: 9129 - DNA, 22 bp, Artificial Sequence
  chemically synthesized
tccttccctcgcttcccctccc

SEQ ID NO: 9130 - DNA, 22 bp, Artificial Sequence
  chemically synthesized
ccttccctcgcttcccctcccc

SEQ ID NO: 9131 - DNA, 22 bp, Artificial Sequence
  chemically synthesized
cttccctcgcttcccctcccct

SEQ ID NO: 9132 - DNA, 22 bp, Artificial Sequence
  chemically synthesized
ccctcgcttcccctcccctctc

SEQ ID NO: 9133 - DNA, 22 bp, Artificial Sequence
  chemically synthesized
cctcgcttcccctcccctctct

SEQ ID NO: 9134 - DNA, 22 bp, Artificial Sequence
  chemically synthesized
gcttcccctcccctctctctct

SEQ ID NO: 9135 - DNA, 22 bp, Artificial Sequence
  chemically synthesized
cccctcccctctctctctctca

SEQ ID NO: 9136 - DNA, 22 bp, Artificial Sequence
  chemically synthesized
ccctcccctctctctctctcat

SEQ ID NO: 9137 - DNA, 22 bp, Artificial Sequence
  chemically synthesized
ccctctctctctctcatctcac

SEQ ID NO: 9138 - DNA, 22 bp, Artificial Sequence
  chemically synthesized
tctctctctcatctcactctgt

SEQ ID NO: 9139 - DNA, 22 bp, Artificial Sequence
  chemically synthesized
tctctctcatctcactctgttg

SEQ ID NO: 9140 - DNA, 22 bp, Artificial Sequence
  chemically synthesized
tctctcatctcactctgttgcc

SEQ ID NO: 9141 - DNA, 22 bp, Artificial Sequence
  chemically synthesized
tctcatctcactctgttgccca

SEQ ID NO: 9142 - DNA, 22 bp, Artificial Sequence
  chemically synthesized
tcatctcactctgttgcccagg

SEQ ID NO: 9143 - DNA, 22 bp, Artificial Sequence
  chemically synthesized
atctcactctgttgcccaggct

SEQ ID NO: 9144 - DNA, 22 bp, Artificial Sequence
  chemically synthesized
actctgttgcccaggctggaat

SEQ ID NO: 9145 - DNA, 22 bp, Artificial Sequence
  chemically synthesized
tgttgcccaggctggaatgcag

SEQ ID NO: 9146 - DNA, 22 bp, Artificial Sequence
  chemically synthesized
ttgcccaggctggaatgcagta

SEQ ID NO: 9147 - DNA, 22 bp, Artificial Sequence
  chemically synthesized
cccaggctggaatgcagtagct

SEQ ID NO: 9148 - DNA, 22 bp, Artificial Sequence
  chemically synthesized
gaatgcagtagcttgtcacaac

SEQ ID NO: 9149 - DNA, 22 bp, Artificial Sequence
  chemically synthesized
gtcacaactcactgtggcctcc

SEQ ID NO: 9150 - DNA, 22 bp, Artificial Sequence
  chemically synthesized
tcacaactcactgtggcctcca

SEQ ID NO: 9151 - DNA, 22 bp, Artificial Sequence
  chemically synthesized
actgtggcctccacctcctggg

SEQ ID NO: 9152 - DNA, 22 bp, Artificial Sequence
  chemically synthesized
tggcctccacctcctgggctca

SEQ ID NO: 9153 - DNA, 22 bp, Artificial Sequence
  chemically synthesized
cacctcctgggctcaggcgatc

SEQ ID NO: 9154 - DNA, 22 bp, Artificial Sequence
  chemically synthesized
ctgggctcaggcgatccttcca

SEQ ID NO: 9155 - DNA, 22 bp, Artificial Sequence
  chemically synthesized
ggctcaggcgatccttccactt

SEQ ID NO: 9156 - DNA, 22 bp, Artificial Sequence
  chemically synthesized
aggcgatccttccacttcagcc

SEQ ID NO: 9157 - DNA, 22 bp, Artificial Sequence
  chemically synthesized
ccacttcagcctcccaggtagc

SEQ ID NO: 9158 - DNA, 22 bp, Artificial Sequence
  chemically synthesized
cacttcagcctcccaggtagct

SEQ ID NO: 9159 - DNA, 22 bp, Artificial Sequence
  chemically synthesized
cagcctcccaggtagctgggac

SEQ ID NO: 9160 - DNA, 22 bp, Artificial Sequence
  chemically synthesized
agcctcccaggtagctgggact

SEQ ID NO: 9161 - DNA, 22 bp, Artificial Sequence
  chemically synthesized
ccaggtagctgggactataggc

SEQ ID NO: 9162 - DNA, 22 bp, Artificial Sequence
  chemically synthesized
ggactataggcatgtggcacca

SEQ ID NO: 9163 - DNA, 22 bp, Artificial Sequence
  chemically synthesized
taggcatgtggcaccacacctg

SEQ ID NO: 9164 - DNA, 22 bp, Artificial Sequence
  chemically synthesized
gctaattaaaaatttttttttg

SEQ ID NO: 9165 - DNA, 22 bp, Artificial Sequence
  chemically synthesized
attaaaaatttttttttgtaga

SEQ ID NO: 9166 - DNA, 22 bp, Artificial Sequence
  chemically synthesized
aaaatttttttttgtagagacg

SEQ ID NO: 9167 - DNA, 22 bp, Artificial Sequence
  chemically synthesized
ttttttgtagagacggttttgc

SEQ ID NO: 9168 - DNA, 22 bp, Artificial Sequence
  chemically synthesized
tttttgtagagacggttttgcc

SEQ ID NO: 9169 - DNA, 22 bp, Artificial Sequence
  chemically synthesized
ttttgtagagacggttttgcca

SEQ ID NO: 9170 - DNA, 22 bp, Artificial Sequence
  chemically synthesized
tttgtagagacggttttgccat

SEQ ID NO: 9171 - DNA, 22 bp, Artificial Sequence
  chemically synthesized
ttgtagagacggttttgccatg

SEQ ID NO: 9172 - DNA, 22 bp, Artificial Sequence
  chemically synthesized
tgtagagacggttttgccatgt

SEQ ID NO: 9173 - DNA, 22 bp, Artificial Sequence
  chemically synthesized
gtagagacggttttgccatgta

SEQ ID NO: 9174 - DNA, 22 bp, Artificial Sequence
  chemically synthesized
tagagacggttttgccatgtag

SEQ ID NO: 9175 - DNA, 22 bp, Artificial Sequence
  chemically synthesized
tgccatgtagaggggttttgcc

SEQ ID NO: 9176 - DNA, 22 bp, Artificial Sequence
  chemically synthesized
gccatgtagaggggttttgcca

SEQ ID NO: 9177 - DNA, 22 bp, Artificial Sequence
  chemically synthesized
ccatgtagaggggttttgccat

SEQ ID NO: 9178 - DNA, 22 bp, Artificial Sequence
  chemically synthesized
tgccatgctgcccagactagtc

SEQ ID NO: 9179 - DNA, 22 bp, Artificial Sequence
  chemically synthesized
gccatgctgcccagactagtct

SEQ ID NO: 9180 - DNA, 22 bp, Artificial Sequence
  chemically synthesized
ccatgctgcccagactagtctt

SEQ ID NO: 9181 - DNA, 22 bp, Artificial Sequence
  chemically synthesized
cccagactagtcttgagctcct

SEQ ID NO: 9182 - DNA, 22 bp, Artificial Sequence
  chemically synthesized
gtcttgagctcctgggctcaag

SEQ ID NO: 9183 - DNA, 22 bp, Artificial Sequence
  chemically synthesized
gagctcctgggctcaagtgatt

SEQ ID NO: 9184 - DNA, 22 bp, Artificial Sequence
  chemically synthesized
agctcctgggctcaagtgattc

SEQ ID NO: 9185 - DNA, 22 bp, Artificial Sequence
  chemically synthesized
ctgggctcaagtgattcccccc

SEQ ID NO: 9186 - DNA, 22 bp, Artificial Sequence
  chemically synthesized
ggctcaagtgattccccccgtg

SEQ ID NO: 9187 - DNA, 22 bp, Artificial Sequence
  chemically synthesized
aagtgattccccccgtgtcgac

SEQ ID NO: 9188 - DNA, 22 bp, Artificial Sequence
  chemically synthesized
cccccgtgtcgacctcccaaag

SEQ ID NO: 9189 - DNA, 22 bp, Artificial Sequence
  chemically synthesized
ccaaagtgctgggattacagat

SEQ ID NO: 9190 - DNA, 22 bp, Artificial Sequence
  chemically synthesized
ggattacagatgtgatccacag

SEQ ID NO: 9191 - DNA, 22 bp, Artificial Sequence
  chemically synthesized
cagatgtgatccacagtgcctg

SEQ ID NO: 9192 - DNA, 22 bp, Artificial Sequence
  chemically synthesized
gccctaaatttttcttacgcat

SEQ ID NO: 9193 - DNA, 22 bp, Artificial Sequence
  chemically synthesized
aatttttcttacgcatttctca

SEQ ID NO: 9194 - DNA, 22 bp, Artificial Sequence
  chemically synthesized
ttcttacgcatttctcatcttc

SEQ ID NO: 9195 - DNA, 22 bp, Artificial Sequence
  chemically synthesized
tcttacgcatttctcatcttcc

SEQ ID NO: 9196 - DNA, 22 bp, Artificial Sequence
  chemically synthesized
cttacgcatttctcatcttcca

SEQ ID NO: 9197 - DNA, 22 bp, Artificial Sequence
  chemically synthesized
ttacgcatttctcatcttccat

SEQ ID NO: 9198 - DNA, 22 bp, Artificial Sequence
  chemically synthesized
acgcatttctcatcttccatta

SEQ ID NO: 9199 - DNA, 22 bp, Artificial Sequence
  chemically synthesized
cgcatttctcatcttccattat

SEQ ID NO: 9200 - DNA, 22 bp, Artificial Sequence
  chemically synthesized
ctcatcttccattatttccatc

SEQ ID NO: 9201 - DNA, 22 bp, Artificial Sequence
  chemically synthesized
tcatcttccattatttccatcc

SEQ ID NO: 9202 - DNA, 22 bp, Artificial Sequence
  chemically synthesized
atcttccattatttccatccag

SEQ ID NO: 9203 - DNA, 22 bp, Artificial Sequence
  chemically synthesized
ccattatttccatccagtgtgt

SEQ ID NO: 9204 - DNA, 22 bp, Artificial Sequence
  chemically synthesized
cattatttccatccagtgtgtt

SEQ ID NO: 9205 - DNA, 22 bp, Artificial Sequence
  chemically synthesized
tttccatccagtgtgttttttc

SEQ ID NO: 9206 - DNA, 22 bp, Artificial Sequence
  chemically synthesized
ccatccagtgtgttttttcttt

SEQ ID NO: 9207 - DNA, 22 bp, Artificial Sequence
  chemically synthesized
catccagtgtgttttttctttt

SEQ ID NO: 9208 - DNA, 22 bp, Artificial Sequence
  chemically synthesized
tttcttttctttcttttctttt

SEQ ID NO: 9209 - DNA, 22 bp, Artificial Sequence
  chemically synthesized
ttcttttctttcttttcttttt

SEQ ID NO: 9210 - DNA, 22 bp, Artificial Sequence
  chemically synthesized
tcttttctttcttttctttttt

SEQ ID NO: 9211 - DNA, 22 bp, Artificial Sequence
  chemically synthesized
cttttctttcttttcttttttt

SEQ ID NO: 9212 - DNA, 22 bp, Artificial Sequence
  chemically synthesized
ttttctttcttttctttttttt

SEQ ID NO: 9213 - DNA, 22 bp, Artificial Sequence
  chemically synthesized
ttctttcttttctttttttttt

SEQ ID NO: 9214 - DNA, 22 bp, Artificial Sequence
  chemically synthesized
tctttcttttcttttttttttt

SEQ ID NO: 9215 - DNA, 22 bp, Artificial Sequence
  chemically synthesized
ctttcttttctttttttttttt

SEQ ID NO: 9216 - DNA, 22 bp, Artificial Sequence
  chemically synthesized
tttcttttcttttttttttttt

SEQ ID NO: 9217 - DNA, 22 bp, Artificial Sequence
  chemically synthesized
tcttttcttttttttttttttg

SEQ ID NO: 9218 - DNA, 22 bp, Artificial Sequence
  chemically synthesized
cttttcttttttttttttttgg

SEQ ID NO: 9219 - DNA, 22 bp, Artificial Sequence
  chemically synthesized
ttttcttttttttttttttgga

SEQ ID NO: 9220 - DNA, 22 bp, Artificial Sequence
  chemically synthesized
ttcttttttttttttttggagg

SEQ ID NO: 9221 - DNA, 22 bp, Artificial Sequence
  chemically synthesized
tcttttttttttttttggaggc

SEQ ID NO: 9222 - DNA, 22 bp, Artificial Sequence
  chemically synthesized
cttttttttttttttggaggcg

SEQ ID NO: 9223 - DNA, 22 bp, Artificial Sequence
  chemically synthesized
ttttttttttttttggaggcgg

SEQ ID NO: 9224 - DNA, 22 bp, Artificial Sequence
  chemically synthesized
ttttttttttttggaggcggag

SEQ ID NO: 9225 - DNA, 22 bp, Artificial Sequence
  chemically synthesized
tttttttttttggaggcggagt

SEQ ID NO: 9226 - DNA, 22 bp, Artificial Sequence
  chemically synthesized
ttttttttttggaggcggagtc

SEQ ID NO: 9227 - DNA, 22 bp, Artificial Sequence
  chemically synthesized
tttttttttggaggcggagtct

SEQ ID NO: 9228 - DNA, 22 bp, Artificial Sequence
  chemically synthesized
ttttttttggaggcggagtctc

SEQ ID NO: 9229 - DNA, 22 bp, Artificial Sequence
  chemically synthesized
tttttttggaggcggagtctcg

SEQ ID NO: 9230 - DNA, 22 bp, Artificial Sequence
  chemically synthesized
ttttttggaggcggagtctcgc

SEQ ID NO: 9231 - DNA, 22 bp, Artificial Sequence
  chemically synthesized
tttttggaggcggagtctcgct

SEQ ID NO: 9232 - DNA, 22 bp, Artificial Sequence
  chemically synthesized
ttttggaggcggagtctcgctc

SEQ ID NO: 9233 - DNA, 22 bp, Artificial Sequence
  chemically synthesized
tttggaggcggagtctcgctct

SEQ ID NO: 9234 - DNA, 22 bp, Artificial Sequence
  chemically synthesized
ttggaggcggagtctcgctctg

SEQ ID NO: 9235 - DNA, 22 bp, Artificial Sequence
  chemically synthesized
tggaggcggagtctcgctctgt

SEQ ID NO: 9236 - DNA, 22 bp, Artificial Sequence
  chemically synthesized
ggaggcggagtctcgctctgtt

SEQ ID NO: 9237 - DNA, 22 bp, Artificial Sequence
  chemically synthesized
gaggcggagtctcgctctgttg

SEQ ID NO: 9238 - DNA, 22 bp, Artificial Sequence
  chemically synthesized
gctctgttgcccaggccggagt

SEQ ID NO: 9239 - DNA, 22 bp, Artificial Sequence
  chemically synthesized
tgttgcccaggccggagtgcag

SEQ ID NO: 9240 - DNA, 22 bp, Artificial Sequence
  chemically synthesized
ttgcccaggccggagtgcagtg

SEQ ID NO: 9241 - DNA, 22 bp, Artificial Sequence
  chemically synthesized
cccaggccggagtgcagtggcg

SEQ ID NO: 9242 - DNA, 22 bp, Artificial Sequence
  chemically synthesized
ggctcactgcaagctctgcctc

SEQ ID NO: 9243 - DNA, 22 bp, Artificial Sequence
  chemically synthesized
gctcactgcaagctctgcctcc

SEQ ID NO: 9244 - DNA, 22 bp, Artificial Sequence
  chemically synthesized
actgcaagctctgcctcccggg

SEQ ID NO: 9245 - DNA, 22 bp, Artificial Sequence
  chemically synthesized
caagctctgcctcccgggttca

SEQ ID NO: 9246 - DNA, 22 bp, Artificial Sequence
  chemically synthesized
tgcctcccgggttcatgccatt

SEQ ID NO: 9247 - DNA, 22 bp, Artificial Sequence
  chemically synthesized
cctcccgggttcatgccattct

SEQ ID NO: 9248 - DNA, 22 bp, Artificial Sequence
  chemically synthesized
ccgggttcatgccattctcctg

SEQ ID NO: 9249 - DNA, 22 bp, Artificial Sequence
  chemically synthesized
atgccattctcctgcctcagcc

SEQ ID NO: 9250 - DNA, 22 bp, Artificial Sequence
  chemically synthesized
tcctgcctcagcctcccgagta

SEQ ID NO: 9251 - DNA, 22 bp, Artificial Sequence
  chemically synthesized
ctgcctcagcctcccgagtagc

SEQ ID NO: 9252 - DNA, 22 bp, Artificial Sequence
  chemically synthesized
cctcagcctcccgagtagctgg

SEQ ID NO: 9253 - DNA, 22 bp, Artificial Sequence
  chemically synthesized
agcctcccgagtagctgggact

SEQ ID NO: 9254 - DNA, 22 bp, Artificial Sequence
  chemically synthesized
ccgagtagctgggactacaggc

SEQ ID NO: 9255 - DNA, 22 bp, Artificial Sequence
  chemically synthesized
ggactacaggcgcctgccacca

SEQ ID NO: 9256 - DNA, 22 bp, Artificial Sequence
  chemically synthesized
caggcgcctgccaccacgtctg

SEQ ID NO: 9257 - DNA, 22 bp, Artificial Sequence
  chemically synthesized
ccaccacgtctggctaattttt

SEQ ID NO: 9258 - DNA, 22 bp, Artificial Sequence
  chemically synthesized
gctaattttttgtatttttagt

SEQ ID NO: 9259 - DNA, 22 bp, Artificial Sequence
  chemically synthesized
attttttgtatttttagtagag

SEQ ID NO: 9260 - DNA, 22 bp, Artificial Sequence
  chemically synthesized
tttgtatttttagtagagatgg

SEQ ID NO: 9261 - DNA, 22 bp, Artificial Sequence
  chemically synthesized
ttgtatttttagtagagatggg

SEQ ID NO: 9262 - DNA, 22 bp, Artificial Sequence
  chemically synthesized
tgtatttttagtagagatgggg

SEQ ID NO: 9263 - DNA, 22 bp, Artificial Sequence
  chemically synthesized
gtatttttagtagagatggggt

SEQ ID NO: 9264 - DNA, 22 bp, Artificial Sequence
  chemically synthesized
tatttttagtagagatggggtt

SEQ ID NO: 9265 - DNA, 22 bp, Artificial Sequence
  chemically synthesized
ttagtagagatggggtttcacc

SEQ ID NO: 9266 - DNA, 22 bp, Artificial Sequence
  chemically synthesized
tagtagagatggggtttcacca

SEQ ID NO: 9267 - DNA, 22 bp, Artificial Sequence
  chemically synthesized
agtagagatggggtttcaccat

SEQ ID NO: 9268 - DNA, 22 bp, Artificial Sequence
  chemically synthesized
gtagagatggggtttcaccatg

SEQ ID NO: 9269 - DNA, 22 bp, Artificial Sequence
  chemically synthesized
caccatgttagccaggatggtg

SEQ ID NO: 9270 - DNA, 22 bp, Artificial Sequence
  chemically synthesized
accatgttagccaggatggtgt

SEQ ID NO: 9271 - DNA, 22 bp, Artificial Sequence
  chemically synthesized
gccaggatggtgtcgatctcct

SEQ ID NO: 9272 - DNA, 22 bp, Artificial Sequence
  chemically synthesized
ctgacctcatgatctgcccgcc

SEQ ID NO: 9273 - DNA, 22 bp, Artificial Sequence
  chemically synthesized
acctcatgatctgcccgccttg

SEQ ID NO: 9274 - DNA, 22 bp, Artificial Sequence
  chemically synthesized
atgatctgcccgccttggcctc

SEQ ID NO: 9275 - DNA, 22 bp, Artificial Sequence
  chemically synthesized
cccgccttggcctcccacagtg

SEQ ID NO: 9276 - DNA, 22 bp, Artificial Sequence
  chemically synthesized
ggcctcccacagtgctgggatt

SEQ ID NO: 9277 - DNA, 22 bp, Artificial Sequence
  chemically synthesized
gcctcccacagtgctgggattc

SEQ ID NO: 9278 - DNA, 22 bp, Artificial Sequence
  chemically synthesized
ccacagtgctgggattccaggc

SEQ ID NO: 9279 - DNA, 22 bp, Artificial Sequence
  chemically synthesized
ggattccaggcgtgagccacgg

SEQ ID NO: 9280 - DNA, 22 bp, Artificial Sequence
  chemically synthesized
caggcgtgagccacggcgcctg

SEQ ID NO: 9281 - DNA, 22 bp, Artificial Sequence
  chemically synthesized
gccagtgtgttttttcatttca

SEQ ID NO: 9282 - DNA, 22 bp, Artificial Sequence
  chemically synthesized
tttcatttcagacattgtagtt

SEQ ID NO: 9283 - DNA, 22 bp, Artificial Sequence
  chemically synthesized
ttcatttcagacattgtagttt

SEQ ID NO: 9284 - DNA, 22 bp, Artificial Sequence
  chemically synthesized
tcatttcagacattgtagtttt

SEQ ID NO: 9285 - DNA, 22 bp, Artificial Sequence
  chemically synthesized
catttcagacattgtagttttt

SEQ ID NO: 9286 - DNA, 22 bp, Artificial Sequence
  chemically synthesized
atttcagacattgtagttttta

SEQ ID NO: 9287 - DNA, 22 bp, Artificial Sequence
  chemically synthesized
cagacattgtagtttttatctc

SEQ ID NO: 9288 - DNA, 22 bp, Artificial Sequence
  chemically synthesized
agacattgtagtttttatctct

SEQ ID NO: 9289 - DNA, 22 bp, Artificial Sequence
  chemically synthesized
tagtttttatctctagaagttc

SEQ ID NO: 9290 - DNA, 22 bp, Artificial Sequence
  chemically synthesized
ttatctctagaagttcacctgg

SEQ ID NO: 9291 - DNA, 22 bp, Artificial Sequence
  chemically synthesized
tatctctagaagttcacctggg

SEQ ID NO: 9292 - DNA, 22 bp, Artificial Sequence
  chemically synthesized
atctctagaagttcacctgggg

SEQ ID NO: 9293 - DNA, 22 bp, Artificial Sequence
  chemically synthesized
tctctagaagttcacctgggga

SEQ ID NO: 9294 - DNA, 22 bp, Artificial Sequence
  chemically synthesized
tagaagttcacctggggactct

SEQ ID NO: 9295 - DNA, 22 bp, Artificial Sequence
  chemically synthesized
gaagttcacctggggactctta

SEQ ID NO: 9296 - DNA, 22 bp, Artificial Sequence
  chemically synthesized
acctggggactcttaaatatcc

SEQ ID NO: 9297 - DNA, 22 bp, Artificial Sequence
  chemically synthesized
gggactcttaaatatcctccac

SEQ ID NO: 9298 - DNA, 22 bp, Artificial Sequence
  chemically synthesized
ttaaatatcctccacaattcta

SEQ ID NO: 9299 - DNA, 22 bp, Artificial Sequence
  chemically synthesized
aaatatcctccacaattctact

SEQ ID NO: 9300 - DNA, 22 bp, Artificial Sequence
  chemically synthesized
aatatcctccacaattctactt

SEQ ID NO: 9301 - DNA, 22 bp, Artificial Sequence
  chemically synthesized
cacaattctacttaattttttg

SEQ ID NO: 9302 - DNA, 22 bp, Artificial Sequence
  chemically synthesized
tacttaattttttgaacataat

SEQ ID NO: 9303 - DNA, 22 bp, Artificial Sequence
  chemically synthesized
cttaattttttgaacataatgg

SEQ ID NO: 9304 - DNA, 22 bp, Artificial Sequence
  chemically synthesized
aattttttgaacataatgggat

SEQ ID NO: 9305 - DNA, 22 bp, Artificial Sequence
  chemically synthesized
attttttgaacataatgggata

SEQ ID NO: 9306 - DNA, 22 bp, Artificial Sequence
  chemically synthesized
tttgaacataatgggatatggc

SEQ ID NO: 9307 - DNA, 22 bp, Artificial Sequence
  chemically synthesized
ttgaacataatgggatatggct

SEQ ID NO: 9308 - DNA, 22 bp, Artificial Sequence
  chemically synthesized
tgaacataatgggatatggcta

SEQ ID NO: 9309 - DNA, 22 bp, Artificial Sequence
  chemically synthesized
gaacataatgggatatggctat

SEQ ID NO: 9310 - DNA, 22 bp, Artificial Sequence
  chemically synthesized
aacataatgggatatggctata

SEQ ID NO: 9311 - DNA, 22 bp, Artificial Sequence
  chemically synthesized
taatatctgttttaccatcctt

SEQ ID NO: 9312 - DNA, 22 bp, Artificial Sequence
  chemically synthesized
ttttaccatccttgcctgctaa

SEQ ID NO: 9313 - DNA, 22 bp, Artificial Sequence
  chemically synthesized
taccatccttgcctgctaattc

SEQ ID NO: 9314 - DNA, 22 bp, Artificial Sequence
  chemically synthesized
accatccttgcctgctaattct

SEQ ID NO: 9315 - DNA, 22 bp, Artificial Sequence
  chemically synthesized
ccatccttgcctgctaattcta

SEQ ID NO: 9316 - DNA, 22 bp, Artificial Sequence
  chemically synthesized
gcctgctaattctagcatccgt

SEQ ID NO: 9317 - DNA, 22 bp, Artificial Sequence
  chemically synthesized
cctgctaattctagcatccgtg

SEQ ID NO: 9318 - DNA, 22 bp, Artificial Sequence
  chemically synthesized
ctaattctagcatccgtgtcag

SEQ ID NO: 9319 - DNA, 22 bp, Artificial Sequence
  chemically synthesized
attctagcatccgtgtcagttc

SEQ ID NO: 9320 - DNA, 22 bp, Artificial Sequence
  chemically synthesized
tagcatccgtgtcagttctgga

SEQ ID NO: 9321 - DNA, 22 bp, Artificial Sequence
  chemically synthesized
gcatccgtgtcagttctggatc

SEQ ID NO: 9322 - DNA, 22 bp, Artificial Sequence
  chemically synthesized
tggatctcttttgatatttatg

SEQ ID NO: 9323 - DNA, 22 bp, Artificial Sequence
  chemically synthesized
gatctcttttgatatttatgaa

SEQ ID NO: 9324 - DNA, 22 bp, Artificial Sequence
  chemically synthesized
ttttgatatttatgaacctcct

SEQ ID NO: 9325 - DNA, 22 bp, Artificial Sequence
  chemically synthesized
ttgatatttatgaacctcctcg

SEQ ID NO: 9326 - DNA, 22 bp, Artificial Sequence
  chemically synthesized
tgatatttatgaacctcctcgt

SEQ ID NO: 9327 - DNA, 22 bp, Artificial Sequence
  chemically synthesized
gatatttatgaacctcctcgtt

SEQ ID NO: 9328 - DNA, 22 bp, Artificial Sequence
  chemically synthesized
atatttatgaacctcctcgtta

SEQ ID NO: 9329 - DNA, 22 bp, Artificial Sequence
  chemically synthesized
atgaacctcctcgttatgcatt

SEQ ID NO: 9330 - DNA, 22 bp, Artificial Sequence
  chemically synthesized
tgaacctcctcgttatgcattg

SEQ ID NO: 9331 - DNA, 22 bp, Artificial Sequence
  chemically synthesized
ctcgttatgcattgtgttttcc

SEQ ID NO: 9332 - DNA, 22 bp, Artificial Sequence
  chemically synthesized
gttatgcattgtgttttcccgt

SEQ ID NO: 9333 - DNA, 22 bp, Artificial Sequence
  chemically synthesized
tgcattgtgttttcccgtttca

SEQ ID NO: 9334 - DNA, 22 bp, Artificial Sequence
  chemically synthesized
tgttttcccgtttcattgcatg

SEQ ID NO: 9335 - DNA, 22 bp, Artificial Sequence
  chemically synthesized
tcccgtttcattgcatgccttg

SEQ ID NO: 9336 - DNA, 22 bp, Artificial Sequence
  chemically synthesized
cccgtttcattgcatgccttgt

SEQ ID NO: 9337 - DNA, 22 bp, Artificial Sequence
  chemically synthesized
ccgtttcattgcatgccttgta

SEQ ID NO: 9338 - DNA, 22 bp, Artificial Sequence
  chemically synthesized
cattgcatgccttgtaatcttt

SEQ ID NO: 9339 - DNA, 22 bp, Artificial Sequence
  chemically synthesized
attgcatgccttgtaatctttg

SEQ ID NO: 9340 - DNA, 22 bp, Artificial Sequence
  chemically synthesized
catgccttgtaatctttgattg

SEQ ID NO: 9341 - DNA, 22 bp, Artificial Sequence
  chemically synthesized
gtaatctttgattggctgccag

SEQ ID NO: 9342 - DNA, 22 bp, Artificial Sequence
  chemically synthesized
taatctttgattggctgccaga

SEQ ID NO: 9343 - DNA, 22 bp, Artificial Sequence
  chemically synthesized
tgattggctgccagacattgtc

SEQ ID NO: 9344 - DNA, 22 bp, Artificial Sequence
  chemically synthesized
gattggctgccagacattgtca

SEQ ID NO: 9345 - DNA, 22 bp, Artificial Sequence
  chemically synthesized
attggctgccagacattgtcaa

SEQ ID NO: 9346 - DNA, 22 bp, Artificial Sequence
  chemically synthesized
gctgccagacattgtcaatttc

SEQ ID NO: 9347 - DNA, 22 bp, Artificial Sequence
  chemically synthesized
ccagacattgtcaatttcacct

SEQ ID NO: 9348 - DNA, 22 bp, Artificial Sequence
  chemically synthesized
tcaatttcaccttgttgggtgc

SEQ ID NO: 9349 - DNA, 22 bp, Artificial Sequence
  chemically synthesized
caccttgttgggtgctggatat

SEQ ID NO: 9350 - DNA, 22 bp, Artificial Sequence
  chemically synthesized
accttgttgggtgctggatatt

SEQ ID NO: 9351 - DNA, 22 bp, Artificial Sequence
  chemically synthesized
gttgggtgctggatatttttgt

SEQ ID NO: 9352 - DNA, 22 bp, Artificial Sequence
  chemically synthesized
ttgggtgctggatatttttgta

SEQ ID NO: 9353 - DNA, 22 bp, Artificial Sequence
  chemically synthesized
ggtgctggatatttttgtattc

SEQ ID NO: 9354 - DNA, 22 bp, Artificial Sequence
  chemically synthesized
gatatttttgtattcctctaaa

SEQ ID NO: 9355 - DNA, 22 bp, Artificial Sequence
  chemically synthesized
ttgtattcctctaaatgttctt

SEQ ID NO: 9356 - DNA, 22 bp, Artificial Sequence
  chemically synthesized
tgtattcctctaaatgttcttg

SEQ ID NO: 9357 - DNA, 22 bp, Artificial Sequence
  chemically synthesized
gtattcctctaaatgttcttga

SEQ ID NO: 9358 - DNA, 22 bp, Artificial Sequence
  chemically synthesized
tattcctctaaatgttcttgag

SEQ ID NO: 9359 - DNA, 22 bp, Artificial Sequence
  chemically synthesized
ctctaaatgttcttgagctttg

SEQ ID NO: 9360 - DNA, 22 bp, Artificial Sequence
  chemically synthesized
taaatgttcttgagctttgctc

SEQ ID NO: 9361 - DNA, 22 bp, Artificial Sequence
  chemically synthesized
aatgttcttgagctttgctccg

SEQ ID NO: 9362 - DNA, 22 bp, Artificial Sequence
  chemically synthesized
ttgagctttgctccgggatgca

SEQ ID NO: 9363 - DNA, 22 bp, Artificial Sequence
  chemically synthesized
gagctttgctccgggatgcagt

SEQ ID NO: 9364 - DNA, 22 bp, Artificial Sequence
  chemically synthesized
agctttgctccgggatgcagtt

SEQ ID NO: 9365 - DNA, 22 bp, Artificial Sequence
  chemically synthesized
tgctccgggatgcagttaagca

SEQ ID NO: 9366 - DNA, 22 bp, Artificial Sequence
  chemically synthesized
gctccgggatgcagttaagcaa

SEQ ID NO: 9367 - DNA, 22 bp, Artificial Sequence
  chemically synthesized
ctccgggatgcagttaagcaac

SEQ ID NO: 9368 - DNA, 22 bp, Artificial Sequence
  chemically synthesized
cgggatgcagttaagcaactta

SEQ ID NO: 9369 - DNA, 22 bp, Artificial Sequence
  chemically synthesized
agcaacttagagtcagtttgat

SEQ ID NO: 9370 - DNA, 22 bp, Artificial Sequence
  chemically synthesized
agagtcagtttgatcgtttgaa

SEQ ID NO: 9371 - DNA, 22 bp, Artificial Sequence
  chemically synthesized
gagtcagtttgatcgtttgaac

SEQ ID NO: 9372 - DNA, 22 bp, Artificial Sequence
  chemically synthesized
gatcgtttgaactcttaattgt

SEQ ID NO: 9373 - DNA, 22 bp, Artificial Sequence
  chemically synthesized
atcgtttgaactcttaattgtt

SEQ ID NO: 9374 - DNA, 22 bp, Artificial Sequence
  chemically synthesized
gaactcttaattgttttggtct

SEQ ID NO: 9375 - DNA, 22 bp, Artificial Sequence
  chemically synthesized
aactcttaattgttttggtctc

SEQ ID NO: 9376 - DNA, 22 bp, Artificial Sequence
  chemically synthesized
ttaattgttttggtctcctcgg

SEQ ID NO: 9377 - DNA, 22 bp, Artificial Sequence
  chemically synthesized
aattgttttggtctcctcggac

SEQ ID NO: 9378 - DNA, 22 bp, Artificial Sequence
  chemically synthesized
attgttttggtctcctcggact

SEQ ID NO: 9379 - DNA, 22 bp, Artificial Sequence
  chemically synthesized
ttttggtctcctcggactctca

SEQ ID NO: 9380 - DNA, 22 bp, Artificial Sequence
  chemically synthesized
tggtctcctcggactctcagct

SEQ ID NO: 9381 - DNA, 22 bp, Artificial Sequence
  chemically synthesized
ggtctcctcggactctcagctc

SEQ ID NO: 9382 - DNA, 22 bp, Artificial Sequence
  chemically synthesized
gtctcctcggactctcagctcc

SEQ ID NO: 9383 - DNA, 22 bp, Artificial Sequence
  chemically synthesized
ctcggactctcagctccatctc

SEQ ID NO: 9384 - DNA, 22 bp, Artificial Sequence
  chemically synthesized
ggactctcagctccatctcctc

SEQ ID NO: 9385 - DNA, 22 bp, Artificial Sequence
  chemically synthesized
tcagctccatctcctcaacgtg

SEQ ID NO: 9386 - DNA, 22 bp, Artificial Sequence
  chemically synthesized
agctccatctcctcaacgtggg

SEQ ID NO: 9387 - DNA, 22 bp, Artificial Sequence
  chemically synthesized
catctcctcaacgtggggagtc

SEQ ID NO: 9388 - DNA, 22 bp, Artificial Sequence
  chemically synthesized
ctcaacgtggggagtctcttgg

SEQ ID NO: 9389 - DNA, 22 bp, Artificial Sequence
  chemically synthesized
aacgtggggagtctcttgggct

SEQ ID NO: 9390 - DNA, 22 bp, Artificial Sequence
  chemically synthesized
ttgggctctgcctggacttccc

SEQ ID NO: 9391 - DNA, 22 bp, Artificial Sequence
  chemically synthesized
gggctctgcctggacttccctt

SEQ ID NO: 9392 - DNA, 22 bp, Artificial Sequence
  chemically synthesized
ggctctgcctggacttcccttt

SEQ ID NO: 9393 - DNA, 22 bp, Artificial Sequence
  chemically synthesized
tgcctggacttccctttcctgg

SEQ ID NO: 9394 - DNA, 22 bp, Artificial Sequence
  chemically synthesized
cctggacttccctttcctggcc

SEQ ID NO: 9395 - DNA, 22 bp, Artificial Sequence
  chemically synthesized
gacttccctttcctggcctgta

SEQ ID NO: 9396 - DNA, 22 bp, Artificial Sequence
  chemically synthesized
ccctttcctggcctgtaacctg

SEQ ID NO: 9397 - DNA, 22 bp, Artificial Sequence
  chemically synthesized
cctttcctggcctgtaacctgc

SEQ ID NO: 9398 - DNA, 22 bp, Artificial Sequence
  chemically synthesized
tcctggcctgtaacctgcagac

SEQ ID NO: 9399 - DNA, 22 bp, Artificial Sequence
  chemically synthesized
cctggcctgtaacctgcagact

SEQ ID NO: 9400 - DNA, 22 bp, Artificial Sequence
  chemically synthesized
ctggcctgtaacctgcagactc

SEQ ID NO: 9401 - DNA, 22 bp, Artificial Sequence
  chemically synthesized
gcctgtaacctgcagactctct

SEQ ID NO: 9402 - DNA, 22 bp, Artificial Sequence
  chemically synthesized
taacctgcagactctctccaaa

SEQ ID NO: 9403 - DNA, 22 bp, Artificial Sequence
  chemically synthesized
cagactctctccaaacagtaag

SEQ ID NO: 9404 - DNA, 22 bp, Artificial Sequence
  chemically synthesized
tctccaaacagtaagctggggt

SEQ ID NO: 9405 - DNA, 22 bp, Artificial Sequence
  chemically synthesized
tccaaacagtaagctggggtga

SEQ ID NO: 9406 - DNA, 22 bp, Artificial Sequence
  chemically synthesized
caaacagtaagctggggtgatc

SEQ ID NO: 9407 - DNA, 22 bp, Artificial Sequence
  chemically synthesized
gggtgatcggagggttcctgtt

SEQ ID NO: 9408 - DNA, 22 bp, Artificial Sequence
  chemically synthesized
ctgttgtttgcttcttatccct

SEQ ID NO: 9409 - DNA, 22 bp, Artificial Sequence
  chemically synthesized
ttgtttgcttcttatccctcag

SEQ ID NO: 9410 - DNA, 22 bp, Artificial Sequence
  chemically synthesized
tttgcttcttatccctcaggga

SEQ ID NO: 9411 - DNA, 22 bp, Artificial Sequence
  chemically synthesized
gcttcttatccctcagggatct

SEQ ID NO: 9412 - DNA, 22 bp, Artificial Sequence
  chemically synthesized
cttcttatccctcagggatctt

SEQ ID NO: 9413 - DNA, 22 bp, Artificial Sequence
  chemically synthesized
cttatccctcagggatctttac

SEQ ID NO: 9414 - DNA, 22 bp, Artificial Sequence
  chemically synthesized
ttatccctcagggatctttact

SEQ ID NO: 9415 - DNA, 22 bp, Artificial Sequence
  chemically synthesized
atccctcagggatctttactcc

SEQ ID NO: 9416 - DNA, 22 bp, Artificial Sequence
  chemically synthesized
tccctcagggatctttactcct

SEQ ID NO: 9417 - DNA, 22 bp, Artificial Sequence
  chemically synthesized
agggatctttactcctccttgc

SEQ ID NO: 9418 - DNA, 22 bp, Artificial Sequence
  chemically synthesized
tactcctccttgcctgatgtcc

SEQ ID NO: 9419 - DNA, 22 bp, Artificial Sequence
  chemically synthesized
actcctccttgcctgatgtcca

SEQ ID NO: 9420 - DNA, 22 bp, Artificial Sequence
  chemically synthesized
ctcctccttgcctgatgtccag

SEQ ID NO: 9421 - DNA, 22 bp, Artificial Sequence
  chemically synthesized
ctccttgcctgatgtccagagt

SEQ ID NO: 9422 - DNA, 22 bp, Artificial Sequence
  chemically synthesized
cttgcctgatgtccagagtctt

SEQ ID NO: 9423 - DNA, 22 bp, Artificial Sequence
  chemically synthesized
gcctgatgtccagagtcttgaa

SEQ ID NO: 9424 - DNA, 22 bp, Artificial Sequence
  chemically synthesized
cctgatgtccagagtcttgaaa

SEQ ID NO: 9425 - DNA, 22 bp, Artificial Sequence
  chemically synthesized
atgtccagagtcttgaaagctg

SEQ ID NO: 9426 - DNA, 22 bp, Artificial Sequence
  chemically synthesized
gaaagctgccatgttctatagt

SEQ ID NO: 9427 - DNA, 22 bp, Artificial Sequence
  chemically synthesized
aaagctgccatgttctatagtt

SEQ ID NO: 9428 - DNA, 22 bp, Artificial Sequence
  chemically synthesized
ccatgttctatagttgtctgtt

SEQ ID NO: 9429 - DNA, 22 bp, Artificial Sequence
  chemically synthesized
tatagttgtctgtttttgtttt

SEQ ID NO: 9430 - DNA, 22 bp, Artificial Sequence
  chemically synthesized
tagttgtctgtttttgttttga

SEQ ID NO: 9431 - DNA, 22 bp, Artificial Sequence
  chemically synthesized
tctgtttttgttttgattgttt

SEQ ID NO: 9432 - DNA, 22 bp, Artificial Sequence
  chemically synthesized
tttttgttttgattgtttctgg

SEQ ID NO: 9433 - DNA, 22 bp, Artificial Sequence
  chemically synthesized
ttgttttgattgtttctgggga

SEQ ID NO: 9434 - DNA, 22 bp, Artificial Sequence
  chemically synthesized
tgttttgattgtttctggggag

SEQ ID NO: 9435 - DNA, 22 bp, Artificial Sequence
  chemically synthesized
gttttgattgtttctggggaga

SEQ ID NO: 9436 - DNA, 22 bp, Artificial Sequence
  chemically synthesized
ttttgattgtttctggggagag

SEQ ID NO: 9437 - DNA, 22 bp, Artificial Sequence
  chemically synthesized
tgattgtttctggggagagaag

SEQ ID NO: 9438 - DNA, 22 bp, Artificial Sequence
  chemically synthesized
gattgtttctggggagagaaga

SEQ ID NO: 9439 - DNA, 22 bp, Artificial Sequence
  chemically synthesized
attgtttctggggagagaagaa

SEQ ID NO: 9440 - DNA, 22 bp, Artificial Sequence
  chemically synthesized
tttctggggagagaagaactct

SEQ ID NO: 9441 - DNA, 22 bp, Artificial Sequence
  chemically synthesized
ctggggagagaagaactcttcc

SEQ ID NO: 9442 - DNA, 22 bp, Artificial Sequence
  chemically synthesized
tggggagagaagaactcttccc

SEQ ID NO: 9443 - DNA, 22 bp, Artificial Sequence
  chemically synthesized
gggagagaagaactcttcccat

SEQ ID NO: 9444 - DNA, 22 bp, Artificial Sequence
  chemically synthesized
ttcccatcttgggcagaccctg

SEQ ID NO: 9445 - DNA, 22 bp, Artificial Sequence
  chemically synthesized
cccatcttgggcagaccctgtc

SEQ ID NO: 9446 - DNA, 22 bp, Artificial Sequence
  chemically synthesized
ccatcttgggcagaccctgtct

SEQ ID NO: 9447 - DNA, 22 bp, Artificial Sequence
  chemically synthesized
gggcagaccctgtcttttatgt

SEQ ID NO: 9448 - DNA, 22 bp, Artificial Sequence
  chemically synthesized
ggcagaccctgtcttttatgtt

SEQ ID NO: 9449 - DNA, 22 bp, Artificial Sequence
  chemically synthesized
tcttttatgttcaaacttttgc

SEQ ID NO: 9450 - DNA, 22 bp, Artificial Sequence
  chemically synthesized
ttatgttcaaacttttgcctaa

SEQ ID NO: 9451 - DNA, 22 bp, Artificial Sequence
  chemically synthesized
tatgttcaaacttttgcctaag

SEQ ID NO: 9452 - DNA, 22 bp, Artificial Sequence
  chemically synthesized
atgttcaaacttttgcctaaga

SEQ ID NO: 9453 - DNA, 22 bp, Artificial Sequence
  chemically synthesized
tgttcaaacttttgcctaagaa

SEQ ID NO: 9454 - DNA, 22 bp, Artificial Sequence
  chemically synthesized
aaacttttgcctaagaagcaca

SEQ ID NO: 9455 - DNA, 22 bp, Artificial Sequence
  chemically synthesized
ttgcctaagaagcacattacat

SEQ ID NO: 9456 - DNA, 22 bp, Artificial Sequence
  chemically synthesized
tgcctaagaagcacattacata

SEQ ID NO: 9457 - DNA, 22 bp, Artificial Sequence
  chemically synthesized
gcctaagaagcacattacatat

SEQ ID NO: 9458 - DNA, 22 bp, Artificial Sequence
  chemically synthesized
cctaagaagcacattacatatt

SEQ ID NO: 9459 - DNA, 22 bp, Artificial Sequence
  chemically synthesized
agaagcacattacatattttaa

SEQ ID NO: 9460 - DNA, 22 bp, Artificial Sequence
  chemically synthesized
catattttaactcatctaatta

SEQ ID NO: 9461 - DNA, 22 bp, Artificial Sequence
  chemically synthesized
taactcatctaattatccgagc

SEQ ID NO: 9462 - DNA, 22 bp, Artificial Sequence
  chemically synthesized
aactcatctaattatccgagca

SEQ ID NO: 9463 - DNA, 22 bp, Artificial Sequence
  chemically synthesized
actcatctaattatccgagcaa

SEQ ID NO: 9464 - DNA, 22 bp, Artificial Sequence
  chemically synthesized
atctaattatccgagcaatcca

SEQ ID NO: 9465 - DNA, 22 bp, Artificial Sequence
  chemically synthesized
attatccgagcaatccaatcgg

SEQ ID NO: 9466 - DNA, 22 bp, Artificial Sequence
  chemically synthesized
tccgagcaatccaatcgggtag

SEQ ID NO: 9467 - DNA, 22 bp, Artificial Sequence
  chemically synthesized
cgactgtgatctccattttaca

SEQ ID NO: 9468 - DNA, 22 bp, Artificial Sequence
  chemically synthesized
tgatctccattttacacacgag

SEQ ID NO: 9469 - DNA, 22 bp, Artificial Sequence
  chemically synthesized
cattttacacacgagaaaatgg

SEQ ID NO: 9470 - DNA, 22 bp, Artificial Sequence
  chemically synthesized
tacacacgagaaaatggaagca

SEQ ID NO: 9471 - DNA, 22 bp, Artificial Sequence
  chemically synthesized
acacacgagaaaatggaagcat

SEQ ID NO: 9472 - DNA, 22 bp, Artificial Sequence
  chemically synthesized
cacacgagaaaatggaagcatg

SEQ ID NO: 9473 - DNA, 22 bp, Artificial Sequence
  chemically synthesized
aatgctggtgcatgatctcaga

SEQ ID NO: 9474 - DNA, 22 bp, Artificial Sequence
  chemically synthesized
gtgcatgatctcagagctacct

SEQ ID NO: 9475 - DNA, 22 bp, Artificial Sequence
  chemically synthesized
agagctacctggaggcacagct

SEQ ID NO: 9476 - DNA, 22 bp, Artificial Sequence
  chemically synthesized
cctggaggcacagctgggctac

SEQ ID NO: 9477 - DNA, 22 bp, Artificial Sequence
  chemically synthesized
gaggcacagctgggctaccctg

SEQ ID NO: 9478 - DNA, 22 bp, Artificial Sequence
  chemically synthesized
ggctaccctgtgggcagtctgg

SEQ ID NO: 9479 - DNA, 22 bp, Artificial Sequence
  chemically synthesized
ccctgtgggcagtctggtttca

SEQ ID NO: 9480 - DNA, 22 bp, Artificial Sequence
  chemically synthesized
tgggcagtctggtttcagggtg

SEQ ID NO: 9481 - DNA, 22 bp, Artificial Sequence
  chemically synthesized
gtttcagggtggatatacagac

SEQ ID NO: 9482 - DNA, 22 bp, Artificial Sequence
  chemically synthesized
cagggtggatatacagacacgt

SEQ ID NO: 9483 - DNA, 22 bp, Artificial Sequence
  chemically synthesized
agggtggatatacagacacgtt

SEQ ID NO: 9484 - DNA, 22 bp, Artificial Sequence
  chemically synthesized
ctgggctgacccagcattggga

SEQ ID NO: 9485 - DNA, 22 bp, Artificial Sequence
  chemically synthesized
ggctgacccagcattgggagtt

SEQ ID NO: 9486 - DNA, 22 bp, Artificial Sequence
  chemically synthesized
acccagcattgggagttgataa

SEQ ID NO: 9487 - DNA, 22 bp, Artificial Sequence
  chemically synthesized
ggagttgataagtcggactggg

SEQ ID NO: 9488 - DNA, 22 bp, Artificial Sequence
  chemically synthesized
ataagtcggactgggaagcagg

SEQ ID NO: 9489 - DNA, 22 bp, Artificial Sequence
  chemically synthesized
ggaagcaggacaggaccctctg

SEQ ID NO: 9490 - DNA, 22 bp, Artificial Sequence
  chemically synthesized
tgagtggagggtgctgaagaca

SEQ ID NO: 9491 - DNA, 22 bp, Artificial Sequence
  chemically synthesized
agtggagggtgctgaagacagc

SEQ ID NO: 9492 - DNA, 22 bp, Artificial Sequence
  chemically synthesized
aagacagcagtcagggactcag

SEQ ID NO: 9493 - DNA, 22 bp, Artificial Sequence
  chemically synthesized
agccatggagggccagcttggt

SEQ ID NO: 9494 - DNA, 22 bp, Artificial Sequence
  chemically synthesized
ggtggggaacaccgtggtcatg

SEQ ID NO: 9495 - DNA, 22 bp, Artificial Sequence
  chemically synthesized
gtggggaacaccgtggtcatgg

SEQ ID NO: 9496 - DNA, 22 bp, Artificial Sequence
  chemically synthesized
ctggatggagaggaatgcaaag

SEQ ID NO: 9497 - DNA, 22 bp, Artificial Sequence
  chemically synthesized
tggatggagaggaatgcaaagg

SEQ ID NO: 9498 - DNA, 22 bp, Artificial Sequence
  chemically synthesized
gatggagaggaatgcaaaggcc

SEQ ID NO: 9499 - DNA, 22 bp, Artificial Sequence
  chemically synthesized
ggaggaaggggtgggggcagtg

SEQ ID NO: 9500 - DNA, 22 bp, Artificial Sequence
  chemically synthesized
gaggaaggggtgggggcagtga

SEQ ID NO: 9501 - DNA, 22 bp, Artificial Sequence
  chemically synthesized
tgctcagagcgggagtgggcag

SEQ ID NO: 9502 - DNA, 22 bp, Artificial Sequence
  chemically synthesized
agagcgggagtgggcagtggag

SEQ ID NO: 9503 - DNA, 22 bp, Artificial Sequence
  chemically synthesized
cctgggtcaaatggggtcctga

SEQ ID NO: 9504 - DNA, 22 bp, Artificial Sequence
  chemically synthesized
ggtcaaatggggtcctgagtgt

SEQ ID NO: 9505 - DNA, 22 bp, Artificial Sequence
  chemically synthesized
agtgtggctgcagtggggaagg

SEQ ID NO: 9506 - DNA, 22 bp, Artificial Sequence
  chemically synthesized
cagtggggaaggtggaagtcac

SEQ ID NO: 9507 - DNA, 22 bp, Artificial Sequence
  chemically synthesized
gtgtgaaaaagatgaagagtta

SEQ ID NO: 9508 - DNA, 22 bp, Artificial Sequence
  chemically synthesized
tggacagtcacttacaggggca

SEQ ID NO: 9509 - DNA, 22 bp, Artificial Sequence
  chemically synthesized
acaggggcagtgtctgactcag

SEQ ID NO: 9510 - DNA, 22 bp, Artificial Sequence
  chemically synthesized
caggggcagtgtctgactcagg

SEQ ID NO: 9511 - DNA, 22 bp, Artificial Sequence
  chemically synthesized
actcaggacagtggcaggaagt

SEQ ID NO: 9512 - DNA, 22 bp, Artificial Sequence
  chemically synthesized
aggacagtggcaggaagtgacc

SEQ ID NO: 9513 - DNA, 22 bp, Artificial Sequence
  chemically synthesized
gggaggaagattctgggcccct

SEQ ID NO: 9514 - DNA, 22 bp, Artificial Sequence
  chemically synthesized
tgggcccctgactgagcctccc

SEQ ID NO: 9515 - DNA, 22 bp, Artificial Sequence
  chemically synthesized
ggcccctgactgagcctcccca

SEQ ID NO: 9516 - DNA, 22 bp, Artificial Sequence
  chemically synthesized
actgagcctccccaggatgtgg

SEQ ID NO: 9517 - DNA, 22 bp, Artificial Sequence
  chemically synthesized
agcctccccaggatgtggtcct

SEQ ID NO: 9518 - DNA, 22 bp, Artificial Sequence
  chemically synthesized
cccaggatgtggtcctgctggg

SEQ ID NO: 9519 - DNA, 22 bp, Artificial Sequence
  chemically synthesized
ctgggtcggggggtgataggaa

SEQ ID NO: 9520 - DNA, 22 bp, Artificial Sequence
  chemically synthesized
ggtcggggggtgataggaatga

SEQ ID NO: 9521 - DNA, 22 bp, Artificial Sequence
  chemically synthesized
gaaggtgttctgtttgcaggtg

SEQ ID NO: 9522 - DNA, 22 bp, Artificial Sequence
  chemically synthesized
tgtttgcaggtggatgctgcaa

SEQ ID NO: 9523 - DNA, 22 bp, Artificial Sequence
  chemically synthesized
tttgcaggtggatgctgcaaag

SEQ ID NO: 9524 - DNA, 22 bp, Artificial Sequence
  chemically synthesized
gcaggtggatgctgcaaagaga

SEQ ID NO: 9525 - DNA, 22 bp, Artificial Sequence
  chemically synthesized
caggtggatgctgcaaagagag

SEQ ID NO: 9526 - DNA, 22 bp, Artificial Sequence
  chemically synthesized
caaagagaggagctcagggctg

SEQ ID NO: 9527 - DNA, 22 bp, Artificial Sequence
  chemically synthesized
agggctgggacaactggagctg

SEQ ID NO: 9528 - DNA, 22 bp, Artificial Sequence
  chemically synthesized
ggacaactggagctgctctggg

SEQ ID NO: 9529 - DNA, 22 bp, Artificial Sequence
  chemically synthesized
gagctgctctgggtctggaggc

SEQ ID NO: 9530 - DNA, 22 bp, Artificial Sequence
  chemically synthesized
ctctgggtctggaggcagcaga

SEQ ID NO: 9531 - DNA, 22 bp, Artificial Sequence
  chemically synthesized
tgggtctggaggcagcagagag

SEQ ID NO: 9532 - DNA, 22 bp, Artificial Sequence
  chemically synthesized
ggtctggaggcagcagagaggg

SEQ ID NO: 9533 - DNA, 22 bp, Artificial Sequence
  chemically synthesized
gaggcagcagagagggagccca

SEQ ID NO: 9534 - DNA, 22 bp, Artificial Sequence
  chemically synthesized
tgtgtgcaggaagacgtgggtg

SEQ ID NO: 9535 - DNA, 22 bp, Artificial Sequence
  chemically synthesized
tgtgcaggaagacgtgggtgtg

SEQ ID NO: 9536 - DNA, 22 bp, Artificial Sequence
  chemically synthesized
gcatgcatatgcacatgtgaga

SEQ ID NO: 9537 - DNA, 22 bp, Artificial Sequence
  chemically synthesized
ttgagtgaagtgagcaatgtgt

SEQ ID NO: 9538 - DNA, 22 bp, Artificial Sequence
  chemically synthesized
tgagtgaagtgagcaatgtgtg

SEQ ID NO: 9539 - DNA, 22 bp, Artificial Sequence
  chemically synthesized
gagtgaagtgagcaatgtgtga

SEQ ID NO: 9540 - DNA, 22 bp, Artificial Sequence
  chemically synthesized
agtgaagtgagcaatgtgtgag

SEQ ID NO: 9541 - DNA, 22 bp, Artificial Sequence
  chemically synthesized
gtgagggcatgtgaatgtgtgt

SEQ ID NO: 9542 - DNA, 22 bp, Artificial Sequence
  chemically synthesized
tgagggcatgtgaatgtgtgtg

SEQ ID NO: 9543 - DNA, 22 bp, Artificial Sequence
  chemically synthesized
tcagggtgcagatggatcaagg

SEQ ID NO: 9544 - DNA, 22 bp, Artificial Sequence
  chemically synthesized
tgagatgacctcgggctgaggg

SEQ ID NO: 9545 - DNA, 22 bp, Artificial Sequence
  chemically synthesized
gggctgaggggagcaaatttag

SEQ ID NO: 9546 - DNA, 22 bp, Artificial Sequence
  chemically synthesized
aggggagcaaatttagtgtgga

SEQ ID NO: 9547 - DNA, 22 bp, Artificial Sequence
  chemically synthesized
agtgtggaacgaggtttctagg

SEQ ID NO: 9548 - DNA, 22 bp, Artificial Sequence
  chemically synthesized
gtgtggaacgaggtttctaggg

SEQ ID NO: 9549 - DNA, 22 bp, Artificial Sequence
  chemically synthesized
ctagggaagcgagggcaaaggg

SEQ ID NO: 9550 - DNA, 22 bp, Artificial Sequence
  chemically synthesized
tagggaagcgagggcaaagggc

SEQ ID NO: 9551 - DNA, 22 bp, Artificial Sequence
  chemically synthesized
gggaagcgagggcaaagggcgc

SEQ ID NO: 9552 - DNA, 22 bp, Artificial Sequence
  chemically synthesized
gggaggaggccttgcgtggtgg

SEQ ID NO: 9553 - DNA, 22 bp, Artificial Sequence
  chemically synthesized
gcgtggtgggggatgaggacaa

SEQ ID NO: 9554 - DNA, 22 bp, Artificial Sequence
  chemically synthesized
cgtggtgggggatgaggacaac

SEQ ID NO: 9555 - DNA, 22 bp, Artificial Sequence
  chemically synthesized
gagggttgtgcttggagagtgg

SEQ ID NO: 9556 - DNA, 22 bp, Artificial Sequence
  chemically synthesized
tgcttggagagtgggctatggt

SEQ ID NO: 9557 - DNA, 22 bp, Artificial Sequence
  chemically synthesized
ggagagtgggctatggtggaat

SEQ ID NO: 9558 - DNA, 22 bp, Artificial Sequence
  chemically synthesized
gagagtgggctatggtggaatg

SEQ ID NO: 9559 - DNA, 22 bp, Artificial Sequence
  chemically synthesized
tggtggaatgacccagatttaa

SEQ ID NO: 9560 - DNA, 22 bp, Artificial Sequence
  chemically synthesized
aaggatctcaatggaattttgg

SEQ ID NO: 9561 - DNA, 22 bp, Artificial Sequence
  chemically synthesized
aggatctcaatggaattttggc

SEQ ID NO: 9562 - DNA, 22 bp, Artificial Sequence
  chemically synthesized
aatggaattttggcaggggagg

SEQ ID NO: 9563 - DNA, 22 bp, Artificial Sequence
  chemically synthesized
tggcaggggagggactgttcca

SEQ ID NO: 9564 - DNA, 22 bp, Artificial Sequence
  chemically synthesized
ggcaggggagggactgttccag

SEQ ID NO: 9565 - DNA, 22 bp, Artificial Sequence
  chemically synthesized
gcaggggagggactgttccagt

SEQ ID NO: 9566 - DNA, 22 bp, Artificial Sequence
  chemically synthesized
ttccagtatggattttaggaag

SEQ ID NO: 9567 - DNA, 22 bp, Artificial Sequence
  chemically synthesized
cagtatggattttaggaagaac

SEQ ID NO: 9568 - DNA, 22 bp, Artificial Sequence
  chemically synthesized
taggaagaacacagggcccagc

SEQ ID NO: 9569 - DNA, 22 bp, Artificial Sequence
  chemically synthesized
aggaagaacacagggcccagct

SEQ ID NO: 9570 - DNA, 22 bp, Artificial Sequence
  chemically synthesized
ggaagaacacagggcccagctt

SEQ ID NO: 9571 - DNA, 22 bp, Artificial Sequence
  chemically synthesized
ctggagtctccaatctgagggg

SEQ ID NO: 9572 - DNA, 22 bp, Artificial Sequence
  chemically synthesized
tggagtctccaatctgagggga

SEQ ID NO: 9573 - DNA, 22 bp, Artificial Sequence
  chemically synthesized
gagtctccaatctgaggggaca

SEQ ID NO: 9574 - DNA, 22 bp, Artificial Sequence
  chemically synthesized
caatctgaggggacaggagcct

SEQ ID NO: 9575 - DNA, 22 bp, Artificial Sequence
  chemically synthesized
aggggacaggagccttagaaga

SEQ ID NO: 9576 - DNA, 22 bp, Artificial Sequence
  chemically synthesized
agaagagctgagactaaggccc

SEQ ID NO: 9577 - DNA, 22 bp, Artificial Sequence
  chemically synthesized
gaagagctgagactaaggcccg

SEQ ID NO: 9578 - DNA, 22 bp, Artificial Sequence
  chemically synthesized
agactaaggcccgaggtgatct

SEQ ID NO: 9579 - DNA, 22 bp, Artificial Sequence
  chemically synthesized
aggcccgaggtgatctggaggc

SEQ ID NO: 9580 - DNA, 22 bp, Artificial Sequence
  chemically synthesized
gaggcctctgccactggctgga

SEQ ID NO: 9581 - DNA, 22 bp, Artificial Sequence
  chemically synthesized
tgccactggctggatgggagga

SEQ ID NO: 9582 - DNA, 22 bp, Artificial Sequence
  chemically synthesized
ccactggctggatgggaggaaa

SEQ ID NO: 9583 - DNA, 22 bp, Artificial Sequence
  chemically synthesized
gctggatgggaggaaaaccatt

SEQ ID NO: 9584 - DNA, 22 bp, Artificial Sequence
  chemically synthesized
gatgggaggaaaaccattcaca

SEQ ID NO: 9585 - DNA, 22 bp, Artificial Sequence
  chemically synthesized
acagatcccccttctcaggatg

SEQ ID NO: 9586 - DNA, 22 bp, Artificial Sequence
  chemically synthesized
ctcaggatgtgtgcctaggcag

SEQ ID NO: 9587 - DNA, 22 bp, Artificial Sequence
  chemically synthesized
tcaggatgtgtgcctaggcagg

SEQ ID NO: 9588 - DNA, 22 bp, Artificial Sequence
  chemically synthesized
aggatgtgtgcctaggcagggc

SEQ ID NO: 9589 - DNA, 22 bp, Artificial Sequence
  chemically synthesized
ggcagggccgggtctgcccccc

SEQ ID NO: 9590 - DNA, 22 bp, Artificial Sequence
  chemically synthesized
cccccccgccccctgtgcgtct

SEQ ID NO: 9591 - DNA, 22 bp, Artificial Sequence
  chemically synthesized
tgcgtctcccagtcccccagct

SEQ ID NO: 9592 - DNA, 22 bp, Artificial Sequence
  chemically synthesized
ccagtcccccagctccaggatc

SEQ ID NO: 9593 - DNA, 22 bp, Artificial Sequence
  chemically synthesized
caggatccgggctttgcacaca

SEQ ID NO: 9594 - DNA, 22 bp, Artificial Sequence
  chemically synthesized
tgcacacagctgatgtgaatat

SEQ ID NO: 9595 - DNA, 22 bp, Artificial Sequence
  chemically synthesized
gcacacagctgatgtgaatatc

SEQ ID NO: 9596 - DNA, 22 bp, Artificial Sequence
  chemically synthesized
cacacagctgatgtgaatatcc

SEQ ID NO: 9597 - DNA, 22 bp, Artificial Sequence
  chemically synthesized
atgtgaatatcctgagtcgtgt

SEQ ID NO: 9598 - DNA, 22 bp, Artificial Sequence
  chemically synthesized
agtcgtgtgcatgggtgtgtgt

SEQ ID NO: 9599 - DNA, 22 bp, Artificial Sequence
  chemically synthesized
gctgcgtgtgtatatttataca

SEQ ID NO: 9600 - DNA, 22 bp, Artificial Sequence
  chemically synthesized
cgtgtgtatatttatacatggt

SEQ ID NO: 9601 - DNA, 22 bp, Artificial Sequence
  chemically synthesized
atacatggtaatatgggtgcga

SEQ ID NO: 9602 - DNA, 22 bp, Artificial Sequence
  chemically synthesized
tacatggtaatatgggtgcgag

SEQ ID NO: 9603 - DNA, 22 bp, Artificial Sequence
  chemically synthesized
aaatgctggggtcaaagcctat

SEQ ID NO: 9604 - DNA, 22 bp, Artificial Sequence
  chemically synthesized
gggtcaaagcctatgatgaccc

SEQ ID NO: 9605 - DNA, 22 bp, Artificial Sequence
  chemically synthesized
tgatgacccccccccatggccc

SEQ ID NO: 9606 - DNA, 22 bp, Artificial Sequence
  chemically synthesized
tgcctcctcaggcttcggtgcc

SEQ ID NO: 9607 - DNA, 22 bp, Artificial Sequence
  chemically synthesized
ctcaggcttcggtgccctgtct

SEQ ID NO: 9608 - DNA, 22 bp, Artificial Sequence
  chemically synthesized
aggcttcggtgccctgtcttta

SEQ ID NO: 9609 - DNA, 22 bp, Artificial Sequence
  chemically synthesized
cggtgccctgtctttaccctcc

SEQ ID NO: 9610 - DNA, 22 bp, Artificial Sequence
  chemically synthesized
ggtgccctgtctttaccctccg

SEQ ID NO: 9611 - DNA, 22 bp, Artificial Sequence
  chemically synthesized
tctttaccctccggctccccac

SEQ ID NO: 9612 - DNA, 22 bp, Artificial Sequence
  chemically synthesized
taccctccggctccccacaccc

SEQ ID NO: 9613 - DNA, 22 bp, Artificial Sequence
  chemically synthesized
accctccggctccccacaccca

SEQ ID NO: 9614 - DNA, 22 bp, Artificial Sequence
  chemically synthesized
ccctccggctccccacacccag

SEQ ID NO: 9615 - DNA, 22 bp, Artificial Sequence
  chemically synthesized
cggctccccacacccaggctgc

SEQ ID NO: 9616 - DNA, 22 bp, Artificial Sequence
  chemically synthesized
cccacacccaggctgccggctc

SEQ ID NO: 9617 - DNA, 22 bp, Artificial Sequence
  chemically synthesized
ccggctcctgatgcccctctcc

SEQ ID NO: 9618 - DNA, 22 bp, Artificial Sequence
  chemically synthesized
ctgatgcccctctcccacaggg

SEQ ID NO: 9619 - DNA, 22 bp, Artificial Sequence
  chemically synthesized
atgcccctctcccacagggcca

SEQ ID NO: 9620 - DNA, 22 bp, Artificial Sequence
  chemically synthesized
tcccacagggccacctcctgcc

SEQ ID NO: 9621 - DNA, 22 bp, Artificial Sequence
  chemically synthesized
ccacagggccacctcctgccca

SEQ ID NO: 9622 - DNA, 22 bp, Artificial Sequence
  chemically synthesized
ctgcccagcccctggcacagcg

SEQ ID NO: 9623 - DNA, 22 bp, Artificial Sequence
  chemically synthesized
cccagcccctggcacagcgtct

SEQ ID NO: 9624 - DNA, 22 bp, Artificial Sequence
  chemically synthesized
gcacagcgtctctgctccatgg

SEQ ID NO: 9625 - DNA, 22 bp, Artificial Sequence
  chemically synthesized
tgctccatggtctgcttcagtc

SEQ ID NO: 9626 - DNA, 22 bp, Artificial Sequence
  chemically synthesized
ctccatggtctgcttcagtctg

SEQ ID NO: 9627 - DNA, 22 bp, Artificial Sequence
  chemically synthesized
catggtctgcttcagtctgctt

SEQ ID NO: 9628 - DNA, 22 bp, Artificial Sequence
  chemically synthesized
cttcagtctgcttgccctgagc

SEQ ID NO: 9629 - DNA, 22 bp, Artificial Sequence
  chemically synthesized
cagtctgcttgccctgagcttc

SEQ ID NO: 9630 - DNA, 22 bp, Artificial Sequence
  chemically synthesized
agtctgcttgccctgagcttca

SEQ ID NO: 9631 - DNA, 22 bp, Artificial Sequence
  chemically synthesized
cttgccctgagcttcaacatcc

SEQ ID NO: 9632 - DNA, 22 bp, Artificial Sequence
  chemically synthesized
gccctgagcttcaacatcctgc

SEQ ID NO: 9633 - DNA, 22 bp, Artificial Sequence
  chemically synthesized
ccctgagcttcaacatcctgct

SEQ ID NO: 9634 - DNA, 22 bp, Artificial Sequence
  chemically synthesized
agcttcaacatcctgctgctgg

SEQ ID NO: 9635 - DNA, 22 bp, Artificial Sequence
  chemically synthesized
caacatcctgctgctggtggtc

SEQ ID NO: 9636 - DNA, 22 bp, Artificial Sequence
  chemically synthesized
aacatcctgctgctggtggtca

SEQ ID NO: 9637 - DNA, 22 bp, Artificial Sequence
  chemically synthesized
ctgctggtggtcatctgtgtga

SEQ ID NO: 9638 - DNA, 22 bp, Artificial Sequence
  chemically synthesized
ctggtggtcatctgtgtgactg

SEQ ID NO: 9639 - DNA, 22 bp, Artificial Sequence
  chemically synthesized
gtggtcatctgtgtgactgggt

SEQ ID NO: 9640 - DNA, 22 bp, Artificial Sequence
  chemically synthesized
tgtgactgggtcccaaagtgag

SEQ ID NO: 9641 - DNA, 22 bp, Artificial Sequence
  chemically synthesized
ggtcccaaagtgagggtcacgg

SEQ ID NO: 9642 - DNA, 20 bp, Artificial Sequence
  chemically synthesized
cttcagatagattatatctg

SEQ ID NO: 9643 - DNA, 20 bp, Artificial Sequence
  chemically synthesized
gatagattatatctggagtg

SEQ ID NO: 9644 - DNA, 20 bp, Artificial Sequence
  chemically synthesized
aatcctgccacctatgtatc

SEQ ID NO: 9645 - DNA, 20 bp, Artificial Sequence
  chemically synthesized
tgccacctatgtatctggca

SEQ ID NO: 9646 - DNA, 20 bp, Artificial Sequence
  chemically synthesized
ctatgtatctggcatagtgt

SEQ ID NO: 9647 - DNA, 20 bp, Artificial Sequence
  chemically synthesized
gagtcctcataaatgcttac

SEQ ID NO: 9648 - DNA, 20 bp, Artificial Sequence
  chemically synthesized
cataaatgcttactggtttg

SEQ ID NO: 9649 - DNA, 20 bp, Artificial Sequence
  chemically synthesized
ataaatgcttactggtttga

SEQ ID NO: 9650 - DNA, 20 bp, Artificial Sequence
  chemically synthesized
taaatgcttactggtttgaa

SEQ ID NO: 9651 - DNA, 20 bp, Artificial Sequence
  chemically synthesized
tggtttgaagggcaacaaaa

SEQ ID NO: 9652 - DNA, 20 bp, Artificial Sequence
  chemically synthesized
aagggcaacaaaatagtgaa

SEQ ID NO: 9653 - DNA, 20 bp, Artificial Sequence
  chemically synthesized
gggcaacaaaatagtgaaca

SEQ ID NO: 9654 - DNA, 20 bp, Artificial Sequence
  chemically synthesized
acagagtgaaaatccccact

SEQ ID NO: 9655 - DNA, 20 bp, Artificial Sequence
  chemically synthesized
gaaaatccccactaagatcc

SEQ ID NO: 9656 - DNA, 20 bp, Artificial Sequence
  chemically synthesized
aaaatccccactaagatcct

SEQ ID NO: 9657 - DNA, 20 bp, Artificial Sequence
  chemically synthesized
ccccactaagatcctgggtc

SEQ ID NO: 9658 - DNA, 20 bp, Artificial Sequence
  chemically synthesized
taagatcctgggtccagaaa

SEQ ID NO: 9659 - DNA, 20 bp, Artificial Sequence
  chemically synthesized
atcctgggtccagaaaaaga

SEQ ID NO: 9660 - DNA, 20 bp, Artificial Sequence
  chemically synthesized
tcctgggtccagaaaaagat

SEQ ID NO: 9661 - DNA, 20 bp, Artificial Sequence
  chemically synthesized
aaaaagatgggaaacctgtt

SEQ ID NO: 9662 - DNA, 20 bp, Artificial Sequence
  chemically synthesized
aacctgtttagctcacccgt

SEQ ID NO: 9663 - DNA, 20 bp, Artificial Sequence
  chemically synthesized
ttagctcacccgtgagccca

SEQ ID NO: 9664 - DNA, 20 bp, Artificial Sequence
  chemically synthesized
agcccatagttaaaactctt

SEQ ID NO: 9665 - DNA, 20 bp, Artificial Sequence
  chemically synthesized
agttaaaactctttagacaa

SEQ ID NO: 9666 - DNA, 20 bp, Artificial Sequence
  chemically synthesized
gttaaaactctttagacaac

SEQ ID NO: 9667 - DNA, 20 bp, Artificial Sequence
  chemically synthesized
caacaggttgtttccgttta

SEQ ID NO: 9668 - DNA, 20 bp, Artificial Sequence
  chemically synthesized
acaggttgtttccgtttaca

SEQ ID NO: 9669 - DNA, 20 bp, Artificial Sequence
  chemically synthesized
tttacagagaacaataatat

SEQ ID NO: 9670 - DNA, 20 bp, Artificial Sequence
  chemically synthesized
ttacagagaacaataatatt

SEQ ID NO: 9671 - DNA, 20 bp, Artificial Sequence
  chemically synthesized
cagagaacaataatattggg

SEQ ID NO: 9672 - DNA, 20 bp, Artificial Sequence
  chemically synthesized
gaacaataatattgggtggt

SEQ ID NO: 9673 - DNA, 20 bp, Artificial Sequence
  chemically synthesized
ttgggtggtgagcatctgtg

SEQ ID NO: 9674 - DNA, 20 bp, Artificial Sequence
  chemically synthesized
tgggtggtgagcatctgtgt

SEQ ID NO: 9675 - DNA, 20 bp, Artificial Sequence
  chemically synthesized
gggtggtgagcatctgtgtg

SEQ ID NO: 9676 - DNA, 20 bp, Artificial Sequence
  chemically synthesized
ggtggtgagcatctgtgtgg

SEQ ID NO: 9677 - DNA, 20 bp, Artificial Sequence
  chemically synthesized
gtgagcatctgtgtgggggt

SEQ ID NO: 9678 - DNA, 20 bp, Artificial Sequence
  chemically synthesized
tgagcatctgtgtgggggtt

SEQ ID NO: 9679 - DNA, 20 bp, Artificial Sequence
  chemically synthesized
gagcatctgtgtgggggttg

SEQ ID NO: 9680 - DNA, 20 bp, Artificial Sequence
  chemically synthesized
catctgtgtgggggttgggg

SEQ ID NO: 9681 - DNA, 20 bp, Artificial Sequence
  chemically synthesized
atctgtgtgggggttggggt

SEQ ID NO: 9682 - DNA, 20 bp, Artificial Sequence
  chemically synthesized
gtgtgggggttggggtggga

SEQ ID NO: 9683 - DNA, 20 bp, Artificial Sequence
  chemically synthesized
tgtgggggttggggtgggat

SEQ ID NO: 9684 - DNA, 20 bp, Artificial Sequence
  chemically synthesized
gtgggggttggggtgggata

SEQ ID NO: 9685 - DNA, 20 bp, Artificial Sequence
  chemically synthesized
tgggggttggggtgggatag

SEQ ID NO: 9686 - DNA, 20 bp, Artificial Sequence
  chemically synthesized
ttggggtgggataggggata

SEQ ID NO: 9687 - DNA, 20 bp, Artificial Sequence
  chemically synthesized
tggggtgggataggggatac

SEQ ID NO: 9688 - DNA, 20 bp, Artificial Sequence
  chemically synthesized
ggggtgggataggggatacg

SEQ ID NO: 9689 - DNA, 20 bp, Artificial Sequence
  chemically synthesized
ggtgggataggggatacggg

SEQ ID NO: 9690 - DNA, 20 bp, Artificial Sequence
  chemically synthesized
tgggataggggatacgggga

SEQ ID NO: 9691 - DNA, 20 bp, Artificial Sequence
  chemically synthesized
gataggggatacggggagag

SEQ ID NO: 9692 - DNA, 20 bp, Artificial Sequence
  chemically synthesized
taggggatacggggagagtg

SEQ ID NO: 9693 - DNA, 20 bp, Artificial Sequence
  chemically synthesized
atacggggagagtggagaaa

SEQ ID NO: 9694 - DNA, 20 bp, Artificial Sequence
  chemically synthesized
tacggggagagtggagaaaa

SEQ ID NO: 9695 - DNA, 20 bp, Artificial Sequence
  chemically synthesized
acggggagagtggagaaaaa

SEQ ID NO: 9696 - DNA, 20 bp, Artificial Sequence
  chemically synthesized
cggggagagtggagaaaaag

SEQ ID NO: 9697 - DNA, 20 bp, Artificial Sequence
  chemically synthesized
gagtggagaaaaaggggaca

SEQ ID NO: 9698 - DNA, 20 bp, Artificial Sequence
  chemically synthesized
agtggagaaaaaggggacac

SEQ ID NO: 9699 - DNA, 20 bp, Artificial Sequence
  chemically synthesized
gtggagaaaaaggggacaca

SEQ ID NO: 9700 - DNA, 20 bp, Artificial Sequence
  chemically synthesized
ggggacacagggttaatgtg

SEQ ID NO: 9701 - DNA, 20 bp, Artificial Sequence
  chemically synthesized
cacagggttaatgtgaagtc

SEQ ID NO: 9702 - DNA, 20 bp, Artificial Sequence
  chemically synthesized
acagggttaatgtgaagtcc

SEQ ID NO: 9703 - DNA, 20 bp, Artificial Sequence
  chemically synthesized
aggatccccctctacattta

SEQ ID NO: 9704 - DNA, 20 bp, Artificial Sequence
  chemically synthesized
tccccctctacatttaaagt

SEQ ID NO: 9705 - DNA, 20 bp, Artificial Sequence
  chemically synthesized
tctacatttaaagttggttt

SEQ ID NO: 9706 - DNA, 20 bp, Artificial Sequence
  chemically synthesized
catttaaagttggtttaagt

SEQ ID NO: 9707 - DNA, 20 bp, Artificial Sequence
  chemically synthesized
tttaagttggctttaattaa

SEQ ID NO: 9708 - DNA, 20 bp, Artificial Sequence
  chemically synthesized
tttaattaatagcaactctt

SEQ ID NO: 9709 - DNA, 20 bp, Artificial Sequence
  chemically synthesized
atagcaactcttaagataat

SEQ ID NO: 9710 - DNA, 20 bp, Artificial Sequence
  chemically synthesized
tcagaattttcttaaccttt

SEQ ID NO: 9711 - DNA, 20 bp, Artificial Sequence
  chemically synthesized
cttttagccttactgttgaa

SEQ ID NO: 9712 - DNA, 20 bp, Artificial Sequence
  chemically synthesized
tgtacaaatcatttgcttct

SEQ ID NO: 9713 - DNA, 20 bp, Artificial Sequence
  chemically synthesized
caaatcatttgcttcttgga

SEQ ID NO: 9714 - DNA, 20 bp, Artificial Sequence
  chemically synthesized
taatttcttttactaaaatg

SEQ ID NO: 9715 - DNA, 20 bp, Artificial Sequence
  chemically synthesized
aatttcttttactaaaatgt

SEQ ID NO: 9716 - DNA, 20 bp, Artificial Sequence
  chemically synthesized
ctaaaatgtgggcttttgac

SEQ ID NO: 9717 - DNA, 20 bp, Artificial Sequence
  chemically synthesized
gatgaatgtaaatgttcttc

SEQ ID NO: 9718 - DNA, 20 bp, Artificial Sequence
  chemically synthesized
ttattctttatattttctaa

SEQ ID NO: 9719 - DNA, 20 bp, Artificial Sequence
  chemically synthesized
attttctaacagattctgtg

SEQ ID NO: 9720 - DNA, 20 bp, Artificial Sequence
  chemically synthesized
ttctaacagattctgtgtag

SEQ ID NO: 9721 - DNA, 20 bp, Artificial Sequence
  chemically synthesized
tctaacagattctgtgtagt

SEQ ID NO: 9722 - DNA, 20 bp, Artificial Sequence
  chemically synthesized
cagattctgtgtagtgggat

SEQ ID NO: 9723 - DNA, 20 bp, Artificial Sequence
  chemically synthesized
attctgtgtagtgggatgag

SEQ ID NO: 9724 - DNA, 20 bp, Artificial Sequence
  chemically synthesized
tctgtgtagtgggatgagca

SEQ ID NO: 9725 - DNA, 20 bp, Artificial Sequence
  chemically synthesized
agaacaaaaacaaaataatc

SEQ ID NO: 9726 - DNA, 20 bp, Artificial Sequence
  chemically synthesized
caaaaacaaaataatccagt

SEQ ID NO: 9727 - DNA, 20 bp, Artificial Sequence
  chemically synthesized
acaaaataatccagtgagaa

SEQ ID NO: 9728 - DNA, 20 bp, Artificial Sequence
  chemically synthesized
aaagcccgtaaataaacctt

SEQ ID NO: 9729 - DNA, 20 bp, Artificial Sequence
  chemically synthesized
ccgtaaataaaccttcagac

SEQ ID NO: 9730 - DNA, 20 bp, Artificial Sequence
  chemically synthesized
gtaaataaaccttcagacca

SEQ ID NO: 9731 - DNA, 20 bp, Artificial Sequence
  chemically synthesized
cagaccagagatctattctc

SEQ ID NO: 9732 - DNA, 20 bp, Artificial Sequence
  chemically synthesized
tctattctctagcttatttt

SEQ ID NO: 9733 - DNA, 20 bp, Artificial Sequence
  chemically synthesized
tattttaagctcaacttaaa

SEQ ID NO: 9734 - DNA, 20 bp, Artificial Sequence
  chemically synthesized
tttaagctcaacttaaaaag

SEQ ID NO: 9735 - DNA, 20 bp, Artificial Sequence
  chemically synthesized
ttaactccaccctccttcaa

SEQ ID NO: 9736 - DNA, 20 bp, Artificial Sequence
  chemically synthesized
ccaccctccttcaaaagaaa

SEQ ID NO: 9737 - DNA, 20 bp, Artificial Sequence
  chemically synthesized
gtctatatgattgatttgca

SEQ ID NO: 9738 - DNA, 20 bp, Artificial Sequence
  chemically synthesized
attgatttgcacagctcatc

SEQ ID NO: 9739 - DNA, 20 bp, Artificial Sequence
  chemically synthesized
atttgcacagctcatctggc

SEQ ID NO: 9740 - DNA, 20 bp, Artificial Sequence
  chemically synthesized
tgcacagctcatctggccag

SEQ ID NO: 9741 - DNA, 20 bp, Artificial Sequence
  chemically synthesized
cacagctcatctggccagaa

SEQ ID NO: 9742 - DNA, 20 bp, Artificial Sequence
  chemically synthesized
ctcatctggccagaagagct

SEQ ID NO: 9743 - DNA, 20 bp, Artificial Sequence
  chemically synthesized
tgagacatccgttcccctac

SEQ ID NO: 9744 - DNA, 20 bp, Artificial Sequence
  chemically synthesized
gagagtttcttgtaggggaa

SEQ ID NO: 9745 - DNA, 20 bp, Artificial Sequence
  chemically synthesized
ttgtaggggaacggatgtct

SEQ ID NO: 9746 - DNA, 20 bp, Artificial Sequence
  chemically synthesized
aacggatgtctcagctcttc

SEQ ID NO: 9747 - DNA, 20 bp, Artificial Sequence
  chemically synthesized
gatgtctcagctcttctggc

SEQ ID NO: 9748 - DNA, 20 bp, Artificial Sequence
  chemically synthesized
ctcagctcttctggccagat

SEQ ID NO: 9749 - DNA, 20 bp, Artificial Sequence
  chemically synthesized
agctgtgcaaatcaatcata

SEQ ID NO: 9750 - DNA, 20 bp, Artificial Sequence
  chemically synthesized
gtgcaaatcaatcatataga

SEQ ID NO: 9751 - DNA, 20 bp, Artificial Sequence
  chemically synthesized
caatcatatagacagtataa

SEQ ID NO: 9752 - DNA, 20 bp, Artificial Sequence
  chemically synthesized
tcatatagacagtataaaag

SEQ ID NO: 9753 - DNA, 20 bp, Artificial Sequence
  chemically synthesized
catatagacagtataaaagt

SEQ ID NO: 9754 - DNA, 20 bp, Artificial Sequence
  chemically synthesized
aggaaatgctgtttcttttg

SEQ ID NO: 9755 - DNA, 20 bp, Artificial Sequence
  chemically synthesized
ggaaatgctgtttcttttga

SEQ ID NO: 9756 - DNA, 20 bp, Artificial Sequence
  chemically synthesized
aaatgctgtttcttttgaag

SEQ ID NO: 9757 - DNA, 20 bp, Artificial Sequence
  chemically synthesized
aatgctgtttcttttgaagg

SEQ ID NO: 9758 - DNA, 20 bp, Artificial Sequence
  chemically synthesized
atgctgtttcttttgaagga

SEQ ID NO: 9759 - DNA, 20 bp, Artificial Sequence
  chemically synthesized
ctgtttcttttgaaggaggg

SEQ ID NO: 9760 - DNA, 20 bp, Artificial Sequence
  chemically synthesized
gtttcttttgaaggagggtg

SEQ ID NO: 9761 - DNA, 20 bp, Artificial Sequence
  chemically synthesized
gagggtggagttaaatcatt

SEQ ID NO: 9762 - DNA, 20 bp, Artificial Sequence
  chemically synthesized
ttaaatcattaagtgtattg

SEQ ID NO: 9763 - DNA, 20 bp, Artificial Sequence
  chemically synthesized
taaatcattaagtgtattga

SEQ ID NO: 9764 - DNA, 20 bp, Artificial Sequence
  chemically synthesized
ttaagtgtattgaaggcgaa

SEQ ID NO: 9765 - DNA, 20 bp, Artificial Sequence
  chemically synthesized
gtattgaaggcgaaaagaat

SEQ ID NO: 9766 - DNA, 20 bp, Artificial Sequence
  chemically synthesized
attgaaggcgaaaagaatca

SEQ ID NO: 9767 - DNA, 20 bp, Artificial Sequence
  chemically synthesized
aggcgaaaagaatcagagaa

SEQ ID NO: 9768 - DNA, 20 bp, Artificial Sequence
  chemically synthesized
agagaacagttcttcttttt

SEQ ID NO: 9769 - DNA, 20 bp, Artificial Sequence
  chemically synthesized
acagttcttctttttaagtt

SEQ ID NO: 9770 - DNA, 20 bp, Artificial Sequence
  chemically synthesized
ttttaagttgagcttaaaat

SEQ ID NO: 9771 - DNA, 20 bp, Artificial Sequence
  chemically synthesized
aagttgagcttaaaataagc

SEQ ID NO: 9772 - DNA, 20 bp, Artificial Sequence
  chemically synthesized
gttgagcttaaaataagcta

SEQ ID NO: 9773 - DNA, 20 bp, Artificial Sequence
  chemically synthesized
gcttaaaataagctagagaa

SEQ ID NO: 9774 - DNA, 20 bp, Artificial Sequence
  chemically synthesized
taagctagagaatagatctc

SEQ ID NO: 9775 - DNA, 20 bp, Artificial Sequence
  chemically synthesized
gagaatagatctctggtctg

SEQ ID NO: 9776 - DNA, 20 bp, Artificial Sequence
  chemically synthesized
agaatagatctctggtctga

SEQ ID NO: 9777 - DNA, 20 bp, Artificial Sequence
  chemically synthesized
ctggtctgaaggtttattta

SEQ ID NO: 9778 - DNA, 20 bp, Artificial Sequence
  chemically synthesized
tggtctgaaggtttatttac

SEQ ID NO: 9779 - DNA, 20 bp, Artificial Sequence
  chemically synthesized
tatttacgggcttttctcac

SEQ ID NO: 9780 - DNA, 20 bp, Artificial Sequence
  chemically synthesized
tctctgctcatcccactaca

SEQ ID NO: 9781 - DNA, 20 bp, Artificial Sequence
  chemically synthesized
tcccactacacagaatctgt

SEQ ID NO: 9782 - DNA, 20 bp, Artificial Sequence
  chemically synthesized
agaatctgttagaaaatata

SEQ ID NO: 9783 - DNA, 20 bp, Artificial Sequence
  chemically synthesized
gttagaaaatataaagaata

SEQ ID NO: 9784 - DNA, 20 bp, Artificial Sequence
  chemically synthesized
ttagaaaatataaagaataa

SEQ ID NO: 9785 - DNA, 20 bp, Artificial Sequence
  chemically synthesized
atataaagaataaaggatat

SEQ ID NO: 9786 - DNA, 20 bp, Artificial Sequence
  chemically synthesized
ataaagaataaaggatatca

SEQ ID NO: 9787 - DNA, 20 bp, Artificial Sequence
  chemically synthesized
agaataaaggatatcagagc

SEQ ID NO: 9788 - DNA, 20 bp, Artificial Sequence
  chemically synthesized
ataaaggatatcagagctag

SEQ ID NO: 9789 - DNA, 20 bp, Artificial Sequence
  chemically synthesized
gaagaacatttacattcatc

SEQ ID NO: 9790 - DNA, 20 bp, Artificial Sequence
  chemically synthesized
atttacattcatctagtcaa

SEQ ID NO: 9791 - DNA, 20 bp, Artificial Sequence
  chemically synthesized
ctagtcaaaagcccacattt

SEQ ID NO: 9792 - DNA, 20 bp, Artificial Sequence
  chemically synthesized
aaaagcccacattttagtaa

SEQ ID NO: 9793 - DNA, 20 bp, Artificial Sequence
  chemically synthesized
agtaaaagaaattactatcc

SEQ ID NO: 9794 - DNA, 20 bp, Artificial Sequence
  chemically synthesized
aaaagaaattactatccaag

SEQ ID NO: 9795 - DNA, 20 bp, Artificial Sequence
  chemically synthesized
aagaagcaaatgatttgtac

SEQ ID NO: 9796 - DNA, 20 bp, Artificial Sequence
  chemically synthesized
aaatgatttgtacaagatca

SEQ ID NO: 9797 - DNA, 20 bp, Artificial Sequence
  chemically synthesized
aatgatttgtacaagatcac

SEQ ID NO: 9798 - DNA, 20 bp, Artificial Sequence
  chemically synthesized
atgatttgtacaagatcaca

SEQ ID NO: 9799 - DNA, 20 bp, Artificial Sequence
  chemically synthesized
aagatcacagggcttttcaa

SEQ ID NO: 9800 - DNA, 20 bp, Artificial Sequence
  chemically synthesized
tcacagggcttttcaacagt

SEQ ID NO: 9801 - DNA, 20 bp, Artificial Sequence
  chemically synthesized
cacagggcttttcaacagta

SEQ ID NO: 9802 - DNA, 20 bp, Artificial Sequence
  chemically synthesized
cttttcaacagtaaggctaa

SEQ ID NO: 9803 - DNA, 20 bp, Artificial Sequence
  chemically synthesized
ttttcaacagtaaggctaaa

SEQ ID NO: 9804 - DNA, 20 bp, Artificial Sequence
  chemically synthesized
aacagtaaggctaaaaggtt

SEQ ID NO: 9805 - DNA, 20 bp, Artificial Sequence
  chemically synthesized
aagaaaattctgattatctt

SEQ ID NO: 9806 - DNA, 20 bp, Artificial Sequence
  chemically synthesized
gaaaattctgattatcttaa

SEQ ID NO: 9807 - DNA, 20 bp, Artificial Sequence
  chemically synthesized
ttaagagttgctattaatta

SEQ ID NO: 9808 - DNA, 20 bp, Artificial Sequence
  chemically synthesized
acttaaaccaactttaaatg

SEQ ID NO: 9809 - DNA, 20 bp, Artificial Sequence
  chemically synthesized
ttaaaccaactttaaatgta

SEQ ID NO: 9810 - DNA, 20 bp, Artificial Sequence
  chemically synthesized
taaaccaactttaaatgtag

SEQ ID NO: 9811 - DNA, 20 bp, Artificial Sequence
  chemically synthesized
aaaccaactttaaatgtaga

SEQ ID NO: 9812 - DNA, 20 bp, Artificial Sequence
  chemically synthesized
aaccaactttaaatgtagag

SEQ ID NO: 9813 - DNA, 20 bp, Artificial Sequence
  chemically synthesized
accaactttaaatgtagagg

SEQ ID NO: 9814 - DNA, 20 bp, Artificial Sequence
  chemically synthesized
ttaaatgtagagggggatcc

SEQ ID NO: 9815 - DNA, 20 bp, Artificial Sequence
  chemically synthesized
atcccaccccaacccccaca

SEQ ID NO: 9816 - DNA, 20 bp, Artificial Sequence
  chemically synthesized
atattattgttctctgtaaa

SEQ ID NO: 9817 - DNA, 20 bp, Artificial Sequence
  chemically synthesized
cggaaacaacctgttgtcta

SEQ ID NO: 9818 - DNA, 20 bp, Artificial Sequence
  chemically synthesized
gaaacaacctgttgtctaaa

SEQ ID NO: 9819 - DNA, 20 bp, Artificial Sequence
  chemically synthesized
tgtctaaagagttttaacta

SEQ ID NO: 9820 - DNA, 20 bp, Artificial Sequence
  chemically synthesized
gtctaaagagttttaactat

SEQ ID NO: 9821 - DNA, 20 bp, Artificial Sequence
  chemically synthesized
gagttttaactatgggctca

SEQ ID NO: 9822 - DNA, 20 bp, Artificial Sequence
  chemically synthesized
agttttaactatgggctcac

SEQ ID NO: 9823 - DNA, 20 bp, Artificial Sequence
  chemically synthesized
ttaactatgggctcacgggt

SEQ ID NO: 9824 - DNA, 20 bp, Artificial Sequence
  chemically synthesized
gggctcacgggtgagctaaa

SEQ ID NO: 9825 - DNA, 20 bp, Artificial Sequence
  chemically synthesized
ggctcacgggtgagctaaac

SEQ ID NO: 9826 - DNA, 20 bp, Artificial Sequence
  chemically synthesized
acaggtttcccatctttttc

SEQ ID NO: 9827 - DNA, 20 bp, Artificial Sequence
  chemically synthesized
ttcccatctttttctggacc

SEQ ID NO: 9828 - DNA, 20 bp, Artificial Sequence
  chemically synthesized
tcccatctttttctggaccc

SEQ ID NO: 9829 - DNA, 20 bp, Artificial Sequence
  chemically synthesized
tttttctggacccaggatct

SEQ ID NO: 9830 - DNA, 20 bp, Artificial Sequence
  chemically synthesized
ttctggacccaggatcttag

SEQ ID NO: 9831 - DNA, 20 bp, Artificial Sequence
  chemically synthesized
tctggacccaggatcttagt

SEQ ID NO: 9832 - DNA, 20 bp, Artificial Sequence
  chemically synthesized
ctggacccaggatcttagtg

SEQ ID NO: 9833 - DNA, 20 bp, Artificial Sequence
  chemically synthesized
tattttgttgcccttcaaac

SEQ ID NO: 9834 - DNA, 20 bp, Artificial Sequence
  chemically synthesized
ttgttgcccttcaaaccagt

SEQ ID NO: 9835 - DNA, 20 bp, Artificial Sequence
  chemically synthesized
tcaaaccagtaagcatttat

SEQ ID NO: 9836 - DNA, 20 bp, Artificial Sequence
  chemically synthesized
caaaccagtaagcatttatg

SEQ ID NO: 9837 - DNA, 20 bp, Artificial Sequence
  chemically synthesized
tatgaggactcacactatgc

SEQ ID NO: 9838 - DNA, 20 bp, Artificial Sequence
  chemically synthesized
ctcacactatgccagataca

SEQ ID NO: 9839 - DNA, 20 bp, Artificial Sequence
  chemically synthesized
tcacactatgccagatacat

SEQ ID NO: 9840 - DNA, 20 bp, Artificial Sequence
  chemically synthesized
cactatgccagatacatagg

SEQ ID NO: 9841 - DNA, 20 bp, Artificial Sequence
  chemically synthesized
tatgccagatacataggtgg

SEQ ID NO: 9842 - DNA, 20 bp, Artificial Sequence
  chemically synthesized
atgccagatacataggtggc

SEQ ID NO: 9843 - DNA, 20 bp, Artificial Sequence
  chemically synthesized
ggtggcaggattcttcactc

SEQ ID NO: 9844 - DNA, 20 bp, Artificial Sequence
  chemically synthesized
ctccagatataatctatctg

SEQ ID NO: 9845 - DNA, 20 bp, Artificial Sequence
  chemically synthesized
gatagattatatctggagtg

SEQ ID NO: 9846 - DNA, 20 bp, Artificial Sequence
  chemically synthesized
acctatgtatctggcatagt

SEQ ID NO: 9847 - DNA, 20 bp, Artificial Sequence
  chemically synthesized
aagggcaacaaaatagtgaa

SEQ ID NO: 9848 - DNA, 20 bp, Artificial Sequence
  chemically synthesized
tgaaaatccccactaagatc

SEQ ID NO: 9849 - DNA, 20 bp, Artificial Sequence
  chemically synthesized
gtttacagagaacaataata

SEQ ID NO: 9850 - DNA, 20 bp, Artificial Sequence
  chemically synthesized
tgggtggtgagcatctgtgt

SEQ ID NO: 9851 - DNA, 20 bp, Artificial Sequence
  chemically synthesized
gtgagcatctgtgtgggggt

SEQ ID NO: 9852 - DNA, 20 bp, Artificial Sequence
  chemically synthesized
catctgtgtgggggttgggg

SEQ ID NO: 9853 - DNA, 20 bp, Artificial Sequence
  chemically synthesized
gtgggggttggggtgggata

SEQ ID NO: 9854 - DNA, 20 bp, Artificial Sequence
  chemically synthesized
ggtgggataggggatacggg

SEQ ID NO: 9855 - DNA, 20 bp, Artificial Sequence
  chemically synthesized
gagtggagaaaaaggggaca

SEQ ID NO: 9856 - DNA, 20 bp, Artificial Sequence
  chemically synthesized
cacagggttaatgtgaagtc

SEQ ID NO: 9857 - DNA, 20 bp, Artificial Sequence
  chemically synthesized
atagcaactcttaagataat

SEQ ID NO: 9858 - DNA, 20 bp, Artificial Sequence
  chemically synthesized
ttgtacaaatcatttgcttc

SEQ ID NO: 9859 - DNA, 20 bp, Artificial Sequence
  chemically synthesized
aaatgtgggcttttgactag

SEQ ID NO: 9860 - DNA, 20 bp, Artificial Sequence
  chemically synthesized
ttctaacagattctgtgtag

SEQ ID NO: 9861 - DNA, 20 bp, Artificial Sequence
  chemically synthesized
ggagagtttcttgtagggga

SEQ ID NO: 9862 - DNA, 20 bp, Artificial Sequence
  chemically synthesized
aaatgctgtttcttttgaag

SEQ ID NO: 9863 - DNA, 20 bp, Artificial Sequence
  chemically synthesized
ctgtttcttttgaaggaggg

SEQ ID NO: 9864 - DNA, 20 bp, Artificial Sequence
  chemically synthesized
ttaagtgtattgaaggcgaa

SEQ ID NO: 9865 - DNA, 20 bp, Artificial Sequence
  chemically synthesized
gttgagcttaaaataagcta

SEQ ID NO: 9866 - DNA, 20 bp, Artificial Sequence
  chemically synthesized
ttatttacgggcttttctca

SEQ ID NO: 9867 - DNA, 20 bp, Artificial Sequence
  chemically synthesized
tctctgctcatcccactaca

SEQ ID NO: 9868 - DNA, 20 bp, Artificial Sequence
  chemically synthesized
agaatctgttagaaaatata

SEQ ID NO: 9869 - DNA, 20 bp, Artificial Sequence
  chemically synthesized
gttagaaaatataaagaata

SEQ ID NO: 9870 - DNA, 20 bp, Artificial Sequence
  chemically synthesized
aagaaaattctgattatctt

SEQ ID NO: 9871 - DNA, 20 bp, Artificial Sequence
  chemically synthesized
aaccaactttaaatgtagag

SEQ ID NO: 9872 - DNA, 20 bp, Artificial Sequence
  chemically synthesized
cggaaacaacctgttgtcta

SEQ ID NO: 9873 - DNA, 20 bp, Artificial Sequence
  chemically synthesized
agagttttaactatgggctc

SEQ ID NO: 9874 - DNA, 20 bp, Artificial Sequence
  chemically synthesized
ttcccatctttttctggacc

SEQ ID NO: 9875 - DNA, 20 bp, Artificial Sequence
  chemically synthesized
tctggacccaggatcttagt

SEQ ID NO: 9876 - DNA, 20 bp, Artificial Sequence
  chemically synthesized
tatgccagatacataggtgg

SEQ ID NO: 9877 - DNA, 20 bp, Artificial Sequence
  chemically synthesized
agatagattatatctggagt

SEQ ID NO: 9878 - DNA, 20 bp, Artificial Sequence
  chemically synthesized
tccccactaagatcctgggt

SEQ ID NO: 9879 - DNA, 20 bp, Artificial Sequence
  chemically synthesized
ataggggatacggggagagt

SEQ ID NO: 9880 - DNA, 20 bp, Artificial Sequence
  chemically synthesized
aatagcaactcttaagataa

SEQ ID NO: 9881 - DNA, 20 bp, Artificial Sequence
  chemically synthesized
acaaaaacaaaataatccag

SEQ ID NO: 9882 - DNA, 20 bp, Artificial Sequence
  chemically synthesized
tttaactccaccctccttca

SEQ ID NO: 9883 - DNA, 20 bp, Artificial Sequence
  chemically synthesized
ctgagacatccgttccccta

SEQ ID NO: 9884 - DNA, 20 bp, Artificial Sequence
  chemically synthesized
attaagtgtattgaaggcga

SEQ ID NO: 9885 - DNA, 20 bp, Artificial Sequence
  chemically synthesized
agttgagcttaaaataagct

SEQ ID NO: 9886 - DNA, 20 bp, Artificial Sequence
  chemically synthesized
ttctctgctcatcccactac

SEQ ID NO: 9887 - DNA, 20 bp, Artificial Sequence
  chemically synthesized
atcccactacacagaatctg

SEQ ID NO: 9888 - DNA, 20 bp, Artificial Sequence
  chemically synthesized
cagaatctgttagaaaatat

SEQ ID NO: 9889 - DNA, 20 bp, Artificial Sequence
  chemically synthesized
caaaagcccacattttagta

SEQ ID NO: 9890 - DNA, 20 bp, Artificial Sequence
  chemically synthesized
caacagtaaggctaaaaggt

SEQ ID NO: 9891 - DNA, 20 bp, Artificial Sequence
  chemically synthesized
ctcacccgtgagcccatagt

SEQ ID NO: 9892 - DNA, 20 bp, Artificial Sequence
  chemically synthesized
tagtgggatgagcagagaac

SEQ ID NO: 9893 - DNA, 20 bp, Artificial Sequence
  chemically synthesized
ggcatagtgtgagtcctcat

SEQ ID NO: 9894 - DNA, 20 bp, Artificial Sequence
  chemically synthesized
gtgagtcctcataaatgctt

SEQ ID NO: 9895 - DNA, 20 bp, Artificial Sequence
  chemically synthesized
ggtccagaaaaagatgggaa

SEQ ID NO: 9896 - DNA, 20 bp, Artificial Sequence
  chemically synthesized
ttaaaactctttagacaaca

SEQ ID NO: 9897 - DNA, 20 bp, Artificial Sequence
  chemically synthesized
ctctttagacaacaggttgt

SEQ ID NO: 9898 - DNA, 20 bp, Artificial Sequence
  chemically synthesized
gatccccctctacatttaaa

SEQ ID NO: 9899 - DNA, 20 bp, Artificial Sequence
  chemically synthesized
tacatttaaagttggtttaa

SEQ ID NO: 9900 - DNA, 20 bp, Artificial Sequence
  chemically synthesized
cctgtgatcttgtacaaatc

SEQ ID NO: 9901 - DNA, 20 bp, Artificial Sequence
  chemically synthesized
gtaatttcttttactaaaat

SEQ ID NO: 9902 - DNA, 20 bp, Artificial Sequence
  chemically synthesized
ctttattctttatattttct

SEQ ID NO: 9903 - DNA, 20 bp, Artificial Sequence
  chemically synthesized
ttcagaccagagatctattc

SEQ ID NO: 9904 - DNA, 20 bp, Artificial Sequence
  chemically synthesized
acttaaaaagaagaactgtt

SEQ ID NO: 9905 - DNA, 20 bp, Artificial Sequence
  chemically synthesized
cttttcgccttcaatacact

SEQ ID NO: 9906 - DNA, 20 bp, Artificial Sequence
  chemically synthesized
ttcctacttttatactgtct

SEQ ID NO: 9907 - DNA, 20 bp, Artificial Sequence
  chemically synthesized
tacttttatactgtctatat

SEQ ID NO: 9908 - DNA, 20 bp, Artificial Sequence
  chemically synthesized
gacagtataaaagtaggaaa

SEQ ID NO: 9909 - DNA, 20 bp, Artificial Sequence
  chemically synthesized
gaacagttcttctttttaag

SEQ ID NO: 9910 - DNA, 20 bp, Artificial Sequence
  chemically synthesized
agagaatagatctctggtct

SEQ ID NO: 9911 - DNA, 20 bp, Artificial Sequence
  chemically synthesized
tctggtctgaaggtttattt

SEQ ID NO: 9912 - DNA, 20 bp, Artificial Sequence
  chemically synthesized
tttatttacgggcttttctc

SEQ ID NO: 9913 - DNA, 20 bp, Artificial Sequence
  chemically synthesized
gggcttttctcactggatta

SEQ ID NO: 9914 - DNA, 20 bp, Artificial Sequence
  chemically synthesized
gaaattactatccaagaagc

SEQ ID NO: 9915 - DNA, 20 bp, Artificial Sequence
  chemically synthesized
aaatgatttgtacaagatca

SEQ ID NO: 9916 - DNA, 20 bp, Artificial Sequence
  chemically synthesized
aggctaaaaggttaagaaaa

SEQ ID NO: 9917 - DNA, 20 bp, Artificial Sequence
  chemically synthesized
cggaaacaacctgttgtcta

SEQ ID NO: 9918 - DNA, 20 bp, Artificial Sequence
  chemically synthesized
tgggctcacgggtgagctaa

SEQ ID NO: 9919 - DNA, 20 bp, Artificial Sequence
  chemically synthesized
ttctggacccaggatcttag

SEQ ID NO: 9920 - DNA, 20 bp, Artificial Sequence
  chemically synthesized
ctatgccagatacataggtg

SEQ ID NO: 9921 - DNA, 22 bp, Artificial Sequence
  chemically synthesized
cagatagattatatctggagtg

SEQ ID NO: 9922 - DNA, 22 bp, Artificial Sequence
  chemically synthesized
agatagattatatctggagtga

SEQ ID NO: 9923 - DNA, 22 bp, Artificial Sequence
  chemically synthesized
tatctggagtgaagaatcctgc

SEQ ID NO: 9924 - DNA, 22 bp, Artificial Sequence
  chemically synthesized
gagtgaagaatcctgccaccta

SEQ ID NO: 9925 - DNA, 22 bp, Artificial Sequence
  chemically synthesized
ccacctatgtatctggcatagt

SEQ ID NO: 9926 - DNA, 22 bp, Artificial Sequence
  chemically synthesized
tgtatctggcatagtgtgagtc

SEQ ID NO: 9927 - DNA, 22 bp, Artificial Sequence
  chemically synthesized
gcatagtgtgagtcctcataaa

SEQ ID NO: 9928 - DNA, 22 bp, Artificial Sequence
  chemically synthesized
ataaatgcttactggtttgaag

SEQ ID NO: 9929 - DNA, 22 bp, Artificial Sequence
  chemically synthesized
actggtttgaagggcaacaaaa

SEQ ID NO: 9930 - DNA, 22 bp, Artificial Sequence
  chemically synthesized
ctggtttgaagggcaacaaaat

SEQ ID NO: 9931 - DNA, 22 bp, Artificial Sequence
  chemically synthesized
gtttgaagggcaacaaaatagt

SEQ ID NO: 9932 - DNA, 22 bp, Artificial Sequence
  chemically synthesized
gaagggcaacaaaatagtgaac

SEQ ID NO: 9933 - DNA, 22 bp, Artificial Sequence
  chemically synthesized
aagggcaacaaaatagtgaaca

SEQ ID NO: 9934 - DNA, 22 bp, Artificial Sequence
  chemically synthesized
agatcctgggtccagaaaaaga

SEQ ID NO: 9935 - DNA, 22 bp, Artificial Sequence
  chemically synthesized
ggtccagaaaaagatgggaaac

SEQ ID NO: 9936 - DNA, 22 bp, Artificial Sequence
  chemically synthesized
tttagctcacccgtgagcccat

SEQ ID NO: 9937 - DNA, 22 bp, Artificial Sequence
  chemically synthesized
agctcacccgtgagcccatagt

SEQ ID NO: 9938 - DNA, 22 bp, Artificial Sequence
  chemically synthesized
gctcacccgtgagcccatagtt

SEQ ID NO: 9939 - DNA, 22 bp, Artificial Sequence
  chemically synthesized
acccgtgagcccatagttaaaa

SEQ ID NO: 9940 - DNA, 22 bp, Artificial Sequence
  chemically synthesized
aaactctttagacaacaggttg

SEQ ID NO: 9941 - DNA, 22 bp, Artificial Sequence
  chemically synthesized
tttagacaacaggttgtttccg

SEQ ID NO: 9942 - DNA, 22 bp, Artificial Sequence
  chemically synthesized
tagacaacaggttgtttccgtt

SEQ ID NO: 9943 - DNA, 22 bp, Artificial Sequence
  chemically synthesized
agacaacaggttgtttccgttt

SEQ ID NO: 9944 - DNA, 22 bp, Artificial Sequence
  chemically synthesized
gacaacaggttgtttccgttta

SEQ ID NO: 9945 - DNA, 22 bp, Artificial Sequence
  chemically synthesized
tttccgtttacagagaacaata

SEQ ID NO: 9946 - DNA, 22 bp, Artificial Sequence
  chemically synthesized
ccgtttacagagaacaataata

SEQ ID NO: 9947 - DNA, 22 bp, Artificial Sequence
  chemically synthesized
cgtttacagagaacaataatat

SEQ ID NO: 9948 - DNA, 22 bp, Artificial Sequence
  chemically synthesized
acagagaacaataatattgggt

SEQ ID NO: 9949 - DNA, 22 bp, Artificial Sequence
  chemically synthesized
cagagaacaataatattgggtg

SEQ ID NO: 9950 - DNA, 22 bp, Artificial Sequence
  chemically synthesized
ggtggtgagcatctgtgtgggg

SEQ ID NO: 9951 - DNA, 22 bp, Artificial Sequence
  chemically synthesized
tgtgggggttggggtgggatag

SEQ ID NO: 9952 - DNA, 22 bp, Artificial Sequence
  chemically synthesized
gggtgggataggggatacgggg

SEQ ID NO: 9953 - DNA, 22 bp, Artificial Sequence
  chemically synthesized
atgtgaagtccaggatccccct

SEQ ID NO: 9954 - DNA, 22 bp, Artificial Sequence
  chemically synthesized
tacatttaaagttggtttaagt

SEQ ID NO: 9955 - DNA, 22 bp, Artificial Sequence
  chemically synthesized
catttaaagttggtttaagttg

SEQ ID NO: 9956 - DNA, 22 bp, Artificial Sequence
  chemically synthesized
aaagttggtttaagttggcttt

SEQ ID NO: 9957 - DNA, 22 bp, Artificial Sequence
  chemically synthesized
aagttggtttaagttggcttta

SEQ ID NO: 9958 - DNA, 22 bp, Artificial Sequence
  chemically synthesized
gtttaagttggctttaattaat

SEQ ID NO: 9959 - DNA, 22 bp, Artificial Sequence
  chemically synthesized
aagttggctttaattaatagca

SEQ ID NO: 9960 - DNA, 22 bp, Artificial Sequence
  chemically synthesized
agttggctttaattaatagcaa

SEQ ID NO: 9961 - DNA, 22 bp, Artificial Sequence
  chemically synthesized
gctttaattaatagcaactctt

SEQ ID NO: 9962 - DNA, 22 bp, Artificial Sequence
  chemically synthesized
taattaatagcaactcttaaga

SEQ ID NO: 9963 - DNA, 22 bp, Artificial Sequence
  chemically synthesized
aattaatagcaactcttaagat

SEQ ID NO: 9964 - DNA, 22 bp, Artificial Sequence
  chemically synthesized
attaatagcaactcttaagata

SEQ ID NO: 9965 - DNA, 22 bp, Artificial Sequence
  chemically synthesized
atagcaactcttaagataatca

SEQ ID NO: 9966 - DNA, 22 bp, Artificial Sequence
  chemically synthesized
ttaagataatcagaattttctt

SEQ ID NO: 9967 - DNA, 22 bp, Artificial Sequence
  chemically synthesized
aagataatcagaattttcttaa

SEQ ID NO: 9968 - DNA, 22 bp, Artificial Sequence
  chemically synthesized
agataatcagaattttcttaac

SEQ ID NO: 9969 - DNA, 22 bp, Artificial Sequence
  chemically synthesized
tcttaaccttttagccttactg

SEQ ID NO: 9970 - DNA, 22 bp, Artificial Sequence
  chemically synthesized
cttaaccttttagccttactgt

SEQ ID NO: 9971 - DNA, 22 bp, Artificial Sequence
  chemically synthesized
ttaaccttttagccttactgtt

SEQ ID NO: 9972 - DNA, 22 bp, Artificial Sequence
  chemically synthesized
aaccttttagccttactgttga

SEQ ID NO: 9973 - DNA, 22 bp, Artificial Sequence
  chemically synthesized
accttttagccttactgttgaa

SEQ ID NO: 9974 - DNA, 22 bp, Artificial Sequence
  chemically synthesized
ttagccttactgttgaaaagcc

SEQ ID NO: 9975 - DNA, 22 bp, Artificial Sequence
  chemically synthesized
tagccttactgttgaaaagccc

SEQ ID NO: 9976 - DNA, 22 bp, Artificial Sequence
  chemically synthesized
agccttactgttgaaaagccct

SEQ ID NO: 9977 - DNA, 22 bp, Artificial Sequence
  chemically synthesized
gccttactgttgaaaagccctg

SEQ ID NO: 9978 - DNA, 22 bp, Artificial Sequence
  chemically synthesized
actgttgaaaagccctgtgatc

SEQ ID NO: 9979 - DNA, 22 bp, Artificial Sequence
  chemically synthesized
ctgttgaaaagccctgtgatct

SEQ ID NO: 9980 - DNA, 22 bp, Artificial Sequence
  chemically synthesized
ttgaaaagccctgtgatcttgt

SEQ ID NO: 9981 - DNA, 22 bp, Artificial Sequence
  chemically synthesized
aaaagccctgtgatcttgtaca

SEQ ID NO: 9982 - DNA, 22 bp, Artificial Sequence
  chemically synthesized
tgatcttgtacaaatcatttgc

SEQ ID NO: 9983 - DNA, 22 bp, Artificial Sequence
  chemically synthesized
gtacaaatcatttgcttcttgg

SEQ ID NO: 9984 - DNA, 22 bp, Artificial Sequence
  chemically synthesized
tacaaatcatttgcttcttgga

SEQ ID NO: 9985 - DNA, 22 bp, Artificial Sequence
  chemically synthesized
gcttcttggatagtaatttctt

SEQ ID NO: 9986 - DNA, 22 bp, Artificial Sequence
  chemically synthesized
cttcttggatagtaatttcttt

SEQ ID NO: 9987 - DNA, 22 bp, Artificial Sequence
  chemically synthesized
cttggatagtaatttcttttac

SEQ ID NO: 9988 - DNA, 22 bp, Artificial Sequence
  chemically synthesized
ttggatagtaatttcttttact

SEQ ID NO: 9989 - DNA, 22 bp, Artificial Sequence
  chemically synthesized
ggatagtaatttcttttactaa

SEQ ID NO: 9990 - DNA, 22 bp, Artificial Sequence
  chemically synthesized
gatagtaatttcttttactaaa

SEQ ID NO: 9991 - DNA, 22 bp, Artificial Sequence
  chemically synthesized
cttttactaaaatgtgggcttt

SEQ ID NO: 9992 - DNA, 22 bp, Artificial Sequence
  chemically synthesized
ttttactaaaatgtgggctttt

SEQ ID NO: 9993 - DNA, 22 bp, Artificial Sequence
  chemically synthesized
ttactaaaatgtgggcttttga

SEQ ID NO: 9994 - DNA, 22 bp, Artificial Sequence
  chemically synthesized
tactaaaatgtgggcttttgac

SEQ ID NO: 9995 - DNA, 22 bp, Artificial Sequence
  chemically synthesized
actaaaatgtgggcttttgact

SEQ ID NO: 9996 - DNA, 22 bp, Artificial Sequence
  chemically synthesized
ctaaaatgtgggcttttgacta

SEQ ID NO: 9997 - DNA, 22 bp, Artificial Sequence
  chemically synthesized
aaatgtgggcttttgactagat

SEQ ID NO: 9998 - DNA, 22 bp, Artificial Sequence
  chemically synthesized
ttgactagatgaatgtaaatgt

SEQ ID NO: 9999 - DNA, 22 bp, Artificial Sequence
  chemically synthesized
tgactagatgaatgtaaatgtt

SEQ ID NO: 10000 - DNA, 22 bp, Artificial Sequence
  chemically synthesized
gactagatgaatgtaaatgttc

SEQ ID NO: 10001 - DNA, 22 bp, Artificial Sequence
  chemically synthesized
actagatgaatgtaaatgttct

SEQ ID NO: 10002 - DNA, 22 bp, Artificial Sequence
  chemically synthesized
gatgaatgtaaatgttcttcta

SEQ ID NO: 10003 - DNA, 22 bp, Artificial Sequence
  chemically synthesized
ttctagctctgatatcctttat

SEQ ID NO: 10004 - DNA, 22 bp, Artificial Sequence
  chemically synthesized
ctagctctgatatcctttattc

SEQ ID NO: 10005 - DNA, 22 bp, Artificial Sequence
  chemically synthesized
tagctctgatatcctttattct

SEQ ID NO: 10006 - DNA, 22 bp, Artificial Sequence
  chemically synthesized
gctctgatatcctttattcttt

SEQ ID NO: 10007 - DNA, 22 bp, Artificial Sequence
  chemically synthesized
tgatatcctttattctttatat

SEQ ID NO: 10008 - DNA, 22 bp, Artificial Sequence
  chemically synthesized
atatcctttattctttatattt

SEQ ID NO: 10009 - DNA, 22 bp, Artificial Sequence
  chemically synthesized
tattctttatattttctaacag

SEQ ID NO: 10010 - DNA, 22 bp, Artificial Sequence
  chemically synthesized
attctttatattttctaacaga

SEQ ID NO: 10011 - DNA, 22 bp, Artificial Sequence
  chemically synthesized
ttctttatattttctaacagat

SEQ ID NO: 10012 - DNA, 22 bp, Artificial Sequence
  chemically synthesized
tttatattttctaacagattct

SEQ ID NO: 10013 - DNA, 22 bp, Artificial Sequence
  chemically synthesized
tatattttctaacagattctgt

SEQ ID NO: 10014 - DNA, 22 bp, Artificial Sequence
  chemically synthesized
atattttctaacagattctgtg

SEQ ID NO: 10015 - DNA, 22 bp, Artificial Sequence
  chemically synthesized
tattttctaacagattctgtgt

SEQ ID NO: 10016 - DNA, 22 bp, Artificial Sequence
  chemically synthesized
tctaacagattctgtgtagtgg

SEQ ID NO: 10017 - DNA, 22 bp, Artificial Sequence
  chemically synthesized
ctaacagattctgtgtagtggg

SEQ ID NO: 10018 - DNA, 22 bp, Artificial Sequence
  chemically synthesized
taacagattctgtgtagtggga

SEQ ID NO: 10019 - DNA, 22 bp, Artificial Sequence
  chemically synthesized
acagattctgtgtagtgggatg

SEQ ID NO: 10020 - DNA, 22 bp, Artificial Sequence
  chemically synthesized
tgtgtagtgggatgagcagaga

SEQ ID NO: 10021 - DNA, 22 bp, Artificial Sequence
  chemically synthesized
tgtagtgggatgagcagagaac

SEQ ID NO: 10022 - DNA, 22 bp, Artificial Sequence
  chemically synthesized
cagaccagagatctattctcta

SEQ ID NO: 10023 - DNA, 22 bp, Artificial Sequence
  chemically synthesized
agaccagagatctattctctag

SEQ ID NO: 10024 - DNA, 22 bp, Artificial Sequence
  chemically synthesized
ttctctagcttattttaagctc

SEQ ID NO: 10025 - DNA, 22 bp, Artificial Sequence
  chemically synthesized
tctagcttattttaagctcaac

SEQ ID NO: 10026 - DNA, 22 bp, Artificial Sequence
  chemically synthesized
tagcttattttaagctcaactt

SEQ ID NO: 10027 - DNA, 22 bp, Artificial Sequence
  chemically synthesized
gcttattttaagctcaacttaa

SEQ ID NO: 10028 - DNA, 22 bp, Artificial Sequence
  chemically synthesized
attttaagctcaacttaaaaag

SEQ ID NO: 10029 - DNA, 22 bp, Artificial Sequence
  chemically synthesized
ttttaagctcaacttaaaaaga

SEQ ID NO: 10030 - DNA, 22 bp, Artificial Sequence
  chemically synthesized
taagctcaacttaaaaagaaga

SEQ ID NO: 10031 - DNA, 22 bp, Artificial Sequence
  chemically synthesized
aagctcaacttaaaaagaagaa

SEQ ID NO: 10032 - DNA, 22 bp, Artificial Sequence
  chemically synthesized
agctcaacttaaaaagaagaac

SEQ ID NO: 10033 - DNA, 22 bp, Artificial Sequence
  chemically synthesized
aacttaaaaagaagaactgttc

SEQ ID NO: 10034 - DNA, 22 bp, Artificial Sequence
  chemically synthesized
aaaaagaagaactgttctctga

SEQ ID NO: 10035 - DNA, 22 bp, Artificial Sequence
  chemically synthesized
aaaagaagaactgttctctgat

SEQ ID NO: 10036 - DNA, 22 bp, Artificial Sequence
  chemically synthesized
ttctctgattcttttcgccttc

SEQ ID NO: 10037 - DNA, 22 bp, Artificial Sequence
  chemically synthesized
tctgattcttttcgccttcaat

SEQ ID NO: 10038 - DNA, 22 bp, Artificial Sequence
  chemically synthesized
tgattcttttcgccttcaatac

SEQ ID NO: 10039 - DNA, 22 bp, Artificial Sequence
  chemically synthesized
attcttttcgccttcaatacac

SEQ ID NO: 10040 - DNA, 22 bp, Artificial Sequence
  chemically synthesized
ttttcgccttcaatacacttaa

SEQ ID NO: 10041 - DNA, 22 bp, Artificial Sequence
  chemically synthesized
ttcgccttcaatacacttaatg

SEQ ID NO: 10042 - DNA, 22 bp, Artificial Sequence
  chemically synthesized
tcgccttcaatacacttaatga

SEQ ID NO: 10043 - DNA, 22 bp, Artificial Sequence
  chemically synthesized
cgccttcaatacacttaatgat

SEQ ID NO: 10044 - DNA, 22 bp, Artificial Sequence
  chemically synthesized
gccttcaatacacttaatgatt

SEQ ID NO: 10045 - DNA, 22 bp, Artificial Sequence
  chemically synthesized
caatacacttaatgatttaact

SEQ ID NO: 10046 - DNA, 22 bp, Artificial Sequence
  chemically synthesized
aatacacttaatgatttaactc

SEQ ID NO: 10047 - DNA, 22 bp, Artificial Sequence
  chemically synthesized
aatgatttaactccaccctcct

SEQ ID NO: 10048 - DNA, 22 bp, Artificial Sequence
  chemically synthesized
atgatttaactccaccctcctt

SEQ ID NO: 10049 - DNA, 22 bp, Artificial Sequence
  chemically synthesized
aactccaccctccttcaaaaga

SEQ ID NO: 10050 - DNA, 22 bp, Artificial Sequence
  chemically synthesized
actccaccctccttcaaaagaa

SEQ ID NO: 10051 - DNA, 22 bp, Artificial Sequence
  chemically synthesized
caccctccttcaaaagaaacag

SEQ ID NO: 10052 - DNA, 22 bp, Artificial Sequence
  chemically synthesized
cttcaaaagaaacagcatttcc

SEQ ID NO: 10053 - DNA, 22 bp, Artificial Sequence
  chemically synthesized
caaaagaaacagcatttcctac

SEQ ID NO: 10054 - DNA, 22 bp, Artificial Sequence
  chemically synthesized
aaaagaaacagcatttcctact

SEQ ID NO: 10055 - DNA, 22 bp, Artificial Sequence
  chemically synthesized
cctacttttatactgtctatat

SEQ ID NO: 10056 - DNA, 22 bp, Artificial Sequence
  chemically synthesized
ctacttttatactgtctatatg

SEQ ID NO: 10057 - DNA, 22 bp, Artificial Sequence
  chemically synthesized
cttttatactgtctatatgatt

SEQ ID NO: 10058 - DNA, 22 bp, Artificial Sequence
  chemically synthesized
ttatactgtctatatgattgat

SEQ ID NO: 10059 - DNA, 22 bp, Artificial Sequence
  chemically synthesized
tatactgtctatatgattgatt

SEQ ID NO: 10060 - DNA, 22 bp, Artificial Sequence
  chemically synthesized
atactgtctatatgattgattt

SEQ ID NO: 10061 - DNA, 22 bp, Artificial Sequence
  chemically synthesized
tactgtctatatgattgatttg

SEQ ID NO: 10062 - DNA, 22 bp, Artificial Sequence
  chemically synthesized
tctatatgattgatttgcacag

SEQ ID NO: 10063 - DNA, 22 bp, Artificial Sequence
  chemically synthesized
tatgattgatttgcacagctca

SEQ ID NO: 10064 - DNA, 22 bp, Artificial Sequence
  chemically synthesized
atttgcacagctcatctggcca

SEQ ID NO: 10065 - DNA, 22 bp, Artificial Sequence
  chemically synthesized
gcacagctcatctggccagaag

SEQ ID NO: 10066 - DNA, 22 bp, Artificial Sequence
  chemically synthesized
cacagctcatctggccagaaga

SEQ ID NO: 10067 - DNA, 22 bp, Artificial Sequence
  chemically synthesized
atctggccagaagagctgagac

SEQ ID NO: 10068 - DNA, 22 bp, Artificial Sequence
  chemically synthesized
gccagaagagctgagacatccg

SEQ ID NO: 10069 - DNA, 22 bp, Artificial Sequence
  chemically synthesized
agacatccgttcccctacaaga

SEQ ID NO: 10070 - DNA, 22 bp, Artificial Sequence
  chemically synthesized
cttgtaggggaacggatgtctc

SEQ ID NO: 10071 - DNA, 22 bp, Artificial Sequence
  chemically synthesized
ttgtaggggaacggatgtctca

SEQ ID NO: 10072 - DNA, 22 bp, Artificial Sequence
  chemically synthesized
gtaggggaacggatgtctcagc

SEQ ID NO: 10073 - DNA, 22 bp, Artificial Sequence
  chemically synthesized
taggggaacggatgtctcagct

SEQ ID NO: 10074 - DNA, 22 bp, Artificial Sequence
  chemically synthesized
agctcttctggccagatgagct

SEQ ID NO: 10075 - DNA, 22 bp, Artificial Sequence
  chemically synthesized
ttctggccagatgagctgtgca

SEQ ID NO: 10076 - DNA, 22 bp, Artificial Sequence
  chemically synthesized
ctggccagatgagctgtgcaaa

SEQ ID NO: 10077 - DNA, 22 bp, Artificial Sequence
  chemically synthesized
tggccagatgagctgtgcaaat

SEQ ID NO: 10078 - DNA, 22 bp, Artificial Sequence
  chemically synthesized
gccagatgagctgtgcaaatca

SEQ ID NO: 10079 - DNA, 22 bp, Artificial Sequence
  chemically synthesized
tgcaaatcaatcatatagacag

SEQ ID NO: 10080 - DNA, 22 bp, Artificial Sequence
  chemically synthesized
tttcttttgaaggagggtggag

SEQ ID NO: 10081 - DNA, 22 bp, Artificial Sequence
  chemically synthesized
cttttgaaggagggtggagtta

SEQ ID NO: 10082 - DNA, 22 bp, Artificial Sequence
  chemically synthesized
ttttgaaggagggtggagttaa

SEQ ID NO: 10083 - DNA, 22 bp, Artificial Sequence
  chemically synthesized
ttgaaggagggtggagttaaat

SEQ ID NO: 10084 - DNA, 22 bp, Artificial Sequence
  chemically synthesized
tgaaggagggtggagttaaatc

SEQ ID NO: 10085 - DNA, 22 bp, Artificial Sequence
  chemically synthesized
gaaggagggtggagttaaatca

SEQ ID NO: 10086 - DNA, 22 bp, Artificial Sequence
  chemically synthesized
aaggagggtggagttaaatcat

SEQ ID NO: 10087 - DNA, 22 bp, Artificial Sequence
  chemically synthesized
aatcattaagtgtattgaaggc

SEQ ID NO: 10088 - DNA, 22 bp, Artificial Sequence
  chemically synthesized
agtgtattgaaggcgaaaagaa

SEQ ID NO: 10089 - DNA, 22 bp, Artificial Sequence
  chemically synthesized
aaggcgaaaagaatcagagaac

SEQ ID NO: 10090 - DNA, 22 bp, Artificial Sequence
  chemically synthesized
ttctttttaagttgagcttaaa

SEQ ID NO: 10091 - DNA, 22 bp, Artificial Sequence
  chemically synthesized
ctttttaagttgagcttaaaat

SEQ ID NO: 10092 - DNA, 22 bp, Artificial Sequence
  chemically synthesized
tttttaagttgagcttaaaata

SEQ ID NO: 10093 - DNA, 22 bp, Artificial Sequence
  chemically synthesized
tttaagttgagcttaaaataag

SEQ ID NO: 10094 - DNA, 22 bp, Artificial Sequence
  chemically synthesized
ttaagttgagcttaaaataagc

SEQ ID NO: 10095 - DNA, 22 bp, Artificial Sequence
  chemically synthesized
taagttgagcttaaaataagct

SEQ ID NO: 10096 - DNA, 22 bp, Artificial Sequence
  chemically synthesized
aagttgagcttaaaataagcta

SEQ ID NO: 10097 - DNA, 22 bp, Artificial Sequence
  chemically synthesized
agttgagcttaaaataagctag

SEQ ID NO: 10098 - DNA, 22 bp, Artificial Sequence
  chemically synthesized
agcttaaaataagctagagaat

SEQ ID NO: 10099 - DNA, 22 bp, Artificial Sequence
  chemically synthesized
aaaataagctagagaatagatc

SEQ ID NO: 10100 - DNA, 22 bp, Artificial Sequence
  chemically synthesized
aaataagctagagaatagatct

SEQ ID NO: 10101 - DNA, 22 bp, Artificial Sequence
  chemically synthesized
gagaatagatctctggtctgaa

SEQ ID NO: 10102 - DNA, 22 bp, Artificial Sequence
  chemically synthesized
tggtctgaaggtttatttacgg

SEQ ID NO: 10103 - DNA, 22 bp, Artificial Sequence
  chemically synthesized
gtctgaaggtttatttacgggc

SEQ ID NO: 10104 - DNA, 22 bp, Artificial Sequence
  chemically synthesized
aaggtttatttacgggcttttc

SEQ ID NO: 10105 - DNA, 22 bp, Artificial Sequence
  chemically synthesized
atttacgggcttttctcactgg

SEQ ID NO: 10106 - DNA, 22 bp, Artificial Sequence
  chemically synthesized
tttacgggcttttctcactgga

SEQ ID NO: 10107 - DNA, 22 bp, Artificial Sequence
  chemically synthesized
acgggcttttctcactggatta

SEQ ID NO: 10108 - DNA, 22 bp, Artificial Sequence
  chemically synthesized
cgggcttttctcactggattat

SEQ ID NO: 10109 - DNA, 22 bp, Artificial Sequence
  chemically synthesized
ttctcactggattattttgttt

SEQ ID NO: 10110 - DNA, 22 bp, Artificial Sequence
  chemically synthesized
tctcactggattattttgtttt

SEQ ID NO: 10111 - DNA, 22 bp, Artificial Sequence
  chemically synthesized
ctcactggattattttgttttt

SEQ ID NO: 10112 - DNA, 22 bp, Artificial Sequence
  chemically synthesized
tcactggattattttgtttttg

SEQ ID NO: 10113 - DNA, 22 bp, Artificial Sequence
  chemically synthesized
actggattattttgtttttgtt

SEQ ID NO: 10114 - DNA, 22 bp, Artificial Sequence
  chemically synthesized
gattattttgtttttgttctct

SEQ ID NO: 10115 - DNA, 22 bp, Artificial Sequence
  chemically synthesized
ttttgtttttgttctctgctca

SEQ ID NO: 10116 - DNA, 22 bp, Artificial Sequence
  chemically synthesized
tgtttttgttctctgctcatcc

SEQ ID NO: 10117 - DNA, 22 bp, Artificial Sequence
  chemically synthesized
gtttttgttctctgctcatccc

SEQ ID NO: 10118 - DNA, 22 bp, Artificial Sequence
  chemically synthesized
tttttgttctctgctcatccca

SEQ ID NO: 10119 - DNA, 22 bp, Artificial Sequence
  chemically synthesized
ttgttctctgctcatcccacta

SEQ ID NO: 10120 - DNA, 22 bp, Artificial Sequence
  chemically synthesized
tgttctctgctcatcccactac

SEQ ID NO: 10121 - DNA, 22 bp, Artificial Sequence
  chemically synthesized
gttctctgctcatcccactaca

SEQ ID NO: 10122 - DNA, 22 bp, Artificial Sequence
  chemically synthesized
ttctctgctcatcccactacac

SEQ ID NO: 10123 - DNA, 22 bp, Artificial Sequence
  chemically synthesized
tctgctcatcccactacacaga

SEQ ID NO: 10124 - DNA, 22 bp, Artificial Sequence
  chemically synthesized
tgctcatcccactacacagaat

SEQ ID NO: 10125 - DNA, 22 bp, Artificial Sequence
  chemically synthesized
ctcatcccactacacagaatct

SEQ ID NO: 10126 - DNA, 22 bp, Artificial Sequence
  chemically synthesized
atcccactacacagaatctgtt

SEQ ID NO: 10127 - DNA, 22 bp, Artificial Sequence
  chemically synthesized
cacagaatctgttagaaaatat

SEQ ID NO: 10128 - DNA, 22 bp, Artificial Sequence
  chemically synthesized
ttagaaaatataaagaataaag

SEQ ID NO: 10129 - DNA, 22 bp, Artificial Sequence
  chemically synthesized
gaaaatataaagaataaaggat

SEQ ID NO: 10130 - DNA, 22 bp, Artificial Sequence
  chemically synthesized
gaagaacatttacattcatcta

SEQ ID NO: 10131 - DNA, 22 bp, Artificial Sequence
  chemically synthesized
acattcatctagtcaaaagccc

SEQ ID NO: 10132 - DNA, 22 bp, Artificial Sequence
  chemically synthesized
cattcatctagtcaaaagccca

SEQ ID NO: 10133 - DNA, 22 bp, Artificial Sequence
  chemically synthesized
atctagtcaaaagcccacattt

SEQ ID NO: 10134 - DNA, 22 bp, Artificial Sequence
  chemically synthesized
gtcaaaagcccacattttagta

SEQ ID NO: 10135 - DNA, 22 bp, Artificial Sequence
  chemically synthesized
tagtaaaagaaattactatcca

SEQ ID NO: 10136 - DNA, 22 bp, Artificial Sequence
  chemically synthesized
agtaaaagaaattactatccaa

SEQ ID NO: 10137 - DNA, 22 bp, Artificial Sequence
  chemically synthesized
gtaaaagaaattactatccaag

SEQ ID NO: 10138 - DNA, 22 bp, Artificial Sequence
  chemically synthesized
ctatccaagaagcaaatgattt

SEQ ID NO: 10139 - DNA, 22 bp, Artificial Sequence
  chemically synthesized
tccaagaagcaaatgatttgta

SEQ ID NO: 10140 - DNA, 22 bp, Artificial Sequence
  chemically synthesized
gtacaagatcacagggcttttc

SEQ ID NO: 10141 - DNA, 22 bp, Artificial Sequence
  chemically synthesized
tacaagatcacagggcttttca

SEQ ID NO: 10142 - DNA, 22 bp, Artificial Sequence
  chemically synthesized
ttcaacagtaaggctaaaaggt

SEQ ID NO: 10143 - DNA, 22 bp, Artificial Sequence
  chemically synthesized
tcaacagtaaggctaaaaggtt

SEQ ID NO: 10144 - DNA, 22 bp, Artificial Sequence
  chemically synthesized
caacagtaaggctaaaaggtta

SEQ ID NO: 10145 - DNA, 22 bp, Artificial Sequence
  chemically synthesized
aacagtaaggctaaaaggttaa

SEQ ID NO: 10146 - DNA, 22 bp, Artificial Sequence
  chemically synthesized
aaaggttaagaaaattctgatt

SEQ ID NO: 10147 - DNA, 22 bp, Artificial Sequence
  chemically synthesized
agaaaattctgattatcttaag

SEQ ID NO: 10148 - DNA, 22 bp, Artificial Sequence
  chemically synthesized
tgattatcttaagagttgctat

SEQ ID NO: 10149 - DNA, 22 bp, Artificial Sequence
  chemically synthesized
attatcttaagagttgctatta

SEQ ID NO: 10150 - DNA, 22 bp, Artificial Sequence
  chemically synthesized
tcttaagagttgctattaatta

SEQ ID NO: 10151 - DNA, 22 bp, Artificial Sequence
  chemically synthesized
aagagttgctattaattaaagc

SEQ ID NO: 10152 - DNA, 22 bp, Artificial Sequence
  chemically synthesized
agagttgctattaattaaagcc

SEQ ID NO: 10153 - DNA, 22 bp, Artificial Sequence
  chemically synthesized
ctattaattaaagccaacttaa

SEQ ID NO: 10154 - DNA, 22 bp, Artificial Sequence
  chemically synthesized
ttaattaaagccaacttaaacc

SEQ ID NO: 10155 - DNA, 22 bp, Artificial Sequence
  chemically synthesized
attaaagccaacttaaaccaac

SEQ ID NO: 10156 - DNA, 22 bp, Artificial Sequence
  chemically synthesized
aagccaacttaaaccaacttta

SEQ ID NO: 10157 - DNA, 22 bp, Artificial Sequence
  chemically synthesized
aaaccaactttaaatgtagagg

SEQ ID NO: 10158 - DNA, 22 bp, Artificial Sequence
  chemically synthesized
aaccaactttaaatgtagaggg

SEQ ID NO: 10159 - DNA, 22 bp, Artificial Sequence
  chemically synthesized
taaatgtagagggggatcctgg

SEQ ID NO: 10160 - DNA, 22 bp, Artificial Sequence
  chemically synthesized
aaatgtagagggggatcctgga

SEQ ID NO: 10161 - DNA, 22 bp, Artificial Sequence
  chemically synthesized
aatgtagagggggatcctggac

SEQ ID NO: 10162 - DNA, 22 bp, Artificial Sequence
  chemically synthesized
gacttcacattaaccctgtgtc

SEQ ID NO: 10163 - DNA, 22 bp, Artificial Sequence
  chemically synthesized
cacattaaccctgtgtcccctt

SEQ ID NO: 10164 - DNA, 22 bp, Artificial Sequence
  chemically synthesized
acattaaccctgtgtccccttt

SEQ ID NO: 10165 - DNA, 22 bp, Artificial Sequence
  chemically synthesized
accctgtgtcccctttttctcc

SEQ ID NO: 10166 - DNA, 22 bp, Artificial Sequence
  chemically synthesized
tgtcccctttttctccactctc

SEQ ID NO: 10167 - DNA, 22 bp, Artificial Sequence
  chemically synthesized
tttctccactctccccgtatcc

SEQ ID NO: 10168 - DNA, 22 bp, Artificial Sequence
  chemically synthesized
ttctccactctccccgtatccc

SEQ ID NO: 10169 - DNA, 22 bp, Artificial Sequence
  chemically synthesized
tctccactctccccgtatcccc

SEQ ID NO: 10170 - DNA, 22 bp, Artificial Sequence
  chemically synthesized
ctccactctccccgtatcccct

SEQ ID NO: 10171 - DNA, 22 bp, Artificial Sequence
  chemically synthesized
tccactctccccgtatccccta

SEQ ID NO: 10172 - DNA, 22 bp, Artificial Sequence
  chemically synthesized
cactctccccgtatcccctatc

SEQ ID NO: 10173 - DNA, 22 bp, Artificial Sequence
  chemically synthesized
tccccgtatcccctatcccacc

SEQ ID NO: 10174 - DNA, 22 bp, Artificial Sequence
  chemically synthesized
cccgtatcccctatcccacccc

SEQ ID NO: 10175 - DNA, 22 bp, Artificial Sequence
  chemically synthesized
tcccaccccaacccccacacag

SEQ ID NO: 10176 - DNA, 22 bp, Artificial Sequence
  chemically synthesized
accacccaatattattgttctc

SEQ ID NO: 10177 - DNA, 22 bp, Artificial Sequence
  chemically synthesized
ttgttctctgtaaacggaaaca

SEQ ID NO: 10178 - DNA, 22 bp, Artificial Sequence
  chemically synthesized
ttctctgtaaacggaaacaacc

SEQ ID NO: 10179 - DNA, 22 bp, Artificial Sequence
  chemically synthesized
tctgtaaacggaaacaacctgt

SEQ ID NO: 10180 - DNA, 22 bp, Artificial Sequence
  chemically synthesized
tgtaaacggaaacaacctgttg

SEQ ID NO: 10181 - DNA, 22 bp, Artificial Sequence
  chemically synthesized
taaacggaaacaacctgttgtc

SEQ ID NO: 10182 - DNA, 22 bp, Artificial Sequence
  chemically synthesized
ttgtctaaagagttttaactat

SEQ ID NO: 10183 - DNA, 22 bp, Artificial Sequence
  chemically synthesized
tctaaagagttttaactatggg

SEQ ID NO: 10184 - DNA, 22 bp, Artificial Sequence
  chemically synthesized
aagagttttaactatgggctca

SEQ ID NO: 10185 - DNA, 22 bp, Artificial Sequence
  chemically synthesized
taactatgggctcacgggtgag

SEQ ID NO: 10186 - DNA, 22 bp, Artificial Sequence
  chemically synthesized
aactatgggctcacgggtgagc

SEQ ID NO: 10187 - DNA, 22 bp, Artificial Sequence
  chemically synthesized
actatgggctcacgggtgagct

SEQ ID NO: 10188 - DNA, 22 bp, Artificial Sequence
  chemically synthesized
tgggctcacgggtgagctaaac

SEQ ID NO: 10189 - DNA, 22 bp, Artificial Sequence
  chemically synthesized
acgggtgagctaaacaggtttc

SEQ ID NO: 10190 - DNA, 22 bp, Artificial Sequence
  chemically synthesized
aacaggtttcccatctttttct

SEQ ID NO: 10191 - DNA, 22 bp, Artificial Sequence
  chemically synthesized
cccatctttttctggacccagg

SEQ ID NO: 10192 - DNA, 22 bp, Artificial Sequence
  chemically synthesized
ccatctttttctggacccagga

SEQ ID NO: 10193 - DNA, 22 bp, Artificial Sequence
  chemically synthesized
tttctggacccaggatcttagt

SEQ ID NO: 10194 - DNA, 22 bp, Artificial Sequence
  chemically synthesized
ttctggacccaggatcttagtg

SEQ ID NO: 10195 - DNA, 22 bp, Artificial Sequence
  chemically synthesized
tctggacccaggatcttagtgg

SEQ ID NO: 10196 - DNA, 22 bp, Artificial Sequence
  chemically synthesized
ctggacccaggatcttagtggg

SEQ ID NO: 10197 - DNA, 22 bp, Artificial Sequence
  chemically synthesized
tggacccaggatcttagtgggg

SEQ ID NO: 10198 - DNA, 22 bp, Artificial Sequence
  chemically synthesized
gacccaggatcttagtggggat

SEQ ID NO: 10199 - DNA, 22 bp, Artificial Sequence
  chemically synthesized
agtggggattttcactctgttc

SEQ ID NO: 10200 - DNA, 22 bp, Artificial Sequence
  chemically synthesized
gtggggattttcactctgttca

SEQ ID NO: 10201 - DNA, 22 bp, Artificial Sequence
  chemically synthesized
tcactctgttcactattttgtt

SEQ ID NO: 10202 - DNA, 22 bp, Artificial Sequence
  chemically synthesized
cactctgttcactattttgttg

SEQ ID NO: 10203 - DNA, 22 bp, Artificial Sequence
  chemically synthesized
actctgttcactattttgttgc

SEQ ID NO: 10204 - DNA, 22 bp, Artificial Sequence
  chemically synthesized
tgttcactattttgttgccctt

SEQ ID NO: 10205 - DNA, 22 bp, Artificial Sequence
  chemically synthesized
ttcactattttgttgcccttca

SEQ ID NO: 10206 - DNA, 22 bp, Artificial Sequence
  chemically synthesized
actattttgttgcccttcaaac

SEQ ID NO: 10207 - DNA, 22 bp, Artificial Sequence
  chemically synthesized
ttttgttgcccttcaaaccagt

SEQ ID NO: 10208 - DNA, 22 bp, Artificial Sequence
  chemically synthesized
tgttgcccttcaaaccagtaag

SEQ ID NO: 10209 - DNA, 22 bp, Artificial Sequence
  chemically synthesized
gttgcccttcaaaccagtaagc

SEQ ID NO: 10210 - DNA, 22 bp, Artificial Sequence
  chemically synthesized
ttgcccttcaaaccagtaagca

SEQ ID NO: 10211 - DNA, 22 bp, Artificial Sequence
  chemically synthesized
cccttcaaaccagtaagcattt

SEQ ID NO: 10212 - DNA, 22 bp, Artificial Sequence
  chemically synthesized
caaaccagtaagcatttatgag

SEQ ID NO: 10213 - DNA, 22 bp, Artificial Sequence
  chemically synthesized
aaaccagtaagcatttatgagg

SEQ ID NO: 10214 - DNA, 22 bp, Artificial Sequence
  chemically synthesized
atgaggactcacactatgccag

SEQ ID NO: 10215 - DNA, 22 bp, Artificial Sequence
  chemically synthesized
tgaggactcacactatgccaga

SEQ ID NO: 10216 - DNA, 22 bp, Artificial Sequence
  chemically synthesized
acactatgccagatacataggt

SEQ ID NO: 10217 - DNA, 22 bp, Artificial Sequence
  chemically synthesized
tgccagatacataggtggcagg

SEQ ID NO: 10218 - DNA, 22 bp, Artificial Sequence
  chemically synthesized
ttcactccagatataatctatc

SEQ ID NO: 10219 - DNA, 22 bp, Artificial Sequence
  chemically synthesized
cactccagatataatctatctg

SEQ ID NO: 10220 - DNA, 22 bp, Artificial Sequence
  chemically synthesized
actccagatataatctatctga

SEQ ID NO: 10221 - DNA, 20 bp, Artificial Sequence
  chemically synthesized
actttcacaatctgctagca

SEQ ID NO: 10222 - DNA, 20 bp, Artificial Sequence
  chemically synthesized
ctttcacaatctgctagcaa

SEQ ID NO: 10223 - DNA, 20 bp, Artificial Sequence
  chemically synthesized
atctgctagcaaaggttatg

SEQ ID NO: 10224 - DNA, 20 bp, Artificial Sequence
  chemically synthesized
gcagcgcgtgaacatgatca

SEQ ID NO: 10225 - DNA, 20 bp, Artificial Sequence
  chemically synthesized
gcgcgtgaacatgatcatgg

SEQ ID NO: 10226 - DNA, 20 bp, Artificial Sequence
  chemically synthesized
catgatcatggcagaatcac

SEQ ID NO: 10227 - DNA, 20 bp, Artificial Sequence
  chemically synthesized
atgatcatggcagaatcacc

SEQ ID NO: 10228 - DNA, 20 bp, Artificial Sequence
  chemically synthesized
cctcatcaccatctgccttt

SEQ ID NO: 10229 - DNA, 20 bp, Artificial Sequence
  chemically synthesized
ctcatcaccatctgcctttt

SEQ ID NO: 10230 - DNA, 20 bp, Artificial Sequence
  chemically synthesized
tgccttttaggatatctact

SEQ ID NO: 10231 - DNA, 20 bp, Artificial Sequence
  chemically synthesized
tctactcagtgctgaatgta

SEQ ID NO: 10232 - DNA, 20 bp, Artificial Sequence
  chemically synthesized
ctactcagtgctgaatgtac

SEQ ID NO: 10233 - DNA, 20 bp, Artificial Sequence
  chemically synthesized
ttccttttttaaaatacatt

SEQ ID NO: 10234 - DNA, 20 bp, Artificial Sequence
  chemically synthesized
cattgagtatgcttgccttt

SEQ ID NO: 10235 - DNA, 20 bp, Artificial Sequence
  chemically synthesized
gtatgcttgccttttagata

SEQ ID NO: 10236 - DNA, 20 bp, Artificial Sequence
  chemically synthesized
attttgattacatgatttga

SEQ ID NO: 10237 - DNA, 20 bp, Artificial Sequence
  chemically synthesized
atgatttgacagcaatattg

SEQ ID NO: 10238 - DNA, 20 bp, Artificial Sequence
  chemically synthesized
gatttgacagcaatattgaa

SEQ ID NO: 10239 - DNA, 20 bp, Artificial Sequence
  chemically synthesized
agcaatattgaagagtctaa

SEQ ID NO: 10240 - DNA, 20 bp, Artificial Sequence
  chemically synthesized
atattgaagagtctaacagc

SEQ ID NO: 10241 - DNA, 20 bp, Artificial Sequence
  chemically synthesized
agagtctaacagccagcacg

SEQ ID NO: 10242 - DNA, 20 bp, Artificial Sequence
  chemically synthesized
gagtctaacagccagcacgc

SEQ ID NO: 10243 - DNA, 20 bp, Artificial Sequence
  chemically synthesized
ctaacagccagcacgcaggt

SEQ ID NO: 10244 - DNA, 20 bp, Artificial Sequence
  chemically synthesized
cagccagcacgcaggttggt

SEQ ID NO: 10245 - DNA, 20 bp, Artificial Sequence
  chemically synthesized
gcacgcaggttggtaagtac

SEQ ID NO: 10246 - DNA, 20 bp, Artificial Sequence
  chemically synthesized
ggtaagtactggttctttgt

SEQ ID NO: 10247 - DNA, 20 bp, Artificial Sequence
  chemically synthesized
agtactggttctttgttagc

SEQ ID NO: 10248 - DNA, 20 bp, Artificial Sequence
  chemically synthesized
gtactggttctttgttagct

SEQ ID NO: 10249 - DNA, 20 bp, Artificial Sequence
  chemically synthesized
tcttcatttttaaaactaaa

SEQ ID NO: 10250 - DNA, 20 bp, Artificial Sequence
  chemically synthesized
tatgtttaataaacactgtt

SEQ ID NO: 10251 - DNA, 20 bp, Artificial Sequence
  chemically synthesized
acactgttcagttcatgatt

SEQ ID NO: 10252 - DNA, 20 bp, Artificial Sequence
  chemically synthesized
tttggtcatgtaattcctgt

SEQ ID NO: 10253 - DNA, 20 bp, Artificial Sequence
  chemically synthesized
ttagaaaacattcatctcct

SEQ ID NO: 10254 - DNA, 20 bp, Artificial Sequence
  chemically synthesized
ccttggtttaaaaaaattaa

SEQ ID NO: 10255 - DNA, 20 bp, Artificial Sequence
  chemically synthesized
tggtttaaaaaaattaaaag

SEQ ID NO: 10256 - DNA, 20 bp, Artificial Sequence
  chemically synthesized
ggtttaaaaaaattaaaagt

SEQ ID NO: 10257 - DNA, 20 bp, Artificial Sequence
  chemically synthesized
aaattaaaagtgggaaaaca

SEQ ID NO: 10258 - DNA, 20 bp, Artificial Sequence
  chemically synthesized
aaagtgggaaaacaaagaaa

SEQ ID NO: 10259 - DNA, 20 bp, Artificial Sequence
  chemically synthesized
gtgggaaaacaaagaaatag

SEQ ID NO: 10260 - DNA, 20 bp, Artificial Sequence
  chemically synthesized
aacaaagaaatagcagaata

SEQ ID NO: 10261 - DNA, 20 bp, Artificial Sequence
  chemically synthesized
ataaccacattatttttgtt

SEQ ID NO: 10262 - DNA, 20 bp, Artificial Sequence
  chemically synthesized
ttaccactttgaaatcaaaa

SEQ ID NO: 10263 - DNA, 20 bp, Artificial Sequence
  chemically synthesized
taccactttgaaatcaaaat

SEQ ID NO: 10264 - DNA, 20 bp, Artificial Sequence
  chemically synthesized
gaaatcaaaatgggaaacaa

SEQ ID NO: 10265 - DNA, 20 bp, Artificial Sequence
  chemically synthesized
ggaaacaaaagcacaaacaa

SEQ ID NO: 10266 - DNA, 20 bp, Artificial Sequence
  chemically synthesized
aatggccttatttacacaaa

SEQ ID NO: 10267 - DNA, 20 bp, Artificial Sequence
  chemically synthesized
tacacaaaaagtctgatttt

SEQ ID NO: 10268 - DNA, 20 bp, Artificial Sequence
  chemically synthesized
tttaagatatatgacatttc

SEQ ID NO: 10269 - DNA, 20 bp, Artificial Sequence
  chemically synthesized
ttaagatatatgacatttca

SEQ ID NO: 10270 - DNA, 20 bp, Artificial Sequence
  chemically synthesized
tatatgacatttcaaggttt

SEQ ID NO: 10271 - DNA, 20 bp, Artificial Sequence
  chemically synthesized
atgacatttcaaggtttcag

SEQ ID NO: 10272 - DNA, 20 bp, Artificial Sequence
  chemically synthesized
aggtttcagaagtatgtaat

SEQ ID NO: 10273 - DNA, 20 bp, Artificial Sequence
  chemically synthesized
ggtttcagaagtatgtaatg

SEQ ID NO: 10274 - DNA, 20 bp, Artificial Sequence
  chemically synthesized
aattatatatcttcaattta

SEQ ID NO: 10275 - DNA, 20 bp, Artificial Sequence
  chemically synthesized
atatcttcaatttaaagttt

SEQ ID NO: 10276 - DNA, 20 bp, Artificial Sequence
  chemically synthesized
aaagttttagttaaaacata

SEQ ID NO: 10277 - DNA, 20 bp, Artificial Sequence
  chemically synthesized
cataaagattaacctttcat

SEQ ID NO: 10278 - DNA, 20 bp, Artificial Sequence
  chemically synthesized
aagattaacctttcattagc

SEQ ID NO: 10279 - DNA, 20 bp, Artificial Sequence
  chemically synthesized
acctttcattagcaagctgt

SEQ ID NO: 10280 - DNA, 20 bp, Artificial Sequence
  chemically synthesized
caagctgttagttatcacca

SEQ ID NO: 10281 - DNA, 20 bp, Artificial Sequence
  chemically synthesized
gttatcaccaaagcttttca

SEQ ID NO: 10282 - DNA, 20 bp, Artificial Sequence
  chemically synthesized
caccaaagcttttcatggat

SEQ ID NO: 10283 - DNA, 20 bp, Artificial Sequence
  chemically synthesized
accaaagcttttcatggatt

SEQ ID NO: 10284 - DNA, 20 bp, Artificial Sequence
  chemically synthesized
tgtctctatgtcaaacatct

SEQ ID NO: 10285 - DNA, 20 bp, Artificial Sequence
  chemically synthesized
tctctatgtcaaacatcttg

SEQ ID NO: 10286 - DNA, 20 bp, Artificial Sequence
  chemically synthesized
aacatcttggagttgatatt

SEQ ID NO: 10287 - DNA, 20 bp, Artificial Sequence
  chemically synthesized
acatcttggagttgatattt

SEQ ID NO: 10288 - DNA, 20 bp, Artificial Sequence
  chemically synthesized
catcttggagttgatatttg

SEQ ID NO: 10289 - DNA, 20 bp, Artificial Sequence
  chemically synthesized
atttggggaaacacaatact

SEQ ID NO: 10290 - DNA, 20 bp, Artificial Sequence
  chemically synthesized
gggaaacacaatactcagtt

SEQ ID NO: 10291 - DNA, 20 bp, Artificial Sequence
  chemically synthesized
caatactcagttgagttccc

SEQ ID NO: 10292 - DNA, 20 bp, Artificial Sequence
  chemically synthesized
aatactcagttgagttccct

SEQ ID NO: 10293 - DNA, 20 bp, Artificial Sequence
  chemically synthesized
atactcagttgagttcccta

SEQ ID NO: 10294 - DNA, 20 bp, Artificial Sequence
  chemically synthesized
tactcagttgagttccctag

SEQ ID NO: 10295 - DNA, 20 bp, Artificial Sequence
  chemically synthesized
ctcagttgagttccctaggg

SEQ ID NO: 10296 - DNA, 20 bp, Artificial Sequence
  chemically synthesized
ttgagttccctaggggagaa

SEQ ID NO: 10297 - DNA, 20 bp, Artificial Sequence
  chemically synthesized
gttccctaggggagaaaagc

SEQ ID NO: 10298 - DNA, 20 bp, Artificial Sequence
  chemically synthesized
taggggagaaaagcaagctt

SEQ ID NO: 10299 - DNA, 20 bp, Artificial Sequence
  chemically synthesized
caagcttaagaattgacata

SEQ ID NO: 10300 - DNA, 20 bp, Artificial Sequence
  chemically synthesized
agcttaagaattgacataaa

SEQ ID NO: 10301 - DNA, 20 bp, Artificial Sequence
  chemically synthesized
ttaagaattgacataaagag

SEQ ID NO: 10302 - DNA, 20 bp, Artificial Sequence
  chemically synthesized
taagaattgacataaagagt

SEQ ID NO: 10303 - DNA, 20 bp, Artificial Sequence
  chemically synthesized
gaattgacataaagagtagg

SEQ ID NO: 10304 - DNA, 20 bp, Artificial Sequence
  chemically synthesized
tgacataaagagtaggaagt

SEQ ID NO: 10305 - DNA, 20 bp, Artificial Sequence
  chemically synthesized
actttgttttttcacaacta

SEQ ID NO: 10306 - DNA, 20 bp, Artificial Sequence
  chemically synthesized
cagtgactttatgtatttcc

SEQ ID NO: 10307 - DNA, 20 bp, Artificial Sequence
  chemically synthesized
gtgactttatgtatttccca

SEQ ID NO: 10308 - DNA, 20 bp, Artificial Sequence
  chemically synthesized
tgactttatgtatttcccag

SEQ ID NO: 10309 - DNA, 20 bp, Artificial Sequence
  chemically synthesized
ctttatgtatttcccagagg

SEQ ID NO: 10310 - DNA, 20 bp, Artificial Sequence
  chemically synthesized
tttatgtatttcccagagga

SEQ ID NO: 10311 - DNA, 20 bp, Artificial Sequence
  chemically synthesized
atttcccagaggaaggcata

SEQ ID NO: 10312 - DNA, 20 bp, Artificial Sequence
  chemically synthesized
tttcccagaggaaggcatac

SEQ ID NO: 10313 - DNA, 20 bp, Artificial Sequence
  chemically synthesized
ttcccagaggaaggcataca

SEQ ID NO: 10314 - DNA, 20 bp, Artificial Sequence
  chemically synthesized
ccagaggaaggcatacaggg

SEQ ID NO: 10315 - DNA, 20 bp, Artificial Sequence
  chemically synthesized
agggaagaaattatcccatt

SEQ ID NO: 10316 - DNA, 20 bp, Artificial Sequence
  chemically synthesized
aattatcccatttggacaaa

SEQ ID NO: 10317 - DNA, 20 bp, Artificial Sequence
  chemically synthesized
ggacaaacagcatgttctca

SEQ ID NO: 10318 - DNA, 20 bp, Artificial Sequence
  chemically synthesized
gacaaacagcatgttctcac

SEQ ID NO: 10319 - DNA, 20 bp, Artificial Sequence
  chemically synthesized
aaacagcatgttctcacagg

SEQ ID NO: 10320 - DNA, 20 bp, Artificial Sequence
  chemically synthesized
acacttacttgtcaactttc

SEQ ID NO: 10321 - DNA, 20 bp, Artificial Sequence
  chemically synthesized
caactttctagaatcaaatc

SEQ ID NO: 10322 - DNA, 20 bp, Artificial Sequence
  chemically synthesized
ctttctagaatcaaatctag

SEQ ID NO: 10323 - DNA, 20 bp, Artificial Sequence
  chemically synthesized
gaatcaaatctagtagctga

SEQ ID NO: 10324 - DNA, 20 bp, Artificial Sequence
  chemically synthesized
aatctagtagctgacagtac

SEQ ID NO: 10325 - DNA, 20 bp, Artificial Sequence
  chemically synthesized
atctagtagctgacagtacc

SEQ ID NO: 10326 - DNA, 20 bp, Artificial Sequence
  chemically synthesized
gtagctgacagtaccaggat

SEQ ID NO: 10327 - DNA, 20 bp, Artificial Sequence
  chemically synthesized
tagctgacagtaccaggatc

SEQ ID NO: 10328 - DNA, 20 bp, Artificial Sequence
  chemically synthesized
agctgacagtaccaggatca

SEQ ID NO: 10329 - DNA, 20 bp, Artificial Sequence
  chemically synthesized
gctgacagtaccaggatcag

SEQ ID NO: 10330 - DNA, 20 bp, Artificial Sequence
  chemically synthesized
ggatcaggggtgccaaccct

SEQ ID NO: 10331 - DNA, 20 bp, Artificial Sequence
  chemically synthesized
gtgccaaccctaagcacccc

SEQ ID NO: 10332 - DNA, 20 bp, Artificial Sequence
  chemically synthesized
caaccctaagcacccccaga

SEQ ID NO: 10333 - DNA, 20 bp, Artificial Sequence
  chemically synthesized
agcacccccagaaagctgac

SEQ ID NO: 10334 - DNA, 20 bp, Artificial Sequence
  chemically synthesized
cagaaagctgactggccctg

SEQ ID NO: 10335 - DNA, 20 bp, Artificial Sequence
  chemically synthesized
tggccctgtggttcccactc

SEQ ID NO: 10336 - DNA, 20 bp, Artificial Sequence
  chemically synthesized
tcccactccagacatgatgt

SEQ ID NO: 10337 - DNA, 20 bp, Artificial Sequence
  chemically synthesized
catgatgtcagctgtgaaat

SEQ ID NO: 10338 - DNA, 20 bp, Artificial Sequence
  chemically synthesized
aataacgataaaaaaaaata

SEQ ID NO: 10339 - DNA, 20 bp, Artificial Sequence
  chemically synthesized
taacgataaaaaaaaataca

SEQ ID NO: 10340 - DNA, 20 bp, Artificial Sequence
  chemically synthesized
aacgataaaaaaaaatacag

SEQ ID NO: 10341 - DNA, 20 bp, Artificial Sequence
  chemically synthesized
aaaaaatacagaggttaaac

SEQ ID NO: 10342 - DNA, 20 bp, Artificial Sequence
  chemically synthesized
atacagaggttaaactagca

SEQ ID NO: 10343 - DNA, 20 bp, Artificial Sequence
  chemically synthesized
agaggttaaactagcaaagt

SEQ ID NO: 10344 - DNA, 20 bp, Artificial Sequence
  chemically synthesized
ttaaactagcaaagtgagta

SEQ ID NO: 10345 - DNA, 20 bp, Artificial Sequence
  chemically synthesized
ctagcaaagtgagtaaagtc

SEQ ID NO: 10346 - DNA, 20 bp, Artificial Sequence
  chemically synthesized
tagcaaagtgagtaaagtca

SEQ ID NO: 10347 - DNA, 20 bp, Artificial Sequence
  chemically synthesized
agcaaagtgagtaaagtcaa

SEQ ID NO: 10348 - DNA, 20 bp, Artificial Sequence
  chemically synthesized
gtgagtaaagtcaagggata

SEQ ID NO: 10349 - DNA, 20 bp, Artificial Sequence
  chemically synthesized
aagggataaagaaaatttgt

SEQ ID NO: 10350 - DNA, 20 bp, Artificial Sequence
  chemically synthesized
aatttgttggaaaactcaca

SEQ ID NO: 10351 - DNA, 20 bp, Artificial Sequence
  chemically synthesized
ttgttggaaaactcacaaag

SEQ ID NO: 10352 - DNA, 20 bp, Artificial Sequence
  chemically synthesized
tgttggaaaactcacaaagc

SEQ ID NO: 10353 - DNA, 20 bp, Artificial Sequence
  chemically synthesized
aactcacaaagcaggacata

SEQ ID NO: 10354 - DNA, 20 bp, Artificial Sequence
  chemically synthesized
cacaaagcaggacataaagc

SEQ ID NO: 10355 - DNA, 20 bp, Artificial Sequence
  chemically synthesized
acaaagcaggacataaagca

SEQ ID NO: 10356 - DNA, 20 bp, Artificial Sequence
  chemically synthesized
aggacataaagcaaggccat

SEQ ID NO: 10357 - DNA, 20 bp, Artificial Sequence
  chemically synthesized
ggccattagatatatctcat

SEQ ID NO: 10358 - DNA, 20 bp, Artificial Sequence
  chemically synthesized
tatctcattagtgtgacatc

SEQ ID NO: 10359 - DNA, 20 bp, Artificial Sequence
  chemically synthesized
atctcattagtgtgacatct

SEQ ID NO: 10360 - DNA, 20 bp, Artificial Sequence
  chemically synthesized
ctcattagtgtgacatctgg

SEQ ID NO: 10361 - DNA, 20 bp, Artificial Sequence
  chemically synthesized
tcattagtgtgacatctggg

SEQ ID NO: 10362 - DNA, 20 bp, Artificial Sequence
  chemically synthesized
gtgtgacatctgggaggaca

SEQ ID NO: 10363 - DNA, 20 bp, Artificial Sequence
  chemically synthesized
ccaaaccctttcttctatat

SEQ ID NO: 10364 - DNA, 20 bp, Artificial Sequence
  chemically synthesized
aaccctttcttctatataag

SEQ ID NO: 10365 - DNA, 20 bp, Artificial Sequence
  chemically synthesized
ctttcttctatataagtggt

SEQ ID NO: 10366 - DNA, 20 bp, Artificial Sequence
  chemically synthesized
atataagtggtgagatgatg

SEQ ID NO: 10367 - DNA, 20 bp, Artificial Sequence
  chemically synthesized
tataagtggtgagatgatga

SEQ ID NO: 10368 - DNA, 20 bp, Artificial Sequence
  chemically synthesized
ggtgagatgatgaaggttgt

SEQ ID NO: 10369 - DNA, 20 bp, Artificial Sequence
  chemically synthesized
tgagatgatgaaggttgtaa

SEQ ID NO: 10370 - DNA, 20 bp, Artificial Sequence
  chemically synthesized
gagatgatgaaggttgtaag

SEQ ID NO: 10371 - DNA, 20 bp, Artificial Sequence
  chemically synthesized
agatgatgaaggttgtaaga

SEQ ID NO: 10372 - DNA, 20 bp, Artificial Sequence
  chemically synthesized
agagggcttctgcccccttg

SEQ ID NO: 10373 - DNA, 20 bp, Artificial Sequence
  chemically synthesized
ttctgcccccttgaagactt

SEQ ID NO: 10374 - DNA, 20 bp, Artificial Sequence
  chemically synthesized
cccttgaagacttcagatgc

SEQ ID NO: 10375 - DNA, 20 bp, Artificial Sequence
  chemically synthesized
ccttgaagacttcagatgct

SEQ ID NO: 10376 - DNA, 20 bp, Artificial Sequence
  chemically synthesized
cttgaagacttcagatgctg

SEQ ID NO: 10377 - DNA, 20 bp, Artificial Sequence
  chemically synthesized
aagacttcagatgctgggga

SEQ ID NO: 10378 - DNA, 20 bp, Artificial Sequence
  chemically synthesized
agacttcagatgctggggaa

SEQ ID NO: 10379 - DNA, 20 bp, Artificial Sequence
  chemically synthesized
ttcagatgctggggaaagga

SEQ ID NO: 10380 - DNA, 20 bp, Artificial Sequence
  chemically synthesized
atgctggggaaaggatagat

SEQ ID NO: 10381 - DNA, 20 bp, Artificial Sequence
  chemically synthesized
gggaaaggatagataagaat

SEQ ID NO: 10382 - DNA, 20 bp, Artificial Sequence
  chemically synthesized
ggaaaggatagataagaata

SEQ ID NO: 10383 - DNA, 20 bp, Artificial Sequence
  chemically synthesized
agataagaataaggatgaac

SEQ ID NO: 10384 - DNA, 20 bp, Artificial Sequence
  chemically synthesized
gataagaataaggatgaacc

SEQ ID NO: 10385 - DNA, 20 bp, Artificial Sequence
  chemically synthesized
ataaggatgaaccaggcttt

SEQ ID NO: 10386 - DNA, 20 bp, Artificial Sequence
  chemically synthesized
aaggatgaaccaggcttttg

SEQ ID NO: 10387 - DNA, 20 bp, Artificial Sequence
  chemically synthesized
tgaaccaggcttttggagcc

SEQ ID NO: 10388 - DNA, 20 bp, Artificial Sequence
  chemically synthesized
gaaccaggcttttggagcct

SEQ ID NO: 10389 - DNA, 20 bp, Artificial Sequence
  chemically synthesized
ggagcctgggaaataatgac

SEQ ID NO: 10390 - DNA, 20 bp, Artificial Sequence
  chemically synthesized
aatgactagcgataaacctg

SEQ ID NO: 10391 - DNA, 20 bp, Artificial Sequence
  chemically synthesized
atgactagcgataaacctga

SEQ ID NO: 10392 - DNA, 20 bp, Artificial Sequence
  chemically synthesized
tgactagcgataaacctgaa

SEQ ID NO: 10393 - DNA, 20 bp, Artificial Sequence
  chemically synthesized
ctagcgataaacctgaaggg

SEQ ID NO: 10394 - DNA, 20 bp, Artificial Sequence
  chemically synthesized
gataaacctgaagggaagtt

SEQ ID NO: 10395 - DNA, 20 bp, Artificial Sequence
  chemically synthesized
gaagttaagtatacgatccc

SEQ ID NO: 10396 - DNA, 20 bp, Artificial Sequence
  chemically synthesized
tacgatccccagataatact

SEQ ID NO: 10397 - DNA, 20 bp, Artificial Sequence
  chemically synthesized
acgatccccagataatacta

SEQ ID NO: 10398 - DNA, 20 bp, Artificial Sequence
  chemically synthesized
gatccccagataatactaag

SEQ ID NO: 10399 - DNA, 20 bp, Artificial Sequence
  chemically synthesized
cccagataatactaaggaga

SEQ ID NO: 10400 - DNA, 20 bp, Artificial Sequence
  chemically synthesized
ccagataatactaaggagaa

SEQ ID NO: 10401 - DNA, 20 bp, Artificial Sequence
  chemically synthesized
agaaaggcaatgtgattctg

SEQ ID NO: 10402 - DNA, 20 bp, Artificial Sequence
  chemically synthesized
atgtgattctgcagccattg

SEQ ID NO: 10403 - DNA, 20 bp, Artificial Sequence
  chemically synthesized
gattctgcagccattgtagc

SEQ ID NO: 10404 - DNA, 20 bp, Artificial Sequence
  chemically synthesized
ttctgcagccattgtagcca

SEQ ID NO: 10405 - DNA, 20 bp, Artificial Sequence
  chemically synthesized
ccattgtagccagagataat

SEQ ID NO: 10406 - DNA, 20 bp, Artificial Sequence
  chemically synthesized
gccagagataataagccctt

SEQ ID NO: 10407 - DNA, 20 bp, Artificial Sequence
  chemically synthesized
ccagagataataagcccttg

SEQ ID NO: 10408 - DNA, 20 bp, Artificial Sequence
  chemically synthesized
gagataataagcccttgagg

SEQ ID NO: 10409 - DNA, 20 bp, Artificial Sequence
  chemically synthesized
agataataagcccttgagga

SEQ ID NO: 10410 - DNA, 20 bp, Artificial Sequence
  chemically synthesized
gataataagcccttgaggaa

SEQ ID NO: 10411 - DNA, 20 bp, Artificial Sequence
  chemically synthesized
ataataagcccttgaggaag

SEQ ID NO: 10412 - DNA, 20 bp, Artificial Sequence
  chemically synthesized
taagcccttgaggaaggggc

SEQ ID NO: 10413 - DNA, 20 bp, Artificial Sequence
  chemically synthesized
aagcccttgaggaaggggcc

SEQ ID NO: 10414 - DNA, 20 bp, Artificial Sequence
  chemically synthesized
agcccttgaggaaggggcca

SEQ ID NO: 10415 - DNA, 20 bp, Artificial Sequence
  chemically synthesized
gcccttgaggaaggggccag

SEQ ID NO: 10416 - DNA, 20 bp, Artificial Sequence
  chemically synthesized
ggggccaggggaatttttct

SEQ ID NO: 10417 - DNA, 20 bp, Artificial Sequence
  chemically synthesized
gggccaggggaatttttcta

SEQ ID NO: 10418 - DNA, 20 bp, Artificial Sequence
  chemically synthesized
caggggaatttttctaagga

SEQ ID NO: 10419 - DNA, 20 bp, Artificial Sequence
  chemically synthesized
ggaatttttctaaggataga

SEQ ID NO: 10420 - DNA, 20 bp, Artificial Sequence
  chemically synthesized
aaggatagacagtattaatg

SEQ ID NO: 10421 - DNA, 20 bp, Artificial Sequence
  chemically synthesized
ttctgctattaaactctcat

SEQ ID NO: 10422 - DNA, 20 bp, Artificial Sequence
  chemically synthesized
aaactctcattggcttctaa

SEQ ID NO: 10423 - DNA, 20 bp, Artificial Sequence
  chemically synthesized
aactctcattggcttctaaa

SEQ ID NO: 10424 - DNA, 20 bp, Artificial Sequence
  chemically synthesized
ctctcattggcttctaaaag

SEQ ID NO: 10425 - DNA, 20 bp, Artificial Sequence
  chemically synthesized
ttggcttctaaaaggagttt

SEQ ID NO: 10426 - DNA, 20 bp, Artificial Sequence
  chemically synthesized
cttctaaaaggagtttcggt

SEQ ID NO: 10427 - DNA, 20 bp, Artificial Sequence
  chemically synthesized
gtttcggtgagtgatttgct

SEQ ID NO: 10428 - DNA, 20 bp, Artificial Sequence
  chemically synthesized
gctgagatgttgcattttca

SEQ ID NO: 10429 - DNA, 20 bp, Artificial Sequence
  chemically synthesized
attttcatggctgctgcctt

SEQ ID NO: 10430 - DNA, 20 bp, Artificial Sequence
  chemically synthesized
ttttcatggctgctgccttt

SEQ ID NO: 10431 - DNA, 20 bp, Artificial Sequence
  chemically synthesized
gcctttaggtattattgcaa

SEQ ID NO: 10432 - DNA, 20 bp, Artificial Sequence
  chemically synthesized
taggtattattgcaacagtt

SEQ ID NO: 10433 - DNA, 20 bp, Artificial Sequence
  chemically synthesized
ttggaattttgaaattaaaa

SEQ ID NO: 10434 - DNA, 20 bp, Artificial Sequence
  chemically synthesized
ttaaaacagttctgtaaaac

SEQ ID NO: 10435 - DNA, 20 bp, Artificial Sequence
  chemically synthesized
acagttctgtaaaaccagtt

SEQ ID NO: 10436 - DNA, 20 bp, Artificial Sequence
  chemically synthesized
aaaaccagtttagttttgta

SEQ ID NO: 10437 - DNA, 20 bp, Artificial Sequence
  chemically synthesized
tttgtaaagtgtatgcatca

SEQ ID NO: 10438 - DNA, 20 bp, Artificial Sequence
  chemically synthesized
catcaaagatgtccttcatt

SEQ ID NO: 10439 - DNA, 20 bp, Artificial Sequence
  chemically synthesized
tccttcattcagacattact

SEQ ID NO: 10440 - DNA, 20 bp, Artificial Sequence
  chemically synthesized
acattactgagttacaacta

SEQ ID NO: 10441 - DNA, 20 bp, Artificial Sequence
  chemically synthesized
ctgagttacaactatggtgc

SEQ ID NO: 10442 - DNA, 20 bp, Artificial Sequence
  chemically synthesized
tgagttacaactatggtgcc

SEQ ID NO: 10443 - DNA, 20 bp, Artificial Sequence
  chemically synthesized
tatggtgccaggtactgtgt

SEQ ID NO: 10444 - DNA, 20 bp, Artificial Sequence
  chemically synthesized
atggtgccaggtactgtgtc

SEQ ID NO: 10445 - DNA, 20 bp, Artificial Sequence
  chemically synthesized
tggtgccaggtactgtgtca

SEQ ID NO: 10446 - DNA, 20 bp, Artificial Sequence
  chemically synthesized
caggtactgtgtcagggtac

SEQ ID NO: 10447 - DNA, 20 bp, Artificial Sequence
  chemically synthesized
aggtactgtgtcagggtact

SEQ ID NO: 10448 - DNA, 20 bp, Artificial Sequence
  chemically synthesized
ggtactgtgtcagggtacta

SEQ ID NO: 10449 - DNA, 20 bp, Artificial Sequence
  chemically synthesized
gtactgtgtcagggtactag

SEQ ID NO: 10450 - DNA, 20 bp, Artificial Sequence
  chemically synthesized
gtgtcagggtactaggggta

SEQ ID NO: 10451 - DNA, 20 bp, Artificial Sequence
  chemically synthesized
tgtcagggtactaggggtat

SEQ ID NO: 10452 - DNA, 20 bp, Artificial Sequence
  chemically synthesized
gtcagggtactaggggtatg

SEQ ID NO: 10453 - DNA, 20 bp, Artificial Sequence
  chemically synthesized
ctaggggtatggggataaac

SEQ ID NO: 10454 - DNA, 20 bp, Artificial Sequence
  chemically synthesized
cagactccctctttgatcta

SEQ ID NO: 10455 - DNA, 20 bp, Artificial Sequence
  chemically synthesized
actccctctttgatctaaag

SEQ ID NO: 10456 - DNA, 20 bp, Artificial Sequence
  chemically synthesized
tctttgatctaaagcagcat

SEQ ID NO: 10457 - DNA, 20 bp, Artificial Sequence
  chemically synthesized
ctttgatctaaagcagcatg

SEQ ID NO: 10458 - DNA, 20 bp, Artificial Sequence
  chemically synthesized
gatctaaagcagcatgaggc

SEQ ID NO: 10459 - DNA, 20 bp, Artificial Sequence
  chemically synthesized
atctaaagcagcatgaggcc

SEQ ID NO: 10460 - DNA, 20 bp, Artificial Sequence
  chemically synthesized
aaagcagcatgaggccaggt

SEQ ID NO: 10461 - DNA, 20 bp, Artificial Sequence
  chemically synthesized
agcagcatgaggccaggtga

SEQ ID NO: 10462 - DNA, 20 bp, Artificial Sequence
  chemically synthesized
gcagcatgaggccaggtgag

SEQ ID NO: 10463 - DNA, 20 bp, Artificial Sequence
  chemically synthesized
taatgtgataaaatgtgcac

SEQ ID NO: 10464 - DNA, 20 bp, Artificial Sequence
  chemically synthesized
aatgtgataaaatgtgcact

SEQ ID NO: 10465 - DNA, 20 bp, Artificial Sequence
  chemically synthesized
taaaatgtgcactaggtact

SEQ ID NO: 10466 - DNA, 20 bp, Artificial Sequence
  chemically synthesized
aaaatgtgcactaggtacta

SEQ ID NO: 10467 - DNA, 20 bp, Artificial Sequence
  chemically synthesized
aaatgtgcactaggtactaa

SEQ ID NO: 10468 - DNA, 20 bp, Artificial Sequence
  chemically synthesized
cactaggtactaagggatca

SEQ ID NO: 10469 - DNA, 20 bp, Artificial Sequence
  chemically synthesized
ctaggtactaagggatcata

SEQ ID NO: 10470 - DNA, 20 bp, Artificial Sequence
  chemically synthesized
gtactaagggatcatagaga

SEQ ID NO: 10471 - DNA, 20 bp, Artificial Sequence
  chemically synthesized
tactaagggatcatagagaa

SEQ ID NO: 10472 - DNA, 20 bp, Artificial Sequence
  chemically synthesized
agagaaaggaacacattaaa

SEQ ID NO: 10473 - DNA, 20 bp, Artificial Sequence
  chemically synthesized
gagaaaggaacacattaaat

SEQ ID NO: 10474 - DNA, 20 bp, Artificial Sequence
  chemically synthesized
agaaaggaacacattaaatg

SEQ ID NO: 10475 - DNA, 20 bp, Artificial Sequence
  chemically synthesized
ttaaatggggaaacaattga

SEQ ID NO: 10476 - DNA, 20 bp, Artificial Sequence
  chemically synthesized
aaatggggaaacaattgata

SEQ ID NO: 10477 - DNA, 20 bp, Artificial Sequence
  chemically synthesized
atggggaaacaattgataga

SEQ ID NO: 10478 - DNA, 20 bp, Artificial Sequence
  chemically synthesized
ggggaaacaattgatagaga

SEQ ID NO: 10479 - DNA, 20 bp, Artificial Sequence
  chemically synthesized
agagagagaatattttcatc

SEQ ID NO: 10480 - DNA, 20 bp, Artificial Sequence
  chemically synthesized
gagagagaatattttcatct

SEQ ID NO: 10481 - DNA, 20 bp, Artificial Sequence
  chemically synthesized
tattttcatctgggtcttaa

SEQ ID NO: 10482 - DNA, 20 bp, Artificial Sequence
  chemically synthesized
tcatctgggtcttaaaagat

SEQ ID NO: 10483 - DNA, 20 bp, Artificial Sequence
  chemically synthesized
tctgggtcttaaaagatgag

SEQ ID NO: 10484 - DNA, 20 bp, Artificial Sequence
  chemically synthesized
ctgggtcttaaaagatgagt

SEQ ID NO: 10485 - DNA, 20 bp, Artificial Sequence
  chemically synthesized
tctctttaaatgtctgatat

SEQ ID NO: 10486 - DNA, 20 bp, Artificial Sequence
  chemically synthesized
ctctttaaatgtctgatata

SEQ ID NO: 10487 - DNA, 20 bp, Artificial Sequence
  chemically synthesized
tctttaaatgtctgatataa

SEQ ID NO: 10488 - DNA, 20 bp, Artificial Sequence
  chemically synthesized
atataagggcattttatgca

SEQ ID NO: 10489 - DNA, 20 bp, Artificial Sequence
  chemically synthesized
ataagggcattttatgcaaa

SEQ ID NO: 10490 - DNA, 20 bp, Artificial Sequence
  chemically synthesized
taagggcattttatgcaaag

SEQ ID NO: 10491 - DNA, 20 bp, Artificial Sequence
  chemically synthesized
caaagaggatcactcgtgca

SEQ ID NO: 10492 - DNA, 20 bp, Artificial Sequence
  chemically synthesized
ggatcactcgtgcaaagact

SEQ ID NO: 10493 - DNA, 20 bp, Artificial Sequence
  chemically synthesized
gtgcaaagactcagatttgc

SEQ ID NO: 10494 - DNA, 20 bp, Artificial Sequence
  chemically synthesized
actcagatttgcaagaacgt

SEQ ID NO: 10495 - DNA, 20 bp, Artificial Sequence
  chemically synthesized
ctcagatttgcaagaacgtg

SEQ ID NO: 10496 - DNA, 20 bp, Artificial Sequence
  chemically synthesized
tgcaagaacgtgaggtattt

SEQ ID NO: 10497 - DNA, 20 bp, Artificial Sequence
  chemically synthesized
gcaagaacgtgaggtatttc

SEQ ID NO: 10498 - DNA, 20 bp, Artificial Sequence
  chemically synthesized
aagaacgtgaggtatttcag

SEQ ID NO: 10499 - DNA, 20 bp, Artificial Sequence
  chemically synthesized
ggtatttcaggagttttgta

SEQ ID NO: 10500 - DNA, 20 bp, Artificial Sequence
  chemically synthesized
gagttttgtatggttccata

SEQ ID NO: 10501 - DNA, 20 bp, Artificial Sequence
  chemically synthesized
ggttccatatggactatgac

SEQ ID NO: 10502 - DNA, 20 bp, Artificial Sequence
  chemically synthesized
ccatatggactatgacaagt

SEQ ID NO: 10503 - DNA, 20 bp, Artificial Sequence
  chemically synthesized
atggactatgacaagtgaga

SEQ ID NO: 10504 - DNA, 20 bp, Artificial Sequence
  chemically synthesized
tggactatgacaagtgagac

SEQ ID NO: 10505 - DNA, 20 bp, Artificial Sequence
  chemically synthesized
gacaagtgagacaggtaaac

SEQ ID NO: 10506 - DNA, 20 bp, Artificial Sequence
  chemically synthesized
acaagtgagacaggtaaact

SEQ ID NO: 10507 - DNA, 20 bp, Artificial Sequence
  chemically synthesized
agtgagacaggtaaactagg

SEQ ID NO: 10508 - DNA, 20 bp, Artificial Sequence
  chemically synthesized
tgagacaggtaaactaggca

SEQ ID NO: 10509 - DNA, 20 bp, Artificial Sequence
  chemically synthesized
acaggtaaactaggcagagc

SEQ ID NO: 10510 - DNA, 20 bp, Artificial Sequence
  chemically synthesized
aactaggcagagctggtcat

SEQ ID NO: 10511 - DNA, 20 bp, Artificial Sequence
  chemically synthesized
gagctggtcatcagataatg

SEQ ID NO: 10512 - DNA, 20 bp, Artificial Sequence
  chemically synthesized
gataatgaagtcattaacct

SEQ ID NO: 10513 - DNA, 20 bp, Artificial Sequence
  chemically synthesized
ataatgaagtcattaaccta

SEQ ID NO: 10514 - DNA, 20 bp, Artificial Sequence
  chemically synthesized
aatgaagtcattaacctaag

SEQ ID NO: 10515 - DNA, 20 bp, Artificial Sequence
  chemically synthesized
agtcattaacctaaggagat

SEQ ID NO: 10516 - DNA, 20 bp, Artificial Sequence
  chemically synthesized
ttggacaataaaatgcaata

SEQ ID NO: 10517 - DNA, 20 bp, Artificial Sequence
  chemically synthesized
ggacaataaaatgcaatatg

SEQ ID NO: 10518 - DNA, 20 bp, Artificial Sequence
  chemically synthesized
gacaataaaatgcaatatgg

SEQ ID NO: 10519 - DNA, 20 bp, Artificial Sequence
  chemically synthesized
aatgcaatatggaggtatcg

SEQ ID NO: 10520 - DNA, 20 bp, Artificial Sequence
  chemically synthesized
aggtatcgaagtataaacat

SEQ ID NO: 10521 - DNA, 20 bp, Artificial Sequence
  chemically synthesized
ggtatcgaagtataaacata

SEQ ID NO: 10522 - DNA, 20 bp, Artificial Sequence
  chemically synthesized
tatcgaagtataaacataag

SEQ ID NO: 10523 - DNA, 20 bp, Artificial Sequence
  chemically synthesized
aacataaggagtaccactga

SEQ ID NO: 10524 - DNA, 20 bp, Artificial Sequence
  chemically synthesized
agtaccactgatggctgatt

SEQ ID NO: 10525 - DNA, 20 bp, Artificial Sequence
  chemically synthesized
gtaccactgatggctgattt

SEQ ID NO: 10526 - DNA, 20 bp, Artificial Sequence
  chemically synthesized
gatggctgatttaggatgcc

SEQ ID NO: 10527 - DNA, 20 bp, Artificial Sequence
  chemically synthesized
ctgatttaggatgcccagtc

SEQ ID NO: 10528 - DNA, 20 bp, Artificial Sequence
  chemically synthesized
gcaacacgctaatgaaatga

SEQ ID NO: 10529 - DNA, 20 bp, Artificial Sequence
  chemically synthesized
acacgctaatgaaatgatag

SEQ ID NO: 10530 - DNA, 20 bp, Artificial Sequence
  chemically synthesized
cacgctaatgaaatgatagt

SEQ ID NO: 10531 - DNA, 20 bp, Artificial Sequence
  chemically synthesized
acgctaatgaaatgatagtg

SEQ ID NO: 10532 - DNA, 20 bp, Artificial Sequence
  chemically synthesized
cgctaatgaaatgatagtgg

SEQ ID NO: 10533 - DNA, 20 bp, Artificial Sequence
  chemically synthesized
ctaatgaaatgatagtgggg

SEQ ID NO: 10534 - DNA, 20 bp, Artificial Sequence
  chemically synthesized
taatgaaatgatagtggggg

SEQ ID NO: 10535 - DNA, 20 bp, Artificial Sequence
  chemically synthesized
aatgaaatgatagtggggga

SEQ ID NO: 10536 - DNA, 20 bp, Artificial Sequence
  chemically synthesized
atgaaatgatagtgggggag

SEQ ID NO: 10537 - DNA, 20 bp, Artificial Sequence
  chemically synthesized
tgaaatgatagtgggggagg

SEQ ID NO: 10538 - DNA, 20 bp, Artificial Sequence
  chemically synthesized
gtgggggagggggccgtacc

SEQ ID NO: 10539 - DNA, 20 bp, Artificial Sequence
  chemically synthesized
ggagggggccgtaccaagac

SEQ ID NO: 10540 - DNA, 20 bp, Artificial Sequence
  chemically synthesized
gagggggccgtaccaagact

SEQ ID NO: 10541 - DNA, 20 bp, Artificial Sequence
  chemically synthesized
gggggccgtaccaagactag

SEQ ID NO: 10542 - DNA, 20 bp, Artificial Sequence
  chemically synthesized
gggccgtaccaagactagga

SEQ ID NO: 10543 - DNA, 20 bp, Artificial Sequence
  chemically synthesized
gccgtaccaagactaggaga

SEQ ID NO: 10544 - DNA, 20 bp, Artificial Sequence
  chemically synthesized
gtaccaagactaggagagag

SEQ ID NO: 10545 - DNA, 20 bp, Artificial Sequence
  chemically synthesized
gactaggagagagcagtcct

SEQ ID NO: 10546 - DNA, 20 bp, Artificial Sequence
  chemically synthesized
gagactattgcaattatctg

SEQ ID NO: 10547 - DNA, 20 bp, Artificial Sequence
  chemically synthesized
agactattgcaattatctgc

SEQ ID NO: 10548 - DNA, 20 bp, Artificial Sequence
  chemically synthesized
actattgcaattatctgcgg

SEQ ID NO: 10549 - DNA, 20 bp, Artificial Sequence
  chemically synthesized
aattatctgcgggagacata

SEQ ID NO: 10550 - DNA, 20 bp, Artificial Sequence
  chemically synthesized
attatctgcgggagacataa

SEQ ID NO: 10551 - DNA, 20 bp, Artificial Sequence
  chemically synthesized
tctgcgggagacataaaggc

SEQ ID NO: 10552 - DNA, 20 bp, Artificial Sequence
  chemically synthesized
cataaaggctagaacctgaa

SEQ ID NO: 10553 - DNA, 20 bp, Artificial Sequence
  chemically synthesized
aaaggctagaacctgaacag

SEQ ID NO: 10554 - DNA, 20 bp, Artificial Sequence
  chemically synthesized
ggctagaacctgaacagtag

SEQ ID NO: 10555 - DNA, 20 bp, Artificial Sequence
  chemically synthesized
gaacagtagcagtacaaaaa

SEQ ID NO: 10556 - DNA, 20 bp, Artificial Sequence
  chemically synthesized
acagtagcagtacaaaaaaa

SEQ ID NO: 10557 - DNA, 20 bp, Artificial Sequence
  chemically synthesized
cagtagcagtacaaaaaaag

SEQ ID NO: 10558 - DNA, 20 bp, Artificial Sequence
  chemically synthesized
agtagcagtacaaaaaaaga

SEQ ID NO: 10559 - DNA, 20 bp, Artificial Sequence
  chemically synthesized
gtagcagtacaaaaaaagag

SEQ ID NO: 10560 - DNA, 20 bp, Artificial Sequence
  chemically synthesized
agcagtacaaaaaaagaggg

SEQ ID NO: 10561 - DNA, 20 bp, Artificial Sequence
  chemically synthesized
aggggagttcaaatgatatt

SEQ ID NO: 10562 - DNA, 20 bp, Artificial Sequence
  chemically synthesized
ggggagttcaaatgatatta

SEQ ID NO: 10563 - DNA, 20 bp, Artificial Sequence
  chemically synthesized
gagttcaaatgatattaagg

SEQ ID NO: 10564 - DNA, 20 bp, Artificial Sequence
  chemically synthesized
ttcaaatgatattaaggaag

SEQ ID NO: 10565 - DNA, 20 bp, Artificial Sequence
  chemically synthesized
aaatgatattaaggaagtag

SEQ ID NO: 10566 - DNA, 20 bp, Artificial Sequence
  chemically synthesized
tgatattaaggaagtagaag

SEQ ID NO: 10567 - DNA, 20 bp, Artificial Sequence
  chemically synthesized
agtggtatgacttaaccatc

SEQ ID NO: 10568 - DNA, 20 bp, Artificial Sequence
  chemically synthesized
gtggtatgacttaaccatct

SEQ ID NO: 10569 - DNA, 20 bp, Artificial Sequence
  chemically synthesized
atgacttaaccatctgggta

SEQ ID NO: 10570 - DNA, 20 bp, Artificial Sequence
  chemically synthesized
acttaaccatctgggtatgg

SEQ ID NO: 10571 - DNA, 20 bp, Artificial Sequence
  chemically synthesized
cttaaccatctgggtatgga

SEQ ID NO: 10572 - DNA, 20 bp, Artificial Sequence
  chemically synthesized
ttaaccatctgggtatggaa

SEQ ID NO: 10573 - DNA, 20 bp, Artificial Sequence
  chemically synthesized
taaccatctgggtatggaag

SEQ ID NO: 10574 - DNA, 20 bp, Artificial Sequence
  chemically synthesized
tctgggtatggaaggggaaa

SEQ ID NO: 10575 - DNA, 20 bp, Artificial Sequence
  chemically synthesized
ggtatggaaggggaaatggc

SEQ ID NO: 10576 - DNA, 20 bp, Artificial Sequence
  chemically synthesized
tatggaaggggaaatggcta

SEQ ID NO: 10577 - DNA, 20 bp, Artificial Sequence
  chemically synthesized
aggggaaatggctagagtct

SEQ ID NO: 10578 - DNA, 20 bp, Artificial Sequence
  chemically synthesized
ggggaaatggctagagtctt

SEQ ID NO: 10579 - DNA, 20 bp, Artificial Sequence
  chemically synthesized
gggaaatggctagagtcttg

SEQ ID NO: 10580 - DNA, 20 bp, Artificial Sequence
  chemically synthesized
ctttgtgtttgatgtgatta

SEQ ID NO: 10581 - DNA, 20 bp, Artificial Sequence
  chemically synthesized
tttgatgtgattatggacca

SEQ ID NO: 10582 - DNA, 20 bp, Artificial Sequence
  chemically synthesized
tggaccacagaataatgtct

SEQ ID NO: 10583 - DNA, 20 bp, Artificial Sequence
  chemically synthesized
gaccacagaataatgtctaa

SEQ ID NO: 10584 - DNA, 20 bp, Artificial Sequence
  chemically synthesized
agaataatgtctaagagaac

SEQ ID NO: 10585 - DNA, 20 bp, Artificial Sequence
  chemically synthesized
gtctaagagaactggctctt

SEQ ID NO: 10586 - DNA, 20 bp, Artificial Sequence
  chemically synthesized
tggctctttagtctgactgc

SEQ ID NO: 10587 - DNA, 20 bp, Artificial Sequence
  chemically synthesized
gctctttagtctgactgcca

SEQ ID NO: 10588 - DNA, 20 bp, Artificial Sequence
  chemically synthesized
agtctgaatcctgaatgttt

SEQ ID NO: 10589 - DNA, 20 bp, Artificial Sequence
  chemically synthesized
aatgttttagtatgttacct

SEQ ID NO: 10590 - DNA, 20 bp, Artificial Sequence
  chemically synthesized
atgttttagtatgttacctt

SEQ ID NO: 10591 - DNA, 20 bp, Artificial Sequence
  chemically synthesized
ttagtatgttaccttgggca

SEQ ID NO: 10592 - DNA, 20 bp, Artificial Sequence
  chemically synthesized
gttaccttgggcaaagccct

SEQ ID NO: 10593 - DNA, 20 bp, Artificial Sequence
  chemically synthesized
tcttcctcattcataaaaat

SEQ ID NO: 10594 - DNA, 20 bp, Artificial Sequence
  chemically synthesized
cattcataaaaataagatga

SEQ ID NO: 10595 - DNA, 20 bp, Artificial Sequence
  chemically synthesized
agatgacagtgcctatctcg

SEQ ID NO: 10596 - DNA, 20 bp, Artificial Sequence
  chemically synthesized
gatgacagtgcctatctcgt

SEQ ID NO: 10597 - DNA, 20 bp, Artificial Sequence
  chemically synthesized
ctatctcgtgggacttttgt

SEQ ID NO: 10598 - DNA, 20 bp, Artificial Sequence
  chemically synthesized
tatctcgtgggacttttgtg

SEQ ID NO: 10599 - DNA, 20 bp, Artificial Sequence
  chemically synthesized
gtgggacttttgtgaggatg

SEQ ID NO: 10600 - DNA, 20 bp, Artificial Sequence
  chemically synthesized
gacttttgtgaggatgaagt

SEQ ID NO: 10601 - DNA, 20 bp, Artificial Sequence
  chemically synthesized
gtgaggatgaagtgagataa

SEQ ID NO: 10602 - DNA, 20 bp, Artificial Sequence
  chemically synthesized
gaagtgagataatggatgca

SEQ ID NO: 10603 - DNA, 20 bp, Artificial Sequence
  chemically synthesized
ataatggatgcaaagttact

SEQ ID NO: 10604 - DNA, 20 bp, Artificial Sequence
  chemically synthesized
ggatgcaaagttactgagca

SEQ ID NO: 10605 - DNA, 20 bp, Artificial Sequence
  chemically synthesized
actgagcacagtgtccaaca

SEQ ID NO: 10606 - DNA, 20 bp, Artificial Sequence
  chemically synthesized
gagcacagtgtccaacacag

SEQ ID NO: 10607 - DNA, 20 bp, Artificial Sequence
  chemically synthesized
cacagtgtccaacacagcag

SEQ ID NO: 10608 - DNA, 20 bp, Artificial Sequence
  chemically synthesized
cagaagcattacatatacat

SEQ ID NO: 10609 - DNA, 20 bp, Artificial Sequence
  chemically synthesized
acatatacattagctattac

SEQ ID NO: 10610 - DNA, 20 bp, Artificial Sequence
  chemically synthesized
actggctacattatgatata

SEQ ID NO: 10611 - DNA, 20 bp, Artificial Sequence
  chemically synthesized
gctacattatgatatacagt

SEQ ID NO: 10612 - DNA, 20 bp, Artificial Sequence
  chemically synthesized
ctacattatgatatacagtt

SEQ ID NO: 10613 - DNA, 20 bp, Artificial Sequence
  chemically synthesized
tacattatgatatacagtta

SEQ ID NO: 10614 - DNA, 20 bp, Artificial Sequence
  chemically synthesized
cattatgatatacagttagg

SEQ ID NO: 10615 - DNA, 20 bp, Artificial Sequence
  chemically synthesized
atgatatacagttagggagt

SEQ ID NO: 10616 - DNA, 20 bp, Artificial Sequence
  chemically synthesized
tatacagttagggagttgga

SEQ ID NO: 10617 - DNA, 20 bp, Artificial Sequence
  chemically synthesized
tggaaagataatctgaaatt

SEQ ID NO: 10618 - DNA, 20 bp, Artificial Sequence
  chemically synthesized
ggaaagataatctgaaattc

SEQ ID NO: 10619 - DNA, 20 bp, Artificial Sequence
  chemically synthesized
aaagataatctgaaattcag

SEQ ID NO: 10620 - DNA, 20 bp, Artificial Sequence
  chemically synthesized
tcaggagacgtatctgacta

SEQ ID NO: 10621 - DNA, 20 bp, Artificial Sequence
  chemically synthesized
caggagacgtatctgactat

SEQ ID NO: 10622 - DNA, 20 bp, Artificial Sequence
  chemically synthesized
agacgtatctgactataggt

SEQ ID NO: 10623 - DNA, 20 bp, Artificial Sequence
  chemically synthesized
tctgactataggtgagtatt

SEQ ID NO: 10624 - DNA, 20 bp, Artificial Sequence
  chemically synthesized
ggaactcattgttctgtaaa

SEQ ID NO: 10625 - DNA, 20 bp, Artificial Sequence
  chemically synthesized
actcattgttctgtaaacag

SEQ ID NO: 10626 - DNA, 20 bp, Artificial Sequence
  chemically synthesized
tgttctgtaaacagtagtta

SEQ ID NO: 10627 - DNA, 20 bp, Artificial Sequence
  chemically synthesized
agtagttacagccacgtgtg

SEQ ID NO: 10628 - DNA, 20 bp, Artificial Sequence
  chemically synthesized
gtagttacagccacgtgtgt

SEQ ID NO: 10629 - DNA, 20 bp, Artificial Sequence
  chemically synthesized
cagccacgtgtgtgggcatc

SEQ ID NO: 10630 - DNA, 20 bp, Artificial Sequence
  chemically synthesized
gccacgtgtgtgggcatctg

SEQ ID NO: 10631 - DNA, 20 bp, Artificial Sequence
  chemically synthesized
cacgtgtgtgggcatctgga

SEQ ID NO: 10632 - DNA, 20 bp, Artificial Sequence
  chemically synthesized
tgtgtgggcatctggagagt

SEQ ID NO: 10633 - DNA, 20 bp, Artificial Sequence
  chemically synthesized
gggcatctggagagtgagca

SEQ ID NO: 10634 - DNA, 20 bp, Artificial Sequence
  chemically synthesized
agcatggatattgtgatacc

SEQ ID NO: 10635 - DNA, 20 bp, Artificial Sequence
  chemically synthesized
ggatattgtgatacctagta

SEQ ID NO: 10636 - DNA, 20 bp, Artificial Sequence
  chemically synthesized
gtgatacctagtacagtgcc

SEQ ID NO: 10637 - DNA, 20 bp, Artificial Sequence
  chemically synthesized
atacctagtacagtgcctgg

SEQ ID NO: 10638 - DNA, 20 bp, Artificial Sequence
  chemically synthesized
cctagtacagtgcctggcag

SEQ ID NO: 10639 - DNA, 20 bp, Artificial Sequence
  chemically synthesized
agtacagtgcctggcagtag

SEQ ID NO: 10640 - DNA, 20 bp, Artificial Sequence
  chemically synthesized
ggcagtagtggttgtatgct

SEQ ID NO: 10641 - DNA, 20 bp, Artificial Sequence
  chemically synthesized
tgctcagtaaattttgttga

SEQ ID NO: 10642 - DNA, 20 bp, Artificial Sequence
  chemically synthesized
gctcagtaaattttgttgac

SEQ ID NO: 10643 - DNA, 20 bp, Artificial Sequence
  chemically synthesized
ctcagtaaattttgttgaca

SEQ ID NO: 10644 - DNA, 20 bp, Artificial Sequence
  chemically synthesized
gtaaattttgttgacagggt

SEQ ID NO: 10645 - DNA, 20 bp, Artificial Sequence
  chemically synthesized
taaattttgttgacagggtc

SEQ ID NO: 10646 - DNA, 20 bp, Artificial Sequence
  chemically synthesized
aaattttgttgacagggtca

SEQ ID NO: 10647 - DNA, 20 bp, Artificial Sequence
  chemically synthesized
tttgttgacagggtcagggc

SEQ ID NO: 10648 - DNA, 20 bp, Artificial Sequence
  chemically synthesized
tgacagggtcagggccggac

SEQ ID NO: 10649 - DNA, 20 bp, Artificial Sequence
  chemically synthesized
gtcagggccggactagactg

SEQ ID NO: 10650 - DNA, 20 bp, Artificial Sequence
  chemically synthesized
gggccggactagactgtggt

SEQ ID NO: 10651 - DNA, 20 bp, Artificial Sequence
  chemically synthesized
cggactagactgtggtaagc

SEQ ID NO: 10652 - DNA, 20 bp, Artificial Sequence
  chemically synthesized
ggactagactgtggtaagca

SEQ ID NO: 10653 - DNA, 20 bp, Artificial Sequence
  chemically synthesized
actgtggtaagcaaggcctg

SEQ ID NO: 10654 - DNA, 20 bp, Artificial Sequence
  chemically synthesized
ctgtggtaagcaaggcctgt

SEQ ID NO: 10655 - DNA, 20 bp, Artificial Sequence
  chemically synthesized
tgtggtaagcaaggcctgta

SEQ ID NO: 10656 - DNA, 20 bp, Artificial Sequence
  chemically synthesized
taaatatacttgtatgcccc

SEQ ID NO: 10657 - DNA, 20 bp, Artificial Sequence
  chemically synthesized
atatacttgtatgccccgag

SEQ ID NO: 10658 - DNA, 20 bp, Artificial Sequence
  chemically synthesized
acttgtatgccccgagaagt

SEQ ID NO: 10659 - DNA, 20 bp, Artificial Sequence
  chemically synthesized
cttgtatgccccgagaagtg

SEQ ID NO: 10660 - DNA, 20 bp, Artificial Sequence
  chemically synthesized
tgtgccctacatgccttgtt

SEQ ID NO: 10661 - DNA, 20 bp, Artificial Sequence
  chemically synthesized
tgtttggttcactcttgtcc

SEQ ID NO: 10662 - DNA, 20 bp, Artificial Sequence
  chemically synthesized
gttcactcttgtcccagccc

SEQ ID NO: 10663 - DNA, 20 bp, Artificial Sequence
  chemically synthesized
actcttgtcccagccctagc

SEQ ID NO: 10664 - DNA, 20 bp, Artificial Sequence
  chemically synthesized
cagccctagcaagtatatat

SEQ ID NO: 10665 - DNA, 20 bp, Artificial Sequence
  chemically synthesized
agccctagcaagtatatata

SEQ ID NO: 10666 - DNA, 20 bp, Artificial Sequence
  chemically synthesized
caagtatatataaggtgaaa

SEQ ID NO: 10667 - DNA, 20 bp, Artificial Sequence
  chemically synthesized
aagtatatataaggtgaaaa

SEQ ID NO: 10668 - DNA, 20 bp, Artificial Sequence
  chemically synthesized
atataaggtgaaaaaggaaa

SEQ ID NO: 10669 - DNA, 20 bp, Artificial Sequence
  chemically synthesized
aggtgaaaaaggaaaaagct

SEQ ID NO: 10670 - DNA, 20 bp, Artificial Sequence
  chemically synthesized
ggtgaaaaaggaaaaagctg

SEQ ID NO: 10671 - DNA, 20 bp, Artificial Sequence
  chemically synthesized
aaaaaggaaaaagctgaggc

SEQ ID NO: 10672 - DNA, 20 bp, Artificial Sequence
  chemically synthesized
aaaggaaaaagctgaggctg

SEQ ID NO: 10673 - DNA, 20 bp, Artificial Sequence
  chemically synthesized
aaaaagctgaggctggagcc

SEQ ID NO: 10674 - DNA, 20 bp, Artificial Sequence
  chemically synthesized
aaaagctgaggctggagcct

SEQ ID NO: 10675 - DNA, 20 bp, Artificial Sequence
  chemically synthesized
aagctgaggctggagcctgg

SEQ ID NO: 10676 - DNA, 20 bp, Artificial Sequence
  chemically synthesized
gctggagcctgggagaaccc

SEQ ID NO: 10677 - DNA, 20 bp, Artificial Sequence
  chemically synthesized
tgggagaaccctggacattt

SEQ ID NO: 10678 - DNA, 20 bp, Artificial Sequence
  chemically synthesized
gggagaaccctggacattta

SEQ ID NO: 10679 - DNA, 20 bp, Artificial Sequence
  chemically synthesized
ggagaaccctggacatttaa

SEQ ID NO: 10680 - DNA, 20 bp, Artificial Sequence
  chemically synthesized
ccctggacatttaagggcca

SEQ ID NO: 10681 - DNA, 20 bp, Artificial Sequence
  chemically synthesized
ctggacatttaagggccatg

SEQ ID NO: 10682 - DNA, 20 bp, Artificial Sequence
  chemically synthesized
ggacatttaagggccatgga

SEQ ID NO: 10683 - DNA, 20 bp, Artificial Sequence
  chemically synthesized
gacatttaagggccatggag

SEQ ID NO: 10684 - DNA, 20 bp, Artificial Sequence
  chemically synthesized
ttaagggccatggagaggaa

SEQ ID NO: 10685 - DNA, 20 bp, Artificial Sequence
  chemically synthesized
taagggccatggagaggaac

SEQ ID NO: 10686 - DNA, 20 bp, Artificial Sequence
  chemically synthesized
agggccatggagaggaacag

SEQ ID NO: 10687 - DNA, 20 bp, Artificial Sequence
  chemically synthesized
gaacaggagttaatcaattc

SEQ ID NO: 10688 - DNA, 20 bp, Artificial Sequence
  chemically synthesized
gagttaatcaattcaagtgc

SEQ ID NO: 10689 - DNA, 20 bp, Artificial Sequence
  chemically synthesized
taatcaattcaagtgctgga

SEQ ID NO: 10690 - DNA, 20 bp, Artificial Sequence
  chemically synthesized
ttcaagtgctggatggataa

SEQ ID NO: 10691 - DNA, 20 bp, Artificial Sequence
  chemically synthesized
tcaagtgctggatggataac

SEQ ID NO: 10692 - DNA, 20 bp, Artificial Sequence
  chemically synthesized
aagtgctggatggataacag

SEQ ID NO: 10693 - DNA, 20 bp, Artificial Sequence
  chemically synthesized
gctggatggataacaggagt

SEQ ID NO: 10694 - DNA, 20 bp, Artificial Sequence
  chemically synthesized
tggatggataacaggagtta

SEQ ID NO: 10695 - DNA, 20 bp, Artificial Sequence
  chemically synthesized
ggataacaggagttagagca

SEQ ID NO: 10696 - DNA, 20 bp, Artificial Sequence
  chemically synthesized
taacaggagttagagcaaag

SEQ ID NO: 10697 - DNA, 20 bp, Artificial Sequence
  chemically synthesized
aacaggagttagagcaaagc

SEQ ID NO: 10698 - DNA, 20 bp, Artificial Sequence
  chemically synthesized
acaggagttagagcaaagcg

SEQ ID NO: 10699 - DNA, 20 bp, Artificial Sequence
  chemically synthesized
gttagagcaaagcggggaac

SEQ ID NO: 10700 - DNA, 20 bp, Artificial Sequence
  chemically synthesized
agcaaagcggggaaccagaa

SEQ ID NO: 10701 - DNA, 20 bp, Artificial Sequence
  chemically synthesized
caaagcggggaaccagaata

SEQ ID NO: 10702 - DNA, 20 bp, Artificial Sequence
  chemically synthesized
aatagagtgattattataaa

SEQ ID NO: 10703 - DNA, 20 bp, Artificial Sequence
  chemically synthesized
tagagtgattattataaaaa

SEQ ID NO: 10704 - DNA, 20 bp, Artificial Sequence
  chemically synthesized
tataaaaagagtttcctaaa

SEQ ID NO: 10705 - DNA, 20 bp, Artificial Sequence
  chemically synthesized
ataaaaagagtttcctaaaa

SEQ ID NO: 10706 - DNA, 20 bp, Artificial Sequence
  chemically synthesized
taaaaagagtttcctaaaaa

SEQ ID NO: 10707 - DNA, 20 bp, Artificial Sequence
  chemically synthesized
aaaagagtttcctaaaaagg

SEQ ID NO: 10708 - DNA, 20 bp, Artificial Sequence
  chemically synthesized
aagagtttcctaaaaaggga

SEQ ID NO: 10709 - DNA, 20 bp, Artificial Sequence
  chemically synthesized
aaaagggagagatcaacaat

SEQ ID NO: 10710 - DNA, 20 bp, Artificial Sequence
  chemically synthesized
atcaacaattagaaattatt

SEQ ID NO: 10711 - DNA, 20 bp, Artificial Sequence
  chemically synthesized
caacaattagaaattattta

SEQ ID NO: 10712 - DNA, 20 bp, Artificial Sequence
  chemically synthesized
caattagaaattatttagag

SEQ ID NO: 10713 - DNA, 20 bp, Artificial Sequence
  chemically synthesized
tagaaattatttagagcagc

SEQ ID NO: 10714 - DNA, 20 bp, Artificial Sequence
  chemically synthesized
ataaactcaaaattattctt

SEQ ID NO: 10715 - DNA, 20 bp, Artificial Sequence
  chemically synthesized
taaactcaaaattattcttt

SEQ ID NO: 10716 - DNA, 20 bp, Artificial Sequence
  chemically synthesized
gtcattcctgattgtgacaa

SEQ ID NO: 10717 - DNA, 20 bp, Artificial Sequence
  chemically synthesized
ttcattatataaatgtgatt

SEQ ID NO: 10718 - DNA, 20 bp, Artificial Sequence
  chemically synthesized
tcattatataaatgtgatta

SEQ ID NO: 10719 - DNA, 20 bp, Artificial Sequence
  chemically synthesized
ttatataaatgtgattaagg

SEQ ID NO: 10720 - DNA, 20 bp, Artificial Sequence
  chemically synthesized
tatataaatgtgattaagga

SEQ ID NO: 10721 - DNA, 20 bp, Artificial Sequence
  chemically synthesized
aaatgtgattaaggaaggaa

SEQ ID NO: 10722 - DNA, 20 bp, Artificial Sequence
  chemically synthesized
atgtgattaaggaaggaaaa

SEQ ID NO: 10723 - DNA, 20 bp, Artificial Sequence
  chemically synthesized
aaggaaggaaaagagctaca

SEQ ID NO: 10724 - DNA, 20 bp, Artificial Sequence
  chemically synthesized
gaaggaaaagagctacacag

SEQ ID NO: 10725 - DNA, 20 bp, Artificial Sequence
  chemically synthesized
gagctacacagaagttatta

SEQ ID NO: 10726 - DNA, 20 bp, Artificial Sequence
  chemically synthesized
gctacacagaagttattaaa

SEQ ID NO: 10727 - DNA, 20 bp, Artificial Sequence
  chemically synthesized
cagaagttattaaagagcta

SEQ ID NO: 10728 - DNA, 20 bp, Artificial Sequence
  chemically synthesized
gaagttattaaagagctaaa

SEQ ID NO: 10729 - DNA, 20 bp, Artificial Sequence
  chemically synthesized
ttaaagagctaaagagaatt

SEQ ID NO: 10730 - DNA, 20 bp, Artificial Sequence
  chemically synthesized
gagaattgagaaatttaaaa

SEQ ID NO: 10731 - DNA, 20 bp, Artificial Sequence
  chemically synthesized
aattgagaaatttaaaacag

SEQ ID NO: 10732 - DNA, 20 bp, Artificial Sequence
  chemically synthesized
gagaaatttaaaacagaaga

SEQ ID NO: 10733 - DNA, 20 bp, Artificial Sequence
  chemically synthesized
aaatttaaaacagaagaaag

SEQ ID NO: 10734 - DNA, 20 bp, Artificial Sequence
  chemically synthesized
aatttaaaacagaagaaagt

SEQ ID NO: 10735 - DNA, 20 bp, Artificial Sequence
  chemically synthesized
atttaaaacagaagaaagta

SEQ ID NO: 10736 - DNA, 20 bp, Artificial Sequence
  chemically synthesized
agaaagtagggccaacatga

SEQ ID NO: 10737 - DNA, 20 bp, Artificial Sequence
  chemically synthesized
gaaagtagggccaacatgaa

SEQ ID NO: 10738 - DNA, 20 bp, Artificial Sequence
  chemically synthesized
aagtagggccaacatgaaag

SEQ ID NO: 10739 - DNA, 20 bp, Artificial Sequence
  chemically synthesized
tagggccaacatgaaaggag

SEQ ID NO: 10740 - DNA, 20 bp, Artificial Sequence
  chemically synthesized
agggccaacatgaaaggagt

SEQ ID NO: 10741 - DNA, 20 bp, Artificial Sequence
  chemically synthesized
gggccaacatgaaaggagta

SEQ ID NO: 10742 - DNA, 20 bp, Artificial Sequence
  chemically synthesized
gccaacatgaaaggagtagg

SEQ ID NO: 10743 - DNA, 20 bp, Artificial Sequence
  chemically synthesized
atgaaaggagtagggagaaa

SEQ ID NO: 10744 - DNA, 20 bp, Artificial Sequence
  chemically synthesized
gaaaggagtagggagaaaaa

SEQ ID NO: 10745 - DNA, 20 bp, Artificial Sequence
  chemically synthesized
tagggagaaaaagagataac

SEQ ID NO: 10746 - DNA, 20 bp, Artificial Sequence
  chemically synthesized
ctgatcctgccaacacctgt

SEQ ID NO: 10747 - DNA, 20 bp, Artificial Sequence
  chemically synthesized
tcctgccaacacctgtgaga

SEQ ID NO: 10748 - DNA, 20 bp, Artificial Sequence
  chemically synthesized
aacctaatttacatttgaca

SEQ ID NO: 10749 - DNA, 20 bp, Artificial Sequence
  chemically synthesized
aatttacatttgacaaagtt

SEQ ID NO: 10750 - DNA, 20 bp, Artificial Sequence
  chemically synthesized
atttacatttgacaaagtta

SEQ ID NO: 10751 - DNA, 20 bp, Artificial Sequence
  chemically synthesized
catttgacaaagttaaggtt

SEQ ID NO: 10752 - DNA, 20 bp, Artificial Sequence
  chemically synthesized
tttgacaaagttaaggttca

SEQ ID NO: 10753 - DNA, 20 bp, Artificial Sequence
  chemically synthesized
agagcttgtgtgacttgtcc

SEQ ID NO: 10754 - DNA, 20 bp, Artificial Sequence
  chemically synthesized
gagcttgtgtgacttgtcca

SEQ ID NO: 10755 - DNA, 20 bp, Artificial Sequence
  chemically synthesized
gtgtgacttgtccaaggtca

SEQ ID NO: 10756 - DNA, 20 bp, Artificial Sequence
  chemically synthesized
tgtgacttgtccaaggtcac

SEQ ID NO: 10757 - DNA, 20 bp, Artificial Sequence
  chemically synthesized
cttgtccaaggtcacaggtc

SEQ ID NO: 10758 - DNA, 20 bp, Artificial Sequence
  chemically synthesized
tgtccaaggtcacaggtcta

SEQ ID NO: 10759 - DNA, 20 bp, Artificial Sequence
  chemically synthesized
gtccaaggtcacaggtctag

SEQ ID NO: 10760 - DNA, 20 bp, Artificial Sequence
  chemically synthesized
ccaaggtcacaggtctagag

SEQ ID NO: 10761 - DNA, 20 bp, Artificial Sequence
  chemically synthesized
caaggtcacaggtctagagg

SEQ ID NO: 10762 - DNA, 20 bp, Artificial Sequence
  chemically synthesized
ggtcacaggtctagaggagg

SEQ ID NO: 10763 - DNA, 20 bp, Artificial Sequence
  chemically synthesized
ttctgtctgatctgattcta

SEQ ID NO: 10764 - DNA, 20 bp, Artificial Sequence
  chemically synthesized
tttcactcaaccacactgta

SEQ ID NO: 10765 - DNA, 20 bp, Artificial Sequence
  chemically synthesized
actcaaccacactgtacagt

SEQ ID NO: 10766 - DNA, 20 bp, Artificial Sequence
  chemically synthesized
gtacagtcagctctccttgt

SEQ ID NO: 10767 - DNA, 20 bp, Artificial Sequence
  chemically synthesized
agctctccttgtgagttcca

SEQ ID NO: 10768 - DNA, 20 bp, Artificial Sequence
  chemically synthesized
ccttgtgagttccacagcca

SEQ ID NO: 10769 - DNA, 20 bp, Artificial Sequence
  chemically synthesized
gccacagattcaattaactg

SEQ ID NO: 10770 - DNA, 20 bp, Artificial Sequence
  chemically synthesized
actgcagatcaaaaatattc

SEQ ID NO: 10771 - DNA, 20 bp, Artificial Sequence
  chemically synthesized
aaaaatattcaagaaaaaaa

SEQ ID NO: 10772 - DNA, 20 bp, Artificial Sequence
  chemically synthesized
atattcaagaaaaaaatgga

SEQ ID NO: 10773 - DNA, 20 bp, Artificial Sequence
  chemically synthesized
gcatctctactgaacatgta

SEQ ID NO: 10774 - DNA, 20 bp, Artificial Sequence
  chemically synthesized
tcattattccctaaacaata

SEQ ID NO: 10775 - DNA, 20 bp, Artificial Sequence
  chemically synthesized
cagcataacaactatttaca

SEQ ID NO: 10776 - DNA, 20 bp, Artificial Sequence
  chemically synthesized
acatagcatttacattgtat

SEQ ID NO: 10777 - DNA, 20 bp, Artificial Sequence
  chemically synthesized
tttacattgtattagctatt

SEQ ID NO: 10778 - DNA, 20 bp, Artificial Sequence
  chemically synthesized
tacattgtattagctattaa

SEQ ID NO: 10779 - DNA, 20 bp, Artificial Sequence
  chemically synthesized
attagctattaagagaaacc

SEQ ID NO: 10780 - DNA, 20 bp, Artificial Sequence
  chemically synthesized
tagctattaagagaaaccta

SEQ ID NO: 10781 - DNA, 20 bp, Artificial Sequence
  chemically synthesized
agaaacctagagatgattta

SEQ ID NO: 10782 - DNA, 20 bp, Artificial Sequence
  chemically synthesized
tagagatgatttaaagtaca

SEQ ID NO: 10783 - DNA, 20 bp, Artificial Sequence
  chemically synthesized
agagatgatttaaagtacaa

SEQ ID NO: 10784 - DNA, 20 bp, Artificial Sequence
  chemically synthesized
agatgatttaaagtacaaag

SEQ ID NO: 10785 - DNA, 20 bp, Artificial Sequence
  chemically synthesized
gatgatttaaagtacaaagg

SEQ ID NO: 10786 - DNA, 20 bp, Artificial Sequence
  chemically synthesized
agtacaaaggaggatgtgtt

SEQ ID NO: 10787 - DNA, 20 bp, Artificial Sequence
  chemically synthesized
gtacaaaggaggatgtgttt

SEQ ID NO: 10788 - DNA, 20 bp, Artificial Sequence
  chemically synthesized
gtgtttaggttatatgcaaa

SEQ ID NO: 10789 - DNA, 20 bp, Artificial Sequence
  chemically synthesized
ttaggttatatgcaaatagt

SEQ ID NO: 10790 - DNA, 20 bp, Artificial Sequence
  chemically synthesized
atagtaagccatttttatat

SEQ ID NO: 10791 - DNA, 20 bp, Artificial Sequence
  chemically synthesized
agtaagccatttttatatcg

SEQ ID NO: 10792 - DNA, 20 bp, Artificial Sequence
  chemically synthesized
catttttatatcggagactt

SEQ ID NO: 10793 - DNA, 20 bp, Artificial Sequence
  chemically synthesized
atcggagacttgagcatcca

SEQ ID NO: 10794 - DNA, 20 bp, Artificial Sequence
  chemically synthesized
tccacagatcttgatatttg

SEQ ID NO: 10795 - DNA, 20 bp, Artificial Sequence
  chemically synthesized
ccacagatcttgatatttgc

SEQ ID NO: 10796 - DNA, 20 bp, Artificial Sequence
  chemically synthesized
cacagatcttgatatttgca

SEQ ID NO: 10797 - DNA, 20 bp, Artificial Sequence
  chemically synthesized
acagatcttgatatttgcag

SEQ ID NO: 10798 - DNA, 20 bp, Artificial Sequence
  chemically synthesized
cagatcttgatatttgcagg

SEQ ID NO: 10799 - DNA, 20 bp, Artificial Sequence
  chemically synthesized
gtcttgccaccaattttcca

SEQ ID NO: 10800 - DNA, 20 bp, Artificial Sequence
  chemically synthesized
accaattttccatggatact

SEQ ID NO: 10801 - DNA, 20 bp, Artificial Sequence
  chemically synthesized
ccaattttccatggatactg

SEQ ID NO: 10802 - DNA, 20 bp, Artificial Sequence
  chemically synthesized
tactgaggaacgactgtaaa

SEQ ID NO: 10803 - DNA, 20 bp, Artificial Sequence
  chemically synthesized
ggaacgactgtaaatggatg

SEQ ID NO: 10804 - DNA, 20 bp, Artificial Sequence
  chemically synthesized
gaacgactgtaaatggatgc

SEQ ID NO: 10805 - DNA, 20 bp, Artificial Sequence
  chemically synthesized
actgtaaatggatgcaggca

SEQ ID NO: 10806 - DNA, 20 bp, Artificial Sequence
  chemically synthesized
atgcaggcatggatgctatt

SEQ ID NO: 10807 - DNA, 20 bp, Artificial Sequence
  chemically synthesized
tgcaggcatggatgctattt

SEQ ID NO: 10808 - DNA, 20 bp, Artificial Sequence
  chemically synthesized
caggcatggatgctatttag

SEQ ID NO: 10809 - DNA, 20 bp, Artificial Sequence
  chemically synthesized
ggatgctatttaggagtgtc

SEQ ID NO: 10810 - DNA, 20 bp, Artificial Sequence
  chemically synthesized
gatgctatttaggagtgtcc

SEQ ID NO: 10811 - DNA, 20 bp, Artificial Sequence
  chemically synthesized
atgctatttaggagtgtcca

SEQ ID NO: 10812 - DNA, 20 bp, Artificial Sequence
  chemically synthesized
atttaggagtgtccagggcc

SEQ ID NO: 10813 - DNA, 20 bp, Artificial Sequence
  chemically synthesized
gtgtccagggccaagtaaat

SEQ ID NO: 10814 - DNA, 20 bp, Artificial Sequence
  chemically synthesized
ggccaagtaaatgagttgct

SEQ ID NO: 10815 - DNA, 20 bp, Artificial Sequence
  chemically synthesized
caagtaaatgagttgctgag

SEQ ID NO: 10816 - DNA, 20 bp, Artificial Sequence
  chemically synthesized
agtaaatgagttgctgagca

SEQ ID NO: 10817 - DNA, 20 bp, Artificial Sequence
  chemically synthesized
taaatgagttgctgagcaga

SEQ ID NO: 10818 - DNA, 20 bp, Artificial Sequence
  chemically synthesized
aaatgagttgctgagcagag

SEQ ID NO: 10819 - DNA, 20 bp, Artificial Sequence
  chemically synthesized
tgagttgctgagcagagagg

SEQ ID NO: 10820 - DNA, 20 bp, Artificial Sequence
  chemically synthesized
gagttgctgagcagagaggt

SEQ ID NO: 10821 - DNA, 20 bp, Artificial Sequence
  chemically synthesized
ttgctgagcagagaggtggg

SEQ ID NO: 10822 - DNA, 20 bp, Artificial Sequence
  chemically synthesized
gctgagcagagaggtgggtg

SEQ ID NO: 10823 - DNA, 20 bp, Artificial Sequence
  chemically synthesized
ctgagcagagaggtgggtgg

SEQ ID NO: 10824 - DNA, 20 bp, Artificial Sequence
  chemically synthesized
gagaggtgggtggaggctgt

SEQ ID NO: 10825 - DNA, 20 bp, Artificial Sequence
  chemically synthesized
agaggtgggtggaggctgtg

SEQ ID NO: 10826 - DNA, 20 bp, Artificial Sequence
  chemically synthesized
ggctgtgaggcatcaatatg

SEQ ID NO: 10827 - DNA, 20 bp, Artificial Sequence
  chemically synthesized
tgtgaggcatcaatatgtgg

SEQ ID NO: 10828 - DNA, 20 bp, Artificial Sequence
  chemically synthesized
ggtggcatccatctgcattt

SEQ ID NO: 10829 - DNA, 20 bp, Artificial Sequence
  chemically synthesized
ttggtgatttttttccttca

SEQ ID NO: 10830 - DNA, 20 bp, Artificial Sequence
  chemically synthesized
tttttttccttcacagtcct

SEQ ID NO: 10831 - DNA, 20 bp, Artificial Sequence
  chemically synthesized
cttcacagtcctcggctgtc

SEQ ID NO: 10832 - DNA, 20 bp, Artificial Sequence
  chemically synthesized
ttcacagtcctcggctgtct

SEQ ID NO: 10833 - DNA, 20 bp, Artificial Sequence
  chemically synthesized
acagtcctcggctgtctggg

SEQ ID NO: 10834 - DNA, 20 bp, Artificial Sequence
  chemically synthesized
agtcctcggctgtctgggaa

SEQ ID NO: 10835 - DNA, 20 bp, Artificial Sequence
  chemically synthesized
cctcggctgtctgggaagag

SEQ ID NO: 10836 - DNA, 20 bp, Artificial Sequence
  chemically synthesized
ctcggctgtctgggaagaga

SEQ ID NO: 10837 - DNA, 20 bp, Artificial Sequence
  chemically synthesized
tgtctgggaagagaaggatg

SEQ ID NO: 10838 - DNA, 20 bp, Artificial Sequence
  chemically synthesized
gtctgggaagagaaggatga

SEQ ID NO: 10839 - DNA, 20 bp, Artificial Sequence
  chemically synthesized
tgggaagagaaggatgaagg

SEQ ID NO: 10840 - DNA, 20 bp, Artificial Sequence
  chemically synthesized
aagagaaggatgaaggcaga

SEQ ID NO: 10841 - DNA, 20 bp, Artificial Sequence
  chemically synthesized
ggcagatggctgctccaatt

SEQ ID NO: 10842 - DNA, 20 bp, Artificial Sequence
  chemically synthesized
gcagatggctgctccaattt

SEQ ID NO: 10843 - DNA, 20 bp, Artificial Sequence
  chemically synthesized
cagatggctgctccaattta

SEQ ID NO: 10844 - DNA, 20 bp, Artificial Sequence
  chemically synthesized
agatggctgctccaatttag

SEQ ID NO: 10845 - DNA, 20 bp, Artificial Sequence
  chemically synthesized
ggctgctccaatttaggggc

SEQ ID NO: 10846 - DNA, 20 bp, Artificial Sequence
  chemically synthesized
gctgctccaatttaggggct

SEQ ID NO: 10847 - DNA, 20 bp, Artificial Sequence
  chemically synthesized
caatttaggggctaggattg

SEQ ID NO: 10848 - DNA, 20 bp, Artificial Sequence
  chemically synthesized
aatttaggggctaggattgc

SEQ ID NO: 10849 - DNA, 20 bp, Artificial Sequence
  chemically synthesized
atttaggggctaggattgca

SEQ ID NO: 10850 - DNA, 20 bp, Artificial Sequence
  chemically synthesized
taggggctaggattgcaggg

SEQ ID NO: 10851 - DNA, 20 bp, Artificial Sequence
  chemically synthesized
aggggctaggattgcagggt

SEQ ID NO: 10852 - DNA, 20 bp, Artificial Sequence
  chemically synthesized
ctaggattgcagggtgggca

SEQ ID NO: 10853 - DNA, 20 bp, Artificial Sequence
  chemically synthesized
gtgggcacagcattgcaaac

SEQ ID NO: 10854 - DNA, 20 bp, Artificial Sequence
  chemically synthesized
cacagcattgcaaacgagtg

SEQ ID NO: 10855 - DNA, 20 bp, Artificial Sequence
  chemically synthesized
acagcattgcaaacgagtga

SEQ ID NO: 10856 - DNA, 20 bp, Artificial Sequence
  chemically synthesized
gcaaacgagtgaaggaaatt

SEQ ID NO: 10857 - DNA, 20 bp, Artificial Sequence
  chemically synthesized
gtgaaggaaattgagaaata

SEQ ID NO: 10858 - DNA, 20 bp, Artificial Sequence
  chemically synthesized
attgagaaatatggccaatg

SEQ ID NO: 10859 - DNA, 20 bp, Artificial Sequence
  chemically synthesized
tgagaaatatggccaatgaa

SEQ ID NO: 10860 - DNA, 20 bp, Artificial Sequence
  chemically synthesized
atatggccaatgaagagttg

SEQ ID NO: 10861 - DNA, 20 bp, Artificial Sequence
  chemically synthesized
atggccaatgaagagttgaa

SEQ ID NO: 10862 - DNA, 20 bp, Artificial Sequence
  chemically synthesized
ggccaatgaagagttgaaga

SEQ ID NO: 10863 - DNA, 20 bp, Artificial Sequence
  chemically synthesized
gccaatgaagagttgaagag

SEQ ID NO: 10864 - DNA, 20 bp, Artificial Sequence
  chemically synthesized
tgaagagttgaagagaggcc

SEQ ID NO: 10865 - DNA, 20 bp, Artificial Sequence
  chemically synthesized
agttgaagagaggcctggca

SEQ ID NO: 10866 - DNA, 20 bp, Artificial Sequence
  chemically synthesized
tgaagagaggcctggcatgg

SEQ ID NO: 10867 - DNA, 20 bp, Artificial Sequence
  chemically synthesized
gtggctcacacctataatcc

SEQ ID NO: 10868 - DNA, 20 bp, Artificial Sequence
  chemically synthesized
acctataatcccagcacttt

SEQ ID NO: 10869 - DNA, 20 bp, Artificial Sequence
  chemically synthesized
ctataatcccagcactttca

SEQ ID NO: 10870 - DNA, 20 bp, Artificial Sequence
  chemically synthesized
tataatcccagcactttcag

SEQ ID NO: 10871 - DNA, 20 bp, Artificial Sequence
  chemically synthesized
tcccagcactttcagaggcc

SEQ ID NO: 10872 - DNA, 20 bp, Artificial Sequence
  chemically synthesized
cccagcactttcagaggccc

SEQ ID NO: 10873 - DNA, 20 bp, Artificial Sequence
  chemically synthesized
agcactttcagaggcccagg

SEQ ID NO: 10874 - DNA, 20 bp, Artificial Sequence
  chemically synthesized
gcactttcagaggcccaggc

SEQ ID NO: 10875 - DNA, 20 bp, Artificial Sequence
  chemically synthesized
ctttcagaggcccaggcagg

SEQ ID NO: 10876 - DNA, 20 bp, Artificial Sequence
  chemically synthesized
cccaggcaggcagatcactt

SEQ ID NO: 10877 - DNA, 20 bp, Artificial Sequence
  chemically synthesized
ccaggcaggcagatcacttg

SEQ ID NO: 10878 - DNA, 20 bp, Artificial Sequence
  chemically synthesized
gcaggcagatcacttgaggt

SEQ ID NO: 10879 - DNA, 20 bp, Artificial Sequence
  chemically synthesized
caggcagatcacttgaggtc

SEQ ID NO: 10880 - DNA, 20 bp, Artificial Sequence
  chemically synthesized
ggcagatcacttgaggtcag

SEQ ID NO: 10881 - DNA, 20 bp, Artificial Sequence
  chemically synthesized
tgaggtcaggagttcgacac

SEQ ID NO: 10882 - DNA, 20 bp, Artificial Sequence
  chemically synthesized
tcaggagttcgacaccagcc

SEQ ID NO: 10883 - DNA, 20 bp, Artificial Sequence
  chemically synthesized
tcgacaccagcctggccaac

SEQ ID NO: 10884 - DNA, 20 bp, Artificial Sequence
  chemically synthesized
cgacaccagcctggccaaca

SEQ ID NO: 10885 - DNA, 20 bp, Artificial Sequence
  chemically synthesized
gcctggccaacaaggtgaaa

SEQ ID NO: 10886 - DNA, 20 bp, Artificial Sequence
  chemically synthesized
aaggtgaaatggtgaaaccc

SEQ ID NO: 10887 - DNA, 20 bp, Artificial Sequence
  chemically synthesized
tttactaaaaatacaaaaat

SEQ ID NO: 10888 - DNA, 20 bp, Artificial Sequence
  chemically synthesized
ctaaaaatacaaaaattagc

SEQ ID NO: 10889 - DNA, 20 bp, Artificial Sequence
  chemically synthesized
taaaaatacaaaaattagct

SEQ ID NO: 10890 - DNA, 20 bp, Artificial Sequence
  chemically synthesized
atacaaaaattagctgggca

SEQ ID NO: 10891 - DNA, 20 bp, Artificial Sequence
  chemically synthesized
caaaaattagctgggcatgg

SEQ ID NO: 10892 - DNA, 20 bp, Artificial Sequence
  chemically synthesized
aaattagctgggcatggtgg

SEQ ID NO: 10893 - DNA, 20 bp, Artificial Sequence
  chemically synthesized
aattagctgggcatggtggc

SEQ ID NO: 10894 - DNA, 20 bp, Artificial Sequence
  chemically synthesized
gtggcgggtgcctgtaatcc

SEQ ID NO: 10895 - DNA, 20 bp, Artificial Sequence
  chemically synthesized
tgcctgtaatcccagctact

SEQ ID NO: 10896 - DNA, 20 bp, Artificial Sequence
  chemically synthesized
gcctgtaatcccagctactt

SEQ ID NO: 10897 - DNA, 20 bp, Artificial Sequence
  chemically synthesized
ctgtaatcccagctacttgg

SEQ ID NO: 10898 - DNA, 20 bp, Artificial Sequence
  chemically synthesized
tgtaatcccagctacttggg

SEQ ID NO: 10899 - DNA, 20 bp, Artificial Sequence
  chemically synthesized
tcccagctacttgggaggct

SEQ ID NO: 10900 - DNA, 20 bp, Artificial Sequence
  chemically synthesized
cccagctacttgggaggctg

SEQ ID NO: 10901 - DNA, 20 bp, Artificial Sequence
  chemically synthesized
agctacttgggaggctgagg

SEQ ID NO: 10902 - DNA, 20 bp, Artificial Sequence
  chemically synthesized
gctacttgggaggctgaggc

SEQ ID NO: 10903 - DNA, 20 bp, Artificial Sequence
  chemically synthesized
tacttgggaggctgaggcag

SEQ ID NO: 10904 - DNA, 20 bp, Artificial Sequence
  chemically synthesized
gggaggctgaggcaggagaa

SEQ ID NO: 10905 - DNA, 20 bp, Artificial Sequence
  chemically synthesized
gcaggagaatagcttgaacc

SEQ ID NO: 10906 - DNA, 20 bp, Artificial Sequence
  chemically synthesized
caggagaatagcttgaacct

SEQ ID NO: 10907 - DNA, 20 bp, Artificial Sequence
  chemically synthesized
ggagaatagcttgaacctgg

SEQ ID NO: 10908 - DNA, 20 bp, Artificial Sequence
  chemically synthesized
aatagcttgaacctgggaga

SEQ ID NO: 10909 - DNA, 20 bp, Artificial Sequence
  chemically synthesized
tagcttgaacctgggagatg

SEQ ID NO: 10910 - DNA, 20 bp, Artificial Sequence
  chemically synthesized
agcttgaacctgggagatgg

SEQ ID NO: 10911 - DNA, 20 bp, Artificial Sequence
  chemically synthesized
aacctgggagatggaggttg

SEQ ID NO: 10912 - DNA, 20 bp, Artificial Sequence
  chemically synthesized
tgggagatggaggttgcagt

SEQ ID NO: 10913 - DNA, 20 bp, Artificial Sequence
  chemically synthesized
gatggaggttgcagtgagct

SEQ ID NO: 10914 - DNA, 20 bp, Artificial Sequence
  chemically synthesized
gagatcgcaccactgcactc

SEQ ID NO: 10915 - DNA, 20 bp, Artificial Sequence
  chemically synthesized
cgcaccactgcactccagcc

SEQ ID NO: 10916 - DNA, 20 bp, Artificial Sequence
  chemically synthesized
gcaccactgcactccagcct

SEQ ID NO: 10917 - DNA, 20 bp, Artificial Sequence
  chemically synthesized
ctgcactccagcctgggcga

SEQ ID NO: 10918 - DNA, 20 bp, Artificial Sequence
  chemically synthesized
gcactccagcctgggcgaca

SEQ ID NO: 10919 - DNA, 20 bp, Artificial Sequence
  chemically synthesized
tccagcctgggcgacagagc

SEQ ID NO: 10920 - DNA, 20 bp, Artificial Sequence
  chemically synthesized
caagactctgtcaaaaaaaa

SEQ ID NO: 10921 - DNA, 20 bp, Artificial Sequence
  chemically synthesized
agactctgtcaaaaaaaaaa

SEQ ID NO: 10922 - DNA, 20 bp, Artificial Sequence
  chemically synthesized
tgtcaaaaaaaaaagagttg

SEQ ID NO: 10923 - DNA, 20 bp, Artificial Sequence
  chemically synthesized
tcaaaaaaaaaagagttgaa

SEQ ID NO: 10924 - DNA, 20 bp, Artificial Sequence
  chemically synthesized
aaaaaagagttgaagagaaa

SEQ ID NO: 10925 - DNA, 20 bp, Artificial Sequence
  chemically synthesized
agagttgaagagaaaaagtc

SEQ ID NO: 10926 - DNA, 20 bp, Artificial Sequence
  chemically synthesized
gagttgaagagaaaaagtct

SEQ ID NO: 10927 - DNA, 20 bp, Artificial Sequence
  chemically synthesized
aaaagtctaggctaaattca

SEQ ID NO: 10928 - DNA, 20 bp, Artificial Sequence
  chemically synthesized
aggctaaattcaaagaaaaa

SEQ ID NO: 10929 - DNA, 20 bp, Artificial Sequence
  chemically synthesized
taaattcaaagaaaaaaagt

SEQ ID NO: 10930 - DNA, 20 bp, Artificial Sequence
  chemically synthesized
aagaaaaaaagtgagcccaa

SEQ ID NO: 10931 - DNA, 20 bp, Artificial Sequence
  chemically synthesized
agaaaaaaagtgagcccaaa

SEQ ID NO: 10932 - DNA, 20 bp, Artificial Sequence
  chemically synthesized
gtgagcccaaaaggaacttg

SEQ ID NO: 10933 - DNA, 20 bp, Artificial Sequence
  chemically synthesized
gagcccaaaaggaacttgca

SEQ ID NO: 10934 - DNA, 20 bp, Artificial Sequence
  chemically synthesized
ccaaaaggaacttgcagagc

SEQ ID NO: 10935 - DNA, 20 bp, Artificial Sequence
  chemically synthesized
caaaaggaacttgcagagca

SEQ ID NO: 10936 - DNA, 20 bp, Artificial Sequence
  chemically synthesized
aaaaggaacttgcagagcaa

SEQ ID NO: 10937 - DNA, 20 bp, Artificial Sequence
  chemically synthesized
gaacttgcagagcaagggaa

SEQ ID NO: 10938 - DNA, 20 bp, Artificial Sequence
  chemically synthesized
cttgcagagcaagggaaaag

SEQ ID NO: 10939 - DNA, 20 bp, Artificial Sequence
  chemically synthesized
ttgcagagcaagggaaaagc

SEQ ID NO: 10940 - DNA, 20 bp, Artificial Sequence
  chemically synthesized
tgcagagcaagggaaaagca

SEQ ID NO: 10941 - DNA, 20 bp, Artificial Sequence
  chemically synthesized
aagggaaaagcagggatgtc

SEQ ID NO: 10942 - DNA, 20 bp, Artificial Sequence
  chemically synthesized
agggaaaagcagggatgtca

SEQ ID NO: 10943 - DNA, 20 bp, Artificial Sequence
  chemically synthesized
gggaaaagcagggatgtcaa

SEQ ID NO: 10944 - DNA, 20 bp, Artificial Sequence
  chemically synthesized
aagcagggatgtcaagggac

SEQ ID NO: 10945 - DNA, 20 bp, Artificial Sequence
  chemically synthesized
agggactagaacactccata

SEQ ID NO: 10946 - DNA, 20 bp, Artificial Sequence
  chemically synthesized
agaacactccataaagtgaa

SEQ ID NO: 10947 - DNA, 20 bp, Artificial Sequence
  chemically synthesized
tgaacagctgcaatgaaaat

SEQ ID NO: 10948 - DNA, 20 bp, Artificial Sequence
  chemically synthesized
gaacagctgcaatgaaaata

SEQ ID NO: 10949 - DNA, 20 bp, Artificial Sequence
  chemically synthesized
aacagctgcaatgaaaataa

SEQ ID NO: 10950 - DNA, 20 bp, Artificial Sequence
  chemically synthesized
agctgcaatgaaaataaggg

SEQ ID NO: 10951 - DNA, 20 bp, Artificial Sequence
  chemically synthesized
gcaatgaaaataagggaaga

SEQ ID NO: 10952 - DNA, 20 bp, Artificial Sequence
  chemically synthesized
gaaaataagggaagaaagtt

SEQ ID NO: 10953 - DNA, 20 bp, Artificial Sequence
  chemically synthesized
ctttcctttctcttcctttt

SEQ ID NO: 10954 - DNA, 20 bp, Artificial Sequence
  chemically synthesized
ttcctttctcttcctttttg

SEQ ID NO: 10955 - DNA, 20 bp, Artificial Sequence
  chemically synthesized
tcttcctttttggagttaat

SEQ ID NO: 10956 - DNA, 20 bp, Artificial Sequence
  chemically synthesized
cttcctttttggagttaatc

SEQ ID NO: 10957 - DNA, 20 bp, Artificial Sequence
  chemically synthesized
cctttttggagttaatcagg

SEQ ID NO: 10958 - DNA, 20 bp, Artificial Sequence
  chemically synthesized
ttttggagttaatcaggaag

SEQ ID NO: 10959 - DNA, 20 bp, Artificial Sequence
  chemically synthesized
ggaagtagtcccaaataccc

SEQ ID NO: 10960 - DNA, 20 bp, Artificial Sequence
  chemically synthesized
gtagtcccaaataccccaga

SEQ ID NO: 10961 - DNA, 20 bp, Artificial Sequence
  chemically synthesized
ccccagaaagttcatcttat

SEQ ID NO: 10962 - DNA, 20 bp, Artificial Sequence
  chemically synthesized
aagttcatcttataagccct

SEQ ID NO: 10963 - DNA, 20 bp, Artificial Sequence
  chemically synthesized
tataagcccttggtcctctt

SEQ ID NO: 10964 - DNA, 20 bp, Artificial Sequence
  chemically synthesized
agcccttggtcctcttgaga

SEQ ID NO: 10965 - DNA, 20 bp, Artificial Sequence
  chemically synthesized
tggtcctcttgagatggtat

SEQ ID NO: 10966 - DNA, 20 bp, Artificial Sequence
  chemically synthesized
gatggtatcagatatattgc

SEQ ID NO: 10967 - DNA, 20 bp, Artificial Sequence
  chemically synthesized
gatatattgctagacccttg

SEQ ID NO: 10968 - DNA, 20 bp, Artificial Sequence
  chemically synthesized
tattgctagacccttgaaga

SEQ ID NO: 10969 - DNA, 20 bp, Artificial Sequence
  chemically synthesized
attgctagacccttgaagaa

SEQ ID NO: 10970 - DNA, 20 bp, Artificial Sequence
  chemically synthesized
cttgaagaaaggaacaactc

SEQ ID NO: 10971 - DNA, 20 bp, Artificial Sequence
  chemically synthesized
ttgaagaaaggaacaactcc

SEQ ID NO: 10972 - DNA, 20 bp, Artificial Sequence
  chemically synthesized
acaactccaggcaacttctt

SEQ ID NO: 10973 - DNA, 20 bp, Artificial Sequence
  chemically synthesized
caaacacatgtgtgtgtata

SEQ ID NO: 10974 - DNA, 20 bp, Artificial Sequence
  chemically synthesized
agccatgcattccttaacaa

SEQ ID NO: 10975 - DNA, 20 bp, Artificial Sequence
  chemically synthesized
gccatgcattccttaacaat

SEQ ID NO: 10976 - DNA, 20 bp, Artificial Sequence
  chemically synthesized
ccatgcattccttaacaatg

SEQ ID NO: 10977 - DNA, 20 bp, Artificial Sequence
  chemically synthesized
taacaatggggatatattct

SEQ ID NO: 10978 - DNA, 20 bp, Artificial Sequence
  chemically synthesized
attctgagaaatgtgtcatt

SEQ ID NO: 10979 - DNA, 20 bp, Artificial Sequence
  chemically synthesized
tcatcattgtgcgaacataa

SEQ ID NO: 10980 - DNA, 20 bp, Artificial Sequence
  chemically synthesized
atcattgtgcgaacataata

SEQ ID NO: 10981 - DNA, 20 bp, Artificial Sequence
  chemically synthesized
tgtacttacctaaacctaaa

SEQ ID NO: 10982 - DNA, 20 bp, Artificial Sequence
  chemically synthesized
ttacctaaacctaaatggta

SEQ ID NO: 10983 - DNA, 20 bp, Artificial Sequence
  chemically synthesized
ggtatagcttactacatacc

SEQ ID NO: 10984 - DNA, 20 bp, Artificial Sequence
  chemically synthesized
gtatagcttactacatacct

SEQ ID NO: 10985 - DNA, 20 bp, Artificial Sequence
  chemically synthesized
atacctaggttgtattgatg

SEQ ID NO: 10986 - DNA, 20 bp, Artificial Sequence
  chemically synthesized
ttgatgtggcctattgctcc

SEQ ID NO: 10987 - DNA, 20 bp, Artificial Sequence
  chemically synthesized
tgatgtggcctattgctcct

SEQ ID NO: 10988 - DNA, 20 bp, Artificial Sequence
  chemically synthesized
gcctattgctcctaggctcc

SEQ ID NO: 10989 - DNA, 20 bp, Artificial Sequence
  chemically synthesized
cctattgctcctaggctcct

SEQ ID NO: 10990 - DNA, 20 bp, Artificial Sequence
  chemically synthesized
tcctgggctgcaaacctgta

SEQ ID NO: 10991 - DNA, 20 bp, Artificial Sequence
  chemically synthesized
tgtgactgtactgaacactg

SEQ ID NO: 10992 - DNA, 20 bp, Artificial Sequence
  chemically synthesized
gtgactgtactgaacactgt

SEQ ID NO: 10993 - DNA, 20 bp, Artificial Sequence
  chemically synthesized
gtactgaacactgtaggcaa

SEQ ID NO: 10994 - DNA, 20 bp, Artificial Sequence
  chemically synthesized
aacactgtaggcaatggtaa

SEQ ID NO: 10995 - DNA, 20 bp, Artificial Sequence
  chemically synthesized
actgtaggcaatggtaacag

SEQ ID NO: 10996 - DNA, 20 bp, Artificial Sequence
  chemically synthesized
ggtatttgtgtatctaaaca

SEQ ID NO: 10997 - DNA, 20 bp, Artificial Sequence
  chemically synthesized
ttgtgtatctaaacatagaa

SEQ ID NO: 10998 - DNA, 20 bp, Artificial Sequence
  chemically synthesized
tgtgtatctaaacatagaaa

SEQ ID NO: 10999 - DNA, 20 bp, Artificial Sequence
  chemically synthesized
atctaaacatagaaaaggta

SEQ ID NO: 11000 - DNA, 20 bp, Artificial Sequence
  chemically synthesized
gaaaaggtacagtgaaaata

SEQ ID NO: 11001 - DNA, 20 bp, Artificial Sequence
  chemically synthesized
aatacagtattataacctta

SEQ ID NO: 11002 - DNA, 20 bp, Artificial Sequence
  chemically synthesized
atacagtattataaccttat

SEQ ID NO: 11003 - DNA, 20 bp, Artificial Sequence
  chemically synthesized
gggaccactgtcgtataatg

SEQ ID NO: 11004 - DNA, 20 bp, Artificial Sequence
  chemically synthesized
ttgaccaaaatgtcattgtg

SEQ ID NO: 11005 - DNA, 20 bp, Artificial Sequence
  chemically synthesized
tatatgtacacacacacaca

SEQ ID NO: 11006 - DNA, 20 bp, Artificial Sequence
  chemically synthesized
tatgtacacacacacacata

SEQ ID NO: 11007 - DNA, 20 bp, Artificial Sequence
  chemically synthesized
tgtacacacacacacataga

SEQ ID NO: 11008 - DNA, 20 bp, Artificial Sequence
  chemically synthesized
tacacacacacacatagaga

SEQ ID NO: 11009 - DNA, 20 bp, Artificial Sequence
  chemically synthesized
cacacacacacatagagaga

SEQ ID NO: 11010 - DNA, 20 bp, Artificial Sequence
  chemically synthesized
cacacacacatagagagaga

SEQ ID NO: 11011 - DNA, 20 bp, Artificial Sequence
  chemically synthesized
cacacacatagagagagaga

SEQ ID NO: 11012 - DNA, 20 bp, Artificial Sequence
  chemically synthesized
cacacatagagagagagaga

SEQ ID NO: 11013 - DNA, 20 bp, Artificial Sequence
  chemically synthesized
acacatagagagagagagag

SEQ ID NO: 11014 - DNA, 20 bp, Artificial Sequence
  chemically synthesized
acatagagagagagagagag

SEQ ID NO: 11015 - DNA, 20 bp, Artificial Sequence
  chemically synthesized
atagagagagagagagagga

SEQ ID NO: 11016 - DNA, 20 bp, Artificial Sequence
  chemically synthesized
tagagagagagagagaggag

SEQ ID NO: 11017 - DNA, 20 bp, Artificial Sequence
  chemically synthesized
gagagagagagagaggagag

SEQ ID NO: 11018 - DNA, 20 bp, Artificial Sequence
  chemically synthesized
gagagagagagaggagagga

SEQ ID NO: 11019 - DNA, 20 bp, Artificial Sequence
  chemically synthesized
agagagagagaggagaggag

SEQ ID NO: 11020 - DNA, 20 bp, Artificial Sequence
  chemically synthesized
gagagagaggagaggagagg

SEQ ID NO: 11021 - DNA, 20 bp, Artificial Sequence
  chemically synthesized
agagagaggagaggagagga

SEQ ID NO: 11022 - DNA, 20 bp, Artificial Sequence
  chemically synthesized
agagaggagaggagaggaag

SEQ ID NO: 11023 - DNA, 20 bp, Artificial Sequence
  chemically synthesized
gagaggagaggagaggaagg

SEQ ID NO: 11024 - DNA, 20 bp, Artificial Sequence
  chemically synthesized
agaggagaggagaggaagga

SEQ ID NO: 11025 - DNA, 20 bp, Artificial Sequence
  chemically synthesized
aggagaggagaggaaggagg

SEQ ID NO: 11026 - DNA, 20 bp, Artificial Sequence
  chemically synthesized
ggagaggagaggaaggaggg

SEQ ID NO: 11027 - DNA, 20 bp, Artificial Sequence
  chemically synthesized
gagaggagaggaaggaggga

SEQ ID NO: 11028 - DNA, 20 bp, Artificial Sequence
  chemically synthesized
aggagaggaaggagggaggg

SEQ ID NO: 11029 - DNA, 20 bp, Artificial Sequence
  chemically synthesized
ggagaggaaggagggaggga

SEQ ID NO: 11030 - DNA, 20 bp, Artificial Sequence
  chemically synthesized
agaggaaggagggagggaag

SEQ ID NO: 11031 - DNA, 20 bp, Artificial Sequence
  chemically synthesized
agggaaggagaaatatgatt

SEQ ID NO: 11032 - DNA, 20 bp, Artificial Sequence
  chemically synthesized
aaggagaaatatgattcaga

SEQ ID NO: 11033 - DNA, 20 bp, Artificial Sequence
  chemically synthesized
ggagaaatatgattcagata

SEQ ID NO: 11034 - DNA, 20 bp, Artificial Sequence
  chemically synthesized
agatagagacatctatcctc

SEQ ID NO: 11035 - DNA, 20 bp, Artificial Sequence
  chemically synthesized
atagagacatctatcctcca

SEQ ID NO: 11036 - DNA, 20 bp, Artificial Sequence
  chemically synthesized
gacatctatcctccagagtt

SEQ ID NO: 11037 - DNA, 20 bp, Artificial Sequence
  chemically synthesized
acatctatcctccagagttc

SEQ ID NO: 11038 - DNA, 20 bp, Artificial Sequence
  chemically synthesized
atctatcctccagagttcag

SEQ ID NO: 11039 - DNA, 20 bp, Artificial Sequence
  chemically synthesized
agagttcaggagtgtctctt

SEQ ID NO: 11040 - DNA, 20 bp, Artificial Sequence
  chemically synthesized
tcaggagtgtctcttcagac

SEQ ID NO: 11041 - DNA, 20 bp, Artificial Sequence
  chemically synthesized
caggagtgtctcttcagact

SEQ ID NO: 11042 - DNA, 20 bp, Artificial Sequence
  chemically synthesized
gagtgtctcttcagactagg

SEQ ID NO: 11043 - DNA, 20 bp, Artificial Sequence
  chemically synthesized
ctcttcagactaggtagatg

SEQ ID NO: 11044 - DNA, 20 bp, Artificial Sequence
  chemically synthesized
aaaaaacatatcctgaattc

SEQ ID NO: 11045 - DNA, 20 bp, Artificial Sequence
  chemically synthesized
aaaacatatcctgaattcta

SEQ ID NO: 11046 - DNA, 20 bp, Artificial Sequence
  chemically synthesized
aacatatcctgaattctaga

SEQ ID NO: 11047 - DNA, 20 bp, Artificial Sequence
  chemically synthesized
cctataacacttgccaacca

SEQ ID NO: 11048 - DNA, 20 bp, Artificial Sequence
  chemically synthesized
ctataacacttgccaaccaa

SEQ ID NO: 11049 - DNA, 20 bp, Artificial Sequence
  chemically synthesized
attgcttttttaaattaatg

SEQ ID NO: 11050 - DNA, 20 bp, Artificial Sequence
  chemically synthesized
agtgatttttctttaacatc

SEQ ID NO: 11051 - DNA, 20 bp, Artificial Sequence
  chemically synthesized
ttttctttaacatctagtga

SEQ ID NO: 11052 - DNA, 20 bp, Artificial Sequence
  chemically synthesized
taacatctagtgacagacac

SEQ ID NO: 11053 - DNA, 20 bp, Artificial Sequence
  chemically synthesized
aacatctagtgacagacact

SEQ ID NO: 11054 - DNA, 20 bp, Artificial Sequence
  chemically synthesized
acatctagtgacagacactg

SEQ ID NO: 11055 - DNA, 20 bp, Artificial Sequence
  chemically synthesized
agacactggggtcacatttg

SEQ ID NO: 11056 - DNA, 20 bp, Artificial Sequence
  chemically synthesized
actggggtcacatttgcagc

SEQ ID NO: 11057 - DNA, 20 bp, Artificial Sequence
  chemically synthesized
atttgcagctggaccataat

SEQ ID NO: 11058 - DNA, 20 bp, Artificial Sequence
  chemically synthesized
tttgcagctggaccataatt

SEQ ID NO: 11059 - DNA, 20 bp, Artificial Sequence
  chemically synthesized
ataattaggcttctgttctt

SEQ ID NO: 11060 - DNA, 20 bp, Artificial Sequence
  chemically synthesized
taattaggcttctgttcttc

SEQ ID NO: 11061 - DNA, 20 bp, Artificial Sequence
  chemically synthesized
attaggcttctgttcttcag

SEQ ID NO: 11062 - DNA, 20 bp, Artificial Sequence
  chemically synthesized
cttcaggagacatttgttca

SEQ ID NO: 11063 - DNA, 20 bp, Artificial Sequence
  chemically synthesized
gacatttgttcaaagtcatt

SEQ ID NO: 11064 - DNA, 20 bp, Artificial Sequence
  chemically synthesized
acatttgttcaaagtcattt

SEQ ID NO: 11065 - DNA, 20 bp, Artificial Sequence
  chemically synthesized
gggcaaccatattctgaaaa

SEQ ID NO: 11066 - DNA, 20 bp, Artificial Sequence
  chemically synthesized
accatattctgaaaacagcc

SEQ ID NO: 11067 - DNA, 20 bp, Artificial Sequence
  chemically synthesized
tattctgaaaacagcccagc

SEQ ID NO: 11068 - DNA, 20 bp, Artificial Sequence
  chemically synthesized
attctgaaaacagcccagcc

SEQ ID NO: 11069 - DNA, 20 bp, Artificial Sequence
  chemically synthesized
ttctgaaaacagcccagcca

SEQ ID NO: 11070 - DNA, 20 bp, Artificial Sequence
  chemically synthesized
aaacagcccagccagggtga

SEQ ID NO: 11071 - DNA, 20 bp, Artificial Sequence
  chemically synthesized
gggtgatggatcactttgca

SEQ ID NO: 11072 - DNA, 20 bp, Artificial Sequence
  chemically synthesized
actttgcaaagatcctcaat

SEQ ID NO: 11073 - DNA, 20 bp, Artificial Sequence
  chemically synthesized
atcctcaatgagctattttc

SEQ ID NO: 11074 - DNA, 20 bp, Artificial Sequence
  chemically synthesized
gctattttcaagtgatgaca

SEQ ID NO: 11075 - DNA, 20 bp, Artificial Sequence
  chemically synthesized
tcaagtgatgacaaagtgtg

SEQ ID NO: 11076 - DNA, 20 bp, Artificial Sequence
  chemically synthesized
gtgaagttaaccgctcattt

SEQ ID NO: 11077 - DNA, 20 bp, Artificial Sequence
  chemically synthesized
agaactttctttttcatcca

SEQ ID NO: 11078 - DNA, 20 bp, Artificial Sequence
  chemically synthesized
aaagtaaattcaaatatgat

SEQ ID NO: 11079 - DNA, 20 bp, Artificial Sequence
  chemically synthesized
gaaatctgaccttttattac

SEQ ID NO: 11080 - DNA, 20 bp, Artificial Sequence
  chemically synthesized
actggaattctcttgactaa

SEQ ID NO: 11081 - DNA, 20 bp, Artificial Sequence
  chemically synthesized
cctaaatctccatgtgtata

SEQ ID NO: 11082 - DNA, 20 bp, Artificial Sequence
  chemically synthesized
tccatgtgtatacagtactg

SEQ ID NO: 11083 - DNA, 20 bp, Artificial Sequence
  chemically synthesized
ccatgtgtatacagtactgt

SEQ ID NO: 11084 - DNA, 20 bp, Artificial Sequence
  chemically synthesized
acagtactgtgggaacatca

SEQ ID NO: 11085 - DNA, 20 bp, Artificial Sequence
  chemically synthesized
tgtgggaacatcacagattt

SEQ ID NO: 11086 - DNA, 20 bp, Artificial Sequence
  chemically synthesized
gattttggctccatgcccta

SEQ ID NO: 11087 - DNA, 20 bp, Artificial Sequence
  chemically synthesized
ttttggctccatgccctaaa

SEQ ID NO: 11088 - DNA, 20 bp, Artificial Sequence
  chemically synthesized
tccatgccctaaagagaaat

SEQ ID NO: 11089 - DNA, 20 bp, Artificial Sequence
  chemically synthesized
cctaaagagaaattggcttt

SEQ ID NO: 11090 - DNA, 20 bp, Artificial Sequence
  chemically synthesized
aaattggctttcagattatt

SEQ ID NO: 11091 - DNA, 20 bp, Artificial Sequence
  chemically synthesized
gattatttggattaaaaaca

SEQ ID NO: 11092 - DNA, 20 bp, Artificial Sequence
  chemically synthesized
ttaaaaacaaagactttctt

SEQ ID NO: 11093 - DNA, 20 bp, Artificial Sequence
  chemically synthesized
aaaaacaaagactttcttaa

SEQ ID NO: 11094 - DNA, 20 bp, Artificial Sequence
  chemically synthesized
tttcttttttgctaaaacta

SEQ ID NO: 11095 - DNA, 20 bp, Artificial Sequence
  chemically synthesized
agaattattcttttacattt

SEQ ID NO: 11096 - DNA, 20 bp, Artificial Sequence
  chemically synthesized
acgccaacaaaattctgaat

SEQ ID NO: 11097 - DNA, 20 bp, Artificial Sequence
  chemically synthesized
acaaaattctgaatcggcca

SEQ ID NO: 11098 - DNA, 20 bp, Artificial Sequence
  chemically synthesized
aaaattctgaatcggccaaa

SEQ ID NO: 11099 - DNA, 20 bp, Artificial Sequence
  chemically synthesized
aaattctgaatcggccaaag

SEQ ID NO: 11100 - DNA, 20 bp, Artificial Sequence
  chemically synthesized
tcggccaaagaggtataatt

SEQ ID NO: 11101 - DNA, 20 bp, Artificial Sequence
  chemically synthesized
cggccaaagaggtataattc

SEQ ID NO: 11102 - DNA, 20 bp, Artificial Sequence
  chemically synthesized
gaggtataattcaggtaaat

SEQ ID NO: 11103 - DNA, 20 bp, Artificial Sequence
  chemically synthesized
gtataattcaggtaaattgg

SEQ ID NO: 11104 - DNA, 20 bp, Artificial Sequence
  chemically synthesized
ataattcaggtaaattggaa

SEQ ID NO: 11105 - DNA, 20 bp, Artificial Sequence
  chemically synthesized
taaattggaagagtttgttc

SEQ ID NO: 11106 - DNA, 20 bp, Artificial Sequence
  chemically synthesized
aaattggaagagtttgttca

SEQ ID NO: 11107 - DNA, 20 bp, Artificial Sequence
  chemically synthesized
aattggaagagtttgttcaa

SEQ ID NO: 11108 - DNA, 20 bp, Artificial Sequence
  chemically synthesized
agtttgttcaagggaacctt

SEQ ID NO: 11109 - DNA, 20 bp, Artificial Sequence
  chemically synthesized
tttgttcaagggaaccttga

SEQ ID NO: 11110 - DNA, 20 bp, Artificial Sequence
  chemically synthesized
tgttcaagggaaccttgaga

SEQ ID NO: 11111 - DNA, 20 bp, Artificial Sequence
  chemically synthesized
gaaccttgagagagaatgta

SEQ ID NO: 11112 - DNA, 20 bp, Artificial Sequence
  chemically synthesized
ccttgagagagaatgtatgg

SEQ ID NO: 11113 - DNA, 20 bp, Artificial Sequence
  chemically synthesized
agagagaatgtatggaagaa

SEQ ID NO: 11114 - DNA, 20 bp, Artificial Sequence
  chemically synthesized
gaatgtatggaagaaaagtg

SEQ ID NO: 11115 - DNA, 20 bp, Artificial Sequence
  chemically synthesized
ggaagaaaagtgtagttttg

SEQ ID NO: 11116 - DNA, 20 bp, Artificial Sequence
  chemically synthesized
agaaaagtgtagttttgaag

SEQ ID NO: 11117 - DNA, 20 bp, Artificial Sequence
  chemically synthesized
gtgtagttttgaagaagcac

SEQ ID NO: 11118 - DNA, 20 bp, Artificial Sequence
  chemically synthesized
tagttttgaagaagcacgag

SEQ ID NO: 11119 - DNA, 20 bp, Artificial Sequence
  chemically synthesized
gaagtttttgaaaacactga

SEQ ID NO: 11120 - DNA, 20 bp, Artificial Sequence
  chemically synthesized
tcttccatacattctctctc

SEQ ID NO: 11121 - DNA, 20 bp, Artificial Sequence
  chemically synthesized
cttccatacattctctctca

SEQ ID NO: 11122 - DNA, 20 bp, Artificial Sequence
  chemically synthesized
ttacctgaattatacctctt

SEQ ID NO: 11123 - DNA, 20 bp, Artificial Sequence
  chemically synthesized
ttatacctctttggccgatt

SEQ ID NO: 11124 - DNA, 20 bp, Artificial Sequence
  chemically synthesized
tggccgattcagaattttgt

SEQ ID NO: 11125 - DNA, 20 bp, Artificial Sequence
  chemically synthesized
ttgttggcgttttcatgatc

SEQ ID NO: 11126 - DNA, 20 bp, Artificial Sequence
  chemically synthesized
caagaaaaactgaaatgtaa

SEQ ID NO: 11127 - DNA, 20 bp, Artificial Sequence
  chemically synthesized
aatgtaaaagaataattctt

SEQ ID NO: 11128 - DNA, 20 bp, Artificial Sequence
  chemically synthesized
aaagaataattctttagttt

SEQ ID NO: 11129 - DNA, 20 bp, Artificial Sequence
  chemically synthesized
attctttagttttagcaaaa

SEQ ID NO: 11130 - DNA, 20 bp, Artificial Sequence
  chemically synthesized
atgaaaattttacatctctt

SEQ ID NO: 11131 - DNA, 20 bp, Artificial Sequence
  chemically synthesized
aaattttacatctcttaaga

SEQ ID NO: 11132 - DNA, 20 bp, Artificial Sequence
  chemically synthesized
ttttaatccaaataatctga

SEQ ID NO: 11133 - DNA, 20 bp, Artificial Sequence
  chemically synthesized
tctgaaagccaatttctctt

SEQ ID NO: 11134 - DNA, 20 bp, Artificial Sequence
  chemically synthesized
ctgaaagccaatttctcttt

SEQ ID NO: 11135 - DNA, 20 bp, Artificial Sequence
  chemically synthesized
tgaaagccaatttctcttta

SEQ ID NO: 11136 - DNA, 20 bp, Artificial Sequence
  chemically synthesized
gccaatttctctttagggca

SEQ ID NO: 11137 - DNA, 20 bp, Artificial Sequence
  chemically synthesized
caatttctctttagggcatg

SEQ ID NO: 11138 - DNA, 20 bp, Artificial Sequence
  chemically synthesized
caaaatctgtgatgttccca

SEQ ID NO: 11139 - DNA, 20 bp, Artificial Sequence
  chemically synthesized
cccacagtactgtatacaca

SEQ ID NO: 11140 - DNA, 20 bp, Artificial Sequence
  chemically synthesized
cacagtactgtatacacatg

SEQ ID NO: 11141 - DNA, 20 bp, Artificial Sequence
  chemically synthesized
actgtatacacatggagatt

SEQ ID NO: 11142 - DNA, 20 bp, Artificial Sequence
  chemically synthesized
ctgtatacacatggagattt

SEQ ID NO: 11143 - DNA, 20 bp, Artificial Sequence
  chemically synthesized
ttaaaattcaattttacttt

SEQ ID NO: 11144 - DNA, 20 bp, Artificial Sequence
  chemically synthesized
attcaattttacttttagtc

SEQ ID NO: 11145 - DNA, 20 bp, Artificial Sequence
  chemically synthesized
tcaattttacttttagtcaa

SEQ ID NO: 11146 - DNA, 20 bp, Artificial Sequence
  chemically synthesized
acttttagtcaagagaattc

SEQ ID NO: 11147 - DNA, 20 bp, Artificial Sequence
  chemically synthesized
caagagaattccagtaataa

SEQ ID NO: 11148 - DNA, 20 bp, Artificial Sequence
  chemically synthesized
aagagaattccagtaataaa

SEQ ID NO: 11149 - DNA, 20 bp, Artificial Sequence
  chemically synthesized
gaattccagtaataaaaggt

SEQ ID NO: 11150 - DNA, 20 bp, Artificial Sequence
  chemically synthesized
aatcatatttgaatttactt

SEQ ID NO: 11151 - DNA, 20 bp, Artificial Sequence
  chemically synthesized
tgaatttactttggatgaaa

SEQ ID NO: 11152 - DNA, 20 bp, Artificial Sequence
  chemically synthesized
tttactttggatgaaaaaga

SEQ ID NO: 11153 - DNA, 20 bp, Artificial Sequence
  chemically synthesized
gaaaaagaaagttctcaaat

SEQ ID NO: 11154 - DNA, 20 bp, Artificial Sequence
  chemically synthesized
aaagaaagttctcaaatgag

SEQ ID NO: 11155 - DNA, 20 bp, Artificial Sequence
  chemically synthesized
actttgtcatcacttgaaaa

SEQ ID NO: 11156 - DNA, 20 bp, Artificial Sequence
  chemically synthesized
tcacttgaaaatagctcatt

SEQ ID NO: 11157 - DNA, 20 bp, Artificial Sequence
  chemically synthesized
cacttgaaaatagctcattg

SEQ ID NO: 11158 - DNA, 20 bp, Artificial Sequence
  chemically synthesized
gctcattgaggatctttgca

SEQ ID NO: 11159 - DNA, 20 bp, Artificial Sequence
  chemically synthesized
tgcaaagtgatccatcaccc

SEQ ID NO: 11160 - DNA, 20 bp, Artificial Sequence
  chemically synthesized
aagtgatccatcaccctggc

SEQ ID NO: 11161 - DNA, 20 bp, Artificial Sequence
  chemically synthesized
agtgatccatcaccctggct

SEQ ID NO: 11162 - DNA, 20 bp, Artificial Sequence
  chemically synthesized
caccctggctgggctgtttt

SEQ ID NO: 11163 - DNA, 20 bp, Artificial Sequence
  chemically synthesized
gctgggctgttttcagaata

SEQ ID NO: 11164 - DNA, 20 bp, Artificial Sequence
  chemically synthesized
ctttgaacaaatgtctcctg

SEQ ID NO: 11165 - DNA, 20 bp, Artificial Sequence
  chemically synthesized
aacaaatgtctcctgaagaa

SEQ ID NO: 11166 - DNA, 20 bp, Artificial Sequence
  chemically synthesized
aaatgtctcctgaagaacag

SEQ ID NO: 11167 - DNA, 20 bp, Artificial Sequence
  chemically synthesized
gaagaacagaagcctaatta

SEQ ID NO: 11168 - DNA, 20 bp, Artificial Sequence
  chemically synthesized
acagaagcctaattatggtc

SEQ ID NO: 11169 - DNA, 20 bp, Artificial Sequence
  chemically synthesized
tccagctgcaaatgtgaccc

SEQ ID NO: 11170 - DNA, 20 bp, Artificial Sequence
  chemically synthesized
gtgaccccagtgtctgtcac

SEQ ID NO: 11171 - DNA, 20 bp, Artificial Sequence
  chemically synthesized
gtgtctgtcactagatgtta

SEQ ID NO: 11172 - DNA, 20 bp, Artificial Sequence
  chemically synthesized
atcactgcattaatttaaaa

SEQ ID NO: 11173 - DNA, 20 bp, Artificial Sequence
  chemically synthesized
ttaatttaaaaaagcaattt

SEQ ID NO: 11174 - DNA, 20 bp, Artificial Sequence
  chemically synthesized
aaaaagcaatttcagatcaa

SEQ ID NO: 11175 - DNA, 20 bp, Artificial Sequence
  chemically synthesized
tttcagatcaacagcacctt

SEQ ID NO: 11176 - DNA, 20 bp, Artificial Sequence
  chemically synthesized
agatcaacagcacctttggt

SEQ ID NO: 11177 - DNA, 20 bp, Artificial Sequence
  chemically synthesized
caacagcacctttggttggc

SEQ ID NO: 11178 - DNA, 20 bp, Artificial Sequence
  chemically synthesized
cctttggttggcaagtgtta

SEQ ID NO: 11179 - DNA, 20 bp, Artificial Sequence
  chemically synthesized
ctttggttggcaagtgttat

SEQ ID NO: 11180 - DNA, 20 bp, Artificial Sequence
  chemically synthesized
ggcaagtgttataggaattg

SEQ ID NO: 11181 - DNA, 20 bp, Artificial Sequence
  chemically synthesized
tataggaattgcagtgattt

SEQ ID NO: 11182 - DNA, 20 bp, Artificial Sequence
  chemically synthesized
cagtgatttaagcatctctc

SEQ ID NO: 11183 - DNA, 20 bp, Artificial Sequence
  chemically synthesized
ttaagcatctctctagaatt

SEQ ID NO: 11184 - DNA, 20 bp, Artificial Sequence
  chemically synthesized
taagcatctctctagaattc

SEQ ID NO: 11185 - DNA, 20 bp, Artificial Sequence
  chemically synthesized
attcaggatatgtttttttt

SEQ ID NO: 11186 - DNA, 20 bp, Artificial Sequence
  chemically synthesized
ttttttaagctacatctacc

SEQ ID NO: 11187 - DNA, 20 bp, Artificial Sequence
  chemically synthesized
agctacatctacctagtctg

SEQ ID NO: 11188 - DNA, 20 bp, Artificial Sequence
  chemically synthesized
ctacatctacctagtctgaa

SEQ ID NO: 11189 - DNA, 20 bp, Artificial Sequence
  chemically synthesized
gaagagacactcctgaactc

SEQ ID NO: 11190 - DNA, 20 bp, Artificial Sequence
  chemically synthesized
agagacactcctgaactctg

SEQ ID NO: 11191 - DNA, 20 bp, Artificial Sequence
  chemically synthesized
gagacactcctgaactctgg

SEQ ID NO: 11192 - DNA, 20 bp, Artificial Sequence
  chemically synthesized
cactcctgaactctggagga

SEQ ID NO: 11193 - DNA, 20 bp, Artificial Sequence
  chemically synthesized
tatcatatatatatatatat

SEQ ID NO: 11194 - DNA, 20 bp, Artificial Sequence
  chemically synthesized
tttgctgcacaatgacattt

SEQ ID NO: 11195 - DNA, 20 bp, Artificial Sequence
  chemically synthesized
aatgacattttggtcaatga

SEQ ID NO: 11196 - DNA, 20 bp, Artificial Sequence
  chemically synthesized
tgatggaccacattatacga

SEQ ID NO: 11197 - DNA, 20 bp, Artificial Sequence
  chemically synthesized
tggaccacattatacgacag

SEQ ID NO: 11198 - DNA, 20 bp, Artificial Sequence
  chemically synthesized
ttatacgacagtggtcccat

SEQ ID NO: 11199 - DNA, 20 bp, Artificial Sequence
  chemically synthesized
tatacgacagtggtcccata

SEQ ID NO: 11200 - DNA, 20 bp, Artificial Sequence
  chemically synthesized
cactgtaccttttctatgtt

SEQ ID NO: 11201 - DNA, 20 bp, Artificial Sequence
  chemically synthesized
accactgttaccattgccta

SEQ ID NO: 11202 - DNA, 20 bp, Artificial Sequence
  chemically synthesized
ttaccattgcctacagtgtt

SEQ ID NO: 11203 - DNA, 20 bp, Artificial Sequence
  chemically synthesized
attgcctacagtgttcagta

SEQ ID NO: 11204 - DNA, 20 bp, Artificial Sequence
  chemically synthesized
cagtacagtcacatgctgta

SEQ ID NO: 11205 - DNA, 20 bp, Artificial Sequence
  chemically synthesized
agtacagtcacatgctgtac

SEQ ID NO: 11206 - DNA, 20 bp, Artificial Sequence
  chemically synthesized
tcacatgctgtacaggtttg

SEQ ID NO: 11207 - DNA, 20 bp, Artificial Sequence
  chemically synthesized
tgctgtacaggtttgcagcc

SEQ ID NO: 11208 - DNA, 20 bp, Artificial Sequence
  chemically synthesized
gctgtacaggtttgcagccc

SEQ ID NO: 11209 - DNA, 20 bp, Artificial Sequence
  chemically synthesized
tgtacaggtttgcagcccag

SEQ ID NO: 11210 - DNA, 20 bp, Artificial Sequence
  chemically synthesized
aggtttgcagcccaggagcc

SEQ ID NO: 11211 - DNA, 20 bp, Artificial Sequence
  chemically synthesized
ggtttgcagcccaggagcct

SEQ ID NO: 11212 - DNA, 20 bp, Artificial Sequence
  chemically synthesized
tttgcagcccaggagcctag

SEQ ID NO: 11213 - DNA, 20 bp, Artificial Sequence
  chemically synthesized
gcccaggagcctaggagcaa

SEQ ID NO: 11214 - DNA, 20 bp, Artificial Sequence
  chemically synthesized
cccaggagcctaggagcaat

SEQ ID NO: 11215 - DNA, 20 bp, Artificial Sequence
  chemically synthesized
taggccacatcaatacaacc

SEQ ID NO: 11216 - DNA, 20 bp, Artificial Sequence
  chemically synthesized
aggccacatcaatacaacct

SEQ ID NO: 11217 - DNA, 20 bp, Artificial Sequence
  chemically synthesized
atcaatacaacctaggtatg

SEQ ID NO: 11218 - DNA, 20 bp, Artificial Sequence
  chemically synthesized
atacaacctaggtatgtagt

SEQ ID NO: 11219 - DNA, 20 bp, Artificial Sequence
  chemically synthesized
atgtagtaagctataccatt

SEQ ID NO: 11220 - DNA, 20 bp, Artificial Sequence
  chemically synthesized
tgtagtaagctataccattt

SEQ ID NO: 11221 - DNA, 20 bp, Artificial Sequence
  chemically synthesized
taagctataccatttaggtt

SEQ ID NO: 11222 - DNA, 20 bp, Artificial Sequence
  chemically synthesized
aagctataccatttaggttt

SEQ ID NO: 11223 - DNA, 20 bp, Artificial Sequence
  chemically synthesized
tataccatttaggtttaggt

SEQ ID NO: 11224 - DNA, 20 bp, Artificial Sequence
  chemically synthesized
ttgcttaatgacacatttct

SEQ ID NO: 11225 - DNA, 20 bp, Artificial Sequence
  chemically synthesized
cagaatatatccccattgtt

SEQ ID NO: 11226 - DNA, 20 bp, Artificial Sequence
  chemically synthesized
agaatatatccccattgtta

SEQ ID NO: 11227 - DNA, 20 bp, Artificial Sequence
  chemically synthesized
ccccattgttaaggaatgca

SEQ ID NO: 11228 - DNA, 20 bp, Artificial Sequence
  chemically synthesized
tgtatgtataaaattaataa

SEQ ID NO: 11229 - DNA, 20 bp, Artificial Sequence
  chemically synthesized
gtatgtataaaattaataac

SEQ ID NO: 11230 - DNA, 20 bp, Artificial Sequence
  chemically synthesized
tatgtataaaattaataaca

SEQ ID NO: 11231 - DNA, 20 bp, Artificial Sequence
  chemically synthesized
aaaattaataacagggactc

SEQ ID NO: 11232 - DNA, 20 bp, Artificial Sequence
  chemically synthesized
attaataacagggactcaag

SEQ ID NO: 11233 - DNA, 20 bp, Artificial Sequence
  chemically synthesized
cagggactcaagaagttgcc

SEQ ID NO: 11234 - DNA, 20 bp, Artificial Sequence
  chemically synthesized
gggactcaagaagttgcctg

SEQ ID NO: 11235 - DNA, 20 bp, Artificial Sequence
  chemically synthesized
ctggagttgttcctttcttc

SEQ ID NO: 11236 - DNA, 20 bp, Artificial Sequence
  chemically synthesized
tggagttgttcctttcttca

SEQ ID NO: 11237 - DNA, 20 bp, Artificial Sequence
  chemically synthesized
ggagttgttcctttcttcaa

SEQ ID NO: 11238 - DNA, 20 bp, Artificial Sequence
  chemically synthesized
tgttcctttcttcaagggtc

SEQ ID NO: 11239 - DNA, 20 bp, Artificial Sequence
  chemically synthesized
aatatatctgataccatctc

SEQ ID NO: 11240 - DNA, 20 bp, Artificial Sequence
  chemically synthesized
tatatctgataccatctcaa

SEQ ID NO: 11241 - DNA, 20 bp, Artificial Sequence
  chemically synthesized
atatctgataccatctcaag

SEQ ID NO: 11242 - DNA, 20 bp, Artificial Sequence
  chemically synthesized
gataccatctcaagaggacc

SEQ ID NO: 11243 - DNA, 20 bp, Artificial Sequence
  chemically synthesized
ataccatctcaagaggacca

SEQ ID NO: 11244 - DNA, 20 bp, Artificial Sequence
  chemically synthesized
taccatctcaagaggaccaa

SEQ ID NO: 11245 - DNA, 20 bp, Artificial Sequence
  chemically synthesized
caagaggaccaagggcttat

SEQ ID NO: 11246 - DNA, 20 bp, Artificial Sequence
  chemically synthesized
ggcttataagatgaactttc

SEQ ID NO: 11247 - DNA, 20 bp, Artificial Sequence
  chemically synthesized
gcttataagatgaactttct

SEQ ID NO: 11248 - DNA, 20 bp, Artificial Sequence
  chemically synthesized
cttataagatgaactttctg

SEQ ID NO: 11249 - DNA, 20 bp, Artificial Sequence
  chemically synthesized
gatgaactttctggggtatt

SEQ ID NO: 11250 - DNA, 20 bp, Artificial Sequence
  chemically synthesized
atgaactttctggggtattt

SEQ ID NO: 11251 - DNA, 20 bp, Artificial Sequence
  chemically synthesized
acttcctgattaactccaaa

SEQ ID NO: 11252 - DNA, 20 bp, Artificial Sequence
  chemically synthesized
cttcctgattaactccaaaa

SEQ ID NO: 11253 - DNA, 20 bp, Artificial Sequence
  chemically synthesized
cctgattaactccaaaaagg

SEQ ID NO: 11254 - DNA, 20 bp, Artificial Sequence
  chemically synthesized
tgattaactccaaaaaggaa

SEQ ID NO: 11255 - DNA, 20 bp, Artificial Sequence
  chemically synthesized
taactccaaaaaggaagaga

SEQ ID NO: 11256 - DNA, 20 bp, Artificial Sequence
  chemically synthesized
aactccaaaaaggaagagaa

SEQ ID NO: 11257 - DNA, 20 bp, Artificial Sequence
  chemically synthesized
ccaaaaaggaagagaaagga

SEQ ID NO: 11258 - DNA, 20 bp, Artificial Sequence
  chemically synthesized
ggaagagaaaggaaagtaaa

SEQ ID NO: 11259 - DNA, 20 bp, Artificial Sequence
  chemically synthesized
gaagagaaaggaaagtaaaa

SEQ ID NO: 11260 - DNA, 20 bp, Artificial Sequence
  chemically synthesized
agaaaggaaagtaaaaagga

SEQ ID NO: 11261 - DNA, 20 bp, Artificial Sequence
  chemically synthesized
gaaaggaaagtaaaaaggaa

SEQ ID NO: 11262 - DNA, 20 bp, Artificial Sequence
  chemically synthesized
ggaaagtaaaaaggaaagga

SEQ ID NO: 11263 - DNA, 20 bp, Artificial Sequence
  chemically synthesized
taaaaaggaaaggaaagaaa

SEQ ID NO: 11264 - DNA, 20 bp, Artificial Sequence
  chemically synthesized
aaaaggaaaggaaagaaacg

SEQ ID NO: 11265 - DNA, 20 bp, Artificial Sequence
  chemically synthesized
ttcttcccttattttcattg

SEQ ID NO: 11266 - DNA, 20 bp, Artificial Sequence
  chemically synthesized
cattgcagctgttcacttta

SEQ ID NO: 11267 - DNA, 20 bp, Artificial Sequence
  chemically synthesized
ttgcagctgttcactttatg

SEQ ID NO: 11268 - DNA, 20 bp, Artificial Sequence
  chemically synthesized
gttcactttatggagtgttc

SEQ ID NO: 11269 - DNA, 20 bp, Artificial Sequence
  chemically synthesized
ctgcttttcccttgctctgc

SEQ ID NO: 11270 - DNA, 20 bp, Artificial Sequence
  chemically synthesized
cttgctctgcaagttccttt

SEQ ID NO: 11271 - DNA, 20 bp, Artificial Sequence
  chemically synthesized
ttgctctgcaagttcctttt

SEQ ID NO: 11272 - DNA, 20 bp, Artificial Sequence
  chemically synthesized
tcactttttttctttgaatt

SEQ ID NO: 11273 - DNA, 20 bp, Artificial Sequence
  chemically synthesized
ttttttctttgaatttagcc

SEQ ID NO: 11274 - DNA, 20 bp, Artificial Sequence
  chemically synthesized
ttcaactcttttttttttga

SEQ ID NO: 11275 - DNA, 20 bp, Artificial Sequence
  chemically synthesized
caactcttttttttttgaca

SEQ ID NO: 11276 - DNA, 20 bp, Artificial Sequence
  chemically synthesized
cagagtcttgctctgtcgcc

SEQ ID NO: 11277 - DNA, 20 bp, Artificial Sequence
  chemically synthesized
agagtcttgctctgtcgccc

SEQ ID NO: 11278 - DNA, 20 bp, Artificial Sequence
  chemically synthesized
tcttgctctgtcgcccaggc

SEQ ID NO: 11279 - DNA, 20 bp, Artificial Sequence
  chemically synthesized
ttgctctgtcgcccaggctg

SEQ ID NO: 11280 - DNA, 20 bp, Artificial Sequence
  chemically synthesized
ctgtcgcccaggctggagtg

SEQ ID NO: 11281 - DNA, 20 bp, Artificial Sequence
  chemically synthesized
tcgcccaggctggagtgcag

SEQ ID NO: 11282 - DNA, 20 bp, Artificial Sequence
  chemically synthesized
ggagtgcagtggtgcgatct

SEQ ID NO: 11283 - DNA, 20 bp, Artificial Sequence
  chemically synthesized
tcactgcaacctccatctcc

SEQ ID NO: 11284 - DNA, 20 bp, Artificial Sequence
  chemically synthesized
cactgcaacctccatctccc

SEQ ID NO: 11285 - DNA, 20 bp, Artificial Sequence
  chemically synthesized
aacctccatctcccaggttc

SEQ ID NO: 11286 - DNA, 20 bp, Artificial Sequence
  chemically synthesized
ttcaagctattctcctgcct

SEQ ID NO: 11287 - DNA, 20 bp, Artificial Sequence
  chemically synthesized
ttctcctgcctcagcctccc

SEQ ID NO: 11288 - DNA, 20 bp, Artificial Sequence
  chemically synthesized
tcctgcctcagcctcccaag

SEQ ID NO: 11289 - DNA, 20 bp, Artificial Sequence
  chemically synthesized
gcctcagcctcccaagtagc

SEQ ID NO: 11290 - DNA, 20 bp, Artificial Sequence
  chemically synthesized
cctcagcctcccaagtagct

SEQ ID NO: 11291 - DNA, 20 bp, Artificial Sequence
  chemically synthesized
ctcccaagtagctgggatta

SEQ ID NO: 11292 - DNA, 20 bp, Artificial Sequence
  chemically synthesized
tcccaagtagctgggattac

SEQ ID NO: 11293 - DNA, 20 bp, Artificial Sequence
  chemically synthesized
caggcacccgccaccatgcc

SEQ ID NO: 11294 - DNA, 20 bp, Artificial Sequence
  chemically synthesized
ccagctaatttttgtatttt

SEQ ID NO: 11295 - DNA, 20 bp, Artificial Sequence
  chemically synthesized
taatttttgtatttttagta

SEQ ID NO: 11296 - DNA, 20 bp, Artificial Sequence
  chemically synthesized
ttttgtatttttagtaaagc

SEQ ID NO: 11297 - DNA, 20 bp, Artificial Sequence
  chemically synthesized
tttgtatttttagtaaagcc

SEQ ID NO: 11298 - DNA, 20 bp, Artificial Sequence
  chemically synthesized
ttgtatttttagtaaagccg

SEQ ID NO: 11299 - DNA, 20 bp, Artificial Sequence
  chemically synthesized
gtttcaccatttcaccttgt

SEQ ID NO: 11300 - DNA, 20 bp, Artificial Sequence
  chemically synthesized
caccatttcaccttgttggc

SEQ ID NO: 11301 - DNA, 20 bp, Artificial Sequence
  chemically synthesized
accatttcaccttgttggcc

SEQ ID NO: 11302 - DNA, 20 bp, Artificial Sequence
  chemically synthesized
tttcaccttgttggccaggc

SEQ ID NO: 11303 - DNA, 20 bp, Artificial Sequence
  chemically synthesized
ggtgtcgaactcctgacctc

SEQ ID NO: 11304 - DNA, 20 bp, Artificial Sequence
  chemically synthesized
cctcaagtgatctgcctgcc

SEQ ID NO: 11305 - DNA, 20 bp, Artificial Sequence
  chemically synthesized
ctcaagtgatctgcctgcct

SEQ ID NO: 11306 - DNA, 20 bp, Artificial Sequence
  chemically synthesized
ctgcctgcctgggcctctga

SEQ ID NO: 11307 - DNA, 20 bp, Artificial Sequence
  chemically synthesized
gcctgggcctctgaaagtgc

SEQ ID NO: 11308 - DNA, 20 bp, Artificial Sequence
  chemically synthesized
cctgggcctctgaaagtgct

SEQ ID NO: 11309 - DNA, 20 bp, Artificial Sequence
  chemically synthesized
ctctgaaagtgctgggatta

SEQ ID NO: 11310 - DNA, 20 bp, Artificial Sequence
  chemically synthesized
tctgaaagtgctgggattat

SEQ ID NO: 11311 - DNA, 20 bp, Artificial Sequence
  chemically synthesized
agtgctgggattataggtgt

SEQ ID NO: 11312 - DNA, 20 bp, Artificial Sequence
  chemically synthesized
ataggtgtgagccaccatgc

SEQ ID NO: 11313 - DNA, 20 bp, Artificial Sequence
  chemically synthesized
taggtgtgagccaccatgcc

SEQ ID NO: 11314 - DNA, 20 bp, Artificial Sequence
  chemically synthesized
gcctctcttcaactcttcat

SEQ ID NO: 11315 - DNA, 20 bp, Artificial Sequence
  chemically synthesized
ctgtgcccaccctgcaatcc

SEQ ID NO: 11316 - DNA, 20 bp, Artificial Sequence
  chemically synthesized
tgcaatcctagcccctaaat

SEQ ID NO: 11317 - DNA, 20 bp, Artificial Sequence
  chemically synthesized
caatcctagcccctaaattg

SEQ ID NO: 11318 - DNA, 20 bp, Artificial Sequence
  chemically synthesized
tcctagcccctaaattggag

SEQ ID NO: 11319 - DNA, 20 bp, Artificial Sequence
  chemically synthesized
tgccttcatccttctcttcc

SEQ ID NO: 11320 - DNA, 20 bp, Artificial Sequence
  chemically synthesized
ttcatccttctcttcccaga

SEQ ID NO: 11321 - DNA, 20 bp, Artificial Sequence
  chemically synthesized
ccttctcttcccagacagcc

SEQ ID NO: 11322 - DNA, 20 bp, Artificial Sequence
  chemically synthesized
cttctcttcccagacagccg

SEQ ID NO: 11323 - DNA, 20 bp, Artificial Sequence
  chemically synthesized
ccagacagccgaggactgtg

SEQ ID NO: 11324 - DNA, 20 bp, Artificial Sequence
  chemically synthesized
cagacagccgaggactgtga

SEQ ID NO: 11325 - DNA, 20 bp, Artificial Sequence
  chemically synthesized
ggaaaaaaatcaccaaaatg

SEQ ID NO: 11326 - DNA, 20 bp, Artificial Sequence
  chemically synthesized
aaaaatcaccaaaatgcaga

SEQ ID NO: 11327 - DNA, 20 bp, Artificial Sequence
  chemically synthesized
caccacatattgatgcctca

SEQ ID NO: 11328 - DNA, 20 bp, Artificial Sequence
  chemically synthesized
cctccacccacctctctgct

SEQ ID NO: 11329 - DNA, 20 bp, Artificial Sequence
  chemically synthesized
tgctcagcaactcatttact

SEQ ID NO: 11330 - DNA, 20 bp, Artificial Sequence
  chemically synthesized
gcaactcatttacttggccc

SEQ ID NO: 11331 - DNA, 20 bp, Artificial Sequence
  chemically synthesized
tggccctggacactcctaaa

SEQ ID NO: 11332 - DNA, 20 bp, Artificial Sequence
  chemically synthesized
tccatgcctgcatccattta

SEQ ID NO: 11333 - DNA, 20 bp, Artificial Sequence
  chemically synthesized
atccatttacagtcgttcct

SEQ ID NO: 11334 - DNA, 20 bp, Artificial Sequence
  chemically synthesized
cagtcgttcctcagtatcca

SEQ ID NO: 11335 - DNA, 20 bp, Artificial Sequence
  chemically synthesized
cctcagtatccatggaaaat

SEQ ID NO: 11336 - DNA, 20 bp, Artificial Sequence
  chemically synthesized
cagtatccatggaaaattgg

SEQ ID NO: 11337 - DNA, 20 bp, Artificial Sequence
  chemically synthesized
atccatggaaaattggtggc

SEQ ID NO: 11338 - DNA, 20 bp, Artificial Sequence
  chemically synthesized
caagaccccctgcaaatatc

SEQ ID NO: 11339 - DNA, 20 bp, Artificial Sequence
  chemically synthesized
cctgcaaatatcaagatctg

SEQ ID NO: 11340 - DNA, 20 bp, Artificial Sequence
  chemically synthesized
atcaagatctgtggatgctc

SEQ ID NO: 11341 - DNA, 20 bp, Artificial Sequence
  chemically synthesized
tcaagtctccgatataaaaa

SEQ ID NO: 11342 - DNA, 20 bp, Artificial Sequence
  chemically synthesized
tttgtactttaaatcatctc

SEQ ID NO: 11343 - DNA, 20 bp, Artificial Sequence
  chemically synthesized
ttgtactttaaatcatctct

SEQ ID NO: 11344 - DNA, 20 bp, Artificial Sequence
  chemically synthesized
catctctaggtttctcttaa

SEQ ID NO: 11345 - DNA, 20 bp, Artificial Sequence
  chemically synthesized
caatgtaaatgctatgtaaa

SEQ ID NO: 11346 - DNA, 20 bp, Artificial Sequence
  chemically synthesized
agttgttatgctgtattgtt

SEQ ID NO: 11347 - DNA, 20 bp, Artificial Sequence
  chemically synthesized
gttgttatgctgtattgttt

SEQ ID NO: 11348 - DNA, 20 bp, Artificial Sequence
  chemically synthesized
ttgttatgctgtattgttta

SEQ ID NO: 11349 - DNA, 20 bp, Artificial Sequence
  chemically synthesized
tattgtttagggaataatga

SEQ ID NO: 11350 - DNA, 20 bp, Artificial Sequence
  chemically synthesized
tagggaataatgaaagataa

SEQ ID NO: 11351 - DNA, 20 bp, Artificial Sequence
  chemically synthesized
gggaataatgaaagataaaa

SEQ ID NO: 11352 - DNA, 20 bp, Artificial Sequence
  chemically synthesized
taaaagagtctgtacatgtt

SEQ ID NO: 11353 - DNA, 20 bp, Artificial Sequence
  chemically synthesized
aagagtctgtacatgttcag

SEQ ID NO: 11354 - DNA, 20 bp, Artificial Sequence
  chemically synthesized
gagtctgtacatgttcagta

SEQ ID NO: 11355 - DNA, 20 bp, Artificial Sequence
  chemically synthesized
tcttgaatatttttgatctg

SEQ ID NO: 11356 - DNA, 20 bp, Artificial Sequence
  chemically synthesized
tctgcagttaattgaatctg

SEQ ID NO: 11357 - DNA, 20 bp, Artificial Sequence
  chemically synthesized
gttaattgaatctgtggctg

SEQ ID NO: 11358 - DNA, 20 bp, Artificial Sequence
  chemically synthesized
tctgtggctgtggaactcac

SEQ ID NO: 11359 - DNA, 20 bp, Artificial Sequence
  chemically synthesized
ctgtggctgtggaactcaca

SEQ ID NO: 11360 - DNA, 20 bp, Artificial Sequence
  chemically synthesized
gtggctgtggaactcacaag

SEQ ID NO: 11361 - DNA, 20 bp, Artificial Sequence
  chemically synthesized
ggctgtggaactcacaagga

SEQ ID NO: 11362 - DNA, 20 bp, Artificial Sequence
  chemically synthesized
cacaaggagagctgactgta

SEQ ID NO: 11363 - DNA, 20 bp, Artificial Sequence
  chemically synthesized
ggagagctgactgtacagtg

SEQ ID NO: 11364 - DNA, 20 bp, Artificial Sequence
  chemically synthesized
gctgactgtacagtgtggtt

SEQ ID NO: 11365 - DNA, 20 bp, Artificial Sequence
  chemically synthesized
agtgtggttgagtgaaaaaa

SEQ ID NO: 11366 - DNA, 20 bp, Artificial Sequence
  chemically synthesized
ttgagtgaaaaaacagactt

SEQ ID NO: 11367 - DNA, 20 bp, Artificial Sequence
  chemically synthesized
gaaaaaacagactttagaat

SEQ ID NO: 11368 - DNA, 20 bp, Artificial Sequence
  chemically synthesized
aacagactttagaatcagat

SEQ ID NO: 11369 - DNA, 20 bp, Artificial Sequence
  chemically synthesized
gactttagaatcagatcaga

SEQ ID NO: 11370 - DNA, 20 bp, Artificial Sequence
  chemically synthesized
agaatcagatcagacagaaa

SEQ ID NO: 11371 - DNA, 20 bp, Artificial Sequence
  chemically synthesized
gaatcagatcagacagaaat

SEQ ID NO: 11372 - DNA, 20 bp, Artificial Sequence
  chemically synthesized
gacagaaataggtttgaatc

SEQ ID NO: 11373 - DNA, 20 bp, Artificial Sequence
  chemically synthesized
aatcaagtatctgcctcctc

SEQ ID NO: 11374 - DNA, 20 bp, Artificial Sequence
  chemically synthesized
ctcctctagacctgtgacct

SEQ ID NO: 11375 - DNA, 20 bp, Artificial Sequence
  chemically synthesized
ctagacctgtgaccttggac

SEQ ID NO: 11376 - DNA, 20 bp, Artificial Sequence
  chemically synthesized
tgaccttggacaagtcacac

SEQ ID NO: 11377 - DNA, 20 bp, Artificial Sequence
  chemically synthesized
taactttgtcaaatgtaaat

SEQ ID NO: 11378 - DNA, 20 bp, Artificial Sequence
  chemically synthesized
aactttgtcaaatgtaaatt

SEQ ID NO: 11379 - DNA, 20 bp, Artificial Sequence
  chemically synthesized
caaatgtaaattaggtttaa

SEQ ID NO: 11380 - DNA, 20 bp, Artificial Sequence
  chemically synthesized
atgtaaattaggtttaacag

SEQ ID NO: 11381 - DNA, 20 bp, Artificial Sequence
  chemically synthesized
aggtttaacagtagtataat

SEQ ID NO: 11382 - DNA, 20 bp, Artificial Sequence
  chemically synthesized
taataagaatatctatctca

SEQ ID NO: 11383 - DNA, 20 bp, Artificial Sequence
  chemically synthesized
aataagaatatctatctcac

SEQ ID NO: 11384 - DNA, 20 bp, Artificial Sequence
  chemically synthesized
aatatctatctcacaggtgt

SEQ ID NO: 11385 - DNA, 20 bp, Artificial Sequence
  chemically synthesized
atctatctcacaggtgttgg

SEQ ID NO: 11386 - DNA, 20 bp, Artificial Sequence
  chemically synthesized
tctatctcacaggtgttggc

SEQ ID NO: 11387 - DNA, 20 bp, Artificial Sequence
  chemically synthesized
ctcacaggtgttggcaggat

SEQ ID NO: 11388 - DNA, 20 bp, Artificial Sequence
  chemically synthesized
caggtgttggcaggatcagt

SEQ ID NO: 11389 - DNA, 20 bp, Artificial Sequence
  chemically synthesized
ggatcagtgagacaatatgc

SEQ ID NO: 11390 - DNA, 20 bp, Artificial Sequence
  chemically synthesized
tctccctactcctttcatgt

SEQ ID NO: 11391 - DNA, 20 bp, Artificial Sequence
  chemically synthesized
ttaaatttctcaattctctt

SEQ ID NO: 11392 - DNA, 20 bp, Artificial Sequence
  chemically synthesized
gctctttaataacttctgtg

SEQ ID NO: 11393 - DNA, 20 bp, Artificial Sequence
  chemically synthesized
gaaatgactattgtcacaat

SEQ ID NO: 11394 - DNA, 20 bp, Artificial Sequence
  chemically synthesized
aaatgactattgtcacaatc

SEQ ID NO: 11395 - DNA, 20 bp, Artificial Sequence
  chemically synthesized
tcacaatcaggaatgaccta

SEQ ID NO: 11396 - DNA, 20 bp, Artificial Sequence
  chemically synthesized
atgacctaaagaataatttt

SEQ ID NO: 11397 - DNA, 20 bp, Artificial Sequence
  chemically synthesized
ttttgagtttatgtatttac

SEQ ID NO: 11398 - DNA, 20 bp, Artificial Sequence
  chemically synthesized
attgttgatctctccctttt

SEQ ID NO: 11399 - DNA, 20 bp, Artificial Sequence
  chemically synthesized
ttgttgatctctcccttttt

SEQ ID NO: 11400 - DNA, 20 bp, Artificial Sequence
  chemically synthesized
ttataataatcactctattc

SEQ ID NO: 11401 - DNA, 20 bp, Artificial Sequence
  chemically synthesized
tctaactcctgttatccatc

SEQ ID NO: 11402 - DNA, 20 bp, Artificial Sequence
  chemically synthesized
ttaactcctgttcctctcca

SEQ ID NO: 11403 - DNA, 20 bp, Artificial Sequence
  chemically synthesized
ctccatggcccttaaatgtc

SEQ ID NO: 11404 - DNA, 20 bp, Artificial Sequence
  chemically synthesized
tccatggcccttaaatgtcc

SEQ ID NO: 11405 - DNA, 20 bp, Artificial Sequence
  chemically synthesized
ccatggcccttaaatgtcca

SEQ ID NO: 11406 - DNA, 20 bp, Artificial Sequence
  chemically synthesized
ttaaatgtccagggttctcc

SEQ ID NO: 11407 - DNA, 20 bp, Artificial Sequence
  chemically synthesized
taaatgtccagggttctccc

SEQ ID NO: 11408 - DNA, 20 bp, Artificial Sequence
  chemically synthesized
tccagggttctcccaggctc

SEQ ID NO: 11409 - DNA, 20 bp, Artificial Sequence
  chemically synthesized
gttctcccaggctccagcct

SEQ ID NO: 11410 - DNA, 20 bp, Artificial Sequence
  chemically synthesized
ttcaccttatatatacttgc

SEQ ID NO: 11411 - DNA, 20 bp, Artificial Sequence
  chemically synthesized
tcaccttatatatacttgct

SEQ ID NO: 11412 - DNA, 20 bp, Artificial Sequence
  chemically synthesized
caccttatatatacttgcta

SEQ ID NO: 11413 - DNA, 20 bp, Artificial Sequence
  chemically synthesized
ttatatatacttgctagggc

SEQ ID NO: 11414 - DNA, 20 bp, Artificial Sequence
  chemically synthesized
tatatatacttgctagggct

SEQ ID NO: 11415 - DNA, 20 bp, Artificial Sequence
  chemically synthesized
atacttgctagggctgggac

SEQ ID NO: 11416 - DNA, 20 bp, Artificial Sequence
  chemically synthesized
acttgctagggctgggacaa

SEQ ID NO: 11417 - DNA, 20 bp, Artificial Sequence
  chemically synthesized
gggacaagagtgaaccaaac

SEQ ID NO: 11418 - DNA, 20 bp, Artificial Sequence
  chemically synthesized
ggacaagagtgaaccaaaca

SEQ ID NO: 11419 - DNA, 20 bp, Artificial Sequence
  chemically synthesized
agtgaaccaaacaaggcatg

SEQ ID NO: 11420 - DNA, 20 bp, Artificial Sequence
  chemically synthesized
gtgaaccaaacaaggcatgt

SEQ ID NO: 11421 - DNA, 20 bp, Artificial Sequence
  chemically synthesized
tgaaccaaacaaggcatgta

SEQ ID NO: 11422 - DNA, 20 bp, Artificial Sequence
  chemically synthesized
gcatgtagggcacaatattt

SEQ ID NO: 11423 - DNA, 20 bp, Artificial Sequence
  chemically synthesized
atgtagggcacaatatttaa

SEQ ID NO: 11424 - DNA, 20 bp, Artificial Sequence
  chemically synthesized
tgtagggcacaatatttaag

SEQ ID NO: 11425 - DNA, 20 bp, Artificial Sequence
  chemically synthesized
tttaagaggtcctcacttct

SEQ ID NO: 11426 - DNA, 20 bp, Artificial Sequence
  chemically synthesized
ttaagaggtcctcacttctc

SEQ ID NO: 11427 - DNA, 20 bp, Artificial Sequence
  chemically synthesized
taagaggtcctcacttctcg

SEQ ID NO: 11428 - DNA, 20 bp, Artificial Sequence
  chemically synthesized
cctcacttctcggggcatac

SEQ ID NO: 11429 - DNA, 20 bp, Artificial Sequence
  chemically synthesized
acaagtatatttatgcccta

SEQ ID NO: 11430 - DNA, 20 bp, Artificial Sequence
  chemically synthesized
caagtatatttatgccctac

SEQ ID NO: 11431 - DNA, 20 bp, Artificial Sequence
  chemically synthesized
cctacaggccttgcttacca

SEQ ID NO: 11432 - DNA, 20 bp, Artificial Sequence
  chemically synthesized
aggccttgcttaccacagtc

SEQ ID NO: 11433 - DNA, 20 bp, Artificial Sequence
  chemically synthesized
ttgcttaccacagtctagtc

SEQ ID NO: 11434 - DNA, 20 bp, Artificial Sequence
  chemically synthesized
ccctgtcaacaaaatttact

SEQ ID NO: 11435 - DNA, 20 bp, Artificial Sequence
  chemically synthesized
gagcatacaaccactactgc

SEQ ID NO: 11436 - DNA, 20 bp, Artificial Sequence
  chemically synthesized
agcatacaaccactactgcc

SEQ ID NO: 11437 - DNA, 20 bp, Artificial Sequence
  chemically synthesized
actactgccaggcactgtac

SEQ ID NO: 11438 - DNA, 20 bp, Artificial Sequence
  chemically synthesized
ctactgccaggcactgtact

SEQ ID NO: 11439 - DNA, 20 bp, Artificial Sequence
  chemically synthesized
caatatccatgctcactctc

SEQ ID NO: 11440 - DNA, 20 bp, Artificial Sequence
  chemically synthesized
tctccagatgcccacacacg

SEQ ID NO: 11441 - DNA, 20 bp, Artificial Sequence
  chemically synthesized
gtggctgtaactactgttta

SEQ ID NO: 11442 - DNA, 20 bp, Artificial Sequence
  chemically synthesized
actactgtttacagaacaat

SEQ ID NO: 11443 - DNA, 20 bp, Artificial Sequence
  chemically synthesized
gagttccaaatactcaccta

SEQ ID NO: 11444 - DNA, 20 bp, Artificial Sequence
  chemically synthesized
tccaaatactcacctatagt

SEQ ID NO: 11445 - DNA, 20 bp, Artificial Sequence
  chemically synthesized
cagatacgtctcctgaattt

SEQ ID NO: 11446 - DNA, 20 bp, Artificial Sequence
  chemically synthesized
cctaactgtatatcataatg

SEQ ID NO: 11447 - DNA, 20 bp, Artificial Sequence
  chemically synthesized
actgtatatcataatgtagc

SEQ ID NO: 11448 - DNA, 20 bp, Artificial Sequence
  chemically synthesized
tatcataatgtagccagtaa

SEQ ID NO: 11449 - DNA, 20 bp, Artificial Sequence
  chemically synthesized
atgtaatgcttctgctgtgt

SEQ ID NO: 11450 - DNA, 20 bp, Artificial Sequence
  chemically synthesized
gctgtgttggacactgtgct

SEQ ID NO: 11451 - DNA, 20 bp, Artificial Sequence
  chemically synthesized
atctcacttcatcctcacaa

SEQ ID NO: 11452 - DNA, 20 bp, Artificial Sequence
  chemically synthesized
catcctcacaaaagtcccac

SEQ ID NO: 11453 - DNA, 20 bp, Artificial Sequence
  chemically synthesized
ctcacaaaagtcccacgaga

SEQ ID NO: 11454 - DNA, 20 bp, Artificial Sequence
  chemically synthesized
tcacaaaagtcccacgagat

SEQ ID NO: 11455 - DNA, 20 bp, Artificial Sequence
  chemically synthesized
gtcatcttatttttatgaat

SEQ ID NO: 11456 - DNA, 20 bp, Artificial Sequence
  chemically synthesized
tcatcttatttttatgaatg

SEQ ID NO: 11457 - DNA, 20 bp, Artificial Sequence
  chemically synthesized
tcttatttttatgaatgagg

SEQ ID NO: 11458 - DNA, 20 bp, Artificial Sequence
  chemically synthesized
atttttatgaatgaggaaga

SEQ ID NO: 11459 - DNA, 20 bp, Artificial Sequence
  chemically synthesized
gaatgaggaagatagattca

SEQ ID NO: 11460 - DNA, 20 bp, Artificial Sequence
  chemically synthesized
atgaggaagatagattcata

SEQ ID NO: 11461 - DNA, 20 bp, Artificial Sequence
  chemically synthesized
tgaggaagatagattcatag

SEQ ID NO: 11462 - DNA, 20 bp, Artificial Sequence
  chemically synthesized
aagatagattcatagaggct

SEQ ID NO: 11463 - DNA, 20 bp, Artificial Sequence
  chemically synthesized
agatagattcatagaggcta

SEQ ID NO: 11464 - DNA, 20 bp, Artificial Sequence
  chemically synthesized
gatagattcatagaggctaa

SEQ ID NO: 11465 - DNA, 20 bp, Artificial Sequence
  chemically synthesized
agaggctaagggctttgccc

SEQ ID NO: 11466 - DNA, 20 bp, Artificial Sequence
  chemically synthesized
gaggctaagggctttgccca

SEQ ID NO: 11467 - DNA, 20 bp, Artificial Sequence
  chemically synthesized
aggtaacatactaaaacatt

SEQ ID NO: 11468 - DNA, 20 bp, Artificial Sequence
  chemically synthesized
ggtaacatactaaaacattc

SEQ ID NO: 11469 - DNA, 20 bp, Artificial Sequence
  chemically synthesized
atactaaaacattcaggatt

SEQ ID NO: 11470 - DNA, 20 bp, Artificial Sequence
  chemically synthesized
aacattcaggattcagactc

SEQ ID NO: 11471 - DNA, 20 bp, Artificial Sequence
  chemically synthesized
attcaggattcagactctgg

SEQ ID NO: 11472 - DNA, 20 bp, Artificial Sequence
  chemically synthesized
aggattcagactctggcagt

SEQ ID NO: 11473 - DNA, 20 bp, Artificial Sequence
  chemically synthesized
agactctggcagtcagacta

SEQ ID NO: 11474 - DNA, 20 bp, Artificial Sequence
  chemically synthesized
actctggcagtcagactaaa

SEQ ID NO: 11475 - DNA, 20 bp, Artificial Sequence
  chemically synthesized
tggcagtcagactaaagagc

SEQ ID NO: 11476 - DNA, 20 bp, Artificial Sequence
  chemically synthesized
gactaaagagccagttctct

SEQ ID NO: 11477 - DNA, 20 bp, Artificial Sequence
  chemically synthesized
ttctcttagacattattctg

SEQ ID NO: 11478 - DNA, 20 bp, Artificial Sequence
  chemically synthesized
ccataatcacatcaaacaca

SEQ ID NO: 11479 - DNA, 20 bp, Artificial Sequence
  chemically synthesized
acatcaaacacaaagtcccc

SEQ ID NO: 11480 - DNA, 20 bp, Artificial Sequence
  chemically synthesized
acacaaagtccccaagactc

SEQ ID NO: 11481 - DNA, 20 bp, Artificial Sequence
  chemically synthesized
gccatttccccttccatacc

SEQ ID NO: 11482 - DNA, 20 bp, Artificial Sequence
  chemically synthesized
tttccccttccatacccaga

SEQ ID NO: 11483 - DNA, 20 bp, Artificial Sequence
  chemically synthesized
ccttccatacccagatggtt

SEQ ID NO: 11484 - DNA, 20 bp, Artificial Sequence
  chemically synthesized
ttttttgtactgctactgtt

SEQ ID NO: 11485 - DNA, 20 bp, Artificial Sequence
  chemically synthesized
tttttgtactgctactgttc

SEQ ID NO: 11486 - DNA, 20 bp, Artificial Sequence
  chemically synthesized
tactgctactgttcaggttc

SEQ ID NO: 11487 - DNA, 20 bp, Artificial Sequence
  chemically synthesized
tctagcctttatgtctcccg

SEQ ID NO: 11488 - DNA, 20 bp, Artificial Sequence
  chemically synthesized
tctcccgcagataattgcaa

SEQ ID NO: 11489 - DNA, 20 bp, Artificial Sequence
  chemically synthesized
gcagataattgcaatagtct

SEQ ID NO: 11490 - DNA, 20 bp, Artificial Sequence
  chemically synthesized
cagataattgcaatagtctc

SEQ ID NO: 11491 - DNA, 20 bp, Artificial Sequence
  chemically synthesized
gtctcaggactgctctctcc

SEQ ID NO: 11492 - DNA, 20 bp, Artificial Sequence
  chemically synthesized
ggactgctctctcctagtct

SEQ ID NO: 11493 - DNA, 20 bp, Artificial Sequence
  chemically synthesized
gctctctcctagtcttggta

SEQ ID NO: 11494 - DNA, 20 bp, Artificial Sequence
  chemically synthesized
ctcccccactatcatttcat

SEQ ID NO: 11495 - DNA, 20 bp, Artificial Sequence
  chemically synthesized
tcatttcattagcgtgttgc

SEQ ID NO: 11496 - DNA, 20 bp, Artificial Sequence
  chemically synthesized
tcattagcgtgttgccagac

SEQ ID NO: 11497 - DNA, 20 bp, Artificial Sequence
  chemically synthesized
cattagcgtgttgccagact

SEQ ID NO: 11498 - DNA, 20 bp, Artificial Sequence
  chemically synthesized
ccagactgggcatcctaaat

SEQ ID NO: 11499 - DNA, 20 bp, Artificial Sequence
  chemically synthesized
gggcatcctaaatcagccat

SEQ ID NO: 11500 - DNA, 20 bp, Artificial Sequence
  chemically synthesized
catcctaaatcagccatcag

SEQ ID NO: 11501 - DNA, 20 bp, Artificial Sequence
  chemically synthesized
attttattgtccaatctcct

SEQ ID NO: 11502 - DNA, 20 bp, Artificial Sequence
  chemically synthesized
ttttattgtccaatctcctt

SEQ ID NO: 11503 - DNA, 20 bp, Artificial Sequence
  chemically synthesized
tgacttcattatctgatgac

SEQ ID NO: 11504 - DNA, 20 bp, Artificial Sequence
  chemically synthesized
atctgatgaccagctctgcc

SEQ ID NO: 11505 - DNA, 20 bp, Artificial Sequence
  chemically synthesized
tttacctgtctcacttgtca

SEQ ID NO: 11506 - DNA, 20 bp, Artificial Sequence
  chemically synthesized
ctcacttgtcatagtccata

SEQ ID NO: 11507 - DNA, 20 bp, Artificial Sequence
  chemically synthesized
cctcacgttcttgcaaatct

SEQ ID NO: 11508 - DNA, 20 bp, Artificial Sequence
  chemically synthesized
gcaaatctgagtctttgcac

SEQ ID NO: 11509 - DNA, 20 bp, Artificial Sequence
  chemically synthesized
tgcataaaatgcccttatat

SEQ ID NO: 11510 - DNA, 20 bp, Artificial Sequence
  chemically synthesized
gcccttatatcagacattta

SEQ ID NO: 11511 - DNA, 20 bp, Artificial Sequence
  chemically synthesized
ccttatatcagacatttaaa

SEQ ID NO: 11512 - DNA, 20 bp, Artificial Sequence
  chemically synthesized
ttatatcagacatttaaaga

SEQ ID NO: 11513 - DNA, 20 bp, Artificial Sequence
  chemically synthesized
atatcagacatttaaagaga

SEQ ID NO: 11514 - DNA, 20 bp, Artificial Sequence
  chemically synthesized
agaacgcctactcatctttt

SEQ ID NO: 11515 - DNA, 20 bp, Artificial Sequence
  chemically synthesized
cctactcatcttttaagacc

SEQ ID NO: 11516 - DNA, 20 bp, Artificial Sequence
  chemically synthesized
ttcctttctctatgatccct

SEQ ID NO: 11517 - DNA, 20 bp, Artificial Sequence
  chemically synthesized
ctctatgatcccttagtacc

SEQ ID NO: 11518 - DNA, 20 bp, Artificial Sequence
  chemically synthesized
ttatattgaaacctctcacc

SEQ ID NO: 11519 - DNA, 20 bp, Artificial Sequence
  chemically synthesized
cacctggcctcatgctgctt

SEQ ID NO: 11520 - DNA, 20 bp, Artificial Sequence
  chemically synthesized
cctcatgctgctttagatca

SEQ ID NO: 11521 - DNA, 20 bp, Artificial Sequence
  chemically synthesized
tcatgctgctttagatcaaa

SEQ ID NO: 11522 - DNA, 20 bp, Artificial Sequence
  chemically synthesized
catgctgctttagatcaaag

SEQ ID NO: 11523 - DNA, 20 bp, Artificial Sequence
  chemically synthesized
atgctgctttagatcaaaga

SEQ ID NO: 11524 - DNA, 20 bp, Artificial Sequence
  chemically synthesized
gctgctttagatcaaagagg

SEQ ID NO: 11525 - DNA, 20 bp, Artificial Sequence
  chemically synthesized
tttagatcaaagagggagtc

SEQ ID NO: 11526 - DNA, 20 bp, Artificial Sequence
  chemically synthesized
ctggtttatccccatacccc

SEQ ID NO: 11527 - DNA, 20 bp, Artificial Sequence
  chemically synthesized
atacccctagtaccctgaca

SEQ ID NO: 11528 - DNA, 20 bp, Artificial Sequence
  chemically synthesized
tagtaccctgacacagtacc

SEQ ID NO: 11529 - DNA, 20 bp, Artificial Sequence
  chemically synthesized
tgacacagtacctggcacca

SEQ ID NO: 11530 - DNA, 20 bp, Artificial Sequence
  chemically synthesized
ctggcaccatagttgtaact

SEQ ID NO: 11531 - DNA, 20 bp, Artificial Sequence
  chemically synthesized
aactcagtaatgtctgaatg

SEQ ID NO: 11532 - DNA, 20 bp, Artificial Sequence
  chemically synthesized
actcagtaatgtctgaatga

SEQ ID NO: 11533 - DNA, 20 bp, Artificial Sequence
  chemically synthesized
tacactttacaaaactaaac

SEQ ID NO: 11534 - DNA, 20 bp, Artificial Sequence
  chemically synthesized
acaaaactaaactggtttta

SEQ ID NO: 11535 - DNA, 20 bp, Artificial Sequence
  chemically synthesized
aactgttgcaataataccta

SEQ ID NO: 11536 - DNA, 20 bp, Artificial Sequence
  chemically synthesized
actgttgcaataatacctaa

SEQ ID NO: 11537 - DNA, 20 bp, Artificial Sequence
  chemically synthesized
gttgcaataatacctaaagg

SEQ ID NO: 11538 - DNA, 20 bp, Artificial Sequence
  chemically synthesized
gcaataatacctaaaggcag

SEQ ID NO: 11539 - DNA, 20 bp, Artificial Sequence
  chemically synthesized
gccatgaaaatgcaacatct

SEQ ID NO: 11540 - DNA, 20 bp, Artificial Sequence
  chemically synthesized
tcactcaccgaaactccttt

SEQ ID NO: 11541 - DNA, 20 bp, Artificial Sequence
  chemically synthesized
ctcaccgaaactccttttag

SEQ ID NO: 11542 - DNA, 20 bp, Artificial Sequence
  chemically synthesized
aactccttttagaagccaat

SEQ ID NO: 11543 - DNA, 20 bp, Artificial Sequence
  chemically synthesized
ctccttttagaagccaatga

SEQ ID NO: 11544 - DNA, 20 bp, Artificial Sequence
  chemically synthesized
agaagccaatgagagtttaa

SEQ ID NO: 11545 - DNA, 20 bp, Artificial Sequence
  chemically synthesized
agccaatgagagtttaatag

SEQ ID NO: 11546 - DNA, 20 bp, Artificial Sequence
  chemically synthesized
caatgagagtttaatagcag

SEQ ID NO: 11547 - DNA, 20 bp, Artificial Sequence
  chemically synthesized
atgagagtttaatagcagaa

SEQ ID NO: 11548 - DNA, 20 bp, Artificial Sequence
  chemically synthesized
gagagtttaatagcagaaga

SEQ ID NO: 11549 - DNA, 20 bp, Artificial Sequence
  chemically synthesized
gcattaatactgtctatcct

SEQ ID NO: 11550 - DNA, 20 bp, Artificial Sequence
  chemically synthesized
tatccttagaaaaattcccc

SEQ ID NO: 11551 - DNA, 20 bp, Artificial Sequence
  chemically synthesized
attcccctggccccttcctc

SEQ ID NO: 11552 - DNA, 20 bp, Artificial Sequence
  chemically synthesized
ttcccctggccccttcctca

SEQ ID NO: 11553 - DNA, 20 bp, Artificial Sequence
  chemically synthesized
tcccctggccccttcctcaa

SEQ ID NO: 11554 - DNA, 20 bp, Artificial Sequence
  chemically synthesized
cctcaagggcttattatctc

SEQ ID NO: 11555 - DNA, 20 bp, Artificial Sequence
  chemically synthesized
cttattatctctggctacaa

SEQ ID NO: 11556 - DNA, 20 bp, Artificial Sequence
  chemically synthesized
atctctggctacaatggctg

SEQ ID NO: 11557 - DNA, 20 bp, Artificial Sequence
  chemically synthesized
aatcacattgcctttctcct

SEQ ID NO: 11558 - DNA, 20 bp, Artificial Sequence
  chemically synthesized
cctttctccttagtattatc

SEQ ID NO: 11559 - DNA, 20 bp, Artificial Sequence
  chemically synthesized
ctttctccttagtattatct

SEQ ID NO: 11560 - DNA, 20 bp, Artificial Sequence
  chemically synthesized
tttctccttagtattatctg

SEQ ID NO: 11561 - DNA, 20 bp, Artificial Sequence
  chemically synthesized
tcgtatacttaacttccctt

SEQ ID NO: 11562 - DNA, 20 bp, Artificial Sequence
  chemically synthesized
cgtatacttaacttcccttc

SEQ ID NO: 11563 - DNA, 20 bp, Artificial Sequence
  chemically synthesized
cttcccttcaggtttatcgc

SEQ ID NO: 11564 - DNA, 20 bp, Artificial Sequence
  chemically synthesized
tatcgctagtcattatttcc

SEQ ID NO: 11565 - DNA, 20 bp, Artificial Sequence
  chemically synthesized
atcgctagtcattatttccc

SEQ ID NO: 11566 - DNA, 20 bp, Artificial Sequence
  chemically synthesized
cattatttcccaggctccaa

SEQ ID NO: 11567 - DNA, 20 bp, Artificial Sequence
  chemically synthesized
tttcccaggctccaaaagcc

SEQ ID NO: 11568 - DNA, 20 bp, Artificial Sequence
  chemically synthesized
attcttatctatcctttccc

SEQ ID NO: 11569 - DNA, 20 bp, Artificial Sequence
  chemically synthesized
tatcctttccccagcatctg

SEQ ID NO: 11570 - DNA, 20 bp, Artificial Sequence
  chemically synthesized
ccccagcatctgaagtcttc

SEQ ID NO: 11571 - DNA, 20 bp, Artificial Sequence
  chemically synthesized
cccagcatctgaagtcttca

SEQ ID NO: 11572 - DNA, 20 bp, Artificial Sequence
  chemically synthesized
ccagcatctgaagtcttcaa

SEQ ID NO: 11573 - DNA, 20 bp, Artificial Sequence
  chemically synthesized
cagcatctgaagtcttcaag

SEQ ID NO: 11574 - DNA, 20 bp, Artificial Sequence
  chemically synthesized
agcatctgaagtcttcaagg

SEQ ID NO: 11575 - DNA, 20 bp, Artificial Sequence
  chemically synthesized
atctgaagtcttcaaggggg

SEQ ID NO: 11576 - DNA, 20 bp, Artificial Sequence
  chemically synthesized
tgaagtcttcaagggggcag

SEQ ID NO: 11577 - DNA, 20 bp, Artificial Sequence
  chemically synthesized
tcatcatctcaccacttata

SEQ ID NO: 11578 - DNA, 20 bp, Artificial Sequence
  chemically synthesized
tcatctcaccacttatatag

SEQ ID NO: 11579 - DNA, 20 bp, Artificial Sequence
  chemically synthesized
ctcaccacttatatagaaga

SEQ ID NO: 11580 - DNA, 20 bp, Artificial Sequence
  chemically synthesized
tcaccacttatatagaagaa

SEQ ID NO: 11581 - DNA, 20 bp, Artificial Sequence
  chemically synthesized
caccacttatatagaagaaa

SEQ ID NO: 11582 - DNA, 20 bp, Artificial Sequence
  chemically synthesized
cttatatagaagaaagggtt

SEQ ID NO: 11583 - DNA, 20 bp, Artificial Sequence
  chemically synthesized
gtttggatgctttgtcctcc

SEQ ID NO: 11584 - DNA, 20 bp, Artificial Sequence
  chemically synthesized
ctcccagatgtcacactaat

SEQ ID NO: 11585 - DNA, 20 bp, Artificial Sequence
  chemically synthesized
cactaatgagatatatctaa

SEQ ID NO: 11586 - DNA, 20 bp, Artificial Sequence
  chemically synthesized
tgctttatgtcctgctttgt

SEQ ID NO: 11587 - DNA, 20 bp, Artificial Sequence
  chemically synthesized
cttgactttactcactttgc

SEQ ID NO: 11588 - DNA, 20 bp, Artificial Sequence
  chemically synthesized
atttttttttatcgttattt

SEQ ID NO: 11589 - DNA, 20 bp, Artificial Sequence
  chemically synthesized
ttatcgttatttcagcattt

SEQ ID NO: 11590 - DNA, 20 bp, Artificial Sequence
  chemically synthesized
agcatttcagtctgatttca

SEQ ID NO: 11591 - DNA, 20 bp, Artificial Sequence
  chemically synthesized
ttcacagctgacatcatgtc

SEQ ID NO: 11592 - DNA, 20 bp, Artificial Sequence
  chemically synthesized
cacagctgacatcatgtctg

SEQ ID NO: 11593 - DNA, 20 bp, Artificial Sequence
  chemically synthesized
agctgacatcatgtctggag

SEQ ID NO: 11594 - DNA, 20 bp, Artificial Sequence
  chemically synthesized
gctgacatcatgtctggagt

SEQ ID NO: 11595 - DNA, 20 bp, Artificial Sequence
  chemically synthesized
catgtctggagtgggaacca

SEQ ID NO: 11596 - DNA, 20 bp, Artificial Sequence
  chemically synthesized
atgtctggagtgggaaccac

SEQ ID NO: 11597 - DNA, 20 bp, Artificial Sequence
  chemically synthesized
tgtctggagtgggaaccaca

SEQ ID NO: 11598 - DNA, 20 bp, Artificial Sequence
  chemically synthesized
tggagtgggaaccacagggc

SEQ ID NO: 11599 - DNA, 20 bp, Artificial Sequence
  chemically synthesized
gtgggaaccacagggccagt

SEQ ID NO: 11600 - DNA, 20 bp, Artificial Sequence
  chemically synthesized
cacagggccagtcagctttc

SEQ ID NO: 11601 - DNA, 20 bp, Artificial Sequence
  chemically synthesized
acagggccagtcagctttct

SEQ ID NO: 11602 - DNA, 20 bp, Artificial Sequence
  chemically synthesized
cagggccagtcagctttctg

SEQ ID NO: 11603 - DNA, 20 bp, Artificial Sequence
  chemically synthesized
agggccagtcagctttctgg

SEQ ID NO: 11604 - DNA, 20 bp, Artificial Sequence
  chemically synthesized
gtcagctttctgggggtgct

SEQ ID NO: 11605 - DNA, 20 bp, Artificial Sequence
  chemically synthesized
tcagctttctgggggtgctt

SEQ ID NO: 11606 - DNA, 20 bp, Artificial Sequence
  chemically synthesized
cagctttctgggggtgctta

SEQ ID NO: 11607 - DNA, 20 bp, Artificial Sequence
  chemically synthesized
tttctgggggtgcttagggt

SEQ ID NO: 11608 - DNA, 20 bp, Artificial Sequence
  chemically synthesized
agggttggcacccctgatcc

SEQ ID NO: 11609 - DNA, 20 bp, Artificial Sequence
  chemically synthesized
acccctgatcctggtactgt

SEQ ID NO: 11610 - DNA, 20 bp, Artificial Sequence
  chemically synthesized
atcctggtactgtcagctac

SEQ ID NO: 11611 - DNA, 20 bp, Artificial Sequence
  chemically synthesized
tcagctactagatttgattc

SEQ ID NO: 11612 - DNA, 20 bp, Artificial Sequence
  chemically synthesized
ctactagatttgattctaga

SEQ ID NO: 11613 - DNA, 20 bp, Artificial Sequence
  chemically synthesized
tttgattctagaaagttgac

SEQ ID NO: 11614 - DNA, 20 bp, Artificial Sequence
  chemically synthesized
attctagaaagttgacaagt

SEQ ID NO: 11615 - DNA, 20 bp, Artificial Sequence
  chemically synthesized
gtgtgataaatgcttcctgt

SEQ ID NO: 11616 - DNA, 20 bp, Artificial Sequence
  chemically synthesized
gaacatgctgtttgtccaaa

SEQ ID NO: 11617 - DNA, 20 bp, Artificial Sequence
  chemically synthesized
aacatgctgtttgtccaaat

SEQ ID NO: 11618 - DNA, 20 bp, Artificial Sequence
  chemically synthesized
cttccctgtatgccttcctc

SEQ ID NO: 11619 - DNA, 20 bp, Artificial Sequence
  chemically synthesized
ttccctgtatgccttcctct

SEQ ID NO: 11620 - DNA, 20 bp, Artificial Sequence
  chemically synthesized
cttcctctgggaaatacata

SEQ ID NO: 11621 - DNA, 20 bp, Artificial Sequence
  chemically synthesized
ggaaatacataaagtcactg

SEQ ID NO: 11622 - DNA, 20 bp, Artificial Sequence
  chemically synthesized
actgtagttgtgaaaaaaca

SEQ ID NO: 11623 - DNA, 20 bp, Artificial Sequence
  chemically synthesized
caaagtgatatatgttgcat

SEQ ID NO: 11624 - DNA, 20 bp, Artificial Sequence
  chemically synthesized
tactctttatgtcaattctt

SEQ ID NO: 11625 - DNA, 20 bp, Artificial Sequence
  chemically synthesized
ttaagcttgcttttctcccc

SEQ ID NO: 11626 - DNA, 20 bp, Artificial Sequence
  chemically synthesized
taagcttgcttttctcccct

SEQ ID NO: 11627 - DNA, 20 bp, Artificial Sequence
  chemically synthesized
aagcttgcttttctccccta

SEQ ID NO: 11628 - DNA, 20 bp, Artificial Sequence
  chemically synthesized
ctcccctagggaactcaact

SEQ ID NO: 11629 - DNA, 20 bp, Artificial Sequence
  chemically synthesized
tttccccaaatatcaactcc

SEQ ID NO: 11630 - DNA, 20 bp, Artificial Sequence
  chemically synthesized
caactccaagatgtttgaca

SEQ ID NO: 11631 - DNA, 20 bp, Artificial Sequence
  chemically synthesized
actccaagatgtttgacata

SEQ ID NO: 11632 - DNA, 20 bp, Artificial Sequence
  chemically synthesized
attttttcctaatccatgaa

SEQ ID NO: 11633 - DNA, 20 bp, Artificial Sequence
  chemically synthesized
tcctaatccatgaaaagctt

SEQ ID NO: 11634 - DNA, 20 bp, Artificial Sequence
  chemically synthesized
aaagctttggtgataactaa

SEQ ID NO: 11635 - DNA, 20 bp, Artificial Sequence
  chemically synthesized
aactaacagcttgctaatga

SEQ ID NO: 11636 - DNA, 20 bp, Artificial Sequence
  chemically synthesized
actaacagcttgctaatgaa

SEQ ID NO: 11637 - DNA, 20 bp, Artificial Sequence
  chemically synthesized
ttaactaaaactttaaattg

SEQ ID NO: 11638 - DNA, 20 bp, Artificial Sequence
  chemically synthesized
agatatataatttaaaaaat

SEQ ID NO: 11639 - DNA, 20 bp, Artificial Sequence
  chemically synthesized
atatataatttaaaaaatta

SEQ ID NO: 11640 - DNA, 20 bp, Artificial Sequence
  chemically synthesized
aatgtcatatatcttaaaat

SEQ ID NO: 11641 - DNA, 20 bp, Artificial Sequence
  chemically synthesized
atcagactttttgtgtaaat

SEQ ID NO: 11642 - DNA, 20 bp, Artificial Sequence
  chemically synthesized
tcagactttttgtgtaaata

SEQ ID NO: 11643 - DNA, 20 bp, Artificial Sequence
  chemically synthesized
tgtttcccattttgatttca

SEQ ID NO: 11644 - DNA, 20 bp, Artificial Sequence
  chemically synthesized
ttcccattttgatttcaaag

SEQ ID NO: 11645 - DNA, 20 bp, Artificial Sequence
  chemically synthesized
cattttgatttcaaagtggt

SEQ ID NO: 11646 - DNA, 20 bp, Artificial Sequence
  chemically synthesized
aagtccaaacaaaaataatg

SEQ ID NO: 11647 - DNA, 20 bp, Artificial Sequence
  chemically synthesized
acttttaatttttttaaacc

SEQ ID NO: 11648 - DNA, 20 bp, Artificial Sequence
  chemically synthesized
cttttaatttttttaaacca

SEQ ID NO: 11649 - DNA, 20 bp, Artificial Sequence
  chemically synthesized
tttaatttttttaaaccaag

SEQ ID NO: 11650 - DNA, 20 bp, Artificial Sequence
  chemically synthesized
aggagatgaatgttttctaa

SEQ ID NO: 11651 - DNA, 20 bp, Artificial Sequence
  chemically synthesized
ggagatgaatgttttctaac

SEQ ID NO: 11652 - DNA, 20 bp, Artificial Sequence
  chemically synthesized
tgaccaaatcatgaactgaa

SEQ ID NO: 11653 - DNA, 20 bp, Artificial Sequence
  chemically synthesized
attaaacataaatgcatcat

SEQ ID NO: 11654 - DNA, 20 bp, Artificial Sequence
  chemically synthesized
ataagcattgtcgatctatt

SEQ ID NO: 11655 - DNA, 20 bp, Artificial Sequence
  chemically synthesized
tctatttagttttaaaaatg

SEQ ID NO: 11656 - DNA, 20 bp, Artificial Sequence
  chemically synthesized
atttagttttaaaaatgaag

SEQ ID NO: 11657 - DNA, 20 bp, Artificial Sequence
  chemically synthesized
tagttttaaaaatgaagaag

SEQ ID NO: 11658 - DNA, 20 bp, Artificial Sequence
  chemically synthesized
aaatgaagaagaagaaaacc

SEQ ID NO: 11659 - DNA, 20 bp, Artificial Sequence
  chemically synthesized
agaagaaaacctagctaaca

SEQ ID NO: 11660 - DNA, 20 bp, Artificial Sequence
  chemically synthesized
aaacctagctaacaaagaac

SEQ ID NO: 11661 - DNA, 20 bp, Artificial Sequence
  chemically synthesized
gtacttaccaacctgcgtgc

SEQ ID NO: 11662 - DNA, 20 bp, Artificial Sequence
  chemically synthesized
ccaacctgcgtgctggctgt

SEQ ID NO: 11663 - DNA, 20 bp, Artificial Sequence
  chemically synthesized
caaatcatgtaatcaaaatt

SEQ ID NO: 11664 - DNA, 20 bp, Artificial Sequence
  chemically synthesized
catgtaatcaaaatttagtg

SEQ ID NO: 11665 - DNA, 20 bp, Artificial Sequence
  chemically synthesized
gtaatcaaaatttagtgaag

SEQ ID NO: 11666 - DNA, 20 bp, Artificial Sequence
  chemically synthesized
tcaaaatttagtgaagaaga

SEQ ID NO: 11667 - DNA, 20 bp, Artificial Sequence
  chemically synthesized
tttagtgaagaagacagcat

SEQ ID NO: 11668 - DNA, 20 bp, Artificial Sequence
  chemically synthesized
tcagatatttctatatctaa

SEQ ID NO: 11669 - DNA, 20 bp, Artificial Sequence
  chemically synthesized
cagatatttctatatctaaa

SEQ ID NO: 11670 - DNA, 20 bp, Artificial Sequence
  chemically synthesized
tatttctatatctaaaaggc

SEQ ID NO: 11671 - DNA, 20 bp, Artificial Sequence
  chemically synthesized
atactcaatgtattttaaaa

SEQ ID NO: 11672 - DNA, 20 bp, Artificial Sequence
  chemically synthesized
tactcaatgtattttaaaaa

SEQ ID NO: 11673 - DNA, 20 bp, Artificial Sequence
  chemically synthesized
aggaaacaaacctgtacatt

SEQ ID NO: 11674 - DNA, 20 bp, Artificial Sequence
  chemically synthesized
aaacctgtacattcagcact

SEQ ID NO: 11675 - DNA, 20 bp, Artificial Sequence
  chemically synthesized
cctgtacattcagcactgag

SEQ ID NO: 11676 - DNA, 20 bp, Artificial Sequence
  chemically synthesized
gcactgagtagatatcctaa

SEQ ID NO: 11677 - DNA, 20 bp, Artificial Sequence
  chemically synthesized
cactgagtagatatcctaaa

SEQ ID NO: 11678 - DNA, 20 bp, Artificial Sequence
  chemically synthesized
tgagtagatatcctaaaagg

SEQ ID NO: 11679 - DNA, 20 bp, Artificial Sequence
  chemically synthesized
tagatatcctaaaaggcaga

SEQ ID NO: 11680 - DNA, 20 bp, Artificial Sequence
  chemically synthesized
cctaaaaggcagatggtgat

SEQ ID NO: 11681 - DNA, 20 bp, Artificial Sequence
  chemically synthesized
ctaaaaggcagatggtgatg

SEQ ID NO: 11682 - DNA, 20 bp, Artificial Sequence
  chemically synthesized
aggcagatggtgatgaggcc

SEQ ID NO: 11683 - DNA, 20 bp, Artificial Sequence
  chemically synthesized
acgcgctgcataacctttgc

SEQ ID NO: 11684 - DNA, 20 bp, Artificial Sequence
  chemically synthesized
cgctgcataacctttgctag

SEQ ID NO: 11685 - DNA, 20 bp, Artificial Sequence
  chemically synthesized
cctttgctagcagattgtga

SEQ ID NO: 11686 - DNA, 20 bp, Artificial Sequence
  chemically synthesized
ttgctagcagattgtgaaag

SEQ ID NO: 11687 - DNA, 20 bp, Artificial Sequence
  chemically synthesized
gcgcgtgaacatgatcatgg

SEQ ID NO: 11688 - DNA, 20 bp, Artificial Sequence
  chemically synthesized
cctcatcaccatctgccttt

SEQ ID NO: 11689 - DNA, 20 bp, Artificial Sequence
  chemically synthesized
tttaggatatctactcagtg

SEQ ID NO: 11690 - DNA, 20 bp, Artificial Sequence
  chemically synthesized
gtttccttttttaaaataca

SEQ ID NO: 11691 - DNA, 20 bp, Artificial Sequence
  chemically synthesized
atgatttgacagcaatattg

SEQ ID NO: 11692 - DNA, 20 bp, Artificial Sequence
  chemically synthesized
gtgggaaaacaaagaaatag

SEQ ID NO: 11693 - DNA, 20 bp, Artificial Sequence
  chemically synthesized
agttatcaccaaagcttttc

SEQ ID NO: 11694 - DNA, 20 bp, Artificial Sequence
  chemically synthesized
tgtctctatgtcaaacatct

SEQ ID NO: 11695 - DNA, 20 bp, Artificial Sequence
  chemically synthesized
tggggaaacacaatactcag

SEQ ID NO: 11696 - DNA, 20 bp, Artificial Sequence
  chemically synthesized
taggggagaaaagcaagctt

SEQ ID NO: 11697 - DNA, 20 bp, Artificial Sequence
  chemically synthesized
caagcttaagaattgacata

SEQ ID NO: 11698 - DNA, 20 bp, Artificial Sequence
  chemically synthesized
acacttacttgtcaactttc

SEQ ID NO: 11699 - DNA, 20 bp, Artificial Sequence
  chemically synthesized
aatctagtagctgacagtac

SEQ ID NO: 11700 - DNA, 20 bp, Artificial Sequence
  chemically synthesized
tagctgacagtaccaggatc

SEQ ID NO: 11701 - DNA, 20 bp, Artificial Sequence
  chemically synthesized
acagaggttaaactagcaaa

SEQ ID NO: 11702 - DNA, 20 bp, Artificial Sequence
  chemically synthesized
tagcaaagtgagtaaagtca

SEQ ID NO: 11703 - DNA, 20 bp, Artificial Sequence
  chemically synthesized
aagacttcagatgctgggga

SEQ ID NO: 11704 - DNA, 20 bp, Artificial Sequence
  chemically synthesized
atgctggggaaaggatagat

SEQ ID NO: 11705 - DNA, 20 bp, Artificial Sequence
  chemically synthesized
gggaaaggatagataagaat

SEQ ID NO: 11706 - DNA, 20 bp, Artificial Sequence
  chemically synthesized
gcccttgaggaaggggccag

SEQ ID NO: 11707 - DNA, 20 bp, Artificial Sequence
  chemically synthesized
ggggccaggggaatttttct

SEQ ID NO: 11708 - DNA, 20 bp, Artificial Sequence
  chemically synthesized
aactctcattggcttctaaa

SEQ ID NO: 11709 - DNA, 20 bp, Artificial Sequence
  chemically synthesized
ggcttctaaaaggagtttcg

SEQ ID NO: 11710 - DNA, 20 bp, Artificial Sequence
  chemically synthesized
taggtattattgcaacagtt

SEQ ID NO: 11711 - DNA, 20 bp, Artificial Sequence
  chemically synthesized
tgtccttcattcagacatta

SEQ ID NO: 11712 - DNA, 20 bp, Artificial Sequence
  chemically synthesized
tatggtgccaggtactgtgt

SEQ ID NO: 11713 - DNA, 20 bp, Artificial Sequence
  chemically synthesized
aggtactgtgtcagggtact

SEQ ID NO: 11714 - DNA, 20 bp, Artificial Sequence
  chemically synthesized
tgtcagggtactaggggtat

SEQ ID NO: 11715 - DNA, 20 bp, Artificial Sequence
  chemically synthesized
aaaatgtgcactaggtacta

SEQ ID NO: 11716 - DNA, 20 bp, Artificial Sequence
  chemically synthesized
ggggaaacaattgatagaga

SEQ ID NO: 11717 - DNA, 20 bp, Artificial Sequence
  chemically synthesized
tagagagagaatattttcat

SEQ ID NO: 11718 - DNA, 20 bp, Artificial Sequence
  chemically synthesized
tttcatctgggtcttaaaag

SEQ ID NO: 11719 - DNA, 20 bp, Artificial Sequence
  chemically synthesized
ataagggcattttatgcaaa

SEQ ID NO: 11720 - DNA, 20 bp, Artificial Sequence
  chemically synthesized
gcaagaacgtgaggtatttc

SEQ ID NO: 11721 - DNA, 20 bp, Artificial Sequence
  chemically synthesized
ggtatcgaagtataaacata

SEQ ID NO: 11722 - DNA, 20 bp, Artificial Sequence
  chemically synthesized
agtaccactgatggctgatt

SEQ ID NO: 11723 - DNA, 20 bp, Artificial Sequence
  chemically synthesized
gtagcagtacaaaaaaagag

SEQ ID NO: 11724 - DNA, 20 bp, Artificial Sequence
  chemically synthesized
aagtggtatgacttaaccat

SEQ ID NO: 11725 - DNA, 20 bp, Artificial Sequence
  chemically synthesized
ggtatggaaggggaaatggc

SEQ ID NO: 11726 - DNA, 20 bp, Artificial Sequence
  chemically synthesized
tttgatgtgattatggacca

SEQ ID NO: 11727 - DNA, 20 bp, Artificial Sequence
  chemically synthesized
tggctctttagtctgactgc

SEQ ID NO: 11728 - DNA, 20 bp, Artificial Sequence
  chemically synthesized
tttagtctgactgccagagt

SEQ ID NO: 11729 - DNA, 20 bp, Artificial Sequence
  chemically synthesized
tgactgccagagtctgaatc

SEQ ID NO: 11730 - DNA, 20 bp, Artificial Sequence
  chemically synthesized
gggcaaagcccttagcctct

SEQ ID NO: 11731 - DNA, 20 bp, Artificial Sequence
  chemically synthesized
ctatctcgtgggacttttgt

SEQ ID NO: 11732 - DNA, 20 bp, Artificial Sequence
  chemically synthesized
tgtgaggatgaagtgagata

SEQ ID NO: 11733 - DNA, 20 bp, Artificial Sequence
  chemically synthesized
tacattatgatatacagtta

SEQ ID NO: 11734 - DNA, 20 bp, Artificial Sequence
  chemically synthesized
ggagacgtatctgactatag

SEQ ID NO: 11735 - DNA, 20 bp, Artificial Sequence
  chemically synthesized
gccacgtgtgtgggcatctg

SEQ ID NO: 11736 - DNA, 20 bp, Artificial Sequence
  chemically synthesized
tgggcatctggagagtgagc

SEQ ID NO: 11737 - DNA, 20 bp, Artificial Sequence
  chemically synthesized
tgctcagtaaattttgttga

SEQ ID NO: 11738 - DNA, 20 bp, Artificial Sequence
  chemically synthesized
taagggccatggagaggaac

SEQ ID NO: 11739 - DNA, 20 bp, Artificial Sequence
  chemically synthesized
ggagttaatcaattcaagtg

SEQ ID NO: 11740 - DNA, 20 bp, Artificial Sequence
  chemically synthesized
ttaatcaattcaagtgctgg

SEQ ID NO: 11741 - DNA, 20 bp, Artificial Sequence
  chemically synthesized
tcaagtgctggatggataac

SEQ ID NO: 11742 - DNA, 20 bp, Artificial Sequence
  chemically synthesized
gttagagcaaagcggggaac

SEQ ID NO: 11743 - DNA, 20 bp, Artificial Sequence
  chemically synthesized
agcaaagcggggaaccagaa

SEQ ID NO: 11744 - DNA, 20 bp, Artificial Sequence
  chemically synthesized
aatagagtgattattataaa

SEQ ID NO: 11745 - DNA, 20 bp, Artificial Sequence
  chemically synthesized
gaagttattaaagagctaaa

SEQ ID NO: 11746 - DNA, 20 bp, Artificial Sequence
  chemically synthesized
gaaagtagggccaacatgaa

SEQ ID NO: 11747 - DNA, 20 bp, Artificial Sequence
  chemically synthesized
ctgtacagtcagctctcctt

SEQ ID NO: 11748 - DNA, 20 bp, Artificial Sequence
  chemically synthesized
caaaaatattcaagaaaaaa

SEQ ID NO: 11749 - DNA, 20 bp, Artificial Sequence
  chemically synthesized
agatgatttaaagtacaaag

SEQ ID NO: 11750 - DNA, 20 bp, Artificial Sequence
  chemically synthesized
cacagatcttgatatttgca

SEQ ID NO: 11751 - DNA, 20 bp, Artificial Sequence
  chemically synthesized
ggtcttgccaccaattttcc

SEQ ID NO: 11752 - DNA, 20 bp, Artificial Sequence
  chemically synthesized
atactgaggaacgactgtaa

SEQ ID NO: 11753 - DNA, 20 bp, Artificial Sequence
  chemically synthesized
gactgtaaatggatgcaggc

SEQ ID NO: 11754 - DNA, 20 bp, Artificial Sequence
  chemically synthesized
tgcaggcatggatgctattt

SEQ ID NO: 11755 - DNA, 20 bp, Artificial Sequence
  chemically synthesized
gagtgtccagggccaagtaa

SEQ ID NO: 11756 - DNA, 20 bp, Artificial Sequence
  chemically synthesized
atgagttgctgagcagagag

SEQ ID NO: 11757 - DNA, 20 bp, Artificial Sequence
  chemically synthesized
cctcggctgtctgggaagag

SEQ ID NO: 11758 - DNA, 20 bp, Artificial Sequence
  chemically synthesized
ggctgctccaatttaggggc

SEQ ID NO: 11759 - DNA, 20 bp, Artificial Sequence
  chemically synthesized
caatttaggggctaggattg

SEQ ID NO: 11760 - DNA, 20 bp, Artificial Sequence
  chemically synthesized
gggtgggcacagcattgcaa

SEQ ID NO: 11761 - DNA, 20 bp, Artificial Sequence
  chemically synthesized
attgagaaatatggccaatg

SEQ ID NO: 11762 - DNA, 20 bp, Artificial Sequence
  chemically synthesized
caggcagatcacttgaggtc

SEQ ID NO: 11763 - DNA, 20 bp, Artificial Sequence
  chemically synthesized
aaaattagctgggcatggtg

SEQ ID NO: 11764 - DNA, 20 bp, Artificial Sequence
  chemically synthesized
tacttgggaggctgaggcag

SEQ ID NO: 11765 - DNA, 20 bp, Artificial Sequence
  chemically synthesized
caagactctgtcaaaaaaaa

SEQ ID NO: 11766 - DNA, 20 bp, Artificial Sequence
  chemically synthesized
ttgcagagcaagggaaaagc

SEQ ID NO: 11767 - DNA, 20 bp, Artificial Sequence
  chemically synthesized
ctttcctttctcttcctttt

SEQ ID NO: 11768 - DNA, 20 bp, Artificial Sequence
  chemically synthesized
gaacaactccaggcaacttc

SEQ ID NO: 11769 - DNA, 20 bp, Artificial Sequence
  chemically synthesized
gccatgcattccttaacaat

SEQ ID NO: 11770 - DNA, 20 bp, Artificial Sequence
  chemically synthesized
tcatcattgtgcgaacataa

SEQ ID NO: 11771 - DNA, 20 bp, Artificial Sequence
  chemically synthesized
agatagagacatctatcctc

SEQ ID NO: 11772 - DNA, 20 bp, Artificial Sequence
  chemically synthesized
acatctatcctccagagttc

SEQ ID NO: 11773 - DNA, 20 bp, Artificial Sequence
  chemically synthesized
tagcttaaaaaaaacatatc

SEQ ID NO: 11774 - DNA, 20 bp, Artificial Sequence
  chemically synthesized
taacatctagtgacagacac

SEQ ID NO: 11775 - DNA, 20 bp, Artificial Sequence
  chemically synthesized
tattctgaaaacagcccagc

SEQ ID NO: 11776 - DNA, 20 bp, Artificial Sequence
  chemically synthesized
aaaacagcccagccagggtg

SEQ ID NO: 11777 - DNA, 20 bp, Artificial Sequence
  chemically synthesized
gaaatctgaccttttattac

SEQ ID NO: 11778 - DNA, 20 bp, Artificial Sequence
  chemically synthesized
tctcttgactaaaagtaaaa

SEQ ID NO: 11779 - DNA, 20 bp, Artificial Sequence
  chemically synthesized
gaaattggctttcagattat

SEQ ID NO: 11780 - DNA, 20 bp, Artificial Sequence
  chemically synthesized
tttcttttttgctaaaacta

SEQ ID NO: 11781 - DNA, 20 bp, Artificial Sequence
  chemically synthesized
atgaaaacgccaacaaaatt

SEQ ID NO: 11782 - DNA, 20 bp, Artificial Sequence
  chemically synthesized
gtataattcaggtaaattgg

SEQ ID NO: 11783 - DNA, 20 bp, Artificial Sequence
  chemically synthesized
tgttcaagggaaccttgaga

SEQ ID NO: 11784 - DNA, 20 bp, Artificial Sequence
  chemically synthesized
aacaaactcttccaatttac

SEQ ID NO: 11785 - DNA, 20 bp, Artificial Sequence
  chemically synthesized
ttatacctctttggccgatt

SEQ ID NO: 11786 - DNA, 20 bp, Artificial Sequence
  chemically synthesized
caagaaaaactgaaatgtaa

SEQ ID NO: 11787 - DNA, 20 bp, Artificial Sequence
  chemically synthesized
ctgtatacacatggagattt

SEQ ID NO: 11788 - DNA, 20 bp, Artificial Sequence
  chemically synthesized
tcaattttacttttagtcaa

SEQ ID NO: 11789 - DNA, 20 bp, Artificial Sequence
  chemically synthesized
ggtcagatttctaatcatat

SEQ ID NO: 11790 - DNA, 20 bp, Artificial Sequence
  chemically synthesized
taatcatatttgaatttact

SEQ ID NO: 11791 - DNA, 20 bp, Artificial Sequence
  chemically synthesized
tcacttgaaaatagctcatt

SEQ ID NO: 11792 - DNA, 20 bp, Artificial Sequence
  chemically synthesized
caccctggctgggctgtttt

SEQ ID NO: 11793 - DNA, 20 bp, Artificial Sequence
  chemically synthesized
ctttggttggcaagtgttat

SEQ ID NO: 11794 - DNA, 20 bp, Artificial Sequence
  chemically synthesized
cagtgatttaagcatctctc

SEQ ID NO: 11795 - DNA, 20 bp, Artificial Sequence
  chemically synthesized
ttaagcatctctctagaatt

SEQ ID NO: 11796 - DNA, 20 bp, Artificial Sequence
  chemically synthesized
agagacactcctgaactctg

SEQ ID NO: 11797 - DNA, 20 bp, Artificial Sequence
  chemically synthesized
tggaggatagatgtctctat

SEQ ID NO: 11798 - DNA, 20 bp, Artificial Sequence
  chemically synthesized
ttgcttaatgacacatttct

SEQ ID NO: 11799 - DNA, 20 bp, Artificial Sequence
  chemically synthesized
agaatatatccccattgtta

SEQ ID NO: 11800 - DNA, 20 bp, Artificial Sequence
  chemically synthesized
cagggactcaagaagttgcc

SEQ ID NO: 11801 - DNA, 20 bp, Artificial Sequence
  chemically synthesized
ctggagttgttcctttcttc

SEQ ID NO: 11802 - DNA, 20 bp, Artificial Sequence
  chemically synthesized
ggcttataagatgaactttc

SEQ ID NO: 11803 - DNA, 20 bp, Artificial Sequence
  chemically synthesized
cattgcagctgttcacttta

SEQ ID NO: 11804 - DNA, 20 bp, Artificial Sequence
  chemically synthesized
tttgggctcactttttttct

SEQ ID NO: 11805 - DNA, 20 bp, Artificial Sequence
  chemically synthesized
ttcaactcttttttttttga

SEQ ID NO: 11806 - DNA, 20 bp, Artificial Sequence
  chemically synthesized
tcttgctctgtcgcccaggc

SEQ ID NO: 11807 - DNA, 20 bp, Artificial Sequence
  chemically synthesized
gcctcagcctcccaagtagc

SEQ ID NO: 11808 - DNA, 20 bp, Artificial Sequence
  chemically synthesized
ttttgtatttttagtaaagc

SEQ ID NO: 11809 - DNA, 20 bp, Artificial Sequence
  chemically synthesized
gcctgggcctctgaaagtgc

SEQ ID NO: 11810 - DNA, 20 bp, Artificial Sequence
  chemically synthesized
aaaaaatcaccaaaatgcag

SEQ ID NO: 11811 - DNA, 20 bp, Artificial Sequence
  chemically synthesized
ccctgcaaatatcaagatct

SEQ ID NO: 11812 - DNA, 20 bp, Artificial Sequence
  chemically synthesized
ttgttatgctgtattgttta

SEQ ID NO: 11813 - DNA, 20 bp, Artificial Sequence
  chemically synthesized
tagggaataatgaaagataa

SEQ ID NO: 11814 - DNA, 20 bp, Artificial Sequence
  chemically synthesized
tgcaaccatccatttttttc

SEQ ID NO: 11815 - DNA, 20 bp, Artificial Sequence
  chemically synthesized
tatttttgatctgcagttaa

SEQ ID NO: 11816 - DNA, 20 bp, Artificial Sequence
  chemically synthesized
gagctgactgtacagtgtgg

SEQ ID NO: 11817 - DNA, 20 bp, Artificial Sequence
  chemically synthesized
ttgagtgaaaaaacagactt

SEQ ID NO: 11818 - DNA, 20 bp, Artificial Sequence
  chemically synthesized
cagatcagacagaaataggt

SEQ ID NO: 11819 - DNA, 20 bp, Artificial Sequence
  chemically synthesized
aggtttaacagtagtataat

SEQ ID NO: 11820 - DNA, 20 bp, Artificial Sequence
  chemically synthesized
atctatctcacaggtgttgg

SEQ ID NO: 11821 - DNA, 20 bp, Artificial Sequence
  chemically synthesized
aaatgactattgtcacaatc

SEQ ID NO: 11822 - DNA, 20 bp, Artificial Sequence
  chemically synthesized
tcacaatcaggaatgaccta

SEQ ID NO: 11823 - DNA, 20 bp, Artificial Sequence
  chemically synthesized
gaatgacctaaagaataatt

SEQ ID NO: 11824 - DNA, 20 bp, Artificial Sequence
  chemically synthesized
tcctgttatccatccagcac

SEQ ID NO: 11825 - DNA, 20 bp, Artificial Sequence
  chemically synthesized
ctccatggcccttaaatgtc

SEQ ID NO: 11826 - DNA, 20 bp, Artificial Sequence
  chemically synthesized
atacttgctagggctgggac

SEQ ID NO: 11827 - DNA, 20 bp, Artificial Sequence
  chemically synthesized
taactactgtttacagaaca

SEQ ID NO: 11828 - DNA, 20 bp, Artificial Sequence
  chemically synthesized
cctatagtcagatacgtctc

SEQ ID NO: 11829 - DNA, 20 bp, Artificial Sequence
  chemically synthesized
ggcactgtcatcttattttt

SEQ ID NO: 11830 - DNA, 20 bp, Artificial Sequence
  chemically synthesized
aggtaacatactaaaacatt

SEQ ID NO: 11831 - DNA, 20 bp, Artificial Sequence
  chemically synthesized
tacctcacgttcttgcaaat

SEQ ID NO: 11832 - DNA, 20 bp, Artificial Sequence
  chemically synthesized
ttgcaaatctgagtctttgc

SEQ ID NO: 11833 - DNA, 20 bp, Artificial Sequence
  chemically synthesized
atgctgctttagatcaaaga

SEQ ID NO: 11834 - DNA, 20 bp, Artificial Sequence
  chemically synthesized
tagttgtaactcagtaatgt

SEQ ID NO: 11835 - DNA, 20 bp, Artificial Sequence
  chemically synthesized
aactccttttagaagccaat

SEQ ID NO: 11836 - DNA, 20 bp, Artificial Sequence
  chemically synthesized
atgagagtttaatagcagaa

SEQ ID NO: 11837 - DNA, 20 bp, Artificial Sequence
  chemically synthesized
atctctggctacaatggctg

SEQ ID NO: 11838 - DNA, 20 bp, Artificial Sequence
  chemically synthesized
ctttctccttagtattatct

SEQ ID NO: 11839 - DNA, 20 bp, Artificial Sequence
  chemically synthesized
ctcaccacttatatagaaga

SEQ ID NO: 11840 - DNA, 20 bp, Artificial Sequence
  chemically synthesized
acttatatagaagaaagggt

SEQ ID NO: 11841 - DNA, 20 bp, Artificial Sequence
  chemically synthesized
cttgctttatgtcctgcttt

SEQ ID NO: 11842 - DNA, 20 bp, Artificial Sequence
  chemically synthesized
ttcacagctgacatcatgtc

SEQ ID NO: 11843 - DNA, 20 bp, Artificial Sequence
  chemically synthesized
acagggccagtcagctttct

SEQ ID NO: 11844 - DNA, 20 bp, Artificial Sequence
  chemically synthesized
gtcagctttctgggggtgct

SEQ ID NO: 11845 - DNA, 20 bp, Artificial Sequence
  chemically synthesized
gaacatgctgtttgtccaaa

SEQ ID NO: 11846 - DNA, 20 bp, Artificial Sequence
  chemically synthesized
ttctcccctagggaactcaa

SEQ ID NO: 11847 - DNA, 20 bp, Artificial Sequence
  chemically synthesized
aatttttttaaaccaaggag

SEQ ID NO: 11848 - DNA, 20 bp, Artificial Sequence
  chemically synthesized
ggagatgaatgttttctaac

SEQ ID NO: 11849 - DNA, 20 bp, Artificial Sequence
  chemically synthesized
acaaacctgtacattcagca

SEQ ID NO: 11850 - DNA, 20 bp, Artificial Sequence
  chemically synthesized
agcgcgtgaacatgatcatg

SEQ ID NO: 11851 - DNA, 20 bp, Artificial Sequence
  chemically synthesized
agtatgcttgccttttagat

SEQ ID NO: 11852 - DNA, 20 bp, Artificial Sequence
  chemically synthesized
atttggtcatgtaattcctg

SEQ ID NO: 11853 - DNA, 20 bp, Artificial Sequence
  chemically synthesized
aaaattaaaagtgggaaaac

SEQ ID NO: 11854 - DNA, 20 bp, Artificial Sequence
  chemically synthesized
agtgggaaaacaaagaaata

SEQ ID NO: 11855 - DNA, 20 bp, Artificial Sequence
  chemically synthesized
actcagttgagttccctagg

SEQ ID NO: 11856 - DNA, 20 bp, Artificial Sequence
  chemically synthesized
ctaggggagaaaagcaagct

SEQ ID NO: 11857 - DNA, 20 bp, Artificial Sequence
  chemically synthesized
cccagaggaaggcatacagg

SEQ ID NO: 11858 - DNA, 20 bp, Artificial Sequence
  chemically synthesized
cacacttacttgtcaacttt

SEQ ID NO: 11859 - DNA, 20 bp, Artificial Sequence
  chemically synthesized
ggtgccaaccctaagcaccc

SEQ ID NO: 11860 - DNA, 20 bp, Artificial Sequence
  chemically synthesized
agtgagtaaagtcaagggat

SEQ ID NO: 11861 - DNA, 20 bp, Artificial Sequence
  chemically synthesized
gatgctggggaaaggataga

SEQ ID NO: 11862 - DNA, 20 bp, Artificial Sequence
  chemically synthesized
cgatccccagataatactaa

SEQ ID NO: 11863 - DNA, 20 bp, Artificial Sequence
  chemically synthesized
actaggtactaagggatcat

SEQ ID NO: 11864 - DNA, 20 bp, Artificial Sequence
  chemically synthesized
tggggaaacaattgatagag

SEQ ID NO: 11865 - DNA, 20 bp, Artificial Sequence
  chemically synthesized
gtttgatgtgattatggacc

SEQ ID NO: 11866 - DNA, 20 bp, Artificial Sequence
  chemically synthesized
agttagagcaaagcggggaa

SEQ ID NO: 11867 - DNA, 20 bp, Artificial Sequence
  chemically synthesized
aaaaagggagagatcaacaa

SEQ ID NO: 11868 - DNA, 20 bp, Artificial Sequence
  chemically synthesized
agaagttattaaagagctaa

SEQ ID NO: 11869 - DNA, 20 bp, Artificial Sequence
  chemically synthesized
attaaagagctaaagagaat

SEQ ID NO: 11870 - DNA, 20 bp, Artificial Sequence
  chemically synthesized
gaattgagaaatttaaaaca

SEQ ID NO: 11871 - DNA, 20 bp, Artificial Sequence
  chemically synthesized
ggccaacatgaaaggagtag

SEQ ID NO: 11872 - DNA, 20 bp, Artificial Sequence
  chemically synthesized
aactgcagatcaaaaatatt

SEQ ID NO: 11873 - DNA, 20 bp, Artificial Sequence
  chemically synthesized
ttacattgtattagctatta

SEQ ID NO: 11874 - DNA, 20 bp, Artificial Sequence
  chemically synthesized
tgcaaacgagtgaaggaaat

SEQ ID NO: 11875 - DNA, 20 bp, Artificial Sequence
  chemically synthesized
ctacttgggaggctgaggca

SEQ ID NO: 11876 - DNA, 20 bp, Artificial Sequence
  chemically synthesized
gtcaaaaaaaaaagagttga

SEQ ID NO: 11877 - DNA, 20 bp, Artificial Sequence
  chemically synthesized
aaaaagtctaggctaaattc

SEQ ID NO: 11878 - DNA, 20 bp, Artificial Sequence
  chemically synthesized
cagctgcaatgaaaataagg

SEQ ID NO: 11879 - DNA, 20 bp, Artificial Sequence
  chemically synthesized
aggaagtagtcccaaatacc

SEQ ID NO: 11880 - DNA, 20 bp, Artificial Sequence
  chemically synthesized
agatatattgctagaccctt

SEQ ID NO: 11881 - DNA, 20 bp, Artificial Sequence
  chemically synthesized
ttaacaatggggatatattc

SEQ ID NO: 11882 - DNA, 20 bp, Artificial Sequence
  chemically synthesized
tggtatttgtgtatctaaac

SEQ ID NO: 11883 - DNA, 20 bp, Artificial Sequence
  chemically synthesized
gagaggaaggagggagggaa

SEQ ID NO: 11884 - DNA, 20 bp, Artificial Sequence
  chemically synthesized
caaagtaaattcaaatatga

SEQ ID NO: 11885 - DNA, 20 bp, Artificial Sequence
  chemically synthesized
attttggctccatgccctaa

SEQ ID NO: 11886 - DNA, 20 bp, Artificial Sequence
  chemically synthesized
ttttcttttttgctaaaact

SEQ ID NO: 11887 - DNA, 20 bp, Artificial Sequence
  chemically synthesized
ttgttcaagggaaccttgag

SEQ ID NO: 11888 - DNA, 20 bp, Artificial Sequence
  chemically synthesized
accttgagagagaatgtatg

SEQ ID NO: 11889 - DNA, 20 bp, Artificial Sequence
  chemically synthesized
attatacctctttggccgat

SEQ ID NO: 11890 - DNA, 20 bp, Artificial Sequence
  chemically synthesized
tttgttggcgttttcatgat

SEQ ID NO: 11891 - DNA, 20 bp, Artificial Sequence
  chemically synthesized
tcaagaaaaactgaaatgta

SEQ ID NO: 11892 - DNA, 20 bp, Artificial Sequence
  chemically synthesized
aattctttagttttagcaaa

SEQ ID NO: 11893 - DNA, 20 bp, Artificial Sequence
  chemically synthesized
catgaaaattttacatctct

SEQ ID NO: 11894 - DNA, 20 bp, Artificial Sequence
  chemically synthesized
ttcaattttacttttagtca

SEQ ID NO: 11895 - DNA, 20 bp, Artificial Sequence
  chemically synthesized
ttgaatttactttggatgaa

SEQ ID NO: 11896 - DNA, 20 bp, Artificial Sequence
  chemically synthesized
tcaccctggctgggctgttt

SEQ ID NO: 11897 - DNA, 20 bp, Artificial Sequence
  chemically synthesized
agtgtctgtcactagatgtt

SEQ ID NO: 11898 - DNA, 20 bp, Artificial Sequence
  chemically synthesized
gcagtgatttaagcatctct

SEQ ID NO: 11899 - DNA, 20 bp, Artificial Sequence
  chemically synthesized
attgcttaatgacacatttc

SEQ ID NO: 11900 - DNA, 20 bp, Artificial Sequence
  chemically synthesized
ctgattaactccaaaaagga

SEQ ID NO: 11901 - DNA, 20 bp, Artificial Sequence
  chemically synthesized
aggaaagtaaaaaggaaagg

SEQ ID NO: 11902 - DNA, 20 bp, Artificial Sequence
  chemically synthesized
gttgagtgaaaaaacagact

SEQ ID NO: 11903 - DNA, 20 bp, Artificial Sequence
  chemically synthesized
agactttagaatcagatcag

SEQ ID NO: 11904 - DNA, 20 bp, Artificial Sequence
  chemically synthesized
taggtttaacagtagtataa

SEQ ID NO: 11905 - DNA, 20 bp, Artificial Sequence
  chemically synthesized
gtcacaatcaggaatgacct

SEQ ID NO: 11906 - DNA, 20 bp, Artificial Sequence
  chemically synthesized
tgcattaatactgtctatcc

SEQ ID NO: 11907 - DNA, 20 bp, Artificial Sequence
  chemically synthesized
tatctctggctacaatggct

SEQ ID NO: 11908 - DNA, 20 bp, Artificial Sequence
  chemically synthesized
atcatctcaccacttatata

SEQ ID NO: 11909 - DNA, 20 bp, Artificial Sequence
  chemically synthesized
gtcagctactagatttgatt

SEQ ID NO: 11910 - DNA, 20 bp, Artificial Sequence
  chemically synthesized
ttagttttaaaaatgaagaa

SEQ ID NO: 11911 - DNA, 20 bp, Artificial Sequence
  chemically synthesized
gttttcttcttcttcatttt

SEQ ID NO: 11912 - DNA, 20 bp, Artificial Sequence
  chemically synthesized
tggtcatgtaattcctgtta

SEQ ID NO: 11913 - DNA, 20 bp, Artificial Sequence
  chemically synthesized
tttaaaaaaattaaaagtgg

SEQ ID NO: 11914 - DNA, 20 bp, Artificial Sequence
  chemically synthesized
cttcaatttaaagttttagt

SEQ ID NO: 11915 - DNA, 20 bp, Artificial Sequence
  chemically synthesized
gggataaagaaaatttgttg

SEQ ID NO: 11916 - DNA, 20 bp, Artificial Sequence
  chemically synthesized
acagtttggaattttgaaat

SEQ ID NO: 11917 - DNA, 20 bp, Artificial Sequence
  chemically synthesized
ttgaaattaaaacagttctg

SEQ ID NO: 11918 - DNA, 20 bp, Artificial Sequence
  chemically synthesized
ctaaagagaattgagaaatt

SEQ ID NO: 11919 - DNA, 20 bp, Artificial Sequence
  chemically synthesized
acacatatatgtatatacat

SEQ ID NO: 11920 - DNA, 20 bp, Artificial Sequence
  chemically synthesized
ctaggtagatgtagcttaaa

SEQ ID NO: 11921 - DNA, 20 bp, Artificial Sequence
  chemically synthesized
catttgggcaaccatattct

SEQ ID NO: 11922 - DNA, 20 bp, Artificial Sequence
  chemically synthesized
gctttcagattatttggatt

SEQ ID NO: 11923 - DNA, 20 bp, Artificial Sequence
  chemically synthesized
catgatgttttcttttttgc

SEQ ID NO: 11924 - DNA, 20 bp, Artificial Sequence
  chemically synthesized
tttcagtttttcttgatcat

SEQ ID NO: 11925 - DNA, 20 bp, Artificial Sequence
  chemically synthesized
aagaagcacgagaagttttt

SEQ ID NO: 11926 - DNA, 20 bp, Artificial Sequence
  chemically synthesized
aaaaacttctcgtgcttctt

SEQ ID NO: 11927 - DNA, 20 bp, Artificial Sequence
  chemically synthesized
ttggcgttttcatgatcaag

SEQ ID NO: 11928 - DNA, 20 bp, Artificial Sequence
  chemically synthesized
tctttagttttagcaaaaaa

SEQ ID NO: 11929 - DNA, 20 bp, Artificial Sequence
  chemically synthesized
tgtacagtgtggttgagtga

SEQ ID NO: 11930 - DNA, 20 bp, Artificial Sequence
  chemically synthesized
ctttgcccaaggtaacatac

SEQ ID NO: 11931 - DNA, 20 bp, Artificial Sequence
  chemically synthesized
atagtccatatggaaccata

SEQ ID NO: 11932 - DNA, 20 bp, Artificial Sequence
  chemically synthesized
tctttgatgcatacacttta

SEQ ID NO: 11933 - DNA, 20 bp, Artificial Sequence
  chemically synthesized
taaagtcactgtagttgtga

SEQ ID NO: 11934 - DNA, 20 bp, Artificial Sequence
  chemically synthesized
gttaatctttatgttttaac

SEQ ID NO: 11935 - DNA, 20 bp, Artificial Sequence
  chemically synthesized
gttttaaaaatgaagaagaa

SEQ ID NO: 11936 - DNA, 20 bp, Artificial Sequence
  chemically synthesized
atctactcagtgctgaatgt

SEQ ID NO: 11937 - DNA, 20 bp, Artificial Sequence
  chemically synthesized
actcagtgctgaatgtacag

SEQ ID NO: 11938 - DNA, 20 bp, Artificial Sequence
  chemically synthesized
ccttttttaaaatacattga

SEQ ID NO: 11939 - DNA, 20 bp, Artificial Sequence
  chemically synthesized
atgctgtcttcttcactaaa

SEQ ID NO: 11940 - DNA, 20 bp, Artificial Sequence
  chemically synthesized
ttcttcactaaattttgatt

SEQ ID NO: 11941 - DNA, 20 bp, Artificial Sequence
  chemically synthesized
aagtactggttctttgttag

SEQ ID NO: 11942 - DNA, 20 bp, Artificial Sequence
  chemically synthesized
tttaaaactaaatagatcga

SEQ ID NO: 11943 - DNA, 20 bp, Artificial Sequence
  chemically synthesized
cgacaatgcttatgatgcat

SEQ ID NO: 11944 - DNA, 20 bp, Artificial Sequence
  chemically synthesized
tttaataaacactgttcagt

SEQ ID NO: 11945 - DNA, 20 bp, Artificial Sequence
  chemically synthesized
tgttagaaaacattcatctc

SEQ ID NO: 11946 - DNA, 20 bp, Artificial Sequence
  chemically synthesized
aaaaaaaataaccacattat

SEQ ID NO: 11947 - DNA, 20 bp, Artificial Sequence
  chemically synthesized
tggccttatttacacaaaaa

SEQ ID NO: 11948 - DNA, 20 bp, Artificial Sequence
  chemically synthesized
ttttaagatatatgacattt

SEQ ID NO: 11949 - DNA, 20 bp, Artificial Sequence
  chemically synthesized
taaattatatatcttcaatt

SEQ ID NO: 11950 - DNA, 20 bp, Artificial Sequence
  chemically synthesized
ttaaagttttagttaaaaca

SEQ ID NO: 11951 - DNA, 20 bp, Artificial Sequence
  chemically synthesized
agcaagctgttagttatcac

SEQ ID NO: 11952 - DNA, 20 bp, Artificial Sequence
  chemically synthesized
tagttatcaccaaagctttt

SEQ ID NO: 11953 - DNA, 20 bp, Artificial Sequence
  chemically synthesized
gagttccctaggggagaaaa

SEQ ID NO: 11954 - DNA, 20 bp, Artificial Sequence
  chemically synthesized
agctaatgcaacatatatca

SEQ ID NO: 11955 - DNA, 20 bp, Artificial Sequence
  chemically synthesized
tgagatgatgaaggttgtaa

SEQ ID NO: 11956 - DNA, 20 bp, Artificial Sequence
  chemically synthesized
tagataagaataaggatgaa

SEQ ID NO: 11957 - DNA, 20 bp, Artificial Sequence
  chemically synthesized
taatactaaggagaaaggca

SEQ ID NO: 11958 - DNA, 20 bp, Artificial Sequence
  chemically synthesized
tcttctgctattaaactctc

SEQ ID NO: 11959 - DNA, 20 bp, Artificial Sequence
  chemically synthesized
aactctcattggcttctaaa

SEQ ID NO: 11960 - DNA, 20 bp, Artificial Sequence
  chemically synthesized
cttctaaaaggagtttcggt

SEQ ID NO: 11961 - DNA, 20 bp, Artificial Sequence
  chemically synthesized
ctgcctttaggtattattgc

SEQ ID NO: 11962 - DNA, 20 bp, Artificial Sequence
  chemically synthesized
aattaaaacagttctgtaaa

SEQ ID NO: 11963 - DNA, 20 bp, Artificial Sequence
  chemically synthesized
aaacagttctgtaaaaccag

SEQ ID NO: 11964 - DNA, 20 bp, Artificial Sequence
  chemically synthesized
aagcagcatgaggccaggtg

SEQ ID NO: 11965 - DNA, 20 bp, Artificial Sequence
  chemically synthesized
gaggatcactcgtgcaaaga

SEQ ID NO: 11966 - DNA, 20 bp, Artificial Sequence
  chemically synthesized
gcaagaacgtgaggtatttc

SEQ ID NO: 11967 - DNA, 20 bp, Artificial Sequence
  chemically synthesized
ataatgaagtcattaaccta

SEQ ID NO: 11968 - DNA, 20 bp, Artificial Sequence
  chemically synthesized
acataaggagtaccactgat

SEQ ID NO: 11969 - DNA, 20 bp, Artificial Sequence
  chemically synthesized
tggctagagtcttggggact

SEQ ID NO: 11970 - DNA, 20 bp, Artificial Sequence
  chemically synthesized
tcttggggactttgtgtttg

SEQ ID NO: 11971 - DNA, 20 bp, Artificial Sequence
  chemically synthesized
actgccagagtctgaatcct

SEQ ID NO: 11972 - DNA, 20 bp, Artificial Sequence
  chemically synthesized
taaatattgtgccctacatg

SEQ ID NO: 11973 - DNA, 20 bp, Artificial Sequence
  chemically synthesized
caaagcggggaaccagaata

SEQ ID NO: 11974 - DNA, 20 bp, Artificial Sequence
  chemically synthesized
aatagagtgattattataaa

SEQ ID NO: 11975 - DNA, 20 bp, Artificial Sequence
  chemically synthesized
aaaattattctttaggtcat

SEQ ID NO: 11976 - DNA, 20 bp, Artificial Sequence
  chemically synthesized
atagtcatttcattatataa

SEQ ID NO: 11977 - DNA, 20 bp, Artificial Sequence
  chemically synthesized
catttgacaaagttaaggtt

SEQ ID NO: 11978 - DNA, 20 bp, Artificial Sequence
  chemically synthesized
caggtctagaggaggcagat

SEQ ID NO: 11979 - DNA, 20 bp, Artificial Sequence
  chemically synthesized
ttcaaacctatttctgtctg

SEQ ID NO: 11980 - DNA, 20 bp, Artificial Sequence
  chemically synthesized
ctgtctgatctgattctaaa

SEQ ID NO: 11981 - DNA, 20 bp, Artificial Sequence
  chemically synthesized
ctccttgtgagttccacagc

SEQ ID NO: 11982 - DNA, 20 bp, Artificial Sequence
  chemically synthesized
agctattaagagaaacctag

SEQ ID NO: 11983 - DNA, 20 bp, Artificial Sequence
  chemically synthesized
gatttaaagtacaaaggagg

SEQ ID NO: 11984 - DNA, 20 bp, Artificial Sequence
  chemically synthesized
ggtggcatccatctgcattt

SEQ ID NO: 11985 - DNA, 20 bp, Artificial Sequence
  chemically synthesized
tggctgctccaatttagggg

SEQ ID NO: 11986 - DNA, 20 bp, Artificial Sequence
  chemically synthesized
acaaggtgaaatggtgaaac

SEQ ID NO: 11987 - DNA, 20 bp, Artificial Sequence
  chemically synthesized
ttgggaggctgaggcaggag

SEQ ID NO: 11988 - DNA, 20 bp, Artificial Sequence
  chemically synthesized
ctgcaatgaaaataagggaa

SEQ ID NO: 11989 - DNA, 20 bp, Artificial Sequence
  chemically synthesized
gggaagaaagtttagttcat

SEQ ID NO: 11990 - DNA, 20 bp, Artificial Sequence
  chemically synthesized
acttacctaaacctaaatgg

SEQ ID NO: 11991 - DNA, 20 bp, Artificial Sequence
  chemically synthesized
ccaaaatgtcattgtgcagc

SEQ ID NO: 11992 - DNA, 20 bp, Artificial Sequence
  chemically synthesized
aaggagggagggaaggagaa

SEQ ID NO: 11993 - DNA, 20 bp, Artificial Sequence
  chemically synthesized
gtctcttcagactaggtaga

SEQ ID NO: 11994 - DNA, 20 bp, Artificial Sequence
  chemically synthesized
acatatcctgaattctagag

SEQ ID NO: 11995 - DNA, 20 bp, Artificial Sequence
  chemically synthesized
caaaggtgctgttgatctga

SEQ ID NO: 11996 - DNA, 20 bp, Artificial Sequence
  chemically synthesized
attgcttttttaaattaatg

SEQ ID NO: 11997 - DNA, 20 bp, Artificial Sequence
  chemically synthesized
catttgcagctggaccataa

SEQ ID NO: 11998 - DNA, 20 bp, Artificial Sequence
  chemically synthesized
ttcatccaaagtaaattcaa

SEQ ID NO: 11999 - DNA, 20 bp, Artificial Sequence
  chemically synthesized
atacagtactgtgggaacat

SEQ ID NO: 12000 - DNA, 20 bp, Artificial Sequence
  chemically synthesized
gctccatgccctaaagagaa

SEQ ID NO: 12001 - DNA, 20 bp, Artificial Sequence
  chemically synthesized
gccctaaagagaaattggct

SEQ ID NO: 12002 - DNA, 20 bp, Artificial Sequence
  chemically synthesized
agaaattggctttcagatta

SEQ ID NO: 12003 - DNA, 20 bp, Artificial Sequence
  chemically synthesized
taagagatgtaaaattttca

SEQ ID NO: 12004 - DNA, 20 bp, Artificial Sequence
  chemically synthesized
aaagaattattcttttacat

SEQ ID NO: 12005 - DNA, 20 bp, Artificial Sequence
  chemically synthesized
gtataattcaggtaaattgg

SEQ ID NO: 12006 - DNA, 20 bp, Artificial Sequence
  chemically synthesized
gagaatgtatggaagaaaag

SEQ ID NO: 12007 - DNA, 20 bp, Artificial Sequence
  chemically synthesized
tgtagttttgaagaagcacg

SEQ ID NO: 12008 - DNA, 20 bp, Artificial Sequence
  chemically synthesized
tcagtgttttcaaaaacttc

SEQ ID NO: 12009 - DNA, 20 bp, Artificial Sequence
  chemically synthesized
tacctgaattatacctcttt

SEQ ID NO: 12010 - DNA, 20 bp, Artificial Sequence
  chemically synthesized
tggccgattcagaattttgt

SEQ ID NO: 12011 - DNA, 20 bp, Artificial Sequence
  chemically synthesized
gaaatgtaaaagaataattc

SEQ ID NO: 12012 - DNA, 20 bp, Artificial Sequence
  chemically synthesized
tttacatctcttaagaaagt

SEQ ID NO: 12013 - DNA, 20 bp, Artificial Sequence
  chemically synthesized
cccacagtactgtatacaca

SEQ ID NO: 12014 - DNA, 20 bp, Artificial Sequence
  chemically synthesized
gagaattccagtaataaaag

SEQ ID NO: 12015 - DNA, 20 bp, Artificial Sequence
  chemically synthesized
gtgatccatcaccctggctg

SEQ ID NO: 12016 - DNA, 20 bp, Artificial Sequence
  chemically synthesized
ggcaagtgttataggaattg

SEQ ID NO: 12017 - DNA, 20 bp, Artificial Sequence
  chemically synthesized
gcatctctctagaattcagg

SEQ ID NO: 12018 - DNA, 20 bp, Artificial Sequence
  chemically synthesized
gtattttcactgtacctttt

SEQ ID NO: 12019 - DNA, 20 bp, Artificial Sequence
  chemically synthesized
tcagtacagtcacatgctgt

SEQ ID NO: 12020 - DNA, 20 bp, Artificial Sequence
  chemically synthesized
tatgtagtaagctataccat

SEQ ID NO: 12021 - DNA, 20 bp, Artificial Sequence
  chemically synthesized
ttatgttcgcacaatgatga

SEQ ID NO: 12022 - DNA, 20 bp, Artificial Sequence
  chemically synthesized
gcatggctgtatacacacac

SEQ ID NO: 12023 - DNA, 20 bp, Artificial Sequence
  chemically synthesized
gtatacacacacatgtgttt

SEQ ID NO: 12024 - DNA, 20 bp, Artificial Sequence
  chemically synthesized
gataccatctcaagaggacc

SEQ ID NO: 12025 - DNA, 20 bp, Artificial Sequence
  chemically synthesized
ctggggtatttgggactact

SEQ ID NO: 12026 - DNA, 20 bp, Artificial Sequence
  chemically synthesized
gtgttctagtcccttgacat

SEQ ID NO: 12027 - DNA, 20 bp, Artificial Sequence
  chemically synthesized
tgcctcagcctcccaagtag

SEQ ID NO: 12028 - DNA, 20 bp, Artificial Sequence
  chemically synthesized
ttttgtatttttagtaaagc

SEQ ID NO: 12029 - DNA, 20 bp, Artificial Sequence
  chemically synthesized
tgcctgggcctctgaaagtg

SEQ ID NO: 12030 - DNA, 20 bp, Artificial Sequence
  chemically synthesized
catatttctcaatttccttc

SEQ ID NO: 12031 - DNA, 20 bp, Artificial Sequence
  chemically synthesized
gctcaagtctccgatataaa

SEQ ID NO: 12032 - DNA, 20 bp, Artificial Sequence
  chemically synthesized
ctttgtactttaaatcatct

SEQ ID NO: 12033 - DNA, 20 bp, Artificial Sequence
  chemically synthesized
tgtaaatagttgttatgctg

SEQ ID NO: 12034 - DNA, 20 bp, Artificial Sequence
  chemically synthesized
tagaatcagatcagacagaa

SEQ ID NO: 12035 - DNA, 20 bp, Artificial Sequence
  chemically synthesized
ttaactttgtcaaatgtaaa

SEQ ID NO: 12036 - DNA, 20 bp, Artificial Sequence
  chemically synthesized
ttcatgttggccctactttc

SEQ ID NO: 12037 - DNA, 20 bp, Artificial Sequence
  chemically synthesized
gaatgacctaaagaataatt

SEQ ID NO: 12038 - DNA, 20 bp, Artificial Sequence
  chemically synthesized
ataatcactctattctggtt

SEQ ID NO: 12039 - DNA, 20 bp, Artificial Sequence
  chemically synthesized
tgttatccatccagcacttg

SEQ ID NO: 12040 - DNA, 20 bp, Artificial Sequence
  chemically synthesized
gggttctcccaggctccagc

SEQ ID NO: 12041 - DNA, 20 bp, Artificial Sequence
  chemically synthesized
gtatatttatgccctacagg

SEQ ID NO: 12042 - DNA, 20 bp, Artificial Sequence
  chemically synthesized
cccacacacgtggctgtaac

SEQ ID NO: 12043 - DNA, 20 bp, Artificial Sequence
  chemically synthesized
gtcagatacgtctcctgaat

SEQ ID NO: 12044 - DNA, 20 bp, Artificial Sequence
  chemically synthesized
agtaatagctaatgtatatg

SEQ ID NO: 12045 - DNA, 20 bp, Artificial Sequence
  chemically synthesized
ttatttttatgaatgaggaa

SEQ ID NO: 12046 - DNA, 20 bp, Artificial Sequence
  chemically synthesized
aagatagattcatagaggct

SEQ ID NO: 12047 - DNA, 20 bp, Artificial Sequence
  chemically synthesized
aaggtaacatactaaaacat

SEQ ID NO: 12048 - DNA, 20 bp, Artificial Sequence
  chemically synthesized
tcagccatcagtggtactcc

SEQ ID NO: 12049 - DNA, 20 bp, Artificial Sequence
  chemically synthesized
ttatctgatgaccagctctg

SEQ ID NO: 12050 - DNA, 20 bp, Artificial Sequence
  chemically synthesized
gaaaatattctctctctatc

SEQ ID NO: 12051 - DNA, 20 bp, Artificial Sequence
  chemically synthesized
aaacctctcacctggcctca

SEQ ID NO: 12052 - DNA, 20 bp, Artificial Sequence
  chemically synthesized
gctttagatcaaagagggag

SEQ ID NO: 12053 - DNA, 20 bp, Artificial Sequence
  chemically synthesized
catacactttacaaaactaa

SEQ ID NO: 12054 - DNA, 20 bp, Artificial Sequence
  chemically synthesized
aaactaaactggttttacag

SEQ ID NO: 12055 - DNA, 20 bp, Artificial Sequence
  chemically synthesized
aactccttttagaagccaat

SEQ ID NO: 12056 - DNA, 20 bp, Artificial Sequence
  chemically synthesized
attcccctggccccttcctc

SEQ ID NO: 12057 - DNA, 20 bp, Artificial Sequence
  chemically synthesized
atcgtatacttaacttccct

SEQ ID NO: 12058 - DNA, 20 bp, Artificial Sequence
  chemically synthesized
ctcaccacttatatagaaga

SEQ ID NO: 12059 - DNA, 20 bp, Artificial Sequence
  chemically synthesized
ttatatagaagaaagggttt

SEQ ID NO: 12060 - DNA, 20 bp, Artificial Sequence
  chemically synthesized
taatgagatatatctaatgg

SEQ ID NO: 12061 - DNA, 20 bp, Artificial Sequence
  chemically synthesized
tctaatggccttgctttatg

SEQ ID NO: 12062 - DNA, 20 bp, Artificial Sequence
  chemically synthesized
cttgctttatgtcctgcttt

SEQ ID NO: 12063 - DNA, 20 bp, Artificial Sequence
  chemically synthesized
cccttgactttactcacttt

SEQ ID NO: 12064 - DNA, 20 bp, Artificial Sequence
  chemically synthesized
atcgttatttcagcatttca

SEQ ID NO: 12065 - DNA, 20 bp, Artificial Sequence
  chemically synthesized
gagtgggaaccacagggcca

SEQ ID NO: 12066 - DNA, 20 bp, Artificial Sequence
  chemically synthesized
agggccagtcagctttctgg

SEQ ID NO: 12067 - DNA, 20 bp, Artificial Sequence
  chemically synthesized
tgatcctggtactgtcagct

SEQ ID NO: 12068 - DNA, 20 bp, Artificial Sequence
  chemically synthesized
ctggtactgtcagctactag

SEQ ID NO: 12069 - DNA, 20 bp, Artificial Sequence
  chemically synthesized
agttgacaagtaagtgtgat

SEQ ID NO: 12070 - DNA, 20 bp, Artificial Sequence
  chemically synthesized
aaatgcttcctgtgagaaca

SEQ ID NO: 12071 - DNA, 20 bp, Artificial Sequence
  chemically synthesized
cctactctttatgtcaattc

SEQ ID NO: 12072 - DNA, 20 bp, Artificial Sequence
  chemically synthesized
ctctttatgtcaattcttaa

SEQ ID NO: 12073 - DNA, 20 bp, Artificial Sequence
  chemically synthesized
ctagggaactcaactgagta

SEQ ID NO: 12074 - DNA, 20 bp, Artificial Sequence
  chemically synthesized
ttccccaaatatcaactcca

SEQ ID NO: 12075 - DNA, 20 bp, Artificial Sequence
  chemically synthesized
agatgtttgacatagagaca

SEQ ID NO: 12076 - DNA, 20 bp, Artificial Sequence
  chemically synthesized
tgattttttcctaatccatg

SEQ ID NO: 12077 - DNA, 20 bp, Artificial Sequence
  chemically synthesized
gaaaagctttggtgataact

SEQ ID NO: 12078 - DNA, 20 bp, Artificial Sequence
  chemically synthesized
tgctaatgaaaggttaatct

SEQ ID NO: 12079 - DNA, 20 bp, Artificial Sequence
  chemically synthesized
actttttgtgtaaataaggc

SEQ ID NO: 12080 - DNA, 20 bp, Artificial Sequence
  chemically synthesized
tgtgtaaataaggccattgt

SEQ ID NO: 12081 - DNA, 20 bp, Artificial Sequence
  chemically synthesized
aataaggccattgtttgtgc

SEQ ID NO: 12082 - DNA, 20 bp, Artificial Sequence
  chemically synthesized
gtttgtgcttttgtttccca

SEQ ID NO: 12083 - DNA, 20 bp, Artificial Sequence
  chemically synthesized
ttcactatattctgctattt

SEQ ID NO: 12084 - DNA, 20 bp, Artificial Sequence
  chemically synthesized
tttttttaaaccaaggagat

SEQ ID NO: 12085 - DNA, 20 bp, Artificial Sequence
  chemically synthesized
tgaccaaatcatgaactgaa

SEQ ID NO: 12086 - DNA, 20 bp, Artificial Sequence
  chemically synthesized
tcataagcattgtcgatcta

SEQ ID NO: 12087 - DNA, 20 bp, Artificial Sequence
  chemically synthesized
aggcagatggtgatgaggcc

SEQ ID NO: 12088 - DNA, 20 bp, Artificial Sequence
  chemically synthesized
cgcgctgcataacctttgct

SEQ ID NO: 12089 - DNA, 22 bp, Artificial Sequence
  chemically synthesized
tcacaatctgctagcaaaggtt

SEQ ID NO: 12090 - DNA, 22 bp, Artificial Sequence
  chemically synthesized
cacaatctgctagcaaaggtta

SEQ ID NO: 12091 - DNA, 22 bp, Artificial Sequence
  chemically synthesized
acaatctgctagcaaaggttat

SEQ ID NO: 12092 - DNA, 22 bp, Artificial Sequence
  chemically synthesized
ctagcaaaggttatgcagcgcg

SEQ ID NO: 12093 - DNA, 22 bp, Artificial Sequence
  chemically synthesized
gcaaaggttatgcagcgcgtga

SEQ ID NO: 12094 - DNA, 22 bp, Artificial Sequence
  chemically synthesized
tgcagcgcgtgaacatgatcat

SEQ ID NO: 12095 - DNA, 22 bp, Artificial Sequence
  chemically synthesized
atcaccatctgccttttaggat

SEQ ID NO: 12096 - DNA, 22 bp, Artificial Sequence
  chemically synthesized
ccttttaggatatctactcagt

SEQ ID NO: 12097 - DNA, 22 bp, Artificial Sequence
  chemically synthesized
ttaggatatctactcagtgctg

SEQ ID NO: 12098 - DNA, 22 bp, Artificial Sequence
  chemically synthesized
taggatatctactcagtgctga

SEQ ID NO: 12099 - DNA, 22 bp, Artificial Sequence
  chemically synthesized
aggatatctactcagtgctgaa

SEQ ID NO: 12100 - DNA, 22 bp, Artificial Sequence
  chemically synthesized
ggatatctactcagtgctgaat

SEQ ID NO: 12101 - DNA, 22 bp, Artificial Sequence
  chemically synthesized
ctcagtgctgaatgtacaggtt

SEQ ID NO: 12102 - DNA, 22 bp, Artificial Sequence
  chemically synthesized
agtgctgaatgtacaggtttgt

SEQ ID NO: 12103 - DNA, 22 bp, Artificial Sequence
  chemically synthesized
aatgtacaggtttgtttccttt

SEQ ID NO: 12104 - DNA, 22 bp, Artificial Sequence
  chemically synthesized
gtttccttttttaaaatacatt

SEQ ID NO: 12105 - DNA, 22 bp, Artificial Sequence
  chemically synthesized
tttccttttttaaaatacattg

SEQ ID NO: 12106 - DNA, 22 bp, Artificial Sequence
  chemically synthesized
ccttttttaaaatacattgagt

SEQ ID NO: 12107 - DNA, 22 bp, Artificial Sequence
  chemically synthesized
cttttttaaaatacattgagta

SEQ ID NO: 12108 - DNA, 22 bp, Artificial Sequence
  chemically synthesized
ttttaaaatacattgagtatgc

SEQ ID NO: 12109 - DNA, 22 bp, Artificial Sequence
  chemically synthesized
tttaaaatacattgagtatgct

SEQ ID NO: 12110 - DNA, 22 bp, Artificial Sequence
  chemically synthesized
ttaaaatacattgagtatgctt

SEQ ID NO: 12111 - DNA, 22 bp, Artificial Sequence
  chemically synthesized
taaaatacattgagtatgcttg

SEQ ID NO: 12112 - DNA, 22 bp, Artificial Sequence
  chemically synthesized
aaaatacattgagtatgcttgc

SEQ ID NO: 12113 - DNA, 22 bp, Artificial Sequence
  chemically synthesized
aaatacattgagtatgcttgcc

SEQ ID NO: 12114 - DNA, 22 bp, Artificial Sequence
  chemically synthesized
agtatgcttgccttttagatat

SEQ ID NO: 12115 - DNA, 22 bp, Artificial Sequence
  chemically synthesized
gccttttagatatagaaatatc

SEQ ID NO: 12116 - DNA, 22 bp, Artificial Sequence
  chemically synthesized
ccttttagatatagaaatatct

SEQ ID NO: 12117 - DNA, 22 bp, Artificial Sequence
  chemically synthesized
ttagatatagaaatatctgatg

SEQ ID NO: 12118 - DNA, 22 bp, Artificial Sequence
  chemically synthesized
tagatatagaaatatctgatgc

SEQ ID NO: 12119 - DNA, 22 bp, Artificial Sequence
  chemically synthesized
agatatagaaatatctgatgct

SEQ ID NO: 12120 - DNA, 22 bp, Artificial Sequence
  chemically synthesized
gatatagaaatatctgatgctg

SEQ ID NO: 12121 - DNA, 22 bp, Artificial Sequence
  chemically synthesized
atgctgtcttcttcactaaatt

SEQ ID NO: 12122 - DNA, 22 bp, Artificial Sequence
  chemically synthesized
tcttcttcactaaattttgatt

SEQ ID NO: 12123 - DNA, 22 bp, Artificial Sequence
  chemically synthesized
cttcactaaattttgattacat

SEQ ID NO: 12124 - DNA, 22 bp, Artificial Sequence
  chemically synthesized
ttcactaaattttgattacatg

SEQ ID NO: 12125 - DNA, 22 bp, Artificial Sequence
  chemically synthesized
cactaaattttgattacatgat

SEQ ID NO: 12126 - DNA, 22 bp, Artificial Sequence
  chemically synthesized
actaaattttgattacatgatt

SEQ ID NO: 12127 - DNA, 22 bp, Artificial Sequence
  chemically synthesized
aattttgattacatgatttgac

SEQ ID NO: 12128 - DNA, 22 bp, Artificial Sequence
  chemically synthesized
tgattacatgatttgacagcaa

SEQ ID NO: 12129 - DNA, 22 bp, Artificial Sequence
  chemically synthesized
gattacatgatttgacagcaat

SEQ ID NO: 12130 - DNA, 22 bp, Artificial Sequence
  chemically synthesized
attacatgatttgacagcaata

SEQ ID NO: 12131 - DNA, 22 bp, Artificial Sequence
  chemically synthesized
catgatttgacagcaatattga

SEQ ID NO: 12132 - DNA, 22 bp, Artificial Sequence
  chemically synthesized
gacagcaatattgaagagtcta

SEQ ID NO: 12133 - DNA, 22 bp, Artificial Sequence
  chemically synthesized
acagcaatattgaagagtctaa

SEQ ID NO: 12134 - DNA, 22 bp, Artificial Sequence
  chemically synthesized
aagagtctaacagccagcacgc

SEQ ID NO: 12135 - DNA, 22 bp, Artificial Sequence
  chemically synthesized
acagccagcacgcaggttggta

SEQ ID NO: 12136 - DNA, 22 bp, Artificial Sequence
  chemically synthesized
gtaagtactggttctttgttag

SEQ ID NO: 12137 - DNA, 22 bp, Artificial Sequence
  chemically synthesized
gttctttgttagctaggttttc

SEQ ID NO: 12138 - DNA, 22 bp, Artificial Sequence
  chemically synthesized
tttgttagctaggttttcttct

SEQ ID NO: 12139 - DNA, 22 bp, Artificial Sequence
  chemically synthesized
tgttagctaggttttcttcttc

SEQ ID NO: 12140 - DNA, 22 bp, Artificial Sequence
  chemically synthesized
gttagctaggttttcttcttct

SEQ ID NO: 12141 - DNA, 22 bp, Artificial Sequence
  chemically synthesized
ttagctaggttttcttcttctt

SEQ ID NO: 12142 - DNA, 22 bp, Artificial Sequence
  chemically synthesized
gctaggttttcttcttcttcat

SEQ ID NO: 12143 - DNA, 22 bp, Artificial Sequence
  chemically synthesized
ggttttcttcttcttcattttt

SEQ ID NO: 12144 - DNA, 22 bp, Artificial Sequence
  chemically synthesized
tcttcttcttcatttttaaaac

SEQ ID NO: 12145 - DNA, 22 bp, Artificial Sequence
  chemically synthesized
cttcttcttcatttttaaaact

SEQ ID NO: 12146 - DNA, 22 bp, Artificial Sequence
  chemically synthesized
ttcttcttcatttttaaaacta

SEQ ID NO: 12147 - DNA, 22 bp, Artificial Sequence
  chemically synthesized
cttcttcatttttaaaactaaa

SEQ ID NO: 12148 - DNA, 22 bp, Artificial Sequence
  chemically synthesized
ttcttcatttttaaaactaaat

SEQ ID NO: 12149 - DNA, 22 bp, Artificial Sequence
  chemically synthesized
cttcatttttaaaactaaatag

SEQ ID NO: 12150 - DNA, 22 bp, Artificial Sequence
  chemically synthesized
ttcatttttaaaactaaataga

SEQ ID NO: 12151 - DNA, 22 bp, Artificial Sequence
  chemically synthesized
catttttaaaactaaatagatc

SEQ ID NO: 12152 - DNA, 22 bp, Artificial Sequence
  chemically synthesized
atttttaaaactaaatagatcg

SEQ ID NO: 12153 - DNA, 22 bp, Artificial Sequence
  chemically synthesized
ttaaaactaaatagatcgacaa

SEQ ID NO: 12154 - DNA, 22 bp, Artificial Sequence
  chemically synthesized
taaaactaaatagatcgacaat

SEQ ID NO: 12155 - DNA, 22 bp, Artificial Sequence
  chemically synthesized
aaaactaaatagatcgacaatg

SEQ ID NO: 12156 - DNA, 22 bp, Artificial Sequence
  chemically synthesized
aaactaaatagatcgacaatgc

SEQ ID NO: 12157 - DNA, 22 bp, Artificial Sequence
  chemically synthesized
aatagatcgacaatgcttatga

SEQ ID NO: 12158 - DNA, 22 bp, Artificial Sequence
  chemically synthesized
atgatgcatttatgtttaataa

SEQ ID NO: 12159 - DNA, 22 bp, Artificial Sequence
  chemically synthesized
tgatgcatttatgtttaataaa

SEQ ID NO: 12160 - DNA, 22 bp, Artificial Sequence
  chemically synthesized
atgtttaataaacactgttcag

SEQ ID NO: 12161 - DNA, 22 bp, Artificial Sequence
  chemically synthesized
tgtttaataaacactgttcagt

SEQ ID NO: 12162 - DNA, 22 bp, Artificial Sequence
  chemically synthesized
aataaacactgttcagttcatg

SEQ ID NO: 12163 - DNA, 22 bp, Artificial Sequence
  chemically synthesized
ataaacactgttcagttcatga

SEQ ID NO: 12164 - DNA, 22 bp, Artificial Sequence
  chemically synthesized
ttcagttcatgatttggtcatg

SEQ ID NO: 12165 - DNA, 22 bp, Artificial Sequence
  chemically synthesized
agttcatgatttggtcatgtaa

SEQ ID NO: 12166 - DNA, 22 bp, Artificial Sequence
  chemically synthesized
atgatttggtcatgtaattcct

SEQ ID NO: 12167 - DNA, 22 bp, Artificial Sequence
  chemically synthesized
ggtcatgtaattcctgttagaa

SEQ ID NO: 12168 - DNA, 22 bp, Artificial Sequence
  chemically synthesized
gtcatgtaattcctgttagaaa

SEQ ID NO: 12169 - DNA, 22 bp, Artificial Sequence
  chemically synthesized
ctgttagaaaacattcatctcc

SEQ ID NO: 12170 - DNA, 22 bp, Artificial Sequence
  chemically synthesized
ttagaaaacattcatctccttg

SEQ ID NO: 12171 - DNA, 22 bp, Artificial Sequence
  chemically synthesized
gaaaacattcatctccttggtt

SEQ ID NO: 12172 - DNA, 22 bp, Artificial Sequence
  chemically synthesized
atctccttggtttaaaaaaatt

SEQ ID NO: 12173 - DNA, 22 bp, Artificial Sequence
  chemically synthesized
cttggtttaaaaaaattaaaag

SEQ ID NO: 12174 - DNA, 22 bp, Artificial Sequence
  chemically synthesized
ggtttaaaaaaattaaaagtgg

SEQ ID NO: 12175 - DNA, 22 bp, Artificial Sequence
  chemically synthesized
gtttaaaaaaattaaaagtggg

SEQ ID NO: 12176 - DNA, 22 bp, Artificial Sequence
  chemically synthesized
aaaaaaattaaaagtgggaaaa

SEQ ID NO: 12177 - DNA, 22 bp, Artificial Sequence
  chemically synthesized
aaaaaattaaaagtgggaaaac

SEQ ID NO: 12178 - DNA, 22 bp, Artificial Sequence
  chemically synthesized
aaagtgggaaaacaaagaaata

SEQ ID NO: 12179 - DNA, 22 bp, Artificial Sequence
  chemically synthesized
tttttgtttggacttaccactt

SEQ ID NO: 12180 - DNA, 22 bp, Artificial Sequence
  chemically synthesized
ttgtttggacttaccactttga

SEQ ID NO: 12181 - DNA, 22 bp, Artificial Sequence
  chemically synthesized
tgtttggacttaccactttgaa

SEQ ID NO: 12182 - DNA, 22 bp, Artificial Sequence
  chemically synthesized
gtttggacttaccactttgaaa

SEQ ID NO: 12183 - DNA, 22 bp, Artificial Sequence
  chemically synthesized
tttggacttaccactttgaaat

SEQ ID NO: 12184 - DNA, 22 bp, Artificial Sequence
  chemically synthesized
ggacttaccactttgaaatcaa

SEQ ID NO: 12185 - DNA, 22 bp, Artificial Sequence
  chemically synthesized
gacttaccactttgaaatcaaa

SEQ ID NO: 12186 - DNA, 22 bp, Artificial Sequence
  chemically synthesized
accactttgaaatcaaaatggg

SEQ ID NO: 12187 - DNA, 22 bp, Artificial Sequence
  chemically synthesized
ccactttgaaatcaaaatggga

SEQ ID NO: 12188 - DNA, 22 bp, Artificial Sequence
  chemically synthesized
tgaaatcaaaatgggaaacaaa

SEQ ID NO: 12189 - DNA, 22 bp, Artificial Sequence
  chemically synthesized
gaaatcaaaatgggaaacaaaa

SEQ ID NO: 12190 - DNA, 22 bp, Artificial Sequence
  chemically synthesized
aaatcaaaatgggaaacaaaag

SEQ ID NO: 12191 - DNA, 22 bp, Artificial Sequence
  chemically synthesized
atttacacaaaaagtctgattt

SEQ ID NO: 12192 - DNA, 22 bp, Artificial Sequence
  chemically synthesized
tttacacaaaaagtctgatttt

SEQ ID NO: 12193 - DNA, 22 bp, Artificial Sequence
  chemically synthesized
acacaaaaagtctgattttaag

SEQ ID NO: 12194 - DNA, 22 bp, Artificial Sequence
  chemically synthesized
cacaaaaagtctgattttaaga

SEQ ID NO: 12195 - DNA, 22 bp, Artificial Sequence
  chemically synthesized
attttaagatatatgacatttc

SEQ ID NO: 12196 - DNA, 22 bp, Artificial Sequence
  chemically synthesized
taagatatatgacatttcaagg

SEQ ID NO: 12197 - DNA, 22 bp, Artificial Sequence
  chemically synthesized
aagatatatgacatttcaaggt

SEQ ID NO: 12198 - DNA, 22 bp, Artificial Sequence
  chemically synthesized
agatatatgacatttcaaggtt

SEQ ID NO: 12199 - DNA, 22 bp, Artificial Sequence
  chemically synthesized
caaggtttcagaagtatgtaat

SEQ ID NO: 12200 - DNA, 22 bp, Artificial Sequence
  chemically synthesized
aaggtttcagaagtatgtaatg

SEQ ID NO: 12201 - DNA, 22 bp, Artificial Sequence
  chemically synthesized
cagaagtatgtaatgaggtgtg

SEQ ID NO: 12202 - DNA, 22 bp, Artificial Sequence
  chemically synthesized
agaagtatgtaatgaggtgtgt

SEQ ID NO: 12203 - DNA, 22 bp, Artificial Sequence
  chemically synthesized
taattttttaaattatatatct

SEQ ID NO: 12204 - DNA, 22 bp, Artificial Sequence
  chemically synthesized
attttttaaattatatatcttc

SEQ ID NO: 12205 - DNA, 22 bp, Artificial Sequence
  chemically synthesized
tttaaattatatatcttcaatt

SEQ ID NO: 12206 - DNA, 22 bp, Artificial Sequence
  chemically synthesized
ttaaattatatatcttcaattt

SEQ ID NO: 12207 - DNA, 22 bp, Artificial Sequence
  chemically synthesized
taaattatatatcttcaattta

SEQ ID NO: 12208 - DNA, 22 bp, Artificial Sequence
  chemically synthesized
aaattatatatcttcaatttaa

SEQ ID NO: 12209 - DNA, 22 bp, Artificial Sequence
  chemically synthesized
aattatatatcttcaatttaaa

SEQ ID NO: 12210 - DNA, 22 bp, Artificial Sequence
  chemically synthesized
tatatcttcaatttaaagtttt

SEQ ID NO: 12211 - DNA, 22 bp, Artificial Sequence
  chemically synthesized
caatttaaagttttagttaaaa

SEQ ID NO: 12212 - DNA, 22 bp, Artificial Sequence
  chemically synthesized
aatttaaagttttagttaaaac

SEQ ID NO: 12213 - DNA, 22 bp, Artificial Sequence
  chemically synthesized
aaagttttagttaaaacataaa

SEQ ID NO: 12214 - DNA, 22 bp, Artificial Sequence
  chemically synthesized
aagttttagttaaaacataaag

SEQ ID NO: 12215 - DNA, 22 bp, Artificial Sequence
  chemically synthesized
tagttaaaacataaagattaac

SEQ ID NO: 12216 - DNA, 22 bp, Artificial Sequence
  chemically synthesized
agttaaaacataaagattaacc

SEQ ID NO: 12217 - DNA, 22 bp, Artificial Sequence
  chemically synthesized
gttaaaacataaagattaacct

SEQ ID NO: 12218 - DNA, 22 bp, Artificial Sequence
  chemically synthesized
aaacataaagattaacctttca

SEQ ID NO: 12219 - DNA, 22 bp, Artificial Sequence
  chemically synthesized
acctttcattagcaagctgtta

SEQ ID NO: 12220 - DNA, 22 bp, Artificial Sequence
  chemically synthesized
tcattagcaagctgttagttat

SEQ ID NO: 12221 - DNA, 22 bp, Artificial Sequence
  chemically synthesized
cattagcaagctgttagttatc

SEQ ID NO: 12222 - DNA, 22 bp, Artificial Sequence
  chemically synthesized
attagcaagctgttagttatca

SEQ ID NO: 12223 - DNA, 22 bp, Artificial Sequence
  chemically synthesized
gcaagctgttagttatcaccaa

SEQ ID NO: 12224 - DNA, 22 bp, Artificial Sequence
  chemically synthesized
ttagttatcaccaaagcttttc

SEQ ID NO: 12225 - DNA, 22 bp, Artificial Sequence
  chemically synthesized
gttatcaccaaagcttttcatg

SEQ ID NO: 12226 - DNA, 22 bp, Artificial Sequence
  chemically synthesized
tcaccaaagcttttcatggatt

SEQ ID NO: 12227 - DNA, 22 bp, Artificial Sequence
  chemically synthesized
ttcatggattaggaaaaaatca

SEQ ID NO: 12228 - DNA, 22 bp, Artificial Sequence
  chemically synthesized
tcatggattaggaaaaaatcat

SEQ ID NO: 12229 - DNA, 22 bp, Artificial Sequence
  chemically synthesized
catggattaggaaaaaatcatt

SEQ ID NO: 12230 - DNA, 22 bp, Artificial Sequence
  chemically synthesized
atggattaggaaaaaatcattt

SEQ ID NO: 12231 - DNA, 22 bp, Artificial Sequence
  chemically synthesized
ggaaaaaatcattttgtctcta

SEQ ID NO: 12232 - DNA, 22 bp, Artificial Sequence
  chemically synthesized
tgtctctatgtcaaacatcttg

SEQ ID NO: 12233 - DNA, 22 bp, Artificial Sequence
  chemically synthesized
gtctctatgtcaaacatcttgg

SEQ ID NO: 12234 - DNA, 22 bp, Artificial Sequence
  chemically synthesized
tctctatgtcaaacatcttgga

SEQ ID NO: 12235 - DNA, 22 bp, Artificial Sequence
  chemically synthesized
tatgtcaaacatcttggagttg

SEQ ID NO: 12236 - DNA, 22 bp, Artificial Sequence
  chemically synthesized
tgtcaaacatcttggagttgat

SEQ ID NO: 12237 - DNA, 22 bp, Artificial Sequence
  chemically synthesized
ggagttgatatttggggaaaca

SEQ ID NO: 12238 - DNA, 22 bp, Artificial Sequence
  chemically synthesized
gagttgatatttggggaaacac

SEQ ID NO: 12239 - DNA, 22 bp, Artificial Sequence
  chemically synthesized
atatttggggaaacacaatact

SEQ ID NO: 12240 - DNA, 22 bp, Artificial Sequence
  chemically synthesized
ggggaaacacaatactcagttg

SEQ ID NO: 12241 - DNA, 22 bp, Artificial Sequence
  chemically synthesized
gggaaacacaatactcagttga

SEQ ID NO: 12242 - DNA, 22 bp, Artificial Sequence
  chemically synthesized
agttgagttccctaggggagaa

SEQ ID NO: 12243 - DNA, 22 bp, Artificial Sequence
  chemically synthesized
agttccctaggggagaaaagca

SEQ ID NO: 12244 - DNA, 22 bp, Artificial Sequence
  chemically synthesized
cctaggggagaaaagcaagctt

SEQ ID NO: 12245 - DNA, 22 bp, Artificial Sequence
  chemically synthesized
ggggagaaaagcaagcttaaga

SEQ ID NO: 12246 - DNA, 22 bp, Artificial Sequence
  chemically synthesized
aagaattgacataaagagtagg

SEQ ID NO: 12247 - DNA, 22 bp, Artificial Sequence
  chemically synthesized
agaattgacataaagagtagga

SEQ ID NO: 12248 - DNA, 22 bp, Artificial Sequence
  chemically synthesized
acataaagagtaggaagttagc

SEQ ID NO: 12249 - DNA, 22 bp, Artificial Sequence
  chemically synthesized
gctaatgcaacatatatcactt

SEQ ID NO: 12250 - DNA, 22 bp, Artificial Sequence
  chemically synthesized
atgcaacatatatcactttgtt

SEQ ID NO: 12251 - DNA, 22 bp, Artificial Sequence
  chemically synthesized
tgttttttcacaactacagtga

SEQ ID NO: 12252 - DNA, 22 bp, Artificial Sequence
  chemically synthesized
gttttttcacaactacagtgac

SEQ ID NO: 12253 - DNA, 22 bp, Artificial Sequence
  chemically synthesized
ttttttcacaactacagtgact

SEQ ID NO: 12254 - DNA, 22 bp, Artificial Sequence
  chemically synthesized
tttcacaactacagtgacttta

SEQ ID NO: 12255 - DNA, 22 bp, Artificial Sequence
  chemically synthesized
ttcacaactacagtgactttat

SEQ ID NO: 12256 - DNA, 22 bp, Artificial Sequence
  chemically synthesized
tcacaactacagtgactttatg

SEQ ID NO: 12257 - DNA, 22 bp, Artificial Sequence
  chemically synthesized
cacaactacagtgactttatgt

SEQ ID NO: 12258 - DNA, 22 bp, Artificial Sequence
  chemically synthesized
acaactacagtgactttatgta

SEQ ID NO: 12259 - DNA, 22 bp, Artificial Sequence
  chemically synthesized
cagtgactttatgtatttccca

SEQ ID NO: 12260 - DNA, 22 bp, Artificial Sequence
  chemically synthesized
tatgtatttcccagaggaaggc

SEQ ID NO: 12261 - DNA, 22 bp, Artificial Sequence
  chemically synthesized
atgtatttcccagaggaaggca

SEQ ID NO: 12262 - DNA, 22 bp, Artificial Sequence
  chemically synthesized
tgtatttcccagaggaaggcat

SEQ ID NO: 12263 - DNA, 22 bp, Artificial Sequence
  chemically synthesized
cccagaggaaggcatacaggga

SEQ ID NO: 12264 - DNA, 22 bp, Artificial Sequence
  chemically synthesized
ccagaggaaggcatacagggaa

SEQ ID NO: 12265 - DNA, 22 bp, Artificial Sequence
  chemically synthesized
tcccatttggacaaacagcatg

SEQ ID NO: 12266 - DNA, 22 bp, Artificial Sequence
  chemically synthesized
ggacaaacagcatgttctcaca

SEQ ID NO: 12267 - DNA, 22 bp, Artificial Sequence
  chemically synthesized
gacaaacagcatgttctcacag

SEQ ID NO: 12268 - DNA, 22 bp, Artificial Sequence
  chemically synthesized
tcacaggaagcatttatcacac

SEQ ID NO: 12269 - DNA, 22 bp, Artificial Sequence
  chemically synthesized
acaggaagcatttatcacactt

SEQ ID NO: 12270 - DNA, 22 bp, Artificial Sequence
  chemically synthesized
atcacacttacttgtcaacttt

SEQ ID NO: 12271 - DNA, 22 bp, Artificial Sequence
  chemically synthesized
tcacacttacttgtcaactttc

SEQ ID NO: 12272 - DNA, 22 bp, Artificial Sequence
  chemically synthesized
acttgtcaactttctagaatca

SEQ ID NO: 12273 - DNA, 22 bp, Artificial Sequence
  chemically synthesized
cttgtcaactttctagaatcaa

SEQ ID NO: 12274 - DNA, 22 bp, Artificial Sequence
  chemically synthesized
gtcaactttctagaatcaaatc

SEQ ID NO: 12275 - DNA, 22 bp, Artificial Sequence
  chemically synthesized
tcaactttctagaatcaaatct

SEQ ID NO: 12276 - DNA, 22 bp, Artificial Sequence
  chemically synthesized
tctagaatcaaatctagtagct

SEQ ID NO: 12277 - DNA, 22 bp, Artificial Sequence
  chemically synthesized
ctagaatcaaatctagtagctg

SEQ ID NO: 12278 - DNA, 22 bp, Artificial Sequence
  chemically synthesized
tagaatcaaatctagtagctga

SEQ ID NO: 12279 - DNA, 22 bp, Artificial Sequence
  chemically synthesized
gaatcaaatctagtagctgaca

SEQ ID NO: 12280 - DNA, 22 bp, Artificial Sequence
  chemically synthesized
gtagctgacagtaccaggatca

SEQ ID NO: 12281 - DNA, 22 bp, Artificial Sequence
  chemically synthesized
acagtaccaggatcaggggtgc

SEQ ID NO: 12282 - DNA, 22 bp, Artificial Sequence
  chemically synthesized
agcacccccagaaagctgactg

SEQ ID NO: 12283 - DNA, 22 bp, Artificial Sequence
  chemically synthesized
actggccctgtggttcccactc

SEQ ID NO: 12284 - DNA, 22 bp, Artificial Sequence
  chemically synthesized
gccctgtggttcccactccaga

SEQ ID NO: 12285 - DNA, 22 bp, Artificial Sequence
  chemically synthesized
tggttcccactccagacatgat

SEQ ID NO: 12286 - DNA, 22 bp, Artificial Sequence
  chemically synthesized
ccactccagacatgatgtcagc

SEQ ID NO: 12287 - DNA, 22 bp, Artificial Sequence
  chemically synthesized
cagacatgatgtcagctgtgaa

SEQ ID NO: 12288 - DNA, 22 bp, Artificial Sequence
  chemically synthesized
tgaaatcagactgaaatgctga

SEQ ID NO: 12289 - DNA, 22 bp, Artificial Sequence
  chemically synthesized
aaatgctgaaataacgataaaa

SEQ ID NO: 12290 - DNA, 22 bp, Artificial Sequence
  chemically synthesized
aaataacgataaaaaaaaatac

SEQ ID NO: 12291 - DNA, 22 bp, Artificial Sequence
  chemically synthesized
aactagcaaagtgagtaaagtc

SEQ ID NO: 12292 - DNA, 22 bp, Artificial Sequence
  chemically synthesized
gcaaagtgagtaaagtcaaggg

SEQ ID NO: 12293 - DNA, 22 bp, Artificial Sequence
  chemically synthesized
gttggaaaactcacaaagcagg

SEQ ID NO: 12294 - DNA, 22 bp, Artificial Sequence
  chemically synthesized
ttggaaaactcacaaagcagga

SEQ ID NO: 12295 - DNA, 22 bp, Artificial Sequence
  chemically synthesized
gaaaactcacaaagcaggacat

SEQ ID NO: 12296 - DNA, 22 bp, Artificial Sequence
  chemically synthesized
acaaagcaggacataaagcaag

SEQ ID NO: 12297 - DNA, 22 bp, Artificial Sequence
  chemically synthesized
gatatatctcattagtgtgaca

SEQ ID NO: 12298 - DNA, 22 bp, Artificial Sequence
  chemically synthesized
attagtgtgacatctgggagga

SEQ ID NO: 12299 - DNA, 22 bp, Artificial Sequence
  chemically synthesized
gtgtgacatctgggaggacaaa

SEQ ID NO: 12300 - DNA, 22 bp, Artificial Sequence
  chemically synthesized
ggaggacaaagcatccaaaccc

SEQ ID NO: 12301 - DNA, 22 bp, Artificial Sequence
  chemically synthesized
tcttctatataagtggtgagat

SEQ ID NO: 12302 - DNA, 22 bp, Artificial Sequence
  chemically synthesized
cttctatataagtggtgagatg

SEQ ID NO: 12303 - DNA, 22 bp, Artificial Sequence
  chemically synthesized
ttctatataagtggtgagatga

SEQ ID NO: 12304 - DNA, 22 bp, Artificial Sequence
  chemically synthesized
ctatataagtggtgagatgatg

SEQ ID NO: 12305 - DNA, 22 bp, Artificial Sequence
  chemically synthesized
tatataagtggtgagatgatga

SEQ ID NO: 12306 - DNA, 22 bp, Artificial Sequence
  chemically synthesized
tataagtggtgagatgatgaag

SEQ ID NO: 12307 - DNA, 22 bp, Artificial Sequence
  chemically synthesized
taagagggcttctgcccccttg

SEQ ID NO: 12308 - DNA, 22 bp, Artificial Sequence
  chemically synthesized
ctgcccccttgaagacttcaga

SEQ ID NO: 12309 - DNA, 22 bp, Artificial Sequence
  chemically synthesized
tgcccccttgaagacttcagat

SEQ ID NO: 12310 - DNA, 22 bp, Artificial Sequence
  chemically synthesized
cccccttgaagacttcagatgc

SEQ ID NO: 12311 - DNA, 22 bp, Artificial Sequence
  chemically synthesized
gaagacttcagatgctggggaa

SEQ ID NO: 12312 - DNA, 22 bp, Artificial Sequence
  chemically synthesized
aagacttcagatgctggggaaa

SEQ ID NO: 12313 - DNA, 22 bp, Artificial Sequence
  chemically synthesized
cagatgctggggaaaggataga

SEQ ID NO: 12314 - DNA, 22 bp, Artificial Sequence
  chemically synthesized
agatgctggggaaaggatagat

SEQ ID NO: 12315 - DNA, 22 bp, Artificial Sequence
  chemically synthesized
gggaaaggatagataagaataa

SEQ ID NO: 12316 - DNA, 22 bp, Artificial Sequence
  chemically synthesized
ttggagcctgggaaataatgac

SEQ ID NO: 12317 - DNA, 22 bp, Artificial Sequence
  chemically synthesized
tggagcctgggaaataatgact

SEQ ID NO: 12318 - DNA, 22 bp, Artificial Sequence
  chemically synthesized
ggagcctgggaaataatgacta

SEQ ID NO: 12319 - DNA, 22 bp, Artificial Sequence
  chemically synthesized
gagcctgggaaataatgactag

SEQ ID NO: 12320 - DNA, 22 bp, Artificial Sequence
  chemically synthesized
ggaaataatgactagcgataaa

SEQ ID NO: 12321 - DNA, 22 bp, Artificial Sequence
  chemically synthesized
gcgataaacctgaagggaagtt

SEQ ID NO: 12322 - DNA, 22 bp, Artificial Sequence
  chemically synthesized
aagggaagttaagtatacgatc

SEQ ID NO: 12323 - DNA, 22 bp, Artificial Sequence
  chemically synthesized
agtatacgatccccagataata

SEQ ID NO: 12324 - DNA, 22 bp, Artificial Sequence
  chemically synthesized
aggagaaaggcaatgtgattct

SEQ ID NO: 12325 - DNA, 22 bp, Artificial Sequence
  chemically synthesized
tgcagccattgtagccagagat

SEQ ID NO: 12326 - DNA, 22 bp, Artificial Sequence
  chemically synthesized
cagccattgtagccagagataa

SEQ ID NO: 12327 - DNA, 22 bp, Artificial Sequence
  chemically synthesized
tagccagagataataagccctt

SEQ ID NO: 12328 - DNA, 22 bp, Artificial Sequence
  chemically synthesized
gaggaaggggccaggggaattt

SEQ ID NO: 12329 - DNA, 22 bp, Artificial Sequence
  chemically synthesized
aggaaggggccaggggaatttt

SEQ ID NO: 12330 - DNA, 22 bp, Artificial Sequence
  chemically synthesized
ttctaaggatagacagtattaa

SEQ ID NO: 12331 - DNA, 22 bp, Artificial Sequence
  chemically synthesized
tctaaggatagacagtattaat

SEQ ID NO: 12332 - DNA, 22 bp, Artificial Sequence
  chemically synthesized
ctaaggatagacagtattaatg

SEQ ID NO: 12333 - DNA, 22 bp, Artificial Sequence
  chemically synthesized
taaggatagacagtattaatgc

SEQ ID NO: 12334 - DNA, 22 bp, Artificial Sequence
  chemically synthesized
aggatagacagtattaatgcag

SEQ ID NO: 12335 - DNA, 22 bp, Artificial Sequence
  chemically synthesized
atgcagcactctcttctgctat

SEQ ID NO: 12336 - DNA, 22 bp, Artificial Sequence
  chemically synthesized
tcttctgctattaaactctcat

SEQ ID NO: 12337 - DNA, 22 bp, Artificial Sequence
  chemically synthesized
ttctgctattaaactctcattg

SEQ ID NO: 12338 - DNA, 22 bp, Artificial Sequence
  chemically synthesized
ctgctattaaactctcattggc

SEQ ID NO: 12339 - DNA, 22 bp, Artificial Sequence
  chemically synthesized
tgctattaaactctcattggct

SEQ ID NO: 12340 - DNA, 22 bp, Artificial Sequence
  chemically synthesized
ctattaaactctcattggcttc

SEQ ID NO: 12341 - DNA, 22 bp, Artificial Sequence
  chemically synthesized
ttaaactctcattggcttctaa

SEQ ID NO: 12342 - DNA, 22 bp, Artificial Sequence
  chemically synthesized
aactctcattggcttctaaaag

SEQ ID NO: 12343 - DNA, 22 bp, Artificial Sequence
  chemically synthesized
tcattggcttctaaaaggagtt

SEQ ID NO: 12344 - DNA, 22 bp, Artificial Sequence
  chemically synthesized
attggcttctaaaaggagtttc

SEQ ID NO: 12345 - DNA, 22 bp, Artificial Sequence
  chemically synthesized
gcttctaaaaggagtttcggtg

SEQ ID NO: 12346 - DNA, 22 bp, Artificial Sequence
  chemically synthesized
ctaaaaggagtttcggtgagtg

SEQ ID NO: 12347 - DNA, 22 bp, Artificial Sequence
  chemically synthesized
taaaaggagtttcggtgagtga

SEQ ID NO: 12348 - DNA, 22 bp, Artificial Sequence
  chemically synthesized
aaaggagtttcggtgagtgatt

SEQ ID NO: 12349 - DNA, 22 bp, Artificial Sequence
  chemically synthesized
cggtgagtgatttgctgagatg

SEQ ID NO: 12350 - DNA, 22 bp, Artificial Sequence
  chemically synthesized
ggtgagtgatttgctgagatgt

SEQ ID NO: 12351 - DNA, 22 bp, Artificial Sequence
  chemically synthesized
gctgagatgttgcattttcatg

SEQ ID NO: 12352 - DNA, 22 bp, Artificial Sequence
  chemically synthesized
ctgagatgttgcattttcatgg

SEQ ID NO: 12353 - DNA, 22 bp, Artificial Sequence
  chemically synthesized
agatgttgcattttcatggctg

SEQ ID NO: 12354 - DNA, 22 bp, Artificial Sequence
  chemically synthesized
cattttcatggctgctgccttt

SEQ ID NO: 12355 - DNA, 22 bp, Artificial Sequence
  chemically synthesized
tcatggctgctgcctttaggta

SEQ ID NO: 12356 - DNA, 22 bp, Artificial Sequence
  chemically synthesized
catggctgctgcctttaggtat

SEQ ID NO: 12357 - DNA, 22 bp, Artificial Sequence
  chemically synthesized
atggctgctgcctttaggtatt

SEQ ID NO: 12358 - DNA, 22 bp, Artificial Sequence
  chemically synthesized
ctgcctttaggtattattgcaa

SEQ ID NO: 12359 - DNA, 22 bp, Artificial Sequence
  chemically synthesized
cctttaggtattattgcaacag

SEQ ID NO: 12360 - DNA, 22 bp, Artificial Sequence
  chemically synthesized
taggtattattgcaacagtttg

SEQ ID NO: 12361 - DNA, 22 bp, Artificial Sequence
  chemically synthesized
aggtattattgcaacagtttgg

SEQ ID NO: 12362 - DNA, 22 bp, Artificial Sequence
  chemically synthesized
ggtattattgcaacagtttgga

SEQ ID NO: 12363 - DNA, 22 bp, Artificial Sequence
  chemically synthesized
ttgcaacagtttggaattttga

SEQ ID NO: 12364 - DNA, 22 bp, Artificial Sequence
  chemically synthesized
caacagtttggaattttgaaat

SEQ ID NO: 12365 - DNA, 22 bp, Artificial Sequence
  chemically synthesized
ggaattttgaaattaaaacagt

SEQ ID NO: 12366 - DNA, 22 bp, Artificial Sequence
  chemically synthesized
gaattttgaaattaaaacagtt

SEQ ID NO: 12367 - DNA, 22 bp, Artificial Sequence
  chemically synthesized
tgaaattaaaacagttctgtaa

SEQ ID NO: 12368 - DNA, 22 bp, Artificial Sequence
  chemically synthesized
gaaattaaaacagttctgtaaa

SEQ ID NO: 12369 - DNA, 22 bp, Artificial Sequence
  chemically synthesized
aaattaaaacagttctgtaaaa

SEQ ID NO: 12370 - DNA, 22 bp, Artificial Sequence
  chemically synthesized
aaacagttctgtaaaaccagtt

SEQ ID NO: 12371 - DNA, 22 bp, Artificial Sequence
  chemically synthesized
tgtaaaaccagtttagttttgt

SEQ ID NO: 12372 - DNA, 22 bp, Artificial Sequence
  chemically synthesized
taaaaccagtttagttttgtaa

SEQ ID NO: 12373 - DNA, 22 bp, Artificial Sequence
  chemically synthesized
agttttgtaaagtgtatgcatc

SEQ ID NO: 12374 - DNA, 22 bp, Artificial Sequence
  chemically synthesized
gttttgtaaagtgtatgcatca

SEQ ID NO: 12375 - DNA, 22 bp, Artificial Sequence
  chemically synthesized
tgtaaagtgtatgcatcaaaga

SEQ ID NO: 12376 - DNA, 22 bp, Artificial Sequence
  chemically synthesized
gtaaagtgtatgcatcaaagat

SEQ ID NO: 12377 - DNA, 22 bp, Artificial Sequence
  chemically synthesized
taaagtgtatgcatcaaagatg

SEQ ID NO: 12378 - DNA, 22 bp, Artificial Sequence
  chemically synthesized
cattcagacattactgagttac

SEQ ID NO: 12379 - DNA, 22 bp, Artificial Sequence
  chemically synthesized
attcagacattactgagttaca

SEQ ID NO: 12380 - DNA, 22 bp, Artificial Sequence
  chemically synthesized
agacattactgagttacaacta

SEQ ID NO: 12381 - DNA, 22 bp, Artificial Sequence
  chemically synthesized
ctgagttacaactatggtgcca

SEQ ID NO: 12382 - DNA, 22 bp, Artificial Sequence
  chemically synthesized
agttacaactatggtgccaggt

SEQ ID NO: 12383 - DNA, 22 bp, Artificial Sequence
  chemically synthesized
caactatggtgccaggtactgt

SEQ ID NO: 12384 - DNA, 22 bp, Artificial Sequence
  chemically synthesized
tggtgccaggtactgtgtcagg

SEQ ID NO: 12385 - DNA, 22 bp, Artificial Sequence
  chemically synthesized
tgtcagggtactaggggtatgg

SEQ ID NO: 12386 - DNA, 22 bp, Artificial Sequence
  chemically synthesized
ggggtatggggataaaccagac

SEQ ID NO: 12387 - DNA, 22 bp, Artificial Sequence
  chemically synthesized
cctctttgatctaaagcagcat

SEQ ID NO: 12388 - DNA, 22 bp, Artificial Sequence
  chemically synthesized
tttgatctaaagcagcatgagg

SEQ ID NO: 12389 - DNA, 22 bp, Artificial Sequence
  chemically synthesized
tgatctaaagcagcatgaggcc

SEQ ID NO: 12390 - DNA, 22 bp, Artificial Sequence
  chemically synthesized
gatctaaagcagcatgaggcca

SEQ ID NO: 12391 - DNA, 22 bp, Artificial Sequence
  chemically synthesized
atctaaagcagcatgaggccag

SEQ ID NO: 12392 - DNA, 22 bp, Artificial Sequence
  chemically synthesized
aagcagcatgaggccaggtgag

SEQ ID NO: 12393 - DNA, 22 bp, Artificial Sequence
  chemically synthesized
caatataatgtgataaaatgtg

SEQ ID NO: 12394 - DNA, 22 bp, Artificial Sequence
  chemically synthesized
aatataatgtgataaaatgtgc

SEQ ID NO: 12395 - DNA, 22 bp, Artificial Sequence
  chemically synthesized
ggtactaagggatcatagagaa

SEQ ID NO: 12396 - DNA, 22 bp, Artificial Sequence
  chemically synthesized
agggatcatagagaaaggaaca

SEQ ID NO: 12397 - DNA, 22 bp, Artificial Sequence
  chemically synthesized
aatggggaaacaattgatagag

SEQ ID NO: 12398 - DNA, 22 bp, Artificial Sequence
  chemically synthesized
atagagagagaatattttcatc

SEQ ID NO: 12399 - DNA, 22 bp, Artificial Sequence
  chemically synthesized
tcatctgggtcttaaaagatga

SEQ ID NO: 12400 - DNA, 22 bp, Artificial Sequence
  chemically synthesized
catctgggtcttaaaagatgag

SEQ ID NO: 12401 - DNA, 22 bp, Artificial Sequence
  chemically synthesized
atctgggtcttaaaagatgagt

SEQ ID NO: 12402 - DNA, 22 bp, Artificial Sequence
  chemically synthesized
ggtcttaaaagatgagtaggcg

SEQ ID NO: 12403 - DNA, 22 bp, Artificial Sequence
  chemically synthesized
aaaagatgagtaggcgttctct

SEQ ID NO: 12404 - DNA, 22 bp, Artificial Sequence
  chemically synthesized
aaagatgagtaggcgttctctc

SEQ ID NO: 12405 - DNA, 22 bp, Artificial Sequence
  chemically synthesized
tctctctttaaatgtctgatat

SEQ ID NO: 12406 - DNA, 22 bp, Artificial Sequence
  chemically synthesized
tctctttaaatgtctgatataa

SEQ ID NO: 12407 - DNA, 22 bp, Artificial Sequence
  chemically synthesized
tctttaaatgtctgatataagg

SEQ ID NO: 12408 - DNA, 22 bp, Artificial Sequence
  chemically synthesized
tttaaatgtctgatataagggc

SEQ ID NO: 12409 - DNA, 22 bp, Artificial Sequence
  chemically synthesized
taaatgtctgatataagggcat

SEQ ID NO: 12410 - DNA, 22 bp, Artificial Sequence
  chemically synthesized
aaatgtctgatataagggcatt

SEQ ID NO: 12411 - DNA, 22 bp, Artificial Sequence
  chemically synthesized
aatgtctgatataagggcattt

SEQ ID NO: 12412 - DNA, 22 bp, Artificial Sequence
  chemically synthesized
atataagggcattttatgcaaa

SEQ ID NO: 12413 - DNA, 22 bp, Artificial Sequence
  chemically synthesized
tatgcaaagaggatcactcgtg

SEQ ID NO: 12414 - DNA, 22 bp, Artificial Sequence
  chemically synthesized
atgcaaagaggatcactcgtgc

SEQ ID NO: 12415 - DNA, 22 bp, Artificial Sequence
  chemically synthesized
tgcaaagaggatcactcgtgca

SEQ ID NO: 12416 - DNA, 22 bp, Artificial Sequence
  chemically synthesized
gtgcaaagactcagatttgcaa

SEQ ID NO: 12417 - DNA, 22 bp, Artificial Sequence
  chemically synthesized
agatttgcaagaacgtgaggta

SEQ ID NO: 12418 - DNA, 22 bp, Artificial Sequence
  chemically synthesized
gcaagaacgtgaggtatttcag

SEQ ID NO: 12419 - DNA, 22 bp, Artificial Sequence
  chemically synthesized
caagaacgtgaggtatttcagg

SEQ ID NO: 12420 - DNA, 22 bp, Artificial Sequence
  chemically synthesized
caggagttttgtatggttccat

SEQ ID NO: 12421 - DNA, 22 bp, Artificial Sequence
  chemically synthesized
aggagttttgtatggttccata

SEQ ID NO: 12422 - DNA, 22 bp, Artificial Sequence
  chemically synthesized
tgtatggttccatatggactat

SEQ ID NO: 12423 - DNA, 22 bp, Artificial Sequence
  chemically synthesized
gtatggttccatatggactatg

SEQ ID NO: 12424 - DNA, 22 bp, Artificial Sequence
  chemically synthesized
tatggttccatatggactatga

SEQ ID NO: 12425 - DNA, 22 bp, Artificial Sequence
  chemically synthesized
catatggactatgacaagtgag

SEQ ID NO: 12426 - DNA, 22 bp, Artificial Sequence
  chemically synthesized
tgacaagtgagacaggtaaact

SEQ ID NO: 12427 - DNA, 22 bp, Artificial Sequence
  chemically synthesized
ggcagagctggtcatcagataa

SEQ ID NO: 12428 - DNA, 22 bp, Artificial Sequence
  chemically synthesized
gtcatcagataatgaagtcatt

SEQ ID NO: 12429 - DNA, 22 bp, Artificial Sequence
  chemically synthesized
acctaaggagattggacaataa

SEQ ID NO: 12430 - DNA, 22 bp, Artificial Sequence
  chemically synthesized
aggagattggacaataaaatgc

SEQ ID NO: 12431 - DNA, 22 bp, Artificial Sequence
  chemically synthesized
gacaataaaatgcaatatggag

SEQ ID NO: 12432 - DNA, 22 bp, Artificial Sequence
  chemically synthesized
atggctgatttaggatgcccag

SEQ ID NO: 12433 - DNA, 22 bp, Artificial Sequence
  chemically synthesized
atttaggatgcccagtctggca

SEQ ID NO: 12434 - DNA, 22 bp, Artificial Sequence
  chemically synthesized
aggatgcccagtctggcaacac

SEQ ID NO: 12435 - DNA, 22 bp, Artificial Sequence
  chemically synthesized
ggatgcccagtctggcaacacg

SEQ ID NO: 12436 - DNA, 22 bp, Artificial Sequence
  chemically synthesized
gcaacacgctaatgaaatgata

SEQ ID NO: 12437 - DNA, 22 bp, Artificial Sequence
  chemically synthesized
atgaaatgatagtgggggaggg

SEQ ID NO: 12438 - DNA, 22 bp, Artificial Sequence
  chemically synthesized
ggagagagcagtcctgagacta

SEQ ID NO: 12439 - DNA, 22 bp, Artificial Sequence
  chemically synthesized
agactattgcaattatctgcgg

SEQ ID NO: 12440 - DNA, 22 bp, Artificial Sequence
  chemically synthesized
ttgcaattatctgcgggagaca

SEQ ID NO: 12441 - DNA, 22 bp, Artificial Sequence
  chemically synthesized
caattatctgcgggagacataa

SEQ ID NO: 12442 - DNA, 22 bp, Artificial Sequence
  chemically synthesized
tctgcgggagacataaaggcta

SEQ ID NO: 12443 - DNA, 22 bp, Artificial Sequence
  chemically synthesized
cgggagacataaaggctagaac

SEQ ID NO: 12444 - DNA, 22 bp, Artificial Sequence
  chemically synthesized
gaacctgaacagtagcagtaca

SEQ ID NO: 12445 - DNA, 22 bp, Artificial Sequence
  chemically synthesized
aacagtagcagtacaaaaaaag

SEQ ID NO: 12446 - DNA, 22 bp, Artificial Sequence
  chemically synthesized
aaatgatattaaggaagtagaa

SEQ ID NO: 12447 - DNA, 22 bp, Artificial Sequence
  chemically synthesized
aggaagtagaagtggtatgact

SEQ ID NO: 12448 - DNA, 22 bp, Artificial Sequence
  chemically synthesized
aaccatctgggtatggaagggg

SEQ ID NO: 12449 - DNA, 22 bp, Artificial Sequence
  chemically synthesized
accatctgggtatggaagggga

SEQ ID NO: 12450 - DNA, 22 bp, Artificial Sequence
  chemically synthesized
ggtatggaaggggaaatggcta

SEQ ID NO: 12451 - DNA, 22 bp, Artificial Sequence
  chemically synthesized
gagtcttggggactttgtgttt

SEQ ID NO: 12452 - DNA, 22 bp, Artificial Sequence
  chemically synthesized
ggggactttgtgtttgatgtga

SEQ ID NO: 12453 - DNA, 22 bp, Artificial Sequence
  chemically synthesized
gggactttgtgtttgatgtgat

SEQ ID NO: 12454 - DNA, 22 bp, Artificial Sequence
  chemically synthesized
tgtgtttgatgtgattatggac

SEQ ID NO: 12455 - DNA, 22 bp, Artificial Sequence
  chemically synthesized
gtgtttgatgtgattatggacc

SEQ ID NO: 12456 - DNA, 22 bp, Artificial Sequence
  chemically synthesized
tgtttgatgtgattatggacca

SEQ ID NO: 12457 - DNA, 22 bp, Artificial Sequence
  chemically synthesized
gatgtgattatggaccacagaa

SEQ ID NO: 12458 - DNA, 22 bp, Artificial Sequence
  chemically synthesized
atgtgattatggaccacagaat

SEQ ID NO: 12459 - DNA, 22 bp, Artificial Sequence
  chemically synthesized
tggaccacagaataatgtctaa

SEQ ID NO: 12460 - DNA, 22 bp, Artificial Sequence
  chemically synthesized
agagaactggctctttagtctg

SEQ ID NO: 12461 - DNA, 22 bp, Artificial Sequence
  chemically synthesized
gctctttagtctgactgccaga

SEQ ID NO: 12462 - DNA, 22 bp, Artificial Sequence
  chemically synthesized
tttagtctgactgccagagtct

SEQ ID NO: 12463 - DNA, 22 bp, Artificial Sequence
  chemically synthesized
tagtctgactgccagagtctga

SEQ ID NO: 12464 - DNA, 22 bp, Artificial Sequence
  chemically synthesized
agtctgactgccagagtctgaa

SEQ ID NO: 12465 - DNA, 22 bp, Artificial Sequence
  chemically synthesized
gtctgactgccagagtctgaat

SEQ ID NO: 12466 - DNA, 22 bp, Artificial Sequence
  chemically synthesized
actgccagagtctgaatcctga

SEQ ID NO: 12467 - DNA, 22 bp, Artificial Sequence
  chemically synthesized
ccagagtctgaatcctgaatgt

SEQ ID NO: 12468 - DNA, 22 bp, Artificial Sequence
  chemically synthesized
aatcctgaatgttttagtatgt

SEQ ID NO: 12469 - DNA, 22 bp, Artificial Sequence
  chemically synthesized
aatgttttagtatgttaccttg

SEQ ID NO: 12470 - DNA, 22 bp, Artificial Sequence
  chemically synthesized
tagtatgttaccttgggcaaag

SEQ ID NO: 12471 - DNA, 22 bp, Artificial Sequence
  chemically synthesized
agtatgttaccttgggcaaagc

SEQ ID NO: 12472 - DNA, 22 bp, Artificial Sequence
  chemically synthesized
gtatgttaccttgggcaaagcc

SEQ ID NO: 12473 - DNA, 22 bp, Artificial Sequence
  chemically synthesized
ccttgggcaaagcccttagcct

SEQ ID NO: 12474 - DNA, 22 bp, Artificial Sequence
  chemically synthesized
gggcaaagcccttagcctctat

SEQ ID NO: 12475 - DNA, 22 bp, Artificial Sequence
  chemically synthesized
ggcaaagcccttagcctctatg

SEQ ID NO: 12476 - DNA, 22 bp, Artificial Sequence
  chemically synthesized
agcctctatgaatctatcttcc

SEQ ID NO: 12477 - DNA, 22 bp, Artificial Sequence
  chemically synthesized
gcctctatgaatctatcttcct

SEQ ID NO: 12478 - DNA, 22 bp, Artificial Sequence
  chemically synthesized
tatgaatctatcttcctcattc

SEQ ID NO: 12479 - DNA, 22 bp, Artificial Sequence
  chemically synthesized
tgaatctatcttcctcattcat

SEQ ID NO: 12480 - DNA, 22 bp, Artificial Sequence
  chemically synthesized
tcttcctcattcataaaaataa

SEQ ID NO: 12481 - DNA, 22 bp, Artificial Sequence
  chemically synthesized
cctcattcataaaaataagatg

SEQ ID NO: 12482 - DNA, 22 bp, Artificial Sequence
  chemically synthesized
ctcattcataaaaataagatga

SEQ ID NO: 12483 - DNA, 22 bp, Artificial Sequence
  chemically synthesized
attcataaaaataagatgacag

SEQ ID NO: 12484 - DNA, 22 bp, Artificial Sequence
  chemically synthesized
ataaaaataagatgacagtgcc

SEQ ID NO: 12485 - DNA, 22 bp, Artificial Sequence
  chemically synthesized
tctcgtgggacttttgtgagga

SEQ ID NO: 12486 - DNA, 22 bp, Artificial Sequence
  chemically synthesized
gtgggacttttgtgaggatgaa

SEQ ID NO: 12487 - DNA, 22 bp, Artificial Sequence
  chemically synthesized
ttgtgaggatgaagtgagataa

SEQ ID NO: 12488 - DNA, 22 bp, Artificial Sequence
  chemically synthesized
tgtgaggatgaagtgagataat

SEQ ID NO: 12489 - DNA, 22 bp, Artificial Sequence
  chemically synthesized
gtgaggatgaagtgagataatg

SEQ ID NO: 12490 - DNA, 22 bp, Artificial Sequence
  chemically synthesized
tgaggatgaagtgagataatgg

SEQ ID NO: 12491 - DNA, 22 bp, Artificial Sequence
  chemically synthesized
ctgagcacagtgtccaacacag

SEQ ID NO: 12492 - DNA, 22 bp, Artificial Sequence
  chemically synthesized
agcacagtgtccaacacagcag

SEQ ID NO: 12493 - DNA, 22 bp, Artificial Sequence
  chemically synthesized
catatacattagctattactgg

SEQ ID NO: 12494 - DNA, 22 bp, Artificial Sequence
  chemically synthesized
gctattactggctacattatga

SEQ ID NO: 12495 - DNA, 22 bp, Artificial Sequence
  chemically synthesized
ttactggctacattatgatata

SEQ ID NO: 12496 - DNA, 22 bp, Artificial Sequence
  chemically synthesized
ctggctacattatgatatacag

SEQ ID NO: 12497 - DNA, 22 bp, Artificial Sequence
  chemically synthesized
gctacattatgatatacagtta

SEQ ID NO: 12498 - DNA, 22 bp, Artificial Sequence
  chemically synthesized
cattatgatatacagttaggga

SEQ ID NO: 12499 - DNA, 22 bp, Artificial Sequence
  chemically synthesized
tgatatacagttagggagttgg

SEQ ID NO: 12500 - DNA, 22 bp, Artificial Sequence
  chemically synthesized
gggagttggaaagataatctga

SEQ ID NO: 12501 - DNA, 22 bp, Artificial Sequence
  chemically synthesized
gaaagataatctgaaattcagg

SEQ ID NO: 12502 - DNA, 22 bp, Artificial Sequence
  chemically synthesized
aaattcaggagacgtatctgac

SEQ ID NO: 12503 - DNA, 22 bp, Artificial Sequence
  chemically synthesized
aggagacgtatctgactatagg

SEQ ID NO: 12504 - DNA, 22 bp, Artificial Sequence
  chemically synthesized
actataggtgagtatttggaac

SEQ ID NO: 12505 - DNA, 22 bp, Artificial Sequence
  chemically synthesized
taggtgagtatttggaactcat

SEQ ID NO: 12506 - DNA, 22 bp, Artificial Sequence
  chemically synthesized
ggaactcattgttctgtaaaca

SEQ ID NO: 12507 - DNA, 22 bp, Artificial Sequence
  chemically synthesized
gaactcattgttctgtaaacag

SEQ ID NO: 12508 - DNA, 22 bp, Artificial Sequence
  chemically synthesized
attgttctgtaaacagtagtta

SEQ ID NO: 12509 - DNA, 22 bp, Artificial Sequence
  chemically synthesized
ttctgtaaacagtagttacagc

SEQ ID NO: 12510 - DNA, 22 bp, Artificial Sequence
  chemically synthesized
tgtaaacagtagttacagccac

SEQ ID NO: 12511 - DNA, 22 bp, Artificial Sequence
  chemically synthesized
taaacagtagttacagccacgt

SEQ ID NO: 12512 - DNA, 22 bp, Artificial Sequence
  chemically synthesized
cagccacgtgtgtgggcatctg

SEQ ID NO: 12513 - DNA, 22 bp, Artificial Sequence
  chemically synthesized
gagagtgagcatggatattgtg

SEQ ID NO: 12514 - DNA, 22 bp, Artificial Sequence
  chemically synthesized
tgatacctagtacagtgcctgg

SEQ ID NO: 12515 - DNA, 22 bp, Artificial Sequence
  chemically synthesized
gtacagtgcctggcagtagtgg

SEQ ID NO: 12516 - DNA, 22 bp, Artificial Sequence
  chemically synthesized
gcagtagtggttgtatgctcag

SEQ ID NO: 12517 - DNA, 22 bp, Artificial Sequence
  chemically synthesized
tatgctcagtaaattttgttga

SEQ ID NO: 12518 - DNA, 22 bp, Artificial Sequence
  chemically synthesized
agtaaattttgttgacagggtc

SEQ ID NO: 12519 - DNA, 22 bp, Artificial Sequence
  chemically synthesized
tgttgacagggtcagggccgga

SEQ ID NO: 12520 - DNA, 22 bp, Artificial Sequence
  chemically synthesized
gttgacagggtcagggccggac

SEQ ID NO: 12521 - DNA, 22 bp, Artificial Sequence
  chemically synthesized
ttgacagggtcagggccggact

SEQ ID NO: 12522 - DNA, 22 bp, Artificial Sequence
  chemically synthesized
acagggtcagggccggactaga

SEQ ID NO: 12523 - DNA, 22 bp, Artificial Sequence
  chemically synthesized
gactgtggtaagcaaggcctgt

SEQ ID NO: 12524 - DNA, 22 bp, Artificial Sequence
  chemically synthesized
tggtaagcaaggcctgtagggc

SEQ ID NO: 12525 - DNA, 22 bp, Artificial Sequence
  chemically synthesized
tagggcataaatatacttgtat

SEQ ID NO: 12526 - DNA, 22 bp, Artificial Sequence
  chemically synthesized
gtatgccccgagaagtgaggac

SEQ ID NO: 12527 - DNA, 22 bp, Artificial Sequence
  chemically synthesized
tatgccccgagaagtgaggacc

SEQ ID NO: 12528 - DNA, 22 bp, Artificial Sequence
  chemically synthesized
ttaaatattgtgccctacatgc

SEQ ID NO: 12529 - DNA, 22 bp, Artificial Sequence
  chemically synthesized
aaatattgtgccctacatgcct

SEQ ID NO: 12530 - DNA, 22 bp, Artificial Sequence
  chemically synthesized
aatattgtgccctacatgcctt

SEQ ID NO: 12531 - DNA, 22 bp, Artificial Sequence
  chemically synthesized
tgccctacatgccttgtttggt

SEQ ID NO: 12532 - DNA, 22 bp, Artificial Sequence
  chemically synthesized
catgccttgtttggttcactct

SEQ ID NO: 12533 - DNA, 22 bp, Artificial Sequence
  chemically synthesized
gtttggttcactcttgtcccag

SEQ ID NO: 12534 - DNA, 22 bp, Artificial Sequence
  chemically synthesized
tttggttcactcttgtcccagc

SEQ ID NO: 12535 - DNA, 22 bp, Artificial Sequence
  chemically synthesized
ggttcactcttgtcccagccct

SEQ ID NO: 12536 - DNA, 22 bp, Artificial Sequence
  chemically synthesized
gttcactcttgtcccagcccta

SEQ ID NO: 12537 - DNA, 22 bp, Artificial Sequence
  chemically synthesized
actcttgtcccagccctagcaa

SEQ ID NO: 12538 - DNA, 22 bp, Artificial Sequence
  chemically synthesized
ttgtcccagccctagcaagtat

SEQ ID NO: 12539 - DNA, 22 bp, Artificial Sequence
  chemically synthesized
gtcccagccctagcaagtatat

SEQ ID NO: 12540 - DNA, 22 bp, Artificial Sequence
  chemically synthesized
tcccagccctagcaagtatata

SEQ ID NO: 12541 - DNA, 22 bp, Artificial Sequence
  chemically synthesized
gcaagtatatataaggtgaaaa

SEQ ID NO: 12542 - DNA, 22 bp, Artificial Sequence
  chemically synthesized
aggctggagcctgggagaaccc

SEQ ID NO: 12543 - DNA, 22 bp, Artificial Sequence
  chemically synthesized
gagcctgggagaaccctggaca

SEQ ID NO: 12544 - DNA, 22 bp, Artificial Sequence
  chemically synthesized
ggagaaccctggacatttaagg

SEQ ID NO: 12545 - DNA, 22 bp, Artificial Sequence
  chemically synthesized
gacatttaagggccatggagag

SEQ ID NO: 12546 - DNA, 22 bp, Artificial Sequence
  chemically synthesized
aagggccatggagaggaacagg

SEQ ID NO: 12547 - DNA, 22 bp, Artificial Sequence
  chemically synthesized
agggccatggagaggaacagga

SEQ ID NO: 12548 - DNA, 22 bp, Artificial Sequence
  chemically synthesized
atcaattcaagtgctggatgga

SEQ ID NO: 12549 - DNA, 22 bp, Artificial Sequence
  chemically synthesized
aagtgctggatggataacagga

SEQ ID NO: 12550 - DNA, 22 bp, Artificial Sequence
  chemically synthesized
gatggataacaggagttagagc

SEQ ID NO: 12551 - DNA, 22 bp, Artificial Sequence
  chemically synthesized
gagcaaagcggggaaccagaat

SEQ ID NO: 12552 - DNA, 22 bp, Artificial Sequence
  chemically synthesized
ttataaaaagagtttcctaaaa

SEQ ID NO: 12553 - DNA, 22 bp, Artificial Sequence
  chemically synthesized
taaaaagagtttcctaaaaagg

SEQ ID NO: 12554 - DNA, 22 bp, Artificial Sequence
  chemically synthesized
cctaaaaagggagagatcaaca

SEQ ID NO: 12555 - DNA, 22 bp, Artificial Sequence
  chemically synthesized
ctaaaaagggagagatcaacaa

SEQ ID NO: 12556 - DNA, 22 bp, Artificial Sequence
  chemically synthesized
aaaagggagagatcaacaatta

SEQ ID NO: 12557 - DNA, 22 bp, Artificial Sequence
  chemically synthesized
gaaattatttagagcagccagt

SEQ ID NO: 12558 - DNA, 22 bp, Artificial Sequence
  chemically synthesized
tttagagcagccagtaaataca

SEQ ID NO: 12559 - DNA, 22 bp, Artificial Sequence
  chemically synthesized
agagcagccagtaaatacataa

SEQ ID NO: 12560 - DNA, 22 bp, Artificial Sequence
  chemically synthesized
gagcagccagtaaatacataaa

SEQ ID NO: 12561 - DNA, 22 bp, Artificial Sequence
  chemically synthesized
aaaattattctttaggtcattc

SEQ ID NO: 12562 - DNA, 22 bp, Artificial Sequence
  chemically synthesized
ttctttaggtcattcctgattg

SEQ ID NO: 12563 - DNA, 22 bp, Artificial Sequence
  chemically synthesized
tttaggtcattcctgattgtga

SEQ ID NO: 12564 - DNA, 22 bp, Artificial Sequence
  chemically synthesized
taggtcattcctgattgtgaca

SEQ ID NO: 12565 - DNA, 22 bp, Artificial Sequence
  chemically synthesized
aggtcattcctgattgtgacaa

SEQ ID NO: 12566 - DNA, 22 bp, Artificial Sequence
  chemically synthesized
ggtcattcctgattgtgacaat

SEQ ID NO: 12567 - DNA, 22 bp, Artificial Sequence
  chemically synthesized
ctgattgtgacaatagtcattt

SEQ ID NO: 12568 - DNA, 22 bp, Artificial Sequence
  chemically synthesized
attgtgacaatagtcatttcat

SEQ ID NO: 12569 - DNA, 22 bp, Artificial Sequence
  chemically synthesized
tgacaatagtcatttcattata

SEQ ID NO: 12570 - DNA, 22 bp, Artificial Sequence
  chemically synthesized
cattatataaatgtgattaagg

SEQ ID NO: 12571 - DNA, 22 bp, Artificial Sequence
  chemically synthesized
attatataaatgtgattaagga

SEQ ID NO: 12572 - DNA, 22 bp, Artificial Sequence
  chemically synthesized
tataaatgtgattaaggaagga

SEQ ID NO: 12573 - DNA, 22 bp, Artificial Sequence
  chemically synthesized
aggaaggaaaagagctacacag

SEQ ID NO: 12574 - DNA, 22 bp, Artificial Sequence
  chemically synthesized
cacagaagttattaaagagcta

SEQ ID NO: 12575 - DNA, 22 bp, Artificial Sequence
  chemically synthesized
ttaaagagctaaagagaattga

SEQ ID NO: 12576 - DNA, 22 bp, Artificial Sequence
  chemically synthesized
aagagctaaagagaattgagaa

SEQ ID NO: 12577 - DNA, 22 bp, Artificial Sequence
  chemically synthesized
aagagaattgagaaatttaaaa

SEQ ID NO: 12578 - DNA, 22 bp, Artificial Sequence
  chemically synthesized
agaaatttaaaacagaagaaag

SEQ ID NO: 12579 - DNA, 22 bp, Artificial Sequence
  chemically synthesized
aaaacagaagaaagtagggcca

SEQ ID NO: 12580 - DNA, 22 bp, Artificial Sequence
  chemically synthesized
aaacagaagaaagtagggccaa

SEQ ID NO: 12581 - DNA, 22 bp, Artificial Sequence
  chemically synthesized
tctcactgatcctgccaacacc

SEQ ID NO: 12582 - DNA, 22 bp, Artificial Sequence
  chemically synthesized
actgatcctgccaacacctgtg

SEQ ID NO: 12583 - DNA, 22 bp, Artificial Sequence
  chemically synthesized
atcctgccaacacctgtgagat

SEQ ID NO: 12584 - DNA, 22 bp, Artificial Sequence
  chemically synthesized
ccaacacctgtgagatagatat

SEQ ID NO: 12585 - DNA, 22 bp, Artificial Sequence
  chemically synthesized
tgagatagatattcttattata

SEQ ID NO: 12586 - DNA, 22 bp, Artificial Sequence
  chemically synthesized
ttattatactactgttaaacct

SEQ ID NO: 12587 - DNA, 22 bp, Artificial Sequence
  chemically synthesized
attatactactgttaaacctaa

SEQ ID NO: 12588 - DNA, 22 bp, Artificial Sequence
  chemically synthesized
ttatactactgttaaacctaat

SEQ ID NO: 12589 - DNA, 22 bp, Artificial Sequence
  chemically synthesized
tactactgttaaacctaattta

SEQ ID NO: 12590 - DNA, 22 bp, Artificial Sequence
  chemically synthesized
ctgttaaacctaatttacattt

SEQ ID NO: 12591 - DNA, 22 bp, Artificial Sequence
  chemically synthesized
ttaaacctaatttacatttgac

SEQ ID NO: 12592 - DNA, 22 bp, Artificial Sequence
  chemically synthesized
aacctaatttacatttgacaaa

SEQ ID NO: 12593 - DNA, 22 bp, Artificial Sequence
  chemically synthesized
atttacatttgacaaagttaag

SEQ ID NO: 12594 - DNA, 22 bp, Artificial Sequence
  chemically synthesized
acatttgacaaagttaaggttc

SEQ ID NO: 12595 - DNA, 22 bp, Artificial Sequence
  chemically synthesized
catttgacaaagttaaggttca

SEQ ID NO: 12596 - DNA, 22 bp, Artificial Sequence
  chemically synthesized
gacaaagttaaggttcagagct

SEQ ID NO: 12597 - DNA, 22 bp, Artificial Sequence
  chemically synthesized
acaaagttaaggttcagagctt

SEQ ID NO: 12598 - DNA, 22 bp, Artificial Sequence
  chemically synthesized
aggttcagagcttgtgtgactt

SEQ ID NO: 12599 - DNA, 22 bp, Artificial Sequence
  chemically synthesized
agagcttgtgtgacttgtccaa

SEQ ID NO: 12600 - DNA, 22 bp, Artificial Sequence
  chemically synthesized
gtgtgacttgtccaaggtcaca

SEQ ID NO: 12601 - DNA, 22 bp, Artificial Sequence
  chemically synthesized
tgtgacttgtccaaggtcacag

SEQ ID NO: 12602 - DNA, 22 bp, Artificial Sequence
  chemically synthesized
gtccaaggtcacaggtctagag

SEQ ID NO: 12603 - DNA, 22 bp, Artificial Sequence
  chemically synthesized
tccaaggtcacaggtctagagg

SEQ ID NO: 12604 - DNA, 22 bp, Artificial Sequence
  chemically synthesized
gaggaggcagatacttgattca

SEQ ID NO: 12605 - DNA, 22 bp, Artificial Sequence
  chemically synthesized
gattcaaacctatttctgtctg

SEQ ID NO: 12606 - DNA, 22 bp, Artificial Sequence
  chemically synthesized
attcaaacctatttctgtctga

SEQ ID NO: 12607 - DNA, 22 bp, Artificial Sequence
  chemically synthesized
aaacctatttctgtctgatctg

SEQ ID NO: 12608 - DNA, 22 bp, Artificial Sequence
  chemically synthesized
tttctgtctgatctgattctaa

SEQ ID NO: 12609 - DNA, 22 bp, Artificial Sequence
  chemically synthesized
ctgtctgatctgattctaaagt

SEQ ID NO: 12610 - DNA, 22 bp, Artificial Sequence
  chemically synthesized
tgtctgatctgattctaaagtc

SEQ ID NO: 12611 - DNA, 22 bp, Artificial Sequence
  chemically synthesized
tctgatctgattctaaagtctg

SEQ ID NO: 12612 - DNA, 22 bp, Artificial Sequence
  chemically synthesized
atctgattctaaagtctgtttt

SEQ ID NO: 12613 - DNA, 22 bp, Artificial Sequence
  chemically synthesized
attctaaagtctgttttttcac

SEQ ID NO: 12614 - DNA, 22 bp, Artificial Sequence
  chemically synthesized
taaagtctgttttttcactcaa

SEQ ID NO: 12615 - DNA, 22 bp, Artificial Sequence
  chemically synthesized
aagtctgttttttcactcaacc

SEQ ID NO: 12616 - DNA, 22 bp, Artificial Sequence
  chemically synthesized
ttttttcactcaaccacactgt

SEQ ID NO: 12617 - DNA, 22 bp, Artificial Sequence
  chemically synthesized
tttcactcaaccacactgtaca

SEQ ID NO: 12618 - DNA, 22 bp, Artificial Sequence
  chemically synthesized
ttcactcaaccacactgtacag

SEQ ID NO: 12619 - DNA, 22 bp, Artificial Sequence
  chemically synthesized
tcactcaaccacactgtacagt

SEQ ID NO: 12620 - DNA, 22 bp, Artificial Sequence
  chemically synthesized
cactcaaccacactgtacagtc

SEQ ID NO: 12621 - DNA, 22 bp, Artificial Sequence
  chemically synthesized
actcaaccacactgtacagtca

SEQ ID NO: 12622 - DNA, 22 bp, Artificial Sequence
  chemically synthesized
aaccacactgtacagtcagctc

SEQ ID NO: 12623 - DNA, 22 bp, Artificial Sequence
  chemically synthesized
tacagtcagctctccttgtgag

SEQ ID NO: 12624 - DNA, 22 bp, Artificial Sequence
  chemically synthesized
tccttgtgagttccacagccac

SEQ ID NO: 12625 - DNA, 22 bp, Artificial Sequence
  chemically synthesized
cttgtgagttccacagccacag

SEQ ID NO: 12626 - DNA, 22 bp, Artificial Sequence
  chemically synthesized
gtgagttccacagccacagatt

SEQ ID NO: 12627 - DNA, 22 bp, Artificial Sequence
  chemically synthesized
tgagttccacagccacagattc

SEQ ID NO: 12628 - DNA, 22 bp, Artificial Sequence
  chemically synthesized
cacagccacagattcaattaac

SEQ ID NO: 12629 - DNA, 22 bp, Artificial Sequence
  chemically synthesized
aattaactgcagatcaaaaata

SEQ ID NO: 12630 - DNA, 22 bp, Artificial Sequence
  chemically synthesized
actgcagatcaaaaatattcaa

SEQ ID NO: 12631 - DNA, 22 bp, Artificial Sequence
  chemically synthesized
cagatcaaaaatattcaagaaa

SEQ ID NO: 12632 - DNA, 22 bp, Artificial Sequence
  chemically synthesized
aagaaaaaaatggatggttgca

SEQ ID NO: 12633 - DNA, 22 bp, Artificial Sequence
  chemically synthesized
catctctactgaacatgtacag

SEQ ID NO: 12634 - DNA, 22 bp, Artificial Sequence
  chemically synthesized
tactgaacatgtacagactctt

SEQ ID NO: 12635 - DNA, 22 bp, Artificial Sequence
  chemically synthesized
ctgaacatgtacagactctttt

SEQ ID NO: 12636 - DNA, 22 bp, Artificial Sequence
  chemically synthesized
aacatgtacagactcttttatc

SEQ ID NO: 12637 - DNA, 22 bp, Artificial Sequence
  chemically synthesized
ttttatctttcattattcccta

SEQ ID NO: 12638 - DNA, 22 bp, Artificial Sequence
  chemically synthesized
ttatctttcattattccctaaa

SEQ ID NO: 12639 - DNA, 22 bp, Artificial Sequence
  chemically synthesized
tatctttcattattccctaaac

SEQ ID NO: 12640 - DNA, 22 bp, Artificial Sequence
  chemically synthesized
atctttcattattccctaaaca

SEQ ID NO: 12641 - DNA, 22 bp, Artificial Sequence
  chemically synthesized
tctttcattattccctaaacaa

SEQ ID NO: 12642 - DNA, 22 bp, Artificial Sequence
  chemically synthesized
tcattattccctaaacaataca

SEQ ID NO: 12643 - DNA, 22 bp, Artificial Sequence
  chemically synthesized
cattattccctaaacaatacag

SEQ ID NO: 12644 - DNA, 22 bp, Artificial Sequence
  chemically synthesized
attattccctaaacaatacagc

SEQ ID NO: 12645 - DNA, 22 bp, Artificial Sequence
  chemically synthesized
ttccctaaacaatacagcataa

SEQ ID NO: 12646 - DNA, 22 bp, Artificial Sequence
  chemically synthesized
cctaaacaatacagcataacaa

SEQ ID NO: 12647 - DNA, 22 bp, Artificial Sequence
  chemically synthesized
aacaatacagcataacaactat

SEQ ID NO: 12648 - DNA, 22 bp, Artificial Sequence
  chemically synthesized
tttacatagcatttacattgta

SEQ ID NO: 12649 - DNA, 22 bp, Artificial Sequence
  chemically synthesized
acatagcatttacattgtatta

SEQ ID NO: 12650 - DNA, 22 bp, Artificial Sequence
  chemically synthesized
catagcatttacattgtattag

SEQ ID NO: 12651 - DNA, 22 bp, Artificial Sequence
  chemically synthesized
acattgtattagctattaagag

SEQ ID NO: 12652 - DNA, 22 bp, Artificial Sequence
  chemically synthesized
cattgtattagctattaagaga

SEQ ID NO: 12653 - DNA, 22 bp, Artificial Sequence
  chemically synthesized
tattagctattaagagaaacct

SEQ ID NO: 12654 - DNA, 22 bp, Artificial Sequence
  chemically synthesized
gctattaagagaaacctagaga

SEQ ID NO: 12655 - DNA, 22 bp, Artificial Sequence
  chemically synthesized
ttaagagaaacctagagatgat

SEQ ID NO: 12656 - DNA, 22 bp, Artificial Sequence
  chemically synthesized
agagaaacctagagatgattta

SEQ ID NO: 12657 - DNA, 22 bp, Artificial Sequence
  chemically synthesized
gagatgatttaaagtacaaagg

SEQ ID NO: 12658 - DNA, 22 bp, Artificial Sequence
  chemically synthesized
aaagtacaaaggaggatgtgtt

SEQ ID NO: 12659 - DNA, 22 bp, Artificial Sequence
  chemically synthesized
aagtacaaaggaggatgtgttt

SEQ ID NO: 12660 - DNA, 22 bp, Artificial Sequence
  chemically synthesized
aggttatatgcaaatagtaagc

SEQ ID NO: 12661 - DNA, 22 bp, Artificial Sequence
  chemically synthesized
ggttatatgcaaatagtaagcc

SEQ ID NO: 12662 - DNA, 22 bp, Artificial Sequence
  chemically synthesized
tatgcaaatagtaagccatttt

SEQ ID NO: 12663 - DNA, 22 bp, Artificial Sequence
  chemically synthesized
ttatatcggagacttgagcatc

SEQ ID NO: 12664 - DNA, 22 bp, Artificial Sequence
  chemically synthesized
tatatcggagacttgagcatcc

SEQ ID NO: 12665 - DNA, 22 bp, Artificial Sequence
  chemically synthesized
atatcggagacttgagcatcca

SEQ ID NO: 12666 - DNA, 22 bp, Artificial Sequence
  chemically synthesized
tatcggagacttgagcatccac

SEQ ID NO: 12667 - DNA, 22 bp, Artificial Sequence
  chemically synthesized
gagcatccacagatcttgatat

SEQ ID NO: 12668 - DNA, 22 bp, Artificial Sequence
  chemically synthesized
agcatccacagatcttgatatt

SEQ ID NO: 12669 - DNA, 22 bp, Artificial Sequence
  chemically synthesized
gatatttgcagggggtcttgcc

SEQ ID NO: 12670 - DNA, 22 bp, Artificial Sequence
  chemically synthesized
atatttgcagggggtcttgcca

SEQ ID NO: 12671 - DNA, 22 bp, Artificial Sequence
  chemically synthesized
gcagggggtcttgccaccaatt

SEQ ID NO: 12672 - DNA, 22 bp, Artificial Sequence
  chemically synthesized
cagggggtcttgccaccaattt

SEQ ID NO: 12673 - DNA, 22 bp, Artificial Sequence
  chemically synthesized
gccaccaattttccatggatac

SEQ ID NO: 12674 - DNA, 22 bp, Artificial Sequence
  chemically synthesized
ccaccaattttccatggatact

SEQ ID NO: 12675 - DNA, 22 bp, Artificial Sequence
  chemically synthesized
tccatggatactgaggaacgac

SEQ ID NO: 12676 - DNA, 22 bp, Artificial Sequence
  chemically synthesized
ccatggatactgaggaacgact

SEQ ID NO: 12677 - DNA, 22 bp, Artificial Sequence
  chemically synthesized
catggatactgaggaacgactg

SEQ ID NO: 12678 - DNA, 22 bp, Artificial Sequence
  chemically synthesized
aggaacgactgtaaatggatgc

SEQ ID NO: 12679 - DNA, 22 bp, Artificial Sequence
  chemically synthesized
taaatggatgcaggcatggatg

SEQ ID NO: 12680 - DNA, 22 bp, Artificial Sequence
  chemically synthesized
tttaggagtgtccagggccaag

SEQ ID NO: 12681 - DNA, 22 bp, Artificial Sequence
  chemically synthesized
aggagtgtccagggccaagtaa

SEQ ID NO: 12682 - DNA, 22 bp, Artificial Sequence
  chemically synthesized
ggagtgtccagggccaagtaaa

SEQ ID NO: 12683 - DNA, 22 bp, Artificial Sequence
  chemically synthesized
ctgagcagagaggtgggtggag

SEQ ID NO: 12684 - DNA, 22 bp, Artificial Sequence
  chemically synthesized
agcagagaggtgggtggaggct

SEQ ID NO: 12685 - DNA, 22 bp, Artificial Sequence
  chemically synthesized
tgaggcatcaatatgtggtggc

SEQ ID NO: 12686 - DNA, 22 bp, Artificial Sequence
  chemically synthesized
cattttggtgatttttttcctt

SEQ ID NO: 12687 - DNA, 22 bp, Artificial Sequence
  chemically synthesized
tggtgatttttttccttcacag

SEQ ID NO: 12688 - DNA, 22 bp, Artificial Sequence
  chemically synthesized
ggtgatttttttccttcacagt

SEQ ID NO: 12689 - DNA, 22 bp, Artificial Sequence
  chemically synthesized
gtgatttttttccttcacagtc

SEQ ID NO: 12690 - DNA, 22 bp, Artificial Sequence
  chemically synthesized
ttttccttcacagtcctcggct

SEQ ID NO: 12691 - DNA, 22 bp, Artificial Sequence
  chemically synthesized
tttccttcacagtcctcggctg

SEQ ID NO: 12692 - DNA, 22 bp, Artificial Sequence
  chemically synthesized
ttccttcacagtcctcggctgt

SEQ ID NO: 12693 - DNA, 22 bp, Artificial Sequence
  chemically synthesized
tccttcacagtcctcggctgtc

SEQ ID NO: 12694 - DNA, 22 bp, Artificial Sequence
  chemically synthesized
ccttcacagtcctcggctgtct

SEQ ID NO: 12695 - DNA, 22 bp, Artificial Sequence
  chemically synthesized
cttcacagtcctcggctgtctg

SEQ ID NO: 12696 - DNA, 22 bp, Artificial Sequence
  chemically synthesized
cacagtcctcggctgtctggga

SEQ ID NO: 12697 - DNA, 22 bp, Artificial Sequence
  chemically synthesized
acagtcctcggctgtctgggaa

SEQ ID NO: 12698 - DNA, 22 bp, Artificial Sequence
  chemically synthesized
ggctgtctgggaagagaaggat

SEQ ID NO: 12699 - DNA, 22 bp, Artificial Sequence
  chemically synthesized
tctgggaagagaaggatgaagg

SEQ ID NO: 12700 - DNA, 22 bp, Artificial Sequence
  chemically synthesized
ggaagagaaggatgaaggcaga

SEQ ID NO: 12701 - DNA, 22 bp, Artificial Sequence
  chemically synthesized
ctccaatttaggggctaggatt

SEQ ID NO: 12702 - DNA, 22 bp, Artificial Sequence
  chemically synthesized
caatttaggggctaggattgca

SEQ ID NO: 12703 - DNA, 22 bp, Artificial Sequence
  chemically synthesized
aggggctaggattgcagggtgg

SEQ ID NO: 12704 - DNA, 22 bp, Artificial Sequence
  chemically synthesized
ggggctaggattgcagggtggg

SEQ ID NO: 12705 - DNA, 22 bp, Artificial Sequence
  chemically synthesized
ggattgcagggtgggcacagca

SEQ ID NO: 12706 - DNA, 22 bp, Artificial Sequence
  chemically synthesized
cagggtgggcacagcattgcaa

SEQ ID NO: 12707 - DNA, 22 bp, Artificial Sequence
  chemically synthesized
caaacgagtgaaggaaattgag

SEQ ID NO: 12708 - DNA, 22 bp, Artificial Sequence
  chemically synthesized
agaaatatggccaatgaagagt

SEQ ID NO: 12709 - DNA, 22 bp, Artificial Sequence
  chemically synthesized
aagagaggcctggcatggtggc

SEQ ID NO: 12710 - DNA, 22 bp, Artificial Sequence
  chemically synthesized
gcatggtggctcacacctataa

SEQ ID NO: 12711 - DNA, 22 bp, Artificial Sequence
  chemically synthesized
acacctataatcccagcacttt

SEQ ID NO: 12712 - DNA, 22 bp, Artificial Sequence
  chemically synthesized
taatcccagcactttcagaggc

SEQ ID NO: 12713 - DNA, 22 bp, Artificial Sequence
  chemically synthesized
tcagaggcccaggcaggcagat

SEQ ID NO: 12714 - DNA, 22 bp, Artificial Sequence
  chemically synthesized
cagaggcccaggcaggcagatc

SEQ ID NO: 12715 - DNA, 22 bp, Artificial Sequence
  chemically synthesized
agaggcccaggcaggcagatca

SEQ ID NO: 12716 - DNA, 22 bp, Artificial Sequence
  chemically synthesized
gaggtcaggagttcgacaccag

SEQ ID NO: 12717 - DNA, 22 bp, Artificial Sequence
  chemically synthesized
aggtcaggagttcgacaccagc

SEQ ID NO: 12718 - DNA, 22 bp, Artificial Sequence
  chemically synthesized
gacaccagcctggccaacaagg

SEQ ID NO: 12719 - DNA, 22 bp, Artificial Sequence
  chemically synthesized
gccaacaaggtgaaatggtgaa

SEQ ID NO: 12720 - DNA, 22 bp, Artificial Sequence
  chemically synthesized
tactaaaaatacaaaaattagc

SEQ ID NO: 12721 - DNA, 22 bp, Artificial Sequence
  chemically synthesized
actaaaaatacaaaaattagct

SEQ ID NO: 12722 - DNA, 22 bp, Artificial Sequence
  chemically synthesized
ctaaaaatacaaaaattagctg

SEQ ID NO: 12723 - DNA, 22 bp, Artificial Sequence
  chemically synthesized
aaaatacaaaaattagctgggc

SEQ ID NO: 12724 - DNA, 22 bp, Artificial Sequence
  chemically synthesized
gctgggcatggtggcgggtgcc

SEQ ID NO: 12725 - DNA, 22 bp, Artificial Sequence
  chemically synthesized
ggcatggtggcgggtgcctgta

SEQ ID NO: 12726 - DNA, 22 bp, Artificial Sequence
  chemically synthesized
taatcccagctacttgggaggc

SEQ ID NO: 12727 - DNA, 22 bp, Artificial Sequence
  chemically synthesized
cttgggaggctgaggcaggaga

SEQ ID NO: 12728 - DNA, 22 bp, Artificial Sequence
  chemically synthesized
gggaggctgaggcaggagaata

SEQ ID NO: 12729 - DNA, 22 bp, Artificial Sequence
  chemically synthesized
ggaggctgaggcaggagaatag

SEQ ID NO: 12730 - DNA, 22 bp, Artificial Sequence
  chemically synthesized
aggcaggagaatagcttgaacc

SEQ ID NO: 12731 - DNA, 22 bp, Artificial Sequence
  chemically synthesized
gaacctgggagatggaggttgc

SEQ ID NO: 12732 - DNA, 22 bp, Artificial Sequence
  chemically synthesized
aacctgggagatggaggttgca

SEQ ID NO: 12733 - DNA, 22 bp, Artificial Sequence
  chemically synthesized
ggagatggaggttgcagtgagc

SEQ ID NO: 12734 - DNA, 22 bp, Artificial Sequence
  chemically synthesized
cagtgagctgagatcgcaccac

SEQ ID NO: 12735 - DNA, 22 bp, Artificial Sequence
  chemically synthesized
agatcgcaccactgcactccag

SEQ ID NO: 12736 - DNA, 22 bp, Artificial Sequence
  chemically synthesized
cactccagcctgggcgacagag

SEQ ID NO: 12737 - DNA, 22 bp, Artificial Sequence
  chemically synthesized
cagcctgggcgacagagcaaga

SEQ ID NO: 12738 - DNA, 22 bp, Artificial Sequence
  chemically synthesized
ggcgacagagcaagactctgtc

SEQ ID NO: 12739 - DNA, 22 bp, Artificial Sequence
  chemically synthesized
tgtcaaaaaaaaaagagttgaa

SEQ ID NO: 12740 - DNA, 22 bp, Artificial Sequence
  chemically synthesized
tcaaaaaaaaaagagttgaaga

SEQ ID NO: 12741 - DNA, 22 bp, Artificial Sequence
  chemically synthesized
aagagaaaaagtctaggctaaa

SEQ ID NO: 12742 - DNA, 22 bp, Artificial Sequence
  chemically synthesized
ggctaaattcaaagaaaaaaag

SEQ ID NO: 12743 - DNA, 22 bp, Artificial Sequence
  chemically synthesized
aattcaaagaaaaaaagtgagc

SEQ ID NO: 12744 - DNA, 22 bp, Artificial Sequence
  chemically synthesized
aaagaaaaaaagtgagcccaaa

SEQ ID NO: 12745 - DNA, 22 bp, Artificial Sequence
  chemically synthesized
gcagagcaagggaaaagcaggg

SEQ ID NO: 12746 - DNA, 22 bp, Artificial Sequence
  chemically synthesized
cagagcaagggaaaagcaggga

SEQ ID NO: 12747 - DNA, 22 bp, Artificial Sequence
  chemically synthesized
gaacactccataaagtgaacag

SEQ ID NO: 12748 - DNA, 22 bp, Artificial Sequence
  chemically synthesized
cataaagtgaacagctgcaatg

SEQ ID NO: 12749 - DNA, 22 bp, Artificial Sequence
  chemically synthesized
caatgaaaataagggaagaaag

SEQ ID NO: 12750 - DNA, 22 bp, Artificial Sequence
  chemically synthesized
agttcatctccgtttctttcct

SEQ ID NO: 12751 - DNA, 22 bp, Artificial Sequence
  chemically synthesized
gttcatctccgtttctttcctt

SEQ ID NO: 12752 - DNA, 22 bp, Artificial Sequence
  chemically synthesized
atctccgtttctttcctttcct

SEQ ID NO: 12753 - DNA, 22 bp, Artificial Sequence
  chemically synthesized
cgtttctttcctttccttttta

SEQ ID NO: 12754 - DNA, 22 bp, Artificial Sequence
  chemically synthesized
ctttcctttcctttttactttc

SEQ ID NO: 12755 - DNA, 22 bp, Artificial Sequence
  chemically synthesized
tttcctttcctttttactttcc

SEQ ID NO: 12756 - DNA, 22 bp, Artificial Sequence
  chemically synthesized
tcctttcctttttactttcctt

SEQ ID NO: 12757 - DNA, 22 bp, Artificial Sequence
  chemically synthesized
cctttcctttttactttccttt

SEQ ID NO: 12758 - DNA, 22 bp, Artificial Sequence
  chemically synthesized
ctttcctttttactttcctttc

SEQ ID NO: 12759 - DNA, 22 bp, Artificial Sequence
  chemically synthesized
tcctttttactttcctttctct

SEQ ID NO: 12760 - DNA, 22 bp, Artificial Sequence
  chemically synthesized
cctttttactttcctttctctt

SEQ ID NO: 12761 - DNA, 22 bp, Artificial Sequence
  chemically synthesized
ctttttactttcctttctcttc

SEQ ID NO: 12762 - DNA, 22 bp, Artificial Sequence
  chemically synthesized
tttactttcctttctcttcctt

SEQ ID NO: 12763 - DNA, 22 bp, Artificial Sequence
  chemically synthesized
ttactttcctttctcttccttt

SEQ ID NO: 12764 - DNA, 22 bp, Artificial Sequence
  chemically synthesized
tactttcctttctcttcctttt

SEQ ID NO: 12765 - DNA, 22 bp, Artificial Sequence
  chemically synthesized
actttcctttctcttccttttt

SEQ ID NO: 12766 - DNA, 22 bp, Artificial Sequence
  chemically synthesized
ctttcctttctcttcctttttg

SEQ ID NO: 12767 - DNA, 22 bp, Artificial Sequence
  chemically synthesized
tcctttctcttcctttttggag

SEQ ID NO: 12768 - DNA, 22 bp, Artificial Sequence
  chemically synthesized
cctttctcttcctttttggagt

SEQ ID NO: 12769 - DNA, 22 bp, Artificial Sequence
  chemically synthesized
ctttctcttcctttttggagtt

SEQ ID NO: 12770 - DNA, 22 bp, Artificial Sequence
  chemically synthesized
tctcttcctttttggagttaat

SEQ ID NO: 12771 - DNA, 22 bp, Artificial Sequence
  chemically synthesized
ctcttcctttttggagttaatc

SEQ ID NO: 12772 - DNA, 22 bp, Artificial Sequence
  chemically synthesized
tcttcctttttggagttaatca

SEQ ID NO: 12773 - DNA, 22 bp, Artificial Sequence
  chemically synthesized
ttcctttttggagttaatcagg

SEQ ID NO: 12774 - DNA, 22 bp, Artificial Sequence
  chemically synthesized
cctttttggagttaatcaggaa

SEQ ID NO: 12775 - DNA, 22 bp, Artificial Sequence
  chemically synthesized
ctttttggagttaatcaggaag

SEQ ID NO: 12776 - DNA, 22 bp, Artificial Sequence
  chemically synthesized
tttggagttaatcaggaagtag

SEQ ID NO: 12777 - DNA, 22 bp, Artificial Sequence
  chemically synthesized
ttggagttaatcaggaagtagt

SEQ ID NO: 12778 - DNA, 22 bp, Artificial Sequence
  chemically synthesized
tggagttaatcaggaagtagtc

SEQ ID NO: 12779 - DNA, 22 bp, Artificial Sequence
  chemically synthesized
ggagttaatcaggaagtagtcc

SEQ ID NO: 12780 - DNA, 22 bp, Artificial Sequence
  chemically synthesized
gagttaatcaggaagtagtccc

SEQ ID NO: 12781 - DNA, 22 bp, Artificial Sequence
  chemically synthesized
atcaggaagtagtcccaaatac

SEQ ID NO: 12782 - DNA, 22 bp, Artificial Sequence
  chemically synthesized
atcttataagcccttggtcctc

SEQ ID NO: 12783 - DNA, 22 bp, Artificial Sequence
  chemically synthesized
ataagcccttggtcctcttgag

SEQ ID NO: 12784 - DNA, 22 bp, Artificial Sequence
  chemically synthesized
taagcccttggtcctcttgaga

SEQ ID NO: 12785 - DNA, 22 bp, Artificial Sequence
  chemically synthesized
ggtcctcttgagatggtatcag

SEQ ID NO: 12786 - DNA, 22 bp, Artificial Sequence
  chemically synthesized
gtcctcttgagatggtatcaga

SEQ ID NO: 12787 - DNA, 22 bp, Artificial Sequence
  chemically synthesized
ttgagatggtatcagatatatt

SEQ ID NO: 12788 - DNA, 22 bp, Artificial Sequence
  chemically synthesized
gagatggtatcagatatattgc

SEQ ID NO: 12789 - DNA, 22 bp, Artificial Sequence
  chemically synthesized
agatggtatcagatatattgct

SEQ ID NO: 12790 - DNA, 22 bp, Artificial Sequence
  chemically synthesized
ctagacccttgaagaaaggaac

SEQ ID NO: 12791 - DNA, 22 bp, Artificial Sequence
  chemically synthesized
gacccttgaagaaaggaacaac

SEQ ID NO: 12792 - DNA, 22 bp, Artificial Sequence
  chemically synthesized
gaagaaaggaacaactccaggc

SEQ ID NO: 12793 - DNA, 22 bp, Artificial Sequence
  chemically synthesized
aagaaaggaacaactccaggca

SEQ ID NO: 12794 - DNA, 22 bp, Artificial Sequence
  chemically synthesized
caggcaacttcttgagtccctg

SEQ ID NO: 12795 - DNA, 22 bp, Artificial Sequence
  chemically synthesized
cttgagtccctgttattaattt

SEQ ID NO: 12796 - DNA, 22 bp, Artificial Sequence
  chemically synthesized
ttgagtccctgttattaatttt

SEQ ID NO: 12797 - DNA, 22 bp, Artificial Sequence
  chemically synthesized
gagtccctgttattaattttat

SEQ ID NO: 12798 - DNA, 22 bp, Artificial Sequence
  chemically synthesized
agtccctgttattaattttata

SEQ ID NO: 12799 - DNA, 22 bp, Artificial Sequence
  chemically synthesized
ttattaattttatacatacaca

SEQ ID NO: 12800 - DNA, 22 bp, Artificial Sequence
  chemically synthesized
ttaattttatacatacacacac

SEQ ID NO: 12801 - DNA, 22 bp, Artificial Sequence
  chemically synthesized
attttatacatacacacacata

SEQ ID NO: 12802 - DNA, 22 bp, Artificial Sequence
  chemically synthesized
tatacatacacacacatatatg

SEQ ID NO: 12803 - DNA, 22 bp, Artificial Sequence
  chemically synthesized
atacatacacacacatatatgt

SEQ ID NO: 12804 - DNA, 22 bp, Artificial Sequence
  chemically synthesized
tacatacacacacatatatgta

SEQ ID NO: 12805 - DNA, 22 bp, Artificial Sequence
  chemically synthesized
cttaacaatggggatatattct

SEQ ID NO: 12806 - DNA, 22 bp, Artificial Sequence
  chemically synthesized
aacaatggggatatattctgag

SEQ ID NO: 12807 - DNA, 22 bp, Artificial Sequence
  chemically synthesized
acaatggggatatattctgaga

SEQ ID NO: 12808 - DNA, 22 bp, Artificial Sequence
  chemically synthesized
tgagaaatgtgtcattaagcaa

SEQ ID NO: 12809 - DNA, 22 bp, Artificial Sequence
  chemically synthesized
agaaatgtgtcattaagcaatt

SEQ ID NO: 12810 - DNA, 22 bp, Artificial Sequence
  chemically synthesized
agcaatttcatcattgtgcgaa

SEQ ID NO: 12811 - DNA, 22 bp, Artificial Sequence
  chemically synthesized
catcattgtgcgaacataatag

SEQ ID NO: 12812 - DNA, 22 bp, Artificial Sequence
  chemically synthesized
atcattgtgcgaacataataga

SEQ ID NO: 12813 - DNA, 22 bp, Artificial Sequence
  chemically synthesized
tgcgaacataatagagtgtact

SEQ ID NO: 12814 - DNA, 22 bp, Artificial Sequence
  chemically synthesized
acctaaacctaaatggtatagc

SEQ ID NO: 12815 - DNA, 22 bp, Artificial Sequence
  chemically synthesized
cctaaacctaaatggtatagct

SEQ ID NO: 12816 - DNA, 22 bp, Artificial Sequence
  chemically synthesized
aacctaaatggtatagcttact

SEQ ID NO: 12817 - DNA, 22 bp, Artificial Sequence
  chemically synthesized
aatggtatagcttactacatac

SEQ ID NO: 12818 - DNA, 22 bp, Artificial Sequence
  chemically synthesized
actacatacctaggttgtattg

SEQ ID NO: 12819 - DNA, 22 bp, Artificial Sequence
  chemically synthesized
ctacatacctaggttgtattga

SEQ ID NO: 12820 - DNA, 22 bp, Artificial Sequence
  chemically synthesized
catacctaggttgtattgatgt

SEQ ID NO: 12821 - DNA, 22 bp, Artificial Sequence
  chemically synthesized
ggttgtattgatgtggcctatt

SEQ ID NO: 12822 - DNA, 22 bp, Artificial Sequence
  chemically synthesized
tattgatgtggcctattgctcc

SEQ ID NO: 12823 - DNA, 22 bp, Artificial Sequence
  chemically synthesized
atgtggcctattgctcctaggc

SEQ ID NO: 12824 - DNA, 22 bp, Artificial Sequence
  chemically synthesized
ttgctcctaggctcctgggctg

SEQ ID NO: 12825 - DNA, 22 bp, Artificial Sequence
  chemically synthesized
ctcctaggctcctgggctgcaa

SEQ ID NO: 12826 - DNA, 22 bp, Artificial Sequence
  chemically synthesized
ctaggctcctgggctgcaaacc

SEQ ID NO: 12827 - DNA, 22 bp, Artificial Sequence
  chemically synthesized
ggctcctgggctgcaaacctgt

SEQ ID NO: 12828 - DNA, 22 bp, Artificial Sequence
  chemically synthesized
ctgggctgcaaacctgtacagc

SEQ ID NO: 12829 - DNA, 22 bp, Artificial Sequence
  chemically synthesized
ggctgcaaacctgtacagcatg

SEQ ID NO: 12830 - DNA, 22 bp, Artificial Sequence
  chemically synthesized
caaacctgtacagcatgtgact

SEQ ID NO: 12831 - DNA, 22 bp, Artificial Sequence
  chemically synthesized
tacagcatgtgactgtactgaa

SEQ ID NO: 12832 - DNA, 22 bp, Artificial Sequence
  chemically synthesized
tactgaacactgtaggcaatgg

SEQ ID NO: 12833 - DNA, 22 bp, Artificial Sequence
  chemically synthesized
aacactgtaggcaatggtaaca

SEQ ID NO: 12834 - DNA, 22 bp, Artificial Sequence
  chemically synthesized
taggcaatggtaacagtggtat

SEQ ID NO: 12835 - DNA, 22 bp, Artificial Sequence
  chemically synthesized
gtgtatctaaacatagaaaagg

SEQ ID NO: 12836 - DNA, 22 bp, Artificial Sequence
  chemically synthesized
tgtatctaaacatagaaaaggt

SEQ ID NO: 12837 - DNA, 22 bp, Artificial Sequence
  chemically synthesized
aacatagaaaaggtacagtgaa

SEQ ID NO: 12838 - DNA, 22 bp, Artificial Sequence
  chemically synthesized
taaccttatgggaccactgtcg

SEQ ID NO: 12839 - DNA, 22 bp, Artificial Sequence
  chemically synthesized
atgggaccactgtcgtataatg

SEQ ID NO: 12840 - DNA, 22 bp, Artificial Sequence
  chemically synthesized
tgggaccactgtcgtataatgt

SEQ ID NO: 12841 - DNA, 22 bp, Artificial Sequence
  chemically synthesized
tcgtataatgtggtccatcatt

SEQ ID NO: 12842 - DNA, 22 bp, Artificial Sequence
  chemically synthesized
accaaaatgtcattgtgcagca

SEQ ID NO: 12843 - DNA, 22 bp, Artificial Sequence
  chemically synthesized
tgcagcaaatgattatctcata

SEQ ID NO: 12844 - DNA, 22 bp, Artificial Sequence
  chemically synthesized
tctcatatatatatatatatga

SEQ ID NO: 12845 - DNA, 22 bp, Artificial Sequence
  chemically synthesized
atatatatatatatatgatatg

SEQ ID NO: 12846 - DNA, 22 bp, Artificial Sequence
  chemically synthesized
agatagagacatctatcctcca

SEQ ID NO: 12847 - DNA, 22 bp, Artificial Sequence
  chemically synthesized
tcctccagagttcaggagtgtc

SEQ ID NO: 12848 - DNA, 22 bp, Artificial Sequence
  chemically synthesized
cagagttcaggagtgtctcttc

SEQ ID NO: 12849 - DNA, 22 bp, Artificial Sequence
  chemically synthesized
aggagtgtctcttcagactagg

SEQ ID NO: 12850 - DNA, 22 bp, Artificial Sequence
  chemically synthesized
ttcagactaggtagatgtagct

SEQ ID NO: 12851 - DNA, 22 bp, Artificial Sequence
  chemically synthesized
cagactaggtagatgtagctta

SEQ ID NO: 12852 - DNA, 22 bp, Artificial Sequence
  chemically synthesized
agactaggtagatgtagcttaa

SEQ ID NO: 12853 - DNA, 22 bp, Artificial Sequence
  chemically synthesized
ggtagatgtagcttaaaaaaaa

SEQ ID NO: 12854 - DNA, 22 bp, Artificial Sequence
  chemically synthesized
aaaaaaaacatatcctgaattc

SEQ ID NO: 12855 - DNA, 22 bp, Artificial Sequence
  chemically synthesized
aaaaaaacatatcctgaattct

SEQ ID NO: 12856 - DNA, 22 bp, Artificial Sequence
  chemically synthesized
aattctagagagatgcttaaat

SEQ ID NO: 12857 - DNA, 22 bp, Artificial Sequence
  chemically synthesized
tagagagatgcttaaatcactg

SEQ ID NO: 12858 - DNA, 22 bp, Artificial Sequence
  chemically synthesized
gagagatgcttaaatcactgca

SEQ ID NO: 12859 - DNA, 22 bp, Artificial Sequence
  chemically synthesized
aaatcactgcaattcctataac

SEQ ID NO: 12860 - DNA, 22 bp, Artificial Sequence
  chemically synthesized
aatcactgcaattcctataaca

SEQ ID NO: 12861 - DNA, 22 bp, Artificial Sequence
  chemically synthesized
caattcctataacacttgccaa

SEQ ID NO: 12862 - DNA, 22 bp, Artificial Sequence
  chemically synthesized
ctataacacttgccaaccaaag

SEQ ID NO: 12863 - DNA, 22 bp, Artificial Sequence
  chemically synthesized
taacacttgccaaccaaaggtg

SEQ ID NO: 12864 - DNA, 22 bp, Artificial Sequence
  chemically synthesized
gccaaccaaaggtgctgttgat

SEQ ID NO: 12865 - DNA, 22 bp, Artificial Sequence
  chemically synthesized
ccaaccaaaggtgctgttgatc

SEQ ID NO: 12866 - DNA, 22 bp, Artificial Sequence
  chemically synthesized
ttgatctgaaattgctttttta

SEQ ID NO: 12867 - DNA, 22 bp, Artificial Sequence
  chemically synthesized
atctgaaattgcttttttaaat

SEQ ID NO: 12868 - DNA, 22 bp, Artificial Sequence
  chemically synthesized
aaattgcttttttaaattaatg

SEQ ID NO: 12869 - DNA, 22 bp, Artificial Sequence
  chemically synthesized
cttttttaaattaatgcagtga

SEQ ID NO: 12870 - DNA, 22 bp, Artificial Sequence
  chemically synthesized
ttttaaattaatgcagtgattt

SEQ ID NO: 12871 - DNA, 22 bp, Artificial Sequence
  chemically synthesized
tttaaattaatgcagtgatttt

SEQ ID NO: 12872 - DNA, 22 bp, Artificial Sequence
  chemically synthesized
ttaaattaatgcagtgattttt

SEQ ID NO: 12873 - DNA, 22 bp, Artificial Sequence
  chemically synthesized
taaattaatgcagtgatttttc

SEQ ID NO: 12874 - DNA, 22 bp, Artificial Sequence
  chemically synthesized
aaattaatgcagtgatttttct

SEQ ID NO: 12875 - DNA, 22 bp, Artificial Sequence
  chemically synthesized
aattaatgcagtgatttttctt

SEQ ID NO: 12876 - DNA, 22 bp, Artificial Sequence
  chemically synthesized
atgcagtgatttttctttaaca

SEQ ID NO: 12877 - DNA, 22 bp, Artificial Sequence
  chemically synthesized
ttctttaacatctagtgacaga

SEQ ID NO: 12878 - DNA, 22 bp, Artificial Sequence
  chemically synthesized
tctttaacatctagtgacagac

SEQ ID NO: 12879 - DNA, 22 bp, Artificial Sequence
  chemically synthesized
ctttaacatctagtgacagaca

SEQ ID NO: 12880 - DNA, 22 bp, Artificial Sequence
  chemically synthesized
tttaacatctagtgacagacac

SEQ ID NO: 12881 - DNA, 22 bp, Artificial Sequence
  chemically synthesized
taacatctagtgacagacactg

SEQ ID NO: 12882 - DNA, 22 bp, Artificial Sequence
  chemically synthesized
aacatctagtgacagacactgg

SEQ ID NO: 12883 - DNA, 22 bp, Artificial Sequence
  chemically synthesized
acatctagtgacagacactggg

SEQ ID NO: 12884 - DNA, 22 bp, Artificial Sequence
  chemically synthesized
gtgacagacactggggtcacat

SEQ ID NO: 12885 - DNA, 22 bp, Artificial Sequence
  chemically synthesized
gggtcacatttgcagctggacc

SEQ ID NO: 12886 - DNA, 22 bp, Artificial Sequence
  chemically synthesized
gcagctggaccataattaggct

SEQ ID NO: 12887 - DNA, 22 bp, Artificial Sequence
  chemically synthesized
cagctggaccataattaggctt

SEQ ID NO: 12888 - DNA, 22 bp, Artificial Sequence
  chemically synthesized
gaccataattaggcttctgttc

SEQ ID NO: 12889 - DNA, 22 bp, Artificial Sequence
  chemically synthesized
ggcttctgttcttcaggagaca

SEQ ID NO: 12890 - DNA, 22 bp, Artificial Sequence
  chemically synthesized
ctgttcttcaggagacatttgt

SEQ ID NO: 12891 - DNA, 22 bp, Artificial Sequence
  chemically synthesized
tgttcttcaggagacatttgtt

SEQ ID NO: 12892 - DNA, 22 bp, Artificial Sequence
  chemically synthesized
ttcttcaggagacatttgttca

SEQ ID NO: 12893 - DNA, 22 bp, Artificial Sequence
  chemically synthesized
ttcaggagacatttgttcaaag

SEQ ID NO: 12894 - DNA, 22 bp, Artificial Sequence
  chemically synthesized
caggagacatttgttcaaagtc

SEQ ID NO: 12895 - DNA, 22 bp, Artificial Sequence
  chemically synthesized
aggagacatttgttcaaagtca

SEQ ID NO: 12896 - DNA, 22 bp, Artificial Sequence
  chemically synthesized
gttcaaagtcatttgggcaacc

SEQ ID NO: 12897 - DNA, 22 bp, Artificial Sequence
  chemically synthesized
ttcaaagtcatttgggcaacca

SEQ ID NO: 12898 - DNA, 22 bp, Artificial Sequence
  chemically synthesized
aaagtcatttgggcaaccatat

SEQ ID NO: 12899 - DNA, 22 bp, Artificial Sequence
  chemically synthesized
gggcaaccatattctgaaaaca

SEQ ID NO: 12900 - DNA, 22 bp, Artificial Sequence
  chemically synthesized
ggcaaccatattctgaaaacag

SEQ ID NO: 12901 - DNA, 22 bp, Artificial Sequence
  chemically synthesized
tgaaaacagcccagccagggtg

SEQ ID NO: 12902 - DNA, 22 bp, Artificial Sequence
  chemically synthesized
aaaacagcccagccagggtgat

SEQ ID NO: 12903 - DNA, 22 bp, Artificial Sequence
  chemically synthesized
tgcaaagatcctcaatgagcta

SEQ ID NO: 12904 - DNA, 22 bp, Artificial Sequence
  chemically synthesized
gcaaagatcctcaatgagctat

SEQ ID NO: 12905 - DNA, 22 bp, Artificial Sequence
  chemically synthesized
caaagatcctcaatgagctatt

SEQ ID NO: 12906 - DNA, 22 bp, Artificial Sequence
  chemically synthesized
aatgagctattttcaagtgatg

SEQ ID NO: 12907 - DNA, 22 bp, Artificial Sequence
  chemically synthesized
ttttcaagtgatgacaaagtgt

SEQ ID NO: 12908 - DNA, 22 bp, Artificial Sequence
  chemically synthesized
tcaagtgatgacaaagtgtgaa

SEQ ID NO: 12909 - DNA, 22 bp, Artificial Sequence
  chemically synthesized
caagtgatgacaaagtgtgaag

SEQ ID NO: 12910 - DNA, 22 bp, Artificial Sequence
  chemically synthesized
aagtgatgacaaagtgtgaagt

SEQ ID NO: 12911 - DNA, 22 bp, Artificial Sequence
  chemically synthesized
accgctcatttgagaactttct

SEQ ID NO: 12912 - DNA, 22 bp, Artificial Sequence
  chemically synthesized
atttgagaactttctttttcat

SEQ ID NO: 12913 - DNA, 22 bp, Artificial Sequence
  chemically synthesized
gagaactttctttttcatccaa

SEQ ID NO: 12914 - DNA, 22 bp, Artificial Sequence
  chemically synthesized
agaactttctttttcatccaaa

SEQ ID NO: 12915 - DNA, 22 bp, Artificial Sequence
  chemically synthesized
tctttttcatccaaagtaaatt

SEQ ID NO: 12916 - DNA, 22 bp, Artificial Sequence
  chemically synthesized
ctttttcatccaaagtaaattc

SEQ ID NO: 12917 - DNA, 22 bp, Artificial Sequence
  chemically synthesized
tttttcatccaaagtaaattca

SEQ ID NO: 12918 - DNA, 22 bp, Artificial Sequence
  chemically synthesized
tttcatccaaagtaaattcaaa

SEQ ID NO: 12919 - DNA, 22 bp, Artificial Sequence
  chemically synthesized
ttcatccaaagtaaattcaaat

SEQ ID NO: 12920 - DNA, 22 bp, Artificial Sequence
  chemically synthesized
tcatccaaagtaaattcaaata

SEQ ID NO: 12921 - DNA, 22 bp, Artificial Sequence
  chemically synthesized
catccaaagtaaattcaaatat

SEQ ID NO: 12922 - DNA, 22 bp, Artificial Sequence
  chemically synthesized
atccaaagtaaattcaaatatg

SEQ ID NO: 12923 - DNA, 22 bp, Artificial Sequence
  chemically synthesized
aaatatgattagaaatctgacc

SEQ ID NO: 12924 - DNA, 22 bp, Artificial Sequence
  chemically synthesized
gaaatctgaccttttattactg

SEQ ID NO: 12925 - DNA, 22 bp, Artificial Sequence
  chemically synthesized
accttttattactggaattctc

SEQ ID NO: 12926 - DNA, 22 bp, Artificial Sequence
  chemically synthesized
ttattactggaattctcttgac

SEQ ID NO: 12927 - DNA, 22 bp, Artificial Sequence
  chemically synthesized
tattactggaattctcttgact

SEQ ID NO: 12928 - DNA, 22 bp, Artificial Sequence
  chemically synthesized
attactggaattctcttgacta

SEQ ID NO: 12929 - DNA, 22 bp, Artificial Sequence
  chemically synthesized
ttactggaattctcttgactaa

SEQ ID NO: 12930 - DNA, 22 bp, Artificial Sequence
  chemically synthesized
ctggaattctcttgactaaaag

SEQ ID NO: 12931 - DNA, 22 bp, Artificial Sequence
  chemically synthesized
gaattctcttgactaaaagtaa

SEQ ID NO: 12932 - DNA, 22 bp, Artificial Sequence
  chemically synthesized
tcttgactaaaagtaaaattga

SEQ ID NO: 12933 - DNA, 22 bp, Artificial Sequence
  chemically synthesized
ttgactaaaagtaaaattgaat

SEQ ID NO: 12934 - DNA, 22 bp, Artificial Sequence
  chemically synthesized
gactaaaagtaaaattgaattt

SEQ ID NO: 12935 - DNA, 22 bp, Artificial Sequence
  chemically synthesized
actaaaagtaaaattgaatttt

SEQ ID NO: 12936 - DNA, 22 bp, Artificial Sequence
  chemically synthesized
aaagtaaaattgaattttaatt

SEQ ID NO: 12937 - DNA, 22 bp, Artificial Sequence
  chemically synthesized
aattttaattcctaaatctcca

SEQ ID NO: 12938 - DNA, 22 bp, Artificial Sequence
  chemically synthesized
taattcctaaatctccatgtgt

SEQ ID NO: 12939 - DNA, 22 bp, Artificial Sequence
  chemically synthesized
aattcctaaatctccatgtgta

SEQ ID NO: 12940 - DNA, 22 bp, Artificial Sequence
  chemically synthesized
attcctaaatctccatgtgtat

SEQ ID NO: 12941 - DNA, 22 bp, Artificial Sequence
  chemically synthesized
ctaaatctccatgtgtatacag

SEQ ID NO: 12942 - DNA, 22 bp, Artificial Sequence
  chemically synthesized
aatctccatgtgtatacagtac

SEQ ID NO: 12943 - DNA, 22 bp, Artificial Sequence
  chemically synthesized
catgtgtatacagtactgtggg

SEQ ID NO: 12944 - DNA, 22 bp, Artificial Sequence
  chemically synthesized
tgggaacatcacagattttggc

SEQ ID NO: 12945 - DNA, 22 bp, Artificial Sequence
  chemically synthesized
tggctccatgccctaaagagaa

SEQ ID NO: 12946 - DNA, 22 bp, Artificial Sequence
  chemically synthesized
ggctccatgccctaaagagaaa

SEQ ID NO: 12947 - DNA, 22 bp, Artificial Sequence
  chemically synthesized
gctccatgccctaaagagaaat

SEQ ID NO: 12948 - DNA, 22 bp, Artificial Sequence
  chemically synthesized
catgccctaaagagaaattggc

SEQ ID NO: 12949 - DNA, 22 bp, Artificial Sequence
  chemically synthesized
aagagaaattggctttcagatt

SEQ ID NO: 12950 - DNA, 22 bp, Artificial Sequence
  chemically synthesized
gctttcagattatttggattaa

SEQ ID NO: 12951 - DNA, 22 bp, Artificial Sequence
  chemically synthesized
tcagattatttggattaaaaac

SEQ ID NO: 12952 - DNA, 22 bp, Artificial Sequence
  chemically synthesized
cagattatttggattaaaaaca

SEQ ID NO: 12953 - DNA, 22 bp, Artificial Sequence
  chemically synthesized
agattatttggattaaaaacaa

SEQ ID NO: 12954 - DNA, 22 bp, Artificial Sequence
  chemically synthesized
tttggattaaaaacaaagactt

SEQ ID NO: 12955 - DNA, 22 bp, Artificial Sequence
  chemically synthesized
ggattaaaaacaaagactttct

SEQ ID NO: 12956 - DNA, 22 bp, Artificial Sequence
  chemically synthesized
gattaaaaacaaagactttctt

SEQ ID NO: 12957 - DNA, 22 bp, Artificial Sequence
  chemically synthesized
aaaacaaagactttcttaagag

SEQ ID NO: 12958 - DNA, 22 bp, Artificial Sequence
  chemically synthesized
tcttaagagatgtaaaattttc

SEQ ID NO: 12959 - DNA, 22 bp, Artificial Sequence
  chemically synthesized
cttaagagatgtaaaattttca

SEQ ID NO: 12960 - DNA, 22 bp, Artificial Sequence
  chemically synthesized
ttaagagatgtaaaattttcat

SEQ ID NO: 12961 - DNA, 22 bp, Artificial Sequence
  chemically synthesized
aagagatgtaaaattttcatga

SEQ ID NO: 12962 - DNA, 22 bp, Artificial Sequence
  chemically synthesized
agagatgtaaaattttcatgat

SEQ ID NO: 12963 - DNA, 22 bp, Artificial Sequence
  chemically synthesized
tcatgatgttttcttttttgct

SEQ ID NO: 12964 - DNA, 22 bp, Artificial Sequence
  chemically synthesized
catgatgttttcttttttgcta

SEQ ID NO: 12965 - DNA, 22 bp, Artificial Sequence
  chemically synthesized
atgatgttttcttttttgctaa

SEQ ID NO: 12966 - DNA, 22 bp, Artificial Sequence
  chemically synthesized
tcttttttgctaaaactaaaga

SEQ ID NO: 12967 - DNA, 22 bp, Artificial Sequence
  chemically synthesized
cttttttgctaaaactaaagaa

SEQ ID NO: 12968 - DNA, 22 bp, Artificial Sequence
  chemically synthesized
ttttttgctaaaactaaagaat

SEQ ID NO: 12969 - DNA, 22 bp, Artificial Sequence
  chemically synthesized
ttttgctaaaactaaagaatta

SEQ ID NO: 12970 - DNA, 22 bp, Artificial Sequence
  chemically synthesized
tttgctaaaactaaagaattat

SEQ ID NO: 12971 - DNA, 22 bp, Artificial Sequence
  chemically synthesized
ttgctaaaactaaagaattatt

SEQ ID NO: 12972 - DNA, 22 bp, Artificial Sequence
  chemically synthesized
tgctaaaactaaagaattattc

SEQ ID NO: 12973 - DNA, 22 bp, Artificial Sequence
  chemically synthesized
gctaaaactaaagaattattct

SEQ ID NO: 12974 - DNA, 22 bp, Artificial Sequence
  chemically synthesized
ctaaaactaaagaattattctt

SEQ ID NO: 12975 - DNA, 22 bp, Artificial Sequence
  chemically synthesized
aaactaaagaattattctttta

SEQ ID NO: 12976 - DNA, 22 bp, Artificial Sequence
  chemically synthesized
aagaattattcttttacatttc

SEQ ID NO: 12977 - DNA, 22 bp, Artificial Sequence
  chemically synthesized
ttcttttacatttcagtttttc

SEQ ID NO: 12978 - DNA, 22 bp, Artificial Sequence
  chemically synthesized
ttttacatttcagtttttcttg

SEQ ID NO: 12979 - DNA, 22 bp, Artificial Sequence
  chemically synthesized
ttacatttcagtttttcttgat

SEQ ID NO: 12980 - DNA, 22 bp, Artificial Sequence
  chemically synthesized
tacatttcagtttttcttgatc

SEQ ID NO: 12981 - DNA, 22 bp, Artificial Sequence
  chemically synthesized
acatttcagtttttcttgatca

SEQ ID NO: 12982 - DNA, 22 bp, Artificial Sequence
  chemically synthesized
catttcagtttttcttgatcat

SEQ ID NO: 12983 - DNA, 22 bp, Artificial Sequence
  chemically synthesized
cagtttttcttgatcatgaaaa

SEQ ID NO: 12984 - DNA, 22 bp, Artificial Sequence
  chemically synthesized
agtttttcttgatcatgaaaac

SEQ ID NO: 12985 - DNA, 22 bp, Artificial Sequence
  chemically synthesized
ttcttgatcatgaaaacgccaa

SEQ ID NO: 12986 - DNA, 22 bp, Artificial Sequence
  chemically synthesized
tcttgatcatgaaaacgccaac

SEQ ID NO: 12987 - DNA, 22 bp, Artificial Sequence
  chemically synthesized
cttgatcatgaaaacgccaaca

SEQ ID NO: 12988 - DNA, 22 bp, Artificial Sequence
  chemically synthesized
ttgatcatgaaaacgccaacaa

SEQ ID NO: 12989 - DNA, 22 bp, Artificial Sequence
  chemically synthesized
gatcatgaaaacgccaacaaaa

SEQ ID NO: 12990 - DNA, 22 bp, Artificial Sequence
  chemically synthesized
atcatgaaaacgccaacaaaat

SEQ ID NO: 12991 - DNA, 22 bp, Artificial Sequence
  chemically synthesized
tgaatcggccaaagaggtataa

SEQ ID NO: 12992 - DNA, 22 bp, Artificial Sequence
  chemically synthesized
aatcggccaaagaggtataatt

SEQ ID NO: 12993 - DNA, 22 bp, Artificial Sequence
  chemically synthesized
aggtaaattggaagagtttgtt

SEQ ID NO: 12994 - DNA, 22 bp, Artificial Sequence
  chemically synthesized
gaagagtttgttcaagggaacc

SEQ ID NO: 12995 - DNA, 22 bp, Artificial Sequence
  chemically synthesized
gttcaagggaaccttgagagag

SEQ ID NO: 12996 - DNA, 22 bp, Artificial Sequence
  chemically synthesized
ttcaagggaaccttgagagaga

SEQ ID NO: 12997 - DNA, 22 bp, Artificial Sequence
  chemically synthesized
aagggaaccttgagagagaatg

SEQ ID NO: 12998 - DNA, 22 bp, Artificial Sequence
  chemically synthesized
gagagagaatgtatggaagaaa

SEQ ID NO: 12999 - DNA, 22 bp, Artificial Sequence
  chemically synthesized
agagagaatgtatggaagaaaa

SEQ ID NO: 13000 - DNA, 22 bp, Artificial Sequence
  chemically synthesized
tgaagaagcacgagaagttttt

SEQ ID NO: 13001 - DNA, 22 bp, Artificial Sequence
  chemically synthesized
gaagaagcacgagaagtttttg

SEQ ID NO: 13002 - DNA, 22 bp, Artificial Sequence
  chemically synthesized
aagaagcacgagaagtttttga

SEQ ID NO: 13003 - DNA, 22 bp, Artificial Sequence
  chemically synthesized
tttcagtgttttcaaaaacttc

SEQ ID NO: 13004 - DNA, 22 bp, Artificial Sequence
  chemically synthesized
tcagtgttttcaaaaacttctc

SEQ ID NO: 13005 - DNA, 22 bp, Artificial Sequence
  chemically synthesized
cagtgttttcaaaaacttctcg

SEQ ID NO: 13006 - DNA, 22 bp, Artificial Sequence
  chemically synthesized
agtgttttcaaaaacttctcgt

SEQ ID NO: 13007 - DNA, 22 bp, Artificial Sequence
  chemically synthesized
tcaaaaacttctcgtgcttctt

SEQ ID NO: 13008 - DNA, 22 bp, Artificial Sequence
  chemically synthesized
caaaaacttctcgtgcttcttc

SEQ ID NO: 13009 - DNA, 22 bp, Artificial Sequence
  chemically synthesized
aaaaacttctcgtgcttcttca

SEQ ID NO: 13010 - DNA, 22 bp, Artificial Sequence
  chemically synthesized
ctcgtgcttcttcaaaactaca

SEQ ID NO: 13011 - DNA, 22 bp, Artificial Sequence
  chemically synthesized
tcgtgcttcttcaaaactacac

SEQ ID NO: 13012 - DNA, 22 bp, Artificial Sequence
  chemically synthesized
gtgcttcttcaaaactacactt

SEQ ID NO: 13013 - DNA, 22 bp, Artificial Sequence
  chemically synthesized
cttcaaaactacacttttcttc

SEQ ID NO: 13014 - DNA, 22 bp, Artificial Sequence
  chemically synthesized
ttcaaaactacacttttcttcc

SEQ ID NO: 13015 - DNA, 22 bp, Artificial Sequence
  chemically synthesized
caaaactacacttttcttccat

SEQ ID NO: 13016 - DNA, 22 bp, Artificial Sequence
  chemically synthesized
aaaactacacttttcttccata

SEQ ID NO: 13017 - DNA, 22 bp, Artificial Sequence
  chemically synthesized
cacttttcttccatacattctc

SEQ ID NO: 13018 - DNA, 22 bp, Artificial Sequence
  chemically synthesized
ttcttccatacattctctctca

SEQ ID NO: 13019 - DNA, 22 bp, Artificial Sequence
  chemically synthesized
tcttccatacattctctctcaa

SEQ ID NO: 13020 - DNA, 22 bp, Artificial Sequence
  chemically synthesized
cttccatacattctctctcaag

SEQ ID NO: 13021 - DNA, 22 bp, Artificial Sequence
  chemically synthesized
ttccatacattctctctcaagg

SEQ ID NO: 13022 - DNA, 22 bp, Artificial Sequence
  chemically synthesized
ccatacattctctctcaaggtt

SEQ ID NO: 13023 - DNA, 22 bp, Artificial Sequence
  chemically synthesized
catacattctctctcaaggttc

SEQ ID NO: 13024 - DNA, 22 bp, Artificial Sequence
  chemically synthesized
tctctcaaggttcccttgaaca

SEQ ID NO: 13025 - DNA, 22 bp, Artificial Sequence
  chemically synthesized
tctcaaggttcccttgaacaaa

SEQ ID NO: 13026 - DNA, 22 bp, Artificial Sequence
  chemically synthesized
tcaaggttcccttgaacaaact

SEQ ID NO: 13027 - DNA, 22 bp, Artificial Sequence
  chemically synthesized
aaggttcccttgaacaaactct

SEQ ID NO: 13028 - DNA, 22 bp, Artificial Sequence
  chemically synthesized
ccttgaacaaactcttccaatt

SEQ ID NO: 13029 - DNA, 22 bp, Artificial Sequence
  chemically synthesized
gaacaaactcttccaatttacc

SEQ ID NO: 13030 - DNA, 22 bp, Artificial Sequence
  chemically synthesized
aacaaactcttccaatttacct

SEQ ID NO: 13031 - DNA, 22 bp, Artificial Sequence
  chemically synthesized
ttccaatttacctgaattatac

SEQ ID NO: 13032 - DNA, 22 bp, Artificial Sequence
  chemically synthesized
ccaatttacctgaattatacct

SEQ ID NO: 13033 - DNA, 22 bp, Artificial Sequence
  chemically synthesized
caatttacctgaattatacctc

SEQ ID NO: 13034 - DNA, 22 bp, Artificial Sequence
  chemically synthesized
acctgaattatacctctttggc

SEQ ID NO: 13035 - DNA, 22 bp, Artificial Sequence
  chemically synthesized
cctgaattatacctctttggcc

SEQ ID NO: 13036 - DNA, 22 bp, Artificial Sequence
  chemically synthesized
aattatacctctttggccgatt

SEQ ID NO: 13037 - DNA, 22 bp, Artificial Sequence
  chemically synthesized
tacctctttggccgattcagaa

SEQ ID NO: 13038 - DNA, 22 bp, Artificial Sequence
  chemically synthesized
tttggccgattcagaattttgt

SEQ ID NO: 13039 - DNA, 22 bp, Artificial Sequence
  chemically synthesized
tggccgattcagaattttgttg

SEQ ID NO: 13040 - DNA, 22 bp, Artificial Sequence
  chemically synthesized
ggccgattcagaattttgttgg

SEQ ID NO: 13041 - DNA, 22 bp, Artificial Sequence
  chemically synthesized
gccgattcagaattttgttggc

SEQ ID NO: 13042 - DNA, 22 bp, Artificial Sequence
  chemically synthesized
agaattttgttggcgttttcat

SEQ ID NO: 13043 - DNA, 22 bp, Artificial Sequence
  chemically synthesized
tgttggcgttttcatgatcaag

SEQ ID NO: 13044 - DNA, 22 bp, Artificial Sequence
  chemically synthesized
gttggcgttttcatgatcaaga

SEQ ID NO: 13045 - DNA, 22 bp, Artificial Sequence
  chemically synthesized
ttggcgttttcatgatcaagaa

SEQ ID NO: 13046 - DNA, 22 bp, Artificial Sequence
  chemically synthesized
gcgttttcatgatcaagaaaaa

SEQ ID NO: 13047 - DNA, 22 bp, Artificial Sequence
  chemically synthesized
tcatgatcaagaaaaactgaaa

SEQ ID NO: 13048 - DNA, 22 bp, Artificial Sequence
  chemically synthesized
catgatcaagaaaaactgaaat

SEQ ID NO: 13049 - DNA, 22 bp, Artificial Sequence
  chemically synthesized
atgatcaagaaaaactgaaatg

SEQ ID NO: 13050 - DNA, 22 bp, Artificial Sequence
  chemically synthesized
aaatgtaaaagaataattcttt

SEQ ID NO: 13051 - DNA, 22 bp, Artificial Sequence
  chemically synthesized
tttagttttagcaaaaaagaaa

SEQ ID NO: 13052 - DNA, 22 bp, Artificial Sequence
  chemically synthesized
tagttttagcaaaaaagaaaac

SEQ ID NO: 13053 - DNA, 22 bp, Artificial Sequence
  chemically synthesized
agttttagcaaaaaagaaaaca

SEQ ID NO: 13054 - DNA, 22 bp, Artificial Sequence
  chemically synthesized
gttttagcaaaaaagaaaacat

SEQ ID NO: 13055 - DNA, 22 bp, Artificial Sequence
  chemically synthesized
tagcaaaaaagaaaacatcatg

SEQ ID NO: 13056 - DNA, 22 bp, Artificial Sequence
  chemically synthesized
agcaaaaaagaaaacatcatga

SEQ ID NO: 13057 - DNA, 22 bp, Artificial Sequence
  chemically synthesized
gcaaaaaagaaaacatcatgaa

SEQ ID NO: 13058 - DNA, 22 bp, Artificial Sequence
  chemically synthesized
tacatctcttaagaaagtcttt

SEQ ID NO: 13059 - DNA, 22 bp, Artificial Sequence
  chemically synthesized
acatctcttaagaaagtctttg

SEQ ID NO: 13060 - DNA, 22 bp, Artificial Sequence
  chemically synthesized
catctcttaagaaagtctttgt

SEQ ID NO: 13061 - DNA, 22 bp, Artificial Sequence
  chemically synthesized
ttaagaaagtctttgtttttaa

SEQ ID NO: 13062 - DNA, 22 bp, Artificial Sequence
  chemically synthesized
aagaaagtctttgtttttaatc

SEQ ID NO: 13063 - DNA, 22 bp, Artificial Sequence
  chemically synthesized
agaaagtctttgtttttaatcc

SEQ ID NO: 13064 - DNA, 22 bp, Artificial Sequence
  chemically synthesized
tgtttttaatccaaataatctg

SEQ ID NO: 13065 - DNA, 22 bp, Artificial Sequence
  chemically synthesized
gtttttaatccaaataatctga

SEQ ID NO: 13066 - DNA, 22 bp, Artificial Sequence
  chemically synthesized
tttttaatccaaataatctgaa

SEQ ID NO: 13067 - DNA, 22 bp, Artificial Sequence
  chemically synthesized
ttaatccaaataatctgaaagc

SEQ ID NO: 13068 - DNA, 22 bp, Artificial Sequence
  chemically synthesized
taatccaaataatctgaaagcc

SEQ ID NO: 13069 - DNA, 22 bp, Artificial Sequence
  chemically synthesized
aatccaaataatctgaaagcca

SEQ ID NO: 13070 - DNA, 22 bp, Artificial Sequence
  chemically synthesized
atccaaataatctgaaagccaa

SEQ ID NO: 13071 - DNA, 22 bp, Artificial Sequence
  chemically synthesized
aaagccaatttctctttagggc

SEQ ID NO: 13072 - DNA, 22 bp, Artificial Sequence
  chemically synthesized
ctctttagggcatggagccaaa

SEQ ID NO: 13073 - DNA, 22 bp, Artificial Sequence
  chemically synthesized
tctttagggcatggagccaaaa

SEQ ID NO: 13074 - DNA, 22 bp, Artificial Sequence
  chemically synthesized
tttagggcatggagccaaaatc

SEQ ID NO: 13075 - DNA, 22 bp, Artificial Sequence
  chemically synthesized
tagggcatggagccaaaatctg

SEQ ID NO: 13076 - DNA, 22 bp, Artificial Sequence
  chemically synthesized
agggcatggagccaaaatctgt

SEQ ID NO: 13077 - DNA, 22 bp, Artificial Sequence
  chemically synthesized
gggcatggagccaaaatctgtg

SEQ ID NO: 13078 - DNA, 22 bp, Artificial Sequence
  chemically synthesized
tgatgttcccacagtactgtat

SEQ ID NO: 13079 - DNA, 22 bp, Artificial Sequence
  chemically synthesized
ccacagtactgtatacacatgg

SEQ ID NO: 13080 - DNA, 22 bp, Artificial Sequence
  chemically synthesized
tatacacatggagatttaggaa

SEQ ID NO: 13081 - DNA, 22 bp, Artificial Sequence
  chemically synthesized
aggaattaaaattcaattttac

SEQ ID NO: 13082 - DNA, 22 bp, Artificial Sequence
  chemically synthesized
ggaattaaaattcaattttact

SEQ ID NO: 13083 - DNA, 22 bp, Artificial Sequence
  chemically synthesized
aaattcaattttacttttagtc

SEQ ID NO: 13084 - DNA, 22 bp, Artificial Sequence
  chemically synthesized
aattttacttttagtcaagaga

SEQ ID NO: 13085 - DNA, 22 bp, Artificial Sequence
  chemically synthesized
tacttttagtcaagagaattcc

SEQ ID NO: 13086 - DNA, 22 bp, Artificial Sequence
  chemically synthesized
acttttagtcaagagaattcca

SEQ ID NO: 13087 - DNA, 22 bp, Artificial Sequence
  chemically synthesized
cttttagtcaagagaattccag

SEQ ID NO: 13088 - DNA, 22 bp, Artificial Sequence
  chemically synthesized
ttagtcaagagaattccagtaa

SEQ ID NO: 13089 - DNA, 22 bp, Artificial Sequence
  chemically synthesized
tagtcaagagaattccagtaat

SEQ ID NO: 13090 - DNA, 22 bp, Artificial Sequence
  chemically synthesized
agtcaagagaattccagtaata

SEQ ID NO: 13091 - DNA, 22 bp, Artificial Sequence
  chemically synthesized
gtcaagagaattccagtaataa

SEQ ID NO: 13092 - DNA, 22 bp, Artificial Sequence
  chemically synthesized
cagtaataaaaggtcagatttc

SEQ ID NO: 13093 - DNA, 22 bp, Artificial Sequence
  chemically synthesized
ctaatcatatttgaatttactt

SEQ ID NO: 13094 - DNA, 22 bp, Artificial Sequence
  chemically synthesized
taatcatatttgaatttacttt

SEQ ID NO: 13095 - DNA, 22 bp, Artificial Sequence
  chemically synthesized
atcatatttgaatttactttgg

SEQ ID NO: 13096 - DNA, 22 bp, Artificial Sequence
  chemically synthesized
gaatttactttggatgaaaaag

SEQ ID NO: 13097 - DNA, 22 bp, Artificial Sequence
  chemically synthesized
aatttactttggatgaaaaaga

SEQ ID NO: 13098 - DNA, 22 bp, Artificial Sequence
  chemically synthesized
actttggatgaaaaagaaagtt

SEQ ID NO: 13099 - DNA, 22 bp, Artificial Sequence
  chemically synthesized
ctttggatgaaaaagaaagttc

SEQ ID NO: 13100 - DNA, 22 bp, Artificial Sequence
  chemically synthesized
tggatgaaaaagaaagttctca

SEQ ID NO: 13101 - DNA, 22 bp, Artificial Sequence
  chemically synthesized
ggatgaaaaagaaagttctcaa

SEQ ID NO: 13102 - DNA, 22 bp, Artificial Sequence
  chemically synthesized
gatgaaaaagaaagttctcaaa

SEQ ID NO: 13103 - DNA, 22 bp, Artificial Sequence
  chemically synthesized
tcaaatgagcggttaacttcac

SEQ ID NO: 13104 - DNA, 22 bp, Artificial Sequence
  chemically synthesized
aaatgagcggttaacttcacac

SEQ ID NO: 13105 - DNA, 22 bp, Artificial Sequence
  chemically synthesized
acttcacactttgtcatcactt

SEQ ID NO: 13106 - DNA, 22 bp, Artificial Sequence
  chemically synthesized
cacactttgtcatcacttgaaa

SEQ ID NO: 13107 - DNA, 22 bp, Artificial Sequence
  chemically synthesized
acactttgtcatcacttgaaaa

SEQ ID NO: 13108 - DNA, 22 bp, Artificial Sequence
  chemically synthesized
tgtcatcacttgaaaatagctc

SEQ ID NO: 13109 - DNA, 22 bp, Artificial Sequence
  chemically synthesized
gtcatcacttgaaaatagctca

SEQ ID NO: 13110 - DNA, 22 bp, Artificial Sequence
  chemically synthesized
tcatcacttgaaaatagctcat

SEQ ID NO: 13111 - DNA, 22 bp, Artificial Sequence
  chemically synthesized
gaaaatagctcattgaggatct

SEQ ID NO: 13112 - DNA, 22 bp, Artificial Sequence
  chemically synthesized
aaaatagctcattgaggatctt

SEQ ID NO: 13113 - DNA, 22 bp, Artificial Sequence
  chemically synthesized
attgaggatctttgcaaagtga

SEQ ID NO: 13114 - DNA, 22 bp, Artificial Sequence
  chemically synthesized
aggatctttgcaaagtgatcca

SEQ ID NO: 13115 - DNA, 22 bp, Artificial Sequence
  chemically synthesized
tgcaaagtgatccatcaccctg

SEQ ID NO: 13116 - DNA, 22 bp, Artificial Sequence
  chemically synthesized
gcaaagtgatccatcaccctgg

SEQ ID NO: 13117 - DNA, 22 bp, Artificial Sequence
  chemically synthesized
caaagtgatccatcaccctggc

SEQ ID NO: 13118 - DNA, 22 bp, Artificial Sequence
  chemically synthesized
gctgggctgttttcagaatatg

SEQ ID NO: 13119 - DNA, 22 bp, Artificial Sequence
  chemically synthesized
ggctgttttcagaatatggttg

SEQ ID NO: 13120 - DNA, 22 bp, Artificial Sequence
  chemically synthesized
ttttcagaatatggttgcccaa

SEQ ID NO: 13121 - DNA, 22 bp, Artificial Sequence
  chemically synthesized
tcagaatatggttgcccaaatg

SEQ ID NO: 13122 - DNA, 22 bp, Artificial Sequence
  chemically synthesized
cagaatatggttgcccaaatga

SEQ ID NO: 13123 - DNA, 22 bp, Artificial Sequence
  chemically synthesized
agaatatggttgcccaaatgac

SEQ ID NO: 13124 - DNA, 22 bp, Artificial Sequence
  chemically synthesized
cccaaatgactttgaacaaatg

SEQ ID NO: 13125 - DNA, 22 bp, Artificial Sequence
  chemically synthesized
tgaacaaatgtctcctgaagaa

SEQ ID NO: 13126 - DNA, 22 bp, Artificial Sequence
  chemically synthesized
gaacaaatgtctcctgaagaac

SEQ ID NO: 13127 - DNA, 22 bp, Artificial Sequence
  chemically synthesized
aacaaatgtctcctgaagaaca

SEQ ID NO: 13128 - DNA, 22 bp, Artificial Sequence
  chemically synthesized
ctgaagaacagaagcctaatta

SEQ ID NO: 13129 - DNA, 22 bp, Artificial Sequence
  chemically synthesized
aagaacagaagcctaattatgg

SEQ ID NO: 13130 - DNA, 22 bp, Artificial Sequence
  chemically synthesized
attatggtccagctgcaaatgt

SEQ ID NO: 13131 - DNA, 22 bp, Artificial Sequence
  chemically synthesized
tggtccagctgcaaatgtgacc

SEQ ID NO: 13132 - DNA, 22 bp, Artificial Sequence
  chemically synthesized
caaatgtgaccccagtgtctgt

SEQ ID NO: 13133 - DNA, 22 bp, Artificial Sequence
  chemically synthesized
tcactagatgttaaagaaaaat

SEQ ID NO: 13134 - DNA, 22 bp, Artificial Sequence
  chemically synthesized
gatgttaaagaaaaatcactgc

SEQ ID NO: 13135 - DNA, 22 bp, Artificial Sequence
  chemically synthesized
aagaaaaatcactgcattaatt

SEQ ID NO: 13136 - DNA, 22 bp, Artificial Sequence
  chemically synthesized
cattaatttaaaaaagcaattt

SEQ ID NO: 13137 - DNA, 22 bp, Artificial Sequence
  chemically synthesized
atttaaaaaagcaatttcagat

SEQ ID NO: 13138 - DNA, 22 bp, Artificial Sequence
  chemically synthesized
aaaaaagcaatttcagatcaac

SEQ ID NO: 13139 - DNA, 22 bp, Artificial Sequence
  chemically synthesized
aaaaagcaatttcagatcaaca

SEQ ID NO: 13140 - DNA, 22 bp, Artificial Sequence
  chemically synthesized
cagatcaacagcacctttggtt

SEQ ID NO: 13141 - DNA, 22 bp, Artificial Sequence
  chemically synthesized
agatcaacagcacctttggttg

SEQ ID NO: 13142 - DNA, 22 bp, Artificial Sequence
  chemically synthesized
tggttggcaagtgttataggaa

SEQ ID NO: 13143 - DNA, 22 bp, Artificial Sequence
  chemically synthesized
ggttggcaagtgttataggaat

SEQ ID NO: 13144 - DNA, 22 bp, Artificial Sequence
  chemically synthesized
gttggcaagtgttataggaatt

SEQ ID NO: 13145 - DNA, 22 bp, Artificial Sequence
  chemically synthesized
gcaagtgttataggaattgcag

SEQ ID NO: 13146 - DNA, 22 bp, Artificial Sequence
  chemically synthesized
taggaattgcagtgatttaagc

SEQ ID NO: 13147 - DNA, 22 bp, Artificial Sequence
  chemically synthesized
cagtgatttaagcatctctcta

SEQ ID NO: 13148 - DNA, 22 bp, Artificial Sequence
  chemically synthesized
aagcatctctctagaattcagg

SEQ ID NO: 13149 - DNA, 22 bp, Artificial Sequence
  chemically synthesized
agcatctctctagaattcagga

SEQ ID NO: 13150 - DNA, 22 bp, Artificial Sequence
  chemically synthesized
tctagaattcaggatatgtttt

SEQ ID NO: 13151 - DNA, 22 bp, Artificial Sequence
  chemically synthesized
tagaattcaggatatgtttttt

SEQ ID NO: 13152 - DNA, 22 bp, Artificial Sequence
  chemically synthesized
gaattcaggatatgtttttttt

SEQ ID NO: 13153 - DNA, 22 bp, Artificial Sequence
  chemically synthesized
aggatatgttttttttaagcta

SEQ ID NO: 13154 - DNA, 22 bp, Artificial Sequence
  chemically synthesized
tttttaagctacatctacctag

SEQ ID NO: 13155 - DNA, 22 bp, Artificial Sequence
  chemically synthesized
ttttaagctacatctacctagt

SEQ ID NO: 13156 - DNA, 22 bp, Artificial Sequence
  chemically synthesized
tttaagctacatctacctagtc

SEQ ID NO: 13157 - DNA, 22 bp, Artificial Sequence
  chemically synthesized
ttaagctacatctacctagtct

SEQ ID NO: 13158 - DNA, 22 bp, Artificial Sequence
  chemically synthesized
taagctacatctacctagtctg

SEQ ID NO: 13159 - DNA, 22 bp, Artificial Sequence
  chemically synthesized
aagctacatctacctagtctga

SEQ ID NO: 13160 - DNA, 22 bp, Artificial Sequence
  chemically synthesized
agctacatctacctagtctgaa

SEQ ID NO: 13161 - DNA, 22 bp, Artificial Sequence
  chemically synthesized
catctacctagtctgaagagac

SEQ ID NO: 13162 - DNA, 22 bp, Artificial Sequence
  chemically synthesized
cctagtctgaagagacactcct

SEQ ID NO: 13163 - DNA, 22 bp, Artificial Sequence
  chemically synthesized
gtctgaagagacactcctgaac

SEQ ID NO: 13164 - DNA, 22 bp, Artificial Sequence
  chemically synthesized
aagagacactcctgaactctgg

SEQ ID NO: 13165 - DNA, 22 bp, Artificial Sequence
  chemically synthesized
ctgaactctggaggatagatgt

SEQ ID NO: 13166 - DNA, 22 bp, Artificial Sequence
  chemically synthesized
aactctggaggatagatgtctc

SEQ ID NO: 13167 - DNA, 22 bp, Artificial Sequence
  chemically synthesized
tggaggatagatgtctctatct

SEQ ID NO: 13168 - DNA, 22 bp, Artificial Sequence
  chemically synthesized
gaggatagatgtctctatctga

SEQ ID NO: 13169 - DNA, 22 bp, Artificial Sequence
  chemically synthesized
tatctgaatcatatttctcctt

SEQ ID NO: 13170 - DNA, 22 bp, Artificial Sequence
  chemically synthesized
tctgaatcatatttctccttcc

SEQ ID NO: 13171 - DNA, 22 bp, Artificial Sequence
  chemically synthesized
aatcatatttctccttccctcc

SEQ ID NO: 13172 - DNA, 22 bp, Artificial Sequence
  chemically synthesized
ctccttccctccctccttcctc

SEQ ID NO: 13173 - DNA, 22 bp, Artificial Sequence
  chemically synthesized
tccttccctccctccttcctct

SEQ ID NO: 13174 - DNA, 22 bp, Artificial Sequence
  chemically synthesized
cttccctccctccttcctctcc

SEQ ID NO: 13175 - DNA, 22 bp, Artificial Sequence
  chemically synthesized
ccctccctccttcctctcctct

SEQ ID NO: 13176 - DNA, 22 bp, Artificial Sequence
  chemically synthesized
cctccctccttcctctcctctc

SEQ ID NO: 13177 - DNA, 22 bp, Artificial Sequence
  chemically synthesized
cctccttcctctcctctcctct

SEQ ID NO: 13178 - DNA, 22 bp, Artificial Sequence
  chemically synthesized
cttcctctcctctcctctctct

SEQ ID NO: 13179 - DNA, 22 bp, Artificial Sequence
  chemically synthesized
cctctcctctcctctctctctc

SEQ ID NO: 13180 - DNA, 22 bp, Artificial Sequence
  chemically synthesized
ctctcctctcctctctctctct

SEQ ID NO: 13181 - DNA, 22 bp, Artificial Sequence
  chemically synthesized
tcctctcctctctctctctctc

SEQ ID NO: 13182 - DNA, 22 bp, Artificial Sequence
  chemically synthesized
ctctcctctctctctctctcta

SEQ ID NO: 13183 - DNA, 22 bp, Artificial Sequence
  chemically synthesized
tcctctctctctctctctatgt

SEQ ID NO: 13184 - DNA, 22 bp, Artificial Sequence
  chemically synthesized
ctctctctctctctctatgtgt

SEQ ID NO: 13185 - DNA, 22 bp, Artificial Sequence
  chemically synthesized
tctctctctctctatgtgtgtg

SEQ ID NO: 13186 - DNA, 22 bp, Artificial Sequence
  chemically synthesized
tctctctctctatgtgtgtgtg

SEQ ID NO: 13187 - DNA, 22 bp, Artificial Sequence
  chemically synthesized
tctctctctatgtgtgtgtgtg

SEQ ID NO: 13188 - DNA, 22 bp, Artificial Sequence
  chemically synthesized
tctctctatgtgtgtgtgtgta

SEQ ID NO: 13189 - DNA, 22 bp, Artificial Sequence
  chemically synthesized
tctctatgtgtgtgtgtgtaca

SEQ ID NO: 13190 - DNA, 22 bp, Artificial Sequence
  chemically synthesized
tctatgtgtgtgtgtgtacata

SEQ ID NO: 13191 - DNA, 22 bp, Artificial Sequence
  chemically synthesized
tatgtgtgtgtgtgtacatata

SEQ ID NO: 13192 - DNA, 22 bp, Artificial Sequence
  chemically synthesized
tgtgtgtgtgtgtacatatata

SEQ ID NO: 13193 - DNA, 22 bp, Artificial Sequence
  chemically synthesized
gctgcacaatgacattttggtc

SEQ ID NO: 13194 - DNA, 22 bp, Artificial Sequence
  chemically synthesized
ctgcacaatgacattttggtca

SEQ ID NO: 13195 - DNA, 22 bp, Artificial Sequence
  chemically synthesized
cacaatgacattttggtcaatg

SEQ ID NO: 13196 - DNA, 22 bp, Artificial Sequence
  chemically synthesized
tggtcaatgatggaccacatta

SEQ ID NO: 13197 - DNA, 22 bp, Artificial Sequence
  chemically synthesized
ggtcaatgatggaccacattat

SEQ ID NO: 13198 - DNA, 22 bp, Artificial Sequence
  chemically synthesized
gtcaatgatggaccacattata

SEQ ID NO: 13199 - DNA, 22 bp, Artificial Sequence
  chemically synthesized
tacgacagtggtcccataaggt

SEQ ID NO: 13200 - DNA, 22 bp, Artificial Sequence
  chemically synthesized
taatactgtattttcactgtac

SEQ ID NO: 13201 - DNA, 22 bp, Artificial Sequence
  chemically synthesized
tattttcactgtaccttttcta

SEQ ID NO: 13202 - DNA, 22 bp, Artificial Sequence
  chemically synthesized
tcactgtaccttttctatgttt

SEQ ID NO: 13203 - DNA, 22 bp, Artificial Sequence
  chemically synthesized
cactgtaccttttctatgttta

SEQ ID NO: 13204 - DNA, 22 bp, Artificial Sequence
  chemically synthesized
actgtaccttttctatgtttag

SEQ ID NO: 13205 - DNA, 22 bp, Artificial Sequence
  chemically synthesized
taccttttctatgtttagatac

SEQ ID NO: 13206 - DNA, 22 bp, Artificial Sequence
  chemically synthesized
ttctatgtttagatacacaaat

SEQ ID NO: 13207 - DNA, 22 bp, Artificial Sequence
  chemically synthesized
tctatgtttagatacacaaata

SEQ ID NO: 13208 - DNA, 22 bp, Artificial Sequence
  chemically synthesized
ctatgtttagatacacaaatac

SEQ ID NO: 13209 - DNA, 22 bp, Artificial Sequence
  chemically synthesized
tatgtttagatacacaaatacc

SEQ ID NO: 13210 - DNA, 22 bp, Artificial Sequence
  chemically synthesized
tgtttagatacacaaataccac

SEQ ID NO: 13211 - DNA, 22 bp, Artificial Sequence
  chemically synthesized
agatacacaaataccactgtta

SEQ ID NO: 13212 - DNA, 22 bp, Artificial Sequence
  chemically synthesized
gatacacaaataccactgttac

SEQ ID NO: 13213 - DNA, 22 bp, Artificial Sequence
  chemically synthesized
ttaccattgcctacagtgttca

SEQ ID NO: 13214 - DNA, 22 bp, Artificial Sequence
  chemically synthesized
ccattgcctacagtgttcagta

SEQ ID NO: 13215 - DNA, 22 bp, Artificial Sequence
  chemically synthesized
cctacagtgttcagtacagtca

SEQ ID NO: 13216 - DNA, 22 bp, Artificial Sequence
  chemically synthesized
cagtgttcagtacagtcacatg

SEQ ID NO: 13217 - DNA, 22 bp, Artificial Sequence
  chemically synthesized
agtacagtcacatgctgtacag

SEQ ID NO: 13218 - DNA, 22 bp, Artificial Sequence
  chemically synthesized
tacaggtttgcagcccaggagc

SEQ ID NO: 13219 - DNA, 22 bp, Artificial Sequence
  chemically synthesized
gcagcccaggagcctaggagca

SEQ ID NO: 13220 - DNA, 22 bp, Artificial Sequence
  chemically synthesized
cagcccaggagcctaggagcaa

SEQ ID NO: 13221 - DNA, 22 bp, Artificial Sequence
  chemically synthesized
ggagcaataggccacatcaata

SEQ ID NO: 13222 - DNA, 22 bp, Artificial Sequence
  chemically synthesized
ggtatgtagtaagctataccat

SEQ ID NO: 13223 - DNA, 22 bp, Artificial Sequence
  chemically synthesized
taccatttaggtttaggtaagt

SEQ ID NO: 13224 - DNA, 22 bp, Artificial Sequence
  chemically synthesized
aggtttaggtaagtacactcta

SEQ ID NO: 13225 - DNA, 22 bp, Artificial Sequence
  chemically synthesized
ggtttaggtaagtacactctat

SEQ ID NO: 13226 - DNA, 22 bp, Artificial Sequence
  chemically synthesized
aggtaagtacactctattatgt

SEQ ID NO: 13227 - DNA, 22 bp, Artificial Sequence
  chemically synthesized
ggtaagtacactctattatgtt

SEQ ID NO: 13228 - DNA, 22 bp, Artificial Sequence
  chemically synthesized
tattatgttcgcacaatgatga

SEQ ID NO: 13229 - DNA, 22 bp, Artificial Sequence
  chemically synthesized
ttatgttcgcacaatgatgaaa

SEQ ID NO: 13230 - DNA, 22 bp, Artificial Sequence
  chemically synthesized
tgttcgcacaatgatgaaattg

SEQ ID NO: 13231 - DNA, 22 bp, Artificial Sequence
  chemically synthesized
gcacaatgatgaaattgcttaa

SEQ ID NO: 13232 - DNA, 22 bp, Artificial Sequence
  chemically synthesized
cttaatgacacatttctcagaa

SEQ ID NO: 13233 - DNA, 22 bp, Artificial Sequence
  chemically synthesized
aatgacacatttctcagaatat

SEQ ID NO: 13234 - DNA, 22 bp, Artificial Sequence
  chemically synthesized
atgacacatttctcagaatata

SEQ ID NO: 13235 - DNA, 22 bp, Artificial Sequence
  chemically synthesized
ctcagaatatatccccattgtt

SEQ ID NO: 13236 - DNA, 22 bp, Artificial Sequence
  chemically synthesized
tcagaatatatccccattgtta

SEQ ID NO: 13237 - DNA, 22 bp, Artificial Sequence
  chemically synthesized
agaatatatccccattgttaag

SEQ ID NO: 13238 - DNA, 22 bp, Artificial Sequence
  chemically synthesized
ttaaggaatgcatggctgtata

SEQ ID NO: 13239 - DNA, 22 bp, Artificial Sequence
  chemically synthesized
aggaatgcatggctgtatacac

SEQ ID NO: 13240 - DNA, 22 bp, Artificial Sequence
  chemically synthesized
tatacacacacatgtgtttgtg

SEQ ID NO: 13241 - DNA, 22 bp, Artificial Sequence
  chemically synthesized
gtgtgttttcatgtatatacat

SEQ ID NO: 13242 - DNA, 22 bp, Artificial Sequence
  chemically synthesized
tgtgttttcatgtatatacata

SEQ ID NO: 13243 - DNA, 22 bp, Artificial Sequence
  chemically synthesized
tcatgtatatacatatatgtgt

SEQ ID NO: 13244 - DNA, 22 bp, Artificial Sequence
  chemically synthesized
catgtatatacatatatgtgtg

SEQ ID NO: 13245 - DNA, 22 bp, Artificial Sequence
  chemically synthesized
atgtatatacatatatgtgtgt

SEQ ID NO: 13246 - DNA, 22 bp, Artificial Sequence
  chemically synthesized
ataacagggactcaagaagttg

SEQ ID NO: 13247 - DNA, 22 bp, Artificial Sequence
  chemically synthesized
aagaagttgcctggagttgttc

SEQ ID NO: 13248 - DNA, 22 bp, Artificial Sequence
  chemically synthesized
cctggagttgttcctttcttca

SEQ ID NO: 13249 - DNA, 22 bp, Artificial Sequence
  chemically synthesized
gagttgttcctttcttcaaggg

SEQ ID NO: 13250 - DNA, 22 bp, Artificial Sequence
  chemically synthesized
ttcctttcttcaagggtctagc

SEQ ID NO: 13251 - DNA, 22 bp, Artificial Sequence
  chemically synthesized
ctttcttcaagggtctagcaat

SEQ ID NO: 13252 - DNA, 22 bp, Artificial Sequence
  chemically synthesized
tcttcaagggtctagcaatata

SEQ ID NO: 13253 - DNA, 22 bp, Artificial Sequence
  chemically synthesized
cttcaagggtctagcaatatat

SEQ ID NO: 13254 - DNA, 22 bp, Artificial Sequence
  chemically synthesized
ttcaagggtctagcaatatatc

SEQ ID NO: 13255 - DNA, 22 bp, Artificial Sequence
  chemically synthesized
caagggtctagcaatatatctg

SEQ ID NO: 13256 - DNA, 22 bp, Artificial Sequence
  chemically synthesized
aagggtctagcaatatatctga

SEQ ID NO: 13257 - DNA, 22 bp, Artificial Sequence
  chemically synthesized
gcaatatatctgataccatctc

SEQ ID NO: 13258 - DNA, 22 bp, Artificial Sequence
  chemically synthesized
ataccatctcaagaggaccaag

SEQ ID NO: 13259 - DNA, 22 bp, Artificial Sequence
  chemically synthesized
aagaggaccaagggcttataag

SEQ ID NO: 13260 - DNA, 22 bp, Artificial Sequence
  chemically synthesized
ataagatgaactttctggggta

SEQ ID NO: 13261 - DNA, 22 bp, Artificial Sequence
  chemically synthesized
taagatgaactttctggggtat

SEQ ID NO: 13262 - DNA, 22 bp, Artificial Sequence
  chemically synthesized
tctggggtatttgggactactt

SEQ ID NO: 13263 - DNA, 22 bp, Artificial Sequence
  chemically synthesized
ctggggtatttgggactacttc

SEQ ID NO: 13264 - DNA, 22 bp, Artificial Sequence
  chemically synthesized
tggggtatttgggactacttcc

SEQ ID NO: 13265 - DNA, 22 bp, Artificial Sequence
  chemically synthesized
gggtatttgggactacttcctg

SEQ ID NO: 13266 - DNA, 22 bp, Artificial Sequence
  chemically synthesized
gggactacttcctgattaactc

SEQ ID NO: 13267 - DNA, 22 bp, Artificial Sequence
  chemically synthesized
ggactacttcctgattaactcc

SEQ ID NO: 13268 - DNA, 22 bp, Artificial Sequence
  chemically synthesized
cttcctgattaactccaaaaag

SEQ ID NO: 13269 - DNA, 22 bp, Artificial Sequence
  chemically synthesized
cctgattaactccaaaaaggaa

SEQ ID NO: 13270 - DNA, 22 bp, Artificial Sequence
  chemically synthesized
ctgattaactccaaaaaggaag

SEQ ID NO: 13271 - DNA, 22 bp, Artificial Sequence
  chemically synthesized
attaactccaaaaaggaagaga

SEQ ID NO: 13272 - DNA, 22 bp, Artificial Sequence
  chemically synthesized
actccaaaaaggaagagaaagg

SEQ ID NO: 13273 - DNA, 22 bp, Artificial Sequence
  chemically synthesized
caaaaaggaagagaaaggaaag

SEQ ID NO: 13274 - DNA, 22 bp, Artificial Sequence
  chemically synthesized
aactttcttcccttattttcat

SEQ ID NO: 13275 - DNA, 22 bp, Artificial Sequence
  chemically synthesized
tcttcccttattttcattgcag

SEQ ID NO: 13276 - DNA, 22 bp, Artificial Sequence
  chemically synthesized
cttcccttattttcattgcagc

SEQ ID NO: 13277 - DNA, 22 bp, Artificial Sequence
  chemically synthesized
ttcccttattttcattgcagct

SEQ ID NO: 13278 - DNA, 22 bp, Artificial Sequence
  chemically synthesized
cccttattttcattgcagctgt

SEQ ID NO: 13279 - DNA, 22 bp, Artificial Sequence
  chemically synthesized
ccttattttcattgcagctgtt

SEQ ID NO: 13280 - DNA, 22 bp, Artificial Sequence
  chemically synthesized
attttcattgcagctgttcact

SEQ ID NO: 13281 - DNA, 22 bp, Artificial Sequence
  chemically synthesized
ttttcattgcagctgttcactt

SEQ ID NO: 13282 - DNA, 22 bp, Artificial Sequence
  chemically synthesized
tcattgcagctgttcactttat

SEQ ID NO: 13283 - DNA, 22 bp, Artificial Sequence
  chemically synthesized
cattgcagctgttcactttatg

SEQ ID NO: 13284 - DNA, 22 bp, Artificial Sequence
  chemically synthesized
attgcagctgttcactttatgg

SEQ ID NO: 13285 - DNA, 22 bp, Artificial Sequence
  chemically synthesized
cagctgttcactttatggagtg

SEQ ID NO: 13286 - DNA, 22 bp, Artificial Sequence
  chemically synthesized
ttcactttatggagtgttctag

SEQ ID NO: 13287 - DNA, 22 bp, Artificial Sequence
  chemically synthesized
actttatggagtgttctagtcc

SEQ ID NO: 13288 - DNA, 22 bp, Artificial Sequence
  chemically synthesized
tatggagtgttctagtcccttg

SEQ ID NO: 13289 - DNA, 22 bp, Artificial Sequence
  chemically synthesized
atggagtgttctagtcccttga

SEQ ID NO: 13290 - DNA, 22 bp, Artificial Sequence
  chemically synthesized
tggagtgttctagtcccttgac

SEQ ID NO: 13291 - DNA, 22 bp, Artificial Sequence
  chemically synthesized
tagtcccttgacatccctgctt

SEQ ID NO: 13292 - DNA, 22 bp, Artificial Sequence
  chemically synthesized
gtcccttgacatccctgctttt

SEQ ID NO: 13293 - DNA, 22 bp, Artificial Sequence
  chemically synthesized
gacatccctgcttttcccttgc

SEQ ID NO: 13294 - DNA, 22 bp, Artificial Sequence
  chemically synthesized
acatccctgcttttcccttgct

SEQ ID NO: 13295 - DNA, 22 bp, Artificial Sequence
  chemically synthesized
cttttcccttgctctgcaagtt

SEQ ID NO: 13296 - DNA, 22 bp, Artificial Sequence
  chemically synthesized
ttcccttgctctgcaagttcct

SEQ ID NO: 13297 - DNA, 22 bp, Artificial Sequence
  chemically synthesized
tcccttgctctgcaagttcctt

SEQ ID NO: 13298 - DNA, 22 bp, Artificial Sequence
  chemically synthesized
cccttgctctgcaagttccttt

SEQ ID NO: 13299 - DNA, 22 bp, Artificial Sequence
  chemically synthesized
ccttgctctgcaagttcctttt

SEQ ID NO: 13300 - DNA, 22 bp, Artificial Sequence
  chemically synthesized
gctctgcaagttccttttgggc

SEQ ID NO: 13301 - DNA, 22 bp, Artificial Sequence
  chemically synthesized
ctctgcaagttccttttgggct

SEQ ID NO: 13302 - DNA, 22 bp, Artificial Sequence
  chemically synthesized
tgcaagttccttttgggctcac

SEQ ID NO: 13303 - DNA, 22 bp, Artificial Sequence
  chemically synthesized
caagttccttttgggctcactt

SEQ ID NO: 13304 - DNA, 22 bp, Artificial Sequence
  chemically synthesized
cttttgggctcactttttttct

SEQ ID NO: 13305 - DNA, 22 bp, Artificial Sequence
  chemically synthesized
ttgggctcactttttttctttg

SEQ ID NO: 13306 - DNA, 22 bp, Artificial Sequence
  chemically synthesized
tgggctcactttttttctttga

SEQ ID NO: 13307 - DNA, 22 bp, Artificial Sequence
  chemically synthesized
gggctcactttttttctttgaa

SEQ ID NO: 13308 - DNA, 22 bp, Artificial Sequence
  chemically synthesized
ggctcactttttttctttgaat

SEQ ID NO: 13309 - DNA, 22 bp, Artificial Sequence
  chemically synthesized
actttttttctttgaatttagc

SEQ ID NO: 13310 - DNA, 22 bp, Artificial Sequence
  chemically synthesized
tttttctttgaatttagcctag

SEQ ID NO: 13311 - DNA, 22 bp, Artificial Sequence
  chemically synthesized
ttttctttgaatttagcctaga

SEQ ID NO: 13312 - DNA, 22 bp, Artificial Sequence
  chemically synthesized
tttctttgaatttagcctagac

SEQ ID NO: 13313 - DNA, 22 bp, Artificial Sequence
  chemically synthesized
ttctttgaatttagcctagact

SEQ ID NO: 13314 - DNA, 22 bp, Artificial Sequence
  chemically synthesized
tctttgaatttagcctagactt

SEQ ID NO: 13315 - DNA, 22 bp, Artificial Sequence
  chemically synthesized
ctttgaatttagcctagacttt

SEQ ID NO: 13316 - DNA, 22 bp, Artificial Sequence
  chemically synthesized
tttgaatttagcctagactttt

SEQ ID NO: 13317 - DNA, 22 bp, Artificial Sequence
  chemically synthesized
tgaatttagcctagactttttc

SEQ ID NO: 13318 - DNA, 22 bp, Artificial Sequence
  chemically synthesized
gaatttagcctagactttttct

SEQ ID NO: 13319 - DNA, 22 bp, Artificial Sequence
  chemically synthesized
aatttagcctagactttttctc

SEQ ID NO: 13320 - DNA, 22 bp, Artificial Sequence
  chemically synthesized
agcctagactttttctcttcaa

SEQ ID NO: 13321 - DNA, 22 bp, Artificial Sequence
  chemically synthesized
gcctagactttttctcttcaac

SEQ ID NO: 13322 - DNA, 22 bp, Artificial Sequence
  chemically synthesized
gactttttctcttcaactcttt

SEQ ID NO: 13323 - DNA, 22 bp, Artificial Sequence
  chemically synthesized
tttctcttcaactctttttttt

SEQ ID NO: 13324 - DNA, 22 bp, Artificial Sequence
  chemically synthesized
ttctcttcaactcttttttttt

SEQ ID NO: 13325 - DNA, 22 bp, Artificial Sequence
  chemically synthesized
tctcttcaactctttttttttt

SEQ ID NO: 13326 - DNA, 22 bp, Artificial Sequence
  chemically synthesized
ctcttcaactcttttttttttg

SEQ ID NO: 13327 - DNA, 22 bp, Artificial Sequence
  chemically synthesized
tcttcaactcttttttttttga

SEQ ID NO: 13328 - DNA, 22 bp, Artificial Sequence
  chemically synthesized
ttcaactcttttttttttgaca

SEQ ID NO: 13329 - DNA, 22 bp, Artificial Sequence
  chemically synthesized
caactcttttttttttgacaga

SEQ ID NO: 13330 - DNA, 22 bp, Artificial Sequence
  chemically synthesized
aactcttttttttttgacagag

SEQ ID NO: 13331 - DNA, 22 bp, Artificial Sequence
  chemically synthesized
ttttttttttgacagagtcttg

SEQ ID NO: 13332 - DNA, 22 bp, Artificial Sequence
  chemically synthesized
ttttttttgacagagtcttgct

SEQ ID NO: 13333 - DNA, 22 bp, Artificial Sequence
  chemically synthesized
tttttttgacagagtcttgctc

SEQ ID NO: 13334 - DNA, 22 bp, Artificial Sequence
  chemically synthesized
ttttttgacagagtcttgctct

SEQ ID NO: 13335 - DNA, 22 bp, Artificial Sequence
  chemically synthesized
tttttgacagagtcttgctctg

SEQ ID NO: 13336 - DNA, 22 bp, Artificial Sequence
  chemically synthesized
ttttgacagagtcttgctctgt

SEQ ID NO: 13337 - DNA, 22 bp, Artificial Sequence
  chemically synthesized
tttgacagagtcttgctctgtc

SEQ ID NO: 13338 - DNA, 22 bp, Artificial Sequence
  chemically synthesized
ttgacagagtcttgctctgtcg

SEQ ID NO: 13339 - DNA, 22 bp, Artificial Sequence
  chemically synthesized
tgacagagtcttgctctgtcgc

SEQ ID NO: 13340 - DNA, 22 bp, Artificial Sequence
  chemically synthesized
gacagagtcttgctctgtcgcc

SEQ ID NO: 13341 - DNA, 22 bp, Artificial Sequence
  chemically synthesized
acagagtcttgctctgtcgccc

SEQ ID NO: 13342 - DNA, 22 bp, Artificial Sequence
  chemically synthesized
gctctgtcgcccaggctggagt

SEQ ID NO: 13343 - DNA, 22 bp, Artificial Sequence
  chemically synthesized
ctctgtcgcccaggctggagtg

SEQ ID NO: 13344 - DNA, 22 bp, Artificial Sequence
  chemically synthesized
tgtcgcccaggctggagtgcag

SEQ ID NO: 13345 - DNA, 22 bp, Artificial Sequence
  chemically synthesized
tcgcccaggctggagtgcagtg

SEQ ID NO: 13346 - DNA, 22 bp, Artificial Sequence
  chemically synthesized
gagtgcagtggtgcgatctcag

SEQ ID NO: 13347 - DNA, 22 bp, Artificial Sequence
  chemically synthesized
agctcactgcaacctccatctc

SEQ ID NO: 13348 - DNA, 22 bp, Artificial Sequence
  chemically synthesized
actgcaacctccatctcccagg

SEQ ID NO: 13349 - DNA, 22 bp, Artificial Sequence
  chemically synthesized
caacctccatctcccaggttca

SEQ ID NO: 13350 - DNA, 22 bp, Artificial Sequence
  chemically synthesized
catctcccaggttcaagctatt

SEQ ID NO: 13351 - DNA, 22 bp, Artificial Sequence
  chemically synthesized
ccaggttcaagctattctcctg

SEQ ID NO: 13352 - DNA, 22 bp, Artificial Sequence
  chemically synthesized
aagctattctcctgcctcagcc

SEQ ID NO: 13353 - DNA, 22 bp, Artificial Sequence
  chemically synthesized
ttctcctgcctcagcctcccaa

SEQ ID NO: 13354 - DNA, 22 bp, Artificial Sequence
  chemically synthesized
tcctgcctcagcctcccaagta

SEQ ID NO: 13355 - DNA, 22 bp, Artificial Sequence
  chemically synthesized
ctgcctcagcctcccaagtagc

SEQ ID NO: 13356 - DNA, 22 bp, Artificial Sequence
  chemically synthesized
cctcagcctcccaagtagctgg

SEQ ID NO: 13357 - DNA, 22 bp, Artificial Sequence
  chemically synthesized
agcctcccaagtagctgggatt

SEQ ID NO: 13358 - DNA, 22 bp, Artificial Sequence
  chemically synthesized
ccaagtagctgggattacaggc

SEQ ID NO: 13359 - DNA, 22 bp, Artificial Sequence
  chemically synthesized
ggattacaggcacccgccacca

SEQ ID NO: 13360 - DNA, 22 bp, Artificial Sequence
  chemically synthesized
caggcacccgccaccatgccca

SEQ ID NO: 13361 - DNA, 22 bp, Artificial Sequence
  chemically synthesized
atttttgtatttttagtaaagc

SEQ ID NO: 13362 - DNA, 22 bp, Artificial Sequence
  chemically synthesized
ttgtatttttagtaaagccggg

SEQ ID NO: 13363 - DNA, 22 bp, Artificial Sequence
  chemically synthesized
tgtatttttagtaaagccgggg

SEQ ID NO: 13364 - DNA, 22 bp, Artificial Sequence
  chemically synthesized
gtatttttagtaaagccggggt

SEQ ID NO: 13365 - DNA, 22 bp, Artificial Sequence
  chemically synthesized
tatttttagtaaagccggggtt

SEQ ID NO: 13366 - DNA, 22 bp, Artificial Sequence
  chemically synthesized
ttagtaaagccggggtttcacc

SEQ ID NO: 13367 - DNA, 22 bp, Artificial Sequence
  chemically synthesized
tagtaaagccggggtttcacca

SEQ ID NO: 13368 - DNA, 22 bp, Artificial Sequence
  chemically synthesized
agtaaagccggggtttcaccat

SEQ ID NO: 13369 - DNA, 22 bp, Artificial Sequence
  chemically synthesized
gtaaagccggggtttcaccatt

SEQ ID NO: 13370 - DNA, 22 bp, Artificial Sequence
  chemically synthesized
caccatttcaccttgttggcca

SEQ ID NO: 13371 - DNA, 22 bp, Artificial Sequence
  chemically synthesized
accatttcaccttgttggccag

SEQ ID NO: 13372 - DNA, 22 bp, Artificial Sequence
  chemically synthesized
caccttgttggccaggctggtg

SEQ ID NO: 13373 - DNA, 22 bp, Artificial Sequence
  chemically synthesized
accttgttggccaggctggtgt

SEQ ID NO: 13374 - DNA, 22 bp, Artificial Sequence
  chemically synthesized
gttggccaggctggtgtcgaac

SEQ ID NO: 13375 - DNA, 22 bp, Artificial Sequence
  chemically synthesized
ttggccaggctggtgtcgaact

SEQ ID NO: 13376 - DNA, 22 bp, Artificial Sequence
  chemically synthesized
gccaggctggtgtcgaactcct

SEQ ID NO: 13377 - DNA, 22 bp, Artificial Sequence
  chemically synthesized
gtgtcgaactcctgacctcaag

SEQ ID NO: 13378 - DNA, 22 bp, Artificial Sequence
  chemically synthesized
ctgacctcaagtgatctgcctg

SEQ ID NO: 13379 - DNA, 22 bp, Artificial Sequence
  chemically synthesized
acctcaagtgatctgcctgcct

SEQ ID NO: 13380 - DNA, 22 bp, Artificial Sequence
  chemically synthesized
aagtgatctgcctgcctgggcc

SEQ ID NO: 13381 - DNA, 22 bp, Artificial Sequence
  chemically synthesized
cctgcctgggcctctgaaagtg

SEQ ID NO: 13382 - DNA, 22 bp, Artificial Sequence
  chemically synthesized
cctgggcctctgaaagtgctgg

SEQ ID NO: 13383 - DNA, 22 bp, Artificial Sequence
  chemically synthesized
ggcctctgaaagtgctgggatt

SEQ ID NO: 13384 - DNA, 22 bp, Artificial Sequence
  chemically synthesized
tgaaagtgctgggattataggt

SEQ ID NO: 13385 - DNA, 22 bp, Artificial Sequence
  chemically synthesized
aaagtgctgggattataggtgt

SEQ ID NO: 13386 - DNA, 22 bp, Artificial Sequence
  chemically synthesized
ggattataggtgtgagccacca

SEQ ID NO: 13387 - DNA, 22 bp, Artificial Sequence
  chemically synthesized
taggtgtgagccaccatgccag

SEQ ID NO: 13388 - DNA, 22 bp, Artificial Sequence
  chemically synthesized
tcttcaactcttcattggccat

SEQ ID NO: 13389 - DNA, 22 bp, Artificial Sequence
  chemically synthesized
ttcaactcttcattggccatat

SEQ ID NO: 13390 - DNA, 22 bp, Artificial Sequence
  chemically synthesized
caactcttcattggccatattt

SEQ ID NO: 13391 - DNA, 22 bp, Artificial Sequence
  chemically synthesized
aactcttcattggccatatttc

SEQ ID NO: 13392 - DNA, 22 bp, Artificial Sequence
  chemically synthesized
ttcattggccatatttctcaat

SEQ ID NO: 13393 - DNA, 22 bp, Artificial Sequence
  chemically synthesized
cattggccatatttctcaattt

SEQ ID NO: 13394 - DNA, 22 bp, Artificial Sequence
  chemically synthesized
attggccatatttctcaatttc

SEQ ID NO: 13395 - DNA, 22 bp, Artificial Sequence
  chemically synthesized
gccatatttctcaatttccttc

SEQ ID NO: 13396 - DNA, 22 bp, Artificial Sequence
  chemically synthesized
ctcaatttccttcactcgtttg

SEQ ID NO: 13397 - DNA, 22 bp, Artificial Sequence
  chemically synthesized
tcaatttccttcactcgtttgc

SEQ ID NO: 13398 - DNA, 22 bp, Artificial Sequence
  chemically synthesized
aatttccttcactcgtttgcaa

SEQ ID NO: 13399 - DNA, 22 bp, Artificial Sequence
  chemically synthesized
ccttcactcgtttgcaatgctg

SEQ ID NO: 13400 - DNA, 22 bp, Artificial Sequence
  chemically synthesized
cttcactcgtttgcaatgctgt

SEQ ID NO: 13401 - DNA, 22 bp, Artificial Sequence
  chemically synthesized
cactcgtttgcaatgctgtgcc

SEQ ID NO: 13402 - DNA, 22 bp, Artificial Sequence
  chemically synthesized
actcgtttgcaatgctgtgccc

SEQ ID NO: 13403 - DNA, 22 bp, Artificial Sequence
  chemically synthesized
gtttgcaatgctgtgcccaccc

SEQ ID NO: 13404 - DNA, 22 bp, Artificial Sequence
  chemically synthesized
gcaatgctgtgcccaccctgca

SEQ ID NO: 13405 - DNA, 22 bp, Artificial Sequence
  chemically synthesized
caatgctgtgcccaccctgcaa

SEQ ID NO: 13406 - DNA, 22 bp, Artificial Sequence
  chemically synthesized
tgcccaccctgcaatcctagcc

SEQ ID NO: 13407 - DNA, 22 bp, Artificial Sequence
  chemically synthesized
caatcctagcccctaaattgga

SEQ ID NO: 13408 - DNA, 22 bp, Artificial Sequence
  chemically synthesized
gcccctaaattggagcagccat

SEQ ID NO: 13409 - DNA, 22 bp, Artificial Sequence
  chemically synthesized
aattggagcagccatctgcctt

SEQ ID NO: 13410 - DNA, 22 bp, Artificial Sequence
  chemically synthesized
gagcagccatctgccttcatcc

SEQ ID NO: 13411 - DNA, 22 bp, Artificial Sequence
  chemically synthesized
ccttcatccttctcttcccaga

SEQ ID NO: 13412 - DNA, 22 bp, Artificial Sequence
  chemically synthesized
catccttctcttcccagacagc

SEQ ID NO: 13413 - DNA, 22 bp, Artificial Sequence
  chemically synthesized
atccttctcttcccagacagcc

SEQ ID NO: 13414 - DNA, 22 bp, Artificial Sequence
  chemically synthesized
ctcttcccagacagccgaggac

SEQ ID NO: 13415 - DNA, 22 bp, Artificial Sequence
  chemically synthesized
tcttcccagacagccgaggact

SEQ ID NO: 13416 - DNA, 22 bp, Artificial Sequence
  chemically synthesized
ttcccagacagccgaggactgt

SEQ ID NO: 13417 - DNA, 22 bp, Artificial Sequence
  chemically synthesized
cccagacagccgaggactgtga

SEQ ID NO: 13418 - DNA, 22 bp, Artificial Sequence
  chemically synthesized
ccagacagccgaggactgtgaa

SEQ ID NO: 13419 - DNA, 22 bp, Artificial Sequence
  chemically synthesized
tgaaggaaaaaaatcaccaaaa

SEQ ID NO: 13420 - DNA, 22 bp, Artificial Sequence
  chemically synthesized
atgcctcacagcctccacccac

SEQ ID NO: 13421 - DNA, 22 bp, Artificial Sequence
  chemically synthesized
acagcctccacccacctctctg

SEQ ID NO: 13422 - DNA, 22 bp, Artificial Sequence
  chemically synthesized
cacccacctctctgctcagcaa

SEQ ID NO: 13423 - DNA, 22 bp, Artificial Sequence
  chemically synthesized
tctgctcagcaactcatttact

SEQ ID NO: 13424 - DNA, 22 bp, Artificial Sequence
  chemically synthesized
tgctcagcaactcatttacttg

SEQ ID NO: 13425 - DNA, 22 bp, Artificial Sequence
  chemically synthesized
ctcagcaactcatttacttggc

SEQ ID NO: 13426 - DNA, 22 bp, Artificial Sequence
  chemically synthesized
agcaactcatttacttggccct

SEQ ID NO: 13427 - DNA, 22 bp, Artificial Sequence
  chemically synthesized
atttacttggccctggacactc

SEQ ID NO: 13428 - DNA, 22 bp, Artificial Sequence
  chemically synthesized
acttggccctggacactcctaa

SEQ ID NO: 13429 - DNA, 22 bp, Artificial Sequence
  chemically synthesized
cttggccctggacactcctaaa

SEQ ID NO: 13430 - DNA, 22 bp, Artificial Sequence
  chemically synthesized
ggccctggacactcctaaatag

SEQ ID NO: 13431 - DNA, 22 bp, Artificial Sequence
  chemically synthesized
gccctggacactcctaaatagc

SEQ ID NO: 13432 - DNA, 22 bp, Artificial Sequence
  chemically synthesized
gacactcctaaatagcatccat

SEQ ID NO: 13433 - DNA, 22 bp, Artificial Sequence
  chemically synthesized
ctaaatagcatccatgcctgca

SEQ ID NO: 13434 - DNA, 22 bp, Artificial Sequence
  chemically synthesized
aatagcatccatgcctgcatcc

SEQ ID NO: 13435 - DNA, 22 bp, Artificial Sequence
  chemically synthesized
catccatttacagtcgttcctc

SEQ ID NO: 13436 - DNA, 22 bp, Artificial Sequence
  chemically synthesized
acagtcgttcctcagtatccat

SEQ ID NO: 13437 - DNA, 22 bp, Artificial Sequence
  chemically synthesized
cagtcgttcctcagtatccatg

SEQ ID NO: 13438 - DNA, 22 bp, Artificial Sequence
  chemically synthesized
ctcagtatccatggaaaattgg

SEQ ID NO: 13439 - DNA, 22 bp, Artificial Sequence
  chemically synthesized
agtatccatggaaaattggtgg

SEQ ID NO: 13440 - DNA, 22 bp, Artificial Sequence
  chemically synthesized
gtggcaagaccccctgcaaata

SEQ ID NO: 13441 - DNA, 22 bp, Artificial Sequence
  chemically synthesized
caaatatcaagatctgtggatg

SEQ ID NO: 13442 - DNA, 22 bp, Artificial Sequence
  chemically synthesized
tggatgctcaagtctccgatat

SEQ ID NO: 13443 - DNA, 22 bp, Artificial Sequence
  chemically synthesized
aagtctccgatataaaaatggc

SEQ ID NO: 13444 - DNA, 22 bp, Artificial Sequence
  chemically synthesized
cgatataaaaatggcttactat

SEQ ID NO: 13445 - DNA, 22 bp, Artificial Sequence
  chemically synthesized
actatttgcatataacctaaac

SEQ ID NO: 13446 - DNA, 22 bp, Artificial Sequence
  chemically synthesized
ctatttgcatataacctaaaca

SEQ ID NO: 13447 - DNA, 22 bp, Artificial Sequence
  chemically synthesized
tttgcatataacctaaacacat

SEQ ID NO: 13448 - DNA, 22 bp, Artificial Sequence
  chemically synthesized
gcatataacctaaacacatcct

SEQ ID NO: 13449 - DNA, 22 bp, Artificial Sequence
  chemically synthesized
catataacctaaacacatcctc

SEQ ID NO: 13450 - DNA, 22 bp, Artificial Sequence
  chemically synthesized
aacacatcctcctttgtacttt

SEQ ID NO: 13451 - DNA, 22 bp, Artificial Sequence
  chemically synthesized
ctttgtactttaaatcatctct

SEQ ID NO: 13452 - DNA, 22 bp, Artificial Sequence
  chemically synthesized
tgtactttaaatcatctctagg

SEQ ID NO: 13453 - DNA, 22 bp, Artificial Sequence
  chemically synthesized
gtactttaaatcatctctaggt

SEQ ID NO: 13454 - DNA, 22 bp, Artificial Sequence
  chemically synthesized
tactttaaatcatctctaggtt

SEQ ID NO: 13455 - DNA, 22 bp, Artificial Sequence
  chemically synthesized
taaatcatctctaggtttctct

SEQ ID NO: 13456 - DNA, 22 bp, Artificial Sequence
  chemically synthesized
aaatcatctctaggtttctctt

SEQ ID NO: 13457 - DNA, 22 bp, Artificial Sequence
  chemically synthesized
aatcatctctaggtttctctta

SEQ ID NO: 13458 - DNA, 22 bp, Artificial Sequence
  chemically synthesized
taggtttctcttaatagctaat

SEQ ID NO: 13459 - DNA, 22 bp, Artificial Sequence
  chemically synthesized
ggtttctcttaatagctaatac

SEQ ID NO: 13460 - DNA, 22 bp, Artificial Sequence
  chemically synthesized
ctcttaatagctaatacaatgt

SEQ ID NO: 13461 - DNA, 22 bp, Artificial Sequence
  chemically synthesized
tcttaatagctaatacaatgta

SEQ ID NO: 13462 - DNA, 22 bp, Artificial Sequence
  chemically synthesized
ttaatagctaatacaatgtaaa

SEQ ID NO: 13463 - DNA, 22 bp, Artificial Sequence
  chemically synthesized
aatagctaatacaatgtaaatg

SEQ ID NO: 13464 - DNA, 22 bp, Artificial Sequence
  chemically synthesized
atagctaatacaatgtaaatgc

SEQ ID NO: 13465 - DNA, 22 bp, Artificial Sequence
  chemically synthesized
atacaatgtaaatgctatgtaa

SEQ ID NO: 13466 - DNA, 22 bp, Artificial Sequence
  chemically synthesized
tgtaaatagttgttatgctgta

SEQ ID NO: 13467 - DNA, 22 bp, Artificial Sequence
  chemically synthesized
ttatgctgtattgtttagggaa

SEQ ID NO: 13468 - DNA, 22 bp, Artificial Sequence
  chemically synthesized
tgctgtattgtttagggaataa

SEQ ID NO: 13469 - DNA, 22 bp, Artificial Sequence
  chemically synthesized
tattgtttagggaataatgaaa

SEQ ID NO: 13470 - DNA, 22 bp, Artificial Sequence
  chemically synthesized
tttagggaataatgaaagataa

SEQ ID NO: 13471 - DNA, 22 bp, Artificial Sequence
  chemically synthesized
agggaataatgaaagataaaag

SEQ ID NO: 13472 - DNA, 22 bp, Artificial Sequence
  chemically synthesized
gggaataatgaaagataaaaga

SEQ ID NO: 13473 - DNA, 22 bp, Artificial Sequence
  chemically synthesized
tacatgttcagtagagatgcaa

SEQ ID NO: 13474 - DNA, 22 bp, Artificial Sequence
  chemically synthesized
agtagagatgcaaccatccatt

SEQ ID NO: 13475 - DNA, 22 bp, Artificial Sequence
  chemically synthesized
ttttcttgaatatttttgatct

SEQ ID NO: 13476 - DNA, 22 bp, Artificial Sequence
  chemically synthesized
tttcttgaatatttttgatctg

SEQ ID NO: 13477 - DNA, 22 bp, Artificial Sequence
  chemically synthesized
ttcttgaatatttttgatctgc

SEQ ID NO: 13478 - DNA, 22 bp, Artificial Sequence
  chemically synthesized
tcttgaatatttttgatctgca

SEQ ID NO: 13479 - DNA, 22 bp, Artificial Sequence
  chemically synthesized
cttgaatatttttgatctgcag

SEQ ID NO: 13480 - DNA, 22 bp, Artificial Sequence
  chemically synthesized
ttgaatatttttgatctgcagt

SEQ ID NO: 13481 - DNA, 22 bp, Artificial Sequence
  chemically synthesized
gaatatttttgatctgcagtta

SEQ ID NO: 13482 - DNA, 22 bp, Artificial Sequence
  chemically synthesized
aatatttttgatctgcagttaa

SEQ ID NO: 13483 - DNA, 22 bp, Artificial Sequence
  chemically synthesized
ttgatctgcagttaattgaatc

SEQ ID NO: 13484 - DNA, 22 bp, Artificial Sequence
  chemically synthesized
tgatctgcagttaattgaatct

SEQ ID NO: 13485 - DNA, 22 bp, Artificial Sequence
  chemically synthesized
gatctgcagttaattgaatctg

SEQ ID NO: 13486 - DNA, 22 bp, Artificial Sequence
  chemically synthesized
atctgcagttaattgaatctgt

SEQ ID NO: 13487 - DNA, 22 bp, Artificial Sequence
  chemically synthesized
cagttaattgaatctgtggctg

SEQ ID NO: 13488 - DNA, 22 bp, Artificial Sequence
  chemically synthesized
attgaatctgtggctgtggaac

SEQ ID NO: 13489 - DNA, 22 bp, Artificial Sequence
  chemically synthesized
aatctgtggctgtggaactcac

SEQ ID NO: 13490 - DNA, 22 bp, Artificial Sequence
  chemically synthesized
tggctgtggaactcacaaggag

SEQ ID NO: 13491 - DNA, 22 bp, Artificial Sequence
  chemically synthesized
tggaactcacaaggagagctga

SEQ ID NO: 13492 - DNA, 22 bp, Artificial Sequence
  chemically synthesized
acaaggagagctgactgtacag

SEQ ID NO: 13493 - DNA, 22 bp, Artificial Sequence
  chemically synthesized
actgtacagtgtggttgagtga

SEQ ID NO: 13494 - DNA, 22 bp, Artificial Sequence
  chemically synthesized
tacagtgtggttgagtgaaaaa

SEQ ID NO: 13495 - DNA, 22 bp, Artificial Sequence
  chemically synthesized
agtgaaaaaacagactttagaa

SEQ ID NO: 13496 - DNA, 22 bp, Artificial Sequence
  chemically synthesized
tagaatcagatcagacagaaat

SEQ ID NO: 13497 - DNA, 22 bp, Artificial Sequence
  chemically synthesized
agaatcagatcagacagaaata

SEQ ID NO: 13498 - DNA, 22 bp, Artificial Sequence
  chemically synthesized
gaatcagatcagacagaaatag

SEQ ID NO: 13499 - DNA, 22 bp, Artificial Sequence
  chemically synthesized
gaatcaagtatctgcctcctct

SEQ ID NO: 13500 - DNA, 22 bp, Artificial Sequence
  chemically synthesized
aatcaagtatctgcctcctcta

SEQ ID NO: 13501 - DNA, 22 bp, Artificial Sequence
  chemically synthesized
cctcctctagacctgtgacctt

SEQ ID NO: 13502 - DNA, 22 bp, Artificial Sequence
  chemically synthesized
ctctagacctgtgaccttggac

SEQ ID NO: 13503 - DNA, 22 bp, Artificial Sequence
  chemically synthesized
tagacctgtgaccttggacaag

SEQ ID NO: 13504 - DNA, 22 bp, Artificial Sequence
  chemically synthesized
gacctgtgaccttggacaagtc

SEQ ID NO: 13505 - DNA, 22 bp, Artificial Sequence
  chemically synthesized
tgaccttggacaagtcacacaa

SEQ ID NO: 13506 - DNA, 22 bp, Artificial Sequence
  chemically synthesized
ggacaagtcacacaagctctga

SEQ ID NO: 13507 - DNA, 22 bp, Artificial Sequence
  chemically synthesized
gacaagtcacacaagctctgaa

SEQ ID NO: 13508 - DNA, 22 bp, Artificial Sequence
  chemically synthesized
tgaaccttaactttgtcaaatg

SEQ ID NO: 13509 - DNA, 22 bp, Artificial Sequence
  chemically synthesized
aaccttaactttgtcaaatgta

SEQ ID NO: 13510 - DNA, 22 bp, Artificial Sequence
  chemically synthesized
aactttgtcaaatgtaaattag

SEQ ID NO: 13511 - DNA, 22 bp, Artificial Sequence
  chemically synthesized
actttgtcaaatgtaaattagg

SEQ ID NO: 13512 - DNA, 22 bp, Artificial Sequence
  chemically synthesized
tgtcaaatgtaaattaggttta

SEQ ID NO: 13513 - DNA, 22 bp, Artificial Sequence
  chemically synthesized
gtcaaatgtaaattaggtttaa

SEQ ID NO: 13514 - DNA, 22 bp, Artificial Sequence
  chemically synthesized
tcaaatgtaaattaggtttaac

SEQ ID NO: 13515 - DNA, 22 bp, Artificial Sequence
  chemically synthesized
ggtttaacagtagtataataag

SEQ ID NO: 13516 - DNA, 22 bp, Artificial Sequence
  chemically synthesized
aacagtagtataataagaatat

SEQ ID NO: 13517 - DNA, 22 bp, Artificial Sequence
  chemically synthesized
acagtagtataataagaatatc

SEQ ID NO: 13518 - DNA, 22 bp, Artificial Sequence
  chemically synthesized
tctcacaggtgttggcaggatc

SEQ ID NO: 13519 - DNA, 22 bp, Artificial Sequence
  chemically synthesized
acaggtgttggcaggatcagtg

SEQ ID NO: 13520 - DNA, 22 bp, Artificial Sequence
  chemically synthesized
gcaggatcagtgagacaatatg

SEQ ID NO: 13521 - DNA, 22 bp, Artificial Sequence
  chemically synthesized
gttatctctttttctccctact

SEQ ID NO: 13522 - DNA, 22 bp, Artificial Sequence
  chemically synthesized
tctctttttctccctactcctt

SEQ ID NO: 13523 - DNA, 22 bp, Artificial Sequence
  chemically synthesized
tttttctccctactcctttcat

SEQ ID NO: 13524 - DNA, 22 bp, Artificial Sequence
  chemically synthesized
tttctccctactcctttcatgt

SEQ ID NO: 13525 - DNA, 22 bp, Artificial Sequence
  chemically synthesized
ttctccctactcctttcatgtt

SEQ ID NO: 13526 - DNA, 22 bp, Artificial Sequence
  chemically synthesized
tctccctactcctttcatgttg

SEQ ID NO: 13527 - DNA, 22 bp, Artificial Sequence
  chemically synthesized
ctccctactcctttcatgttgg

SEQ ID NO: 13528 - DNA, 22 bp, Artificial Sequence
  chemically synthesized
tccctactcctttcatgttggc

SEQ ID NO: 13529 - DNA, 22 bp, Artificial Sequence
  chemically synthesized
cctactcctttcatgttggccc

SEQ ID NO: 13530 - DNA, 22 bp, Artificial Sequence
  chemically synthesized
ctcctttcatgttggccctact

SEQ ID NO: 13531 - DNA, 22 bp, Artificial Sequence
  chemically synthesized
ctttcatgttggccctactttc

SEQ ID NO: 13532 - DNA, 22 bp, Artificial Sequence
  chemically synthesized
tcatgttggccctactttcttc

SEQ ID NO: 13533 - DNA, 22 bp, Artificial Sequence
  chemically synthesized
catgttggccctactttcttct

SEQ ID NO: 13534 - DNA, 22 bp, Artificial Sequence
  chemically synthesized
atgttggccctactttcttctg

SEQ ID NO: 13535 - DNA, 22 bp, Artificial Sequence
  chemically synthesized
gccctactttcttctgttttaa

SEQ ID NO: 13536 - DNA, 22 bp, Artificial Sequence
  chemically synthesized
ctttcttctgttttaaatttct

SEQ ID NO: 13537 - DNA, 22 bp, Artificial Sequence
  chemically synthesized
tcttctgttttaaatttctcaa

SEQ ID NO: 13538 - DNA, 22 bp, Artificial Sequence
  chemically synthesized
cttctgttttaaatttctcaat

SEQ ID NO: 13539 - DNA, 22 bp, Artificial Sequence
  chemically synthesized
ttctgttttaaatttctcaatt

SEQ ID NO: 13540 - DNA, 22 bp, Artificial Sequence
  chemically synthesized
ctgttttaaatttctcaattct

SEQ ID NO: 13541 - DNA, 22 bp, Artificial Sequence
  chemically synthesized
tgttttaaatttctcaattctc

SEQ ID NO: 13542 - DNA, 22 bp, Artificial Sequence
  chemically synthesized
ttttaaatttctcaattctctt

SEQ ID NO: 13543 - DNA, 22 bp, Artificial Sequence
  chemically synthesized
taaatttctcaattctctttag

SEQ ID NO: 13544 - DNA, 22 bp, Artificial Sequence
  chemically synthesized
aaatttctcaattctctttagc

SEQ ID NO: 13545 - DNA, 22 bp, Artificial Sequence
  chemically synthesized
aatttctcaattctctttagct

SEQ ID NO: 13546 - DNA, 22 bp, Artificial Sequence
  chemically synthesized
ctcaattctctttagctcttta

SEQ ID NO: 13547 - DNA, 22 bp, Artificial Sequence
  chemically synthesized
tcaattctctttagctctttaa

SEQ ID NO: 13548 - DNA, 22 bp, Artificial Sequence
  chemically synthesized
aattctctttagctctttaata

SEQ ID NO: 13549 - DNA, 22 bp, Artificial Sequence
  chemically synthesized
tctttagctctttaataacttc

SEQ ID NO: 13550 - DNA, 22 bp, Artificial Sequence
  chemically synthesized
tttagctctttaataacttctg

SEQ ID NO: 13551 - DNA, 22 bp, Artificial Sequence
  chemically synthesized
tagctctttaataacttctgtg

SEQ ID NO: 13552 - DNA, 22 bp, Artificial Sequence
  chemically synthesized
agctctttaataacttctgtgt

SEQ ID NO: 13553 - DNA, 22 bp, Artificial Sequence
  chemically synthesized
gctctttaataacttctgtgta

SEQ ID NO: 13554 - DNA, 22 bp, Artificial Sequence
  chemically synthesized
tttaataacttctgtgtagctc

SEQ ID NO: 13555 - DNA, 22 bp, Artificial Sequence
  chemically synthesized
taataacttctgtgtagctctt

SEQ ID NO: 13556 - DNA, 22 bp, Artificial Sequence
  chemically synthesized
aataacttctgtgtagctcttt

SEQ ID NO: 13557 - DNA, 22 bp, Artificial Sequence
  chemically synthesized
ataacttctgtgtagctctttt

SEQ ID NO: 13558 - DNA, 22 bp, Artificial Sequence
  chemically synthesized
ctgtgtagctcttttccttcct

SEQ ID NO: 13559 - DNA, 22 bp, Artificial Sequence
  chemically synthesized
tgtgtagctcttttccttcctt

SEQ ID NO: 13560 - DNA, 22 bp, Artificial Sequence
  chemically synthesized
tgtagctcttttccttccttaa

SEQ ID NO: 13561 - DNA, 22 bp, Artificial Sequence
  chemically synthesized
ttttccttccttaatcacattt

SEQ ID NO: 13562 - DNA, 22 bp, Artificial Sequence
  chemically synthesized
ttccttccttaatcacatttat

SEQ ID NO: 13563 - DNA, 22 bp, Artificial Sequence
  chemically synthesized
tccttccttaatcacatttata

SEQ ID NO: 13564 - DNA, 22 bp, Artificial Sequence
  chemically synthesized
ccttccttaatcacatttatat

SEQ ID NO: 13565 - DNA, 22 bp, Artificial Sequence
  chemically synthesized
cttccttaatcacatttatata

SEQ ID NO: 13566 - DNA, 22 bp, Artificial Sequence
  chemically synthesized
ccttaatcacatttatataatg

SEQ ID NO: 13567 - DNA, 22 bp, Artificial Sequence
  chemically synthesized
cttaatcacatttatataatga

SEQ ID NO: 13568 - DNA, 22 bp, Artificial Sequence
  chemically synthesized
aatcacatttatataatgaaat

SEQ ID NO: 13569 - DNA, 22 bp, Artificial Sequence
  chemically synthesized
atcacatttatataatgaaatg

SEQ ID NO: 13570 - DNA, 22 bp, Artificial Sequence
  chemically synthesized
atataatgaaatgactattgtc

SEQ ID NO: 13571 - DNA, 22 bp, Artificial Sequence
  chemically synthesized
tataatgaaatgactattgtca

SEQ ID NO: 13572 - DNA, 22 bp, Artificial Sequence
  chemically synthesized
ttgtcacaatcaggaatgacct

SEQ ID NO: 13573 - DNA, 22 bp, Artificial Sequence
  chemically synthesized
tcacaatcaggaatgacctaaa

SEQ ID NO: 13574 - DNA, 22 bp, Artificial Sequence
  chemically synthesized
aagaataattttgagtttatgt

SEQ ID NO: 13575 - DNA, 22 bp, Artificial Sequence
  chemically synthesized
tgagtttatgtatttactggct

SEQ ID NO: 13576 - DNA, 22 bp, Artificial Sequence
  chemically synthesized
gagtttatgtatttactggctg

SEQ ID NO: 13577 - DNA, 22 bp, Artificial Sequence
  chemically synthesized
agtttatgtatttactggctgc

SEQ ID NO: 13578 - DNA, 22 bp, Artificial Sequence
  chemically synthesized
atgtatttactggctgctctaa

SEQ ID NO: 13579 - DNA, 22 bp, Artificial Sequence
  chemically synthesized
tgtatttactggctgctctaaa

SEQ ID NO: 13580 - DNA, 22 bp, Artificial Sequence
  chemically synthesized
actggctgctctaaataatttc

SEQ ID NO: 13581 - DNA, 22 bp, Artificial Sequence
  chemically synthesized
ctggctgctctaaataatttct

SEQ ID NO: 13582 - DNA, 22 bp, Artificial Sequence
  chemically synthesized
gctgctctaaataatttctaat

SEQ ID NO: 13583 - DNA, 22 bp, Artificial Sequence
  chemically synthesized
ctctaaataatttctaattgtt

SEQ ID NO: 13584 - DNA, 22 bp, Artificial Sequence
  chemically synthesized
taaataatttctaattgttgat

SEQ ID NO: 13585 - DNA, 22 bp, Artificial Sequence
  chemically synthesized
aataatttctaattgttgatct

SEQ ID NO: 13586 - DNA, 22 bp, Artificial Sequence
  chemically synthesized
ctaattgttgatctctcccttt

SEQ ID NO: 13587 - DNA, 22 bp, Artificial Sequence
  chemically synthesized
taattgttgatctctccctttt

SEQ ID NO: 13588 - DNA, 22 bp, Artificial Sequence
  chemically synthesized
attgttgatctctcccttttta

SEQ ID NO: 13589 - DNA, 22 bp, Artificial Sequence
  chemically synthesized
ttgatctctccctttttaggaa

SEQ ID NO: 13590 - DNA, 22 bp, Artificial Sequence
  chemically synthesized
atctctccctttttaggaaact

SEQ ID NO: 13591 - DNA, 22 bp, Artificial Sequence
  chemically synthesized
tccctttttaggaaactctttt

SEQ ID NO: 13592 - DNA, 22 bp, Artificial Sequence
  chemically synthesized
cctttttaggaaactcttttta

SEQ ID NO: 13593 - DNA, 22 bp, Artificial Sequence
  chemically synthesized
tttaggaaactctttttataat

SEQ ID NO: 13594 - DNA, 22 bp, Artificial Sequence
  chemically synthesized
ttaggaaactctttttataata

SEQ ID NO: 13595 - DNA, 22 bp, Artificial Sequence
  chemically synthesized
taggaaactctttttataataa

SEQ ID NO: 13596 - DNA, 22 bp, Artificial Sequence
  chemically synthesized
aggaaactctttttataataat

SEQ ID NO: 13597 - DNA, 22 bp, Artificial Sequence
  chemically synthesized
ggaaactctttttataataatc

SEQ ID NO: 13598 - DNA, 22 bp, Artificial Sequence
  chemically synthesized
tttttataataatcactctatt

SEQ ID NO: 13599 - DNA, 22 bp, Artificial Sequence
  chemically synthesized
tttataataatcactctattct

SEQ ID NO: 13600 - DNA, 22 bp, Artificial Sequence
  chemically synthesized
ttataataatcactctattctg

SEQ ID NO: 13601 - DNA, 22 bp, Artificial Sequence
  chemically synthesized
tataataatcactctattctgg

SEQ ID NO: 13602 - DNA, 22 bp, Artificial Sequence
  chemically synthesized
ataataatcactctattctggt

SEQ ID NO: 13603 - DNA, 22 bp, Artificial Sequence
  chemically synthesized
taataatcactctattctggtt

SEQ ID NO: 13604 - DNA, 22 bp, Artificial Sequence
  chemically synthesized
tattctggttccccgctttgct

SEQ ID NO: 13605 - DNA, 22 bp, Artificial Sequence
  chemically synthesized
ttctggttccccgctttgctct

SEQ ID NO: 13606 - DNA, 22 bp, Artificial Sequence
  chemically synthesized
tggttccccgctttgctctaac

SEQ ID NO: 13607 - DNA, 22 bp, Artificial Sequence
  chemically synthesized
gttccccgctttgctctaactc

SEQ ID NO: 13608 - DNA, 22 bp, Artificial Sequence
  chemically synthesized
cccgctttgctctaactcctgt

SEQ ID NO: 13609 - DNA, 22 bp, Artificial Sequence
  chemically synthesized
tgctctaactcctgttatccat

SEQ ID NO: 13610 - DNA, 22 bp, Artificial Sequence
  chemically synthesized
gctctaactcctgttatccatc

SEQ ID NO: 13611 - DNA, 22 bp, Artificial Sequence
  chemically synthesized
ctctaactcctgttatccatcc

SEQ ID NO: 13612 - DNA, 22 bp, Artificial Sequence
  chemically synthesized
taactcctgttatccatccagc

SEQ ID NO: 13613 - DNA, 22 bp, Artificial Sequence
  chemically synthesized
actcctgttatccatccagcac

SEQ ID NO: 13614 - DNA, 22 bp, Artificial Sequence
  chemically synthesized
ctgttatccatccagcacttga

SEQ ID NO: 13615 - DNA, 22 bp, Artificial Sequence
  chemically synthesized
ttatccatccagcacttgaatt

SEQ ID NO: 13616 - DNA, 22 bp, Artificial Sequence
  chemically synthesized
tccatccagcacttgaattgat

SEQ ID NO: 13617 - DNA, 22 bp, Artificial Sequence
  chemically synthesized
gaattgattaactcctgttcct

SEQ ID NO: 13618 - DNA, 22 bp, Artificial Sequence
  chemically synthesized
aattgattaactcctgttcctc

SEQ ID NO: 13619 - DNA, 22 bp, Artificial Sequence
  chemically synthesized
attaactcctgttcctctccat

SEQ ID NO: 13620 - DNA, 22 bp, Artificial Sequence
  chemically synthesized
actcctgttcctctccatggcc

SEQ ID NO: 13621 - DNA, 22 bp, Artificial Sequence
  chemically synthesized
ctgttcctctccatggccctta

SEQ ID NO: 13622 - DNA, 22 bp, Artificial Sequence
  chemically synthesized
ttcctctccatggcccttaaat

SEQ ID NO: 13623 - DNA, 22 bp, Artificial Sequence
  chemically synthesized
ctctccatggcccttaaatgtc

SEQ ID NO: 13624 - DNA, 22 bp, Artificial Sequence
  chemically synthesized
tccatggcccttaaatgtccag

SEQ ID NO: 13625 - DNA, 22 bp, Artificial Sequence
  chemically synthesized
catggcccttaaatgtccaggg

SEQ ID NO: 13626 - DNA, 22 bp, Artificial Sequence
  chemically synthesized
aaatgtccagggttctcccagg

SEQ ID NO: 13627 - DNA, 22 bp, Artificial Sequence
  chemically synthesized
aatgtccagggttctcccaggc

SEQ ID NO: 13628 - DNA, 22 bp, Artificial Sequence
  chemically synthesized
tcccaggctccagcctcagctt

SEQ ID NO: 13629 - DNA, 22 bp, Artificial Sequence
  chemically synthesized
ccaggctccagcctcagctttt

SEQ ID NO: 13630 - DNA, 22 bp, Artificial Sequence
  chemically synthesized
cagcctcagctttttccttttt

SEQ ID NO: 13631 - DNA, 22 bp, Artificial Sequence
  chemically synthesized
agctttttcctttttcacctta

SEQ ID NO: 13632 - DNA, 22 bp, Artificial Sequence
  chemically synthesized
tttcctttttcaccttatatat

SEQ ID NO: 13633 - DNA, 22 bp, Artificial Sequence
  chemically synthesized
ttcctttttcaccttatatata

SEQ ID NO: 13634 - DNA, 22 bp, Artificial Sequence
  chemically synthesized
tcctttttcaccttatatatac

SEQ ID NO: 13635 - DNA, 22 bp, Artificial Sequence
  chemically synthesized
cctttttcaccttatatatact

SEQ ID NO: 13636 - DNA, 22 bp, Artificial Sequence
  chemically synthesized
ctttttcaccttatatatactt

SEQ ID NO: 13637 - DNA, 22 bp, Artificial Sequence
  chemically synthesized
tttcaccttatatatacttgct

SEQ ID NO: 13638 - DNA, 22 bp, Artificial Sequence
  chemically synthesized
ttcaccttatatatacttgcta

SEQ ID NO: 13639 - DNA, 22 bp, Artificial Sequence
  chemically synthesized
tcaccttatatatacttgctag

SEQ ID NO: 13640 - DNA, 22 bp, Artificial Sequence
  chemically synthesized
caccttatatatacttgctagg

SEQ ID NO: 13641 - DNA, 22 bp, Artificial Sequence
  chemically synthesized
accttatatatacttgctaggg

SEQ ID NO: 13642 - DNA, 22 bp, Artificial Sequence
  chemically synthesized
atatatacttgctagggctggg

SEQ ID NO: 13643 - DNA, 22 bp, Artificial Sequence
  chemically synthesized
tatatacttgctagggctggga

SEQ ID NO: 13644 - DNA, 22 bp, Artificial Sequence
  chemically synthesized
gctagggctgggacaagagtga

SEQ ID NO: 13645 - DNA, 22 bp, Artificial Sequence
  chemically synthesized
ctagggctgggacaagagtgaa

SEQ ID NO: 13646 - DNA, 22 bp, Artificial Sequence
  chemically synthesized
gggctgggacaagagtgaacca

SEQ ID NO: 13647 - DNA, 22 bp, Artificial Sequence
  chemically synthesized
ggacaagagtgaaccaaacaag

SEQ ID NO: 13648 - DNA, 22 bp, Artificial Sequence
  chemically synthesized
aagaggtcctcacttctcgggg

SEQ ID NO: 13649 - DNA, 22 bp, Artificial Sequence
  chemically synthesized
agaggtcctcacttctcggggc

SEQ ID NO: 13650 - DNA, 22 bp, Artificial Sequence
  chemically synthesized
acttctcggggcatacaagtat

SEQ ID NO: 13651 - DNA, 22 bp, Artificial Sequence
  chemically synthesized
ctcggggcatacaagtatattt

SEQ ID NO: 13652 - DNA, 22 bp, Artificial Sequence
  chemically synthesized
tcggggcatacaagtatattta

SEQ ID NO: 13653 - DNA, 22 bp, Artificial Sequence
  chemically synthesized
ggggcatacaagtatatttatg

SEQ ID NO: 13654 - DNA, 22 bp, Artificial Sequence
  chemically synthesized
atgccctacaggccttgcttac

SEQ ID NO: 13655 - DNA, 22 bp, Artificial Sequence
  chemically synthesized
tgccctacaggccttgcttacc

SEQ ID NO: 13656 - DNA, 22 bp, Artificial Sequence
  chemically synthesized
caggccttgcttaccacagtct

SEQ ID NO: 13657 - DNA, 22 bp, Artificial Sequence
  chemically synthesized
gcttaccacagtctagtccggc

SEQ ID NO: 13658 - DNA, 22 bp, Artificial Sequence
  chemically synthesized
cttaccacagtctagtccggcc

SEQ ID NO: 13659 - DNA, 22 bp, Artificial Sequence
  chemically synthesized
accacagtctagtccggccctg

SEQ ID NO: 13660 - DNA, 22 bp, Artificial Sequence
  chemically synthesized
ccacagtctagtccggccctga

SEQ ID NO: 13661 - DNA, 22 bp, Artificial Sequence
  chemically synthesized
gtccggccctgaccctgtcaac

SEQ ID NO: 13662 - DNA, 22 bp, Artificial Sequence
  chemically synthesized
accctgtcaacaaaatttactg

SEQ ID NO: 13663 - DNA, 22 bp, Artificial Sequence
  chemically synthesized
tcaacaaaatttactgagcata

SEQ ID NO: 13664 - DNA, 22 bp, Artificial Sequence
  chemically synthesized
actgagcatacaaccactactg

SEQ ID NO: 13665 - DNA, 22 bp, Artificial Sequence
  chemically synthesized
ctgagcatacaaccactactgc

SEQ ID NO: 13666 - DNA, 22 bp, Artificial Sequence
  chemically synthesized
agcatacaaccactactgccag

SEQ ID NO: 13667 - DNA, 22 bp, Artificial Sequence
  chemically synthesized
ctgccaggcactgtactaggta

SEQ ID NO: 13668 - DNA, 22 bp, Artificial Sequence
  chemically synthesized
ccaggcactgtactaggtatca

SEQ ID NO: 13669 - DNA, 22 bp, Artificial Sequence
  chemically synthesized
tactaggtatcacaatatccat

SEQ ID NO: 13670 - DNA, 22 bp, Artificial Sequence
  chemically synthesized
ggtatcacaatatccatgctca

SEQ ID NO: 13671 - DNA, 22 bp, Artificial Sequence
  chemically synthesized
actctccagatgcccacacacg

SEQ ID NO: 13672 - DNA, 22 bp, Artificial Sequence
  chemically synthesized
tccagatgcccacacacgtggc

SEQ ID NO: 13673 - DNA, 22 bp, Artificial Sequence
  chemically synthesized
cagatgcccacacacgtggctg

SEQ ID NO: 13674 - DNA, 22 bp, Artificial Sequence
  chemically synthesized
taactactgtttacagaacaat

SEQ ID NO: 13675 - DNA, 22 bp, Artificial Sequence
  chemically synthesized
ctgtttacagaacaatgagttc

SEQ ID NO: 13676 - DNA, 22 bp, Artificial Sequence
  chemically synthesized
tttacagaacaatgagttccaa

SEQ ID NO: 13677 - DNA, 22 bp, Artificial Sequence
  chemically synthesized
acagaacaatgagttccaaata

SEQ ID NO: 13678 - DNA, 22 bp, Artificial Sequence
  chemically synthesized
cagaacaatgagttccaaatac

SEQ ID NO: 13679 - DNA, 22 bp, Artificial Sequence
  chemically synthesized
caaatactcacctatagtcaga

SEQ ID NO: 13680 - DNA, 22 bp, Artificial Sequence
  chemically synthesized
acctatagtcagatacgtctcc

SEQ ID NO: 13681 - DNA, 22 bp, Artificial Sequence
  chemically synthesized
tagtcagatacgtctcctgaat

SEQ ID NO: 13682 - DNA, 22 bp, Artificial Sequence
  chemically synthesized
ctgaatttcagattatctttcc

SEQ ID NO: 13683 - DNA, 22 bp, Artificial Sequence
  chemically synthesized
aatttcagattatctttccaac

SEQ ID NO: 13684 - DNA, 22 bp, Artificial Sequence
  chemically synthesized
cagattatctttccaactccct

SEQ ID NO: 13685 - DNA, 22 bp, Artificial Sequence
  chemically synthesized
agattatctttccaactcccta

SEQ ID NO: 13686 - DNA, 22 bp, Artificial Sequence
  chemically synthesized
tctttccaactccctaactgta

SEQ ID NO: 13687 - DNA, 22 bp, Artificial Sequence
  chemically synthesized
tccaactccctaactgtatatc

SEQ ID NO: 13688 - DNA, 22 bp, Artificial Sequence
  chemically synthesized
ccaactccctaactgtatatca

SEQ ID NO: 13689 - DNA, 22 bp, Artificial Sequence
  chemically synthesized
caactccctaactgtatatcat

SEQ ID NO: 13690 - DNA, 22 bp, Artificial Sequence
  chemically synthesized
cctaactgtatatcataatgta

SEQ ID NO: 13691 - DNA, 22 bp, Artificial Sequence
  chemically synthesized
actgtatatcataatgtagcca

SEQ ID NO: 13692 - DNA, 22 bp, Artificial Sequence
  chemically synthesized
tatatcataatgtagccagtaa

SEQ ID NO: 13693 - DNA, 22 bp, Artificial Sequence
  chemically synthesized
atgtatatgtaatgcttctgct

SEQ ID NO: 13694 - DNA, 22 bp, Artificial Sequence
  chemically synthesized
ctgctgtgttggacactgtgct

SEQ ID NO: 13695 - DNA, 22 bp, Artificial Sequence
  chemically synthesized
tgctgtgttggacactgtgctc

SEQ ID NO: 13696 - DNA, 22 bp, Artificial Sequence
  chemically synthesized
ctgtgttggacactgtgctcag

SEQ ID NO: 13697 - DNA, 22 bp, Artificial Sequence
  chemically synthesized
tgttggacactgtgctcagtaa

SEQ ID NO: 13698 - DNA, 22 bp, Artificial Sequence
  chemically synthesized
gacactgtgctcagtaactttg

SEQ ID NO: 13699 - DNA, 22 bp, Artificial Sequence
  chemically synthesized
tgctcagtaactttgcatccat

SEQ ID NO: 13700 - DNA, 22 bp, Artificial Sequence
  chemically synthesized
agtaactttgcatccattatct

SEQ ID NO: 13701 - DNA, 22 bp, Artificial Sequence
  chemically synthesized
tgcatccattatctcacttcat

SEQ ID NO: 13702 - DNA, 22 bp, Artificial Sequence
  chemically synthesized
gcatccattatctcacttcatc

SEQ ID NO: 13703 - DNA, 22 bp, Artificial Sequence
  chemically synthesized
catccattatctcacttcatcc

SEQ ID NO: 13704 - DNA, 22 bp, Artificial Sequence
  chemically synthesized
tctcacttcatcctcacaaaag

SEQ ID NO: 13705 - DNA, 22 bp, Artificial Sequence
  chemically synthesized
acttcatcctcacaaaagtccc

SEQ ID NO: 13706 - DNA, 22 bp, Artificial Sequence
  chemically synthesized
catcctcacaaaagtcccacga

SEQ ID NO: 13707 - DNA, 22 bp, Artificial Sequence
  chemically synthesized
atcctcacaaaagtcccacgag

SEQ ID NO: 13708 - DNA, 22 bp, Artificial Sequence
  chemically synthesized
acaaaagtcccacgagataggc

SEQ ID NO: 13709 - DNA, 22 bp, Artificial Sequence
  chemically synthesized
tcatcttatttttatgaatgag

SEQ ID NO: 13710 - DNA, 22 bp, Artificial Sequence
  chemically synthesized
atttttatgaatgaggaagata

SEQ ID NO: 13711 - DNA, 22 bp, Artificial Sequence
  chemically synthesized
tttttatgaatgaggaagatag

SEQ ID NO: 13712 - DNA, 22 bp, Artificial Sequence
  chemically synthesized
ttatgaatgaggaagatagatt

SEQ ID NO: 13713 - DNA, 22 bp, Artificial Sequence
  chemically synthesized
tatgaatgaggaagatagattc

SEQ ID NO: 13714 - DNA, 22 bp, Artificial Sequence
  chemically synthesized
atgaatgaggaagatagattca

SEQ ID NO: 13715 - DNA, 22 bp, Artificial Sequence
  chemically synthesized
tgaatgaggaagatagattcat

SEQ ID NO: 13716 - DNA, 22 bp, Artificial Sequence
  chemically synthesized
atagaggctaagggctttgccc

SEQ ID NO: 13717 - DNA, 22 bp, Artificial Sequence
  chemically synthesized
agggctttgcccaaggtaacat

SEQ ID NO: 13718 - DNA, 22 bp, Artificial Sequence
  chemically synthesized
tgcccaaggtaacatactaaaa

SEQ ID NO: 13719 - DNA, 22 bp, Artificial Sequence
  chemically synthesized
gcccaaggtaacatactaaaac

SEQ ID NO: 13720 - DNA, 22 bp, Artificial Sequence
  chemically synthesized
cccaaggtaacatactaaaaca

SEQ ID NO: 13721 - DNA, 22 bp, Artificial Sequence
  chemically synthesized
aaacattcaggattcagactct

SEQ ID NO: 13722 - DNA, 22 bp, Artificial Sequence
  chemically synthesized
aggattcagactctggcagtca

SEQ ID NO: 13723 - DNA, 22 bp, Artificial Sequence
  chemically synthesized
agactctggcagtcagactaaa

SEQ ID NO: 13724 - DNA, 22 bp, Artificial Sequence
  chemically synthesized
tggcagtcagactaaagagcca

SEQ ID NO: 13725 - DNA, 22 bp, Artificial Sequence
  chemically synthesized
gcagtcagactaaagagccagt

SEQ ID NO: 13726 - DNA, 22 bp, Artificial Sequence
  chemically synthesized
aagagccagttctcttagacat

SEQ ID NO: 13727 - DNA, 22 bp, Artificial Sequence
  chemically synthesized
tcttagacattattctgtggtc

SEQ ID NO: 13728 - DNA, 22 bp, Artificial Sequence
  chemically synthesized
ttagacattattctgtggtcca

SEQ ID NO: 13729 - DNA, 22 bp, Artificial Sequence
  chemically synthesized
agacattattctgtggtccata

SEQ ID NO: 13730 - DNA, 22 bp, Artificial Sequence
  chemically synthesized
gacattattctgtggtccataa

SEQ ID NO: 13731 - DNA, 22 bp, Artificial Sequence
  chemically synthesized
ttctgtggtccataatcacatc

SEQ ID NO: 13732 - DNA, 22 bp, Artificial Sequence
  chemically synthesized
tgtggtccataatcacatcaaa

SEQ ID NO: 13733 - DNA, 22 bp, Artificial Sequence
  chemically synthesized
tggtccataatcacatcaaaca

SEQ ID NO: 13734 - DNA, 22 bp, Artificial Sequence
  chemically synthesized
tagccatttccccttccatacc

SEQ ID NO: 13735 - DNA, 22 bp, Artificial Sequence
  chemically synthesized
gccatttccccttccataccca

SEQ ID NO: 13736 - DNA, 22 bp, Artificial Sequence
  chemically synthesized
ccccttccatacccagatggtt

SEQ ID NO: 13737 - DNA, 22 bp, Artificial Sequence
  chemically synthesized
cccttccatacccagatggtta

SEQ ID NO: 13738 - DNA, 22 bp, Artificial Sequence
  chemically synthesized
ccatacccagatggttaagtca

SEQ ID NO: 13739 - DNA, 22 bp, Artificial Sequence
  chemically synthesized
catacccagatggttaagtcat

SEQ ID NO: 13740 - DNA, 22 bp, Artificial Sequence
  chemically synthesized
agtcataccacttctacttcct

SEQ ID NO: 13741 - DNA, 22 bp, Artificial Sequence
  chemically synthesized
ctacttccttaatatcatttga

SEQ ID NO: 13742 - DNA, 22 bp, Artificial Sequence
  chemically synthesized
tacttccttaatatcatttgaa

SEQ ID NO: 13743 - DNA, 22 bp, Artificial Sequence
  chemically synthesized
cttccttaatatcatttgaact

SEQ ID NO: 13744 - DNA, 22 bp, Artificial Sequence
  chemically synthesized
ccttaatatcatttgaactccc

SEQ ID NO: 13745 - DNA, 22 bp, Artificial Sequence
  chemically synthesized
cttaatatcatttgaactcccc

SEQ ID NO: 13746 - DNA, 22 bp, Artificial Sequence
  chemically synthesized
aatatcatttgaactcccctct

SEQ ID NO: 13747 - DNA, 22 bp, Artificial Sequence
  chemically synthesized
atatcatttgaactcccctctt

SEQ ID NO: 13748 - DNA, 22 bp, Artificial Sequence
  chemically synthesized
gaactcccctctttttttgtac

SEQ ID NO: 13749 - DNA, 22 bp, Artificial Sequence
  chemically synthesized
aactcccctctttttttgtact

SEQ ID NO: 13750 - DNA, 22 bp, Artificial Sequence
  chemically synthesized
ccctctttttttgtactgctac

SEQ ID NO: 13751 - DNA, 22 bp, Artificial Sequence
  chemically synthesized
tttttttgtactgctactgttc

SEQ ID NO: 13752 - DNA, 22 bp, Artificial Sequence
  chemically synthesized
tttttgtactgctactgttcag

SEQ ID NO: 13753 - DNA, 22 bp, Artificial Sequence
  chemically synthesized
ttttgtactgctactgttcagg

SEQ ID NO: 13754 - DNA, 22 bp, Artificial Sequence
  chemically synthesized
tttgtactgctactgttcaggt

SEQ ID NO: 13755 - DNA, 22 bp, Artificial Sequence
  chemically synthesized
ttgtactgctactgttcaggtt

SEQ ID NO: 13756 - DNA, 22 bp, Artificial Sequence
  chemically synthesized
tgtactgctactgttcaggttc

SEQ ID NO: 13757 - DNA, 22 bp, Artificial Sequence
  chemically synthesized
gtactgctactgttcaggttct

SEQ ID NO: 13758 - DNA, 22 bp, Artificial Sequence
  chemically synthesized
tactgctactgttcaggttcta

SEQ ID NO: 13759 - DNA, 22 bp, Artificial Sequence
  chemically synthesized
ctactgttcaggttctagcctt

SEQ ID NO: 13760 - DNA, 22 bp, Artificial Sequence
  chemically synthesized
ctgttcaggttctagcctttat

SEQ ID NO: 13761 - DNA, 22 bp, Artificial Sequence
  chemically synthesized
ttcaggttctagcctttatgtc

SEQ ID NO: 13762 - DNA, 22 bp, Artificial Sequence
  chemically synthesized
aggttctagcctttatgtctcc

SEQ ID NO: 13763 - DNA, 22 bp, Artificial Sequence
  chemically synthesized
tagcctttatgtctcccgcaga

SEQ ID NO: 13764 - DNA, 22 bp, Artificial Sequence
  chemically synthesized
gcctttatgtctcccgcagata

SEQ ID NO: 13765 - DNA, 22 bp, Artificial Sequence
  chemically synthesized
tatgtctcccgcagataattgc

SEQ ID NO: 13766 - DNA, 22 bp, Artificial Sequence
  chemically synthesized
atgtctcccgcagataattgca

SEQ ID NO: 13767 - DNA, 22 bp, Artificial Sequence
  chemically synthesized
tgtctcccgcagataattgcaa

SEQ ID NO: 13768 - DNA, 22 bp, Artificial Sequence
  chemically synthesized
ccgcagataattgcaatagtct

SEQ ID NO: 13769 - DNA, 22 bp, Artificial Sequence
  chemically synthesized
caatagtctcaggactgctctc

SEQ ID NO: 13770 - DNA, 22 bp, Artificial Sequence
  chemically synthesized
aggactgctctctcctagtctt

SEQ ID NO: 13771 - DNA, 22 bp, Artificial Sequence
  chemically synthesized
ctctctcctagtcttggtacgg

SEQ ID NO: 13772 - DNA, 22 bp, Artificial Sequence
  chemically synthesized
tctcctagtcttggtacggccc

SEQ ID NO: 13773 - DNA, 22 bp, Artificial Sequence
  chemically synthesized
tcctagtcttggtacggccccc

SEQ ID NO: 13774 - DNA, 22 bp, Artificial Sequence
  chemically synthesized
ctagtcttggtacggccccctc

SEQ ID NO: 13775 - DNA, 22 bp, Artificial Sequence
  chemically synthesized
gtcttggtacggccccctcccc

SEQ ID NO: 13776 - DNA, 22 bp, Artificial Sequence
  chemically synthesized
ggtacggccccctcccccacta

SEQ ID NO: 13777 - DNA, 22 bp, Artificial Sequence
  chemically synthesized
gtacggccccctcccccactat

SEQ ID NO: 13778 - DNA, 22 bp, Artificial Sequence
  chemically synthesized
ccccactatcatttcattagcg

SEQ ID NO: 13779 - DNA, 22 bp, Artificial Sequence
  chemically synthesized
tcatttcattagcgtgttgcca

SEQ ID NO: 13780 - DNA, 22 bp, Artificial Sequence
  chemically synthesized
cattagcgtgttgccagactgg

SEQ ID NO: 13781 - DNA, 22 bp, Artificial Sequence
  chemically synthesized
attagcgtgttgccagactggg

SEQ ID NO: 13782 - DNA, 22 bp, Artificial Sequence
  chemically synthesized
gcgtgttgccagactgggcatc

SEQ ID NO: 13783 - DNA, 22 bp, Artificial Sequence
  chemically synthesized
ccagactgggcatcctaaatca

SEQ ID NO: 13784 - DNA, 22 bp, Artificial Sequence
  chemically synthesized
ggcatcctaaatcagccatcag

SEQ ID NO: 13785 - DNA, 22 bp, Artificial Sequence
  chemically synthesized
aatcagccatcagtggtactcc

SEQ ID NO: 13786 - DNA, 22 bp, Artificial Sequence
  chemically synthesized
cttatgtttatacttcgatacc

SEQ ID NO: 13787 - DNA, 22 bp, Artificial Sequence
  chemically synthesized
atgtttatacttcgatacctcc

SEQ ID NO: 13788 - DNA, 22 bp, Artificial Sequence
  chemically synthesized
tgtttatacttcgatacctcca

SEQ ID NO: 13789 - DNA, 22 bp, Artificial Sequence
  chemically synthesized
atacttcgatacctccatattg

SEQ ID NO: 13790 - DNA, 22 bp, Artificial Sequence
  chemically synthesized
tacttcgatacctccatattgc

SEQ ID NO: 13791 - DNA, 22 bp, Artificial Sequence
  chemically synthesized
cgatacctccatattgcatttt

SEQ ID NO: 13792 - DNA, 22 bp, Artificial Sequence
  chemically synthesized
gatacctccatattgcatttta

SEQ ID NO: 13793 - DNA, 22 bp, Artificial Sequence
  chemically synthesized
catattgcattttattgtccaa

SEQ ID NO: 13794 - DNA, 22 bp, Artificial Sequence
  chemically synthesized
cattttattgtccaatctcctt

SEQ ID NO: 13795 - DNA, 22 bp, Artificial Sequence
  chemically synthesized
tattgtccaatctccttaggtt

SEQ ID NO: 13796 - DNA, 22 bp, Artificial Sequence
  chemically synthesized
attgtccaatctccttaggtta

SEQ ID NO: 13797 - DNA, 22 bp, Artificial Sequence
  chemically synthesized
ttgtccaatctccttaggttaa

SEQ ID NO: 13798 - DNA, 22 bp, Artificial Sequence
  chemically synthesized
tccaatctccttaggttaatga

SEQ ID NO: 13799 - DNA, 22 bp, Artificial Sequence
  chemically synthesized
cttaggttaatgacttcattat

SEQ ID NO: 13800 - DNA, 22 bp, Artificial Sequence
  chemically synthesized
aggttaatgacttcattatctg

SEQ ID NO: 13801 - DNA, 22 bp, Artificial Sequence
  chemically synthesized
ggttaatgacttcattatctga

SEQ ID NO: 13802 - DNA, 22 bp, Artificial Sequence
  chemically synthesized
atgacttcattatctgatgacc

SEQ ID NO: 13803 - DNA, 22 bp, Artificial Sequence
  chemically synthesized
cattatctgatgaccagctctg

SEQ ID NO: 13804 - DNA, 22 bp, Artificial Sequence
  chemically synthesized
attatctgatgaccagctctgc

SEQ ID NO: 13805 - DNA, 22 bp, Artificial Sequence
  chemically synthesized
tctgatgaccagctctgcctag

SEQ ID NO: 13806 - DNA, 22 bp, Artificial Sequence
  chemically synthesized
atgaccagctctgcctagttta

SEQ ID NO: 13807 - DNA, 22 bp, Artificial Sequence
  chemically synthesized
tgcctagtttacctgtctcact

SEQ ID NO: 13808 - DNA, 22 bp, Artificial Sequence
  chemically synthesized
cctagtttacctgtctcacttg

SEQ ID NO: 13809 - DNA, 22 bp, Artificial Sequence
  chemically synthesized
gtttacctgtctcacttgtcat

SEQ ID NO: 13810 - DNA, 22 bp, Artificial Sequence
  chemically synthesized
acctgtctcacttgtcatagtc

SEQ ID NO: 13811 - DNA, 22 bp, Artificial Sequence
  chemically synthesized
cctgtctcacttgtcatagtcc

SEQ ID NO: 13812 - DNA, 22 bp, Artificial Sequence
  chemically synthesized
tctcacttgtcatagtccatat

SEQ ID NO: 13813 - DNA, 22 bp, Artificial Sequence
  chemically synthesized
acttgtcatagtccatatggaa

SEQ ID NO: 13814 - DNA, 22 bp, Artificial Sequence
  chemically synthesized
gtcatagtccatatggaaccat

SEQ ID NO: 13815 - DNA, 22 bp, Artificial Sequence
  chemically synthesized
tcatagtccatatggaaccata

SEQ ID NO: 13816 - DNA, 22 bp, Artificial Sequence
  chemically synthesized
ctgaaatacctcacgttcttgc

SEQ ID NO: 13817 - DNA, 22 bp, Artificial Sequence
  chemically synthesized
aaatacctcacgttcttgcaaa

SEQ ID NO: 13818 - DNA, 22 bp, Artificial Sequence
  chemically synthesized
acgttcttgcaaatctgagtct

SEQ ID NO: 13819 - DNA, 22 bp, Artificial Sequence
  chemically synthesized
ttgcaaatctgagtctttgcac

SEQ ID NO: 13820 - DNA, 22 bp, Artificial Sequence
  chemically synthesized
gcaaatctgagtctttgcacga

SEQ ID NO: 13821 - DNA, 22 bp, Artificial Sequence
  chemically synthesized
caaatctgagtctttgcacgag

SEQ ID NO: 13822 - DNA, 22 bp, Artificial Sequence
  chemically synthesized
agtctttgcacgagtgatcctc

SEQ ID NO: 13823 - DNA, 22 bp, Artificial Sequence
  chemically synthesized
tgcacgagtgatcctctttgca

SEQ ID NO: 13824 - DNA, 22 bp, Artificial Sequence
  chemically synthesized
gcacgagtgatcctctttgcat

SEQ ID NO: 13825 - DNA, 22 bp, Artificial Sequence
  chemically synthesized
cacgagtgatcctctttgcata

SEQ ID NO: 13826 - DNA, 22 bp, Artificial Sequence
  chemically synthesized
tttgcataaaatgcccttatat

SEQ ID NO: 13827 - DNA, 22 bp, Artificial Sequence
  chemically synthesized
tgcataaaatgcccttatatca

SEQ ID NO: 13828 - DNA, 22 bp, Artificial Sequence
  chemically synthesized
gcataaaatgcccttatatcag

SEQ ID NO: 13829 - DNA, 22 bp, Artificial Sequence
  chemically synthesized
cataaaatgcccttatatcaga

SEQ ID NO: 13830 - DNA, 22 bp, Artificial Sequence
  chemically synthesized
atatcagacatttaaagagaga

SEQ ID NO: 13831 - DNA, 22 bp, Artificial Sequence
  chemically synthesized
tatcagacatttaaagagagag

SEQ ID NO: 13832 - DNA, 22 bp, Artificial Sequence
  chemically synthesized
aaagagagagaacgcctactca

SEQ ID NO: 13833 - DNA, 22 bp, Artificial Sequence
  chemically synthesized
aagagagagaacgcctactcat

SEQ ID NO: 13834 - DNA, 22 bp, Artificial Sequence
  chemically synthesized
ctcatcttttaagacccagatg

SEQ ID NO: 13835 - DNA, 22 bp, Artificial Sequence
  chemically synthesized
atcttttaagacccagatgaaa

SEQ ID NO: 13836 - DNA, 22 bp, Artificial Sequence
  chemically synthesized
ttaagacccagatgaaaatatt

SEQ ID NO: 13837 - DNA, 22 bp, Artificial Sequence
  chemically synthesized
taagacccagatgaaaatattc

SEQ ID NO: 13838 - DNA, 22 bp, Artificial Sequence
  chemically synthesized
aagacccagatgaaaatattct

SEQ ID NO: 13839 - DNA, 22 bp, Artificial Sequence
  chemically synthesized
agacccagatgaaaatattctc

SEQ ID NO: 13840 - DNA, 22 bp, Artificial Sequence
  chemically synthesized
tctctctatcaattgtttcccc

SEQ ID NO: 13841 - DNA, 22 bp, Artificial Sequence
  chemically synthesized
tctctatcaattgtttccccat

SEQ ID NO: 13842 - DNA, 22 bp, Artificial Sequence
  chemically synthesized
tctatcaattgtttccccattt

SEQ ID NO: 13843 - DNA, 22 bp, Artificial Sequence
  chemically synthesized
tatcaattgtttccccatttaa

SEQ ID NO: 13844 - DNA, 22 bp, Artificial Sequence
  chemically synthesized
tcaattgtttccccatttaatg

SEQ ID NO: 13845 - DNA, 22 bp, Artificial Sequence
  chemically synthesized
tttccccatttaatgtgttcct

SEQ ID NO: 13846 - DNA, 22 bp, Artificial Sequence
  chemically synthesized
ccccatttaatgtgttcctttc

SEQ ID NO: 13847 - DNA, 22 bp, Artificial Sequence
  chemically synthesized
cccatttaatgtgttcctttct

SEQ ID NO: 13848 - DNA, 22 bp, Artificial Sequence
  chemically synthesized
aatgtgttcctttctctatgat

SEQ ID NO: 13849 - DNA, 22 bp, Artificial Sequence
  chemically synthesized
atgtgttcctttctctatgatc

SEQ ID NO: 13850 - DNA, 22 bp, Artificial Sequence
  chemically synthesized
ctttctctatgatcccttagta

SEQ ID NO: 13851 - DNA, 22 bp, Artificial Sequence
  chemically synthesized
tctctatgatcccttagtacct

SEQ ID NO: 13852 - DNA, 22 bp, Artificial Sequence
  chemically synthesized
ctctatgatcccttagtaccta

SEQ ID NO: 13853 - DNA, 22 bp, Artificial Sequence
  chemically synthesized
tctatgatcccttagtacctag

SEQ ID NO: 13854 - DNA, 22 bp, Artificial Sequence
  chemically synthesized
tatgatcccttagtacctagtg

SEQ ID NO: 13855 - DNA, 22 bp, Artificial Sequence
  chemically synthesized
tgatcccttagtacctagtgca

SEQ ID NO: 13856 - DNA, 22 bp, Artificial Sequence
  chemically synthesized
agtacctagtgcacattttatc

SEQ ID NO: 13857 - DNA, 22 bp, Artificial Sequence
  chemically synthesized
gtacctagtgcacattttatca

SEQ ID NO: 13858 - DNA, 22 bp, Artificial Sequence
  chemically synthesized
gtgcacattttatcacattata

SEQ ID NO: 13859 - DNA, 22 bp, Artificial Sequence
  chemically synthesized
tatcacattatattgaaacctc

SEQ ID NO: 13860 - DNA, 22 bp, Artificial Sequence
  chemically synthesized
atcacattatattgaaacctct

SEQ ID NO: 13861 - DNA, 22 bp, Artificial Sequence
  chemically synthesized
tcacattatattgaaacctctc

SEQ ID NO: 13862 - DNA, 22 bp, Artificial Sequence
  chemically synthesized
tattgaaacctctcacctggcc

SEQ ID NO: 13863 - DNA, 22 bp, Artificial Sequence
  chemically synthesized
aaacctctcacctggcctcatg

SEQ ID NO: 13864 - DNA, 22 bp, Artificial Sequence
  chemically synthesized
tcacctggcctcatgctgcttt

SEQ ID NO: 13865 - DNA, 22 bp, Artificial Sequence
  chemically synthesized
acctggcctcatgctgctttag

SEQ ID NO: 13866 - DNA, 22 bp, Artificial Sequence
  chemically synthesized
gcctcatgctgctttagatcaa

SEQ ID NO: 13867 - DNA, 22 bp, Artificial Sequence
  chemically synthesized
atgctgctttagatcaaagagg

SEQ ID NO: 13868 - DNA, 22 bp, Artificial Sequence
  chemically synthesized
ctttagatcaaagagggagtct

SEQ ID NO: 13869 - DNA, 22 bp, Artificial Sequence
  chemically synthesized
tagatcaaagagggagtctggt

SEQ ID NO: 13870 - DNA, 22 bp, Artificial Sequence
  chemically synthesized
agatcaaagagggagtctggtt

SEQ ID NO: 13871 - DNA, 22 bp, Artificial Sequence
  chemically synthesized
gatcaaagagggagtctggttt

SEQ ID NO: 13872 - DNA, 22 bp, Artificial Sequence
  chemically synthesized
gtttatccccatacccctagta

SEQ ID NO: 13873 - DNA, 22 bp, Artificial Sequence
  chemically synthesized
atccccatacccctagtaccct

SEQ ID NO: 13874 - DNA, 22 bp, Artificial Sequence
  chemically synthesized
tccccatacccctagtaccctg

SEQ ID NO: 13875 - DNA, 22 bp, Artificial Sequence
  chemically synthesized
gtaccctgacacagtacctggc

SEQ ID NO: 13876 - DNA, 22 bp, Artificial Sequence
  chemically synthesized
acacagtacctggcaccatagt

SEQ ID NO: 13877 - DNA, 22 bp, Artificial Sequence
  chemically synthesized
gcaccatagttgtaactcagta

SEQ ID NO: 13878 - DNA, 22 bp, Artificial Sequence
  chemically synthesized
taactcagtaatgtctgaatga

SEQ ID NO: 13879 - DNA, 22 bp, Artificial Sequence
  chemically synthesized
agtaatgtctgaatgaaggaca

SEQ ID NO: 13880 - DNA, 22 bp, Artificial Sequence
  chemically synthesized
aatgaaggacatctttgatgca

SEQ ID NO: 13881 - DNA, 22 bp, Artificial Sequence
  chemically synthesized
tgatgcatacactttacaaaac

SEQ ID NO: 13882 - DNA, 22 bp, Artificial Sequence
  chemically synthesized
gatgcatacactttacaaaact

SEQ ID NO: 13883 - DNA, 22 bp, Artificial Sequence
  chemically synthesized
atgcatacactttacaaaacta

SEQ ID NO: 13884 - DNA, 22 bp, Artificial Sequence
  chemically synthesized
tacaaaactaaactggttttac

SEQ ID NO: 13885 - DNA, 22 bp, Artificial Sequence
  chemically synthesized
acaaaactaaactggttttaca

SEQ ID NO: 13886 - DNA, 22 bp, Artificial Sequence
  chemically synthesized
caaaactaaactggttttacag

SEQ ID NO: 13887 - DNA, 22 bp, Artificial Sequence
  chemically synthesized
aactggttttacagaactgttt

SEQ ID NO: 13888 - DNA, 22 bp, Artificial Sequence
  chemically synthesized
gttttacagaactgttttaatt

SEQ ID NO: 13889 - DNA, 22 bp, Artificial Sequence
  chemically synthesized
tacagaactgttttaatttcaa

SEQ ID NO: 13890 - DNA, 22 bp, Artificial Sequence
  chemically synthesized
acagaactgttttaatttcaaa

SEQ ID NO: 13891 - DNA, 22 bp, Artificial Sequence
  chemically synthesized
cagaactgttttaatttcaaaa

SEQ ID NO: 13892 - DNA, 22 bp, Artificial Sequence
  chemically synthesized
ttttaatttcaaaattccaaac

SEQ ID NO: 13893 - DNA, 22 bp, Artificial Sequence
  chemically synthesized
taatttcaaaattccaaactgt

SEQ ID NO: 13894 - DNA, 22 bp, Artificial Sequence
  chemically synthesized
aatttcaaaattccaaactgtt

SEQ ID NO: 13895 - DNA, 22 bp, Artificial Sequence
  chemically synthesized
atttcaaaattccaaactgttg

SEQ ID NO: 13896 - DNA, 22 bp, Artificial Sequence
  chemically synthesized
caaaattccaaactgttgcaat

SEQ ID NO: 13897 - DNA, 22 bp, Artificial Sequence
  chemically synthesized
aaaattccaaactgttgcaata

SEQ ID NO: 13898 - DNA, 22 bp, Artificial Sequence
  chemically synthesized
caaactgttgcaataataccta

SEQ ID NO: 13899 - DNA, 22 bp, Artificial Sequence
  chemically synthesized
ttgcaataatacctaaaggcag

SEQ ID NO: 13900 - DNA, 22 bp, Artificial Sequence
  chemically synthesized
caataatacctaaaggcagcag

SEQ ID NO: 13901 - DNA, 22 bp, Artificial Sequence
  chemically synthesized
aaggcagcagccatgaaaatgc

SEQ ID NO: 13902 - DNA, 22 bp, Artificial Sequence
  chemically synthesized
agcaaatcactcaccgaaactc

SEQ ID NO: 13903 - DNA, 22 bp, Artificial Sequence
  chemically synthesized
accgaaactccttttagaagcc

SEQ ID NO: 13904 - DNA, 22 bp, Artificial Sequence
  chemically synthesized
cttttagaagccaatgagagtt

SEQ ID NO: 13905 - DNA, 22 bp, Artificial Sequence
  chemically synthesized
ttagaagccaatgagagtttaa

SEQ ID NO: 13906 - DNA, 22 bp, Artificial Sequence
  chemically synthesized
tagaagccaatgagagtttaat

SEQ ID NO: 13907 - DNA, 22 bp, Artificial Sequence
  chemically synthesized
agaagccaatgagagtttaata

SEQ ID NO: 13908 - DNA, 22 bp, Artificial Sequence
  chemically synthesized
gaagccaatgagagtttaatag

SEQ ID NO: 13909 - DNA, 22 bp, Artificial Sequence
  chemically synthesized
aatagcagaagagagtgctgca

SEQ ID NO: 13910 - DNA, 22 bp, Artificial Sequence
  chemically synthesized
atagcagaagagagtgctgcat

SEQ ID NO: 13911 - DNA, 22 bp, Artificial Sequence
  chemically synthesized
cattaatactgtctatccttag

SEQ ID NO: 13912 - DNA, 22 bp, Artificial Sequence
  chemically synthesized
atactgtctatccttagaaaaa

SEQ ID NO: 13913 - DNA, 22 bp, Artificial Sequence
  chemically synthesized
tctatccttagaaaaattcccc

SEQ ID NO: 13914 - DNA, 22 bp, Artificial Sequence
  chemically synthesized
tccttagaaaaattcccctggc

SEQ ID NO: 13915 - DNA, 22 bp, Artificial Sequence
  chemically synthesized
agaaaaattcccctggcccctt

SEQ ID NO: 13916 - DNA, 22 bp, Artificial Sequence
  chemically synthesized
gaaaaattcccctggccccttc

SEQ ID NO: 13917 - DNA, 22 bp, Artificial Sequence
  chemically synthesized
ccctggccccttcctcaagggc

SEQ ID NO: 13918 - DNA, 22 bp, Artificial Sequence
  chemically synthesized
gccccttcctcaagggcttatt

SEQ ID NO: 13919 - DNA, 22 bp, Artificial Sequence
  chemically synthesized
cctcaagggcttattatctctg

SEQ ID NO: 13920 - DNA, 22 bp, Artificial Sequence
  chemically synthesized
ctcaagggcttattatctctgg

SEQ ID NO: 13921 - DNA, 22 bp, Artificial Sequence
  chemically synthesized
aagggcttattatctctggcta

SEQ ID NO: 13922 - DNA, 22 bp, Artificial Sequence
  chemically synthesized
attatctctggctacaatggct

SEQ ID NO: 13923 - DNA, 22 bp, Artificial Sequence
  chemically synthesized
ttatctctggctacaatggctg

SEQ ID NO: 13924 - DNA, 22 bp, Artificial Sequence
  chemically synthesized
tctctggctacaatggctgcag

SEQ ID NO: 13925 - DNA, 22 bp, Artificial Sequence
  chemically synthesized
tggctacaatggctgcagaatc

SEQ ID NO: 13926 - DNA, 22 bp, Artificial Sequence
  chemically synthesized
gctacaatggctgcagaatcac

SEQ ID NO: 13927 - DNA, 22 bp, Artificial Sequence
  chemically synthesized
caatggctgcagaatcacattg

SEQ ID NO: 13928 - DNA, 22 bp, Artificial Sequence
  chemically synthesized
cagaatcacattgcctttctcc

SEQ ID NO: 13929 - DNA, 22 bp, Artificial Sequence
  chemically synthesized
cctttctccttagtattatctg

SEQ ID NO: 13930 - DNA, 22 bp, Artificial Sequence
  chemically synthesized
tctccttagtattatctgggga

SEQ ID NO: 13931 - DNA, 22 bp, Artificial Sequence
  chemically synthesized
ctccttagtattatctggggat

SEQ ID NO: 13932 - DNA, 22 bp, Artificial Sequence
  chemically synthesized
tccttagtattatctggggatc

SEQ ID NO: 13933 - DNA, 22 bp, Artificial Sequence
  chemically synthesized
cttagtattatctggggatcgt

SEQ ID NO: 13934 - DNA, 22 bp, Artificial Sequence
  chemically synthesized
agtattatctggggatcgtata

SEQ ID NO: 13935 - DNA, 22 bp, Artificial Sequence
  chemically synthesized
gtattatctggggatcgtatac

SEQ ID NO: 13936 - DNA, 22 bp, Artificial Sequence
  chemically synthesized
tctggggatcgtatacttaact

SEQ ID NO: 13937 - DNA, 22 bp, Artificial Sequence
  chemically synthesized
gggatcgtatacttaacttccc

SEQ ID NO: 13938 - DNA, 22 bp, Artificial Sequence
  chemically synthesized
aacttcccttcaggtttatcgc

SEQ ID NO: 13939 - DNA, 22 bp, Artificial Sequence
  chemically synthesized
acttcccttcaggtttatcgct

SEQ ID NO: 13940 - DNA, 22 bp, Artificial Sequence
  chemically synthesized
cccttcaggtttatcgctagtc

SEQ ID NO: 13941 - DNA, 22 bp, Artificial Sequence
  chemically synthesized
ccttcaggtttatcgctagtca

SEQ ID NO: 13942 - DNA, 22 bp, Artificial Sequence
  chemically synthesized
caggtttatcgctagtcattat

SEQ ID NO: 13943 - DNA, 22 bp, Artificial Sequence
  chemically synthesized
aggtttatcgctagtcattatt

SEQ ID NO: 13944 - DNA, 22 bp, Artificial Sequence
  chemically synthesized
atcgctagtcattatttcccag

SEQ ID NO: 13945 - DNA, 22 bp, Artificial Sequence
  chemically synthesized
tcgctagtcattatttcccagg

SEQ ID NO: 13946 - DNA, 22 bp, Artificial Sequence
  chemically synthesized
gtcattatttcccaggctccaa

SEQ ID NO: 13947 - DNA, 22 bp, Artificial Sequence
  chemically synthesized
tttcccaggctccaaaagcctg

SEQ ID NO: 13948 - DNA, 22 bp, Artificial Sequence
  chemically synthesized
cccaggctccaaaagcctggtt

SEQ ID NO: 13949 - DNA, 22 bp, Artificial Sequence
  chemically synthesized
ccaggctccaaaagcctggttc

SEQ ID NO: 13950 - DNA, 22 bp, Artificial Sequence
  chemically synthesized
caaaagcctggttcatccttat

SEQ ID NO: 13951 - DNA, 22 bp, Artificial Sequence
  chemically synthesized
gttcatccttattcttatctat

SEQ ID NO: 13952 - DNA, 22 bp, Artificial Sequence
  chemically synthesized
atccttattcttatctatcctt

SEQ ID NO: 13953 - DNA, 22 bp, Artificial Sequence
  chemically synthesized
attcttatctatcctttcccca

SEQ ID NO: 13954 - DNA, 22 bp, Artificial Sequence
  chemically synthesized
ttcttatctatcctttccccag

SEQ ID NO: 13955 - DNA, 22 bp, Artificial Sequence
  chemically synthesized
ttatctatcctttccccagcat

SEQ ID NO: 13956 - DNA, 22 bp, Artificial Sequence
  chemically synthesized
atctatcctttccccagcatct

SEQ ID NO: 13957 - DNA, 22 bp, Artificial Sequence
  chemically synthesized
tctatcctttccccagcatctg

SEQ ID NO: 13958 - DNA, 22 bp, Artificial Sequence
  chemically synthesized
tcctttccccagcatctgaagt

SEQ ID NO: 13959 - DNA, 22 bp, Artificial Sequence
  chemically synthesized
tccccagcatctgaagtcttca

SEQ ID NO: 13960 - DNA, 22 bp, Artificial Sequence
  chemically synthesized
ccccagcatctgaagtcttcaa

SEQ ID NO: 13961 - DNA, 22 bp, Artificial Sequence
  chemically synthesized
cccagcatctgaagtcttcaag

SEQ ID NO: 13962 - DNA, 22 bp, Artificial Sequence
  chemically synthesized
aagtcttcaagggggcagaagc

SEQ ID NO: 13963 - DNA, 22 bp, Artificial Sequence
  chemically synthesized
caagggggcagaagccctctta

SEQ ID NO: 13964 - DNA, 22 bp, Artificial Sequence
  chemically synthesized
aagggggcagaagccctcttac

SEQ ID NO: 13965 - DNA, 22 bp, Artificial Sequence
  chemically synthesized
ttacaaccttcatcatctcacc

SEQ ID NO: 13966 - DNA, 22 bp, Artificial Sequence
  chemically synthesized
acaaccttcatcatctcaccac

SEQ ID NO: 13967 - DNA, 22 bp, Artificial Sequence
  chemically synthesized
caaccttcatcatctcaccact

SEQ ID NO: 13968 - DNA, 22 bp, Artificial Sequence
  chemically synthesized
catcatctcaccacttatatag

SEQ ID NO: 13969 - DNA, 22 bp, Artificial Sequence
  chemically synthesized
atcatctcaccacttatataga

SEQ ID NO: 13970 - DNA, 22 bp, Artificial Sequence
  chemically synthesized
accacttatatagaagaaaggg

SEQ ID NO: 13971 - DNA, 22 bp, Artificial Sequence
  chemically synthesized
atatagaagaaagggtttggat

SEQ ID NO: 13972 - DNA, 22 bp, Artificial Sequence
  chemically synthesized
tatagaagaaagggtttggatg

SEQ ID NO: 13973 - DNA, 22 bp, Artificial Sequence
  chemically synthesized
ggatgctttgtcctcccagatg

SEQ ID NO: 13974 - DNA, 22 bp, Artificial Sequence
  chemically synthesized
gatgctttgtcctcccagatgt

SEQ ID NO: 13975 - DNA, 22 bp, Artificial Sequence
  chemically synthesized
tgtcctcccagatgtcacacta

SEQ ID NO: 13976 - DNA, 22 bp, Artificial Sequence
  chemically synthesized
gtcctcccagatgtcacactaa

SEQ ID NO: 13977 - DNA, 22 bp, Artificial Sequence
  chemically synthesized
tcctcccagatgtcacactaat

SEQ ID NO: 13978 - DNA, 22 bp, Artificial Sequence
  chemically synthesized
ccagatgtcacactaatgagat

SEQ ID NO: 13979 - DNA, 22 bp, Artificial Sequence
  chemically synthesized
atgagatatatctaatggcctt

SEQ ID NO: 13980 - DNA, 22 bp, Artificial Sequence
  chemically synthesized
atggccttgctttatgtcctgc

SEQ ID NO: 13981 - DNA, 22 bp, Artificial Sequence
  chemically synthesized
gctttatgtcctgctttgtgag

SEQ ID NO: 13982 - DNA, 22 bp, Artificial Sequence
  chemically synthesized
ctttatgtcctgctttgtgagt

SEQ ID NO: 13983 - DNA, 22 bp, Artificial Sequence
  chemically synthesized
tatgtcctgctttgtgagtttt

SEQ ID NO: 13984 - DNA, 22 bp, Artificial Sequence
  chemically synthesized
atgtcctgctttgtgagttttc

SEQ ID NO: 13985 - DNA, 22 bp, Artificial Sequence
  chemically synthesized
tgtcctgctttgtgagttttcc

SEQ ID NO: 13986 - DNA, 22 bp, Artificial Sequence
  chemically synthesized
ctttgtgagttttccaacaaat

SEQ ID NO: 13987 - DNA, 22 bp, Artificial Sequence
  chemically synthesized
tgtgagttttccaacaaatttt

SEQ ID NO: 13988 - DNA, 22 bp, Artificial Sequence
  chemically synthesized
gtgagttttccaacaaattttc

SEQ ID NO: 13989 - DNA, 22 bp, Artificial Sequence
  chemically synthesized
tgagttttccaacaaattttct

SEQ ID NO: 13990 - DNA, 22 bp, Artificial Sequence
  chemically synthesized
tccaacaaattttctttatccc

SEQ ID NO: 13991 - DNA, 22 bp, Artificial Sequence
  chemically synthesized
ccaacaaattttctttatccct

SEQ ID NO: 13992 - DNA, 22 bp, Artificial Sequence
  chemically synthesized
caacaaattttctttatccctt

SEQ ID NO: 13993 - DNA, 22 bp, Artificial Sequence
  chemically synthesized
tctttatcccttgactttactc

SEQ ID NO: 13994 - DNA, 22 bp, Artificial Sequence
  chemically synthesized
ctttatcccttgactttactca

SEQ ID NO: 13995 - DNA, 22 bp, Artificial Sequence
  chemically synthesized
tttatcccttgactttactcac

SEQ ID NO: 13996 - DNA, 22 bp, Artificial Sequence
  chemically synthesized
tatcccttgactttactcactt

SEQ ID NO: 13997 - DNA, 22 bp, Artificial Sequence
  chemically synthesized
atcccttgactttactcacttt

SEQ ID NO: 13998 - DNA, 22 bp, Artificial Sequence
  chemically synthesized
tcccttgactttactcactttg

SEQ ID NO: 13999 - DNA, 22 bp, Artificial Sequence
  chemically synthesized
gactttactcactttgctagtt

SEQ ID NO: 14000 - DNA, 22 bp, Artificial Sequence
  chemically synthesized
actttactcactttgctagttt

SEQ ID NO: 14001 - DNA, 22 bp, Artificial Sequence
  chemically synthesized
tactcactttgctagtttaacc

SEQ ID NO: 14002 - DNA, 22 bp, Artificial Sequence
  chemically synthesized
actcactttgctagtttaacct

SEQ ID NO: 14003 - DNA, 22 bp, Artificial Sequence
  chemically synthesized
ctcactttgctagtttaacctc

SEQ ID NO: 14004 - DNA, 22 bp, Artificial Sequence
  chemically synthesized
actttgctagtttaacctctgt

SEQ ID NO: 14005 - DNA, 22 bp, Artificial Sequence
  chemically synthesized
tgctagtttaacctctgtattt

SEQ ID NO: 14006 - DNA, 22 bp, Artificial Sequence
  chemically synthesized
gctagtttaacctctgtatttt

SEQ ID NO: 14007 - DNA, 22 bp, Artificial Sequence
  chemically synthesized
ctagtttaacctctgtattttt

SEQ ID NO: 14008 - DNA, 22 bp, Artificial Sequence
  chemically synthesized
gtttaacctctgtatttttttt

SEQ ID NO: 14009 - DNA, 22 bp, Artificial Sequence
  chemically synthesized
aacctctgtatttttttttatc

SEQ ID NO: 14010 - DNA, 22 bp, Artificial Sequence
  chemically synthesized
acctctgtatttttttttatcg

SEQ ID NO: 14011 - DNA, 22 bp, Artificial Sequence
  chemically synthesized
tgtatttttttttatcgttatt

SEQ ID NO: 14012 - DNA, 22 bp, Artificial Sequence
  chemically synthesized
tatttttttttatcgttatttc

SEQ ID NO: 14013 - DNA, 22 bp, Artificial Sequence
  chemically synthesized
ttttttatcgttatttcagcat

SEQ ID NO: 14014 - DNA, 22 bp, Artificial Sequence
  chemically synthesized
tttttatcgttatttcagcatt

SEQ ID NO: 14015 - DNA, 22 bp, Artificial Sequence
  chemically synthesized
ttttatcgttatttcagcattt

SEQ ID NO: 14016 - DNA, 22 bp, Artificial Sequence
  chemically synthesized
tttatcgttatttcagcatttc

SEQ ID NO: 14017 - DNA, 22 bp, Artificial Sequence
  chemically synthesized
ttatcgttatttcagcatttca

SEQ ID NO: 14018 - DNA, 22 bp, Artificial Sequence
  chemically synthesized
tatcgttatttcagcatttcag

SEQ ID NO: 14019 - DNA, 22 bp, Artificial Sequence
  chemically synthesized
atcgttatttcagcatttcagt

SEQ ID NO: 14020 - DNA, 22 bp, Artificial Sequence
  chemically synthesized
tcgttatttcagcatttcagtc

SEQ ID NO: 14021 - DNA, 22 bp, Artificial Sequence
  chemically synthesized
tttcagcatttcagtctgattt

SEQ ID NO: 14022 - DNA, 22 bp, Artificial Sequence
  chemically synthesized
cagcatttcagtctgatttcac

SEQ ID NO: 14023 - DNA, 22 bp, Artificial Sequence
  chemically synthesized
agcatttcagtctgatttcaca

SEQ ID NO: 14024 - DNA, 22 bp, Artificial Sequence
  chemically synthesized
cagtctgatttcacagctgaca

SEQ ID NO: 14025 - DNA, 22 bp, Artificial Sequence
  chemically synthesized
agtctgatttcacagctgacat

SEQ ID NO: 14026 - DNA, 22 bp, Artificial Sequence
  chemically synthesized
atttcacagctgacatcatgtc

SEQ ID NO: 14027 - DNA, 22 bp, Artificial Sequence
  chemically synthesized
cacagctgacatcatgtctgga

SEQ ID NO: 14028 - DNA, 22 bp, Artificial Sequence
  chemically synthesized
acagctgacatcatgtctggag

SEQ ID NO: 14029 - DNA, 22 bp, Artificial Sequence
  chemically synthesized
acatcatgtctggagtgggaac

SEQ ID NO: 14030 - DNA, 22 bp, Artificial Sequence
  chemically synthesized
gagtgggaaccacagggccagt

SEQ ID NO: 14031 - DNA, 22 bp, Artificial Sequence
  chemically synthesized
tctgggggtgcttagggttggc

SEQ ID NO: 14032 - DNA, 22 bp, Artificial Sequence
  chemically synthesized
ctgggggtgcttagggttggca

SEQ ID NO: 14033 - DNA, 22 bp, Artificial Sequence
  chemically synthesized
tgggggtgcttagggttggcac

SEQ ID NO: 14034 - DNA, 22 bp, Artificial Sequence
  chemically synthesized
ggggtgcttagggttggcaccc

SEQ ID NO: 14035 - DNA, 22 bp, Artificial Sequence
  chemically synthesized
agggttggcacccctgatcctg

SEQ ID NO: 14036 - DNA, 22 bp, Artificial Sequence
  chemically synthesized
gggttggcacccctgatcctgg

SEQ ID NO: 14037 - DNA, 22 bp, Artificial Sequence
  chemically synthesized
gcacccctgatcctggtactgt

SEQ ID NO: 14038 - DNA, 22 bp, Artificial Sequence
  chemically synthesized
atcctggtactgtcagctacta

SEQ ID NO: 14039 - DNA, 22 bp, Artificial Sequence
  chemically synthesized
gtactgtcagctactagatttg

SEQ ID NO: 14040 - DNA, 22 bp, Artificial Sequence
  chemically synthesized
tcagctactagatttgattcta

SEQ ID NO: 14041 - DNA, 22 bp, Artificial Sequence
  chemically synthesized
ctagatttgattctagaaagtt

SEQ ID NO: 14042 - DNA, 22 bp, Artificial Sequence
  chemically synthesized
gatttgattctagaaagttgac

SEQ ID NO: 14043 - DNA, 22 bp, Artificial Sequence
  chemically synthesized
gattctagaaagttgacaagta

SEQ ID NO: 14044 - DNA, 22 bp, Artificial Sequence
  chemically synthesized
attctagaaagttgacaagtaa

SEQ ID NO: 14045 - DNA, 22 bp, Artificial Sequence
  chemically synthesized
tagaaagttgacaagtaagtgt

SEQ ID NO: 14046 - DNA, 22 bp, Artificial Sequence
  chemically synthesized
gaaagttgacaagtaagtgtga

SEQ ID NO: 14047 - DNA, 22 bp, Artificial Sequence
  chemically synthesized
acaagtaagtgtgataaatgct

SEQ ID NO: 14048 - DNA, 22 bp, Artificial Sequence
  chemically synthesized
cctgtgagaacatgctgtttgt

SEQ ID NO: 14049 - DNA, 22 bp, Artificial Sequence
  chemically synthesized
ctgtgagaacatgctgtttgtc

SEQ ID NO: 14050 - DNA, 22 bp, Artificial Sequence
  chemically synthesized
tgagaacatgctgtttgtccaa

SEQ ID NO: 14051 - DNA, 22 bp, Artificial Sequence
  chemically synthesized
tttgtccaaatgggataatttc

SEQ ID NO: 14052 - DNA, 22 bp, Artificial Sequence
  chemically synthesized
gtccaaatgggataatttcttc

SEQ ID NO: 14053 - DNA, 22 bp, Artificial Sequence
  chemically synthesized
tccaaatgggataatttcttcc

SEQ ID NO: 14054 - DNA, 22 bp, Artificial Sequence
  chemically synthesized
cttccctgtatgccttcctctg

SEQ ID NO: 14055 - DNA, 22 bp, Artificial Sequence
  chemically synthesized
ttccctgtatgccttcctctgg

SEQ ID NO: 14056 - DNA, 22 bp, Artificial Sequence
  chemically synthesized
ccctgtatgccttcctctggga

SEQ ID NO: 14057 - DNA, 22 bp, Artificial Sequence
  chemically synthesized
cctgtatgccttcctctgggaa

SEQ ID NO: 14058 - DNA, 22 bp, Artificial Sequence
  chemically synthesized
tatgccttcctctgggaaatac

SEQ ID NO: 14059 - DNA, 22 bp, Artificial Sequence
  chemically synthesized
cctctgggaaatacataaagtc

SEQ ID NO: 14060 - DNA, 22 bp, Artificial Sequence
  chemically synthesized
ctctgggaaatacataaagtca

SEQ ID NO: 14061 - DNA, 22 bp, Artificial Sequence
  chemically synthesized
tgggaaatacataaagtcactg

SEQ ID NO: 14062 - DNA, 22 bp, Artificial Sequence
  chemically synthesized
ggaaatacataaagtcactgta

SEQ ID NO: 14063 - DNA, 22 bp, Artificial Sequence
  chemically synthesized
tagttgtgaaaaaacaaagtga

SEQ ID NO: 14064 - DNA, 22 bp, Artificial Sequence
  chemically synthesized
tgaaaaaacaaagtgatatatg

SEQ ID NO: 14065 - DNA, 22 bp, Artificial Sequence
  chemically synthesized
cattagctaacttcctactctt

SEQ ID NO: 14066 - DNA, 22 bp, Artificial Sequence
  chemically synthesized
gctaacttcctactctttatgt

SEQ ID NO: 14067 - DNA, 22 bp, Artificial Sequence
  chemically synthesized
acttcctactctttatgtcaat

SEQ ID NO: 14068 - DNA, 22 bp, Artificial Sequence
  chemically synthesized
cctactctttatgtcaattctt

SEQ ID NO: 14069 - DNA, 22 bp, Artificial Sequence
  chemically synthesized
ctactctttatgtcaattctta

SEQ ID NO: 14070 - DNA, 22 bp, Artificial Sequence
  chemically synthesized
ctctttatgtcaattcttaagc

SEQ ID NO: 14071 - DNA, 22 bp, Artificial Sequence
  chemically synthesized
tttatgtcaattcttaagcttg

SEQ ID NO: 14072 - DNA, 22 bp, Artificial Sequence
  chemically synthesized
tatgtcaattcttaagcttgct

SEQ ID NO: 14073 - DNA, 22 bp, Artificial Sequence
  chemically synthesized
atgtcaattcttaagcttgctt

SEQ ID NO: 14074 - DNA, 22 bp, Artificial Sequence
  chemically synthesized
tgtcaattcttaagcttgcttt

SEQ ID NO: 14075 - DNA, 22 bp, Artificial Sequence
  chemically synthesized
ttaagcttgcttttctccccta

SEQ ID NO: 14076 - DNA, 22 bp, Artificial Sequence
  chemically synthesized
aagcttgcttttctcccctagg

SEQ ID NO: 14077 - DNA, 22 bp, Artificial Sequence
  chemically synthesized
agcttgcttttctcccctaggg

SEQ ID NO: 14078 - DNA, 22 bp, Artificial Sequence
  chemically synthesized
gcttttctcccctagggaactc

SEQ ID NO: 14079 - DNA, 22 bp, Artificial Sequence
  chemically synthesized
cttttctcccctagggaactca

SEQ ID NO: 14080 - DNA, 22 bp, Artificial Sequence
  chemically synthesized
ttctcccctagggaactcaact

SEQ ID NO: 14081 - DNA, 22 bp, Artificial Sequence
  chemically synthesized
tctcccctagggaactcaactg

SEQ ID NO: 14082 - DNA, 22 bp, Artificial Sequence
  chemically synthesized
ctcccctagggaactcaactga

SEQ ID NO: 14083 - DNA, 22 bp, Artificial Sequence
  chemically synthesized
tcccctagggaactcaactgag

SEQ ID NO: 14084 - DNA, 22 bp, Artificial Sequence
  chemically synthesized
ccctagggaactcaactgagta

SEQ ID NO: 14085 - DNA, 22 bp, Artificial Sequence
  chemically synthesized
gggaactcaactgagtattgtg

SEQ ID NO: 14086 - DNA, 22 bp, Artificial Sequence
  chemically synthesized
aactgagtattgtgtttcccca

SEQ ID NO: 14087 - DNA, 22 bp, Artificial Sequence
  chemically synthesized
agtattgtgtttccccaaatat

SEQ ID NO: 14088 - DNA, 22 bp, Artificial Sequence
  chemically synthesized
tgtttccccaaatatcaactcc

SEQ ID NO: 14089 - DNA, 22 bp, Artificial Sequence
  chemically synthesized
ccccaaatatcaactccaagat

SEQ ID NO: 14090 - DNA, 22 bp, Artificial Sequence
  chemically synthesized
cccaaatatcaactccaagatg

SEQ ID NO: 14091 - DNA, 22 bp, Artificial Sequence
  chemically synthesized
caagatgtttgacatagagaca

SEQ ID NO: 14092 - DNA, 22 bp, Artificial Sequence
  chemically synthesized
gacatagagacaaaatgatttt

SEQ ID NO: 14093 - DNA, 22 bp, Artificial Sequence
  chemically synthesized
acatagagacaaaatgattttt

SEQ ID NO: 14094 - DNA, 22 bp, Artificial Sequence
  chemically synthesized
tttcctaatccatgaaaagctt

SEQ ID NO: 14095 - DNA, 22 bp, Artificial Sequence
  chemically synthesized
ttcctaatccatgaaaagcttt

SEQ ID NO: 14096 - DNA, 22 bp, Artificial Sequence
  chemically synthesized
tcctaatccatgaaaagctttg

SEQ ID NO: 14097 - DNA, 22 bp, Artificial Sequence
  chemically synthesized
cctaatccatgaaaagctttgg

SEQ ID NO: 14098 - DNA, 22 bp, Artificial Sequence
  chemically synthesized
ctaatccatgaaaagctttggt

SEQ ID NO: 14099 - DNA, 22 bp, Artificial Sequence
  chemically synthesized
atccatgaaaagctttggtgat

SEQ ID NO: 14100 - DNA, 22 bp, Artificial Sequence
  chemically synthesized
tggtgataactaacagcttgct

SEQ ID NO: 14101 - DNA, 22 bp, Artificial Sequence
  chemically synthesized
ggtgataactaacagcttgcta

SEQ ID NO: 14102 - DNA, 22 bp, Artificial Sequence
  chemically synthesized
gtgataactaacagcttgctaa

SEQ ID NO: 14103 - DNA, 22 bp, Artificial Sequence
  chemically synthesized
acagcttgctaatgaaaggtta

SEQ ID NO: 14104 - DNA, 22 bp, Artificial Sequence
  chemically synthesized
gctaatgaaaggttaatcttta

SEQ ID NO: 14105 - DNA, 22 bp, Artificial Sequence
  chemically synthesized
ctaatgaaaggttaatctttat

SEQ ID NO: 14106 - DNA, 22 bp, Artificial Sequence
  chemically synthesized
atgaaaggttaatctttatgtt

SEQ ID NO: 14107 - DNA, 22 bp, Artificial Sequence
  chemically synthesized
atctttatgttttaactaaaac

SEQ ID NO: 14108 - DNA, 22 bp, Artificial Sequence
  chemically synthesized
tatgttttaactaaaactttaa

SEQ ID NO: 14109 - DNA, 22 bp, Artificial Sequence
  chemically synthesized
atgttttaactaaaactttaaa

SEQ ID NO: 14110 - DNA, 22 bp, Artificial Sequence
  chemically synthesized
tgttttaactaaaactttaaat

SEQ ID NO: 14111 - DNA, 22 bp, Artificial Sequence
  chemically synthesized
taactaaaactttaaattgaag

SEQ ID NO: 14112 - DNA, 22 bp, Artificial Sequence
  chemically synthesized
aactaaaactttaaattgaaga

SEQ ID NO: 14113 - DNA, 22 bp, Artificial Sequence
  chemically synthesized
actaaaactttaaattgaagat

SEQ ID NO: 14114 - DNA, 22 bp, Artificial Sequence
  chemically synthesized
aaactttaaattgaagatatat

SEQ ID NO: 14115 - DNA, 22 bp, Artificial Sequence
  chemically synthesized
taaattgaagatatataattta

SEQ ID NO: 14116 - DNA, 22 bp, Artificial Sequence
  chemically synthesized
aaattgaagatatataatttaa

SEQ ID NO: 14117 - DNA, 22 bp, Artificial Sequence
  chemically synthesized
aattgaagatatataatttaaa

SEQ ID NO: 14118 - DNA, 22 bp, Artificial Sequence
  chemically synthesized
aagatatataatttaaaaaatt

SEQ ID NO: 14119 - DNA, 22 bp, Artificial Sequence
  chemically synthesized
aaaaaattagagacacacctca

SEQ ID NO: 14120 - DNA, 22 bp, Artificial Sequence
  chemically synthesized
aaaaattagagacacacctcat

SEQ ID NO: 14121 - DNA, 22 bp, Artificial Sequence
  chemically synthesized
gagacacacctcattacatact

SEQ ID NO: 14122 - DNA, 22 bp, Artificial Sequence
  chemically synthesized
attacatacttctgaaaccttg

SEQ ID NO: 14123 - DNA, 22 bp, Artificial Sequence
  chemically synthesized
catacttctgaaaccttgaaat

SEQ ID NO: 14124 - DNA, 22 bp, Artificial Sequence
  chemically synthesized
ctgaaaccttgaaatgtcatat

SEQ ID NO: 14125 - DNA, 22 bp, Artificial Sequence
  chemically synthesized
tgaaaccttgaaatgtcatata

SEQ ID NO: 14126 - DNA, 22 bp, Artificial Sequence
  chemically synthesized
aaaccttgaaatgtcatatatc

SEQ ID NO: 14127 - DNA, 22 bp, Artificial Sequence
  chemically synthesized
gaaatgtcatatatcttaaaat

SEQ ID NO: 14128 - DNA, 22 bp, Artificial Sequence
  chemically synthesized
aaatgtcatatatcttaaaatc

SEQ ID NO: 14129 - DNA, 22 bp, Artificial Sequence
  chemically synthesized
aaaatcagactttttgtgtaaa

SEQ ID NO: 14130 - DNA, 22 bp, Artificial Sequence
  chemically synthesized
aaatcagactttttgtgtaaat

SEQ ID NO: 14131 - DNA, 22 bp, Artificial Sequence
  chemically synthesized
tttgtgtaaataaggccattgt

SEQ ID NO: 14132 - DNA, 22 bp, Artificial Sequence
  chemically synthesized
ttgtgtaaataaggccattgtt

SEQ ID NO: 14133 - DNA, 22 bp, Artificial Sequence
  chemically synthesized
tgtgtaaataaggccattgttt

SEQ ID NO: 14134 - DNA, 22 bp, Artificial Sequence
  chemically synthesized
gtgtaaataaggccattgtttg

SEQ ID NO: 14135 - DNA, 22 bp, Artificial Sequence
  chemically synthesized
tgtaaataaggccattgtttgt

SEQ ID NO: 14136 - DNA, 22 bp, Artificial Sequence
  chemically synthesized
tttgtgcttttgtttcccattt

SEQ ID NO: 14137 - DNA, 22 bp, Artificial Sequence
  chemically synthesized
gtgcttttgtttcccattttga

SEQ ID NO: 14138 - DNA, 22 bp, Artificial Sequence
  chemically synthesized
tgcttttgtttcccattttgat

SEQ ID NO: 14139 - DNA, 22 bp, Artificial Sequence
  chemically synthesized
ttgtttcccattttgatttcaa

SEQ ID NO: 14140 - DNA, 22 bp, Artificial Sequence
  chemically synthesized
tgtttcccattttgatttcaaa

SEQ ID NO: 14141 - DNA, 22 bp, Artificial Sequence
  chemically synthesized
gtttcccattttgatttcaaag

SEQ ID NO: 14142 - DNA, 22 bp, Artificial Sequence
  chemically synthesized
tttcccattttgatttcaaagt

SEQ ID NO: 14143 - DNA, 22 bp, Artificial Sequence
  chemically synthesized
cccattttgatttcaaagtggt

SEQ ID NO: 14144 - DNA, 22 bp, Artificial Sequence
  chemically synthesized
ccattttgatttcaaagtggta

SEQ ID NO: 14145 - DNA, 22 bp, Artificial Sequence
  chemically synthesized
tgatttcaaagtggtaagtcca

SEQ ID NO: 14146 - DNA, 22 bp, Artificial Sequence
  chemically synthesized
gatttcaaagtggtaagtccaa

SEQ ID NO: 14147 - DNA, 22 bp, Artificial Sequence
  chemically synthesized
atttcaaagtggtaagtccaaa

SEQ ID NO: 14148 - DNA, 22 bp, Artificial Sequence
  chemically synthesized
caaagtggtaagtccaaacaaa

SEQ ID NO: 14149 - DNA, 22 bp, Artificial Sequence
  chemically synthesized
aaagtggtaagtccaaacaaaa

SEQ ID NO: 14150 - DNA, 22 bp, Artificial Sequence
  chemically synthesized
ttttttttcactatattctgct

SEQ ID NO: 14151 - DNA, 22 bp, Artificial Sequence
  chemically synthesized
tttttcactatattctgctatt

SEQ ID NO: 14152 - DNA, 22 bp, Artificial Sequence
  chemically synthesized
ttttcactatattctgctattt

SEQ ID NO: 14153 - DNA, 22 bp, Artificial Sequence
  chemically synthesized
tttcactatattctgctatttc

SEQ ID NO: 14154 - DNA, 22 bp, Artificial Sequence
  chemically synthesized
ttcactatattctgctatttct

SEQ ID NO: 14155 - DNA, 22 bp, Artificial Sequence
  chemically synthesized
tcactatattctgctatttctt

SEQ ID NO: 14156 - DNA, 22 bp, Artificial Sequence
  chemically synthesized
cactatattctgctatttcttt

SEQ ID NO: 14157 - DNA, 22 bp, Artificial Sequence
  chemically synthesized
actatattctgctatttctttg

SEQ ID NO: 14158 - DNA, 22 bp, Artificial Sequence
  chemically synthesized
tattctgctatttctttgtttt

SEQ ID NO: 14159 - DNA, 22 bp, Artificial Sequence
  chemically synthesized
tgctatttctttgttttcccac

SEQ ID NO: 14160 - DNA, 22 bp, Artificial Sequence
  chemically synthesized
ctatttctttgttttcccactt

SEQ ID NO: 14161 - DNA, 22 bp, Artificial Sequence
  chemically synthesized
tttctttgttttcccactttta

SEQ ID NO: 14162 - DNA, 22 bp, Artificial Sequence
  chemically synthesized
ctttgttttcccacttttaatt

SEQ ID NO: 14163 - DNA, 22 bp, Artificial Sequence
  chemically synthesized
tttgttttcccacttttaattt

SEQ ID NO: 14164 - DNA, 22 bp, Artificial Sequence
  chemically synthesized
tgttttcccacttttaattttt

SEQ ID NO: 14165 - DNA, 22 bp, Artificial Sequence
  chemically synthesized
gttttcccacttttaatttttt

SEQ ID NO: 14166 - DNA, 22 bp, Artificial Sequence
  chemically synthesized
ttttcccacttttaattttttt

SEQ ID NO: 14167 - DNA, 22 bp, Artificial Sequence
  chemically synthesized
tcccacttttaatttttttaaa

SEQ ID NO: 14168 - DNA, 22 bp, Artificial Sequence
  chemically synthesized
cccacttttaatttttttaaac

SEQ ID NO: 14169 - DNA, 22 bp, Artificial Sequence
  chemically synthesized
ccacttttaatttttttaaacc

SEQ ID NO: 14170 - DNA, 22 bp, Artificial Sequence
  chemically synthesized
ttaatttttttaaaccaaggag

SEQ ID NO: 14171 - DNA, 22 bp, Artificial Sequence
  chemically synthesized
taatttttttaaaccaaggaga

SEQ ID NO: 14172 - DNA, 22 bp, Artificial Sequence
  chemically synthesized
aatttttttaaaccaaggagat

SEQ ID NO: 14173 - DNA, 22 bp, Artificial Sequence
  chemically synthesized
atttttttaaaccaaggagatg

SEQ ID NO: 14174 - DNA, 22 bp, Artificial Sequence
  chemically synthesized
ttttaaaccaaggagatgaatg

SEQ ID NO: 14175 - DNA, 22 bp, Artificial Sequence
  chemically synthesized
tttaaaccaaggagatgaatgt

SEQ ID NO: 14176 - DNA, 22 bp, Artificial Sequence
  chemically synthesized
ttaaaccaaggagatgaatgtt

SEQ ID NO: 14177 - DNA, 22 bp, Artificial Sequence
  chemically synthesized
taaaccaaggagatgaatgttt

SEQ ID NO: 14178 - DNA, 22 bp, Artificial Sequence
  chemically synthesized
aaaccaaggagatgaatgtttt

SEQ ID NO: 14179 - DNA, 22 bp, Artificial Sequence
  chemically synthesized
aaccaaggagatgaatgttttc

SEQ ID NO: 14180 - DNA, 22 bp, Artificial Sequence
  chemically synthesized
tctaacaggaattacatgacca

SEQ ID NO: 14181 - DNA, 22 bp, Artificial Sequence
  chemically synthesized
ctaacaggaattacatgaccaa

SEQ ID NO: 14182 - DNA, 22 bp, Artificial Sequence
  chemically synthesized
taacaggaattacatgaccaaa

SEQ ID NO: 14183 - DNA, 22 bp, Artificial Sequence
  chemically synthesized
acaggaattacatgaccaaatc

SEQ ID NO: 14184 - DNA, 22 bp, Artificial Sequence
  chemically synthesized
catgaccaaatcatgaactgaa

SEQ ID NO: 14185 - DNA, 22 bp, Artificial Sequence
  chemically synthesized
aacagtgtttattaaacataaa

SEQ ID NO: 14186 - DNA, 22 bp, Artificial Sequence
  chemically synthesized
attaaacataaatgcatcataa

SEQ ID NO: 14187 - DNA, 22 bp, Artificial Sequence
  chemically synthesized
ttaaacataaatgcatcataag

SEQ ID NO: 14188 - DNA, 22 bp, Artificial Sequence
  chemically synthesized
aacataaatgcatcataagcat

SEQ ID NO: 14189 - DNA, 22 bp, Artificial Sequence
  chemically synthesized
tcgatctatttagttttaaaaa

SEQ ID NO: 14190 - DNA, 22 bp, Artificial Sequence
  chemically synthesized
tttagttttaaaaatgaagaag

SEQ ID NO: 14191 - DNA, 22 bp, Artificial Sequence
  chemically synthesized
agttttaaaaatgaagaagaag

SEQ ID NO: 14192 - DNA, 22 bp, Artificial Sequence
  chemically synthesized
gttttaaaaatgaagaagaaga

SEQ ID NO: 14193 - DNA, 22 bp, Artificial Sequence
  chemically synthesized
taaaaatgaagaagaagaaaac

SEQ ID NO: 14194 - DNA, 22 bp, Artificial Sequence
  chemically synthesized
aaaaatgaagaagaagaaaacc

SEQ ID NO: 14195 - DNA, 22 bp, Artificial Sequence
  chemically synthesized
aaaatgaagaagaagaaaacct

SEQ ID NO: 14196 - DNA, 22 bp, Artificial Sequence
  chemically synthesized
gctaacaaagaaccagtactta

SEQ ID NO: 14197 - DNA, 22 bp, Artificial Sequence
  chemically synthesized
acaaagaaccagtacttaccaa

SEQ ID NO: 14198 - DNA, 22 bp, Artificial Sequence
  chemically synthesized
accaacctgcgtgctggctgtt

SEQ ID NO: 14199 - DNA, 22 bp, Artificial Sequence
  chemically synthesized
ccaacctgcgtgctggctgtta

SEQ ID NO: 14200 - DNA, 22 bp, Artificial Sequence
  chemically synthesized
cgtgctggctgttagactcttc

SEQ ID NO: 14201 - DNA, 22 bp, Artificial Sequence
  chemically synthesized
gctgttagactcttcaatattg

SEQ ID NO: 14202 - DNA, 22 bp, Artificial Sequence
  chemically synthesized
ttagactcttcaatattgctgt

SEQ ID NO: 14203 - DNA, 22 bp, Artificial Sequence
  chemically synthesized
gactcttcaatattgctgtcaa

SEQ ID NO: 14204 - DNA, 22 bp, Artificial Sequence
  chemically synthesized
ttcaatattgctgtcaaatcat

SEQ ID NO: 14205 - DNA, 22 bp, Artificial Sequence
  chemically synthesized
caatattgctgtcaaatcatgt

SEQ ID NO: 14206 - DNA, 22 bp, Artificial Sequence
  chemically synthesized
aatattgctgtcaaatcatgta

SEQ ID NO: 14207 - DNA, 22 bp, Artificial Sequence
  chemically synthesized
ctgtcaaatcatgtaatcaaaa

SEQ ID NO: 14208 - DNA, 22 bp, Artificial Sequence
  chemically synthesized
tcaaatcatgtaatcaaaattt

SEQ ID NO: 14209 - DNA, 22 bp, Artificial Sequence
  chemically synthesized
agtgaagaagacagcatcagat

SEQ ID NO: 14210 - DNA, 22 bp, Artificial Sequence
  chemically synthesized
gtgaagaagacagcatcagata

SEQ ID NO: 14211 - DNA, 22 bp, Artificial Sequence
  chemically synthesized
ctatatctaaaaggcaagcata

SEQ ID NO: 14212 - DNA, 22 bp, Artificial Sequence
  chemically synthesized
tatatctaaaaggcaagcatac

SEQ ID NO: 14213 - DNA, 22 bp, Artificial Sequence
  chemically synthesized
tatctaaaaggcaagcatactc

SEQ ID NO: 14214 - DNA, 22 bp, Artificial Sequence
  chemically synthesized
aaaggcaagcatactcaatgta

SEQ ID NO: 14215 - DNA, 22 bp, Artificial Sequence
  chemically synthesized
aatgtattttaaaaaaggaaac

SEQ ID NO: 14216 - DNA, 22 bp, Artificial Sequence
  chemically synthesized
taaaaaaggaaacaaacctgta

SEQ ID NO: 14217 - DNA, 22 bp, Artificial Sequence
  chemically synthesized
aaaaaaggaaacaaacctgtac

SEQ ID NO: 14218 - DNA, 22 bp, Artificial Sequence
  chemically synthesized
aaaaaggaaacaaacctgtaca

SEQ ID NO: 14219 - DNA, 22 bp, Artificial Sequence
  chemically synthesized
tacattcagcactgagtagata

SEQ ID NO: 14220 - DNA, 22 bp, Artificial Sequence
  chemically synthesized
agcactgagtagatatcctaaa

SEQ ID NO: 14221 - DNA, 22 bp, Artificial Sequence
  chemically synthesized
agtagatatcctaaaaggcaga

SEQ ID NO: 14222 - DNA, 22 bp, Artificial Sequence
  chemically synthesized
aaaggcagatggtgatgaggcc

SEQ ID NO: 14223 - DNA, 22 bp, Artificial Sequence
  chemically synthesized
gtgattctgccatgatcatgtt

SEQ ID NO: 14224 - DNA, 22 bp, Artificial Sequence
  chemically synthesized
tgccatgatcatgttcacgcgc

SEQ ID NO: 14225 - DNA, 22 bp, Artificial Sequence
  chemically synthesized
ccatgatcatgttcacgcgctg

SEQ ID NO: 14226 - DNA, 22 bp, Artificial Sequence
  chemically synthesized
acgcgctgcataacctttgcta

SEQ ID NO: 14227 - DNA, 22 bp, Artificial Sequence
  chemically synthesized
cataacctttgctagcagattg

SEQ ID NO: 14228 - DNA, 22 bp, Artificial Sequence
  chemically synthesized
tgctagcagattgtgaaagtgg

SEQ ID NO: 14229 - DNA, 22 bp, Artificial Sequence
  chemically synthesized
gctagcagattgtgaaagtggt

SEQ ID NO: 14230 - DNA, 20 bp, Artificial Sequence
  chemically synthesized
tttagacaaacgtggttttt

SEQ ID NO: 14231 - DNA, 20 bp, Artificial Sequence
  chemically synthesized
aaacgtggtttttgagtcca

SEQ ID NO: 14232 - DNA, 20 bp, Artificial Sequence
  chemically synthesized
tggtttttgagtccaaagat

SEQ ID NO: 14233 - DNA, 20 bp, Artificial Sequence
  chemically synthesized
ggtttttgagtccaaagatc

SEQ ID NO: 14234 - DNA, 20 bp, Artificial Sequence
  chemically synthesized
gtttttgagtccaaagatca

SEQ ID NO: 14235 - DNA, 20 bp, Artificial Sequence
  chemically synthesized
ttgagtccaaagatcagggc

SEQ ID NO: 14236 - DNA, 20 bp, Artificial Sequence
  chemically synthesized
tgagtccaaagatcagggct

SEQ ID NO: 14237 - DNA, 20 bp, Artificial Sequence
  chemically synthesized
ggctgggttgacctgaatac

SEQ ID NO: 14238 - DNA, 20 bp, Artificial Sequence
  chemically synthesized
gttgacctgaatactggata

SEQ ID NO: 14239 - DNA, 20 bp, Artificial Sequence
  chemically synthesized
ttgacctgaatactggatac

SEQ ID NO: 14240 - DNA, 20 bp, Artificial Sequence
  chemically synthesized
tgacctgaatactggataca

SEQ ID NO: 14241 - DNA, 20 bp, Artificial Sequence
  chemically synthesized
tggatacagggcatataaaa

SEQ ID NO: 14242 - DNA, 20 bp, Artificial Sequence
  chemically synthesized
ggatacagggcatataaaac

SEQ ID NO: 14243 - DNA, 20 bp, Artificial Sequence
  chemically synthesized
gatacagggcatataaaaca

SEQ ID NO: 14244 - DNA, 20 bp, Artificial Sequence
  chemically synthesized
atacagggcatataaaacag

SEQ ID NO: 14245 - DNA, 20 bp, Artificial Sequence
  chemically synthesized
agggcatataaaacaggggc

SEQ ID NO: 14246 - DNA, 20 bp, Artificial Sequence
  chemically synthesized
gggcatataaaacaggggca

SEQ ID NO: 14247 - DNA, 20 bp, Artificial Sequence
  chemically synthesized
tataaaacaggggcaaggca

SEQ ID NO: 14248 - DNA, 20 bp, Artificial Sequence
  chemically synthesized
aggggcaaggcacagactca

SEQ ID NO: 14249 - DNA, 20 bp, Artificial Sequence
  chemically synthesized
ggcaaggcacagactcatag

SEQ ID NO: 14250 - DNA, 20 bp, Artificial Sequence
  chemically synthesized
caaggcacagactcatagca

SEQ ID NO: 14251 - DNA, 20 bp, Artificial Sequence
  chemically synthesized
atagcagagcaatcaccacc

SEQ ID NO: 14252 - DNA, 20 bp, Artificial Sequence
  chemically synthesized
agagcaatcaccaccaagcc

SEQ ID NO: 14253 - DNA, 20 bp, Artificial Sequence
  chemically synthesized
accaagcctggaataactgc

SEQ ID NO: 14254 - DNA, 20 bp, Artificial Sequence
  chemically synthesized
ccaagcctggaataactgca

SEQ ID NO: 14255 - DNA, 20 bp, Artificial Sequence
  chemically synthesized
caagcctggaataactgcaa

SEQ ID NO: 14256 - DNA, 20 bp, Artificial Sequence
  chemically synthesized
ggctctgctgacatcttcct

SEQ ID NO: 14257 - DNA, 20 bp, Artificial Sequence
  chemically synthesized
gctctgctgacatcttcctg

SEQ ID NO: 14258 - DNA, 20 bp, Artificial Sequence
  chemically synthesized
tgacatcttcctgaggtgcc

SEQ ID NO: 14259 - DNA, 20 bp, Artificial Sequence
  chemically synthesized
gacatcttcctgaggtgcca

SEQ ID NO: 14260 - DNA, 20 bp, Artificial Sequence
  chemically synthesized
tcctgaggtgccaaggaaat

SEQ ID NO: 14261 - DNA, 20 bp, Artificial Sequence
  chemically synthesized
cctgaggtgccaaggaaatg

SEQ ID NO: 14262 - DNA, 20 bp, Artificial Sequence
  chemically synthesized
aggtgccaaggaaatgagga

SEQ ID NO: 14263 - DNA, 20 bp, Artificial Sequence
  chemically synthesized
gtgccaaggaaatgaggatg

SEQ ID NO: 14264 - DNA, 20 bp, Artificial Sequence
  chemically synthesized
tgccaaggaaatgaggatgg

SEQ ID NO: 14265 - DNA, 20 bp, Artificial Sequence
  chemically synthesized
caaggaaatgaggatggagg

SEQ ID NO: 14266 - DNA, 20 bp, Artificial Sequence
  chemically synthesized
aaggaaatgaggatggagga

SEQ ID NO: 14267 - DNA, 20 bp, Artificial Sequence
  chemically synthesized
atgaatgttctccatgactt

SEQ ID NO: 14268 - DNA, 20 bp, Artificial Sequence
  chemically synthesized
tgaatgttctccatgacttt

SEQ ID NO: 14269 - DNA, 20 bp, Artificial Sequence
  chemically synthesized
ttctccatgactttgggatc

SEQ ID NO: 14270 - DNA, 20 bp, Artificial Sequence
  chemically synthesized
tccagtcaacacattacctc

SEQ ID NO: 14271 - DNA, 20 bp, Artificial Sequence
  chemically synthesized
ccagtcaacacattacctcc

SEQ ID NO: 14272 - DNA, 20 bp, Artificial Sequence
  chemically synthesized
ttacctccaggtgaattacc

SEQ ID NO: 14273 - DNA, 20 bp, Artificial Sequence
  chemically synthesized
aggtgaattaccaagactcc

SEQ ID NO: 14274 - DNA, 20 bp, Artificial Sequence
  chemically synthesized
ggtgaattaccaagactccc

SEQ ID NO: 14275 - DNA, 20 bp, Artificial Sequence
  chemically synthesized
attaccaagactcccaggac

SEQ ID NO: 14276 - DNA, 20 bp, Artificial Sequence
  chemically synthesized
ctcccaggactggttcatct

SEQ ID NO: 14277 - DNA, 20 bp, Artificial Sequence
  chemically synthesized
catcttggtgtccgtgatcg

SEQ ID NO: 14278 - DNA, 20 bp, Artificial Sequence
  chemically synthesized
gtgtccgtgatcgcagacct

SEQ ID NO: 14279 - DNA, 20 bp, Artificial Sequence
  chemically synthesized
tgtccgtgatcgcagacctc

SEQ ID NO: 14280 - DNA, 20 bp, Artificial Sequence
  chemically synthesized
tctacgtcctcttccccatc

SEQ ID NO: 14281 - DNA, 20 bp, Artificial Sequence
  chemically synthesized
tccccatctggttccatctt

SEQ ID NO: 14282 - DNA, 20 bp, Artificial Sequence
  chemically synthesized
ccccatctggttccatcttc

SEQ ID NO: 14283 - DNA, 20 bp, Artificial Sequence
  chemically synthesized
catctggttccatcttcagg

SEQ ID NO: 14284 - DNA, 20 bp, Artificial Sequence
  chemically synthesized
gttccatcttcaggaagctg

SEQ ID NO: 14285 - DNA, 20 bp, Artificial Sequence
  chemically synthesized
ttccatcttcaggaagctgt

SEQ ID NO: 14286 - DNA, 20 bp, Artificial Sequence
  chemically synthesized
ctgtgggcattaaactcctt

SEQ ID NO: 14287 - DNA, 20 bp, Artificial Sequence
  chemically synthesized
tgtgggcattaaactccttt

SEQ ID NO: 14288 - DNA, 20 bp, Artificial Sequence
  chemically synthesized
gggcattaaactcctttggg

SEQ ID NO: 14289 - DNA, 20 bp, Artificial Sequence
  chemically synthesized
ctcctttgggtagctgtgat

SEQ ID NO: 14290 - DNA, 20 bp, Artificial Sequence
  chemically synthesized
cctttgggtagctgtgattg

SEQ ID NO: 14291 - DNA, 20 bp, Artificial Sequence
  chemically synthesized
gggtagctgtgattggagac

SEQ ID NO: 14292 - DNA, 20 bp, Artificial Sequence
  chemically synthesized
actggctcaacctcgtcttt

SEQ ID NO: 14293 - DNA, 20 bp, Artificial Sequence
  chemically synthesized
ggctcaacctcgtctttaag

SEQ ID NO: 14294 - DNA, 20 bp, Artificial Sequence
  chemically synthesized
caacctcgtctttaagtggt

SEQ ID NO: 14295 - DNA, 20 bp, Artificial Sequence
  chemically synthesized
tttaagtggtaagaaccata

SEQ ID NO: 14296 - DNA, 20 bp, Artificial Sequence
  chemically synthesized
taagtggtaagaaccatata

SEQ ID NO: 14297 - DNA, 20 bp, Artificial Sequence
  chemically synthesized
agtggtaagaaccatataga

SEQ ID NO: 14298 - DNA, 20 bp, Artificial Sequence
  chemically synthesized
gtggtaagaaccatatagag

SEQ ID NO: 14299 - DNA, 20 bp, Artificial Sequence
  chemically synthesized
ggtaagaaccatatagagag

SEQ ID NO: 14300 - DNA, 20 bp, Artificial Sequence
  chemically synthesized
gaaccatatagagaggagat

SEQ ID NO: 14301 - DNA, 20 bp, Artificial Sequence
  chemically synthesized
catatagagaggagatcagc

SEQ ID NO: 14302 - DNA, 20 bp, Artificial Sequence
  chemically synthesized
agagaggagatcagcaagaa

SEQ ID NO: 14303 - DNA, 20 bp, Artificial Sequence
  chemically synthesized
agaggagatcagcaagaaaa

SEQ ID NO: 14304 - DNA, 20 bp, Artificial Sequence
  chemically synthesized
gaggagatcagcaagaaaag

SEQ ID NO: 14305 - DNA, 20 bp, Artificial Sequence
  chemically synthesized
agatcagcaagaaaagaggc

SEQ ID NO: 14306 - DNA, 20 bp, Artificial Sequence
  chemically synthesized
ctctcgcaatgtctgtccat

SEQ ID NO: 14307 - DNA, 20 bp, Artificial Sequence
  chemically synthesized
tcgcaatgtctgtccatcag

SEQ ID NO: 14308 - DNA, 20 bp, Artificial Sequence
  chemically synthesized
ccatcagaagttgctttccc

SEQ ID NO: 14309 - DNA, 20 bp, Artificial Sequence
  chemically synthesized
catcagaagttgctttcccc

SEQ ID NO: 14310 - DNA, 20 bp, Artificial Sequence
  chemically synthesized
gttgctttccccaggctatt

SEQ ID NO: 14311 - DNA, 20 bp, Artificial Sequence
  chemically synthesized
ttgctttccccaggctattc

SEQ ID NO: 14312 - DNA, 20 bp, Artificial Sequence
  chemically synthesized
ctttccccaggctattcagg

SEQ ID NO: 14313 - DNA, 20 bp, Artificial Sequence
  chemically synthesized
ccaggctattcaggaagcca

SEQ ID NO: 14314 - DNA, 20 bp, Artificial Sequence
  chemically synthesized
caggctattcaggaagccac

SEQ ID NO: 14315 - DNA, 20 bp, Artificial Sequence
  chemically synthesized
ccaacccctctctctgactt

SEQ ID NO: 14316 - DNA, 20 bp, Artificial Sequence
  chemically synthesized
gactttggatcatctacata

SEQ ID NO: 14317 - DNA, 20 bp, Artificial Sequence
  chemically synthesized
actttggatcatctacataa

SEQ ID NO: 14318 - DNA, 20 bp, Artificial Sequence
  chemically synthesized
ctttggatcatctacataaa

SEQ ID NO: 14319 - DNA, 20 bp, Artificial Sequence
  chemically synthesized
tttggatcatctacataaag

SEQ ID NO: 14320 - DNA, 20 bp, Artificial Sequence
  chemically synthesized
ttggatcatctacataaagg

SEQ ID NO: 14321 - DNA, 20 bp, Artificial Sequence
  chemically synthesized
gatcatctacataaaggggg

SEQ ID NO: 14322 - DNA, 20 bp, Artificial Sequence
  chemically synthesized
atctacataaagggggaaga

SEQ ID NO: 14323 - DNA, 20 bp, Artificial Sequence
  chemically synthesized
gaagacagaaaaaatcctac

SEQ ID NO: 14324 - DNA, 20 bp, Artificial Sequence
  chemically synthesized
acagaaaaaatcctaccagt

SEQ ID NO: 14325 - DNA, 20 bp, Artificial Sequence
  chemically synthesized
ctaccagtgagttgaaaata

SEQ ID NO: 14326 - DNA, 20 bp, Artificial Sequence
  chemically synthesized
taccagtgagttgaaaatac

SEQ ID NO: 14327 - DNA, 20 bp, Artificial Sequence
  chemically synthesized
agtgagttgaaaatacagga

SEQ ID NO: 14328 - DNA, 20 bp, Artificial Sequence
  chemically synthesized
acaggaaagcctatttcata

SEQ ID NO: 14329 - DNA, 20 bp, Artificial Sequence
  chemically synthesized
caggaaagcctatttcatat

SEQ ID NO: 14330 - DNA, 20 bp, Artificial Sequence
  chemically synthesized
agcctatttcatatgggtta

SEQ ID NO: 14331 - DNA, 20 bp, Artificial Sequence
  chemically synthesized
gcctatttcatatgggttaa

SEQ ID NO: 14332 - DNA, 20 bp, Artificial Sequence
  chemically synthesized
cctatttcatatgggttaaa

SEQ ID NO: 14333 - DNA, 20 bp, Artificial Sequence
  chemically synthesized
atttcatatgggttaaaggg

SEQ ID NO: 14334 - DNA, 20 bp, Artificial Sequence
  chemically synthesized
tttcatatgggttaaagggt

SEQ ID NO: 14335 - DNA, 20 bp, Artificial Sequence
  chemically synthesized
atatgggttaaagggtagga

SEQ ID NO: 14336 - DNA, 20 bp, Artificial Sequence
  chemically synthesized
ggacagttgaatttcgtgaa

SEQ ID NO: 14337 - DNA, 20 bp, Artificial Sequence
  chemically synthesized
ttgaatttcgtgaaaagtct

SEQ ID NO: 14338 - DNA, 20 bp, Artificial Sequence
  chemically synthesized
cgtgaaaagtctgagttata

SEQ ID NO: 14339 - DNA, 20 bp, Artificial Sequence
  chemically synthesized
gtgaaaagtctgagttatat

SEQ ID NO: 14340 - DNA, 20 bp, Artificial Sequence
  chemically synthesized
gtctgagttatataggcttt

SEQ ID NO: 14341 - DNA, 20 bp, Artificial Sequence
  chemically synthesized
agttatataggctttgagca

SEQ ID NO: 14342 - DNA, 20 bp, Artificial Sequence
  chemically synthesized
ttatataggctttgagcaaa

SEQ ID NO: 14343 - DNA, 20 bp, Artificial Sequence
  chemically synthesized
ctttgagcaaagagttttat

SEQ ID NO: 14344 - DNA, 20 bp, Artificial Sequence
  chemically synthesized
caaagagttttattagtatg

SEQ ID NO: 14345 - DNA, 20 bp, Artificial Sequence
  chemically synthesized
agagttttattagtatgaag

SEQ ID NO: 14346 - DNA, 20 bp, Artificial Sequence
  chemically synthesized
gttttattagtatgaagcag

SEQ ID NO: 14347 - DNA, 20 bp, Artificial Sequence
  chemically synthesized
tttattagtatgaagcagaa

SEQ ID NO: 14348 - DNA, 20 bp, Artificial Sequence
  chemically synthesized
ttattagtatgaagcagaag

SEQ ID NO: 14349 - DNA, 20 bp, Artificial Sequence
  chemically synthesized
gaagcagaagaggtaacata

SEQ ID NO: 14350 - DNA, 20 bp, Artificial Sequence
  chemically synthesized
cagaagaggtaacataaaga

SEQ ID NO: 14351 - DNA, 20 bp, Artificial Sequence
  chemically synthesized
gtaacataaagaaagatgta

SEQ ID NO: 14352 - DNA, 20 bp, Artificial Sequence
  chemically synthesized
taacataaagaaagatgtat

SEQ ID NO: 14353 - DNA, 20 bp, Artificial Sequence
  chemically synthesized
aacataaagaaagatgtatg

SEQ ID NO: 14354 - DNA, 20 bp, Artificial Sequence
  chemically synthesized
taaagaaagatgtatggggc

SEQ ID NO: 14355 - DNA, 20 bp, Artificial Sequence
  chemically synthesized
aaagaaagatgtatggggcc

SEQ ID NO: 14356 - DNA, 20 bp, Artificial Sequence
  chemically synthesized
aagatgtatggggccaggca

SEQ ID NO: 14357 - DNA, 20 bp, Artificial Sequence
  chemically synthesized
atgtatggggccaggcatgg

SEQ ID NO: 14358 - DNA, 20 bp, Artificial Sequence
  chemically synthesized
gtggctcacacctgtaatcc

SEQ ID NO: 14359 - DNA, 20 bp, Artificial Sequence
  chemically synthesized
cacctgtaatcccagcactt

SEQ ID NO: 14360 - DNA, 20 bp, Artificial Sequence
  chemically synthesized
acctgtaatcccagcacttt

SEQ ID NO: 14361 - DNA, 20 bp, Artificial Sequence
  chemically synthesized
ctgtaatcccagcactttgg

SEQ ID NO: 14362 - DNA, 20 bp, Artificial Sequence
  chemically synthesized
tgtaatcccagcactttggg

SEQ ID NO: 14363 - DNA, 20 bp, Artificial Sequence
  chemically synthesized
tcccagcactttgggaggcc

SEQ ID NO: 14364 - DNA, 20 bp, Artificial Sequence
  chemically synthesized
cccagcactttgggaggccg

SEQ ID NO: 14365 - DNA, 20 bp, Artificial Sequence
  chemically synthesized
agcactttgggaggccgagg

SEQ ID NO: 14366 - DNA, 20 bp, Artificial Sequence
  chemically synthesized
gcactttgggaggccgaggt

SEQ ID NO: 14367 - DNA, 20 bp, Artificial Sequence
  chemically synthesized
cgaggtgggcgaatcactcc

SEQ ID NO: 14368 - DNA, 20 bp, Artificial Sequence
  chemically synthesized
gaggtgggcgaatcactcct

SEQ ID NO: 14369 - DNA, 20 bp, Artificial Sequence
  chemically synthesized
gaatcactcctgggtgaact

SEQ ID NO: 14370 - DNA, 20 bp, Artificial Sequence
  chemically synthesized
aatcactcctgggtgaactc

SEQ ID NO: 14371 - DNA, 20 bp, Artificial Sequence
  chemically synthesized
tcactcctgggtgaactcag

SEQ ID NO: 14372 - DNA, 20 bp, Artificial Sequence
  chemically synthesized
ctgggtgaactcaggagttc

SEQ ID NO: 14373 - DNA, 20 bp, Artificial Sequence
  chemically synthesized
tgaactcaggagttcaagac

SEQ ID NO: 14374 - DNA, 20 bp, Artificial Sequence
  chemically synthesized
tcaggagttcaagaccagcc

SEQ ID NO: 14375 - DNA, 20 bp, Artificial Sequence
  chemically synthesized
caggagttcaagaccagcct

SEQ ID NO: 14376 - DNA, 20 bp, Artificial Sequence
  chemically synthesized
caagaccagcctgggcaaca

SEQ ID NO: 14377 - DNA, 20 bp, Artificial Sequence
  chemically synthesized
tacaaaaacattacgaaaat

SEQ ID NO: 14378 - DNA, 20 bp, Artificial Sequence
  chemically synthesized
aaaacattacgaaaattagc

SEQ ID NO: 14379 - DNA, 20 bp, Artificial Sequence
  chemically synthesized
aaacattacgaaaattagct

SEQ ID NO: 14380 - DNA, 20 bp, Artificial Sequence
  chemically synthesized
cgaaaattagctgggcgtgt

SEQ ID NO: 14381 - DNA, 20 bp, Artificial Sequence
  chemically synthesized
agctgggcgtgttggtgctg

SEQ ID NO: 14382 - DNA, 20 bp, Artificial Sequence
  chemically synthesized
gcgtgttggtgctgtagtcc

SEQ ID NO: 14383 - DNA, 20 bp, Artificial Sequence
  chemically synthesized
gtgctgtagtcccagctact

SEQ ID NO: 14384 - DNA, 20 bp, Artificial Sequence
  chemically synthesized
tgctgtagtcccagctactc

SEQ ID NO: 14385 - DNA, 20 bp, Artificial Sequence
  chemically synthesized
ctgtagtcccagctactcag

SEQ ID NO: 14386 - DNA, 20 bp, Artificial Sequence
  chemically synthesized
tgtagtcccagctactcagg

SEQ ID NO: 14387 - DNA, 20 bp, Artificial Sequence
  chemically synthesized
tcccagctactcaggaggct

SEQ ID NO: 14388 - DNA, 20 bp, Artificial Sequence
  chemically synthesized
cccagctactcaggaggctg

SEQ ID NO: 14389 - DNA, 20 bp, Artificial Sequence
  chemically synthesized
gctactcaggaggctgaggt

SEQ ID NO: 14390 - DNA, 20 bp, Artificial Sequence
  chemically synthesized
tactcaggaggctgaggtga

SEQ ID NO: 14391 - DNA, 20 bp, Artificial Sequence
  chemically synthesized
actcaggaggctgaggtgag

SEQ ID NO: 14392 - DNA, 20 bp, Artificial Sequence
  chemically synthesized
caggaggctgaggtgagagg

SEQ ID NO: 14393 - DNA, 20 bp, Artificial Sequence
  chemically synthesized
ggaggctgaggtgagaggcg

SEQ ID NO: 14394 - DNA, 20 bp, Artificial Sequence
  chemically synthesized
gaggctgaggtgagaggcgg

SEQ ID NO: 14395 - DNA, 20 bp, Artificial Sequence
  chemically synthesized
ggctgaggtgagaggcggag

SEQ ID NO: 14396 - DNA, 20 bp, Artificial Sequence
  chemically synthesized
gctgaggtgagaggcggagg

SEQ ID NO: 14397 - DNA, 20 bp, Artificial Sequence
  chemically synthesized
gtgagaggcggaggaggttg

SEQ ID NO: 14398 - DNA, 20 bp, Artificial Sequence
  chemically synthesized
gaggcggaggaggttgcagt

SEQ ID NO: 14399 - DNA, 20 bp, Artificial Sequence
  chemically synthesized
ggaggaggttgcagtgagtc

SEQ ID NO: 14400 - DNA, 20 bp, Artificial Sequence
  chemically synthesized
aagatcatgccactgcactc

SEQ ID NO: 14401 - DNA, 20 bp, Artificial Sequence
  chemically synthesized
catgccactgcactccagcc

SEQ ID NO: 14402 - DNA, 20 bp, Artificial Sequence
  chemically synthesized
atgccactgcactccagcct

SEQ ID NO: 14403 - DNA, 20 bp, Artificial Sequence
  chemically synthesized
ctgcactccagcctgggcaa

SEQ ID NO: 14404 - DNA, 20 bp, Artificial Sequence
  chemically synthesized
gcactccagcctgggcaaca

SEQ ID NO: 14405 - DNA, 20 bp, Artificial Sequence
  chemically synthesized
tccagcctgggcaacagagt

SEQ ID NO: 14406 - DNA, 20 bp, Artificial Sequence
  chemically synthesized
cctgtctcaaaaaaaaaaaa

SEQ ID NO: 14407 - DNA, 20 bp, Artificial Sequence
  chemically synthesized
tctcaaaaaaaaaaaaaaga

SEQ ID NO: 14408 - DNA, 20 bp, Artificial Sequence
  chemically synthesized
tgatgtatgctgtatgaaaa

SEQ ID NO: 14409 - DNA, 20 bp, Artificial Sequence
  chemically synthesized
gatgtatgctgtatgaaaaa

SEQ ID NO: 14410 - DNA, 20 bp, Artificial Sequence
  chemically synthesized
gtatgaaaaaaggaaacaca

SEQ ID NO: 14411 - DNA, 20 bp, Artificial Sequence
  chemically synthesized
gaaacacacagatgattcaa

SEQ ID NO: 14412 - DNA, 20 bp, Artificial Sequence
  chemically synthesized
tgattcaacagcctgttttg

SEQ ID NO: 14413 - DNA, 20 bp, Artificial Sequence
  chemically synthesized
gattcaacagcctgttttgt

SEQ ID NO: 14414 - DNA, 20 bp, Artificial Sequence
  chemically synthesized
attcaacagcctgttttgtg

SEQ ID NO: 14415 - DNA, 20 bp, Artificial Sequence
  chemically synthesized
ctgttttgtggggtaatgaa

SEQ ID NO: 14416 - DNA, 20 bp, Artificial Sequence
  chemically synthesized
ggggtaatgaaaagtcaccc

SEQ ID NO: 14417 - DNA, 20 bp, Artificial Sequence
  chemically synthesized
gggtaatgaaaagtcaccct

SEQ ID NO: 14418 - DNA, 20 bp, Artificial Sequence
  chemically synthesized
tgaaaagtcaccctgggaac

SEQ ID NO: 14419 - DNA, 20 bp, Artificial Sequence
  chemically synthesized
gaaaagtcaccctgggaact

SEQ ID NO: 14420 - DNA, 20 bp, Artificial Sequence
  chemically synthesized
tcaccctgggaactgggctc

SEQ ID NO: 14421 - DNA, 20 bp, Artificial Sequence
  chemically synthesized
acccaccaactacatgtcct

SEQ ID NO: 14422 - DNA, 20 bp, Artificial Sequence
  chemically synthesized
accaactacatgtccttggc

SEQ ID NO: 14423 - DNA, 20 bp, Artificial Sequence
  chemically synthesized
gcaagtcatatcaattatct

SEQ ID NO: 14424 - DNA, 20 bp, Artificial Sequence
  chemically synthesized
tctgttttataatctacaaa

SEQ ID NO: 14425 - DNA, 20 bp, Artificial Sequence
  chemically synthesized
ctgttttataatctacaaat

SEQ ID NO: 14426 - DNA, 20 bp, Artificial Sequence
  chemically synthesized
atctacaaataggttatctc

SEQ ID NO: 14427 - DNA, 20 bp, Artificial Sequence
  chemically synthesized
tacaaataggttatctctgg

SEQ ID NO: 14428 - DNA, 20 bp, Artificial Sequence
  chemically synthesized
tctggcagcttaataataat

SEQ ID NO: 14429 - DNA, 20 bp, Artificial Sequence
  chemically synthesized
ctggcagcttaataataatc

SEQ ID NO: 14430 - DNA, 20 bp, Artificial Sequence
  chemically synthesized
tggcagcttaataataatca

SEQ ID NO: 14431 - DNA, 20 bp, Artificial Sequence
  chemically synthesized
cagggttaacatttattaaa

SEQ ID NO: 14432 - DNA, 20 bp, Artificial Sequence
  chemically synthesized
atttattaaacagtgtgtgc

SEQ ID NO: 14433 - DNA, 20 bp, Artificial Sequence
  chemically synthesized
tgtgctatgtgcttttctgt

SEQ ID NO: 14434 - DNA, 20 bp, Artificial Sequence
  chemically synthesized
gtgctatgtgcttttctgtg

SEQ ID NO: 14435 - DNA, 20 bp, Artificial Sequence
  chemically synthesized
ctatgtgcttttctgtgagg

SEQ ID NO: 14436 - DNA, 20 bp, Artificial Sequence
  chemically synthesized
gaggtagttactgctattta

SEQ ID NO: 14437 - DNA, 20 bp, Artificial Sequence
  chemically synthesized
gttactgctatttacagaaa

SEQ ID NO: 14438 - DNA, 20 bp, Artificial Sequence
  chemically synthesized
actgctatttacagaaacag

SEQ ID NO: 14439 - DNA, 20 bp, Artificial Sequence
  chemically synthesized
atttacagaaacagtagatg

SEQ ID NO: 14440 - DNA, 20 bp, Artificial Sequence
  chemically synthesized
ttacagaaacagtagatgca

SEQ ID NO: 14441 - DNA, 20 bp, Artificial Sequence
  chemically synthesized
aaacagtagatgcagagacc

SEQ ID NO: 14442 - DNA, 20 bp, Artificial Sequence
  chemically synthesized
aacagtagatgcagagacca

SEQ ID NO: 14443 - DNA, 20 bp, Artificial Sequence
  chemically synthesized
gatgcagagaccaaggtgct

SEQ ID NO: 14444 - DNA, 20 bp, Artificial Sequence
  chemically synthesized
aaggtgctgagttaaatgat

SEQ ID NO: 14445 - DNA, 20 bp, Artificial Sequence
  chemically synthesized
aggtgctgagttaaatgatt

SEQ ID NO: 14446 - DNA, 20 bp, Artificial Sequence
  chemically synthesized
agttaaatgattaggccaac

SEQ ID NO: 14447 - DNA, 20 bp, Artificial Sequence
  chemically synthesized
gttaaatgattaggccaaca

SEQ ID NO: 14448 - DNA, 20 bp, Artificial Sequence
  chemically synthesized
aatgattaggccaacaaggt

SEQ ID NO: 14449 - DNA, 20 bp, Artificial Sequence
  chemically synthesized
caacaaggttagtacatgcc

SEQ ID NO: 14450 - DNA, 20 bp, Artificial Sequence
  chemically synthesized
aaggttagtacatgccgagc

SEQ ID NO: 14451 - DNA, 20 bp, Artificial Sequence
  chemically synthesized
aggttagtacatgccgagcc

SEQ ID NO: 14452 - DNA, 20 bp, Artificial Sequence
  chemically synthesized
tagtacatgccgagccagga

SEQ ID NO: 14453 - DNA, 20 bp, Artificial Sequence
  chemically synthesized
tacatgccgagccaggatgg

SEQ ID NO: 14454 - DNA, 20 bp, Artificial Sequence
  chemically synthesized
gccgagccaggatggaagcc

SEQ ID NO: 14455 - DNA, 20 bp, Artificial Sequence
  chemically synthesized
ccgagccaggatggaagccc

SEQ ID NO: 14456 - DNA, 20 bp, Artificial Sequence
  chemically synthesized
agccaggatggaagcccagg

SEQ ID NO: 14457 - DNA, 20 bp, Artificial Sequence
  chemically synthesized
gccaggatggaagcccaggt

SEQ ID NO: 14458 - DNA, 20 bp, Artificial Sequence
  chemically synthesized
aggatggaagcccaggtagg

SEQ ID NO: 14459 - DNA, 20 bp, Artificial Sequence
  chemically synthesized
ggatggaagcccaggtaggc

SEQ ID NO: 14460 - DNA, 20 bp, Artificial Sequence
  chemically synthesized
ggaagcccaggtaggcaggc

SEQ ID NO: 14461 - DNA, 20 bp, Artificial Sequence
  chemically synthesized
ggtaggcaggctggcttccg

SEQ ID NO: 14462 - DNA, 20 bp, Artificial Sequence
  chemically synthesized
cttatgaactatgttacgtc

SEQ ID NO: 14463 - DNA, 20 bp, Artificial Sequence
  chemically synthesized
gtgctgataaactgactctc

SEQ ID NO: 14464 - DNA, 20 bp, Artificial Sequence
  chemically synthesized
tgctgataaactgactctct

SEQ ID NO: 14465 - DNA, 20 bp, Artificial Sequence
  chemically synthesized
gctgataaactgactctctg

SEQ ID NO: 14466 - DNA, 20 bp, Artificial Sequence
  chemically synthesized
tgataaactgactctctggg

SEQ ID NO: 14467 - DNA, 20 bp, Artificial Sequence
  chemically synthesized
taaactgactctctggggag

SEQ ID NO: 14468 - DNA, 20 bp, Artificial Sequence
  chemically synthesized
aaactgactctctggggagc

SEQ ID NO: 14469 - DNA, 20 bp, Artificial Sequence
  chemically synthesized
aactgactctctggggagca

SEQ ID NO: 14470 - DNA, 20 bp, Artificial Sequence
  chemically synthesized
actgactctctggggagcag

SEQ ID NO: 14471 - DNA, 20 bp, Artificial Sequence
  chemically synthesized
actctctggggagcagggga

SEQ ID NO: 14472 - DNA, 20 bp, Artificial Sequence
  chemically synthesized
ggggagcaggggaaagccct

SEQ ID NO: 14473 - DNA, 20 bp, Artificial Sequence
  chemically synthesized
gcaggggaaagccctgagtt

SEQ ID NO: 14474 - DNA, 20 bp, Artificial Sequence
  chemically synthesized
tcacgtaaacattcccattc

SEQ ID NO: 14475 - DNA, 20 bp, Artificial Sequence
  chemically synthesized
tttcttttgtttgtttgttt

SEQ ID NO: 14476 - DNA, 20 bp, Artificial Sequence
  chemically synthesized
ttttgtttgtttgtttgaga

SEQ ID NO: 14477 - DNA, 20 bp, Artificial Sequence
  chemically synthesized
ttgtttgtttgtttgagatg

SEQ ID NO: 14478 - DNA, 20 bp, Artificial Sequence
  chemically synthesized
tggagtctcgcactgttgcc

SEQ ID NO: 14479 - DNA, 20 bp, Artificial Sequence
  chemically synthesized
gtctcgcactgttgcctggc

SEQ ID NO: 14480 - DNA, 20 bp, Artificial Sequence
  chemically synthesized
ctcgcactgttgcctggctg

SEQ ID NO: 14481 - DNA, 20 bp, Artificial Sequence
  chemically synthesized
gttgcctggctggagtgcaa

SEQ ID NO: 14482 - DNA, 20 bp, Artificial Sequence
  chemically synthesized
ggagtgcaatggtgcaatct

SEQ ID NO: 14483 - DNA, 20 bp, Artificial Sequence
  chemically synthesized
cactgcaacctctgcctctc

SEQ ID NO: 14484 - DNA, 20 bp, Artificial Sequence
  chemically synthesized
aacctctgcctctccggttc

SEQ ID NO: 14485 - DNA, 20 bp, Artificial Sequence
  chemically synthesized
ttcaagtgattctcctgcct

SEQ ID NO: 14486 - DNA, 20 bp, Artificial Sequence
  chemically synthesized
ttctcctgcctcagcctccc

SEQ ID NO: 14487 - DNA, 20 bp, Artificial Sequence
  chemically synthesized
tcctgcctcagcctcccaag

SEQ ID NO: 14488 - DNA, 20 bp, Artificial Sequence
  chemically synthesized
gcctcagcctcccaagtagc

SEQ ID NO: 14489 - DNA, 20 bp, Artificial Sequence
  chemically synthesized
cctcagcctcccaagtagct

SEQ ID NO: 14490 - DNA, 20 bp, Artificial Sequence
  chemically synthesized
ctcccaagtagctgggatta

SEQ ID NO: 14491 - DNA, 20 bp, Artificial Sequence
  chemically synthesized
tcccaagtagctgggattac

SEQ ID NO: 14492 - DNA, 20 bp, Artificial Sequence
  chemically synthesized
caggtgcccgccaccatgcc

SEQ ID NO: 14493 - DNA, 20 bp, Artificial Sequence
  chemically synthesized
gctaattttttttgtatttt

SEQ ID NO: 14494 - DNA, 20 bp, Artificial Sequence
  chemically synthesized
aattttttttgtatttttag

SEQ ID NO: 14495 - DNA, 20 bp, Artificial Sequence
  chemically synthesized
ttttttttgtatttttagta

SEQ ID NO: 14496 - DNA, 20 bp, Artificial Sequence
  chemically synthesized
ttgtatttttagtagagaca

SEQ ID NO: 14497 - DNA, 20 bp, Artificial Sequence
  chemically synthesized
catggtttcactatgttgac

SEQ ID NO: 14498 - DNA, 20 bp, Artificial Sequence
  chemically synthesized
atggtttcactatgttgact

SEQ ID NO: 14499 - DNA, 20 bp, Artificial Sequence
  chemically synthesized
tttcactatgttgactaggc

SEQ ID NO: 14500 - DNA, 20 bp, Artificial Sequence
  chemically synthesized
acctcatgatctgcctgcct

SEQ ID NO: 14501 - DNA, 20 bp, Artificial Sequence
  chemically synthesized
ctgcctgccttggcctccct

SEQ ID NO: 14502 - DNA, 20 bp, Artificial Sequence
  chemically synthesized
gccttggcctccctaagtgc

SEQ ID NO: 14503 - DNA, 20 bp, Artificial Sequence
  chemically synthesized
ccttggcctccctaagtgct

SEQ ID NO: 14504 - DNA, 20 bp, Artificial Sequence
  chemically synthesized
ctccctaagtgctaggatta

SEQ ID NO: 14505 - DNA, 20 bp, Artificial Sequence
  chemically synthesized
tccctaagtgctaggattac

SEQ ID NO: 14506 - DNA, 20 bp, Artificial Sequence
  chemically synthesized
agtgctaggattacaggcgt

SEQ ID NO: 14507 - DNA, 20 bp, Artificial Sequence
  chemically synthesized
caggcgtgagccactacacc

SEQ ID NO: 14508 - DNA, 20 bp, Artificial Sequence
  chemically synthesized
gcatgattctaaaaaataaa

SEQ ID NO: 14509 - DNA, 20 bp, Artificial Sequence
  chemically synthesized
ttctaaaaaataaaaagatg

SEQ ID NO: 14510 - DNA, 20 bp, Artificial Sequence
  chemically synthesized
caaacatctgatctccattg

SEQ ID NO: 14511 - DNA, 20 bp, Artificial Sequence
  chemically synthesized
gaagaaccatgcaatctctc

SEQ ID NO: 14512 - DNA, 20 bp, Artificial Sequence
  chemically synthesized
aagaaccatgcaatctctct

SEQ ID NO: 14513 - DNA, 20 bp, Artificial Sequence
  chemically synthesized
atgcaatctctctgggttga

SEQ ID NO: 14514 - DNA, 20 bp, Artificial Sequence
  chemically synthesized
gcaatctctctgggttgata

SEQ ID NO: 14515 - DNA, 20 bp, Artificial Sequence
  chemically synthesized
caatctctctgggttgatag

SEQ ID NO: 14516 - DNA, 20 bp, Artificial Sequence
  chemically synthesized
ctctctgggttgatagaggc

SEQ ID NO: 14517 - DNA, 20 bp, Artificial Sequence
  chemically synthesized
ctctgggttgatagaggcca

SEQ ID NO: 14518 - DNA, 20 bp, Artificial Sequence
  chemically synthesized
gggttgatagaggccagagt

SEQ ID NO: 14519 - DNA, 20 bp, Artificial Sequence
  chemically synthesized
ttgatagaggccagagttag

SEQ ID NO: 14520 - DNA, 20 bp, Artificial Sequence
  chemically synthesized
ttagtggctctccctgattt

SEQ ID NO: 14521 - DNA, 20 bp, Artificial Sequence
  chemically synthesized
tggctctccctgatttcggt

SEQ ID NO: 14522 - DNA, 20 bp, Artificial Sequence
  chemically synthesized
aaatcactattccaccatca

SEQ ID NO: 14523 - DNA, 20 bp, Artificial Sequence
  chemically synthesized
aatcactattccaccatcac

SEQ ID NO: 14524 - DNA, 20 bp, Artificial Sequence
  chemically synthesized
attccaccatcacgggataa

SEQ ID NO: 14525 - DNA, 20 bp, Artificial Sequence
  chemically synthesized
ttccaccatcacgggataaa

SEQ ID NO: 14526 - DNA, 20 bp, Artificial Sequence
  chemically synthesized
gggataaaaggcatcctgac

SEQ ID NO: 14527 - DNA, 20 bp, Artificial Sequence
  chemically synthesized
ataaaaggcatcctgactgg

SEQ ID NO: 14528 - DNA, 20 bp, Artificial Sequence
  chemically synthesized
gcggttgacacctatttcca

SEQ ID NO: 14529 - DNA, 20 bp, Artificial Sequence
  chemically synthesized
gacacctatttccacagtga

SEQ ID NO: 14530 - DNA, 20 bp, Artificial Sequence
  chemically synthesized
tccacagtgaaagatatatc

SEQ ID NO: 14531 - DNA, 20 bp, Artificial Sequence
  chemically synthesized
agatatatctagtactttta

SEQ ID NO: 14532 - DNA, 20 bp, Artificial Sequence
  chemically synthesized
gatatatctagtacttttaa

SEQ ID NO: 14533 - DNA, 20 bp, Artificial Sequence
  chemically synthesized
atatatctagtacttttaaa

SEQ ID NO: 14534 - DNA, 20 bp, Artificial Sequence
  chemically synthesized
tatatctagtacttttaaag

SEQ ID NO: 14535 - DNA, 20 bp, Artificial Sequence
  chemically synthesized
atctagtacttttaaagggg

SEQ ID NO: 14536 - DNA, 20 bp, Artificial Sequence
  chemically synthesized
tagtacttttaaaggggaag

SEQ ID NO: 14537 - DNA, 20 bp, Artificial Sequence
  chemically synthesized
aaaggggaagtggtttgtct

SEQ ID NO: 14538 - DNA, 20 bp, Artificial Sequence
  chemically synthesized
gtctgagatactctgtttca

SEQ ID NO: 14539 - DNA, 20 bp, Artificial Sequence
  chemically synthesized
tgagatactctgtttcaaag

SEQ ID NO: 14540 - DNA, 20 bp, Artificial Sequence
  chemically synthesized
agatactctgtttcaaagta

SEQ ID NO: 14541 - DNA, 20 bp, Artificial Sequence
  chemically synthesized
atactctgtttcaaagtaga

SEQ ID NO: 14542 - DNA, 20 bp, Artificial Sequence
  chemically synthesized
tactctgtttcaaagtagag

SEQ ID NO: 14543 - DNA, 20 bp, Artificial Sequence
  chemically synthesized
gtttcaaagtagagaggata

SEQ ID NO: 14544 - DNA, 20 bp, Artificial Sequence
  chemically synthesized
aagtagagaggatacagaac

SEQ ID NO: 14545 - DNA, 20 bp, Artificial Sequence
  chemically synthesized
ggatacagaacaagcatctg

SEQ ID NO: 14546 - DNA, 20 bp, Artificial Sequence
  chemically synthesized
tgaagctatatacatcctta

SEQ ID NO: 14547 - DNA, 20 bp, Artificial Sequence
  chemically synthesized
aagctatatacatccttaca

SEQ ID NO: 14548 - DNA, 20 bp, Artificial Sequence
  chemically synthesized
gctatatacatccttacaga

SEQ ID NO: 14549 - DNA, 20 bp, Artificial Sequence
  chemically synthesized
cttacagagagcaattctga

SEQ ID NO: 14550 - DNA, 20 bp, Artificial Sequence
  chemically synthesized
gagcaattctgatggaaatg

SEQ ID NO: 14551 - DNA, 20 bp, Artificial Sequence
  chemically synthesized
agcaattctgatggaaatgc

SEQ ID NO: 14552 - DNA, 20 bp, Artificial Sequence
  chemically synthesized
aaatgcaggccatgtttccc

SEQ ID NO: 14553 - DNA, 20 bp, Artificial Sequence
  chemically synthesized
aatgcaggccatgtttccct

SEQ ID NO: 14554 - DNA, 20 bp, Artificial Sequence
  chemically synthesized
atgcaggccatgtttccctg

SEQ ID NO: 14555 - DNA, 20 bp, Artificial Sequence
  chemically synthesized
tgcaggccatgtttccctgg

SEQ ID NO: 14556 - DNA, 20 bp, Artificial Sequence
  chemically synthesized
gcaggccatgtttccctggg

SEQ ID NO: 14557 - DNA, 20 bp, Artificial Sequence
  chemically synthesized
caggccatgtttccctgggg

SEQ ID NO: 14558 - DNA, 20 bp, Artificial Sequence
  chemically synthesized
aggccatgtttccctggggg

SEQ ID NO: 14559 - DNA, 20 bp, Artificial Sequence
  chemically synthesized
tccctggggggggctcgtcc

SEQ ID NO: 14560 - DNA, 20 bp, Artificial Sequence
  chemically synthesized
ccctggggggggctcgtcct

SEQ ID NO: 14561 - DNA, 20 bp, Artificial Sequence
  chemically synthesized
cctggggggggctcgtccta

SEQ ID NO: 14562 - DNA, 20 bp, Artificial Sequence
  chemically synthesized
ctggggggggctcgtcctag

SEQ ID NO: 14563 - DNA, 20 bp, Artificial Sequence
  chemically synthesized
ggggggctcgtcctaggggc

SEQ ID NO: 14564 - DNA, 20 bp, Artificial Sequence
  chemically synthesized
ggggctcgtcctaggggctg

SEQ ID NO: 14565 - DNA, 20 bp, Artificial Sequence
  chemically synthesized
tggagtgcattctctgatgt

SEQ ID NO: 14566 - DNA, 20 bp, Artificial Sequence
  chemically synthesized
gagtgcattctctgatgtca

SEQ ID NO: 14567 - DNA, 20 bp, Artificial Sequence
  chemically synthesized
agtgcattctctgatgtcag

SEQ ID NO: 14568 - DNA, 20 bp, Artificial Sequence
  chemically synthesized
tctgatgtcagaggaaatgc

SEQ ID NO: 14569 - DNA, 20 bp, Artificial Sequence
  chemically synthesized
gaggaaatgcaagattccct

SEQ ID NO: 14570 - DNA, 20 bp, Artificial Sequence
  chemically synthesized
aggaaatgcaagattccctg

SEQ ID NO: 14571 - DNA, 20 bp, Artificial Sequence
  chemically synthesized
tgcaagattccctgaggcct

SEQ ID NO: 14572 - DNA, 20 bp, Artificial Sequence
  chemically synthesized
gcaagattccctgaggcctg

SEQ ID NO: 14573 - DNA, 20 bp, Artificial Sequence
  chemically synthesized
caagattccctgaggcctga

SEQ ID NO: 14574 - DNA, 20 bp, Artificial Sequence
  chemically synthesized
ctgaggcctgagggaaccca

SEQ ID NO: 14575 - DNA, 20 bp, Artificial Sequence
  chemically synthesized
agggaacccatggtatatgc

SEQ ID NO: 14576 - DNA, 20 bp, Artificial Sequence
  chemically synthesized
cccatggtatatgcaagtcc

SEQ ID NO: 14577 - DNA, 20 bp, Artificial Sequence
  chemically synthesized
caagtccaagtttcaaactg

SEQ ID NO: 14578 - DNA, 20 bp, Artificial Sequence
  chemically synthesized
tagttccatatgcattcttc

SEQ ID NO: 14579 - DNA, 20 bp, Artificial Sequence
  chemically synthesized
agttccatatgcattcttcc

SEQ ID NO: 14580 - DNA, 20 bp, Artificial Sequence
  chemically synthesized
ttccaggacaaatacttctt

SEQ ID NO: 14581 - DNA, 20 bp, Artificial Sequence
  chemically synthesized
tccaggacaaatacttcttg

SEQ ID NO: 14582 - DNA, 20 bp, Artificial Sequence
  chemically synthesized
ttcttgaggttaaaaaaaaa

SEQ ID NO: 14583 - DNA, 20 bp, Artificial Sequence
  chemically synthesized
gttaaaaaaaaaaagtcaca

SEQ ID NO: 14584 - DNA, 20 bp, Artificial Sequence
  chemically synthesized
gtcacatagctgccatttta

SEQ ID NO: 14585 - DNA, 20 bp, Artificial Sequence
  chemically synthesized
agctgccattttatggattt

SEQ ID NO: 14586 - DNA, 20 bp, Artificial Sequence
  chemically synthesized
gctgccattttatggatttc

SEQ ID NO: 14587 - DNA, 20 bp, Artificial Sequence
  chemically synthesized
attttttttttttttttttt

SEQ ID NO: 14588 - DNA, 20 bp, Artificial Sequence
  chemically synthesized
ttttttttttttttttgaga

SEQ ID NO: 14589 - DNA, 20 bp, Artificial Sequence
  chemically synthesized
ttttttttttttttgagatg

SEQ ID NO: 14590 - DNA, 20 bp, Artificial Sequence
  chemically synthesized
tggagtcttgctctgtcacc

SEQ ID NO: 14591 - DNA, 20 bp, Artificial Sequence
  chemically synthesized
ttgctctgtcacccagcctg

SEQ ID NO: 14592 - DNA, 20 bp, Artificial Sequence
  chemically synthesized
ctgtcacccagcctgtagtg

SEQ ID NO: 14593 - DNA, 20 bp, Artificial Sequence
  chemically synthesized
tcacccagcctgtagtgcag

SEQ ID NO: 14594 - DNA, 20 bp, Artificial Sequence
  chemically synthesized
gtagtgcagtggcataatct

SEQ ID NO: 14595 - DNA, 20 bp, Artificial Sequence
  chemically synthesized
agtggcataatctcggctca

SEQ ID NO: 14596 - DNA, 20 bp, Artificial Sequence
  chemically synthesized
tcacggcaacctccgcctcc

SEQ ID NO: 14597 - DNA, 20 bp, Artificial Sequence
  chemically synthesized
cacggcaacctccgcctccc

SEQ ID NO: 14598 - DNA, 20 bp, Artificial Sequence
  chemically synthesized
aacctccgcctcccaggttc

SEQ ID NO: 14599 - DNA, 20 bp, Artificial Sequence
  chemically synthesized
ttcaagcgattctcttgcct

SEQ ID NO: 14600 - DNA, 20 bp, Artificial Sequence
  chemically synthesized
ttctcttgccttagcctccc

SEQ ID NO: 14601 - DNA, 20 bp, Artificial Sequence
  chemically synthesized
tcttgccttagcctcccgag

SEQ ID NO: 14602 - DNA, 20 bp, Artificial Sequence
  chemically synthesized
gccttagcctcccgagtagc

SEQ ID NO: 14603 - DNA, 20 bp, Artificial Sequence
  chemically synthesized
ccttagcctcccgagtagct

SEQ ID NO: 14604 - DNA, 20 bp, Artificial Sequence
  chemically synthesized
ctcccgagtagctgggatta

SEQ ID NO: 14605 - DNA, 20 bp, Artificial Sequence
  chemically synthesized
cagtcacgcaccaccacatc

SEQ ID NO: 14606 - DNA, 20 bp, Artificial Sequence
  chemically synthesized
ggctaattctttatattttt

SEQ ID NO: 14607 - DNA, 20 bp, Artificial Sequence
  chemically synthesized
taattctttatattttttgg

SEQ ID NO: 14608 - DNA, 20 bp, Artificial Sequence
  chemically synthesized
tttatattttttggtagaaa

SEQ ID NO: 14609 - DNA, 20 bp, Artificial Sequence
  chemically synthesized
gaaacggtgtttcaccatgt

SEQ ID NO: 14610 - DNA, 20 bp, Artificial Sequence
  chemically synthesized
cggtgtttcaccatgttggc

SEQ ID NO: 14611 - DNA, 20 bp, Artificial Sequence
  chemically synthesized
ggtgtttcaccatgttggcc

SEQ ID NO: 14612 - DNA, 20 bp, Artificial Sequence
  chemically synthesized
tttcaccatgttggccaggc

SEQ ID NO: 14613 - DNA, 20 bp, Artificial Sequence
  chemically synthesized
ctcatgtgatctgcctgcct

SEQ ID NO: 14614 - DNA, 20 bp, Artificial Sequence
  chemically synthesized
ctgcctgccttggcctccca

SEQ ID NO: 14615 - DNA, 20 bp, Artificial Sequence
  chemically synthesized
ccttggcctcccaaagtgct

SEQ ID NO: 14616 - DNA, 20 bp, Artificial Sequence
  chemically synthesized
ctcccaaagtgctgagatta

SEQ ID NO: 14617 - DNA, 20 bp, Artificial Sequence
  chemically synthesized
tcccaaagtgctgagattac

SEQ ID NO: 14618 - DNA, 20 bp, Artificial Sequence
  chemically synthesized
agtgctgagattacaggtgt

SEQ ID NO: 14619 - DNA, 20 bp, Artificial Sequence
  chemically synthesized
tgtgagccaccgcgcctgcc

SEQ ID NO: 14620 - DNA, 20 bp, Artificial Sequence
  chemically synthesized
tgagccaccgcgcctgcctg

SEQ ID NO: 14621 - DNA, 20 bp, Artificial Sequence
  chemically synthesized
caccgcgcctgcctggagtt

SEQ ID NO: 14622 - DNA, 20 bp, Artificial Sequence
  chemically synthesized
ctgcctggagttcagaatct

SEQ ID NO: 14623 - DNA, 20 bp, Artificial Sequence
  chemically synthesized
tgcctggagttcagaatctt

SEQ ID NO: 14624 - DNA, 20 bp, Artificial Sequence
  chemically synthesized
cttcattatttgtgtttaaa

SEQ ID NO: 14625 - DNA, 20 bp, Artificial Sequence
  chemically synthesized
ttgtgtttaaatagatcata

SEQ ID NO: 14626 - DNA, 20 bp, Artificial Sequence
  chemically synthesized
gtttaaatagatcatacagt

SEQ ID NO: 14627 - DNA, 20 bp, Artificial Sequence
  chemically synthesized
tttaaatagatcatacagtc

SEQ ID NO: 14628 - DNA, 20 bp, Artificial Sequence
  chemically synthesized
atagatcatacagtcaggca

SEQ ID NO: 14629 - DNA, 20 bp, Artificial Sequence
  chemically synthesized
gatcatacagtcaggcacgg

SEQ ID NO: 14630 - DNA, 20 bp, Artificial Sequence
  chemically synthesized
gtggctcatgcctgtaatcc

SEQ ID NO: 14631 - DNA, 20 bp, Artificial Sequence
  chemically synthesized
tgcctgtaatcccagcactt

SEQ ID NO: 14632 - DNA, 20 bp, Artificial Sequence
  chemically synthesized
gcctgtaatcccagcacttt

SEQ ID NO: 14633 - DNA, 20 bp, Artificial Sequence
  chemically synthesized
ctgtaatcccagcactttgg

SEQ ID NO: 14634 - DNA, 20 bp, Artificial Sequence
  chemically synthesized
tgtaatcccagcactttggg

SEQ ID NO: 14635 - DNA, 20 bp, Artificial Sequence
  chemically synthesized
tcccagcactttgggaggct

SEQ ID NO: 14636 - DNA, 20 bp, Artificial Sequence
  chemically synthesized
cccagcactttgggaggctg

SEQ ID NO: 14637 - DNA, 20 bp, Artificial Sequence
  chemically synthesized
agcactttgggaggctgagg

SEQ ID NO: 14638 - DNA, 20 bp, Artificial Sequence
  chemically synthesized
gcactttgggaggctgaggt

SEQ ID NO: 14639 - DNA, 20 bp, Artificial Sequence
  chemically synthesized
actttgggaggctgaggtgg

SEQ ID NO: 14640 - DNA, 20 bp, Artificial Sequence
  chemically synthesized
ctttgggaggctgaggtggg

SEQ ID NO: 14641 - DNA, 20 bp, Artificial Sequence
  chemically synthesized
ctgaggtgggaggattgcct

SEQ ID NO: 14642 - DNA, 20 bp, Artificial Sequence
  chemically synthesized
gtgggaggattgcctgagtt

SEQ ID NO: 14643 - DNA, 20 bp, Artificial Sequence
  chemically synthesized
tgggaggattgcctgagttc

SEQ ID NO: 14644 - DNA, 20 bp, Artificial Sequence
  chemically synthesized
ggaggattgcctgagttcag

SEQ ID NO: 14645 - DNA, 20 bp, Artificial Sequence
  chemically synthesized
gattgcctgagttcaggaga

SEQ ID NO: 14646 - DNA, 20 bp, Artificial Sequence
  chemically synthesized
ttgcctgagttcaggagatg

SEQ ID NO: 14647 - DNA, 20 bp, Artificial Sequence
  chemically synthesized
tgagttcaggagatggagac

SEQ ID NO: 14648 - DNA, 20 bp, Artificial Sequence
  chemically synthesized
tcaggagatggagaccagcc

SEQ ID NO: 14649 - DNA, 20 bp, Artificial Sequence
  chemically synthesized
caggagatggagaccagcct

SEQ ID NO: 14650 - DNA, 20 bp, Artificial Sequence
  chemically synthesized
ggagaccagcctgggcaaca

SEQ ID NO: 14651 - DNA, 20 bp, Artificial Sequence
  chemically synthesized
tctactaaaaatacaaaaac

SEQ ID NO: 14652 - DNA, 20 bp, Artificial Sequence
  chemically synthesized
ctaaaaatacaaaaactagc

SEQ ID NO: 14653 - DNA, 20 bp, Artificial Sequence
  chemically synthesized
atacaaaaactagctggatg

SEQ ID NO: 14654 - DNA, 20 bp, Artificial Sequence
  chemically synthesized
caaaaactagctggatgtgg

SEQ ID NO: 14655 - DNA, 20 bp, Artificial Sequence
  chemically synthesized
gatgtggtggcacacacctg

SEQ ID NO: 14656 - DNA, 20 bp, Artificial Sequence
  chemically synthesized
gtggcacacacctgtagtcc

SEQ ID NO: 14657 - DNA, 20 bp, Artificial Sequence
  chemically synthesized
cacctgtagtcccagctatt

SEQ ID NO: 14658 - DNA, 20 bp, Artificial Sequence
  chemically synthesized
acctgtagtcccagctattc

SEQ ID NO: 14659 - DNA, 20 bp, Artificial Sequence
  chemically synthesized
ctgtagtcccagctattcag

SEQ ID NO: 14660 - DNA, 20 bp, Artificial Sequence
  chemically synthesized
tgtagtcccagctattcagg

SEQ ID NO: 14661 - DNA, 20 bp, Artificial Sequence
  chemically synthesized
tcccagctattcaggaggct

SEQ ID NO: 14662 - DNA, 20 bp, Artificial Sequence
  chemically synthesized
cccagctattcaggaggctg

SEQ ID NO: 14663 - DNA, 20 bp, Artificial Sequence
  chemically synthesized
agctattcaggaggctgagg

SEQ ID NO: 14664 - DNA, 20 bp, Artificial Sequence
  chemically synthesized
gctattcaggaggctgaggt

SEQ ID NO: 14665 - DNA, 20 bp, Artificial Sequence
  chemically synthesized
tattcaggaggctgaggtgg

SEQ ID NO: 14666 - DNA, 20 bp, Artificial Sequence
  chemically synthesized
attcaggaggctgaggtggg

SEQ ID NO: 14667 - DNA, 20 bp, Artificial Sequence
  chemically synthesized
aggctgaggtgggaggatcc

SEQ ID NO: 14668 - DNA, 20 bp, Artificial Sequence
  chemically synthesized
ggctgaggtgggaggatccc

SEQ ID NO: 14669 - DNA, 20 bp, Artificial Sequence
  chemically synthesized
ctgaggtgggaggatcccag

SEQ ID NO: 14670 - DNA, 20 bp, Artificial Sequence
  chemically synthesized
tgaggtgggaggatcccagg

SEQ ID NO: 14671 - DNA, 20 bp, Artificial Sequence
  chemically synthesized
ggtgggaggatcccaggagg

SEQ ID NO: 14672 - DNA, 20 bp, Artificial Sequence
  chemically synthesized
tgggaggatcccaggaggta

SEQ ID NO: 14673 - DNA, 20 bp, Artificial Sequence
  chemically synthesized
gggaggatcccaggaggtag

SEQ ID NO: 14674 - DNA, 20 bp, Artificial Sequence
  chemically synthesized
caggaggtagaggtcacaat

SEQ ID NO: 14675 - DNA, 20 bp, Artificial Sequence
  chemically synthesized
ggtagaggtcacaatgagcc

SEQ ID NO: 14676 - DNA, 20 bp, Artificial Sequence
  chemically synthesized
gagattgcgccactgcactc

SEQ ID NO: 14677 - DNA, 20 bp, Artificial Sequence
  chemically synthesized
agattgcgccactgcactcc

SEQ ID NO: 14678 - DNA, 20 bp, Artificial Sequence
  chemically synthesized
tgcgccactgcactccaggc

SEQ ID NO: 14679 - DNA, 20 bp, Artificial Sequence
  chemically synthesized
gcgccactgcactccaggct

SEQ ID NO: 14680 - DNA, 20 bp, Artificial Sequence
  chemically synthesized
gcactccaggctgggttact

SEQ ID NO: 14681 - DNA, 20 bp, Artificial Sequence
  chemically synthesized
tccaggctgggttactgagc

SEQ ID NO: 14682 - DNA, 20 bp, Artificial Sequence
  chemically synthesized
atcctgtctcaaaaaaaaaa

SEQ ID NO: 14683 - DNA, 20 bp, Artificial Sequence
  chemically synthesized
aaaaagataatacattcaaa

SEQ ID NO: 14684 - DNA, 20 bp, Artificial Sequence
  chemically synthesized
tcaaacagttcaaaatgcaa

SEQ ID NO: 14685 - DNA, 20 bp, Artificial Sequence
  chemically synthesized
aatgcaaaagttacatacat

SEQ ID NO: 14686 - DNA, 20 bp, Artificial Sequence
  chemically synthesized
atgcaaaagttacatacata

SEQ ID NO: 14687 - DNA, 20 bp, Artificial Sequence
  chemically synthesized
caaaagttacatacataagg

SEQ ID NO: 14688 - DNA, 20 bp, Artificial Sequence
  chemically synthesized
ctccctctcacacttctccc

SEQ ID NO: 14689 - DNA, 20 bp, Artificial Sequence
  chemically synthesized
cacacttctccccagccacc

SEQ ID NO: 14690 - DNA, 20 bp, Artificial Sequence
  chemically synthesized
agccacccagttctcccttc

SEQ ID NO: 14691 - DNA, 20 bp, Artificial Sequence
  chemically synthesized
ccacccagttctcccttcta

SEQ ID NO: 14692 - DNA, 20 bp, Artificial Sequence
  chemically synthesized
cacccagttctcccttctag

SEQ ID NO: 14693 - DNA, 20 bp, Artificial Sequence
  chemically synthesized
gcaacatgtgaaatccttct

SEQ ID NO: 14694 - DNA, 20 bp, Artificial Sequence
  chemically synthesized
caacatgtgaaatccttctc

SEQ ID NO: 14695 - DNA, 20 bp, Artificial Sequence
  chemically synthesized
ctcaggctacactcttcttg

SEQ ID NO: 14696 - DNA, 20 bp, Artificial Sequence
  chemically synthesized
tcaggctacactcttcttga

SEQ ID NO: 14697 - DNA, 20 bp, Artificial Sequence
  chemically synthesized
ctacactcttcttgaaggtg

SEQ ID NO: 14698 - DNA, 20 bp, Artificial Sequence
  chemically synthesized
tacactcttcttgaaggtgt

SEQ ID NO: 14699 - DNA, 20 bp, Artificial Sequence
  chemically synthesized
cttcttgaaggtgtaggctt

SEQ ID NO: 14700 - DNA, 20 bp, Artificial Sequence
  chemically synthesized
ttcttgaaggtgtaggcttt

SEQ ID NO: 14701 - DNA, 20 bp, Artificial Sequence
  chemically synthesized
aaggtgtaggctttgggcaa

SEQ ID NO: 14702 - DNA, 20 bp, Artificial Sequence
  chemically synthesized
tttgggcaaaagcattcatt

SEQ ID NO: 14703 - DNA, 20 bp, Artificial Sequence
  chemically synthesized
aagcattcattcagtaaccc

SEQ ID NO: 14704 - DNA, 20 bp, Artificial Sequence
  chemically synthesized
aaacttgttctgtttttcca

SEQ ID NO: 14705 - DNA, 20 bp, Artificial Sequence
  chemically synthesized
aacttgttctgtttttccat

SEQ ID NO: 14706 - DNA, 20 bp, Artificial Sequence
  chemically synthesized
tttttccataggattctctt

SEQ ID NO: 14707 - DNA, 20 bp, Artificial Sequence
  chemically synthesized
tccataggattctctttgga

SEQ ID NO: 14708 - DNA, 20 bp, Artificial Sequence
  chemically synthesized
tctttggacagcgtccatac

SEQ ID NO: 14709 - DNA, 20 bp, Artificial Sequence
  chemically synthesized
ttggacagcgtccatactgg

SEQ ID NO: 14710 - DNA, 20 bp, Artificial Sequence
  chemically synthesized
tggacagcgtccatactggt

SEQ ID NO: 14711 - DNA, 20 bp, Artificial Sequence
  chemically synthesized
gcgtccatactggtgggttt

SEQ ID NO: 14712 - DNA, 20 bp, Artificial Sequence
  chemically synthesized
gttttggatactgactacta

SEQ ID NO: 14713 - DNA, 20 bp, Artificial Sequence
  chemically synthesized
acacttccgtgcccctgata

SEQ ID NO: 14714 - DNA, 20 bp, Artificial Sequence
  chemically synthesized
cttccgtgcccctgataaag

SEQ ID NO: 14715 - DNA, 20 bp, Artificial Sequence
  chemically synthesized
agcagttccctgtaacctgt

SEQ ID NO: 14716 - DNA, 20 bp, Artificial Sequence
  chemically synthesized
ttccctgtaacctgtgagac

SEQ ID NO: 14717 - DNA, 20 bp, Artificial Sequence
  chemically synthesized
tgtaacctgtgagactggac

SEQ ID NO: 14718 - DNA, 20 bp, Artificial Sequence
  chemically synthesized
gtaacctgtgagactggacc

SEQ ID NO: 14719 - DNA, 20 bp, Artificial Sequence
  chemically synthesized
cctgtgagactggaccaggt

SEQ ID NO: 14720 - DNA, 20 bp, Artificial Sequence
  chemically synthesized
actggaccaggtaagcgtcc

SEQ ID NO: 14721 - DNA, 20 bp, Artificial Sequence
  chemically synthesized
ggtaagcgtcccagcccctg

SEQ ID NO: 14722 - DNA, 20 bp, Artificial Sequence
  chemically synthesized
agcgtcccagcccctgcaga

SEQ ID NO: 14723 - DNA, 20 bp, Artificial Sequence
  chemically synthesized
gtcccagcccctgcagacag

SEQ ID NO: 14724 - DNA, 20 bp, Artificial Sequence
  chemically synthesized
agcccctgcagacagaagct

SEQ ID NO: 14725 - DNA, 20 bp, Artificial Sequence
  chemically synthesized
ccctgcagacagaagctgag

SEQ ID NO: 14726 - DNA, 20 bp, Artificial Sequence
  chemically synthesized
tggacctcgtttacctgtta

SEQ ID NO: 14727 - DNA, 20 bp, Artificial Sequence
  chemically synthesized
ttatggatgaaactgacctt

SEQ ID NO: 14728 - DNA, 20 bp, Artificial Sequence
  chemically synthesized
tatggatgaaactgaccttg

SEQ ID NO: 14729 - DNA, 20 bp, Artificial Sequence
  chemically synthesized
atggatgaaactgaccttga

SEQ ID NO: 14730 - DNA, 20 bp, Artificial Sequence
  chemically synthesized
tggatgaaactgaccttgag

SEQ ID NO: 14731 - DNA, 20 bp, Artificial Sequence
  chemically synthesized
aactgaccttgaggggacat

SEQ ID NO: 14732 - DNA, 20 bp, Artificial Sequence
  chemically synthesized
actgaccttgaggggacatg

SEQ ID NO: 14733 - DNA, 20 bp, Artificial Sequence
  chemically synthesized
tgaccttgaggggacatgag

SEQ ID NO: 14734 - DNA, 20 bp, Artificial Sequence
  chemically synthesized
accttgaggggacatgagga

SEQ ID NO: 14735 - DNA, 20 bp, Artificial Sequence
  chemically synthesized
cttttgtcatgctcttcaat

SEQ ID NO: 14736 - DNA, 20 bp, Artificial Sequence
  chemically synthesized
ttctgcaatactttcctgaa

SEQ ID NO: 14737 - DNA, 20 bp, Artificial Sequence
  chemically synthesized
caatactttcctgaatagca

SEQ ID NO: 14738 - DNA, 20 bp, Artificial Sequence
  chemically synthesized
tactttcctgaatagcacag

SEQ ID NO: 14739 - DNA, 20 bp, Artificial Sequence
  chemically synthesized
cctgaatagcacagtagtat

SEQ ID NO: 14740 - DNA, 20 bp, Artificial Sequence
  chemically synthesized
tattggaaatctgcctatta

SEQ ID NO: 14741 - DNA, 20 bp, Artificial Sequence
  chemically synthesized
aatctgcctattacagaacc

SEQ ID NO: 14742 - DNA, 20 bp, Artificial Sequence
  chemically synthesized
tgcctattacagaacctgga

SEQ ID NO: 14743 - DNA, 20 bp, Artificial Sequence
  chemically synthesized
cctattacagaacctggatg

SEQ ID NO: 14744 - DNA, 20 bp, Artificial Sequence
  chemically synthesized
tacagaacctggatggagtc

SEQ ID NO: 14745 - DNA, 20 bp, Artificial Sequence
  chemically synthesized
cagaacctggatggagtcca

SEQ ID NO: 14746 - DNA, 20 bp, Artificial Sequence
  chemically synthesized
gaacctggatggagtccaga

SEQ ID NO: 14747 - DNA, 20 bp, Artificial Sequence
  chemically synthesized
aacctggatggagtccagag

SEQ ID NO: 14748 - DNA, 20 bp, Artificial Sequence
  chemically synthesized
ggatggagtccagagaggca

SEQ ID NO: 14749 - DNA, 20 bp, Artificial Sequence
  chemically synthesized
gatggagtccagagaggcac

SEQ ID NO: 14750 - DNA, 20 bp, Artificial Sequence
  chemically synthesized
cagagaggcacgggcatcca

SEQ ID NO: 14751 - DNA, 20 bp, Artificial Sequence
  chemically synthesized
agagaggcacgggcatccat

SEQ ID NO: 14752 - DNA, 20 bp, Artificial Sequence
  chemically synthesized
ggcacgggcatccatgggca

SEQ ID NO: 14753 - DNA, 20 bp, Artificial Sequence
  chemically synthesized
gcacgggcatccatgggcaa

SEQ ID NO: 14754 - DNA, 20 bp, Artificial Sequence
  chemically synthesized
cacgggcatccatgggcaaa

SEQ ID NO: 14755 - DNA, 20 bp, Artificial Sequence
  chemically synthesized
tccatgggcaaagggctcgt

SEQ ID NO: 14756 - DNA, 20 bp, Artificial Sequence
  chemically synthesized
catgggcaaagggctcgtga

SEQ ID NO: 14757 - DNA, 20 bp, Artificial Sequence
  chemically synthesized
tcgtgagagtcaccgccctg

SEQ ID NO: 14758 - DNA, 20 bp, Artificial Sequence
  chemically synthesized
tgcagggcggtgactctcac

SEQ ID NO: 14759 - DNA, 20 bp, Artificial Sequence
  chemically synthesized
tctcacgagccctttgccca

SEQ ID NO: 14760 - DNA, 20 bp, Artificial Sequence
  chemically synthesized
catggatgcccgtgcctctc

SEQ ID NO: 14761 - DNA, 20 bp, Artificial Sequence
  chemically synthesized
gtgcctctctggactccatc

SEQ ID NO: 14762 - DNA, 20 bp, Artificial Sequence
  chemically synthesized
tgcctctctggactccatcc

SEQ ID NO: 14763 - DNA, 20 bp, Artificial Sequence
  chemically synthesized
actccatccaggttctgtaa

SEQ ID NO: 14764 - DNA, 20 bp, Artificial Sequence
  chemically synthesized
ctccatccaggttctgtaat

SEQ ID NO: 14765 - DNA, 20 bp, Artificial Sequence
  chemically synthesized
catccaggttctgtaatagg

SEQ ID NO: 14766 - DNA, 20 bp, Artificial Sequence
  chemically synthesized
tccaatactactgtgctatt

SEQ ID NO: 14767 - DNA, 20 bp, Artificial Sequence
  chemically synthesized
ccaatactactgtgctattc

SEQ ID NO: 14768 - DNA, 20 bp, Artificial Sequence
  chemically synthesized
tactactgtgctattcagga

SEQ ID NO: 14769 - DNA, 20 bp, Artificial Sequence
  chemically synthesized
tgctattcaggaaagtattg

SEQ ID NO: 14770 - DNA, 20 bp, Artificial Sequence
  chemically synthesized
tattcaggaaagtattgcag

SEQ ID NO: 14771 - DNA, 20 bp, Artificial Sequence
  chemically synthesized
gaattaatttgtgccaattg

SEQ ID NO: 14772 - DNA, 20 bp, Artificial Sequence
  chemically synthesized
attaatttgtgccaattgaa

SEQ ID NO: 14773 - DNA, 20 bp, Artificial Sequence
  chemically synthesized
ccaattgaagagcatgacaa

SEQ ID NO: 14774 - DNA, 20 bp, Artificial Sequence
  chemically synthesized
aagagcatgacaaaagtaca

SEQ ID NO: 14775 - DNA, 20 bp, Artificial Sequence
  chemically synthesized
agagcatgacaaaagtacaa

SEQ ID NO: 14776 - DNA, 20 bp, Artificial Sequence
  chemically synthesized
atgacaaaagtacaaaggaa

SEQ ID NO: 14777 - DNA, 20 bp, Artificial Sequence
  chemically synthesized
ggctctcctcatgtcccctc

SEQ ID NO: 14778 - DNA, 20 bp, Artificial Sequence
  chemically synthesized
gctctcctcatgtcccctca

SEQ ID NO: 14779 - DNA, 20 bp, Artificial Sequence
  chemically synthesized
tcctcatgtcccctcaaggt

SEQ ID NO: 14780 - DNA, 20 bp, Artificial Sequence
  chemically synthesized
aaggtcagtttcatccataa

SEQ ID NO: 14781 - DNA, 20 bp, Artificial Sequence
  chemically synthesized
aggtcagtttcatccataac

SEQ ID NO: 14782 - DNA, 20 bp, Artificial Sequence
  chemically synthesized
ttcatccataacaggtaaac

SEQ ID NO: 14783 - DNA, 20 bp, Artificial Sequence
  chemically synthesized
tcatccataacaggtaaacg

SEQ ID NO: 14784 - DNA, 20 bp, Artificial Sequence
  chemically synthesized
acaggtaaacgaggtccact

SEQ ID NO: 14785 - DNA, 20 bp, Artificial Sequence
  chemically synthesized
gtccactcagcttctgtctg

SEQ ID NO: 14786 - DNA, 20 bp, Artificial Sequence
  chemically synthesized
tccactcagcttctgtctgc

SEQ ID NO: 14787 - DNA, 20 bp, Artificial Sequence
  chemically synthesized
ccactcagcttctgtctgca

SEQ ID NO: 14788 - DNA, 20 bp, Artificial Sequence
  chemically synthesized
cactcagcttctgtctgcag

SEQ ID NO: 14789 - DNA, 20 bp, Artificial Sequence
  chemically synthesized
cagcttctgtctgcaggggc

SEQ ID NO: 14790 - DNA, 20 bp, Artificial Sequence
  chemically synthesized
agcttctgtctgcaggggct

SEQ ID NO: 14791 - DNA, 20 bp, Artificial Sequence
  chemically synthesized
caggggctgggacgcttacc

SEQ ID NO: 14792 - DNA, 20 bp, Artificial Sequence
  chemically synthesized
gctgggacgcttacctggtc

SEQ ID NO: 14793 - DNA, 20 bp, Artificial Sequence
  chemically synthesized
gcttacctggtccagtctca

SEQ ID NO: 14794 - DNA, 20 bp, Artificial Sequence
  chemically synthesized
cttacctggtccagtctcac

SEQ ID NO: 14795 - DNA, 20 bp, Artificial Sequence
  chemically synthesized
tggtccagtctcacaggtta

SEQ ID NO: 14796 - DNA, 20 bp, Artificial Sequence
  chemically synthesized
ggtccagtctcacaggttac

SEQ ID NO: 14797 - DNA, 20 bp, Artificial Sequence
  chemically synthesized
gtccagtctcacaggttaca

SEQ ID NO: 14798 - DNA, 20 bp, Artificial Sequence
  chemically synthesized
gttacagggaactgctttat

SEQ ID NO: 14799 - DNA, 20 bp, Artificial Sequence
  chemically synthesized
ttacagggaactgctttatc

SEQ ID NO: 14800 - DNA, 20 bp, Artificial Sequence
  chemically synthesized
tacagggaactgctttatca

SEQ ID NO: 14801 - DNA, 20 bp, Artificial Sequence
  chemically synthesized
acagggaactgctttatcag

SEQ ID NO: 14802 - DNA, 20 bp, Artificial Sequence
  chemically synthesized
gaactgctttatcaggggca

SEQ ID NO: 14803 - DNA, 20 bp, Artificial Sequence
  chemically synthesized
ctgctttatcaggggcacgg

SEQ ID NO: 14804 - DNA, 20 bp, Artificial Sequence
  chemically synthesized
ggggcacggaagtgttgctg

SEQ ID NO: 14805 - DNA, 20 bp, Artificial Sequence
  chemically synthesized
gcacggaagtgttgctgtag

SEQ ID NO: 14806 - DNA, 20 bp, Artificial Sequence
  chemically synthesized
ggaagtgttgctgtagtagt

SEQ ID NO: 14807 - DNA, 20 bp, Artificial Sequence
  chemically synthesized
agtcagtatccaaaacccac

SEQ ID NO: 14808 - DNA, 20 bp, Artificial Sequence
  chemically synthesized
gtatccaaaacccaccagta

SEQ ID NO: 14809 - DNA, 20 bp, Artificial Sequence
  chemically synthesized
accagtatggacgctgtcca

SEQ ID NO: 14810 - DNA, 20 bp, Artificial Sequence
  chemically synthesized
cagtatggacgctgtccaaa

SEQ ID NO: 14811 - DNA, 20 bp, Artificial Sequence
  chemically synthesized
gctgtccaaagagaatccta

SEQ ID NO: 14812 - DNA, 20 bp, Artificial Sequence
  chemically synthesized
aagagaatcctatggaaaaa

SEQ ID NO: 14813 - DNA, 20 bp, Artificial Sequence
  chemically synthesized
atcctatggaaaaacagaac

SEQ ID NO: 14814 - DNA, 20 bp, Artificial Sequence
  chemically synthesized
ggaaaaacagaacaagtttc

SEQ ID NO: 14815 - DNA, 20 bp, Artificial Sequence
  chemically synthesized
gaaaaacagaacaagtttct

SEQ ID NO: 14816 - DNA, 20 bp, Artificial Sequence
  chemically synthesized
aaaaacagaacaagtttctg

SEQ ID NO: 14817 - DNA, 20 bp, Artificial Sequence
  chemically synthesized
tgaatgaatgcttttgccca

SEQ ID NO: 14818 - DNA, 20 bp, Artificial Sequence
  chemically synthesized
tgcccaaagcctacaccttc

SEQ ID NO: 14819 - DNA, 20 bp, Artificial Sequence
  chemically synthesized
ccaaagcctacaccttcaag

SEQ ID NO: 14820 - DNA, 20 bp, Artificial Sequence
  chemically synthesized
aaagcctacaccttcaagaa

SEQ ID NO: 14821 - DNA, 20 bp, Artificial Sequence
  chemically synthesized
ctacaccttcaagaagagtg

SEQ ID NO: 14822 - DNA, 20 bp, Artificial Sequence
  chemically synthesized
cttcaagaagagtgtagcct

SEQ ID NO: 14823 - DNA, 20 bp, Artificial Sequence
  chemically synthesized
caagaagagtgtagcctgag

SEQ ID NO: 14824 - DNA, 20 bp, Artificial Sequence
  chemically synthesized
aagaagagtgtagcctgaga

SEQ ID NO: 14825 - DNA, 20 bp, Artificial Sequence
  chemically synthesized
aggatttcacatgttgcctc

SEQ ID NO: 14826 - DNA, 20 bp, Artificial Sequence
  chemically synthesized
atttcacatgttgcctctag

SEQ ID NO: 14827 - DNA, 20 bp, Artificial Sequence
  chemically synthesized
tttcacatgttgcctctaga

SEQ ID NO: 14828 - DNA, 20 bp, Artificial Sequence
  chemically synthesized
ttcacatgttgcctctagaa

SEQ ID NO: 14829 - DNA, 20 bp, Artificial Sequence
  chemically synthesized
cacatgttgcctctagaagg

SEQ ID NO: 14830 - DNA, 20 bp, Artificial Sequence
  chemically synthesized
ttgcctctagaagggagaac

SEQ ID NO: 14831 - DNA, 20 bp, Artificial Sequence
  chemically synthesized
tgcctctagaagggagaact

SEQ ID NO: 14832 - DNA, 20 bp, Artificial Sequence
  chemically synthesized
ctctagaagggagaactggg

SEQ ID NO: 14833 - DNA, 20 bp, Artificial Sequence
  chemically synthesized
agaagggagaactgggtggc

SEQ ID NO: 14834 - DNA, 20 bp, Artificial Sequence
  chemically synthesized
gaagggagaactgggtggct

SEQ ID NO: 14835 - DNA, 20 bp, Artificial Sequence
  chemically synthesized
aagggagaactgggtggctg

SEQ ID NO: 14836 - DNA, 20 bp, Artificial Sequence
  chemically synthesized
gggagaactgggtggctggg

SEQ ID NO: 14837 - DNA, 20 bp, Artificial Sequence
  chemically synthesized
agaactgggtggctggggag

SEQ ID NO: 14838 - DNA, 20 bp, Artificial Sequence
  chemically synthesized
gggtggctggggagaagtgt

SEQ ID NO: 14839 - DNA, 20 bp, Artificial Sequence
  chemically synthesized
gtggctggggagaagtgtga

SEQ ID NO: 14840 - DNA, 20 bp, Artificial Sequence
  chemically synthesized
tggctggggagaagtgtgag

SEQ ID NO: 14841 - DNA, 20 bp, Artificial Sequence
  chemically synthesized
ggctggggagaagtgtgaga

SEQ ID NO: 14842 - DNA, 20 bp, Artificial Sequence
  chemically synthesized
ctggggagaagtgtgagagg

SEQ ID NO: 14843 - DNA, 20 bp, Artificial Sequence
  chemically synthesized
gtattatctttttttttttt

SEQ ID NO: 14844 - DNA, 20 bp, Artificial Sequence
  chemically synthesized
tatcttttttttttttgaga

SEQ ID NO: 14845 - DNA, 20 bp, Artificial Sequence
  chemically synthesized
atcttttttttttttgagac

SEQ ID NO: 14846 - DNA, 20 bp, Artificial Sequence
  chemically synthesized
tttttttttgagacaggatc

SEQ ID NO: 14847 - DNA, 20 bp, Artificial Sequence
  chemically synthesized
ttttgagacaggatctggct

SEQ ID NO: 14848 - DNA, 20 bp, Artificial Sequence
  chemically synthesized
caggatctggctcagtaacc

SEQ ID NO: 14849 - DNA, 20 bp, Artificial Sequence
  chemically synthesized
tctggctcagtaacccagcc

SEQ ID NO: 14850 - DNA, 20 bp, Artificial Sequence
  chemically synthesized
tggctcagtaacccagcctg

SEQ ID NO: 14851 - DNA, 20 bp, Artificial Sequence
  chemically synthesized
cagtaacccagcctggagtg

SEQ ID NO: 14852 - DNA, 20 bp, Artificial Sequence
  chemically synthesized
taacccagcctggagtgcag

SEQ ID NO: 14853 - DNA, 20 bp, Artificial Sequence
  chemically synthesized
ggagtgcagtggcgcaatct

SEQ ID NO: 14854 - DNA, 20 bp, Artificial Sequence
  chemically synthesized
tcattgtgacctctacctcc

SEQ ID NO: 14855 - DNA, 20 bp, Artificial Sequence
  chemically synthesized
cattgtgacctctacctcct

SEQ ID NO: 14856 - DNA, 20 bp, Artificial Sequence
  chemically synthesized
ctcctgggatcctcccacct

SEQ ID NO: 14857 - DNA, 20 bp, Artificial Sequence
  chemically synthesized
tcccacctcagcctcctgaa

SEQ ID NO: 14858 - DNA, 20 bp, Artificial Sequence
  chemically synthesized
acctcagcctcctgaatagc

SEQ ID NO: 14859 - DNA, 20 bp, Artificial Sequence
  chemically synthesized
cctcagcctcctgaatagct

SEQ ID NO: 14860 - DNA, 20 bp, Artificial Sequence
  chemically synthesized
ctcctgaatagctgggacta

SEQ ID NO: 14861 - DNA, 20 bp, Artificial Sequence
  chemically synthesized
tcctgaatagctgggactac

SEQ ID NO: 14862 - DNA, 20 bp, Artificial Sequence
  chemically synthesized
caggtgtgtgccaccacatc

SEQ ID NO: 14863 - DNA, 20 bp, Artificial Sequence
  chemically synthesized
tgtgtgccaccacatccagc

SEQ ID NO: 14864 - DNA, 20 bp, Artificial Sequence
  chemically synthesized
ccagctagtttttgtatttt

SEQ ID NO: 14865 - DNA, 20 bp, Artificial Sequence
  chemically synthesized
gctagtttttgtatttttag

SEQ ID NO: 14866 - DNA, 20 bp, Artificial Sequence
  chemically synthesized
tagtttttgtatttttagta

SEQ ID NO: 14867 - DNA, 20 bp, Artificial Sequence
  chemically synthesized
ttttgtatttttagtagaga

SEQ ID NO: 14868 - DNA, 20 bp, Artificial Sequence
  chemically synthesized
tttgtatttttagtagagac

SEQ ID NO: 14869 - DNA, 20 bp, Artificial Sequence
  chemically synthesized
ttgtatttttagtagagacg

SEQ ID NO: 14870 - DNA, 20 bp, Artificial Sequence
  chemically synthesized
cggggtttcaccatgttgcc

SEQ ID NO: 14871 - DNA, 20 bp, Artificial Sequence
  chemically synthesized
ggggtttcaccatgttgccc

SEQ ID NO: 14872 - DNA, 20 bp, Artificial Sequence
  chemically synthesized
tttcaccatgttgcccaggc

SEQ ID NO: 14873 - DNA, 20 bp, Artificial Sequence
  chemically synthesized
tggtctccatctcctgaact

SEQ ID NO: 14874 - DNA, 20 bp, Artificial Sequence
  chemically synthesized
ggtctccatctcctgaactc

SEQ ID NO: 14875 - DNA, 20 bp, Artificial Sequence
  chemically synthesized
ctcaggcaatcctcccacct

SEQ ID NO: 14876 - DNA, 20 bp, Artificial Sequence
  chemically synthesized
cctcccacctcagcctccca

SEQ ID NO: 14877 - DNA, 20 bp, Artificial Sequence
  chemically synthesized
acctcagcctcccaaagtgc

SEQ ID NO: 14878 - DNA, 20 bp, Artificial Sequence
  chemically synthesized
cctcagcctcccaaagtgct

SEQ ID NO: 14879 - DNA, 20 bp, Artificial Sequence
  chemically synthesized
ctcccaaagtgctgggatta

SEQ ID NO: 14880 - DNA, 20 bp, Artificial Sequence
  chemically synthesized
tcccaaagtgctgggattac

SEQ ID NO: 14881 - DNA, 20 bp, Artificial Sequence
  chemically synthesized
agtgctgggattacaggcat

SEQ ID NO: 14882 - DNA, 20 bp, Artificial Sequence
  chemically synthesized
ctatttaaacacaaataatg

SEQ ID NO: 14883 - DNA, 20 bp, Artificial Sequence
  chemically synthesized
aaacacaaataatgaagccc

SEQ ID NO: 14884 - DNA, 20 bp, Artificial Sequence
  chemically synthesized
aagcccaagattctgaactc

SEQ ID NO: 14885 - DNA, 20 bp, Artificial Sequence
  chemically synthesized
agcccaagattctgaactcc

SEQ ID NO: 14886 - DNA, 20 bp, Artificial Sequence
  chemically synthesized
ccaagattctgaactccagg

SEQ ID NO: 14887 - DNA, 20 bp, Artificial Sequence
  chemically synthesized
caagattctgaactccaggc

SEQ ID NO: 14888 - DNA, 20 bp, Artificial Sequence
  chemically synthesized
ttctgaactccaggcaggcg

SEQ ID NO: 14889 - DNA, 20 bp, Artificial Sequence
  chemically synthesized
tgaactccaggcaggcgcgg

SEQ ID NO: 14890 - DNA, 20 bp, Artificial Sequence
  chemically synthesized
gtggctcacacctgtaatct

SEQ ID NO: 14891 - DNA, 20 bp, Artificial Sequence
  chemically synthesized
cacctgtaatctcagcactt

SEQ ID NO: 14892 - DNA, 20 bp, Artificial Sequence
  chemically synthesized
acctgtaatctcagcacttt

SEQ ID NO: 14893 - DNA, 20 bp, Artificial Sequence
  chemically synthesized
ctgtaatctcagcactttgg

SEQ ID NO: 14894 - DNA, 20 bp, Artificial Sequence
  chemically synthesized
tgtaatctcagcactttggg

SEQ ID NO: 14895 - DNA, 20 bp, Artificial Sequence
  chemically synthesized
tctcagcactttgggaggcc

SEQ ID NO: 14896 - DNA, 20 bp, Artificial Sequence
  chemically synthesized
ctcagcactttgggaggcca

SEQ ID NO: 14897 - DNA, 20 bp, Artificial Sequence
  chemically synthesized
agcactttgggaggccaagg

SEQ ID NO: 14898 - DNA, 20 bp, Artificial Sequence
  chemically synthesized
gcactttgggaggccaaggc

SEQ ID NO: 14899 - DNA, 20 bp, Artificial Sequence
  chemically synthesized
ctttgggaggccaaggcagg

SEQ ID NO: 14900 - DNA, 20 bp, Artificial Sequence
  chemically synthesized
ccaaggcaggcagatcacat

SEQ ID NO: 14901 - DNA, 20 bp, Artificial Sequence
  chemically synthesized
caaggcaggcagatcacatg

SEQ ID NO: 14902 - DNA, 20 bp, Artificial Sequence
  chemically synthesized
gcaggcagatcacatgaggt

SEQ ID NO: 14903 - DNA, 20 bp, Artificial Sequence
  chemically synthesized
caggcagatcacatgaggtc

SEQ ID NO: 14904 - DNA, 20 bp, Artificial Sequence
  chemically synthesized
ggcagatcacatgaggtcag

SEQ ID NO: 14905 - DNA, 20 bp, Artificial Sequence
  chemically synthesized
tcacatgaggtcaggagttt

SEQ ID NO: 14906 - DNA, 20 bp, Artificial Sequence
  chemically synthesized
tgaggtcaggagtttgagac

SEQ ID NO: 14907 - DNA, 20 bp, Artificial Sequence
  chemically synthesized
tcaggagtttgagaccagcc

SEQ ID NO: 14908 - DNA, 20 bp, Artificial Sequence
  chemically synthesized
tgagaccagcctggccaaca

SEQ ID NO: 14909 - DNA, 20 bp, Artificial Sequence
  chemically synthesized
cgtttctaccaaaaaatata

SEQ ID NO: 14910 - DNA, 20 bp, Artificial Sequence
  chemically synthesized
taccaaaaaatataaagaat

SEQ ID NO: 14911 - DNA, 20 bp, Artificial Sequence
  chemically synthesized
aaaaaatataaagaattagc

SEQ ID NO: 14912 - DNA, 20 bp, Artificial Sequence
  chemically synthesized
tataaagaattagccagatg

SEQ ID NO: 14913 - DNA, 20 bp, Artificial Sequence
  chemically synthesized
aaagaattagccagatgtgg

SEQ ID NO: 14914 - DNA, 20 bp, Artificial Sequence
  chemically synthesized
gtggtgcgtgactgtaatcc

SEQ ID NO: 14915 - DNA, 20 bp, Artificial Sequence
  chemically synthesized
tgactgtaatcccagctact

SEQ ID NO: 14916 - DNA, 20 bp, Artificial Sequence
  chemically synthesized
gactgtaatcccagctactc

SEQ ID NO: 14917 - DNA, 20 bp, Artificial Sequence
  chemically synthesized
ctgtaatcccagctactcgg

SEQ ID NO: 14918 - DNA, 20 bp, Artificial Sequence
  chemically synthesized
tgtaatcccagctactcggg

SEQ ID NO: 14919 - DNA, 20 bp, Artificial Sequence
  chemically synthesized
tcccagctactcgggaggct

SEQ ID NO: 14920 - DNA, 20 bp, Artificial Sequence
  chemically synthesized
cccagctactcgggaggcta

SEQ ID NO: 14921 - DNA, 20 bp, Artificial Sequence
  chemically synthesized
gctactcgggaggctaaggc

SEQ ID NO: 14922 - DNA, 20 bp, Artificial Sequence
  chemically synthesized
tactcgggaggctaaggcaa

SEQ ID NO: 14923 - DNA, 20 bp, Artificial Sequence
  chemically synthesized
gcaagagaatcgcttgaacc

SEQ ID NO: 14924 - DNA, 20 bp, Artificial Sequence
  chemically synthesized
caagagaatcgcttgaacct

SEQ ID NO: 14925 - DNA, 20 bp, Artificial Sequence
  chemically synthesized
agagaatcgcttgaacctgg

SEQ ID NO: 14926 - DNA, 20 bp, Artificial Sequence
  chemically synthesized
gagaatcgcttgaacctggg

SEQ ID NO: 14927 - DNA, 20 bp, Artificial Sequence
  chemically synthesized
aatcgcttgaacctgggagg

SEQ ID NO: 14928 - DNA, 20 bp, Artificial Sequence
  chemically synthesized
tcgcttgaacctgggaggcg

SEQ ID NO: 14929 - DNA, 20 bp, Artificial Sequence
  chemically synthesized
cgcttgaacctgggaggcgg

SEQ ID NO: 14930 - DNA, 20 bp, Artificial Sequence
  chemically synthesized
tgggaggcggaggttgccgt

SEQ ID NO: 14931 - DNA, 20 bp, Artificial Sequence
  chemically synthesized
ggcggaggttgccgtgagcc

SEQ ID NO: 14932 - DNA, 20 bp, Artificial Sequence
  chemically synthesized
gagattatgccactgcacta

SEQ ID NO: 14933 - DNA, 20 bp, Artificial Sequence
  chemically synthesized
agattatgccactgcactac

SEQ ID NO: 14934 - DNA, 20 bp, Artificial Sequence
  chemically synthesized
tatgccactgcactacaggc

SEQ ID NO: 14935 - DNA, 20 bp, Artificial Sequence
  chemically synthesized
atgccactgcactacaggct

SEQ ID NO: 14936 - DNA, 20 bp, Artificial Sequence
  chemically synthesized
ctgcactacaggctgggtga

SEQ ID NO: 14937 - DNA, 20 bp, Artificial Sequence
  chemically synthesized
gcactacaggctgggtgaca

SEQ ID NO: 14938 - DNA, 20 bp, Artificial Sequence
  chemically synthesized
tacaggctgggtgacagagc

SEQ ID NO: 14939 - DNA, 20 bp, Artificial Sequence
  chemically synthesized
aaatcctgaaatccataaaa

SEQ ID NO: 14940 - DNA, 20 bp, Artificial Sequence
  chemically synthesized
tcctgaaatccataaaatgg

SEQ ID NO: 14941 - DNA, 20 bp, Artificial Sequence
  chemically synthesized
gactttttttttttaacctc

SEQ ID NO: 14942 - DNA, 20 bp, Artificial Sequence
  chemically synthesized
tttttttttttaacctcaag

SEQ ID NO: 14943 - DNA, 20 bp, Artificial Sequence
  chemically synthesized
acctcaagaagtatttgtcc

SEQ ID NO: 14944 - DNA, 20 bp, Artificial Sequence
  chemically synthesized
tcaagaagtatttgtcctgg

SEQ ID NO: 14945 - DNA, 20 bp, Artificial Sequence
  chemically synthesized
ttgtcctggaagaatgcata

SEQ ID NO: 14946 - DNA, 20 bp, Artificial Sequence
  chemically synthesized
gaagaatgcatatggaacta

SEQ ID NO: 14947 - DNA, 20 bp, Artificial Sequence
  chemically synthesized
tggaactacagtttgaaact

SEQ ID NO: 14948 - DNA, 20 bp, Artificial Sequence
  chemically synthesized
acttggacttgcatatacca

SEQ ID NO: 14949 - DNA, 20 bp, Artificial Sequence
  chemically synthesized
cttggacttgcatataccat

SEQ ID NO: 14950 - DNA, 20 bp, Artificial Sequence
  chemically synthesized
gcatataccatgggttccct

SEQ ID NO: 14951 - DNA, 20 bp, Artificial Sequence
  chemically synthesized
catataccatgggttccctc

SEQ ID NO: 14952 - DNA, 20 bp, Artificial Sequence
  chemically synthesized
ccatgggttccctcaggcct

SEQ ID NO: 14953 - DNA, 20 bp, Artificial Sequence
  chemically synthesized
catgggttccctcaggcctc

SEQ ID NO: 14954 - DNA, 20 bp, Artificial Sequence
  chemically synthesized
atgggttccctcaggcctca

SEQ ID NO: 14955 - DNA, 20 bp, Artificial Sequence
  chemically synthesized
tcttgcatttcctctgacat

SEQ ID NO: 14956 - DNA, 20 bp, Artificial Sequence
  chemically synthesized
ttgcatttcctctgacatca

SEQ ID NO: 14957 - DNA, 20 bp, Artificial Sequence
  chemically synthesized
tgacatcagagaatgcactc

SEQ ID NO: 14958 - DNA, 20 bp, Artificial Sequence
  chemically synthesized
agagaatgcactccagcccc

SEQ ID NO: 14959 - DNA, 20 bp, Artificial Sequence
  chemically synthesized
gagaatgcactccagcccct

SEQ ID NO: 14960 - DNA, 20 bp, Artificial Sequence
  chemically synthesized
tgcactccagcccctaggac

SEQ ID NO: 14961 - DNA, 20 bp, Artificial Sequence
  chemically synthesized
cccctaggacgagccccccc

SEQ ID NO: 14962 - DNA, 20 bp, Artificial Sequence
  chemically synthesized
ccctaggacgagcccccccc

SEQ ID NO: 14963 - DNA, 20 bp, Artificial Sequence
  chemically synthesized
cctaggacgagcccccccca

SEQ ID NO: 14964 - DNA, 20 bp, Artificial Sequence
  chemically synthesized
gagccccccccagggaaaca

SEQ ID NO: 14965 - DNA, 20 bp, Artificial Sequence
  chemically synthesized
aacatggcctgcatttccat

SEQ ID NO: 14966 - DNA, 20 bp, Artificial Sequence
  chemically synthesized
ccatcagaattgctctctgt

SEQ ID NO: 14967 - DNA, 20 bp, Artificial Sequence
  chemically synthesized
catcagaattgctctctgta

SEQ ID NO: 14968 - DNA, 20 bp, Artificial Sequence
  chemically synthesized
gctctctgtaaggatgtata

SEQ ID NO: 14969 - DNA, 20 bp, Artificial Sequence
  chemically synthesized
tgtaaggatgtatatagctt

SEQ ID NO: 14970 - DNA, 20 bp, Artificial Sequence
  chemically synthesized
gtatcctctctactttgaaa

SEQ ID NO: 14971 - DNA, 20 bp, Artificial Sequence
  chemically synthesized
atcctctctactttgaaaca

SEQ ID NO: 14972 - DNA, 20 bp, Artificial Sequence
  chemically synthesized
tactttgaaacagagtatct

SEQ ID NO: 14973 - DNA, 20 bp, Artificial Sequence
  chemically synthesized
acaaaccacttcccctttaa

SEQ ID NO: 14974 - DNA, 20 bp, Artificial Sequence
  chemically synthesized
cacttcccctttaaaagtac

SEQ ID NO: 14975 - DNA, 20 bp, Artificial Sequence
  chemically synthesized
actagatatatctttcactg

SEQ ID NO: 14976 - DNA, 20 bp, Artificial Sequence
  chemically synthesized
tatatctttcactgtggaaa

SEQ ID NO: 14977 - DNA, 20 bp, Artificial Sequence
  chemically synthesized
atatctttcactgtggaaat

SEQ ID NO: 14978 - DNA, 20 bp, Artificial Sequence
  chemically synthesized
tggaaataggtgtcaaccgc

SEQ ID NO: 14979 - DNA, 20 bp, Artificial Sequence
  chemically synthesized
aataggtgtcaaccgccagt

SEQ ID NO: 14980 - DNA, 20 bp, Artificial Sequence
  chemically synthesized
ataggtgtcaaccgccagtc

SEQ ID NO: 14981 - DNA, 20 bp, Artificial Sequence
  chemically synthesized
ggatgccttttatcccgtga

SEQ ID NO: 14982 - DNA, 20 bp, Artificial Sequence
  chemically synthesized
tgccttttatcccgtgatgg

SEQ ID NO: 14983 - DNA, 20 bp, Artificial Sequence
  chemically synthesized
tttatcccgtgatggtggaa

SEQ ID NO: 14984 - DNA, 20 bp, Artificial Sequence
  chemically synthesized
tagtgatttctcaccgaaat

SEQ ID NO: 14985 - DNA, 20 bp, Artificial Sequence
  chemically synthesized
agtgatttctcaccgaaatc

SEQ ID NO: 14986 - DNA, 20 bp, Artificial Sequence
  chemically synthesized
gtgatttctcaccgaaatca

SEQ ID NO: 14987 - DNA, 20 bp, Artificial Sequence
  chemically synthesized
gatttctcaccgaaatcagg

SEQ ID NO: 14988 - DNA, 20 bp, Artificial Sequence
  chemically synthesized
tttctcaccgaaatcaggga

SEQ ID NO: 14989 - DNA, 20 bp, Artificial Sequence
  chemically synthesized
tcagggagagccactaactc

SEQ ID NO: 14990 - DNA, 20 bp, Artificial Sequence
  chemically synthesized
aactctggcctctatcaacc

SEQ ID NO: 14991 - DNA, 20 bp, Artificial Sequence
  chemically synthesized
ctctggcctctatcaaccca

SEQ ID NO: 14992 - DNA, 20 bp, Artificial Sequence
  chemically synthesized
ctggcctctatcaacccaga

SEQ ID NO: 14993 - DNA, 20 bp, Artificial Sequence
  chemically synthesized
atcaacccagagagattgca

SEQ ID NO: 14994 - DNA, 20 bp, Artificial Sequence
  chemically synthesized
gagattgcatggttcttcaa

SEQ ID NO: 14995 - DNA, 20 bp, Artificial Sequence
  chemically synthesized
gattgcatggttcttcaatg

SEQ ID NO: 14996 - DNA, 20 bp, Artificial Sequence
  chemically synthesized
catggttcttcaatggagat

SEQ ID NO: 14997 - DNA, 20 bp, Artificial Sequence
  chemically synthesized
ttcaatggagatcagatgtt

SEQ ID NO: 14998 - DNA, 20 bp, Artificial Sequence
  chemically synthesized
cacttcatctttttattttt

SEQ ID NO: 14999 - DNA, 20 bp, Artificial Sequence
  chemically synthesized
ttttattttttagaatcatg

SEQ ID NO: 15000 - DNA, 20 bp, Artificial Sequence
  chemically synthesized
attttttagaatcatgcggc

SEQ ID NO: 15001 - DNA, 20 bp, Artificial Sequence
  chemically synthesized
ttttttagaatcatgcggct

SEQ ID NO: 15002 - DNA, 20 bp, Artificial Sequence
  chemically synthesized
tagaatcatgcggctgggtg

SEQ ID NO: 15003 - DNA, 20 bp, Artificial Sequence
  chemically synthesized
aatcatgcggctgggtgtag

SEQ ID NO: 15004 - DNA, 20 bp, Artificial Sequence
  chemically synthesized
gtggctcacgcctgtaatcc

SEQ ID NO: 15005 - DNA, 20 bp, Artificial Sequence
  chemically synthesized
acgcctgtaatcctagcact

SEQ ID NO: 15006 - DNA, 20 bp, Artificial Sequence
  chemically synthesized
cgcctgtaatcctagcactt

SEQ ID NO: 15007 - DNA, 20 bp, Artificial Sequence
  chemically synthesized
gcctgtaatcctagcactta

SEQ ID NO: 15008 - DNA, 20 bp, Artificial Sequence
  chemically synthesized
ctgtaatcctagcacttagg

SEQ ID NO: 15009 - DNA, 20 bp, Artificial Sequence
  chemically synthesized
tgtaatcctagcacttaggg

SEQ ID NO: 15010 - DNA, 20 bp, Artificial Sequence
  chemically synthesized
tcctagcacttagggaggcc

SEQ ID NO: 15011 - DNA, 20 bp, Artificial Sequence
  chemically synthesized
cctagcacttagggaggcca

SEQ ID NO: 15012 - DNA, 20 bp, Artificial Sequence
  chemically synthesized
agcacttagggaggccaagg

SEQ ID NO: 15013 - DNA, 20 bp, Artificial Sequence
  chemically synthesized
gcacttagggaggccaaggc

SEQ ID NO: 15014 - DNA, 20 bp, Artificial Sequence
  chemically synthesized
cttagggaggccaaggcagg

SEQ ID NO: 15015 - DNA, 20 bp, Artificial Sequence
  chemically synthesized
ggccaaggcaggcagatcat

SEQ ID NO: 15016 - DNA, 20 bp, Artificial Sequence
  chemically synthesized
gccaaggcaggcagatcatg

SEQ ID NO: 15017 - DNA, 20 bp, Artificial Sequence
  chemically synthesized
aggcaggcagatcatgaggt

SEQ ID NO: 15018 - DNA, 20 bp, Artificial Sequence
  chemically synthesized
ggcaggcagatcatgaggtc

SEQ ID NO: 15019 - DNA, 20 bp, Artificial Sequence
  chemically synthesized
caggcagatcatgaggtcag

SEQ ID NO: 15020 - DNA, 20 bp, Artificial Sequence
  chemically synthesized
gatcatgaggtcaggagttc

SEQ ID NO: 15021 - DNA, 20 bp, Artificial Sequence
  chemically synthesized
tgaggtcaggagttcgagac

SEQ ID NO: 15022 - DNA, 20 bp, Artificial Sequence
  chemically synthesized
tcaggagttcgagaccagcc

SEQ ID NO: 15023 - DNA, 20 bp, Artificial Sequence
  chemically synthesized
cgagaccagcctagtcaaca

SEQ ID NO: 15024 - DNA, 20 bp, Artificial Sequence
  chemically synthesized
actaaaaatacaaaaaaaat

SEQ ID NO: 15025 - DNA, 20 bp, Artificial Sequence
  chemically synthesized
aaaatacaaaaaaaattagc

SEQ ID NO: 15026 - DNA, 20 bp, Artificial Sequence
  chemically synthesized
aaatacaaaaaaaattagct

SEQ ID NO: 15027 - DNA, 20 bp, Artificial Sequence
  chemically synthesized
caaaaaaaattagctgggca

SEQ ID NO: 15028 - DNA, 20 bp, Artificial Sequence
  chemically synthesized
aaaaaattagctgggcatgg

SEQ ID NO: 15029 - DNA, 20 bp, Artificial Sequence
  chemically synthesized
aaattagctgggcatggtgg

SEQ ID NO: 15030 - DNA, 20 bp, Artificial Sequence
  chemically synthesized
aattagctgggcatggtggc

SEQ ID NO: 15031 - DNA, 20 bp, Artificial Sequence
  chemically synthesized
gtggcgggcacctgtaatcc

SEQ ID NO: 15032 - DNA, 20 bp, Artificial Sequence
  chemically synthesized
cacctgtaatcccagctact

SEQ ID NO: 15033 - DNA, 20 bp, Artificial Sequence
  chemically synthesized
acctgtaatcccagctactt

SEQ ID NO: 15034 - DNA, 20 bp, Artificial Sequence
  chemically synthesized
ctgtaatcccagctacttgg

SEQ ID NO: 15035 - DNA, 20 bp, Artificial Sequence
  chemically synthesized
tgtaatcccagctacttggg

SEQ ID NO: 15036 - DNA, 20 bp, Artificial Sequence
  chemically synthesized
tcccagctacttgggaggct

SEQ ID NO: 15037 - DNA, 20 bp, Artificial Sequence
  chemically synthesized
cccagctacttgggaggctg

SEQ ID NO: 15038 - DNA, 20 bp, Artificial Sequence
  chemically synthesized
agctacttgggaggctgagg

SEQ ID NO: 15039 - DNA, 20 bp, Artificial Sequence
  chemically synthesized
gctacttgggaggctgaggc

SEQ ID NO: 15040 - DNA, 20 bp, Artificial Sequence
  chemically synthesized
tacttgggaggctgaggcag

SEQ ID NO: 15041 - DNA, 20 bp, Artificial Sequence
  chemically synthesized
ggcaggagaatcacttgaac

SEQ ID NO: 15042 - DNA, 20 bp, Artificial Sequence
  chemically synthesized
caggagaatcacttgaaccg

SEQ ID NO: 15043 - DNA, 20 bp, Artificial Sequence
  chemically synthesized
ggagaatcacttgaaccgga

SEQ ID NO: 15044 - DNA, 20 bp, Artificial Sequence
  chemically synthesized
gagaatcacttgaaccggag

SEQ ID NO: 15045 - DNA, 20 bp, Artificial Sequence
  chemically synthesized
aatcacttgaaccggagagg

SEQ ID NO: 15046 - DNA, 20 bp, Artificial Sequence
  chemically synthesized
tcacttgaaccggagaggca

SEQ ID NO: 15047 - DNA, 20 bp, Artificial Sequence
  chemically synthesized
cacttgaaccggagaggcag

SEQ ID NO: 15048 - DNA, 20 bp, Artificial Sequence
  chemically synthesized
aaccggagaggcagaggttg

SEQ ID NO: 15049 - DNA, 20 bp, Artificial Sequence
  chemically synthesized
ggagaggcagaggttgcagt

SEQ ID NO: 15050 - DNA, 20 bp, Artificial Sequence
  chemically synthesized
ggcagaggttgcagtgagct

SEQ ID NO: 15051 - DNA, 20 bp, Artificial Sequence
  chemically synthesized
gagattgcaccattgcactc

SEQ ID NO: 15052 - DNA, 20 bp, Artificial Sequence
  chemically synthesized
ttgcaccattgcactccagc

SEQ ID NO: 15053 - DNA, 20 bp, Artificial Sequence
  chemically synthesized
tgcaccattgcactccagcc

SEQ ID NO: 15054 - DNA, 20 bp, Artificial Sequence
  chemically synthesized
attgcactccagccaggcaa

SEQ ID NO: 15055 - DNA, 20 bp, Artificial Sequence
  chemically synthesized
ctccagccaggcaacagtgc

SEQ ID NO: 15056 - DNA, 20 bp, Artificial Sequence
  chemically synthesized
catctcaaacaaacaaacaa

SEQ ID NO: 15057 - DNA, 20 bp, Artificial Sequence
  chemically synthesized
tcaaacaaacaaacaaaaga

SEQ ID NO: 15058 - DNA, 20 bp, Artificial Sequence
  chemically synthesized
acaaacaaacaaaagaaaga

SEQ ID NO: 15059 - DNA, 20 bp, Artificial Sequence
  chemically synthesized
acaaacaaaagaaagaaaga

SEQ ID NO: 15060 - DNA, 20 bp, Artificial Sequence
  chemically synthesized
acaaaagaaagaaagaaaga

SEQ ID NO: 15061 - DNA, 20 bp, Artificial Sequence
  chemically synthesized
aaagaaagaaagaaagaaag

SEQ ID NO: 15062 - DNA, 20 bp, Artificial Sequence
  chemically synthesized
aaagaaagaaagaaagtggc

SEQ ID NO: 15063 - DNA, 20 bp, Artificial Sequence
  chemically synthesized
aagaaagaaagtggccagaa

SEQ ID NO: 15064 - DNA, 20 bp, Artificial Sequence
  chemically synthesized
agaaagaaagtggccagaat

SEQ ID NO: 15065 - DNA, 20 bp, Artificial Sequence
  chemically synthesized
gaatgggaatgtttacgtga

SEQ ID NO: 15066 - DNA, 20 bp, Artificial Sequence
  chemically synthesized
aatgtttacgtgatagaaat

SEQ ID NO: 15067 - DNA, 20 bp, Artificial Sequence
  chemically synthesized
aaattggcaaatgctaaact

SEQ ID NO: 15068 - DNA, 20 bp, Artificial Sequence
  chemically synthesized
aattggcaaatgctaaactc

SEQ ID NO: 15069 - DNA, 20 bp, Artificial Sequence
  chemically synthesized
attggcaaatgctaaactca

SEQ ID NO: 15070 - DNA, 20 bp, Artificial Sequence
  chemically synthesized
cagggctttcccctgctccc

SEQ ID NO: 15071 - DNA, 20 bp, Artificial Sequence
  chemically synthesized
gggctttcccctgctcccca

SEQ ID NO: 15072 - DNA, 20 bp, Artificial Sequence
  chemically synthesized
gctttcccctgctccccaga

SEQ ID NO: 15073 - DNA, 20 bp, Artificial Sequence
  chemically synthesized
tcccctgctccccagagagt

SEQ ID NO: 15074 - DNA, 20 bp, Artificial Sequence
  chemically synthesized
tccccagagagtcagtttat

SEQ ID NO: 15075 - DNA, 20 bp, Artificial Sequence
  chemically synthesized
gagagtcagtttatcagcac

SEQ ID NO: 15076 - DNA, 20 bp, Artificial Sequence
  chemically synthesized
tatcagcactggacgtaaca

SEQ ID NO: 15077 - DNA, 20 bp, Artificial Sequence
  chemically synthesized
ctggacgtaacatagttcat

SEQ ID NO: 15078 - DNA, 20 bp, Artificial Sequence
  chemically synthesized
ggacgtaacatagttcataa

SEQ ID NO: 15079 - DNA, 20 bp, Artificial Sequence
  chemically synthesized
agttcataagagcattgccg

SEQ ID NO: 15080 - DNA, 20 bp, Artificial Sequence
  chemically synthesized
tcataagagcattgccgcgg

SEQ ID NO: 15081 - DNA, 20 bp, Artificial Sequence
  chemically synthesized
aagagcattgccgcggaagc

SEQ ID NO: 15082 - DNA, 20 bp, Artificial Sequence
  chemically synthesized
cggaagccagcctgcctacc

SEQ ID NO: 15083 - DNA, 20 bp, Artificial Sequence
  chemically synthesized
ggaagccagcctgcctacct

SEQ ID NO: 15084 - DNA, 20 bp, Artificial Sequence
  chemically synthesized
gcctacctgggcttccatcc

SEQ ID NO: 15085 - DNA, 20 bp, Artificial Sequence
  chemically synthesized
cctgggcttccatcctggct

SEQ ID NO: 15086 - DNA, 20 bp, Artificial Sequence
  chemically synthesized
tcggcatgtactaaccttgt

SEQ ID NO: 15087 - DNA, 20 bp, Artificial Sequence
  chemically synthesized
gttggcctaatcatttaact

SEQ ID NO: 15088 - DNA, 20 bp, Artificial Sequence
  chemically synthesized
aatcatttaactcagcacct

SEQ ID NO: 15089 - DNA, 20 bp, Artificial Sequence
  chemically synthesized
gcatctactgtttctgtaaa

SEQ ID NO: 15090 - DNA, 20 bp, Artificial Sequence
  chemically synthesized
tctactgtttctgtaaatag

SEQ ID NO: 15091 - DNA, 20 bp, Artificial Sequence
  chemically synthesized
aaatagcagtaactacctca

SEQ ID NO: 15092 - DNA, 20 bp, Artificial Sequence
  chemically synthesized
gcagtaactacctcacagaa

SEQ ID NO: 15093 - DNA, 20 bp, Artificial Sequence
  chemically synthesized
ctacctcacagaaaagcaca

SEQ ID NO: 15094 - DNA, 20 bp, Artificial Sequence
  chemically synthesized
acagaaaagcacatagcaca

SEQ ID NO: 15095 - DNA, 20 bp, Artificial Sequence
  chemically synthesized
aaagcacatagcacatggac

SEQ ID NO: 15096 - DNA, 20 bp, Artificial Sequence
  chemically synthesized
tgttaaccctgattattatt

SEQ ID NO: 15097 - DNA, 20 bp, Artificial Sequence
  chemically synthesized
cctgattattattaagctgc

SEQ ID NO: 15098 - DNA, 20 bp, Artificial Sequence
  chemically synthesized
tgattattattaagctgcca

SEQ ID NO: 15099 - DNA, 20 bp, Artificial Sequence
  chemically synthesized
tgccagagataacctatttg

SEQ ID NO: 15100 - DNA, 20 bp, Artificial Sequence
  chemically synthesized
cctatttgtagattataaaa

SEQ ID NO: 15101 - DNA, 20 bp, Artificial Sequence
  chemically synthesized
tagattataaaacagaaact

SEQ ID NO: 15102 - DNA, 20 bp, Artificial Sequence
  chemically synthesized
gataattgatatgacttgcc

SEQ ID NO: 15103 - DNA, 20 bp, Artificial Sequence
  chemically synthesized
ataattgatatgacttgcca

SEQ ID NO: 15104 - DNA, 20 bp, Artificial Sequence
  chemically synthesized
tatgacttgccaaggacatg

SEQ ID NO: 15105 - DNA, 20 bp, Artificial Sequence
  chemically synthesized
acttgccaaggacatgtagt

SEQ ID NO: 15106 - DNA, 20 bp, Artificial Sequence
  chemically synthesized
tgccaaggacatgtagttgg

SEQ ID NO: 15107 - DNA, 20 bp, Artificial Sequence
  chemically synthesized
gccaaggacatgtagttggt

SEQ ID NO: 15108 - DNA, 20 bp, Artificial Sequence
  chemically synthesized
aaggacatgtagttggtggg

SEQ ID NO: 15109 - DNA, 20 bp, Artificial Sequence
  chemically synthesized
gacatgtagttggtgggtgg

SEQ ID NO: 15110 - DNA, 20 bp, Artificial Sequence
  chemically synthesized
tagttggtgggtggcagaac

SEQ ID NO: 15111 - DNA, 20 bp, Artificial Sequence
  chemically synthesized
agttggtgggtggcagaacg

SEQ ID NO: 15112 - DNA, 20 bp, Artificial Sequence
  chemically synthesized
gttggtgggtggcagaacga

SEQ ID NO: 15113 - DNA, 20 bp, Artificial Sequence
  chemically synthesized
gtgggtggcagaacgagggc

SEQ ID NO: 15114 - DNA, 20 bp, Artificial Sequence
  chemically synthesized
gggtggcagaacgagggctg

SEQ ID NO: 15115 - DNA, 20 bp, Artificial Sequence
  chemically synthesized
gcagaacgagggctggagcc

SEQ ID NO: 15116 - DNA, 20 bp, Artificial Sequence
  chemically synthesized
gagggctggagcccagttcc

SEQ ID NO: 15117 - DNA, 20 bp, Artificial Sequence
  chemically synthesized
agggctggagcccagttccc

SEQ ID NO: 15118 - DNA, 20 bp, Artificial Sequence
  chemically synthesized
gggctggagcccagttccca

SEQ ID NO: 15119 - DNA, 20 bp, Artificial Sequence
  chemically synthesized
cttttcattaccccacaaaa

SEQ ID NO: 15120 - DNA, 20 bp, Artificial Sequence
  chemically synthesized
ttttcattaccccacaaaac

SEQ ID NO: 15121 - DNA, 20 bp, Artificial Sequence
  chemically synthesized
gtgtgtttccttttttcata

SEQ ID NO: 15122 - DNA, 20 bp, Artificial Sequence
  chemically synthesized
tctatctttttttttttttt

SEQ ID NO: 15123 - DNA, 20 bp, Artificial Sequence
  chemically synthesized
tcttttttttttttttgaga

SEQ ID NO: 15124 - DNA, 20 bp, Artificial Sequence
  chemically synthesized
cttttttttttttttgagac

SEQ ID NO: 15125 - DNA, 20 bp, Artificial Sequence
  chemically synthesized
ttttttttttttttgagaca

SEQ ID NO: 15126 - DNA, 20 bp, Artificial Sequence
  chemically synthesized
cagggtcttactctgttgcc

SEQ ID NO: 15127 - DNA, 20 bp, Artificial Sequence
  chemically synthesized
agggtcttactctgttgccc

SEQ ID NO: 15128 - DNA, 20 bp, Artificial Sequence
  chemically synthesized
tcttactctgttgcccaggc

SEQ ID NO: 15129 - DNA, 20 bp, Artificial Sequence
  chemically synthesized
ttactctgttgcccaggctg

SEQ ID NO: 15130 - DNA, 20 bp, Artificial Sequence
  chemically synthesized
ctgttgcccaggctggagtg

SEQ ID NO: 15131 - DNA, 20 bp, Artificial Sequence
  chemically synthesized
ttgcccaggctggagtgcag

SEQ ID NO: 15132 - DNA, 20 bp, Artificial Sequence
  chemically synthesized
acctcctccgcctctcacct

SEQ ID NO: 15133 - DNA, 20 bp, Artificial Sequence
  chemically synthesized
gcctctcacctcagcctcct

SEQ ID NO: 15134 - DNA, 20 bp, Artificial Sequence
  chemically synthesized
tctcacctcagcctcctgag

SEQ ID NO: 15135 - DNA, 20 bp, Artificial Sequence
  chemically synthesized
acctcagcctcctgagtagc

SEQ ID NO: 15136 - DNA, 20 bp, Artificial Sequence
  chemically synthesized
cctcagcctcctgagtagct

SEQ ID NO: 15137 - DNA, 20 bp, Artificial Sequence
  chemically synthesized
ctcctgagtagctgggacta

SEQ ID NO: 15138 - DNA, 20 bp, Artificial Sequence
  chemically synthesized
gactacagcaccaacacgcc

SEQ ID NO: 15139 - DNA, 20 bp, Artificial Sequence
  chemically synthesized
taattttcgtaatgtttttg

SEQ ID NO: 15140 - DNA, 20 bp, Artificial Sequence
  chemically synthesized
attttcgtaatgtttttgta

SEQ ID NO: 15141 - DNA, 20 bp, Artificial Sequence
  chemically synthesized
tcgtaatgtttttgtagaga

SEQ ID NO: 15142 - DNA, 20 bp, Artificial Sequence
  chemically synthesized
gtaatgtttttgtagagatg

SEQ ID NO: 15143 - DNA, 20 bp, Artificial Sequence
  chemically synthesized
tggagtttcgccatgttgcc

SEQ ID NO: 15144 - DNA, 20 bp, Artificial Sequence
  chemically synthesized
ggagtttcgccatgttgccc

SEQ ID NO: 15145 - DNA, 20 bp, Artificial Sequence
  chemically synthesized
tttcgccatgttgcccaggc

SEQ ID NO: 15146 - DNA, 20 bp, Artificial Sequence
  chemically synthesized
caggctggtcttgaactcct

SEQ ID NO: 15147 - DNA, 20 bp, Artificial Sequence
  chemically synthesized
cttgaactcctgagttcacc

SEQ ID NO: 15148 - DNA, 20 bp, Artificial Sequence
  chemically synthesized
ttgaactcctgagttcaccc

SEQ ID NO: 15149 - DNA, 20 bp, Artificial Sequence
  chemically synthesized
gaactcctgagttcacccag

SEQ ID NO: 15150 - DNA, 20 bp, Artificial Sequence
  chemically synthesized
caggagtgattcgcccacct

SEQ ID NO: 15151 - DNA, 20 bp, Artificial Sequence
  chemically synthesized
tcgcccacctcggcctccca

SEQ ID NO: 15152 - DNA, 20 bp, Artificial Sequence
  chemically synthesized
acctcggcctcccaaagtgc

SEQ ID NO: 15153 - DNA, 20 bp, Artificial Sequence
  chemically synthesized
cctcggcctcccaaagtgct

SEQ ID NO: 15154 - DNA, 20 bp, Artificial Sequence
  chemically synthesized
ctcccaaagtgctgggatta

SEQ ID NO: 15155 - DNA, 20 bp, Artificial Sequence
  chemically synthesized
tcccaaagtgctgggattac

SEQ ID NO: 15156 - DNA, 20 bp, Artificial Sequence
  chemically synthesized
agtgctgggattacaggtgt

SEQ ID NO: 15157 - DNA, 20 bp, Artificial Sequence
  chemically synthesized
caggtgtgagccaccatgcc

SEQ ID NO: 15158 - DNA, 20 bp, Artificial Sequence
  chemically synthesized
ctaataaaactctttgctca

SEQ ID NO: 15159 - DNA, 20 bp, Artificial Sequence
  chemically synthesized
tgctcaaagcctatataact

SEQ ID NO: 15160 - DNA, 20 bp, Artificial Sequence
  chemically synthesized
accctttaacccatatgaaa

SEQ ID NO: 15161 - DNA, 20 bp, Artificial Sequence
  chemically synthesized
ccctttaacccatatgaaat

SEQ ID NO: 15162 - DNA, 20 bp, Artificial Sequence
  chemically synthesized
ttcctgtattttcaactcac

SEQ ID NO: 15163 - DNA, 20 bp, Artificial Sequence
  chemically synthesized
ctgtattttcaactcactgg

SEQ ID NO: 15164 - DNA, 20 bp, Artificial Sequence
  chemically synthesized
tgtattttcaactcactggt

SEQ ID NO: 15165 - DNA, 20 bp, Artificial Sequence
  chemically synthesized
ttctgtcttccccctttatg

SEQ ID NO: 15166 - DNA, 20 bp, Artificial Sequence
  chemically synthesized
ccctttatgtagatgatcca

SEQ ID NO: 15167 - DNA, 20 bp, Artificial Sequence
  chemically synthesized
ttatgtagatgatccaaagt

SEQ ID NO: 15168 - DNA, 20 bp, Artificial Sequence
  chemically synthesized
atgtagatgatccaaagtca

SEQ ID NO: 15169 - DNA, 20 bp, Artificial Sequence
  chemically synthesized
gtagatgatccaaagtcaga

SEQ ID NO: 15170 - DNA, 20 bp, Artificial Sequence
  chemically synthesized
agatgatccaaagtcagaga

SEQ ID NO: 15171 - DNA, 20 bp, Artificial Sequence
  chemically synthesized
gatgatccaaagtcagagag

SEQ ID NO: 15172 - DNA, 20 bp, Artificial Sequence
  chemically synthesized
atgatccaaagtcagagaga

SEQ ID NO: 15173 - DNA, 20 bp, Artificial Sequence
  chemically synthesized
tgatccaaagtcagagagag

SEQ ID NO: 15174 - DNA, 20 bp, Artificial Sequence
  chemically synthesized
ccaaagtcagagagaggggt

SEQ ID NO: 15175 - DNA, 20 bp, Artificial Sequence
  chemically synthesized
aagtcagagagaggggttgg

SEQ ID NO: 15176 - DNA, 20 bp, Artificial Sequence
  chemically synthesized
gagagaggggttggaagcat

SEQ ID NO: 15177 - DNA, 20 bp, Artificial Sequence
  chemically synthesized
agaggggttggaagcatgag

SEQ ID NO: 15178 - DNA, 20 bp, Artificial Sequence
  chemically synthesized
ttggaagcatgagtagcccg

SEQ ID NO: 15179 - DNA, 20 bp, Artificial Sequence
  chemically synthesized
gtagcccgtggcttcctgaa

SEQ ID NO: 15180 - DNA, 20 bp, Artificial Sequence
  chemically synthesized
ccgtggcttcctgaatagcc

SEQ ID NO: 15181 - DNA, 20 bp, Artificial Sequence
  chemically synthesized
cgtggcttcctgaatagcct

SEQ ID NO: 15182 - DNA, 20 bp, Artificial Sequence
  chemically synthesized
gtggcttcctgaatagcctg

SEQ ID NO: 15183 - DNA, 20 bp, Artificial Sequence
  chemically synthesized
cttcctgaatagcctgggga

SEQ ID NO: 15184 - DNA, 20 bp, Artificial Sequence
  chemically synthesized
ctggggaaagcaacttctga

SEQ ID NO: 15185 - DNA, 20 bp, Artificial Sequence
  chemically synthesized
ggaaagcaacttctgatgga

SEQ ID NO: 15186 - DNA, 20 bp, Artificial Sequence
  chemically synthesized
ttctgatggacagacattgc

SEQ ID NO: 15187 - DNA, 20 bp, Artificial Sequence
  chemically synthesized
ctgatggacagacattgcga

SEQ ID NO: 15188 - DNA, 20 bp, Artificial Sequence
  chemically synthesized
gacattgcgagagcgaatgc

SEQ ID NO: 15189 - DNA, 20 bp, Artificial Sequence
  chemically synthesized
ttgctgatctcctctctata

SEQ ID NO: 15190 - DNA, 20 bp, Artificial Sequence
  chemically synthesized
tatatggttcttaccactta

SEQ ID NO: 15191 - DNA, 20 bp, Artificial Sequence
  chemically synthesized
ggttcttaccacttaaagac

SEQ ID NO: 15192 - DNA, 20 bp, Artificial Sequence
  chemically synthesized
gttcttaccacttaaagacg

SEQ ID NO: 15193 - DNA, 20 bp, Artificial Sequence
  chemically synthesized
taccacttaaagacgaggtt

SEQ ID NO: 15194 - DNA, 20 bp, Artificial Sequence
  chemically synthesized
acttaaagacgaggttgagc

SEQ ID NO: 15195 - DNA, 20 bp, Artificial Sequence
  chemically synthesized
gttgagccagtctccaatca

SEQ ID NO: 15196 - DNA, 20 bp, Artificial Sequence
  chemically synthesized
tctccaatcacagctaccca

SEQ ID NO: 15197 - DNA, 20 bp, Artificial Sequence
  chemically synthesized
ctccaatcacagctacccaa

SEQ ID NO: 15198 - DNA, 20 bp, Artificial Sequence
  chemically synthesized
ccaatcacagctacccaaag

SEQ ID NO: 15199 - DNA, 20 bp, Artificial Sequence
  chemically synthesized
ccaaaggagtttaatgccca

SEQ ID NO: 15200 - DNA, 20 bp, Artificial Sequence
  chemically synthesized
ttaatgcccacagcttcctg

SEQ ID NO: 15201 - DNA, 20 bp, Artificial Sequence
  chemically synthesized
tgcccacagcttcctgaaga

SEQ ID NO: 15202 - DNA, 20 bp, Artificial Sequence
  chemically synthesized
cagcttcctgaagatggaac

SEQ ID NO: 15203 - DNA, 20 bp, Artificial Sequence
  chemically synthesized
ttcctgaagatggaaccaga

SEQ ID NO: 15204 - DNA, 20 bp, Artificial Sequence
  chemically synthesized
tcctgaagatggaaccagat

SEQ ID NO: 15205 - DNA, 20 bp, Artificial Sequence
  chemically synthesized
cctgaagatggaaccagatg

SEQ ID NO: 15206 - DNA, 20 bp, Artificial Sequence
  chemically synthesized
gaagatggaaccagatgggg

SEQ ID NO: 15207 - DNA, 20 bp, Artificial Sequence
  chemically synthesized
agatggaaccagatggggaa

SEQ ID NO: 15208 - DNA, 20 bp, Artificial Sequence
  chemically synthesized
gatggaaccagatggggaag

SEQ ID NO: 15209 - DNA, 20 bp, Artificial Sequence
  chemically synthesized
accagatggggaagaggacg

SEQ ID NO: 15210 - DNA, 20 bp, Artificial Sequence
  chemically synthesized
agatggggaagaggacgtag

SEQ ID NO: 15211 - DNA, 20 bp, Artificial Sequence
  chemically synthesized
gatggggaagaggacgtaga

SEQ ID NO: 15212 - DNA, 20 bp, Artificial Sequence
  chemically synthesized
aggacgtagaaggcattcct

SEQ ID NO: 15213 - DNA, 20 bp, Artificial Sequence
  chemically synthesized
ggacgtagaaggcattcctg

SEQ ID NO: 15214 - DNA, 20 bp, Artificial Sequence
  chemically synthesized
attcctgaggtctgcgatca

SEQ ID NO: 15215 - DNA, 20 bp, Artificial Sequence
  chemically synthesized
ggtctgcgatcacggacacc

SEQ ID NO: 15216 - DNA, 20 bp, Artificial Sequence
  chemically synthesized
tcacggacaccaagatgaac

SEQ ID NO: 15217 - DNA, 20 bp, Artificial Sequence
  chemically synthesized
acaccaagatgaaccagtcc

SEQ ID NO: 15218 - DNA, 20 bp, Artificial Sequence
  chemically synthesized
caccaagatgaaccagtcct

SEQ ID NO: 15219 - DNA, 20 bp, Artificial Sequence
  chemically synthesized
ccaagatgaaccagtcctgg

SEQ ID NO: 15220 - DNA, 20 bp, Artificial Sequence
  chemically synthesized
tgaaccagtcctgggagtct

SEQ ID NO: 15221 - DNA, 20 bp, Artificial Sequence
  chemically synthesized
gggagtcttggtaattcacc

SEQ ID NO: 15222 - DNA, 20 bp, Artificial Sequence
  chemically synthesized
gagtcttggtaattcacctg

SEQ ID NO: 15223 - DNA, 20 bp, Artificial Sequence
  chemically synthesized
agtcttggtaattcacctgg

SEQ ID NO: 15224 - DNA, 20 bp, Artificial Sequence
  chemically synthesized
cctggaggtaatgtgttgac

SEQ ID NO: 15225 - DNA, 20 bp, Artificial Sequence
  chemically synthesized
aatgtgttgactggatccca

SEQ ID NO: 15226 - DNA, 20 bp, Artificial Sequence
  chemically synthesized
ttgactggatcccaaagtca

SEQ ID NO: 15227 - DNA, 20 bp, Artificial Sequence
  chemically synthesized
gactggatcccaaagtcatg

SEQ ID NO: 15228 - DNA, 20 bp, Artificial Sequence
  chemically synthesized
ttcctccatcctcatttcct

SEQ ID NO: 15229 - DNA, 20 bp, Artificial Sequence
  chemically synthesized
tcctcatttccttggcacct

SEQ ID NO: 15230 - DNA, 20 bp, Artificial Sequence
  chemically synthesized
cctcatttccttggcacctc

SEQ ID NO: 15231 - DNA, 20 bp, Artificial Sequence
  chemically synthesized
catttccttggcacctcagg

SEQ ID NO: 15232 - DNA, 20 bp, Artificial Sequence
  chemically synthesized
ttggcacctcaggaagatgt

SEQ ID NO: 15233 - DNA, 20 bp, Artificial Sequence
  chemically synthesized
gcacctcaggaagatgtcag

SEQ ID NO: 15234 - DNA, 20 bp, Artificial Sequence
  chemically synthesized
acctcaggaagatgtcagca

SEQ ID NO: 15235 - DNA, 20 bp, Artificial Sequence
  chemically synthesized
agatgtcagcagagcccttg

SEQ ID NO: 15236 - DNA, 20 bp, Artificial Sequence
  chemically synthesized
cagagcccttgcagttattc

SEQ ID NO: 15237 - DNA, 20 bp, Artificial Sequence
  chemically synthesized
agagcccttgcagttattcc

SEQ ID NO: 15238 - DNA, 20 bp, Artificial Sequence
  chemically synthesized
ccttgcagttattccaggct

SEQ ID NO: 15239 - DNA, 20 bp, Artificial Sequence
  chemically synthesized
tgcagttattccaggcttgg

SEQ ID NO: 15240 - DNA, 20 bp, Artificial Sequence
  chemically synthesized
ggtggtgattgctctgctat

SEQ ID NO: 15241 - DNA, 20 bp, Artificial Sequence
  chemically synthesized
tgttttatatgccctgtatc

SEQ ID NO: 15242 - DNA, 20 bp, Artificial Sequence
  chemically synthesized
tatgccctgtatccagtatt

SEQ ID NO: 15243 - DNA, 20 bp, Artificial Sequence
  chemically synthesized
atgccctgtatccagtattc

SEQ ID NO: 15244 - DNA, 20 bp, Artificial Sequence
  chemically synthesized
atccagtattcaggtcaacc

SEQ ID NO: 15245 - DNA, 20 bp, Artificial Sequence
  chemically synthesized
gtcaacccagccctgatctt

SEQ ID NO: 15246 - DNA, 20 bp, Artificial Sequence
  chemically synthesized
attttagacaaacgtggttt

SEQ ID NO: 15247 - DNA, 20 bp, Artificial Sequence
  chemically synthesized
tttgagtccaaagatcaggg

SEQ ID NO: 15248 - DNA, 20 bp, Artificial Sequence
  chemically synthesized
aagatcagggctgggttgac

SEQ ID NO: 15249 - DNA, 20 bp, Artificial Sequence
  chemically synthesized
gggctgggttgacctgaata

SEQ ID NO: 15250 - DNA, 20 bp, Artificial Sequence
  chemically synthesized
agagcaatcaccaccaagcc

SEQ ID NO: 15251 - DNA, 20 bp, Artificial Sequence
  chemically synthesized
tcctgaggtgccaaggaaat

SEQ ID NO: 15252 - DNA, 20 bp, Artificial Sequence
  chemically synthesized
aaggaaatgaggatggagga

SEQ ID NO: 15253 - DNA, 20 bp, Artificial Sequence
  chemically synthesized
aaatgaggatggaggaagga

SEQ ID NO: 15254 - DNA, 20 bp, Artificial Sequence
  chemically synthesized
atgaatgttctccatgactt

SEQ ID NO: 15255 - DNA, 20 bp, Artificial Sequence
  chemically synthesized
agtcaacacattacctccag

SEQ ID NO: 15256 - DNA, 20 bp, Artificial Sequence
  chemically synthesized
tgtccgtgatcgcagacctc

SEQ ID NO: 15257 - DNA, 20 bp, Artificial Sequence
  chemically synthesized
gctgtgggcattaaactcct

SEQ ID NO: 15258 - DNA, 20 bp, Artificial Sequence
  chemically synthesized
tccaacccctctctctgact

SEQ ID NO: 15259 - DNA, 20 bp, Artificial Sequence
  chemically synthesized
agacagaaaaaatcctacca

SEQ ID NO: 15260 - DNA, 20 bp, Artificial Sequence
  chemically synthesized
tacaggaaagcctatttcat

SEQ ID NO: 15261 - DNA, 20 bp, Artificial Sequence
  chemically synthesized
agcctatttcatatgggtta

SEQ ID NO: 15262 - DNA, 20 bp, Artificial Sequence
  chemically synthesized
tgggttaaagggtaggacag

SEQ ID NO: 15263 - DNA, 20 bp, Artificial Sequence
  chemically synthesized
agttgaatttcgtgaaaagt

SEQ ID NO: 15264 - DNA, 20 bp, Artificial Sequence
  chemically synthesized
agttatataggctttgagca

SEQ ID NO: 15265 - DNA, 20 bp, Artificial Sequence
  chemically synthesized
actttgggaggccgaggtgg

SEQ ID NO: 15266 - DNA, 20 bp, Artificial Sequence
  chemically synthesized
ccgaggtgggcgaatcactc

SEQ ID NO: 15267 - DNA, 20 bp, Artificial Sequence
  chemically synthesized
aatcactcctgggtgaactc

SEQ ID NO: 15268 - DNA, 20 bp, Artificial Sequence
  chemically synthesized
gagaggcggaggaggttgca

SEQ ID NO: 15269 - DNA, 20 bp, Artificial Sequence
  chemically synthesized
ctgcactccagcctgggcaa

SEQ ID NO: 15270 - DNA, 20 bp, Artificial Sequence
  chemically synthesized
tgattcaacagcctgttttg

SEQ ID NO: 15271 - DNA, 20 bp, Artificial Sequence
  chemically synthesized
tggcaagtcatatcaattat

SEQ ID NO: 15272 - DNA, 20 bp, Artificial Sequence
  chemically synthesized
tctggcagcttaataataat

SEQ ID NO: 15273 - DNA, 20 bp, Artificial Sequence
  chemically synthesized
tagatgcagagaccaaggtg

SEQ ID NO: 15274 - DNA, 20 bp, Artificial Sequence
  chemically synthesized
aaggttagtacatgccgagc

SEQ ID NO: 15275 - DNA, 20 bp, Artificial Sequence
  chemically synthesized
ctggggagcaggggaaagcc

SEQ ID NO: 15276 - DNA, 20 bp, Artificial Sequence
  chemically synthesized
ttttgtttgtttgtttgaga

SEQ ID NO: 15277 - DNA, 20 bp, Artificial Sequence
  chemically synthesized
gtctcgcactgttgcctggc

SEQ ID NO: 15278 - DNA, 20 bp, Artificial Sequence
  chemically synthesized
gcctcagcctcccaagtagc

SEQ ID NO: 15279 - DNA, 20 bp, Artificial Sequence
  chemically synthesized
gccttggcctccctaagtgc

SEQ ID NO: 15280 - DNA, 20 bp, Artificial Sequence
  chemically synthesized
tgaagaaccatgcaatctct

SEQ ID NO: 15281 - DNA, 20 bp, Artificial Sequence
  chemically synthesized
ctctctgggttgatagaggc

SEQ ID NO: 15282 - DNA, 20 bp, Artificial Sequence
  chemically synthesized
aaatcactattccaccatca

SEQ ID NO: 15283 - DNA, 20 bp, Artificial Sequence
  chemically synthesized
atactctgtttcaaagtaga

SEQ ID NO: 15284 - DNA, 20 bp, Artificial Sequence
  chemically synthesized
ggggggctcgtcctaggggc

SEQ ID NO: 15285 - DNA, 20 bp, Artificial Sequence
  chemically synthesized
agtcacatagctgccatttt

SEQ ID NO: 15286 - DNA, 20 bp, Artificial Sequence
  chemically synthesized
agctgccattttatggattt

SEQ ID NO: 15287 - DNA, 20 bp, Artificial Sequence
  chemically synthesized
ttttttttttttttttgaga

SEQ ID NO: 15288 - DNA, 20 bp, Artificial Sequence
  chemically synthesized
gattctcttgccttagcctc

SEQ ID NO: 15289 - DNA, 20 bp, Artificial Sequence
  chemically synthesized
gccttagcctcccgagtagc

SEQ ID NO: 15290 - DNA, 20 bp, Artificial Sequence
  chemically synthesized
tgtgagccaccgcgcctgcc

SEQ ID NO: 15291 - DNA, 20 bp, Artificial Sequence
  chemically synthesized
caccgcgcctgcctggagtt

SEQ ID NO: 15292 - DNA, 20 bp, Artificial Sequence
  chemically synthesized
actttgggaggctgaggtgg

SEQ ID NO: 15293 - DNA, 20 bp, Artificial Sequence
  chemically synthesized
ggctgaggtgggaggattgc

SEQ ID NO: 15294 - DNA, 20 bp, Artificial Sequence
  chemically synthesized
actaaaaatacaaaaactag

SEQ ID NO: 15295 - DNA, 20 bp, Artificial Sequence
  chemically synthesized
tattcaggaggctgaggtgg

SEQ ID NO: 15296 - DNA, 20 bp, Artificial Sequence
  chemically synthesized
ttgcgccactgcactccagg

SEQ ID NO: 15297 - DNA, 20 bp, Artificial Sequence
  chemically synthesized
aaacttgttctgtttttcca

SEQ ID NO: 15298 - DNA, 20 bp, Artificial Sequence
  chemically synthesized
tttggacagcgtccatactg

SEQ ID NO: 15299 - DNA, 20 bp, Artificial Sequence
  chemically synthesized
agcgtccatactggtgggtt

SEQ ID NO: 15300 - DNA, 20 bp, Artificial Sequence
  chemically synthesized
ccagcccctgcagacagaag

SEQ ID NO: 15301 - DNA, 20 bp, Artificial Sequence
  chemically synthesized
gtggacctcgtttacctgtt

SEQ ID NO: 15302 - DNA, 20 bp, Artificial Sequence
  chemically synthesized
ttcacttctgcaatactttc

SEQ ID NO: 15303 - DNA, 20 bp, Artificial Sequence
  chemically synthesized
aaatctgcctattacagaac

SEQ ID NO: 15304 - DNA, 20 bp, Artificial Sequence
  chemically synthesized
tgcctattacagaacctgga

SEQ ID NO: 15305 - DNA, 20 bp, Artificial Sequence
  chemically synthesized
tccatgggcaaagggctcgt

SEQ ID NO: 15306 - DNA, 20 bp, Artificial Sequence
  chemically synthesized
ctctcacgagccctttgccc

SEQ ID NO: 15307 - DNA, 20 bp, Artificial Sequence
  chemically synthesized
ttcaggaaagtattgcagaa

SEQ ID NO: 15308 - DNA, 20 bp, Artificial Sequence
  chemically synthesized
agagcatgacaaaagtacaa

SEQ ID NO: 15309 - DNA, 20 bp, Artificial Sequence
  chemically synthesized
cagtatggacgctgtccaaa

SEQ ID NO: 15310 - DNA, 20 bp, Artificial Sequence
  chemically synthesized
ggaaaaacagaacaagtttc

SEQ ID NO: 15311 - DNA, 20 bp, Artificial Sequence
  chemically synthesized
agaacaagtttctggggtta

SEQ ID NO: 15312 - DNA, 20 bp, Artificial Sequence
  chemically synthesized
caagtttctggggttactga

SEQ ID NO: 15313 - DNA, 20 bp, Artificial Sequence
  chemically synthesized
ccaaagcctacaccttcaag

SEQ ID NO: 15314 - DNA, 20 bp, Artificial Sequence
  chemically synthesized
caagaagagtgtagcctgag

SEQ ID NO: 15315 - DNA, 20 bp, Artificial Sequence
  chemically synthesized
gttgcctctagaagggagaa

SEQ ID NO: 15316 - DNA, 20 bp, Artificial Sequence
  chemically synthesized
acttttgcattttgaactgt

SEQ ID NO: 15317 - DNA, 20 bp, Artificial Sequence
  chemically synthesized
tatcttttttttttttgaga

SEQ ID NO: 15318 - DNA, 20 bp, Artificial Sequence
  chemically synthesized
tctggctcagtaacccagcc

SEQ ID NO: 15319 - DNA, 20 bp, Artificial Sequence
  chemically synthesized
tcattgtgacctctacctcc

SEQ ID NO: 15320 - DNA, 20 bp, Artificial Sequence
  chemically synthesized
gatcctcccacctcagcctc

SEQ ID NO: 15321 - DNA, 20 bp, Artificial Sequence
  chemically synthesized
ttttgtatttttagtagaga

SEQ ID NO: 15322 - DNA, 20 bp, Artificial Sequence
  chemically synthesized
acctcagcctcccaaagtgc

SEQ ID NO: 15323 - DNA, 20 bp, Artificial Sequence
  chemically synthesized
caggcagatcacatgaggtc

SEQ ID NO: 15324 - DNA, 20 bp, Artificial Sequence
  chemically synthesized
cgtttctaccaaaaaatata

SEQ ID NO: 15325 - DNA, 20 bp, Artificial Sequence
  chemically synthesized
tactcgggaggctaaggcaa

SEQ ID NO: 15326 - DNA, 20 bp, Artificial Sequence
  chemically synthesized
ttatgccactgcactacagg

SEQ ID NO: 15327 - DNA, 20 bp, Artificial Sequence
  chemically synthesized
tcaagaagtatttgtcctgg

SEQ ID NO: 15328 - DNA, 20 bp, Artificial Sequence
  chemically synthesized
aacttggacttgcatatacc

SEQ ID NO: 15329 - DNA, 20 bp, Artificial Sequence
  chemically synthesized
atgggttccctcaggcctca

SEQ ID NO: 15330 - DNA, 20 bp, Artificial Sequence
  chemically synthesized
ttgcatttcctctgacatca

SEQ ID NO: 15331 - DNA, 20 bp, Artificial Sequence
  chemically synthesized
aacatggcctgcatttccat

SEQ ID NO: 15332 - DNA, 20 bp, Artificial Sequence
  chemically synthesized
ccatcagaattgctctctgt

SEQ ID NO: 15333 - DNA, 20 bp, Artificial Sequence
  chemically synthesized
gtatcctctctactttgaaa

SEQ ID NO: 15334 - DNA, 20 bp, Artificial Sequence
  chemically synthesized
aataggtgtcaaccgccagt

SEQ ID NO: 15335 - DNA, 20 bp, Artificial Sequence
  chemically synthesized
tgccttttatcccgtgatgg

SEQ ID NO: 15336 - DNA, 20 bp, Artificial Sequence
  chemically synthesized
ttcaatggagatcagatgtt

SEQ ID NO: 15337 - DNA, 20 bp, Artificial Sequence
  chemically synthesized
cacttcatctttttattttt

SEQ ID NO: 15338 - DNA, 20 bp, Artificial Sequence
  chemically synthesized
tattttttagaatcatgcgg

SEQ ID NO: 15339 - DNA, 20 bp, Artificial Sequence
  chemically synthesized
ggcaggcagatcatgaggtc

SEQ ID NO: 15340 - DNA, 20 bp, Artificial Sequence
  chemically synthesized
tacttgggaggctgaggcag

SEQ ID NO: 15341 - DNA, 20 bp, Artificial Sequence
  chemically synthesized
aaagaaagaaagaaagtggc

SEQ ID NO: 15342 - DNA, 20 bp, Artificial Sequence
  chemically synthesized
agaaagaaagtggccagaat

SEQ ID NO: 15343 - DNA, 20 bp, Artificial Sequence
  chemically synthesized
gggctttcccctgctcccca

SEQ ID NO: 15344 - DNA, 20 bp, Artificial Sequence
  chemically synthesized
ttgccaaggacatgtagttg

SEQ ID NO: 15345 - DNA, 20 bp, Artificial Sequence
  chemically synthesized
gagggctggagcccagttcc

SEQ ID NO: 15346 - DNA, 20 bp, Artificial Sequence
  chemically synthesized
ttaccccacaaaacaggctg

SEQ ID NO: 15347 - DNA, 20 bp, Artificial Sequence
  chemically synthesized
tcttttttttttttttgaga

SEQ ID NO: 15348 - DNA, 20 bp, Artificial Sequence
  chemically synthesized
tcttactctgttgcccaggc

SEQ ID NO: 15349 - DNA, 20 bp, Artificial Sequence
  chemically synthesized
ccgcctctcacctcagcctc

SEQ ID NO: 15350 - DNA, 20 bp, Artificial Sequence
  chemically synthesized
tcgtaatgtttttgtagaga

SEQ ID NO: 15351 - DNA, 20 bp, Artificial Sequence
  chemically synthesized
cccaggctggtcttgaactc

SEQ ID NO: 15352 - DNA, 20 bp, Artificial Sequence
  chemically synthesized
ttgaactcctgagttcaccc

SEQ ID NO: 15353 - DNA, 20 bp, Artificial Sequence
  chemically synthesized
acctcggcctcccaaagtgc

SEQ ID NO: 15354 - DNA, 20 bp, Artificial Sequence
  chemically synthesized
ctgtattttcaactcactgg

SEQ ID NO: 15355 - DNA, 20 bp, Artificial Sequence
  chemically synthesized
gatgatccaaagtcagagag

SEQ ID NO: 15356 - DNA, 20 bp, Artificial Sequence
  chemically synthesized
cagagagaggggttggaagc

SEQ ID NO: 15357 - DNA, 20 bp, Artificial Sequence
  chemically synthesized
catgagtagcccgtggcttc

SEQ ID NO: 15358 - DNA, 20 bp, Artificial Sequence
  chemically synthesized
gatggacagacattgcgaga

SEQ ID NO: 15359 - DNA, 20 bp, Artificial Sequence
  chemically synthesized
ctccaatcacagctacccaa

SEQ ID NO: 15360 - DNA, 20 bp, Artificial Sequence
  chemically synthesized
caccaagatgaaccagtcct

SEQ ID NO: 15361 - DNA, 20 bp, Artificial Sequence
  chemically synthesized
acctggaggtaatgtgttga

SEQ ID NO: 15362 - DNA, 20 bp, Artificial Sequence
  chemically synthesized
ttggtggtgattgctctgct

SEQ ID NO: 15363 - DNA, 20 bp, Artificial Sequence
  chemically synthesized
ccatatagagaggagatcag

SEQ ID NO: 15364 - DNA, 20 bp, Artificial Sequence
  chemically synthesized
catctacataaagggggaag

SEQ ID NO: 15365 - DNA, 20 bp, Artificial Sequence
  chemically synthesized
tgaagcagaagaggtaacat

SEQ ID NO: 15366 - DNA, 20 bp, Artificial Sequence
  chemically synthesized
tgaggtagttactgctattt

SEQ ID NO: 15367 - DNA, 20 bp, Artificial Sequence
  chemically synthesized
gtggctctccctgatttcgg

SEQ ID NO: 15368 - DNA, 20 bp, Artificial Sequence
  chemically synthesized
ctaattctttatattttttg

SEQ ID NO: 15369 - DNA, 20 bp, Artificial Sequence
  chemically synthesized
ccaccgcgcctgcctggagt

SEQ ID NO: 15370 - DNA, 20 bp, Artificial Sequence
  chemically synthesized
aaagcattcattcagtaacc

SEQ ID NO: 15371 - DNA, 20 bp, Artificial Sequence
  chemically synthesized
ccagtatggacgctgtccaa

SEQ ID NO: 15372 - DNA, 20 bp, Artificial Sequence
  chemically synthesized
ccgtttctaccaaaaaatat

SEQ ID NO: 15373 - DNA, 20 bp, Artificial Sequence
  chemically synthesized
ctactcgggaggctaaggca

SEQ ID NO: 15374 - DNA, 20 bp, Artificial Sequence
  chemically synthesized
ctcaagaagtatttgtcctg

SEQ ID NO: 15375 - DNA, 20 bp, Artificial Sequence
  chemically synthesized
cttgcatttcctctgacatc

SEQ ID NO: 15376 - DNA, 20 bp, Artificial Sequence
  chemically synthesized
aaacatggcctgcatttcca

SEQ ID NO: 15377 - DNA, 20 bp, Artificial Sequence
  chemically synthesized
acacttcatctttttatttt

SEQ ID NO: 15378 - DNA, 20 bp, Artificial Sequence
  chemically synthesized
ctacttgggaggctgaggca

SEQ ID NO: 15379 - DNA, 20 bp, Artificial Sequence
  chemically synthesized
ccatctcaaacaaacaaaca

SEQ ID NO: 15380 - DNA, 20 bp, Artificial Sequence
  chemically synthesized
ctcaaacaaacaaacaaaag

SEQ ID NO: 15381 - DNA, 20 bp, Artificial Sequence
  chemically synthesized
aacaaacaaacaaaagaaag

SEQ ID NO: 15382 - DNA, 20 bp, Artificial Sequence
  chemically synthesized
aacaaacaaaagaaagaaag

SEQ ID NO: 15383 - DNA, 20 bp, Artificial Sequence
  chemically synthesized
gaaagaaagaaagaaagtgg

SEQ ID NO: 15384 - DNA, 20 bp, Artificial Sequence
  chemically synthesized
agaatgggaatgtttacgtg

SEQ ID NO: 15385 - DNA, 20 bp, Artificial Sequence
  chemically synthesized
taaatagcagtaactacctc

SEQ ID NO: 15386 - DNA, 20 bp, Artificial Sequence
  chemically synthesized
acctatttgtagattataaa

SEQ ID NO: 15387 - DNA, 20 bp, Artificial Sequence
  chemically synthesized
aatactggatacagggcata

SEQ ID NO: 15388 - DNA, 20 bp, Artificial Sequence
  chemically synthesized
tggcgaaactccatctctac

SEQ ID NO: 15389 - DNA, 20 bp, Artificial Sequence
  chemically synthesized
cccgtctctactaaaaatac

SEQ ID NO: 15390 - DNA, 20 bp, Artificial Sequence
  chemically synthesized
ttgctgtagtagtcagtatc

SEQ ID NO: 15391 - DNA, 20 bp, Artificial Sequence
  chemically synthesized
gtccaaagagaatcctatgg

SEQ ID NO: 15392 - DNA, 20 bp, Artificial Sequence
  chemically synthesized
gataacctatttgtagatta

SEQ ID NO: 15393 - DNA, 20 bp, Artificial Sequence
  chemically synthesized
ggtgacttttcattacccca

SEQ ID NO: 15394 - DNA, 20 bp, Artificial Sequence
  chemically synthesized
cctcttctgcttcatactaa

SEQ ID NO: 15395 - DNA, 20 bp, Artificial Sequence
  chemically synthesized
cagccctgatctttggactc

SEQ ID NO: 15396 - DNA, 20 bp, Artificial Sequence
  chemically synthesized
cattaaactcctttgggtag

SEQ ID NO: 15397 - DNA, 20 bp, Artificial Sequence
  chemically synthesized
cgcaatgtctgtccatcaga

SEQ ID NO: 15398 - DNA, 20 bp, Artificial Sequence
  chemically synthesized
ttcaggaagccacgggctac

SEQ ID NO: 15399 - DNA, 20 bp, Artificial Sequence
  chemically synthesized
tcgtgaaaagtctgagttat

SEQ ID NO: 15400 - DNA, 20 bp, Artificial Sequence
  chemically synthesized
agttatataggctttgagca

SEQ ID NO: 15401 - DNA, 20 bp, Artificial Sequence
  chemically synthesized
tatgaaaaaaggaaacacac

SEQ ID NO: 15402 - DNA, 20 bp, Artificial Sequence
  chemically synthesized
aacacacagatgattcaaca

SEQ ID NO: 15403 - DNA, 20 bp, Artificial Sequence
  chemically synthesized
tggcaagtcatatcaattat

SEQ ID NO: 15404 - DNA, 20 bp, Artificial Sequence
  chemically synthesized
gtcatatcaattatctgagt

SEQ ID NO: 15405 - DNA, 20 bp, Artificial Sequence
  chemically synthesized
tctacaaataggttatctct

SEQ ID NO: 15406 - DNA, 20 bp, Artificial Sequence
  chemically synthesized
tgtgtgccagtccatgtgct

SEQ ID NO: 15407 - DNA, 20 bp, Artificial Sequence
  chemically synthesized
agagaccaaggtgctgagtt

SEQ ID NO: 15408 - DNA, 20 bp, Artificial Sequence
  chemically synthesized
atggaagcccaggtaggcag

SEQ ID NO: 15409 - DNA, 20 bp, Artificial Sequence
  chemically synthesized
ctggggagcaggggaaagcc

SEQ ID NO: 15410 - DNA, 20 bp, Artificial Sequence
  chemically synthesized
ccactttctttctttctttc

SEQ ID NO: 15411 - DNA, 20 bp, Artificial Sequence
  chemically synthesized
tttctttctttctttctttt

SEQ ID NO: 15412 - DNA, 20 bp, Artificial Sequence
  chemically synthesized
tttctttctttcttttgttt

SEQ ID NO: 15413 - DNA, 20 bp, Artificial Sequence
  chemically synthesized
aacctctgcctctccggttc

SEQ ID NO: 15414 - DNA, 20 bp, Artificial Sequence
  chemically synthesized
tgcctcagcctcccaagtag

SEQ ID NO: 15415 - DNA, 20 bp, Artificial Sequence
  chemically synthesized
ttttgtatttttagtagaga

SEQ ID NO: 15416 - DNA, 20 bp, Artificial Sequence
  chemically synthesized
tgccttggcctccctaagtg

SEQ ID NO: 15417 - DNA, 20 bp, Artificial Sequence
  chemically synthesized
gtgagccactacacccagcc

SEQ ID NO: 15418 - DNA, 20 bp, Artificial Sequence
  chemically synthesized
aggccagagttagtggctct

SEQ ID NO: 15419 - DNA, 20 bp, Artificial Sequence
  chemically synthesized
tctagtacttttaaagggga

SEQ ID NO: 15420 - DNA, 20 bp, Artificial Sequence
  chemically synthesized
gaagtggtttgtctgagata

SEQ ID NO: 15421 - DNA, 20 bp, Artificial Sequence
  chemically synthesized
aattctgatggaaatgcagg

SEQ ID NO: 15422 - DNA, 20 bp, Artificial Sequence
  chemically synthesized
tctctgatgtcagaggaaat

SEQ ID NO: 15423 - DNA, 20 bp, Artificial Sequence
  chemically synthesized
aacccatggtatatgcaagt

SEQ ID NO: 15424 - DNA, 20 bp, Artificial Sequence
  chemically synthesized
aagtcacatagctgccattt

SEQ ID NO: 15425 - DNA, 20 bp, Artificial Sequence
  chemically synthesized
tagctgccattttatggatt

SEQ ID NO: 15426 - DNA, 20 bp, Artificial Sequence
  chemically synthesized
aacctccgcctcccaggttc

SEQ ID NO: 15427 - DNA, 20 bp, Artificial Sequence
  chemically synthesized
tgccttagcctcccgagtag

SEQ ID NO: 15428 - DNA, 20 bp, Artificial Sequence
  chemically synthesized
tttatattttttggtagaaa

SEQ ID NO: 15429 - DNA, 20 bp, Artificial Sequence
  chemically synthesized
tgccttggcctcccaaagtg

SEQ ID NO: 15430 - DNA, 20 bp, Artificial Sequence
  chemically synthesized
cctgcctggagttcagaatc

SEQ ID NO: 15431 - DNA, 20 bp, Artificial Sequence
  chemically synthesized
agaatcttgggcttcattat

SEQ ID NO: 15432 - DNA, 20 bp, Artificial Sequence
  chemically synthesized
cactttgggaggctgaggtg

SEQ ID NO: 15433 - DNA, 20 bp, Artificial Sequence
  chemically synthesized
gaggtagaggtcacaatgag

SEQ ID NO: 15434 - DNA, 20 bp, Artificial Sequence
  chemically synthesized
gctacactcttcttgaaggt

SEQ ID NO: 15435 - DNA, 20 bp, Artificial Sequence
  chemically synthesized
tcagtaaccccagaaacttg

SEQ ID NO: 15436 - DNA, 20 bp, Artificial Sequence
  chemically synthesized
gaaacttgttctgtttttcc

SEQ ID NO: 15437 - DNA, 20 bp, Artificial Sequence
  chemically synthesized
tttggacagcgtccatactg

SEQ ID NO: 15438 - DNA, 20 bp, Artificial Sequence
  chemically synthesized
gcagacagaagctgagtgga

SEQ ID NO: 15439 - DNA, 20 bp, Artificial Sequence
  chemically synthesized
tccatccaggttctgtaata

SEQ ID NO: 15440 - DNA, 20 bp, Artificial Sequence
  chemically synthesized
tctcctcatgtcccctcaag

SEQ ID NO: 15441 - DNA, 20 bp, Artificial Sequence
  chemically synthesized
taacaggtaaacgaggtcca

SEQ ID NO: 15442 - DNA, 20 bp, Artificial Sequence
  chemically synthesized
gcttctgtctgcaggggctg

SEQ ID NO: 15443 - DNA, 20 bp, Artificial Sequence
  chemically synthesized
cagtctcacaggttacaggg

SEQ ID NO: 15444 - DNA, 20 bp, Artificial Sequence
  chemically synthesized
gaatcctatggaaaaacaga

SEQ ID NO: 15445 - DNA, 20 bp, Artificial Sequence
  chemically synthesized
agtttctggggttactgaat

SEQ ID NO: 15446 - DNA, 20 bp, Artificial Sequence
  chemically synthesized
tcaagaagagtgtagcctga

SEQ ID NO: 15447 - DNA, 20 bp, Artificial Sequence
  chemically synthesized
tatgtaacttttgcattttg

SEQ ID NO: 15448 - DNA, 20 bp, Artificial Sequence
  chemically synthesized
ggtgtgtgccaccacatcca

SEQ ID NO: 15449 - DNA, 20 bp, Artificial Sequence
  chemically synthesized
ttttgtatttttagtagaga

SEQ ID NO: 15450 - DNA, 20 bp, Artificial Sequence
  chemically synthesized
cacctcagcctcccaaagtg

SEQ ID NO: 15451 - DNA, 20 bp, Artificial Sequence
  chemically synthesized
ttaaacacaaataatgaagc

SEQ ID NO: 15452 - DNA, 20 bp, Artificial Sequence
  chemically synthesized
caggcagatcacatgaggtc

SEQ ID NO: 15453 - DNA, 20 bp, Artificial Sequence
  chemically synthesized
gcctggccaacatggtgaaa

SEQ ID NO: 15454 - DNA, 20 bp, Artificial Sequence
  chemically synthesized
tcgggaggctaaggcaagag

SEQ ID NO: 15455 - DNA, 20 bp, Artificial Sequence
  chemically synthesized
gaggcggaggttgccgtgag

SEQ ID NO: 15456 - DNA, 20 bp, Artificial Sequence
  chemically synthesized
tggaagaatgcatatggaac

SEQ ID NO: 15457 - DNA, 20 bp, Artificial Sequence
  chemically synthesized
ttgctctctgtaaggatgta

SEQ ID NO: 15458 - DNA, 20 bp, Artificial Sequence
  chemically synthesized
gtaaggatgtatatagcttc

SEQ ID NO: 15459 - DNA, 20 bp, Artificial Sequence
  chemically synthesized
tttatcccgtgatggtggaa

SEQ ID NO: 15460 - DNA, 20 bp, Artificial Sequence
  chemically synthesized
ctctggcctctatcaaccca

SEQ ID NO: 15461 - DNA, 20 bp, Artificial Sequence
  chemically synthesized
atggttcttcaatggagatc

SEQ ID NO: 15462 - DNA, 20 bp, Artificial Sequence
  chemically synthesized
gaggcagaggttgcagtgag

SEQ ID NO: 15463 - DNA, 20 bp, Artificial Sequence
  chemically synthesized
aaagaaagtggccagaatgg

SEQ ID NO: 15464 - DNA, 20 bp, Artificial Sequence
  chemically synthesized
aaattggcaaatgctaaact

SEQ ID NO: 15465 - DNA, 20 bp, Artificial Sequence
  chemically synthesized
tttcccctgctccccagaga

SEQ ID NO: 15466 - DNA, 20 bp, Artificial Sequence
  chemically synthesized
gcggaagccagcctgcctac

SEQ ID NO: 15467 - DNA, 20 bp, Artificial Sequence
  chemically synthesized
agcaccttggtctctgcatc

SEQ ID NO: 15468 - DNA, 20 bp, Artificial Sequence
  chemically synthesized
atagcacatggactggcaca

SEQ ID NO: 15469 - DNA, 20 bp, Artificial Sequence
  chemically synthesized
cactgtttaataaatgttaa

SEQ ID NO: 15470 - DNA, 20 bp, Artificial Sequence
  chemically synthesized
gctgccagagataacctatt

SEQ ID NO: 15471 - DNA, 20 bp, Artificial Sequence
  chemically synthesized
aacaggctgttgaatcatct

SEQ ID NO: 15472 - DNA, 20 bp, Artificial Sequence
  chemically synthesized
acacgcccagctaattttcg

SEQ ID NO: 15473 - DNA, 20 bp, Artificial Sequence
  chemically synthesized
tcgtaatgtttttgtagaga

SEQ ID NO: 15474 - DNA, 20 bp, Artificial Sequence
  chemically synthesized
gaactcctgagttcacccag

SEQ ID NO: 15475 - DNA, 20 bp, Artificial Sequence
  chemically synthesized
cacctcggcctcccaaagtg

SEQ ID NO: 15476 - DNA, 20 bp, Artificial Sequence
  chemically synthesized
atctttctttatgttacctc

SEQ ID NO: 15477 - DNA, 20 bp, Artificial Sequence
  chemically synthesized
taccctttaacccatatgaa

SEQ ID NO: 15478 - DNA, 20 bp, Artificial Sequence
  chemically synthesized
cctgtattttcaactcactg

SEQ ID NO: 15479 - DNA, 20 bp, Artificial Sequence
  chemically synthesized
ggttggaagcatgagtagcc

SEQ ID NO: 15480 - DNA, 20 bp, Artificial Sequence
  chemically synthesized
ctccaatcacagctacccaa

SEQ ID NO: 15481 - DNA, 20 bp, Artificial Sequence
  chemically synthesized
acccaaaggagtttaatgcc

SEQ ID NO: 15482 - DNA, 20 bp, Artificial Sequence
  chemically synthesized
gcagagcccttgcagttatt

SEQ ID NO: 15483 - DNA, 20 bp, Artificial Sequence
  chemically synthesized
tgcagttattccaggcttgg

SEQ ID NO: 15484 - DNA, 20 bp, Artificial Sequence
  chemically synthesized
gctatgagtctgtgccttgc

SEQ ID NO: 15485 - DNA, 20 bp, Artificial Sequence
  chemically synthesized
ctgatctttggactcaaaaa

SEQ ID NO: 15486 - DNA, 22 bp, Artificial Sequence
  chemically synthesized
tagacaaacgtggtttttgagt

SEQ ID NO: 15487 - DNA, 22 bp, Artificial Sequence
  chemically synthesized
agacaaacgtggtttttgagtc

SEQ ID NO: 15488 - DNA, 22 bp, Artificial Sequence
  chemically synthesized
gacaaacgtggtttttgagtcc

SEQ ID NO: 15489 - DNA, 22 bp, Artificial Sequence
  chemically synthesized
ttgagtccaaagatcagggctg

SEQ ID NO: 15490 - DNA, 22 bp, Artificial Sequence
  chemically synthesized
tgagtccaaagatcagggctgg

SEQ ID NO: 15491 - DNA, 22 bp, Artificial Sequence
  chemically synthesized
gagtccaaagatcagggctggg

SEQ ID NO: 15492 - DNA, 22 bp, Artificial Sequence
  chemically synthesized
agtccaaagatcagggctgggt

SEQ ID NO: 15493 - DNA, 22 bp, Artificial Sequence
  chemically synthesized
ggttgacctgaatactggatac

SEQ ID NO: 15494 - DNA, 22 bp, Artificial Sequence
  chemically synthesized
acctgaatactggatacagggc

SEQ ID NO: 15495 - DNA, 22 bp, Artificial Sequence
  chemically synthesized
aatactggatacagggcatata

SEQ ID NO: 15496 - DNA, 22 bp, Artificial Sequence
  chemically synthesized
gatacagggcatataaaacagg

SEQ ID NO: 15497 - DNA, 22 bp, Artificial Sequence
  chemically synthesized
atagcagagcaatcaccaccaa

SEQ ID NO: 15498 - DNA, 22 bp, Artificial Sequence
  chemically synthesized
gaataactgcaagggctctgct

SEQ ID NO: 15499 - DNA, 22 bp, Artificial Sequence
  chemically synthesized
caagggctctgctgacatcttc

SEQ ID NO: 15500 - DNA, 22 bp, Artificial Sequence
  chemically synthesized
tgctgacatcttcctgaggtgc

SEQ ID NO: 15501 - DNA, 22 bp, Artificial Sequence
  chemically synthesized
ctgacatcttcctgaggtgcca

SEQ ID NO: 15502 - DNA, 22 bp, Artificial Sequence
  chemically synthesized
acatcttcctgaggtgccaagg

SEQ ID NO: 15503 - DNA, 22 bp, Artificial Sequence
  chemically synthesized
cctgaggtgccaaggaaatgag

SEQ ID NO: 15504 - DNA, 22 bp, Artificial Sequence
  chemically synthesized
ctgaggtgccaaggaaatgagg

SEQ ID NO: 15505 - DNA, 22 bp, Artificial Sequence
  chemically synthesized
aggtgccaaggaaatgaggatg

SEQ ID NO: 15506 - DNA, 22 bp, Artificial Sequence
  chemically synthesized
tccatgactttgggatccagtc

SEQ ID NO: 15507 - DNA, 22 bp, Artificial Sequence
  chemically synthesized
catgactttgggatccagtcaa

SEQ ID NO: 15508 - DNA, 22 bp, Artificial Sequence
  chemically synthesized
tgggatccagtcaacacattac

SEQ ID NO: 15509 - DNA, 22 bp, Artificial Sequence
  chemically synthesized
gggatccagtcaacacattacc

SEQ ID NO: 15510 - DNA, 22 bp, Artificial Sequence
  chemically synthesized
ggatccagtcaacacattacct

SEQ ID NO: 15511 - DNA, 22 bp, Artificial Sequence
  chemically synthesized
cctccaggtgaattaccaagac

SEQ ID NO: 15512 - DNA, 22 bp, Artificial Sequence
  chemically synthesized
caggtgaattaccaagactccc

SEQ ID NO: 15513 - DNA, 22 bp, Artificial Sequence
  chemically synthesized
ccaagactcccaggactggttc

SEQ ID NO: 15514 - DNA, 22 bp, Artificial Sequence
  chemically synthesized
ccaggactggttcatcttggtg

SEQ ID NO: 15515 - DNA, 22 bp, Artificial Sequence
  chemically synthesized
gttcatcttggtgtccgtgatc

SEQ ID NO: 15516 - DNA, 22 bp, Artificial Sequence
  chemically synthesized
atcttggtgtccgtgatcgcag

SEQ ID NO: 15517 - DNA, 22 bp, Artificial Sequence
  chemically synthesized
ggtgtccgtgatcgcagacctc

SEQ ID NO: 15518 - DNA, 22 bp, Artificial Sequence
  chemically synthesized
gtgtccgtgatcgcagacctca

SEQ ID NO: 15519 - DNA, 22 bp, Artificial Sequence
  chemically synthesized
aggaatgccttctacgtcctct

SEQ ID NO: 15520 - DNA, 22 bp, Artificial Sequence
  chemically synthesized
ctacgtcctcttccccatctgg

SEQ ID NO: 15521 - DNA, 22 bp, Artificial Sequence
  chemically synthesized
tacgtcctcttccccatctggt

SEQ ID NO: 15522 - DNA, 22 bp, Artificial Sequence
  chemically synthesized
cgtcctcttccccatctggttc

SEQ ID NO: 15523 - DNA, 22 bp, Artificial Sequence
  chemically synthesized
ttccccatctggttccatcttc

SEQ ID NO: 15524 - DNA, 22 bp, Artificial Sequence
  chemically synthesized
ccccatctggttccatcttcag

SEQ ID NO: 15525 - DNA, 22 bp, Artificial Sequence
  chemically synthesized
cccatctggttccatcttcagg

SEQ ID NO: 15526 - DNA, 22 bp, Artificial Sequence
  chemically synthesized
gttccatcttcaggaagctgtg

SEQ ID NO: 15527 - DNA, 22 bp, Artificial Sequence
  chemically synthesized
catcttcaggaagctgtgggca

SEQ ID NO: 15528 - DNA, 22 bp, Artificial Sequence
  chemically synthesized
caggaagctgtgggcattaaac

SEQ ID NO: 15529 - DNA, 22 bp, Artificial Sequence
  chemically synthesized
aggaagctgtgggcattaaact

SEQ ID NO: 15530 - DNA, 22 bp, Artificial Sequence
  chemically synthesized
tgggcattaaactcctttgggt

SEQ ID NO: 15531 - DNA, 22 bp, Artificial Sequence
  chemically synthesized
aactcctttgggtagctgtgat

SEQ ID NO: 15532 - DNA, 22 bp, Artificial Sequence
  chemically synthesized
ctttgggtagctgtgattggag

SEQ ID NO: 15533 - DNA, 22 bp, Artificial Sequence
  chemically synthesized
tgggtagctgtgattggagact

SEQ ID NO: 15534 - DNA, 22 bp, Artificial Sequence
  chemically synthesized
gggtagctgtgattggagactg

SEQ ID NO: 15535 - DNA, 22 bp, Artificial Sequence
  chemically synthesized
ggtagctgtgattggagactgg

SEQ ID NO: 15536 - DNA, 22 bp, Artificial Sequence
  chemically synthesized
tgattggagactggctcaacct

SEQ ID NO: 15537 - DNA, 22 bp, Artificial Sequence
  chemically synthesized
gagactggctcaacctcgtctt

SEQ ID NO: 15538 - DNA, 22 bp, Artificial Sequence
  chemically synthesized
gctcaacctcgtctttaagtgg

SEQ ID NO: 15539 - DNA, 22 bp, Artificial Sequence
  chemically synthesized
aacctcgtctttaagtggtaag

SEQ ID NO: 15540 - DNA, 22 bp, Artificial Sequence
  chemically synthesized
gtctttaagtggtaagaaccat

SEQ ID NO: 15541 - DNA, 22 bp, Artificial Sequence
  chemically synthesized
taagtggtaagaaccatataga

SEQ ID NO: 15542 - DNA, 22 bp, Artificial Sequence
  chemically synthesized
aagtggtaagaaccatatagag

SEQ ID NO: 15543 - DNA, 22 bp, Artificial Sequence
  chemically synthesized
agtggtaagaaccatatagaga

SEQ ID NO: 15544 - DNA, 22 bp, Artificial Sequence
  chemically synthesized
gcattcgctctcgcaatgtctg

SEQ ID NO: 15545 - DNA, 22 bp, Artificial Sequence
  chemically synthesized
gctctcgcaatgtctgtccatc

SEQ ID NO: 15546 - DNA, 22 bp, Artificial Sequence
  chemically synthesized
tcgcaatgtctgtccatcagaa

SEQ ID NO: 15547 - DNA, 22 bp, Artificial Sequence
  chemically synthesized
gcaatgtctgtccatcagaagt

SEQ ID NO: 15548 - DNA, 22 bp, Artificial Sequence
  chemically synthesized
tccatcagaagttgctttcccc

SEQ ID NO: 15549 - DNA, 22 bp, Artificial Sequence
  chemically synthesized
ctttccccaggctattcaggaa

SEQ ID NO: 15550 - DNA, 22 bp, Artificial Sequence
  chemically synthesized
tccccaggctattcaggaagcc

SEQ ID NO: 15551 - DNA, 22 bp, Artificial Sequence
  chemically synthesized
ccccaggctattcaggaagcca

SEQ ID NO: 15552 - DNA, 22 bp, Artificial Sequence
  chemically synthesized
cccaggctattcaggaagccac

SEQ ID NO: 15553 - DNA, 22 bp, Artificial Sequence
  chemically synthesized
ttcaggaagccacgggctactc

SEQ ID NO: 15554 - DNA, 22 bp, Artificial Sequence
  chemically synthesized
aggaagccacgggctactcatg

SEQ ID NO: 15555 - DNA, 22 bp, Artificial Sequence
  chemically synthesized
ctcatgcttccaacccctctct

SEQ ID NO: 15556 - DNA, 22 bp, Artificial Sequence
  chemically synthesized
atgcttccaacccctctctctg

SEQ ID NO: 15557 - DNA, 22 bp, Artificial Sequence
  chemically synthesized
ccaacccctctctctgactttg

SEQ ID NO: 15558 - DNA, 22 bp, Artificial Sequence
  chemically synthesized
caacccctctctctgactttgg

SEQ ID NO: 15559 - DNA, 22 bp, Artificial Sequence
  chemically synthesized
tctctgactttggatcatctac

SEQ ID NO: 15560 - DNA, 22 bp, Artificial Sequence
  chemically synthesized
tctgactttggatcatctacat

SEQ ID NO: 15561 - DNA, 22 bp, Artificial Sequence
  chemically synthesized
tgactttggatcatctacataa

SEQ ID NO: 15562 - DNA, 22 bp, Artificial Sequence
  chemically synthesized
actttggatcatctacataaag

SEQ ID NO: 15563 - DNA, 22 bp, Artificial Sequence
  chemically synthesized
tggatcatctacataaaggggg

SEQ ID NO: 15564 - DNA, 22 bp, Artificial Sequence
  chemically synthesized
ggatcatctacataaaggggga

SEQ ID NO: 15565 - DNA, 22 bp, Artificial Sequence
  chemically synthesized
gatcatctacataaagggggaa

SEQ ID NO: 15566 - DNA, 22 bp, Artificial Sequence
  chemically synthesized
cataaagggggaagacagaaaa

SEQ ID NO: 15567 - DNA, 22 bp, Artificial Sequence
  chemically synthesized
ccagtgagttgaaaatacagga

SEQ ID NO: 15568 - DNA, 22 bp, Artificial Sequence
  chemically synthesized
aaaatacaggaaagcctatttc

SEQ ID NO: 15569 - DNA, 22 bp, Artificial Sequence
  chemically synthesized
tttcatatgggttaaagggtag

SEQ ID NO: 15570 - DNA, 22 bp, Artificial Sequence
  chemically synthesized
catatgggttaaagggtaggac

SEQ ID NO: 15571 - DNA, 22 bp, Artificial Sequence
  chemically synthesized
atatgggttaaagggtaggaca

SEQ ID NO: 15572 - DNA, 22 bp, Artificial Sequence
  chemically synthesized
aagggtaggacagttgaatttc

SEQ ID NO: 15573 - DNA, 22 bp, Artificial Sequence
  chemically synthesized
aatttcgtgaaaagtctgagtt

SEQ ID NO: 15574 - DNA, 22 bp, Artificial Sequence
  chemically synthesized
cgtgaaaagtctgagttatata

SEQ ID NO: 15575 - DNA, 22 bp, Artificial Sequence
  chemically synthesized
gtgaaaagtctgagttatatag

SEQ ID NO: 15576 - DNA, 22 bp, Artificial Sequence
  chemically synthesized
agttatataggctttgagcaaa

SEQ ID NO: 15577 - DNA, 22 bp, Artificial Sequence
  chemically synthesized
tataggctttgagcaaagagtt

SEQ ID NO: 15578 - DNA, 22 bp, Artificial Sequence
  chemically synthesized
tgagcaaagagttttattagta

SEQ ID NO: 15579 - DNA, 22 bp, Artificial Sequence
  chemically synthesized
gagcaaagagttttattagtat

SEQ ID NO: 15580 - DNA, 22 bp, Artificial Sequence
  chemically synthesized
agcaaagagttttattagtatg

SEQ ID NO: 15581 - DNA, 22 bp, Artificial Sequence
  chemically synthesized
tattagtatgaagcagaagagg

SEQ ID NO: 15582 - DNA, 22 bp, Artificial Sequence
  chemically synthesized
attagtatgaagcagaagaggt

SEQ ID NO: 15583 - DNA, 22 bp, Artificial Sequence
  chemically synthesized
ttagtatgaagcagaagaggta

SEQ ID NO: 15584 - DNA, 22 bp, Artificial Sequence
  chemically synthesized
gtatgaagcagaagaggtaaca

SEQ ID NO: 15585 - DNA, 22 bp, Artificial Sequence
  chemically synthesized
acacctgtaatcccagcacttt

SEQ ID NO: 15586 - DNA, 22 bp, Artificial Sequence
  chemically synthesized
taatcccagcactttgggaggc

SEQ ID NO: 15587 - DNA, 22 bp, Artificial Sequence
  chemically synthesized
tgggaggccgaggtgggcgaat

SEQ ID NO: 15588 - DNA, 22 bp, Artificial Sequence
  chemically synthesized
gggaggccgaggtgggcgaatc

SEQ ID NO: 15589 - DNA, 22 bp, Artificial Sequence
  chemically synthesized
ggaggccgaggtgggcgaatca

SEQ ID NO: 15590 - DNA, 22 bp, Artificial Sequence
  chemically synthesized
ctgggtgaactcaggagttcaa

SEQ ID NO: 15591 - DNA, 22 bp, Artificial Sequence
  chemically synthesized
ggtgaactcaggagttcaagac

SEQ ID NO: 15592 - DNA, 22 bp, Artificial Sequence
  chemically synthesized
aggagttcaagaccagcctggg

SEQ ID NO: 15593 - DNA, 22 bp, Artificial Sequence
  chemically synthesized
aagaccagcctgggcaacatgg

SEQ ID NO: 15594 - DNA, 22 bp, Artificial Sequence
  chemically synthesized
ggcaacatggcgaaactccatc

SEQ ID NO: 15595 - DNA, 22 bp, Artificial Sequence
  chemically synthesized
catctctacaaaaacattacga

SEQ ID NO: 15596 - DNA, 22 bp, Artificial Sequence
  chemically synthesized
tacaaaaacattacgaaaatta

SEQ ID NO: 15597 - DNA, 22 bp, Artificial Sequence
  chemically synthesized
caaaaacattacgaaaattagc

SEQ ID NO: 15598 - DNA, 22 bp, Artificial Sequence
  chemically synthesized
cgaaaattagctgggcgtgttg

SEQ ID NO: 15599 - DNA, 22 bp, Artificial Sequence
  chemically synthesized
gctgggcgtgttggtgctgtag

SEQ ID NO: 15600 - DNA, 22 bp, Artificial Sequence
  chemically synthesized
ggcgtgttggtgctgtagtccc

SEQ ID NO: 15601 - DNA, 22 bp, Artificial Sequence
  chemically synthesized
gtgctgtagtcccagctactca

SEQ ID NO: 15602 - DNA, 22 bp, Artificial Sequence
  chemically synthesized
tagtcccagctactcaggaggc

SEQ ID NO: 15603 - DNA, 22 bp, Artificial Sequence
  chemically synthesized
ctcaggaggctgaggtgagagg

SEQ ID NO: 15604 - DNA, 22 bp, Artificial Sequence
  chemically synthesized
aggaggctgaggtgagaggcgg

SEQ ID NO: 15605 - DNA, 22 bp, Artificial Sequence
  chemically synthesized
aggtgagaggcggaggaggttg

SEQ ID NO: 15606 - DNA, 22 bp, Artificial Sequence
  chemically synthesized
cagtgagtcaagatcatgccac

SEQ ID NO: 15607 - DNA, 22 bp, Artificial Sequence
  chemically synthesized
cactccagcctgggcaacagag

SEQ ID NO: 15608 - DNA, 22 bp, Artificial Sequence
  chemically synthesized
cagcctgggcaacagagtaaga

SEQ ID NO: 15609 - DNA, 22 bp, Artificial Sequence
  chemically synthesized
ggcaacagagtaagaccctgtc

SEQ ID NO: 15610 - DNA, 22 bp, Artificial Sequence
  chemically synthesized
tctcaaaaaaaaaaaaaagata

SEQ ID NO: 15611 - DNA, 22 bp, Artificial Sequence
  chemically synthesized
aaaaaaaaaaaaaagatagatg

SEQ ID NO: 15612 - DNA, 22 bp, Artificial Sequence
  chemically synthesized
tatgaaaaaaggaaacacacag

SEQ ID NO: 15613 - DNA, 22 bp, Artificial Sequence
  chemically synthesized
aacagcctgttttgtggggtaa

SEQ ID NO: 15614 - DNA, 22 bp, Artificial Sequence
  chemically synthesized
ttttgtggggtaatgaaaagtc

SEQ ID NO: 15615 - DNA, 22 bp, Artificial Sequence
  chemically synthesized
tgtggggtaatgaaaagtcacc

SEQ ID NO: 15616 - DNA, 22 bp, Artificial Sequence
  chemically synthesized
gtggggtaatgaaaagtcaccc

SEQ ID NO: 15617 - DNA, 22 bp, Artificial Sequence
  chemically synthesized
tggggtaatgaaaagtcaccct

SEQ ID NO: 15618 - DNA, 22 bp, Artificial Sequence
  chemically synthesized
ggaactgggctccagccctcgt

SEQ ID NO: 15619 - DNA, 22 bp, Artificial Sequence
  chemically synthesized
ggctccagccctcgttctgcca

SEQ ID NO: 15620 - DNA, 22 bp, Artificial Sequence
  chemically synthesized
cagccctcgttctgccacccac

SEQ ID NO: 15621 - DNA, 22 bp, Artificial Sequence
  chemically synthesized
gttctgccacccaccaactaca

SEQ ID NO: 15622 - DNA, 22 bp, Artificial Sequence
  chemically synthesized
tgccacccaccaactacatgtc

SEQ ID NO: 15623 - DNA, 22 bp, Artificial Sequence
  chemically synthesized
ccacccaccaactacatgtcct

SEQ ID NO: 15624 - DNA, 22 bp, Artificial Sequence
  chemically synthesized
catgtccttggcaagtcatatc

SEQ ID NO: 15625 - DNA, 22 bp, Artificial Sequence
  chemically synthesized
ggcaagtcatatcaattatctg

SEQ ID NO: 15626 - DNA, 22 bp, Artificial Sequence
  chemically synthesized
gcaagtcatatcaattatctga

SEQ ID NO: 15627 - DNA, 22 bp, Artificial Sequence
  chemically synthesized
tctgagtttctgttttataatc

SEQ ID NO: 15628 - DNA, 22 bp, Artificial Sequence
  chemically synthesized
agtttctgttttataatctaca

SEQ ID NO: 15629 - DNA, 22 bp, Artificial Sequence
  chemically synthesized
ctgttttataatctacaaatag

SEQ ID NO: 15630 - DNA, 22 bp, Artificial Sequence
  chemically synthesized
tgttttataatctacaaatagg

SEQ ID NO: 15631 - DNA, 22 bp, Artificial Sequence
  chemically synthesized
ttttataatctacaaataggtt

SEQ ID NO: 15632 - DNA, 22 bp, Artificial Sequence
  chemically synthesized
tataatctacaaataggttatc

SEQ ID NO: 15633 - DNA, 22 bp, Artificial Sequence
  chemically synthesized
ataatctacaaataggttatct

SEQ ID NO: 15634 - DNA, 22 bp, Artificial Sequence
  chemically synthesized
taatctacaaataggttatctc

SEQ ID NO: 15635 - DNA, 22 bp, Artificial Sequence
  chemically synthesized
caaataggttatctctggcagc

SEQ ID NO: 15636 - DNA, 22 bp, Artificial Sequence
  chemically synthesized
tctctggcagcttaataataat

SEQ ID NO: 15637 - DNA, 22 bp, Artificial Sequence
  chemically synthesized
tggcagcttaataataatcagg

SEQ ID NO: 15638 - DNA, 22 bp, Artificial Sequence
  chemically synthesized
gcagcttaataataatcagggt

SEQ ID NO: 15639 - DNA, 22 bp, Artificial Sequence
  chemically synthesized
aataataatcagggttaacatt

SEQ ID NO: 15640 - DNA, 22 bp, Artificial Sequence
  chemically synthesized
ataataatcagggttaacattt

SEQ ID NO: 15641 - DNA, 22 bp, Artificial Sequence
  chemically synthesized
acatttattaaacagtgtgtgc

SEQ ID NO: 15642 - DNA, 22 bp, Artificial Sequence
  chemically synthesized
attaaacagtgtgtgccagtcc

SEQ ID NO: 15643 - DNA, 22 bp, Artificial Sequence
  chemically synthesized
ttaaacagtgtgtgccagtcca

SEQ ID NO: 15644 - DNA, 22 bp, Artificial Sequence
  chemically synthesized
aacagtgtgtgccagtccatgt

SEQ ID NO: 15645 - DNA, 22 bp, Artificial Sequence
  chemically synthesized
tgtgcttttctgtgaggtagtt

SEQ ID NO: 15646 - DNA, 22 bp, Artificial Sequence
  chemically synthesized
ttctgtgaggtagttactgcta

SEQ ID NO: 15647 - DNA, 22 bp, Artificial Sequence
  chemically synthesized
tctgtgaggtagttactgctat

SEQ ID NO: 15648 - DNA, 22 bp, Artificial Sequence
  chemically synthesized
ctgtgaggtagttactgctatt

SEQ ID NO: 15649 - DNA, 22 bp, Artificial Sequence
  chemically synthesized
tgtgaggtagttactgctattt

SEQ ID NO: 15650 - DNA, 22 bp, Artificial Sequence
  chemically synthesized
tgaggtagttactgctatttac

SEQ ID NO: 15651 - DNA, 22 bp, Artificial Sequence
  chemically synthesized
ctgctatttacagaaacagtag

SEQ ID NO: 15652 - DNA, 22 bp, Artificial Sequence
  chemically synthesized
ctatttacagaaacagtagatg

SEQ ID NO: 15653 - DNA, 22 bp, Artificial Sequence
  chemically synthesized
tttacagaaacagtagatgcag

SEQ ID NO: 15654 - DNA, 22 bp, Artificial Sequence
  chemically synthesized
acagaaacagtagatgcagaga

SEQ ID NO: 15655 - DNA, 22 bp, Artificial Sequence
  chemically synthesized
cagaaacagtagatgcagagac

SEQ ID NO: 15656 - DNA, 22 bp, Artificial Sequence
  chemically synthesized
agttaaatgattaggccaacaa

SEQ ID NO: 15657 - DNA, 22 bp, Artificial Sequence
  chemically synthesized
aatgattaggccaacaaggtta

SEQ ID NO: 15658 - DNA, 22 bp, Artificial Sequence
  chemically synthesized
ggccaacaaggttagtacatgc

SEQ ID NO: 15659 - DNA, 22 bp, Artificial Sequence
  chemically synthesized
gtacatgccgagccaggatgga

SEQ ID NO: 15660 - DNA, 22 bp, Artificial Sequence
  chemically synthesized
gcttccgcggcaatgctcttat

SEQ ID NO: 15661 - DNA, 22 bp, Artificial Sequence
  chemically synthesized
ccgcggcaatgctcttatgaac

SEQ ID NO: 15662 - DNA, 22 bp, Artificial Sequence
  chemically synthesized
cgcggcaatgctcttatgaact

SEQ ID NO: 15663 - DNA, 22 bp, Artificial Sequence
  chemically synthesized
ttatgaactatgttacgtccag

SEQ ID NO: 15664 - DNA, 22 bp, Artificial Sequence
  chemically synthesized
atgaactatgttacgtccagtg

SEQ ID NO: 15665 - DNA, 22 bp, Artificial Sequence
  chemically synthesized
tgaactatgttacgtccagtgc

SEQ ID NO: 15666 - DNA, 22 bp, Artificial Sequence
  chemically synthesized
tgttacgtccagtgctgataaa

SEQ ID NO: 15667 - DNA, 22 bp, Artificial Sequence
  chemically synthesized
cgtccagtgctgataaactgac

SEQ ID NO: 15668 - DNA, 22 bp, Artificial Sequence
  chemically synthesized
ataaactgactctctggggagc

SEQ ID NO: 15669 - DNA, 22 bp, Artificial Sequence
  chemically synthesized
actctctggggagcaggggaaa

SEQ ID NO: 15670 - DNA, 22 bp, Artificial Sequence
  chemically synthesized
tctggggagcaggggaaagccc

SEQ ID NO: 15671 - DNA, 22 bp, Artificial Sequence
  chemically synthesized
tggggagcaggggaaagccctg

SEQ ID NO: 15672 - DNA, 22 bp, Artificial Sequence
  chemically synthesized
gggagcaggggaaagccctgag

SEQ ID NO: 15673 - DNA, 22 bp, Artificial Sequence
  chemically synthesized
agtttagcatttgccaatttct

SEQ ID NO: 15674 - DNA, 22 bp, Artificial Sequence
  chemically synthesized
agcatttgccaatttctatcac

SEQ ID NO: 15675 - DNA, 22 bp, Artificial Sequence
  chemically synthesized
gcatttgccaatttctatcacg

SEQ ID NO: 15676 - DNA, 22 bp, Artificial Sequence
  chemically synthesized
gccaatttctatcacgtaaaca

SEQ ID NO: 15677 - DNA, 22 bp, Artificial Sequence
  chemically synthesized
ccaatttctatcacgtaaacat

SEQ ID NO: 15678 - DNA, 22 bp, Artificial Sequence
  chemically synthesized
ctatcacgtaaacattcccatt

SEQ ID NO: 15679 - DNA, 22 bp, Artificial Sequence
  chemically synthesized
tatcacgtaaacattcccattc

SEQ ID NO: 15680 - DNA, 22 bp, Artificial Sequence
  chemically synthesized
tcacgtaaacattcccattctg

SEQ ID NO: 15681 - DNA, 22 bp, Artificial Sequence
  chemically synthesized
ccattctggccactttctttct

SEQ ID NO: 15682 - DNA, 22 bp, Artificial Sequence
  chemically synthesized
tggccactttctttctttcttt

SEQ ID NO: 15683 - DNA, 22 bp, Artificial Sequence
  chemically synthesized
gccactttctttctttctttct

SEQ ID NO: 15684 - DNA, 22 bp, Artificial Sequence
  chemically synthesized
tctttctttctttcttttgttt

SEQ ID NO: 15685 - DNA, 22 bp, Artificial Sequence
  chemically synthesized
ctttctttctttcttttgtttg

SEQ ID NO: 15686 - DNA, 22 bp, Artificial Sequence
  chemically synthesized
tttctttctttcttttgtttgt

SEQ ID NO: 15687 - DNA, 22 bp, Artificial Sequence
  chemically synthesized
tctttctttcttttgtttgttt

SEQ ID NO: 15688 - DNA, 22 bp, Artificial Sequence
  chemically synthesized
ctttctttcttttgtttgtttg

SEQ ID NO: 15689 - DNA, 22 bp, Artificial Sequence
  chemically synthesized
tttctttcttttgtttgtttgt

SEQ ID NO: 15690 - DNA, 22 bp, Artificial Sequence
  chemically synthesized
tctttcttttgtttgtttgttt

SEQ ID NO: 15691 - DNA, 22 bp, Artificial Sequence
  chemically synthesized
ctttcttttgtttgtttgtttg

SEQ ID NO: 15692 - DNA, 22 bp, Artificial Sequence
  chemically synthesized
tttcttttgtttgtttgtttga

SEQ ID NO: 15693 - DNA, 22 bp, Artificial Sequence
  chemically synthesized
tcttttgtttgtttgtttgaga

SEQ ID NO: 15694 - DNA, 22 bp, Artificial Sequence
  chemically synthesized
cttttgtttgtttgtttgagat

SEQ ID NO: 15695 - DNA, 22 bp, Artificial Sequence
  chemically synthesized
ttttgtttgtttgtttgagatg

SEQ ID NO: 15696 - DNA, 22 bp, Artificial Sequence
  chemically synthesized
ttgtttgtttgtttgagatgga

SEQ ID NO: 15697 - DNA, 22 bp, Artificial Sequence
  chemically synthesized
tgtttgtttgtttgagatggag

SEQ ID NO: 15698 - DNA, 22 bp, Artificial Sequence
  chemically synthesized
gtttgtttgtttgagatggagt

SEQ ID NO: 15699 - DNA, 22 bp, Artificial Sequence
  chemically synthesized
tttgtttgtttgagatggagtc

SEQ ID NO: 15700 - DNA, 22 bp, Artificial Sequence
  chemically synthesized
gtttgtttgagatggagtctcg

SEQ ID NO: 15701 - DNA, 22 bp, Artificial Sequence
  chemically synthesized
tttgtttgagatggagtctcgc

SEQ ID NO: 15702 - DNA, 22 bp, Artificial Sequence
  chemically synthesized
gtttgagatggagtctcgcact

SEQ ID NO: 15703 - DNA, 22 bp, Artificial Sequence
  chemically synthesized
tttgagatggagtctcgcactg

SEQ ID NO: 15704 - DNA, 22 bp, Artificial Sequence
  chemically synthesized
gagatggagtctcgcactgttg

SEQ ID NO: 15705 - DNA, 22 bp, Artificial Sequence
  chemically synthesized
agatggagtctcgcactgttgc

SEQ ID NO: 15706 - DNA, 22 bp, Artificial Sequence
  chemically synthesized
gcactgttgcctggctggagtg

SEQ ID NO: 15707 - DNA, 22 bp, Artificial Sequence
  chemically synthesized
ttgcctggctggagtgcaatgg

SEQ ID NO: 15708 - DNA, 22 bp, Artificial Sequence
  chemically synthesized
cctggctggagtgcaatggtgc

SEQ ID NO: 15709 - DNA, 22 bp, Artificial Sequence
  chemically synthesized
gctggagtgcaatggtgcaatc

SEQ ID NO: 15710 - DNA, 22 bp, Artificial Sequence
  chemically synthesized
gagtgcaatggtgcaatctcag

SEQ ID NO: 15711 - DNA, 22 bp, Artificial Sequence
  chemically synthesized
agctcactgcaacctctgcctc

SEQ ID NO: 15712 - DNA, 22 bp, Artificial Sequence
  chemically synthesized
actgcaacctctgcctctccgg

SEQ ID NO: 15713 - DNA, 22 bp, Artificial Sequence
  chemically synthesized
caacctctgcctctccggttca

SEQ ID NO: 15714 - DNA, 22 bp, Artificial Sequence
  chemically synthesized
tgcctctccggttcaagtgatt

SEQ ID NO: 15715 - DNA, 22 bp, Artificial Sequence
  chemically synthesized
cctctccggttcaagtgattct

SEQ ID NO: 15716 - DNA, 22 bp, Artificial Sequence
  chemically synthesized
tccggttcaagtgattctcctg

SEQ ID NO: 15717 - DNA, 22 bp, Artificial Sequence
  chemically synthesized
cggttcaagtgattctcctgcc

SEQ ID NO: 15718 - DNA, 22 bp, Artificial Sequence
  chemically synthesized
aagtgattctcctgcctcagcc

SEQ ID NO: 15719 - DNA, 22 bp, Artificial Sequence
  chemically synthesized
tcctgcctcagcctcccaagta

SEQ ID NO: 15720 - DNA, 22 bp, Artificial Sequence
  chemically synthesized
ctgcctcagcctcccaagtagc

SEQ ID NO: 15721 - DNA, 22 bp, Artificial Sequence
  chemically synthesized
cctcagcctcccaagtagctgg

SEQ ID NO: 15722 - DNA, 22 bp, Artificial Sequence
  chemically synthesized
agcctcccaagtagctgggatt

SEQ ID NO: 15723 - DNA, 22 bp, Artificial Sequence
  chemically synthesized
ccaagtagctgggattacaggt

SEQ ID NO: 15724 - DNA, 22 bp, Artificial Sequence
  chemically synthesized
ggattacaggtgcccgccacca

SEQ ID NO: 15725 - DNA, 22 bp, Artificial Sequence
  chemically synthesized
caggtgcccgccaccatgccca

SEQ ID NO: 15726 - DNA, 22 bp, Artificial Sequence
  chemically synthesized
attttttttgtatttttagtag

SEQ ID NO: 15727 - DNA, 22 bp, Artificial Sequence
  chemically synthesized
tttttgtatttttagtagagac

SEQ ID NO: 15728 - DNA, 22 bp, Artificial Sequence
  chemically synthesized
ttttgtatttttagtagagaca

SEQ ID NO: 15729 - DNA, 22 bp, Artificial Sequence
  chemically synthesized
tttgtatttttagtagagacat

SEQ ID NO: 15730 - DNA, 22 bp, Artificial Sequence
  chemically synthesized
ttgtatttttagtagagacatg

SEQ ID NO: 15731 - DNA, 22 bp, Artificial Sequence
  chemically synthesized
tgtatttttagtagagacatgg

SEQ ID NO: 15732 - DNA, 22 bp, Artificial Sequence
  chemically synthesized
gtatttttagtagagacatggt

SEQ ID NO: 15733 - DNA, 22 bp, Artificial Sequence
  chemically synthesized
tatttttagtagagacatggtt

SEQ ID NO: 15734 - DNA, 22 bp, Artificial Sequence
  chemically synthesized
ttagtagagacatggtttcact

SEQ ID NO: 15735 - DNA, 22 bp, Artificial Sequence
  chemically synthesized
tagtagagacatggtttcacta

SEQ ID NO: 15736 - DNA, 22 bp, Artificial Sequence
  chemically synthesized
agtagagacatggtttcactat

SEQ ID NO: 15737 - DNA, 22 bp, Artificial Sequence
  chemically synthesized
gtagagacatggtttcactatg

SEQ ID NO: 15738 - DNA, 22 bp, Artificial Sequence
  chemically synthesized
cactatgttgactaggctggtc

SEQ ID NO: 15739 - DNA, 22 bp, Artificial Sequence
  chemically synthesized
actatgttgactaggctggtct

SEQ ID NO: 15740 - DNA, 22 bp, Artificial Sequence
  chemically synthesized
tgttgactaggctggtctcgaa

SEQ ID NO: 15741 - DNA, 22 bp, Artificial Sequence
  chemically synthesized
actaggctggtctcgaactcct

SEQ ID NO: 15742 - DNA, 22 bp, Artificial Sequence
  chemically synthesized
ggctggtctcgaactcctgacc

SEQ ID NO: 15743 - DNA, 22 bp, Artificial Sequence
  chemically synthesized
gtctcgaactcctgacctcatg

SEQ ID NO: 15744 - DNA, 22 bp, Artificial Sequence
  chemically synthesized
gaactcctgacctcatgatctg

SEQ ID NO: 15745 - DNA, 22 bp, Artificial Sequence
  chemically synthesized
ctgacctcatgatctgcctgcc

SEQ ID NO: 15746 - DNA, 22 bp, Artificial Sequence
  chemically synthesized
acctcatgatctgcctgccttg

SEQ ID NO: 15747 - DNA, 22 bp, Artificial Sequence
  chemically synthesized
atgatctgcctgccttggcctc

SEQ ID NO: 15748 - DNA, 22 bp, Artificial Sequence
  chemically synthesized
cctgccttggcctccctaagtg

SEQ ID NO: 15749 - DNA, 22 bp, Artificial Sequence
  chemically synthesized
ccttggcctccctaagtgctag

SEQ ID NO: 15750 - DNA, 22 bp, Artificial Sequence
  chemically synthesized
ggcctccctaagtgctaggatt

SEQ ID NO: 15751 - DNA, 22 bp, Artificial Sequence
  chemically synthesized
gcctccctaagtgctaggatta

SEQ ID NO: 15752 - DNA, 22 bp, Artificial Sequence
  chemically synthesized
cctaagtgctaggattacaggc

SEQ ID NO: 15753 - DNA, 22 bp, Artificial Sequence
  chemically synthesized
agtgctaggattacaggcgtga

SEQ ID NO: 15754 - DNA, 22 bp, Artificial Sequence
  chemically synthesized
ggattacaggcgtgagccacta

SEQ ID NO: 15755 - DNA, 22 bp, Artificial Sequence
  chemically synthesized
caggcgtgagccactacaccca

SEQ ID NO: 15756 - DNA, 22 bp, Artificial Sequence
  chemically synthesized
cacccagccgcatgattctaaa

SEQ ID NO: 15757 - DNA, 22 bp, Artificial Sequence
  chemically synthesized
taaaaaataaaaagatgaagtg

SEQ ID NO: 15758 - DNA, 22 bp, Artificial Sequence
  chemically synthesized
aaaaataaaaagatgaagtgtt

SEQ ID NO: 15759 - DNA, 22 bp, Artificial Sequence
  chemically synthesized
ttccaaacatctgatctccatt

SEQ ID NO: 15760 - DNA, 22 bp, Artificial Sequence
  chemically synthesized
caaacatctgatctccattgaa

SEQ ID NO: 15761 - DNA, 22 bp, Artificial Sequence
  chemically synthesized
atctccattgaagaaccatgca

SEQ ID NO: 15762 - DNA, 22 bp, Artificial Sequence
  chemically synthesized
cattgaagaaccatgcaatctc

SEQ ID NO: 15763 - DNA, 22 bp, Artificial Sequence
  chemically synthesized
aagaaccatgcaatctctctgg

SEQ ID NO: 15764 - DNA, 22 bp, Artificial Sequence
  chemically synthesized
tctgggttgatagaggccagag

SEQ ID NO: 15765 - DNA, 22 bp, Artificial Sequence
  chemically synthesized
tgggttgatagaggccagagtt

SEQ ID NO: 15766 - DNA, 22 bp, Artificial Sequence
  chemically synthesized
ggttgatagaggccagagttag

SEQ ID NO: 15767 - DNA, 22 bp, Artificial Sequence
  chemically synthesized
atagaggccagagttagtggct

SEQ ID NO: 15768 - DNA, 22 bp, Artificial Sequence
  chemically synthesized
gtggctctccctgatttcggtg

SEQ ID NO: 15769 - DNA, 22 bp, Artificial Sequence
  chemically synthesized
tccctgatttcggtgagaaatc

SEQ ID NO: 15770 - DNA, 22 bp, Artificial Sequence
  chemically synthesized
cctgatttcggtgagaaatcac

SEQ ID NO: 15771 - DNA, 22 bp, Artificial Sequence
  chemically synthesized
atttcggtgagaaatcactatt

SEQ ID NO: 15772 - DNA, 22 bp, Artificial Sequence
  chemically synthesized
cggtgagaaatcactattccac

SEQ ID NO: 15773 - DNA, 22 bp, Artificial Sequence
  chemically synthesized
ggtgagaaatcactattccacc

SEQ ID NO: 15774 - DNA, 22 bp, Artificial Sequence
  chemically synthesized
ttccaccatcacgggataaaag

SEQ ID NO: 15775 - DNA, 22 bp, Artificial Sequence
  chemically synthesized
caccatcacgggataaaaggca

SEQ ID NO: 15776 - DNA, 22 bp, Artificial Sequence
  chemically synthesized
actggcggttgacacctatttc

SEQ ID NO: 15777 - DNA, 22 bp, Artificial Sequence
  chemically synthesized
gcggttgacacctatttccaca

SEQ ID NO: 15778 - DNA, 22 bp, Artificial Sequence
  chemically synthesized
acacctatttccacagtgaaag

SEQ ID NO: 15779 - DNA, 22 bp, Artificial Sequence
  chemically synthesized
tttccacagtgaaagatatatc

SEQ ID NO: 15780 - DNA, 22 bp, Artificial Sequence
  chemically synthesized
ccacagtgaaagatatatctag

SEQ ID NO: 15781 - DNA, 22 bp, Artificial Sequence
  chemically synthesized
cacagtgaaagatatatctagt

SEQ ID NO: 15782 - DNA, 22 bp, Artificial Sequence
  chemically synthesized
gtacttttaaaggggaagtggt

SEQ ID NO: 15783 - DNA, 22 bp, Artificial Sequence
  chemically synthesized
ttaaaggggaagtggtttgtct

SEQ ID NO: 15784 - DNA, 22 bp, Artificial Sequence
  chemically synthesized
taaaggggaagtggtttgtctg

SEQ ID NO: 15785 - DNA, 22 bp, Artificial Sequence
  chemically synthesized
aaaggggaagtggtttgtctga

SEQ ID NO: 15786 - DNA, 22 bp, Artificial Sequence
  chemically synthesized
aaggggaagtggtttgtctgag

SEQ ID NO: 15787 - DNA, 22 bp, Artificial Sequence
  chemically synthesized
gtctgagatactctgtttcaaa

SEQ ID NO: 15788 - DNA, 22 bp, Artificial Sequence
  chemically synthesized
tctgagatactctgtttcaaag

SEQ ID NO: 15789 - DNA, 22 bp, Artificial Sequence
  chemically synthesized
agatactctgtttcaaagtaga

SEQ ID NO: 15790 - DNA, 22 bp, Artificial Sequence
  chemically synthesized
tgtttcaaagtagagaggatac

SEQ ID NO: 15791 - DNA, 22 bp, Artificial Sequence
  chemically synthesized
tttcaaagtagagaggatacag

SEQ ID NO: 15792 - DNA, 22 bp, Artificial Sequence
  chemically synthesized
caaagtagagaggatacagaac

SEQ ID NO: 15793 - DNA, 22 bp, Artificial Sequence
  chemically synthesized
aaagtagagaggatacagaaca

SEQ ID NO: 15794 - DNA, 22 bp, Artificial Sequence
  chemically synthesized
aagctatatacatccttacaga

SEQ ID NO: 15795 - DNA, 22 bp, Artificial Sequence
  chemically synthesized
tatacatccttacagagagcaa

SEQ ID NO: 15796 - DNA, 22 bp, Artificial Sequence
  chemically synthesized
acagagagcaattctgatggaa

SEQ ID NO: 15797 - DNA, 22 bp, Artificial Sequence
  chemically synthesized
cagagagcaattctgatggaaa

SEQ ID NO: 15798 - DNA, 22 bp, Artificial Sequence
  chemically synthesized
tgatggaaatgcaggccatgtt

SEQ ID NO: 15799 - DNA, 22 bp, Artificial Sequence
  chemically synthesized
atggaaatgcaggccatgtttc

SEQ ID NO: 15800 - DNA, 22 bp, Artificial Sequence
  chemically synthesized
ccctggggggggctcgtcctag

SEQ ID NO: 15801 - DNA, 22 bp, Artificial Sequence
  chemically synthesized
cctggggggggctcgtcctagg

SEQ ID NO: 15802 - DNA, 22 bp, Artificial Sequence
  chemically synthesized
gggggggctcgtcctaggggct

SEQ ID NO: 15803 - DNA, 22 bp, Artificial Sequence
  chemically synthesized
gtcctaggggctggagtgcatt

SEQ ID NO: 15804 - DNA, 22 bp, Artificial Sequence
  chemically synthesized
ggggctggagtgcattctctga

SEQ ID NO: 15805 - DNA, 22 bp, Artificial Sequence
  chemically synthesized
gagtgcattctctgatgtcaga

SEQ ID NO: 15806 - DNA, 22 bp, Artificial Sequence
  chemically synthesized
tctgatgtcagaggaaatgcaa

SEQ ID NO: 15807 - DNA, 22 bp, Artificial Sequence
  chemically synthesized
tgatgtcagaggaaatgcaaga

SEQ ID NO: 15808 - DNA, 22 bp, Artificial Sequence
  chemically synthesized
atgtcagaggaaatgcaagatt

SEQ ID NO: 15809 - DNA, 22 bp, Artificial Sequence
  chemically synthesized
cctgaggcctgagggaacccat

SEQ ID NO: 15810 - DNA, 22 bp, Artificial Sequence
  chemically synthesized
aggcctgagggaacccatggta

SEQ ID NO: 15811 - DNA, 22 bp, Artificial Sequence
  chemically synthesized
agggaacccatggtatatgcaa

SEQ ID NO: 15812 - DNA, 22 bp, Artificial Sequence
  chemically synthesized
caaactgtagttccatatgcat

SEQ ID NO: 15813 - DNA, 22 bp, Artificial Sequence
  chemically synthesized
aaactgtagttccatatgcatt

SEQ ID NO: 15814 - DNA, 22 bp, Artificial Sequence
  chemically synthesized
tagttccatatgcattcttcca

SEQ ID NO: 15815 - DNA, 22 bp, Artificial Sequence
  chemically synthesized
catatgcattcttccaggacaa

SEQ ID NO: 15816 - DNA, 22 bp, Artificial Sequence
  chemically synthesized
ttccaggacaaatacttcttga

SEQ ID NO: 15817 - DNA, 22 bp, Artificial Sequence
  chemically synthesized
ccaggacaaatacttcttgagg

SEQ ID NO: 15818 - DNA, 22 bp, Artificial Sequence
  chemically synthesized
caggacaaatacttcttgaggt

SEQ ID NO: 15819 - DNA, 22 bp, Artificial Sequence
  chemically synthesized
cttgaggttaaaaaaaaaaagt

SEQ ID NO: 15820 - DNA, 22 bp, Artificial Sequence
  chemically synthesized
ttgaggttaaaaaaaaaaagtc

SEQ ID NO: 15821 - DNA, 22 bp, Artificial Sequence
  chemically synthesized
gaggttaaaaaaaaaaagtcac

SEQ ID NO: 15822 - DNA, 22 bp, Artificial Sequence
  chemically synthesized
aggttaaaaaaaaaaagtcaca

SEQ ID NO: 15823 - DNA, 22 bp, Artificial Sequence
  chemically synthesized
aaaaaaaaaagtcacatagctg

SEQ ID NO: 15824 - DNA, 22 bp, Artificial Sequence
  chemically synthesized
ccattttatggatttcaggatt

SEQ ID NO: 15825 - DNA, 22 bp, Artificial Sequence
  chemically synthesized
tatggatttcaggatttttttt

SEQ ID NO: 15826 - DNA, 22 bp, Artificial Sequence
  chemically synthesized
atggatttcaggattttttttt

SEQ ID NO: 15827 - DNA, 22 bp, Artificial Sequence
  chemically synthesized
tggatttcaggatttttttttt

SEQ ID NO: 15828 - DNA, 22 bp, Artificial Sequence
  chemically synthesized
caggattttttttttttttttt

SEQ ID NO: 15829 - DNA, 22 bp, Artificial Sequence
  chemically synthesized
aggatttttttttttttttttt

SEQ ID NO: 15830 - DNA, 22 bp, Artificial Sequence
  chemically synthesized
ttttttttttttttttgagatg

SEQ ID NO: 15831 - DNA, 22 bp, Artificial Sequence
  chemically synthesized
tttttttttttttttgagatgg

SEQ ID NO: 15832 - DNA, 22 bp, Artificial Sequence
  chemically synthesized
ttttttttttttttgagatgga

SEQ ID NO: 15833 - DNA, 22 bp, Artificial Sequence
  chemically synthesized
tttttttttttttgagatggag

SEQ ID NO: 15834 - DNA, 22 bp, Artificial Sequence
  chemically synthesized
ttttttttttttgagatggagt

SEQ ID NO: 15835 - DNA, 22 bp, Artificial Sequence
  chemically synthesized
tttttttttttgagatggagtc

SEQ ID NO: 15836 - DNA, 22 bp, Artificial Sequence
  chemically synthesized
ttttttttttgagatggagtct

SEQ ID NO: 15837 - DNA, 22 bp, Artificial Sequence
  chemically synthesized
tttttttttgagatggagtctt

SEQ ID NO: 15838 - DNA, 22 bp, Artificial Sequence
  chemically synthesized
ttttttttgagatggagtcttg

SEQ ID NO: 15839 - DNA, 22 bp, Artificial Sequence
  chemically synthesized
tttttttgagatggagtcttgc

SEQ ID NO: 15840 - DNA, 22 bp, Artificial Sequence
  chemically synthesized
ttttttgagatggagtcttgct

SEQ ID NO: 15841 - DNA, 22 bp, Artificial Sequence
  chemically synthesized
tttttgagatggagtcttgctc

SEQ ID NO: 15842 - DNA, 22 bp, Artificial Sequence
  chemically synthesized
ttttgagatggagtcttgctct

SEQ ID NO: 15843 - DNA, 22 bp, Artificial Sequence
  chemically synthesized
tttgagatggagtcttgctctg

SEQ ID NO: 15844 - DNA, 22 bp, Artificial Sequence
  chemically synthesized
ttgagatggagtcttgctctgt

SEQ ID NO: 15845 - DNA, 22 bp, Artificial Sequence
  chemically synthesized
tgagatggagtcttgctctgtc

SEQ ID NO: 15846 - DNA, 22 bp, Artificial Sequence
  chemically synthesized
gagatggagtcttgctctgtca

SEQ ID NO: 15847 - DNA, 22 bp, Artificial Sequence
  chemically synthesized
agatggagtcttgctctgtcac

SEQ ID NO: 15848 - DNA, 22 bp, Artificial Sequence
  chemically synthesized
gctctgtcacccagcctgtagt

SEQ ID NO: 15849 - DNA, 22 bp, Artificial Sequence
  chemically synthesized
ctctgtcacccagcctgtagtg

SEQ ID NO: 15850 - DNA, 22 bp, Artificial Sequence
  chemically synthesized
tgtcacccagcctgtagtgcag

SEQ ID NO: 15851 - DNA, 22 bp, Artificial Sequence
  chemically synthesized
tcacccagcctgtagtgcagtg

SEQ ID NO: 15852 - DNA, 22 bp, Artificial Sequence
  chemically synthesized
tagtgcagtggcataatctcgg

SEQ ID NO: 15853 - DNA, 22 bp, Artificial Sequence
  chemically synthesized
ggctcacggcaacctccgcctc

SEQ ID NO: 15854 - DNA, 22 bp, Artificial Sequence
  chemically synthesized
acggcaacctccgcctcccagg

SEQ ID NO: 15855 - DNA, 22 bp, Artificial Sequence
  chemically synthesized
cgcctcccaggttcaagcgatt

SEQ ID NO: 15856 - DNA, 22 bp, Artificial Sequence
  chemically synthesized
ccaggttcaagcgattctcttg

SEQ ID NO: 15857 - DNA, 22 bp, Artificial Sequence
  chemically synthesized
aagcgattctcttgccttagcc

SEQ ID NO: 15858 - DNA, 22 bp, Artificial Sequence
  chemically synthesized
tcttgccttagcctcccgagta

SEQ ID NO: 15859 - DNA, 22 bp, Artificial Sequence
  chemically synthesized
ttgccttagcctcccgagtagc

SEQ ID NO: 15860 - DNA, 22 bp, Artificial Sequence
  chemically synthesized
gccttagcctcccgagtagctg

SEQ ID NO: 15861 - DNA, 22 bp, Artificial Sequence
  chemically synthesized
ccttagcctcccgagtagctgg

SEQ ID NO: 15862 - DNA, 22 bp, Artificial Sequence
  chemically synthesized
agcctcccgagtagctgggatt

SEQ ID NO: 15863 - DNA, 22 bp, Artificial Sequence
  chemically synthesized
gcctcccgagtagctgggatta

SEQ ID NO: 15864 - DNA, 22 bp, Artificial Sequence
  chemically synthesized
ccgagtagctgggattacagtc

SEQ ID NO: 15865 - DNA, 22 bp, Artificial Sequence
  chemically synthesized
ggattacagtcacgcaccacca

SEQ ID NO: 15866 - DNA, 22 bp, Artificial Sequence
  chemically synthesized
cagtcacgcaccaccacatctg

SEQ ID NO: 15867 - DNA, 22 bp, Artificial Sequence
  chemically synthesized
gctaattctttatattttttgg

SEQ ID NO: 15868 - DNA, 22 bp, Artificial Sequence
  chemically synthesized
attctttatattttttggtaga

SEQ ID NO: 15869 - DNA, 22 bp, Artificial Sequence
  chemically synthesized
tttatattttttggtagaaacg

SEQ ID NO: 15870 - DNA, 22 bp, Artificial Sequence
  chemically synthesized
tatattttttggtagaaacggt

SEQ ID NO: 15871 - DNA, 22 bp, Artificial Sequence
  chemically synthesized
atattttttggtagaaacggtg

SEQ ID NO: 15872 - DNA, 22 bp, Artificial Sequence
  chemically synthesized
tattttttggtagaaacggtgt

SEQ ID NO: 15873 - DNA, 22 bp, Artificial Sequence
  chemically synthesized
tttggtagaaacggtgtttcac

SEQ ID NO: 15874 - DNA, 22 bp, Artificial Sequence
  chemically synthesized
ttggtagaaacggtgtttcacc

SEQ ID NO: 15875 - DNA, 22 bp, Artificial Sequence
  chemically synthesized
tggtagaaacggtgtttcacca

SEQ ID NO: 15876 - DNA, 22 bp, Artificial Sequence
  chemically synthesized
ggtagaaacggtgtttcaccat

SEQ ID NO: 15877 - DNA, 22 bp, Artificial Sequence
  chemically synthesized
gtagaaacggtgtttcaccatg

SEQ ID NO: 15878 - DNA, 22 bp, Artificial Sequence
  chemically synthesized
caccatgttggccaggctggtc

SEQ ID NO: 15879 - DNA, 22 bp, Artificial Sequence
  chemically synthesized
accatgttggccaggctggtct

SEQ ID NO: 15880 - DNA, 22 bp, Artificial Sequence
  chemically synthesized
gccaggctggtctcaaactcct

SEQ ID NO: 15881 - DNA, 22 bp, Artificial Sequence
  chemically synthesized
gtctcaaactcctgacctcatg

SEQ ID NO: 15882 - DNA, 22 bp, Artificial Sequence
  chemically synthesized
aaactcctgacctcatgtgatc

SEQ ID NO: 15883 - DNA, 22 bp, Artificial Sequence
  chemically synthesized
ctgacctcatgtgatctgcctg

SEQ ID NO: 15884 - DNA, 22 bp, Artificial Sequence
  chemically synthesized
acctcatgtgatctgcctgcct

SEQ ID NO: 15885 - DNA, 22 bp, Artificial Sequence
  chemically synthesized
atgtgatctgcctgccttggcc

SEQ ID NO: 15886 - DNA, 22 bp, Artificial Sequence
  chemically synthesized
cctgccttggcctcccaaagtg

SEQ ID NO: 15887 - DNA, 22 bp, Artificial Sequence
  chemically synthesized
ccttggcctcccaaagtgctga

SEQ ID NO: 15888 - DNA, 22 bp, Artificial Sequence
  chemically synthesized
ggcctcccaaagtgctgagatt

SEQ ID NO: 15889 - DNA, 22 bp, Artificial Sequence
  chemically synthesized
gcctcccaaagtgctgagatta

SEQ ID NO: 15890 - DNA, 22 bp, Artificial Sequence
  chemically synthesized
ccaaagtgctgagattacaggt

SEQ ID NO: 15891 - DNA, 22 bp, Artificial Sequence
  chemically synthesized
agattacaggtgtgagccaccg

SEQ ID NO: 15892 - DNA, 22 bp, Artificial Sequence
  chemically synthesized
caggtgtgagccaccgcgcctg

SEQ ID NO: 15893 - DNA, 22 bp, Artificial Sequence
  chemically synthesized
cctggagttcagaatcttgggc

SEQ ID NO: 15894 - DNA, 22 bp, Artificial Sequence
  chemically synthesized
gagttcagaatcttgggcttca

SEQ ID NO: 15895 - DNA, 22 bp, Artificial Sequence
  chemically synthesized
agaatcttgggcttcattattt

SEQ ID NO: 15896 - DNA, 22 bp, Artificial Sequence
  chemically synthesized
gggcttcattatttgtgtttaa

SEQ ID NO: 15897 - DNA, 22 bp, Artificial Sequence
  chemically synthesized
ggcttcattatttgtgtttaaa

SEQ ID NO: 15898 - DNA, 22 bp, Artificial Sequence
  chemically synthesized
cattatttgtgtttaaatagat

SEQ ID NO: 15899 - DNA, 22 bp, Artificial Sequence
  chemically synthesized
attatttgtgtttaaatagatc

SEQ ID NO: 15900 - DNA, 22 bp, Artificial Sequence
  chemically synthesized
tttgtgtttaaatagatcatac

SEQ ID NO: 15901 - DNA, 22 bp, Artificial Sequence
  chemically synthesized
gtgtttaaatagatcatacagt

SEQ ID NO: 15902 - DNA, 22 bp, Artificial Sequence
  chemically synthesized
tgtttaaatagatcatacagtc

SEQ ID NO: 15903 - DNA, 22 bp, Artificial Sequence
  chemically synthesized
aaatagatcatacagtcaggca

SEQ ID NO: 15904 - DNA, 22 bp, Artificial Sequence
  chemically synthesized
aatagatcatacagtcaggcac

SEQ ID NO: 15905 - DNA, 22 bp, Artificial Sequence
  chemically synthesized
atgcctgtaatcccagcacttt

SEQ ID NO: 15906 - DNA, 22 bp, Artificial Sequence
  chemically synthesized
taatcccagcactttgggaggc

SEQ ID NO: 15907 - DNA, 22 bp, Artificial Sequence
  chemically synthesized
tgggaggctgaggtgggaggat

SEQ ID NO: 15908 - DNA, 22 bp, Artificial Sequence
  chemically synthesized
gggaggctgaggtgggaggatt

SEQ ID NO: 15909 - DNA, 22 bp, Artificial Sequence
  chemically synthesized
ggaggctgaggtgggaggattg

SEQ ID NO: 15910 - DNA, 22 bp, Artificial Sequence
  chemically synthesized
aggtgggaggattgcctgagtt

SEQ ID NO: 15911 - DNA, 22 bp, Artificial Sequence
  chemically synthesized
cctgagttcaggagatggagac

SEQ ID NO: 15912 - DNA, 22 bp, Artificial Sequence
  chemically synthesized
agttcaggagatggagaccagc

SEQ ID NO: 15913 - DNA, 22 bp, Artificial Sequence
  chemically synthesized
aggagatggagaccagcctggg

SEQ ID NO: 15914 - DNA, 22 bp, Artificial Sequence
  chemically synthesized
ggcaacatggtgaaaccccgtc

SEQ ID NO: 15915 - DNA, 22 bp, Artificial Sequence
  chemically synthesized
tactaaaaatacaaaaactagc

SEQ ID NO: 15916 - DNA, 22 bp, Artificial Sequence
  chemically synthesized
ctaaaaatacaaaaactagctg

SEQ ID NO: 15917 - DNA, 22 bp, Artificial Sequence
  chemically synthesized
aaaatacaaaaactagctggat

SEQ ID NO: 15918 - DNA, 22 bp, Artificial Sequence
  chemically synthesized
gctggatgtggtggcacacacc

SEQ ID NO: 15919 - DNA, 22 bp, Artificial Sequence
  chemically synthesized
gatgtggtggcacacacctgta

SEQ ID NO: 15920 - DNA, 22 bp, Artificial Sequence
  chemically synthesized
tagtcccagctattcaggaggc

SEQ ID NO: 15921 - DNA, 22 bp, Artificial Sequence
  chemically synthesized
ttcaggaggctgaggtgggagg

SEQ ID NO: 15922 - DNA, 22 bp, Artificial Sequence
  chemically synthesized
aggaggctgaggtgggaggatc

SEQ ID NO: 15923 - DNA, 22 bp, Artificial Sequence
  chemically synthesized
aggtgggaggatcccaggaggt

SEQ ID NO: 15924 - DNA, 22 bp, Artificial Sequence
  chemically synthesized
cgccactgcactccaggctggg

SEQ ID NO: 15925 - DNA, 22 bp, Artificial Sequence
  chemically synthesized
cactccaggctgggttactgag

SEQ ID NO: 15926 - DNA, 22 bp, Artificial Sequence
  chemically synthesized
caggctgggttactgagccaga

SEQ ID NO: 15927 - DNA, 22 bp, Artificial Sequence
  chemically synthesized
ggttactgagccagatcctgtc

SEQ ID NO: 15928 - DNA, 22 bp, Artificial Sequence
  chemically synthesized
ctgagccagatcctgtctcaaa

SEQ ID NO: 15929 - DNA, 22 bp, Artificial Sequence
  chemically synthesized
agccagatcctgtctcaaaaaa

SEQ ID NO: 15930 - DNA, 22 bp, Artificial Sequence
  chemically synthesized
tctcaaaaaaaaaaaagataat

SEQ ID NO: 15931 - DNA, 22 bp, Artificial Sequence
  chemically synthesized
aaaaaaaaaaaagataatacat

SEQ ID NO: 15932 - DNA, 22 bp, Artificial Sequence
  chemically synthesized
aaacagttcaaaatgcaaaagt

SEQ ID NO: 15933 - DNA, 22 bp, Artificial Sequence
  chemically synthesized
aaaatgcaaaagttacatacat

SEQ ID NO: 15934 - DNA, 22 bp, Artificial Sequence
  chemically synthesized
catacataaggaagtgtcatga

SEQ ID NO: 15935 - DNA, 22 bp, Artificial Sequence
  chemically synthesized
cctctcacacttctccccagcc

SEQ ID NO: 15936 - DNA, 22 bp, Artificial Sequence
  chemically synthesized
tcacacttctccccagccaccc

SEQ ID NO: 15937 - DNA, 22 bp, Artificial Sequence
  chemically synthesized
acacttctccccagccacccag

SEQ ID NO: 15938 - DNA, 22 bp, Artificial Sequence
  chemically synthesized
ctccccagccacccagttctcc

SEQ ID NO: 15939 - DNA, 22 bp, Artificial Sequence
  chemically synthesized
tccccagccacccagttctccc

SEQ ID NO: 15940 - DNA, 22 bp, Artificial Sequence
  chemically synthesized
cccagccacccagttctccctt

SEQ ID NO: 15941 - DNA, 22 bp, Artificial Sequence
  chemically synthesized
tcccttctagaggcaacatgtg

SEQ ID NO: 15942 - DNA, 22 bp, Artificial Sequence
  chemically synthesized
ccttctagaggcaacatgtgaa

SEQ ID NO: 15943 - DNA, 22 bp, Artificial Sequence
  chemically synthesized
ctagaggcaacatgtgaaatcc

SEQ ID NO: 15944 - DNA, 22 bp, Artificial Sequence
  chemically synthesized
tagaggcaacatgtgaaatcct

SEQ ID NO: 15945 - DNA, 22 bp, Artificial Sequence
  chemically synthesized
gaggcaacatgtgaaatccttc

SEQ ID NO: 15946 - DNA, 22 bp, Artificial Sequence
  chemically synthesized
ctcaggctacactcttcttgaa

SEQ ID NO: 15947 - DNA, 22 bp, Artificial Sequence
  chemically synthesized
tcaggctacactcttcttgaag

SEQ ID NO: 15948 - DNA, 22 bp, Artificial Sequence
  chemically synthesized
aggctacactcttcttgaaggt

SEQ ID NO: 15949 - DNA, 22 bp, Artificial Sequence
  chemically synthesized
cactcttcttgaaggtgtaggc

SEQ ID NO: 15950 - DNA, 22 bp, Artificial Sequence
  chemically synthesized
ttcttgaaggtgtaggctttgg

SEQ ID NO: 15951 - DNA, 22 bp, Artificial Sequence
  chemically synthesized
cttgaaggtgtaggctttgggc

SEQ ID NO: 15952 - DNA, 22 bp, Artificial Sequence
  chemically synthesized
ttgaaggtgtaggctttgggca

SEQ ID NO: 15953 - DNA, 22 bp, Artificial Sequence
  chemically synthesized
gaaggtgtaggctttgggcaaa

SEQ ID NO: 15954 - DNA, 22 bp, Artificial Sequence
  chemically synthesized
aaggtgtaggctttgggcaaaa

SEQ ID NO: 15955 - DNA, 22 bp, Artificial Sequence
  chemically synthesized
tgggcaaaagcattcattcagt

SEQ ID NO: 15956 - DNA, 22 bp, Artificial Sequence
  chemically synthesized
gggcaaaagcattcattcagta

SEQ ID NO: 15957 - DNA, 22 bp, Artificial Sequence
  chemically synthesized
ggcaaaagcattcattcagtaa

SEQ ID NO: 15958 - DNA, 22 bp, Artificial Sequence
  chemically synthesized
attcagtaaccccagaaacttg

SEQ ID NO: 15959 - DNA, 22 bp, Artificial Sequence
  chemically synthesized
agtaaccccagaaacttgttct

SEQ ID NO: 15960 - DNA, 22 bp, Artificial Sequence
  chemically synthesized
gttctgtttttccataggattc

SEQ ID NO: 15961 - DNA, 22 bp, Artificial Sequence
  chemically synthesized
ttctgtttttccataggattct

SEQ ID NO: 15962 - DNA, 22 bp, Artificial Sequence
  chemically synthesized
tgtttttccataggattctctt

SEQ ID NO: 15963 - DNA, 22 bp, Artificial Sequence
  chemically synthesized
tttttccataggattctctttg

SEQ ID NO: 15964 - DNA, 22 bp, Artificial Sequence
  chemically synthesized
ttccataggattctctttggac

SEQ ID NO: 15965 - DNA, 22 bp, Artificial Sequence
  chemically synthesized
tccataggattctctttggaca

SEQ ID NO: 15966 - DNA, 22 bp, Artificial Sequence
  chemically synthesized
ccataggattctctttggacag

SEQ ID NO: 15967 - DNA, 22 bp, Artificial Sequence
  chemically synthesized
cataggattctctttggacagc

SEQ ID NO: 15968 - DNA, 22 bp, Artificial Sequence
  chemically synthesized
tctttggacagcgtccatactg

SEQ ID NO: 15969 - DNA, 22 bp, Artificial Sequence
  chemically synthesized
tttggacagcgtccatactggt

SEQ ID NO: 15970 - DNA, 22 bp, Artificial Sequence
  chemically synthesized
tggacagcgtccatactggtgg

SEQ ID NO: 15971 - DNA, 22 bp, Artificial Sequence
  chemically synthesized
ggacagcgtccatactggtggg

SEQ ID NO: 15972 - DNA, 22 bp, Artificial Sequence
  chemically synthesized
gacagcgtccatactggtgggt

SEQ ID NO: 15973 - DNA, 22 bp, Artificial Sequence
  chemically synthesized
gtgggttttggatactgactac

SEQ ID NO: 15974 - DNA, 22 bp, Artificial Sequence
  chemically synthesized
tggatactgactactacagcaa

SEQ ID NO: 15975 - DNA, 22 bp, Artificial Sequence
  chemically synthesized
ggatactgactactacagcaac

SEQ ID NO: 15976 - DNA, 22 bp, Artificial Sequence
  chemically synthesized
gatactgactactacagcaaca

SEQ ID NO: 15977 - DNA, 22 bp, Artificial Sequence
  chemically synthesized
actactacagcaacacttccgt

SEQ ID NO: 15978 - DNA, 22 bp, Artificial Sequence
  chemically synthesized
ctacagcaacacttccgtgccc

SEQ ID NO: 15979 - DNA, 22 bp, Artificial Sequence
  chemically synthesized
cagcaacacttccgtgcccctg

SEQ ID NO: 15980 - DNA, 22 bp, Artificial Sequence
  chemically synthesized
ccgtgcccctgataaagcagtt

SEQ ID NO: 15981 - DNA, 22 bp, Artificial Sequence
  chemically synthesized
cgtgcccctgataaagcagttc

SEQ ID NO: 15982 - DNA, 22 bp, Artificial Sequence
  chemically synthesized
ataaagcagttccctgtaacct

SEQ ID NO: 15983 - DNA, 22 bp, Artificial Sequence
  chemically synthesized
cctgtaacctgtgagactggac

SEQ ID NO: 15984 - DNA, 22 bp, Artificial Sequence
  chemically synthesized
taacctgtgagactggaccagg

SEQ ID NO: 15985 - DNA, 22 bp, Artificial Sequence
  chemically synthesized
tgagactggaccaggtaagcgt

SEQ ID NO: 15986 - DNA, 22 bp, Artificial Sequence
  chemically synthesized
gaccaggtaagcgtcccagccc

SEQ ID NO: 15987 - DNA, 22 bp, Artificial Sequence
  chemically synthesized
cagacagaagctgagtggacct

SEQ ID NO: 15988 - DNA, 22 bp, Artificial Sequence
  chemically synthesized
agtggacctcgtttacctgtta

SEQ ID NO: 15989 - DNA, 22 bp, Artificial Sequence
  chemically synthesized
gtttacctgttatggatgaaac

SEQ ID NO: 15990 - DNA, 22 bp, Artificial Sequence
  chemically synthesized
acctgttatggatgaaactgac

SEQ ID NO: 15991 - DNA, 22 bp, Artificial Sequence
  chemically synthesized
cctgttatggatgaaactgacc

SEQ ID NO: 15992 - DNA, 22 bp, Artificial Sequence
  chemically synthesized
ttatggatgaaactgaccttga

SEQ ID NO: 15993 - DNA, 22 bp, Artificial Sequence
  chemically synthesized
tggatgaaactgaccttgaggg

SEQ ID NO: 15994 - DNA, 22 bp, Artificial Sequence
  chemically synthesized
accttgaggggacatgaggaga

SEQ ID NO: 15995 - DNA, 22 bp, Artificial Sequence
  chemically synthesized
gaggggacatgaggagagccat

SEQ ID NO: 15996 - DNA, 22 bp, Artificial Sequence
  chemically synthesized
aggggacatgaggagagccatt

SEQ ID NO: 15997 - DNA, 22 bp, Artificial Sequence
  chemically synthesized
ctttgtacttttgtcatgctct

SEQ ID NO: 15998 - DNA, 22 bp, Artificial Sequence
  chemically synthesized
tgtacttttgtcatgctcttca

SEQ ID NO: 15999 - DNA, 22 bp, Artificial Sequence
  chemically synthesized
gtacttttgtcatgctcttcaa

SEQ ID NO: 16000 - DNA, 22 bp, Artificial Sequence
  chemically synthesized
tacttttgtcatgctcttcaat

SEQ ID NO: 16001 - DNA, 22 bp, Artificial Sequence
  chemically synthesized
ttgtcatgctcttcaattggca

SEQ ID NO: 16002 - DNA, 22 bp, Artificial Sequence
  chemically synthesized
tgtcatgctcttcaattggcac

SEQ ID NO: 16003 - DNA, 22 bp, Artificial Sequence
  chemically synthesized
gtcatgctcttcaattggcaca

SEQ ID NO: 16004 - DNA, 22 bp, Artificial Sequence
  chemically synthesized
tcatgctcttcaattggcacaa

SEQ ID NO: 16005 - DNA, 22 bp, Artificial Sequence
  chemically synthesized
ttcaattggcacaaattaattc

SEQ ID NO: 16006 - DNA, 22 bp, Artificial Sequence
  chemically synthesized
caattggcacaaattaattcac

SEQ ID NO: 16007 - DNA, 22 bp, Artificial Sequence
  chemically synthesized
aattggcacaaattaattcact

SEQ ID NO: 16008 - DNA, 22 bp, Artificial Sequence
  chemically synthesized
gcacaaattaattcacttctgc

SEQ ID NO: 16009 - DNA, 22 bp, Artificial Sequence
  chemically synthesized
attcacttctgcaatactttcc

SEQ ID NO: 16010 - DNA, 22 bp, Artificial Sequence
  chemically synthesized
acttctgcaatactttcctgaa

SEQ ID NO: 16011 - DNA, 22 bp, Artificial Sequence
  chemically synthesized
ctgcaatactttcctgaatagc

SEQ ID NO: 16012 - DNA, 22 bp, Artificial Sequence
  chemically synthesized
tgcaatactttcctgaatagca

SEQ ID NO: 16013 - DNA, 22 bp, Artificial Sequence
  chemically synthesized
caatactttcctgaatagcaca

SEQ ID NO: 16014 - DNA, 22 bp, Artificial Sequence
  chemically synthesized
tcctgaatagcacagtagtatt

SEQ ID NO: 16015 - DNA, 22 bp, Artificial Sequence
  chemically synthesized
cctgaatagcacagtagtattg

SEQ ID NO: 16016 - DNA, 22 bp, Artificial Sequence
  chemically synthesized
ctgaatagcacagtagtattgg

SEQ ID NO: 16017 - DNA, 22 bp, Artificial Sequence
  chemically synthesized
aatagcacagtagtattggaaa

SEQ ID NO: 16018 - DNA, 22 bp, Artificial Sequence
  chemically synthesized
gaaatctgcctattacagaacc

SEQ ID NO: 16019 - DNA, 22 bp, Artificial Sequence
  chemically synthesized
cctattacagaacctggatgga

SEQ ID NO: 16020 - DNA, 22 bp, Artificial Sequence
  chemically synthesized
ttacagaacctggatggagtcc

SEQ ID NO: 16021 - DNA, 22 bp, Artificial Sequence
  chemically synthesized
cagaacctggatggagtccaga

SEQ ID NO: 16022 - DNA, 22 bp, Artificial Sequence
  chemically synthesized
gatggagtccagagaggcacgg

SEQ ID NO: 16023 - DNA, 22 bp, Artificial Sequence
  chemically synthesized
gtgagagtcaccgccctgcagc

SEQ ID NO: 16024 - DNA, 22 bp, Artificial Sequence
  chemically synthesized
cagggcggtgactctcacgagc

SEQ ID NO: 16025 - DNA, 22 bp, Artificial Sequence
  chemically synthesized
tcacgagccctttgcccatgga

SEQ ID NO: 16026 - DNA, 22 bp, Artificial Sequence
  chemically synthesized
acgagccctttgcccatggatg

SEQ ID NO: 16027 - DNA, 22 bp, Artificial Sequence
  chemically synthesized
tgcccatggatgcccgtgcctc

SEQ ID NO: 16028 - DNA, 22 bp, Artificial Sequence
  chemically synthesized
gcccatggatgcccgtgcctct

SEQ ID NO: 16029 - DNA, 22 bp, Artificial Sequence
  chemically synthesized
cccatggatgcccgtgcctctc

SEQ ID NO: 16030 - DNA, 22 bp, Artificial Sequence
  chemically synthesized
tctggactccatccaggttctg

SEQ ID NO: 16031 - DNA, 22 bp, Artificial Sequence
  chemically synthesized
tggactccatccaggttctgta

SEQ ID NO: 16032 - DNA, 22 bp, Artificial Sequence
  chemically synthesized
gactccatccaggttctgtaat

SEQ ID NO: 16033 - DNA, 22 bp, Artificial Sequence
  chemically synthesized
catccaggttctgtaataggca

SEQ ID NO: 16034 - DNA, 22 bp, Artificial Sequence
  chemically synthesized
tgtaataggcagatttccaata

SEQ ID NO: 16035 - DNA, 22 bp, Artificial Sequence
  chemically synthesized
taataggcagatttccaatact

SEQ ID NO: 16036 - DNA, 22 bp, Artificial Sequence
  chemically synthesized
ccaatactactgtgctattcag

SEQ ID NO: 16037 - DNA, 22 bp, Artificial Sequence
  chemically synthesized
caatactactgtgctattcagg

SEQ ID NO: 16038 - DNA, 22 bp, Artificial Sequence
  chemically synthesized
ctgtgctattcaggaaagtatt

SEQ ID NO: 16039 - DNA, 22 bp, Artificial Sequence
  chemically synthesized
tgctattcaggaaagtattgca

SEQ ID NO: 16040 - DNA, 22 bp, Artificial Sequence
  chemically synthesized
ttcaggaaagtattgcagaagt

SEQ ID NO: 16041 - DNA, 22 bp, Artificial Sequence
  chemically synthesized
aggaaagtattgcagaagtgaa

SEQ ID NO: 16042 - DNA, 22 bp, Artificial Sequence
  chemically synthesized
cagaagtgaattaatttgtgcc

SEQ ID NO: 16043 - DNA, 22 bp, Artificial Sequence
  chemically synthesized
atttgtgccaattgaagagcat

SEQ ID NO: 16044 - DNA, 22 bp, Artificial Sequence
  chemically synthesized
gtgccaattgaagagcatgaca

SEQ ID NO: 16045 - DNA, 22 bp, Artificial Sequence
  chemically synthesized
tgccaattgaagagcatgacaa

SEQ ID NO: 16046 - DNA, 22 bp, Artificial Sequence
  chemically synthesized
aagagcatgacaaaagtacaaa

SEQ ID NO: 16047 - DNA, 22 bp, Artificial Sequence
  chemically synthesized
tcctcatgtcccctcaaggtca

SEQ ID NO: 16048 - DNA, 22 bp, Artificial Sequence
  chemically synthesized
ctcatgtcccctcaaggtcagt

SEQ ID NO: 16049 - DNA, 22 bp, Artificial Sequence
  chemically synthesized
atgtcccctcaaggtcagtttc

SEQ ID NO: 16050 - DNA, 22 bp, Artificial Sequence
  chemically synthesized
aaggtcagtttcatccataaca

SEQ ID NO: 16051 - DNA, 22 bp, Artificial Sequence
  chemically synthesized
catccataacaggtaaacgagg

SEQ ID NO: 16052 - DNA, 22 bp, Artificial Sequence
  chemically synthesized
atccataacaggtaaacgaggt

SEQ ID NO: 16053 - DNA, 22 bp, Artificial Sequence
  chemically synthesized
agcttctgtctgcaggggctgg

SEQ ID NO: 16054 - DNA, 22 bp, Artificial Sequence
  chemically synthesized
ctgtctgcaggggctgggacgc

SEQ ID NO: 16055 - DNA, 22 bp, Artificial Sequence
  chemically synthesized
tgtctgcaggggctgggacgct

SEQ ID NO: 16056 - DNA, 22 bp, Artificial Sequence
  chemically synthesized
tctgcaggggctgggacgctta

SEQ ID NO: 16057 - DNA, 22 bp, Artificial Sequence
  chemically synthesized
caggggctgggacgcttacctg

SEQ ID NO: 16058 - DNA, 22 bp, Artificial Sequence
  chemically synthesized
ggacgcttacctggtccagtct

SEQ ID NO: 16059 - DNA, 22 bp, Artificial Sequence
  chemically synthesized
acctggtccagtctcacaggtt

SEQ ID NO: 16060 - DNA, 22 bp, Artificial Sequence
  chemically synthesized
cctggtccagtctcacaggtta

SEQ ID NO: 16061 - DNA, 22 bp, Artificial Sequence
  chemically synthesized
gtccagtctcacaggttacagg

SEQ ID NO: 16062 - DNA, 22 bp, Artificial Sequence
  chemically synthesized
acaggttacagggaactgcttt

SEQ ID NO: 16063 - DNA, 22 bp, Artificial Sequence
  chemically synthesized
cagggaactgctttatcagggg

SEQ ID NO: 16064 - DNA, 22 bp, Artificial Sequence
  chemically synthesized
ctttatcaggggcacggaagtg

SEQ ID NO: 16065 - DNA, 22 bp, Artificial Sequence
  chemically synthesized
tatcaggggcacggaagtgttg

SEQ ID NO: 16066 - DNA, 22 bp, Artificial Sequence
  chemically synthesized
atcaggggcacggaagtgttgc

SEQ ID NO: 16067 - DNA, 22 bp, Artificial Sequence
  chemically synthesized
tcaggggcacggaagtgttgct

SEQ ID NO: 16068 - DNA, 22 bp, Artificial Sequence
  chemically synthesized
ctgtagtagtcagtatccaaaa

SEQ ID NO: 16069 - DNA, 22 bp, Artificial Sequence
  chemically synthesized
tagtagtcagtatccaaaaccc

SEQ ID NO: 16070 - DNA, 22 bp, Artificial Sequence
  chemically synthesized
tccaaagagaatcctatggaaa

SEQ ID NO: 16071 - DNA, 22 bp, Artificial Sequence
  chemically synthesized
tggaaaaacagaacaagtttct

SEQ ID NO: 16072 - DNA, 22 bp, Artificial Sequence
  chemically synthesized
ctggggttactgaatgaatgct

SEQ ID NO: 16073 - DNA, 22 bp, Artificial Sequence
  chemically synthesized
tggggttactgaatgaatgctt

SEQ ID NO: 16074 - DNA, 22 bp, Artificial Sequence
  chemically synthesized
gggttactgaatgaatgctttt

SEQ ID NO: 16075 - DNA, 22 bp, Artificial Sequence
  chemically synthesized
ctgaatgaatgcttttgcccaa

SEQ ID NO: 16076 - DNA, 22 bp, Artificial Sequence
  chemically synthesized
aatgaatgcttttgcccaaagc

SEQ ID NO: 16077 - DNA, 22 bp, Artificial Sequence
  chemically synthesized
ttgcccaaagcctacaccttca

SEQ ID NO: 16078 - DNA, 22 bp, Artificial Sequence
  chemically synthesized
tgcccaaagcctacaccttcaa

SEQ ID NO: 16079 - DNA, 22 bp, Artificial Sequence
  chemically synthesized
gcccaaagcctacaccttcaag

SEQ ID NO: 16080 - DNA, 22 bp, Artificial Sequence
  chemically synthesized
cccaaagcctacaccttcaaga

SEQ ID NO: 16081 - DNA, 22 bp, Artificial Sequence
  chemically synthesized
caccttcaagaagagtgtagcc

SEQ ID NO: 16082 - DNA, 22 bp, Artificial Sequence
  chemically synthesized
caagaagagtgtagcctgagaa

SEQ ID NO: 16083 - DNA, 22 bp, Artificial Sequence
  chemically synthesized
aagaagagtgtagcctgagaag

SEQ ID NO: 16084 - DNA, 22 bp, Artificial Sequence
  chemically synthesized
agaaggatttcacatgttgcct

SEQ ID NO: 16085 - DNA, 22 bp, Artificial Sequence
  chemically synthesized
cacatgttgcctctagaaggga

SEQ ID NO: 16086 - DNA, 22 bp, Artificial Sequence
  chemically synthesized
acatgttgcctctagaagggag

SEQ ID NO: 16087 - DNA, 22 bp, Artificial Sequence
  chemically synthesized
cctctagaagggagaactgggt

SEQ ID NO: 16088 - DNA, 22 bp, Artificial Sequence
  chemically synthesized
tagaagggagaactgggtggct

SEQ ID NO: 16089 - DNA, 22 bp, Artificial Sequence
  chemically synthesized
gaagggagaactgggtggctgg

SEQ ID NO: 16090 - DNA, 22 bp, Artificial Sequence
  chemically synthesized
ggtggctggggagaagtgtgag

SEQ ID NO: 16091 - DNA, 22 bp, Artificial Sequence
  chemically synthesized
gggagaagtgtgagagggagat

SEQ ID NO: 16092 - DNA, 22 bp, Artificial Sequence
  chemically synthesized
catgacacttccttatgtatgt

SEQ ID NO: 16093 - DNA, 22 bp, Artificial Sequence
  chemically synthesized
atgacacttccttatgtatgta

SEQ ID NO: 16094 - DNA, 22 bp, Artificial Sequence
  chemically synthesized
ccttatgtatgtaacttttgca

SEQ ID NO: 16095 - DNA, 22 bp, Artificial Sequence
  chemically synthesized
cttatgtatgtaacttttgcat

SEQ ID NO: 16096 - DNA, 22 bp, Artificial Sequence
  chemically synthesized
atgtatgtaacttttgcatttt

SEQ ID NO: 16097 - DNA, 22 bp, Artificial Sequence
  chemically synthesized
tgtatgtaacttttgcattttg

SEQ ID NO: 16098 - DNA, 22 bp, Artificial Sequence
  chemically synthesized
ttgcattttgaactgtttgaat

SEQ ID NO: 16099 - DNA, 22 bp, Artificial Sequence
  chemically synthesized
tgcattttgaactgtttgaatg

SEQ ID NO: 16100 - DNA, 22 bp, Artificial Sequence
  chemically synthesized
gcattttgaactgtttgaatgt

SEQ ID NO: 16101 - DNA, 22 bp, Artificial Sequence
  chemically synthesized
cattttgaactgtttgaatgta

SEQ ID NO: 16102 - DNA, 22 bp, Artificial Sequence
  chemically synthesized
tgaactgtttgaatgtattatc

SEQ ID NO: 16103 - DNA, 22 bp, Artificial Sequence
  chemically synthesized
gaactgtttgaatgtattatct

SEQ ID NO: 16104 - DNA, 22 bp, Artificial Sequence
  chemically synthesized
aactgtttgaatgtattatctt

SEQ ID NO: 16105 - DNA, 22 bp, Artificial Sequence
  chemically synthesized
tttgaatgtattatcttttttt

SEQ ID NO: 16106 - DNA, 22 bp, Artificial Sequence
  chemically synthesized
gaatgtattatctttttttttt

SEQ ID NO: 16107 - DNA, 22 bp, Artificial Sequence
  chemically synthesized
aatgtattatcttttttttttt

SEQ ID NO: 16108 - DNA, 22 bp, Artificial Sequence
  chemically synthesized
tcttttttttttttgagacagg

SEQ ID NO: 16109 - DNA, 22 bp, Artificial Sequence
  chemically synthesized
ttttttttttgagacaggatct

SEQ ID NO: 16110 - DNA, 22 bp, Artificial Sequence
  chemically synthesized
tttttttttgagacaggatctg

SEQ ID NO: 16111 - DNA, 22 bp, Artificial Sequence
  chemically synthesized
ttttttttgagacaggatctgg

SEQ ID NO: 16112 - DNA, 22 bp, Artificial Sequence
  chemically synthesized
tttttttgagacaggatctggc

SEQ ID NO: 16113 - DNA, 22 bp, Artificial Sequence
  chemically synthesized
ttttttgagacaggatctggct

SEQ ID NO: 16114 - DNA, 22 bp, Artificial Sequence
  chemically synthesized
tttttgagacaggatctggctc

SEQ ID NO: 16115 - DNA, 22 bp, Artificial Sequence
  chemically synthesized
ttttgagacaggatctggctca

SEQ ID NO: 16116 - DNA, 22 bp, Artificial Sequence
  chemically synthesized
tttgagacaggatctggctcag

SEQ ID NO: 16117 - DNA, 22 bp, Artificial Sequence
  chemically synthesized
ttgagacaggatctggctcagt

SEQ ID NO: 16118 - DNA, 22 bp, Artificial Sequence
  chemically synthesized
tgagacaggatctggctcagta

SEQ ID NO: 16119 - DNA, 22 bp, Artificial Sequence
  chemically synthesized
gagacaggatctggctcagtaa

SEQ ID NO: 16120 - DNA, 22 bp, Artificial Sequence
  chemically synthesized
agacaggatctggctcagtaac

SEQ ID NO: 16121 - DNA, 22 bp, Artificial Sequence
  chemically synthesized
gctcagtaacccagcctggagt

SEQ ID NO: 16122 - DNA, 22 bp, Artificial Sequence
  chemically synthesized
agtaacccagcctggagtgcag

SEQ ID NO: 16123 - DNA, 22 bp, Artificial Sequence
  chemically synthesized
gagtgcagtggcgcaatctcgg

SEQ ID NO: 16124 - DNA, 22 bp, Artificial Sequence
  chemically synthesized
ggctcattgtgacctctacctc

SEQ ID NO: 16125 - DNA, 22 bp, Artificial Sequence
  chemically synthesized
attgtgacctctacctcctggg

SEQ ID NO: 16126 - DNA, 22 bp, Artificial Sequence
  chemically synthesized
tgacctctacctcctgggatcc

SEQ ID NO: 16127 - DNA, 22 bp, Artificial Sequence
  chemically synthesized
tacctcctgggatcctcccacc

SEQ ID NO: 16128 - DNA, 22 bp, Artificial Sequence
  chemically synthesized
cctcctgggatcctcccacctc

SEQ ID NO: 16129 - DNA, 22 bp, Artificial Sequence
  chemically synthesized
ctgggatcctcccacctcagcc

SEQ ID NO: 16130 - DNA, 22 bp, Artificial Sequence
  chemically synthesized
ggatcctcccacctcagcctcc

SEQ ID NO: 16131 - DNA, 22 bp, Artificial Sequence
  chemically synthesized
ccacctcagcctcctgaatagc

SEQ ID NO: 16132 - DNA, 22 bp, Artificial Sequence
  chemically synthesized
agcctcctgaatagctgggact

SEQ ID NO: 16133 - DNA, 22 bp, Artificial Sequence
  chemically synthesized
ctgaatagctgggactacaggt

SEQ ID NO: 16134 - DNA, 22 bp, Artificial Sequence
  chemically synthesized
aatagctgggactacaggtgtg

SEQ ID NO: 16135 - DNA, 22 bp, Artificial Sequence
  chemically synthesized
ggactacaggtgtgtgccacca

SEQ ID NO: 16136 - DNA, 22 bp, Artificial Sequence
  chemically synthesized
caggtgtgtgccaccacatcca

SEQ ID NO: 16137 - DNA, 22 bp, Artificial Sequence
  chemically synthesized
gtttttgtatttttagtagaga

SEQ ID NO: 16138 - DNA, 22 bp, Artificial Sequence
  chemically synthesized
ttgtatttttagtagagacggg

SEQ ID NO: 16139 - DNA, 22 bp, Artificial Sequence
  chemically synthesized
tgtatttttagtagagacgggg

SEQ ID NO: 16140 - DNA, 22 bp, Artificial Sequence
  chemically synthesized
gtatttttagtagagacggggt

SEQ ID NO: 16141 - DNA, 22 bp, Artificial Sequence
  chemically synthesized
tatttttagtagagacggggtt

SEQ ID NO: 16142 - DNA, 22 bp, Artificial Sequence
  chemically synthesized
ttagtagagacggggtttcacc

SEQ ID NO: 16143 - DNA, 22 bp, Artificial Sequence
  chemically synthesized
tagtagagacggggtttcacca

SEQ ID NO: 16144 - DNA, 22 bp, Artificial Sequence
  chemically synthesized
agtagagacggggtttcaccat

SEQ ID NO: 16145 - DNA, 22 bp, Artificial Sequence
  chemically synthesized
gtagagacggggtttcaccatg

SEQ ID NO: 16146 - DNA, 22 bp, Artificial Sequence
  chemically synthesized
caccatgttgcccaggctggtc

SEQ ID NO: 16147 - DNA, 22 bp, Artificial Sequence
  chemically synthesized
accatgttgcccaggctggtct

SEQ ID NO: 16148 - DNA, 22 bp, Artificial Sequence
  chemically synthesized
cccaggctggtctccatctcct

SEQ ID NO: 16149 - DNA, 22 bp, Artificial Sequence
  chemically synthesized
gtctccatctcctgaactcagg

SEQ ID NO: 16150 - DNA, 22 bp, Artificial Sequence
  chemically synthesized
catctcctgaactcaggcaatc

SEQ ID NO: 16151 - DNA, 22 bp, Artificial Sequence
  chemically synthesized
ctgaactcaggcaatcctccca

SEQ ID NO: 16152 - DNA, 22 bp, Artificial Sequence
  chemically synthesized
aactcaggcaatcctcccacct

SEQ ID NO: 16153 - DNA, 22 bp, Artificial Sequence
  chemically synthesized
aggcaatcctcccacctcagcc

SEQ ID NO: 16154 - DNA, 22 bp, Artificial Sequence
  chemically synthesized
ccacctcagcctcccaaagtgc

SEQ ID NO: 16155 - DNA, 22 bp, Artificial Sequence
  chemically synthesized
agcctcccaaagtgctgggatt

SEQ ID NO: 16156 - DNA, 22 bp, Artificial Sequence
  chemically synthesized
ccaaagtgctgggattacaggc

SEQ ID NO: 16157 - DNA, 22 bp, Artificial Sequence
  chemically synthesized
ggattacaggcatgagccaccg

SEQ ID NO: 16158 - DNA, 22 bp, Artificial Sequence
  chemically synthesized
caggcatgagccaccgtgcctg

SEQ ID NO: 16159 - DNA, 22 bp, Artificial Sequence
  chemically synthesized
actgtatgatctatttaaacac

SEQ ID NO: 16160 - DNA, 22 bp, Artificial Sequence
  chemically synthesized
tatgatctatttaaacacaaat

SEQ ID NO: 16161 - DNA, 22 bp, Artificial Sequence
  chemically synthesized
tttaaacacaaataatgaagcc

SEQ ID NO: 16162 - DNA, 22 bp, Artificial Sequence
  chemically synthesized
aaacacaaataatgaagcccaa

SEQ ID NO: 16163 - DNA, 22 bp, Artificial Sequence
  chemically synthesized
aacacaaataatgaagcccaag

SEQ ID NO: 16164 - DNA, 22 bp, Artificial Sequence
  chemically synthesized
tgaactccaggcaggcgcggtg

SEQ ID NO: 16165 - DNA, 22 bp, Artificial Sequence
  chemically synthesized
aactccaggcaggcgcggtggc

SEQ ID NO: 16166 - DNA, 22 bp, Artificial Sequence
  chemically synthesized
caggcaggcgcggtggctcaca

SEQ ID NO: 16167 - DNA, 22 bp, Artificial Sequence
  chemically synthesized
acacctgtaatctcagcacttt

SEQ ID NO: 16168 - DNA, 22 bp, Artificial Sequence
  chemically synthesized
taatctcagcactttgggaggc

SEQ ID NO: 16169 - DNA, 22 bp, Artificial Sequence
  chemically synthesized
agcactttgggaggccaaggca

SEQ ID NO: 16170 - DNA, 22 bp, Artificial Sequence
  chemically synthesized
tgggaggccaaggcaggcagat

SEQ ID NO: 16171 - DNA, 22 bp, Artificial Sequence
  chemically synthesized
gggaggccaaggcaggcagatc

SEQ ID NO: 16172 - DNA, 22 bp, Artificial Sequence
  chemically synthesized
ggaggccaaggcaggcagatca

SEQ ID NO: 16173 - DNA, 22 bp, Artificial Sequence
  chemically synthesized
gagaccagcctggccaacatgg

SEQ ID NO: 16174 - DNA, 22 bp, Artificial Sequence
  chemically synthesized
agaccagcctggccaacatggt

SEQ ID NO: 16175 - DNA, 22 bp, Artificial Sequence
  chemically synthesized
gccaacatggtgaaacaccgtt

SEQ ID NO: 16176 - DNA, 22 bp, Artificial Sequence
  chemically synthesized
ctaccaaaaaatataaagaatt

SEQ ID NO: 16177 - DNA, 22 bp, Artificial Sequence
  chemically synthesized
taccaaaaaatataaagaatta

SEQ ID NO: 16178 - DNA, 22 bp, Artificial Sequence
  chemically synthesized
ccaaaaaatataaagaattagc

SEQ ID NO: 16179 - DNA, 22 bp, Artificial Sequence
  chemically synthesized
gccagatgtggtggtgcgtgac

SEQ ID NO: 16180 - DNA, 22 bp, Artificial Sequence
  chemically synthesized
taatcccagctactcgggaggc

SEQ ID NO: 16181 - DNA, 22 bp, Artificial Sequence
  chemically synthesized
ctcgggaggctaaggcaagaga

SEQ ID NO: 16182 - DNA, 22 bp, Artificial Sequence
  chemically synthesized
gggaggctaaggcaagagaatc

SEQ ID NO: 16183 - DNA, 22 bp, Artificial Sequence
  chemically synthesized
aggcaagagaatcgcttgaacc

SEQ ID NO: 16184 - DNA, 22 bp, Artificial Sequence
  chemically synthesized
gaacctgggaggcggaggttgc

SEQ ID NO: 16185 - DNA, 22 bp, Artificial Sequence
  chemically synthesized
aacctgggaggcggaggttgcc

SEQ ID NO: 16186 - DNA, 22 bp, Artificial Sequence
  chemically synthesized
ggaggcggaggttgccgtgagc

SEQ ID NO: 16187 - DNA, 22 bp, Artificial Sequence
  chemically synthesized
ccgtgagccgagattatgccac

SEQ ID NO: 16188 - DNA, 22 bp, Artificial Sequence
  chemically synthesized
tgccactgcactacaggctggg

SEQ ID NO: 16189 - DNA, 22 bp, Artificial Sequence
  chemically synthesized
cactacaggctgggtgacagag

SEQ ID NO: 16190 - DNA, 22 bp, Artificial Sequence
  chemically synthesized
caggctgggtgacagagcaaga

SEQ ID NO: 16191 - DNA, 22 bp, Artificial Sequence
  chemically synthesized
ggtgacagagcaagactccatc

SEQ ID NO: 16192 - DNA, 22 bp, Artificial Sequence
  chemically synthesized
catctcaaaaaaaaaaaaaaaa

SEQ ID NO: 16193 - DNA, 22 bp, Artificial Sequence
  chemically synthesized
aaaaaaaaaaaaaaaaaaatcc

SEQ ID NO: 16194 - DNA, 22 bp, Artificial Sequence
  chemically synthesized
aaatccataaaatggcagctat

SEQ ID NO: 16195 - DNA, 22 bp, Artificial Sequence
  chemically synthesized
tgtgactttttttttttaacct

SEQ ID NO: 16196 - DNA, 22 bp, Artificial Sequence
  chemically synthesized
tttttttttaacctcaagaagt

SEQ ID NO: 16197 - DNA, 22 bp, Artificial Sequence
  chemically synthesized
ttttttttaacctcaagaagta

SEQ ID NO: 16198 - DNA, 22 bp, Artificial Sequence
  chemically synthesized
tttttttaacctcaagaagtat

SEQ ID NO: 16199 - DNA, 22 bp, Artificial Sequence
  chemically synthesized
ttttttaacctcaagaagtatt

SEQ ID NO: 16200 - DNA, 22 bp, Artificial Sequence
  chemically synthesized
tttttaacctcaagaagtattt

SEQ ID NO: 16201 - DNA, 22 bp, Artificial Sequence
  chemically synthesized
ttttaacctcaagaagtatttg

SEQ ID NO: 16202 - DNA, 22 bp, Artificial Sequence
  chemically synthesized
tttaacctcaagaagtatttgt

SEQ ID NO: 16203 - DNA, 22 bp, Artificial Sequence
  chemically synthesized
ttaacctcaagaagtatttgtc

SEQ ID NO: 16204 - DNA, 22 bp, Artificial Sequence
  chemically synthesized
taacctcaagaagtatttgtcc

SEQ ID NO: 16205 - DNA, 22 bp, Artificial Sequence
  chemically synthesized
aacctcaagaagtatttgtcct

SEQ ID NO: 16206 - DNA, 22 bp, Artificial Sequence
  chemically synthesized
acctcaagaagtatttgtcctg

SEQ ID NO: 16207 - DNA, 22 bp, Artificial Sequence
  chemically synthesized
aagaagtatttgtcctggaaga

SEQ ID NO: 16208 - DNA, 22 bp, Artificial Sequence
  chemically synthesized
gtcctggaagaatgcatatgga

SEQ ID NO: 16209 - DNA, 22 bp, Artificial Sequence
  chemically synthesized
tcctggaagaatgcatatggaa

SEQ ID NO: 16210 - DNA, 22 bp, Artificial Sequence
  chemically synthesized
gaagaatgcatatggaactaca

SEQ ID NO: 16211 - DNA, 22 bp, Artificial Sequence
  chemically synthesized
cagtttgaaacttggacttgca

SEQ ID NO: 16212 - DNA, 22 bp, Artificial Sequence
  chemically synthesized
gaaacttggacttgcatatacc

SEQ ID NO: 16213 - DNA, 22 bp, Artificial Sequence
  chemically synthesized
aaacttggacttgcatatacca

SEQ ID NO: 16214 - DNA, 22 bp, Artificial Sequence
  chemically synthesized
ggacttgcatataccatgggtt

SEQ ID NO: 16215 - DNA, 22 bp, Artificial Sequence
  chemically synthesized
gacttgcatataccatgggttc

SEQ ID NO: 16216 - DNA, 22 bp, Artificial Sequence
  chemically synthesized
gcatataccatgggttccctca

SEQ ID NO: 16217 - DNA, 22 bp, Artificial Sequence
  chemically synthesized
catataccatgggttccctcag

SEQ ID NO: 16218 - DNA, 22 bp, Artificial Sequence
  chemically synthesized
cctcaggcctcagggaatcttg

SEQ ID NO: 16219 - DNA, 22 bp, Artificial Sequence
  chemically synthesized
aggcctcagggaatcttgcatt

SEQ ID NO: 16220 - DNA, 22 bp, Artificial Sequence
  chemically synthesized
agggaatcttgcatttcctctg

SEQ ID NO: 16221 - DNA, 22 bp, Artificial Sequence
  chemically synthesized
gcatttcctctgacatcagaga

SEQ ID NO: 16222 - DNA, 22 bp, Artificial Sequence
  chemically synthesized
catttcctctgacatcagagaa

SEQ ID NO: 16223 - DNA, 22 bp, Artificial Sequence
  chemically synthesized
cctctgacatcagagaatgcac

SEQ ID NO: 16224 - DNA, 22 bp, Artificial Sequence
  chemically synthesized
ctctgacatcagagaatgcact

SEQ ID NO: 16225 - DNA, 22 bp, Artificial Sequence
  chemically synthesized
tgacatcagagaatgcactcca

SEQ ID NO: 16226 - DNA, 22 bp, Artificial Sequence
  chemically synthesized
acatcagagaatgcactccagc

SEQ ID NO: 16227 - DNA, 22 bp, Artificial Sequence
  chemically synthesized
cagcccctaggacgagcccccc

SEQ ID NO: 16228 - DNA, 22 bp, Artificial Sequence
  chemically synthesized
ggacgagccccccccagggaaa

SEQ ID NO: 16229 - DNA, 22 bp, Artificial Sequence
  chemically synthesized
catttccatcagaattgctctc

SEQ ID NO: 16230 - DNA, 22 bp, Artificial Sequence
  chemically synthesized
ccatcagaattgctctctgtaa

SEQ ID NO: 16231 - DNA, 22 bp, Artificial Sequence
  chemically synthesized
catcagaattgctctctgtaag

SEQ ID NO: 16232 - DNA, 22 bp, Artificial Sequence
  chemically synthesized
ctctctgtaaggatgtatatag

SEQ ID NO: 16233 - DNA, 22 bp, Artificial Sequence
  chemically synthesized
tctgtaaggatgtatatagctt

SEQ ID NO: 16234 - DNA, 22 bp, Artificial Sequence
  chemically synthesized
tgtaaggatgtatatagcttca

SEQ ID NO: 16235 - DNA, 22 bp, Artificial Sequence
  chemically synthesized
taaggatgtatatagcttcaga

SEQ ID NO: 16236 - DNA, 22 bp, Artificial Sequence
  chemically synthesized
cagatgcttgttctgtatcctc

SEQ ID NO: 16237 - DNA, 22 bp, Artificial Sequence
  chemically synthesized
agatgcttgttctgtatcctct

SEQ ID NO: 16238 - DNA, 22 bp, Artificial Sequence
  chemically synthesized
gttctgtatcctctctactttg

SEQ ID NO: 16239 - DNA, 22 bp, Artificial Sequence
  chemically synthesized
ttctgtatcctctctactttga

SEQ ID NO: 16240 - DNA, 22 bp, Artificial Sequence
  chemically synthesized
tgtatcctctctactttgaaac

SEQ ID NO: 16241 - DNA, 22 bp, Artificial Sequence
  chemically synthesized
tatcctctctactttgaaacag

SEQ ID NO: 16242 - DNA, 22 bp, Artificial Sequence
  chemically synthesized
tctactttgaaacagagtatct

SEQ ID NO: 16243 - DNA, 22 bp, Artificial Sequence
  chemically synthesized
tactttgaaacagagtatctca

SEQ ID NO: 16244 - DNA, 22 bp, Artificial Sequence
  chemically synthesized
ctttgaaacagagtatctcaga

SEQ ID NO: 16245 - DNA, 22 bp, Artificial Sequence
  chemically synthesized
tgaaacagagtatctcagacaa

SEQ ID NO: 16246 - DNA, 22 bp, Artificial Sequence
  chemically synthesized
gaaacagagtatctcagacaaa

SEQ ID NO: 16247 - DNA, 22 bp, Artificial Sequence
  chemically synthesized
aaacagagtatctcagacaaac

SEQ ID NO: 16248 - DNA, 22 bp, Artificial Sequence
  chemically synthesized
agacaaaccacttcccctttaa

SEQ ID NO: 16249 - DNA, 22 bp, Artificial Sequence
  chemically synthesized
cccctttaaaagtactagatat

SEQ ID NO: 16250 - DNA, 22 bp, Artificial Sequence
  chemically synthesized
ccctttaaaagtactagatata

SEQ ID NO: 16251 - DNA, 22 bp, Artificial Sequence
  chemically synthesized
taaaagtactagatatatcttt

SEQ ID NO: 16252 - DNA, 22 bp, Artificial Sequence
  chemically synthesized
aaaagtactagatatatctttc

SEQ ID NO: 16253 - DNA, 22 bp, Artificial Sequence
  chemically synthesized
aaagtactagatatatctttca

SEQ ID NO: 16254 - DNA, 22 bp, Artificial Sequence
  chemically synthesized
gatatatctttcactgtggaaa

SEQ ID NO: 16255 - DNA, 22 bp, Artificial Sequence
  chemically synthesized
tcactgtggaaataggtgtcaa

SEQ ID NO: 16256 - DNA, 22 bp, Artificial Sequence
  chemically synthesized
cactgtggaaataggtgtcaac

SEQ ID NO: 16257 - DNA, 22 bp, Artificial Sequence
  chemically synthesized
actgtggaaataggtgtcaacc

SEQ ID NO: 16258 - DNA, 22 bp, Artificial Sequence
  chemically synthesized
tggaaataggtgtcaaccgcca

SEQ ID NO: 16259 - DNA, 22 bp, Artificial Sequence
  chemically synthesized
ttatcccgtgatggtggaatag

SEQ ID NO: 16260 - DNA, 22 bp, Artificial Sequence
  chemically synthesized
tatcccgtgatggtggaatagt

SEQ ID NO: 16261 - DNA, 22 bp, Artificial Sequence
  chemically synthesized
atcccgtgatggtggaatagtg

SEQ ID NO: 16262 - DNA, 22 bp, Artificial Sequence
  chemically synthesized
tcccgtgatggtggaatagtga

SEQ ID NO: 16263 - DNA, 22 bp, Artificial Sequence
  chemically synthesized
ctcaccgaaatcagggagagcc

SEQ ID NO: 16264 - DNA, 22 bp, Artificial Sequence
  chemically synthesized
tcaccgaaatcagggagagcca

SEQ ID NO: 16265 - DNA, 22 bp, Artificial Sequence
  chemically synthesized
accgaaatcagggagagccact

SEQ ID NO: 16266 - DNA, 22 bp, Artificial Sequence
  chemically synthesized
actctggcctctatcaacccag

SEQ ID NO: 16267 - DNA, 22 bp, Artificial Sequence
  chemically synthesized
tggcctctatcaacccagagag

SEQ ID NO: 16268 - DNA, 22 bp, Artificial Sequence
  chemically synthesized
gcctctatcaacccagagagat

SEQ ID NO: 16269 - DNA, 22 bp, Artificial Sequence
  chemically synthesized
tatcaacccagagagattgcat

SEQ ID NO: 16270 - DNA, 22 bp, Artificial Sequence
  chemically synthesized
tcaacccagagagattgcatgg

SEQ ID NO: 16271 - DNA, 22 bp, Artificial Sequence
  chemically synthesized
catggttcttcaatggagatca

SEQ ID NO: 16272 - DNA, 22 bp, Artificial Sequence
  chemically synthesized
ttcaatggagatcagatgtttg

SEQ ID NO: 16273 - DNA, 22 bp, Artificial Sequence
  chemically synthesized
caatggagatcagatgtttgga

SEQ ID NO: 16274 - DNA, 22 bp, Artificial Sequence
  chemically synthesized
aatggagatcagatgtttggaa

SEQ ID NO: 16275 - DNA, 22 bp, Artificial Sequence
  chemically synthesized
ggaataacacttcatcttttta

SEQ ID NO: 16276 - DNA, 22 bp, Artificial Sequence
  chemically synthesized
gaataacacttcatctttttat

SEQ ID NO: 16277 - DNA, 22 bp, Artificial Sequence
  chemically synthesized
catctttttattttttagaatc

SEQ ID NO: 16278 - DNA, 22 bp, Artificial Sequence
  chemically synthesized
atctttttattttttagaatca

SEQ ID NO: 16279 - DNA, 22 bp, Artificial Sequence
  chemically synthesized
tttattttttagaatcatgcgg

SEQ ID NO: 16280 - DNA, 22 bp, Artificial Sequence
  chemically synthesized
ttattttttagaatcatgcggc

SEQ ID NO: 16281 - DNA, 22 bp, Artificial Sequence
  chemically synthesized
tattttttagaatcatgcggct

SEQ ID NO: 16282 - DNA, 22 bp, Artificial Sequence
  chemically synthesized
attttttagaatcatgcggctg

SEQ ID NO: 16283 - DNA, 22 bp, Artificial Sequence
  chemically synthesized
ttttttagaatcatgcggctgg

SEQ ID NO: 16284 - DNA, 22 bp, Artificial Sequence
  chemically synthesized
tttagaatcatgcggctgggtg

SEQ ID NO: 16285 - DNA, 22 bp, Artificial Sequence
  chemically synthesized
ttagaatcatgcggctgggtgt

SEQ ID NO: 16286 - DNA, 22 bp, Artificial Sequence
  chemically synthesized
tagaatcatgcggctgggtgta

SEQ ID NO: 16287 - DNA, 22 bp, Artificial Sequence
  chemically synthesized
agaatcatgcggctgggtgtag

SEQ ID NO: 16288 - DNA, 22 bp, Artificial Sequence
  chemically synthesized
gaatcatgcggctgggtgtagt

SEQ ID NO: 16289 - DNA, 22 bp, Artificial Sequence
  chemically synthesized
ggtgtagtggctcacgcctgta

SEQ ID NO: 16290 - DNA, 22 bp, Artificial Sequence
  chemically synthesized
acgcctgtaatcctagcactta

SEQ ID NO: 16291 - DNA, 22 bp, Artificial Sequence
  chemically synthesized
taatcctagcacttagggaggc

SEQ ID NO: 16292 - DNA, 22 bp, Artificial Sequence
  chemically synthesized
gcacttagggaggccaaggcag

SEQ ID NO: 16293 - DNA, 22 bp, Artificial Sequence
  chemically synthesized
agggaggccaaggcaggcagat

SEQ ID NO: 16294 - DNA, 22 bp, Artificial Sequence
  chemically synthesized
gggaggccaaggcaggcagatc

SEQ ID NO: 16295 - DNA, 22 bp, Artificial Sequence
  chemically synthesized
gagaccagcctagtcaacatag

SEQ ID NO: 16296 - DNA, 22 bp, Artificial Sequence
  chemically synthesized
gtcaacatagtgaaaccatgtc

SEQ ID NO: 16297 - DNA, 22 bp, Artificial Sequence
  chemically synthesized
tactaaaaatacaaaaaaaatt

SEQ ID NO: 16298 - DNA, 22 bp, Artificial Sequence
  chemically synthesized
ctaaaaatacaaaaaaaattag

SEQ ID NO: 16299 - DNA, 22 bp, Artificial Sequence
  chemically synthesized
aaaatacaaaaaaaattagctg

SEQ ID NO: 16300 - DNA, 22 bp, Artificial Sequence
  chemically synthesized
gctgggcatggtggcgggcacc

SEQ ID NO: 16301 - DNA, 22 bp, Artificial Sequence
  chemically synthesized
ggcatggtggcgggcacctgta

SEQ ID NO: 16302 - DNA, 22 bp, Artificial Sequence
  chemically synthesized
taatcccagctacttgggaggc

SEQ ID NO: 16303 - DNA, 22 bp, Artificial Sequence
  chemically synthesized
cttgggaggctgaggcaggaga

SEQ ID NO: 16304 - DNA, 22 bp, Artificial Sequence
  chemically synthesized
gggaggctgaggcaggagaatc

SEQ ID NO: 16305 - DNA, 22 bp, Artificial Sequence
  chemically synthesized
ggaggctgaggcaggagaatca

SEQ ID NO: 16306 - DNA, 22 bp, Artificial Sequence
  chemically synthesized
aggcaggagaatcacttgaacc

SEQ ID NO: 16307 - DNA, 22 bp, Artificial Sequence
  chemically synthesized
gaaccggagaggcagaggttgc

SEQ ID NO: 16308 - DNA, 22 bp, Artificial Sequence
  chemically synthesized
aaccggagaggcagaggttgca

SEQ ID NO: 16309 - DNA, 22 bp, Artificial Sequence
  chemically synthesized
cagtgagctgagattgcaccat

SEQ ID NO: 16310 - DNA, 22 bp, Artificial Sequence
  chemically synthesized
agattgcaccattgcactccag

SEQ ID NO: 16311 - DNA, 22 bp, Artificial Sequence
  chemically synthesized
caccattgcactccagccaggc

SEQ ID NO: 16312 - DNA, 22 bp, Artificial Sequence
  chemically synthesized
cactccagccaggcaacagtgc

SEQ ID NO: 16313 - DNA, 22 bp, Artificial Sequence
  chemically synthesized
cagccaggcaacagtgcgagac

SEQ ID NO: 16314 - DNA, 22 bp, Artificial Sequence
  chemically synthesized
catctcaaacaaacaaacaaaa

SEQ ID NO: 16315 - DNA, 22 bp, Artificial Sequence
  chemically synthesized
aaacaaacaaacaaaagaaaga

SEQ ID NO: 16316 - DNA, 22 bp, Artificial Sequence
  chemically synthesized
acgtgatagaaattggcaaatg

SEQ ID NO: 16317 - DNA, 22 bp, Artificial Sequence
  chemically synthesized
cgtgatagaaattggcaaatgc

SEQ ID NO: 16318 - DNA, 22 bp, Artificial Sequence
  chemically synthesized
gcaaatgctaaactcagggctt

SEQ ID NO: 16319 - DNA, 22 bp, Artificial Sequence
  chemically synthesized
aactcagggctttcccctgctc

SEQ ID NO: 16320 - DNA, 22 bp, Artificial Sequence
  chemically synthesized
agggctttcccctgctccccag

SEQ ID NO: 16321 - DNA, 22 bp, Artificial Sequence
  chemically synthesized
tcccctgctccccagagagtca

SEQ ID NO: 16322 - DNA, 22 bp, Artificial Sequence
  chemically synthesized
cccctgctccccagagagtcag

SEQ ID NO: 16323 - DNA, 22 bp, Artificial Sequence
  chemically synthesized
ccctgctccccagagagtcagt

SEQ ID NO: 16324 - DNA, 22 bp, Artificial Sequence
  chemically synthesized
ctccccagagagtcagtttatc

SEQ ID NO: 16325 - DNA, 22 bp, Artificial Sequence
  chemically synthesized
cccagagagtcagtttatcagc

SEQ ID NO: 16326 - DNA, 22 bp, Artificial Sequence
  chemically synthesized
atcagcactggacgtaacatag

SEQ ID NO: 16327 - DNA, 22 bp, Artificial Sequence
  chemically synthesized
tcagcactggacgtaacatagt

SEQ ID NO: 16328 - DNA, 22 bp, Artificial Sequence
  chemically synthesized
gacgtaacatagttcataagag

SEQ ID NO: 16329 - DNA, 22 bp, Artificial Sequence
  chemically synthesized
ataagagcattgccgcggaagc

SEQ ID NO: 16330 - DNA, 22 bp, Artificial Sequence
  chemically synthesized
ccgcggaagccagcctgcctac

SEQ ID NO: 16331 - DNA, 22 bp, Artificial Sequence
  chemically synthesized
cctacctgggcttccatcctgg

SEQ ID NO: 16332 - DNA, 22 bp, Artificial Sequence
  chemically synthesized
cctgggcttccatcctggctcg

SEQ ID NO: 16333 - DNA, 22 bp, Artificial Sequence
  chemically synthesized
ggcttccatcctggctcggcat

SEQ ID NO: 16334 - DNA, 22 bp, Artificial Sequence
  chemically synthesized
ccatcctggctcggcatgtact

SEQ ID NO: 16335 - DNA, 22 bp, Artificial Sequence
  chemically synthesized
catcctggctcggcatgtacta

SEQ ID NO: 16336 - DNA, 22 bp, Artificial Sequence
  chemically synthesized
gctcggcatgtactaaccttgt

SEQ ID NO: 16337 - DNA, 22 bp, Artificial Sequence
  chemically synthesized
ggcatgtactaaccttgttggc

SEQ ID NO: 16338 - DNA, 22 bp, Artificial Sequence
  chemically synthesized
accttgttggcctaatcattta

SEQ ID NO: 16339 - DNA, 22 bp, Artificial Sequence
  chemically synthesized
gttggcctaatcatttaactca

SEQ ID NO: 16340 - DNA, 22 bp, Artificial Sequence
  chemically synthesized
ttggcctaatcatttaactcag

SEQ ID NO: 16341 - DNA, 22 bp, Artificial Sequence
  chemically synthesized
gcctaatcatttaactcagcac

SEQ ID NO: 16342 - DNA, 22 bp, Artificial Sequence
  chemically synthesized
atcatttaactcagcaccttgg

SEQ ID NO: 16343 - DNA, 22 bp, Artificial Sequence
  chemically synthesized
aactcagcaccttggtctctgc

SEQ ID NO: 16344 - DNA, 22 bp, Artificial Sequence
  chemically synthesized
actcagcaccttggtctctgca

SEQ ID NO: 16345 - DNA, 22 bp, Artificial Sequence
  chemically synthesized
agcaccttggtctctgcatcta

SEQ ID NO: 16346 - DNA, 22 bp, Artificial Sequence
  chemically synthesized
ggtctctgcatctactgtttct

SEQ ID NO: 16347 - DNA, 22 bp, Artificial Sequence
  chemically synthesized
gtctctgcatctactgtttctg

SEQ ID NO: 16348 - DNA, 22 bp, Artificial Sequence
  chemically synthesized
tgcatctactgtttctgtaaat

SEQ ID NO: 16349 - DNA, 22 bp, Artificial Sequence
  chemically synthesized
catctactgtttctgtaaatag

SEQ ID NO: 16350 - DNA, 22 bp, Artificial Sequence
  chemically synthesized
ctgtttctgtaaatagcagtaa

SEQ ID NO: 16351 - DNA, 22 bp, Artificial Sequence
  chemically synthesized
tttctgtaaatagcagtaacta

SEQ ID NO: 16352 - DNA, 22 bp, Artificial Sequence
  chemically synthesized
ctgtaaatagcagtaactacct

SEQ ID NO: 16353 - DNA, 22 bp, Artificial Sequence
  chemically synthesized
tgtaaatagcagtaactacctc

SEQ ID NO: 16354 - DNA, 22 bp, Artificial Sequence
  chemically synthesized
taaatagcagtaactacctcac

SEQ ID NO: 16355 - DNA, 22 bp, Artificial Sequence
  chemically synthesized
cctcacagaaaagcacatagca

SEQ ID NO: 16356 - DNA, 22 bp, Artificial Sequence
  chemically synthesized
acagaaaagcacatagcacatg

SEQ ID NO: 16357 - DNA, 22 bp, Artificial Sequence
  chemically synthesized
gcacacactgtttaataaatgt

SEQ ID NO: 16358 - DNA, 22 bp, Artificial Sequence
  chemically synthesized
tttaataaatgttaaccctgat

SEQ ID NO: 16359 - DNA, 22 bp, Artificial Sequence
  chemically synthesized
aataaatgttaaccctgattat

SEQ ID NO: 16360 - DNA, 22 bp, Artificial Sequence
  chemically synthesized
ataaatgttaaccctgattatt

SEQ ID NO: 16361 - DNA, 22 bp, Artificial Sequence
  chemically synthesized
accctgattattattaagctgc

SEQ ID NO: 16362 - DNA, 22 bp, Artificial Sequence
  chemically synthesized
attattattaagctgccagaga

SEQ ID NO: 16363 - DNA, 22 bp, Artificial Sequence
  chemically synthesized
ttattaagctgccagagataac

SEQ ID NO: 16364 - DNA, 22 bp, Artificial Sequence
  chemically synthesized
ttaagctgccagagataaccta

SEQ ID NO: 16365 - DNA, 22 bp, Artificial Sequence
  chemically synthesized
agctgccagagataacctattt

SEQ ID NO: 16366 - DNA, 22 bp, Artificial Sequence
  chemically synthesized
ccagagataacctatttgtaga

SEQ ID NO: 16367 - DNA, 22 bp, Artificial Sequence
  chemically synthesized
tttgtagattataaaacagaaa

SEQ ID NO: 16368 - DNA, 22 bp, Artificial Sequence
  chemically synthesized
gtagattataaaacagaaactc

SEQ ID NO: 16369 - DNA, 22 bp, Artificial Sequence
  chemically synthesized
tagattataaaacagaaactca

SEQ ID NO: 16370 - DNA, 22 bp, Artificial Sequence
  chemically synthesized
taaaacagaaactcagataatt

SEQ ID NO: 16371 - DNA, 22 bp, Artificial Sequence
  chemically synthesized
agataattgatatgacttgcca

SEQ ID NO: 16372 - DNA, 22 bp, Artificial Sequence
  chemically synthesized
atatgacttgccaaggacatgt

SEQ ID NO: 16373 - DNA, 22 bp, Artificial Sequence
  chemically synthesized
gccaaggacatgtagttggtgg

SEQ ID NO: 16374 - DNA, 22 bp, Artificial Sequence
  chemically synthesized
ccaaggacatgtagttggtggg

SEQ ID NO: 16375 - DNA, 22 bp, Artificial Sequence
  chemically synthesized
gtgggtggcagaacgagggctg

SEQ ID NO: 16376 - DNA, 22 bp, Artificial Sequence
  chemically synthesized
gagcccagttcccagggtgact

SEQ ID NO: 16377 - DNA, 22 bp, Artificial Sequence
  chemically synthesized
ccagggtgacttttcattaccc

SEQ ID NO: 16378 - DNA, 22 bp, Artificial Sequence
  chemically synthesized
ttcattaccccacaaaacaggc

SEQ ID NO: 16379 - DNA, 22 bp, Artificial Sequence
  chemically synthesized
tcattaccccacaaaacaggct

SEQ ID NO: 16380 - DNA, 22 bp, Artificial Sequence
  chemically synthesized
cattaccccacaaaacaggctg

SEQ ID NO: 16381 - DNA, 22 bp, Artificial Sequence
  chemically synthesized
attaccccacaaaacaggctgt

SEQ ID NO: 16382 - DNA, 22 bp, Artificial Sequence
  chemically synthesized
ccccacaaaacaggctgttgaa

SEQ ID NO: 16383 - DNA, 22 bp, Artificial Sequence
  chemically synthesized
ttgaatcatctgtgtgtttcct

SEQ ID NO: 16384 - DNA, 22 bp, Artificial Sequence
  chemically synthesized
aatcatctgtgtgtttcctttt

SEQ ID NO: 16385 - DNA, 22 bp, Artificial Sequence
  chemically synthesized
tgtgtttccttttttcatacag

SEQ ID NO: 16386 - DNA, 22 bp, Artificial Sequence
  chemically synthesized
ccttttttcatacagcatacat

SEQ ID NO: 16387 - DNA, 22 bp, Artificial Sequence
  chemically synthesized
cttttttcatacagcatacatc

SEQ ID NO: 16388 - DNA, 22 bp, Artificial Sequence
  chemically synthesized
ttttcatacagcatacatcatc

SEQ ID NO: 16389 - DNA, 22 bp, Artificial Sequence
  chemically synthesized
tttcatacagcatacatcatct

SEQ ID NO: 16390 - DNA, 22 bp, Artificial Sequence
  chemically synthesized
ttcatacagcatacatcatcta

SEQ ID NO: 16391 - DNA, 22 bp, Artificial Sequence
  chemically synthesized
tcatacagcatacatcatctat

SEQ ID NO: 16392 - DNA, 22 bp, Artificial Sequence
  chemically synthesized
catacagcatacatcatctatc

SEQ ID NO: 16393 - DNA, 22 bp, Artificial Sequence
  chemically synthesized
atacagcatacatcatctatct

SEQ ID NO: 16394 - DNA, 22 bp, Artificial Sequence
  chemically synthesized
tcttttttttttttttgagaca

SEQ ID NO: 16395 - DNA, 22 bp, Artificial Sequence
  chemically synthesized
ttttttttttttgagacagggt

SEQ ID NO: 16396 - DNA, 22 bp, Artificial Sequence
  chemically synthesized
tttttttttttgagacagggtc

SEQ ID NO: 16397 - DNA, 22 bp, Artificial Sequence
  chemically synthesized
ttttttttttgagacagggtct

SEQ ID NO: 16398 - DNA, 22 bp, Artificial Sequence
  chemically synthesized
tttttttttgagacagggtctt

SEQ ID NO: 16399 - DNA, 22 bp, Artificial Sequence
  chemically synthesized
ttttttttgagacagggtctta

SEQ ID NO: 16400 - DNA, 22 bp, Artificial Sequence
  chemically synthesized
tttttttgagacagggtcttac

SEQ ID NO: 16401 - DNA, 22 bp, Artificial Sequence
  chemically synthesized
ttttttgagacagggtcttact

SEQ ID NO: 16402 - DNA, 22 bp, Artificial Sequence
  chemically synthesized
tttttgagacagggtcttactc

SEQ ID NO: 16403 - DNA, 22 bp, Artificial Sequence
  chemically synthesized
ttttgagacagggtcttactct

SEQ ID NO: 16404 - DNA, 22 bp, Artificial Sequence
  chemically synthesized
tttgagacagggtcttactctg

SEQ ID NO: 16405 - DNA, 22 bp, Artificial Sequence
  chemically synthesized
ttgagacagggtcttactctgt

SEQ ID NO: 16406 - DNA, 22 bp, Artificial Sequence
  chemically synthesized
tgagacagggtcttactctgtt

SEQ ID NO: 16407 - DNA, 22 bp, Artificial Sequence
  chemically synthesized
gagacagggtcttactctgttg

SEQ ID NO: 16408 - DNA, 22 bp, Artificial Sequence
  chemically synthesized
agacagggtcttactctgttgc

SEQ ID NO: 16409 - DNA, 22 bp, Artificial Sequence
  chemically synthesized
actctgttgcccaggctggagt

SEQ ID NO: 16410 - DNA, 22 bp, Artificial Sequence
  chemically synthesized
ctctgttgcccaggctggagtg

SEQ ID NO: 16411 - DNA, 22 bp, Artificial Sequence
  chemically synthesized
tgttgcccaggctggagtgcag

SEQ ID NO: 16412 - DNA, 22 bp, Artificial Sequence
  chemically synthesized
ttgcccaggctggagtgcagtg

SEQ ID NO: 16413 - DNA, 22 bp, Artificial Sequence
  chemically synthesized
cccaggctggagtgcagtggca

SEQ ID NO: 16414 - DNA, 22 bp, Artificial Sequence
  chemically synthesized
gagtgcagtggcatgatcttga

SEQ ID NO: 16415 - DNA, 22 bp, Artificial Sequence
  chemically synthesized
gactcactgcaacctcctccgc

SEQ ID NO: 16416 - DNA, 22 bp, Artificial Sequence
  chemically synthesized
actcactgcaacctcctccgcc

SEQ ID NO: 16417 - DNA, 22 bp, Artificial Sequence
  chemically synthesized
actgcaacctcctccgcctctc

SEQ ID NO: 16418 - DNA, 22 bp, Artificial Sequence
  chemically synthesized
caacctcctccgcctctcacct

SEQ ID NO: 16419 - DNA, 22 bp, Artificial Sequence
  chemically synthesized
ctccgcctctcacctcagcctc

SEQ ID NO: 16420 - DNA, 22 bp, Artificial Sequence
  chemically synthesized
cgcctctcacctcagcctcctg

SEQ ID NO: 16421 - DNA, 22 bp, Artificial Sequence
  chemically synthesized
tcacctcagcctcctgagtagc

SEQ ID NO: 16422 - DNA, 22 bp, Artificial Sequence
  chemically synthesized
acctcagcctcctgagtagctg

SEQ ID NO: 16423 - DNA, 22 bp, Artificial Sequence
  chemically synthesized
agcctcctgagtagctgggact

SEQ ID NO: 16424 - DNA, 22 bp, Artificial Sequence
  chemically synthesized
ctgagtagctgggactacagca

SEQ ID NO: 16425 - DNA, 22 bp, Artificial Sequence
  chemically synthesized
agtagctgggactacagcacca

SEQ ID NO: 16426 - DNA, 22 bp, Artificial Sequence
  chemically synthesized
ggactacagcaccaacacgccc

SEQ ID NO: 16427 - DNA, 22 bp, Artificial Sequence
  chemically synthesized
cagcaccaacacgcccagctaa

SEQ ID NO: 16428 - DNA, 22 bp, Artificial Sequence
  chemically synthesized
attttcgtaatgtttttgtaga

SEQ ID NO: 16429 - DNA, 22 bp, Artificial Sequence
  chemically synthesized
tcgtaatgtttttgtagagatg

SEQ ID NO: 16430 - DNA, 22 bp, Artificial Sequence
  chemically synthesized
cgtaatgtttttgtagagatgg

SEQ ID NO: 16431 - DNA, 22 bp, Artificial Sequence
  chemically synthesized
gtaatgtttttgtagagatgga

SEQ ID NO: 16432 - DNA, 22 bp, Artificial Sequence
  chemically synthesized
ttgtagagatggagtttcgcca

SEQ ID NO: 16433 - DNA, 22 bp, Artificial Sequence
  chemically synthesized
tgtagagatggagtttcgccat

SEQ ID NO: 16434 - DNA, 22 bp, Artificial Sequence
  chemically synthesized
gtagagatggagtttcgccatg

SEQ ID NO: 16435 - DNA, 22 bp, Artificial Sequence
  chemically synthesized
tagagatggagtttcgccatgt

SEQ ID NO: 16436 - DNA, 22 bp, Artificial Sequence
  chemically synthesized
cgccatgttgcccaggctggtc

SEQ ID NO: 16437 - DNA, 22 bp, Artificial Sequence
  chemically synthesized
gccatgttgcccaggctggtct

SEQ ID NO: 16438 - DNA, 22 bp, Artificial Sequence
  chemically synthesized
cccaggctggtcttgaactcct

SEQ ID NO: 16439 - DNA, 22 bp, Artificial Sequence
  chemically synthesized
gtcttgaactcctgagttcacc

SEQ ID NO: 16440 - DNA, 22 bp, Artificial Sequence
  chemically synthesized
gaactcctgagttcacccagga

SEQ ID NO: 16441 - DNA, 22 bp, Artificial Sequence
  chemically synthesized
aactcctgagttcacccaggag

SEQ ID NO: 16442 - DNA, 22 bp, Artificial Sequence
  chemically synthesized
ctgagttcacccaggagtgatt

SEQ ID NO: 16443 - DNA, 22 bp, Artificial Sequence
  chemically synthesized
agttcacccaggagtgattcgc

SEQ ID NO: 16444 - DNA, 22 bp, Artificial Sequence
  chemically synthesized
acccaggagtgattcgcccacc

SEQ ID NO: 16445 - DNA, 22 bp, Artificial Sequence
  chemically synthesized
gcccacctcggcctcccaaagt

SEQ ID NO: 16446 - DNA, 22 bp, Artificial Sequence
  chemically synthesized
ggcctcccaaagtgctgggatt

SEQ ID NO: 16447 - DNA, 22 bp, Artificial Sequence
  chemically synthesized
ccaaagtgctgggattacaggt

SEQ ID NO: 16448 - DNA, 22 bp, Artificial Sequence
  chemically synthesized
ggattacaggtgtgagccacca

SEQ ID NO: 16449 - DNA, 22 bp, Artificial Sequence
  chemically synthesized
caggtgtgagccaccatgcctg

SEQ ID NO: 16450 - DNA, 22 bp, Artificial Sequence
  chemically synthesized
gccccatacatctttctttatg

SEQ ID NO: 16451 - DNA, 22 bp, Artificial Sequence
  chemically synthesized
tctttatgttacctcttctgct

SEQ ID NO: 16452 - DNA, 22 bp, Artificial Sequence
  chemically synthesized
ctttatgttacctcttctgctt

SEQ ID NO: 16453 - DNA, 22 bp, Artificial Sequence
  chemically synthesized
tttatgttacctcttctgcttc

SEQ ID NO: 16454 - DNA, 22 bp, Artificial Sequence
  chemically synthesized
tatgttacctcttctgcttcat

SEQ ID NO: 16455 - DNA, 22 bp, Artificial Sequence
  chemically synthesized
atgttacctcttctgcttcata

SEQ ID NO: 16456 - DNA, 22 bp, Artificial Sequence
  chemically synthesized
tgttacctcttctgcttcatac

SEQ ID NO: 16457 - DNA, 22 bp, Artificial Sequence
  chemically synthesized
cctcttctgcttcatactaata

SEQ ID NO: 16458 - DNA, 22 bp, Artificial Sequence
  chemically synthesized
ttctgcttcatactaataaaac

SEQ ID NO: 16459 - DNA, 22 bp, Artificial Sequence
  chemically synthesized
ctgcttcatactaataaaactc

SEQ ID NO: 16460 - DNA, 22 bp, Artificial Sequence
  chemically synthesized
tgcttcatactaataaaactct

SEQ ID NO: 16461 - DNA, 22 bp, Artificial Sequence
  chemically synthesized
cttcatactaataaaactcttt

SEQ ID NO: 16462 - DNA, 22 bp, Artificial Sequence
  chemically synthesized
catactaataaaactctttgct

SEQ ID NO: 16463 - DNA, 22 bp, Artificial Sequence
  chemically synthesized
atactaataaaactctttgctc

SEQ ID NO: 16464 - DNA, 22 bp, Artificial Sequence
  chemically synthesized
ataaaactctttgctcaaagcc

SEQ ID NO: 16465 - DNA, 22 bp, Artificial Sequence
  chemically synthesized
tttgctcaaagcctatataact

SEQ ID NO: 16466 - DNA, 22 bp, Artificial Sequence
  chemically synthesized
tgctcaaagcctatataactca

SEQ ID NO: 16467 - DNA, 22 bp, Artificial Sequence
  chemically synthesized
gctcaaagcctatataactcag

SEQ ID NO: 16468 - DNA, 22 bp, Artificial Sequence
  chemically synthesized
ctcaaagcctatataactcaga

SEQ ID NO: 16469 - DNA, 22 bp, Artificial Sequence
  chemically synthesized
aaagcctatataactcagactt

SEQ ID NO: 16470 - DNA, 22 bp, Artificial Sequence
  chemically synthesized
tataactcagacttttcacgaa

SEQ ID NO: 16471 - DNA, 22 bp, Artificial Sequence
  chemically synthesized
agacttttcacgaaattcaact

SEQ ID NO: 16472 - DNA, 22 bp, Artificial Sequence
  chemically synthesized
ttcacgaaattcaactgtccta

SEQ ID NO: 16473 - DNA, 22 bp, Artificial Sequence
  chemically synthesized
tcacgaaattcaactgtcctac

SEQ ID NO: 16474 - DNA, 22 bp, Artificial Sequence
  chemically synthesized
cacgaaattcaactgtcctacc

SEQ ID NO: 16475 - DNA, 22 bp, Artificial Sequence
  chemically synthesized
acgaaattcaactgtcctaccc

SEQ ID NO: 16476 - DNA, 22 bp, Artificial Sequence
  chemically synthesized
aactgtcctaccctttaaccca

SEQ ID NO: 16477 - DNA, 22 bp, Artificial Sequence
  chemically synthesized
tcctaccctttaacccatatga

SEQ ID NO: 16478 - DNA, 22 bp, Artificial Sequence
  chemically synthesized
ccctttaacccatatgaaatag

SEQ ID NO: 16479 - DNA, 22 bp, Artificial Sequence
  chemically synthesized
taacccatatgaaataggcttt

SEQ ID NO: 16480 - DNA, 22 bp, Artificial Sequence
  chemically synthesized
aacccatatgaaataggctttc

SEQ ID NO: 16481 - DNA, 22 bp, Artificial Sequence
  chemically synthesized
acccatatgaaataggctttcc

SEQ ID NO: 16482 - DNA, 22 bp, Artificial Sequence
  chemically synthesized
tcctgtattttcaactcactgg

SEQ ID NO: 16483 - DNA, 22 bp, Artificial Sequence
  chemically synthesized
cctgtattttcaactcactggt

SEQ ID NO: 16484 - DNA, 22 bp, Artificial Sequence
  chemically synthesized
ctgtattttcaactcactggta

SEQ ID NO: 16485 - DNA, 22 bp, Artificial Sequence
  chemically synthesized
tattttcaactcactggtagga

SEQ ID NO: 16486 - DNA, 22 bp, Artificial Sequence
  chemically synthesized
tcaactcactggtaggattttt

SEQ ID NO: 16487 - DNA, 22 bp, Artificial Sequence
  chemically synthesized
caactcactggtaggatttttt

SEQ ID NO: 16488 - DNA, 22 bp, Artificial Sequence
  chemically synthesized
aactcactggtaggattttttc

SEQ ID NO: 16489 - DNA, 22 bp, Artificial Sequence
  chemically synthesized
actggtaggattttttctgtct

SEQ ID NO: 16490 - DNA, 22 bp, Artificial Sequence
  chemically synthesized
gtaggattttttctgtcttccc

SEQ ID NO: 16491 - DNA, 22 bp, Artificial Sequence
  chemically synthesized
tttctgtcttccccctttatgt

SEQ ID NO: 16492 - DNA, 22 bp, Artificial Sequence
  chemically synthesized
ttctgtcttccccctttatgta

SEQ ID NO: 16493 - DNA, 22 bp, Artificial Sequence
  chemically synthesized
tctgtcttccccctttatgtag

SEQ ID NO: 16494 - DNA, 22 bp, Artificial Sequence
  chemically synthesized
ctgtcttccccctttatgtaga

SEQ ID NO: 16495 - DNA, 22 bp, Artificial Sequence
  chemically synthesized
tgtcttccccctttatgtagat

SEQ ID NO: 16496 - DNA, 22 bp, Artificial Sequence
  chemically synthesized
tcttccccctttatgtagatga

SEQ ID NO: 16497 - DNA, 22 bp, Artificial Sequence
  chemically synthesized
ccccctttatgtagatgatcca

SEQ ID NO: 16498 - DNA, 22 bp, Artificial Sequence
  chemically synthesized
cccctttatgtagatgatccaa

SEQ ID NO: 16499 - DNA, 22 bp, Artificial Sequence
  chemically synthesized
tatgtagatgatccaaagtcag

SEQ ID NO: 16500 - DNA, 22 bp, Artificial Sequence
  chemically synthesized
atgtagatgatccaaagtcaga

SEQ ID NO: 16501 - DNA, 22 bp, Artificial Sequence
  chemically synthesized
tgtagatgatccaaagtcagag

SEQ ID NO: 16502 - DNA, 22 bp, Artificial Sequence
  chemically synthesized
gaagcatgagtagcccgtggct

SEQ ID NO: 16503 - DNA, 22 bp, Artificial Sequence
  chemically synthesized
cctgaatagcctggggaaagca

SEQ ID NO: 16504 - DNA, 22 bp, Artificial Sequence
  chemically synthesized
ctgaatagcctggggaaagcaa

SEQ ID NO: 16505 - DNA, 22 bp, Artificial Sequence
  chemically synthesized
aatagcctggggaaagcaactt

SEQ ID NO: 16506 - DNA, 22 bp, Artificial Sequence
  chemically synthesized
gggaaagcaacttctgatggac

SEQ ID NO: 16507 - DNA, 22 bp, Artificial Sequence
  chemically synthesized
ctgatggacagacattgcgaga

SEQ ID NO: 16508 - DNA, 22 bp, Artificial Sequence
  chemically synthesized
tgatggacagacattgcgagag

SEQ ID NO: 16509 - DNA, 22 bp, Artificial Sequence
  chemically synthesized
atggacagacattgcgagagcg

SEQ ID NO: 16510 - DNA, 22 bp, Artificial Sequence
  chemically synthesized
cgagagcgaatgccagcctctt

SEQ ID NO: 16511 - DNA, 22 bp, Artificial Sequence
  chemically synthesized
ttttcttgctgatctcctctct

SEQ ID NO: 16512 - DNA, 22 bp, Artificial Sequence
  chemically synthesized
ttcttgctgatctcctctctat

SEQ ID NO: 16513 - DNA, 22 bp, Artificial Sequence
  chemically synthesized
tcttgctgatctcctctctata

SEQ ID NO: 16514 - DNA, 22 bp, Artificial Sequence
  chemically synthesized
cttgctgatctcctctctatat

SEQ ID NO: 16515 - DNA, 22 bp, Artificial Sequence
  chemically synthesized
ttgctgatctcctctctatatg

SEQ ID NO: 16516 - DNA, 22 bp, Artificial Sequence
  chemically synthesized
gctgatctcctctctatatggt

SEQ ID NO: 16517 - DNA, 22 bp, Artificial Sequence
  chemically synthesized
ctgatctcctctctatatggtt

SEQ ID NO: 16518 - DNA, 22 bp, Artificial Sequence
  chemically synthesized
atctcctctctatatggttctt

SEQ ID NO: 16519 - DNA, 22 bp, Artificial Sequence
  chemically synthesized
ctctctatatggttcttaccac

SEQ ID NO: 16520 - DNA, 22 bp, Artificial Sequence
  chemically synthesized
tctatatggttcttaccactta

SEQ ID NO: 16521 - DNA, 22 bp, Artificial Sequence
  chemically synthesized
tatatggttcttaccacttaaa

SEQ ID NO: 16522 - DNA, 22 bp, Artificial Sequence
  chemically synthesized
tatggttcttaccacttaaaga

SEQ ID NO: 16523 - DNA, 22 bp, Artificial Sequence
  chemically synthesized
ttaccacttaaagacgaggttg

SEQ ID NO: 16524 - DNA, 22 bp, Artificial Sequence
  chemically synthesized
accacttaaagacgaggttgag

SEQ ID NO: 16525 - DNA, 22 bp, Artificial Sequence
  chemically synthesized
ccacttaaagacgaggttgagc

SEQ ID NO: 16526 - DNA, 22 bp, Artificial Sequence
  chemically synthesized
aaagacgaggttgagccagtct

SEQ ID NO: 16527 - DNA, 22 bp, Artificial Sequence
  chemically synthesized
aagacgaggttgagccagtctc

SEQ ID NO: 16528 - DNA, 22 bp, Artificial Sequence
  chemically synthesized
agccagtctccaatcacagcta

SEQ ID NO: 16529 - DNA, 22 bp, Artificial Sequence
  chemically synthesized
caatcacagctacccaaaggag

SEQ ID NO: 16530 - DNA, 22 bp, Artificial Sequence
  chemically synthesized
cccaaaggagtttaatgcccac

SEQ ID NO: 16531 - DNA, 22 bp, Artificial Sequence
  chemically synthesized
aatgcccacagcttcctgaaga

SEQ ID NO: 16532 - DNA, 22 bp, Artificial Sequence
  chemically synthesized
atgcccacagcttcctgaagat

SEQ ID NO: 16533 - DNA, 22 bp, Artificial Sequence
  chemically synthesized
cctgaagatggaaccagatggg

SEQ ID NO: 16534 - DNA, 22 bp, Artificial Sequence
  chemically synthesized
ctgaagatggaaccagatgggg

SEQ ID NO: 16535 - DNA, 22 bp, Artificial Sequence
  chemically synthesized
aagatggaaccagatggggaag

SEQ ID NO: 16536 - DNA, 22 bp, Artificial Sequence
  chemically synthesized
ctgaggtctgcgatcacggaca

SEQ ID NO: 16537 - DNA, 22 bp, Artificial Sequence
  chemically synthesized
aggtctgcgatcacggacacca

SEQ ID NO: 16538 - DNA, 22 bp, Artificial Sequence
  chemically synthesized
cgatcacggacaccaagatgaa

SEQ ID NO: 16539 - DNA, 22 bp, Artificial Sequence
  chemically synthesized
ggagtcttggtaattcacctgg

SEQ ID NO: 16540 - DNA, 22 bp, Artificial Sequence
  chemically synthesized
ggtaattcacctggaggtaatg

SEQ ID NO: 16541 - DNA, 22 bp, Artificial Sequence
  chemically synthesized
gtaattcacctggaggtaatgt

SEQ ID NO: 16542 - DNA, 22 bp, Artificial Sequence
  chemically synthesized
acctggaggtaatgtgttgact

SEQ ID NO: 16543 - DNA, 22 bp, Artificial Sequence
  chemically synthesized
gaggtaatgtgttgactggatc

SEQ ID NO: 16544 - DNA, 22 bp, Artificial Sequence
  chemically synthesized
actggatcccaaagtcatggag

SEQ ID NO: 16545 - DNA, 22 bp, Artificial Sequence
  chemically synthesized
gatcccaaagtcatggagaaca

SEQ ID NO: 16546 - DNA, 22 bp, Artificial Sequence
  chemically synthesized
attccttcctccatcctcattt

SEQ ID NO: 16547 - DNA, 22 bp, Artificial Sequence
  chemically synthesized
cttcctccatcctcatttcctt

SEQ ID NO: 16548 - DNA, 22 bp, Artificial Sequence
  chemically synthesized
cctccatcctcatttccttggc

SEQ ID NO: 16549 - DNA, 22 bp, Artificial Sequence
  chemically synthesized
ctccatcctcatttccttggca

SEQ ID NO: 16550 - DNA, 22 bp, Artificial Sequence
  chemically synthesized
catcctcatttccttggcacct

SEQ ID NO: 16551 - DNA, 22 bp, Artificial Sequence
  chemically synthesized
atttccttggcacctcaggaag

SEQ ID NO: 16552 - DNA, 22 bp, Artificial Sequence
  chemically synthesized
ccttggcacctcaggaagatgt

SEQ ID NO: 16553 - DNA, 22 bp, Artificial Sequence
  chemically synthesized
cttggcacctcaggaagatgtc

SEQ ID NO: 16554 - DNA, 22 bp, Artificial Sequence
  chemically synthesized
ggcacctcaggaagatgtcagc

SEQ ID NO: 16555 - DNA, 22 bp, Artificial Sequence
  chemically synthesized
gcacctcaggaagatgtcagca

SEQ ID NO: 16556 - DNA, 22 bp, Artificial Sequence
  chemically synthesized
aggaagatgtcagcagagccct

SEQ ID NO: 16557 - DNA, 22 bp, Artificial Sequence
  chemically synthesized
gcagttattccaggcttggtgg

SEQ ID NO: 16558 - DNA, 22 bp, Artificial Sequence
  chemically synthesized
cagttattccaggcttggtggt

SEQ ID NO: 16559 - DNA, 22 bp, Artificial Sequence
  chemically synthesized
ttccaggcttggtggtgattgc

SEQ ID NO: 16560 - DNA, 22 bp, Artificial Sequence
  chemically synthesized
caggcttggtggtgattgctct

SEQ ID NO: 16561 - DNA, 22 bp, Artificial Sequence
  chemically synthesized
ggtggtgattgctctgctatga

SEQ ID NO: 16562 - DNA, 22 bp, Artificial Sequence
  chemically synthesized
gtggtgattgctctgctatgag

SEQ ID NO: 16563 - DNA, 22 bp, Artificial Sequence
  chemically synthesized
ctctgctatgagtctgtgcctt

SEQ ID NO: 16564 - DNA, 22 bp, Artificial Sequence
  chemically synthesized
tgctatgagtctgtgccttgcc

SEQ ID NO: 16565 - DNA, 22 bp, Artificial Sequence
  chemically synthesized
ctatgagtctgtgccttgcccc

SEQ ID NO: 16566 - DNA, 22 bp, Artificial Sequence
  chemically synthesized
tgagtctgtgccttgcccctgt

SEQ ID NO: 16567 - DNA, 22 bp, Artificial Sequence
  chemically synthesized
tgccttgcccctgttttatatg

SEQ ID NO: 16568 - DNA, 22 bp, Artificial Sequence
  chemically synthesized
gcccctgttttatatgccctgt

SEQ ID NO: 16569 - DNA, 22 bp, Artificial Sequence
  chemically synthesized
cccctgttttatatgccctgta

SEQ ID NO: 16570 - DNA, 22 bp, Artificial Sequence
  chemically synthesized
ttttatatgccctgtatccagt

SEQ ID NO: 16571 - DNA, 22 bp, Artificial Sequence
  chemically synthesized
tatatgccctgtatccagtatt

SEQ ID NO: 16572 - DNA, 22 bp, Artificial Sequence
  chemically synthesized
atatgccctgtatccagtattc

SEQ ID NO: 16573 - DNA, 22 bp, Artificial Sequence
  chemically synthesized
tatgccctgtatccagtattca

SEQ ID NO: 16574 - DNA, 22 bp, Artificial Sequence
  chemically synthesized
tatccagtattcaggtcaaccc

SEQ ID NO: 16575 - DNA, 22 bp, Artificial Sequence
  chemically synthesized
aggtcaacccagccctgatctt

SEQ ID NO: 16576 - DNA, 22 bp, Artificial Sequence
  chemically synthesized
atctttggactcaaaaaccacg

SEQ ID NO: 16577 - DNA, 22 bp, Artificial Sequence
  chemically synthesized
tggactcaaaaaccacgtttgt

SEQ ID NO: 16578 - DNA, 22 bp, Artificial Sequence
  chemically synthesized
ggactcaaaaaccacgtttgtc

SEQ ID NO: 16579 - DNA, 22 bp, Artificial Sequence
  chemically synthesized
gactcaaaaaccacgtttgtct

SEQ ID NO: 16580 - DNA, 22 bp, Artificial Sequence
  chemically synthesized
aaaaaccacgtttgtctaaaat

SEQ ID NO: 16581 - DNA, 20 bp, Artificial Sequence
  chemically synthesized
tgcgtccactgctcttctga

SEQ ID NO: 16582 - DNA, 20 bp, Artificial Sequence
  chemically synthesized
tcttctgacagcatcattta

SEQ ID NO: 16583 - DNA, 20 bp, Artificial Sequence
  chemically synthesized
cttctgacagcatcatttac

SEQ ID NO: 16584 - DNA, 20 bp, Artificial Sequence
  chemically synthesized
aggttcacactgttccacct

SEQ ID NO: 16585 - DNA, 20 bp, Artificial Sequence
  chemically synthesized
ttcatattatgctcaaaata

SEQ ID NO: 16586 - DNA, 20 bp, Artificial Sequence
  chemically synthesized
tgctcaaaatatggacctat

SEQ ID NO: 16587 - DNA, 20 bp, Artificial Sequence
  chemically synthesized
aatatggacctatcagaaaa

SEQ ID NO: 16588 - DNA, 20 bp, Artificial Sequence
  chemically synthesized
ccattcatctgctgttgttt

SEQ ID NO: 16589 - DNA, 20 bp, Artificial Sequence
  chemically synthesized
tttggcctttgtctgaatca

SEQ ID NO: 16590 - DNA, 20 bp, Artificial Sequence
  chemically synthesized
cctttgtctgaatcacagta

SEQ ID NO: 16591 - DNA, 20 bp, Artificial Sequence
  chemically synthesized
tagatgcctccaactgttaa

SEQ ID NO: 16592 - DNA, 20 bp, Artificial Sequence
  chemically synthesized
agatgcctccaactgttaaa

SEQ ID NO: 16593 - DNA, 20 bp, Artificial Sequence
  chemically synthesized
tccaactgttaaaaggaaaa

SEQ ID NO: 16594 - DNA, 20 bp, Artificial Sequence
  chemically synthesized
aaaaagtttctattatcatt

SEQ ID NO: 16595 - DNA, 20 bp, Artificial Sequence
  chemically synthesized
aaaagtttctattatcattc

SEQ ID NO: 16596 - DNA, 20 bp, Artificial Sequence
  chemically synthesized
gtttctattatcattcaggt

SEQ ID NO: 16597 - DNA, 20 bp, Artificial Sequence
  chemically synthesized
tcaggttagcaatttgttta

SEQ ID NO: 16598 - DNA, 20 bp, Artificial Sequence
  chemically synthesized
agcaatttgtttaaagtaat

SEQ ID NO: 16599 - DNA, 20 bp, Artificial Sequence
  chemically synthesized
gcaatttgtttaaagtaata

SEQ ID NO: 16600 - DNA, 20 bp, Artificial Sequence
  chemically synthesized
caatttgtttaaagtaataa

SEQ ID NO: 16601 - DNA, 20 bp, Artificial Sequence
  chemically synthesized
ttgtttaaagtaataaggga

SEQ ID NO: 16602 - DNA, 20 bp, Artificial Sequence
  chemically synthesized
aagtaataagggatggaaat

SEQ ID NO: 16603 - DNA, 20 bp, Artificial Sequence
  chemically synthesized
ataagggatggaaatgagtt

SEQ ID NO: 16604 - DNA, 20 bp, Artificial Sequence
  chemically synthesized
atgagttcagatttttaaat

SEQ ID NO: 16605 - DNA, 20 bp, Artificial Sequence
  chemically synthesized
cagatttttaaattagcatt

SEQ ID NO: 16606 - DNA, 20 bp, Artificial Sequence
  chemically synthesized
agatttttaaattagcattt

SEQ ID NO: 16607 - DNA, 20 bp, Artificial Sequence
  chemically synthesized
attagcatttaggatccact

SEQ ID NO: 16608 - DNA, 20 bp, Artificial Sequence
  chemically synthesized
atttaggatccactaagccc

SEQ ID NO: 16609 - DNA, 20 bp, Artificial Sequence
  chemically synthesized
tttaggatccactaagccca

SEQ ID NO: 16610 - DNA, 20 bp, Artificial Sequence
  chemically synthesized
tatttacctttcaaaaataa

SEQ ID NO: 16611 - DNA, 20 bp, Artificial Sequence
  chemically synthesized
atagtatttgacatattgtt

SEQ ID NO: 16612 - DNA, 20 bp, Artificial Sequence
  chemically synthesized
tagtatttgacatattgtta

SEQ ID NO: 16613 - DNA, 20 bp, Artificial Sequence
  chemically synthesized
agtatttgacatattgttaa

SEQ ID NO: 16614 - DNA, 20 bp, Artificial Sequence
  chemically synthesized
tgttaagggacaccaacgaa

SEQ ID NO: 16615 - DNA, 20 bp, Artificial Sequence
  chemically synthesized
tcaattctgtgcatgtttta

SEQ ID NO: 16616 - DNA, 20 bp, Artificial Sequence
  chemically synthesized
gcatgttttaaagtcccttc

SEQ ID NO: 16617 - DNA, 20 bp, Artificial Sequence
  chemically synthesized
catgttttaaagtcccttct

SEQ ID NO: 16618 - DNA, 20 bp, Artificial Sequence
  chemically synthesized
ccttctaggtgcatgtgaaa

SEQ ID NO: 16619 - DNA, 20 bp, Artificial Sequence
  chemically synthesized
tctaggtgcatgtgaaatag

SEQ ID NO: 16620 - DNA, 20 bp, Artificial Sequence
  chemically synthesized
aggtgcatgtgaaatagcag

SEQ ID NO: 16621 - DNA, 20 bp, Artificial Sequence
  chemically synthesized
ggtgcatgtgaaatagcagc

SEQ ID NO: 16622 - DNA, 20 bp, Artificial Sequence
  chemically synthesized
agcagcaggctgatgccgca

SEQ ID NO: 16623 - DNA, 20 bp, Artificial Sequence
  chemically synthesized
cagcaggctgatgccgcaaa

SEQ ID NO: 16624 - DNA, 20 bp, Artificial Sequence
  chemically synthesized
agcaggctgatgccgcaaag

SEQ ID NO: 16625 - DNA, 20 bp, Artificial Sequence
  chemically synthesized
aagaggtcaaatacctcaaa

SEQ ID NO: 16626 - DNA, 20 bp, Artificial Sequence
  chemically synthesized
ggtcaaatacctcaaaaaga

SEQ ID NO: 16627 - DNA, 20 bp, Artificial Sequence
  chemically synthesized
tcaaatacctcaaaaagaaa

SEQ ID NO: 16628 - DNA, 20 bp, Artificial Sequence
  chemically synthesized
tcaaaaagaaagagtctgaa

SEQ ID NO: 16629 - DNA, 20 bp, Artificial Sequence
  chemically synthesized
aaagagtctgaaaagacaat

SEQ ID NO: 16630 - DNA, 20 bp, Artificial Sequence
  chemically synthesized
agagtctgaaaagacaattg

SEQ ID NO: 16631 - DNA, 20 bp, Artificial Sequence
  chemically synthesized
ttggagtaactacttgccta

SEQ ID NO: 16632 - DNA, 20 bp, Artificial Sequence
  chemically synthesized
taactacttgcctaaagctc

SEQ ID NO: 16633 - DNA, 20 bp, Artificial Sequence
  chemically synthesized
ctaaagctccagtcactttg

SEQ ID NO: 16634 - DNA, 20 bp, Artificial Sequence
  chemically synthesized
ccagtcactttgtagtgtca

SEQ ID NO: 16635 - DNA, 20 bp, Artificial Sequence
  chemically synthesized
tcactttgtagtgtcaaagt

SEQ ID NO: 16636 - DNA, 20 bp, Artificial Sequence
  chemically synthesized
cactttgtagtgtcaaagtt

SEQ ID NO: 16637 - DNA, 20 bp, Artificial Sequence
  chemically synthesized
attgtcatcatacatgccct

SEQ ID NO: 16638 - DNA, 20 bp, Artificial Sequence
  chemically synthesized
gtcatcatacatgccctcag

SEQ ID NO: 16639 - DNA, 20 bp, Artificial Sequence
  chemically synthesized
atcatacatgccctcagcag

SEQ ID NO: 16640 - DNA, 20 bp, Artificial Sequence
  chemically synthesized
ctctcttcctccttctccta

SEQ ID NO: 16641 - DNA, 20 bp, Artificial Sequence
  chemically synthesized
tcttcctccttctcctacag

SEQ ID NO: 16642 - DNA, 20 bp, Artificial Sequence
  chemically synthesized
ctccttctcctacagtggtc

SEQ ID NO: 16643 - DNA, 20 bp, Artificial Sequence
  chemically synthesized
cttctcctacagtggtccag

SEQ ID NO: 16644 - DNA, 20 bp, Artificial Sequence
  chemically synthesized
ttctcctacagtggtccaga

SEQ ID NO: 16645 - DNA, 20 bp, Artificial Sequence
  chemically synthesized
tctcctacagtggtccagaa

SEQ ID NO: 16646 - DNA, 20 bp, Artificial Sequence
  chemically synthesized
ctcctacagtggtccagaag

SEQ ID NO: 16647 - DNA, 20 bp, Artificial Sequence
  chemically synthesized
acagtggtccagaaggggct

SEQ ID NO: 16648 - DNA, 20 bp, Artificial Sequence
  chemically synthesized
cagtggtccagaaggggctc

SEQ ID NO: 16649 - DNA, 20 bp, Artificial Sequence
  chemically synthesized
gctcaggtatgttcaaataa

SEQ ID NO: 16650 - DNA, 20 bp, Artificial Sequence
  chemically synthesized
tgttcaaataacagctgctg

SEQ ID NO: 16651 - DNA, 20 bp, Artificial Sequence
  chemically synthesized
tgctgtggttttcaattatg

SEQ ID NO: 16652 - DNA, 20 bp, Artificial Sequence
  chemically synthesized
caattatgaagaaatctcct

SEQ ID NO: 16653 - DNA, 20 bp, Artificial Sequence
  chemically synthesized
aagaaatctcctaagctaca

SEQ ID NO: 16654 - DNA, 20 bp, Artificial Sequence
  chemically synthesized
acatagtcatttatctttta

SEQ ID NO: 16655 - DNA, 20 bp, Artificial Sequence
  chemically synthesized
catttatcttttaaagcacc

SEQ ID NO: 16656 - DNA, 20 bp, Artificial Sequence
  chemically synthesized
atcttttaaagcaccaagca

SEQ ID NO: 16657 - DNA, 20 bp, Artificial Sequence
  chemically synthesized
caagcaaagtaccttttgat

SEQ ID NO: 16658 - DNA, 20 bp, Artificial Sequence
  chemically synthesized
aagcaaagtaccttttgata

SEQ ID NO: 16659 - DNA, 20 bp, Artificial Sequence
  chemically synthesized
gcaaagtaccttttgataag

SEQ ID NO: 16660 - DNA, 20 bp, Artificial Sequence
  chemically synthesized
tgataaggagaacgtgctta

SEQ ID NO: 16661 - DNA, 20 bp, Artificial Sequence
  chemically synthesized
aacgtgcttatagatgttca

SEQ ID NO: 16662 - DNA, 20 bp, Artificial Sequence
  chemically synthesized
gtgcttatagatgttcatag

SEQ ID NO: 16663 - DNA, 20 bp, Artificial Sequence
  chemically synthesized
agatgttcatagaagatgct

SEQ ID NO: 16664 - DNA, 20 bp, Artificial Sequence
  chemically synthesized
atacgtatttcattctcaca

SEQ ID NO: 16665 - DNA, 20 bp, Artificial Sequence
  chemically synthesized
acatggtatttctctcttcc

SEQ ID NO: 16666 - DNA, 20 bp, Artificial Sequence
  chemically synthesized
ggtatttctctcttcctagt

SEQ ID NO: 16667 - DNA, 20 bp, Artificial Sequence
  chemically synthesized
gtatttctctcttcctagta

SEQ ID NO: 16668 - DNA, 20 bp, Artificial Sequence
  chemically synthesized
tatttctctcttcctagtaa

SEQ ID NO: 16669 - DNA, 20 bp, Artificial Sequence
  chemically synthesized
tttctctcttcctagtaagg

SEQ ID NO: 16670 - DNA, 20 bp, Artificial Sequence
  chemically synthesized
ttctctcttcctagtaaggg

SEQ ID NO: 16671 - DNA, 20 bp, Artificial Sequence
  chemically synthesized
ctctcttcctagtaagggag

SEQ ID NO: 16672 - DNA, 20 bp, Artificial Sequence
  chemically synthesized
atgcccaatttctgcctcca

SEQ ID NO: 16673 - DNA, 20 bp, Artificial Sequence
  chemically synthesized
ccaatttctgcctccaaaga

SEQ ID NO: 16674 - DNA, 20 bp, Artificial Sequence
  chemically synthesized
atttctgcctccaaagaaag

SEQ ID NO: 16675 - DNA, 20 bp, Artificial Sequence
  chemically synthesized
tctgcctccaaagaaagaag

SEQ ID NO: 16676 - DNA, 20 bp, Artificial Sequence
  chemically synthesized
aaagaagaagtaaaaactaa

SEQ ID NO: 16677 - DNA, 20 bp, Artificial Sequence
  chemically synthesized
aagaagaagtaaaaactaaa

SEQ ID NO: 16678 - DNA, 20 bp, Artificial Sequence
  chemically synthesized
aagaagtaaaaactaaaagg

SEQ ID NO: 16679 - DNA, 20 bp, Artificial Sequence
  chemically synthesized
aaaggcagaaatgaaatcca

SEQ ID NO: 16680 - DNA, 20 bp, Artificial Sequence
  chemically synthesized
aaggcagaaatgaaatccac

SEQ ID NO: 16681 - DNA, 20 bp, Artificial Sequence
  chemically synthesized
aaatgaaatccacaggcaaa

SEQ ID NO: 16682 - DNA, 20 bp, Artificial Sequence
  chemically synthesized
aatccacaggcaaacagcct

SEQ ID NO: 16683 - DNA, 20 bp, Artificial Sequence
  chemically synthesized
aacagcctgagaccacatcc

SEQ ID NO: 16684 - DNA, 20 bp, Artificial Sequence
  chemically synthesized
acagcctgagaccacatcct

SEQ ID NO: 16685 - DNA, 20 bp, Artificial Sequence
  chemically synthesized
ctgagaccacatcctgggcc

SEQ ID NO: 16686 - DNA, 20 bp, Artificial Sequence
  chemically synthesized
ccacatcctgggcctggtta

SEQ ID NO: 16687 - DNA, 20 bp, Artificial Sequence
  chemically synthesized
atcctgggcctggttaaaga

SEQ ID NO: 16688 - DNA, 20 bp, Artificial Sequence
  chemically synthesized
ttaaagatagacccctgacc

SEQ ID NO: 16689 - DNA, 20 bp, Artificial Sequence
  chemically synthesized
agatagacccctgacctggc

SEQ ID NO: 16690 - DNA, 20 bp, Artificial Sequence
  chemically synthesized
ctggccagttatgttatcta

SEQ ID NO: 16691 - DNA, 20 bp, Artificial Sequence
  chemically synthesized
gttatgttatctatagattc

SEQ ID NO: 16692 - DNA, 20 bp, Artificial Sequence
  chemically synthesized
tatagattccagacactgta

SEQ ID NO: 16693 - DNA, 20 bp, Artificial Sequence
  chemically synthesized
attccagacactgtatggaa

SEQ ID NO: 16694 - DNA, 20 bp, Artificial Sequence
  chemically synthesized
ccagacactgtatggaaaag

SEQ ID NO: 16695 - DNA, 20 bp, Artificial Sequence
  chemically synthesized
ttctgttccattctgatgac

SEQ ID NO: 16696 - DNA, 20 bp, Artificial Sequence
  chemically synthesized
attctgatgaccagtgcatg

SEQ ID NO: 16697 - DNA, 20 bp, Artificial Sequence
  chemically synthesized
tgaccagtgcatgcagcccc

SEQ ID NO: 16698 - DNA, 20 bp, Artificial Sequence
  chemically synthesized
cccccagtcatgtaccccct

SEQ ID NO: 16699 - DNA, 20 bp, Artificial Sequence
  chemically synthesized
cccagtcatgtaccccctta

SEQ ID NO: 16700 - DNA, 20 bp, Artificial Sequence
  chemically synthesized
atgtacccccttagagttgt

SEQ ID NO: 16701 - DNA, 20 bp, Artificial Sequence
  chemically synthesized
ttagagttgtaagcccttaa

SEQ ID NO: 16702 - DNA, 20 bp, Artificial Sequence
  chemically synthesized
tagagttgtaagcccttaaa

SEQ ID NO: 16703 - DNA, 20 bp, Artificial Sequence
  chemically synthesized
agagttgtaagcccttaaaa

SEQ ID NO: 16704 - DNA, 20 bp, Artificial Sequence
  chemically synthesized
ttgtaagcccttaaaaggga

SEQ ID NO: 16705 - DNA, 20 bp, Artificial Sequence
  chemically synthesized
tgtaagcccttaaaagggac

SEQ ID NO: 16706 - DNA, 20 bp, Artificial Sequence
  chemically synthesized
ggacaggaattgctcactct

SEQ ID NO: 16707 - DNA, 20 bp, Artificial Sequence
  chemically synthesized
acaggaattgctcactctga

SEQ ID NO: 16708 - DNA, 20 bp, Artificial Sequence
  chemically synthesized
aattgctcactctgagagct

SEQ ID NO: 16709 - DNA, 20 bp, Artificial Sequence
  chemically synthesized
cactctgagagcttggttgt

SEQ ID NO: 16710 - DNA, 20 bp, Artificial Sequence
  chemically synthesized
ctctgagagcttggttgttg

SEQ ID NO: 16711 - DNA, 20 bp, Artificial Sequence
  chemically synthesized
agcttggttgttggagatgt

SEQ ID NO: 16712 - DNA, 20 bp, Artificial Sequence
  chemically synthesized
tggagatgtgagtcttgccc

SEQ ID NO: 16713 - DNA, 20 bp, Artificial Sequence
  chemically synthesized
gtgagtcttgcccaagctcc

SEQ ID NO: 16714 - DNA, 20 bp, Artificial Sequence
  chemically synthesized
cccaagctcccagccgaata

SEQ ID NO: 16715 - DNA, 20 bp, Artificial Sequence
  chemically synthesized
aagcccttccttctttaact

SEQ ID NO: 16716 - DNA, 20 bp, Artificial Sequence
  chemically synthesized
ccttctttaactcggtgtct

SEQ ID NO: 16717 - DNA, 20 bp, Artificial Sequence
  chemically synthesized
cttctttaactcggtgtctg

SEQ ID NO: 16718 - DNA, 20 bp, Artificial Sequence
  chemically synthesized
ttctttaactcggtgtctga

SEQ ID NO: 16719 - DNA, 20 bp, Artificial Sequence
  chemically synthesized
tctttaactcggtgtctgag

SEQ ID NO: 16720 - DNA, 20 bp, Artificial Sequence
  chemically synthesized
tgtctgaggggttttgtatg

SEQ ID NO: 16721 - DNA, 20 bp, Artificial Sequence
  chemically synthesized
tgcagcttgtcctgctacac

SEQ ID NO: 16722 - DNA, 20 bp, Artificial Sequence
  chemically synthesized
gctacctctattaaaacaca

SEQ ID NO: 16723 - DNA, 20 bp, Artificial Sequence
  chemically synthesized
aaacacaaagccacaatata

SEQ ID NO: 16724 - DNA, 20 bp, Artificial Sequence
  chemically synthesized
ccacaatatatggatacatt

SEQ ID NO: 16725 - DNA, 20 bp, Artificial Sequence
  chemically synthesized
tttggaaaatatgcacactt

SEQ ID NO: 16726 - DNA, 20 bp, Artificial Sequence
  chemically synthesized
aaatatgcacactttggatc

SEQ ID NO: 16727 - DNA, 20 bp, Artificial Sequence
  chemically synthesized
atgcacactttggatccagc

SEQ ID NO: 16728 - DNA, 20 bp, Artificial Sequence
  chemically synthesized
ggatccagcaagtccacatc

SEQ ID NO: 16729 - DNA, 20 bp, Artificial Sequence
  chemically synthesized
ccacatctagaaaaccatcc

SEQ ID NO: 16730 - DNA, 20 bp, Artificial Sequence
  chemically synthesized
cacatctagaaaaccatcct

SEQ ID NO: 16731 - DNA, 20 bp, Artificial Sequence
  chemically synthesized
acatctagaaaaccatcctg

SEQ ID NO: 16732 - DNA, 20 bp, Artificial Sequence
  chemically synthesized
catctagaaaaccatcctgg

SEQ ID NO: 16733 - DNA, 20 bp, Artificial Sequence
  chemically synthesized
aaccatcctgggggaaaatt

SEQ ID NO: 16734 - DNA, 20 bp, Artificial Sequence
  chemically synthesized
accatcctgggggaaaatta

SEQ ID NO: 16735 - DNA, 20 bp, Artificial Sequence
  chemically synthesized
catcctgggggaaaattaag

SEQ ID NO: 16736 - DNA, 20 bp, Artificial Sequence
  chemically synthesized
tcctgggggaaaattaagga

SEQ ID NO: 16737 - DNA, 20 bp, Artificial Sequence
  chemically synthesized
aaaattaaggagagtatgaa

SEQ ID NO: 16738 - DNA, 20 bp, Artificial Sequence
  chemically synthesized
aaattaaggagagtatgaaa

SEQ ID NO: 16739 - DNA, 20 bp, Artificial Sequence
  chemically synthesized
tatgaaaaggatgtttacta

SEQ ID NO: 16740 - DNA, 20 bp, Artificial Sequence
  chemically synthesized
tgtttactaaagcattatga

SEQ ID NO: 16741 - DNA, 20 bp, Artificial Sequence
  chemically synthesized
gcattatgatggcaaaaaat

SEQ ID NO: 16742 - DNA, 20 bp, Artificial Sequence
  chemically synthesized
agaaacaacttacactgaac

SEQ ID NO: 16743 - DNA, 20 bp, Artificial Sequence
  chemically synthesized
gaactagtcaacttacttaa

SEQ ID NO: 16744 - DNA, 20 bp, Artificial Sequence
  chemically synthesized
tagtcaacttacttaacaga

SEQ ID NO: 16745 - DNA, 20 bp, Artificial Sequence
  chemically synthesized
tcaacttacttaacagacag

SEQ ID NO: 16746 - DNA, 20 bp, Artificial Sequence
  chemically synthesized
caacttacttaacagacaga

SEQ ID NO: 16747 - DNA, 20 bp, Artificial Sequence
  chemically synthesized
taacagacagaaggctcaat

SEQ ID NO: 16748 - DNA, 20 bp, Artificial Sequence
  chemically synthesized
caattagctcatgtgtcaaa

SEQ ID NO: 16749 - DNA, 20 bp, Artificial Sequence
  chemically synthesized
aattagctcatgtgtcaaat

SEQ ID NO: 16750 - DNA, 20 bp, Artificial Sequence
  chemically synthesized
attagctcatgtgtcaaatg

SEQ ID NO: 16751 - DNA, 20 bp, Artificial Sequence
  chemically synthesized
ttagctcatgtgtcaaatgg

SEQ ID NO: 16752 - DNA, 20 bp, Artificial Sequence
  chemically synthesized
aatgggggtaaaataatatt

SEQ ID NO: 16753 - DNA, 20 bp, Artificial Sequence
  chemically synthesized
gggtaaaataatatttagtt

SEQ ID NO: 16754 - DNA, 20 bp, Artificial Sequence
  chemically synthesized
gtaaaataatatttagtttg

SEQ ID NO: 16755 - DNA, 20 bp, Artificial Sequence
  chemically synthesized
taaaataatatttagtttgg

SEQ ID NO: 16756 - DNA, 20 bp, Artificial Sequence
  chemically synthesized
aaaataatatttagtttgga

SEQ ID NO: 16757 - DNA, 20 bp, Artificial Sequence
  chemically synthesized
taatatttagtttggaggga

SEQ ID NO: 16758 - DNA, 20 bp, Artificial Sequence
  chemically synthesized
atttagtttggagggaaaga

SEQ ID NO: 16759 - DNA, 20 bp, Artificial Sequence
  chemically synthesized
tttagtttggagggaaagac

SEQ ID NO: 16760 - DNA, 20 bp, Artificial Sequence
  chemically synthesized
gagggaaagacaggctctaa

SEQ ID NO: 16761 - DNA, 20 bp, Artificial Sequence
  chemically synthesized
gggaaagacaggctctaaaa

SEQ ID NO: 16762 - DNA, 20 bp, Artificial Sequence
  chemically synthesized
ggaaagacaggctctaaaag

SEQ ID NO: 16763 - DNA, 20 bp, Artificial Sequence
  chemically synthesized
tctaaaagaggattaaaaat

SEQ ID NO: 16764 - DNA, 20 bp, Artificial Sequence
  chemically synthesized
agaggattaaaaattagatg

SEQ ID NO: 16765 - DNA, 20 bp, Artificial Sequence
  chemically synthesized
attaaaaattagatgtggcc

SEQ ID NO: 16766 - DNA, 20 bp, Artificial Sequence
  chemically synthesized
ttaaaaattagatgtggcct

SEQ ID NO: 16767 - DNA, 20 bp, Artificial Sequence
  chemically synthesized
aattagatgtggcctaggca

SEQ ID NO: 16768 - DNA, 20 bp, Artificial Sequence
  chemically synthesized
taggcaaagaatttatgacc

SEQ ID NO: 16769 - DNA, 20 bp, Artificial Sequence
  chemically synthesized
aaacacaacaaaaacaaaaa

SEQ ID NO: 16770 - DNA, 20 bp, Artificial Sequence
  chemically synthesized
caaaaacaaaaacagacaaa

SEQ ID NO: 16771 - DNA, 20 bp, Artificial Sequence
  chemically synthesized
aaaaacaaaaacagacaaat

SEQ ID NO: 16772 - DNA, 20 bp, Artificial Sequence
  chemically synthesized
aaaatgcttctgcaccgcaa

SEQ ID NO: 16773 - DNA, 20 bp, Artificial Sequence
  chemically synthesized
accgcaaaagaccgaatcaa

SEQ ID NO: 16774 - DNA, 20 bp, Artificial Sequence
  chemically synthesized
cgcaaaagaccgaatcaaca

SEQ ID NO: 16775 - DNA, 20 bp, Artificial Sequence
  chemically synthesized
gaccgaatcaacagagtaaa

SEQ ID NO: 16776 - DNA, 20 bp, Artificial Sequence
  chemically synthesized
cagagtaaacggataaccta

SEQ ID NO: 16777 - DNA, 20 bp, Artificial Sequence
  chemically synthesized
aaacggataacctacagaat

SEQ ID NO: 16778 - DNA, 20 bp, Artificial Sequence
  chemically synthesized
gcaaactatgaatgcaacaa

SEQ ID NO: 16779 - DNA, 20 bp, Artificial Sequence
  chemically synthesized
caaactatgaatgcaacaaa

SEQ ID NO: 16780 - DNA, 20 bp, Artificial Sequence
  chemically synthesized
tgcaacaaaaggctaatata

SEQ ID NO: 16781 - DNA, 20 bp, Artificial Sequence
  chemically synthesized
ggctaatatacagaatctac

SEQ ID NO: 16782 - DNA, 20 bp, Artificial Sequence
  chemically synthesized
gctaatatacagaatctaca

SEQ ID NO: 16783 - DNA, 20 bp, Artificial Sequence
  chemically synthesized
aacaaaaaaaccaacctcat

SEQ ID NO: 16784 - DNA, 20 bp, Artificial Sequence
  chemically synthesized
aaaaaaccaacctcattaga

SEQ ID NO: 16785 - DNA, 20 bp, Artificial Sequence
  chemically synthesized
tcattagaaagtgactgtga

SEQ ID NO: 16786 - DNA, 20 bp, Artificial Sequence
  chemically synthesized
tgactgtgatggttaatact

SEQ ID NO: 16787 - DNA, 20 bp, Artificial Sequence
  chemically synthesized
atactgagtgtcaacttgat

SEQ ID NO: 16788 - DNA, 20 bp, Artificial Sequence
  chemically synthesized
gtgtcaacttgattggactg

SEQ ID NO: 16789 - DNA, 20 bp, Artificial Sequence
  chemically synthesized
tgtcaacttgattggactga

SEQ ID NO: 16790 - DNA, 20 bp, Artificial Sequence
  chemically synthesized
tgattggactgaaggatgca

SEQ ID NO: 16791 - DNA, 20 bp, Artificial Sequence
  chemically synthesized
aggatgcaaagtaatgatct

SEQ ID NO: 16792 - DNA, 20 bp, Artificial Sequence
  chemically synthesized
ggatgcaaagtaatgatctt

SEQ ID NO: 16793 - DNA, 20 bp, Artificial Sequence
  chemically synthesized
atgatcttgggtgtgtctgt

SEQ ID NO: 16794 - DNA, 20 bp, Artificial Sequence
  chemically synthesized
tgatcttgggtgtgtctgtg

SEQ ID NO: 16795 - DNA, 20 bp, Artificial Sequence
  chemically synthesized
gatcttgggtgtgtctgtga

SEQ ID NO: 16796 - DNA, 20 bp, Artificial Sequence
  chemically synthesized
tgtctgtgagggtgttacca

SEQ ID NO: 16797 - DNA, 20 bp, Artificial Sequence
  chemically synthesized
gtctgtgagggtgttaccaa

SEQ ID NO: 16798 - DNA, 20 bp, Artificial Sequence
  chemically synthesized
ctgtgagggtgttaccaaag

SEQ ID NO: 16799 - DNA, 20 bp, Artificial Sequence
  chemically synthesized
accaaaggagattaatattt

SEQ ID NO: 16800 - DNA, 20 bp, Artificial Sequence
  chemically synthesized
aaggagattaatatttcagt

SEQ ID NO: 16801 - DNA, 20 bp, Artificial Sequence
  chemically synthesized
gagattaatatttcagtcag

SEQ ID NO: 16802 - DNA, 20 bp, Artificial Sequence
  chemically synthesized
agattaatatttcagtcagt

SEQ ID NO: 16803 - DNA, 20 bp, Artificial Sequence
  chemically synthesized
taatatttcagtcagtgggc

SEQ ID NO: 16804 - DNA, 20 bp, Artificial Sequence
  chemically synthesized
aatatttcagtcagtgggct

SEQ ID NO: 16805 - DNA, 20 bp, Artificial Sequence
  chemically synthesized
atatttcagtcagtgggctg

SEQ ID NO: 16806 - DNA, 20 bp, Artificial Sequence
  chemically synthesized
tttcagtcagtgggctgggg

SEQ ID NO: 16807 - DNA, 20 bp, Artificial Sequence
  chemically synthesized
ttcagtcagtgggctgggga

SEQ ID NO: 16808 - DNA, 20 bp, Artificial Sequence
  chemically synthesized
agtcagtgggctggggaagg

SEQ ID NO: 16809 - DNA, 20 bp, Artificial Sequence
  chemically synthesized
aggcagacccacccttaatc

SEQ ID NO: 16810 - DNA, 20 bp, Artificial Sequence
  chemically synthesized
ggcagacccacccttaatct

SEQ ID NO: 16811 - DNA, 20 bp, Artificial Sequence
  chemically synthesized
agacccacccttaatctggg

SEQ ID NO: 16812 - DNA, 20 bp, Artificial Sequence
  chemically synthesized
gacccacccttaatctgggt

SEQ ID NO: 16813 - DNA, 20 bp, Artificial Sequence
  chemically synthesized
ctgggtgggcaccatctaat

SEQ ID NO: 16814 - DNA, 20 bp, Artificial Sequence
  chemically synthesized
ggcaccatctaatcagttgc

SEQ ID NO: 16815 - DNA, 20 bp, Artificial Sequence
  chemically synthesized
catctaatcagttgccagca

SEQ ID NO: 16816 - DNA, 20 bp, Artificial Sequence
  chemically synthesized
taatcagttgccagcacagc

SEQ ID NO: 16817 - DNA, 20 bp, Artificial Sequence
  chemically synthesized
aatcagttgccagcacagcc

SEQ ID NO: 16818 - DNA, 20 bp, Artificial Sequence
  chemically synthesized
gccagcacagccaggatata

SEQ ID NO: 16819 - DNA, 20 bp, Artificial Sequence
  chemically synthesized
agcacagccaggatataaag

SEQ ID NO: 16820 - DNA, 20 bp, Artificial Sequence
  chemically synthesized
gcacagccaggatataaagc

SEQ ID NO: 16821 - DNA, 20 bp, Artificial Sequence
  chemically synthesized
cagccaggatataaagcagg

SEQ ID NO: 16822 - DNA, 20 bp, Artificial Sequence
  chemically synthesized
agcaggcagaaaaatgtgaa

SEQ ID NO: 16823 - DNA, 20 bp, Artificial Sequence
  chemically synthesized
gcaggcagaaaaatgtgaaa

SEQ ID NO: 16824 - DNA, 20 bp, Artificial Sequence
  chemically synthesized
gcagaaaaatgtgaaaaggc

SEQ ID NO: 16825 - DNA, 20 bp, Artificial Sequence
  chemically synthesized
aaaatgtgaaaaggctagat

SEQ ID NO: 16826 - DNA, 20 bp, Artificial Sequence
  chemically synthesized
gtgaaaaggctagattggct

SEQ ID NO: 16827 - DNA, 20 bp, Artificial Sequence
  chemically synthesized
gctagattggcttggcatcc

SEQ ID NO: 16828 - DNA, 20 bp, Artificial Sequence
  chemically synthesized
cctacatttttctcccatgc

SEQ ID NO: 16829 - DNA, 20 bp, Artificial Sequence
  chemically synthesized
atgctggattcttcctgccc

SEQ ID NO: 16830 - DNA, 20 bp, Artificial Sequence
  chemically synthesized
tgccctggaacattgaactc

SEQ ID NO: 16831 - DNA, 20 bp, Artificial Sequence
  chemically synthesized
gccctggaacattgaactcc

SEQ ID NO: 16832 - DNA, 20 bp, Artificial Sequence
  chemically synthesized
acattgaactccaggttctt

SEQ ID NO: 16833 - DNA, 20 bp, Artificial Sequence
  chemically synthesized
aactccaggttcttcagctt

SEQ ID NO: 16834 - DNA, 20 bp, Artificial Sequence
  chemically synthesized
actccaggttcttcagcttt

SEQ ID NO: 16835 - DNA, 20 bp, Artificial Sequence
  chemically synthesized
ttcagctttgggactccgac

SEQ ID NO: 16836 - DNA, 20 bp, Artificial Sequence
  chemically synthesized
cgactagcttccttgttcct

SEQ ID NO: 16837 - DNA, 20 bp, Artificial Sequence
  chemically synthesized
tagcttccttgttcctcagc

SEQ ID NO: 16838 - DNA, 20 bp, Artificial Sequence
  chemically synthesized
cttccttgttcctcagctgg

SEQ ID NO: 16839 - DNA, 20 bp, Artificial Sequence
  chemically synthesized
cttgttcctcagctggcaga

SEQ ID NO: 16840 - DNA, 20 bp, Artificial Sequence
  chemically synthesized
agctggcagatggcctgttt

SEQ ID NO: 16841 - DNA, 20 bp, Artificial Sequence
  chemically synthesized
gctggcagatggcctgtttt

SEQ ID NO: 16842 - DNA, 20 bp, Artificial Sequence
  chemically synthesized
ttgggaccttgtgaacatgt

SEQ ID NO: 16843 - DNA, 20 bp, Artificial Sequence
  chemically synthesized
ctacataataaactctcata

SEQ ID NO: 16844 - DNA, 20 bp, Artificial Sequence
  chemically synthesized
aataaactctcatatagata

SEQ ID NO: 16845 - DNA, 20 bp, Artificial Sequence
  chemically synthesized
ctctcatatagatatagata

SEQ ID NO: 16846 - DNA, 20 bp, Artificial Sequence
  chemically synthesized
ctcatatagatatagatata

SEQ ID NO: 16847 - DNA, 20 bp, Artificial Sequence
  chemically synthesized
tatagatatagatatagaga

SEQ ID NO: 16848 - DNA, 20 bp, Artificial Sequence
  chemically synthesized
tatagatatagagatagata

SEQ ID NO: 16849 - DNA, 20 bp, Artificial Sequence
  chemically synthesized
tagatatagagatagatata

SEQ ID NO: 16850 - DNA, 20 bp, Artificial Sequence
  chemically synthesized
tatagagatagatatagaga

SEQ ID NO: 16851 - DNA, 20 bp, Artificial Sequence
  chemically synthesized
gatagatatagagatagata

SEQ ID NO: 16852 - DNA, 20 bp, Artificial Sequence
  chemically synthesized
tatagagatagatatagata

SEQ ID NO: 16853 - DNA, 20 bp, Artificial Sequence
  chemically synthesized
gatagatatagatatagata

SEQ ID NO: 16854 - DNA, 20 bp, Artificial Sequence
  chemically synthesized
tatagatatagatatagata

SEQ ID NO: 16855 - DNA, 20 bp, Artificial Sequence
  chemically synthesized
tatagatatagatatagata

SEQ ID NO: 16856 - DNA, 20 bp, Artificial Sequence
  chemically synthesized
tatagatatagatatagata

SEQ ID NO: 16857 - DNA, 20 bp, Artificial Sequence
  chemically synthesized
ctattaattctgtttctctg

SEQ ID NO: 16858 - DNA, 20 bp, Artificial Sequence
  chemically synthesized
ttctctgtagaaccctaata

SEQ ID NO: 16859 - DNA, 20 bp, Artificial Sequence
  chemically synthesized
tagaaccctaatacagattt

SEQ ID NO: 16860 - DNA, 20 bp, Artificial Sequence
  chemically synthesized
cctaatacagattttggtac

SEQ ID NO: 16861 - DNA, 20 bp, Artificial Sequence
  chemically synthesized
ctaatacagattttggtacc

SEQ ID NO: 16862 - DNA, 20 bp, Artificial Sequence
  chemically synthesized
aatacagattttggtaccag

SEQ ID NO: 16863 - DNA, 20 bp, Artificial Sequence
  chemically synthesized
acagattttggtaccaggag

SEQ ID NO: 16864 - DNA, 20 bp, Artificial Sequence
  chemically synthesized
tttggtaccaggagtggttc

SEQ ID NO: 16865 - DNA, 20 bp, Artificial Sequence
  chemically synthesized
tggtaccaggagtggttcta

SEQ ID NO: 16866 - DNA, 20 bp, Artificial Sequence
  chemically synthesized
ggtaccaggagtggttctag

SEQ ID NO: 16867 - DNA, 20 bp, Artificial Sequence
  chemically synthesized
caggagtggttctagaggaa

SEQ ID NO: 16868 - DNA, 20 bp, Artificial Sequence
  chemically synthesized
ttctagaggaacagaatatt

SEQ ID NO: 16869 - DNA, 20 bp, Artificial Sequence
  chemically synthesized
tctagaggaacagaatatta

SEQ ID NO: 16870 - DNA, 20 bp, Artificial Sequence
  chemically synthesized
gaggaacagaatattaagga

SEQ ID NO: 16871 - DNA, 20 bp, Artificial Sequence
  chemically synthesized
ggaacagaatattaaggatg

SEQ ID NO: 16872 - DNA, 20 bp, Artificial Sequence
  chemically synthesized
taaggatggagttctttcat

SEQ ID NO: 16873 - DNA, 20 bp, Artificial Sequence
  chemically synthesized
tggagttctttcattggttt

SEQ ID NO: 16874 - DNA, 20 bp, Artificial Sequence
  chemically synthesized
ggagttctttcattggtttt

SEQ ID NO: 16875 - DNA, 20 bp, Artificial Sequence
  chemically synthesized
gagttctttcattggttttg

SEQ ID NO: 16876 - DNA, 20 bp, Artificial Sequence
  chemically synthesized
ttcattggttttggggtttc

SEQ ID NO: 16877 - DNA, 20 bp, Artificial Sequence
  chemically synthesized
cattggttttggggtttctg

SEQ ID NO: 16878 - DNA, 20 bp, Artificial Sequence
  chemically synthesized
ggttttggggtttctggagt

SEQ ID NO: 16879 - DNA, 20 bp, Artificial Sequence
  chemically synthesized
agttggctgcttaatatgat

SEQ ID NO: 16880 - DNA, 20 bp, Artificial Sequence
  chemically synthesized
tgattagacccaaatatgct

SEQ ID NO: 16881 - DNA, 20 bp, Artificial Sequence
  chemically synthesized
gattagacccaaatatgcta

SEQ ID NO: 16882 - DNA, 20 bp, Artificial Sequence
  chemically synthesized
gctaaggactcttcttctaa

SEQ ID NO: 16883 - DNA, 20 bp, Artificial Sequence
  chemically synthesized
ggactcttcttctaatggta

SEQ ID NO: 16884 - DNA, 20 bp, Artificial Sequence
  chemically synthesized
actcttcttctaatggtatg

SEQ ID NO: 16885 - DNA, 20 bp, Artificial Sequence
  chemically synthesized
tggagaacactgataatcct

SEQ ID NO: 16886 - DNA, 20 bp, Artificial Sequence
  chemically synthesized
aatccttggcatcaattgtt

SEQ ID NO: 16887 - DNA, 20 bp, Artificial Sequence
  chemically synthesized
tccttggcatcaattgttta

SEQ ID NO: 16888 - DNA, 20 bp, Artificial Sequence
  chemically synthesized
cttggcatcaattgtttaga

SEQ ID NO: 16889 - DNA, 20 bp, Artificial Sequence
  chemically synthesized
actcttgattcaacgcttgt

SEQ ID NO: 16890 - DNA, 20 bp, Artificial Sequence
  chemically synthesized
tcttgattcaacgcttgtga

SEQ ID NO: 16891 - DNA, 20 bp, Artificial Sequence
  chemically synthesized
cttgattcaacgcttgtgag

SEQ ID NO: 16892 - DNA, 20 bp, Artificial Sequence
  chemically synthesized
attcaacgcttgtgagaggc

SEQ ID NO: 16893 - DNA, 20 bp, Artificial Sequence
  chemically synthesized
ttcaacgcttgtgagaggca

SEQ ID NO: 16894 - DNA, 20 bp, Artificial Sequence
  chemically synthesized
cttgtgagaggcaaggaatt

SEQ ID NO: 16895 - DNA, 20 bp, Artificial Sequence
  chemically synthesized
ataatacttttgactatatg

SEQ ID NO: 16896 - DNA, 20 bp, Artificial Sequence
  chemically synthesized
aatacttttgactatatgtg

SEQ ID NO: 16897 - DNA, 20 bp, Artificial Sequence
  chemically synthesized
ttgactatatgtggagaatc

SEQ ID NO: 16898 - DNA, 20 bp, Artificial Sequence
  chemically synthesized
tgactatatgtggagaatca

SEQ ID NO: 16899 - DNA, 20 bp, Artificial Sequence
  chemically synthesized
atgtggagaatcaaggaaca

SEQ ID NO: 16900 - DNA, 20 bp, Artificial Sequence
  chemically synthesized
gagaatcaaggaacatagtg

SEQ ID NO: 16901 - DNA, 20 bp, Artificial Sequence
  chemically synthesized
atcaaggaacatagtgaagt

SEQ ID NO: 16902 - DNA, 20 bp, Artificial Sequence
  chemically synthesized
aggaacatagtgaagttggt

SEQ ID NO: 16903 - DNA, 20 bp, Artificial Sequence
  chemically synthesized
gaagttggttggttgcttgt

SEQ ID NO: 16904 - DNA, 20 bp, Artificial Sequence
  chemically synthesized
ttggttgcttgtaagttcgc

SEQ ID NO: 16905 - DNA, 20 bp, Artificial Sequence
  chemically synthesized
gcttgtaagttcgctggaca

SEQ ID NO: 16906 - DNA, 20 bp, Artificial Sequence
  chemically synthesized
ttcgctggacaaagtgatga

SEQ ID NO: 16907 - DNA, 20 bp, Artificial Sequence
  chemically synthesized
atgaaagaaaatgatgaact

SEQ ID NO: 16908 - DNA, 20 bp, Artificial Sequence
  chemically synthesized
tgaaagaaaatgatgaactc

SEQ ID NO: 16909 - DNA, 20 bp, Artificial Sequence
  chemically synthesized
aaagaaaatgatgaactcag

SEQ ID NO: 16910 - DNA, 20 bp, Artificial Sequence
  chemically synthesized
tcaggagtatatcaactctc

SEQ ID NO: 16911 - DNA, 20 bp, Artificial Sequence
  chemically synthesized
ctttgtgccataatcttatt

SEQ ID NO: 16912 - DNA, 20 bp, Artificial Sequence
  chemically synthesized
ttgtgccataatcttatttg

SEQ ID NO: 16913 - DNA, 20 bp, Artificial Sequence
  chemically synthesized
gtgccataatcttatttgga

SEQ ID NO: 16914 - DNA, 20 bp, Artificial Sequence
  chemically synthesized
tgctcacctttcacttccac

SEQ ID NO: 16915 - DNA, 20 bp, Artificial Sequence
  chemically synthesized
ttcacttccacaagatatca

SEQ ID NO: 16916 - DNA, 20 bp, Artificial Sequence
  chemically synthesized
acttccacaagatatcacag

SEQ ID NO: 16917 - DNA, 20 bp, Artificial Sequence
  chemically synthesized
tacattgatgacatgctgac

SEQ ID NO: 16918 - DNA, 20 bp, Artificial Sequence
  chemically synthesized
gatgacatgctgactggaac

SEQ ID NO: 16919 - DNA, 20 bp, Artificial Sequence
  chemically synthesized
acatgctgactggaactagt

SEQ ID NO: 16920 - DNA, 20 bp, Artificial Sequence
  chemically synthesized
gctgactggaactagtgagc

SEQ ID NO: 16921 - DNA, 20 bp, Artificial Sequence
  chemically synthesized
gactggaactagtgagcaag

SEQ ID NO: 16922 - DNA, 20 bp, Artificial Sequence
  chemically synthesized
tggaactagtgagcaagaag

SEQ ID NO: 16923 - DNA, 20 bp, Artificial Sequence
  chemically synthesized
gcaagaagtagcaaacacac

SEQ ID NO: 16924 - DNA, 20 bp, Artificial Sequence
  chemically synthesized
aacacactggatttattgat

SEQ ID NO: 16925 - DNA, 20 bp, Artificial Sequence
  chemically synthesized
atttattgatgagacatttg

SEQ ID NO: 16926 - DNA, 20 bp, Artificial Sequence
  chemically synthesized
tttattgatgagacatttgt

SEQ ID NO: 16927 - DNA, 20 bp, Artificial Sequence
  chemically synthesized
ttgatgagacatttgtggga

SEQ ID NO: 16928 - DNA, 20 bp, Artificial Sequence
  chemically synthesized
gatgagacatttgtgggaca

SEQ ID NO: 16929 - DNA, 20 bp, Artificial Sequence
  chemically synthesized
atgagacatttgtgggacag

SEQ ID NO: 16930 - DNA, 20 bp, Artificial Sequence
  chemically synthesized
gacatttgtgggacagagga

SEQ ID NO: 16931 - DNA, 20 bp, Artificial Sequence
  chemically synthesized
acatttgtgggacagaggat

SEQ ID NO: 16932 - DNA, 20 bp, Artificial Sequence
  chemically synthesized
gaaataaatctgattaaatt

SEQ ID NO: 16933 - DNA, 20 bp, Artificial Sequence
  chemically synthesized
aaataaatctgattaaattc

SEQ ID NO: 16934 - DNA, 20 bp, Artificial Sequence
  chemically synthesized
aataaatctgattaaattca

SEQ ID NO: 16935 - DNA, 20 bp, Artificial Sequence
  chemically synthesized
aattcagggaccttctacct

SEQ ID NO: 16936 - DNA, 20 bp, Artificial Sequence
  chemically synthesized
ttctacctcagtaaaattta

SEQ ID NO: 16937 - DNA, 20 bp, Artificial Sequence
  chemically synthesized
tctacctcagtaaaatttat

SEQ ID NO: 16938 - DNA, 20 bp, Artificial Sequence
  chemically synthesized
ctacctcagtaaaatttata

SEQ ID NO: 16939 - DNA, 20 bp, Artificial Sequence
  chemically synthesized
tacctcagtaaaatttatag

SEQ ID NO: 16940 - DNA, 20 bp, Artificial Sequence
  chemically synthesized
taaaatttataggggtccaa

SEQ ID NO: 16941 - DNA, 20 bp, Artificial Sequence
  chemically synthesized
tttataggggtccaatggtt

SEQ ID NO: 16942 - DNA, 20 bp, Artificial Sequence
  chemically synthesized
ttataggggtccaatggttt

SEQ ID NO: 16943 - DNA, 20 bp, Artificial Sequence
  chemically synthesized
tataggggtccaatggtttg

SEQ ID NO: 16944 - DNA, 20 bp, Artificial Sequence
  chemically synthesized
ccaatggtttggggctcttt

SEQ ID NO: 16945 - DNA, 20 bp, Artificial Sequence
  chemically synthesized
tctttgagatattccttcta

SEQ ID NO: 16946 - DNA, 20 bp, Artificial Sequence
  chemically synthesized
gagatattccttctaaagtg

SEQ ID NO: 16947 - DNA, 20 bp, Artificial Sequence
  chemically synthesized
agatattccttctaaagtga

SEQ ID NO: 16948 - DNA, 20 bp, Artificial Sequence
  chemically synthesized
gaaggataatttgctgcatt

SEQ ID NO: 16949 - DNA, 20 bp, Artificial Sequence
  chemically synthesized
atttggccactcttacaacc

SEQ ID NO: 16950 - DNA, 20 bp, Artificial Sequence
  chemically synthesized
ccactcttacaaccaagaaa

SEQ ID NO: 16951 - DNA, 20 bp, Artificial Sequence
  chemically synthesized
cactcttacaaccaagaaat

SEQ ID NO: 16952 - DNA, 20 bp, Artificial Sequence
  chemically synthesized
caagaaataggcacaacgcc

SEQ ID NO: 16953 - DNA, 20 bp, Artificial Sequence
  chemically synthesized
gaaataggcacaacgcctag

SEQ ID NO: 16954 - DNA, 20 bp, Artificial Sequence
  chemically synthesized
aaataggcacaacgcctagt

SEQ ID NO: 16955 - DNA, 20 bp, Artificial Sequence
  chemically synthesized
caacgcctagtgggcctatt

SEQ ID NO: 16956 - DNA, 20 bp, Artificial Sequence
  chemically synthesized
tagtgggcctatttggattt

SEQ ID NO: 16957 - DNA, 20 bp, Artificial Sequence
  chemically synthesized
gtgggcctatttggattttg

SEQ ID NO: 16958 - DNA, 20 bp, Artificial Sequence
  chemically synthesized
tgggcctatttggattttgg

SEQ ID NO: 16959 - DNA, 20 bp, Artificial Sequence
  chemically synthesized
gaggcaacatattcctgatt

SEQ ID NO: 16960 - DNA, 20 bp, Artificial Sequence
  chemically synthesized
aggcaacatattcctgattt

SEQ ID NO: 16961 - DNA, 20 bp, Artificial Sequence
  chemically synthesized
ctgatttgggtgtgttactc

SEQ ID NO: 16962 - DNA, 20 bp, Artificial Sequence
  chemically synthesized
gttactctggcccatttatc

SEQ ID NO: 16963 - DNA, 20 bp, Artificial Sequence
  chemically synthesized
ccatttatcgagtgatccaa

SEQ ID NO: 16964 - DNA, 20 bp, Artificial Sequence
  chemically synthesized
catttatcgagtgatccaaa

SEQ ID NO: 16965 - DNA, 20 bp, Artificial Sequence
  chemically synthesized
cgagtgatccaaaaggctgc

SEQ ID NO: 16966 - DNA, 20 bp, Artificial Sequence
  chemically synthesized
tccaaaaggctgccagtttt

SEQ ID NO: 16967 - DNA, 20 bp, Artificial Sequence
  chemically synthesized
aaaaggctgccagttttgag

SEQ ID NO: 16968 - DNA, 20 bp, Artificial Sequence
  chemically synthesized
aaggctgccagttttgagtg

SEQ ID NO: 16969 - DNA, 20 bp, Artificial Sequence
  chemically synthesized
tgccagttttgagtggagtc

SEQ ID NO: 16970 - DNA, 20 bp, Artificial Sequence
  chemically synthesized
gttttgagtggagtccagaa

SEQ ID NO: 16971 - DNA, 20 bp, Artificial Sequence
  chemically synthesized
ttgagtggagtccagaacag

SEQ ID NO: 16972 - DNA, 20 bp, Artificial Sequence
  chemically synthesized
tgagtggagtccagaacaga

SEQ ID NO: 16973 - DNA, 20 bp, Artificial Sequence
  chemically synthesized
cagaacagaaggctctgcca

SEQ ID NO: 16974 - DNA, 20 bp, Artificial Sequence
  chemically synthesized
agaacagaaggctctgccac

SEQ ID NO: 16975 - DNA, 20 bp, Artificial Sequence
  chemically synthesized
agaaggctctgccacaggtc

SEQ ID NO: 16976 - DNA, 20 bp, Artificial Sequence
  chemically synthesized
gaaggctctgccacaggtcc

SEQ ID NO: 16977 - DNA, 20 bp, Artificial Sequence
  chemically synthesized
acaggtccaggctgctgtgc

SEQ ID NO: 16978 - DNA, 20 bp, Artificial Sequence
  chemically synthesized
gtgcaagctgctatgccact

SEQ ID NO: 16979 - DNA, 20 bp, Artificial Sequence
  chemically synthesized
tgcaagctgctatgccactt

SEQ ID NO: 16980 - DNA, 20 bp, Artificial Sequence
  chemically synthesized
gccacttgggccatatgacc

SEQ ID NO: 16981 - DNA, 20 bp, Artificial Sequence
  chemically synthesized
acttgggccatatgacctag

SEQ ID NO: 16982 - DNA, 20 bp, Artificial Sequence
  chemically synthesized
tagcagatccaatgatgctt

SEQ ID NO: 16983 - DNA, 20 bp, Artificial Sequence
  chemically synthesized
agcagatccaatgatgcttg

SEQ ID NO: 16984 - DNA, 20 bp, Artificial Sequence
  chemically synthesized
tccaatgatgcttgaggtgt

SEQ ID NO: 16985 - DNA, 20 bp, Artificial Sequence
  chemically synthesized
gatgcttgaggtgtcagtgc

SEQ ID NO: 16986 - DNA, 20 bp, Artificial Sequence
  chemically synthesized
cttgaggtgtcagtgccaga

SEQ ID NO: 16987 - DNA, 20 bp, Artificial Sequence
  chemically synthesized
ttgaggtgtcagtgccagat

SEQ ID NO: 16988 - DNA, 20 bp, Artificial Sequence
  chemically synthesized
tgaggtgtcagtgccagata

SEQ ID NO: 16989 - DNA, 20 bp, Artificial Sequence
  chemically synthesized
tgccagatagggatgctgtt

SEQ ID NO: 16990 - DNA, 20 bp, Artificial Sequence
  chemically synthesized
ccagatagggatgctgtttg

SEQ ID NO: 16991 - DNA, 20 bp, Artificial Sequence
  chemically synthesized
gggatgctgtttggagcatt

SEQ ID NO: 16992 - DNA, 20 bp, Artificial Sequence
  chemically synthesized
atgctgtttggagcatttgg

SEQ ID NO: 16993 - DNA, 20 bp, Artificial Sequence
  chemically synthesized
tgctgtttggagcatttggc

SEQ ID NO: 16994 - DNA, 20 bp, Artificial Sequence
  chemically synthesized
gcatttggcaggctgaatca

SEQ ID NO: 16995 - DNA, 20 bp, Artificial Sequence
  chemically synthesized
tttggcaggctgaatcacag

SEQ ID NO: 16996 - DNA, 20 bp, Artificial Sequence
  chemically synthesized
tggcaggctgaatcacagcg

SEQ ID NO: 16997 - DNA, 20 bp, Artificial Sequence
  chemically synthesized
ggcaggctgaatcacagcgg

SEQ ID NO: 16998 - DNA, 20 bp, Artificial Sequence
  chemically synthesized
tgaatcacagcggaggcctc

SEQ ID NO: 16999 - DNA, 20 bp, Artificial Sequence
  chemically synthesized
gaatcacagcggaggcctct

SEQ ID NO: 17000 - DNA, 20 bp, Artificial Sequence
  chemically synthesized
agcggaggcctctaggattt

SEQ ID NO: 17001 - DNA, 20 bp, Artificial Sequence
  chemically synthesized
cggaggcctctaggattttg

SEQ ID NO: 17002 - DNA, 20 bp, Artificial Sequence
  chemically synthesized
ggcctctaggattttggagc

SEQ ID NO: 17003 - DNA, 20 bp, Artificial Sequence
  chemically synthesized
gcctctaggattttggagca

SEQ ID NO: 17004 - DNA, 20 bp, Artificial Sequence
  chemically synthesized
caaggccctgccatcttctg

SEQ ID NO: 17005 - DNA, 20 bp, Artificial Sequence
  chemically synthesized
tgcagataactactctcttt

SEQ ID NO: 17006 - DNA, 20 bp, Artificial Sequence
  chemically synthesized
gcagataactactctctttt

SEQ ID NO: 17007 - DNA, 20 bp, Artificial Sequence
  chemically synthesized
cagataactactctctttta

SEQ ID NO: 17008 - DNA, 20 bp, Artificial Sequence
  chemically synthesized
gataactactctcttttagg

SEQ ID NO: 17009 - DNA, 20 bp, Artificial Sequence
  chemically synthesized
actactctcttttagggaga

SEQ ID NO: 17010 - DNA, 20 bp, Artificial Sequence
  chemically synthesized
tcttttagggagaaagctct

SEQ ID NO: 17011 - DNA, 20 bp, Artificial Sequence
  chemically synthesized
gaaagctcttggcctgttac

SEQ ID NO: 17012 - DNA, 20 bp, Artificial Sequence
  chemically synthesized
aaagctcttggcctgttact

SEQ ID NO: 17013 - DNA, 20 bp, Artificial Sequence
  chemically synthesized
cttggcctgttactgggctt

SEQ ID NO: 17014 - DNA, 20 bp, Artificial Sequence
  chemically synthesized
ggcctgttactgggctttgg

SEQ ID NO: 17015 - DNA, 20 bp, Artificial Sequence
  chemically synthesized
gaaacgaaatatttgactat

SEQ ID NO: 17016 - DNA, 20 bp, Artificial Sequence
  chemically synthesized
atatttgactatgagtcatc

SEQ ID NO: 17017 - DNA, 20 bp, Artificial Sequence
  chemically synthesized
ctgaactgcctatcatgaac

SEQ ID NO: 17018 - DNA, 20 bp, Artificial Sequence
  chemically synthesized
tgaactgcctatcatgaact

SEQ ID NO: 17019 - DNA, 20 bp, Artificial Sequence
  chemically synthesized
tgggtgctttctgatccatc

SEQ ID NO: 17020 - DNA, 20 bp, Artificial Sequence
  chemically synthesized
ttctgatccatctagccata

SEQ ID NO: 17021 - DNA, 20 bp, Artificial Sequence
  chemically synthesized
tgatccatctagccataaag

SEQ ID NO: 17022 - DNA, 20 bp, Artificial Sequence
  chemically synthesized
gatccatctagccataaagt

SEQ ID NO: 17023 - DNA, 20 bp, Artificial Sequence
  chemically synthesized
gccataaagtgggctgtgca

SEQ ID NO: 17024 - DNA, 20 bp, Artificial Sequence
  chemically synthesized
ataaagtgggctgtgcacag

SEQ ID NO: 17025 - DNA, 20 bp, Artificial Sequence
  chemically synthesized
tgtgcacagcagcattgcat

SEQ ID NO: 17026 - DNA, 20 bp, Artificial Sequence
  chemically synthesized
agcagcattgcatcagcaaa

SEQ ID NO: 17027 - DNA, 20 bp, Artificial Sequence
  chemically synthesized
agcattgcatcagcaaatgg

SEQ ID NO: 17028 - DNA, 20 bp, Artificial Sequence
  chemically synthesized
attgcatcagcaaatggaag

SEQ ID NO: 17029 - DNA, 20 bp, Artificial Sequence
  chemically synthesized
ggaagtggtatatatgcgat

SEQ ID NO: 17030 - DNA, 20 bp, Artificial Sequence
  chemically synthesized
gaagtggtatatatgcgatt

SEQ ID NO: 17031 - DNA, 20 bp, Artificial Sequence
  chemically synthesized
gtatatatgcgattgggctt

SEQ ID NO: 17032 - DNA, 20 bp, Artificial Sequence
  chemically synthesized
tatatgcgattgggcttgag

SEQ ID NO: 17033 - DNA, 20 bp, Artificial Sequence
  chemically synthesized
ttgggcttgagcagatcctg

SEQ ID NO: 17034 - DNA, 20 bp, Artificial Sequence
  chemically synthesized
tgggcttgagcagatcctga

SEQ ID NO: 17035 - DNA, 20 bp, Artificial Sequence
  chemically synthesized
tgagcagatcctgaaggcac

SEQ ID NO: 17036 - DNA, 20 bp, Artificial Sequence
  chemically synthesized
cagatcctgaaggcactagt

SEQ ID NO: 17037 - DNA, 20 bp, Artificial Sequence
  chemically synthesized
aaggcactagtaagttacat

SEQ ID NO: 17038 - DNA, 20 bp, Artificial Sequence
  chemically synthesized
cactagtaagttacatgaga

SEQ ID NO: 17039 - DNA, 20 bp, Artificial Sequence
  chemically synthesized
actagtaagttacatgagaa

SEQ ID NO: 17040 - DNA, 20 bp, Artificial Sequence
  chemically synthesized
ctagtaagttacatgagaaa

SEQ ID NO: 17041 - DNA, 20 bp, Artificial Sequence
  chemically synthesized
tagtaagttacatgagaaag

SEQ ID NO: 17042 - DNA, 20 bp, Artificial Sequence
  chemically synthesized
gaaaggggctcaaatgccca

SEQ ID NO: 17043 - DNA, 20 bp, Artificial Sequence
  chemically synthesized
acacactgctttctctccct

SEQ ID NO: 17044 - DNA, 20 bp, Artificial Sequence
  chemically synthesized
tctccctgagactgcaccga

SEQ ID NO: 17045 - DNA, 20 bp, Artificial Sequence
  chemically synthesized
agactgcaccgatggtctca

SEQ ID NO: 17046 - DNA, 20 bp, Artificial Sequence
  chemically synthesized
gactgcaccgatggtctcat

SEQ ID NO: 17047 - DNA, 20 bp, Artificial Sequence
  chemically synthesized
actgcaccgatggtctcatg

SEQ ID NO: 17048 - DNA, 20 bp, Artificial Sequence
  chemically synthesized
tgcaccgatggtctcatggg

SEQ ID NO: 17049 - DNA, 20 bp, Artificial Sequence
  chemically synthesized
catggggagttccctatgat

SEQ ID NO: 17050 - DNA, 20 bp, Artificial Sequence
  chemically synthesized
agttccctatgatcagctga

SEQ ID NO: 17051 - DNA, 20 bp, Artificial Sequence
  chemically synthesized
ttccctatgatcagctgaca

SEQ ID NO: 17052 - DNA, 20 bp, Artificial Sequence
  chemically synthesized
tccctatgatcagctgacag

SEQ ID NO: 17053 - DNA, 20 bp, Artificial Sequence
  chemically synthesized
ctatgatcagctgacagagg

SEQ ID NO: 17054 - DNA, 20 bp, Artificial Sequence
  chemically synthesized
atgatcagctgacagaggaa

SEQ ID NO: 17055 - DNA, 20 bp, Artificial Sequence
  chemically synthesized
atcagctgacagaggaagag

SEQ ID NO: 17056 - DNA, 20 bp, Artificial Sequence
  chemically synthesized
ctgacagaggaagagaagac

SEQ ID NO: 17057 - DNA, 20 bp, Artificial Sequence
  chemically synthesized
tgacagaggaagagaagact

SEQ ID NO: 17058 - DNA, 20 bp, Artificial Sequence
  chemically synthesized
aggaagagaagactaggtcc

SEQ ID NO: 17059 - DNA, 20 bp, Artificial Sequence
  chemically synthesized
gaagactaggtcctggttca

SEQ ID NO: 17060 - DNA, 20 bp, Artificial Sequence
  chemically synthesized
actaggtcctggttcacaga

SEQ ID NO: 17061 - DNA, 20 bp, Artificial Sequence
  chemically synthesized
agatagttctgcacgatatg

SEQ ID NO: 17062 - DNA, 20 bp, Artificial Sequence
  chemically synthesized
gatagttctgcacgatatgc

SEQ ID NO: 17063 - DNA, 20 bp, Artificial Sequence
  chemically synthesized
gatatgcaggcaccacccaa

SEQ ID NO: 17064 - DNA, 20 bp, Artificial Sequence
  chemically synthesized
atgcaggcaccacccaaaag

SEQ ID NO: 17065 - DNA, 20 bp, Artificial Sequence
  chemically synthesized
aggcaccacccaaaagtgga

SEQ ID NO: 17066 - DNA, 20 bp, Artificial Sequence
  chemically synthesized
cacccaaaagtggacagccg

SEQ ID NO: 17067 - DNA, 20 bp, Artificial Sequence
  chemically synthesized
agtggacagccgcagcacta

SEQ ID NO: 17068 - DNA, 20 bp, Artificial Sequence
  chemically synthesized
gcagcactacagcccctttc

SEQ ID NO: 17069 - DNA, 20 bp, Artificial Sequence
  chemically synthesized
cagcactacagcccctttct

SEQ ID NO: 17070 - DNA, 20 bp, Artificial Sequence
  chemically synthesized
ccctttctaggacatccctg

SEQ ID NO: 17071 - DNA, 20 bp, Artificial Sequence
  chemically synthesized
cctttctaggacatccctga

SEQ ID NO: 17072 - DNA, 20 bp, Artificial Sequence
  chemically synthesized
aggacatccctgaaggacaa

SEQ ID NO: 17073 - DNA, 20 bp, Artificial Sequence
  chemically synthesized
atccctgaaggacaacggtg

SEQ ID NO: 17074 - DNA, 20 bp, Artificial Sequence
  chemically synthesized
tccctgaaggacaacggtga

SEQ ID NO: 17075 - DNA, 20 bp, Artificial Sequence
  chemically synthesized
ccctgaaggacaacggtgaa

SEQ ID NO: 17076 - DNA, 20 bp, Artificial Sequence
  chemically synthesized
acggtgaagggaaatcttcc

SEQ ID NO: 17077 - DNA, 20 bp, Artificial Sequence
  chemically synthesized
tgaagggaaatcttcctagt

SEQ ID NO: 17078 - DNA, 20 bp, Artificial Sequence
  chemically synthesized
agggaaatcttcctagttgg

SEQ ID NO: 17079 - DNA, 20 bp, Artificial Sequence
  chemically synthesized
ttcctagttggcagaacttt

SEQ ID NO: 17080 - DNA, 20 bp, Artificial Sequence
  chemically synthesized
ctagttggcagaactttgag

SEQ ID NO: 17081 - DNA, 20 bp, Artificial Sequence
  chemically synthesized
agaactttgagcagtgtgcc

SEQ ID NO: 17082 - DNA, 20 bp, Artificial Sequence
  chemically synthesized
gcctggttgtgcactttgca

SEQ ID NO: 17083 - DNA, 20 bp, Artificial Sequence
  chemically synthesized
tggttgtgcactttgcacag

SEQ ID NO: 17084 - DNA, 20 bp, Artificial Sequence
  chemically synthesized
ggttgtgcactttgcacaga

SEQ ID NO: 17085 - DNA, 20 bp, Artificial Sequence
  chemically synthesized
ttgtgcactttgcacagaag

SEQ ID NO: 17086 - DNA, 20 bp, Artificial Sequence
  chemically synthesized
actttgcacagaaggagaaa

SEQ ID NO: 17087 - DNA, 20 bp, Artificial Sequence
  chemically synthesized
tgcacagaaggagaaatggc

SEQ ID NO: 17088 - DNA, 20 bp, Artificial Sequence
  chemically synthesized
tgcgattatatacttattca

SEQ ID NO: 17089 - DNA, 20 bp, Artificial Sequence
  chemically synthesized
gcgattatatacttattcat

SEQ ID NO: 17090 - DNA, 20 bp, Artificial Sequence
  chemically synthesized
atatacttattcatgggctg

SEQ ID NO: 17091 - DNA, 20 bp, Artificial Sequence
  chemically synthesized
ttattcatgggctgtagcca

SEQ ID NO: 17092 - DNA, 20 bp, Artificial Sequence
  chemically synthesized
tattcatgggctgtagccaa

SEQ ID NO: 17093 - DNA, 20 bp, Artificial Sequence
  chemically synthesized
atgggctgtagccaaaggtt

SEQ ID NO: 17094 - DNA, 20 bp, Artificial Sequence
  chemically synthesized
gctgtagccaaaggtttggc

SEQ ID NO: 17095 - DNA, 20 bp, Artificial Sequence
  chemically synthesized
tagccaaaggtttggctaga

SEQ ID NO: 17096 - DNA, 20 bp, Artificial Sequence
  chemically synthesized
caaaggtttggctagatggt

SEQ ID NO: 17097 - DNA, 20 bp, Artificial Sequence
  chemically synthesized
aaaggtttggctagatggtc

SEQ ID NO: 17098 - DNA, 20 bp, Artificial Sequence
  chemically synthesized
aaggtttggctagatggtca

SEQ ID NO: 17099 - DNA, 20 bp, Artificial Sequence
  chemically synthesized
tggctagatggtcagggact

SEQ ID NO: 17100 - DNA, 20 bp, Artificial Sequence
  chemically synthesized
gatggtcagggacttggaaa

SEQ ID NO: 17101 - DNA, 20 bp, Artificial Sequence
  chemically synthesized
ggacttggaaaaagcatgac

SEQ ID NO: 17102 - DNA, 20 bp, Artificial Sequence
  chemically synthesized
tgactggaaaattgatgaca

SEQ ID NO: 17103 - DNA, 20 bp, Artificial Sequence
  chemically synthesized
aaattgatgacaaagaaatt

SEQ ID NO: 17104 - DNA, 20 bp, Artificial Sequence
  chemically synthesized
aattgatgacaaagaaattt

SEQ ID NO: 17105 - DNA, 20 bp, Artificial Sequence
  chemically synthesized
attgatgacaaagaaatttg

SEQ ID NO: 17106 - DNA, 20 bp, Artificial Sequence
  chemically synthesized
gatgacaaagaaatttgggg

SEQ ID NO: 17107 - DNA, 20 bp, Artificial Sequence
  chemically synthesized
tgacaaagaaatttggggaa

SEQ ID NO: 17108 - DNA, 20 bp, Artificial Sequence
  chemically synthesized
gacaaagaaatttggggaag

SEQ ID NO: 17109 - DNA, 20 bp, Artificial Sequence
  chemically synthesized
aaatttggggaagaggtatg

SEQ ID NO: 17110 - DNA, 20 bp, Artificial Sequence
  chemically synthesized
ttggggaagaggtatgtgga

SEQ ID NO: 17111 - DNA, 20 bp, Artificial Sequence
  chemically synthesized
tgtggatggacctctatgat

SEQ ID NO: 17112 - DNA, 20 bp, Artificial Sequence
  chemically synthesized
atgattagtcaaaaactaca

SEQ ID NO: 17113 - DNA, 20 bp, Artificial Sequence
  chemically synthesized
aagatattttcatcccatgt

SEQ ID NO: 17114 - DNA, 20 bp, Artificial Sequence
  chemically synthesized
cccatgtgagtgctcaccaa

SEQ ID NO: 17115 - DNA, 20 bp, Artificial Sequence
  chemically synthesized
ccatgtgagtgctcaccaat

SEQ ID NO: 17116 - DNA, 20 bp, Artificial Sequence
  chemically synthesized
tgctcaccaatgggtgacct

SEQ ID NO: 17117 - DNA, 20 bp, Artificial Sequence
  chemically synthesized
tcaccaatgggtgacctcag

SEQ ID NO: 17118 - DNA, 20 bp, Artificial Sequence
  chemically synthesized
ccaatgggtgacctcagcag

SEQ ID NO: 17119 - DNA, 20 bp, Artificial Sequence
  chemically synthesized
aatgggtgacctcagcagaa

SEQ ID NO: 17120 - DNA, 20 bp, Artificial Sequence
  chemically synthesized
atgggtgacctcagcagaag

SEQ ID NO: 17121 - DNA, 20 bp, Artificial Sequence
  chemically synthesized
agaagaggattttaataatc

SEQ ID NO: 17122 - DNA, 20 bp, Artificial Sequence
  chemically synthesized
agaggattttaataatcaag

SEQ ID NO: 17123 - DNA, 20 bp, Artificial Sequence
  chemically synthesized
gattttaataatcaagtgga

SEQ ID NO: 17124 - DNA, 20 bp, Artificial Sequence
  chemically synthesized
attttaataatcaagtggat

SEQ ID NO: 17125 - DNA, 20 bp, Artificial Sequence
  chemically synthesized
ggataggatgatcaattctg

SEQ ID NO: 17126 - DNA, 20 bp, Artificial Sequence
  chemically synthesized
tcaattctgtggacaccact

SEQ ID NO: 17127 - DNA, 20 bp, Artificial Sequence
  chemically synthesized
gacaccactcagccttttcc

SEQ ID NO: 17128 - DNA, 20 bp, Artificial Sequence
  chemically synthesized
acaccactcagccttttccc

SEQ ID NO: 17129 - DNA, 20 bp, Artificial Sequence
  chemically synthesized
ccactcatgtcatcgtccaa

SEQ ID NO: 17130 - DNA, 20 bp, Artificial Sequence
  chemically synthesized
gtccaatggacccatgaaca

SEQ ID NO: 17131 - DNA, 20 bp, Artificial Sequence
  chemically synthesized
caatggacccatgaacaaag

SEQ ID NO: 17132 - DNA, 20 bp, Artificial Sequence
  chemically synthesized
acccatgaacaaagtggcca

SEQ ID NO: 17133 - DNA, 20 bp, Artificial Sequence
  chemically synthesized
gaacaaagtggccacagttg

SEQ ID NO: 17134 - DNA, 20 bp, Artificial Sequence
  chemically synthesized
aacaaagtggccacagttgc

SEQ ID NO: 17135 - DNA, 20 bp, Artificial Sequence
  chemically synthesized
acaaagtggccacagttgca

SEQ ID NO: 17136 - DNA, 20 bp, Artificial Sequence
  chemically synthesized
agtggccacagttgcaggga

SEQ ID NO: 17137 - DNA, 20 bp, Artificial Sequence
  chemically synthesized
ggccacagttgcagggatgg

SEQ ID NO: 17138 - DNA, 20 bp, Artificial Sequence
  chemically synthesized
gcagggatggaagttatgct

SEQ ID NO: 17139 - DNA, 20 bp, Artificial Sequence
  chemically synthesized
cagggatggaagttatgctt

SEQ ID NO: 17140 - DNA, 20 bp, Artificial Sequence
  chemically synthesized
atggaagttatgcttgggct

SEQ ID NO: 17141 - DNA, 20 bp, Artificial Sequence
  chemically synthesized
tatgcttgggctcagcaaca

SEQ ID NO: 17142 - DNA, 20 bp, Artificial Sequence
  chemically synthesized
acatggacttccactcacca

SEQ ID NO: 17143 - DNA, 20 bp, Artificial Sequence
  chemically synthesized
tccactcaccaaagctgacc

SEQ ID NO: 17144 - DNA, 20 bp, Artificial Sequence
  chemically synthesized
caccaaagctgacctggcca

SEQ ID NO: 17145 - DNA, 20 bp, Artificial Sequence
  chemically synthesized
tggccacagccactgcttgc

SEQ ID NO: 17146 - DNA, 20 bp, Artificial Sequence
  chemically synthesized
cagccactgcttgccagcat

SEQ ID NO: 17147 - DNA, 20 bp, Artificial Sequence
  chemically synthesized
gccactgcttgccagcatca

SEQ ID NO: 17148 - DNA, 20 bp, Artificial Sequence
  chemically synthesized
cagcatcagagaccaacact

SEQ ID NO: 17149 - DNA, 20 bp, Artificial Sequence
  chemically synthesized
ccaacactaagcccttgata

SEQ ID NO: 17150 - DNA, 20 bp, Artificial Sequence
  chemically synthesized
cttgatatggcaccattcct

SEQ ID NO: 17151 - DNA, 20 bp, Artificial Sequence
  chemically synthesized
ttgatatggcaccattcctc

SEQ ID NO: 17152 - DNA, 20 bp, Artificial Sequence
  chemically synthesized
tgatatggcaccattcctcg

SEQ ID NO: 17153 - DNA, 20 bp, Artificial Sequence
  chemically synthesized
gcaccattcctcggggtgat

SEQ ID NO: 17154 - DNA, 20 bp, Artificial Sequence
  chemically synthesized
cattcctcggggtgatcagc

SEQ ID NO: 17155 - DNA, 20 bp, Artificial Sequence
  chemically synthesized
ggggtgatcagccagctacc

SEQ ID NO: 17156 - DNA, 20 bp, Artificial Sequence
  chemically synthesized
gtgatcagccagctacctgg

SEQ ID NO: 17157 - DNA, 20 bp, Artificial Sequence
  chemically synthesized
atcagccagctacctggtgg

SEQ ID NO: 17158 - DNA, 20 bp, Artificial Sequence
  chemically synthesized
tcagccagctacctggtggc

SEQ ID NO: 17159 - DNA, 20 bp, Artificial Sequence
  chemically synthesized
tggtggcaggttgattatat

SEQ ID NO: 17160 - DNA, 20 bp, Artificial Sequence
  chemically synthesized
atattggacctcttccatca

SEQ ID NO: 17161 - DNA, 20 bp, Artificial Sequence
  chemically synthesized
tggacctcttccatcatgga

SEQ ID NO: 17162 - DNA, 20 bp, Artificial Sequence
  chemically synthesized
ggacctcttccatcatggaa

SEQ ID NO: 17163 - DNA, 20 bp, Artificial Sequence
  chemically synthesized
gacctcttccatcatggaaa

SEQ ID NO: 17164 - DNA, 20 bp, Artificial Sequence
  chemically synthesized
ctcttccatcatggaaaggg

SEQ ID NO: 17165 - DNA, 20 bp, Artificial Sequence
  chemically synthesized
cttccatcatggaaagggca

SEQ ID NO: 17166 - DNA, 20 bp, Artificial Sequence
  chemically synthesized
ttccatcatggaaagggcag

SEQ ID NO: 17167 - DNA, 20 bp, Artificial Sequence
  chemically synthesized
gggcagaggcttgtcctcac

SEQ ID NO: 17168 - DNA, 20 bp, Artificial Sequence
  chemically synthesized
gaggcttgtcctcactggaa

SEQ ID NO: 17169 - DNA, 20 bp, Artificial Sequence
  chemically synthesized
actggaatagacacttactc

SEQ ID NO: 17170 - DNA, 20 bp, Artificial Sequence
  chemically synthesized
atagacacttactctggata

SEQ ID NO: 17171 - DNA, 20 bp, Artificial Sequence
  chemically synthesized
tagacacttactctggatat

SEQ ID NO: 17172 - DNA, 20 bp, Artificial Sequence
  chemically synthesized
ctgaactcaatgcttatgcc

SEQ ID NO: 17173 - DNA, 20 bp, Artificial Sequence
  chemically synthesized
tatgccaagactaccatcca

SEQ ID NO: 17174 - DNA, 20 bp, Artificial Sequence
  chemically synthesized
gactaccatccatggaatca

SEQ ID NO: 17175 - DNA, 20 bp, Artificial Sequence
  chemically synthesized
gaatgccgtatccactgtca

SEQ ID NO: 17176 - DNA, 20 bp, Artificial Sequence
  chemically synthesized
cactgtcatggtattccaca

SEQ ID NO: 17177 - DNA, 20 bp, Artificial Sequence
  chemically synthesized
acacagcattgcttctgacc

SEQ ID NO: 17178 - DNA, 20 bp, Artificial Sequence
  chemically synthesized
tgaccaagccactcacttta

SEQ ID NO: 17179 - DNA, 20 bp, Artificial Sequence
  chemically synthesized
agccactcactttatggcta

SEQ ID NO: 17180 - DNA, 20 bp, Artificial Sequence
  chemically synthesized
cactcactttatggctaaag

SEQ ID NO: 17181 - DNA, 20 bp, Artificial Sequence
  chemically synthesized
ttatggctaaagaagtgtga

SEQ ID NO: 17182 - DNA, 20 bp, Artificial Sequence
  chemically synthesized
tggctaaagaagtgtgacag

SEQ ID NO: 17183 - DNA, 20 bp, Artificial Sequence
  chemically synthesized
ggctaaagaagtgtgacagt

SEQ ID NO: 17184 - DNA, 20 bp, Artificial Sequence
  chemically synthesized
tgacagtgggctcatgctca

SEQ ID NO: 17185 - DNA, 20 bp, Artificial Sequence
  chemically synthesized
ctcatgctcatggaatttac

SEQ ID NO: 17186 - DNA, 20 bp, Artificial Sequence
  chemically synthesized
ccatgatccctatcatcctg

SEQ ID NO: 17187 - DNA, 20 bp, Artificial Sequence
  chemically synthesized
tgatccctatcatcctgaag

SEQ ID NO: 17188 - DNA, 20 bp, Artificial Sequence
  chemically synthesized
atcctgaagcagcttttgaa

SEQ ID NO: 17189 - DNA, 20 bp, Artificial Sequence
  chemically synthesized
agcttttgaatggccttttg

SEQ ID NO: 17190 - DNA, 20 bp, Artificial Sequence
  chemically synthesized
gtcacgattacaatgccaac

SEQ ID NO: 17191 - DNA, 20 bp, Artificial Sequence
  chemically synthesized
tcacgattacaatgccaact

SEQ ID NO: 17192 - DNA, 20 bp, Artificial Sequence
  chemically synthesized
aactaggtgacaatactttg

SEQ ID NO: 17193 - DNA, 20 bp, Artificial Sequence
  chemically synthesized
actaggtgacaatactttgc

SEQ ID NO: 17194 - DNA, 20 bp, Artificial Sequence
  chemically synthesized
gtgacaatactttgcaggcc

SEQ ID NO: 17195 - DNA, 20 bp, Artificial Sequence
  chemically synthesized
tgacaatactttgcaggcct

SEQ ID NO: 17196 - DNA, 20 bp, Artificial Sequence
  chemically synthesized
gacaatactttgcaggcctg

SEQ ID NO: 17197 - DNA, 20 bp, Artificial Sequence
  chemically synthesized
tactttgcaggcctggggca

SEQ ID NO: 17198 - DNA, 20 bp, Artificial Sequence
  chemically synthesized
aggcctggggcaaagttctc

SEQ ID NO: 17199 - DNA, 20 bp, Artificial Sequence
  chemically synthesized
cctggggcaaagttctccag

SEQ ID NO: 17200 - DNA, 20 bp, Artificial Sequence
  chemically synthesized
ctggggcaaagttctccaga

SEQ ID NO: 17201 - DNA, 20 bp, Artificial Sequence
  chemically synthesized
aggctgtgtatgctctgaat

SEQ ID NO: 17202 - DNA, 20 bp, Artificial Sequence
  chemically synthesized
ctgaatcagtgtccaatata

SEQ ID NO: 17203 - DNA, 20 bp, Artificial Sequence
  chemically synthesized
atatggtactgtttctccca

SEQ ID NO: 17204 - DNA, 20 bp, Artificial Sequence
  chemically synthesized
ggtactgtttctcccataga

SEQ ID NO: 17205 - DNA, 20 bp, Artificial Sequence
  chemically synthesized
gtactgtttctcccatagac

SEQ ID NO: 17206 - DNA, 20 bp, Artificial Sequence
  chemically synthesized
tctcccatagacaggattca

SEQ ID NO: 17207 - DNA, 20 bp, Artificial Sequence
  chemically synthesized
ctcccatagacaggattcac

SEQ ID NO: 17208 - DNA, 20 bp, Artificial Sequence
  chemically synthesized
atagacaggattcacgggtc

SEQ ID NO: 17209 - DNA, 20 bp, Artificial Sequence
  chemically synthesized
tagacaggattcacgggtcc

SEQ ID NO: 17210 - DNA, 20 bp, Artificial Sequence
  chemically synthesized
attcacgggtccaggaatca

SEQ ID NO: 17211 - DNA, 20 bp, Artificial Sequence
  chemically synthesized
ttcacgggtccaggaatcaa

SEQ ID NO: 17212 - DNA, 20 bp, Artificial Sequence
  chemically synthesized
tcacgggtccaggaatcaaa

SEQ ID NO: 17213 - DNA, 20 bp, Artificial Sequence
  chemically synthesized
cgggtccaggaatcaaaggg

SEQ ID NO: 17214 - DNA, 20 bp, Artificial Sequence
  chemically synthesized
gtccaggaatcaaagggtgg

SEQ ID NO: 17215 - DNA, 20 bp, Artificial Sequence
  chemically synthesized
caggaatcaaagggtggaag

SEQ ID NO: 17216 - DNA, 20 bp, Artificial Sequence
  chemically synthesized
gaatcaaagggtggaagtgg

SEQ ID NO: 17217 - DNA, 20 bp, Artificial Sequence
  chemically synthesized
tcaaagggtggaagtggaag

SEQ ID NO: 17218 - DNA, 20 bp, Artificial Sequence
  chemically synthesized
aagggtggaagtggaagtgg

SEQ ID NO: 17219 - DNA, 20 bp, Artificial Sequence
  chemically synthesized
ggtggaagtggaagtggaag

SEQ ID NO: 17220 - DNA, 20 bp, Artificial Sequence
  chemically synthesized
gcaccactcaccatcacccc

SEQ ID NO: 17221 - DNA, 20 bp, Artificial Sequence
  chemically synthesized
catcacccctagtgttccac

SEQ ID NO: 17222 - DNA, 20 bp, Artificial Sequence
  chemically synthesized
atttttgcttcctgttccca

SEQ ID NO: 17223 - DNA, 20 bp, Artificial Sequence
  chemically synthesized
cccatggcattatgttctgc

SEQ ID NO: 17224 - DNA, 20 bp, Artificial Sequence
  chemically synthesized
ggcattatgttctgctggct

SEQ ID NO: 17225 - DNA, 20 bp, Artificial Sequence
  chemically synthesized
cattatgttctgctggctta

SEQ ID NO: 17226 - DNA, 20 bp, Artificial Sequence
  chemically synthesized
attatgttctgctggcttag

SEQ ID NO: 17227 - DNA, 20 bp, Artificial Sequence
  chemically synthesized
ttctgctggcttagaggtct

SEQ ID NO: 17228 - DNA, 20 bp, Artificial Sequence
  chemically synthesized
tggcttagaggtcttagttc

SEQ ID NO: 17229 - DNA, 20 bp, Artificial Sequence
  chemically synthesized
gcttagaggtcttagttcca

SEQ ID NO: 17230 - DNA, 20 bp, Artificial Sequence
  chemically synthesized
cttagaggtcttagttccag

SEQ ID NO: 17231 - DNA, 20 bp, Artificial Sequence
  chemically synthesized
ttagaggtcttagttccaga

SEQ ID NO: 17232 - DNA, 20 bp, Artificial Sequence
  chemically synthesized
agaggtcttagttccagagg

SEQ ID NO: 17233 - DNA, 20 bp, Artificial Sequence
  chemically synthesized
gaggtcttagttccagaggg

SEQ ID NO: 17234 - DNA, 20 bp, Artificial Sequence
  chemically synthesized
agagggaggaacactgccgc

SEQ ID NO: 17235 - DNA, 20 bp, Artificial Sequence
  chemically synthesized
gagggaggaacactgccgcc

SEQ ID NO: 17236 - DNA, 20 bp, Artificial Sequence
  chemically synthesized
attccattaaactgcaaatt

SEQ ID NO: 17237 - DNA, 20 bp, Artificial Sequence
  chemically synthesized
tgcaaattaagattgccacc

SEQ ID NO: 17238 - DNA, 20 bp, Artificial Sequence
  chemically synthesized
agattgccacctggacactt

SEQ ID NO: 17239 - DNA, 20 bp, Artificial Sequence
  chemically synthesized
gattgccacctggacacttt

SEQ ID NO: 17240 - DNA, 20 bp, Artificial Sequence
  chemically synthesized
tttgggctcctcccaccttt

SEQ ID NO: 17241 - DNA, 20 bp, Artificial Sequence
  chemically synthesized
tcctcccacctttaagtcaa

SEQ ID NO: 17242 - DNA, 20 bp, Artificial Sequence
  chemically synthesized
cctcccacctttaagtcaac

SEQ ID NO: 17243 - DNA, 20 bp, Artificial Sequence
  chemically synthesized
cacctttaagtcaacaggct

SEQ ID NO: 17244 - DNA, 20 bp, Artificial Sequence
  chemically synthesized
ctttaagtcaacaggctaag

SEQ ID NO: 17245 - DNA, 20 bp, Artificial Sequence
  chemically synthesized
ttaagtcaacaggctaagaa

SEQ ID NO: 17246 - DNA, 20 bp, Artificial Sequence
  chemically synthesized
aagtcaacaggctaagaaga

SEQ ID NO: 17247 - DNA, 20 bp, Artificial Sequence
  chemically synthesized
acaggctaagaagagagtta

SEQ ID NO: 17248 - DNA, 20 bp, Artificial Sequence
  chemically synthesized
taagaagagagttacagtgt

SEQ ID NO: 17249 - DNA, 20 bp, Artificial Sequence
  chemically synthesized
gagagttacagtgttggctg

SEQ ID NO: 17250 - DNA, 20 bp, Artificial Sequence
  chemically synthesized
gttggctgcggtgattaacc

SEQ ID NO: 17251 - DNA, 20 bp, Artificial Sequence
  chemically synthesized
ggtgattaacccagactatc

SEQ ID NO: 17252 - DNA, 20 bp, Artificial Sequence
  chemically synthesized
ccagactatcaagatgaaat

SEQ ID NO: 17253 - DNA, 20 bp, Artificial Sequence
  chemically synthesized
atcagtctacaactccacaa

SEQ ID NO: 17254 - DNA, 20 bp, Artificial Sequence
  chemically synthesized
cagtctacaactccacaatg

SEQ ID NO: 17255 - DNA, 20 bp, Artificial Sequence
  chemically synthesized
agtctacaactccacaatgg

SEQ ID NO: 17256 - DNA, 20 bp, Artificial Sequence
  chemically synthesized
tacaactccacaatggaggt

SEQ ID NO: 17257 - DNA, 20 bp, Artificial Sequence
  chemically synthesized
acaactccacaatggaggta

SEQ ID NO: 17258 - DNA, 20 bp, Artificial Sequence
  chemically synthesized
actccacaatggaggtaagg

SEQ ID NO: 17259 - DNA, 20 bp, Artificial Sequence
  chemically synthesized
gaggtaaggaagcgtatgca

SEQ ID NO: 17260 - DNA, 20 bp, Artificial Sequence
  chemically synthesized
ggaagcgtatgcatggaata

SEQ ID NO: 17261 - DNA, 20 bp, Artificial Sequence
  chemically synthesized
gaagcgtatgcatggaatat

SEQ ID NO: 17262 - DNA, 20 bp, Artificial Sequence
  chemically synthesized
agcgtatgcatggaatatag

SEQ ID NO: 17263 - DNA, 20 bp, Artificial Sequence
  chemically synthesized
atggaatataggagatccat

SEQ ID NO: 17264 - DNA, 20 bp, Artificial Sequence
  chemically synthesized
tggaatataggagatccatt

SEQ ID NO: 17265 - DNA, 20 bp, Artificial Sequence
  chemically synthesized
ggaatataggagatccatta

SEQ ID NO: 17266 - DNA, 20 bp, Artificial Sequence
  chemically synthesized
agatccattagggtgtctct

SEQ ID NO: 17267 - DNA, 20 bp, Artificial Sequence
  chemically synthesized
ctcttagttttaccatgtcc

SEQ ID NO: 17268 - DNA, 20 bp, Artificial Sequence
  chemically synthesized
ttttaccatgtcctggaatt

SEQ ID NO: 17269 - DNA, 20 bp, Artificial Sequence
  chemically synthesized
tttaccatgtcctggaatta

SEQ ID NO: 17270 - DNA, 20 bp, Artificial Sequence
  chemically synthesized
ccatgtcctggaattaaggt

SEQ ID NO: 17271 - DNA, 20 bp, Artificial Sequence
  chemically synthesized
tgtcctggaattaaggtcag

SEQ ID NO: 17272 - DNA, 20 bp, Artificial Sequence
  chemically synthesized
gtcctggaattaaggtcagt

SEQ ID NO: 17273 - DNA, 20 bp, Artificial Sequence
  chemically synthesized
aggtcagtgggaaactacta

SEQ ID NO: 17274 - DNA, 20 bp, Artificial Sequence
  chemically synthesized
ggtcagtgggaaactactac

SEQ ID NO: 17275 - DNA, 20 bp, Artificial Sequence
  chemically synthesized
gaaactactacaggccattc

SEQ ID NO: 17276 - DNA, 20 bp, Artificial Sequence
  chemically synthesized
aaactactacaggccattcc

SEQ ID NO: 17277 - DNA, 20 bp, Artificial Sequence
  chemically synthesized
ctactacaggccattccagg

SEQ ID NO: 17278 - DNA, 20 bp, Artificial Sequence
  chemically synthesized
tactacaggccattccaggc

SEQ ID NO: 17279 - DNA, 20 bp, Artificial Sequence
  chemically synthesized
tccaggcaggactacaaata

SEQ ID NO: 17280 - DNA, 20 bp, Artificial Sequence
  chemically synthesized
ccaggcaggactacaaataa

SEQ ID NO: 17281 - DNA, 20 bp, Artificial Sequence
  chemically synthesized
caggactacaaataaaggtt

SEQ ID NO: 17282 - DNA, 20 bp, Artificial Sequence
  chemically synthesized
aggactacaaataaaggttt

SEQ ID NO: 17283 - DNA, 20 bp, Artificial Sequence
  chemically synthesized
aaaggtttgggtcactccac

SEQ ID NO: 17284 - DNA, 20 bp, Artificial Sequence
  chemically synthesized
aaggtttgggtcactccacc

SEQ ID NO: 17285 - DNA, 20 bp, Artificial Sequence
  chemically synthesized
caggaaaaaaaaaaaaaaaa

SEQ ID NO: 17286 - DNA, 20 bp, Artificial Sequence
  chemically synthesized
aaaaaaaaaaaaaaaaagac

SEQ ID NO: 17287 - DNA, 20 bp, Artificial Sequence
  chemically synthesized
aaaaaaagacaagacctgct

SEQ ID NO: 17288 - DNA, 20 bp, Artificial Sequence
  chemically synthesized
aaaaaagacaagacctgctg

SEQ ID NO: 17289 - DNA, 20 bp, Artificial Sequence
  chemically synthesized
gacctgctgaggtgcttgct

SEQ ID NO: 17290 - DNA, 20 bp, Artificial Sequence
  chemically synthesized
acctgctgaggtgcttgctg

SEQ ID NO: 17291 - DNA, 20 bp, Artificial Sequence
  chemically synthesized
cctgctgaggtgcttgctga

SEQ ID NO: 17292 - DNA, 20 bp, Artificial Sequence
  chemically synthesized
tgaggtgcttgctgagggca

SEQ ID NO: 17293 - DNA, 20 bp, Artificial Sequence
  chemically synthesized
gaggtgcttgctgagggcaa

SEQ ID NO: 17294 - DNA, 20 bp, Artificial Sequence
  chemically synthesized
aggtgcttgctgagggcaaa

SEQ ID NO: 17295 - DNA, 20 bp, Artificial Sequence
  chemically synthesized
tgctgagggcaaagggaata

SEQ ID NO: 17296 - DNA, 20 bp, Artificial Sequence
  chemically synthesized
caaagggaatacagaatatg

SEQ ID NO: 17297 - DNA, 20 bp, Artificial Sequence
  chemically synthesized
agggaatacagaatatgtag

SEQ ID NO: 17298 - DNA, 20 bp, Artificial Sequence
  chemically synthesized
gaatacagaatatgtagcag

SEQ ID NO: 17299 - DNA, 20 bp, Artificial Sequence
  chemically synthesized
tacagaatatgtagcagaag

SEQ ID NO: 17300 - DNA, 20 bp, Artificial Sequence
  chemically synthesized
acagaatatgtagcagaaga

SEQ ID NO: 17301 - DNA, 20 bp, Artificial Sequence
  chemically synthesized
gaatatgtagcagaagaagg

SEQ ID NO: 17302 - DNA, 20 bp, Artificial Sequence
  chemically synthesized
aagaaggtagtcatcaatac

SEQ ID NO: 17303 - DNA, 20 bp, Artificial Sequence
  chemically synthesized
tacgatcacgtgaccaattg

SEQ ID NO: 17304 - DNA, 20 bp, Artificial Sequence
  chemically synthesized
acgtgaccaattgcagatac

SEQ ID NO: 17305 - DNA, 20 bp, Artificial Sequence
  chemically synthesized
cgtgaccaattgcagataca

SEQ ID NO: 17306 - DNA, 20 bp, Artificial Sequence
  chemically synthesized
acaaggactgtaattgtcat

SEQ ID NO: 17307 - DNA, 20 bp, Artificial Sequence
  chemically synthesized
tgtctgtatacacttgtact

SEQ ID NO: 17308 - DNA, 20 bp, Artificial Sequence
  chemically synthesized
tttcctttatcatgtgacat

SEQ ID NO: 17309 - DNA, 20 bp, Artificial Sequence
  chemically synthesized
aagatttattgacttcatat

SEQ ID NO: 17310 - DNA, 20 bp, Artificial Sequence
  chemically synthesized
ttgacttcatatcagcattt

SEQ ID NO: 17311 - DNA, 20 bp, Artificial Sequence
  chemically synthesized
atcagcatttaagtattgtt

SEQ ID NO: 17312 - DNA, 20 bp, Artificial Sequence
  chemically synthesized
gtattgttaagtttatgtaa

SEQ ID NO: 17313 - DNA, 20 bp, Artificial Sequence
  chemically synthesized
ttatgtaatagcatttgcaa

SEQ ID NO: 17314 - DNA, 20 bp, Artificial Sequence
  chemically synthesized
tatgtaatagcatttgcaat

SEQ ID NO: 17315 - DNA, 20 bp, Artificial Sequence
  chemically synthesized
atgtaatagcatttgcaatg

SEQ ID NO: 17316 - DNA, 20 bp, Artificial Sequence
  chemically synthesized
atagcatttgcaatggggat

SEQ ID NO: 17317 - DNA, 20 bp, Artificial Sequence
  chemically synthesized
ggtgcattttcaattgcacg

SEQ ID NO: 17318 - DNA, 20 bp, Artificial Sequence
  chemically synthesized
gtgcattttcaattgcacga

SEQ ID NO: 17319 - DNA, 20 bp, Artificial Sequence
  chemically synthesized
attttcaattgcacgaagga

SEQ ID NO: 17320 - DNA, 20 bp, Artificial Sequence
  chemically synthesized
aattgcacgaaggatagttt

SEQ ID NO: 17321 - DNA, 20 bp, Artificial Sequence
  chemically synthesized
gaaggatagttttagtatgt

SEQ ID NO: 17322 - DNA, 20 bp, Artificial Sequence
  chemically synthesized
aaggatagttttagtatgtt

SEQ ID NO: 17323 - DNA, 20 bp, Artificial Sequence
  chemically synthesized
cttattgttgtctttatttg

SEQ ID NO: 17324 - DNA, 20 bp, Artificial Sequence
  chemically synthesized
ttgaagataatgtatgacct

SEQ ID NO: 17325 - DNA, 20 bp, Artificial Sequence
  chemically synthesized
tgaagataatgtatgacctc

SEQ ID NO: 17326 - DNA, 20 bp, Artificial Sequence
  chemically synthesized
gaagataatgtatgacctca

SEQ ID NO: 17327 - DNA, 20 bp, Artificial Sequence
  chemically synthesized
aagataatgtatgacctcag

SEQ ID NO: 17328 - DNA, 20 bp, Artificial Sequence
  chemically synthesized
atgacctcaggggatgtgta

SEQ ID NO: 17329 - DNA, 20 bp, Artificial Sequence
  chemically synthesized
tgacctcaggggatgtgtat

SEQ ID NO: 17330 - DNA, 20 bp, Artificial Sequence
  chemically synthesized
caggggatgtgtataggctc

SEQ ID NO: 17331 - DNA, 20 bp, Artificial Sequence
  chemically synthesized
gtgtataggctcaagttgac

SEQ ID NO: 17332 - DNA, 20 bp, Artificial Sequence
  chemically synthesized
aggctcaagttgacaagcga

SEQ ID NO: 17333 - DNA, 20 bp, Artificial Sequence
  chemically synthesized
gacaagcgatggacttgtga

SEQ ID NO: 17334 - DNA, 20 bp, Artificial Sequence
  chemically synthesized
gacttgtgatggttaatact

SEQ ID NO: 17335 - DNA, 20 bp, Artificial Sequence
  chemically synthesized
atactgagtgtcaacttgat

SEQ ID NO: 17336 - DNA, 20 bp, Artificial Sequence
  chemically synthesized
gtgtcaacttgattggattg

SEQ ID NO: 17337 - DNA, 20 bp, Artificial Sequence
  chemically synthesized
tgattggattgaagtgtgca

SEQ ID NO: 17338 - DNA, 20 bp, Artificial Sequence
  chemically synthesized
gtgtgcaaagtattgatcct

SEQ ID NO: 17339 - DNA, 20 bp, Artificial Sequence
  chemically synthesized
ttgatcctgagtgtgtctgt

SEQ ID NO: 17340 - DNA, 20 bp, Artificial Sequence
  chemically synthesized
tgatcctgagtgtgtctgtg

SEQ ID NO: 17341 - DNA, 20 bp, Artificial Sequence
  chemically synthesized
gatcctgagtgtgtctgtga

SEQ ID NO: 17342 - DNA, 20 bp, Artificial Sequence
  chemically synthesized
tgtctgtgagggtattgcca

SEQ ID NO: 17343 - DNA, 20 bp, Artificial Sequence
  chemically synthesized
gtctgtgagggtattgccaa

SEQ ID NO: 17344 - DNA, 20 bp, Artificial Sequence
  chemically synthesized
ctgtgagggtattgccaaag

SEQ ID NO: 17345 - DNA, 20 bp, Artificial Sequence
  chemically synthesized
gccaaaggagattaacattt

SEQ ID NO: 17346 - DNA, 20 bp, Artificial Sequence
  chemically synthesized
aaggagattaacattttagt

SEQ ID NO: 17347 - DNA, 20 bp, Artificial Sequence
  chemically synthesized
gagattaacattttagtcag

SEQ ID NO: 17348 - DNA, 20 bp, Artificial Sequence
  chemically synthesized
agattaacattttagtcagt

SEQ ID NO: 17349 - DNA, 20 bp, Artificial Sequence
  chemically synthesized
taacattttagtcagtgggc

SEQ ID NO: 17350 - DNA, 20 bp, Artificial Sequence
  chemically synthesized
aacattttagtcagtgggct

SEQ ID NO: 17351 - DNA, 20 bp, Artificial Sequence
  chemically synthesized
ttttagtcagtgggctggga

SEQ ID NO: 17352 - DNA, 20 bp, Artificial Sequence
  chemically synthesized
tttagtcagtgggctgggaa

SEQ ID NO: 17353 - DNA, 20 bp, Artificial Sequence
  chemically synthesized
agtcagtgggctgggaaagg

SEQ ID NO: 17354 - DNA, 20 bp, Artificial Sequence
  chemically synthesized
aggcagacccacccttaatc

SEQ ID NO: 17355 - DNA, 20 bp, Artificial Sequence
  chemically synthesized
ggcagacccacccttaatct

SEQ ID NO: 17356 - DNA, 20 bp, Artificial Sequence
  chemically synthesized
agacccacccttaatctggg

SEQ ID NO: 17357 - DNA, 20 bp, Artificial Sequence
  chemically synthesized
gacccacccttaatctgggt

SEQ ID NO: 17358 - DNA, 20 bp, Artificial Sequence
  chemically synthesized
ctgggtgggcaccatctaat

SEQ ID NO: 17359 - DNA, 20 bp, Artificial Sequence
  chemically synthesized
ggcaccatctaatcagttgc

SEQ ID NO: 17360 - DNA, 20 bp, Artificial Sequence
  chemically synthesized
catctaatcagttgccagtg

SEQ ID NO: 17361 - DNA, 20 bp, Artificial Sequence
  chemically synthesized
taatcagttgccagtgtggc

SEQ ID NO: 17362 - DNA, 20 bp, Artificial Sequence
  chemically synthesized
aatcagttgccagtgtggcc

SEQ ID NO: 17363 - DNA, 20 bp, Artificial Sequence
  chemically synthesized
gccagtgtggccaggatata

SEQ ID NO: 17364 - DNA, 20 bp, Artificial Sequence
  chemically synthesized
agtgtggccaggatataaag

SEQ ID NO: 17365 - DNA, 20 bp, Artificial Sequence
  chemically synthesized
gtgtggccaggatataaagc

SEQ ID NO: 17366 - DNA, 20 bp, Artificial Sequence
  chemically synthesized
tggccaggatataaagcagg

SEQ ID NO: 17367 - DNA, 20 bp, Artificial Sequence
  chemically synthesized
aaaaaaacatgtgaaaatcc

SEQ ID NO: 17368 - DNA, 20 bp, Artificial Sequence
  chemically synthesized
aacatgtgaaaatcctggac

SEQ ID NO: 17369 - DNA, 20 bp, Artificial Sequence
  chemically synthesized
gtgaaaatcctggactggct

SEQ ID NO: 17370 - DNA, 20 bp, Artificial Sequence
  chemically synthesized
cctggactggcttagcctcc

SEQ ID NO: 17371 - DNA, 20 bp, Artificial Sequence
  chemically synthesized
cctacatctttctcccatgc

SEQ ID NO: 17372 - DNA, 20 bp, Artificial Sequence
  chemically synthesized
tgcttcctgccctcaaacat

SEQ ID NO: 17373 - DNA, 20 bp, Artificial Sequence
  chemically synthesized
gccctcaaacattggactcc

SEQ ID NO: 17374 - DNA, 20 bp, Artificial Sequence
  chemically synthesized
acattggactccaagtcctt

SEQ ID NO: 17375 - DNA, 20 bp, Artificial Sequence
  chemically synthesized
gactccaagtccttcagctt

SEQ ID NO: 17376 - DNA, 20 bp, Artificial Sequence
  chemically synthesized
actccaagtccttcagcttt

SEQ ID NO: 17377 - DNA, 20 bp, Artificial Sequence
  chemically synthesized
agtccttcagctttgggact

SEQ ID NO: 17378 - DNA, 20 bp, Artificial Sequence
  chemically synthesized
ttcagctttgggacttggac

SEQ ID NO: 17379 - DNA, 20 bp, Artificial Sequence
  chemically synthesized
cttccttgctcctctgcttg

SEQ ID NO: 17380 - DNA, 20 bp, Artificial Sequence
  chemically synthesized
cttgctcctctgcttgcaga

SEQ ID NO: 17381 - DNA, 20 bp, Artificial Sequence
  chemically synthesized
tgcttgcagatggcctattg

SEQ ID NO: 17382 - DNA, 20 bp, Artificial Sequence
  chemically synthesized
gcttgcagatggcctattgt

SEQ ID NO: 17383 - DNA, 20 bp, Artificial Sequence
  chemically synthesized
gtgggaccttgtgattgtgt

SEQ ID NO: 17384 - DNA, 20 bp, Artificial Sequence
  chemically synthesized
tctatctatctatctcctat

SEQ ID NO: 17385 - DNA, 20 bp, Artificial Sequence
  chemically synthesized
tcctattagttctgtctctc

SEQ ID NO: 17386 - DNA, 20 bp, Artificial Sequence
  chemically synthesized
cctattagttctgtctctct

SEQ ID NO: 17387 - DNA, 20 bp, Artificial Sequence
  chemically synthesized
ctattagttctgtctctcta

SEQ ID NO: 17388 - DNA, 20 bp, Artificial Sequence
  chemically synthesized
ctagggaaccctgacaaata

SEQ ID NO: 17389 - DNA, 20 bp, Artificial Sequence
  chemically synthesized
ggaaccctgacaaatacagt

SEQ ID NO: 17390 - DNA, 20 bp, Artificial Sequence
  chemically synthesized
cctgacaaatacagtgagct

SEQ ID NO: 17391 - DNA, 20 bp, Artificial Sequence
  chemically synthesized
ctgacaaatacagtgagctc

SEQ ID NO: 17392 - DNA, 20 bp, Artificial Sequence
  chemically synthesized
atacagtgagctcaggtcct

SEQ ID NO: 17393 - DNA, 20 bp, Artificial Sequence
  chemically synthesized
cagtgagctcaggtcctgag

SEQ ID NO: 17394 - DNA, 20 bp, Artificial Sequence
  chemically synthesized
cctgagcagacattttccaa

SEQ ID NO: 17395 - DNA, 20 bp, Artificial Sequence
  chemically synthesized
gagcagacattttccaaaag

SEQ ID NO: 17396 - DNA, 20 bp, Artificial Sequence
  chemically synthesized
ttttccaaaagaagacatac

SEQ ID NO: 17397 - DNA, 20 bp, Artificial Sequence
  chemically synthesized
tccaaaagaagacatacaag

SEQ ID NO: 17398 - DNA, 20 bp, Artificial Sequence
  chemically synthesized
ggccaataaacgtcaaaaaa

SEQ ID NO: 17399 - DNA, 20 bp, Artificial Sequence
  chemically synthesized
agttcaacatcactaataat

SEQ ID NO: 17400 - DNA, 20 bp, Artificial Sequence
  chemically synthesized
ttcaacatcactaataatca

SEQ ID NO: 17401 - DNA, 20 bp, Artificial Sequence
  chemically synthesized
catatgatacctccttatgc

SEQ ID NO: 17402 - DNA, 20 bp, Artificial Sequence
  chemically synthesized
tgatacctccttatgccagt

SEQ ID NO: 17403 - DNA, 20 bp, Artificial Sequence
  chemically synthesized
cctccttatgccagtcagaa

SEQ ID NO: 17404 - DNA, 20 bp, Artificial Sequence
  chemically synthesized
tcagaatggctatcattata

SEQ ID NO: 17405 - DNA, 20 bp, Artificial Sequence
  chemically synthesized
atcattataaagttcaaaaa

SEQ ID NO: 17406 - DNA, 20 bp, Artificial Sequence
  chemically synthesized
attataaagttcaaaaacag

SEQ ID NO: 17407 - DNA, 20 bp, Artificial Sequence
  chemically synthesized
agttcaaaaacagcagatgt

SEQ ID NO: 17408 - DNA, 20 bp, Artificial Sequence
  chemically synthesized
caaaaacagcagatgttggt

SEQ ID NO: 17409 - DNA, 20 bp, Artificial Sequence
  chemically synthesized
aaaaacagcagatgttggtg

SEQ ID NO: 17410 - DNA, 20 bp, Artificial Sequence
  chemically synthesized
agcagatgttggtgaggatg

SEQ ID NO: 17411 - DNA, 20 bp, Artificial Sequence
  chemically synthesized
cagatgttggtgaggatgtg

SEQ ID NO: 17412 - DNA, 20 bp, Artificial Sequence
  chemically synthesized
gttggtgaggatgtggagac

SEQ ID NO: 17413 - DNA, 20 bp, Artificial Sequence
  chemically synthesized
agaaaatgcttatacactgt

SEQ ID NO: 17414 - DNA, 20 bp, Artificial Sequence
  chemically synthesized
aatgcttatacactgttggt

SEQ ID NO: 17415 - DNA, 20 bp, Artificial Sequence
  chemically synthesized
ctgttggtaagaatgtaaat

SEQ ID NO: 17416 - DNA, 20 bp, Artificial Sequence
  chemically synthesized
gtaaattagtacaaacttta

SEQ ID NO: 17417 - DNA, 20 bp, Artificial Sequence
  chemically synthesized
aattagtacaaactttatgg

SEQ ID NO: 17418 - DNA, 20 bp, Artificial Sequence
  chemically synthesized
agtacaaactttatggaaga

SEQ ID NO: 17419 - DNA, 20 bp, Artificial Sequence
  chemically synthesized
actttatggaagacagcatg

SEQ ID NO: 17420 - DNA, 20 bp, Artificial Sequence
  chemically synthesized
gacagcatgaagatttctta

SEQ ID NO: 17421 - DNA, 20 bp, Artificial Sequence
  chemically synthesized
atgaagatttcttaaagaac

SEQ ID NO: 17422 - DNA, 20 bp, Artificial Sequence
  chemically synthesized
atttcttaaagaactagaaa

SEQ ID NO: 17423 - DNA, 20 bp, Artificial Sequence
  chemically synthesized
caatcctgcaatcccactac

SEQ ID NO: 17424 - DNA, 20 bp, Artificial Sequence
  chemically synthesized
aatcctgcaatcccactact

SEQ ID NO: 17425 - DNA, 20 bp, Artificial Sequence
  chemically synthesized
tgcaatcccactactgggta

SEQ ID NO: 17426 - DNA, 20 bp, Artificial Sequence
  chemically synthesized
cactactgggtatggaccca

SEQ ID NO: 17427 - DNA, 20 bp, Artificial Sequence
  chemically synthesized
tgggtatggacccaaagtga

SEQ ID NO: 17428 - DNA, 20 bp, Artificial Sequence
  chemically synthesized
ggtatggacccaaagtgaaa

SEQ ID NO: 17429 - DNA, 20 bp, Artificial Sequence
  chemically synthesized
tgaaagagatcatattaaaa

SEQ ID NO: 17430 - DNA, 20 bp, Artificial Sequence
  chemically synthesized
attaaaaaagatatctgcat

SEQ ID NO: 17431 - DNA, 20 bp, Artificial Sequence
  chemically synthesized
tatctgcattagtatgttca

SEQ ID NO: 17432 - DNA, 20 bp, Artificial Sequence
  chemically synthesized
ctgcattagtatgttcaaag

SEQ ID NO: 17433 - DNA, 20 bp, Artificial Sequence
  chemically synthesized
caaagtagcactgttcccaa

SEQ ID NO: 17434 - DNA, 20 bp, Artificial Sequence
  chemically synthesized
tagcactgttcccaatagca

SEQ ID NO: 17435 - DNA, 20 bp, Artificial Sequence
  chemically synthesized
tgttcccaatagcaaagata

SEQ ID NO: 17436 - DNA, 20 bp, Artificial Sequence
  chemically synthesized
tcaacctaaatgtctaccaa

SEQ ID NO: 17437 - DNA, 20 bp, Artificial Sequence
  chemically synthesized
aatgtctaccaatggacgat

SEQ ID NO: 17438 - DNA, 20 bp, Artificial Sequence
  chemically synthesized
taccaatggacgattggata

SEQ ID NO: 17439 - DNA, 20 bp, Artificial Sequence
  chemically synthesized
acgattggataaagaaaatg

SEQ ID NO: 17440 - DNA, 20 bp, Artificial Sequence
  chemically synthesized
ttatatacatatatattact

SEQ ID NO: 17441 - DNA, 20 bp, Artificial Sequence
  chemically synthesized
tatattactcagccataaaa

SEQ ID NO: 17442 - DNA, 20 bp, Artificial Sequence
  chemically synthesized
gaatgaaatcatgtcttctc

SEQ ID NO: 17443 - DNA, 20 bp, Artificial Sequence
  chemically synthesized
tcatgtcttctctagaaaca

SEQ ID NO: 17444 - DNA, 20 bp, Artificial Sequence
  chemically synthesized
gtcttctctagaaacatggt

SEQ ID NO: 17445 - DNA, 20 bp, Artificial Sequence
  chemically synthesized
tctagaaacatggttagaac

SEQ ID NO: 17446 - DNA, 20 bp, Artificial Sequence
  chemically synthesized
tagaaacatggttagaactg

SEQ ID NO: 17447 - DNA, 20 bp, Artificial Sequence
  chemically synthesized
agaaacatggttagaactgg

SEQ ID NO: 17448 - DNA, 20 bp, Artificial Sequence
  chemically synthesized
gaactggaggacattatcct

SEQ ID NO: 17449 - DNA, 20 bp, Artificial Sequence
  chemically synthesized
ttatcctcagtgaaataact

SEQ ID NO: 17450 - DNA, 20 bp, Artificial Sequence
  chemically synthesized
tcagtgaaataactcagaaa

SEQ ID NO: 17451 - DNA, 20 bp, Artificial Sequence
  chemically synthesized
tgaaataactcagaaacaga

SEQ ID NO: 17452 - DNA, 20 bp, Artificial Sequence
  chemically synthesized
cagaaacagaaagtcaaaca

SEQ ID NO: 17453 - DNA, 20 bp, Artificial Sequence
  chemically synthesized
aaacacagtatgttctcatt

SEQ ID NO: 17454 - DNA, 20 bp, Artificial Sequence
  chemically synthesized
acagtatgttctcatttagt

SEQ ID NO: 17455 - DNA, 20 bp, Artificial Sequence
  chemically synthesized
agtatgttctcatttagtga

SEQ ID NO: 17456 - DNA, 20 bp, Artificial Sequence
  chemically synthesized
gttctcatttagtgagagcc

SEQ ID NO: 17457 - DNA, 20 bp, Artificial Sequence
  chemically synthesized
ctcatttagtgagagccaag

SEQ ID NO: 17458 - DNA, 20 bp, Artificial Sequence
  chemically synthesized
tcatttagtgagagccaagt

SEQ ID NO: 17459 - DNA, 20 bp, Artificial Sequence
  chemically synthesized
atttagtgagagccaagtgg

SEQ ID NO: 17460 - DNA, 20 bp, Artificial Sequence
  chemically synthesized
ccaagtgggagctaaacgat

SEQ ID NO: 17461 - DNA, 20 bp, Artificial Sequence
  chemically synthesized
gtgggagctaaacgatgagt

SEQ ID NO: 17462 - DNA, 20 bp, Artificial Sequence
  chemically synthesized
agctaaacgatgagtaagca

SEQ ID NO: 17463 - DNA, 20 bp, Artificial Sequence
  chemically synthesized
gatgagtaagcatagacata

SEQ ID NO: 17464 - DNA, 20 bp, Artificial Sequence
  chemically synthesized
agacatatagaatgaaataa

SEQ ID NO: 17465 - DNA, 20 bp, Artificial Sequence
  chemically synthesized
gaatgaaataatagacactt

SEQ ID NO: 17466 - DNA, 20 bp, Artificial Sequence
  chemically synthesized
aaataatagacacttgagac

SEQ ID NO: 17467 - DNA, 20 bp, Artificial Sequence
  chemically synthesized
ataatagacacttgagacta

SEQ ID NO: 17468 - DNA, 20 bp, Artificial Sequence
  chemically synthesized
tagacacttgagactagaga

SEQ ID NO: 17469 - DNA, 20 bp, Artificial Sequence
  chemically synthesized
agacacttgagactagagaa

SEQ ID NO: 17470 - DNA, 20 bp, Artificial Sequence
  chemically synthesized
cacttgagactagagaaagg

SEQ ID NO: 17471 - DNA, 20 bp, Artificial Sequence
  chemically synthesized
acttgagactagagaaaggt

SEQ ID NO: 17472 - DNA, 20 bp, Artificial Sequence
  chemically synthesized
ttgagactagagaaaggtgg

SEQ ID NO: 17473 - DNA, 20 bp, Artificial Sequence
  chemically synthesized
tgagactagagaaaggtggg

SEQ ID NO: 17474 - DNA, 20 bp, Artificial Sequence
  chemically synthesized
actagagaaaggtgggagga

SEQ ID NO: 17475 - DNA, 20 bp, Artificial Sequence
  chemically synthesized
ctagagaaaggtgggaggat

SEQ ID NO: 17476 - DNA, 20 bp, Artificial Sequence
  chemically synthesized
agagaaaggtgggaggatag

SEQ ID NO: 17477 - DNA, 20 bp, Artificial Sequence
  chemically synthesized
aaggtgggaggataggagta

SEQ ID NO: 17478 - DNA, 20 bp, Artificial Sequence
  chemically synthesized
tgggaggataggagtatggt

SEQ ID NO: 17479 - DNA, 20 bp, Artificial Sequence
  chemically synthesized
gggaggataggagtatggtg

SEQ ID NO: 17480 - DNA, 20 bp, Artificial Sequence
  chemically synthesized
tggtgaggactgaaaaacta

SEQ ID NO: 17481 - DNA, 20 bp, Artificial Sequence
  chemically synthesized
aggactgaaaaactacggat

SEQ ID NO: 17482 - DNA, 20 bp, Artificial Sequence
  chemically synthesized
tggatacaacattcactttt

SEQ ID NO: 17483 - DNA, 20 bp, Artificial Sequence
  chemically synthesized
ggatacaacattcacttttc

SEQ ID NO: 17484 - DNA, 20 bp, Artificial Sequence
  chemically synthesized
aacattcacttttcaggtga

SEQ ID NO: 17485 - DNA, 20 bp, Artificial Sequence
  chemically synthesized
ttcaggtgatggtccactaa

SEQ ID NO: 17486 - DNA, 20 bp, Artificial Sequence
  chemically synthesized
gtgatggtccactaaaagct

SEQ ID NO: 17487 - DNA, 20 bp, Artificial Sequence
  chemically synthesized
actatgcaacatacatatgt

SEQ ID NO: 17488 - DNA, 20 bp, Artificial Sequence
  chemically synthesized
ctatgcaacatacatatgta

SEQ ID NO: 17489 - DNA, 20 bp, Artificial Sequence
  chemically synthesized
catacatatgtaaggaaccc

SEQ ID NO: 17490 - DNA, 20 bp, Artificial Sequence
  chemically synthesized
cccgagcttgtaccctgata

SEQ ID NO: 17491 - DNA, 20 bp, Artificial Sequence
  chemically synthesized
ccaaatctcatcttgaattg

SEQ ID NO: 17492 - DNA, 20 bp, Artificial Sequence
  chemically synthesized
cccataatcctcacgtgttg

SEQ ID NO: 17493 - DNA, 20 bp, Artificial Sequence
  chemically synthesized
ccataatcctcacgtgttgt

SEQ ID NO: 17494 - DNA, 20 bp, Artificial Sequence
  chemically synthesized
ataatcctcacgtgttgtgg

SEQ ID NO: 17495 - DNA, 20 bp, Artificial Sequence
  chemically synthesized
taatcctcacgtgttgtggg

SEQ ID NO: 17496 - DNA, 20 bp, Artificial Sequence
  chemically synthesized
aatcctcacgtgttgtggga

SEQ ID NO: 17497 - DNA, 20 bp, Artificial Sequence
  chemically synthesized
cacgtgttgtgggagggatt

SEQ ID NO: 17498 - DNA, 20 bp, Artificial Sequence
  chemically synthesized
cgtgttgtgggagggatttg

SEQ ID NO: 17499 - DNA, 20 bp, Artificial Sequence
  chemically synthesized
gtgttgtgggagggatttgg

SEQ ID NO: 17500 - DNA, 20 bp, Artificial Sequence
  chemically synthesized
tgttgtgggagggatttgga

SEQ ID NO: 17501 - DNA, 20 bp, Artificial Sequence
  chemically synthesized
ttgtgggagggatttggagg

SEQ ID NO: 17502 - DNA, 20 bp, Artificial Sequence
  chemically synthesized
tgtgggagggatttggaggg

SEQ ID NO: 17503 - DNA, 20 bp, Artificial Sequence
  chemically synthesized
ggagggaggtaattgaatca

SEQ ID NO: 17504 - DNA, 20 bp, Artificial Sequence
  chemically synthesized
agggaggtaattgaatcata

SEQ ID NO: 17505 - DNA, 20 bp, Artificial Sequence
  chemically synthesized
gggaggtaattgaatcatag

SEQ ID NO: 17506 - DNA, 20 bp, Artificial Sequence
  chemically synthesized
gaggtaattgaatcatagag

SEQ ID NO: 17507 - DNA, 20 bp, Artificial Sequence
  chemically synthesized
aggtaattgaatcatagagg

SEQ ID NO: 17508 - DNA, 20 bp, Artificial Sequence
  chemically synthesized
ctctcatgctcttctcgtga

SEQ ID NO: 17509 - DNA, 20 bp, Artificial Sequence
  chemically synthesized
catgctcttctcgtgatagt

SEQ ID NO: 17510 - DNA, 20 bp, Artificial Sequence
  chemically synthesized
tcgtgatagtgagttcttac

SEQ ID NO: 17511 - DNA, 20 bp, Artificial Sequence
  chemically synthesized
tgagttcttacaagatctga

SEQ ID NO: 17512 - DNA, 20 bp, Artificial Sequence
  chemically synthesized
acaagatctgatggttttat

SEQ ID NO: 17513 - DNA, 20 bp, Artificial Sequence
  chemically synthesized
agatctgatggttttataag

SEQ ID NO: 17514 - DNA, 20 bp, Artificial Sequence
  chemically synthesized
cggcttttcccccttttgct

SEQ ID NO: 17515 - DNA, 20 bp, Artificial Sequence
  chemically synthesized
ctacttgctgctgccatgtg

SEQ ID NO: 17516 - DNA, 20 bp, Artificial Sequence
  chemically synthesized
cttgctgctgccatgtgaag

SEQ ID NO: 17517 - DNA, 20 bp, Artificial Sequence
  chemically synthesized
ttgctgctgccatgtgaaga

SEQ ID NO: 17518 - DNA, 20 bp, Artificial Sequence
  chemically synthesized
tcttcttctgccatgattgt

SEQ ID NO: 17519 - DNA, 20 bp, Artificial Sequence
  chemically synthesized
gccatgattgtaagtttccc

SEQ ID NO: 17520 - DNA, 20 bp, Artificial Sequence
  chemically synthesized
ccatgattgtaagtttcccg

SEQ ID NO: 17521 - DNA, 20 bp, Artificial Sequence
  chemically synthesized
taagtttcccgaggcctccc

SEQ ID NO: 17522 - DNA, 20 bp, Artificial Sequence
  chemically synthesized
ccgaggcctccccagccctg

SEQ ID NO: 17523 - DNA, 20 bp, Artificial Sequence
  chemically synthesized
ccccagccctgtggaactgt

SEQ ID NO: 17524 - DNA, 20 bp, Artificial Sequence
  chemically synthesized
ttttttccttataaattacc

SEQ ID NO: 17525 - DNA, 20 bp, Artificial Sequence
  chemically synthesized
ccttataaattacccagtct

SEQ ID NO: 17526 - DNA, 20 bp, Artificial Sequence
  chemically synthesized
cttataaattacccagtctc

SEQ ID NO: 17527 - DNA, 20 bp, Artificial Sequence
  chemically synthesized
agtctcaggtatgtctttat

SEQ ID NO: 17528 - DNA, 20 bp, Artificial Sequence
  chemically synthesized
ctcaggtatgtctttataag

SEQ ID NO: 17529 - DNA, 20 bp, Artificial Sequence
  chemically synthesized
taagcagcatgataacgaac

SEQ ID NO: 17530 - DNA, 20 bp, Artificial Sequence
  chemically synthesized
tttaaaaatataaaataaat

SEQ ID NO: 17531 - DNA, 20 bp, Artificial Sequence
  chemically synthesized
ataaattagatctgattgaa

SEQ ID NO: 17532 - DNA, 20 bp, Artificial Sequence
  chemically synthesized
taaattagatctgattgaaa

SEQ ID NO: 17533 - DNA, 20 bp, Artificial Sequence
  chemically synthesized
tgattgaaaaggcaaaaatt

SEQ ID NO: 17534 - DNA, 20 bp, Artificial Sequence
  chemically synthesized
tgaaaaggcaaaaattgagc

SEQ ID NO: 17535 - DNA, 20 bp, Artificial Sequence
  chemically synthesized
gcaagcaaaatatcacttaa

SEQ ID NO: 17536 - DNA, 20 bp, Artificial Sequence
  chemically synthesized
caagcaaaatatcacttaat

SEQ ID NO: 17537 - DNA, 20 bp, Artificial Sequence
  chemically synthesized
aagcaaaatatcacttaatg

SEQ ID NO: 17538 - DNA, 20 bp, Artificial Sequence
  chemically synthesized
tcacttaatggggtaattaa

SEQ ID NO: 17539 - DNA, 20 bp, Artificial Sequence
  chemically synthesized
cacttaatggggtaattaaa

SEQ ID NO: 17540 - DNA, 20 bp, Artificial Sequence
  chemically synthesized
acttaatggggtaattaaaa

SEQ ID NO: 17541 - DNA, 20 bp, Artificial Sequence
  chemically synthesized
atggggtaattaaaagggtg

SEQ ID NO: 17542 - DNA, 20 bp, Artificial Sequence
  chemically synthesized
aattaaaagggtgaagaaat

SEQ ID NO: 17543 - DNA, 20 bp, Artificial Sequence
  chemically synthesized
attaaaagggtgaagaaatt

SEQ ID NO: 17544 - DNA, 20 bp, Artificial Sequence
  chemically synthesized
gggtgaagaaattgggcaaa

SEQ ID NO: 17545 - DNA, 20 bp, Artificial Sequence
  chemically synthesized
attgggcaaatggatgtcat

SEQ ID NO: 17546 - DNA, 20 bp, Artificial Sequence
  chemically synthesized
ttgggcaaatggatgtcatg

SEQ ID NO: 17547 - DNA, 20 bp, Artificial Sequence
  chemically synthesized
gggcaaatggatgtcatgag

SEQ ID NO: 17548 - DNA, 20 bp, Artificial Sequence
  chemically synthesized
ggcaaatggatgtcatgagg

SEQ ID NO: 17549 - DNA, 20 bp, Artificial Sequence
  chemically synthesized
atgtcatgaggaggaatttt

SEQ ID NO: 17550 - DNA, 20 bp, Artificial Sequence
  chemically synthesized
tgtcatgaggaggaattttt

SEQ ID NO: 17551 - DNA, 20 bp, Artificial Sequence
  chemically synthesized
catgaggaggaatttttagg

SEQ ID NO: 17552 - DNA, 20 bp, Artificial Sequence
  chemically synthesized
tgaggaggaatttttaggca

SEQ ID NO: 17553 - DNA, 20 bp, Artificial Sequence
  chemically synthesized
gaggaggaatttttaggcag

SEQ ID NO: 17554 - DNA, 20 bp, Artificial Sequence
  chemically synthesized
gaatttttaggcagaggtaa

SEQ ID NO: 17555 - DNA, 20 bp, Artificial Sequence
  chemically synthesized
ttttaggcagaggtaatggt

SEQ ID NO: 17556 - DNA, 20 bp, Artificial Sequence
  chemically synthesized
ttaggcagaggtaatggtca

SEQ ID NO: 17557 - DNA, 20 bp, Artificial Sequence
  chemically synthesized
cagaggtaatggtcagagcc

SEQ ID NO: 17558 - DNA, 20 bp, Artificial Sequence
  chemically synthesized
agaggtaatggtcagagccc

SEQ ID NO: 17559 - DNA, 20 bp, Artificial Sequence
  chemically synthesized
atggtcagagcccaggccct

SEQ ID NO: 17560 - DNA, 20 bp, Artificial Sequence
  chemically synthesized
tcagagcccaggccctaagc

SEQ ID NO: 17561 - DNA, 20 bp, Artificial Sequence
  chemically synthesized
agagcccaggccctaagctg

SEQ ID NO: 17562 - DNA, 20 bp, Artificial Sequence
  chemically synthesized
gcccaggccctaagctggag

SEQ ID NO: 17563 - DNA, 20 bp, Artificial Sequence
  chemically synthesized
ccaggccctaagctggagta

SEQ ID NO: 17564 - DNA, 20 bp, Artificial Sequence
  chemically synthesized
taagctggagtagagtgtgc

SEQ ID NO: 17565 - DNA, 20 bp, Artificial Sequence
  chemically synthesized
aagctggagtagagtgtgca

SEQ ID NO: 17566 - DNA, 20 bp, Artificial Sequence
  chemically synthesized
tggagtagagtgtgcaagga

SEQ ID NO: 17567 - DNA, 20 bp, Artificial Sequence
  chemically synthesized
gagtagagtgtgcaaggaaa

SEQ ID NO: 17568 - DNA, 20 bp, Artificial Sequence
  chemically synthesized
agtgtgcaaggaaagagtaa

SEQ ID NO: 17569 - DNA, 20 bp, Artificial Sequence
  chemically synthesized
gtgtgcaaggaaagagtaat

SEQ ID NO: 17570 - DNA, 20 bp, Artificial Sequence
  chemically synthesized
gaaagagtaataggattgaa

SEQ ID NO: 17571 - DNA, 20 bp, Artificial Sequence
  chemically synthesized
aaagagtaataggattgaaa

SEQ ID NO: 17572 - DNA, 20 bp, Artificial Sequence
  chemically synthesized
ataggattgaaaaggataac

SEQ ID NO: 17573 - DNA, 20 bp, Artificial Sequence
  chemically synthesized
taggattgaaaaggataacc

SEQ ID NO: 17574 - DNA, 20 bp, Artificial Sequence
  chemically synthesized
gattgaaaaggataaccagg

SEQ ID NO: 17575 - DNA, 20 bp, Artificial Sequence
  chemically synthesized
attgaaaaggataaccaggt

SEQ ID NO: 17576 - DNA, 20 bp, Artificial Sequence
  chemically synthesized
tgaaaaggataaccaggtag

SEQ ID NO: 17577 - DNA, 20 bp, Artificial Sequence
  chemically synthesized
gaaaaggataaccaggtagg

SEQ ID NO: 17578 - DNA, 20 bp, Artificial Sequence
  chemically synthesized
gataaccaggtaggaggaca

SEQ ID NO: 17579 - DNA, 20 bp, Artificial Sequence
  chemically synthesized
ataaccaggtaggaggacat

SEQ ID NO: 17580 - DNA, 20 bp, Artificial Sequence
  chemically synthesized
taaccaggtaggaggacata

SEQ ID NO: 17581 - DNA, 20 bp, Artificial Sequence
  chemically synthesized
accaggtaggaggacatagg

SEQ ID NO: 17582 - DNA, 20 bp, Artificial Sequence
  chemically synthesized
ccaggtaggaggacataggg

SEQ ID NO: 17583 - DNA, 20 bp, Artificial Sequence
  chemically synthesized
caggtaggaggacataggga

SEQ ID NO: 17584 - DNA, 20 bp, Artificial Sequence
  chemically synthesized
aggtaggaggacatagggag

SEQ ID NO: 17585 - DNA, 20 bp, Artificial Sequence
  chemically synthesized
aggaggacatagggaggggt

SEQ ID NO: 17586 - DNA, 20 bp, Artificial Sequence
  chemically synthesized
ggaggacatagggaggggta

SEQ ID NO: 17587 - DNA, 20 bp, Artificial Sequence
  chemically synthesized
gaggacatagggaggggtaa

SEQ ID NO: 17588 - DNA, 20 bp, Artificial Sequence
  chemically synthesized
aggacatagggaggggtaag

SEQ ID NO: 17589 - DNA, 20 bp, Artificial Sequence
  chemically synthesized
gacatagggaggggtaaggg

SEQ ID NO: 17590 - DNA, 20 bp, Artificial Sequence
  chemically synthesized
acatagggaggggtaagggg

SEQ ID NO: 17591 - DNA, 20 bp, Artificial Sequence
  chemically synthesized
tagggaggggtaaggggagg

SEQ ID NO: 17592 - DNA, 20 bp, Artificial Sequence
  chemically synthesized
ggtaaggggaggaagacctc

SEQ ID NO: 17593 - DNA, 20 bp, Artificial Sequence
  chemically synthesized
aggaagacctccagtaaact

SEQ ID NO: 17594 - DNA, 20 bp, Artificial Sequence
  chemically synthesized
ggaagacctccagtaaactt

SEQ ID NO: 17595 - DNA, 20 bp, Artificial Sequence
  chemically synthesized
agacctccagtaaacttagg

SEQ ID NO: 17596 - DNA, 20 bp, Artificial Sequence
  chemically synthesized
gacctccagtaaacttaggc

SEQ ID NO: 17597 - DNA, 20 bp, Artificial Sequence
  chemically synthesized
aggcaggatatttcccgtga

SEQ ID NO: 17598 - DNA, 20 bp, Artificial Sequence
  chemically synthesized
actaaataataatcacatgt

SEQ ID NO: 17599 - DNA, 20 bp, Artificial Sequence
  chemically synthesized
aaataatctgtcgattactt

SEQ ID NO: 17600 - DNA, 20 bp, Artificial Sequence
  chemically synthesized
ttgagcaatactttgttcat

SEQ ID NO: 17601 - DNA, 20 bp, Artificial Sequence
  chemically synthesized
gcaatactttgttcatgagc

SEQ ID NO: 17602 - DNA, 20 bp, Artificial Sequence
  chemically synthesized
aatactttgttcatgagcta

SEQ ID NO: 17603 - DNA, 20 bp, Artificial Sequence
  chemically synthesized
ctttgttcatgagctagagc

SEQ ID NO: 17604 - DNA, 20 bp, Artificial Sequence
  chemically synthesized
tttgttcatgagctagagca

SEQ ID NO: 17605 - DNA, 20 bp, Artificial Sequence
  chemically synthesized
ttgttcatgagctagagcaa

SEQ ID NO: 17606 - DNA, 20 bp, Artificial Sequence
  chemically synthesized
tgttcatgagctagagcaag

SEQ ID NO: 17607 - DNA, 20 bp, Artificial Sequence
  chemically synthesized
ctagagcaaggggatgactc

SEQ ID NO: 17608 - DNA, 20 bp, Artificial Sequence
  chemically synthesized
agaaatcctttgtgaaatcc

SEQ ID NO: 17609 - DNA, 20 bp, Artificial Sequence
  chemically synthesized
aaatcctttgtgaaatcctg

SEQ ID NO: 17610 - DNA, 20 bp, Artificial Sequence
  chemically synthesized
aatcctttgtgaaatcctgg

SEQ ID NO: 17611 - DNA, 20 bp, Artificial Sequence
  chemically synthesized
tgtgaaatcctggaggtaat

SEQ ID NO: 17612 - DNA, 20 bp, Artificial Sequence
  chemically synthesized
tcctggaggtaataagatcc

SEQ ID NO: 17613 - DNA, 20 bp, Artificial Sequence
  chemically synthesized
atcttcaactcaattgcaaa

SEQ ID NO: 17614 - DNA, 20 bp, Artificial Sequence
  chemically synthesized
caaaacatattccatttcat

SEQ ID NO: 17615 - DNA, 20 bp, Artificial Sequence
  chemically synthesized
tattccatttcatcagacta

SEQ ID NO: 17616 - DNA, 20 bp, Artificial Sequence
  chemically synthesized
attccatttcatcagactac

SEQ ID NO: 17617 - DNA, 20 bp, Artificial Sequence
  chemically synthesized
catcagactacaggttttaa

SEQ ID NO: 17618 - DNA, 20 bp, Artificial Sequence
  chemically synthesized
atttcttaaatgtattattc

SEQ ID NO: 17619 - DNA, 20 bp, Artificial Sequence
  chemically synthesized
ccagtaacttatactttaca

SEQ ID NO: 17620 - DNA, 20 bp, Artificial Sequence
  chemically synthesized
tacatagtaaatcttatcaa

SEQ ID NO: 17621 - DNA, 20 bp, Artificial Sequence
  chemically synthesized
ttatcaatagtcacaatcaa

SEQ ID NO: 17622 - DNA, 20 bp, Artificial Sequence
  chemically synthesized
agtcacaatcaatggtcaca

SEQ ID NO: 17623 - DNA, 20 bp, Artificial Sequence
  chemically synthesized
cacaatcaatggtcacaaag

SEQ ID NO: 17624 - DNA, 20 bp, Artificial Sequence
  chemically synthesized
tcacaaagtagaacttcatc

SEQ ID NO: 17625 - DNA, 20 bp, Artificial Sequence
  chemically synthesized
acaaagtagaacttcatctg

SEQ ID NO: 17626 - DNA, 20 bp, Artificial Sequence
  chemically synthesized
tcatctggagacattacttt

SEQ ID NO: 17627 - DNA, 20 bp, Artificial Sequence
  chemically synthesized
ggagacattacttttagcct

SEQ ID NO: 17628 - DNA, 20 bp, Artificial Sequence
  chemically synthesized
gccatgcaaaatatactttt

SEQ ID NO: 17629 - DNA, 20 bp, Artificial Sequence
  chemically synthesized
tttggaaaattgccctttga

SEQ ID NO: 17630 - DNA, 20 bp, Artificial Sequence
  chemically synthesized
ttggaaaattgccctttgaa

SEQ ID NO: 17631 - DNA, 20 bp, Artificial Sequence
  chemically synthesized
aaaattgccctttgaaaggc

SEQ ID NO: 17632 - DNA, 20 bp, Artificial Sequence
  chemically synthesized
ctttgaaaggcgagacacaa

SEQ ID NO: 17633 - DNA, 20 bp, Artificial Sequence
  chemically synthesized
tttgaaaggcgagacacaaa

SEQ ID NO: 17634 - DNA, 20 bp, Artificial Sequence
  chemically synthesized
caaatgttgatgctattata

SEQ ID NO: 17635 - DNA, 20 bp, Artificial Sequence
  chemically synthesized
atgctattatatggtaccaa

SEQ ID NO: 17636 - DNA, 20 bp, Artificial Sequence
  chemically synthesized
tgctattatatggtaccaat

SEQ ID NO: 17637 - DNA, 20 bp, Artificial Sequence
  chemically synthesized
ataggattcattaatttata

SEQ ID NO: 17638 - DNA, 20 bp, Artificial Sequence
  chemically synthesized
taggattcattaatttataa

SEQ ID NO: 17639 - DNA, 20 bp, Artificial Sequence
  chemically synthesized
ggattcattaatttataaag

SEQ ID NO: 17640 - DNA, 20 bp, Artificial Sequence
  chemically synthesized
ttcattaatttataaaggag

SEQ ID NO: 17641 - DNA, 20 bp, Artificial Sequence
  chemically synthesized
cattaatttataaaggagaa

SEQ ID NO: 17642 - DNA, 20 bp, Artificial Sequence
  chemically synthesized
ctaatgtaactccaaaatgc

SEQ ID NO: 17643 - DNA, 20 bp, Artificial Sequence
  chemically synthesized
aatgcaagcaattttcatat

SEQ ID NO: 17644 - DNA, 20 bp, Artificial Sequence
  chemically synthesized
attttcatatgagtctacac

SEQ ID NO: 17645 - DNA, 20 bp, Artificial Sequence
  chemically synthesized
tacacaagctaattgtcctt

SEQ ID NO: 17646 - DNA, 20 bp, Artificial Sequence
  chemically synthesized
tccttaagaatttcatcttt

SEQ ID NO: 17647 - DNA, 20 bp, Artificial Sequence
  chemically synthesized
ccttaagaatttcatcttta

SEQ ID NO: 17648 - DNA, 20 bp, Artificial Sequence
  chemically synthesized
agaatttcatctttaaggaa

SEQ ID NO: 17649 - DNA, 20 bp, Artificial Sequence
  chemically synthesized
aagttttttactgtatcaaa

SEQ ID NO: 17650 - DNA, 20 bp, Artificial Sequence
  chemically synthesized
ttttttactgtatcaaaaag

SEQ ID NO: 17651 - DNA, 20 bp, Artificial Sequence
  chemically synthesized
aagaagtttaaactgtcatt

SEQ ID NO: 17652 - DNA, 20 bp, Artificial Sequence
  chemically synthesized
aagtttaaactgtcattgag

SEQ ID NO: 17653 - DNA, 20 bp, Artificial Sequence
  chemically synthesized
gtttaaactgtcattgagca

SEQ ID NO: 17654 - DNA, 20 bp, Artificial Sequence
  chemically synthesized
attgagcagagtctgataat

SEQ ID NO: 17655 - DNA, 20 bp, Artificial Sequence
  chemically synthesized
ttgagcagagtctgataata

SEQ ID NO: 17656 - DNA, 20 bp, Artificial Sequence
  chemically synthesized
ataaggacactgtcaaatca

SEQ ID NO: 17657 - DNA, 20 bp, Artificial Sequence
  chemically synthesized
gacactgtcaaatcacagtt

SEQ ID NO: 17658 - DNA, 20 bp, Artificial Sequence
  chemically synthesized
cagttcagatgttatgtgat

SEQ ID NO: 17659 - DNA, 20 bp, Artificial Sequence
  chemically synthesized
agttcagatgttatgtgatg

SEQ ID NO: 17660 - DNA, 20 bp, Artificial Sequence
  chemically synthesized
cagatgttatgtgatgagga

SEQ ID NO: 17661 - DNA, 20 bp, Artificial Sequence
  chemically synthesized
gttatgtgatgaggacagaa

SEQ ID NO: 17662 - DNA, 20 bp, Artificial Sequence
  chemically synthesized
gaggacagaatagaacacat

SEQ ID NO: 17663 - DNA, 20 bp, Artificial Sequence
  chemically synthesized
aggacagaatagaacacatg

SEQ ID NO: 17664 - DNA, 20 bp, Artificial Sequence
  chemically synthesized
gacagaatagaacacatgag

SEQ ID NO: 17665 - DNA, 20 bp, Artificial Sequence
  chemically synthesized
acagaatagaacacatgagg

SEQ ID NO: 17666 - DNA, 20 bp, Artificial Sequence
  chemically synthesized
gaatagaacacatgaggagg

SEQ ID NO: 17667 - DNA, 20 bp, Artificial Sequence
  chemically synthesized
tagaacacatgaggaggaag

SEQ ID NO: 17668 - DNA, 20 bp, Artificial Sequence
  chemically synthesized
gaggaggaagcagaaacttc

SEQ ID NO: 17669 - DNA, 20 bp, Artificial Sequence
  chemically synthesized
ggaagcagaaacttctagac

SEQ ID NO: 17670 - DNA, 20 bp, Artificial Sequence
  chemically synthesized
cagaaacttctagactggac

SEQ ID NO: 17671 - DNA, 20 bp, Artificial Sequence
  chemically synthesized
acttctagactggacaagaa

SEQ ID NO: 17672 - DNA, 20 bp, Artificial Sequence
  chemically synthesized
aaccatccaacaataaatct

SEQ ID NO: 17673 - DNA, 20 bp, Artificial Sequence
  chemically synthesized
tgatgtcatctactacatct

SEQ ID NO: 17674 - DNA, 20 bp, Artificial Sequence
  chemically synthesized
ctaagtatttcctcaaattc

SEQ ID NO: 17675 - DNA, 20 bp, Artificial Sequence
  chemically synthesized
cctcaaattctggacaattt

SEQ ID NO: 17676 - DNA, 20 bp, Artificial Sequence
  chemically synthesized
aaccatcaaaattatttgtt

SEQ ID NO: 17677 - DNA, 20 bp, Artificial Sequence
  chemically synthesized
accatcaaaattatttgttg

SEQ ID NO: 17678 - DNA, 20 bp, Artificial Sequence
  chemically synthesized
ttgttgaggaaaaataaact

SEQ ID NO: 17679 - DNA, 20 bp, Artificial Sequence
  chemically synthesized
aataaacttagccaatttgc

SEQ ID NO: 17680 - DNA, 20 bp, Artificial Sequence
  chemically synthesized
ataaacttagccaatttgca

SEQ ID NO: 17681 - DNA, 20 bp, Artificial Sequence
  chemically synthesized
taaacttagccaatttgcaa

SEQ ID NO: 17682 - DNA, 20 bp, Artificial Sequence
  chemically synthesized
ttgcaagggcaactaaaatg

SEQ ID NO: 17683 - DNA, 20 bp, Artificial Sequence
  chemically synthesized
aaatgaagaacttttcttta

SEQ ID NO: 17684 - DNA, 20 bp, Artificial Sequence
  chemically synthesized
aagaacttttctttaaagtg

SEQ ID NO: 17685 - DNA, 20 bp, Artificial Sequence
  chemically synthesized
agaacttttctttaaagtgt

SEQ ID NO: 17686 - DNA, 20 bp, Artificial Sequence
  chemically synthesized
aacttttctttaaagtgtgg

SEQ ID NO: 17687 - DNA, 20 bp, Artificial Sequence
  chemically synthesized
aaagtgtgggagtcacatct

SEQ ID NO: 17688 - DNA, 20 bp, Artificial Sequence
  chemically synthesized
caacatatttaaatatatct

SEQ ID NO: 17689 - DNA, 20 bp, Artificial Sequence
  chemically synthesized
acaaaaatgcaaaatttcca

SEQ ID NO: 17690 - DNA, 20 bp, Artificial Sequence
  chemically synthesized
aaagaatttctcctcttctg

SEQ ID NO: 17691 - DNA, 20 bp, Artificial Sequence
  chemically synthesized
ttcttcatcttcatcttttc

SEQ ID NO: 17692 - DNA, 20 bp, Artificial Sequence
  chemically synthesized
tcttcatcttcatcttttcc

SEQ ID NO: 17693 - DNA, 20 bp, Artificial Sequence
  chemically synthesized
ttcatcttcatcttttccag

SEQ ID NO: 17694 - DNA, 20 bp, Artificial Sequence
  chemically synthesized
tttccaggagaatataccat

SEQ ID NO: 17695 - DNA, 20 bp, Artificial Sequence
  chemically synthesized
aatataccataagtttctga

SEQ ID NO: 17696 - DNA, 20 bp, Artificial Sequence
  chemically synthesized
ttctgatggtacacatttat

SEQ ID NO: 17697 - DNA, 20 bp, Artificial Sequence
  chemically synthesized
ttgcaactatgcatcttact

SEQ ID NO: 17698 - DNA, 20 bp, Artificial Sequence
  chemically synthesized
gcaactatgcatcttactca

SEQ ID NO: 17699 - DNA, 20 bp, Artificial Sequence
  chemically synthesized
cttaaaacatccttgtttgt

SEQ ID NO: 17700 - DNA, 20 bp, Artificial Sequence
  chemically synthesized
tttcaaattcatatacactt

SEQ ID NO: 17701 - DNA, 20 bp, Artificial Sequence
  chemically synthesized
caaattcatatacactttgg

SEQ ID NO: 17702 - DNA, 20 bp, Artificial Sequence
  chemically synthesized
gcaaacatttttatttgctg

SEQ ID NO: 17703 - DNA, 20 bp, Artificial Sequence
  chemically synthesized
ttttatttgctgaagaacat

SEQ ID NO: 17704 - DNA, 20 bp, Artificial Sequence
  chemically synthesized
tttatttgctgaagaacata

SEQ ID NO: 17705 - DNA, 20 bp, Artificial Sequence
  chemically synthesized
ttatttgctgaagaacataa

SEQ ID NO: 17706 - DNA, 20 bp, Artificial Sequence
  chemically synthesized
tatttgctgaagaacataag

SEQ ID NO: 17707 - DNA, 20 bp, Artificial Sequence
  chemically synthesized
atttgctgaagaacataagg

SEQ ID NO: 17708 - DNA, 20 bp, Artificial Sequence
  chemically synthesized
tgaagaacataagggggaaa

SEQ ID NO: 17709 - DNA, 20 bp, Artificial Sequence
  chemically synthesized
aagaacataagggggaaata

SEQ ID NO: 17710 - DNA, 20 bp, Artificial Sequence
  chemically synthesized
aaatagagattctttatttg

SEQ ID NO: 17711 - DNA, 20 bp, Artificial Sequence
  chemically synthesized
aagaaacaaatgatttgatt

SEQ ID NO: 17712 - DNA, 20 bp, Artificial Sequence
  chemically synthesized
agaaacaaatgatttgattt

SEQ ID NO: 17713 - DNA, 20 bp, Artificial Sequence
  chemically synthesized
gatttgggaaatgaaatgaa

SEQ ID NO: 17714 - DNA, 20 bp, Artificial Sequence
  chemically synthesized
atgaaatgaaaagaaaaaca

SEQ ID NO: 17715 - DNA, 20 bp, Artificial Sequence
  chemically synthesized
gctacttcttttactcatct

SEQ ID NO: 17716 - DNA, 20 bp, Artificial Sequence
  chemically synthesized
ctacttcttttactcatctg

SEQ ID NO: 17717 - DNA, 20 bp, Artificial Sequence
  chemically synthesized
ttttactcatctgaggcctt

SEQ ID NO: 17718 - DNA, 20 bp, Artificial Sequence
  chemically synthesized
actcatctgaggccttcaga

SEQ ID NO: 17719 - DNA, 20 bp, Artificial Sequence
  chemically synthesized
ccttcagatagtcccccata

SEQ ID NO: 17720 - DNA, 20 bp, Artificial Sequence
  chemically synthesized
gatagtcccccatatagcct

SEQ ID NO: 17721 - DNA, 20 bp, Artificial Sequence
  chemically synthesized
tagtcccccatatagcctta

SEQ ID NO: 17722 - DNA, 20 bp, Artificial Sequence
  chemically synthesized
aaaatatgattatgctcttt

SEQ ID NO: 17723 - DNA, 20 bp, Artificial Sequence
  chemically synthesized
attatgctctttcagtctat

SEQ ID NO: 17724 - DNA, 20 bp, Artificial Sequence
  chemically synthesized
ctattagaaataaaaacata

SEQ ID NO: 17725 - DNA, 20 bp, Artificial Sequence
  chemically synthesized
cataaagcttaaaaaatttc

SEQ ID NO: 17726 - DNA, 20 bp, Artificial Sequence
  chemically synthesized
ataaagcttaaaaaatttca

SEQ ID NO: 17727 - DNA, 20 bp, Artificial Sequence
  chemically synthesized
taaagcttaaaaaatttcaa

SEQ ID NO: 17728 - DNA, 20 bp, Artificial Sequence
  chemically synthesized
agcttaaaaaatttcaaggg

SEQ ID NO: 17729 - DNA, 20 bp, Artificial Sequence
  chemically synthesized
gcttaaaaaatttcaaggga

SEQ ID NO: 17730 - DNA, 20 bp, Artificial Sequence
  chemically synthesized
cttaaaaaatttcaagggaa

SEQ ID NO: 17731 - DNA, 20 bp, Artificial Sequence
  chemically synthesized
ttaaaaaatttcaagggaag

SEQ ID NO: 17732 - DNA, 20 bp, Artificial Sequence
  chemically synthesized
atttcaagggaaggggcttg

SEQ ID NO: 17733 - DNA, 20 bp, Artificial Sequence
  chemically synthesized
gggcttgaagattactgact

SEQ ID NO: 17734 - DNA, 20 bp, Artificial Sequence
  chemically synthesized
ggcttgaagattactgacta

SEQ ID NO: 17735 - DNA, 20 bp, Artificial Sequence
  chemically synthesized
gcttgaagattactgactaa

SEQ ID NO: 17736 - DNA, 20 bp, Artificial Sequence
  chemically synthesized
tgaagattactgactaaggg

SEQ ID NO: 17737 - DNA, 20 bp, Artificial Sequence
  chemically synthesized
tgacactcacctcctccaca

SEQ ID NO: 17738 - DNA, 20 bp, Artificial Sequence
  chemically synthesized
tcctccacaaagaaccaaaa

SEQ ID NO: 17739 - DNA, 20 bp, Artificial Sequence
  chemically synthesized
ccacaaagaaccaaaatagt

SEQ ID NO: 17740 - DNA, 20 bp, Artificial Sequence
  chemically synthesized
caaagaaccaaaatagtaag

SEQ ID NO: 17741 - DNA, 20 bp, Artificial Sequence
  chemically synthesized
gtaagtagaaaatcccacat

SEQ ID NO: 17742 - DNA, 20 bp, Artificial Sequence
  chemically synthesized
aagtagaaaatcccacataa

SEQ ID NO: 17743 - DNA, 20 bp, Artificial Sequence
  chemically synthesized
gtagaaaatcccacataaga

SEQ ID NO: 17744 - DNA, 20 bp, Artificial Sequence
  chemically synthesized
tcccacataagagagaattc

SEQ ID NO: 17745 - DNA, 20 bp, Artificial Sequence
  chemically synthesized
gagagaattctggaattcaa

SEQ ID NO: 17746 - DNA, 20 bp, Artificial Sequence
  chemically synthesized
gagaattctggaattcaaca

SEQ ID NO: 17747 - DNA, 20 bp, Artificial Sequence
  chemically synthesized
aattctggaattcaacagag

SEQ ID NO: 17748 - DNA, 20 bp, Artificial Sequence
  chemically synthesized
ggaattcaacagagaagtga

SEQ ID NO: 17749 - DNA, 20 bp, Artificial Sequence
  chemically synthesized
gaattcaacagagaagtgac

SEQ ID NO: 17750 - DNA, 20 bp, Artificial Sequence
  chemically synthesized
ttcaacagagaagtgacagg

SEQ ID NO: 17751 - DNA, 20 bp, Artificial Sequence
  chemically synthesized
agaagtgacaggaagcatct

SEQ ID NO: 17752 - DNA, 20 bp, Artificial Sequence
  chemically synthesized
gaagtgacaggaagcatcta

SEQ ID NO: 17753 - DNA, 20 bp, Artificial Sequence
  chemically synthesized
aggaagcatctaaggcaatg

SEQ ID NO: 17754 - DNA, 20 bp, Artificial Sequence
  chemically synthesized
ggaagcatctaaggcaatga

SEQ ID NO: 17755 - DNA, 20 bp, Artificial Sequence
  chemically synthesized
gaagcatctaaggcaatgaa

SEQ ID NO: 17756 - DNA, 20 bp, Artificial Sequence
  chemically synthesized
aagcatctaaggcaatgaag

SEQ ID NO: 17757 - DNA, 20 bp, Artificial Sequence
  chemically synthesized
gcatctaaggcaatgaaggg

SEQ ID NO: 17758 - DNA, 20 bp, Artificial Sequence
  chemically synthesized
catctaaggcaatgaagggg

SEQ ID NO: 17759 - DNA, 20 bp, Artificial Sequence
  chemically synthesized
atctaaggcaatgaagggga

SEQ ID NO: 17760 - DNA, 20 bp, Artificial Sequence
  chemically synthesized
taaggcaatgaaggggaggg

SEQ ID NO: 17761 - DNA, 20 bp, Artificial Sequence
  chemically synthesized
gcaatgaaggggagggaagc

SEQ ID NO: 17762 - DNA, 20 bp, Artificial Sequence
  chemically synthesized
caatgaaggggagggaagca

SEQ ID NO: 17763 - DNA, 20 bp, Artificial Sequence
  chemically synthesized
tgaaggggagggaagcaagg

SEQ ID NO: 17764 - DNA, 20 bp, Artificial Sequence
  chemically synthesized
gggaagcaaggaagcctacc

SEQ ID NO: 17765 - DNA, 20 bp, Artificial Sequence
  chemically synthesized
aagcaaggaagcctacccag

SEQ ID NO: 17766 - DNA, 20 bp, Artificial Sequence
  chemically synthesized
agcaaggaagcctacccagt

SEQ ID NO: 17767 - DNA, 20 bp, Artificial Sequence
  chemically synthesized
gcaaggaagcctacccagta

SEQ ID NO: 17768 - DNA, 20 bp, Artificial Sequence
  chemically synthesized
acccagtagggatcctctgt

SEQ ID NO: 17769 - DNA, 20 bp, Artificial Sequence
  chemically synthesized
cccagtagggatcctctgtg

SEQ ID NO: 17770 - DNA, 20 bp, Artificial Sequence
  chemically synthesized
gtagggatcctctgtgaggc

SEQ ID NO: 17771 - DNA, 20 bp, Artificial Sequence
  chemically synthesized
agggatcctctgtgaggcca

SEQ ID NO: 17772 - DNA, 20 bp, Artificial Sequence
  chemically synthesized
ggatcctctgtgaggccaga

SEQ ID NO: 17773 - DNA, 20 bp, Artificial Sequence
  chemically synthesized
gatcctctgtgaggccagag

SEQ ID NO: 17774 - DNA, 20 bp, Artificial Sequence
  chemically synthesized
gtgaggccagagaggctccc

SEQ ID NO: 17775 - DNA, 20 bp, Artificial Sequence
  chemically synthesized
gaggctccccagtgcatcga

SEQ ID NO: 17776 - DNA, 20 bp, Artificial Sequence
  chemically synthesized
tccccagtgcatcgaaagtt

SEQ ID NO: 17777 - DNA, 20 bp, Artificial Sequence
  chemically synthesized
aaagttaagtgactgactcc

SEQ ID NO: 17778 - DNA, 20 bp, Artificial Sequence
  chemically synthesized
gttaagtgactgactcccag

SEQ ID NO: 17779 - DNA, 20 bp, Artificial Sequence
  chemically synthesized
agtggtccacatctgcatta

SEQ ID NO: 17780 - DNA, 20 bp, Artificial Sequence
  chemically synthesized
cacatctgcattatggactc

SEQ ID NO: 17781 - DNA, 20 bp, Artificial Sequence
  chemically synthesized
acatctgcattatggactcc

SEQ ID NO: 17782 - DNA, 20 bp, Artificial Sequence
  chemically synthesized
attatggactccaggaatcc

SEQ ID NO: 17783 - DNA, 20 bp, Artificial Sequence
  chemically synthesized
gactccaggaatcctagcca

SEQ ID NO: 17784 - DNA, 20 bp, Artificial Sequence
  chemically synthesized
actccaggaatcctagccac

SEQ ID NO: 17785 - DNA, 20 bp, Artificial Sequence
  chemically synthesized
tccaggaatcctagccacag

SEQ ID NO: 17786 - DNA, 20 bp, Artificial Sequence
  chemically synthesized
caggaatcctagccacagga

SEQ ID NO: 17787 - DNA, 20 bp, Artificial Sequence
  chemically synthesized
aggagagtcccttgaccatg

SEQ ID NO: 17788 - DNA, 20 bp, Artificial Sequence
  chemically synthesized
ggagagtcccttgaccatgc

SEQ ID NO: 17789 - DNA, 20 bp, Artificial Sequence
  chemically synthesized
cccttgaccatgcaggcctt

SEQ ID NO: 17790 - DNA, 20 bp, Artificial Sequence
  chemically synthesized
gcaggccttgagactatcat

SEQ ID NO: 17791 - DNA, 20 bp, Artificial Sequence
  chemically synthesized
caggccttgagactatcata

SEQ ID NO: 17792 - DNA, 20 bp, Artificial Sequence
  chemically synthesized
gactatcataaggaactgcc

SEQ ID NO: 17793 - DNA, 20 bp, Artificial Sequence
  chemically synthesized
aactgcccagcaatcgcaca

SEQ ID NO: 17794 - DNA, 20 bp, Artificial Sequence
  chemically synthesized
actgcccagcaatcgcacaa

SEQ ID NO: 17795 - DNA, 20 bp, Artificial Sequence
  chemically synthesized
atcgcacaaaggcattgctc

SEQ ID NO: 17796 - DNA, 20 bp, Artificial Sequence
  chemically synthesized
cgcacaaaggcattgctcca

SEQ ID NO: 17797 - DNA, 20 bp, Artificial Sequence
  chemically synthesized
acaaaggcattgctccagag

SEQ ID NO: 17798 - DNA, 20 bp, Artificial Sequence
  chemically synthesized
caaaggcattgctccagaga

SEQ ID NO: 17799 - DNA, 20 bp, Artificial Sequence
  chemically synthesized
aaggcattgctccagagaag

SEQ ID NO: 17800 - DNA, 20 bp, Artificial Sequence
  chemically synthesized
tccagagaaggagctctcac

SEQ ID NO: 17801 - DNA, 20 bp, Artificial Sequence
  chemically synthesized
ccagagaaggagctctcact

SEQ ID NO: 17802 - DNA, 20 bp, Artificial Sequence
  chemically synthesized
cccctgccatccccattact

SEQ ID NO: 17803 - DNA, 20 bp, Artificial Sequence
  chemically synthesized
ctgccatccccattactgag

SEQ ID NO: 17804 - DNA, 20 bp, Artificial Sequence
  chemically synthesized
catccccattactgagcagc

SEQ ID NO: 17805 - DNA, 20 bp, Artificial Sequence
  chemically synthesized
atccccattactgagcagca

SEQ ID NO: 17806 - DNA, 20 bp, Artificial Sequence
  chemically synthesized
gagcagcaaggtgccatttt

SEQ ID NO: 17807 - DNA, 20 bp, Artificial Sequence
  chemically synthesized
gcagcaaggtgccattttga

SEQ ID NO: 17808 - DNA, 20 bp, Artificial Sequence
  chemically synthesized
tttgagagcccaacacccac

SEQ ID NO: 17809 - DNA, 20 bp, Artificial Sequence
  chemically synthesized
caccagatgacatcgttcct

SEQ ID NO: 17810 - DNA, 20 bp, Artificial Sequence
  chemically synthesized
tctgcatctctacatccctg

SEQ ID NO: 17811 - DNA, 20 bp, Artificial Sequence
  chemically synthesized
ctgctgacatcccccaccca

SEQ ID NO: 17812 - DNA, 20 bp, Artificial Sequence
  chemically synthesized
gacatcccccacccacagct

SEQ ID NO: 17813 - DNA, 20 bp, Artificial Sequence
  chemically synthesized
ccacagctgagtgctactgc

SEQ ID NO: 17814 - DNA, 20 bp, Artificial Sequence
  chemically synthesized
ctactgctggctgctgtcac

SEQ ID NO: 17815 - DNA, 20 bp, Artificial Sequence
  chemically synthesized
tactgctggctgctgtcacc

SEQ ID NO: 17816 - DNA, 20 bp, Artificial Sequence
  chemically synthesized
actgctggctgctgtcacca

SEQ ID NO: 17817 - DNA, 20 bp, Artificial Sequence
  chemically synthesized
ggctgctgtcaccagggata

SEQ ID NO: 17818 - DNA, 20 bp, Artificial Sequence
  chemically synthesized
ccagggataaagtgtgtcat

SEQ ID NO: 17819 - DNA, 20 bp, Artificial Sequence
  chemically synthesized
gggataaagtgtgtcattag

SEQ ID NO: 17820 - DNA, 20 bp, Artificial Sequence
  chemically synthesized
ataaagtgtgtcattagaag

SEQ ID NO: 17821 - DNA, 20 bp, Artificial Sequence
  chemically synthesized
gaagtggactcccccacccc

SEQ ID NO: 17822 - DNA, 20 bp, Artificial Sequence
  chemically synthesized
gtggactcccccacccccag

SEQ ID NO: 17823 - DNA, 20 bp, Artificial Sequence
  chemically synthesized
gactcccccacccccagtag

SEQ ID NO: 17824 - DNA, 20 bp, Artificial Sequence
  chemically synthesized
actcccccacccccagtagc

SEQ ID NO: 17825 - DNA, 20 bp, Artificial Sequence
  chemically synthesized
ctcccccacccccagtagca

SEQ ID NO: 17826 - DNA, 20 bp, Artificial Sequence
  chemically synthesized
cagggctgctacacatttat

SEQ ID NO: 17827 - DNA, 20 bp, Artificial Sequence
  chemically synthesized
tacacatttataagctccct

SEQ ID NO: 17828 - DNA, 20 bp, Artificial Sequence
  chemically synthesized
agaaaatgctaccccacttg

SEQ ID NO: 17829 - DNA, 20 bp, Artificial Sequence
  chemically synthesized
ccccacttgcagccaccatc

SEQ ID NO: 17830 - DNA, 20 bp, Artificial Sequence
  chemically synthesized
cccacttgcagccaccatct

SEQ ID NO: 17831 - DNA, 20 bp, Artificial Sequence
  chemically synthesized
ccacttgcagccaccatctg

SEQ ID NO: 17832 - DNA, 20 bp, Artificial Sequence
  chemically synthesized
gggctgaaacacatgcccac

SEQ ID NO: 17833 - DNA, 20 bp, Artificial Sequence
  chemically synthesized
gcccaccagcaacccattta

SEQ ID NO: 17834 - DNA, 20 bp, Artificial Sequence
  chemically synthesized
tttatagctgctgccactga

SEQ ID NO: 17835 - DNA, 20 bp, Artificial Sequence
  chemically synthesized
aacacaccccgcaccccttc

SEQ ID NO: 17836 - DNA, 20 bp, Artificial Sequence
  chemically synthesized
cacaccccgcaccccttcaa

SEQ ID NO: 17837 - DNA, 20 bp, Artificial Sequence
  chemically synthesized
accccgcaccccttcaagag

SEQ ID NO: 17838 - DNA, 20 bp, Artificial Sequence
  chemically synthesized
ccccgcaccccttcaagagc

SEQ ID NO: 17839 - DNA, 20 bp, Artificial Sequence
  chemically synthesized
cccgcaccccttcaagagca

SEQ ID NO: 17840 - DNA, 20 bp, Artificial Sequence
  chemically synthesized
tcaagagcagggcaacaatg

SEQ ID NO: 17841 - DNA, 20 bp, Artificial Sequence
  chemically synthesized
agagcagggcaacaatgcag

SEQ ID NO: 17842 - DNA, 20 bp, Artificial Sequence
  chemically synthesized
gcagtagctgctaattcact

SEQ ID NO: 17843 - DNA, 20 bp, Artificial Sequence
  chemically synthesized
cagtagctgctaattcactc

SEQ ID NO: 17844 - DNA, 20 bp, Artificial Sequence
  chemically synthesized
aattcactcaggcattctgc

SEQ ID NO: 17845 - DNA, 20 bp, Artificial Sequence
  chemically synthesized
attcactcaggcattctgct

SEQ ID NO: 17846 - DNA, 20 bp, Artificial Sequence
  chemically synthesized
ttcactcaggcattctgctg

SEQ ID NO: 17847 - DNA, 20 bp, Artificial Sequence
  chemically synthesized
tcactcaggcattctgctgg

SEQ ID NO: 17848 - DNA, 20 bp, Artificial Sequence
  chemically synthesized
aggcattctgctgggggcct

SEQ ID NO: 17849 - DNA, 20 bp, Artificial Sequence
  chemically synthesized
ggcattctgctgggggcctg

SEQ ID NO: 17850 - DNA, 20 bp, Artificial Sequence
  chemically synthesized
gcctgaggatcactccactc

SEQ ID NO: 17851 - DNA, 20 bp, Artificial Sequence
  chemically synthesized
cactccactccagcctatga

SEQ ID NO: 17852 - DNA, 20 bp, Artificial Sequence
  chemically synthesized
ccactccagcctatgatagc

SEQ ID NO: 17853 - DNA, 20 bp, Artificial Sequence
  chemically synthesized
cggtgtccacacacaccact

SEQ ID NO: 17854 - DNA, 20 bp, Artificial Sequence
  chemically synthesized
tgtccacacacaccactgag

SEQ ID NO: 17855 - DNA, 20 bp, Artificial Sequence
  chemically synthesized
cacacaccactgagtggcct

SEQ ID NO: 17856 - DNA, 20 bp, Artificial Sequence
  chemically synthesized
acacaccactgagtggcctg

SEQ ID NO: 17857 - DNA, 20 bp, Artificial Sequence
  chemically synthesized
accactgagtggcctgaggt

SEQ ID NO: 17858 - DNA, 20 bp, Artificial Sequence
  chemically synthesized
ccactgagtggcctgaggtc

SEQ ID NO: 17859 - DNA, 20 bp, Artificial Sequence
  chemically synthesized
ggcctgaggtcaggaacacc

SEQ ID NO: 17860 - DNA, 20 bp, Artificial Sequence
  chemically synthesized
gaggtcaggaacacccagcc

SEQ ID NO: 17861 - DNA, 20 bp, Artificial Sequence
  chemically synthesized
ctttgccttcctcaatgcct

SEQ ID NO: 17862 - DNA, 20 bp, Artificial Sequence
  chemically synthesized
gccttcctcaatgcctaagc

SEQ ID NO: 17863 - DNA, 20 bp, Artificial Sequence
  chemically synthesized
caatgcctaagcaagttgtc

SEQ ID NO: 17864 - DNA, 20 bp, Artificial Sequence
  chemically synthesized
aatgcctaagcaagttgtct

SEQ ID NO: 17865 - DNA, 20 bp, Artificial Sequence
  chemically synthesized
aagcaagttgtctgggaacc

SEQ ID NO: 17866 - DNA, 20 bp, Artificial Sequence
  chemically synthesized
gcaagttgtctgggaaccca

SEQ ID NO: 17867 - DNA, 20 bp, Artificial Sequence
  chemically synthesized
gttgtctgggaacccagaga

SEQ ID NO: 17868 - DNA, 20 bp, Artificial Sequence
  chemically synthesized
cttgtgccatccaccatgac

SEQ ID NO: 17869 - DNA, 20 bp, Artificial Sequence
  chemically synthesized
atccaccatgactggtacct

SEQ ID NO: 17870 - DNA, 20 bp, Artificial Sequence
  chemically synthesized
tggtacctaagcaaccctcc

SEQ ID NO: 17871 - DNA, 20 bp, Artificial Sequence
  chemically synthesized
tacctaagcaaccctcccag

SEQ ID NO: 17872 - DNA, 20 bp, Artificial Sequence
  chemically synthesized
ccctcccagaagcctgatga

SEQ ID NO: 17873 - DNA, 20 bp, Artificial Sequence
  chemically synthesized
cctcccagaagcctgatgat

SEQ ID NO: 17874 - DNA, 20 bp, Artificial Sequence
  chemically synthesized
tctgccactgccatcacaac

SEQ ID NO: 17875 - DNA, 20 bp, Artificial Sequence
  chemically synthesized
cctcctgcatgtgccacctg

SEQ ID NO: 17876 - DNA, 20 bp, Artificial Sequence
  chemically synthesized
ctcctgcatgtgccacctgt

SEQ ID NO: 17877 - DNA, 20 bp, Artificial Sequence
  chemically synthesized
atgtgccacctgtgggtctg

SEQ ID NO: 17878 - DNA, 20 bp, Artificial Sequence
  chemically synthesized
ccacctgtgggtctgaagac

SEQ ID NO: 17879 - DNA, 20 bp, Artificial Sequence
  chemically synthesized
ggtctgaagactggctcatt

SEQ ID NO: 17880 - DNA, 20 bp, Artificial Sequence
  chemically synthesized
actggctcattcagcccttg

SEQ ID NO: 17881 - DNA, 20 bp, Artificial Sequence
  chemically synthesized
cttgcagccaccaccaacac

SEQ ID NO: 17882 - DNA, 20 bp, Artificial Sequence
  chemically synthesized
agccaccaccaacaccagtg

SEQ ID NO: 17883 - DNA, 20 bp, Artificial Sequence
  chemically synthesized
caacaccagtgcagactgct

SEQ ID NO: 17884 - DNA, 20 bp, Artificial Sequence
  chemically synthesized
aacaccagtgcagactgctt

SEQ ID NO: 17885 - DNA, 20 bp, Artificial Sequence
  chemically synthesized
caccagtgcagactgcttgg

SEQ ID NO: 17886 - DNA, 20 bp, Artificial Sequence
  chemically synthesized
agtgcagactgcttgggagc

SEQ ID NO: 17887 - DNA, 20 bp, Artificial Sequence
  chemically synthesized
tgcagactgcttgggagcca

SEQ ID NO: 17888 - DNA, 20 bp, Artificial Sequence
  chemically synthesized
gcagactgcttgggagccag

SEQ ID NO: 17889 - DNA, 20 bp, Artificial Sequence
  chemically synthesized
cagactgcttgggagccaga

SEQ ID NO: 17890 - DNA, 20 bp, Artificial Sequence
  chemically synthesized
ggagccagagggttgtcctg

SEQ ID NO: 17891 - DNA, 20 bp, Artificial Sequence
  chemically synthesized
gggttgtcctgcagttgcta

SEQ ID NO: 17892 - DNA, 20 bp, Artificial Sequence
  chemically synthesized
cccacaccacacccactgtc

SEQ ID NO: 17893 - DNA, 20 bp, Artificial Sequence
  chemically synthesized
acaccacacccactgtccag

SEQ ID NO: 17894 - DNA, 20 bp, Artificial Sequence
  chemically synthesized
cacccactgtccagaagcct

SEQ ID NO: 17895 - DNA, 20 bp, Artificial Sequence
  chemically synthesized
acccactgtccagaagcctg

SEQ ID NO: 17896 - DNA, 20 bp, Artificial Sequence
  chemically synthesized
aagcctgaggacccacacac

SEQ ID NO: 17897 - DNA, 20 bp, Artificial Sequence
  chemically synthesized
tgaggacccacacaccagcc

SEQ ID NO: 17898 - DNA, 20 bp, Artificial Sequence
  chemically synthesized
cacaccagcccagtctacta

SEQ ID NO: 17899 - DNA, 20 bp, Artificial Sequence
  chemically synthesized
tatggccactactgacaccc

SEQ ID NO: 17900 - DNA, 20 bp, Artificial Sequence
  chemically synthesized
acacccaagcaaactgcctg

SEQ ID NO: 17901 - DNA, 20 bp, Artificial Sequence
  chemically synthesized
cacccaagcaaactgcctga

SEQ ID NO: 17902 - DNA, 20 bp, Artificial Sequence
  chemically synthesized
agcaaactgcctgaaggcca

SEQ ID NO: 17903 - DNA, 20 bp, Artificial Sequence
  chemically synthesized
ggccaaagaatcaacccaac

SEQ ID NO: 17904 - DNA, 20 bp, Artificial Sequence
  chemically synthesized
ccaactagactcattaccat

SEQ ID NO: 17905 - DNA, 20 bp, Artificial Sequence
  chemically synthesized
accatcagtgccaatgtaca

SEQ ID NO: 17906 - DNA, 20 bp, Artificial Sequence
  chemically synthesized
agtgccaatgtacacagcca

SEQ ID NO: 17907 - DNA, 20 bp, Artificial Sequence
  chemically synthesized
gtgccaatgtacacagccat

SEQ ID NO: 17908 - DNA, 20 bp, Artificial Sequence
  chemically synthesized
tgccaatgtacacagccatg

SEQ ID NO: 17909 - DNA, 20 bp, Artificial Sequence
  chemically synthesized
tgtacacagccatggggccc

SEQ ID NO: 17910 - DNA, 20 bp, Artificial Sequence
  chemically synthesized
gtacacagccatggggccca

SEQ ID NO: 17911 - DNA, 20 bp, Artificial Sequence
  chemically synthesized
acagccatggggcccaagga

SEQ ID NO: 17912 - DNA, 20 bp, Artificial Sequence
  chemically synthesized
cagccatggggcccaaggac

SEQ ID NO: 17913 - DNA, 20 bp, Artificial Sequence
  chemically synthesized
gggcccaaggacaggaatgc

SEQ ID NO: 17914 - DNA, 20 bp, Artificial Sequence
  chemically synthesized
ggcccaaggacaggaatgct

SEQ ID NO: 17915 - DNA, 20 bp, Artificial Sequence
  chemically synthesized
gctaggcccaccaccaccac

SEQ ID NO: 17916 - DNA, 20 bp, Artificial Sequence
  chemically synthesized
ctaggcccaccaccaccact

SEQ ID NO: 17917 - DNA, 20 bp, Artificial Sequence
  chemically synthesized
taggcccaccaccaccactg

SEQ ID NO: 17918 - DNA, 20 bp, Artificial Sequence
  chemically synthesized
ccaccaccaccactggggcc

SEQ ID NO: 17919 - DNA, 20 bp, Artificial Sequence
  chemically synthesized
caccaccaccactggggcca

SEQ ID NO: 17920 - DNA, 20 bp, Artificial Sequence
  chemically synthesized
ccaccactggggccaaggac

SEQ ID NO: 17921 - DNA, 20 bp, Artificial Sequence
  chemically synthesized
ccacttgatattcttgtctc

SEQ ID NO: 17922 - DNA, 20 bp, Artificial Sequence
  chemically synthesized
ttcactaacaaatgcaccct

SEQ ID NO: 17923 - DNA, 20 bp, Artificial Sequence
  chemically synthesized
ctaagccactgaaaaaatca

SEQ ID NO: 17924 - DNA, 20 bp, Artificial Sequence
  chemically synthesized
acagacactgatgatactgt

SEQ ID NO: 17925 - DNA, 20 bp, Artificial Sequence
  chemically synthesized
gacactgatgatactgttgg

SEQ ID NO: 17926 - DNA, 20 bp, Artificial Sequence
  chemically synthesized
agctgaaaaaaaataatatg

SEQ ID NO: 17927 - DNA, 20 bp, Artificial Sequence
  chemically synthesized
actatgctgctgtatgcacc

SEQ ID NO: 17928 - DNA, 20 bp, Artificial Sequence
  chemically synthesized
gcacctagaaatcaaaatca

SEQ ID NO: 17929 - DNA, 20 bp, Artificial Sequence
  chemically synthesized
tgccctactcaatcaacacc

SEQ ID NO: 17930 - DNA, 20 bp, Artificial Sequence
  chemically synthesized
tcaacaccaagatacatctt

SEQ ID NO: 17931 - DNA, 20 bp, Artificial Sequence
  chemically synthesized
caagatacatcttcagaaaa

SEQ ID NO: 17932 - DNA, 20 bp, Artificial Sequence
  chemically synthesized
caaaaacaaatttacaaaac

SEQ ID NO: 17933 - DNA, 20 bp, Artificial Sequence
  chemically synthesized
aaacaaatttacaaaactgg

SEQ ID NO: 17934 - DNA, 20 bp, Artificial Sequence
  chemically synthesized
caaatttacaaaactggaag

SEQ ID NO: 17935 - DNA, 20 bp, Artificial Sequence
  chemically synthesized
ggaagcagcaatcattacac

SEQ ID NO: 17936 - DNA, 20 bp, Artificial Sequence
  chemically synthesized
agcaatcattacaccagatg

SEQ ID NO: 17937 - DNA, 20 bp, Artificial Sequence
  chemically synthesized
caatcattacaccagatgca

SEQ ID NO: 17938 - DNA, 20 bp, Artificial Sequence
  chemically synthesized
agatgcagagatatcaatgc

SEQ ID NO: 17939 - DNA, 20 bp, Artificial Sequence
  chemically synthesized
aagaacaaaataaacataaa

SEQ ID NO: 17940 - DNA, 20 bp, Artificial Sequence
  chemically synthesized
agaacaaaataaacataaaa

SEQ ID NO: 17941 - DNA, 20 bp, Artificial Sequence
  chemically synthesized
aaaataaacataaaaaggtg

SEQ ID NO: 17942 - DNA, 20 bp, Artificial Sequence
  chemically synthesized
gaagaaatatgacacttcca

SEQ ID NO: 17943 - DNA, 20 bp, Artificial Sequence
  chemically synthesized
aagaaatatgacacttccaa

SEQ ID NO: 17944 - DNA, 20 bp, Artificial Sequence
  chemically synthesized
aaaggaatttaataattctt

SEQ ID NO: 17945 - DNA, 20 bp, Artificial Sequence
  chemically synthesized
taataattcttcagcaacat

SEQ ID NO: 17946 - DNA, 20 bp, Artificial Sequence
  chemically synthesized
aattcttcagcaacataagc

SEQ ID NO: 17947 - DNA, 20 bp, Artificial Sequence
  chemically synthesized
tcttcagcaacataagccag

SEQ ID NO: 17948 - DNA, 20 bp, Artificial Sequence
  chemically synthesized
acataagccagtggaaaaaa

SEQ ID NO: 17949 - DNA, 20 bp, Artificial Sequence
  chemically synthesized
aaaagacatttataaaattc

SEQ ID NO: 17950 - DNA, 20 bp, Artificial Sequence
  chemically synthesized
atttataaaattctggaaaa

SEQ ID NO: 17951 - DNA, 20 bp, Artificial Sequence
  chemically synthesized
gaatccaaaatgttgatatt

SEQ ID NO: 17952 - DNA, 20 bp, Artificial Sequence
  chemically synthesized
aatccaaaatgttgatatta

SEQ ID NO: 17953 - DNA, 20 bp, Artificial Sequence
  chemically synthesized
ccaaaatgttgatattaagg

SEQ ID NO: 17954 - DNA, 20 bp, Artificial Sequence
  chemically synthesized
atgttgatattaaggaagct

SEQ ID NO: 17955 - DNA, 20 bp, Artificial Sequence
  chemically synthesized
tgatattaaggaagctcagt

SEQ ID NO: 17956 - DNA, 20 bp, Artificial Sequence
  chemically synthesized
aaggaagctcagtgagacac

SEQ ID NO: 17957 - DNA, 20 bp, Artificial Sequence
  chemically synthesized
ggaagctcagtgagacacaa

SEQ ID NO: 17958 - DNA, 20 bp, Artificial Sequence
  chemically synthesized
cagtgagacacaagagaact

SEQ ID NO: 17959 - DNA, 20 bp, Artificial Sequence
  chemically synthesized
gaactcagataaacaataaa

SEQ ID NO: 17960 - DNA, 20 bp, Artificial Sequence
  chemically synthesized
gataaacaataaaaagaaat

SEQ ID NO: 17961 - DNA, 20 bp, Artificial Sequence
  chemically synthesized
aagaaatcagaaaaacaatt

SEQ ID NO: 17962 - DNA, 20 bp, Artificial Sequence
  chemically synthesized
agaaatcagaaaaacaattc

SEQ ID NO: 17963 - DNA, 20 bp, Artificial Sequence
  chemically synthesized
aaacaattcaggatatgaat

SEQ ID NO: 17964 - DNA, 20 bp, Artificial Sequence
  chemically synthesized
tatgaatgagaaatttaccc

SEQ ID NO: 17965 - DNA, 20 bp, Artificial Sequence
  chemically synthesized
tgaatgagaaatttacccaa

SEQ ID NO: 17966 - DNA, 20 bp, Artificial Sequence
  chemically synthesized
tgagaaatttacccaagaga

SEQ ID NO: 17967 - DNA, 20 bp, Artificial Sequence
  chemically synthesized
acccaagagatagatacaac

SEQ ID NO: 17968 - DNA, 20 bp, Artificial Sequence
  chemically synthesized
tacaacaagaatgaaccaaa

SEQ ID NO: 17969 - DNA, 20 bp, Artificial Sequence
  chemically synthesized
aaacagaaattctgtaactg

SEQ ID NO: 17970 - DNA, 20 bp, Artificial Sequence
  chemically synthesized
acagaaattctgtaactgaa

SEQ ID NO: 17971 - DNA, 20 bp, Artificial Sequence
  chemically synthesized
gtaactgaagagtttattga

SEQ ID NO: 17972 - DNA, 20 bp, Artificial Sequence
  chemically synthesized
acattcaaaaacttcaacaa

SEQ ID NO: 17973 - DNA, 20 bp, Artificial Sequence
  chemically synthesized
caaaaacttcaacaatagat

SEQ ID NO: 17974 - DNA, 20 bp, Artificial Sequence
  chemically synthesized
cttcaacaatagatcagatc

SEQ ID NO: 17975 - DNA, 20 bp, Artificial Sequence
  chemically synthesized
caacaatagatcagatcaag

SEQ ID NO: 17976 - DNA, 20 bp, Artificial Sequence
  chemically synthesized
caatagatcagatcaagcag

SEQ ID NO: 17977 - DNA, 20 bp, Artificial Sequence
  chemically synthesized
atcaagcagaagaaaaattt

SEQ ID NO: 17978 - DNA, 20 bp, Artificial Sequence
  chemically synthesized
aagaaaaatttcagaacttg

SEQ ID NO: 17979 - DNA, 20 bp, Artificial Sequence
  chemically synthesized
aaaatttcagaacttgaaga

SEQ ID NO: 17980 - DNA, 20 bp, Artificial Sequence
  chemically synthesized
aaatttcagaacttgaagac

SEQ ID NO: 17981 - DNA, 20 bp, Artificial Sequence
  chemically synthesized
gaagacaggtcttttaaaat

SEQ ID NO: 17982 - DNA, 20 bp, Artificial Sequence
  chemically synthesized
acaggtcttttaaaattagc

SEQ ID NO: 17983 - DNA, 20 bp, Artificial Sequence
  chemically synthesized
aaaattagctggtcaaatga

SEQ ID NO: 17984 - DNA, 20 bp, Artificial Sequence
  chemically synthesized
ttagctggtcaaatgataga

SEQ ID NO: 17985 - DNA, 20 bp, Artificial Sequence
  chemically synthesized
tagctggtcaaatgatagaa

SEQ ID NO: 17986 - DNA, 20 bp, Artificial Sequence
  chemically synthesized
aatgatagaaaggaaaaaaa

SEQ ID NO: 17987 - DNA, 20 bp, Artificial Sequence
  chemically synthesized
ggaaaaaaaaagaatgaaca

SEQ ID NO: 17988 - DNA, 20 bp, Artificial Sequence
  chemically synthesized
acaaagtgtatgtgacatat

SEQ ID NO: 17989 - DNA, 20 bp, Artificial Sequence
  chemically synthesized
caaagtgtatgtgacatatg

SEQ ID NO: 17990 - DNA, 20 bp, Artificial Sequence
  chemically synthesized
gtgacatatgaggcactata

SEQ ID NO: 17991 - DNA, 20 bp, Artificial Sequence
  chemically synthesized
tgaacaaatattcaaatttg

SEQ ID NO: 17992 - DNA, 20 bp, Artificial Sequence
  chemically synthesized
tattcaaatttgcagtttcc

SEQ ID NO: 17993 - DNA, 20 bp, Artificial Sequence
  chemically synthesized
tcaaatttgcagtttcccag

SEQ ID NO: 17994 - DNA, 20 bp, Artificial Sequence
  chemically synthesized
caaatttgcagtttcccaga

SEQ ID NO: 17995 - DNA, 20 bp, Artificial Sequence
  chemically synthesized
ttgcagtttcccagaaggta

SEQ ID NO: 17996 - DNA, 20 bp, Artificial Sequence
  chemically synthesized
gcagtttcccagaaggtaaa

SEQ ID NO: 17997 - DNA, 20 bp, Artificial Sequence
  chemically synthesized
agaaggtaaagagaacatga

SEQ ID NO: 17998 - DNA, 20 bp, Artificial Sequence
  chemically synthesized
gaaggtaaagagaacatgaa

SEQ ID NO: 17999 - DNA, 20 bp, Artificial Sequence
  chemically synthesized
taaagagaacatgaaaggtg

SEQ ID NO: 18000 - DNA, 20 bp, Artificial Sequence
  chemically synthesized
aaagagaacatgaaaggtgt

SEQ ID NO: 18001 - DNA, 20 bp, Artificial Sequence
  chemically synthesized
aaacctacgtaacaacacaa

SEQ ID NO: 18002 - DNA, 20 bp, Artificial Sequence
  chemically synthesized
acaatagctgaaaacttgtc

SEQ ID NO: 18003 - DNA, 20 bp, Artificial Sequence
  chemically synthesized
agctgaaaacttgtcaagtc

SEQ ID NO: 18004 - DNA, 20 bp, Artificial Sequence
  chemically synthesized
gaaaacttgtcaagtctagc

SEQ ID NO: 18005 - DNA, 20 bp, Artificial Sequence
  chemically synthesized
gtcaagtctagcaagaaatg

SEQ ID NO: 18006 - DNA, 20 bp, Artificial Sequence
  chemically synthesized
tagcaagaaatgtagacatc

SEQ ID NO: 18007 - DNA, 20 bp, Artificial Sequence
  chemically synthesized
acatccagacaaatgaaaat

SEQ ID NO: 18008 - DNA, 20 bp, Artificial Sequence
  chemically synthesized
cccaaataatataatgcaaa

SEQ ID NO: 18009 - DNA, 20 bp, Artificial Sequence
  chemically synthesized
atgcaaaaagctcttctcca

SEQ ID NO: 18010 - DNA, 20 bp, Artificial Sequence
  chemically synthesized
ctcttctccacagcacatta

SEQ ID NO: 18011 - DNA, 20 bp, Artificial Sequence
  chemically synthesized
cattatagtcaaactgtcaa

SEQ ID NO: 18012 - DNA, 20 bp, Artificial Sequence
  chemically synthesized
agtcaaactgtcaaaagcca

SEQ ID NO: 18013 - DNA, 20 bp, Artificial Sequence
  chemically synthesized
tcaaactgtcaaaagccaaa

SEQ ID NO: 18014 - DNA, 20 bp, Artificial Sequence
  chemically synthesized
actgtcaaaagccaaagagt

SEQ ID NO: 18015 - DNA, 20 bp, Artificial Sequence
  chemically synthesized
aaagagtaagaactctaaaa

SEQ ID NO: 18016 - DNA, 20 bp, Artificial Sequence
  chemically synthesized
agtaagaactctaaaacagc

SEQ ID NO: 18017 - DNA, 20 bp, Artificial Sequence
  chemically synthesized
aaaacagcaagcaaaatgtc

SEQ ID NO: 18018 - DNA, 20 bp, Artificial Sequence
  chemically synthesized
caaaatgtctagtcacttat

SEQ ID NO: 18019 - DNA, 20 bp, Artificial Sequence
  chemically synthesized
aaaatgtctagtcacttata

SEQ ID NO: 18020 - DNA, 20 bp, Artificial Sequence
  chemically synthesized
aaatgtctagtcacttataa

SEQ ID NO: 18021 - DNA, 20 bp, Artificial Sequence
  chemically synthesized
acttataagggaacttccac

SEQ ID NO: 18022 - DNA, 20 bp, Artificial Sequence
  chemically synthesized
gggaacttccacaagattaa

SEQ ID NO: 18023 - DNA, 20 bp, Artificial Sequence
  chemically synthesized
ccacaagattaacagattaa

SEQ ID NO: 18024 - DNA, 20 bp, Artificial Sequence
  chemically synthesized
caagattaacagattaacag

SEQ ID NO: 18025 - DNA, 20 bp, Artificial Sequence
  chemically synthesized
cagattaacagcagatttct

SEQ ID NO: 18026 - DNA, 20 bp, Artificial Sequence
  chemically synthesized
attaacagcagatttctcag

SEQ ID NO: 18027 - DNA, 20 bp, Artificial Sequence
  chemically synthesized
atttctcagcagaaacctca

SEQ ID NO: 18028 - DNA, 20 bp, Artificial Sequence
  chemically synthesized
tttctcagcagaaacctcac

SEQ ID NO: 18029 - DNA, 20 bp, Artificial Sequence
  chemically synthesized
tcagcagaaacctcacaggc

SEQ ID NO: 18030 - DNA, 20 bp, Artificial Sequence
  chemically synthesized
cagcagaaacctcacaggcc

SEQ ID NO: 18031 - DNA, 20 bp, Artificial Sequence
  chemically synthesized
gcagaaacctcacaggccag

SEQ ID NO: 18032 - DNA, 20 bp, Artificial Sequence
  chemically synthesized
gaaacctcacaggccaggag

SEQ ID NO: 18033 - DNA, 20 bp, Artificial Sequence
  chemically synthesized
cctcacaggccaggagaaga

SEQ ID NO: 18034 - DNA, 20 bp, Artificial Sequence
  chemically synthesized
ctcacaggccaggagaagat

SEQ ID NO: 18035 - DNA, 20 bp, Artificial Sequence
  chemically synthesized
atgggatgatatattcaaaa

SEQ ID NO: 18036 - DNA, 20 bp, Artificial Sequence
  chemically synthesized
tgatatattcaaaatagtga

SEQ ID NO: 18037 - DNA, 20 bp, Artificial Sequence
  chemically synthesized
tgaaagaaaaaaatgacacc

SEQ ID NO: 18038 - DNA, 20 bp, Artificial Sequence
  chemically synthesized
gaaagaaaaaaatgacacca

SEQ ID NO: 18039 - DNA, 20 bp, Artificial Sequence
  chemically synthesized
gacaccaaggatgttatacc

SEQ ID NO: 18040 - DNA, 20 bp, Artificial Sequence
  chemically synthesized
aacattgttcttcaaaaatg

SEQ ID NO: 18041 - DNA, 20 bp, Artificial Sequence
  chemically synthesized
acattgttcttcaaaaatga

SEQ ID NO: 18042 - DNA, 20 bp, Artificial Sequence
  chemically synthesized
aggataaataaaatcttttc

SEQ ID NO: 18043 - DNA, 20 bp, Artificial Sequence
  chemically synthesized
ggataaataaaatcttttct

SEQ ID NO: 18044 - DNA, 20 bp, Artificial Sequence
  chemically synthesized
aaataaaatcttttctgggc

SEQ ID NO: 18045 - DNA, 20 bp, Artificial Sequence
  chemically synthesized
ttctgggcaagaaaaatttg

SEQ ID NO: 18046 - DNA, 20 bp, Artificial Sequence
  chemically synthesized
tctgggcaagaaaaatttga

SEQ ID NO: 18047 - DNA, 20 bp, Artificial Sequence
  chemically synthesized
ttgaaggaattcactatcac

SEQ ID NO: 18048 - DNA, 20 bp, Artificial Sequence
  chemically synthesized
ggaattcactatcactagac

SEQ ID NO: 18049 - DNA, 20 bp, Artificial Sequence
  chemically synthesized
tatcactagactggctttac

SEQ ID NO: 18050 - DNA, 20 bp, Artificial Sequence
  chemically synthesized
tggctttacaagaaatattt

SEQ ID NO: 18051 - DNA, 20 bp, Artificial Sequence
  chemically synthesized
ggctttacaagaaatattta

SEQ ID NO: 18052 - DNA, 20 bp, Artificial Sequence
  chemically synthesized
gctttacaagaaatatttaa

SEQ ID NO: 18053 - DNA, 20 bp, Artificial Sequence
  chemically synthesized
tttacaagaaatatttaagg

SEQ ID NO: 18054 - DNA, 20 bp, Artificial Sequence
  chemically synthesized
taagggagtcctacacatga

SEQ ID NO: 18055 - DNA, 20 bp, Artificial Sequence
  chemically synthesized
agtcctacacatgaaagtga

SEQ ID NO: 18056 - DNA, 20 bp, Artificial Sequence
  chemically synthesized
gtcctacacatgaaagtgac

SEQ ID NO: 18057 - DNA, 20 bp, Artificial Sequence
  chemically synthesized
gacaggacactgccattatg

SEQ ID NO: 18058 - DNA, 20 bp, Artificial Sequence
  chemically synthesized
tgccattatgaagacacaca

SEQ ID NO: 18059 - DNA, 20 bp, Artificial Sequence
  chemically synthesized
gccattatgaagacacacaa

SEQ ID NO: 18060 - DNA, 20 bp, Artificial Sequence
  chemically synthesized
cacaaaggtatacaactaac

SEQ ID NO: 18061 - DNA, 20 bp, Artificial Sequence
  chemically synthesized
aaaggtatacaactaactgg

SEQ ID NO: 18062 - DNA, 20 bp, Artificial Sequence
  chemically synthesized
aggtatacaactaactggta

SEQ ID NO: 18063 - DNA, 20 bp, Artificial Sequence
  chemically synthesized
ggtagagcaaaacacaaata

SEQ ID NO: 18064 - DNA, 20 bp, Artificial Sequence
  chemically synthesized
agagcaaaacacaaataaag

SEQ ID NO: 18065 - DNA, 20 bp, Artificial Sequence
  chemically synthesized
agcaaaacacaaataaagaa

SEQ ID NO: 18066 - DNA, 20 bp, Artificial Sequence
  chemically synthesized
aaacacaaataaagaagaga

SEQ ID NO: 18067 - DNA, 20 bp, Artificial Sequence
  chemically synthesized
gaactcaaacgttaccacta

SEQ ID NO: 18068 - DNA, 20 bp, Artificial Sequence
  chemically synthesized
aaaccacaatcataaataat

SEQ ID NO: 18069 - DNA, 20 bp, Artificial Sequence
  chemically synthesized
cacaatcataaataataaga

SEQ ID NO: 18070 - DNA, 20 bp, Artificial Sequence
  chemically synthesized
atcataaataataagaaaga

SEQ ID NO: 18071 - DNA, 20 bp, Artificial Sequence
  chemically synthesized
taaataataagaaagaaaga

SEQ ID NO: 18072 - DNA, 20 bp, Artificial Sequence
  chemically synthesized
taataagaaagaaagaaaga

SEQ ID NO: 18073 - DNA, 20 bp, Artificial Sequence
  chemically synthesized
aagaaagaaagaaagaaaga

SEQ ID NO: 18074 - DNA, 20 bp, Artificial Sequence
  chemically synthesized
gaaagaaagaaagaaagaaa

SEQ ID NO: 18075 - DNA, 20 bp, Artificial Sequence
  chemically synthesized
aagaaagaaagaaagaaaga

SEQ ID NO: 18076 - DNA, 20 bp, Artificial Sequence
  chemically synthesized
gaaagaaagaaagaaagaga

SEQ ID NO: 18077 - DNA, 20 bp, Artificial Sequence
  chemically synthesized
aagaaagaaagaaagagaga

SEQ ID NO: 18078 - DNA, 20 bp, Artificial Sequence
  chemically synthesized
gaaagaaagaaagagagaga

SEQ ID NO: 18079 - DNA, 20 bp, Artificial Sequence
  chemically synthesized
aagaaagaaagagagagaga

SEQ ID NO: 18080 - DNA, 20 bp, Artificial Sequence
  chemically synthesized
gaaagaaagagagagagaga

SEQ ID NO: 18081 - DNA, 20 bp, Artificial Sequence
  chemically synthesized
gagagagagagagagaatga

SEQ ID NO: 18082 - DNA, 20 bp, Artificial Sequence
  chemically synthesized
gagagagagagaatgaaaga

SEQ ID NO: 18083 - DNA, 20 bp, Artificial Sequence
  chemically synthesized
agagagaatgaaagaaagaa

SEQ ID NO: 18084 - DNA, 20 bp, Artificial Sequence
  chemically synthesized
gagagaatgaaagaaagaaa

SEQ ID NO: 18085 - DNA, 20 bp, Artificial Sequence
  chemically synthesized
agaatgaaagaaagaaaagg

SEQ ID NO: 18086 - DNA, 20 bp, Artificial Sequence
  chemically synthesized
gaatgaaagaaagaaaagga

SEQ ID NO: 18087 - DNA, 20 bp, Artificial Sequence
  chemically synthesized
tgaaagaaagaaaaggaagg

SEQ ID NO: 18088 - DNA, 20 bp, Artificial Sequence
  chemically synthesized
gaaagaaagaaaaggaagga

SEQ ID NO: 18089 - DNA, 20 bp, Artificial Sequence
  chemically synthesized
agaaagaaaaggaaggaagg

SEQ ID NO: 18090 - DNA, 20 bp, Artificial Sequence
  chemically synthesized
taaaaaaaaaacaaaacaac

SEQ ID NO: 18091 - DNA, 20 bp, Artificial Sequence
  chemically synthesized
aaaaaaaaaacaaaacaacc

SEQ ID NO: 18092 - DNA, 20 bp, Artificial Sequence
  chemically synthesized
ccaggaatcaattaacaaaa

SEQ ID NO: 18093 - DNA, 20 bp, Artificial Sequence
  chemically synthesized
ggaatcaattaacaaaatgg

SEQ ID NO: 18094 - DNA, 20 bp, Artificial Sequence
  chemically synthesized
gaatcaattaacaaaatggc

SEQ ID NO: 18095 - DNA, 20 bp, Artificial Sequence
  chemically synthesized
attaacaaaatggcaggaat

SEQ ID NO: 18096 - DNA, 20 bp, Artificial Sequence
  chemically synthesized
aagctctcacatgtcaataa

SEQ ID NO: 18097 - DNA, 20 bp, Artificial Sequence
  chemically synthesized
ataatagccttgcatgtaaa

SEQ ID NO: 18098 - DNA, 20 bp, Artificial Sequence
  chemically synthesized
tggattaaattgttacttga

SEQ ID NO: 18099 - DNA, 20 bp, Artificial Sequence
  chemically synthesized
aaattgttacttgaaagata

SEQ ID NO: 18100 - DNA, 20 bp, Artificial Sequence
  chemically synthesized
gttacttgaaagatatagac

SEQ ID NO: 18101 - DNA, 20 bp, Artificial Sequence
  chemically synthesized
aaagatatagactggctaaa

SEQ ID NO: 18102 - DNA, 20 bp, Artificial Sequence
  chemically synthesized
tttaaaacaaaaatatgacc

SEQ ID NO: 18103 - DNA, 20 bp, Artificial Sequence
  chemically synthesized
caaaaatatgacccagttgt

SEQ ID NO: 18104 - DNA, 20 bp, Artificial Sequence
  chemically synthesized
cccagttgtaagctgcctat

SEQ ID NO: 18105 - DNA, 20 bp, Artificial Sequence
  chemically synthesized
agaaacttatctcacttgta

SEQ ID NO: 18106 - DNA, 20 bp, Artificial Sequence
  chemically synthesized
ctcacttgtaaagataaata

SEQ ID NO: 18107 - DNA, 20 bp, Artificial Sequence
  chemically synthesized
taaagataaatatagactga

SEQ ID NO: 18108 - DNA, 20 bp, Artificial Sequence
  chemically synthesized
aaatatagactgaaagtaaa

SEQ ID NO: 18109 - DNA, 20 bp, Artificial Sequence
  chemically synthesized
gactgaaagtaaaaagatga

SEQ ID NO: 18110 - DNA, 20 bp, Artificial Sequence
  chemically synthesized
gatgaaagatcttccataca

SEQ ID NO: 18111 - DNA, 20 bp, Artificial Sequence
  chemically synthesized
tgaaagatcttccatacaaa

SEQ ID NO: 18112 - DNA, 20 bp, Artificial Sequence
  chemically synthesized
tacaaagagaaaccaaaaat

SEQ ID NO: 18113 - DNA, 20 bp, Artificial Sequence
  chemically synthesized
gagaaaccaaaaatgagcaa

SEQ ID NO: 18114 - DNA, 20 bp, Artificial Sequence
  chemically synthesized
aaaccaaaaatgagcaaaag

SEQ ID NO: 18115 - DNA, 20 bp, Artificial Sequence
  chemically synthesized
aaaagtagttatacctataa

SEQ ID NO: 18116 - DNA, 20 bp, Artificial Sequence
  chemically synthesized
gactttaaataaaaaacact

SEQ ID NO: 18117 - DNA, 20 bp, Artificial Sequence
  chemically synthesized
ctttaaataaaaaacactaa

SEQ ID NO: 18118 - DNA, 20 bp, Artificial Sequence
  chemically synthesized
taaaaaacactaagagacaa

SEQ ID NO: 18119 - DNA, 20 bp, Artificial Sequence
  chemically synthesized
aagtcattacataatgataa

SEQ ID NO: 18120 - DNA, 20 bp, Artificial Sequence
  chemically synthesized
agtcattacataatgataaa

SEQ ID NO: 18121 - DNA, 20 bp, Artificial Sequence
  chemically synthesized
taatgataaaaggaacaatt

SEQ ID NO: 18122 - DNA, 20 bp, Artificial Sequence
  chemically synthesized
gataaaaggaacaattcagc

SEQ ID NO: 18123 - DNA, 20 bp, Artificial Sequence
  chemically synthesized
taaaaggaacaattcagcaa

SEQ ID NO: 18124 - DNA, 20 bp, Artificial Sequence
  chemically synthesized
taaacattcacactcaacac

SEQ ID NO: 18125 - DNA, 20 bp, Artificial Sequence
  chemically synthesized
aacattcacactcaacacca

SEQ ID NO: 18126 - DNA, 20 bp, Artificial Sequence
  chemically synthesized
acactcaacaccagagcatc

SEQ ID NO: 18127 - DNA, 20 bp, Artificial Sequence
  chemically synthesized
ccagagcatccagatatgta

SEQ ID NO: 18128 - DNA, 20 bp, Artificial Sequence
  chemically synthesized
atatgtaaagcaaatgttat

SEQ ID NO: 18129 - DNA, 20 bp, Artificial Sequence
  chemically synthesized
agcaaatgttattagatata

SEQ ID NO: 18130 - DNA, 20 bp, Artificial Sequence
  chemically synthesized
gcaaatgttattagatataa

SEQ ID NO: 18131 - DNA, 20 bp, Artificial Sequence
  chemically synthesized
caaatgttattagatataaa

SEQ ID NO: 18132 - DNA, 20 bp, Artificial Sequence
  chemically synthesized
attagatataaagggtgaaa

SEQ ID NO: 18133 - DNA, 20 bp, Artificial Sequence
  chemically synthesized
aatagaatccaatacaataa

SEQ ID NO: 18134 - DNA, 20 bp, Artificial Sequence
  chemically synthesized
gaatccaatacaataatagt

SEQ ID NO: 18135 - DNA, 20 bp, Artificial Sequence
  chemically synthesized
aatccaatacaataatagtt

SEQ ID NO: 18136 - DNA, 20 bp, Artificial Sequence
  chemically synthesized
atccaatacaataatagttg

SEQ ID NO: 18137 - DNA, 20 bp, Artificial Sequence
  chemically synthesized
ggatttcaacattctaatct

SEQ ID NO: 18138 - DNA, 20 bp, Artificial Sequence
  chemically synthesized
caacattctaatctcagcat

SEQ ID NO: 18139 - DNA, 20 bp, Artificial Sequence
  chemically synthesized
attctaatctcagcatcaga

SEQ ID NO: 18140 - DNA, 20 bp, Artificial Sequence
  chemically synthesized
tcagcatcagatagatcatc

SEQ ID NO: 18141 - DNA, 20 bp, Artificial Sequence
  chemically synthesized
catcagatagatcatctaga

SEQ ID NO: 18142 - DNA, 20 bp, Artificial Sequence
  chemically synthesized
atctagacagaaaattaaca

SEQ ID NO: 18143 - DNA, 20 bp, Artificial Sequence
  chemically synthesized
gaaaattaacaaagaaacat

SEQ ID NO: 18144 - DNA, 20 bp, Artificial Sequence
  chemically synthesized
attggatttaaacttgactt

SEQ ID NO: 18145 - DNA, 20 bp, Artificial Sequence
  chemically synthesized
aaacttgactttagaccaaa

SEQ ID NO: 18146 - DNA, 20 bp, Artificial Sequence
  chemically synthesized
ttacacaatatttcatccaa

SEQ ID NO: 18147 - DNA, 20 bp, Artificial Sequence
  chemically synthesized
aatatttcatccaacagcta

SEQ ID NO: 18148 - DNA, 20 bp, Artificial Sequence
  chemically synthesized
acagaatatatttatctcat

SEQ ID NO: 18149 - DNA, 20 bp, Artificial Sequence
  chemically synthesized
tcagcacatgacgcattccc

SEQ ID NO: 18150 - DNA, 20 bp, Artificial Sequence
  chemically synthesized
cagcacatgacgcattcccc

SEQ ID NO: 18151 - DNA, 20 bp, Artificial Sequence
  chemically synthesized
ccccaggatacaccatatgt

SEQ ID NO: 18152 - DNA, 20 bp, Artificial Sequence
  chemically synthesized
caccatatgttagaacacaa

SEQ ID NO: 18153 - DNA, 20 bp, Artificial Sequence
  chemically synthesized
catatgttagaacacaaaag

SEQ ID NO: 18154 - DNA, 20 bp, Artificial Sequence
  chemically synthesized
gaaatatttgaaatcatatt

SEQ ID NO: 18155 - DNA, 20 bp, Artificial Sequence
  chemically synthesized
aatcatattaagcatcttct

SEQ ID NO: 18156 - DNA, 20 bp, Artificial Sequence
  chemically synthesized
agcatcttctcagaccacaa

SEQ ID NO: 18157 - DNA, 20 bp, Artificial Sequence
  chemically synthesized
agaccacaatggaataaaac

SEQ ID NO: 18158 - DNA, 20 bp, Artificial Sequence
  chemically synthesized
taaaactagaaatcaataac

SEQ ID NO: 18159 - DNA, 20 bp, Artificial Sequence
  chemically synthesized
ttaaaacctatacaaataca

SEQ ID NO: 18160 - DNA, 20 bp, Artificial Sequence
  chemically synthesized
tcctgaatgaacgttatgtc

SEQ ID NO: 18161 - DNA, 20 bp, Artificial Sequence
  chemically synthesized
tgaatgaacgttatgtcaag

SEQ ID NO: 18162 - DNA, 20 bp, Artificial Sequence
  chemically synthesized
gttatgtcaagaagaaaatt

SEQ ID NO: 18163 - DNA, 20 bp, Artificial Sequence
  chemically synthesized
atgtcaagaagaaaattaag

SEQ ID NO: 18164 - DNA, 20 bp, Artificial Sequence
  chemically synthesized
tgtcaagaagaaaattaaga

SEQ ID NO: 18165 - DNA, 20 bp, Artificial Sequence
  chemically synthesized
atgaaaattgaaatacaaca

SEQ ID NO: 18166 - DNA, 20 bp, Artificial Sequence
  chemically synthesized
tgaaaattgaaatacaacat

SEQ ID NO: 18167 - DNA, 20 bp, Artificial Sequence
  chemically synthesized
attgaaatacaacataggaa

SEQ ID NO: 18168 - DNA, 20 bp, Artificial Sequence
  chemically synthesized
atacaacataggaaaagcca

SEQ ID NO: 18169 - DNA, 20 bp, Artificial Sequence
  chemically synthesized
tacaacataggaaaagccat

SEQ ID NO: 18170 - DNA, 20 bp, Artificial Sequence
  chemically synthesized
ataggaaaagccatgggata

SEQ ID NO: 18171 - DNA, 20 bp, Artificial Sequence
  chemically synthesized
aaagccatgggatacagcaa

SEQ ID NO: 18172 - DNA, 20 bp, Artificial Sequence
  chemically synthesized
gccatgggatacagcaaaag

SEQ ID NO: 18173 - DNA, 20 bp, Artificial Sequence
  chemically synthesized
gatacagcaaaagcagtgct

SEQ ID NO: 18174 - DNA, 20 bp, Artificial Sequence
  chemically synthesized
tacagcaaaagcagtgctaa

SEQ ID NO: 18175 - DNA, 20 bp, Artificial Sequence
  chemically synthesized
cagcaaaagcagtgctaaga

SEQ ID NO: 18176 - DNA, 20 bp, Artificial Sequence
  chemically synthesized
caaaagcagtgctaagagag

SEQ ID NO: 18177 - DNA, 20 bp, Artificial Sequence
  chemically synthesized
aaacacttaaattaaaaaca

SEQ ID NO: 18178 - DNA, 20 bp, Artificial Sequence
  chemically synthesized
acttaaattaaaaacataga

SEQ ID NO: 18179 - DNA, 20 bp, Artificial Sequence
  chemically synthesized
atctaatcatgtacctcaac

SEQ ID NO: 18180 - DNA, 20 bp, Artificial Sequence
  chemically synthesized
aatcatgtacctcaacaagc

SEQ ID NO: 18181 - DNA, 20 bp, Artificial Sequence
  chemically synthesized
tgtacctcaacaagctagaa

SEQ ID NO: 18182 - DNA, 20 bp, Artificial Sequence
  chemically synthesized
cctcaacaagctagaaaagc

SEQ ID NO: 18183 - DNA, 20 bp, Artificial Sequence
  chemically synthesized
gcaagaacaaaacccaaaac

SEQ ID NO: 18184 - DNA, 20 bp, Artificial Sequence
  chemically synthesized
agaacaaaacccaaaactag

SEQ ID NO: 18185 - DNA, 20 bp, Artificial Sequence
  chemically synthesized
acaaaacccaaaactagcag

SEQ ID NO: 18186 - DNA, 20 bp, Artificial Sequence
  chemically synthesized
caaaacccaaaactagcaga

SEQ ID NO: 18187 - DNA, 20 bp, Artificial Sequence
  chemically synthesized
acccaaaactagcagaagga

SEQ ID NO: 18188 - DNA, 20 bp, Artificial Sequence
  chemically synthesized
gcagaaggaaagaaaaaatg

SEQ ID NO: 18189 - DNA, 20 bp, Artificial Sequence
  chemically synthesized
aggaaagaaaaaatgaagaa

SEQ ID NO: 18190 - DNA, 20 bp, Artificial Sequence
  chemically synthesized
aaagaaaaaatgaagaacag

SEQ ID NO: 18191 - DNA, 20 bp, Artificial Sequence
  chemically synthesized
aacagaagaacttaatgaaa

SEQ ID NO: 18192 - DNA, 20 bp, Artificial Sequence
  chemically synthesized
cagaagaacttaatgaaata

SEQ ID NO: 18193 - DNA, 20 bp, Artificial Sequence
  chemically synthesized
aaatagagaaaaacaacaac

SEQ ID NO: 18194 - DNA, 20 bp, Artificial Sequence
  chemically synthesized
aatagagaaaaacaacaaca

SEQ ID NO: 18195 - DNA, 20 bp, Artificial Sequence
  chemically synthesized
atagagaaaaacaacaacaa

SEQ ID NO: 18196 - DNA, 20 bp, Artificial Sequence
  chemically synthesized
gaaaaacaacaacaagggat

SEQ ID NO: 18197 - DNA, 20 bp, Artificial Sequence
  chemically synthesized
caagggattagcaaaatgaa

SEQ ID NO: 18198 - DNA, 20 bp, Artificial Sequence
  chemically synthesized
tgaaaagttgttatttaaaa

SEQ ID NO: 18199 - DNA, 20 bp, Artificial Sequence
  chemically synthesized
gttatttaaaaaagataaaa

SEQ ID NO: 18200 - DNA, 20 bp, Artificial Sequence
  chemically synthesized
taaaaaagataaaatggata

SEQ ID NO: 18201 - DNA, 20 bp, Artificial Sequence
  chemically synthesized
agataaaatggatatagctc

SEQ ID NO: 18202 - DNA, 20 bp, Artificial Sequence
  chemically synthesized
aaaatggatatagctctagc

SEQ ID NO: 18203 - DNA, 20 bp, Artificial Sequence
  chemically synthesized
tagctctagctagactaacc

SEQ ID NO: 18204 - DNA, 20 bp, Artificial Sequence
  chemically synthesized
tagctagactaaccaagaaa

SEQ ID NO: 18205 - DNA, 20 bp, Artificial Sequence
  chemically synthesized
gctagactaaccaagaaaaa

SEQ ID NO: 18206 - DNA, 20 bp, Artificial Sequence
  chemically synthesized
agactaaccaagaaaaagag

SEQ ID NO: 18207 - DNA, 20 bp, Artificial Sequence
  chemically synthesized
actaaccaagaaaaagagaa

SEQ ID NO: 18208 - DNA, 20 bp, Artificial Sequence
  chemically synthesized
aaagagaagagactgaaata

SEQ ID NO: 18209 - DNA, 20 bp, Artificial Sequence
  chemically synthesized
gagactgaaataaagaaaat

SEQ ID NO: 18210 - DNA, 20 bp, Artificial Sequence
  chemically synthesized
aaagaaaatcagaaataaaa

SEQ ID NO: 18211 - DNA, 20 bp, Artificial Sequence
  chemically synthesized
atatattacaaccgatacca

SEQ ID NO: 18212 - DNA, 20 bp, Artificial Sequence
  chemically synthesized
tacaaccgataccacagaaa

SEQ ID NO: 18213 - DNA, 20 bp, Artificial Sequence
  chemically synthesized
ccgataccacagaaatagaa

SEQ ID NO: 18214 - DNA, 20 bp, Artificial Sequence
  chemically synthesized
acagaaatagaaaagattat

SEQ ID NO: 18215 - DNA, 20 bp, Artificial Sequence
  chemically synthesized
agaaatagaaaagattatca

SEQ ID NO: 18216 - DNA, 20 bp, Artificial Sequence
  chemically synthesized
cactaaaaaactgaaaaatc

SEQ ID NO: 18217 - DNA, 20 bp, Artificial Sequence
  chemically synthesized
ctaaaaaactgaaaaatcta

SEQ ID NO: 18218 - DNA, 20 bp, Artificial Sequence
  chemically synthesized
taaaaaactgaaaaatctag

SEQ ID NO: 18219 - DNA, 20 bp, Artificial Sequence
  chemically synthesized
agaggaaattaataaatttc

SEQ ID NO: 18220 - DNA, 20 bp, Artificial Sequence
  chemically synthesized
ctggacacataccacctacc

SEQ ID NO: 18221 - DNA, 20 bp, Artificial Sequence
  chemically synthesized
ccacctaccaagattgaatt

SEQ ID NO: 18222 - DNA, 20 bp, Artificial Sequence
  chemically synthesized
ctaccaagattgaattaaga

SEQ ID NO: 18223 - DNA, 20 bp, Artificial Sequence
  chemically synthesized
aagattgaattaagaaagaa

SEQ ID NO: 18224 - DNA, 20 bp, Artificial Sequence
  chemically synthesized
gaaagaatagaaaacctgaa

SEQ ID NO: 18225 - DNA, 20 bp, Artificial Sequence
  chemically synthesized
aatagaaaacctgaacagac

SEQ ID NO: 18226 - DNA, 20 bp, Artificial Sequence
  chemically synthesized
aatgaataatgaaattgaat

SEQ ID NO: 18227 - DNA, 20 bp, Artificial Sequence
  chemically synthesized
gaataatgaaattgaatcag

SEQ ID NO: 18228 - DNA, 20 bp, Artificial Sequence
  chemically synthesized
gaaattgaatcagtagtaaa

SEQ ID NO: 18229 - DNA, 20 bp, Artificial Sequence
  chemically synthesized
tagtaaaaagtctcccaaaa

SEQ ID NO: 18230 - DNA, 20 bp, Artificial Sequence
  chemically synthesized
ctcccaaaaaagaaaatttc

SEQ ID NO: 18231 - DNA, 20 bp, Artificial Sequence
  chemically synthesized
aaaaaagaaaatttcaagac

SEQ ID NO: 18232 - DNA, 20 bp, Artificial Sequence
  chemically synthesized
aagaaaatttcaagaccaga

SEQ ID NO: 18233 - DNA, 20 bp, Artificial Sequence
  chemically synthesized
caaattttaccaaactttca

SEQ ID NO: 18234 - DNA, 20 bp, Artificial Sequence
  chemically synthesized
aactttcaaagaaaactaac

SEQ ID NO: 18235 - DNA, 20 bp, Artificial Sequence
  chemically synthesized
aaattcttttaaaaattaaa

SEQ ID NO: 18236 - DNA, 20 bp, Artificial Sequence
  chemically synthesized
aattcttttaaaaattaaac

SEQ ID NO: 18237 - DNA, 20 bp, Artificial Sequence
  chemically synthesized
tcttttaaaaattaaacagg

SEQ ID NO: 18238 - DNA, 20 bp, Artificial Sequence
  chemically synthesized
cttttaaaaattaaacagga

SEQ ID NO: 18239 - DNA, 20 bp, Artificial Sequence
  chemically synthesized
ttctccctaactcattctct

SEQ ID NO: 18240 - DNA, 20 bp, Artificial Sequence
  chemically synthesized
tctccctaactcattctctg

SEQ ID NO: 18241 - DNA, 20 bp, Artificial Sequence
  chemically synthesized
cctaactcattctctgaggc

SEQ ID NO: 18242 - DNA, 20 bp, Artificial Sequence
  chemically synthesized
tattatcctgattccataac

SEQ ID NO: 18243 - DNA, 20 bp, Artificial Sequence
  chemically synthesized
tcctgattccataaccagac

SEQ ID NO: 18244 - DNA, 20 bp, Artificial Sequence
  chemically synthesized
cctgattccataaccagaca

SEQ ID NO: 18245 - DNA, 20 bp, Artificial Sequence
  chemically synthesized
ccataaccagacaaggatgc

SEQ ID NO: 18246 - DNA, 20 bp, Artificial Sequence
  chemically synthesized
tgcaagtaaaaataaaactg

SEQ ID NO: 18247 - DNA, 20 bp, Artificial Sequence
  chemically synthesized
gcaagtaaaaataaaactgc

SEQ ID NO: 18248 - DNA, 20 bp, Artificial Sequence
  chemically synthesized
ctgcaggtcaatatccctga

SEQ ID NO: 18249 - DNA, 20 bp, Artificial Sequence
  chemically synthesized
tcaatatccctgatggaaca

SEQ ID NO: 18250 - DNA, 20 bp, Artificial Sequence
  chemically synthesized
caatatccctgatggaacat

SEQ ID NO: 18251 - DNA, 20 bp, Artificial Sequence
  chemically synthesized
gaaaatcctcaacaaaatac

SEQ ID NO: 18252 - DNA, 20 bp, Artificial Sequence
  chemically synthesized
tactagcaaactgaatccaa

SEQ ID NO: 18253 - DNA, 20 bp, Artificial Sequence
  chemically synthesized
gaatccaacagtacatccaa

SEQ ID NO: 18254 - DNA, 20 bp, Artificial Sequence
  chemically synthesized
aaagataatacaccatgatc

SEQ ID NO: 18255 - DNA, 20 bp, Artificial Sequence
  chemically synthesized
gataatacaccatgatcaag

SEQ ID NO: 18256 - DNA, 20 bp, Artificial Sequence
  chemically synthesized
ataatacaccatgatcaagt

SEQ ID NO: 18257 - DNA, 20 bp, Artificial Sequence
  chemically synthesized
tgatcaagtgggatttatac

SEQ ID NO: 18258 - DNA, 20 bp, Artificial Sequence
  chemically synthesized
gatcaagtgggatttatact

SEQ ID NO: 18259 - DNA, 20 bp, Artificial Sequence
  chemically synthesized
atcaagtgggatttatacta

SEQ ID NO: 18260 - DNA, 20 bp, Artificial Sequence
  chemically synthesized
gggatttatactagggttgc

SEQ ID NO: 18261 - DNA, 20 bp, Artificial Sequence
  chemically synthesized
ttatactagggttgcaagaa

SEQ ID NO: 18262 - DNA, 20 bp, Artificial Sequence
  chemically synthesized
tgatacatcacatcaacaaa

SEQ ID NO: 18263 - DNA, 20 bp, Artificial Sequence
  chemically synthesized
aaaccatatgatcatctcaa

SEQ ID NO: 18264 - DNA, 20 bp, Artificial Sequence
  chemically synthesized
tatgatcatctcaatagata

SEQ ID NO: 18265 - DNA, 20 bp, Artificial Sequence
  chemically synthesized
catctcaatagatacagaaa

SEQ ID NO: 18266 - DNA, 20 bp, Artificial Sequence
  chemically synthesized
ttcatgataaaaactatctg

SEQ ID NO: 18267 - DNA, 20 bp, Artificial Sequence
  chemically synthesized
aaactatctgcagccaatca

SEQ ID NO: 18268 - DNA, 20 bp, Artificial Sequence
  chemically synthesized
ctatctgcagccaatcatag

SEQ ID NO: 18269 - DNA, 20 bp, Artificial Sequence
  chemically synthesized
tatctgcagccaatcataga

SEQ ID NO: 18270 - DNA, 20 bp, Artificial Sequence
  chemically synthesized
aacatatctcaatataataa

SEQ ID NO: 18271 - DNA, 20 bp, Artificial Sequence
  chemically synthesized
agtcatatatgacaaaccca

SEQ ID NO: 18272 - DNA, 20 bp, Artificial Sequence
  chemically synthesized
cagctaacatcatactgaat

SEQ ID NO: 18273 - DNA, 20 bp, Artificial Sequence
  chemically synthesized
agctaacatcatactgaatt

SEQ ID NO: 18274 - DNA, 20 bp, Artificial Sequence
  chemically synthesized
acatcatactgaattgggaa

SEQ ID NO: 18275 - DNA, 20 bp, Artificial Sequence
  chemically synthesized
catactgaattgggaaaagc

SEQ ID NO: 18276 - DNA, 20 bp, Artificial Sequence
  chemically synthesized
actgaattgggaaaagctgg

SEQ ID NO: 18277 - DNA, 20 bp, Artificial Sequence
  chemically synthesized
aagctggaagcctttcctct

SEQ ID NO: 18278 - DNA, 20 bp, Artificial Sequence
  chemically synthesized
tctaagaactgaaacaaaat

SEQ ID NO: 18279 - DNA, 20 bp, Artificial Sequence
  chemically synthesized
ctaagaactgaaacaaaata

SEQ ID NO: 18280 - DNA, 20 bp, Artificial Sequence
  chemically synthesized
actcctattcaatataatac

SEQ ID NO: 18281 - DNA, 20 bp, Artificial Sequence
  chemically synthesized
cctattcaatataatactgg

SEQ ID NO: 18282 - DNA, 20 bp, Artificial Sequence
  chemically synthesized
caatataatactggaagtcc

SEQ ID NO: 18283 - DNA, 20 bp, Artificial Sequence
  chemically synthesized
aatactggaagtcctagcca

SEQ ID NO: 18284 - DNA, 20 bp, Artificial Sequence
  chemically synthesized
gaagtcctagccacagcttt

SEQ ID NO: 18285 - DNA, 20 bp, Artificial Sequence
  chemically synthesized
aagtcctagccacagctttc

SEQ ID NO: 18286 - DNA, 20 bp, Artificial Sequence
  chemically synthesized
cctagccacagctttcaggt

SEQ ID NO: 18287 - DNA, 20 bp, Artificial Sequence
  chemically synthesized
tagccacagctttcaggtca

SEQ ID NO: 18288 - DNA, 20 bp, Artificial Sequence
  chemically synthesized
cacagctttcaggtcagaga

SEQ ID NO: 18289 - DNA, 20 bp, Artificial Sequence
  chemically synthesized
gctttcaggtcagagaaaga

SEQ ID NO: 18290 - DNA, 20 bp, Artificial Sequence
  chemically synthesized
tcaggtcagagaaagaaaga

SEQ ID NO: 18291 - DNA, 20 bp, Artificial Sequence
  chemically synthesized
tcagagaaagaaagaaagaa

SEQ ID NO: 18292 - DNA, 20 bp, Artificial Sequence
  chemically synthesized
cagagaaagaaagaaagaaa

SEQ ID NO: 18293 - DNA, 20 bp, Artificial Sequence
  chemically synthesized
agaaagaaaaggcatgcaaa

SEQ ID NO: 18294 - DNA, 20 bp, Artificial Sequence
  chemically synthesized
gaaagaaaaggcatgcaaat

SEQ ID NO: 18295 - DNA, 20 bp, Artificial Sequence
  chemically synthesized
aaaaggcatgcaaataggaa

SEQ ID NO: 18296 - DNA, 20 bp, Artificial Sequence
  chemically synthesized
catgcaaataggaaaagatg

SEQ ID NO: 18297 - DNA, 20 bp, Artificial Sequence
  chemically synthesized
agtcaaactgtccatctttc

SEQ ID NO: 18298 - DNA, 20 bp, Artificial Sequence
  chemically synthesized
agatgacatgattttatacc

SEQ ID NO: 18299 - DNA, 20 bp, Artificial Sequence
  chemically synthesized
attttatacctagaaaaacc

SEQ ID NO: 18300 - DNA, 20 bp, Artificial Sequence
  chemically synthesized
gaaaaaccaagactccacca

SEQ ID NO: 18301 - DNA, 20 bp, Artificial Sequence
  chemically synthesized
agactccaccaaagcactct

SEQ ID NO: 18302 - DNA, 20 bp, Artificial Sequence
  chemically synthesized
ttagcgctgaaaaataaatt

SEQ ID NO: 18303 - DNA, 20 bp, Artificial Sequence
  chemically synthesized
gctgaaaaataaattcagta

SEQ ID NO: 18304 - DNA, 20 bp, Artificial Sequence
  chemically synthesized
aaataaattcagtaaagtta

SEQ ID NO: 18305 - DNA, 20 bp, Artificial Sequence
  chemically synthesized
aataaattcagtaaagttac

SEQ ID NO: 18306 - DNA, 20 bp, Artificial Sequence
  chemically synthesized
taaattcagtaaagttacag

SEQ ID NO: 18307 - DNA, 20 bp, Artificial Sequence
  chemically synthesized
aaagttacaggagacaaaat

SEQ ID NO: 18308 - DNA, 20 bp, Artificial Sequence
  chemically synthesized
acaaaatcagcatatgaaac

SEQ ID NO: 18309 - DNA, 20 bp, Artificial Sequence
  chemically synthesized
tctacacaccaataataaac

SEQ ID NO: 18310 - DNA, 20 bp, Artificial Sequence
  chemically synthesized
acaccaataataaactagct

SEQ ID NO: 18311 - DNA, 20 bp, Artificial Sequence
  chemically synthesized
ccaataataaactagctgag

SEQ ID NO: 18312 - DNA, 20 bp, Artificial Sequence
  chemically synthesized
caataataaactagctgaga

SEQ ID NO: 18313 - DNA, 20 bp, Artificial Sequence
  chemically synthesized
aactagctgagaaggaaatt

SEQ ID NO: 18314 - DNA, 20 bp, Artificial Sequence
  chemically synthesized
tagctgagaaggaaattaag

SEQ ID NO: 18315 - DNA, 20 bp, Artificial Sequence
  chemically synthesized
agctgagaaggaaattaaga

SEQ ID NO: 18316 - DNA, 20 bp, Artificial Sequence
  chemically synthesized
gaaggcaatcccatttacaa

SEQ ID NO: 18317 - DNA, 20 bp, Artificial Sequence
  chemically synthesized
tagctaaaaaataaaatatt

SEQ ID NO: 18318 - DNA, 20 bp, Artificial Sequence
  chemically synthesized
agctaaaaaataaaatattt

SEQ ID NO: 18319 - DNA, 20 bp, Artificial Sequence
  chemically synthesized
gctaaaaaataaaatattta

SEQ ID NO: 18320 - DNA, 20 bp, Artificial Sequence
  chemically synthesized
atttagggataaatttaacc

SEQ ID NO: 18321 - DNA, 20 bp, Artificial Sequence
  chemically synthesized
tttagggataaatttaacca

SEQ ID NO: 18322 - DNA, 20 bp, Artificial Sequence
  chemically synthesized
ggaaccgaaaaacctctatt

SEQ ID NO: 18323 - DNA, 20 bp, Artificial Sequence
  chemically synthesized
aaactacaaaacactgataa

SEQ ID NO: 18324 - DNA, 20 bp, Artificial Sequence
  chemically synthesized
acactgataaaagaattgaa

SEQ ID NO: 18325 - DNA, 20 bp, Artificial Sequence
  chemically synthesized
cactgataaaagaattgaaa

SEQ ID NO: 18326 - DNA, 20 bp, Artificial Sequence
  chemically synthesized
gataaaagaattgaaaagga

SEQ ID NO: 18327 - DNA, 20 bp, Artificial Sequence
  chemically synthesized
ttgaaaaggacagaaacaaa

SEQ ID NO: 18328 - DNA, 20 bp, Artificial Sequence
  chemically synthesized
gaaaaggacagaaacaaatg

SEQ ID NO: 18329 - DNA, 20 bp, Artificial Sequence
  chemically synthesized
aaaggacagaaacaaatgga

SEQ ID NO: 18330 - DNA, 20 bp, Artificial Sequence
  chemically synthesized
ggagagatatcctatgttca

SEQ ID NO: 18331 - DNA, 20 bp, Artificial Sequence
  chemically synthesized
gatatcctatgttcatggat

SEQ ID NO: 18332 - DNA, 20 bp, Artificial Sequence
  chemically synthesized
aaaaattaatattgttaaaa

SEQ ID NO: 18333 - DNA, 20 bp, Artificial Sequence
  chemically synthesized
taaaatggccatactaccca

SEQ ID NO: 18334 - DNA, 20 bp, Artificial Sequence
  chemically synthesized
atactacccaaagcaatcta

SEQ ID NO: 18335 - DNA, 20 bp, Artificial Sequence
  chemically synthesized
ctatatgaccgctatcaaaa

SEQ ID NO: 18336 - DNA, 20 bp, Artificial Sequence
  chemically synthesized
aatagcaatgtcatttttca

SEQ ID NO: 18337 - DNA, 20 bp, Artificial Sequence
  chemically synthesized
aatgtcatttttcacagaaa

SEQ ID NO: 18338 - DNA, 20 bp, Artificial Sequence
  chemically synthesized
atttgtatgaaattaaaaaa

SEQ ID NO: 18339 - DNA, 20 bp, Artificial Sequence
  chemically synthesized
atgaaattaaaaaatagctc

SEQ ID NO: 18340 - DNA, 20 bp, Artificial Sequence
  chemically synthesized
aaattaaaaaatagctccag

SEQ ID NO: 18341 - DNA, 20 bp, Artificial Sequence
  chemically synthesized
aaaaatagctccagtagcca

SEQ ID NO: 18342 - DNA, 20 bp, Artificial Sequence
  chemically synthesized
ccaaagtcatcctgtgaaaa

SEQ ID NO: 18343 - DNA, 20 bp, Artificial Sequence
  chemically synthesized
ctgtgaaaaaagaacaatgc

SEQ ID NO: 18344 - DNA, 20 bp, Artificial Sequence
  chemically synthesized
gtgaaaaaagaacaatgcta

SEQ ID NO: 18345 - DNA, 20 bp, Artificial Sequence
  chemically synthesized
tgaaaaaagaacaatgctag

SEQ ID NO: 18346 - DNA, 20 bp, Artificial Sequence
  chemically synthesized
tatcatactacctgatttca

SEQ ID NO: 18347 - DNA, 20 bp, Artificial Sequence
  chemically synthesized
gatttcaaagtatattacaa

SEQ ID NO: 18348 - DNA, 20 bp, Artificial Sequence
  chemically synthesized
caaagtatattacaaaagta

SEQ ID NO: 18349 - DNA, 20 bp, Artificial Sequence
  chemically synthesized
aaagtatattacaaaagtat

SEQ ID NO: 18350 - DNA, 20 bp, Artificial Sequence
  chemically synthesized
caaaagtataggaacctaaa

SEQ ID NO: 18351 - DNA, 20 bp, Artificial Sequence
  chemically synthesized
aaacagcatgatactgacat

SEQ ID NO: 18352 - DNA, 20 bp, Artificial Sequence
  chemically synthesized
gcatgatactgacattagaa

SEQ ID NO: 18353 - DNA, 20 bp, Artificial Sequence
  chemically synthesized
ctgacattagaacagacact

SEQ ID NO: 18354 - DNA, 20 bp, Artificial Sequence
  chemically synthesized
agaacagacacttagaccaa

SEQ ID NO: 18355 - DNA, 20 bp, Artificial Sequence
  chemically synthesized
acagacacttagaccaatgg

SEQ ID NO: 18356 - DNA, 20 bp, Artificial Sequence
  chemically synthesized
agacacttagaccaatggaa

SEQ ID NO: 18357 - DNA, 20 bp, Artificial Sequence
  chemically synthesized
cttagaccaatggaagagaa

SEQ ID NO: 18358 - DNA, 20 bp, Artificial Sequence
  chemically synthesized
tagaccaatggaagagaata

SEQ ID NO: 18359 - DNA, 20 bp, Artificial Sequence
  chemically synthesized
atggaagagaatagagaacc

SEQ ID NO: 18360 - DNA, 20 bp, Artificial Sequence
  chemically synthesized
gaaatgcatccacatattta

SEQ ID NO: 18361 - DNA, 20 bp, Artificial Sequence
  chemically synthesized
atccacatatttatagccaa

SEQ ID NO: 18362 - DNA, 20 bp, Artificial Sequence
  chemically synthesized
tagccaacagattttcaaca

SEQ ID NO: 18363 - DNA, 20 bp, Artificial Sequence
  chemically synthesized
agccaacagattttcaacaa

SEQ ID NO: 18364 - DNA, 20 bp, Artificial Sequence
  chemically synthesized
agattttcaacaaaggtgac

SEQ ID NO: 18365 - DNA, 20 bp, Artificial Sequence
  chemically synthesized
aggtgacaagaatatacatt

SEQ ID NO: 18366 - DNA, 20 bp, Artificial Sequence
  chemically synthesized
ggtgacaagaatatacattg

SEQ ID NO: 18367 - DNA, 20 bp, Artificial Sequence
  chemically synthesized
acaagaatatacattgagga

SEQ ID NO: 18368 - DNA, 20 bp, Artificial Sequence
  chemically synthesized
caagaatatacattgaggaa

SEQ ID NO: 18369 - DNA, 20 bp, Artificial Sequence
  chemically synthesized
tatacattgaggaaaggaca

SEQ ID NO: 18370 - DNA, 20 bp, Artificial Sequence
  chemically synthesized
gaggaaaggacacagtgttc

SEQ ID NO: 18371 - DNA, 20 bp, Artificial Sequence
  chemically synthesized
aggacacagtgttcaagaaa

SEQ ID NO: 18372 - DNA, 20 bp, Artificial Sequence
  chemically synthesized
agaaatggtgctgaaaaaat

SEQ ID NO: 18373 - DNA, 20 bp, Artificial Sequence
  chemically synthesized
tgaaaaaattggatatccat

SEQ ID NO: 18374 - DNA, 20 bp, Artificial Sequence
  chemically synthesized
cattggatatccatgtgcaa

SEQ ID NO: 18375 - DNA, 20 bp, Artificial Sequence
  chemically synthesized
catgtgcaaaagaataaaac

SEQ ID NO: 18376 - DNA, 20 bp, Artificial Sequence
  chemically synthesized
ataaaactggactgctgata

SEQ ID NO: 18377 - DNA, 20 bp, Artificial Sequence
  chemically synthesized
actggactgctgatatggtt

SEQ ID NO: 18378 - DNA, 20 bp, Artificial Sequence
  chemically synthesized
aaatataatccccaacttct

SEQ ID NO: 18379 - DNA, 20 bp, Artificial Sequence
  chemically synthesized
aatataatccccaacttctc

SEQ ID NO: 18380 - DNA, 20 bp, Artificial Sequence
  chemically synthesized
tccccaacttctcaggatct

SEQ ID NO: 18381 - DNA, 20 bp, Artificial Sequence
  chemically synthesized
ccaacttctcaggatcttgg

SEQ ID NO: 18382 - DNA, 20 bp, Artificial Sequence
  chemically synthesized
cttctcaggatcttggcgga

SEQ ID NO: 18383 - DNA, 20 bp, Artificial Sequence
  chemically synthesized
ttctcaggatcttggcggat

SEQ ID NO: 18384 - DNA, 20 bp, Artificial Sequence
  chemically synthesized
ctcaggatcttggcggatgg

SEQ ID NO: 18385 - DNA, 20 bp, Artificial Sequence
  chemically synthesized
tcaggatcttggcggatggg

SEQ ID NO: 18386 - DNA, 20 bp, Artificial Sequence
  chemically synthesized
ggatcttggcggatgggagg

SEQ ID NO: 18387 - DNA, 20 bp, Artificial Sequence
  chemically synthesized
gatcttggcggatgggaggt

SEQ ID NO: 18388 - DNA, 20 bp, Artificial Sequence
  chemically synthesized
tggcggatgggaggtaggcc

SEQ ID NO: 18389 - DNA, 20 bp, Artificial Sequence
  chemically synthesized
tgggaggtaggcctagattg

SEQ ID NO: 18390 - DNA, 20 bp, Artificial Sequence
  chemically synthesized
cctagattgcagctccaact

SEQ ID NO: 18391 - DNA, 20 bp, Artificial Sequence
  chemically synthesized
gattgcagctccaactcaga

SEQ ID NO: 18392 - DNA, 20 bp, Artificial Sequence
  chemically synthesized
gcagctccaactcagatgga

SEQ ID NO: 18393 - DNA, 20 bp, Artificial Sequence
  chemically synthesized
agctccaactcagatggaca

SEQ ID NO: 18394 - DNA, 20 bp, Artificial Sequence
  chemically synthesized
tccaactcagatggacagag

SEQ ID NO: 18395 - DNA, 20 bp, Artificial Sequence
  chemically synthesized
cagatggacagagcagcatg

SEQ ID NO: 18396 - DNA, 20 bp, Artificial Sequence
  chemically synthesized
gatggacagagcagcatgtg

SEQ ID NO: 18397 - DNA, 20 bp, Artificial Sequence
  chemically synthesized
atggacagagcagcatgtgg

SEQ ID NO: 18398 - DNA, 20 bp, Artificial Sequence
  chemically synthesized
gaggctcgcattgtgaattt

SEQ ID NO: 18399 - DNA, 20 bp, Artificial Sequence
  chemically synthesized
cgcattgtgaattttagctg

SEQ ID NO: 18400 - DNA, 20 bp, Artificial Sequence
  chemically synthesized
ttgtgaattttagctgcaga

SEQ ID NO: 18401 - DNA, 20 bp, Artificial Sequence
  chemically synthesized
tttagctgcagatagactgc

SEQ ID NO: 18402 - DNA, 20 bp, Artificial Sequence
  chemically synthesized
gatagactgcaagaacaaac

SEQ ID NO: 18403 - DNA, 20 bp, Artificial Sequence
  chemically synthesized
aagaacaaaccagcaatcct

SEQ ID NO: 18404 - DNA, 20 bp, Artificial Sequence
  chemically synthesized
gaacaaaccagcaatcctga

SEQ ID NO: 18405 - DNA, 20 bp, Artificial Sequence
  chemically synthesized
aacaaaccagcaatcctgag

SEQ ID NO: 18406 - DNA, 20 bp, Artificial Sequence
  chemically synthesized
agcaatcctgagaggaccca

SEQ ID NO: 18407 - DNA, 20 bp, Artificial Sequence
  chemically synthesized
gaggacccacagaccctctg

SEQ ID NO: 18408 - DNA, 20 bp, Artificial Sequence
  chemically synthesized
aggacccacagaccctctga

SEQ ID NO: 18409 - DNA, 20 bp, Artificial Sequence
  chemically synthesized
acccacagaccctctgaagg

SEQ ID NO: 18410 - DNA, 20 bp, Artificial Sequence
  chemically synthesized
cacagaccctctgaaggaag

SEQ ID NO: 18411 - DNA, 20 bp, Artificial Sequence
  chemically synthesized
aaggaagtagattgctcctg

SEQ ID NO: 18412 - DNA, 20 bp, Artificial Sequence
  chemically synthesized
aggaagtagattgctcctgc

SEQ ID NO: 18413 - DNA, 20 bp, Artificial Sequence
  chemically synthesized
tagattgctcctgcaggacc

SEQ ID NO: 18414 - DNA, 20 bp, Artificial Sequence
  chemically synthesized
agattgctcctgcaggaccc

SEQ ID NO: 18415 - DNA, 20 bp, Artificial Sequence
  chemically synthesized
attgctcctgcaggacccag

SEQ ID NO: 18416 - DNA, 20 bp, Artificial Sequence
  chemically synthesized
ggagacaccccaaatactgt

SEQ ID NO: 18417 - DNA, 20 bp, Artificial Sequence
  chemically synthesized
tactgtgagtgccccaactg

SEQ ID NO: 18418 - DNA, 20 bp, Artificial Sequence
  chemically synthesized
tgtgagtgccccaactgcgg

SEQ ID NO: 18419 - DNA, 20 bp, Artificial Sequence
  chemically synthesized
gagtgccccaactgcggaag

SEQ ID NO: 18420 - DNA, 20 bp, Artificial Sequence
  chemically synthesized
agtgccccaactgcggaagt

SEQ ID NO: 18421 - DNA, 20 bp, Artificial Sequence
  chemically synthesized
ccccaactgcggaagtggga

SEQ ID NO: 18422 - DNA, 20 bp, Artificial Sequence
  chemically synthesized
cccaactgcggaagtgggaa

SEQ ID NO: 18423 - DNA, 20 bp, Artificial Sequence
  chemically synthesized
ccaactgcggaagtgggaaa

SEQ ID NO: 18424 - DNA, 20 bp, Artificial Sequence
  chemically synthesized
aactgcggaagtgggaaagg

SEQ ID NO: 18425 - DNA, 20 bp, Artificial Sequence
  chemically synthesized
tcctaaacacacactcccac

SEQ ID NO: 18426 - DNA, 20 bp, Artificial Sequence
  chemically synthesized
ctaaacacacactcccactg

SEQ ID NO: 18427 - DNA, 20 bp, Artificial Sequence
  chemically synthesized
cactcccactggagaaactg

SEQ ID NO: 18428 - DNA, 20 bp, Artificial Sequence
  chemically synthesized
actcccactggagaaactga

SEQ ID NO: 18429 - DNA, 20 bp, Artificial Sequence
  chemically synthesized
agaaactgaaggtctgtttg

SEQ ID NO: 18430 - DNA, 20 bp, Artificial Sequence
  chemically synthesized
gaaactgaaggtctgtttgt

SEQ ID NO: 18431 - DNA, 20 bp, Artificial Sequence
  chemically synthesized
aactgaaggtctgtttgtgg

SEQ ID NO: 18432 - DNA, 20 bp, Artificial Sequence
  chemically synthesized
tgaaggtctgtttgtgggag

SEQ ID NO: 18433 - DNA, 20 bp, Artificial Sequence
  chemically synthesized
gagaagtttctgaccttacc

SEQ ID NO: 18434 - DNA, 20 bp, Artificial Sequence
  chemically synthesized
gaagtttctgaccttacctg

SEQ ID NO: 18435 - DNA, 20 bp, Artificial Sequence
  chemically synthesized
ttctgaccttacctggagtt

SEQ ID NO: 18436 - DNA, 20 bp, Artificial Sequence
  chemically synthesized
tacctggagttgagttaact

SEQ ID NO: 18437 - DNA, 20 bp, Artificial Sequence
  chemically synthesized
cctggagttgagttaactta

SEQ ID NO: 18438 - DNA, 20 bp, Artificial Sequence
  chemically synthesized
tggagttgagttaacttaga

SEQ ID NO: 18439 - DNA, 20 bp, Artificial Sequence
  chemically synthesized
ttgagttaacttagagagct

SEQ ID NO: 18440 - DNA, 20 bp, Artificial Sequence
  chemically synthesized
ttagagagctgagcaaaata

SEQ ID NO: 18441 - DNA, 20 bp, Artificial Sequence
  chemically synthesized
tagagagctgagcaaaatac

SEQ ID NO: 18442 - DNA, 20 bp, Artificial Sequence
  chemically synthesized
agctgagcaaaatacaggtg

SEQ ID NO: 18443 - DNA, 20 bp, Artificial Sequence
  chemically synthesized
ctgagcaaaatacaggtgta

SEQ ID NO: 18444 - DNA, 20 bp, Artificial Sequence
  chemically synthesized
tgagcaaaatacaggtgtag

SEQ ID NO: 18445 - DNA, 20 bp, Artificial Sequence
  chemically synthesized
gcaaaatacaggtgtagagg

SEQ ID NO: 18446 - DNA, 20 bp, Artificial Sequence
  chemically synthesized
aaatacaggtgtagaggaag

SEQ ID NO: 18447 - DNA, 20 bp, Artificial Sequence
  chemically synthesized
acaggtgtagaggaagcagt

SEQ ID NO: 18448 - DNA, 20 bp, Artificial Sequence
  chemically synthesized
gtgtagaggaagcagtgaga

SEQ ID NO: 18449 - DNA, 20 bp, Artificial Sequence
  chemically synthesized
tgtagaggaagcagtgagaa

SEQ ID NO: 18450 - DNA, 20 bp, Artificial Sequence
  chemically synthesized
ggaagcagtgagaaaggccc

SEQ ID NO: 18451 - DNA, 20 bp, Artificial Sequence
  chemically synthesized
gaagcagtgagaaaggccct

SEQ ID NO: 18452 - DNA, 20 bp, Artificial Sequence
  chemically synthesized
agcagtgagaaaggccctgg

SEQ ID NO: 18453 - DNA, 20 bp, Artificial Sequence
  chemically synthesized
gaaaggccctgggagctcac

SEQ ID NO: 18454 - DNA, 20 bp, Artificial Sequence
  chemically synthesized
aaaggccctgggagctcact

SEQ ID NO: 18455 - DNA, 20 bp, Artificial Sequence
  chemically synthesized
tgggagctcactgggtccct

SEQ ID NO: 18456 - DNA, 20 bp, Artificial Sequence
  chemically synthesized
gagctcactgggtccctgag

SEQ ID NO: 18457 - DNA, 20 bp, Artificial Sequence
  chemically synthesized
agctcactgggtccctgagc

SEQ ID NO: 18458 - DNA, 20 bp, Artificial Sequence
  chemically synthesized
ctgagcaggccattcctgcc

SEQ ID NO: 18459 - DNA, 20 bp, Artificial Sequence
  chemically synthesized
caggccattcctgcctggca

SEQ ID NO: 18460 - DNA, 20 bp, Artificial Sequence
  chemically synthesized
ccattcctgcctggcatagc

SEQ ID NO: 18461 - DNA, 20 bp, Artificial Sequence
  chemically synthesized
cattcctgcctggcatagcc

SEQ ID NO: 18462 - DNA, 20 bp, Artificial Sequence
  chemically synthesized
ttactaacattgaatgtaaa

SEQ ID NO: 18463 - DNA, 20 bp, Artificial Sequence
  chemically synthesized
ggcctaaatgctccacttaa

SEQ ID NO: 18464 - DNA, 20 bp, Artificial Sequence
  chemically synthesized
gcctaaatgctccacttaaa

SEQ ID NO: 18465 - DNA, 20 bp, Artificial Sequence
  chemically synthesized
cctaaatgctccacttaaaa

SEQ ID NO: 18466 - DNA, 20 bp, Artificial Sequence
  chemically synthesized
ctccacttaaaagggtgaaa

SEQ ID NO: 18467 - DNA, 20 bp, Artificial Sequence
  chemically synthesized
tccacttaaaagggtgaaaa

SEQ ID NO: 18468 - DNA, 20 bp, Artificial Sequence
  chemically synthesized
aaaaaggtatttcatgcaaa

SEQ ID NO: 18469 - DNA, 20 bp, Artificial Sequence
  chemically synthesized
ttcatgcaaatggccaccaa

SEQ ID NO: 18470 - DNA, 20 bp, Artificial Sequence
  chemically synthesized
tgcaaatggccaccaaaagt

SEQ ID NO: 18471 - DNA, 20 bp, Artificial Sequence
  chemically synthesized
aaatggccaccaaaagtgag

SEQ ID NO: 18472 - DNA, 20 bp, Artificial Sequence
  chemically synthesized
aatggccaccaaaagtgagt

SEQ ID NO: 18473 - DNA, 20 bp, Artificial Sequence
  chemically synthesized
agtaggcaaaacaaacttta

SEQ ID NO: 18474 - DNA, 20 bp, Artificial Sequence
  chemically synthesized
caaaacaaactttaaagcaa

SEQ ID NO: 18475 - DNA, 20 bp, Artificial Sequence
  chemically synthesized
aacaaactttaaagcaacag

SEQ ID NO: 18476 - DNA, 20 bp, Artificial Sequence
  chemically synthesized
tttaaagcaacagcagttaa

SEQ ID NO: 18477 - DNA, 20 bp, Artificial Sequence
  chemically synthesized
taaagcaacagcagttaaaa

SEQ ID NO: 18478 - DNA, 20 bp, Artificial Sequence
  chemically synthesized
aacagcagttaaaagagaca

SEQ ID NO: 18479 - DNA, 20 bp, Artificial Sequence
  chemically synthesized
cagcagttaaaagagacaaa

SEQ ID NO: 18480 - DNA, 20 bp, Artificial Sequence
  chemically synthesized
agcagttaaaagagacaaag

SEQ ID NO: 18481 - DNA, 20 bp, Artificial Sequence
  chemically synthesized
gcagttaaaagagacaaaga

SEQ ID NO: 18482 - DNA, 20 bp, Artificial Sequence
  chemically synthesized
caaagagggacattatataa

SEQ ID NO: 18483 - DNA, 20 bp, Artificial Sequence
  chemically synthesized
gggacattatataatggtaa

SEQ ID NO: 18484 - DNA, 20 bp, Artificial Sequence
  chemically synthesized
ggacattatataatggtaaa

SEQ ID NO: 18485 - DNA, 20 bp, Artificial Sequence
  chemically synthesized
tggtaaaaggccttgtccaa

SEQ ID NO: 18486 - DNA, 20 bp, Artificial Sequence
  chemically synthesized
ggtaaaaggccttgtccaac

SEQ ID NO: 18487 - DNA, 20 bp, Artificial Sequence
  chemically synthesized
aacatatatgcacctaacac

SEQ ID NO: 18488 - DNA, 20 bp, Artificial Sequence
  chemically synthesized
catatatgcacctaacactg

SEQ ID NO: 18489 - DNA, 20 bp, Artificial Sequence
  chemically synthesized
cactggagctcccaaattta

SEQ ID NO: 18490 - DNA, 20 bp, Artificial Sequence
  chemically synthesized
atttatagaacaattactaa

SEQ ID NO: 18491 - DNA, 20 bp, Artificial Sequence
  chemically synthesized
gaacaattactaatagacct

SEQ ID NO: 18492 - DNA, 20 bp, Artificial Sequence
  chemically synthesized
tactaatagacctaagaaat

SEQ ID NO: 18493 - DNA, 20 bp, Artificial Sequence
  chemically synthesized
aatagacctaagaaatgaga

SEQ ID NO: 18494 - DNA, 20 bp, Artificial Sequence
  chemically synthesized
gacctaagaaatgagataga

SEQ ID NO: 18495 - DNA, 20 bp, Artificial Sequence
  chemically synthesized
gatagacagcaacacaataa

SEQ ID NO: 18496 - DNA, 20 bp, Artificial Sequence
  chemically synthesized
agacagcaacacaataatag

SEQ ID NO: 18497 - DNA, 20 bp, Artificial Sequence
  chemically synthesized
gacagcaacacaataatagt

SEQ ID NO: 18498 - DNA, 20 bp, Artificial Sequence
  chemically synthesized
acagcaacacaataatagtg

SEQ ID NO: 18499 - DNA, 20 bp, Artificial Sequence
  chemically synthesized
cagcaacacaataatagtgg

SEQ ID NO: 18500 - DNA, 20 bp, Artificial Sequence
  chemically synthesized
ggacttcaatacttcattga

SEQ ID NO: 18501 - DNA, 20 bp, Artificial Sequence
  chemically synthesized
caatacttcattgacagcac

SEQ ID NO: 18502 - DNA, 20 bp, Artificial Sequence
  chemically synthesized
acttcattgacagcactaga

SEQ ID NO: 18503 - DNA, 20 bp, Artificial Sequence
  chemically synthesized
acagcactagacagttcatc

SEQ ID NO: 18504 - DNA, 20 bp, Artificial Sequence
  chemically synthesized
cactagacagttcatcaaga

SEQ ID NO: 18505 - DNA, 20 bp, Artificial Sequence
  chemically synthesized
agacagttcatcaagacaga

SEQ ID NO: 18506 - DNA, 20 bp, Artificial Sequence
  chemically synthesized
gaaagtcaacaaaaaaataa

SEQ ID NO: 18507 - DNA, 20 bp, Artificial Sequence
  chemically synthesized
aatggatttaaattatacct

SEQ ID NO: 18508 - DNA, 20 bp, Artificial Sequence
  chemically synthesized
aaattataccttagaacaaa

SEQ ID NO: 18509 - DNA, 20 bp, Artificial Sequence
  chemically synthesized
cttagaacaaatggacttaa

SEQ ID NO: 18510 - DNA, 20 bp, Artificial Sequence
  chemically synthesized
atggacttaacagttatata

SEQ ID NO: 18511 - DNA, 20 bp, Artificial Sequence
  chemically synthesized
aacatttcatccaataacca

SEQ ID NO: 18512 - DNA, 20 bp, Artificial Sequence
  chemically synthesized
agaacacacattctattcaa

SEQ ID NO: 18513 - DNA, 20 bp, Artificial Sequence
  chemically synthesized
acattctattcaacagcgcg

SEQ ID NO: 18514 - DNA, 20 bp, Artificial Sequence
  chemically synthesized
cagcgcgtggaaatttctcc

SEQ ID NO: 18515 - DNA, 20 bp, Artificial Sequence
  chemically synthesized
agcgcgtggaaatttctcca

SEQ ID NO: 18516 - DNA, 20 bp, Artificial Sequence
  chemically synthesized
gcgtggaaatttctccaagg

SEQ ID NO: 18517 - DNA, 20 bp, Artificial Sequence
  chemically synthesized
ctccaaggtagaccatatga

SEQ ID NO: 18518 - DNA, 20 bp, Artificial Sequence
  chemically synthesized
tccaaggtagaccatatgat

SEQ ID NO: 18519 - DNA, 20 bp, Artificial Sequence
  chemically synthesized
catatgataggccatgaaat

SEQ ID NO: 18520 - DNA, 20 bp, Artificial Sequence
  chemically synthesized
agcctcaataaatttactaa

SEQ ID NO: 18521 - DNA, 20 bp, Artificial Sequence
  chemically synthesized
tttactaacagaccaataac

SEQ ID NO: 18522 - DNA, 20 bp, Artificial Sequence
  chemically synthesized
actaacagaccaataacaag

SEQ ID NO: 18523 - DNA, 20 bp, Artificial Sequence
  chemically synthesized
acagaccaataacaagcagt

SEQ ID NO: 18524 - DNA, 20 bp, Artificial Sequence
  chemically synthesized
aacaagcagtgagatttaat

SEQ ID NO: 18525 - DNA, 20 bp, Artificial Sequence
  chemically synthesized
aaaaattaccaaccaaaaaa

SEQ ID NO: 18526 - DNA, 20 bp, Artificial Sequence
  chemically synthesized
ttaccaaccaaaaaaaagtt

SEQ ID NO: 18527 - DNA, 20 bp, Artificial Sequence
  chemically synthesized
taccaaccaaaaaaaagttc

SEQ ID NO: 18528 - DNA, 20 bp, Artificial Sequence
  chemically synthesized
accaaaaaaaagttcaggac

SEQ ID NO: 18529 - DNA, 20 bp, Artificial Sequence
  chemically synthesized
aaaaaaagttcaggaccaga

SEQ ID NO: 18530 - DNA, 20 bp, Artificial Sequence
  chemically synthesized
aggaccagatggattcacaa

SEQ ID NO: 18531 - DNA, 20 bp, Artificial Sequence
  chemically synthesized
gattcacaacagaattctac

SEQ ID NO: 18532 - DNA, 20 bp, Artificial Sequence
  chemically synthesized
agaattctactagacattca

SEQ ID NO: 18533 - DNA, 20 bp, Artificial Sequence
  chemically synthesized
aattctactagacattcaaa

SEQ ID NO: 18534 - DNA, 20 bp, Artificial Sequence
  chemically synthesized
attctactagacattcaaag

SEQ ID NO: 18535 - DNA, 20 bp, Artificial Sequence
  chemically synthesized
ctagacattcaaagaggaat

SEQ ID NO: 18536 - DNA, 20 bp, Artificial Sequence
  chemically synthesized
tctttttgacactattctac

SEQ ID NO: 18537 - DNA, 20 bp, Artificial Sequence
  chemically synthesized
tttgacactattctacaaga

SEQ ID NO: 18538 - DNA, 20 bp, Artificial Sequence
  chemically synthesized
actattctacaagacagata

SEQ ID NO: 18539 - DNA, 20 bp, Artificial Sequence
  chemically synthesized
attctacaagacagataaag

SEQ ID NO: 18540 - DNA, 20 bp, Artificial Sequence
  chemically synthesized
ttctacaagacagataaaga

SEQ ID NO: 18541 - DNA, 20 bp, Artificial Sequence
  chemically synthesized
ctgccctaattcattctatg

SEQ ID NO: 18542 - DNA, 20 bp, Artificial Sequence
  chemically synthesized
cctaattcattctatgaagc

SEQ ID NO: 18543 - DNA, 20 bp, Artificial Sequence
  chemically synthesized
agccagcatcacaccaaaac

SEQ ID NO: 18544 - DNA, 20 bp, Artificial Sequence
  chemically synthesized
gccagcatcacaccaaaacc

SEQ ID NO: 18545 - DNA, 20 bp, Artificial Sequence
  chemically synthesized
ccagcatcacaccaaaacca

SEQ ID NO: 18546 - DNA, 20 bp, Artificial Sequence
  chemically synthesized
gcatcacaccaaaaccaggg

SEQ ID NO: 18547 - DNA, 20 bp, Artificial Sequence
  chemically synthesized
catcacaccaaaaccaggga

SEQ ID NO: 18548 - DNA, 20 bp, Artificial Sequence
  chemically synthesized
agggaaggacataaccaaaa

SEQ ID NO: 18549 - DNA, 20 bp, Artificial Sequence
  chemically synthesized
ataaccaaaaaagaaaacta

SEQ ID NO: 18550 - DNA, 20 bp, Artificial Sequence
  chemically synthesized
aaaagaaaactacagactga

SEQ ID NO: 18551 - DNA, 20 bp, Artificial Sequence
  chemically synthesized
actgatagccttgatgaaca

SEQ ID NO: 18552 - DNA, 20 bp, Artificial Sequence
  chemically synthesized
taaaatccttaacaaaatac

SEQ ID NO: 18553 - DNA, 20 bp, Artificial Sequence
  chemically synthesized
aaattcaacaacataacaaa

SEQ ID NO: 18554 - DNA, 20 bp, Artificial Sequence
  chemically synthesized
aaagataatccaccatgatc

SEQ ID NO: 18555 - DNA, 20 bp, Artificial Sequence
  chemically synthesized
gataatccaccatgatcaag

SEQ ID NO: 18556 - DNA, 20 bp, Artificial Sequence
  chemically synthesized
ataatccaccatgatcaagc

SEQ ID NO: 18557 - DNA, 20 bp, Artificial Sequence
  chemically synthesized
tgatcaagcaggttccatgc

SEQ ID NO: 18558 - DNA, 20 bp, Artificial Sequence
  chemically synthesized
gatcaagcaggttccatgcc

SEQ ID NO: 18559 - DNA, 20 bp, Artificial Sequence
  chemically synthesized
atcaagcaggttccatgcca

SEQ ID NO: 18560 - DNA, 20 bp, Artificial Sequence
  chemically synthesized
caggttccatgccagggatg

SEQ ID NO: 18561 - DNA, 20 bp, Artificial Sequence
  chemically synthesized
aggttccatgccagggatgc

SEQ ID NO: 18562 - DNA, 20 bp, Artificial Sequence
  chemically synthesized
ggttccatgccagggatgca

SEQ ID NO: 18563 - DNA, 20 bp, Artificial Sequence
  chemically synthesized
ccatgccagggatgcagggt

SEQ ID NO: 18564 - DNA, 20 bp, Artificial Sequence
  chemically synthesized
agggttggtttgacatctgc

SEQ ID NO: 18565 - DNA, 20 bp, Artificial Sequence
  chemically synthesized
tttgacatctgcaagtcaat

SEQ ID NO: 18566 - DNA, 20 bp, Artificial Sequence
  chemically synthesized
agtgtgatacaccacataaa

SEQ ID NO: 18567 - DNA, 20 bp, Artificial Sequence
  chemically synthesized
aaattacatgatcatctcaa

SEQ ID NO: 18568 - DNA, 20 bp, Artificial Sequence
  chemically synthesized
catgatcatctcaatagatg

SEQ ID NO: 18569 - DNA, 20 bp, Artificial Sequence
  chemically synthesized
catctcaatagatgcagaaa

SEQ ID NO: 18570 - DNA, 20 bp, Artificial Sequence
  chemically synthesized
aaaaagcattcaacaaaatc

SEQ ID NO: 18571 - DNA, 20 bp, Artificial Sequence
  chemically synthesized
acatttatgattaaaatgct

SEQ ID NO: 18572 - DNA, 20 bp, Artificial Sequence
  chemically synthesized
attaaaatgctcagcaaaat

SEQ ID NO: 18573 - DNA, 20 bp, Artificial Sequence
  chemically synthesized
gctcagcaaaatcagcatac

SEQ ID NO: 18574 - DNA, 20 bp, Artificial Sequence
  chemically synthesized
tcagcaaaatcagcatacaa

SEQ ID NO: 18575 - DNA, 20 bp, Artificial Sequence
  chemically synthesized
agcatacaagagacatacct

SEQ ID NO: 18576 - DNA, 20 bp, Artificial Sequence
  chemically synthesized
gacatacctcagtgtaataa

SEQ ID NO: 18577 - DNA, 20 bp, Artificial Sequence
  chemically synthesized
agccatctgtgacaaaccca

SEQ ID NO: 18578 - DNA, 20 bp, Artificial Sequence
  chemically synthesized
acagccaacataatattgaa

SEQ ID NO: 18579 - DNA, 20 bp, Artificial Sequence
  chemically synthesized
cagccaacataatattgaat

SEQ ID NO: 18580 - DNA, 20 bp, Artificial Sequence
  chemically synthesized
agccaacataatattgaatg

SEQ ID NO: 18581 - DNA, 20 bp, Artificial Sequence
  chemically synthesized
acataatattgaatggggaa

SEQ ID NO: 18582 - DNA, 20 bp, Artificial Sequence
  chemically synthesized
attgaatggggaaaagttga

SEQ ID NO: 18583 - DNA, 20 bp, Artificial Sequence
  chemically synthesized
aagttgaaagcattccctct

SEQ ID NO: 18584 - DNA, 20 bp, Artificial Sequence
  chemically synthesized
aaagcattccctctgagaac

SEQ ID NO: 18585 - DNA, 20 bp, Artificial Sequence
  chemically synthesized
ttccctctgagaactggaac

SEQ ID NO: 18586 - DNA, 20 bp, Artificial Sequence
  chemically synthesized
tctgagaactggaacaagac

SEQ ID NO: 18587 - DNA, 20 bp, Artificial Sequence
  chemically synthesized
ctgagaactggaacaagaca

SEQ ID NO: 18588 - DNA, 20 bp, Artificial Sequence
  chemically synthesized
ctcaccactcctcttcaaca

SEQ ID NO: 18589 - DNA, 20 bp, Artificial Sequence
  chemically synthesized
actcctcttcaacatagtac

SEQ ID NO: 18590 - DNA, 20 bp, Artificial Sequence
  chemically synthesized
cctcttcaacatagtactgg

SEQ ID NO: 18591 - DNA, 20 bp, Artificial Sequence
  chemically synthesized
caacatagtactggaagtcc

SEQ ID NO: 18592 - DNA, 20 bp, Artificial Sequence
  chemically synthesized
atagtactggaagtcctagc

SEQ ID NO: 18593 - DNA, 20 bp, Artificial Sequence
  chemically synthesized
tagtactggaagtcctagcc

SEQ ID NO: 18594 - DNA, 20 bp, Artificial Sequence
  chemically synthesized
agtactggaagtcctagcca

SEQ ID NO: 18595 - DNA, 20 bp, Artificial Sequence
  chemically synthesized
gaagtcctagccagggcaat

SEQ ID NO: 18596 - DNA, 20 bp, Artificial Sequence
  chemically synthesized
cagggcaatcagacaaaaca

SEQ ID NO: 18597 - DNA, 20 bp, Artificial Sequence
  chemically synthesized
tcagacaaaacaaagaaata

SEQ ID NO: 18598 - DNA, 20 bp, Artificial Sequence
  chemically synthesized
cagacaaaacaaagaaataa

SEQ ID NO: 18599 - DNA, 20 bp, Artificial Sequence
  chemically synthesized
agacaaaacaaagaaataaa

SEQ ID NO: 18600 - DNA, 20 bp, Artificial Sequence
  chemically synthesized
gaaataaagggcattcaaat

SEQ ID NO: 18601 - DNA, 20 bp, Artificial Sequence
  chemically synthesized
aaagggcattcaaatcagta

SEQ ID NO: 18602 - DNA, 20 bp, Artificial Sequence
  chemically synthesized
agggcattcaaatcagtaaa

SEQ ID NO: 18603 - DNA, 20 bp, Artificial Sequence
  chemically synthesized
gggcattcaaatcagtaaag

SEQ ID NO: 18604 - DNA, 20 bp, Artificial Sequence
  chemically synthesized
cattcaaatcagtaaagagg

SEQ ID NO: 18605 - DNA, 20 bp, Artificial Sequence
  chemically synthesized
catttacctttaaaacccta

SEQ ID NO: 18606 - DNA, 20 bp, Artificial Sequence
  chemically synthesized
taaaaccctaaagactcctc

SEQ ID NO: 18607 - DNA, 20 bp, Artificial Sequence
  chemically synthesized
accctaaagactcctccaga

SEQ ID NO: 18608 - DNA, 20 bp, Artificial Sequence
  chemically synthesized
agactcctccagaaagctcc

SEQ ID NO: 18609 - DNA, 20 bp, Artificial Sequence
  chemically synthesized
ctagaactgataaaataatt

SEQ ID NO: 18610 - DNA, 20 bp, Artificial Sequence
  chemically synthesized
actgataaaataattcagca

SEQ ID NO: 18611 - DNA, 20 bp, Artificial Sequence
  chemically synthesized
aaataattcagcaaagtttc

SEQ ID NO: 18612 - DNA, 20 bp, Artificial Sequence
  chemically synthesized
tcagcaaagtttccagatac

SEQ ID NO: 18613 - DNA, 20 bp, Artificial Sequence
  chemically synthesized
caagatgaatgcacacaaat

SEQ ID NO: 18614 - DNA, 20 bp, Artificial Sequence
  chemically synthesized
gtaactcttctatacaccaa

SEQ ID NO: 18615 - DNA, 20 bp, Artificial Sequence
  chemically synthesized
atacaccaacagcaaccaaa

SEQ ID NO: 18616 - DNA, 20 bp, Artificial Sequence
  chemically synthesized
acaccaacagcaaccaaatg

SEQ ID NO: 18617 - DNA, 20 bp, Artificial Sequence
  chemically synthesized
accaaatggagaatcaaatc

SEQ ID NO: 18618 - DNA, 20 bp, Artificial Sequence
  chemically synthesized
gaactcaaccccttgtacaa

SEQ ID NO: 18619 - DNA, 20 bp, Artificial Sequence
  chemically synthesized
ttgtacaatagatgcaaaaa

SEQ ID NO: 18620 - DNA, 20 bp, Artificial Sequence
  chemically synthesized
gccatataaaacgtactctc

SEQ ID NO: 18621 - DNA, 20 bp, Artificial Sequence
  chemically synthesized
tataaaacgtactctcaaga

SEQ ID NO: 18622 - DNA, 20 bp, Artificial Sequence
  chemically synthesized
cgtactctcaagatggatta

SEQ ID NO: 18623 - DNA, 20 bp, Artificial Sequence
  chemically synthesized
taaaactataaaactactaa

SEQ ID NO: 18624 - DNA, 20 bp, Artificial Sequence
  chemically synthesized
aaactactaaaagaaaacat

SEQ ID NO: 18625 - DNA, 20 bp, Artificial Sequence
  chemically synthesized
aactactaaaagaaaacata

SEQ ID NO: 18626 - DNA, 20 bp, Artificial Sequence
  chemically synthesized
actactaaaagaaaacataa

SEQ ID NO: 18627 - DNA, 20 bp, Artificial Sequence
  chemically synthesized
tactaaaagaaaacataagg

SEQ ID NO: 18628 - DNA, 20 bp, Artificial Sequence
  chemically synthesized
aaacataagggagacacttc

SEQ ID NO: 18629 - DNA, 20 bp, Artificial Sequence
  chemically synthesized
aagggagacacttcaagaca

SEQ ID NO: 18630 - DNA, 20 bp, Artificial Sequence
  chemically synthesized
gacacttcaagacatggctt

SEQ ID NO: 18631 - DNA, 20 bp, Artificial Sequence
  chemically synthesized
acacttcaagacatggcttt

SEQ ID NO: 18632 - DNA, 20 bp, Artificial Sequence
  chemically synthesized
tcaagacatggctttgggca

SEQ ID NO: 18633 - DNA, 20 bp, Artificial Sequence
  chemically synthesized
ggctttgggcaaagatttta

SEQ ID NO: 18634 - DNA, 20 bp, Artificial Sequence
  chemically synthesized
tgggcaaagattttatggcc

SEQ ID NO: 18635 - DNA, 20 bp, Artificial Sequence
  chemically synthesized
ttttatggccaagacctcaa

SEQ ID NO: 18636 - DNA, 20 bp, Artificial Sequence
  chemically synthesized
tggccaagacctcaaaagca

SEQ ID NO: 18637 - DNA, 20 bp, Artificial Sequence
  chemically synthesized
ggccaagacctcaaaagcac

SEQ ID NO: 18638 - DNA, 20 bp, Artificial Sequence
  chemically synthesized
ctcaaaagcacaggcaacaa

SEQ ID NO: 18639 - DNA, 20 bp, Artificial Sequence
  chemically synthesized
acaggcaacaaaagcaaaaa

SEQ ID NO: 18640 - DNA, 20 bp, Artificial Sequence
  chemically synthesized
caaaagcaaaaatagacaaa

SEQ ID NO: 18641 - DNA, 20 bp, Artificial Sequence
  chemically synthesized
aaaagcaaaaatagacaaat

SEQ ID NO: 18642 - DNA, 20 bp, Artificial Sequence
  chemically synthesized
tagacaaatgggactatatt

SEQ ID NO: 18643 - DNA, 20 bp, Artificial Sequence
  chemically synthesized
taagctaaaatacatctgca

SEQ ID NO: 18644 - DNA, 20 bp, Artificial Sequence
  chemically synthesized
taaaatacatctgcacagta

SEQ ID NO: 18645 - DNA, 20 bp, Artificial Sequence
  chemically synthesized
aaaatacatctgcacagtaa

SEQ ID NO: 18646 - DNA, 20 bp, Artificial Sequence
  chemically synthesized
agtaaaggaaacaatcaaca

SEQ ID NO: 18647 - DNA, 20 bp, Artificial Sequence
  chemically synthesized
aggaaacaatcaacacagtg

SEQ ID NO: 18648 - DNA, 20 bp, Artificial Sequence
  chemically synthesized
gaaacaatcaacacagtgaa

SEQ ID NO: 18649 - DNA, 20 bp, Artificial Sequence
  chemically synthesized
aatcaacacagtgaagagac

SEQ ID NO: 18650 - DNA, 20 bp, Artificial Sequence
  chemically synthesized
agagacaagctgttgaatgc

SEQ ID NO: 18651 - DNA, 20 bp, Artificial Sequence
  chemically synthesized
aatatttgcatacatttgac

SEQ ID NO: 18652 - DNA, 20 bp, Artificial Sequence
  chemically synthesized
atatttgcatacatttgaca

SEQ ID NO: 18653 - DNA, 20 bp, Artificial Sequence
  chemically synthesized
tttgacaaggaattaatctc

SEQ ID NO: 18654 - DNA, 20 bp, Artificial Sequence
  chemically synthesized
aattaatctccagaatatat

SEQ ID NO: 18655 - DNA, 20 bp, Artificial Sequence
  chemically synthesized
aagaaactcaaacaactcaa

SEQ ID NO: 18656 - DNA, 20 bp, Artificial Sequence
  chemically synthesized
aaactcaaacaactcaacag

SEQ ID NO: 18657 - DNA, 20 bp, Artificial Sequence
  chemically synthesized
aaataatctcattaaaaaat

SEQ ID NO: 18658 - DNA, 20 bp, Artificial Sequence
  chemically synthesized
atctcattaaaaaattggca

SEQ ID NO: 18659 - DNA, 20 bp, Artificial Sequence
  chemically synthesized
tctcattaaaaaattggcaa

SEQ ID NO: 18660 - DNA, 20 bp, Artificial Sequence
  chemically synthesized
tggcaaaggatatttttcaa

SEQ ID NO: 18661 - DNA, 20 bp, Artificial Sequence
  chemically synthesized
caaaggatatttttcaaaag

SEQ ID NO: 18662 - DNA, 20 bp, Artificial Sequence
  chemically synthesized
gaagacatacaaatgcacaa

SEQ ID NO: 18663 - DNA, 20 bp, Artificial Sequence
  chemically synthesized
aagacatacaaatgcacaat

SEQ ID NO: 18664 - DNA, 20 bp, Artificial Sequence
  chemically synthesized
atacaaatgcacaatgggta

SEQ ID NO: 18665 - DNA, 20 bp, Artificial Sequence
  chemically synthesized
tacaaatgcacaatgggtat

SEQ ID NO: 18666 - DNA, 20 bp, Artificial Sequence
  chemically synthesized
acaaatgcacaatgggtatg

SEQ ID NO: 18667 - DNA, 20 bp, Artificial Sequence
  chemically synthesized
tgctcaacattactaatcat

SEQ ID NO: 18668 - DNA, 20 bp, Artificial Sequence
  chemically synthesized
ctcaacattactaatcatca

SEQ ID NO: 18669 - DNA, 20 bp, Artificial Sequence
  chemically synthesized
atgcaaatcaaaaccacaat

SEQ ID NO: 18670 - DNA, 20 bp, Artificial Sequence
  chemically synthesized
aatgagatatcatcttatgc

SEQ ID NO: 18671 - DNA, 20 bp, Artificial Sequence
  chemically synthesized
agatatcatcttatgccagt

SEQ ID NO: 18672 - DNA, 20 bp, Artificial Sequence
  chemically synthesized
aataaataaataacacatgc

SEQ ID NO: 18673 - DNA, 20 bp, Artificial Sequence
  chemically synthesized
aataaataacacatgctggc

SEQ ID NO: 18674 - DNA, 20 bp, Artificial Sequence
  chemically synthesized
ataaataacacatgctggca

SEQ ID NO: 18675 - DNA, 20 bp, Artificial Sequence
  chemically synthesized
cacatgctggcaaggatgtg

SEQ ID NO: 18676 - DNA, 20 bp, Artificial Sequence
  chemically synthesized
acatgctggcaaggatgtga

SEQ ID NO: 18677 - DNA, 20 bp, Artificial Sequence
  chemically synthesized
ctggcaaggatgtgaaggaa

SEQ ID NO: 18678 - DNA, 20 bp, Artificial Sequence
  chemically synthesized
tggcaaggatgtgaaggaaa

SEQ ID NO: 18679 - DNA, 20 bp, Artificial Sequence
  chemically synthesized
tgtgaaggaaaaggcactcg

SEQ ID NO: 18680 - DNA, 20 bp, Artificial Sequence
  chemically synthesized
gtgaaggaaaaggcactcgt

SEQ ID NO: 18681 - DNA, 20 bp, Artificial Sequence
  chemically synthesized
aaggcactcgtaggcactat

SEQ ID NO: 18682 - DNA, 20 bp, Artificial Sequence
  chemically synthesized
cactcgtaggcactattggt

SEQ ID NO: 18683 - DNA, 20 bp, Artificial Sequence
  chemically synthesized
ctattggtaagcatgcaaat

SEQ ID NO: 18684 - DNA, 20 bp, Artificial Sequence
  chemically synthesized
ggtaagcatgcaaattagta

SEQ ID NO: 18685 - DNA, 20 bp, Artificial Sequence
  chemically synthesized
gcaaattagtatagccacta

SEQ ID NO: 18686 - DNA, 20 bp, Artificial Sequence
  chemically synthesized
ccactatggaaaacaatatg

SEQ ID NO: 18687 - DNA, 20 bp, Artificial Sequence
  chemically synthesized
caatatgtagatttaccaaa

SEQ ID NO: 18688 - DNA, 20 bp, Artificial Sequence
  chemically synthesized
gctaaaaattgaactatcat

SEQ ID NO: 18689 - DNA, 20 bp, Artificial Sequence
  chemically synthesized
aattgaactatcataagatc

SEQ ID NO: 18690 - DNA, 20 bp, Artificial Sequence
  chemically synthesized
agatccagcaatcttattac

SEQ ID NO: 18691 - DNA, 20 bp, Artificial Sequence
  chemically synthesized
gatccagcaatcttattact

SEQ ID NO: 18692 - DNA, 20 bp, Artificial Sequence
  chemically synthesized
tattactgggtatttatcca

SEQ ID NO: 18693 - DNA, 20 bp, Artificial Sequence
  chemically synthesized
attactgggtatttatccaa

SEQ ID NO: 18694 - DNA, 20 bp, Artificial Sequence
  chemically synthesized
tgggtatttatccaaaggaa

SEQ ID NO: 18695 - DNA, 20 bp, Artificial Sequence
  chemically synthesized
ttatccaaaggaaaagaatt

SEQ ID NO: 18696 - DNA, 20 bp, Artificial Sequence
  chemically synthesized
aaagaattcagaataataaa

SEQ ID NO: 18697 - DNA, 20 bp, Artificial Sequence
  chemically synthesized
tcagaataataaacagatac

SEQ ID NO: 18698 - DNA, 20 bp, Artificial Sequence
  chemically synthesized
tggtaccacactgtttattg

SEQ ID NO: 18699 - DNA, 20 bp, Artificial Sequence
  chemically synthesized
tattgcagcacgattcacat

SEQ ID NO: 18700 - DNA, 20 bp, Artificial Sequence
  chemically synthesized
cagcacgattcacattagca

SEQ ID NO: 18701 - DNA, 20 bp, Artificial Sequence
  chemically synthesized
gattcacattagcaaagata

SEQ ID NO: 18702 - DNA, 20 bp, Artificial Sequence
  chemically synthesized
caaagatatggaatcaacct

SEQ ID NO: 18703 - DNA, 20 bp, Artificial Sequence
  chemically synthesized
tcaacctaagtgtccatcaa

SEQ ID NO: 18704 - DNA, 20 bp, Artificial Sequence
  chemically synthesized
tgtccatcaatggatgaatg

SEQ ID NO: 18705 - DNA, 20 bp, Artificial Sequence
  chemically synthesized
atggatgaatgaagaaaatg

SEQ ID NO: 18706 - DNA, 20 bp, Artificial Sequence
  chemically synthesized
atataaaatcatttcatttg

SEQ ID NO: 18707 - DNA, 20 bp, Artificial Sequence
  chemically synthesized
tcatttcatttgcagcaaca

SEQ ID NO: 18708 - DNA, 20 bp, Artificial Sequence
  chemically synthesized
tgcagcaacatggatgaaac

SEQ ID NO: 18709 - DNA, 20 bp, Artificial Sequence
  chemically synthesized
agcaacatggatgaaactgg

SEQ ID NO: 18710 - DNA, 20 bp, Artificial Sequence
  chemically synthesized
gtcattatgttaaacgaaat

SEQ ID NO: 18711 - DNA, 20 bp, Artificial Sequence
  chemically synthesized
ttatgttaaacgaaataagc

SEQ ID NO: 18712 - DNA, 20 bp, Artificial Sequence
  chemically synthesized
tatgttaaacgaaataagcc

SEQ ID NO: 18713 - DNA, 20 bp, Artificial Sequence
  chemically synthesized
taaacgaaataagccaggca

SEQ ID NO: 18714 - DNA, 20 bp, Artificial Sequence
  chemically synthesized
cgaaataagccaggcataga

SEQ ID NO: 18715 - DNA, 20 bp, Artificial Sequence
  chemically synthesized
tgcatgttctcactgatatg

SEQ ID NO: 18716 - DNA, 20 bp, Artificial Sequence
  chemically synthesized
gcatgttctcactgatatgt

SEQ ID NO: 18717 - DNA, 20 bp, Artificial Sequence
  chemically synthesized
atgttctcactgatatgtgg

SEQ ID NO: 18718 - DNA, 20 bp, Artificial Sequence
  chemically synthesized
ctgatatgtgggagctaaaa

SEQ ID NO: 18719 - DNA, 20 bp, Artificial Sequence
  chemically synthesized
ctaaaaaagttaatatcatg

SEQ ID NO: 18720 - DNA, 20 bp, Artificial Sequence
  chemically synthesized
taaaaaagttaatatcatgt

SEQ ID NO: 18721 - DNA, 20 bp, Artificial Sequence
  chemically synthesized
aaaagttaatatcatgtagg

SEQ ID NO: 18722 - DNA, 20 bp, Artificial Sequence
  chemically synthesized
aagttaatatcatgtaggta

SEQ ID NO: 18723 - DNA, 20 bp, Artificial Sequence
  chemically synthesized
gttaatatcatgtaggtaga

SEQ ID NO: 18724 - DNA, 20 bp, Artificial Sequence
  chemically synthesized
aatatcatgtaggtagagag

SEQ ID NO: 18725 - DNA, 20 bp, Artificial Sequence
  chemically synthesized
gtaggtagagagtagaatga

SEQ ID NO: 18726 - DNA, 20 bp, Artificial Sequence
  chemically synthesized
gagagtagaatgacagaaac

SEQ ID NO: 18727 - DNA, 20 bp, Artificial Sequence
  chemically synthesized
gagtagaatgacagaaacca

SEQ ID NO: 18728 - DNA, 20 bp, Artificial Sequence
  chemically synthesized
agtagaatgacagaaaccag

SEQ ID NO: 18729 - DNA, 20 bp, Artificial Sequence
  chemically synthesized
agaatgacagaaaccagagg

SEQ ID NO: 18730 - DNA, 20 bp, Artificial Sequence
  chemically synthesized
aatgacagaaaccagaggta

SEQ ID NO: 18731 - DNA, 20 bp, Artificial Sequence
  chemically synthesized
acagaaaccagaggtagaga

SEQ ID NO: 18732 - DNA, 20 bp, Artificial Sequence
  chemically synthesized
cagaaaccagaggtagagaa

SEQ ID NO: 18733 - DNA, 20 bp, Artificial Sequence
  chemically synthesized
agagaaaggtgtgtacgtta

SEQ ID NO: 18734 - DNA, 20 bp, Artificial Sequence
  chemically synthesized
gagaaaggtgtgtacgttat

SEQ ID NO: 18735 - DNA, 20 bp, Artificial Sequence
  chemically synthesized
gaaaggtgtgtacgttatgg

SEQ ID NO: 18736 - DNA, 20 bp, Artificial Sequence
  chemically synthesized
aaaggtgtgtacgttatggg

SEQ ID NO: 18737 - DNA, 20 bp, Artificial Sequence
  chemically synthesized
ggtgtgtacgttatgggagg

SEQ ID NO: 18738 - DNA, 20 bp, Artificial Sequence
  chemically synthesized
gtgtgtacgttatgggagga

SEQ ID NO: 18739 - DNA, 20 bp, Artificial Sequence
  chemically synthesized
tgtgtacgttatgggaggaa

SEQ ID NO: 18740 - DNA, 20 bp, Artificial Sequence
  chemically synthesized
tgtacgttatgggaggaagg

SEQ ID NO: 18741 - DNA, 20 bp, Artificial Sequence
  chemically synthesized
ttatgggaggaagggagacg

SEQ ID NO: 18742 - DNA, 20 bp, Artificial Sequence
  chemically synthesized
atgggaggaagggagacgaa

SEQ ID NO: 18743 - DNA, 20 bp, Artificial Sequence
  chemically synthesized
ggaggaagggagacgaagag

SEQ ID NO: 18744 - DNA, 20 bp, Artificial Sequence
  chemically synthesized
gaagggagacgaagagaagt

SEQ ID NO: 18745 - DNA, 20 bp, Artificial Sequence
  chemically synthesized
gacgaagagaagttggttaa

SEQ ID NO: 18746 - DNA, 20 bp, Artificial Sequence
  chemically synthesized
gagaagttggttaatggaaa

SEQ ID NO: 18747 - DNA, 20 bp, Artificial Sequence
  chemically synthesized
agaagttggttaatggaaac

SEQ ID NO: 18748 - DNA, 20 bp, Artificial Sequence
  chemically synthesized
agttggttaatggaaacagg

SEQ ID NO: 18749 - DNA, 20 bp, Artificial Sequence
  chemically synthesized
ggttaatggaaacaggcagt

SEQ ID NO: 18750 - DNA, 20 bp, Artificial Sequence
  chemically synthesized
aatggaaacaggcagttaga

SEQ ID NO: 18751 - DNA, 20 bp, Artificial Sequence
  chemically synthesized
ggaaacaggcagttagatag

SEQ ID NO: 18752 - DNA, 20 bp, Artificial Sequence
  chemically synthesized
gaaacaggcagttagataga

SEQ ID NO: 18753 - DNA, 20 bp, Artificial Sequence
  chemically synthesized
gaatatgttctgatgttcaa

SEQ ID NO: 18754 - DNA, 20 bp, Artificial Sequence
  chemically synthesized
tgttctgatgttcaatagca

SEQ ID NO: 18755 - DNA, 20 bp, Artificial Sequence
  chemically synthesized
tctgatgttcaatagcaaag

SEQ ID NO: 18756 - DNA, 20 bp, Artificial Sequence
  chemically synthesized
ctgatgttcaatagcaaagt

SEQ ID NO: 18757 - DNA, 20 bp, Artificial Sequence
  chemically synthesized
tgatgttcaatagcaaagta

SEQ ID NO: 18758 - DNA, 20 bp, Artificial Sequence
  chemically synthesized
atagcaaagtagggtgatta

SEQ ID NO: 18759 - DNA, 20 bp, Artificial Sequence
  chemically synthesized
atatattgtatatttcaaaa

SEQ ID NO: 18760 - DNA, 20 bp, Artificial Sequence
  chemically synthesized
tattgtatatttcaaaatag

SEQ ID NO: 18761 - DNA, 20 bp, Artificial Sequence
  chemically synthesized
tgtatatttcaaaatagtag

SEQ ID NO: 18762 - DNA, 20 bp, Artificial Sequence
  chemically synthesized
tatttcaaaatagtagaaga

SEQ ID NO: 18763 - DNA, 20 bp, Artificial Sequence
  chemically synthesized
atttcaaaatagtagaagaa

SEQ ID NO: 18764 - DNA, 20 bp, Artificial Sequence
  chemically synthesized
cttgaaatgttcctaacaca

SEQ ID NO: 18765 - DNA, 20 bp, Artificial Sequence
  chemically synthesized
catagaaacgataaatactt

SEQ ID NO: 18766 - DNA, 20 bp, Artificial Sequence
  chemically synthesized
atagaaacgataaatacttg

SEQ ID NO: 18767 - DNA, 20 bp, Artificial Sequence
  chemically synthesized
aacacgtcatatatcaataa

SEQ ID NO: 18768 - DNA, 20 bp, Artificial Sequence
  chemically synthesized
cgtcatatatcaataaaaga

SEQ ID NO: 18769 - DNA, 20 bp, Artificial Sequence
  chemically synthesized
aaagaaagtcgatctcatat

SEQ ID NO: 18770 - DNA, 20 bp, Artificial Sequence
  chemically synthesized
aagtcgatctcatattggtt

SEQ ID NO: 18771 - DNA, 20 bp, Artificial Sequence
  chemically synthesized
agtcgatctcatattggttg

SEQ ID NO: 18772 - DNA, 20 bp, Artificial Sequence
  chemically synthesized
attggttgaggcctgattgt

SEQ ID NO: 18773 - DNA, 20 bp, Artificial Sequence
  chemically synthesized
taagtaaatctttgtccctc

SEQ ID NO: 18774 - DNA, 20 bp, Artificial Sequence
  chemically synthesized
tccctgtactgtcttgctgt

SEQ ID NO: 18775 - DNA, 20 bp, Artificial Sequence
  chemically synthesized
ccctgtactgtcttgctgtg

SEQ ID NO: 18776 - DNA, 20 bp, Artificial Sequence
  chemically synthesized
ctgtactgtcttgctgtgag

SEQ ID NO: 18777 - DNA, 20 bp, Artificial Sequence
  chemically synthesized
cttatattccaacaccattt

SEQ ID NO: 18778 - DNA, 20 bp, Artificial Sequence
  chemically synthesized
tcctccccatatttttacct

SEQ ID NO: 18779 - DNA, 20 bp, Artificial Sequence
  chemically synthesized
ctcggtttttactgtttata

SEQ ID NO: 18780 - DNA, 20 bp, Artificial Sequence
  chemically synthesized
atatagcacactttgtgcta

SEQ ID NO: 18781 - DNA, 20 bp, Artificial Sequence
  chemically synthesized
ctttgtgctatagtttacct

SEQ ID NO: 18782 - DNA, 20 bp, Artificial Sequence
  chemically synthesized
ctcagtttttactatttata

SEQ ID NO: 18783 - DNA, 20 bp, Artificial Sequence
  chemically synthesized
ccccaaacttctctcttaac

SEQ ID NO: 18784 - DNA, 20 bp, Artificial Sequence
  chemically synthesized
aaacttctctcttaacaagc

SEQ ID NO: 18785 - DNA, 20 bp, Artificial Sequence
  chemically synthesized
ctcttaacaagctagaatat

SEQ ID NO: 18786 - DNA, 20 bp, Artificial Sequence
  chemically synthesized
gctagaatataagtgaatgc

SEQ ID NO: 18787 - DNA, 20 bp, Artificial Sequence
  chemically synthesized
tagaatataagtgaatgcaa

SEQ ID NO: 18788 - DNA, 20 bp, Artificial Sequence
  chemically synthesized
tataagtgaatgcaagagca

SEQ ID NO: 18789 - DNA, 20 bp, Artificial Sequence
  chemically synthesized
taagtgaatgcaagagcata

SEQ ID NO: 18790 - DNA, 20 bp, Artificial Sequence
  chemically synthesized
tgaatgcaagagcatagaga

SEQ ID NO: 18791 - DNA, 20 bp, Artificial Sequence
  chemically synthesized
gaatgcaagagcatagagac

SEQ ID NO: 18792 - DNA, 20 bp, Artificial Sequence
  chemically synthesized
aatgcaagagcatagagaca

SEQ ID NO: 18793 - DNA, 20 bp, Artificial Sequence
  chemically synthesized
tcattcctattttcatattt

SEQ ID NO: 18794 - DNA, 20 bp, Artificial Sequence
  chemically synthesized
cattcctattttcatatttg

SEQ ID NO: 18795 - DNA, 20 bp, Artificial Sequence
  chemically synthesized
tcatatttgaggtataaacc

SEQ ID NO: 18796 - DNA, 20 bp, Artificial Sequence
  chemically synthesized
catatttgaggtataaacca

SEQ ID NO: 18797 - DNA, 20 bp, Artificial Sequence
  chemically synthesized
tatttgaggtataaaccaag

SEQ ID NO: 18798 - DNA, 20 bp, Artificial Sequence
  chemically synthesized
tttttaaatctgcaaataaa

SEQ ID NO: 18799 - DNA, 20 bp, Artificial Sequence
  chemically synthesized
gttttattctgacattaaaa

SEQ ID NO: 18800 - DNA, 20 bp, Artificial Sequence
  chemically synthesized
aatgaatgatcgttttacca

SEQ ID NO: 18801 - DNA, 20 bp, Artificial Sequence
  chemically synthesized
atgatcgttttaccacagcg

SEQ ID NO: 18802 - DNA, 20 bp, Artificial Sequence
  chemically synthesized
tgatcgttttaccacagcgt

SEQ ID NO: 18803 - DNA, 20 bp, Artificial Sequence
  chemically synthesized
cttaaccttcactttcaaac

SEQ ID NO: 18804 - DNA, 20 bp, Artificial Sequence
  chemically synthesized
tttattgatctctattttcc

SEQ ID NO: 18805 - DNA, 20 bp, Artificial Sequence
  chemically synthesized
tctattttcctggaacaaca

SEQ ID NO: 18806 - DNA, 20 bp, Artificial Sequence
  chemically synthesized
ctattttcctggaacaacat

SEQ ID NO: 18807 - DNA, 20 bp, Artificial Sequence
  chemically synthesized
tattttcctggaacaacatg

SEQ ID NO: 18808 - DNA, 20 bp, Artificial Sequence
  chemically synthesized
attttcctggaacaacatgg

SEQ ID NO: 18809 - DNA, 20 bp, Artificial Sequence
  chemically synthesized
aacaacatgggggctatgtt

SEQ ID NO: 18810 - DNA, 20 bp, Artificial Sequence
  chemically synthesized
atgggggctatgtttagcgt

SEQ ID NO: 18811 - DNA, 20 bp, Artificial Sequence
  chemically synthesized
tgggggctatgtttagcgtg

SEQ ID NO: 18812 - DNA, 20 bp, Artificial Sequence
  chemically synthesized
ctatgtttagcgtgaggaca

SEQ ID NO: 18813 - DNA, 20 bp, Artificial Sequence
  chemically synthesized
gtatcacaactttcacctga

SEQ ID NO: 18814 - DNA, 20 bp, Artificial Sequence
  chemically synthesized
acaactttcacctgaaagaa

SEQ ID NO: 18815 - DNA, 20 bp, Artificial Sequence
  chemically synthesized
tttcacctgaaagaaaagat

SEQ ID NO: 18816 - DNA, 20 bp, Artificial Sequence
  chemically synthesized
aaagaaaagatgagctacca

SEQ ID NO: 18817 - DNA, 20 bp, Artificial Sequence
  chemically synthesized
accatggtacatataacaat

SEQ ID NO: 18818 - DNA, 20 bp, Artificial Sequence
  chemically synthesized
ccatggtacatataacaatg

SEQ ID NO: 18819 - DNA, 20 bp, Artificial Sequence
  chemically synthesized
tggtacatataacaatgagg

SEQ ID NO: 18820 - DNA, 20 bp, Artificial Sequence
  chemically synthesized
aatgaggtggttaaaactct

SEQ ID NO: 18821 - DNA, 20 bp, Artificial Sequence
  chemically synthesized
taaaactctaagtcgtcatc

SEQ ID NO: 18822 - DNA, 20 bp, Artificial Sequence
  chemically synthesized
tactaaaaatcactatttca

SEQ ID NO: 18823 - DNA, 20 bp, Artificial Sequence
  chemically synthesized
taaaaatcactatttcaaag

SEQ ID NO: 18824 - DNA, 20 bp, Artificial Sequence
  chemically synthesized
atcactatttcaaagaagta

SEQ ID NO: 18825 - DNA, 20 bp, Artificial Sequence
  chemically synthesized
tatttcaaagaagtatagaa

SEQ ID NO: 18826 - DNA, 20 bp, Artificial Sequence
  chemically synthesized
aagaagtatagaatagatat

SEQ ID NO: 18827 - DNA, 20 bp, Artificial Sequence
  chemically synthesized
gaatagatatcagccaaaat

SEQ ID NO: 18828 - DNA, 20 bp, Artificial Sequence
  chemically synthesized
aatagatatcagccaaaata

SEQ ID NO: 18829 - DNA, 20 bp, Artificial Sequence
  chemically synthesized
atatacatattatacacata

SEQ ID NO: 18830 - DNA, 20 bp, Artificial Sequence
  chemically synthesized
atacatattatacacatatg

SEQ ID NO: 18831 - DNA, 20 bp, Artificial Sequence
  chemically synthesized
ttgtatatgcttaaaaatta

SEQ ID NO: 18832 - DNA, 20 bp, Artificial Sequence
  chemically synthesized
tgcttaaaaattacagactt

SEQ ID NO: 18833 - DNA, 20 bp, Artificial Sequence
  chemically synthesized
ttaaaaattacagactttgg

SEQ ID NO: 18834 - DNA, 20 bp, Artificial Sequence
  chemically synthesized
tggaagtcatatgactattt

SEQ ID NO: 18835 - DNA, 20 bp, Artificial Sequence
  chemically synthesized
tatgactatttcagtgtgtg

SEQ ID NO: 18836 - DNA, 20 bp, Artificial Sequence
  chemically synthesized
caccctcctgttccaaaaca

SEQ ID NO: 18837 - DNA, 20 bp, Artificial Sequence
  chemically synthesized
cctgttccaaaacacagttg

SEQ ID NO: 18838 - DNA, 20 bp, Artificial Sequence
  chemically synthesized
gttccaaaacacagttgcag

SEQ ID NO: 18839 - DNA, 20 bp, Artificial Sequence
  chemically synthesized
ccaaaacacagttgcagaag

SEQ ID NO: 18840 - DNA, 20 bp, Artificial Sequence
  chemically synthesized
aaaacacagttgcagaagca

SEQ ID NO: 18841 - DNA, 20 bp, Artificial Sequence
  chemically synthesized
aaacacagttgcagaagcag

SEQ ID NO: 18842 - DNA, 20 bp, Artificial Sequence
  chemically synthesized
cacagttgcagaagcagagg

SEQ ID NO: 18843 - DNA, 20 bp, Artificial Sequence
  chemically synthesized
agaggaagtcattatacact

SEQ ID NO: 18844 - DNA, 20 bp, Artificial Sequence
  chemically synthesized
cacttagaacatcattttat

SEQ ID NO: 18845 - DNA, 20 bp, Artificial Sequence
  chemically synthesized
acttagaacatcattttata

SEQ ID NO: 18846 - DNA, 20 bp, Artificial Sequence
  chemically synthesized
tagaacatcattttataagg

SEQ ID NO: 18847 - DNA, 20 bp, Artificial Sequence
  chemically synthesized
aacatcattttataaggcag

SEQ ID NO: 18848 - DNA, 20 bp, Artificial Sequence
  chemically synthesized
acatcattttataaggcagc

SEQ ID NO: 18849 - DNA, 20 bp, Artificial Sequence
  chemically synthesized
attttataaggcagcaggtc

SEQ ID NO: 18850 - DNA, 20 bp, Artificial Sequence
  chemically synthesized
ttataaggcagcaggtctgg

SEQ ID NO: 18851 - DNA, 20 bp, Artificial Sequence
  chemically synthesized
tataaggcagcaggtctggt

SEQ ID NO: 18852 - DNA, 20 bp, Artificial Sequence
  chemically synthesized
aaggcagcaggtctggtagg

SEQ ID NO: 18853 - DNA, 20 bp, Artificial Sequence
  chemically synthesized
aggcagcaggtctggtagga

SEQ ID NO: 18854 - DNA, 20 bp, Artificial Sequence
  chemically synthesized
gcagcaggtctggtaggaag

SEQ ID NO: 18855 - DNA, 20 bp, Artificial Sequence
  chemically synthesized
aggtctggtaggaaggagat

SEQ ID NO: 18856 - DNA, 20 bp, Artificial Sequence
  chemically synthesized
ggtctggtaggaaggagatt

SEQ ID NO: 18857 - DNA, 20 bp, Artificial Sequence
  chemically synthesized
attaggtgctacttgtgaca

SEQ ID NO: 18858 - DNA, 20 bp, Artificial Sequence
  chemically synthesized
ttaggtgctacttgtgacaa

SEQ ID NO: 18859 - DNA, 20 bp, Artificial Sequence
  chemically synthesized
gtgctacttgtgacaaaggt

SEQ ID NO: 18860 - DNA, 20 bp, Artificial Sequence
  chemically synthesized
tcagcaaatatttgtgttcc

SEQ ID NO: 18861 - DNA, 20 bp, Artificial Sequence
  chemically synthesized
ttgtgttcccagcacttttc

SEQ ID NO: 18862 - DNA, 20 bp, Artificial Sequence
  chemically synthesized
ccagcacttttctagatcct

SEQ ID NO: 18863 - DNA, 20 bp, Artificial Sequence
  chemically synthesized
tagatcctcagttaaaatca

SEQ ID NO: 18864 - DNA, 20 bp, Artificial Sequence
  chemically synthesized
atcctcagttaaaatcaaag

SEQ ID NO: 18865 - DNA, 20 bp, Artificial Sequence
  chemically synthesized
agttaaaatcaaagcagctg

SEQ ID NO: 18866 - DNA, 20 bp, Artificial Sequence
  chemically synthesized
aatcaaagcagctgcagtct

SEQ ID NO: 18867 - DNA, 20 bp, Artificial Sequence
  chemically synthesized
caaagcagctgcagtcttgg

SEQ ID NO: 18868 - DNA, 20 bp, Artificial Sequence
  chemically synthesized
agcagctgcagtcttggcag

SEQ ID NO: 18869 - DNA, 20 bp, Artificial Sequence
  chemically synthesized
gcagctgcagtcttggcagt

SEQ ID NO: 18870 - DNA, 20 bp, Artificial Sequence
  chemically synthesized
agctgcagtcttggcagtgg

SEQ ID NO: 18871 - DNA, 20 bp, Artificial Sequence
  chemically synthesized
gctgcagtcttggcagtggg

SEQ ID NO: 18872 - DNA, 20 bp, Artificial Sequence
  chemically synthesized
gtgatactcacactttgaac

SEQ ID NO: 18873 - DNA, 20 bp, Artificial Sequence
  chemically synthesized
accacctgcactacctacaa

SEQ ID NO: 18874 - DNA, 20 bp, Artificial Sequence
  chemically synthesized
acctgcactacctacaatgg

SEQ ID NO: 18875 - DNA, 20 bp, Artificial Sequence
  chemically synthesized
gctccaaatattttatatga

SEQ ID NO: 18876 - DNA, 20 bp, Artificial Sequence
  chemically synthesized
ctccaaatattttatatgaa

SEQ ID NO: 18877 - DNA, 20 bp, Artificial Sequence
  chemically synthesized
tccaaatattttatatgaaa

SEQ ID NO: 18878 - DNA, 20 bp, Artificial Sequence
  chemically synthesized
ccaaatattttatatgaaag

SEQ ID NO: 18879 - DNA, 20 bp, Artificial Sequence
  chemically synthesized
tattttatatgaaaggggcc

SEQ ID NO: 18880 - DNA, 20 bp, Artificial Sequence
  chemically synthesized
atatgaaaggggcctagaca

SEQ ID NO: 18881 - DNA, 20 bp, Artificial Sequence
  chemically synthesized
gacatagcatgctgaatgaa

SEQ ID NO: 18882 - DNA, 20 bp, Artificial Sequence
  chemically synthesized
acatagcatgctgaatgaaa

SEQ ID NO: 18883 - DNA, 20 bp, Artificial Sequence
  chemically synthesized
tagcatgctgaatgaaaagg

SEQ ID NO: 18884 - DNA, 20 bp, Artificial Sequence
  chemically synthesized
atgctgaatgaaaaggaagt

SEQ ID NO: 18885 - DNA, 20 bp, Artificial Sequence
  chemically synthesized
ctgaatgaaaaggaagtgag

SEQ ID NO: 18886 - DNA, 20 bp, Artificial Sequence
  chemically synthesized
tgaaaaggaagtgagtagac

SEQ ID NO: 18887 - DNA, 20 bp, Artificial Sequence
  chemically synthesized
gtagactagtgctttccttg

SEQ ID NO: 18888 - DNA, 20 bp, Artificial Sequence
  chemically synthesized
ttccttgaagctgtgcaacc

SEQ ID NO: 18889 - DNA, 20 bp, Artificial Sequence
  chemically synthesized
tgaagctgtgcaaccaagca

SEQ ID NO: 18890 - DNA, 20 bp, Artificial Sequence
  chemically synthesized
aaccaagcatagtttttaca

SEQ ID NO: 18891 - DNA, 20 bp, Artificial Sequence
  chemically synthesized
catagatcgtgtgtttcaca

SEQ ID NO: 18892 - DNA, 20 bp, Artificial Sequence
  chemically synthesized
tgtttcacatggtgtgataa

SEQ ID NO: 18893 - DNA, 20 bp, Artificial Sequence
  chemically synthesized
acatggtgtgataacagctt

SEQ ID NO: 18894 - DNA, 20 bp, Artificial Sequence
  chemically synthesized
agcttgagatgccattgaca

SEQ ID NO: 18895 - DNA, 20 bp, Artificial Sequence
  chemically synthesized
atgccattgacatggcccac

SEQ ID NO: 18896 - DNA, 20 bp, Artificial Sequence
  chemically synthesized
gcccaccggcttatccacat

SEQ ID NO: 18897 - DNA, 20 bp, Artificial Sequence
  chemically synthesized
ggcttatccacatcagtaat

SEQ ID NO: 18898 - DNA, 20 bp, Artificial Sequence
  chemically synthesized
gcttatccacatcagtaatt

SEQ ID NO: 18899 - DNA, 20 bp, Artificial Sequence
  chemically synthesized
cttatccacatcagtaatta

SEQ ID NO: 18900 - DNA, 20 bp, Artificial Sequence
  chemically synthesized
ccacatcagtaattagggca

SEQ ID NO: 18901 - DNA, 20 bp, Artificial Sequence
  chemically synthesized
tactatgcatcccgtgattg

SEQ ID NO: 18902 - DNA, 20 bp, Artificial Sequence
  chemically synthesized
tgtgtttaaaaatgcaatta

SEQ ID NO: 18903 - DNA, 20 bp, Artificial Sequence
  chemically synthesized
tgcaattatggactcattca

SEQ ID NO: 18904 - DNA, 20 bp, Artificial Sequence
  chemically synthesized
tatggactcattcaaagtga

SEQ ID NO: 18905 - DNA, 20 bp, Artificial Sequence
  chemically synthesized
gactcattcaaagtgaaagc

SEQ ID NO: 18906 - DNA, 20 bp, Artificial Sequence
  chemically synthesized
aagctggtatgacaatacat

SEQ ID NO: 18907 - DNA, 20 bp, Artificial Sequence
  chemically synthesized
ttttatgaataaattttata

SEQ ID NO: 18908 - DNA, 20 bp, Artificial Sequence
  chemically synthesized
aataaattttataaagaaat

SEQ ID NO: 18909 - DNA, 20 bp, Artificial Sequence
  chemically synthesized
aagaaataagctaataccta

SEQ ID NO: 18910 - DNA, 20 bp, Artificial Sequence
  chemically synthesized
gaaataagctaatacctaca

SEQ ID NO: 18911 - DNA, 20 bp, Artificial Sequence
  chemically synthesized
acagagtgtttattaaatgc

SEQ ID NO: 18912 - DNA, 20 bp, Artificial Sequence
  chemically synthesized
cagagtgtttattaaatgct

SEQ ID NO: 18913 - DNA, 20 bp, Artificial Sequence
  chemically synthesized
tgtttattaaatgctaggca

SEQ ID NO: 18914 - DNA, 20 bp, Artificial Sequence
  chemically synthesized
taaatgctaggcacagttct

SEQ ID NO: 18915 - DNA, 20 bp, Artificial Sequence
  chemically synthesized
agttctgagtgatttacaac

SEQ ID NO: 18916 - DNA, 20 bp, Artificial Sequence
  chemically synthesized
taattttcacaacattatta

SEQ ID NO: 18917 - DNA, 20 bp, Artificial Sequence
  chemically synthesized
aattttcacaacattattac

SEQ ID NO: 18918 - DNA, 20 bp, Artificial Sequence
  chemically synthesized
tttcacaacattattacagg

SEQ ID NO: 18919 - DNA, 20 bp, Artificial Sequence
  chemically synthesized
ttacaggtagattttatata

SEQ ID NO: 18920 - DNA, 20 bp, Artificial Sequence
  chemically synthesized
acaggtagattttatatatg

SEQ ID NO: 18921 - DNA, 20 bp, Artificial Sequence
  chemically synthesized
attttatatatggagaaact

SEQ ID NO: 18922 - DNA, 20 bp, Artificial Sequence
  chemically synthesized
ttttatatatggagaaactg

SEQ ID NO: 18923 - DNA, 20 bp, Artificial Sequence
  chemically synthesized
tatatggagaaactgaggca

SEQ ID NO: 18924 - DNA, 20 bp, Artificial Sequence
  chemically synthesized
tatggagaaactgaggcaca

SEQ ID NO: 18925 - DNA, 20 bp, Artificial Sequence
  chemically synthesized
taataaatctcaacattacc

SEQ ID NO: 18926 - DNA, 20 bp, Artificial Sequence
  chemically synthesized
aataaatctcaacattaccc

SEQ ID NO: 18927 - DNA, 20 bp, Artificial Sequence
  chemically synthesized
tctcaacattacccaggtga

SEQ ID NO: 18928 - DNA, 20 bp, Artificial Sequence
  chemically synthesized
caacattacccaggtgatgg

SEQ ID NO: 18929 - DNA, 20 bp, Artificial Sequence
  chemically synthesized
acattacccaggtgatggtg

SEQ ID NO: 18930 - DNA, 20 bp, Artificial Sequence
  chemically synthesized
tacccaggtgatggtggagt

SEQ ID NO: 18931 - DNA, 20 bp, Artificial Sequence
  chemically synthesized
agttggaattccaaatcatg

SEQ ID NO: 18932 - DNA, 20 bp, Artificial Sequence
  chemically synthesized
caaatcatgcagtctgactt

SEQ ID NO: 18933 - DNA, 20 bp, Artificial Sequence
  chemically synthesized
atgcagtctgactttagctg

SEQ ID NO: 18934 - DNA, 20 bp, Artificial Sequence
  chemically synthesized
agtctgactttagctgtaga

SEQ ID NO: 18935 - DNA, 20 bp, Artificial Sequence
  chemically synthesized
tgactttagctgtagacagc

SEQ ID NO: 18936 - DNA, 20 bp, Artificial Sequence
  chemically synthesized
tttagctgtagacagcaaga

SEQ ID NO: 18937 - DNA, 20 bp, Artificial Sequence
  chemically synthesized
gctgtagacagcaagatagt

SEQ ID NO: 18938 - DNA, 20 bp, Artificial Sequence
  chemically synthesized
agacagcaagatagtaagta

SEQ ID NO: 18939 - DNA, 20 bp, Artificial Sequence
  chemically synthesized
gacagcaagatagtaagtaa

SEQ ID NO: 18940 - DNA, 20 bp, Artificial Sequence
  chemically synthesized
caagatagtaagtaaaggaa

SEQ ID NO: 18941 - DNA, 20 bp, Artificial Sequence
  chemically synthesized
agatagtaagtaaaggaatg

SEQ ID NO: 18942 - DNA, 20 bp, Artificial Sequence
  chemically synthesized
ggaatggagcaacaaattga

SEQ ID NO: 18943 - DNA, 20 bp, Artificial Sequence
  chemically synthesized
ttttgcttgtttgtttgaaa

SEQ ID NO: 18944 - DNA, 20 bp, Artificial Sequence
  chemically synthesized
tttgcttgtttgtttgaaac

SEQ ID NO: 18945 - DNA, 20 bp, Artificial Sequence
  chemically synthesized
ttgcttgtttgtttgaaaca

SEQ ID NO: 18946 - DNA, 20 bp, Artificial Sequence
  chemically synthesized
agggtctcactctgtcaccc

SEQ ID NO: 18947 - DNA, 20 bp, Artificial Sequence
  chemically synthesized
tctcactctgtcaccccggc

SEQ ID NO: 18948 - DNA, 20 bp, Artificial Sequence
  chemically synthesized
tcactctgtcaccccggctg

SEQ ID NO: 18949 - DNA, 20 bp, Artificial Sequence
  chemically synthesized
tcaccccggctggagtgcaa

SEQ ID NO: 18950 - DNA, 20 bp, Artificial Sequence
  chemically synthesized
tggtgcaatcttgctcactg

SEQ ID NO: 18951 - DNA, 20 bp, Artificial Sequence
  chemically synthesized
cttgctcactgaagcctcac

SEQ ID NO: 18952 - DNA, 20 bp, Artificial Sequence
  chemically synthesized
tgaagcctcactagaacgcc

SEQ ID NO: 18953 - DNA, 20 bp, Artificial Sequence
  chemically synthesized
ttcaattgatcctcctgctt

SEQ ID NO: 18954 - DNA, 20 bp, Artificial Sequence
  chemically synthesized
atcctcctgctttagcctct

SEQ ID NO: 18955 - DNA, 20 bp, Artificial Sequence
  chemically synthesized
tcctcctgctttagcctctc

SEQ ID NO: 18956 - DNA, 20 bp, Artificial Sequence
  chemically synthesized
tcctgctttagcctctcagg

SEQ ID NO: 18957 - DNA, 20 bp, Artificial Sequence
  chemically synthesized
gctttagcctctcaggtagc

SEQ ID NO: 18958 - DNA, 20 bp, Artificial Sequence
  chemically synthesized
ctttagcctctcaggtagct

SEQ ID NO: 18959 - DNA, 20 bp, Artificial Sequence
  chemically synthesized
ctctcaggtagctaggacta

SEQ ID NO: 18960 - DNA, 20 bp, Artificial Sequence
  chemically synthesized
tctcaggtagctaggactac

SEQ ID NO: 18961 - DNA, 20 bp, Artificial Sequence
  chemically synthesized
gtagctaggactacaggtgt

SEQ ID NO: 18962 - DNA, 20 bp, Artificial Sequence
  chemically synthesized
actacaggtgtgagcctcca

SEQ ID NO: 18963 - DNA, 20 bp, Artificial Sequence
  chemically synthesized
caggtgtgagcctccatggc

SEQ ID NO: 18964 - DNA, 20 bp, Artificial Sequence
  chemically synthesized
tgtgagcctccatggccagc

SEQ ID NO: 18965 - DNA, 20 bp, Artificial Sequence
  chemically synthesized
tgagcctccatggccagcta

SEQ ID NO: 18966 - DNA, 20 bp, Artificial Sequence
  chemically synthesized
agaaattttttaaatttctg

SEQ ID NO: 18967 - DNA, 20 bp, Artificial Sequence
  chemically synthesized
tttttaaatttctgtagaaa

SEQ ID NO: 18968 - DNA, 20 bp, Artificial Sequence
  chemically synthesized
ttttaaatttctgtagaaac

SEQ ID NO: 18969 - DNA, 20 bp, Artificial Sequence
  chemically synthesized
tttaaatttctgtagaaaca

SEQ ID NO: 18970 - DNA, 20 bp, Artificial Sequence
  chemically synthesized
cagggtctccctatgttccc

SEQ ID NO: 18971 - DNA, 20 bp, Artificial Sequence
  chemically synthesized
agggtctccctatgttcccc

SEQ ID NO: 18972 - DNA, 20 bp, Artificial Sequence
  chemically synthesized
tctccctatgttccccaggc

SEQ ID NO: 18973 - DNA, 20 bp, Artificial Sequence
  chemically synthesized
ccaggctggtatccaactct

SEQ ID NO: 18974 - DNA, 20 bp, Artificial Sequence
  chemically synthesized
ctcaaacaattctcccacct

SEQ ID NO: 18975 - DNA, 20 bp, Artificial Sequence
  chemically synthesized
tctcccacctcagccttgaa

SEQ ID NO: 18976 - DNA, 20 bp, Artificial Sequence
  chemically synthesized
cctcagccttgaaaagtgtt

SEQ ID NO: 18977 - DNA, 20 bp, Artificial Sequence
  chemically synthesized
cttgaaaagtgttgagatta

SEQ ID NO: 18978 - DNA, 20 bp, Artificial Sequence
  chemically synthesized
ttgaaaagtgttgagattac

SEQ ID NO: 18979 - DNA, 20 bp, Artificial Sequence
  chemically synthesized
acaggtgtgaatcaccatgc

SEQ ID NO: 18980 - DNA, 20 bp, Artificial Sequence
  chemically synthesized
caggtgtgaatcaccatgct

SEQ ID NO: 18981 - DNA, 20 bp, Artificial Sequence
  chemically synthesized
atcaccatgctgggccttga

SEQ ID NO: 18982 - DNA, 20 bp, Artificial Sequence
  chemically synthesized
gggccttgatggatctttaa

SEQ ID NO: 18983 - DNA, 20 bp, Artificial Sequence
  chemically synthesized
ccttgatggatctttaaaag

SEQ ID NO: 18984 - DNA, 20 bp, Artificial Sequence
  chemically synthesized
tgatggatctttaaaagtgg

SEQ ID NO: 18985 - DNA, 20 bp, Artificial Sequence
  chemically synthesized
gatggatctttaaaagtggt

SEQ ID NO: 18986 - DNA, 20 bp, Artificial Sequence
  chemically synthesized
atggatctttaaaagtggtg

SEQ ID NO: 18987 - DNA, 20 bp, Artificial Sequence
  chemically synthesized
tggatctttaaaagtggtgg

SEQ ID NO: 18988 - DNA, 20 bp, Artificial Sequence
  chemically synthesized
ggatctttaaaagtggtggg

SEQ ID NO: 18989 - DNA, 20 bp, Artificial Sequence
  chemically synthesized
tctttaaaagtggtgggggg

SEQ ID NO: 18990 - DNA, 20 bp, Artificial Sequence
  chemically synthesized
ctttaaaagtggtggggggt

SEQ ID NO: 18991 - DNA, 20 bp, Artificial Sequence
  chemically synthesized
ttaaaagtggtggggggtag

SEQ ID NO: 18992 - DNA, 20 bp, Artificial Sequence
  chemically synthesized
gtggtggggggtaggagaaa

SEQ ID NO: 18993 - DNA, 20 bp, Artificial Sequence
  chemically synthesized
ggtggggggtaggagaaaaa

SEQ ID NO: 18994 - DNA, 20 bp, Artificial Sequence
  chemically synthesized
gtggggggtaggagaaaaag

SEQ ID NO: 18995 - DNA, 20 bp, Artificial Sequence
  chemically synthesized
gggggtaggagaaaaagagg

SEQ ID NO: 18996 - DNA, 20 bp, Artificial Sequence
  chemically synthesized
aaaaagaggaagaacaaaaa

SEQ ID NO: 18997 - DNA, 20 bp, Artificial Sequence
  chemically synthesized
gaacaaaaacagtatcacga

SEQ ID NO: 18998 - DNA, 20 bp, Artificial Sequence
  chemically synthesized
tcacgaaagataaacatcgt

SEQ ID NO: 18999 - DNA, 20 bp, Artificial Sequence
  chemically synthesized
cacgaaagataaacatcgtt

SEQ ID NO: 19000 - DNA, 20 bp, Artificial Sequence
  chemically synthesized
agataaacatcgttaggtct

SEQ ID NO: 19001 - DNA, 20 bp, Artificial Sequence
  chemically synthesized
gataaacatcgttaggtctc

SEQ ID NO: 19002 - DNA, 20 bp, Artificial Sequence
  chemically synthesized
aaacatcgttaggtctcggg

SEQ ID NO: 19003 - DNA, 20 bp, Artificial Sequence
  chemically synthesized
aacatcgttaggtctcggga

SEQ ID NO: 19004 - DNA, 20 bp, Artificial Sequence
  chemically synthesized
tcgttaggtctcgggaagga

SEQ ID NO: 19005 - DNA, 20 bp, Artificial Sequence
  chemically synthesized
cgttaggtctcgggaaggat

SEQ ID NO: 19006 - DNA, 20 bp, Artificial Sequence
  chemically synthesized
ggatccttttcattttgctc

SEQ ID NO: 19007 - DNA, 20 bp, Artificial Sequence
  chemically synthesized
atccttttcattttgctcta

SEQ ID NO: 19008 - DNA, 20 bp, Artificial Sequence
  chemically synthesized
tttcattttgctctagagaa

SEQ ID NO: 19009 - DNA, 20 bp, Artificial Sequence
  chemically synthesized
tgctctagagaaaagccatt

SEQ ID NO: 19010 - DNA, 20 bp, Artificial Sequence
  chemically synthesized
acttctgtgttaacaaaaaa

SEQ ID NO: 19011 - DNA, 20 bp, Artificial Sequence
  chemically synthesized
tgtgttaacaaaaaacagcc

SEQ ID NO: 19012 - DNA, 20 bp, Artificial Sequence
  chemically synthesized
gttaacaaaaaacagccgag

SEQ ID NO: 19013 - DNA, 20 bp, Artificial Sequence
  chemically synthesized
caaaaaacagccgagtagcc

SEQ ID NO: 19014 - DNA, 20 bp, Artificial Sequence
  chemically synthesized
agtagcctagtattaaactt

SEQ ID NO: 19015 - DNA, 20 bp, Artificial Sequence
  chemically synthesized
tagcctagtattaaacttta

SEQ ID NO: 19016 - DNA, 20 bp, Artificial Sequence
  chemically synthesized
cctagtattaaactttagag

SEQ ID NO: 19017 - DNA, 20 bp, Artificial Sequence
  chemically synthesized
tttagagcagttgttcttta

SEQ ID NO: 19018 - DNA, 20 bp, Artificial Sequence
  chemically synthesized
gttgttctttacggcaatta

SEQ ID NO: 19019 - DNA, 20 bp, Artificial Sequence
  chemically synthesized
ttgttctttacggcaattac

SEQ ID NO: 19020 - DNA, 20 bp, Artificial Sequence
  chemically synthesized
tgttctttacggcaattaca

SEQ ID NO: 19021 - DNA, 20 bp, Artificial Sequence
  chemically synthesized
gttctttacggcaattacag

SEQ ID NO: 19022 - DNA, 20 bp, Artificial Sequence
  chemically synthesized
acggcaattacaggggcctt

SEQ ID NO: 19023 - DNA, 20 bp, Artificial Sequence
  chemically synthesized
cggcaattacaggggccttc

SEQ ID NO: 19024 - DNA, 20 bp, Artificial Sequence
  chemically synthesized
caattacaggggccttcagg

SEQ ID NO: 19025 - DNA, 20 bp, Artificial Sequence
  chemically synthesized
aggggccttcaggaagctga

SEQ ID NO: 19026 - DNA, 20 bp, Artificial Sequence
  chemically synthesized
ggccttcaggaagctgatgg

SEQ ID NO: 19027 - DNA, 20 bp, Artificial Sequence
  chemically synthesized
aggaagctgatggaagtgtg

SEQ ID NO: 19028 - DNA, 20 bp, Artificial Sequence
  chemically synthesized
gaagtgtgaagtcctcttct

SEQ ID NO: 19029 - DNA, 20 bp, Artificial Sequence
  chemically synthesized
agtgtgaagtcctcttctca

SEQ ID NO: 19030 - DNA, 20 bp, Artificial Sequence
  chemically synthesized
gaagtcctcttctcagagaa

SEQ ID NO: 19031 - DNA, 20 bp, Artificial Sequence
  chemically synthesized
atatacgtgcacctaatttt

SEQ ID NO: 19032 - DNA, 20 bp, Artificial Sequence
  chemically synthesized
atttttagatataatttctg

SEQ ID NO: 19033 - DNA, 20 bp, Artificial Sequence
  chemically synthesized
tttttagatataatttctga

SEQ ID NO: 19034 - DNA, 20 bp, Artificial Sequence
  chemically synthesized
agatataatttctgaaggtt

SEQ ID NO: 19035 - DNA, 20 bp, Artificial Sequence
  chemically synthesized
tgaaggtttagaaactcctt

SEQ ID NO: 19036 - DNA, 20 bp, Artificial Sequence
  chemically synthesized
ccttgagttcacttatatca

SEQ ID NO: 19037 - DNA, 20 bp, Artificial Sequence
  chemically synthesized
tatatcaaagtcctcacctt

SEQ ID NO: 19038 - DNA, 20 bp, Artificial Sequence
  chemically synthesized
cacctttagaactcctgtcc

SEQ ID NO: 19039 - DNA, 20 bp, Artificial Sequence
  chemically synthesized
ctttagaactcctgtcctag

SEQ ID NO: 19040 - DNA, 20 bp, Artificial Sequence
  chemically synthesized
ttagaactcctgtcctagaa

SEQ ID NO: 19041 - DNA, 20 bp, Artificial Sequence
  chemically synthesized
gaactcctgtcctagaagag

SEQ ID NO: 19042 - DNA, 20 bp, Artificial Sequence
  chemically synthesized
ttccataaccactttgactc

SEQ ID NO: 19043 - DNA, 20 bp, Artificial Sequence
  chemically synthesized
gccacttgtaccatgtaatt

SEQ ID NO: 19044 - DNA, 20 bp, Artificial Sequence
  chemically synthesized
cacttgtaccatgtaattca

SEQ ID NO: 19045 - DNA, 20 bp, Artificial Sequence
  chemically synthesized
acttgtaccatgtaattcag

SEQ ID NO: 19046 - DNA, 20 bp, Artificial Sequence
  chemically synthesized
taccatgtaattcagaggtg

SEQ ID NO: 19047 - DNA, 20 bp, Artificial Sequence
  chemically synthesized
taattcagaggtgtagtgtc

SEQ ID NO: 19048 - DNA, 20 bp, Artificial Sequence
  chemically synthesized
agaggtgtagtgtcaagact

SEQ ID NO: 19049 - DNA, 20 bp, Artificial Sequence
  chemically synthesized
gaggtgtagtgtcaagactg

SEQ ID NO: 19050 - DNA, 20 bp, Artificial Sequence
  chemically synthesized
ggtgtagtgtcaagactgag

SEQ ID NO: 19051 - DNA, 20 bp, Artificial Sequence
  chemically synthesized
gtgtagtgtcaagactgagg

SEQ ID NO: 19052 - DNA, 20 bp, Artificial Sequence
  chemically synthesized
tagtgtcaagactgaggagg

SEQ ID NO: 19053 - DNA, 20 bp, Artificial Sequence
  chemically synthesized
tgtcaagactgaggaggaag

SEQ ID NO: 19054 - DNA, 20 bp, Artificial Sequence
  chemically synthesized
gtcaagactgaggaggaagc

SEQ ID NO: 19055 - DNA, 20 bp, Artificial Sequence
  chemically synthesized
ggaagcaggtaaattatgtc

SEQ ID NO: 19056 - DNA, 20 bp, Artificial Sequence
  chemically synthesized
aattatgtccagcaatacgt

SEQ ID NO: 19057 - DNA, 20 bp, Artificial Sequence
  chemically synthesized
tgtccagcaatacgttggct

SEQ ID NO: 19058 - DNA, 20 bp, Artificial Sequence
  chemically synthesized
gtccagcaatacgttggctt

SEQ ID NO: 19059 - DNA, 20 bp, Artificial Sequence
  chemically synthesized
aggcaaaaacaaattgtttc

SEQ ID NO: 19060 - DNA, 20 bp, Artificial Sequence
  chemically synthesized
aattgtttctagtccatttt

SEQ ID NO: 19061 - DNA, 20 bp, Artificial Sequence
  chemically synthesized
ttgtttctagtccattttaa

SEQ ID NO: 19062 - DNA, 20 bp, Artificial Sequence
  chemically synthesized
tgtttctagtccattttaag

SEQ ID NO: 19063 - DNA, 20 bp, Artificial Sequence
  chemically synthesized
gtttctagtccattttaaga

SEQ ID NO: 19064 - DNA, 20 bp, Artificial Sequence
  chemically synthesized
tctagtccattttaagaggg

SEQ ID NO: 19065 - DNA, 20 bp, Artificial Sequence
  chemically synthesized
ttaagagggaagcatttatt

SEQ ID NO: 19066 - DNA, 20 bp, Artificial Sequence
  chemically synthesized
taagagggaagcatttattt

SEQ ID NO: 19067 - DNA, 20 bp, Artificial Sequence
  chemically synthesized
aagagggaagcatttattta

SEQ ID NO: 19068 - DNA, 20 bp, Artificial Sequence
  chemically synthesized
atttagggactacatcgctc

SEQ ID NO: 19069 - DNA, 20 bp, Artificial Sequence
  chemically synthesized
ccttaacatgttaatttctc

SEQ ID NO: 19070 - DNA, 20 bp, Artificial Sequence
  chemically synthesized
ttaacatgttaatttctcca

SEQ ID NO: 19071 - DNA, 20 bp, Artificial Sequence
  chemically synthesized
tccagagtttgtaatgttct

SEQ ID NO: 19072 - DNA, 20 bp, Artificial Sequence
  chemically synthesized
gagtttgtaatgttctgagc

SEQ ID NO: 19073 - DNA, 20 bp, Artificial Sequence
  chemically synthesized
atgttctgagcaagtgtgtg

SEQ ID NO: 19074 - DNA, 20 bp, Artificial Sequence
  chemically synthesized
ttctgagcaagtgtgtgcag

SEQ ID NO: 19075 - DNA, 20 bp, Artificial Sequence
  chemically synthesized
gtgtgcagaagaaatgattg

SEQ ID NO: 19076 - DNA, 20 bp, Artificial Sequence
  chemically synthesized
gcagaagaaatgattgtagt

SEQ ID NO: 19077 - DNA, 20 bp, Artificial Sequence
  chemically synthesized
gaaatgattgtagtaagacc

SEQ ID NO: 19078 - DNA, 20 bp, Artificial Sequence
  chemically synthesized
aaatgattgtagtaagacct

SEQ ID NO: 19079 - DNA, 20 bp, Artificial Sequence
  chemically synthesized
attgtagtaagacctgggca

SEQ ID NO: 19080 - DNA, 20 bp, Artificial Sequence
  chemically synthesized
ttgtagtaagacctgggcaa

SEQ ID NO: 19081 - DNA, 20 bp, Artificial Sequence
  chemically synthesized
gtagtaagacctgggcaaag

SEQ ID NO: 19082 - DNA, 20 bp, Artificial Sequence
  chemically synthesized
agtaagacctgggcaaagga

SEQ ID NO: 19083 - DNA, 20 bp, Artificial Sequence
  chemically synthesized
taagacctgggcaaaggaga

SEQ ID NO: 19084 - DNA, 20 bp, Artificial Sequence
  chemically synthesized
aaacatttttcccccacatt

SEQ ID NO: 19085 - DNA, 20 bp, Artificial Sequence
  chemically synthesized
aacatttttcccccacattt

SEQ ID NO: 19086 - DNA, 20 bp, Artificial Sequence
  chemically synthesized
ttgggcaaaactttccatcc

SEQ ID NO: 19087 - DNA, 20 bp, Artificial Sequence
  chemically synthesized
tgggcaaaactttccatcct

SEQ ID NO: 19088 - DNA, 20 bp, Artificial Sequence
  chemically synthesized
ttccatcctgggtcacacca

SEQ ID NO: 19089 - DNA, 20 bp, Artificial Sequence
  chemically synthesized
ctcctctcctctccctcaac

SEQ ID NO: 19090 - DNA, 20 bp, Artificial Sequence
  chemically synthesized
tcctctccctcaactggtaa

SEQ ID NO: 19091 - DNA, 20 bp, Artificial Sequence
  chemically synthesized
ccaaaacatacctgactact

SEQ ID NO: 19092 - DNA, 20 bp, Artificial Sequence
  chemically synthesized
cttagtacttcccactactg

SEQ ID NO: 19093 - DNA, 20 bp, Artificial Sequence
  chemically synthesized
gtacttcccactactgtgga

SEQ ID NO: 19094 - DNA, 20 bp, Artificial Sequence
  chemically synthesized
cactactgtggatagaattt

SEQ ID NO: 19095 - DNA, 20 bp, Artificial Sequence
  chemically synthesized
ctcattcattgttcataccc

SEQ ID NO: 19096 - DNA, 20 bp, Artificial Sequence
  chemically synthesized
cattcattgttcataccctg

SEQ ID NO: 19097 - DNA, 20 bp, Artificial Sequence
  chemically synthesized
ccctggagacaaaactcctt

SEQ ID NO: 19098 - DNA, 20 bp, Artificial Sequence
  chemically synthesized
cctggagacaaaactcctta

SEQ ID NO: 19099 - DNA, 20 bp, Artificial Sequence
  chemically synthesized
taaggctattaactccccct

SEQ ID NO: 19100 - DNA, 20 bp, Artificial Sequence
  chemically synthesized
tccccctgagcttcacaatc

SEQ ID NO: 19101 - DNA, 20 bp, Artificial Sequence
  chemically synthesized
gcttcacaatctagtccctg

SEQ ID NO: 19102 - DNA, 20 bp, Artificial Sequence
  chemically synthesized
cttcacaatctagtccctgc

SEQ ID NO: 19103 - DNA, 20 bp, Artificial Sequence
  chemically synthesized
tcctctccttttccctctct

SEQ ID NO: 19104 - DNA, 20 bp, Artificial Sequence
  chemically synthesized
ttccctctctgagccccgct

SEQ ID NO: 19105 - DNA, 20 bp, Artificial Sequence
  chemically synthesized
gccccgctcagatcttcgaa

SEQ ID NO: 19106 - DNA, 20 bp, Artificial Sequence
  chemically synthesized
cccgctcagatcttcgaaca

SEQ ID NO: 19107 - DNA, 20 bp, Artificial Sequence
  chemically synthesized
cagagaacacttctgcatct

SEQ ID NO: 19108 - DNA, 20 bp, Artificial Sequence
  chemically synthesized
cttctgcatcttggcatata

SEQ ID NO: 19109 - DNA, 20 bp, Artificial Sequence
  chemically synthesized
gcatatatagttctctcaca

SEQ ID NO: 19110 - DNA, 20 bp, Artificial Sequence
  chemically synthesized
atagaacgctttctcccctt

SEQ ID NO: 19111 - DNA, 20 bp, Artificial Sequence
  chemically synthesized
cctttagctatttatccttc

SEQ ID NO: 19112 - DNA, 20 bp, Artificial Sequence
  chemically synthesized
gctatttatccttcaagtgt

SEQ ID NO: 19113 - DNA, 20 bp, Artificial Sequence
  chemically synthesized
cagctcaaacatctcatcat

SEQ ID NO: 19114 - DNA, 20 bp, Artificial Sequence
  chemically synthesized
gctcaaacatctcatcatta

SEQ ID NO: 19115 - DNA, 20 bp, Artificial Sequence
  chemically synthesized
tcaaacatctcatcattaga

SEQ ID NO: 19116 - DNA, 20 bp, Artificial Sequence
  chemically synthesized
caaacatctcatcattagag

SEQ ID NO: 19117 - DNA, 20 bp, Artificial Sequence
  chemically synthesized
agaggtttttcccaaacctc

SEQ ID NO: 19118 - DNA, 20 bp, Artificial Sequence
  chemically synthesized
gaggtttttcccaaacctct

SEQ ID NO: 19119 - DNA, 20 bp, Artificial Sequence
  chemically synthesized
ttcccaaacctctaggtaac

SEQ ID NO: 19120 - DNA, 20 bp, Artificial Sequence
  chemically synthesized
tcccaaacctctaggtaact

SEQ ID NO: 19121 - DNA, 20 bp, Artificial Sequence
  chemically synthesized
aaacctctaggtaactaggt

SEQ ID NO: 19122 - DNA, 20 bp, Artificial Sequence
  chemically synthesized
agaaaccactccccattcca

SEQ ID NO: 19123 - DNA, 20 bp, Artificial Sequence
  chemically synthesized
ccattccacggtacactgta

SEQ ID NO: 19124 - DNA, 20 bp, Artificial Sequence
  chemically synthesized
cacggtacactgtatagtct

SEQ ID NO: 19125 - DNA, 20 bp, Artificial Sequence
  chemically synthesized
acggtacactgtatagtctt

SEQ ID NO: 19126 - DNA, 20 bp, Artificial Sequence
  chemically synthesized
ctgtatagtcttaggacacc

SEQ ID NO: 19127 - DNA, 20 bp, Artificial Sequence
  chemically synthesized
cttaggacacctggttccct

SEQ ID NO: 19128 - DNA, 20 bp, Artificial Sequence
  chemically synthesized
tacaaatttgtcaattcttg

SEQ ID NO: 19129 - DNA, 20 bp, Artificial Sequence
  chemically synthesized
tttgtcaattcttgaagatt

SEQ ID NO: 19130 - DNA, 20 bp, Artificial Sequence
  chemically synthesized
aattcttgaagattaagaat

SEQ ID NO: 19131 - DNA, 20 bp, Artificial Sequence
  chemically synthesized
actctatctccctcgcctct

SEQ ID NO: 19132 - DNA, 20 bp, Artificial Sequence
  chemically synthesized
tctcagtgcctgatacctaa

SEQ ID NO: 19133 - DNA, 20 bp, Artificial Sequence
  chemically synthesized
atccttactgaataataaaa

SEQ ID NO: 19134 - DNA, 20 bp, Artificial Sequence
  chemically synthesized
taaaatggattaatgaataa

SEQ ID NO: 19135 - DNA, 20 bp, Artificial Sequence
  chemically synthesized
gaataaaagcaataaatttc

SEQ ID NO: 19136 - DNA, 20 bp, Artificial Sequence
  chemically synthesized
aataaaagcaataaatttca

SEQ ID NO: 19137 - DNA, 20 bp, Artificial Sequence
  chemically synthesized
gttaatattaataaattaaa

SEQ ID NO: 19138 - DNA, 20 bp, Artificial Sequence
  chemically synthesized
ttaatattaataaattaaaa

SEQ ID NO: 19139 - DNA, 20 bp, Artificial Sequence
  chemically synthesized
aaattaaaaaggttattttg

SEQ ID NO: 19140 - DNA, 20 bp, Artificial Sequence
  chemically synthesized
aaaaggttattttgaagtct

SEQ ID NO: 19141 - DNA, 20 bp, Artificial Sequence
  chemically synthesized
ttattttgaagtctgagaat

SEQ ID NO: 19142 - DNA, 20 bp, Artificial Sequence
  chemically synthesized
tttcacgtttccattgttca

SEQ ID NO: 19143 - DNA, 20 bp, Artificial Sequence
  chemically synthesized
ttcacgtttccattgttcat

SEQ ID NO: 19144 - DNA, 20 bp, Artificial Sequence
  chemically synthesized
attgttcatgggcaaaattc

SEQ ID NO: 19145 - DNA, 20 bp, Artificial Sequence
  chemically synthesized
gttcatgggcaaaattctgg

SEQ ID NO: 19146 - DNA, 20 bp, Artificial Sequence
  chemically synthesized
atgggcaaaattctggcagc

SEQ ID NO: 19147 - DNA, 20 bp, Artificial Sequence
  chemically synthesized
tgggcaaaattctggcagca

SEQ ID NO: 19148 - DNA, 20 bp, Artificial Sequence
  chemically synthesized
gggcaaaattctggcagcaa

SEQ ID NO: 19149 - DNA, 20 bp, Artificial Sequence
  chemically synthesized
cagcaagggattcttctcct

SEQ ID NO: 19150 - DNA, 20 bp, Artificial Sequence
  chemically synthesized
taagaaaccttttgttttct

SEQ ID NO: 19151 - DNA, 20 bp, Artificial Sequence
  chemically synthesized
gaatacatttccttgtttgc

SEQ ID NO: 19152 - DNA, 20 bp, Artificial Sequence
  chemically synthesized
tccttgtttgccagaaaaca

SEQ ID NO: 19153 - DNA, 20 bp, Artificial Sequence
  chemically synthesized
tgtttgccagaaaacatggt

SEQ ID NO: 19154 - DNA, 20 bp, Artificial Sequence
  chemically synthesized
agaaaacatggtaagataac

SEQ ID NO: 19155 - DNA, 20 bp, Artificial Sequence
  chemically synthesized
aaaacatggtaagataactg

SEQ ID NO: 19156 - DNA, 20 bp, Artificial Sequence
  chemically synthesized
aacatggtaagataactgga

SEQ ID NO: 19157 - DNA, 20 bp, Artificial Sequence
  chemically synthesized
taacattcattttattcatg

SEQ ID NO: 19158 - DNA, 20 bp, Artificial Sequence
  chemically synthesized
ttcatgaagaaactgttatt

SEQ ID NO: 19159 - DNA, 20 bp, Artificial Sequence
  chemically synthesized
aagaaactgttattcagttt

SEQ ID NO: 19160 - DNA, 20 bp, Artificial Sequence
  chemically synthesized
agaaactgttattcagttta

SEQ ID NO: 19161 - DNA, 20 bp, Artificial Sequence
  chemically synthesized
gaaactgttattcagtttaa

SEQ ID NO: 19162 - DNA, 20 bp, Artificial Sequence
  chemically synthesized
aaactgttattcagtttaag

SEQ ID NO: 19163 - DNA, 20 bp, Artificial Sequence
  chemically synthesized
cagtttaaggggttcttttt

SEQ ID NO: 19164 - DNA, 20 bp, Artificial Sequence
  chemically synthesized
ttaaggggttctttttcaga

SEQ ID NO: 19165 - DNA, 20 bp, Artificial Sequence
  chemically synthesized
ggttctttttcagaaagttt

SEQ ID NO: 19166 - DNA, 20 bp, Artificial Sequence
  chemically synthesized
tcagaaagtttcagaaatcc

SEQ ID NO: 19167 - DNA, 20 bp, Artificial Sequence
  chemically synthesized
aatccaagacctttgactgc

SEQ ID NO: 19168 - DNA, 20 bp, Artificial Sequence
  chemically synthesized
gtactgtgttctttcatcta

SEQ ID NO: 19169 - DNA, 20 bp, Artificial Sequence
  chemically synthesized
tactgtgttctttcatctat

SEQ ID NO: 19170 - DNA, 20 bp, Artificial Sequence
  chemically synthesized
ggacatttcctttgaaaact

SEQ ID NO: 19171 - DNA, 20 bp, Artificial Sequence
  chemically synthesized
gacatttcctttgaaaactg

SEQ ID NO: 19172 - DNA, 20 bp, Artificial Sequence
  chemically synthesized
aatatttaattcttacataa

SEQ ID NO: 19173 - DNA, 20 bp, Artificial Sequence
  chemically synthesized
attcttacataatagtaaaa

SEQ ID NO: 19174 - DNA, 20 bp, Artificial Sequence
  chemically synthesized
ataatagtaaaaaagtgaat

SEQ ID NO: 19175 - DNA, 20 bp, Artificial Sequence
  chemically synthesized
gtaaaaaagtgaattggcct

SEQ ID NO: 19176 - DNA, 20 bp, Artificial Sequence
  chemically synthesized
aaagtgaattggccttggaa

SEQ ID NO: 19177 - DNA, 20 bp, Artificial Sequence
  chemically synthesized
cttggaaaagacctaaatcc

SEQ ID NO: 19178 - DNA, 20 bp, Artificial Sequence
  chemically synthesized
aatcaatttgctctatgaac

SEQ ID NO: 19179 - DNA, 20 bp, Artificial Sequence
  chemically synthesized
tcaatttgctctatgaactg

SEQ ID NO: 19180 - DNA, 20 bp, Artificial Sequence
  chemically synthesized
caatttgctctatgaactgg

SEQ ID NO: 19181 - DNA, 20 bp, Artificial Sequence
  chemically synthesized
atttgctctatgaactggag

SEQ ID NO: 19182 - DNA, 20 bp, Artificial Sequence
  chemically synthesized
tgctctatgaactggaggag

SEQ ID NO: 19183 - DNA, 20 bp, Artificial Sequence
  chemically synthesized
gctctatgaactggaggagt

SEQ ID NO: 19184 - DNA, 20 bp, Artificial Sequence
  chemically synthesized
gagtgggattcatgatctct

SEQ ID NO: 19185 - DNA, 20 bp, Artificial Sequence
  chemically synthesized
catatcactactatgaaatg

SEQ ID NO: 19186 - DNA, 20 bp, Artificial Sequence
  chemically synthesized
atatcactactatgaaatgc

SEQ ID NO: 19187 - DNA, 20 bp, Artificial Sequence
  chemically synthesized
tatcactactatgaaatgca

SEQ ID NO: 19188 - DNA, 20 bp, Artificial Sequence
  chemically synthesized
cactactatgaaatgcaggg

SEQ ID NO: 19189 - DNA, 20 bp, Artificial Sequence
  chemically synthesized
aattcaaatcattaaattta

SEQ ID NO: 19190 - DNA, 20 bp, Artificial Sequence
  chemically synthesized
cattaaatttaaagaaacta

SEQ ID NO: 19191 - DNA, 20 bp, Artificial Sequence
  chemically synthesized
taaatttaaagaaactatag

SEQ ID NO: 19192 - DNA, 20 bp, Artificial Sequence
  chemically synthesized
ctatagtggcaatgtattat

SEQ ID NO: 19193 - DNA, 20 bp, Artificial Sequence
  chemically synthesized
tatagtggcaatgtattatt

SEQ ID NO: 19194 - DNA, 20 bp, Artificial Sequence
  chemically synthesized
atgaaaatctcaaaccatac

SEQ ID NO: 19195 - DNA, 20 bp, Artificial Sequence
  chemically synthesized
tgaaaatctcaaaccatacc

SEQ ID NO: 19196 - DNA, 20 bp, Artificial Sequence
  chemically synthesized
gctatgataatattaaaata

SEQ ID NO: 19197 - DNA, 20 bp, Artificial Sequence
  chemically synthesized
attaaaataaagatacattg

SEQ ID NO: 19198 - DNA, 20 bp, Artificial Sequence
  chemically synthesized
aacttgtgtaaatcacattg

SEQ ID NO: 19199 - DNA, 20 bp, Artificial Sequence
  chemically synthesized
acttgtgtaaatcacattgt

SEQ ID NO: 19200 - DNA, 20 bp, Artificial Sequence
  chemically synthesized
cttgtgtaaatcacattgtg

SEQ ID NO: 19201 - DNA, 20 bp, Artificial Sequence
  chemically synthesized
aacacttcccttccccttga

SEQ ID NO: 19202 - DNA, 20 bp, Artificial Sequence
  chemically synthesized
acacttcccttccccttgaa

SEQ ID NO: 19203 - DNA, 20 bp, Artificial Sequence
  chemically synthesized
cacttcccttccccttgaaa

SEQ ID NO: 19204 - DNA, 20 bp, Artificial Sequence
  chemically synthesized
tccccttgaaagggaaatga

SEQ ID NO: 19205 - DNA, 20 bp, Artificial Sequence
  chemically synthesized
aaagggaaatgatagaaaat

SEQ ID NO: 19206 - DNA, 20 bp, Artificial Sequence
  chemically synthesized
atgatagaaaataagtatta

SEQ ID NO: 19207 - DNA, 20 bp, Artificial Sequence
  chemically synthesized
tgatagaaaataagtattaa

SEQ ID NO: 19208 - DNA, 20 bp, Artificial Sequence
  chemically synthesized
tagaaaataagtattaaagg

SEQ ID NO: 19209 - DNA, 20 bp, Artificial Sequence
  chemically synthesized
aataagtattaaaggcagct

SEQ ID NO: 19210 - DNA, 20 bp, Artificial Sequence
  chemically synthesized
ataagtattaaaggcagctt

SEQ ID NO: 19211 - DNA, 20 bp, Artificial Sequence
  chemically synthesized
taagtattaaaggcagctta

SEQ ID NO: 19212 - DNA, 20 bp, Artificial Sequence
  chemically synthesized
aagtattaaaggcagcttag

SEQ ID NO: 19213 - DNA, 20 bp, Artificial Sequence
  chemically synthesized
ttttcaaaaaaaaatccatt

SEQ ID NO: 19214 - DNA, 20 bp, Artificial Sequence
  chemically synthesized
attgagcattttctatgtac

SEQ ID NO: 19215 - DNA, 20 bp, Artificial Sequence
  chemically synthesized
ttgagcattttctatgtacc

SEQ ID NO: 19216 - DNA, 20 bp, Artificial Sequence
  chemically synthesized
ctatgtaccaggcactgttc

SEQ ID NO: 19217 - DNA, 20 bp, Artificial Sequence
  chemically synthesized
caggcactgttctagaccct

SEQ ID NO: 19218 - DNA, 20 bp, Artificial Sequence
  chemically synthesized
acacacatgctactgattat

SEQ ID NO: 19219 - DNA, 20 bp, Artificial Sequence
  chemically synthesized
ataagatccataaaataact

SEQ ID NO: 19220 - DNA, 20 bp, Artificial Sequence
  chemically synthesized
ataaaataacttagtttcac

SEQ ID NO: 19221 - DNA, 20 bp, Artificial Sequence
  chemically synthesized
tagtttcactggcgtgttcc

SEQ ID NO: 19222 - DNA, 20 bp, Artificial Sequence
  chemically synthesized
actggcgtgttcccagtgcc

SEQ ID NO: 19223 - DNA, 20 bp, Artificial Sequence
  chemically synthesized
ctggcgtgttcccagtgccc

SEQ ID NO: 19224 - DNA, 20 bp, Artificial Sequence
  chemically synthesized
tgttcccagtgcccaggtaa

SEQ ID NO: 19225 - DNA, 20 bp, Artificial Sequence
  chemically synthesized
attaatgtttgttaaatgat

SEQ ID NO: 19226 - DNA, 20 bp, Artificial Sequence
  chemically synthesized
tgtttgttaaatgatgagaa

SEQ ID NO: 19227 - DNA, 20 bp, Artificial Sequence
  chemically synthesized
tttgttaaatgatgagaaaa

SEQ ID NO: 19228 - DNA, 20 bp, Artificial Sequence
  chemically synthesized
ttgttaaatgatgagaaaag

SEQ ID NO: 19229 - DNA, 20 bp, Artificial Sequence
  chemically synthesized
taaatgatgagaaaagagga

SEQ ID NO: 19230 - DNA, 20 bp, Artificial Sequence
  chemically synthesized
atgatgagaaaagaggaaag

SEQ ID NO: 19231 - DNA, 20 bp, Artificial Sequence
  chemically synthesized
atgagaaaagaggaaagcag

SEQ ID NO: 19232 - DNA, 20 bp, Artificial Sequence
  chemically synthesized
tgagaaaagaggaaagcaga

SEQ ID NO: 19233 - DNA, 20 bp, Artificial Sequence
  chemically synthesized
gagaaaagaggaaagcagaa

SEQ ID NO: 19234 - DNA, 20 bp, Artificial Sequence
  chemically synthesized
agaaaagaggaaagcagaag

SEQ ID NO: 19235 - DNA, 20 bp, Artificial Sequence
  chemically synthesized
aaagcagaaggggctctgct

SEQ ID NO: 19236 - DNA, 20 bp, Artificial Sequence
  chemically synthesized
aagcagaaggggctctgctc

SEQ ID NO: 19237 - DNA, 20 bp, Artificial Sequence
  chemically synthesized
gaaggggctctgctcaggtg

SEQ ID NO: 19238 - DNA, 20 bp, Artificial Sequence
  chemically synthesized
aaggggctctgctcaggtgc

SEQ ID NO: 19239 - DNA, 20 bp, Artificial Sequence
  chemically synthesized
ctcaggtgcaggaacttgtg

SEQ ID NO: 19240 - DNA, 20 bp, Artificial Sequence
  chemically synthesized
caggtgcaggaacttgtgca

SEQ ID NO: 19241 - DNA, 20 bp, Artificial Sequence
  chemically synthesized
gaacttgtgcagagatcttc

SEQ ID NO: 19242 - DNA, 20 bp, Artificial Sequence
  chemically synthesized
agatcttctggactgattcc

SEQ ID NO: 19243 - DNA, 20 bp, Artificial Sequence
  chemically synthesized
gactgattcccagtgctaac

SEQ ID NO: 19244 - DNA, 20 bp, Artificial Sequence
  chemically synthesized
cagtgctaacaagtcccttc

SEQ ID NO: 19245 - DNA, 20 bp, Artificial Sequence
  chemically synthesized
ttccagttttatccaccaat

SEQ ID NO: 19246 - DNA, 20 bp, Artificial Sequence
  chemically synthesized
caccaataagctatgtcctt

SEQ ID NO: 19247 - DNA, 20 bp, Artificial Sequence
  chemically synthesized
ttgagctcctgcccactctc

SEQ ID NO: 19248 - DNA, 20 bp, Artificial Sequence
  chemically synthesized
gagctcctgcccactctcta

SEQ ID NO: 19249 - DNA, 20 bp, Artificial Sequence
  chemically synthesized
ctagagaaaacttttatttc

SEQ ID NO: 19250 - DNA, 20 bp, Artificial Sequence
  chemically synthesized
tagagaaaacttttatttca

SEQ ID NO: 19251 - DNA, 20 bp, Artificial Sequence
  chemically synthesized
ttttatttcaaggcatactc

SEQ ID NO: 19252 - DNA, 20 bp, Artificial Sequence
  chemically synthesized
tttatttcaaggcatactcc

SEQ ID NO: 19253 - DNA, 20 bp, Artificial Sequence
  chemically synthesized
actccgggattcacatgtga

SEQ ID NO: 19254 - DNA, 20 bp, Artificial Sequence
  chemically synthesized
tccgggattcacatgtgata

SEQ ID NO: 19255 - DNA, 20 bp, Artificial Sequence
  chemically synthesized
ggattcacatgtgatagaga

SEQ ID NO: 19256 - DNA, 20 bp, Artificial Sequence
  chemically synthesized
gatagagatggttctgttcc

SEQ ID NO: 19257 - DNA, 20 bp, Artificial Sequence
  chemically synthesized
atagagatggttctgttccc

SEQ ID NO: 19258 - DNA, 20 bp, Artificial Sequence
  chemically synthesized
ggttctgttcccaggaactt

SEQ ID NO: 19259 - DNA, 20 bp, Artificial Sequence
  chemically synthesized
gttctgttcccaggaacttt

SEQ ID NO: 19260 - DNA, 20 bp, Artificial Sequence
  chemically synthesized
ctttgggcatatttaaaaac

SEQ ID NO: 19261 - DNA, 20 bp, Artificial Sequence
  chemically synthesized
ggcatatttaaaaactggac

SEQ ID NO: 19262 - DNA, 20 bp, Artificial Sequence
  chemically synthesized
ggactggaaaaatttgtgac

SEQ ID NO: 19263 - DNA, 20 bp, Artificial Sequence
  chemically synthesized
gaaaaatttgtgactagaaa

SEQ ID NO: 19264 - DNA, 20 bp, Artificial Sequence
  chemically synthesized
aaaaatttgtgactagaaaa

SEQ ID NO: 19265 - DNA, 20 bp, Artificial Sequence
  chemically synthesized
ttaaaaacacatgctcattt

SEQ ID NO: 19266 - DNA, 20 bp, Artificial Sequence
  chemically synthesized
taaaaacacatgctcatttc

SEQ ID NO: 19267 - DNA, 20 bp, Artificial Sequence
  chemically synthesized
cacatgctcatttcaggata

SEQ ID NO: 19268 - DNA, 20 bp, Artificial Sequence
  chemically synthesized
atttcaggataaagatctct

SEQ ID NO: 19269 - DNA, 20 bp, Artificial Sequence
  chemically synthesized
tttcaggataaagatctctg

SEQ ID NO: 19270 - DNA, 20 bp, Artificial Sequence
  chemically synthesized
ggataaagatctctgaggaa

SEQ ID NO: 19271 - DNA, 20 bp, Artificial Sequence
  chemically synthesized
agaatacaaaataatttaaa

SEQ ID NO: 19272 - DNA, 20 bp, Artificial Sequence
  chemically synthesized
aataatttaaaaagaaacaa

SEQ ID NO: 19273 - DNA, 20 bp, Artificial Sequence
  chemically synthesized
ttaaaaagaaacaacagaaa

SEQ ID NO: 19274 - DNA, 20 bp, Artificial Sequence
  chemically synthesized
taaaaagaaacaacagaaac

SEQ ID NO: 19275 - DNA, 20 bp, Artificial Sequence
  chemically synthesized
atacttcacttctctgtaat

SEQ ID NO: 19276 - DNA, 20 bp, Artificial Sequence
  chemically synthesized
tacttcacttctctgtaata

SEQ ID NO: 19277 - DNA, 20 bp, Artificial Sequence
  chemically synthesized
taataaggtttctgtcctcc

SEQ ID NO: 19278 - DNA, 20 bp, Artificial Sequence
  chemically synthesized
gattctttctcactaaacta

SEQ ID NO: 19279 - DNA, 20 bp, Artificial Sequence
  chemically synthesized
ttctttctcactaaactaca

SEQ ID NO: 19280 - DNA, 20 bp, Artificial Sequence
  chemically synthesized
ctcactaaactacagagaat

SEQ ID NO: 19281 - DNA, 20 bp, Artificial Sequence
  chemically synthesized
gcattctgtccacttctaca

SEQ ID NO: 19282 - DNA, 20 bp, Artificial Sequence
  chemically synthesized
cattctgtccacttctacat

SEQ ID NO: 19283 - DNA, 20 bp, Artificial Sequence
  chemically synthesized
ttttatgaatgcatacacac

SEQ ID NO: 19284 - DNA, 20 bp, Artificial Sequence
  chemically synthesized
atacacacgagaactttgaa

SEQ ID NO: 19285 - DNA, 20 bp, Artificial Sequence
  chemically synthesized
acacgagaactttgaacagt

SEQ ID NO: 19286 - DNA, 20 bp, Artificial Sequence
  chemically synthesized
gaactttgaacagttagtat

SEQ ID NO: 19287 - DNA, 20 bp, Artificial Sequence
  chemically synthesized
aactttgaacagttagtata

SEQ ID NO: 19288 - DNA, 20 bp, Artificial Sequence
  chemically synthesized
taaggtgaattctgattttt

SEQ ID NO: 19289 - DNA, 20 bp, Artificial Sequence
  chemically synthesized
tatataatgcatttaatttt

SEQ ID NO: 19290 - DNA, 20 bp, Artificial Sequence
  chemically synthesized
atttaattttgagattatgc

SEQ ID NO: 19291 - DNA, 20 bp, Artificial Sequence
  chemically synthesized
gagattatgctggctctgat

SEQ ID NO: 19292 - DNA, 20 bp, Artificial Sequence
  chemically synthesized
tgctggctctgattagccaa

SEQ ID NO: 19293 - DNA, 20 bp, Artificial Sequence
  chemically synthesized
tggctctgattagccaaaag

SEQ ID NO: 19294 - DNA, 20 bp, Artificial Sequence
  chemically synthesized
ggctctgattagccaaaaga

SEQ ID NO: 19295 - DNA, 20 bp, Artificial Sequence
  chemically synthesized
tctgattagccaaaagaagg

SEQ ID NO: 19296 - DNA, 20 bp, Artificial Sequence
  chemically synthesized
ggaagtaatatatcacattc

SEQ ID NO: 19297 - DNA, 20 bp, Artificial Sequence
  chemically synthesized
tcacattctggttattattt

SEQ ID NO: 19298 - DNA, 20 bp, Artificial Sequence
  chemically synthesized
ggttattatttcagatcctt

SEQ ID NO: 19299 - DNA, 20 bp, Artificial Sequence
  chemically synthesized
gatcctttagattactgtaa

SEQ ID NO: 19300 - DNA, 20 bp, Artificial Sequence
  chemically synthesized
ttactgtaatagacatgaaa

SEQ ID NO: 19301 - DNA, 20 bp, Artificial Sequence
  chemically synthesized
cacaacacatgacataattt

SEQ ID NO: 19302 - DNA, 20 bp, Artificial Sequence
  chemically synthesized
tcagatcgtttaaatcacac

SEQ ID NO: 19303 - DNA, 20 bp, Artificial Sequence
  chemically synthesized
agtcatcactgccatttacc

SEQ ID NO: 19304 - DNA, 20 bp, Artificial Sequence
  chemically synthesized
actgccatttacccagcaat

SEQ ID NO: 19305 - DNA, 20 bp, Artificial Sequence
  chemically synthesized
ccatttacccagcaatcagt

SEQ ID NO: 19306 - DNA, 20 bp, Artificial Sequence
  chemically synthesized
atcagttggcttgattcttc

SEQ ID NO: 19307 - DNA, 20 bp, Artificial Sequence
  chemically synthesized
gcttgattcttcaagatctt

SEQ ID NO: 19308 - DNA, 20 bp, Artificial Sequence
  chemically synthesized
cttgattcttcaagatcttg

SEQ ID NO: 19309 - DNA, 20 bp, Artificial Sequence
  chemically synthesized
cttcaagatcttgaggaact

SEQ ID NO: 19310 - DNA, 20 bp, Artificial Sequence
  chemically synthesized
ctttgctaatgttccttcaa

SEQ ID NO: 19311 - DNA, 20 bp, Artificial Sequence
  chemically synthesized
tagtcttgacacttttaaac

SEQ ID NO: 19312 - DNA, 20 bp, Artificial Sequence
  chemically synthesized
gtcttgacacttttaaacta

SEQ ID NO: 19313 - DNA, 20 bp, Artificial Sequence
  chemically synthesized
cttgacacttttaaactaga

SEQ ID NO: 19314 - DNA, 20 bp, Artificial Sequence
  chemically synthesized
actagagagtataaacccac

SEQ ID NO: 19315 - DNA, 20 bp, Artificial Sequence
  chemically synthesized
ctagagagtataaacccaca

SEQ ID NO: 19316 - DNA, 20 bp, Artificial Sequence
  chemically synthesized
ggaattgttttataatttta

SEQ ID NO: 19317 - DNA, 20 bp, Artificial Sequence
  chemically synthesized
tttcaaaatcatttacattg

SEQ ID NO: 19318 - DNA, 20 bp, Artificial Sequence
  chemically synthesized
ctaccttgccttctcttacc

SEQ ID NO: 19319 - DNA, 20 bp, Artificial Sequence
  chemically synthesized
ttgccttctcttacccagca

SEQ ID NO: 19320 - DNA, 20 bp, Artificial Sequence
  chemically synthesized
ttctcttacccagcacagat

SEQ ID NO: 19321 - DNA, 20 bp, Artificial Sequence
  chemically synthesized
tctcttacccagcacagatg

SEQ ID NO: 19322 - DNA, 20 bp, Artificial Sequence
  chemically synthesized
ttattttataattcctacat

SEQ ID NO: 19323 - DNA, 20 bp, Artificial Sequence
  chemically synthesized
ttataattcctacataagca

SEQ ID NO: 19324 - DNA, 20 bp, Artificial Sequence
  chemically synthesized
cctacataagcatagcattg

SEQ ID NO: 19325 - DNA, 20 bp, Artificial Sequence
  chemically synthesized
aaaaattactttcattctga

SEQ ID NO: 19326 - DNA, 20 bp, Artificial Sequence
  chemically synthesized
aaaattactttcattctgaa

SEQ ID NO: 19327 - DNA, 20 bp, Artificial Sequence
  chemically synthesized
aattactttcattctgaaag

SEQ ID NO: 19328 - DNA, 20 bp, Artificial Sequence
  chemically synthesized
ctttcattctgaaaggagca

SEQ ID NO: 19329 - DNA, 20 bp, Artificial Sequence
  chemically synthesized
agcacagtattttgcctttt

SEQ ID NO: 19330 - DNA, 20 bp, Artificial Sequence
  chemically synthesized
acagtattttgccttttgag

SEQ ID NO: 19331 - DNA, 20 bp, Artificial Sequence
  chemically synthesized
tgaattaaaacattaattcc

SEQ ID NO: 19332 - DNA, 20 bp, Artificial Sequence
  chemically synthesized
tgtgaatatgaaacattctt

SEQ ID NO: 19333 - DNA, 20 bp, Artificial Sequence
  chemically synthesized
gcatttcatataattactaa

SEQ ID NO: 19334 - DNA, 20 bp, Artificial Sequence
  chemically synthesized
atataattactaacagaatg

SEQ ID NO: 19335 - DNA, 20 bp, Artificial Sequence
  chemically synthesized
ataattactaacagaatgta

SEQ ID NO: 19336 - DNA, 20 bp, Artificial Sequence
  chemically synthesized
tactaacagaatgtagagtt

SEQ ID NO: 19337 - DNA, 20 bp, Artificial Sequence
  chemically synthesized
actaacagaatgtagagttg

SEQ ID NO: 19338 - DNA, 20 bp, Artificial Sequence
  chemically synthesized
gtagagttgaggtttccaac

SEQ ID NO: 19339 - DNA, 20 bp, Artificial Sequence
  chemically synthesized
tttaattatactattttgct

SEQ ID NO: 19340 - DNA, 20 bp, Artificial Sequence
  chemically synthesized
atttctatgttgtcataata

SEQ ID NO: 19341 - DNA, 20 bp, Artificial Sequence
  chemically synthesized
taatttaaatgcacattcca

SEQ ID NO: 19342 - DNA, 20 bp, Artificial Sequence
  chemically synthesized
aaatgcacattccatggcaa

SEQ ID NO: 19343 - DNA, 20 bp, Artificial Sequence
  chemically synthesized
tccctcttcaacacatacac

SEQ ID NO: 19344 - DNA, 20 bp, Artificial Sequence
  chemically synthesized
catacacaagtctgtattca

SEQ ID NO: 19345 - DNA, 20 bp, Artificial Sequence
  chemically synthesized
gtattcatagcctgttgtaa

SEQ ID NO: 19346 - DNA, 20 bp, Artificial Sequence
  chemically synthesized
catagcctgttgtaatagac

SEQ ID NO: 19347 - DNA, 20 bp, Artificial Sequence
  chemically synthesized
atagcctgttgtaatagaca

SEQ ID NO: 19348 - DNA, 20 bp, Artificial Sequence
  chemically synthesized
gtaatagacaaggttaaatg

SEQ ID NO: 19349 - DNA, 20 bp, Artificial Sequence
  chemically synthesized
taaatgctttcctcactcac

SEQ ID NO: 19350 - DNA, 20 bp, Artificial Sequence
  chemically synthesized
tttcctcactcactagcaat

SEQ ID NO: 19351 - DNA, 20 bp, Artificial Sequence
  chemically synthesized
cactagcaattggttatcac

SEQ ID NO: 19352 - DNA, 20 bp, Artificial Sequence
  chemically synthesized
ctagcaattggttatcacta

SEQ ID NO: 19353 - DNA, 20 bp, Artificial Sequence
  chemically synthesized
agcaattggttatcactaga

SEQ ID NO: 19354 - DNA, 20 bp, Artificial Sequence
  chemically synthesized
aaatcttactctacattcct

SEQ ID NO: 19355 - DNA, 20 bp, Artificial Sequence
  chemically synthesized
ctctacattcctcagtcacc

SEQ ID NO: 19356 - DNA, 20 bp, Artificial Sequence
  chemically synthesized
cattcctcagtcacctagtg

SEQ ID NO: 19357 - DNA, 20 bp, Artificial Sequence
  chemically synthesized
attcctcagtcacctagtga

SEQ ID NO: 19358 - DNA, 20 bp, Artificial Sequence
  chemically synthesized
aaggtgtactgatccacctt

SEQ ID NO: 19359 - DNA, 20 bp, Artificial Sequence
  chemically synthesized
aggtgtactgatccaccttc

SEQ ID NO: 19360 - DNA, 20 bp, Artificial Sequence
  chemically synthesized
gtgtactgatccaccttcag

SEQ ID NO: 19361 - DNA, 20 bp, Artificial Sequence
  chemically synthesized
tactgatccaccttcaggag

SEQ ID NO: 19362 - DNA, 20 bp, Artificial Sequence
  chemically synthesized
ggagcagtacaaacctttat

SEQ ID NO: 19363 - DNA, 20 bp, Artificial Sequence
  chemically synthesized
acctttattggtcacttccc

SEQ ID NO: 19364 - DNA, 20 bp, Artificial Sequence
  chemically synthesized
tcacttcccaagcaacttca

SEQ ID NO: 19365 - DNA, 20 bp, Artificial Sequence
  chemically synthesized
acttcccaagcaacttcaaa

SEQ ID NO: 19366 - DNA, 20 bp, Artificial Sequence
  chemically synthesized
tcccaagcaacttcaaagag

SEQ ID NO: 19367 - DNA, 20 bp, Artificial Sequence
  chemically synthesized
aaagagcagtaactcctcca

SEQ ID NO: 19368 - DNA, 20 bp, Artificial Sequence
  chemically synthesized
aagagcagtaactcctccac

SEQ ID NO: 19369 - DNA, 20 bp, Artificial Sequence
  chemically synthesized
agcagtaactcctccacagg

SEQ ID NO: 19370 - DNA, 20 bp, Artificial Sequence
  chemically synthesized
gaagttcttcgacttcccac

SEQ ID NO: 19371 - DNA, 20 bp, Artificial Sequence
  chemically synthesized
aagttcttcgacttcccact

SEQ ID NO: 19372 - DNA, 20 bp, Artificial Sequence
  chemically synthesized
agttcttcgacttcccactg

SEQ ID NO: 19373 - DNA, 20 bp, Artificial Sequence
  chemically synthesized
tcttcgacttcccactgggg

SEQ ID NO: 19374 - DNA, 20 bp, Artificial Sequence
  chemically synthesized
tcccactggggaagcccacc

SEQ ID NO: 19375 - DNA, 20 bp, Artificial Sequence
  chemically synthesized
cccactggggaagcccaccc

SEQ ID NO: 19376 - DNA, 20 bp, Artificial Sequence
  chemically synthesized
ccactggggaagcccaccca

SEQ ID NO: 19377 - DNA, 20 bp, Artificial Sequence
  chemically synthesized
aagcccacccagggatgtta

SEQ ID NO: 19378 - DNA, 20 bp, Artificial Sequence
  chemically synthesized
gcccacccagggatgttaca

SEQ ID NO: 19379 - DNA, 20 bp, Artificial Sequence
  chemically synthesized
ccacccagggatgttacaga

SEQ ID NO: 19380 - DNA, 20 bp, Artificial Sequence
  chemically synthesized
cacccagggatgttacagag

SEQ ID NO: 19381 - DNA, 20 bp, Artificial Sequence
  chemically synthesized
acccagggatgttacagaga

SEQ ID NO: 19382 - DNA, 20 bp, Artificial Sequence
  chemically synthesized
gggatgttacagagagggat

SEQ ID NO: 19383 - DNA, 20 bp, Artificial Sequence
  chemically synthesized
acagagagggatcggcctcg

SEQ ID NO: 19384 - DNA, 20 bp, Artificial Sequence
  chemically synthesized
gcctcgaagcattcttctta

SEQ ID NO: 19385 - DNA, 20 bp, Artificial Sequence
  chemically synthesized
cattcttcttacagtcctcc

SEQ ID NO: 19386 - DNA, 20 bp, Artificial Sequence
  chemically synthesized
ctttgaattcctgtttcaat

SEQ ID NO: 19387 - DNA, 20 bp, Artificial Sequence
  chemically synthesized
gtttcaattagttgtaatcc

SEQ ID NO: 19388 - DNA, 20 bp, Artificial Sequence
  chemically synthesized
tttcaattagttgtaatccc

SEQ ID NO: 19389 - DNA, 20 bp, Artificial Sequence
  chemically synthesized
tcaattagttgtaatcccag

SEQ ID NO: 19390 - DNA, 20 bp, Artificial Sequence
  chemically synthesized
attagttgtaatcccaggag

SEQ ID NO: 19391 - DNA, 20 bp, Artificial Sequence
  chemically synthesized
tagttgtaatcccaggagaa

SEQ ID NO: 19392 - DNA, 20 bp, Artificial Sequence
  chemically synthesized
tcccaggagaagagaactta

SEQ ID NO: 19393 - DNA, 20 bp, Artificial Sequence
  chemically synthesized
cccaggagaagagaacttac

SEQ ID NO: 19394 - DNA, 20 bp, Artificial Sequence
  chemically synthesized
aagagaacttacaggcacaa

SEQ ID NO: 19395 - DNA, 20 bp, Artificial Sequence
  chemically synthesized
gaacttacaggcacaaaagt

SEQ ID NO: 19396 - DNA, 20 bp, Artificial Sequence
  chemically synthesized
acttacaggcacaaaagtta

SEQ ID NO: 19397 - DNA, 20 bp, Artificial Sequence
  chemically synthesized
acaggcacaaaagttagagt

SEQ ID NO: 19398 - DNA, 20 bp, Artificial Sequence
  chemically synthesized
ggcacaaaagttagagttgg

SEQ ID NO: 19399 - DNA, 20 bp, Artificial Sequence
  chemically synthesized
cacaaaagttagagttggta

SEQ ID NO: 19400 - DNA, 20 bp, Artificial Sequence
  chemically synthesized
gttagagttggtagagttac

SEQ ID NO: 19401 - DNA, 20 bp, Artificial Sequence
  chemically synthesized
ttagagttggtagagttacc

SEQ ID NO: 19402 - DNA, 20 bp, Artificial Sequence
  chemically synthesized
ttggtagagttaccaggctt

SEQ ID NO: 19403 - DNA, 20 bp, Artificial Sequence
  chemically synthesized
gtagagttaccaggctttgg

SEQ ID NO: 19404 - DNA, 20 bp, Artificial Sequence
  chemically synthesized
caggctttggtagcttctct

SEQ ID NO: 19405 - DNA, 20 bp, Artificial Sequence
  chemically synthesized
aggctttggtagcttctctt

SEQ ID NO: 19406 - DNA, 20 bp, Artificial Sequence
  chemically synthesized
agcttctcttgggaataaac

SEQ ID NO: 19407 - DNA, 20 bp, Artificial Sequence
  chemically synthesized
ttctcttgggaataaactag

SEQ ID NO: 19408 - DNA, 20 bp, Artificial Sequence
  chemically synthesized
gaaatcttatgtgcttccca

SEQ ID NO: 19409 - DNA, 20 bp, Artificial Sequence
  chemically synthesized
tgtgcttcccacagaattcc

SEQ ID NO: 19410 - DNA, 20 bp, Artificial Sequence
  chemically synthesized
gcttcccacagaattcctgg

SEQ ID NO: 19411 - DNA, 20 bp, Artificial Sequence
  chemically synthesized
tcccacagaattcctggtgg

SEQ ID NO: 19412 - DNA, 20 bp, Artificial Sequence
  chemically synthesized
cccacagaattcctggtgga

SEQ ID NO: 19413 - DNA, 20 bp, Artificial Sequence
  chemically synthesized
cacagaattcctggtggaag

SEQ ID NO: 19414 - DNA, 20 bp, Artificial Sequence
  chemically synthesized
acagaattcctggtggaagg

SEQ ID NO: 19415 - DNA, 20 bp, Artificial Sequence
  chemically synthesized
cctcctctttctcgtctttc

SEQ ID NO: 19416 - DNA, 20 bp, Artificial Sequence
  chemically synthesized
ctcctctttctcgtctttct

SEQ ID NO: 19417 - DNA, 20 bp, Artificial Sequence
  chemically synthesized
ctctttctcgtctttctggg

SEQ ID NO: 19418 - DNA, 20 bp, Artificial Sequence
  chemically synthesized
tctttctcgtctttctgggc

SEQ ID NO: 19419 - DNA, 20 bp, Artificial Sequence
  chemically synthesized
tctttctgggcaggtattgt

SEQ ID NO: 19420 - DNA, 20 bp, Artificial Sequence
  chemically synthesized
ctttctgggcaggtattgtg

SEQ ID NO: 19421 - DNA, 20 bp, Artificial Sequence
  chemically synthesized
ctgggcaggtattgtgagga

SEQ ID NO: 19422 - DNA, 20 bp, Artificial Sequence
  chemically synthesized
gaggacggtatctgccctgt

SEQ ID NO: 19423 - DNA, 20 bp, Artificial Sequence
  chemically synthesized
ccgtcctcacaatacctgcc

SEQ ID NO: 19424 - DNA, 20 bp, Artificial Sequence
  chemically synthesized
cctcacaatacctgcccaga

SEQ ID NO: 19425 - DNA, 20 bp, Artificial Sequence
  chemically synthesized
caatacctgcccagaaagac

SEQ ID NO: 19426 - DNA, 20 bp, Artificial Sequence
  chemically synthesized
acctgcccagaaagacgaga

SEQ ID NO: 19427 - DNA, 20 bp, Artificial Sequence
  chemically synthesized
ctgcccagaaagacgagaaa

SEQ ID NO: 19428 - DNA, 20 bp, Artificial Sequence
  chemically synthesized
tgcccagaaagacgagaaag

SEQ ID NO: 19429 - DNA, 20 bp, Artificial Sequence
  chemically synthesized
cccagaaagacgagaaagag

SEQ ID NO: 19430 - DNA, 20 bp, Artificial Sequence
  chemically synthesized
ccagaaagacgagaaagagg

SEQ ID NO: 19431 - DNA, 20 bp, Artificial Sequence
  chemically synthesized
gaaagacgagaaagaggagg

SEQ ID NO: 19432 - DNA, 20 bp, Artificial Sequence
  chemically synthesized
ggaagaattcctccttccac

SEQ ID NO: 19433 - DNA, 20 bp, Artificial Sequence
  chemically synthesized
gaagaattcctccttccacc

SEQ ID NO: 19434 - DNA, 20 bp, Artificial Sequence
  chemically synthesized
tccttccaccaggaattctg

SEQ ID NO: 19435 - DNA, 20 bp, Artificial Sequence
  chemically synthesized
ccttccaccaggaattctgt

SEQ ID NO: 19436 - DNA, 20 bp, Artificial Sequence
  chemically synthesized
tccaccaggaattctgtggg

SEQ ID NO: 19437 - DNA, 20 bp, Artificial Sequence
  chemically synthesized
gaattctgtgggaagcacat

SEQ ID NO: 19438 - DNA, 20 bp, Artificial Sequence
  chemically synthesized
cacataagatttcatgctac

SEQ ID NO: 19439 - DNA, 20 bp, Artificial Sequence
  chemically synthesized
catgctactagtttattccc

SEQ ID NO: 19440 - DNA, 20 bp, Artificial Sequence
  chemically synthesized
tgctactagtttattcccaa

SEQ ID NO: 19441 - DNA, 20 bp, Artificial Sequence
  chemically synthesized
tactagtttattcccaagag

SEQ ID NO: 19442 - DNA, 20 bp, Artificial Sequence
  chemically synthesized
attcccaagagaagctacca

SEQ ID NO: 19443 - DNA, 20 bp, Artificial Sequence
  chemically synthesized
caagagaagctaccaaagcc

SEQ ID NO: 19444 - DNA, 20 bp, Artificial Sequence
  chemically synthesized
actctaacttttgtgcctgt

SEQ ID NO: 19445 - DNA, 20 bp, Artificial Sequence
  chemically synthesized
gcctgtaagttctcttctcc

SEQ ID NO: 19446 - DNA, 20 bp, Artificial Sequence
  chemically synthesized
cctgtaagttctcttctcct

SEQ ID NO: 19447 - DNA, 20 bp, Artificial Sequence
  chemically synthesized
gggattacaactaattgaaa

SEQ ID NO: 19448 - DNA, 20 bp, Artificial Sequence
  chemically synthesized
ggattacaactaattgaaac

SEQ ID NO: 19449 - DNA, 20 bp, Artificial Sequence
  chemically synthesized
ctaattgaaacaggaattca

SEQ ID NO: 19450 - DNA, 20 bp, Artificial Sequence
  chemically synthesized
taattgaaacaggaattcaa

SEQ ID NO: 19451 - DNA, 20 bp, Artificial Sequence
  chemically synthesized
attgaaacaggaattcaaag

SEQ ID NO: 19452 - DNA, 20 bp, Artificial Sequence
  chemically synthesized
acaggaattcaaaggagtct

SEQ ID NO: 19453 - DNA, 20 bp, Artificial Sequence
  chemically synthesized
aggaattcaaaggagtctcg

SEQ ID NO: 19454 - DNA, 20 bp, Artificial Sequence
  chemically synthesized
ggaattcaaaggagtctcgg

SEQ ID NO: 19455 - DNA, 20 bp, Artificial Sequence
  chemically synthesized
aaggagtctcggaggactgt

SEQ ID NO: 19456 - DNA, 20 bp, Artificial Sequence
  chemically synthesized
gagtctcggaggactgtaag

SEQ ID NO: 19457 - DNA, 20 bp, Artificial Sequence
  chemically synthesized
gactgtaagaagaatgcttc

SEQ ID NO: 19458 - DNA, 20 bp, Artificial Sequence
  chemically synthesized
actgtaagaagaatgcttcg

SEQ ID NO: 19459 - DNA, 20 bp, Artificial Sequence
  chemically synthesized
atccctctctgtaacatccc

SEQ ID NO: 19460 - DNA, 20 bp, Artificial Sequence
  chemically synthesized
tccctctctgtaacatccct

SEQ ID NO: 19461 - DNA, 20 bp, Artificial Sequence
  chemically synthesized
ctctctgtaacatccctggg

SEQ ID NO: 19462 - DNA, 20 bp, Artificial Sequence
  chemically synthesized
tctctgtaacatccctgggt

SEQ ID NO: 19463 - DNA, 20 bp, Artificial Sequence
  chemically synthesized
catccctgggtgggcttccc

SEQ ID NO: 19464 - DNA, 20 bp, Artificial Sequence
  chemically synthesized
ccctgggtgggcttccccag

SEQ ID NO: 19465 - DNA, 20 bp, Artificial Sequence
  chemically synthesized
cctgggtgggcttccccagt

SEQ ID NO: 19466 - DNA, 20 bp, Artificial Sequence
  chemically synthesized
gggtgggcttccccagtggg

SEQ ID NO: 19467 - DNA, 20 bp, Artificial Sequence
  chemically synthesized
gcttccccagtgggaagtcg

SEQ ID NO: 19468 - DNA, 20 bp, Artificial Sequence
  chemically synthesized
ggaagtcgaagaacttcctg

SEQ ID NO: 19469 - DNA, 20 bp, Artificial Sequence
  chemically synthesized
aagtcgaagaacttcctgtg

SEQ ID NO: 19470 - DNA, 20 bp, Artificial Sequence
  chemically synthesized
agtcgaagaacttcctgtgg

SEQ ID NO: 19471 - DNA, 20 bp, Artificial Sequence
  chemically synthesized
tcgaagaacttcctgtggag

SEQ ID NO: 19472 - DNA, 20 bp, Artificial Sequence
  chemically synthesized
ggaggagttactgctctttg

SEQ ID NO: 19473 - DNA, 20 bp, Artificial Sequence
  chemically synthesized
tactgctctttgaagttgct

SEQ ID NO: 19474 - DNA, 20 bp, Artificial Sequence
  chemically synthesized
actgctctttgaagttgctt

SEQ ID NO: 19475 - DNA, 20 bp, Artificial Sequence
  chemically synthesized
gctctttgaagttgcttggg

SEQ ID NO: 19476 - DNA, 20 bp, Artificial Sequence
  chemically synthesized
tgcttgggaagtgaccaata

SEQ ID NO: 19477 - DNA, 20 bp, Artificial Sequence
  chemically synthesized
gcttgggaagtgaccaataa

SEQ ID NO: 19478 - DNA, 20 bp, Artificial Sequence
  chemically synthesized
aaaggtttgtactgctcctg

SEQ ID NO: 19479 - DNA, 20 bp, Artificial Sequence
  chemically synthesized
aaggtttgtactgctcctga

SEQ ID NO: 19480 - DNA, 20 bp, Artificial Sequence
  chemically synthesized
gtttgtactgctcctgaagg

SEQ ID NO: 19481 - DNA, 20 bp, Artificial Sequence
  chemically synthesized
tactgctcctgaaggtggat

SEQ ID NO: 19482 - DNA, 20 bp, Artificial Sequence
  chemically synthesized
gtggatcagtacaccttcac

SEQ ID NO: 19483 - DNA, 20 bp, Artificial Sequence
  chemically synthesized
tggatcagtacaccttcact

SEQ ID NO: 19484 - DNA, 20 bp, Artificial Sequence
  chemically synthesized
tacaccttcactaggtgact

SEQ ID NO: 19485 - DNA, 20 bp, Artificial Sequence
  chemically synthesized
acaccttcactaggtgactg

SEQ ID NO: 19486 - DNA, 20 bp, Artificial Sequence
  chemically synthesized
cactaggtgactgaggaatg

SEQ ID NO: 19487 - DNA, 20 bp, Artificial Sequence
  chemically synthesized
ctaggtgactgaggaatgta

SEQ ID NO: 19488 - DNA, 20 bp, Artificial Sequence
  chemically synthesized
gtgactgaggaatgtagagt

SEQ ID NO: 19489 - DNA, 20 bp, Artificial Sequence
  chemically synthesized
gaatgtagagtaagatttca

SEQ ID NO: 19490 - DNA, 20 bp, Artificial Sequence
  chemically synthesized
agatttcacagataactctc

SEQ ID NO: 19491 - DNA, 20 bp, Artificial Sequence
  chemically synthesized
ctctagtgataaccaattgc

SEQ ID NO: 19492 - DNA, 20 bp, Artificial Sequence
  chemically synthesized
agtgataaccaattgctagt

SEQ ID NO: 19493 - DNA, 20 bp, Artificial Sequence
  chemically synthesized
ataaccaattgctagtgagt

SEQ ID NO: 19494 - DNA, 20 bp, Artificial Sequence
  chemically synthesized
taaccaattgctagtgagtg

SEQ ID NO: 19495 - DNA, 20 bp, Artificial Sequence
  chemically synthesized
caattgctagtgagtgagga

SEQ ID NO: 19496 - DNA, 20 bp, Artificial Sequence
  chemically synthesized
gagtgaggaaagcatttaaa

SEQ ID NO: 19497 - DNA, 20 bp, Artificial Sequence
  chemically synthesized
atttaaacggaatatatatt

SEQ ID NO: 19498 - DNA, 20 bp, Artificial Sequence
  chemically synthesized
tttaaacggaatatatattt

SEQ ID NO: 19499 - DNA, 20 bp, Artificial Sequence
  chemically synthesized
tttaaccttgtctattacaa

SEQ ID NO: 19500 - DNA, 20 bp, Artificial Sequence
  chemically synthesized
ttaaccttgtctattacaac

SEQ ID NO: 19501 - DNA, 20 bp, Artificial Sequence
  chemically synthesized
attacaacaggctatgaata

SEQ ID NO: 19502 - DNA, 20 bp, Artificial Sequence
  chemically synthesized
acagacttgtgtatgtgttg

SEQ ID NO: 19503 - DNA, 20 bp, Artificial Sequence
  chemically synthesized
agacttgtgtatgtgttgaa

SEQ ID NO: 19504 - DNA, 20 bp, Artificial Sequence
  chemically synthesized
gacttgtgtatgtgttgaag

SEQ ID NO: 19505 - DNA, 20 bp, Artificial Sequence
  chemically synthesized
acttgtgtatgtgttgaaga

SEQ ID NO: 19506 - DNA, 20 bp, Artificial Sequence
  chemically synthesized
ttgtgtatgtgttgaagagg

SEQ ID NO: 19507 - DNA, 20 bp, Artificial Sequence
  chemically synthesized
gtatgtgttgaagagggaga

SEQ ID NO: 19508 - DNA, 20 bp, Artificial Sequence
  chemically synthesized
agggagaaagttgaaaatat

SEQ ID NO: 19509 - DNA, 20 bp, Artificial Sequence
  chemically synthesized
gaaaatattagccattgcca

SEQ ID NO: 19510 - DNA, 20 bp, Artificial Sequence
  chemically synthesized
aaatccatattatgacaaca

SEQ ID NO: 19511 - DNA, 20 bp, Artificial Sequence
  chemically synthesized
tatgacaacatagaaataaa

SEQ ID NO: 19512 - DNA, 20 bp, Artificial Sequence
  chemically synthesized
ttttgttttaaaatttttct

SEQ ID NO: 19513 - DNA, 20 bp, Artificial Sequence
  chemically synthesized
taaaatttttctcagcaaaa

SEQ ID NO: 19514 - DNA, 20 bp, Artificial Sequence
  chemically synthesized
tataattaaacattttattt

SEQ ID NO: 19515 - DNA, 20 bp, Artificial Sequence
  chemically synthesized
ataattaaacattttatttt

SEQ ID NO: 19516 - DNA, 20 bp, Artificial Sequence
  chemically synthesized
attaaacattttattttagg

SEQ ID NO: 19517 - DNA, 20 bp, Artificial Sequence
  chemically synthesized
taggaagatgtatatgtgat

SEQ ID NO: 19518 - DNA, 20 bp, Artificial Sequence
  chemically synthesized
gatgtatatgtgattagaac

SEQ ID NO: 19519 - DNA, 20 bp, Artificial Sequence
  chemically synthesized
tatatgtgattagaaccagt

SEQ ID NO: 19520 - DNA, 20 bp, Artificial Sequence
  chemically synthesized
acctcaactctacattctgt

SEQ ID NO: 19521 - DNA, 20 bp, Artificial Sequence
  chemically synthesized
agtaattatatgaaatgctt

SEQ ID NO: 19522 - DNA, 20 bp, Artificial Sequence
  chemically synthesized
gaatgtttcatattcacaat

SEQ ID NO: 19523 - DNA, 20 bp, Artificial Sequence
  chemically synthesized
tttcatattcacaattagct

SEQ ID NO: 19524 - DNA, 20 bp, Artificial Sequence
  chemically synthesized
ttggaattaatgttttaatt

SEQ ID NO: 19525 - DNA, 20 bp, Artificial Sequence
  chemically synthesized
tggaattaatgttttaattc

SEQ ID NO: 19526 - DNA, 20 bp, Artificial Sequence
  chemically synthesized
gaattaatgttttaattcag

SEQ ID NO: 19527 - DNA, 20 bp, Artificial Sequence
  chemically synthesized
ttaattcaggagcttctcaa

SEQ ID NO: 19528 - DNA, 20 bp, Artificial Sequence
  chemically synthesized
taattcaggagcttctcaaa

SEQ ID NO: 19529 - DNA, 20 bp, Artificial Sequence
  chemically synthesized
gcaaaatactgtgctccttt

SEQ ID NO: 19530 - DNA, 20 bp, Artificial Sequence
  chemically synthesized
ctgtgctcctttcagaatga

SEQ ID NO: 19531 - DNA, 20 bp, Artificial Sequence
  chemically synthesized
tcttcaatgctatgcttatg

SEQ ID NO: 19532 - DNA, 20 bp, Artificial Sequence
  chemically synthesized
cttcaatgctatgcttatgt

SEQ ID NO: 19533 - DNA, 20 bp, Artificial Sequence
  chemically synthesized
tatgtaggaattataaaata

SEQ ID NO: 19534 - DNA, 20 bp, Artificial Sequence
  chemically synthesized
aaattgataaaacaatttgc

SEQ ID NO: 19535 - DNA, 20 bp, Artificial Sequence
  chemically synthesized
tgataaaacaatttgcgagt

SEQ ID NO: 19536 - DNA, 20 bp, Artificial Sequence
  chemically synthesized
gataaaacaatttgcgagtg

SEQ ID NO: 19537 - DNA, 20 bp, Artificial Sequence
  chemically synthesized
aggtataacctcatctgtgc

SEQ ID NO: 19538 - DNA, 20 bp, Artificial Sequence
  chemically synthesized
ggtataacctcatctgtgct

SEQ ID NO: 19539 - DNA, 20 bp, Artificial Sequence
  chemically synthesized
taacctcatctgtgctgggt

SEQ ID NO: 19540 - DNA, 20 bp, Artificial Sequence
  chemically synthesized
acctcatctgtgctgggtaa

SEQ ID NO: 19541 - DNA, 20 bp, Artificial Sequence
  chemically synthesized
tcatctgtgctgggtaagag

SEQ ID NO: 19542 - DNA, 20 bp, Artificial Sequence
  chemically synthesized
catctgtgctgggtaagaga

SEQ ID NO: 19543 - DNA, 20 bp, Artificial Sequence
  chemically synthesized
tgtgctgggtaagagaaggc

SEQ ID NO: 19544 - DNA, 20 bp, Artificial Sequence
  chemically synthesized
gtgctgggtaagagaaggca

SEQ ID NO: 19545 - DNA, 20 bp, Artificial Sequence
  chemically synthesized
ctgggtaagagaaggcaagg

SEQ ID NO: 19546 - DNA, 20 bp, Artificial Sequence
  chemically synthesized
gggtaagagaaggcaaggta

SEQ ID NO: 19547 - DNA, 20 bp, Artificial Sequence
  chemically synthesized
tgtaaatgattttgaaaata

SEQ ID NO: 19548 - DNA, 20 bp, Artificial Sequence
  chemically synthesized
aattataaaacaattccttg

SEQ ID NO: 19549 - DNA, 20 bp, Artificial Sequence
  chemically synthesized
attataaaacaattccttgt

SEQ ID NO: 19550 - DNA, 20 bp, Artificial Sequence
  chemically synthesized
ccttgtgggtttatactctc

SEQ ID NO: 19551 - DNA, 20 bp, Artificial Sequence
  chemically synthesized
gtttatactctctagtttaa

SEQ ID NO: 19552 - DNA, 20 bp, Artificial Sequence
  chemically synthesized
ctctctagtttaaaagtgtc

SEQ ID NO: 19553 - DNA, 20 bp, Artificial Sequence
  chemically synthesized
taaaagtgtcaagactattg

SEQ ID NO: 19554 - DNA, 20 bp, Artificial Sequence
  chemically synthesized
aaaagtgtcaagactattga

SEQ ID NO: 19555 - DNA, 20 bp, Artificial Sequence
  chemically synthesized
caagactattgaaggaacat

SEQ ID NO: 19556 - DNA, 20 bp, Artificial Sequence
  chemically synthesized
ctattgaaggaacattagca

SEQ ID NO: 19557 - DNA, 20 bp, Artificial Sequence
  chemically synthesized
aaggaacattagcaaagaaa

SEQ ID NO: 19558 - DNA, 20 bp, Artificial Sequence
  chemically synthesized
cattagcaaagaaaaagtca

SEQ ID NO: 19559 - DNA, 20 bp, Artificial Sequence
  chemically synthesized
aagaaaaagtcatggttttg

SEQ ID NO: 19560 - DNA, 20 bp, Artificial Sequence
  chemically synthesized
agaaaaagtcatggttttga

SEQ ID NO: 19561 - DNA, 20 bp, Artificial Sequence
  chemically synthesized
aagtcatggttttgaaggct

SEQ ID NO: 19562 - DNA, 20 bp, Artificial Sequence
  chemically synthesized
ttttgaaggctgagttcctc

SEQ ID NO: 19563 - DNA, 20 bp, Artificial Sequence
  chemically synthesized
ctgagttcctcaagatcttg

SEQ ID NO: 19564 - DNA, 20 bp, Artificial Sequence
  chemically synthesized
cctcaagatcttgaagaatc

SEQ ID NO: 19565 - DNA, 20 bp, Artificial Sequence
  chemically synthesized
gaatcaagccaactgattgc

SEQ ID NO: 19566 - DNA, 20 bp, Artificial Sequence
  chemically synthesized
aatcaagccaactgattgct

SEQ ID NO: 19567 - DNA, 20 bp, Artificial Sequence
  chemically synthesized
ccaactgattgctgggtaaa

SEQ ID NO: 19568 - DNA, 20 bp, Artificial Sequence
  chemically synthesized
actgattgctgggtaaatgg

SEQ ID NO: 19569 - DNA, 20 bp, Artificial Sequence
  chemically synthesized
ttactatttcatgtctatta

SEQ ID NO: 19570 - DNA, 20 bp, Artificial Sequence
  chemically synthesized
atgtctattacagtaatcta

SEQ ID NO: 19571 - DNA, 20 bp, Artificial Sequence
  chemically synthesized
tgtctattacagtaatctaa

SEQ ID NO: 19572 - DNA, 20 bp, Artificial Sequence
  chemically synthesized
aaaggatctgaaataataac

SEQ ID NO: 19573 - DNA, 20 bp, Artificial Sequence
  chemically synthesized
gatatattacttccttcttt

SEQ ID NO: 19574 - DNA, 20 bp, Artificial Sequence
  chemically synthesized
acttccttcttttggctaat

SEQ ID NO: 19575 - DNA, 20 bp, Artificial Sequence
  chemically synthesized
ttccttcttttggctaatca

SEQ ID NO: 19576 - DNA, 20 bp, Artificial Sequence
  chemically synthesized
ttcttttggctaatcagagc

SEQ ID NO: 19577 - DNA, 20 bp, Artificial Sequence
  chemically synthesized
aaaattaaatgcattatata

SEQ ID NO: 19578 - DNA, 20 bp, Artificial Sequence
  chemically synthesized
tggcatgcattctgaaaaat

SEQ ID NO: 19579 - DNA, 20 bp, Artificial Sequence
  chemically synthesized
caccttatactaactgttca

SEQ ID NO: 19580 - DNA, 20 bp, Artificial Sequence
  chemically synthesized
attcataaaatcaaaattaa

SEQ ID NO: 19581 - DNA, 20 bp, Artificial Sequence
  chemically synthesized
aaaagtcaattttgcctatg

SEQ ID NO: 19582 - DNA, 20 bp, Artificial Sequence
  chemically synthesized
agtcaattttgcctatgtag

SEQ ID NO: 19583 - DNA, 20 bp, Artificial Sequence
  chemically synthesized
caattttgcctatgtagaag

SEQ ID NO: 19584 - DNA, 20 bp, Artificial Sequence
  chemically synthesized
tttgcctatgtagaagtgga

SEQ ID NO: 19585 - DNA, 20 bp, Artificial Sequence
  chemically synthesized
gaagtggacagaatgcatat

SEQ ID NO: 19586 - DNA, 20 bp, Artificial Sequence
  chemically synthesized
agtggacagaatgcatataa

SEQ ID NO: 19587 - DNA, 20 bp, Artificial Sequence
  chemically synthesized
agaatgcatataagagaaca

SEQ ID NO: 19588 - DNA, 20 bp, Artificial Sequence
  chemically synthesized
gcatataagagaacaaagca

SEQ ID NO: 19589 - DNA, 20 bp, Artificial Sequence
  chemically synthesized
aagcacggtcttattctctg

SEQ ID NO: 19590 - DNA, 20 bp, Artificial Sequence
  chemically synthesized
cggtcttattctctgtagtt

SEQ ID NO: 19591 - DNA, 20 bp, Artificial Sequence
  chemically synthesized
cttattctctgtagtttagt

SEQ ID NO: 19592 - DNA, 20 bp, Artificial Sequence
  chemically synthesized
ttctctgtagtttagtgaga

SEQ ID NO: 19593 - DNA, 20 bp, Artificial Sequence
  chemically synthesized
tagtttagtgagaaagaatc

SEQ ID NO: 19594 - DNA, 20 bp, Artificial Sequence
  chemically synthesized
agtttagtgagaaagaatct

SEQ ID NO: 19595 - DNA, 20 bp, Artificial Sequence
  chemically synthesized
tttagtgagaaagaatctag

SEQ ID NO: 19596 - DNA, 20 bp, Artificial Sequence
  chemically synthesized
ttagtgagaaagaatctagg

SEQ ID NO: 19597 - DNA, 20 bp, Artificial Sequence
  chemically synthesized
tgagaaagaatctaggagga

SEQ ID NO: 19598 - DNA, 20 bp, Artificial Sequence
  chemically synthesized
ggaggacagaaaccttatta

SEQ ID NO: 19599 - DNA, 20 bp, Artificial Sequence
  chemically synthesized
aggacagaaaccttattaca

SEQ ID NO: 19600 - DNA, 20 bp, Artificial Sequence
  chemically synthesized
acagaaaccttattacagag

SEQ ID NO: 19601 - DNA, 20 bp, Artificial Sequence
  chemically synthesized
aaccttattacagagaagtg

SEQ ID NO: 19602 - DNA, 20 bp, Artificial Sequence
  chemically synthesized
ttattttgtattcttttcct

SEQ ID NO: 19603 - DNA, 20 bp, Artificial Sequence
  chemically synthesized
attttgtattcttttcctca

SEQ ID NO: 19604 - DNA, 20 bp, Artificial Sequence
  chemically synthesized
agagatctttatcctgaaat

SEQ ID NO: 19605 - DNA, 20 bp, Artificial Sequence
  chemically synthesized
tgtttttaatgtcctttttc

SEQ ID NO: 19606 - DNA, 20 bp, Artificial Sequence
  chemically synthesized
tttctagtcacaaatttttc

SEQ ID NO: 19607 - DNA, 20 bp, Artificial Sequence
  chemically synthesized
agtcacaaatttttccagtc

SEQ ID NO: 19608 - DNA, 20 bp, Artificial Sequence
  chemically synthesized
ccagtttttaaatatgccca

SEQ ID NO: 19609 - DNA, 20 bp, Artificial Sequence
  chemically synthesized
ttaaatatgcccaaagttcc

SEQ ID NO: 19610 - DNA, 20 bp, Artificial Sequence
  chemically synthesized
taaatatgcccaaagttcct

SEQ ID NO: 19611 - DNA, 20 bp, Artificial Sequence
  chemically synthesized
atgcccaaagttcctgggaa

SEQ ID NO: 19612 - DNA, 20 bp, Artificial Sequence
  chemically synthesized
tctctatcacatgtgaatcc

SEQ ID NO: 19613 - DNA, 20 bp, Artificial Sequence
  chemically synthesized
tctatcacatgtgaatcccg

SEQ ID NO: 19614 - DNA, 20 bp, Artificial Sequence
  chemically synthesized
cggagtatgccttgaaataa

SEQ ID NO: 19615 - DNA, 20 bp, Artificial Sequence
  chemically synthesized
cttgaaataaaagttttctc

SEQ ID NO: 19616 - DNA, 20 bp, Artificial Sequence
  chemically synthesized
tgaaataaaagttttctcta

SEQ ID NO: 19617 - DNA, 20 bp, Artificial Sequence
  chemically synthesized
aaataaaagttttctctaga

SEQ ID NO: 19618 - DNA, 20 bp, Artificial Sequence
  chemically synthesized
taaaagttttctctagagag

SEQ ID NO: 19619 - DNA, 20 bp, Artificial Sequence
  chemically synthesized
aaaagttttctctagagagt

SEQ ID NO: 19620 - DNA, 20 bp, Artificial Sequence
  chemically synthesized
agttttctctagagagtggg

SEQ ID NO: 19621 - DNA, 20 bp, Artificial Sequence
  chemically synthesized
gttttctctagagagtgggc

SEQ ID NO: 19622 - DNA, 20 bp, Artificial Sequence
  chemically synthesized
tttctctagagagtgggcag

SEQ ID NO: 19623 - DNA, 20 bp, Artificial Sequence
  chemically synthesized
tagagagtgggcaggagctc

SEQ ID NO: 19624 - DNA, 20 bp, Artificial Sequence
  chemically synthesized
agagagtgggcaggagctca

SEQ ID NO: 19625 - DNA, 20 bp, Artificial Sequence
  chemically synthesized
tgggcaggagctcaaggaca

SEQ ID NO: 19626 - DNA, 20 bp, Artificial Sequence
  chemically synthesized
agctcaaggacatagcttat

SEQ ID NO: 19627 - DNA, 20 bp, Artificial Sequence
  chemically synthesized
tcaaggacatagcttattgg

SEQ ID NO: 19628 - DNA, 20 bp, Artificial Sequence
  chemically synthesized
agcttattggtggataaaac

SEQ ID NO: 19629 - DNA, 20 bp, Artificial Sequence
  chemically synthesized
ttattggtggataaaactgg

SEQ ID NO: 19630 - DNA, 20 bp, Artificial Sequence
  chemically synthesized
tattggtggataaaactgga

SEQ ID NO: 19631 - DNA, 20 bp, Artificial Sequence
  chemically synthesized
attggtggataaaactggaa

SEQ ID NO: 19632 - DNA, 20 bp, Artificial Sequence
  chemically synthesized
taaaactggaagggacttgt

SEQ ID NO: 19633 - DNA, 20 bp, Artificial Sequence
  chemically synthesized
tggaagggacttgttagcac

SEQ ID NO: 19634 - DNA, 20 bp, Artificial Sequence
  chemically synthesized
ggaagggacttgttagcact

SEQ ID NO: 19635 - DNA, 20 bp, Artificial Sequence
  chemically synthesized
gacttgttagcactgggaat

SEQ ID NO: 19636 - DNA, 20 bp, Artificial Sequence
  chemically synthesized
gttagcactgggaatcagtc

SEQ ID NO: 19637 - DNA, 20 bp, Artificial Sequence
  chemically synthesized
agcactgggaatcagtccag

SEQ ID NO: 19638 - DNA, 20 bp, Artificial Sequence
  chemically synthesized
agtccagaagatctctgcac

SEQ ID NO: 19639 - DNA, 20 bp, Artificial Sequence
  chemically synthesized
ctgcacaagttcctgcacct

SEQ ID NO: 19640 - DNA, 20 bp, Artificial Sequence
  chemically synthesized
cacaagttcctgcacctgag

SEQ ID NO: 19641 - DNA, 20 bp, Artificial Sequence
  chemically synthesized
caagttcctgcacctgagca

SEQ ID NO: 19642 - DNA, 20 bp, Artificial Sequence
  chemically synthesized
catcatttaacaaacattaa

SEQ ID NO: 19643 - DNA, 20 bp, Artificial Sequence
  chemically synthesized
tcatttaacaaacattaatg

SEQ ID NO: 19644 - DNA, 20 bp, Artificial Sequence
  chemically synthesized
attaatggagcactgttacc

SEQ ID NO: 19645 - DNA, 20 bp, Artificial Sequence
  chemically synthesized
ttaatggagcactgttacct

SEQ ID NO: 19646 - DNA, 20 bp, Artificial Sequence
  chemically synthesized
gagcactgttacctgggcac

SEQ ID NO: 19647 - DNA, 20 bp, Artificial Sequence
  chemically synthesized
agcactgttacctgggcact

SEQ ID NO: 19648 - DNA, 20 bp, Artificial Sequence
  chemically synthesized
cctgggcactgggaacacgc

SEQ ID NO: 19649 - DNA, 20 bp, Artificial Sequence
  chemically synthesized
gggaacacgccagtgaaact

SEQ ID NO: 19650 - DNA, 20 bp, Artificial Sequence
  chemically synthesized
agtgaaactaagttatttta

SEQ ID NO: 19651 - DNA, 20 bp, Artificial Sequence
  chemically synthesized
tattttatggatcttataat

SEQ ID NO: 19652 - DNA, 20 bp, Artificial Sequence
  chemically synthesized
tttatggatcttataatcag

SEQ ID NO: 19653 - DNA, 20 bp, Artificial Sequence
  chemically synthesized
agtagcatgtgtgttgatct

SEQ ID NO: 19654 - DNA, 20 bp, Artificial Sequence
  chemically synthesized
gtagcatgtgtgttgatctc

SEQ ID NO: 19655 - DNA, 20 bp, Artificial Sequence
  chemically synthesized
tagcatgtgtgttgatctca

SEQ ID NO: 19656 - DNA, 20 bp, Artificial Sequence
  chemically synthesized
tgtgtgttgatctcagggtc

SEQ ID NO: 19657 - DNA, 20 bp, Artificial Sequence
  chemically synthesized
gttgatctcagggtctagaa

SEQ ID NO: 19658 - DNA, 20 bp, Artificial Sequence
  chemically synthesized
tcagggtctagaacagtgcc

SEQ ID NO: 19659 - DNA, 20 bp, Artificial Sequence
  chemically synthesized
ctagaacagtgcctggtaca

SEQ ID NO: 19660 - DNA, 20 bp, Artificial Sequence
  chemically synthesized
ggtacatagaaaatgctcaa

SEQ ID NO: 19661 - DNA, 20 bp, Artificial Sequence
  chemically synthesized
aaatttgtttttcaacccct

SEQ ID NO: 19662 - DNA, 20 bp, Artificial Sequence
  chemically synthesized
ttttctatcatttccctttc

SEQ ID NO: 19663 - DNA, 20 bp, Artificial Sequence
  chemically synthesized
tttctatcatttccctttca

SEQ ID NO: 19664 - DNA, 20 bp, Artificial Sequence
  chemically synthesized
ttctatcatttccctttcaa

SEQ ID NO: 19665 - DNA, 20 bp, Artificial Sequence
  chemically synthesized
tctatcatttccctttcaag

SEQ ID NO: 19666 - DNA, 20 bp, Artificial Sequence
  chemically synthesized
atcatttccctttcaagggg

SEQ ID NO: 19667 - DNA, 20 bp, Artificial Sequence
  chemically synthesized
tcatttccctttcaagggga

SEQ ID NO: 19668 - DNA, 20 bp, Artificial Sequence
  chemically synthesized
catttccctttcaaggggaa

SEQ ID NO: 19669 - DNA, 20 bp, Artificial Sequence
  chemically synthesized
ttccctttcaaggggaaggg

SEQ ID NO: 19670 - DNA, 20 bp, Artificial Sequence
  chemically synthesized
ggggaagggaagtgtttttg

SEQ ID NO: 19671 - DNA, 20 bp, Artificial Sequence
  chemically synthesized
ggaagggaagtgtttttgtg

SEQ ID NO: 19672 - DNA, 20 bp, Artificial Sequence
  chemically synthesized
aagggaagtgtttttgtgga

SEQ ID NO: 19673 - DNA, 20 bp, Artificial Sequence
  chemically synthesized
agggaagtgtttttgtggag

SEQ ID NO: 19674 - DNA, 20 bp, Artificial Sequence
  chemically synthesized
ccccacaatgtgatttacac

SEQ ID NO: 19675 - DNA, 20 bp, Artificial Sequence
  chemically synthesized
tctttattttaatattatca

SEQ ID NO: 19676 - DNA, 20 bp, Artificial Sequence
  chemically synthesized
attttaatattatcatagcc

SEQ ID NO: 19677 - DNA, 20 bp, Artificial Sequence
  chemically synthesized
aatattatcatagcctggta

SEQ ID NO: 19678 - DNA, 20 bp, Artificial Sequence
  chemically synthesized
atcatagcctggtatggttt

SEQ ID NO: 19679 - DNA, 20 bp, Artificial Sequence
  chemically synthesized
tatggtttgagattttcata

SEQ ID NO: 19680 - DNA, 20 bp, Artificial Sequence
  chemically synthesized
gtttgagattttcatataga

SEQ ID NO: 19681 - DNA, 20 bp, Artificial Sequence
  chemically synthesized
ctaataatacattgccacta

SEQ ID NO: 19682 - DNA, 20 bp, Artificial Sequence
  chemically synthesized
ttttacttccctgcatttca

SEQ ID NO: 19683 - DNA, 20 bp, Artificial Sequence
  chemically synthesized
tacttccctgcatttcatag

SEQ ID NO: 19684 - DNA, 20 bp, Artificial Sequence
  chemically synthesized
gcatttcatagtagtgatat

SEQ ID NO: 19685 - DNA, 20 bp, Artificial Sequence
  chemically synthesized
catttcatagtagtgatatg

SEQ ID NO: 19686 - DNA, 20 bp, Artificial Sequence
  chemically synthesized
agtagtgatatgaggtatct

SEQ ID NO: 19687 - DNA, 20 bp, Artificial Sequence
  chemically synthesized
tagtgatatgaggtatctta

SEQ ID NO: 19688 - DNA, 20 bp, Artificial Sequence
  chemically synthesized
gatcatgaatcccactcctc

SEQ ID NO: 19689 - DNA, 20 bp, Artificial Sequence
  chemically synthesized
aatcccactcctccagttca

SEQ ID NO: 19690 - DNA, 20 bp, Artificial Sequence
  chemically synthesized
tcccactcctccagttcata

SEQ ID NO: 19691 - DNA, 20 bp, Artificial Sequence
  chemically synthesized
tcatagagcaaattgattcg

SEQ ID NO: 19692 - DNA, 20 bp, Artificial Sequence
  chemically synthesized
atagagcaaattgattcgta

SEQ ID NO: 19693 - DNA, 20 bp, Artificial Sequence
  chemically synthesized
tagagcaaattgattcgtag

SEQ ID NO: 19694 - DNA, 20 bp, Artificial Sequence
  chemically synthesized
cgtagaggtatttaatgatc

SEQ ID NO: 19695 - DNA, 20 bp, Artificial Sequence
  chemically synthesized
gtatttaatgatcaagcaaa

SEQ ID NO: 19696 - DNA, 20 bp, Artificial Sequence
  chemically synthesized
tttaatgatcaagcaaatgg

SEQ ID NO: 19697 - DNA, 20 bp, Artificial Sequence
  chemically synthesized
taatgatcaagcaaatggca

SEQ ID NO: 19698 - DNA, 20 bp, Artificial Sequence
  chemically synthesized
gatcaagcaaatggcagagt

SEQ ID NO: 19699 - DNA, 20 bp, Artificial Sequence
  chemically synthesized
atcaagcaaatggcagagtt

SEQ ID NO: 19700 - DNA, 20 bp, Artificial Sequence
  chemically synthesized
gcaaatggcagagttaggac

SEQ ID NO: 19701 - DNA, 20 bp, Artificial Sequence
  chemically synthesized
caaatggcagagttaggacc

SEQ ID NO: 19702 - DNA, 20 bp, Artificial Sequence
  chemically synthesized
gcagagttaggaccaggatt

SEQ ID NO: 19703 - DNA, 20 bp, Artificial Sequence
  chemically synthesized
cagagttaggaccaggattt

SEQ ID NO: 19704 - DNA, 20 bp, Artificial Sequence
  chemically synthesized
ccaggatttaggtcttttcc

SEQ ID NO: 19705 - DNA, 20 bp, Artificial Sequence
  chemically synthesized
caggatttaggtcttttcca

SEQ ID NO: 19706 - DNA, 20 bp, Artificial Sequence
  chemically synthesized
tcacttttttactattatgt

SEQ ID NO: 19707 - DNA, 20 bp, Artificial Sequence
  chemically synthesized
agaattaaatattaaaacct

SEQ ID NO: 19708 - DNA, 20 bp, Artificial Sequence
  chemically synthesized
tattaaaacctcagttttca

SEQ ID NO: 19709 - DNA, 20 bp, Artificial Sequence
  chemically synthesized
attaaaacctcagttttcaa

SEQ ID NO: 19710 - DNA, 20 bp, Artificial Sequence
  chemically synthesized
ttttcaaaggaaatgtccta

SEQ ID NO: 19711 - DNA, 20 bp, Artificial Sequence
  chemically synthesized
aggaaatgtcctatagatga

SEQ ID NO: 19712 - DNA, 20 bp, Artificial Sequence
  chemically synthesized
gtcctatagatgaaagaaca

SEQ ID NO: 19713 - DNA, 20 bp, Artificial Sequence
  chemically synthesized
atgaaagaacacagtacttg

SEQ ID NO: 19714 - DNA, 20 bp, Artificial Sequence
  chemically synthesized
gaacacagtacttgcagtca

SEQ ID NO: 19715 - DNA, 20 bp, Artificial Sequence
  chemically synthesized
aacacagtacttgcagtcaa

SEQ ID NO: 19716 - DNA, 20 bp, Artificial Sequence
  chemically synthesized
gtacttgcagtcaaaggtct

SEQ ID NO: 19717 - DNA, 20 bp, Artificial Sequence
  chemically synthesized
atttctgaaactttctgaaa

SEQ ID NO: 19718 - DNA, 20 bp, Artificial Sequence
  chemically synthesized
gaaccccttaaactgaataa

SEQ ID NO: 19719 - DNA, 20 bp, Artificial Sequence
  chemically synthesized
aaaatgaatgttatactctc

SEQ ID NO: 19720 - DNA, 20 bp, Artificial Sequence
  chemically synthesized
agttatcttaccatgttttc

SEQ ID NO: 19721 - DNA, 20 bp, Artificial Sequence
  chemically synthesized
taccatgttttctggcaaac

SEQ ID NO: 19722 - DNA, 20 bp, Artificial Sequence
  chemically synthesized
accatgttttctggcaaaca

SEQ ID NO: 19723 - DNA, 20 bp, Artificial Sequence
  chemically synthesized
aaggaaatgtattcacatcc

SEQ ID NO: 19724 - DNA, 20 bp, Artificial Sequence
  chemically synthesized
attcacatccaagaaaacaa

SEQ ID NO: 19725 - DNA, 20 bp, Artificial Sequence
  chemically synthesized
ttcacatccaagaaaacaaa

SEQ ID NO: 19726 - DNA, 20 bp, Artificial Sequence
  chemically synthesized
caagaaaacaaaaggtttct

SEQ ID NO: 19727 - DNA, 20 bp, Artificial Sequence
  chemically synthesized
aagaaaacaaaaggtttctt

SEQ ID NO: 19728 - DNA, 20 bp, Artificial Sequence
  chemically synthesized
gaaaacaaaaggtttcttag

SEQ ID NO: 19729 - DNA, 20 bp, Artificial Sequence
  chemically synthesized
aacaaaaggtttcttaggag

SEQ ID NO: 19730 - DNA, 20 bp, Artificial Sequence
  chemically synthesized
ggagaagaatcccttgctgc

SEQ ID NO: 19731 - DNA, 20 bp, Artificial Sequence
  chemically synthesized
agaattttgcccatgaacaa

SEQ ID NO: 19732 - DNA, 20 bp, Artificial Sequence
  chemically synthesized
tggaaacgtgaaaaacataa

SEQ ID NO: 19733 - DNA, 20 bp, Artificial Sequence
  chemically synthesized
acgtgaaaaacataacagat

SEQ ID NO: 19734 - DNA, 20 bp, Artificial Sequence
  chemically synthesized
gtgaaaaacataacagatga

SEQ ID NO: 19735 - DNA, 20 bp, Artificial Sequence
  chemically synthesized
gaaaaacataacagatgaga

SEQ ID NO: 19736 - DNA, 20 bp, Artificial Sequence
  chemically synthesized
cataacagatgagagagtca

SEQ ID NO: 19737 - DNA, 20 bp, Artificial Sequence
  chemically synthesized
acagatgagagagtcacagt

SEQ ID NO: 19738 - DNA, 20 bp, Artificial Sequence
  chemically synthesized
gagagagtcacagttagttt

SEQ ID NO: 19739 - DNA, 20 bp, Artificial Sequence
  chemically synthesized
agagagtcacagttagtttt

SEQ ID NO: 19740 - DNA, 20 bp, Artificial Sequence
  chemically synthesized
tagttttgggtactaattct

SEQ ID NO: 19741 - DNA, 20 bp, Artificial Sequence
  chemically synthesized
cattaatccattttattatt

SEQ ID NO: 19742 - DNA, 20 bp, Artificial Sequence
  chemically synthesized
aatccattttattattcagt

SEQ ID NO: 19743 - DNA, 20 bp, Artificial Sequence
  chemically synthesized
atccattttattattcagta

SEQ ID NO: 19744 - DNA, 20 bp, Artificial Sequence
  chemically synthesized
ttattcagtaaggattcatc

SEQ ID NO: 19745 - DNA, 20 bp, Artificial Sequence
  chemically synthesized
aggattcatcaagtgtctat

SEQ ID NO: 19746 - DNA, 20 bp, Artificial Sequence
  chemically synthesized
ggattcatcaagtgtctatt

SEQ ID NO: 19747 - DNA, 20 bp, Artificial Sequence
  chemically synthesized
atcaagtgtctattaggtat

SEQ ID NO: 19748 - DNA, 20 bp, Artificial Sequence
  chemically synthesized
tcaagtgtctattaggtatc

SEQ ID NO: 19749 - DNA, 20 bp, Artificial Sequence
  chemically synthesized
tctattaggtatcaggcact

SEQ ID NO: 19750 - DNA, 20 bp, Artificial Sequence
  chemically synthesized
tattaggtatcaggcactga

SEQ ID NO: 19751 - DNA, 20 bp, Artificial Sequence
  chemically synthesized
attaggtatcaggcactgag

SEQ ID NO: 19752 - DNA, 20 bp, Artificial Sequence
  chemically synthesized
ggtatcaggcactgagaggc

SEQ ID NO: 19753 - DNA, 20 bp, Artificial Sequence
  chemically synthesized
gtatcaggcactgagaggcg

SEQ ID NO: 19754 - DNA, 20 bp, Artificial Sequence
  chemically synthesized
tatcaggcactgagaggcga

SEQ ID NO: 19755 - DNA, 20 bp, Artificial Sequence
  chemically synthesized
tcaggcactgagaggcgagg

SEQ ID NO: 19756 - DNA, 20 bp, Artificial Sequence
  chemically synthesized
gcactgagaggcgagggaga

SEQ ID NO: 19757 - DNA, 20 bp, Artificial Sequence
  chemically synthesized
actgagaggcgagggagata

SEQ ID NO: 19758 - DNA, 20 bp, Artificial Sequence
  chemically synthesized
gaggcgagggagatagagtt

SEQ ID NO: 19759 - DNA, 20 bp, Artificial Sequence
  chemically synthesized
gggagatagagttaagaata

SEQ ID NO: 19760 - DNA, 20 bp, Artificial Sequence
  chemically synthesized
agaactgattcttaatcttc

SEQ ID NO: 19761 - DNA, 20 bp, Artificial Sequence
  chemically synthesized
ttcaagaattgacaaatttg

SEQ ID NO: 19762 - DNA, 20 bp, Artificial Sequence
  chemically synthesized
aagaattgacaaatttgtag

SEQ ID NO: 19763 - DNA, 20 bp, Artificial Sequence
  chemically synthesized
agaattgacaaatttgtaga

SEQ ID NO: 19764 - DNA, 20 bp, Artificial Sequence
  chemically synthesized
attgacaaatttgtagaagg

SEQ ID NO: 19765 - DNA, 20 bp, Artificial Sequence
  chemically synthesized
tagacattgaacatacaata

SEQ ID NO: 19766 - DNA, 20 bp, Artificial Sequence
  chemically synthesized
acaatacagtcaaatgtgat

SEQ ID NO: 19767 - DNA, 20 bp, Artificial Sequence
  chemically synthesized
cagtcaaatgtgatgagtgt

SEQ ID NO: 19768 - DNA, 20 bp, Artificial Sequence
  chemically synthesized
aatgtgatgagtgtgagact

SEQ ID NO: 19769 - DNA, 20 bp, Artificial Sequence
  chemically synthesized
atgtgatgagtgtgagacta

SEQ ID NO: 19770 - DNA, 20 bp, Artificial Sequence
  chemically synthesized
tgtgatgagtgtgagactaa

SEQ ID NO: 19771 - DNA, 20 bp, Artificial Sequence
  chemically synthesized
gagtgtgagactaagggaac

SEQ ID NO: 19772 - DNA, 20 bp, Artificial Sequence
  chemically synthesized
agtgtgagactaagggaacc

SEQ ID NO: 19773 - DNA, 20 bp, Artificial Sequence
  chemically synthesized
ctaagggaaccaggtgtcct

SEQ ID NO: 19774 - DNA, 20 bp, Artificial Sequence
  chemically synthesized
ccaggtgtcctaagactata

SEQ ID NO: 19775 - DNA, 20 bp, Artificial Sequence
  chemically synthesized
taagactatacagtgtaccg

SEQ ID NO: 19776 - DNA, 20 bp, Artificial Sequence
  chemically synthesized
ctatacagtgtaccgtggaa

SEQ ID NO: 19777 - DNA, 20 bp, Artificial Sequence
  chemically synthesized
tatacagtgtaccgtggaat

SEQ ID NO: 19778 - DNA, 20 bp, Artificial Sequence
  chemically synthesized
atacagtgtaccgtggaatg

SEQ ID NO: 19779 - DNA, 20 bp, Artificial Sequence
  chemically synthesized
acagtgtaccgtggaatggg

SEQ ID NO: 19780 - DNA, 20 bp, Artificial Sequence
  chemically synthesized
gtgtaccgtggaatggggag

SEQ ID NO: 19781 - DNA, 20 bp, Artificial Sequence
  chemically synthesized
atggggagtggtttctaacc

SEQ ID NO: 19782 - DNA, 20 bp, Artificial Sequence
  chemically synthesized
tggtttctaacctagttacc

SEQ ID NO: 19783 - DNA, 20 bp, Artificial Sequence
  chemically synthesized
gtttctaacctagttaccta

SEQ ID NO: 19784 - DNA, 20 bp, Artificial Sequence
  chemically synthesized
tttctaacctagttacctag

SEQ ID NO: 19785 - DNA, 20 bp, Artificial Sequence
  chemically synthesized
aacctagttacctagaggtt

SEQ ID NO: 19786 - DNA, 20 bp, Artificial Sequence
  chemically synthesized
acctagttacctagaggttt

SEQ ID NO: 19787 - DNA, 20 bp, Artificial Sequence
  chemically synthesized
ggaaaaacctctctaatgat

SEQ ID NO: 19788 - DNA, 20 bp, Artificial Sequence
  chemically synthesized
tctctaatgatgagatgttt

SEQ ID NO: 19789 - DNA, 20 bp, Artificial Sequence
  chemically synthesized
gatgtttgagctgacacttg

SEQ ID NO: 19790 - DNA, 20 bp, Artificial Sequence
  chemically synthesized
atgtttgagctgacacttga

SEQ ID NO: 19791 - DNA, 20 bp, Artificial Sequence
  chemically synthesized
gctgacacttgaaggataaa

SEQ ID NO: 19792 - DNA, 20 bp, Artificial Sequence
  chemically synthesized
acttgaaggataaatagcta

SEQ ID NO: 19793 - DNA, 20 bp, Artificial Sequence
  chemically synthesized
cttgaaggataaatagctaa

SEQ ID NO: 19794 - DNA, 20 bp, Artificial Sequence
  chemically synthesized
ttgaaggataaatagctaaa

SEQ ID NO: 19795 - DNA, 20 bp, Artificial Sequence
  chemically synthesized
tgaaggataaatagctaaag

SEQ ID NO: 19796 - DNA, 20 bp, Artificial Sequence
  chemically synthesized
aaggataaatagctaaaggg

SEQ ID NO: 19797 - DNA, 20 bp, Artificial Sequence
  chemically synthesized
ataaatagctaaaggggaga

SEQ ID NO: 19798 - DNA, 20 bp, Artificial Sequence
  chemically synthesized
ggggagaaagcgttctatgt

SEQ ID NO: 19799 - DNA, 20 bp, Artificial Sequence
  chemically synthesized
ggagaaagcgttctatgtga

SEQ ID NO: 19800 - DNA, 20 bp, Artificial Sequence
  chemically synthesized
gtgagagaactatatatgcc

SEQ ID NO: 19801 - DNA, 20 bp, Artificial Sequence
  chemically synthesized
gaactatatatgccaagatg

SEQ ID NO: 19802 - DNA, 20 bp, Artificial Sequence
  chemically synthesized
ctatatatgccaagatgcag

SEQ ID NO: 19803 - DNA, 20 bp, Artificial Sequence
  chemically synthesized
gcagaagtgttctctgttcg

SEQ ID NO: 19804 - DNA, 20 bp, Artificial Sequence
  chemically synthesized
tgttctctgttcgaagatct

SEQ ID NO: 19805 - DNA, 20 bp, Artificial Sequence
  chemically synthesized
tctctgttcgaagatctgag

SEQ ID NO: 19806 - DNA, 20 bp, Artificial Sequence
  chemically synthesized
ctctgttcgaagatctgagc

SEQ ID NO: 19807 - DNA, 20 bp, Artificial Sequence
  chemically synthesized
tctgttcgaagatctgagcg

SEQ ID NO: 19808 - DNA, 20 bp, Artificial Sequence
  chemically synthesized
tcgaagatctgagcggggct

SEQ ID NO: 19809 - DNA, 20 bp, Artificial Sequence
  chemically synthesized
gaagatctgagcggggctca

SEQ ID NO: 19810 - DNA, 20 bp, Artificial Sequence
  chemically synthesized
agatctgagcggggctcaga

SEQ ID NO: 19811 - DNA, 20 bp, Artificial Sequence
  chemically synthesized
gatctgagcggggctcagag

SEQ ID NO: 19812 - DNA, 20 bp, Artificial Sequence
  chemically synthesized
atctgagcggggctcagaga

SEQ ID NO: 19813 - DNA, 20 bp, Artificial Sequence
  chemically synthesized
agcggggctcagagagggaa

SEQ ID NO: 19814 - DNA, 20 bp, Artificial Sequence
  chemically synthesized
gcggggctcagagagggaaa

SEQ ID NO: 19815 - DNA, 20 bp, Artificial Sequence
  chemically synthesized
ggggctcagagagggaaaag

SEQ ID NO: 19816 - DNA, 20 bp, Artificial Sequence
  chemically synthesized
ggctcagagagggaaaagga

SEQ ID NO: 19817 - DNA, 20 bp, Artificial Sequence
  chemically synthesized
gctcagagagggaaaaggag

SEQ ID NO: 19818 - DNA, 20 bp, Artificial Sequence
  chemically synthesized
tcagagagggaaaaggagag

SEQ ID NO: 19819 - DNA, 20 bp, Artificial Sequence
  chemically synthesized
agggaaaaggagaggagtat

SEQ ID NO: 19820 - DNA, 20 bp, Artificial Sequence
  chemically synthesized
ggaaaaggagaggagtatga

SEQ ID NO: 19821 - DNA, 20 bp, Artificial Sequence
  chemically synthesized
aaaggagaggagtatgagag

SEQ ID NO: 19822 - DNA, 20 bp, Artificial Sequence
  chemically synthesized
gagaggagtatgagagaaga

SEQ ID NO: 19823 - DNA, 20 bp, Artificial Sequence
  chemically synthesized
agaggagtatgagagaagat

SEQ ID NO: 19824 - DNA, 20 bp, Artificial Sequence
  chemically synthesized
aggagtatgagagaagatgg

SEQ ID NO: 19825 - DNA, 20 bp, Artificial Sequence
  chemically synthesized
gagtatgagagaagatggga

SEQ ID NO: 19826 - DNA, 20 bp, Artificial Sequence
  chemically synthesized
gagaagatgggagagacctg

SEQ ID NO: 19827 - DNA, 20 bp, Artificial Sequence
  chemically synthesized
agaagatgggagagacctgc

SEQ ID NO: 19828 - DNA, 20 bp, Artificial Sequence
  chemically synthesized
gaagatgggagagacctgca

SEQ ID NO: 19829 - DNA, 20 bp, Artificial Sequence
  chemically synthesized
tgggagagacctgcagggac

SEQ ID NO: 19830 - DNA, 20 bp, Artificial Sequence
  chemically synthesized
cctgcagggactagattgtg

SEQ ID NO: 19831 - DNA, 20 bp, Artificial Sequence
  chemically synthesized
agggactagattgtgaagct

SEQ ID NO: 19832 - DNA, 20 bp, Artificial Sequence
  chemically synthesized
gggactagattgtgaagctc

SEQ ID NO: 19833 - DNA, 20 bp, Artificial Sequence
  chemically synthesized
ggactagattgtgaagctca

SEQ ID NO: 19834 - DNA, 20 bp, Artificial Sequence
  chemically synthesized
gactagattgtgaagctcag

SEQ ID NO: 19835 - DNA, 20 bp, Artificial Sequence
  chemically synthesized
actagattgtgaagctcagg

SEQ ID NO: 19836 - DNA, 20 bp, Artificial Sequence
  chemically synthesized
tagattgtgaagctcagggg

SEQ ID NO: 19837 - DNA, 20 bp, Artificial Sequence
  chemically synthesized
tgaagctcagggggagttaa

SEQ ID NO: 19838 - DNA, 20 bp, Artificial Sequence
  chemically synthesized
cagggggagttaatagcctt

SEQ ID NO: 19839 - DNA, 20 bp, Artificial Sequence
  chemically synthesized
agggggagttaatagcctta

SEQ ID NO: 19840 - DNA, 20 bp, Artificial Sequence
  chemically synthesized
ggggagttaatagccttaag

SEQ ID NO: 19841 - DNA, 20 bp, Artificial Sequence
  chemically synthesized
gccttaaggagttttgtctc

SEQ ID NO: 19842 - DNA, 20 bp, Artificial Sequence
  chemically synthesized
ccttaaggagttttgtctcc

SEQ ID NO: 19843 - DNA, 20 bp, Artificial Sequence
  chemically synthesized
cttaaggagttttgtctcca

SEQ ID NO: 19844 - DNA, 20 bp, Artificial Sequence
  chemically synthesized
ccagggtatgaacaatgaat

SEQ ID NO: 19845 - DNA, 20 bp, Artificial Sequence
  chemically synthesized
cagggtatgaacaatgaatg

SEQ ID NO: 19846 - DNA, 20 bp, Artificial Sequence
  chemically synthesized
gggtatgaacaatgaatgag

SEQ ID NO: 19847 - DNA, 20 bp, Artificial Sequence
  chemically synthesized
agtcactgaaattctatcca

SEQ ID NO: 19848 - DNA, 20 bp, Artificial Sequence
  chemically synthesized
cactgaaattctatccacag

SEQ ID NO: 19849 - DNA, 20 bp, Artificial Sequence
  chemically synthesized
tgaaattctatccacagtag

SEQ ID NO: 19850 - DNA, 20 bp, Artificial Sequence
  chemically synthesized
gaaattctatccacagtagt

SEQ ID NO: 19851 - DNA, 20 bp, Artificial Sequence
  chemically synthesized
attctatccacagtagtggg

SEQ ID NO: 19852 - DNA, 20 bp, Artificial Sequence
  chemically synthesized
ccacagtagtgggaagtact

SEQ ID NO: 19853 - DNA, 20 bp, Artificial Sequence
  chemically synthesized
cagtagtgggaagtactaag

SEQ ID NO: 19854 - DNA, 20 bp, Artificial Sequence
  chemically synthesized
agtgggaagtactaagtagt

SEQ ID NO: 19855 - DNA, 20 bp, Artificial Sequence
  chemically synthesized
gtgggaagtactaagtagtc

SEQ ID NO: 19856 - DNA, 20 bp, Artificial Sequence
  chemically synthesized
ctaagtagtcaggtatgttt

SEQ ID NO: 19857 - DNA, 20 bp, Artificial Sequence
  chemically synthesized
agtagtcaggtatgttttgg

SEQ ID NO: 19858 - DNA, 20 bp, Artificial Sequence
  chemically synthesized
agtcaggtatgttttggaag

SEQ ID NO: 19859 - DNA, 20 bp, Artificial Sequence
  chemically synthesized
tttggaagaagcactgttac

SEQ ID NO: 19860 - DNA, 20 bp, Artificial Sequence
  chemically synthesized
aagaagcactgttaccagtt

SEQ ID NO: 19861 - DNA, 20 bp, Artificial Sequence
  chemically synthesized
agaagcactgttaccagttg

SEQ ID NO: 19862 - DNA, 20 bp, Artificial Sequence
  chemically synthesized
gaagcactgttaccagttga

SEQ ID NO: 19863 - DNA, 20 bp, Artificial Sequence
  chemically synthesized
agcactgttaccagttgagg

SEQ ID NO: 19864 - DNA, 20 bp, Artificial Sequence
  chemically synthesized
cactgttaccagttgaggga

SEQ ID NO: 19865 - DNA, 20 bp, Artificial Sequence
  chemically synthesized
actgttaccagttgagggag

SEQ ID NO: 19866 - DNA, 20 bp, Artificial Sequence
  chemically synthesized
tgttaccagttgagggagag

SEQ ID NO: 19867 - DNA, 20 bp, Artificial Sequence
  chemically synthesized
ttaccagttgagggagagga

SEQ ID NO: 19868 - DNA, 20 bp, Artificial Sequence
  chemically synthesized
taccagttgagggagaggag

SEQ ID NO: 19869 - DNA, 20 bp, Artificial Sequence
  chemically synthesized
ccagttgagggagaggagag

SEQ ID NO: 19870 - DNA, 20 bp, Artificial Sequence
  chemically synthesized
cagttgagggagaggagagg

SEQ ID NO: 19871 - DNA, 20 bp, Artificial Sequence
  chemically synthesized
agttgagggagaggagagga

SEQ ID NO: 19872 - DNA, 20 bp, Artificial Sequence
  chemically synthesized
ggagaggagaggagggaaat

SEQ ID NO: 19873 - DNA, 20 bp, Artificial Sequence
  chemically synthesized
agaggagggaaattagactg

SEQ ID NO: 19874 - DNA, 20 bp, Artificial Sequence
  chemically synthesized
aattagactgtggtgtgacc

SEQ ID NO: 19875 - DNA, 20 bp, Artificial Sequence
  chemically synthesized
attagactgtggtgtgaccc

SEQ ID NO: 19876 - DNA, 20 bp, Artificial Sequence
  chemically synthesized
gactgtggtgtgacccagga

SEQ ID NO: 19877 - DNA, 20 bp, Artificial Sequence
  chemically synthesized
gtggtgtgacccaggatgga

SEQ ID NO: 19878 - DNA, 20 bp, Artificial Sequence
  chemically synthesized
tggaaagttttgcccaaatg

SEQ ID NO: 19879 - DNA, 20 bp, Artificial Sequence
  chemically synthesized
ggaaagttttgcccaaatgt

SEQ ID NO: 19880 - DNA, 20 bp, Artificial Sequence
  chemically synthesized
gaaagttttgcccaaatgtg

SEQ ID NO: 19881 - DNA, 20 bp, Artificial Sequence
  chemically synthesized
aaagttttgcccaaatgtgg

SEQ ID NO: 19882 - DNA, 20 bp, Artificial Sequence
  chemically synthesized
tgtttactctctcctttgcc

SEQ ID NO: 19883 - DNA, 20 bp, Artificial Sequence
  chemically synthesized
gtttactctctcctttgccc

SEQ ID NO: 19884 - DNA, 20 bp, Artificial Sequence
  chemically synthesized
ttcttctgcacacacttgct

SEQ ID NO: 19885 - DNA, 20 bp, Artificial Sequence
  chemically synthesized
gctcagaacattacaaactc

SEQ ID NO: 19886 - DNA, 20 bp, Artificial Sequence
  chemically synthesized
tcagaacattacaaactctg

SEQ ID NO: 19887 - DNA, 20 bp, Artificial Sequence
  chemically synthesized
tctggagaaattaacatgtt

SEQ ID NO: 19888 - DNA, 20 bp, Artificial Sequence
  chemically synthesized
ctggagaaattaacatgtta

SEQ ID NO: 19889 - DNA, 20 bp, Artificial Sequence
  chemically synthesized
attaacatgttaaggatatt

SEQ ID NO: 19890 - DNA, 20 bp, Artificial Sequence
  chemically synthesized
ttaacatgttaaggatattt

SEQ ID NO: 19891 - DNA, 20 bp, Artificial Sequence
  chemically synthesized
gatatttaggatcattaaaa

SEQ ID NO: 19892 - DNA, 20 bp, Artificial Sequence
  chemically synthesized
aatgttgtcacacataatga

SEQ ID NO: 19893 - DNA, 20 bp, Artificial Sequence
  chemically synthesized
cacataatgaaagttaattt

SEQ ID NO: 19894 - DNA, 20 bp, Artificial Sequence
  chemically synthesized
aagttaatttaagaattgta

SEQ ID NO: 19895 - DNA, 20 bp, Artificial Sequence
  chemically synthesized
tttaagaattgtaaagactt

SEQ ID NO: 19896 - DNA, 20 bp, Artificial Sequence
  chemically synthesized
ttgtaaagacttgagcgatg

SEQ ID NO: 19897 - DNA, 20 bp, Artificial Sequence
  chemically synthesized
taaatgcttccctcttaaaa

SEQ ID NO: 19898 - DNA, 20 bp, Artificial Sequence
  chemically synthesized
gcttccctcttaaaatggac

SEQ ID NO: 19899 - DNA, 20 bp, Artificial Sequence
  chemically synthesized
gaaacaatttgtttttgcct

SEQ ID NO: 19900 - DNA, 20 bp, Artificial Sequence
  chemically synthesized
tgcctaagccaacgtattgc

SEQ ID NO: 19901 - DNA, 20 bp, Artificial Sequence
  chemically synthesized
taatttacctgcttcctcct

SEQ ID NO: 19902 - DNA, 20 bp, Artificial Sequence
  chemically synthesized
cactacacctctgaattaca

SEQ ID NO: 19903 - DNA, 20 bp, Artificial Sequence
  chemically synthesized
acctctgaattacatggtac

SEQ ID NO: 19904 - DNA, 20 bp, Artificial Sequence
  chemically synthesized
tctgaattacatggtacaag

SEQ ID NO: 19905 - DNA, 20 bp, Artificial Sequence
  chemically synthesized
attacatggtacaagtggca

SEQ ID NO: 19906 - DNA, 20 bp, Artificial Sequence
  chemically synthesized
ttacatggtacaagtggcac

SEQ ID NO: 19907 - DNA, 20 bp, Artificial Sequence
  chemically synthesized
tacatggtacaagtggcaca

SEQ ID NO: 19908 - DNA, 20 bp, Artificial Sequence
  chemically synthesized
atggtacaagtggcacaggg

SEQ ID NO: 19909 - DNA, 20 bp, Artificial Sequence
  chemically synthesized
aagtggcacagggaagaatt

SEQ ID NO: 19910 - DNA, 20 bp, Artificial Sequence
  chemically synthesized
cagggaagaattcagaaaac

SEQ ID NO: 19911 - DNA, 20 bp, Artificial Sequence
  chemically synthesized
gggaagaattcagaaaacta

SEQ ID NO: 19912 - DNA, 20 bp, Artificial Sequence
  chemically synthesized
aattcagaaaactagagtca

SEQ ID NO: 19913 - DNA, 20 bp, Artificial Sequence
  chemically synthesized
tcagaaaactagagtcaaag

SEQ ID NO: 19914 - DNA, 20 bp, Artificial Sequence
  chemically synthesized
aactagagtcaaagtggtta

SEQ ID NO: 19915 - DNA, 20 bp, Artificial Sequence
  chemically synthesized
tagagtcaaagtggttatgg

SEQ ID NO: 19916 - DNA, 20 bp, Artificial Sequence
  chemically synthesized
atggaagaaattataataat

SEQ ID NO: 19917 - DNA, 20 bp, Artificial Sequence
  chemically synthesized
taataatgagtccactcttc

SEQ ID NO: 19918 - DNA, 20 bp, Artificial Sequence
  chemically synthesized
aataatgagtccactcttct

SEQ ID NO: 19919 - DNA, 20 bp, Artificial Sequence
  chemically synthesized
atgagtccactcttctagga

SEQ ID NO: 19920 - DNA, 20 bp, Artificial Sequence
  chemically synthesized
tgagtccactcttctaggac

SEQ ID NO: 19921 - DNA, 20 bp, Artificial Sequence
  chemically synthesized
agtccactcttctaggacag

SEQ ID NO: 19922 - DNA, 20 bp, Artificial Sequence
  chemically synthesized
cttctaggacaggagttcta

SEQ ID NO: 19923 - DNA, 20 bp, Artificial Sequence
  chemically synthesized
ttctaggacaggagttctaa

SEQ ID NO: 19924 - DNA, 20 bp, Artificial Sequence
  chemically synthesized
aggacaggagttctaaaggt

SEQ ID NO: 19925 - DNA, 20 bp, Artificial Sequence
  chemically synthesized
ggacaggagttctaaaggtg

SEQ ID NO: 19926 - DNA, 20 bp, Artificial Sequence
  chemically synthesized
aaaggtgaggactttgatat

SEQ ID NO: 19927 - DNA, 20 bp, Artificial Sequence
  chemically synthesized
actttgatataagtgaactc

SEQ ID NO: 19928 - DNA, 20 bp, Artificial Sequence
  chemically synthesized
ctttgatataagtgaactca

SEQ ID NO: 19929 - DNA, 20 bp, Artificial Sequence
  chemically synthesized
ttgatataagtgaactcaag

SEQ ID NO: 19930 - DNA, 20 bp, Artificial Sequence
  chemically synthesized
tcaaggagtttctaaacctt

SEQ ID NO: 19931 - DNA, 20 bp, Artificial Sequence
  chemically synthesized
cagaaattatatctaaaaat

SEQ ID NO: 19932 - DNA, 20 bp, Artificial Sequence
  chemically synthesized
agaaattatatctaaaaatt

SEQ ID NO: 19933 - DNA, 20 bp, Artificial Sequence
  chemically synthesized
aaaaattaggtgcacgtata

SEQ ID NO: 19934 - DNA, 20 bp, Artificial Sequence
  chemically synthesized
aattaggtgcacgtatatag

SEQ ID NO: 19935 - DNA, 20 bp, Artificial Sequence
  chemically synthesized
atatagaagtacttttctct

SEQ ID NO: 19936 - DNA, 20 bp, Artificial Sequence
  chemically synthesized
tagaagtacttttctctgag

SEQ ID NO: 19937 - DNA, 20 bp, Artificial Sequence
  chemically synthesized
gaagtacttttctctgagaa

SEQ ID NO: 19938 - DNA, 20 bp, Artificial Sequence
  chemically synthesized
aagtacttttctctgagaag

SEQ ID NO: 19939 - DNA, 20 bp, Artificial Sequence
  chemically synthesized
agaggacttcacacttccat

SEQ ID NO: 19940 - DNA, 20 bp, Artificial Sequence
  chemically synthesized
acacttccatcagcttcctg

SEQ ID NO: 19941 - DNA, 20 bp, Artificial Sequence
  chemically synthesized
cacttccatcagcttcctga

SEQ ID NO: 19942 - DNA, 20 bp, Artificial Sequence
  chemically synthesized
aggcccctgtaattgccgta

SEQ ID NO: 19943 - DNA, 20 bp, Artificial Sequence
  chemically synthesized
cgtaaagaacaactgctcta

SEQ ID NO: 19944 - DNA, 20 bp, Artificial Sequence
  chemically synthesized
actgctctaaagtttaatac

SEQ ID NO: 19945 - DNA, 20 bp, Artificial Sequence
  chemically synthesized
ctgctctaaagtttaatact

SEQ ID NO: 19946 - DNA, 20 bp, Artificial Sequence
  chemically synthesized
aagtttaatactaggctact

SEQ ID NO: 19947 - DNA, 20 bp, Artificial Sequence
  chemically synthesized
tcggctgttttttgttaaca

SEQ ID NO: 19948 - DNA, 20 bp, Artificial Sequence
  chemically synthesized
gctgttttttgttaacacag

SEQ ID NO: 19949 - DNA, 20 bp, Artificial Sequence
  chemically synthesized
taacacagaagttttccaaa

SEQ ID NO: 19950 - DNA, 20 bp, Artificial Sequence
  chemically synthesized
ttttccaaatggcttttctc

SEQ ID NO: 19951 - DNA, 20 bp, Artificial Sequence
  chemically synthesized
ttccaaatggcttttctcta

SEQ ID NO: 19952 - DNA, 20 bp, Artificial Sequence
  chemically synthesized
tttctctagagcaaaatgaa

SEQ ID NO: 19953 - DNA, 20 bp, Artificial Sequence
  chemically synthesized
ttctctagagcaaaatgaaa

SEQ ID NO: 19954 - DNA, 20 bp, Artificial Sequence
  chemically synthesized
aaaaggatcccatccttccc

SEQ ID NO: 19955 - DNA, 20 bp, Artificial Sequence
  chemically synthesized
cctaccccccaccactttta

SEQ ID NO: 19956 - DNA, 20 bp, Artificial Sequence
  chemically synthesized
accacttttaaagatccatc

SEQ ID NO: 19957 - DNA, 20 bp, Artificial Sequence
  chemically synthesized
ccacttttaaagatccatca

SEQ ID NO: 19958 - DNA, 20 bp, Artificial Sequence
  chemically synthesized
tttaaagatccatcaaggcc

SEQ ID NO: 19959 - DNA, 20 bp, Artificial Sequence
  chemically synthesized
agatccatcaaggcccagca

SEQ ID NO: 19960 - DNA, 20 bp, Artificial Sequence
  chemically synthesized
ctgtaatctcaacacttttc

SEQ ID NO: 19961 - DNA, 20 bp, Artificial Sequence
  chemically synthesized
tgtaatctcaacacttttca

SEQ ID NO: 19962 - DNA, 20 bp, Artificial Sequence
  chemically synthesized
tctcaacacttttcaaggct

SEQ ID NO: 19963 - DNA, 20 bp, Artificial Sequence
  chemically synthesized
ctcaacacttttcaaggctg

SEQ ID NO: 19964 - DNA, 20 bp, Artificial Sequence
  chemically synthesized
aacacttttcaaggctgagg

SEQ ID NO: 19965 - DNA, 20 bp, Artificial Sequence
  chemically synthesized
acacttttcaaggctgaggt

SEQ ID NO: 19966 - DNA, 20 bp, Artificial Sequence
  chemically synthesized
acttttcaaggctgaggtgg

SEQ ID NO: 19967 - DNA, 20 bp, Artificial Sequence
  chemically synthesized
ctgaggtgggagaattgttt

SEQ ID NO: 19968 - DNA, 20 bp, Artificial Sequence
  chemically synthesized
tgggagaattgtttgagacc

SEQ ID NO: 19969 - DNA, 20 bp, Artificial Sequence
  chemically synthesized
ggagaattgtttgagaccaa

SEQ ID NO: 19970 - DNA, 20 bp, Artificial Sequence
  chemically synthesized
aattgtttgagaccaagagt

SEQ ID NO: 19971 - DNA, 20 bp, Artificial Sequence
  chemically synthesized
tgagaccaagagttggatac

SEQ ID NO: 19972 - DNA, 20 bp, Artificial Sequence
  chemically synthesized
ccaagagttggataccagcc

SEQ ID NO: 19973 - DNA, 20 bp, Artificial Sequence
  chemically synthesized
caagagttggataccagcct

SEQ ID NO: 19974 - DNA, 20 bp, Artificial Sequence
  chemically synthesized
aagagttggataccagcctg

SEQ ID NO: 19975 - DNA, 20 bp, Artificial Sequence
  chemically synthesized
ggataccagcctggggaaca

SEQ ID NO: 19976 - DNA, 20 bp, Artificial Sequence
  chemically synthesized
gataccagcctggggaacat

SEQ ID NO: 19977 - DNA, 20 bp, Artificial Sequence
  chemically synthesized
ataccagcctggggaacata

SEQ ID NO: 19978 - DNA, 20 bp, Artificial Sequence
  chemically synthesized
accagcctggggaacatagg

SEQ ID NO: 19979 - DNA, 20 bp, Artificial Sequence
  chemically synthesized
atagggagaccctgtttcta

SEQ ID NO: 19980 - DNA, 20 bp, Artificial Sequence
  chemically synthesized
agaaatttaaaaaatttctc

SEQ ID NO: 19981 - DNA, 20 bp, Artificial Sequence
  chemically synthesized
atttaaaaaatttctctagc

SEQ ID NO: 19982 - DNA, 20 bp, Artificial Sequence
  chemically synthesized
aaaatttctctagctggcca

SEQ ID NO: 19983 - DNA, 20 bp, Artificial Sequence
  chemically synthesized
aatttctctagctggccatg

SEQ ID NO: 19984 - DNA, 20 bp, Artificial Sequence
  chemically synthesized
atttctctagctggccatgg

SEQ ID NO: 19985 - DNA, 20 bp, Artificial Sequence
  chemically synthesized
gccatggaggctcacacctg

SEQ ID NO: 19986 - DNA, 20 bp, Artificial Sequence
  chemically synthesized
gaggctcacacctgtagtcc

SEQ ID NO: 19987 - DNA, 20 bp, Artificial Sequence
  chemically synthesized
acctgtagtcctagctacct

SEQ ID NO: 19988 - DNA, 20 bp, Artificial Sequence
  chemically synthesized
ctgtagtcctagctacctga

SEQ ID NO: 19989 - DNA, 20 bp, Artificial Sequence
  chemically synthesized
tgtagtcctagctacctgag

SEQ ID NO: 19990 - DNA, 20 bp, Artificial Sequence
  chemically synthesized
cctagctacctgagaggcta

SEQ ID NO: 19991 - DNA, 20 bp, Artificial Sequence
  chemically synthesized
agctacctgagaggctaaag

SEQ ID NO: 19992 - DNA, 20 bp, Artificial Sequence
  chemically synthesized
gctacctgagaggctaaagc

SEQ ID NO: 19993 - DNA, 20 bp, Artificial Sequence
  chemically synthesized
tacctgagaggctaaagcag

SEQ ID NO: 19994 - DNA, 20 bp, Artificial Sequence
  chemically synthesized
acctgagaggctaaagcagg

SEQ ID NO: 19995 - DNA, 20 bp, Artificial Sequence
  chemically synthesized
gcaggaggatcaattgaatc

SEQ ID NO: 19996 - DNA, 20 bp, Artificial Sequence
  chemically synthesized
caggaggatcaattgaatcc

SEQ ID NO: 19997 - DNA, 20 bp, Artificial Sequence
  chemically synthesized
tcaattgaatccaggcgttc

SEQ ID NO: 19998 - DNA, 20 bp, Artificial Sequence
  chemically synthesized
ttgaatccaggcgttctagt

SEQ ID NO: 19999 - DNA, 20 bp, Artificial Sequence
  chemically synthesized
tgaatccaggcgttctagtg

SEQ ID NO: 20000 - DNA, 20 bp, Artificial Sequence
  chemically synthesized
caggcgttctagtgaggctt

SEQ ID NO: 20001 - DNA, 20 bp, Artificial Sequence
  chemically synthesized
cgttctagtgaggcttcagt

SEQ ID NO: 20002 - DNA, 20 bp, Artificial Sequence
  chemically synthesized
ctagtgaggcttcagtgagc

SEQ ID NO: 20003 - DNA, 20 bp, Artificial Sequence
  chemically synthesized
aagattgcaccattgcactc

SEQ ID NO: 20004 - DNA, 20 bp, Artificial Sequence
  chemically synthesized
ttgcaccattgcactccagc

SEQ ID NO: 20005 - DNA, 20 bp, Artificial Sequence
  chemically synthesized
tgcaccattgcactccagcc

SEQ ID NO: 20006 - DNA, 20 bp, Artificial Sequence
  chemically synthesized
gcaccattgcactccagccg

SEQ ID NO: 20007 - DNA, 20 bp, Artificial Sequence
  chemically synthesized
ttgcactccagccggggtga

SEQ ID NO: 20008 - DNA, 20 bp, Artificial Sequence
  chemically synthesized
gcactccagccggggtgaca

SEQ ID NO: 20009 - DNA, 20 bp, Artificial Sequence
  chemically synthesized
tccagccggggtgacagagt

SEQ ID NO: 20010 - DNA, 20 bp, Artificial Sequence
  chemically synthesized
agaccctgtttcaaacaaac

SEQ ID NO: 20011 - DNA, 20 bp, Artificial Sequence
  chemically synthesized
tgtttcaaacaaacaagcaa

SEQ ID NO: 20012 - DNA, 20 bp, Artificial Sequence
  chemically synthesized
aacaaacaagcaaaagcaaa

SEQ ID NO: 20013 - DNA, 20 bp, Artificial Sequence
  chemically synthesized
acttactatcttgctgtcta

SEQ ID NO: 20014 - DNA, 20 bp, Artificial Sequence
  chemically synthesized
tatcttgctgtctacagcta

SEQ ID NO: 20015 - DNA, 20 bp, Artificial Sequence
  chemically synthesized
ttgctgtctacagctaaagt

SEQ ID NO: 20016 - DNA, 20 bp, Artificial Sequence
  chemically synthesized
taaagtcagactgcatgatt

SEQ ID NO: 20017 - DNA, 20 bp, Artificial Sequence
  chemically synthesized
attccaactccaccatcacc

SEQ ID NO: 20018 - DNA, 20 bp, Artificial Sequence
  chemically synthesized
ttccaactccaccatcacct

SEQ ID NO: 20019 - DNA, 20 bp, Artificial Sequence
  chemically synthesized
accatcacctgggtaatgtt

SEQ ID NO: 20020 - DNA, 20 bp, Artificial Sequence
  chemically synthesized
taatgttgagatttattaca

SEQ ID NO: 20021 - DNA, 20 bp, Artificial Sequence
  chemically synthesized
tacatagcatctctgtgcct

SEQ ID NO: 20022 - DNA, 20 bp, Artificial Sequence
  chemically synthesized
aataatgttgtgaaaattaa

SEQ ID NO: 20023 - DNA, 20 bp, Artificial Sequence
  chemically synthesized
gtgaaaattaaaagaaatac

SEQ ID NO: 20024 - DNA, 20 bp, Artificial Sequence
  chemically synthesized
aataccagttgtaaatcact

SEQ ID NO: 20025 - DNA, 20 bp, Artificial Sequence
  chemically synthesized
aaatcactcagaactgtgcc

SEQ ID NO: 20026 - DNA, 20 bp, Artificial Sequence
  chemically synthesized
agcatttaataaacactctg

SEQ ID NO: 20027 - DNA, 20 bp, Artificial Sequence
  chemically synthesized
gcatttaataaacactctgt

SEQ ID NO: 20028 - DNA, 20 bp, Artificial Sequence
  chemically synthesized
aataaacactctgtaggtat

SEQ ID NO: 20029 - DNA, 20 bp, Artificial Sequence
  chemically synthesized
ataaaatttattcataaaat

SEQ ID NO: 20030 - DNA, 20 bp, Artificial Sequence
  chemically synthesized
taaaatttattcataaaatg

SEQ ID NO: 20031 - DNA, 20 bp, Artificial Sequence
  chemically synthesized
aatttattcataaaatgagg

SEQ ID NO: 20032 - DNA, 20 bp, Artificial Sequence
  chemically synthesized
tattcataaaatgaggaagt

SEQ ID NO: 20033 - DNA, 20 bp, Artificial Sequence
  chemically synthesized
tagctcatgtattgtcatac

SEQ ID NO: 20034 - DNA, 20 bp, Artificial Sequence
  chemically synthesized
taccagctttcactttgaat

SEQ ID NO: 20035 - DNA, 20 bp, Artificial Sequence
  chemically synthesized
attgcatttttaaacacaaa

SEQ ID NO: 20036 - DNA, 20 bp, Artificial Sequence
  chemically synthesized
tgcatttttaaacacaaaaa

SEQ ID NO: 20037 - DNA, 20 bp, Artificial Sequence
  chemically synthesized
aaacacaaaaagagaaataa

SEQ ID NO: 20038 - DNA, 20 bp, Artificial Sequence
  chemically synthesized
aacacaaaaagagaaataat

SEQ ID NO: 20039 - DNA, 20 bp, Artificial Sequence
  chemically synthesized
catcaatgttacttcaatca

SEQ ID NO: 20040 - DNA, 20 bp, Artificial Sequence
  chemically synthesized
atcaatgttacttcaatcac

SEQ ID NO: 20041 - DNA, 20 bp, Artificial Sequence
  chemically synthesized
tacttcaatcacgggatgca

SEQ ID NO: 20042 - DNA, 20 bp, Artificial Sequence
  chemically synthesized
atcacgggatgcatagtaat

SEQ ID NO: 20043 - DNA, 20 bp, Artificial Sequence
  chemically synthesized
tcacgggatgcatagtaatt

SEQ ID NO: 20044 - DNA, 20 bp, Artificial Sequence
  chemically synthesized
ctttgccctaattactgatg

SEQ ID NO: 20045 - DNA, 20 bp, Artificial Sequence
  chemically synthesized
ccctaattactgatgtggat

SEQ ID NO: 20046 - DNA, 20 bp, Artificial Sequence
  chemically synthesized
aattactgatgtggataagc

SEQ ID NO: 20047 - DNA, 20 bp, Artificial Sequence
  chemically synthesized
tactgatgtggataagccgg

SEQ ID NO: 20048 - DNA, 20 bp, Artificial Sequence
  chemically synthesized
actgatgtggataagccggt

SEQ ID NO: 20049 - DNA, 20 bp, Artificial Sequence
  chemically synthesized
aagccggtgggccatgtcaa

SEQ ID NO: 20050 - DNA, 20 bp, Artificial Sequence
  chemically synthesized
ggccatgtcaatggcatctc

SEQ ID NO: 20051 - DNA, 20 bp, Artificial Sequence
  chemically synthesized
atctatgtaaaaactatgct

SEQ ID NO: 20052 - DNA, 20 bp, Artificial Sequence
  chemically synthesized
aaaaactatgcttggttgca

SEQ ID NO: 20053 - DNA, 20 bp, Artificial Sequence
  chemically synthesized
atgcttggttgcacagcttc

SEQ ID NO: 20054 - DNA, 20 bp, Artificial Sequence
  chemically synthesized
tgcttggttgcacagcttca

SEQ ID NO: 20055 - DNA, 20 bp, Artificial Sequence
  chemically synthesized
tggttgcacagcttcaagga

SEQ ID NO: 20056 - DNA, 20 bp, Artificial Sequence
  chemically synthesized
cacagcttcaaggaaagcac

SEQ ID NO: 20057 - DNA, 20 bp, Artificial Sequence
  chemically synthesized
ctactcacttccttttcatt

SEQ ID NO: 20058 - DNA, 20 bp, Artificial Sequence
  chemically synthesized
ttcattcagcatgctatgtc

SEQ ID NO: 20059 - DNA, 20 bp, Artificial Sequence
  chemically synthesized
tcattcagcatgctatgtct

SEQ ID NO: 20060 - DNA, 20 bp, Artificial Sequence
  chemically synthesized
cccctttcatataaaatatt

SEQ ID NO: 20061 - DNA, 20 bp, Artificial Sequence
  chemically synthesized
cctttcatataaaatatttg

SEQ ID NO: 20062 - DNA, 20 bp, Artificial Sequence
  chemically synthesized
aatatttggagctgccattg

SEQ ID NO: 20063 - DNA, 20 bp, Artificial Sequence
  chemically synthesized
atatttggagctgccattgt

SEQ ID NO: 20064 - DNA, 20 bp, Artificial Sequence
  chemically synthesized
tttggagctgccattgtagg

SEQ ID NO: 20065 - DNA, 20 bp, Artificial Sequence
  chemically synthesized
agctgccattgtaggtagtg

SEQ ID NO: 20066 - DNA, 20 bp, Artificial Sequence
  chemically synthesized
gctgccattgtaggtagtgc

SEQ ID NO: 20067 - DNA, 20 bp, Artificial Sequence
  chemically synthesized
gccattgtaggtagtgcagg

SEQ ID NO: 20068 - DNA, 20 bp, Artificial Sequence
  chemically synthesized
agtgcaggtggtcttgttca

SEQ ID NO: 20069 - DNA, 20 bp, Artificial Sequence
  chemically synthesized
ggtggtcttgttcaaagtgt

SEQ ID NO: 20070 - DNA, 20 bp, Artificial Sequence
  chemically synthesized
gagtatcacctcccactgcc

SEQ ID NO: 20071 - DNA, 20 bp, Artificial Sequence
  chemically synthesized
acctcccactgccaagactg

SEQ ID NO: 20072 - DNA, 20 bp, Artificial Sequence
  chemically synthesized
cagctgctttgattttaact

SEQ ID NO: 20073 - DNA, 20 bp, Artificial Sequence
  chemically synthesized
agctgctttgattttaactg

SEQ ID NO: 20074 - DNA, 20 bp, Artificial Sequence
  chemically synthesized
tttgattttaactgaggatc

SEQ ID NO: 20075 - DNA, 20 bp, Artificial Sequence
  chemically synthesized
ttttaactgaggatctagaa

SEQ ID NO: 20076 - DNA, 20 bp, Artificial Sequence
  chemically synthesized
ctgaggatctagaaaagtgc

SEQ ID NO: 20077 - DNA, 20 bp, Artificial Sequence
  chemically synthesized
tgaggatctagaaaagtgct

SEQ ID NO: 20078 - DNA, 20 bp, Artificial Sequence
  chemically synthesized
tatttgctgacctttgtcac

SEQ ID NO: 20079 - DNA, 20 bp, Artificial Sequence
  chemically synthesized
ttgctgacctttgtcacaag

SEQ ID NO: 20080 - DNA, 20 bp, Artificial Sequence
  chemically synthesized
gcacctaatctccttcctac

SEQ ID NO: 20081 - DNA, 20 bp, Artificial Sequence
  chemically synthesized
gccttataaaatgatgttct

SEQ ID NO: 20082 - DNA, 20 bp, Artificial Sequence
  chemically synthesized
ctgcttctgcaactgtgttt

SEQ ID NO: 20083 - DNA, 20 bp, Artificial Sequence
  chemically synthesized
tctgcaactgtgttttggaa

SEQ ID NO: 20084 - DNA, 20 bp, Artificial Sequence
  chemically synthesized
ctgcaactgtgttttggaac

SEQ ID NO: 20085 - DNA, 20 bp, Artificial Sequence
  chemically synthesized
gcaactgtgttttggaacag

SEQ ID NO: 20086 - DNA, 20 bp, Artificial Sequence
  chemically synthesized
caactgtgttttggaacagg

SEQ ID NO: 20087 - DNA, 20 bp, Artificial Sequence
  chemically synthesized
aactgtgttttggaacagga

SEQ ID NO: 20088 - DNA, 20 bp, Artificial Sequence
  chemically synthesized
gtgttttggaacaggagggt

SEQ ID NO: 20089 - DNA, 20 bp, Artificial Sequence
  chemically synthesized
ttggaacaggagggtgagat

SEQ ID NO: 20090 - DNA, 20 bp, Artificial Sequence
  chemically synthesized
gaacaggagggtgagattag

SEQ ID NO: 20091 - DNA, 20 bp, Artificial Sequence
  chemically synthesized
agtagccacacacactgaaa

SEQ ID NO: 20092 - DNA, 20 bp, Artificial Sequence
  chemically synthesized
aaatagtcatatgacttcca

SEQ ID NO: 20093 - DNA, 20 bp, Artificial Sequence
  chemically synthesized
ttccaaagtctgtaattttt

SEQ ID NO: 20094 - DNA, 20 bp, Artificial Sequence
  chemically synthesized
atttttaagcatatacaaaa

SEQ ID NO: 20095 - DNA, 20 bp, Artificial Sequence
  chemically synthesized
tatgtgtgtatacatatata

SEQ ID NO: 20096 - DNA, 20 bp, Artificial Sequence
  chemically synthesized
tgtgtgtatacatatatata

SEQ ID NO: 20097 - DNA, 20 bp, Artificial Sequence
  chemically synthesized
tgtgtatacatatatataga

SEQ ID NO: 20098 - DNA, 20 bp, Artificial Sequence
  chemically synthesized
tgtatacatatatatagaga

SEQ ID NO: 20099 - DNA, 20 bp, Artificial Sequence
  chemically synthesized
tatacatatatatagagaga

SEQ ID NO: 20100 - DNA, 20 bp, Artificial Sequence
  chemically synthesized
catatatatagagagagaga

SEQ ID NO: 20101 - DNA, 20 bp, Artificial Sequence
  chemically synthesized
tatatatagagagagagaca

SEQ ID NO: 20102 - DNA, 20 bp, Artificial Sequence
  chemically synthesized
tatatagagagagagacaga

SEQ ID NO: 20103 - DNA, 20 bp, Artificial Sequence
  chemically synthesized
tatagagagagagacagaga

SEQ ID NO: 20104 - DNA, 20 bp, Artificial Sequence
  chemically synthesized
gagagagagacagagagaga

SEQ ID NO: 20105 - DNA, 20 bp, Artificial Sequence
  chemically synthesized
agagagagacagagagagat

SEQ ID NO: 20106 - DNA, 20 bp, Artificial Sequence
  chemically synthesized
gagagagacagagagagatg

SEQ ID NO: 20107 - DNA, 20 bp, Artificial Sequence
  chemically synthesized
agagagacagagagagatgg

SEQ ID NO: 20108 - DNA, 20 bp, Artificial Sequence
  chemically synthesized
agagacagagagagatgggg

SEQ ID NO: 20109 - DNA, 20 bp, Artificial Sequence
  chemically synthesized
agacagagagagatggggga

SEQ ID NO: 20110 - DNA, 20 bp, Artificial Sequence
  chemically synthesized
acagagagagatgggggaga

SEQ ID NO: 20111 - DNA, 20 bp, Artificial Sequence
  chemically synthesized
agagagagatgggggagaga

SEQ ID NO: 20112 - DNA, 20 bp, Artificial Sequence
  chemically synthesized
agagagatgggggagagaga

SEQ ID NO: 20113 - DNA, 20 bp, Artificial Sequence
  chemically synthesized
agagatgggggagagagaga

SEQ ID NO: 20114 - DNA, 20 bp, Artificial Sequence
  chemically synthesized
agatgggggagagagagaga

SEQ ID NO: 20115 - DNA, 20 bp, Artificial Sequence
  chemically synthesized
atgggggagagagagagaga

SEQ ID NO: 20116 - DNA, 20 bp, Artificial Sequence
  chemically synthesized
gggagagagagagagagagc

SEQ ID NO: 20117 - DNA, 20 bp, Artificial Sequence
  chemically synthesized
gagagagagagagagagcga

SEQ ID NO: 20118 - DNA, 20 bp, Artificial Sequence
  chemically synthesized
gagagagagagagagcgaga

SEQ ID NO: 20119 - DNA, 20 bp, Artificial Sequence
  chemically synthesized
gagagagagagagcgagaga

SEQ ID NO: 20120 - DNA, 20 bp, Artificial Sequence
  chemically synthesized
agagagagagagcgagagag

SEQ ID NO: 20121 - DNA, 20 bp, Artificial Sequence
  chemically synthesized
gagagagagcgagagagagg

SEQ ID NO: 20122 - DNA, 20 bp, Artificial Sequence
  chemically synthesized
gagagagcgagagagaggca

SEQ ID NO: 20123 - DNA, 20 bp, Artificial Sequence
  chemically synthesized
gagcgagagagaggcagaga

SEQ ID NO: 20124 - DNA, 20 bp, Artificial Sequence
  chemically synthesized
gcgagagagaggcagagaaa

SEQ ID NO: 20125 - DNA, 20 bp, Artificial Sequence
  chemically synthesized
agagaaagagatccttattt

SEQ ID NO: 20126 - DNA, 20 bp, Artificial Sequence
  chemically synthesized
tattctatacttctttgaaa

SEQ ID NO: 20127 - DNA, 20 bp, Artificial Sequence
  chemically synthesized
ttctttgaaatagtgatttt

SEQ ID NO: 20128 - DNA, 20 bp, Artificial Sequence
  chemically synthesized
aatagtgatttttagtaaat

SEQ ID NO: 20129 - DNA, 20 bp, Artificial Sequence
  chemically synthesized
agtgatttttagtaaattgg

SEQ ID NO: 20130 - DNA, 20 bp, Artificial Sequence
  chemically synthesized
tagtaaattggcagtgttgc

SEQ ID NO: 20131 - DNA, 20 bp, Artificial Sequence
  chemically synthesized
agtgttgccagatgacgact

SEQ ID NO: 20132 - DNA, 20 bp, Artificial Sequence
  chemically synthesized
tgttgccagatgacgactta

SEQ ID NO: 20133 - DNA, 20 bp, Artificial Sequence
  chemically synthesized
cctcattgttatatgtacca

SEQ ID NO: 20134 - DNA, 20 bp, Artificial Sequence
  chemically synthesized
cattgttatatgtaccatgg

SEQ ID NO: 20135 - DNA, 20 bp, Artificial Sequence
  chemically synthesized
tggtagctcatcttttcttt

SEQ ID NO: 20136 - DNA, 20 bp, Artificial Sequence
  chemically synthesized
ggtagctcatcttttctttc

SEQ ID NO: 20137 - DNA, 20 bp, Artificial Sequence
  chemically synthesized
tcatcttttctttcaggtga

SEQ ID NO: 20138 - DNA, 20 bp, Artificial Sequence
  chemically synthesized
ctttgtcctcacgctaaaca

SEQ ID NO: 20139 - DNA, 20 bp, Artificial Sequence
  chemically synthesized
acatagcccccatgttgttc

SEQ ID NO: 20140 - DNA, 20 bp, Artificial Sequence
  chemically synthesized
catagcccccatgttgttcc

SEQ ID NO: 20141 - DNA, 20 bp, Artificial Sequence
  chemically synthesized
cccatgttgttccaggaaaa

SEQ ID NO: 20142 - DNA, 20 bp, Artificial Sequence
  chemically synthesized
catgttgttccaggaaaata

SEQ ID NO: 20143 - DNA, 20 bp, Artificial Sequence
  chemically synthesized
atagagatcaataaaataca

SEQ ID NO: 20144 - DNA, 20 bp, Artificial Sequence
  chemically synthesized
aatacaaagtacttgtttga

SEQ ID NO: 20145 - DNA, 20 bp, Artificial Sequence
  chemically synthesized
aaagtacttgtttgaaagtg

SEQ ID NO: 20146 - DNA, 20 bp, Artificial Sequence
  chemically synthesized
aagtacttgtttgaaagtga

SEQ ID NO: 20147 - DNA, 20 bp, Artificial Sequence
  chemically synthesized
cttgtttgaaagtgaaggtt

SEQ ID NO: 20148 - DNA, 20 bp, Artificial Sequence
  chemically synthesized
aaattcaatgacctacgctg

SEQ ID NO: 20149 - DNA, 20 bp, Artificial Sequence
  chemically synthesized
gatcattcattaatgatatt

SEQ ID NO: 20150 - DNA, 20 bp, Artificial Sequence
  chemically synthesized
agtattttcttttttaatgt

SEQ ID NO: 20151 - DNA, 20 bp, Artificial Sequence
  chemically synthesized
agaataaaaccatttatttg

SEQ ID NO: 20152 - DNA, 20 bp, Artificial Sequence
  chemically synthesized
tatgtgtatgtaaatctcct

SEQ ID NO: 20153 - DNA, 20 bp, Artificial Sequence
  chemically synthesized
ttatacctcaaatatgaaaa

SEQ ID NO: 20154 - DNA, 20 bp, Artificial Sequence
  chemically synthesized
tatacctcaaatatgaaaat

SEQ ID NO: 20155 - DNA, 20 bp, Artificial Sequence
  chemically synthesized
tcttgcattcacttatattc

SEQ ID NO: 20156 - DNA, 20 bp, Artificial Sequence
  chemically synthesized
cacttatattctagcttgtt

SEQ ID NO: 20157 - DNA, 20 bp, Artificial Sequence
  chemically synthesized
cttatattctagcttgttaa

SEQ ID NO: 20158 - DNA, 20 bp, Artificial Sequence
  chemically synthesized
tatattctagcttgttaaga

SEQ ID NO: 20159 - DNA, 20 bp, Artificial Sequence
  chemically synthesized
attctagcttgttaagagag

SEQ ID NO: 20160 - DNA, 20 bp, Artificial Sequence
  chemically synthesized
agcttgttaagagagaagtt

SEQ ID NO: 20161 - DNA, 20 bp, Artificial Sequence
  chemically synthesized
gcttgttaagagagaagttt

SEQ ID NO: 20162 - DNA, 20 bp, Artificial Sequence
  chemically synthesized
cttgttaagagagaagtttg

SEQ ID NO: 20163 - DNA, 20 bp, Artificial Sequence
  chemically synthesized
ggcaaaatgtgctttataaa

SEQ ID NO: 20164 - DNA, 20 bp, Artificial Sequence
  chemically synthesized
ctttataaatagtaaaaact

SEQ ID NO: 20165 - DNA, 20 bp, Artificial Sequence
  chemically synthesized
tttataaatagtaaaaactg

SEQ ID NO: 20166 - DNA, 20 bp, Artificial Sequence
  chemically synthesized
gtaaaaactgaggtaaacta

SEQ ID NO: 20167 - DNA, 20 bp, Artificial Sequence
  chemically synthesized
ctgaggtaaactatagcaca

SEQ ID NO: 20168 - DNA, 20 bp, Artificial Sequence
  chemically synthesized
cacaaagtgtgctatataaa

SEQ ID NO: 20169 - DNA, 20 bp, Artificial Sequence
  chemically synthesized
ctatataaacagtaaaaacc

SEQ ID NO: 20170 - DNA, 20 bp, Artificial Sequence
  chemically synthesized
tatataaacagtaaaaaccg

SEQ ID NO: 20171 - DNA, 20 bp, Artificial Sequence
  chemically synthesized
taaaaaccgaggtaaaaata

SEQ ID NO: 20172 - DNA, 20 bp, Artificial Sequence
  chemically synthesized
aaaaaccgaggtaaaaatat

SEQ ID NO: 20173 - DNA, 20 bp, Artificial Sequence
  chemically synthesized
aaaaccgaggtaaaaatatg

SEQ ID NO: 20174 - DNA, 20 bp, Artificial Sequence
  chemically synthesized
aaccgaggtaaaaatatggg

SEQ ID NO: 20175 - DNA, 20 bp, Artificial Sequence
  chemically synthesized
accgaggtaaaaatatgggg

SEQ ID NO: 20176 - DNA, 20 bp, Artificial Sequence
  chemically synthesized
aaaatatggggaggacaaaa

SEQ ID NO: 20177 - DNA, 20 bp, Artificial Sequence
  chemically synthesized
aaatatggggaggacaaaaa

SEQ ID NO: 20178 - DNA, 20 bp, Artificial Sequence
  chemically synthesized
aatatggggaggacaaaaaa

SEQ ID NO: 20179 - DNA, 20 bp, Artificial Sequence
  chemically synthesized
aggacaaaaaagggctaaaa

SEQ ID NO: 20180 - DNA, 20 bp, Artificial Sequence
  chemically synthesized
aaaaagggctaaaatggtgt

SEQ ID NO: 20181 - DNA, 20 bp, Artificial Sequence
  chemically synthesized
ctaaaatggtgttggaatat

SEQ ID NO: 20182 - DNA, 20 bp, Artificial Sequence
  chemically synthesized
tggtgttggaatataagaaa

SEQ ID NO: 20183 - DNA, 20 bp, Artificial Sequence
  chemically synthesized
tgttggaatataagaaatag

SEQ ID NO: 20184 - DNA, 20 bp, Artificial Sequence
  chemically synthesized
aatataagaaatagcagtaa

SEQ ID NO: 20185 - DNA, 20 bp, Artificial Sequence
  chemically synthesized
ataagaaatagcagtaaaag

SEQ ID NO: 20186 - DNA, 20 bp, Artificial Sequence
  chemically synthesized
gcagtaaaagaagctcctca

SEQ ID NO: 20187 - DNA, 20 bp, Artificial Sequence
  chemically synthesized
taaaagaagctcctcacagc

SEQ ID NO: 20188 - DNA, 20 bp, Artificial Sequence
  chemically synthesized
agaagctcctcacagcaaga

SEQ ID NO: 20189 - DNA, 20 bp, Artificial Sequence
  chemically synthesized
ctcctcacagcaagacagta

SEQ ID NO: 20190 - DNA, 20 bp, Artificial Sequence
  chemically synthesized
tcctcacagcaagacagtac

SEQ ID NO: 20191 - DNA, 20 bp, Artificial Sequence
  chemically synthesized
cctcacagcaagacagtaca

SEQ ID NO: 20192 - DNA, 20 bp, Artificial Sequence
  chemically synthesized
agacagtacagggaaatgtc

SEQ ID NO: 20193 - DNA, 20 bp, Artificial Sequence
  chemically synthesized
acagtacagggaaatgtctg

SEQ ID NO: 20194 - DNA, 20 bp, Artificial Sequence
  chemically synthesized
cagtacagggaaatgtctgg

SEQ ID NO: 20195 - DNA, 20 bp, Artificial Sequence
  chemically synthesized
agtacagggaaatgtctgga

SEQ ID NO: 20196 - DNA, 20 bp, Artificial Sequence
  chemically synthesized
gggaaatgtctggagggaca

SEQ ID NO: 20197 - DNA, 20 bp, Artificial Sequence
  chemically synthesized
gacaaagatttacttacaat

SEQ ID NO: 20198 - DNA, 20 bp, Artificial Sequence
  chemically synthesized
acaaagatttacttacaatc

SEQ ID NO: 20199 - DNA, 20 bp, Artificial Sequence
  chemically synthesized
aatcaggcctcaaccaatat

SEQ ID NO: 20200 - DNA, 20 bp, Artificial Sequence
  chemically synthesized
tatgacgtgtttatatgtat

SEQ ID NO: 20201 - DNA, 20 bp, Artificial Sequence
  chemically synthesized
atgacgtgtttatatgtatc

SEQ ID NO: 20202 - DNA, 20 bp, Artificial Sequence
  chemically synthesized
gcatataatgtataatgatc

SEQ ID NO: 20203 - DNA, 20 bp, Artificial Sequence
  chemically synthesized
ataatgtataatgatcaagt

SEQ ID NO: 20204 - DNA, 20 bp, Artificial Sequence
  chemically synthesized
taatgtataatgatcaagtc

SEQ ID NO: 20205 - DNA, 20 bp, Artificial Sequence
  chemically synthesized
taatgatcaagtcaggtatt

SEQ ID NO: 20206 - DNA, 20 bp, Artificial Sequence
  chemically synthesized
aatgatcaagtcaggtattt

SEQ ID NO: 20207 - DNA, 20 bp, Artificial Sequence
  chemically synthesized
atgatcaagtcaggtatttg

SEQ ID NO: 20208 - DNA, 20 bp, Artificial Sequence
  chemically synthesized
tttggggtattcatcacctc

SEQ ID NO: 20209 - DNA, 20 bp, Artificial Sequence
  chemically synthesized
tatttatcgtttctatgtgt

SEQ ID NO: 20210 - DNA, 20 bp, Artificial Sequence
  chemically synthesized
atttatcgtttctatgtgtt

SEQ ID NO: 20211 - DNA, 20 bp, Artificial Sequence
  chemically synthesized
ctatgtgttaggaacatttc

SEQ ID NO: 20212 - DNA, 20 bp, Artificial Sequence
  chemically synthesized
cctactttgctattgaacat

SEQ ID NO: 20213 - DNA, 20 bp, Artificial Sequence
  chemically synthesized
tacacacctttctctacctc

SEQ ID NO: 20214 - DNA, 20 bp, Artificial Sequence
  chemically synthesized
ctacatgatattaacttttt

SEQ ID NO: 20215 - DNA, 20 bp, Artificial Sequence
  chemically synthesized
cttttttagctcccacatat

SEQ ID NO: 20216 - DNA, 20 bp, Artificial Sequence
  chemically synthesized
tttagctcccacatatcagt

SEQ ID NO: 20217 - DNA, 20 bp, Artificial Sequence
  chemically synthesized
aaaatttgtctttctatgcc

SEQ ID NO: 20218 - DNA, 20 bp, Artificial Sequence
  chemically synthesized
tcgtttaacataatgacttc

SEQ ID NO: 20219 - DNA, 20 bp, Artificial Sequence
  chemically synthesized
gaaatgattttatatttgta

SEQ ID NO: 20220 - DNA, 20 bp, Artificial Sequence
  chemically synthesized
tttcttcattcatccattga

SEQ ID NO: 20221 - DNA, 20 bp, Artificial Sequence
  chemically synthesized
ttcatccattgatggacact

SEQ ID NO: 20222 - DNA, 20 bp, Artificial Sequence
  chemically synthesized
tcatccattgatggacactt

SEQ ID NO: 20223 - DNA, 20 bp, Artificial Sequence
  chemically synthesized
gtgaatcgtgctgcaataaa

SEQ ID NO: 20224 - DNA, 20 bp, Artificial Sequence
  chemically synthesized
tcgtgctgcaataaacagtg

SEQ ID NO: 20225 - DNA, 20 bp, Artificial Sequence
  chemically synthesized
tgcaataaacagtgtggtac

SEQ ID NO: 20226 - DNA, 20 bp, Artificial Sequence
  chemically synthesized
tattctgaattcttttcctt

SEQ ID NO: 20227 - DNA, 20 bp, Artificial Sequence
  chemically synthesized
ttttcctttggataaatacc

SEQ ID NO: 20228 - DNA, 20 bp, Artificial Sequence
  chemically synthesized
ttggataaatacccagtaat

SEQ ID NO: 20229 - DNA, 20 bp, Artificial Sequence
  chemically synthesized
atacccagtaataagattgc

SEQ ID NO: 20230 - DNA, 20 bp, Artificial Sequence
  chemically synthesized
aagattgctggatcttatga

SEQ ID NO: 20231 - DNA, 20 bp, Artificial Sequence
  chemically synthesized
tcttatgatagttcaatttt

SEQ ID NO: 20232 - DNA, 20 bp, Artificial Sequence
  chemically synthesized
tagttcaatttttagctttt

SEQ ID NO: 20233 - DNA, 20 bp, Artificial Sequence
  chemically synthesized
aatctacatattgttttcca

SEQ ID NO: 20234 - DNA, 20 bp, Artificial Sequence
  chemically synthesized
ctacatattgttttccatag

SEQ ID NO: 20235 - DNA, 20 bp, Artificial Sequence
  chemically synthesized
ctaatttgcatgcttaccaa

SEQ ID NO: 20236 - DNA, 20 bp, Artificial Sequence
  chemically synthesized
tgcttaccaatagtgcctac

SEQ ID NO: 20237 - DNA, 20 bp, Artificial Sequence
  chemically synthesized
cttttccttcacatccttgc

SEQ ID NO: 20238 - DNA, 20 bp, Artificial Sequence
  chemically synthesized
taaatcatgatgattctaac

SEQ ID NO: 20239 - DNA, 20 bp, Artificial Sequence
  chemically synthesized
atgatgattctaactggcat

SEQ ID NO: 20240 - DNA, 20 bp, Artificial Sequence
  chemically synthesized
cataagatgatatctcattg

SEQ ID NO: 20241 - DNA, 20 bp, Artificial Sequence
  chemically synthesized
atttgcatttctctgatgat

SEQ ID NO: 20242 - DNA, 20 bp, Artificial Sequence
  chemically synthesized
ctctgatgattagtaatgtt

SEQ ID NO: 20243 - DNA, 20 bp, Artificial Sequence
  chemically synthesized
tcctttgccaattttttaat

SEQ ID NO: 20244 - DNA, 20 bp, Artificial Sequence
  chemically synthesized
ttatttgtttttccactgtt

SEQ ID NO: 20245 - DNA, 20 bp, Artificial Sequence
  chemically synthesized
tttccactgttgagttgttt

SEQ ID NO: 20246 - DNA, 20 bp, Artificial Sequence
  chemically synthesized
tttgagtttcttatatattc

SEQ ID NO: 20247 - DNA, 20 bp, Artificial Sequence
  chemically synthesized
tgagtttcttatatattctg

SEQ ID NO: 20248 - DNA, 20 bp, Artificial Sequence
  chemically synthesized
aaatattttctcgcattcaa

SEQ ID NO: 20249 - DNA, 20 bp, Artificial Sequence
  chemically synthesized
tgattgtttcctttactgtg

SEQ ID NO: 20250 - DNA, 20 bp, Artificial Sequence
  chemically synthesized
tttactgtgcagatgtattt

SEQ ID NO: 20251 - DNA, 20 bp, Artificial Sequence
  chemically synthesized
agatgtattttagcttaata

SEQ ID NO: 20252 - DNA, 20 bp, Artificial Sequence
  chemically synthesized
cttttgttgcctgtgctttt

SEQ ID NO: 20253 - DNA, 20 bp, Artificial Sequence
  chemically synthesized
ttttgttgcctgtgcttttg

SEQ ID NO: 20254 - DNA, 20 bp, Artificial Sequence
  chemically synthesized
tgcctgtgcttttgaggtct

SEQ ID NO: 20255 - DNA, 20 bp, Artificial Sequence
  chemically synthesized
ggccataaaatctttgccca

SEQ ID NO: 20256 - DNA, 20 bp, Artificial Sequence
  chemically synthesized
ttgcccaaagccatgtcttg

SEQ ID NO: 20257 - DNA, 20 bp, Artificial Sequence
  chemically synthesized
gtctcccttatgttttcttt

SEQ ID NO: 20258 - DNA, 20 bp, Artificial Sequence
  chemically synthesized
tcccttatgttttcttttag

SEQ ID NO: 20259 - DNA, 20 bp, Artificial Sequence
  chemically synthesized
gttttcttttagtagtttta

SEQ ID NO: 20260 - DNA, 20 bp, Artificial Sequence
  chemically synthesized
tttagtagttttatagtttt

SEQ ID NO: 20261 - DNA, 20 bp, Artificial Sequence
  chemically synthesized
tagttttaagttttatattt

SEQ ID NO: 20262 - DNA, 20 bp, Artificial Sequence
  chemically synthesized
ttaagtctttaatccatctt

SEQ ID NO: 20263 - DNA, 20 bp, Artificial Sequence
  chemically synthesized
aagtctttaatccatcttga

SEQ ID NO: 20264 - DNA, 20 bp, Artificial Sequence
  chemically synthesized
tcttgagagtacgttttata

SEQ ID NO: 20265 - DNA, 20 bp, Artificial Sequence
  chemically synthesized
acgttttatatggcaataaa

SEQ ID NO: 20266 - DNA, 20 bp, Artificial Sequence
  chemically synthesized
cgttttatatggcaataaat

SEQ ID NO: 20267 - DNA, 20 bp, Artificial Sequence
  chemically synthesized
gttttatatggcaataaata

SEQ ID NO: 20268 - DNA, 20 bp, Artificial Sequence
  chemically synthesized
ttttatatggcaataaatag

SEQ ID NO: 20269 - DNA, 20 bp, Artificial Sequence
  chemically synthesized
gcaataaataggggttgtat

SEQ ID NO: 20270 - DNA, 20 bp, Artificial Sequence
  chemically synthesized
caataaataggggttgtatt

SEQ ID NO: 20271 - DNA, 20 bp, Artificial Sequence
  chemically synthesized
catttttgcatctattgtac

SEQ ID NO: 20272 - DNA, 20 bp, Artificial Sequence
  chemically synthesized
atttttgcatctattgtaca

SEQ ID NO: 20273 - DNA, 20 bp, Artificial Sequence
  chemically synthesized
tttttgcatctattgtacaa

SEQ ID NO: 20274 - DNA, 20 bp, Artificial Sequence
  chemically synthesized
ttttgcatctattgtacaag

SEQ ID NO: 20275 - DNA, 20 bp, Artificial Sequence
  chemically synthesized
catctattgtacaaggggtt

SEQ ID NO: 20276 - DNA, 20 bp, Artificial Sequence
  chemically synthesized
tcttgatttgattctccatt

SEQ ID NO: 20277 - DNA, 20 bp, Artificial Sequence
  chemically synthesized
attctccatttggttgctgt

SEQ ID NO: 20278 - DNA, 20 bp, Artificial Sequence
  chemically synthesized
atttggttgctgttggtgta

SEQ ID NO: 20279 - DNA, 20 bp, Artificial Sequence
  chemically synthesized
tggttgctgttggtgtatag

SEQ ID NO: 20280 - DNA, 20 bp, Artificial Sequence
  chemically synthesized
gttgctgttggtgtatagaa

SEQ ID NO: 20281 - DNA, 20 bp, Artificial Sequence
  chemically synthesized
gtgtgcattcatcttgtatc

SEQ ID NO: 20282 - DNA, 20 bp, Artificial Sequence
  chemically synthesized
actttgctgaattattttat

SEQ ID NO: 20283 - DNA, 20 bp, Artificial Sequence
  chemically synthesized
ctgaattattttatcagttc

SEQ ID NO: 20284 - DNA, 20 bp, Artificial Sequence
  chemically synthesized
tgaattattttatcagttct

SEQ ID NO: 20285 - DNA, 20 bp, Artificial Sequence
  chemically synthesized
aattattttatcagttctag

SEQ ID NO: 20286 - DNA, 20 bp, Artificial Sequence
  chemically synthesized
tatcagttctaggagctttc

SEQ ID NO: 20287 - DNA, 20 bp, Artificial Sequence
  chemically synthesized
tcagttctaggagctttctg

SEQ ID NO: 20288 - DNA, 20 bp, Artificial Sequence
  chemically synthesized
cagttctaggagctttctgg

SEQ ID NO: 20289 - DNA, 20 bp, Artificial Sequence
  chemically synthesized
gttctaggagctttctggag

SEQ ID NO: 20290 - DNA, 20 bp, Artificial Sequence
  chemically synthesized
gagctttctggaggagtctt

SEQ ID NO: 20291 - DNA, 20 bp, Artificial Sequence
  chemically synthesized
agctttctggaggagtcttt

SEQ ID NO: 20292 - DNA, 20 bp, Artificial Sequence
  chemically synthesized
gctttctggaggagtcttta

SEQ ID NO: 20293 - DNA, 20 bp, Artificial Sequence
  chemically synthesized
gaggagtctttagggtttta

SEQ ID NO: 20294 - DNA, 20 bp, Artificial Sequence
  chemically synthesized
aggagtctttagggttttaa

SEQ ID NO: 20295 - DNA, 20 bp, Artificial Sequence
  chemically synthesized
aaggtaaatgatcatatcat

SEQ ID NO: 20296 - DNA, 20 bp, Artificial Sequence
  chemically synthesized
atgatcatatcatcagcaaa

SEQ ID NO: 20297 - DNA, 20 bp, Artificial Sequence
  chemically synthesized
atatcatcagcaaacagtga

SEQ ID NO: 20298 - DNA, 20 bp, Artificial Sequence
  chemically synthesized
tttgttttgtctgattgccc

SEQ ID NO: 20299 - DNA, 20 bp, Artificial Sequence
  chemically synthesized
ttttgtctgattgccctggc

SEQ ID NO: 20300 - DNA, 20 bp, Artificial Sequence
  chemically synthesized
tttgtctgattgccctggct

SEQ ID NO: 20301 - DNA, 20 bp, Artificial Sequence
  chemically synthesized
attgccctggctaggacttc

SEQ ID NO: 20302 - DNA, 20 bp, Artificial Sequence
  chemically synthesized
ggacttccagtactatgttg

SEQ ID NO: 20303 - DNA, 20 bp, Artificial Sequence
  chemically synthesized
acttccagtactatgttgaa

SEQ ID NO: 20304 - DNA, 20 bp, Artificial Sequence
  chemically synthesized
cttccagtactatgttgaag

SEQ ID NO: 20305 - DNA, 20 bp, Artificial Sequence
  chemically synthesized
tccagtactatgttgaagag

SEQ ID NO: 20306 - DNA, 20 bp, Artificial Sequence
  chemically synthesized
agtactatgttgaagaggag

SEQ ID NO: 20307 - DNA, 20 bp, Artificial Sequence
  chemically synthesized
ctatgttgaagaggagtggt

SEQ ID NO: 20308 - DNA, 20 bp, Artificial Sequence
  chemically synthesized
atgttgaagaggagtggtga

SEQ ID NO: 20309 - DNA, 20 bp, Artificial Sequence
  chemically synthesized
ttgaagaggagtggtgagag

SEQ ID NO: 20310 - DNA, 20 bp, Artificial Sequence
  chemically synthesized
tgaagaggagtggtgagagt

SEQ ID NO: 20311 - DNA, 20 bp, Artificial Sequence
  chemically synthesized
tgggcatccttgtcttgttc

SEQ ID NO: 20312 - DNA, 20 bp, Artificial Sequence
  chemically synthesized
ccttgtcttgttccagttct

SEQ ID NO: 20313 - DNA, 20 bp, Artificial Sequence
  chemically synthesized
ttgtcttgttccagttctca

SEQ ID NO: 20314 - DNA, 20 bp, Artificial Sequence
  chemically synthesized
tgtcttgttccagttctcag

SEQ ID NO: 20315 - DNA, 20 bp, Artificial Sequence
  chemically synthesized
gtcttgttccagttctcaga

SEQ ID NO: 20316 - DNA, 20 bp, Artificial Sequence
  chemically synthesized
ttccccattcaatattatgt

SEQ ID NO: 20317 - DNA, 20 bp, Artificial Sequence
  chemically synthesized
attcaatattatgttggctg

SEQ ID NO: 20318 - DNA, 20 bp, Artificial Sequence
  chemically synthesized
ttcaatattatgttggctgt

SEQ ID NO: 20319 - DNA, 20 bp, Artificial Sequence
  chemically synthesized
tgttggctgtgggtttgtca

SEQ ID NO: 20320 - DNA, 20 bp, Artificial Sequence
  chemically synthesized
ggctgtgggtttgtcacaga

SEQ ID NO: 20321 - DNA, 20 bp, Artificial Sequence
  chemically synthesized
cagatggcttttattacact

SEQ ID NO: 20322 - DNA, 20 bp, Artificial Sequence
  chemically synthesized
agatggcttttattacactg

SEQ ID NO: 20323 - DNA, 20 bp, Artificial Sequence
  chemically synthesized
tcttgtatgctgattttgct

SEQ ID NO: 20324 - DNA, 20 bp, Artificial Sequence
  chemically synthesized
ttttaatcataaatgtatgc

SEQ ID NO: 20325 - DNA, 20 bp, Artificial Sequence
  chemically synthesized
atgctttttctgcatctatt

SEQ ID NO: 20326 - DNA, 20 bp, Artificial Sequence
  chemically synthesized
tgtttttaaatctgtttatg

SEQ ID NO: 20327 - DNA, 20 bp, Artificial Sequence
  chemically synthesized
gtatcacacttattgacttg

SEQ ID NO: 20328 - DNA, 20 bp, Artificial Sequence
  chemically synthesized
tcaaaccaaccctgcatccc

SEQ ID NO: 20329 - DNA, 20 bp, Artificial Sequence
  chemically synthesized
ccaaccctgcatccctggca

SEQ ID NO: 20330 - DNA, 20 bp, Artificial Sequence
  chemically synthesized
gcatggaacctgcttgatca

SEQ ID NO: 20331 - DNA, 20 bp, Artificial Sequence
  chemically synthesized
tggaacctgcttgatcatgg

SEQ ID NO: 20332 - DNA, 20 bp, Artificial Sequence
  chemically synthesized
ttttgttatgttgttgaatt

SEQ ID NO: 20333 - DNA, 20 bp, Artificial Sequence
  chemically synthesized
tgttgttgaatttggttatc

SEQ ID NO: 20334 - DNA, 20 bp, Artificial Sequence
  chemically synthesized
tggttatctagtattttgtt

SEQ ID NO: 20335 - DNA, 20 bp, Artificial Sequence
  chemically synthesized
ggttatctagtattttgtta

SEQ ID NO: 20336 - DNA, 20 bp, Artificial Sequence
  chemically synthesized
tagtattttgttaaggattt

SEQ ID NO: 20337 - DNA, 20 bp, Artificial Sequence
  chemically synthesized
ttttagcatctatgttcatc

SEQ ID NO: 20338 - DNA, 20 bp, Artificial Sequence
  chemically synthesized
tttagcatctatgttcatca

SEQ ID NO: 20339 - DNA, 20 bp, Artificial Sequence
  chemically synthesized
tctatgttcatcaaggctat

SEQ ID NO: 20340 - DNA, 20 bp, Artificial Sequence
  chemically synthesized
tcatcaaggctatcagtctg

SEQ ID NO: 20341 - DNA, 20 bp, Artificial Sequence
  chemically synthesized
cagtctgtagttttcttttt

SEQ ID NO: 20342 - DNA, 20 bp, Artificial Sequence
  chemically synthesized
tttttggttatgtccttccc

SEQ ID NO: 20343 - DNA, 20 bp, Artificial Sequence
  chemically synthesized
gttatgtccttccctggttt

SEQ ID NO: 20344 - DNA, 20 bp, Artificial Sequence
  chemically synthesized
ccctggttttggtgtgatgc

SEQ ID NO: 20345 - DNA, 20 bp, Artificial Sequence
  chemically synthesized
ttggtgtgatgctggcttca

SEQ ID NO: 20346 - DNA, 20 bp, Artificial Sequence
  chemically synthesized
gctggcttcatagaatgaat

SEQ ID NO: 20347 - DNA, 20 bp, Artificial Sequence
  chemically synthesized
ctggcttcatagaatgaatt

SEQ ID NO: 20348 - DNA, 20 bp, Artificial Sequence
  chemically synthesized
tggcttcatagaatgaatta

SEQ ID NO: 20349 - DNA, 20 bp, Artificial Sequence
  chemically synthesized
cttcatagaatgaattaggg

SEQ ID NO: 20350 - DNA, 20 bp, Artificial Sequence
  chemically synthesized
ttcatagaatgaattagggc

SEQ ID NO: 20351 - DNA, 20 bp, Artificial Sequence
  chemically synthesized
ttccttctttatctgtcttg

SEQ ID NO: 20352 - DNA, 20 bp, Artificial Sequence
  chemically synthesized
tctttatctgtcttgtagaa

SEQ ID NO: 20353 - DNA, 20 bp, Artificial Sequence
  chemically synthesized
tcttgtagaatagtgtcaaa

SEQ ID NO: 20354 - DNA, 20 bp, Artificial Sequence
  chemically synthesized
gtagaatagtgtcaaaaaga

SEQ ID NO: 20355 - DNA, 20 bp, Artificial Sequence
  chemically synthesized
tagaatagtgtcaaaaagat

SEQ ID NO: 20356 - DNA, 20 bp, Artificial Sequence
  chemically synthesized
agaatagtgtcaaaaagatg

SEQ ID NO: 20357 - DNA, 20 bp, Artificial Sequence
  chemically synthesized
ccaattcctctttgaatgtc

SEQ ID NO: 20358 - DNA, 20 bp, Artificial Sequence
  chemically synthesized
attcctctttgaatgtctag

SEQ ID NO: 20359 - DNA, 20 bp, Artificial Sequence
  chemically synthesized
aattctgttgtgaatccatc

SEQ ID NO: 20360 - DNA, 20 bp, Artificial Sequence
  chemically synthesized
tctggtcctgaacttttttt

SEQ ID NO: 20361 - DNA, 20 bp, Artificial Sequence
  chemically synthesized
gtcctgaacttttttttggt

SEQ ID NO: 20362 - DNA, 20 bp, Artificial Sequence
  chemically synthesized
taaatctcactgcttgttat

SEQ ID NO: 20363 - DNA, 20 bp, Artificial Sequence
  chemically synthesized
actgcttgttattggtctgt

SEQ ID NO: 20364 - DNA, 20 bp, Artificial Sequence
  chemically synthesized
ggtctgttagtaaatttatt

SEQ ID NO: 20365 - DNA, 20 bp, Artificial Sequence
  chemically synthesized
gtctgttagtaaatttattg

SEQ ID NO: 20366 - DNA, 20 bp, Artificial Sequence
  chemically synthesized
atttattgaggctcatttca

SEQ ID NO: 20367 - DNA, 20 bp, Artificial Sequence
  chemically synthesized
tcatttcatggcctatcata

SEQ ID NO: 20368 - DNA, 20 bp, Artificial Sequence
  chemically synthesized
gcctatcatatggtctacct

SEQ ID NO: 20369 - DNA, 20 bp, Artificial Sequence
  chemically synthesized
ctatcatatggtctaccttg

SEQ ID NO: 20370 - DNA, 20 bp, Artificial Sequence
  chemically synthesized
aatttccacgcgctgttgaa

SEQ ID NO: 20371 - DNA, 20 bp, Artificial Sequence
  chemically synthesized
tgaatagaatgtgtgttctg

SEQ ID NO: 20372 - DNA, 20 bp, Artificial Sequence
  chemically synthesized
aatgtgtgttctgtggttat

SEQ ID NO: 20373 - DNA, 20 bp, Artificial Sequence
  chemically synthesized
atgttctgtatataactgtt

SEQ ID NO: 20374 - DNA, 20 bp, Artificial Sequence
  chemically synthesized
ctgttaagtccatttgttct

SEQ ID NO: 20375 - DNA, 20 bp, Artificial Sequence
  chemically synthesized
tgttaagtccatttgttcta

SEQ ID NO: 20376 - DNA, 20 bp, Artificial Sequence
  chemically synthesized
ttctgtcttgatgaactgtc

SEQ ID NO: 20377 - DNA, 20 bp, Artificial Sequence
  chemically synthesized
actgtctagtgctgtcaatg

SEQ ID NO: 20378 - DNA, 20 bp, Artificial Sequence
  chemically synthesized
gtgctgtcaatgaagtattg

SEQ ID NO: 20379 - DNA, 20 bp, Artificial Sequence
  chemically synthesized
ttgctgtctatctcatttct

SEQ ID NO: 20380 - DNA, 20 bp, Artificial Sequence
  chemically synthesized
tgctgtctatctcatttctt

SEQ ID NO: 20381 - DNA, 20 bp, Artificial Sequence
  chemically synthesized
atctcatttcttaggtctat

SEQ ID NO: 20382 - DNA, 20 bp, Artificial Sequence
  chemically synthesized
tagtaattgttctataaatt

SEQ ID NO: 20383 - DNA, 20 bp, Artificial Sequence
  chemically synthesized
agtaattgttctataaattt

SEQ ID NO: 20384 - DNA, 20 bp, Artificial Sequence
  chemically synthesized
taattgttctataaatttgg

SEQ ID NO: 20385 - DNA, 20 bp, Artificial Sequence
  chemically synthesized
ttctataaatttgggagctc

SEQ ID NO: 20386 - DNA, 20 bp, Artificial Sequence
  chemically synthesized
aaatttgggagctccagtgt

SEQ ID NO: 20387 - DNA, 20 bp, Artificial Sequence
  chemically synthesized
aatttgggagctccagtgtt

SEQ ID NO: 20388 - DNA, 20 bp, Artificial Sequence
  chemically synthesized
tgttaggtgcatatatgttt

SEQ ID NO: 20389 - DNA, 20 bp, Artificial Sequence
  chemically synthesized
agattgtgatattttcctgt

SEQ ID NO: 20390 - DNA, 20 bp, Artificial Sequence
  chemically synthesized
gtgatattttcctgttggac

SEQ ID NO: 20391 - DNA, 20 bp, Artificial Sequence
  chemically synthesized
tgatattttcctgttggaca

SEQ ID NO: 20392 - DNA, 20 bp, Artificial Sequence
  chemically synthesized
ttttaactgctgttgcttta

SEQ ID NO: 20393 - DNA, 20 bp, Artificial Sequence
  chemically synthesized
ttgttttgcctactcacttt

SEQ ID NO: 20394 - DNA, 20 bp, Artificial Sequence
  chemically synthesized
ttttgcctactcacttttgg

SEQ ID NO: 20395 - DNA, 20 bp, Artificial Sequence
  chemically synthesized
aatacctttttcaccctttt

SEQ ID NO: 20396 - DNA, 20 bp, Artificial Sequence
  chemically synthesized
acctttttcacccttttaag

SEQ ID NO: 20397 - DNA, 20 bp, Artificial Sequence
  chemically synthesized
ctttttcacccttttaagtg

SEQ ID NO: 20398 - DNA, 20 bp, Artificial Sequence
  chemically synthesized
acccttttaagtggagcatt

SEQ ID NO: 20399 - DNA, 20 bp, Artificial Sequence
  chemically synthesized
cccttttaagtggagcattt

SEQ ID NO: 20400 - DNA, 20 bp, Artificial Sequence
  chemically synthesized
aggccatttacattcaatgt

SEQ ID NO: 20401 - DNA, 20 bp, Artificial Sequence
  chemically synthesized
atgttagtaatgtaaatgcc

SEQ ID NO: 20402 - DNA, 20 bp, Artificial Sequence
  chemically synthesized
atgtaaatgcctggctatgc

SEQ ID NO: 20403 - DNA, 20 bp, Artificial Sequence
  chemically synthesized
tgtaaatgcctggctatgcc

SEQ ID NO: 20404 - DNA, 20 bp, Artificial Sequence
  chemically synthesized
aaatgcctggctatgccagg

SEQ ID NO: 20405 - DNA, 20 bp, Artificial Sequence
  chemically synthesized
aatgcctggctatgccaggc

SEQ ID NO: 20406 - DNA, 20 bp, Artificial Sequence
  chemically synthesized
ctggctatgccaggcaggaa

SEQ ID NO: 20407 - DNA, 20 bp, Artificial Sequence
  chemically synthesized
ccaggcaggaatggcctgct

SEQ ID NO: 20408 - DNA, 20 bp, Artificial Sequence
  chemically synthesized
caggcaggaatggcctgctc

SEQ ID NO: 20409 - DNA, 20 bp, Artificial Sequence
  chemically synthesized
aggcaggaatggcctgctca

SEQ ID NO: 20410 - DNA, 20 bp, Artificial Sequence
  chemically synthesized
gaatggcctgctcagggacc

SEQ ID NO: 20411 - DNA, 20 bp, Artificial Sequence
  chemically synthesized
ggcctgctcagggacccagt

SEQ ID NO: 20412 - DNA, 20 bp, Artificial Sequence
  chemically synthesized
tcagggacccagtgagctcc

SEQ ID NO: 20413 - DNA, 20 bp, Artificial Sequence
  chemically synthesized
cagggacccagtgagctccc

SEQ ID NO: 20414 - DNA, 20 bp, Artificial Sequence
  chemically synthesized
agggacccagtgagctccca

SEQ ID NO: 20415 - DNA, 20 bp, Artificial Sequence
  chemically synthesized
ctctacacctgtattttgct

SEQ ID NO: 20416 - DNA, 20 bp, Artificial Sequence
  chemically synthesized
tgtattttgctcagctctct

SEQ ID NO: 20417 - DNA, 20 bp, Artificial Sequence
  chemically synthesized
tctctaagttaactcaactc

SEQ ID NO: 20418 - DNA, 20 bp, Artificial Sequence
  chemically synthesized
ctctaagttaactcaactcc

SEQ ID NO: 20419 - DNA, 20 bp, Artificial Sequence
  chemically synthesized
aagttaactcaactccaggt

SEQ ID NO: 20420 - DNA, 20 bp, Artificial Sequence
  chemically synthesized
agttaactcaactccaggta

SEQ ID NO: 20421 - DNA, 20 bp, Artificial Sequence
  chemically synthesized
aactcaactccaggtaaggt

SEQ ID NO: 20422 - DNA, 20 bp, Artificial Sequence
  chemically synthesized
tcagaaacttctcccacaaa

SEQ ID NO: 20423 - DNA, 20 bp, Artificial Sequence
  chemically synthesized
ttctcccacaaacagacctt

SEQ ID NO: 20424 - DNA, 20 bp, Artificial Sequence
  chemically synthesized
aaacagaccttcagtttctc

SEQ ID NO: 20425 - DNA, 20 bp, Artificial Sequence
  chemically synthesized
cagaccttcagtttctccag

SEQ ID NO: 20426 - DNA, 20 bp, Artificial Sequence
  chemically synthesized
agaccttcagtttctccagt

SEQ ID NO: 20427 - DNA, 20 bp, Artificial Sequence
  chemically synthesized
accttcagtttctccagtgg

SEQ ID NO: 20428 - DNA, 20 bp, Artificial Sequence
  chemically synthesized
ctccagtgggagtgtgtgtt

SEQ ID NO: 20429 - DNA, 20 bp, Artificial Sequence
  chemically synthesized
tccagtgggagtgtgtgttt

SEQ ID NO: 20430 - DNA, 20 bp, Artificial Sequence
  chemically synthesized
cagtgggagtgtgtgtttag

SEQ ID NO: 20431 - DNA, 20 bp, Artificial Sequence
  chemically synthesized
gtgggagtgtgtgtttagga

SEQ ID NO: 20432 - DNA, 20 bp, Artificial Sequence
  chemically synthesized
tgggagtgtgtgtttaggag

SEQ ID NO: 20433 - DNA, 20 bp, Artificial Sequence
  chemically synthesized
ggagtgtgtgtttaggagag

SEQ ID NO: 20434 - DNA, 20 bp, Artificial Sequence
  chemically synthesized
gagtgtgtgtttaggagagg

SEQ ID NO: 20435 - DNA, 20 bp, Artificial Sequence
  chemically synthesized
atctccctttcccacttccg

SEQ ID NO: 20436 - DNA, 20 bp, Artificial Sequence
  chemically synthesized
ccctttcccacttccgcagt

SEQ ID NO: 20437 - DNA, 20 bp, Artificial Sequence
  chemically synthesized
cctttcccacttccgcagtt

SEQ ID NO: 20438 - DNA, 20 bp, Artificial Sequence
  chemically synthesized
ctttcccacttccgcagttg

SEQ ID NO: 20439 - DNA, 20 bp, Artificial Sequence
  chemically synthesized
ttccgcagttggggcactca

SEQ ID NO: 20440 - DNA, 20 bp, Artificial Sequence
  chemically synthesized
gttggggcactcacagtatt

SEQ ID NO: 20441 - DNA, 20 bp, Artificial Sequence
  chemically synthesized
ttggggcactcacagtattt

SEQ ID NO: 20442 - DNA, 20 bp, Artificial Sequence
  chemically synthesized
tggggcactcacagtatttg

SEQ ID NO: 20443 - DNA, 20 bp, Artificial Sequence
  chemically synthesized
acagtatttggggtgtctcc

SEQ ID NO: 20444 - DNA, 20 bp, Artificial Sequence
  chemically synthesized
cagtatttggggtgtctcct

SEQ ID NO: 20445 - DNA, 20 bp, Artificial Sequence
  chemically synthesized
ggggtgtctcctgggtcctg

SEQ ID NO: 20446 - DNA, 20 bp, Artificial Sequence
  chemically synthesized
gggtgtctcctgggtcctgc

SEQ ID NO: 20447 - DNA, 20 bp, Artificial Sequence
  chemically synthesized
gtgtctcctgggtcctgcag

SEQ ID NO: 20448 - DNA, 20 bp, Artificial Sequence
  chemically synthesized
caggagcaatctacttcctt

SEQ ID NO: 20449 - DNA, 20 bp, Artificial Sequence
  chemically synthesized
ggagcaatctacttccttca

SEQ ID NO: 20450 - DNA, 20 bp, Artificial Sequence
  chemically synthesized
gagcaatctacttccttcag

SEQ ID NO: 20451 - DNA, 20 bp, Artificial Sequence
  chemically synthesized
agcaatctacttccttcaga

SEQ ID NO: 20452 - DNA, 20 bp, Artificial Sequence
  chemically synthesized
tacttccttcagagggtctg

SEQ ID NO: 20453 - DNA, 20 bp, Artificial Sequence
  chemically synthesized
acttccttcagagggtctgt

SEQ ID NO: 20454 - DNA, 20 bp, Artificial Sequence
  chemically synthesized
agagggtctgtgggtcctct

SEQ ID NO: 20455 - DNA, 20 bp, Artificial Sequence
  chemically synthesized
gagggtctgtgggtcctctc

SEQ ID NO: 20456 - DNA, 20 bp, Artificial Sequence
  chemically synthesized
gtgggtcctctcaggattgc

SEQ ID NO: 20457 - DNA, 20 bp, Artificial Sequence
  chemically synthesized
ggattgctggtttgttcttg

SEQ ID NO: 20458 - DNA, 20 bp, Artificial Sequence
  chemically synthesized
ttgttcttgcagtctatctg

SEQ ID NO: 20459 - DNA, 20 bp, Artificial Sequence
  chemically synthesized
gcagctaaaattcacaatgc

SEQ ID NO: 20460 - DNA, 20 bp, Artificial Sequence
  chemically synthesized
acatgctgctctgtccatct

SEQ ID NO: 20461 - DNA, 20 bp, Artificial Sequence
  chemically synthesized
gctgctctgtccatctgagt

SEQ ID NO: 20462 - DNA, 20 bp, Artificial Sequence
  chemically synthesized
tgctctgtccatctgagttg

SEQ ID NO: 20463 - DNA, 20 bp, Artificial Sequence
  chemically synthesized
tctgagttggagctgcaatc

SEQ ID NO: 20464 - DNA, 20 bp, Artificial Sequence
  chemically synthesized
ctgagttggagctgcaatct

SEQ ID NO: 20465 - DNA, 20 bp, Artificial Sequence
  chemically synthesized
aggcctacctcccatccgcc

SEQ ID NO: 20466 - DNA, 20 bp, Artificial Sequence
  chemically synthesized
ctcccatccgccaagatcct

SEQ ID NO: 20467 - DNA, 20 bp, Artificial Sequence
  chemically synthesized
ccatccgccaagatcctgag

SEQ ID NO: 20468 - DNA, 20 bp, Artificial Sequence
  chemically synthesized
ccgccaagatcctgagaagt

SEQ ID NO: 20469 - DNA, 20 bp, Artificial Sequence
  chemically synthesized
cgccaagatcctgagaagtt

SEQ ID NO: 20470 - DNA, 20 bp, Artificial Sequence
  chemically synthesized
gccaagatcctgagaagttg

SEQ ID NO: 20471 - DNA, 20 bp, Artificial Sequence
  chemically synthesized
tggggattatatttcaacat

SEQ ID NO: 20472 - DNA, 20 bp, Artificial Sequence
  chemically synthesized
ttatatttcaacatgagatt

SEQ ID NO: 20473 - DNA, 20 bp, Artificial Sequence
  chemically synthesized
atatttcaacatgagatttg

SEQ ID NO: 20474 - DNA, 20 bp, Artificial Sequence
  chemically synthesized
tatttcaacatgagatttgg

SEQ ID NO: 20475 - DNA, 20 bp, Artificial Sequence
  chemically synthesized
atttcaacatgagatttgga

SEQ ID NO: 20476 - DNA, 20 bp, Artificial Sequence
  chemically synthesized
aacaaacatccaaaccatat

SEQ ID NO: 20477 - DNA, 20 bp, Artificial Sequence
  chemically synthesized
aaacatccaaaccatatcag

SEQ ID NO: 20478 - DNA, 20 bp, Artificial Sequence
  chemically synthesized
tccaaaccatatcagcagtc

SEQ ID NO: 20479 - DNA, 20 bp, Artificial Sequence
  chemically synthesized
cagttttattcttttgcaca

SEQ ID NO: 20480 - DNA, 20 bp, Artificial Sequence
  chemically synthesized
ttttgcacatggatatccaa

SEQ ID NO: 20481 - DNA, 20 bp, Artificial Sequence
  chemically synthesized
caatggatatccaatttttt

SEQ ID NO: 20482 - DNA, 20 bp, Artificial Sequence
  chemically synthesized
cacctttgttgaaaatctgt

SEQ ID NO: 20483 - DNA, 20 bp, Artificial Sequence
  chemically synthesized
atctgttggctataaatatg

SEQ ID NO: 20484 - DNA, 20 bp, Artificial Sequence
  chemically synthesized
taaatatgtggatgcatttc

SEQ ID NO: 20485 - DNA, 20 bp, Artificial Sequence
  chemically synthesized
aaatatgtggatgcatttct

SEQ ID NO: 20486 - DNA, 20 bp, Artificial Sequence
  chemically synthesized
ggttctctattctcttccat

SEQ ID NO: 20487 - DNA, 20 bp, Artificial Sequence
  chemically synthesized
ctattctcttccattggtct

SEQ ID NO: 20488 - DNA, 20 bp, Artificial Sequence
  chemically synthesized
ctaagtgtctgttctaatgt

SEQ ID NO: 20489 - DNA, 20 bp, Artificial Sequence
  chemically synthesized
aatgtcagtatcatgctgtt

SEQ ID NO: 20490 - DNA, 20 bp, Artificial Sequence
  chemically synthesized
atgtcagtatcatgctgttt

SEQ ID NO: 20491 - DNA, 20 bp, Artificial Sequence
  chemically synthesized
tttgtaatatactttgaaat

SEQ ID NO: 20492 - DNA, 20 bp, Artificial Sequence
  chemically synthesized
ttgtaatatactttgaaatc

SEQ ID NO: 20493 - DNA, 20 bp, Artificial Sequence
  chemically synthesized
taatatactttgaaatcagg

SEQ ID NO: 20494 - DNA, 20 bp, Artificial Sequence
  chemically synthesized
atcaggtagtatgatacctc

SEQ ID NO: 20495 - DNA, 20 bp, Artificial Sequence
  chemically synthesized
ctagcattgttcttttttca

SEQ ID NO: 20496 - DNA, 20 bp, Artificial Sequence
  chemically synthesized
tagcattgttcttttttcac

SEQ ID NO: 20497 - DNA, 20 bp, Artificial Sequence
  chemically synthesized
cttttttcacaggatgactt

SEQ ID NO: 20498 - DNA, 20 bp, Artificial Sequence
  chemically synthesized
cacaggatgactttggctac

SEQ ID NO: 20499 - DNA, 20 bp, Artificial Sequence
  chemically synthesized
caggatgactttggctactg

SEQ ID NO: 20500 - DNA, 20 bp, Artificial Sequence
  chemically synthesized
ttttaatttcatacaaattt

SEQ ID NO: 20501 - DNA, 20 bp, Artificial Sequence
  chemically synthesized
atttcatacaaattttagat

SEQ ID NO: 20502 - DNA, 20 bp, Artificial Sequence
  chemically synthesized
aaatgacattgctattttga

SEQ ID NO: 20503 - DNA, 20 bp, Artificial Sequence
  chemically synthesized
tgacattgctattttgatag

SEQ ID NO: 20504 - DNA, 20 bp, Artificial Sequence
  chemically synthesized
ctattttgatagcggtcata

SEQ ID NO: 20505 - DNA, 20 bp, Artificial Sequence
  chemically synthesized
tagcggtcatatagaatctg

SEQ ID NO: 20506 - DNA, 20 bp, Artificial Sequence
  chemically synthesized
atagaatctgtagattgctt

SEQ ID NO: 20507 - DNA, 20 bp, Artificial Sequence
  chemically synthesized
tagaatctgtagattgcttt

SEQ ID NO: 20508 - DNA, 20 bp, Artificial Sequence
  chemically synthesized
aatctgtagattgctttggg

SEQ ID NO: 20509 - DNA, 20 bp, Artificial Sequence
  chemically synthesized
gtagattgctttgggtagta

SEQ ID NO: 20510 - DNA, 20 bp, Artificial Sequence
  chemically synthesized
atttttctgatccatgaaca

SEQ ID NO: 20511 - DNA, 20 bp, Artificial Sequence
  chemically synthesized
tttttctgatccatgaacat

SEQ ID NO: 20512 - DNA, 20 bp, Artificial Sequence
  chemically synthesized
gtccttttcaattcttttat

SEQ ID NO: 20513 - DNA, 20 bp, Artificial Sequence
  chemically synthesized
attcttttatcagtgttttg

SEQ ID NO: 20514 - DNA, 20 bp, Artificial Sequence
  chemically synthesized
gtgttttgtagttttccgaa

SEQ ID NO: 20515 - DNA, 20 bp, Artificial Sequence
  chemically synthesized
gttttgtagttttccgaata

SEQ ID NO: 20516 - DNA, 20 bp, Artificial Sequence
  chemically synthesized
ttttgtagttttccgaatag

SEQ ID NO: 20517 - DNA, 20 bp, Artificial Sequence
  chemically synthesized
ttttccgaatagaggttttt

SEQ ID NO: 20518 - DNA, 20 bp, Artificial Sequence
  chemically synthesized
atagaggtttttcggttcct

SEQ ID NO: 20519 - DNA, 20 bp, Artificial Sequence
  chemically synthesized
tccctaaatattttattttt

SEQ ID NO: 20520 - DNA, 20 bp, Artificial Sequence
  chemically synthesized
tattttttagctattgtaaa

SEQ ID NO: 20521 - DNA, 20 bp, Artificial Sequence
  chemically synthesized
attttttagctattgtaaat

SEQ ID NO: 20522 - DNA, 20 bp, Artificial Sequence
  chemically synthesized
tgccttcttaatttccttct

SEQ ID NO: 20523 - DNA, 20 bp, Artificial Sequence
  chemically synthesized
ttcttaatttccttctcagc

SEQ ID NO: 20524 - DNA, 20 bp, Artificial Sequence
  chemically synthesized
cttctcagctagtttattat

SEQ ID NO: 20525 - DNA, 20 bp, Artificial Sequence
  chemically synthesized
gctagtttattattggtgtg

SEQ ID NO: 20526 - DNA, 20 bp, Artificial Sequence
  chemically synthesized
actttactgaatttattttt

SEQ ID NO: 20527 - DNA, 20 bp, Artificial Sequence
  chemically synthesized
tgaatttatttttcagcgct

SEQ ID NO: 20528 - DNA, 20 bp, Artificial Sequence
  chemically synthesized
aatttatttttcagcgctaa

SEQ ID NO: 20529 - DNA, 20 bp, Artificial Sequence
  chemically synthesized
tttcagcgctaagagtgctt

SEQ ID NO: 20530 - DNA, 20 bp, Artificial Sequence
  chemically synthesized
cagcgctaagagtgctttgg

SEQ ID NO: 20531 - DNA, 20 bp, Artificial Sequence
  chemically synthesized
gcgctaagagtgctttggtg

SEQ ID NO: 20532 - DNA, 20 bp, Artificial Sequence
  chemically synthesized
agagtgctttggtggagtct

SEQ ID NO: 20533 - DNA, 20 bp, Artificial Sequence
  chemically synthesized
tggtggagtcttggtttttc

SEQ ID NO: 20534 - DNA, 20 bp, Artificial Sequence
  chemically synthesized
ggtggagtcttggtttttct

SEQ ID NO: 20535 - DNA, 20 bp, Artificial Sequence
  chemically synthesized
aggtataaaatcatgtcatc

SEQ ID NO: 20536 - DNA, 20 bp, Artificial Sequence
  chemically synthesized
ataaaatcatgtcatctgga

SEQ ID NO: 20537 - DNA, 20 bp, Artificial Sequence
  chemically synthesized
aatcatgtcatctggaaaga

SEQ ID NO: 20538 - DNA, 20 bp, Artificial Sequence
  chemically synthesized
atgtcatctggaaagatgga

SEQ ID NO: 20539 - DNA, 20 bp, Artificial Sequence
  chemically synthesized
tctttctttctctgacctga

SEQ ID NO: 20540 - DNA, 20 bp, Artificial Sequence
  chemically synthesized
tttctctgacctgaaagctg

SEQ ID NO: 20541 - DNA, 20 bp, Artificial Sequence
  chemically synthesized
tctgacctgaaagctgtggc

SEQ ID NO: 20542 - DNA, 20 bp, Artificial Sequence
  chemically synthesized
ctgacctgaaagctgtggct

SEQ ID NO: 20543 - DNA, 20 bp, Artificial Sequence
  chemically synthesized
aaagctgtggctaggacttc

SEQ ID NO: 20544 - DNA, 20 bp, Artificial Sequence
  chemically synthesized
acttccagtattatattgaa

SEQ ID NO: 20545 - DNA, 20 bp, Artificial Sequence
  chemically synthesized
cttccagtattatattgaat

SEQ ID NO: 20546 - DNA, 20 bp, Artificial Sequence
  chemically synthesized
tccagtattatattgaatag

SEQ ID NO: 20547 - DNA, 20 bp, Artificial Sequence
  chemically synthesized
attatattgaataggagtga

SEQ ID NO: 20548 - DNA, 20 bp, Artificial Sequence
  chemically synthesized
atattgaataggagtgatgg

SEQ ID NO: 20549 - DNA, 20 bp, Artificial Sequence
  chemically synthesized
ttgaataggagtgatggaag

SEQ ID NO: 20550 - DNA, 20 bp, Artificial Sequence
  chemically synthesized
tgaataggagtgatggaagt

SEQ ID NO: 20551 - DNA, 20 bp, Artificial Sequence
  chemically synthesized
tgggcatccttattttgttt

SEQ ID NO: 20552 - DNA, 20 bp, Artificial Sequence
  chemically synthesized
ccttattttgtttcagttct

SEQ ID NO: 20553 - DNA, 20 bp, Artificial Sequence
  chemically synthesized
ttattttgtttcagttctta

SEQ ID NO: 20554 - DNA, 20 bp, Artificial Sequence
  chemically synthesized
tattttgtttcagttcttag

SEQ ID NO: 20555 - DNA, 20 bp, Artificial Sequence
  chemically synthesized
ttgtttcagttcttagagga

SEQ ID NO: 20556 - DNA, 20 bp, Artificial Sequence
  chemically synthesized
tgtttcagttcttagaggaa

SEQ ID NO: 20557 - DNA, 20 bp, Artificial Sequence
  chemically synthesized
gttcttagaggaaaggcttc

SEQ ID NO: 20558 - DNA, 20 bp, Artificial Sequence
  chemically synthesized
gcttccagcttttcccaatt

SEQ ID NO: 20559 - DNA, 20 bp, Artificial Sequence
  chemically synthesized
ttcccaattcagtatgatgt

SEQ ID NO: 20560 - DNA, 20 bp, Artificial Sequence
  chemically synthesized
attcagtatgatgttagctg

SEQ ID NO: 20561 - DNA, 20 bp, Artificial Sequence
  chemically synthesized
ttcagtatgatgttagctgt

SEQ ID NO: 20562 - DNA, 20 bp, Artificial Sequence
  chemically synthesized
tatatgacttttattatatt

SEQ ID NO: 20563 - DNA, 20 bp, Artificial Sequence
  chemically synthesized
agatatgttccttctatgat

SEQ ID NO: 20564 - DNA, 20 bp, Artificial Sequence
  chemically synthesized
gttccttctatgattggctg

SEQ ID NO: 20565 - DNA, 20 bp, Artificial Sequence
  chemically synthesized
cttctatgattggctgcaga

SEQ ID NO: 20566 - DNA, 20 bp, Artificial Sequence
  chemically synthesized
tgcagatagtttttatcatg

SEQ ID NO: 20567 - DNA, 20 bp, Artificial Sequence
  chemically synthesized
gcagatagtttttatcatga

SEQ ID NO: 20568 - DNA, 20 bp, Artificial Sequence
  chemically synthesized
atactttttctgtatctatt

SEQ ID NO: 20569 - DNA, 20 bp, Artificial Sequence
  chemically synthesized
tatctattgagatgatcata

SEQ ID NO: 20570 - DNA, 20 bp, Artificial Sequence
  chemically synthesized
ttgaactgttcttgcaaccc

SEQ ID NO: 20571 - DNA, 20 bp, Artificial Sequence
  chemically synthesized
gtataaatcccacttgatca

SEQ ID NO: 20572 - DNA, 20 bp, Artificial Sequence
  chemically synthesized
gatcatggtgtattatcttt

SEQ ID NO: 20573 - DNA, 20 bp, Artificial Sequence
  chemically synthesized
ttatcttttggatgtactgt

SEQ ID NO: 20574 - DNA, 20 bp, Artificial Sequence
  chemically synthesized
tttggatgtactgttggatt

SEQ ID NO: 20575 - DNA, 20 bp, Artificial Sequence
  chemically synthesized
tactgttggattcagtttgc

SEQ ID NO: 20576 - DNA, 20 bp, Artificial Sequence
  chemically synthesized
cagtttgctagtattttgtt

SEQ ID NO: 20577 - DNA, 20 bp, Artificial Sequence
  chemically synthesized
agtttgctagtattttgttg

SEQ ID NO: 20578 - DNA, 20 bp, Artificial Sequence
  chemically synthesized
ttttcacacctatgttccat

SEQ ID NO: 20579 - DNA, 20 bp, Artificial Sequence
  chemically synthesized
tttcacacctatgttccatc

SEQ ID NO: 20580 - DNA, 20 bp, Artificial Sequence
  chemically synthesized
ttcacacctatgttccatca

SEQ ID NO: 20581 - DNA, 20 bp, Artificial Sequence
  chemically synthesized
ccatcagggatattgacctg

SEQ ID NO: 20582 - DNA, 20 bp, Artificial Sequence
  chemically synthesized
tttttacttgcatccttgtc

SEQ ID NO: 20583 - DNA, 20 bp, Artificial Sequence
  chemically synthesized
cttgcatccttgtctggtta

SEQ ID NO: 20584 - DNA, 20 bp, Artificial Sequence
  chemically synthesized
tccttgtctggttatggaat

SEQ ID NO: 20585 - DNA, 20 bp, Artificial Sequence
  chemically synthesized
ccttgtctggttatggaatc

SEQ ID NO: 20586 - DNA, 20 bp, Artificial Sequence
  chemically synthesized
ttatggaatcaggataatac

SEQ ID NO: 20587 - DNA, 20 bp, Artificial Sequence
  chemically synthesized
aatcaggataatactggcct

SEQ ID NO: 20588 - DNA, 20 bp, Artificial Sequence
  chemically synthesized
tcaggataatactggcctca

SEQ ID NO: 20589 - DNA, 20 bp, Artificial Sequence
  chemically synthesized
taatactggcctcagagaat

SEQ ID NO: 20590 - DNA, 20 bp, Artificial Sequence
  chemically synthesized
actggcctcagagaatgagt

SEQ ID NO: 20591 - DNA, 20 bp, Artificial Sequence
  chemically synthesized
ctggcctcagagaatgagtt

SEQ ID NO: 20592 - DNA, 20 bp, Artificial Sequence
  chemically synthesized
tggcctcagagaatgagtta

SEQ ID NO: 20593 - DNA, 20 bp, Artificial Sequence
  chemically synthesized
gcctcagagaatgagttagg

SEQ ID NO: 20594 - DNA, 20 bp, Artificial Sequence
  chemically synthesized
ccttcctgtttaatttttaa

SEQ ID NO: 20595 - DNA, 20 bp, Artificial Sequence
  chemically synthesized
tttaatttttaaaagaattt

SEQ ID NO: 20596 - DNA, 20 bp, Artificial Sequence
  chemically synthesized
ttaatttttaaaagaattta

SEQ ID NO: 20597 - DNA, 20 bp, Artificial Sequence
  chemically synthesized
aatttttaaaagaatttaag

SEQ ID NO: 20598 - DNA, 20 bp, Artificial Sequence
  chemically synthesized
aagaatttaaggagacttgt

SEQ ID NO: 20599 - DNA, 20 bp, Artificial Sequence
  chemically synthesized
gacttgttagttttctttga

SEQ ID NO: 20600 - DNA, 20 bp, Artificial Sequence
  chemically synthesized
gttagttttctttgaaagtt

SEQ ID NO: 20601 - DNA, 20 bp, Artificial Sequence
  chemically synthesized
gaaagtttggtaaaatttga

SEQ ID NO: 20602 - DNA, 20 bp, Artificial Sequence
  chemically synthesized
tttggtaaaatttgacagta

SEQ ID NO: 20603 - DNA, 20 bp, Artificial Sequence
  chemically synthesized
aatttgacagtaaagccatc

SEQ ID NO: 20604 - DNA, 20 bp, Artificial Sequence
  chemically synthesized
ggtcttgaaattttcttttt

SEQ ID NO: 20605 - DNA, 20 bp, Artificial Sequence
  chemically synthesized
gtcttgaaattttctttttt

SEQ ID NO: 20606 - DNA, 20 bp, Artificial Sequence
  chemically synthesized
cttgaaattttcttttttgg

SEQ ID NO: 20607 - DNA, 20 bp, Artificial Sequence
  chemically synthesized
tcaatttcattattcattac

SEQ ID NO: 20608 - DNA, 20 bp, Artificial Sequence
  chemically synthesized
ttattcattactggtctgtt

SEQ ID NO: 20609 - DNA, 20 bp, Artificial Sequence
  chemically synthesized
tattcattactggtctgttc

SEQ ID NO: 20610 - DNA, 20 bp, Artificial Sequence
  chemically synthesized
attctttcttaattcaatct

SEQ ID NO: 20611 - DNA, 20 bp, Artificial Sequence
  chemically synthesized
ctttcttaattcaatcttgg

SEQ ID NO: 20612 - DNA, 20 bp, Artificial Sequence
  chemically synthesized
tttcttaattcaatcttggt

SEQ ID NO: 20613 - DNA, 20 bp, Artificial Sequence
  chemically synthesized
cttaattcaatcttggtagg

SEQ ID NO: 20614 - DNA, 20 bp, Artificial Sequence
  chemically synthesized
cttggtaggtggtatgtgtc

SEQ ID NO: 20615 - DNA, 20 bp, Artificial Sequence
  chemically synthesized
agaaatttattaatttcctc

SEQ ID NO: 20616 - DNA, 20 bp, Artificial Sequence
  chemically synthesized
ttaatttcctctagattttt

SEQ ID NO: 20617 - DNA, 20 bp, Artificial Sequence
  chemically synthesized
ctctagatttttcagttttt

SEQ ID NO: 20618 - DNA, 20 bp, Artificial Sequence
  chemically synthesized
tttttcagttttttagtgta

SEQ ID NO: 20619 - DNA, 20 bp, Artificial Sequence
  chemically synthesized
tagtgtatggttgttcataa

SEQ ID NO: 20620 - DNA, 20 bp, Artificial Sequence
  chemically synthesized
gataatcttttctatttctg

SEQ ID NO: 20621 - DNA, 20 bp, Artificial Sequence
  chemically synthesized
cttttctatttctgtggtat

SEQ ID NO: 20622 - DNA, 20 bp, Artificial Sequence
  chemically synthesized
atttctgattttctttattt

SEQ ID NO: 20623 - DNA, 20 bp, Artificial Sequence
  chemically synthesized
tcagtctcttctctttttct

SEQ ID NO: 20624 - DNA, 20 bp, Artificial Sequence
  chemically synthesized
tctcttctctttttcttggt

SEQ ID NO: 20625 - DNA, 20 bp, Artificial Sequence
  chemically synthesized
tctctttttcttggttagtc

SEQ ID NO: 20626 - DNA, 20 bp, Artificial Sequence
  chemically synthesized
tttttcttggttagtctagc

SEQ ID NO: 20627 - DNA, 20 bp, Artificial Sequence
  chemically synthesized
tttcttggttagtctagcta

SEQ ID NO: 20628 - DNA, 20 bp, Artificial Sequence
  chemically synthesized
ttgtttttctctatttcatt

SEQ ID NO: 20629 - DNA, 20 bp, Artificial Sequence
  chemically synthesized
cattttttctttccttctgc

SEQ ID NO: 20630 - DNA, 20 bp, Artificial Sequence
  chemically synthesized
ttctttccttctgctagttt

SEQ ID NO: 20631 - DNA, 20 bp, Artificial Sequence
  chemically synthesized
tctttccttctgctagtttt

SEQ ID NO: 20632 - DNA, 20 bp, Artificial Sequence
  chemically synthesized
gggttttgttcttgcttttc

SEQ ID NO: 20633 - DNA, 20 bp, Artificial Sequence
  chemically synthesized
tcttgcttttctagcttgtt

SEQ ID NO: 20634 - DNA, 20 bp, Artificial Sequence
  chemically synthesized
cttgcttttctagcttgttg

SEQ ID NO: 20635 - DNA, 20 bp, Artificial Sequence
  chemically synthesized
agcttgttgaggtacatgat

SEQ ID NO: 20636 - DNA, 20 bp, Artificial Sequence
  chemically synthesized
tctttctatgtttttaattt

SEQ ID NO: 20637 - DNA, 20 bp, Artificial Sequence
  chemically synthesized
taatttaagtgtttattgat

SEQ ID NO: 20638 - DNA, 20 bp, Artificial Sequence
  chemically synthesized
ttattgataagcttctctct

SEQ ID NO: 20639 - DNA, 20 bp, Artificial Sequence
  chemically synthesized
actgcttttgctgtatccca

SEQ ID NO: 20640 - DNA, 20 bp, Artificial Sequence
  chemically synthesized
ttcttgacataacgttcatt

SEQ ID NO: 20641 - DNA, 20 bp, Artificial Sequence
  chemically synthesized
tcttgacataacgttcattc

SEQ ID NO: 20642 - DNA, 20 bp, Artificial Sequence
  chemically synthesized
ttgacataacgttcattcag

SEQ ID NO: 20643 - DNA, 20 bp, Artificial Sequence
  chemically synthesized
ttaatttccatgtatttgta

SEQ ID NO: 20644 - DNA, 20 bp, Artificial Sequence
  chemically synthesized
taatttccatgtatttgtat

SEQ ID NO: 20645 - DNA, 20 bp, Artificial Sequence
  chemically synthesized
atgtatttgtataggtttta

SEQ ID NO: 20646 - DNA, 20 bp, Artificial Sequence
  chemically synthesized
tttttcttgttattgatttc

SEQ ID NO: 20647 - DNA, 20 bp, Artificial Sequence
  chemically synthesized
tttctagttttattccattg

SEQ ID NO: 20648 - DNA, 20 bp, Artificial Sequence
  chemically synthesized
gttttattccattgtggtct

SEQ ID NO: 20649 - DNA, 20 bp, Artificial Sequence
  chemically synthesized
ttattccattgtggtctgag

SEQ ID NO: 20650 - DNA, 20 bp, Artificial Sequence
  chemically synthesized
tgatttcaaatatttcaaat

SEQ ID NO: 20651 - DNA, 20 bp, Artificial Sequence
  chemically synthesized
tcaaatatttcaaattagtt

SEQ ID NO: 20652 - DNA, 20 bp, Artificial Sequence
  chemically synthesized
ttcttttgtgttctaacata

SEQ ID NO: 20653 - DNA, 20 bp, Artificial Sequence
  chemically synthesized
ttctaacatatggtgtatcc

SEQ ID NO: 20654 - DNA, 20 bp, Artificial Sequence
  chemically synthesized
tctaacatatggtgtatcct

SEQ ID NO: 20655 - DNA, 20 bp, Artificial Sequence
  chemically synthesized
ctaacatatggtgtatcctg

SEQ ID NO: 20656 - DNA, 20 bp, Artificial Sequence
  chemically synthesized
ggaatgcgtcatgtgctgat

SEQ ID NO: 20657 - DNA, 20 bp, Artificial Sequence
  chemically synthesized
gatgagataaatatattctg

SEQ ID NO: 20658 - DNA, 20 bp, Artificial Sequence
  chemically synthesized
taaatatattctgtagctgt

SEQ ID NO: 20659 - DNA, 20 bp, Artificial Sequence
  chemically synthesized
atgaaatattgtgtaaatgt

SEQ ID NO: 20660 - DNA, 20 bp, Artificial Sequence
  chemically synthesized
gtgtaaatgttagatccatt

SEQ ID NO: 20661 - DNA, 20 bp, Artificial Sequence
  chemically synthesized
tgttagatccatttggtcta

SEQ ID NO: 20662 - DNA, 20 bp, Artificial Sequence
  chemically synthesized
gatccatttggtctaaagtc

SEQ ID NO: 20663 - DNA, 20 bp, Artificial Sequence
  chemically synthesized
ttctttgttaattttctgtc

SEQ ID NO: 20664 - DNA, 20 bp, Artificial Sequence
  chemically synthesized
tagatgatctatctgatgct

SEQ ID NO: 20665 - DNA, 20 bp, Artificial Sequence
  chemically synthesized
gatctatctgatgctgagat

SEQ ID NO: 20666 - DNA, 20 bp, Artificial Sequence
  chemically synthesized
atccccaactattattgtat

SEQ ID NO: 20667 - DNA, 20 bp, Artificial Sequence
  chemically synthesized
taacatttgctttacatatc

SEQ ID NO: 20668 - DNA, 20 bp, Artificial Sequence
  chemically synthesized
ctttacatatctggatgctc

SEQ ID NO: 20669 - DNA, 20 bp, Artificial Sequence
  chemically synthesized
tatctggatgctctggtgtt

SEQ ID NO: 20670 - DNA, 20 bp, Artificial Sequence
  chemically synthesized
tggtgttgagtgtgaatgtt

SEQ ID NO: 20671 - DNA, 20 bp, Artificial Sequence
  chemically synthesized
atgtaatgacttttgtctct

SEQ ID NO: 20672 - DNA, 20 bp, Artificial Sequence
  chemically synthesized
ctcttagtgttttttattta

SEQ ID NO: 20673 - DNA, 20 bp, Artificial Sequence
  chemically synthesized
aaagtcaattttatctgtta

SEQ ID NO: 20674 - DNA, 20 bp, Artificial Sequence
  chemically synthesized
aagtcaattttatctgttat

SEQ ID NO: 20675 - DNA, 20 bp, Artificial Sequence
  chemically synthesized
taactacttttgctcatttt

SEQ ID NO: 20676 - DNA, 20 bp, Artificial Sequence
  chemically synthesized
atttttggtttctctttgta

SEQ ID NO: 20677 - DNA, 20 bp, Artificial Sequence
  chemically synthesized
tttggtttctctttgtatgg

SEQ ID NO: 20678 - DNA, 20 bp, Artificial Sequence
  chemically synthesized
atctttcatctttttacttt

SEQ ID NO: 20679 - DNA, 20 bp, Artificial Sequence
  chemically synthesized
cagtctatatttatctttac

SEQ ID NO: 20680 - DNA, 20 bp, Artificial Sequence
  chemically synthesized
ctatatttatctttacaagt

SEQ ID NO: 20681 - DNA, 20 bp, Artificial Sequence
  chemically synthesized
tttatctttacaagtgagat

SEQ ID NO: 20682 - DNA, 20 bp, Artificial Sequence
  chemically synthesized
caagtgagataagtttctta

SEQ ID NO: 20683 - DNA, 20 bp, Artificial Sequence
  chemically synthesized
aagtgagataagtttcttat

SEQ ID NO: 20684 - DNA, 20 bp, Artificial Sequence
  chemically synthesized
tgagataagtttcttatagg

SEQ ID NO: 20685 - DNA, 20 bp, Artificial Sequence
  chemically synthesized
tcttataggcagcttacaac

SEQ ID NO: 20686 - DNA, 20 bp, Artificial Sequence
  chemically synthesized
cttataggcagcttacaact

SEQ ID NO: 20687 - DNA, 20 bp, Artificial Sequence
  chemically synthesized
atttttgttttaaatctatt

SEQ ID NO: 20688 - DNA, 20 bp, Artificial Sequence
  chemically synthesized
ttgttttaaatctatttagc

SEQ ID NO: 20689 - DNA, 20 bp, Artificial Sequence
  chemically synthesized
ttagccagtctatatctttc

SEQ ID NO: 20690 - DNA, 20 bp, Artificial Sequence
  chemically synthesized
aatttaatccatttacatgc

SEQ ID NO: 20691 - DNA, 20 bp, Artificial Sequence
  chemically synthesized
atttaatccatttacatgca

SEQ ID NO: 20692 - DNA, 20 bp, Artificial Sequence
  chemically synthesized
caaggctattattgacatgt

SEQ ID NO: 20693 - DNA, 20 bp, Artificial Sequence
  chemically synthesized
aggctattattgacatgtga

SEQ ID NO: 20694 - DNA, 20 bp, Artificial Sequence
  chemically synthesized
ccattttgttaattgattcc

SEQ ID NO: 20695 - DNA, 20 bp, Artificial Sequence
  chemically synthesized
tggttgttttgttttttttt

SEQ ID NO: 20696 - DNA, 20 bp, Artificial Sequence
  chemically synthesized
tttcttattatttatgattg

SEQ ID NO: 20697 - DNA, 20 bp, Artificial Sequence
  chemically synthesized
tattatttatgattgtggtt

SEQ ID NO: 20698 - DNA, 20 bp, Artificial Sequence
  chemically synthesized
tgtggtttggtgattttctg

SEQ ID NO: 20699 - DNA, 20 bp, Artificial Sequence
  chemically synthesized
ggtttggtgattttctgtag

SEQ ID NO: 20700 - DNA, 20 bp, Artificial Sequence
  chemically synthesized
tttctgtagtggtaacgttt

SEQ ID NO: 20701 - DNA, 20 bp, Artificial Sequence
  chemically synthesized
ttatttgtgttttgctctac

SEQ ID NO: 20702 - DNA, 20 bp, Artificial Sequence
  chemically synthesized
ttgtgttttgctctaccagt

SEQ ID NO: 20703 - DNA, 20 bp, Artificial Sequence
  chemically synthesized
acctttgtgtgtcttcataa

SEQ ID NO: 20704 - DNA, 20 bp, Artificial Sequence
  chemically synthesized
tttgtgtgtcttcataatgg

SEQ ID NO: 20705 - DNA, 20 bp, Artificial Sequence
  chemically synthesized
tgtcctgtcactttcatgtg

SEQ ID NO: 20706 - DNA, 20 bp, Artificial Sequence
  chemically synthesized
gtcctgtcactttcatgtgt

SEQ ID NO: 20707 - DNA, 20 bp, Artificial Sequence
  chemically synthesized
tcccttaaatatttcttgta

SEQ ID NO: 20708 - DNA, 20 bp, Artificial Sequence
  chemically synthesized
ttaaatatttcttgtaaagc

SEQ ID NO: 20709 - DNA, 20 bp, Artificial Sequence
  chemically synthesized
tatttcttgtaaagccagtc

SEQ ID NO: 20710 - DNA, 20 bp, Artificial Sequence
  chemically synthesized
ttgtaaagccagtctagtga

SEQ ID NO: 20711 - DNA, 20 bp, Artificial Sequence
  chemically synthesized
tccttcaaatttttcttgcc

SEQ ID NO: 20712 - DNA, 20 bp, Artificial Sequence
  chemically synthesized
caaatttttcttgcccagaa

SEQ ID NO: 20713 - DNA, 20 bp, Artificial Sequence
  chemically synthesized
ttatttatccttcatttttg

SEQ ID NO: 20714 - DNA, 20 bp, Artificial Sequence
  chemically synthesized
tttttgaagaacaatgttgc

SEQ ID NO: 20715 - DNA, 20 bp, Artificial Sequence
  chemically synthesized
ttttgaagaacaatgttgct

SEQ ID NO: 20716 - DNA, 20 bp, Artificial Sequence
  chemically synthesized
gttgctgggtataacatcct

SEQ ID NO: 20717 - DNA, 20 bp, Artificial Sequence
  chemically synthesized
tatatcatcccatcttctcc

SEQ ID NO: 20718 - DNA, 20 bp, Artificial Sequence
  chemically synthesized
cccatcttctcctggcctgt

SEQ ID NO: 20719 - DNA, 20 bp, Artificial Sequence
  chemically synthesized
ccatcttctcctggcctgtg

SEQ ID NO: 20720 - DNA, 20 bp, Artificial Sequence
  chemically synthesized
tggcctgtgaggtttctgct

SEQ ID NO: 20721 - DNA, 20 bp, Artificial Sequence
  chemically synthesized
ctgttaatctgttaatcttg

SEQ ID NO: 20722 - DNA, 20 bp, Artificial Sequence
  chemically synthesized
ttaatctgttaatcttgtgg

SEQ ID NO: 20723 - DNA, 20 bp, Artificial Sequence
  chemically synthesized
tcttgtggaagttcccttat

SEQ ID NO: 20724 - DNA, 20 bp, Artificial Sequence
  chemically synthesized
gaagttcccttataagtgac

SEQ ID NO: 20725 - DNA, 20 bp, Artificial Sequence
  chemically synthesized
agacattttgcttgctgttt

SEQ ID NO: 20726 - DNA, 20 bp, Artificial Sequence
  chemically synthesized
acattttgcttgctgtttta

SEQ ID NO: 20727 - DNA, 20 bp, Artificial Sequence
  chemically synthesized
gttttagagttcttactctt

SEQ ID NO: 20728 - DNA, 20 bp, Artificial Sequence
  chemically synthesized
tcttactctttggcttttga

SEQ ID NO: 20729 - DNA, 20 bp, Artificial Sequence
  chemically synthesized
agtttgactataatgtgctg

SEQ ID NO: 20730 - DNA, 20 bp, Artificial Sequence
  chemically synthesized
tttgactataatgtgctgtg

SEQ ID NO: 20731 - DNA, 20 bp, Artificial Sequence
  chemically synthesized
gactataatgtgctgtggag

SEQ ID NO: 20732 - DNA, 20 bp, Artificial Sequence
  chemically synthesized
ctataatgtgctgtggagaa

SEQ ID NO: 20733 - DNA, 20 bp, Artificial Sequence
  chemically synthesized
gctttttgcattatattatt

SEQ ID NO: 20734 - DNA, 20 bp, Artificial Sequence
  chemically synthesized
ctttttgcattatattattt

SEQ ID NO: 20735 - DNA, 20 bp, Artificial Sequence
  chemically synthesized
atttctgattttcatttgtc

SEQ ID NO: 20736 - DNA, 20 bp, Artificial Sequence
  chemically synthesized
tggatgtctacatttcttgc

SEQ ID NO: 20737 - DNA, 20 bp, Artificial Sequence
  chemically synthesized
catttcttgctagacttgac

SEQ ID NO: 20738 - DNA, 20 bp, Artificial Sequence
  chemically synthesized
tgctagacttgacaagtttt

SEQ ID NO: 20739 - DNA, 20 bp, Artificial Sequence
  chemically synthesized
tcagctattgtgttgttacg

SEQ ID NO: 20740 - DNA, 20 bp, Artificial Sequence
  chemically synthesized
cagctattgtgttgttacgt

SEQ ID NO: 20741 - DNA, 20 bp, Artificial Sequence
  chemically synthesized
ttcatgttctctttaccttc

SEQ ID NO: 20742 - DNA, 20 bp, Artificial Sequence
  chemically synthesized
tcatgttctctttaccttct

SEQ ID NO: 20743 - DNA, 20 bp, Artificial Sequence
  chemically synthesized
ttgaatatttgttcacttta

SEQ ID NO: 20744 - DNA, 20 bp, Artificial Sequence
  chemically synthesized
tttcctttctatcatttgac

SEQ ID NO: 20745 - DNA, 20 bp, Artificial Sequence
  chemically synthesized
atttgaccagctaattttaa

SEQ ID NO: 20746 - DNA, 20 bp, Artificial Sequence
  chemically synthesized
attttaaaagacctgtcttc

SEQ ID NO: 20747 - DNA, 20 bp, Artificial Sequence
  chemically synthesized
cttgatctgatctattgttg

SEQ ID NO: 20748 - DNA, 20 bp, Artificial Sequence
  chemically synthesized
atttctttcaataaactctt

SEQ ID NO: 20749 - DNA, 20 bp, Artificial Sequence
  chemically synthesized
ttcaataaactcttcagtta

SEQ ID NO: 20750 - DNA, 20 bp, Artificial Sequence
  chemically synthesized
tcagttacagaatttctgtt

SEQ ID NO: 20751 - DNA, 20 bp, Artificial Sequence
  chemically synthesized
ttcttgttgtatctatctct

SEQ ID NO: 20752 - DNA, 20 bp, Artificial Sequence
  chemically synthesized
tcttgttgtatctatctctt

SEQ ID NO: 20753 - DNA, 20 bp, Artificial Sequence
  chemically synthesized
tttctttttattgtttatct

SEQ ID NO: 20754 - DNA, 20 bp, Artificial Sequence
  chemically synthesized
gagttctcttgtgtctcact

SEQ ID NO: 20755 - DNA, 20 bp, Artificial Sequence
  chemically synthesized
cttccttaatatcaacattt

SEQ ID NO: 20756 - DNA, 20 bp, Artificial Sequence
  chemically synthesized
acattttggattcttttttc

SEQ ID NO: 20757 - DNA, 20 bp, Artificial Sequence
  chemically synthesized
taaatgtcttttttttccac

SEQ ID NO: 20758 - DNA, 20 bp, Artificial Sequence
  chemically synthesized
tccactggcttatgttgctg

SEQ ID NO: 20759 - DNA, 20 bp, Artificial Sequence
  chemically synthesized
gaagaattattaaattcctt

SEQ ID NO: 20760 - DNA, 20 bp, Artificial Sequence
  chemically synthesized
gaattattaaattcctttgg

SEQ ID NO: 20761 - DNA, 20 bp, Artificial Sequence
  chemically synthesized
tgcattgatatctctgcatc

SEQ ID NO: 20762 - DNA, 20 bp, Artificial Sequence
  chemically synthesized
ggtgtaatgattgctgcttc

SEQ ID NO: 20763 - DNA, 20 bp, Artificial Sequence
  chemically synthesized
gttttgtaaatttgtttttg

SEQ ID NO: 20764 - DNA, 20 bp, Artificial Sequence
  chemically synthesized
ttttgtaaatttgtttttgt

SEQ ID NO: 20765 - DNA, 20 bp, Artificial Sequence
  chemically synthesized
tttgtaaatttgtttttgta

SEQ ID NO: 20766 - DNA, 20 bp, Artificial Sequence
  chemically synthesized
ttgtaaatttgtttttgtag

SEQ ID NO: 20767 - DNA, 20 bp, Artificial Sequence
  chemically synthesized
taaatttgtttttgtagggg

SEQ ID NO: 20768 - DNA, 20 bp, Artificial Sequence
  chemically synthesized
taggggaagacttttttctg

SEQ ID NO: 20769 - DNA, 20 bp, Artificial Sequence
  chemically synthesized
ttttttctgaagatgtatct

SEQ ID NO: 20770 - DNA, 20 bp, Artificial Sequence
  chemically synthesized
gatgtatcttggtgttgatt

SEQ ID NO: 20771 - DNA, 20 bp, Artificial Sequence
  chemically synthesized
gtatcttggtgttgattgag

SEQ ID NO: 20772 - DNA, 20 bp, Artificial Sequence
  chemically synthesized
tatcttggtgttgattgagt

SEQ ID NO: 20773 - DNA, 20 bp, Artificial Sequence
  chemically synthesized
atcttggtgttgattgagta

SEQ ID NO: 20774 - DNA, 20 bp, Artificial Sequence
  chemically synthesized
ggcactttgattttgatttc

SEQ ID NO: 20775 - DNA, 20 bp, Artificial Sequence
  chemically synthesized
gcactttgattttgatttct

SEQ ID NO: 20776 - DNA, 20 bp, Artificial Sequence
  chemically synthesized
ttttgatttctaggtgcata

SEQ ID NO: 20777 - DNA, 20 bp, Artificial Sequence
  chemically synthesized
tgatttctaggtgcatacag

SEQ ID NO: 20778 - DNA, 20 bp, Artificial Sequence
  chemically synthesized
tctaggtgcatacagcagca

SEQ ID NO: 20779 - DNA, 20 bp, Artificial Sequence
  chemically synthesized
gtcttcatattatttttttt

SEQ ID NO: 20780 - DNA, 20 bp, Artificial Sequence
  chemically synthesized
tattttttttcagctgccaa

SEQ ID NO: 20781 - DNA, 20 bp, Artificial Sequence
  chemically synthesized
tcagctgccaacagtatcat

SEQ ID NO: 20782 - DNA, 20 bp, Artificial Sequence
  chemically synthesized
atcagtgtctgtgatttttt

SEQ ID NO: 20783 - DNA, 20 bp, Artificial Sequence
  chemically synthesized
agtgtctgtgattttttcag

SEQ ID NO: 20784 - DNA, 20 bp, Artificial Sequence
  chemically synthesized
ctgtgattttttcagtggct

SEQ ID NO: 20785 - DNA, 20 bp, Artificial Sequence
  chemically synthesized
tgtgattttttcagtggctt

SEQ ID NO: 20786 - DNA, 20 bp, Artificial Sequence
  chemically synthesized
gtgattttttcagtggctta

SEQ ID NO: 20787 - DNA, 20 bp, Artificial Sequence
  chemically synthesized
gtggcttagggtgcatttgt

SEQ ID NO: 20788 - DNA, 20 bp, Artificial Sequence
  chemically synthesized
ttagggtgcatttgttagtg

SEQ ID NO: 20789 - DNA, 20 bp, Artificial Sequence
  chemically synthesized
tagggtgcatttgttagtga

SEQ ID NO: 20790 - DNA, 20 bp, Artificial Sequence
  chemically synthesized
ggtgcatttgttagtgaagg

SEQ ID NO: 20791 - DNA, 20 bp, Artificial Sequence
  chemically synthesized
ttgttagtgaaggtggtgat

SEQ ID NO: 20792 - DNA, 20 bp, Artificial Sequence
  chemically synthesized
tgttagtgaaggtggtgatg

SEQ ID NO: 20793 - DNA, 20 bp, Artificial Sequence
  chemically synthesized
aggtggtgatgaggttgtgc

SEQ ID NO: 20794 - DNA, 20 bp, Artificial Sequence
  chemically synthesized
gtggtgatgaggttgtgctg

SEQ ID NO: 20795 - DNA, 20 bp, Artificial Sequence
  chemically synthesized
gatgaggttgtgctggagac

SEQ ID NO: 20796 - DNA, 20 bp, Artificial Sequence
  chemically synthesized
gtgctggagacaagaatatc

SEQ ID NO: 20797 - DNA, 20 bp, Artificial Sequence
  chemically synthesized
ctggagacaagaatatcaag

SEQ ID NO: 20798 - DNA, 20 bp, Artificial Sequence
  chemically synthesized
tggagacaagaatatcaagt

SEQ ID NO: 20799 - DNA, 20 bp, Artificial Sequence
  chemically synthesized
gacaagaatatcaagtgggc

SEQ ID NO: 20800 - DNA, 20 bp, Artificial Sequence
  chemically synthesized
atatcaagtgggccagtcct

SEQ ID NO: 20801 - DNA, 20 bp, Artificial Sequence
  chemically synthesized
agtgggccagtccttggccc

SEQ ID NO: 20802 - DNA, 20 bp, Artificial Sequence
  chemically synthesized
gggccagtccttggccccag

SEQ ID NO: 20803 - DNA, 20 bp, Artificial Sequence
  chemically synthesized
ccagtccttggccccagtgg

SEQ ID NO: 20804 - DNA, 20 bp, Artificial Sequence
  chemically synthesized
gtccttggccccagtggtgg

SEQ ID NO: 20805 - DNA, 20 bp, Artificial Sequence
  chemically synthesized
cttggccccagtggtggtgg

SEQ ID NO: 20806 - DNA, 20 bp, Artificial Sequence
  chemically synthesized
ttggccccagtggtggtggt

SEQ ID NO: 20807 - DNA, 20 bp, Artificial Sequence
  chemically synthesized
cccagtggtggtggtgggcc

SEQ ID NO: 20808 - DNA, 20 bp, Artificial Sequence
  chemically synthesized
gggcctagcattcctgtcct

SEQ ID NO: 20809 - DNA, 20 bp, Artificial Sequence
  chemically synthesized
ggcctagcattcctgtcctt

SEQ ID NO: 20810 - DNA, 20 bp, Artificial Sequence
  chemically synthesized
attcctgtccttgggcccca

SEQ ID NO: 20811 - DNA, 20 bp, Artificial Sequence
  chemically synthesized
ggccccatggctgtgtacat

SEQ ID NO: 20812 - DNA, 20 bp, Artificial Sequence
  chemically synthesized
gctgtgtacattggcactga

SEQ ID NO: 20813 - DNA, 20 bp, Artificial Sequence
  chemically synthesized
acattggcactgatggtaat

SEQ ID NO: 20814 - DNA, 20 bp, Artificial Sequence
  chemically synthesized
ggcactgatggtaatgagtc

SEQ ID NO: 20815 - DNA, 20 bp, Artificial Sequence
  chemically synthesized
ctgatggtaatgagtctagt

SEQ ID NO: 20816 - DNA, 20 bp, Artificial Sequence
  chemically synthesized
tgatggtaatgagtctagtt

SEQ ID NO: 20817 - DNA, 20 bp, Artificial Sequence
  chemically synthesized
gtctagttgggttgattctt

SEQ ID NO: 20818 - DNA, 20 bp, Artificial Sequence
  chemically synthesized
tgggttgattctttggcctt

SEQ ID NO: 20819 - DNA, 20 bp, Artificial Sequence
  chemically synthesized
gggttgattctttggccttc

SEQ ID NO: 20820 - DNA, 20 bp, Artificial Sequence
  chemically synthesized
ttgattctttggccttcagg

SEQ ID NO: 20821 - DNA, 20 bp, Artificial Sequence
  chemically synthesized
tggccttcaggcagtttgct

SEQ ID NO: 20822 - DNA, 20 bp, Artificial Sequence
  chemically synthesized
ggccttcaggcagtttgctt

SEQ ID NO: 20823 - DNA, 20 bp, Artificial Sequence
  chemically synthesized
caggcagtttgcttgggtgt

SEQ ID NO: 20824 - DNA, 20 bp, Artificial Sequence
  chemically synthesized
gcagtttgcttgggtgtcag

SEQ ID NO: 20825 - DNA, 20 bp, Artificial Sequence
  chemically synthesized
gtttgcttgggtgtcagtag

SEQ ID NO: 20826 - DNA, 20 bp, Artificial Sequence
  chemically synthesized
ttgggtgtcagtagtggcca

SEQ ID NO: 20827 - DNA, 20 bp, Artificial Sequence
  chemically synthesized
ggtgtcagtagtggccatag

SEQ ID NO: 20828 - DNA, 20 bp, Artificial Sequence
  chemically synthesized
cagtagtggccatagtagac

SEQ ID NO: 20829 - DNA, 20 bp, Artificial Sequence
  chemically synthesized
agtagtggccatagtagact

SEQ ID NO: 20830 - DNA, 20 bp, Artificial Sequence
  chemically synthesized
gtggccatagtagactgggc

SEQ ID NO: 20831 - DNA, 20 bp, Artificial Sequence
  chemically synthesized
tagtagactgggctggtgtg

SEQ ID NO: 20832 - DNA, 20 bp, Artificial Sequence
  chemically synthesized
agtagactgggctggtgtgt

SEQ ID NO: 20833 - DNA, 20 bp, Artificial Sequence
  chemically synthesized
tgggctggtgtgtgggtcct

SEQ ID NO: 20834 - DNA, 20 bp, Artificial Sequence
  chemically synthesized
gggctggtgtgtgggtcctc

SEQ ID NO: 20835 - DNA, 20 bp, Artificial Sequence
  chemically synthesized
tgtgtgggtcctcaggcttc

SEQ ID NO: 20836 - DNA, 20 bp, Artificial Sequence
  chemically synthesized
tgggtcctcaggcttctgga

SEQ ID NO: 20837 - DNA, 20 bp, Artificial Sequence
  chemically synthesized
gtcctcaggcttctggacag

SEQ ID NO: 20838 - DNA, 20 bp, Artificial Sequence
  chemically synthesized
tcctcaggcttctggacagt

SEQ ID NO: 20839 - DNA, 20 bp, Artificial Sequence
  chemically synthesized
aggcttctggacagtgggtg

SEQ ID NO: 20840 - DNA, 20 bp, Artificial Sequence
  chemically synthesized
tctggacagtgggtgtggtg

SEQ ID NO: 20841 - DNA, 20 bp, Artificial Sequence
  chemically synthesized
ctggacagtgggtgtggtgt

SEQ ID NO: 20842 - DNA, 20 bp, Artificial Sequence
  chemically synthesized
agtgggtgtggtgtgggtga

SEQ ID NO: 20843 - DNA, 20 bp, Artificial Sequence
  chemically synthesized
tgtggtgtgggtgatggctg

SEQ ID NO: 20844 - DNA, 20 bp, Artificial Sequence
  chemically synthesized
ggtgatggctgtagcaactg

SEQ ID NO: 20845 - DNA, 20 bp, Artificial Sequence
  chemically synthesized
gtgatggctgtagcaactgc

SEQ ID NO: 20846 - DNA, 20 bp, Artificial Sequence
  chemically synthesized
gcaactgcaggacaaccctc

SEQ ID NO: 20847 - DNA, 20 bp, Artificial Sequence
  chemically synthesized
aggacaaccctctggctccc

SEQ ID NO: 20848 - DNA, 20 bp, Artificial Sequence
  chemically synthesized
acaaccctctggctcccaag

SEQ ID NO: 20849 - DNA, 20 bp, Artificial Sequence
  chemically synthesized
ggctcccaagcagtctgcac

SEQ ID NO: 20850 - DNA, 20 bp, Artificial Sequence
  chemically synthesized
caagcagtctgcactggtgt

SEQ ID NO: 20851 - DNA, 20 bp, Artificial Sequence
  chemically synthesized
gcagtctgcactggtgttgg

SEQ ID NO: 20852 - DNA, 20 bp, Artificial Sequence
  chemically synthesized
gtctgcactggtgttggtgg

SEQ ID NO: 20853 - DNA, 20 bp, Artificial Sequence
  chemically synthesized
ctggtgttggtggtggctgc

SEQ ID NO: 20854 - DNA, 20 bp, Artificial Sequence
  chemically synthesized
tggtgttggtggtggctgca

SEQ ID NO: 20855 - DNA, 20 bp, Artificial Sequence
  chemically synthesized
ggtgttggtggtggctgcaa

SEQ ID NO: 20856 - DNA, 20 bp, Artificial Sequence
  chemically synthesized
ggtggctgcaagggctgaat

SEQ ID NO: 20857 - DNA, 20 bp, Artificial Sequence
  chemically synthesized
gctgcaagggctgaatgagc

SEQ ID NO: 20858 - DNA, 20 bp, Artificial Sequence
  chemically synthesized
gggctgaatgagccagtctt

SEQ ID NO: 20859 - DNA, 20 bp, Artificial Sequence
  chemically synthesized
tgagccagtcttcagaccca

SEQ ID NO: 20860 - DNA, 20 bp, Artificial Sequence
  chemically synthesized
gagccagtcttcagacccac

SEQ ID NO: 20861 - DNA, 20 bp, Artificial Sequence
  chemically synthesized
ccagtcttcagacccacagg

SEQ ID NO: 20862 - DNA, 20 bp, Artificial Sequence
  chemically synthesized
agacccacaggtggcacatg

SEQ ID NO: 20863 - DNA, 20 bp, Artificial Sequence
  chemically synthesized
gacccacaggtggcacatgc

SEQ ID NO: 20864 - DNA, 20 bp, Artificial Sequence
  chemically synthesized
cccacaggtggcacatgcag

SEQ ID NO: 20865 - DNA, 20 bp, Artificial Sequence
  chemically synthesized
ccacaggtggcacatgcagg

SEQ ID NO: 20866 - DNA, 20 bp, Artificial Sequence
  chemically synthesized
gtggcacatgcaggaggtgc

SEQ ID NO: 20867 - DNA, 20 bp, Artificial Sequence
  chemically synthesized
gcaggaggtgccagttgtga

SEQ ID NO: 20868 - DNA, 20 bp, Artificial Sequence
  chemically synthesized
ggaggtgccagttgtgatgg

SEQ ID NO: 20869 - DNA, 20 bp, Artificial Sequence
  chemically synthesized
ggtgccagttgtgatggcag

SEQ ID NO: 20870 - DNA, 20 bp, Artificial Sequence
  chemically synthesized
gccagttgtgatggcagtgg

SEQ ID NO: 20871 - DNA, 20 bp, Artificial Sequence
  chemically synthesized
ttgtgatggcagtggcagat

SEQ ID NO: 20872 - DNA, 20 bp, Artificial Sequence
  chemically synthesized
tgtgatggcagtggcagatt

SEQ ID NO: 20873 - DNA, 20 bp, Artificial Sequence
  chemically synthesized
gatggcagtggcagattggg

SEQ ID NO: 20874 - DNA, 20 bp, Artificial Sequence
  chemically synthesized
atggcagtggcagattgggt

SEQ ID NO: 20875 - DNA, 20 bp, Artificial Sequence
  chemically synthesized
agattgggtaggcccatcat

SEQ ID NO: 20876 - DNA, 20 bp, Artificial Sequence
  chemically synthesized
gattgggtaggcccatcatc

SEQ ID NO: 20877 - DNA, 20 bp, Artificial Sequence
  chemically synthesized
taggcccatcatcaggcttc

SEQ ID NO: 20878 - DNA, 20 bp, Artificial Sequence
  chemically synthesized
aggcccatcatcaggcttct

SEQ ID NO: 20879 - DNA, 20 bp, Artificial Sequence
  chemically synthesized
gcccatcatcaggcttctgg

SEQ ID NO: 20880 - DNA, 20 bp, Artificial Sequence
  chemically synthesized
cccatcatcaggcttctggg

SEQ ID NO: 20881 - DNA, 20 bp, Artificial Sequence
  chemically synthesized
ccatcatcaggcttctggga

SEQ ID NO: 20882 - DNA, 20 bp, Artificial Sequence
  chemically synthesized
aggcttctgggagggttgct

SEQ ID NO: 20883 - DNA, 20 bp, Artificial Sequence
  chemically synthesized
ggcttctgggagggttgctt

SEQ ID NO: 20884 - DNA, 20 bp, Artificial Sequence
  chemically synthesized
tgggagggttgcttaggtac

SEQ ID NO: 20885 - DNA, 20 bp, Artificial Sequence
  chemically synthesized
ggttgcttaggtaccagtca

SEQ ID NO: 20886 - DNA, 20 bp, Artificial Sequence
  chemically synthesized
tgcttaggtaccagtcatgg

SEQ ID NO: 20887 - DNA, 20 bp, Artificial Sequence
  chemically synthesized
taggtaccagtcatggtgga

SEQ ID NO: 20888 - DNA, 20 bp, Artificial Sequence
  chemically synthesized
ccagtcatggtggatggcac

SEQ ID NO: 20889 - DNA, 20 bp, Artificial Sequence
  chemically synthesized
cagtcatggtggatggcaca

SEQ ID NO: 20890 - DNA, 20 bp, Artificial Sequence
  chemically synthesized
ggatggcacaaggctgtctc

SEQ ID NO: 20891 - DNA, 20 bp, Artificial Sequence
  chemically synthesized
gatggcacaaggctgtctct

SEQ ID NO: 20892 - DNA, 20 bp, Artificial Sequence
  chemically synthesized
caaggctgtctctgggttcc

SEQ ID NO: 20893 - DNA, 20 bp, Artificial Sequence
  chemically synthesized
gggttcccagacaacttgct

SEQ ID NO: 20894 - DNA, 20 bp, Artificial Sequence
  chemically synthesized
ggttcccagacaacttgctt

SEQ ID NO: 20895 - DNA, 20 bp, Artificial Sequence
  chemically synthesized
agacaacttgcttaggcatt

SEQ ID NO: 20896 - DNA, 20 bp, Artificial Sequence
  chemically synthesized
gacaacttgcttaggcattg

SEQ ID NO: 20897 - DNA, 20 bp, Artificial Sequence
  chemically synthesized
aacttgcttaggcattgagg

SEQ ID NO: 20898 - DNA, 20 bp, Artificial Sequence
  chemically synthesized
acttgcttaggcattgagga

SEQ ID NO: 20899 - DNA, 20 bp, Artificial Sequence
  chemically synthesized
cttaggcattgaggaaggca

SEQ ID NO: 20900 - DNA, 20 bp, Artificial Sequence
  chemically synthesized
ggcattgaggaaggcaaagc

SEQ ID NO: 20901 - DNA, 20 bp, Artificial Sequence
  chemically synthesized
gcattgaggaaggcaaagcc

SEQ ID NO: 20902 - DNA, 20 bp, Artificial Sequence
  chemically synthesized
tgaggaaggcaaagccaggc

SEQ ID NO: 20903 - DNA, 20 bp, Artificial Sequence
  chemically synthesized
gaggaaggcaaagccaggct

SEQ ID NO: 20904 - DNA, 20 bp, Artificial Sequence
  chemically synthesized
aggctgggtgttcctgacct

SEQ ID NO: 20905 - DNA, 20 bp, Artificial Sequence
  chemically synthesized
ggctgggtgttcctgacctc

SEQ ID NO: 20906 - DNA, 20 bp, Artificial Sequence
  chemically synthesized
gttcctgacctcaggccact

SEQ ID NO: 20907 - DNA, 20 bp, Artificial Sequence
  chemically synthesized
cctgacctcaggccactcag

SEQ ID NO: 20908 - DNA, 20 bp, Artificial Sequence
  chemically synthesized
aggccactcagtggtgtgtg

SEQ ID NO: 20909 - DNA, 20 bp, Artificial Sequence
  chemically synthesized
tcagtggtgtgtgtggacac

SEQ ID NO: 20910 - DNA, 20 bp, Artificial Sequence
  chemically synthesized
tgtgtggacaccggctatca

SEQ ID NO: 20911 - DNA, 20 bp, Artificial Sequence
  chemically synthesized
gtgtggacaccggctatcat

SEQ ID NO: 20912 - DNA, 20 bp, Artificial Sequence
  chemically synthesized
ggacaccggctatcataggc

SEQ ID NO: 20913 - DNA, 20 bp, Artificial Sequence
  chemically synthesized
acaccggctatcataggctg

SEQ ID NO: 20914 - DNA, 20 bp, Artificial Sequence
  chemically synthesized
ccggctatcataggctggag

SEQ ID NO: 20915 - DNA, 20 bp, Artificial Sequence
  chemically synthesized
ggctatcataggctggagtg

SEQ ID NO: 20916 - DNA, 20 bp, Artificial Sequence
  chemically synthesized
ggctggagtggagtgatcct

SEQ ID NO: 20917 - DNA, 20 bp, Artificial Sequence
  chemically synthesized
gctggagtggagtgatcctc

SEQ ID NO: 20918 - DNA, 20 bp, Artificial Sequence
  chemically synthesized
tggagtgatcctcaggcccc

SEQ ID NO: 20919 - DNA, 20 bp, Artificial Sequence
  chemically synthesized
agtgatcctcaggcccccag

SEQ ID NO: 20920 - DNA, 20 bp, Artificial Sequence
  chemically synthesized
aggcccccagcagaatgcct

SEQ ID NO: 20921 - DNA, 20 bp, Artificial Sequence
  chemically synthesized
agcagaatgcctgagtgaat

SEQ ID NO: 20922 - DNA, 20 bp, Artificial Sequence
  chemically synthesized
agaatgcctgagtgaattag

SEQ ID NO: 20923 - DNA, 20 bp, Artificial Sequence
  chemically synthesized
gcattgttgccctgctcttg

SEQ ID NO: 20924 - DNA, 20 bp, Artificial Sequence
  chemically synthesized
cattgttgccctgctcttga

SEQ ID NO: 20925 - DNA, 20 bp, Artificial Sequence
  chemically synthesized
attgttgccctgctcttgaa

SEQ ID NO: 20926 - DNA, 20 bp, Artificial Sequence
  chemically synthesized
ttgttgccctgctcttgaag

SEQ ID NO: 20927 - DNA, 20 bp, Artificial Sequence
  chemically synthesized
gccctgctcttgaaggggtg

SEQ ID NO: 20928 - DNA, 20 bp, Artificial Sequence
  chemically synthesized
ccctgctcttgaaggggtgc

SEQ ID NO: 20929 - DNA, 20 bp, Artificial Sequence
  chemically synthesized
cctgctcttgaaggggtgcg

SEQ ID NO: 20930 - DNA, 20 bp, Artificial Sequence
  chemically synthesized
ggtgcggggtgtgttgcttt

SEQ ID NO: 20931 - DNA, 20 bp, Artificial Sequence
  chemically synthesized
gcggggtgtgttgctttcag

SEQ ID NO: 20932 - DNA, 20 bp, Artificial Sequence
  chemically synthesized
gggtgtgttgctttcagtgg

SEQ ID NO: 20933 - DNA, 20 bp, Artificial Sequence
  chemically synthesized
tgtgttgctttcagtggcag

SEQ ID NO: 20934 - DNA, 20 bp, Artificial Sequence
  chemically synthesized
tcagtggcagcagctataaa

SEQ ID NO: 20935 - DNA, 20 bp, Artificial Sequence
  chemically synthesized
cagtggcagcagctataaat

SEQ ID NO: 20936 - DNA, 20 bp, Artificial Sequence
  chemically synthesized
agcagctataaatgggttgc

SEQ ID NO: 20937 - DNA, 20 bp, Artificial Sequence
  chemically synthesized
agctataaatgggttgctgg

SEQ ID NO: 20938 - DNA, 20 bp, Artificial Sequence
  chemically synthesized
gctataaatgggttgctggt

SEQ ID NO: 20939 - DNA, 20 bp, Artificial Sequence
  chemically synthesized
ttgctggtgggcatgtgttt

SEQ ID NO: 20940 - DNA, 20 bp, Artificial Sequence
  chemically synthesized
gtgggcatgtgtttcagccc

SEQ ID NO: 20941 - DNA, 20 bp, Artificial Sequence
  chemically synthesized
gcatgtgtttcagccccaga

SEQ ID NO: 20942 - DNA, 20 bp, Artificial Sequence
  chemically synthesized
tgtgtttcagccccagatgg

SEQ ID NO: 20943 - DNA, 20 bp, Artificial Sequence
  chemically synthesized
cagccccagatggtggctgc

SEQ ID NO: 20944 - DNA, 20 bp, Artificial Sequence
  chemically synthesized
ccccagatggtggctgcaag

SEQ ID NO: 20945 - DNA, 20 bp, Artificial Sequence
  chemically synthesized
cccagatggtggctgcaagt

SEQ ID NO: 20946 - DNA, 20 bp, Artificial Sequence
  chemically synthesized
ccagatggtggctgcaagtg

SEQ ID NO: 20947 - DNA, 20 bp, Artificial Sequence
  chemically synthesized
gatggtggctgcaagtgggg

SEQ ID NO: 20948 - DNA, 20 bp, Artificial Sequence
  chemically synthesized
caagtggggtagcattttct

SEQ ID NO: 20949 - DNA, 20 bp, Artificial Sequence
  chemically synthesized
aagtggggtagcattttctt

SEQ ID NO: 20950 - DNA, 20 bp, Artificial Sequence
  chemically synthesized
agtggggtagcattttctta

SEQ ID NO: 20951 - DNA, 20 bp, Artificial Sequence
  chemically synthesized
tggggtagcattttcttagg

SEQ ID NO: 20952 - DNA, 20 bp, Artificial Sequence
  chemically synthesized
ttagggagcttataaatgtg

SEQ ID NO: 20953 - DNA, 20 bp, Artificial Sequence
  chemically synthesized
gggagcttataaatgtgtag

SEQ ID NO: 20954 - DNA, 20 bp, Artificial Sequence
  chemically synthesized
atgtgtagcagccctgctac

SEQ ID NO: 20955 - DNA, 20 bp, Artificial Sequence
  chemically synthesized
tgtgtagcagccctgctact

SEQ ID NO: 20956 - DNA, 20 bp, Artificial Sequence
  chemically synthesized
gtgtagcagccctgctactg

SEQ ID NO: 20957 - DNA, 20 bp, Artificial Sequence
  chemically synthesized
tgtagcagccctgctactgg

SEQ ID NO: 20958 - DNA, 20 bp, Artificial Sequence
  chemically synthesized
agcagccctgctactggggg

SEQ ID NO: 20959 - DNA, 20 bp, Artificial Sequence
  chemically synthesized
gcagccctgctactgggggt

SEQ ID NO: 20960 - DNA, 20 bp, Artificial Sequence
  chemically synthesized
cagccctgctactgggggtg

SEQ ID NO: 20961 - DNA, 20 bp, Artificial Sequence
  chemically synthesized
agccctgctactgggggtgg

SEQ ID NO: 20962 - DNA, 20 bp, Artificial Sequence
  chemically synthesized
ccctgctactgggggtgggg

SEQ ID NO: 20963 - DNA, 20 bp, Artificial Sequence
  chemically synthesized
ctaatgacacactttatccc

SEQ ID NO: 20964 - DNA, 20 bp, Artificial Sequence
  chemically synthesized
acacactttatccctggtga

SEQ ID NO: 20965 - DNA, 20 bp, Artificial Sequence
  chemically synthesized
cactttatccctggtgacag

SEQ ID NO: 20966 - DNA, 20 bp, Artificial Sequence
  chemically synthesized
ttatccctggtgacagcagc

SEQ ID NO: 20967 - DNA, 20 bp, Artificial Sequence
  chemically synthesized
tccctggtgacagcagccag

SEQ ID NO: 20968 - DNA, 20 bp, Artificial Sequence
  chemically synthesized
ctggtgacagcagccagcag

SEQ ID NO: 20969 - DNA, 20 bp, Artificial Sequence
  chemically synthesized
cagcagccagcagtagcact

SEQ ID NO: 20970 - DNA, 20 bp, Artificial Sequence
  chemically synthesized
ccagcagtagcactcagctg

SEQ ID NO: 20971 - DNA, 20 bp, Artificial Sequence
  chemically synthesized
cagcagtagcactcagctgt

SEQ ID NO: 20972 - DNA, 20 bp, Artificial Sequence
  chemically synthesized
cagtagcactcagctgtggg

SEQ ID NO: 20973 - DNA, 20 bp, Artificial Sequence
  chemically synthesized
agtagcactcagctgtgggt

SEQ ID NO: 20974 - DNA, 20 bp, Artificial Sequence
  chemically synthesized
gtagcactcagctgtgggtg

SEQ ID NO: 20975 - DNA, 20 bp, Artificial Sequence
  chemically synthesized
tagcactcagctgtgggtgg

SEQ ID NO: 20976 - DNA, 20 bp, Artificial Sequence
  chemically synthesized
cagctgtgggtgggggatgt

SEQ ID NO: 20977 - DNA, 20 bp, Artificial Sequence
  chemically synthesized
ctgtgggtgggggatgtcag

SEQ ID NO: 20978 - DNA, 20 bp, Artificial Sequence
  chemically synthesized
gtgggtgggggatgtcagca

SEQ ID NO: 20979 - DNA, 20 bp, Artificial Sequence
  chemically synthesized
gggggatgtcagcagagctt

SEQ ID NO: 20980 - DNA, 20 bp, Artificial Sequence
  chemically synthesized
ggggatgtcagcagagcttc

SEQ ID NO: 20981 - DNA, 20 bp, Artificial Sequence
  chemically synthesized
gggatgtcagcagagcttca

SEQ ID NO: 20982 - DNA, 20 bp, Artificial Sequence
  chemically synthesized
tcagcagagcttcagggatg

SEQ ID NO: 20983 - DNA, 20 bp, Artificial Sequence
  chemically synthesized
agcagagcttcagggatgta

SEQ ID NO: 20984 - DNA, 20 bp, Artificial Sequence
  chemically synthesized
gcttcagggatgtagagatg

SEQ ID NO: 20985 - DNA, 20 bp, Artificial Sequence
  chemically synthesized
tgtagagatgcagatgatgt

SEQ ID NO: 20986 - DNA, 20 bp, Artificial Sequence
  chemically synthesized
gtagagatgcagatgatgtt

SEQ ID NO: 20987 - DNA, 20 bp, Artificial Sequence
  chemically synthesized
tagagatgcagatgatgttg

SEQ ID NO: 20988 - DNA, 20 bp, Artificial Sequence
  chemically synthesized
tgcagatgatgttggggtct

SEQ ID NO: 20989 - DNA, 20 bp, Artificial Sequence
  chemically synthesized
gcagatgatgttggggtctg

SEQ ID NO: 20990 - DNA, 20 bp, Artificial Sequence
  chemically synthesized
gtctgaggaacgatgtcatc

SEQ ID NO: 20991 - DNA, 20 bp, Artificial Sequence
  chemically synthesized
tgaggaacgatgtcatctgg

SEQ ID NO: 20992 - DNA, 20 bp, Artificial Sequence
  chemically synthesized
gaggaacgatgtcatctggt

SEQ ID NO: 20993 - DNA, 20 bp, Artificial Sequence
  chemically synthesized
cgatgtcatctggtgggtgt

SEQ ID NO: 20994 - DNA, 20 bp, Artificial Sequence
  chemically synthesized
gatgtcatctggtgggtgtt

SEQ ID NO: 20995 - DNA, 20 bp, Artificial Sequence
  chemically synthesized
tgggtgttgggctctcaaaa

SEQ ID NO: 20996 - DNA, 20 bp, Artificial Sequence
  chemically synthesized
caaaatggcaccttgctgct

SEQ ID NO: 20997 - DNA, 20 bp, Artificial Sequence
  chemically synthesized
ggcaccttgctgctcagtaa

SEQ ID NO: 20998 - DNA, 20 bp, Artificial Sequence
  chemically synthesized
gcaccttgctgctcagtaat

SEQ ID NO: 20999 - DNA, 20 bp, Artificial Sequence
  chemically synthesized
caccttgctgctcagtaatg

SEQ ID NO: 21000 - DNA, 20 bp, Artificial Sequence
  chemically synthesized
ttgctgctcagtaatgggga

SEQ ID NO: 21001 - DNA, 20 bp, Artificial Sequence
  chemically synthesized
ctgctcagtaatggggatgg

SEQ ID NO: 21002 - DNA, 20 bp, Artificial Sequence
  chemically synthesized
tgctcagtaatggggatggc

SEQ ID NO: 21003 - DNA, 20 bp, Artificial Sequence
  chemically synthesized
gctcagtaatggggatggca

SEQ ID NO: 21004 - DNA, 20 bp, Artificial Sequence
  chemically synthesized
ctcagtaatggggatggcag

SEQ ID NO: 21005 - DNA, 20 bp, Artificial Sequence
  chemically synthesized
agtaatggggatggcagggg

SEQ ID NO: 21006 - DNA, 20 bp, Artificial Sequence
  chemically synthesized
gtaatggggatggcaggggt

SEQ ID NO: 21007 - DNA, 20 bp, Artificial Sequence
  chemically synthesized
gggatggcaggggtgggacc

SEQ ID NO: 21008 - DNA, 20 bp, Artificial Sequence
  chemically synthesized
tggcaggggtgggacccagt

SEQ ID NO: 21009 - DNA, 20 bp, Artificial Sequence
  chemically synthesized
gcaggggtgggacccagtga

SEQ ID NO: 21010 - DNA, 20 bp, Artificial Sequence
  chemically synthesized
cccagtgagagctccttctc

SEQ ID NO: 21011 - DNA, 20 bp, Artificial Sequence
  chemically synthesized
cagtgagagctccttctctg

SEQ ID NO: 21012 - DNA, 20 bp, Artificial Sequence
  chemically synthesized
caatgcctttgtgcgattgc

SEQ ID NO: 21013 - DNA, 20 bp, Artificial Sequence
  chemically synthesized
aatgcctttgtgcgattgct

SEQ ID NO: 21014 - DNA, 20 bp, Artificial Sequence
  chemically synthesized
gcctttgtgcgattgctggg

SEQ ID NO: 21015 - DNA, 20 bp, Artificial Sequence
  chemically synthesized
tgctgggcagttccttatga

SEQ ID NO: 21016 - DNA, 20 bp, Artificial Sequence
  chemically synthesized
cagttccttatgatagtctc

SEQ ID NO: 21017 - DNA, 20 bp, Artificial Sequence
  chemically synthesized
agttccttatgatagtctca

SEQ ID NO: 21018 - DNA, 20 bp, Artificial Sequence
  chemically synthesized
tgatagtctcaaggcctgca

SEQ ID NO: 21019 - DNA, 20 bp, Artificial Sequence
  chemically synthesized
gtctcaaggcctgcatggtc

SEQ ID NO: 21020 - DNA, 20 bp, Artificial Sequence
  chemically synthesized
tctcaaggcctgcatggtca

SEQ ID NO: 21021 - DNA, 20 bp, Artificial Sequence
  chemically synthesized
ctcaaggcctgcatggtcaa

SEQ ID NO: 21022 - DNA, 20 bp, Artificial Sequence
  chemically synthesized
atggtcaagggactctcctg

SEQ ID NO: 21023 - DNA, 20 bp, Artificial Sequence
  chemically synthesized
tcaagggactctcctgtggc

SEQ ID NO: 21024 - DNA, 20 bp, Artificial Sequence
  chemically synthesized
caagggactctcctgtggct

SEQ ID NO: 21025 - DNA, 20 bp, Artificial Sequence
  chemically synthesized
tctcctgtggctaggattcc

SEQ ID NO: 21026 - DNA, 20 bp, Artificial Sequence
  chemically synthesized
tcctgtggctaggattcctg

SEQ ID NO: 21027 - DNA, 20 bp, Artificial Sequence
  chemically synthesized
gattcctggagtccataatg

SEQ ID NO: 21028 - DNA, 20 bp, Artificial Sequence
  chemically synthesized
tggagtccataatgcagatg

SEQ ID NO: 21029 - DNA, 20 bp, Artificial Sequence
  chemically synthesized
ataatgcagatgtggaccac

SEQ ID NO: 21030 - DNA, 20 bp, Artificial Sequence
  chemically synthesized
taatgcagatgtggaccact

SEQ ID NO: 21031 - DNA, 20 bp, Artificial Sequence
  chemically synthesized
atgcagatgtggaccactgg

SEQ ID NO: 21032 - DNA, 20 bp, Artificial Sequence
  chemically synthesized
agatgtggaccactgggagt

SEQ ID NO: 21033 - DNA, 20 bp, Artificial Sequence
  chemically synthesized
tcacttaactttcgatgcac

SEQ ID NO: 21034 - DNA, 20 bp, Artificial Sequence
  chemically synthesized
cacttaactttcgatgcact

SEQ ID NO: 21035 - DNA, 20 bp, Artificial Sequence
  chemically synthesized
acttaactttcgatgcactg

SEQ ID NO: 21036 - DNA, 20 bp, Artificial Sequence
  chemically synthesized
ttaactttcgatgcactggg

SEQ ID NO: 21037 - DNA, 20 bp, Artificial Sequence
  chemically synthesized
gatgcactggggagcctctc

SEQ ID NO: 21038 - DNA, 20 bp, Artificial Sequence
  chemically synthesized
ggggagcctctctggcctca

SEQ ID NO: 21039 - DNA, 20 bp, Artificial Sequence
  chemically synthesized
ggagcctctctggcctcaca

SEQ ID NO: 21040 - DNA, 20 bp, Artificial Sequence
  chemically synthesized
gagcctctctggcctcacag

SEQ ID NO: 21041 - DNA, 20 bp, Artificial Sequence
  chemically synthesized
gcctcacagaggatccctac

SEQ ID NO: 21042 - DNA, 20 bp, Artificial Sequence
  chemically synthesized
cctcacagaggatccctact

SEQ ID NO: 21043 - DNA, 20 bp, Artificial Sequence
  chemically synthesized
cacagaggatccctactggg

SEQ ID NO: 21044 - DNA, 20 bp, Artificial Sequence
  chemically synthesized
acagaggatccctactgggt

SEQ ID NO: 21045 - DNA, 20 bp, Artificial Sequence
  chemically synthesized
ttccctccccttcattgcct

SEQ ID NO: 21046 - DNA, 20 bp, Artificial Sequence
  chemically synthesized
gtcacttctctgttgaattc

SEQ ID NO: 21047 - DNA, 20 bp, Artificial Sequence
  chemically synthesized
ttccagaattctctcttatg

SEQ ID NO: 21048 - DNA, 20 bp, Artificial Sequence
  chemically synthesized
tccagaattctctcttatgt

SEQ ID NO: 21049 - DNA, 20 bp, Artificial Sequence
  chemically synthesized
ggattttctacttactattt

SEQ ID NO: 21050 - DNA, 20 bp, Artificial Sequence
  chemically synthesized
cttactattttggttctttg

SEQ ID NO: 21051 - DNA, 20 bp, Artificial Sequence
  chemically synthesized
tactattttggttctttgtg

SEQ ID NO: 21052 - DNA, 20 bp, Artificial Sequence
  chemically synthesized
actattttggttctttgtgg

SEQ ID NO: 21053 - DNA, 20 bp, Artificial Sequence
  chemically synthesized
tattttggttctttgtggag

SEQ ID NO: 21054 - DNA, 20 bp, Artificial Sequence
  chemically synthesized
attttggttctttgtggagg

SEQ ID NO: 21055 - DNA, 20 bp, Artificial Sequence
  chemically synthesized
tggttctttgtggaggaggt

SEQ ID NO: 21056 - DNA, 20 bp, Artificial Sequence
  chemically synthesized
tttgtggaggaggtgagtgt

SEQ ID NO: 21057 - DNA, 20 bp, Artificial Sequence
  chemically synthesized
aggtgagtgtcagctgccct

SEQ ID NO: 21058 - DNA, 20 bp, Artificial Sequence
  chemically synthesized
gagtgtcagctgcccttagt

SEQ ID NO: 21059 - DNA, 20 bp, Artificial Sequence
  chemically synthesized
gcccttagtcagtaatcttc

SEQ ID NO: 21060 - DNA, 20 bp, Artificial Sequence
  chemically synthesized
cccttcccttgaaatttttt

SEQ ID NO: 21061 - DNA, 20 bp, Artificial Sequence
  chemically synthesized
ctttatgtttttatttctaa

SEQ ID NO: 21062 - DNA, 20 bp, Artificial Sequence
  chemically synthesized
ttttatttctaatagactga

SEQ ID NO: 21063 - DNA, 20 bp, Artificial Sequence
  chemically synthesized
ttatttctaatagactgaaa

SEQ ID NO: 21064 - DNA, 20 bp, Artificial Sequence
  chemically synthesized
aatcatattttaaacactct

SEQ ID NO: 21065 - DNA, 20 bp, Artificial Sequence
  chemically synthesized
atcatattttaaacactcta

SEQ ID NO: 21066 - DNA, 20 bp, Artificial Sequence
  chemically synthesized
ttaaacactctaaggctata

SEQ ID NO: 21067 - DNA, 20 bp, Artificial Sequence
  chemically synthesized
taaacactctaaggctatat

SEQ ID NO: 21068 - DNA, 20 bp, Artificial Sequence
  chemically synthesized
aaacactctaaggctatatg

SEQ ID NO: 21069 - DNA, 20 bp, Artificial Sequence
  chemically synthesized
aacactctaaggctatatgg

SEQ ID NO: 21070 - DNA, 20 bp, Artificial Sequence
  chemically synthesized
gctatatgggggactatctg

SEQ ID NO: 21071 - DNA, 20 bp, Artificial Sequence
  chemically synthesized
ctatatgggggactatctga

SEQ ID NO: 21072 - DNA, 20 bp, Artificial Sequence
  chemically synthesized
gggggactatctgaaggcct

SEQ ID NO: 21073 - DNA, 20 bp, Artificial Sequence
  chemically synthesized
actatctgaaggcctcagat

SEQ ID NO: 21074 - DNA, 20 bp, Artificial Sequence
  chemically synthesized
tgaaggcctcagatgagtaa

SEQ ID NO: 21075 - DNA, 20 bp, Artificial Sequence
  chemically synthesized
aggcctcagatgagtaaaag

SEQ ID NO: 21076 - DNA, 20 bp, Artificial Sequence
  chemically synthesized
cctcagatgagtaaaagaag

SEQ ID NO: 21077 - DNA, 20 bp, Artificial Sequence
  chemically synthesized
gagtaaaagaagtagcgaat

SEQ ID NO: 21078 - DNA, 20 bp, Artificial Sequence
  chemically synthesized
atcatttgtttcttcaaata

SEQ ID NO: 21079 - DNA, 20 bp, Artificial Sequence
  chemically synthesized
tatttcccccttatgttctt

SEQ ID NO: 21080 - DNA, 20 bp, Artificial Sequence
  chemically synthesized
aaaaatgtttgcatctacca

SEQ ID NO: 21081 - DNA, 20 bp, Artificial Sequence
  chemically synthesized
aaatacgtaatctaacaaac

SEQ ID NO: 21082 - DNA, 20 bp, Artificial Sequence
  chemically synthesized
aatacgtaatctaacaaaca

SEQ ID NO: 21083 - DNA, 20 bp, Artificial Sequence
  chemically synthesized
ctaacaaacaaggatgtttt

SEQ ID NO: 21084 - DNA, 20 bp, Artificial Sequence
  chemically synthesized
aaggatgttttaagatctct

SEQ ID NO: 21085 - DNA, 20 bp, Artificial Sequence
  chemically synthesized
atgttttaagatctctgagt

SEQ ID NO: 21086 - DNA, 20 bp, Artificial Sequence
  chemically synthesized
agatctctgagtaagatgca

SEQ ID NO: 21087 - DNA, 20 bp, Artificial Sequence
  chemically synthesized
agatgcatagttgcaaataa

SEQ ID NO: 21088 - DNA, 20 bp, Artificial Sequence
  chemically synthesized
gatgcatagttgcaaataaa

SEQ ID NO: 21089 - DNA, 20 bp, Artificial Sequence
  chemically synthesized
tgcatagttgcaaataaaag

SEQ ID NO: 21090 - DNA, 20 bp, Artificial Sequence
  chemically synthesized
tgcaaataaaaggagttttc

SEQ ID NO: 21091 - DNA, 20 bp, Artificial Sequence
  chemically synthesized
gcaaataaaaggagttttca

SEQ ID NO: 21092 - DNA, 20 bp, Artificial Sequence
  chemically synthesized
atctaataaatgtgtaccat

SEQ ID NO: 21093 - DNA, 20 bp, Artificial Sequence
  chemically synthesized
tgtgtaccatcagaaactta

SEQ ID NO: 21094 - DNA, 20 bp, Artificial Sequence
  chemically synthesized
aaacttatggtatattctcc

SEQ ID NO: 21095 - DNA, 20 bp, Artificial Sequence
  chemically synthesized
tatggtatattctcctggaa

SEQ ID NO: 21096 - DNA, 20 bp, Artificial Sequence
  chemically synthesized
atattctcctggaaaagatg

SEQ ID NO: 21097 - DNA, 20 bp, Artificial Sequence
  chemically synthesized
tcctggaaaagatgaagatg

SEQ ID NO: 21098 - DNA, 20 bp, Artificial Sequence
  chemically synthesized
aagatgaagatgaagaaaat

SEQ ID NO: 21099 - DNA, 20 bp, Artificial Sequence
  chemically synthesized
agatgaagaaaataagtcta

SEQ ID NO: 21100 - DNA, 20 bp, Artificial Sequence
  chemically synthesized
tgaagaaaataagtctacag

SEQ ID NO: 21101 - DNA, 20 bp, Artificial Sequence
  chemically synthesized
aagaaaataagtctacagaa

SEQ ID NO: 21102 - DNA, 20 bp, Artificial Sequence
  chemically synthesized
agaaaataagtctacagaag

SEQ ID NO: 21103 - DNA, 20 bp, Artificial Sequence
  chemically synthesized
aaaataagtctacagaagag

SEQ ID NO: 21104 - DNA, 20 bp, Artificial Sequence
  chemically synthesized
acagaagaggagaaattctt

SEQ ID NO: 21105 - DNA, 20 bp, Artificial Sequence
  chemically synthesized
ttggaaattttgcatttttg

SEQ ID NO: 21106 - DNA, 20 bp, Artificial Sequence
  chemically synthesized
aaattttgcatttttgtgga

SEQ ID NO: 21107 - DNA, 20 bp, Artificial Sequence
  chemically synthesized
ttttgcatttttgtggatag

SEQ ID NO: 21108 - DNA, 20 bp, Artificial Sequence
  chemically synthesized
ttttgtggatagtggttttg

SEQ ID NO: 21109 - DNA, 20 bp, Artificial Sequence
  chemically synthesized
gtggatagtggttttgaaga

SEQ ID NO: 21110 - DNA, 20 bp, Artificial Sequence
  chemically synthesized
tagtggttttgaagaaagct

SEQ ID NO: 21111 - DNA, 20 bp, Artificial Sequence
  chemically synthesized
atatatttaaatatgttgct

SEQ ID NO: 21112 - DNA, 20 bp, Artificial Sequence
  chemically synthesized
gatgtgactcccacacttta

SEQ ID NO: 21113 - DNA, 20 bp, Artificial Sequence
  chemically synthesized
gactcccacactttaaagaa

SEQ ID NO: 21114 - DNA, 20 bp, Artificial Sequence
  chemically synthesized
taaagaaaagttcttcattt

SEQ ID NO: 21115 - DNA, 20 bp, Artificial Sequence
  chemically synthesized
ttttagttgcccttgcaaat

SEQ ID NO: 21116 - DNA, 20 bp, Artificial Sequence
  chemically synthesized
gttgcccttgcaaattggct

SEQ ID NO: 21117 - DNA, 20 bp, Artificial Sequence
  chemically synthesized
tcctcaacaaataattttga

SEQ ID NO: 21118 - DNA, 20 bp, Artificial Sequence
  chemically synthesized
tgatggtttctaaaattgtc

SEQ ID NO: 21119 - DNA, 20 bp, Artificial Sequence
  chemically synthesized
tctaaaattgtccagaattt

SEQ ID NO: 21120 - DNA, 20 bp, Artificial Sequence
  chemically synthesized
ctaaaattgtccagaatttg

SEQ ID NO: 21121 - DNA, 20 bp, Artificial Sequence
  chemically synthesized
ccagaatttgaggaaatact

SEQ ID NO: 21122 - DNA, 20 bp, Artificial Sequence
  chemically synthesized
tttgaggaaatacttagatg

SEQ ID NO: 21123 - DNA, 20 bp, Artificial Sequence
  chemically synthesized
gaggaaatacttagatgtag

SEQ ID NO: 21124 - DNA, 20 bp, Artificial Sequence
  chemically synthesized
gacatcaatttatgttaact

SEQ ID NO: 21125 - DNA, 20 bp, Artificial Sequence
  chemically synthesized
tgttaacttagatttattgt

SEQ ID NO: 21126 - DNA, 20 bp, Artificial Sequence
  chemically synthesized
aacttagatttattgttgga

SEQ ID NO: 21127 - DNA, 20 bp, Artificial Sequence
  chemically synthesized
agatttattgttggatggtt

SEQ ID NO: 21128 - DNA, 20 bp, Artificial Sequence
  chemically synthesized
taatcatgtctgttcttgtc

SEQ ID NO: 21129 - DNA, 20 bp, Artificial Sequence
  chemically synthesized
atgtctgttcttgtccagtc

SEQ ID NO: 21130 - DNA, 20 bp, Artificial Sequence
  chemically synthesized
tctgttcttgtccagtctag

SEQ ID NO: 21131 - DNA, 20 bp, Artificial Sequence
  chemically synthesized
acatctgaactgtgatttga

SEQ ID NO: 21132 - DNA, 20 bp, Artificial Sequence
  chemically synthesized
tttgacagtgtccttattat

SEQ ID NO: 21133 - DNA, 20 bp, Artificial Sequence
  chemically synthesized
tatcagactctgctcaatga

SEQ ID NO: 21134 - DNA, 20 bp, Artificial Sequence
  chemically synthesized
gtttaaacttctttttgata

SEQ ID NO: 21135 - DNA, 20 bp, Artificial Sequence
  chemically synthesized
cagtaaaaaacttttcctta

SEQ ID NO: 21136 - DNA, 20 bp, Artificial Sequence
  chemically synthesized
tccttaaagatgaaattctt

SEQ ID NO: 21137 - DNA, 20 bp, Artificial Sequence
  chemically synthesized
ccttaaagatgaaattctta

SEQ ID NO: 21138 - DNA, 20 bp, Artificial Sequence
  chemically synthesized
atgaaattcttaaggacaat

SEQ ID NO: 21139 - DNA, 20 bp, Artificial Sequence
  chemically synthesized
ttaaggacaattagcttgtg

SEQ ID NO: 21140 - DNA, 20 bp, Artificial Sequence
  chemically synthesized
tatgaaaattgcttgcattt

SEQ ID NO: 21141 - DNA, 20 bp, Artificial Sequence
  chemically synthesized
tgaaaattgcttgcattttg

SEQ ID NO: 21142 - DNA, 20 bp, Artificial Sequence
  chemically synthesized
cttgcattttggagttacat

SEQ ID NO: 21143 - DNA, 20 bp, Artificial Sequence
  chemically synthesized
tataaattaatgaatcctat

SEQ ID NO: 21144 - DNA, 20 bp, Artificial Sequence
  chemically synthesized
atcctattggtaccatataa

SEQ ID NO: 21145 - DNA, 20 bp, Artificial Sequence
  chemically synthesized
cttttgtgtctcgcctttca

SEQ ID NO: 21146 - DNA, 20 bp, Artificial Sequence
  chemically synthesized
ttttgtgtctcgcctttcaa

SEQ ID NO: 21147 - DNA, 20 bp, Artificial Sequence
  chemically synthesized
tttgtgtctcgcctttcaaa

SEQ ID NO: 21148 - DNA, 20 bp, Artificial Sequence
  chemically synthesized
tcaaagggcaattttccaaa

SEQ ID NO: 21149 - DNA, 20 bp, Artificial Sequence
  chemically synthesized
tccaaaaagtatattttgca

SEQ ID NO: 21150 - DNA, 20 bp, Artificial Sequence
  chemically synthesized
aaagtatattttgcatggct

SEQ ID NO: 21151 - DNA, 20 bp, Artificial Sequence
  chemically synthesized
aagtatattttgcatggctc

SEQ ID NO: 21152 - DNA, 20 bp, Artificial Sequence
  chemically synthesized
ttttgcatggctcaggctaa

SEQ ID NO: 21153 - DNA, 20 bp, Artificial Sequence
  chemically synthesized
caggctaaaagtaatgtctc

SEQ ID NO: 21154 - DNA, 20 bp, Artificial Sequence
  chemically synthesized
aaaagtaatgtctccagatg

SEQ ID NO: 21155 - DNA, 20 bp, Artificial Sequence
  chemically synthesized
cattgattgtgactattgat

SEQ ID NO: 21156 - DNA, 20 bp, Artificial Sequence
  chemically synthesized
ttgataagatttactatgta

SEQ ID NO: 21157 - DNA, 20 bp, Artificial Sequence
  chemically synthesized
agatttactatgtaaagtat

SEQ ID NO: 21158 - DNA, 20 bp, Artificial Sequence
  chemically synthesized
ctatgtaaagtataagttac

SEQ ID NO: 21159 - DNA, 20 bp, Artificial Sequence
  chemically synthesized
gttactggaataatacattt

SEQ ID NO: 21160 - DNA, 20 bp, Artificial Sequence
  chemically synthesized
aataatacatttaagaaata

SEQ ID NO: 21161 - DNA, 20 bp, Artificial Sequence
  chemically synthesized
aatacatttaagaaatatag

SEQ ID NO: 21162 - DNA, 20 bp, Artificial Sequence
  chemically synthesized
atagtagctattaaaacctg

SEQ ID NO: 21163 - DNA, 20 bp, Artificial Sequence
  chemically synthesized
aaacctgtagtctgatgaaa

SEQ ID NO: 21164 - DNA, 20 bp, Artificial Sequence
  chemically synthesized
tgaaatggaatatgttttga

SEQ ID NO: 21165 - DNA, 20 bp, Artificial Sequence
  chemically synthesized
atggaatatgttttgaaaga

SEQ ID NO: 21166 - DNA, 20 bp, Artificial Sequence
  chemically synthesized
gaatatgttttgaaagacag

SEQ ID NO: 21167 - DNA, 20 bp, Artificial Sequence
  chemically synthesized
gaaagacagcagtgaaaaat

SEQ ID NO: 21168 - DNA, 20 bp, Artificial Sequence
  chemically synthesized
agacagcagtgaaaaatgag

SEQ ID NO: 21169 - DNA, 20 bp, Artificial Sequence
  chemically synthesized
aaaaatgagaagtaatatat

SEQ ID NO: 21170 - DNA, 20 bp, Artificial Sequence
  chemically synthesized
taaaattgctttttgcaatt

SEQ ID NO: 21171 - DNA, 20 bp, Artificial Sequence
  chemically synthesized
tgctttttgcaattgagttg

SEQ ID NO: 21172 - DNA, 20 bp, Artificial Sequence
  chemically synthesized
attgagttgaagattgatgc

SEQ ID NO: 21173 - DNA, 20 bp, Artificial Sequence
  chemically synthesized
ttgagttgaagattgatgcc

SEQ ID NO: 21174 - DNA, 20 bp, Artificial Sequence
  chemically synthesized
tgccaggatcttattacctc

SEQ ID NO: 21175 - DNA, 20 bp, Artificial Sequence
  chemically synthesized
gccaggatcttattacctcc

SEQ ID NO: 21176 - DNA, 20 bp, Artificial Sequence
  chemically synthesized
attacctccaggatttcaca

SEQ ID NO: 21177 - DNA, 20 bp, Artificial Sequence
  chemically synthesized
ttacctccaggatttcacaa

SEQ ID NO: 21178 - DNA, 20 bp, Artificial Sequence
  chemically synthesized
gatttcacaaaggatttctt

SEQ ID NO: 21179 - DNA, 20 bp, Artificial Sequence
  chemically synthesized
cttgagtcatccccttgctc

SEQ ID NO: 21180 - DNA, 20 bp, Artificial Sequence
  chemically synthesized
cttgctctagctcatgaaca

SEQ ID NO: 21181 - DNA, 20 bp, Artificial Sequence
  chemically synthesized
tcatgaacaaagtattgctc

SEQ ID NO: 21182 - DNA, 20 bp, Artificial Sequence
  chemically synthesized
agtattgctcaagtaatcga

SEQ ID NO: 21183 - DNA, 20 bp, Artificial Sequence
  chemically synthesized
tctcacatgtgattattatt

SEQ ID NO: 21184 - DNA, 20 bp, Artificial Sequence
  chemically synthesized
attattatttagtgctgtca

SEQ ID NO: 21185 - DNA, 20 bp, Artificial Sequence
  chemically synthesized
ttattatttagtgctgtcac

SEQ ID NO: 21186 - DNA, 20 bp, Artificial Sequence
  chemically synthesized
tcacgggaaatatcctgcct

SEQ ID NO: 21187 - DNA, 20 bp, Artificial Sequence
  chemically synthesized
aatatcctgcctaagtttac

SEQ ID NO: 21188 - DNA, 20 bp, Artificial Sequence
  chemically synthesized
tatcctgcctaagtttactg

SEQ ID NO: 21189 - DNA, 20 bp, Artificial Sequence
  chemically synthesized
atcctgcctaagtttactgg

SEQ ID NO: 21190 - DNA, 20 bp, Artificial Sequence
  chemically synthesized
cctccctatgtcctcctacc

SEQ ID NO: 21191 - DNA, 20 bp, Artificial Sequence
  chemically synthesized
tttccttgcacactctactc

SEQ ID NO: 21192 - DNA, 20 bp, Artificial Sequence
  chemically synthesized
ttgcacactctactccagct

SEQ ID NO: 21193 - DNA, 20 bp, Artificial Sequence
  chemically synthesized
tgcacactctactccagctt

SEQ ID NO: 21194 - DNA, 20 bp, Artificial Sequence
  chemically synthesized
gcacactctactccagctta

SEQ ID NO: 21195 - DNA, 20 bp, Artificial Sequence
  chemically synthesized
ctctactccagcttagggcc

SEQ ID NO: 21196 - DNA, 20 bp, Artificial Sequence
  chemically synthesized
tctactccagcttagggcct

SEQ ID NO: 21197 - DNA, 20 bp, Artificial Sequence
  chemically synthesized
acccttttaattaccccatt

SEQ ID NO: 21198 - DNA, 20 bp, Artificial Sequence
  chemically synthesized
tcaatttttgccttttcaat

SEQ ID NO: 21199 - DNA, 20 bp, Artificial Sequence
  chemically synthesized
aaaatttatttatatatatt

SEQ ID NO: 21200 - DNA, 20 bp, Artificial Sequence
  chemically synthesized
atttatttatatatatttag

SEQ ID NO: 21201 - DNA, 20 bp, Artificial Sequence
  chemically synthesized
tttatttatatatatttaga

SEQ ID NO: 21202 - DNA, 20 bp, Artificial Sequence
  chemically synthesized
tatatttagaaggtatgtac

SEQ ID NO: 21203 - DNA, 20 bp, Artificial Sequence
  chemically synthesized
tcgttatcatgctgcttata

SEQ ID NO: 21204 - DNA, 20 bp, Artificial Sequence
  chemically synthesized
ctgcttataaagacatacct

SEQ ID NO: 21205 - DNA, 20 bp, Artificial Sequence
  chemically synthesized
tataaagacatacctgagac

SEQ ID NO: 21206 - DNA, 20 bp, Artificial Sequence
  chemically synthesized
ataaagacatacctgagact

SEQ ID NO: 21207 - DNA, 20 bp, Artificial Sequence
  chemically synthesized
cctgagactgggtaatttat

SEQ ID NO: 21208 - DNA, 20 bp, Artificial Sequence
  chemically synthesized
ctgagactgggtaatttata

SEQ ID NO: 21209 - DNA, 20 bp, Artificial Sequence
  chemically synthesized
aaaaacgtttaattgtctca

SEQ ID NO: 21210 - DNA, 20 bp, Artificial Sequence
  chemically synthesized
ttaattgtctcacagttcca

SEQ ID NO: 21211 - DNA, 20 bp, Artificial Sequence
  chemically synthesized
taattgtctcacagttccac

SEQ ID NO: 21212 - DNA, 20 bp, Artificial Sequence
  chemically synthesized
aattgtctcacagttccaca

SEQ ID NO: 21213 - DNA, 20 bp, Artificial Sequence
  chemically synthesized
gtctcacagttccacagggc

SEQ ID NO: 21214 - DNA, 20 bp, Artificial Sequence
  chemically synthesized
tctcacagttccacagggct

SEQ ID NO: 21215 - DNA, 20 bp, Artificial Sequence
  chemically synthesized
ctcacagttccacagggctg

SEQ ID NO: 21216 - DNA, 20 bp, Artificial Sequence
  chemically synthesized
cacagttccacagggctggg

SEQ ID NO: 21217 - DNA, 20 bp, Artificial Sequence
  chemically synthesized
acagttccacagggctgggg

SEQ ID NO: 21218 - DNA, 20 bp, Artificial Sequence
  chemically synthesized
ccacagggctggggaggcct

SEQ ID NO: 21219 - DNA, 20 bp, Artificial Sequence
  chemically synthesized
cacagggctggggaggcctc

SEQ ID NO: 21220 - DNA, 20 bp, Artificial Sequence
  chemically synthesized
cctcgggaaacttacaatca

SEQ ID NO: 21221 - DNA, 20 bp, Artificial Sequence
  chemically synthesized
cgggaaacttacaatcatgg

SEQ ID NO: 21222 - DNA, 20 bp, Artificial Sequence
  chemically synthesized
gaaacttacaatcatggcag

SEQ ID NO: 21223 - DNA, 20 bp, Artificial Sequence
  chemically synthesized
acttacaatcatggcagaag

SEQ ID NO: 21224 - DNA, 20 bp, Artificial Sequence
  chemically synthesized
caaacatgtccttcttcaca

SEQ ID NO: 21225 - DNA, 20 bp, Artificial Sequence
  chemically synthesized
acatgtccttcttcacatgg

SEQ ID NO: 21226 - DNA, 20 bp, Artificial Sequence
  chemically synthesized
tgtccttcttcacatggcag

SEQ ID NO: 21227 - DNA, 20 bp, Artificial Sequence
  chemically synthesized
cttcttcacatggcagcagc

SEQ ID NO: 21228 - DNA, 20 bp, Artificial Sequence
  chemically synthesized
cttcacatggcagcagcaag

SEQ ID NO: 21229 - DNA, 20 bp, Artificial Sequence
  chemically synthesized
cacatggcagcagcaagtag

SEQ ID NO: 21230 - DNA, 20 bp, Artificial Sequence
  chemically synthesized
cagcagcaagtagaagtgcc

SEQ ID NO: 21231 - DNA, 20 bp, Artificial Sequence
  chemically synthesized
caagtagaagtgccaagcaa

SEQ ID NO: 21232 - DNA, 20 bp, Artificial Sequence
  chemically synthesized
aagtagaagtgccaagcaaa

SEQ ID NO: 21233 - DNA, 20 bp, Artificial Sequence
  chemically synthesized
agtagaagtgccaagcaaaa

SEQ ID NO: 21234 - DNA, 20 bp, Artificial Sequence
  chemically synthesized
gtagaagtgccaagcaaaag

SEQ ID NO: 21235 - DNA, 20 bp, Artificial Sequence
  chemically synthesized
tagaagtgccaagcaaaagg

SEQ ID NO: 21236 - DNA, 20 bp, Artificial Sequence
  chemically synthesized
gtgccaagcaaaagggggaa

SEQ ID NO: 21237 - DNA, 20 bp, Artificial Sequence
  chemically synthesized
aaagccgcttataaaaccat

SEQ ID NO: 21238 - DNA, 20 bp, Artificial Sequence
  chemically synthesized
ataaaaccatcagatcttgt

SEQ ID NO: 21239 - DNA, 20 bp, Artificial Sequence
  chemically synthesized
ttgtaagaactcactatcac

SEQ ID NO: 21240 - DNA, 20 bp, Artificial Sequence
  chemically synthesized
taagaactcactatcacgag

SEQ ID NO: 21241 - DNA, 20 bp, Artificial Sequence
  chemically synthesized
agaactcactatcacgagaa

SEQ ID NO: 21242 - DNA, 20 bp, Artificial Sequence
  chemically synthesized
cactatcacgagaagagcat

SEQ ID NO: 21243 - DNA, 20 bp, Artificial Sequence
  chemically synthesized
ctatcacgagaagagcatga

SEQ ID NO: 21244 - DNA, 20 bp, Artificial Sequence
  chemically synthesized
aaatccctcccacaacacgt

SEQ ID NO: 21245 - DNA, 20 bp, Artificial Sequence
  chemically synthesized
aatccctcccacaacacgtg

SEQ ID NO: 21246 - DNA, 20 bp, Artificial Sequence
  chemically synthesized
cccacaacacgtgaggatta

SEQ ID NO: 21247 - DNA, 20 bp, Artificial Sequence
  chemically synthesized
ccacaacacgtgaggattat

SEQ ID NO: 21248 - DNA, 20 bp, Artificial Sequence
  chemically synthesized
gattatgggaactacaattc

SEQ ID NO: 21249 - DNA, 20 bp, Artificial Sequence
  chemically synthesized
tgggaactacaattcaagat

SEQ ID NO: 21250 - DNA, 20 bp, Artificial Sequence
  chemically synthesized
ctacaattcaagatgagatt

SEQ ID NO: 21251 - DNA, 20 bp, Artificial Sequence
  chemically synthesized
tacaattcaagatgagattt

SEQ ID NO: 21252 - DNA, 20 bp, Artificial Sequence
  chemically synthesized
aattcaagatgagatttggg

SEQ ID NO: 21253 - DNA, 20 bp, Artificial Sequence
  chemically synthesized
attcaagatgagatttgggt

SEQ ID NO: 21254 - DNA, 20 bp, Artificial Sequence
  chemically synthesized
ttcaagatgagatttgggtg

SEQ ID NO: 21255 - DNA, 20 bp, Artificial Sequence
  chemically synthesized
atgagatttgggtggggaca

SEQ ID NO: 21256 - DNA, 20 bp, Artificial Sequence
  chemically synthesized
atttgggtggggacacagtc

SEQ ID NO: 21257 - DNA, 20 bp, Artificial Sequence
  chemically synthesized
gggacacagtcaagctgtat

SEQ ID NO: 21258 - DNA, 20 bp, Artificial Sequence
  chemically synthesized
ggacacagtcaagctgtatc

SEQ ID NO: 21259 - DNA, 20 bp, Artificial Sequence
  chemically synthesized
gacacagtcaagctgtatca

SEQ ID NO: 21260 - DNA, 20 bp, Artificial Sequence
  chemically synthesized
gtcaagctgtatcagggtac

SEQ ID NO: 21261 - DNA, 20 bp, Artificial Sequence
  chemically synthesized
gctgtatcagggtacaagct

SEQ ID NO: 21262 - DNA, 20 bp, Artificial Sequence
  chemically synthesized
ctgtatcagggtacaagctc

SEQ ID NO: 21263 - DNA, 20 bp, Artificial Sequence
  chemically synthesized
ccttacatatgtatgttgca

SEQ ID NO: 21264 - DNA, 20 bp, Artificial Sequence
  chemically synthesized
tacatatgtatgttgcatag

SEQ ID NO: 21265 - DNA, 20 bp, Artificial Sequence
  chemically synthesized
atgtatgttgcatagtggtg

SEQ ID NO: 21266 - DNA, 20 bp, Artificial Sequence
  chemically synthesized
gttgcatagtggtgaagtct

SEQ ID NO: 21267 - DNA, 20 bp, Artificial Sequence
  chemically synthesized
agtggtgaagtctgagcttt

SEQ ID NO: 21268 - DNA, 20 bp, Artificial Sequence
  chemically synthesized
ggtgaagtctgagcttttag

SEQ ID NO: 21269 - DNA, 20 bp, Artificial Sequence
  chemically synthesized
ttagtggaccatcacctgaa

SEQ ID NO: 21270 - DNA, 20 bp, Artificial Sequence
  chemically synthesized
tgaatgttgtatccaatccg

SEQ ID NO: 21271 - DNA, 20 bp, Artificial Sequence
  chemically synthesized
gtatccaatccgtagttttt

SEQ ID NO: 21272 - DNA, 20 bp, Artificial Sequence
  chemically synthesized
cctatcctcccacctttctc

SEQ ID NO: 21273 - DNA, 20 bp, Artificial Sequence
  chemically synthesized
tcccacctttctctagtctc

SEQ ID NO: 21274 - DNA, 20 bp, Artificial Sequence
  chemically synthesized
gtctatgcttactcatcgtt

SEQ ID NO: 21275 - DNA, 20 bp, Artificial Sequence
  chemically synthesized
ctcatcgtttagctcccact

SEQ ID NO: 21276 - DNA, 20 bp, Artificial Sequence
  chemically synthesized
ccacttggctctcactaaat

SEQ ID NO: 21277 - DNA, 20 bp, Artificial Sequence
  chemically synthesized
gtgtttgactttctgtttct

SEQ ID NO: 21278 - DNA, 20 bp, Artificial Sequence
  chemically synthesized
tgtttctgagttatttcact

SEQ ID NO: 21279 - DNA, 20 bp, Artificial Sequence
  chemically synthesized
gtttctgagttatttcactg

SEQ ID NO: 21280 - DNA, 20 bp, Artificial Sequence
  chemically synthesized
tcactgaggataatgtcctc

SEQ ID NO: 21281 - DNA, 20 bp, Artificial Sequence
  chemically synthesized
tccagttctaaccatgtttc

SEQ ID NO: 21282 - DNA, 20 bp, Artificial Sequence
  chemically synthesized
cagttctaaccatgtttcta

SEQ ID NO: 21283 - DNA, 20 bp, Artificial Sequence
  chemically synthesized
ttctaaccatgtttctagag

SEQ ID NO: 21284 - DNA, 20 bp, Artificial Sequence
  chemically synthesized
catgatttcattctttttta

SEQ ID NO: 21285 - DNA, 20 bp, Artificial Sequence
  chemically synthesized
tttcattcttttttatggct

SEQ ID NO: 21286 - DNA, 20 bp, Artificial Sequence
  chemically synthesized
ttctttatccaatcgtccat

SEQ ID NO: 21287 - DNA, 20 bp, Artificial Sequence
  chemically synthesized
tttatccaatcgtccattgg

SEQ ID NO: 21288 - DNA, 20 bp, Artificial Sequence
  chemically synthesized
atcgtccattggtagacatt

SEQ ID NO: 21289 - DNA, 20 bp, Artificial Sequence
  chemically synthesized
tcgtccattggtagacattt

SEQ ID NO: 21290 - DNA, 20 bp, Artificial Sequence
  chemically synthesized
tgattccatatctttgctat

SEQ ID NO: 21291 - DNA, 20 bp, Artificial Sequence
  chemically synthesized
gattccatatctttgctatt

SEQ ID NO: 21292 - DNA, 20 bp, Artificial Sequence
  chemically synthesized
catatctttgctattgggaa

SEQ ID NO: 21293 - DNA, 20 bp, Artificial Sequence
  chemically synthesized
ctactttgaacatactaatg

SEQ ID NO: 21294 - DNA, 20 bp, Artificial Sequence
  chemically synthesized
taatatgatctctttcactt

SEQ ID NO: 21295 - DNA, 20 bp, Artificial Sequence
  chemically synthesized
aatatgatctctttcacttt

SEQ ID NO: 21296 - DNA, 20 bp, Artificial Sequence
  chemically synthesized
tttcactttgggtccatacc

SEQ ID NO: 21297 - DNA, 20 bp, Artificial Sequence
  chemically synthesized
cactttgggtccatacccag

SEQ ID NO: 21298 - DNA, 20 bp, Artificial Sequence
  chemically synthesized
tttgggtccatacccagtag

SEQ ID NO: 21299 - DNA, 20 bp, Artificial Sequence
  chemically synthesized
ttgggtccatacccagtagt

SEQ ID NO: 21300 - DNA, 20 bp, Artificial Sequence
  chemically synthesized
catacccagtagtgggattg

SEQ ID NO: 21301 - DNA, 20 bp, Artificial Sequence
  chemically synthesized
atacccagtagtgggattgc

SEQ ID NO: 21302 - DNA, 20 bp, Artificial Sequence
  chemically synthesized
agtgggattgcaggattgaa

SEQ ID NO: 21303 - DNA, 20 bp, Artificial Sequence
  chemically synthesized
gggattgcaggattgaatgg

SEQ ID NO: 21304 - DNA, 20 bp, Artificial Sequence
  chemically synthesized
ttgaatggtagttctgtttc

SEQ ID NO: 21305 - DNA, 20 bp, Artificial Sequence
  chemically synthesized
agttctgtttctagttcttt

SEQ ID NO: 21306 - DNA, 20 bp, Artificial Sequence
  chemically synthesized
tcttcatgctgtcttccata

SEQ ID NO: 21307 - DNA, 20 bp, Artificial Sequence
  chemically synthesized
ctaatttacattcttaccaa

SEQ ID NO: 21308 - DNA, 20 bp, Artificial Sequence
  chemically synthesized
cattcttaccaacagtgtat

SEQ ID NO: 21309 - DNA, 20 bp, Artificial Sequence
  chemically synthesized
gtttttgaactttataatga

SEQ ID NO: 21310 - DNA, 20 bp, Artificial Sequence
  chemically synthesized
ataatgatagccattctgac

SEQ ID NO: 21311 - DNA, 20 bp, Artificial Sequence
  chemically synthesized
atagccattctgactggcat

SEQ ID NO: 21312 - DNA, 20 bp, Artificial Sequence
  chemically synthesized
tagccattctgactggcata

SEQ ID NO: 21313 - DNA, 20 bp, Artificial Sequence
  chemically synthesized
gccattctgactggcataag

SEQ ID NO: 21314 - DNA, 20 bp, Artificial Sequence
  chemically synthesized
ccattctgactggcataagg

SEQ ID NO: 21315 - DNA, 20 bp, Artificial Sequence
  chemically synthesized
tggcataaggaggtatcata

SEQ ID NO: 21316 - DNA, 20 bp, Artificial Sequence
  chemically synthesized
cataaggaggtatcatatgg

SEQ ID NO: 21317 - DNA, 20 bp, Artificial Sequence
  chemically synthesized
aatttgcattctctgattat

SEQ ID NO: 21318 - DNA, 20 bp, Artificial Sequence
  chemically synthesized
aacttttttttgacgtttat

SEQ ID NO: 21319 - DNA, 20 bp, Artificial Sequence
  chemically synthesized
gccacttgtatgtcttcttt

SEQ ID NO: 21320 - DNA, 20 bp, Artificial Sequence
  chemically synthesized
tcttttggaaaatgtctgct

SEQ ID NO: 21321 - DNA, 20 bp, Artificial Sequence
  chemically synthesized
cttttggaaaatgtctgctc

SEQ ID NO: 21322 - DNA, 20 bp, Artificial Sequence
  chemically synthesized
aaaatgtctgctcaggacct

SEQ ID NO: 21323 - DNA, 20 bp, Artificial Sequence
  chemically synthesized
cctgagctcactgtatttgt

SEQ ID NO: 21324 - DNA, 20 bp, Artificial Sequence
  chemically synthesized
ctgagctcactgtatttgtc

SEQ ID NO: 21325 - DNA, 20 bp, Artificial Sequence
  chemically synthesized
tgagctcactgtatttgtca

SEQ ID NO: 21326 - DNA, 20 bp, Artificial Sequence
  chemically synthesized
ctgtatttgtcagggttccc

SEQ ID NO: 21327 - DNA, 20 bp, Artificial Sequence
  chemically synthesized
gtatttgtcagggttcccta

SEQ ID NO: 21328 - DNA, 20 bp, Artificial Sequence
  chemically synthesized
atttgtcagggttccctaga

SEQ ID NO: 21329 - DNA, 20 bp, Artificial Sequence
  chemically synthesized
gtcagggttccctagagaga

SEQ ID NO: 21330 - DNA, 20 bp, Artificial Sequence
  chemically synthesized
ccctagagagacagaactaa

SEQ ID NO: 21331 - DNA, 20 bp, Artificial Sequence
  chemically synthesized
cctagagagacagaactaat

SEQ ID NO: 21332 - DNA, 20 bp, Artificial Sequence
  chemically synthesized
tagagagacagaactaatag

SEQ ID NO: 21333 - DNA, 20 bp, Artificial Sequence
  chemically synthesized
gagacagaactaataggaga

SEQ ID NO: 21334 - DNA, 20 bp, Artificial Sequence
  chemically synthesized
cagaactaataggagataga

SEQ ID NO: 21335 - DNA, 20 bp, Artificial Sequence
  chemically synthesized
actaataggagatagataga

SEQ ID NO: 21336 - DNA, 20 bp, Artificial Sequence
  chemically synthesized
ataggagatagatagataga

SEQ ID NO: 21337 - DNA, 20 bp, Artificial Sequence
  chemically synthesized
gagatagatagatagataga

SEQ ID NO: 21338 - DNA, 20 bp, Artificial Sequence
  chemically synthesized
tagatagatagatagataga

SEQ ID NO: 21339 - DNA, 20 bp, Artificial Sequence
  chemically synthesized
tagatagatagatagataga

SEQ ID NO: 21340 - DNA, 20 bp, Artificial Sequence
  chemically synthesized
tagatagatagatagataga

SEQ ID NO: 21341 - DNA, 20 bp, Artificial Sequence
  chemically synthesized
tagatagatagatagataga

SEQ ID NO: 21342 - DNA, 20 bp, Artificial Sequence
  chemically synthesized
tagatagatagatagataga

SEQ ID NO: 21343 - DNA, 20 bp, Artificial Sequence
  chemically synthesized
gatagatagatagatagata

SEQ ID NO: 21344 - DNA, 20 bp, Artificial Sequence
  chemically synthesized
tagatagatagatatagatt

SEQ ID NO: 21345 - DNA, 20 bp, Artificial Sequence
  chemically synthesized
agatatagatttagatataa

SEQ ID NO: 21346 - DNA, 20 bp, Artificial Sequence
  chemically synthesized
gatatagatttagatataaa

SEQ ID NO: 21347 - DNA, 20 bp, Artificial Sequence
  chemically synthesized
atatagatttagatataaaa

SEQ ID NO: 21348 - DNA, 20 bp, Artificial Sequence
  chemically synthesized
atagatttagatataaaagg

SEQ ID NO: 21349 - DNA, 20 bp, Artificial Sequence
  chemically synthesized
gatataaaagggagtttatt

SEQ ID NO: 21350 - DNA, 20 bp, Artificial Sequence
  chemically synthesized
ataaaagggagtttattaag

SEQ ID NO: 21351 - DNA, 20 bp, Artificial Sequence
  chemically synthesized
gtgttaacttacacaatcac

SEQ ID NO: 21352 - DNA, 20 bp, Artificial Sequence
  chemically synthesized
tgttaacttacacaatcaca

SEQ ID NO: 21353 - DNA, 20 bp, Artificial Sequence
  chemically synthesized
acaatcacaaggtcccacaa

SEQ ID NO: 21354 - DNA, 20 bp, Artificial Sequence
  chemically synthesized
caatcacaaggtcccacaat

SEQ ID NO: 21355 - DNA, 20 bp, Artificial Sequence
  chemically synthesized
tcccacaataggccatctgc

SEQ ID NO: 21356 - DNA, 20 bp, Artificial Sequence
  chemically synthesized
cacaataggccatctgcaag

SEQ ID NO: 21357 - DNA, 20 bp, Artificial Sequence
  chemically synthesized
caataggccatctgcaagca

SEQ ID NO: 21358 - DNA, 20 bp, Artificial Sequence
  chemically synthesized
aataggccatctgcaagcag

SEQ ID NO: 21359 - DNA, 20 bp, Artificial Sequence
  chemically synthesized
taggccatctgcaagcagag

SEQ ID NO: 21360 - DNA, 20 bp, Artificial Sequence
  chemically synthesized
ccatctgcaagcagaggagc

SEQ ID NO: 21361 - DNA, 20 bp, Artificial Sequence
  chemically synthesized
catctgcaagcagaggagca

SEQ ID NO: 21362 - DNA, 20 bp, Artificial Sequence
  chemically synthesized
ctgcaagcagaggagcaagg

SEQ ID NO: 21363 - DNA, 20 bp, Artificial Sequence
  chemically synthesized
aagcagaggagcaaggaagc

SEQ ID NO: 21364 - DNA, 20 bp, Artificial Sequence
  chemically synthesized
aggagcaaggaagccagtcc

SEQ ID NO: 21365 - DNA, 20 bp, Artificial Sequence
  chemically synthesized
ggaagccagtccaagtccca

SEQ ID NO: 21366 - DNA, 20 bp, Artificial Sequence
  chemically synthesized
cagtccaagtcccaaagctg

SEQ ID NO: 21367 - DNA, 20 bp, Artificial Sequence
  chemically synthesized
agtccaagtcccaaagctga

SEQ ID NO: 21368 - DNA, 20 bp, Artificial Sequence
  chemically synthesized
agtcccaaagctgaaggact

SEQ ID NO: 21369 - DNA, 20 bp, Artificial Sequence
  chemically synthesized
tcccaaagctgaaggacttg

SEQ ID NO: 21370 - DNA, 20 bp, Artificial Sequence
  chemically synthesized
ggacttggagtccaatgttt

SEQ ID NO: 21371 - DNA, 20 bp, Artificial Sequence
  chemically synthesized
gacttggagtccaatgtttg

SEQ ID NO: 21372 - DNA, 20 bp, Artificial Sequence
  chemically synthesized
acttggagtccaatgtttga

SEQ ID NO: 21373 - DNA, 20 bp, Artificial Sequence
  chemically synthesized
tggagtccaatgtttgaggg

SEQ ID NO: 21374 - DNA, 20 bp, Artificial Sequence
  chemically synthesized
ggagtccaatgtttgagggc

SEQ ID NO: 21375 - DNA, 20 bp, Artificial Sequence
  chemically synthesized
gtccaatgtttgagggcagg

SEQ ID NO: 21376 - DNA, 20 bp, Artificial Sequence
  chemically synthesized
gtttgagggcaggaagcatc

SEQ ID NO: 21377 - DNA, 20 bp, Artificial Sequence
  chemically synthesized
agggcaggaagcatccagca

SEQ ID NO: 21378 - DNA, 20 bp, Artificial Sequence
  chemically synthesized
gggcaggaagcatccagcat

SEQ ID NO: 21379 - DNA, 20 bp, Artificial Sequence
  chemically synthesized
gcaggaagcatccagcatgg

SEQ ID NO: 21380 - DNA, 20 bp, Artificial Sequence
  chemically synthesized
gaagcatccagcatgggaga

SEQ ID NO: 21381 - DNA, 20 bp, Artificial Sequence
  chemically synthesized
tccagcatgggagaaagatg

SEQ ID NO: 21382 - DNA, 20 bp, Artificial Sequence
  chemically synthesized
ccagcatgggagaaagatgt

SEQ ID NO: 21383 - DNA, 20 bp, Artificial Sequence
  chemically synthesized
atgggagaaagatgtaggct

SEQ ID NO: 21384 - DNA, 20 bp, Artificial Sequence
  chemically synthesized
gggagaaagatgtaggcttg

SEQ ID NO: 21385 - DNA, 20 bp, Artificial Sequence
  chemically synthesized
ggagaaagatgtaggcttgg

SEQ ID NO: 21386 - DNA, 20 bp, Artificial Sequence
  chemically synthesized
aagatgtaggcttggaggct

SEQ ID NO: 21387 - DNA, 20 bp, Artificial Sequence
  chemically synthesized
tgtaggcttggaggctaagc

SEQ ID NO: 21388 - DNA, 20 bp, Artificial Sequence
  chemically synthesized
gcttggaggctaagccagtc

SEQ ID NO: 21389 - DNA, 20 bp, Artificial Sequence
  chemically synthesized
cttggaggctaagccagtcc

SEQ ID NO: 21390 - DNA, 20 bp, Artificial Sequence
  chemically synthesized
tttctgcctgctttatatcc

SEQ ID NO: 21391 - DNA, 20 bp, Artificial Sequence
  chemically synthesized
gctttatatcctggccacac

SEQ ID NO: 21392 - DNA, 20 bp, Artificial Sequence
  chemically synthesized
tggccacactggcaactgat

SEQ ID NO: 21393 - DNA, 20 bp, Artificial Sequence
  chemically synthesized
cacactggcaactgattaga

SEQ ID NO: 21394 - DNA, 20 bp, Artificial Sequence
  chemically synthesized
ctgattagatggtgcccacc

SEQ ID NO: 21395 - DNA, 20 bp, Artificial Sequence
  chemically synthesized
agatggtgcccacccagatt

SEQ ID NO: 21396 - DNA, 20 bp, Artificial Sequence
  chemically synthesized
gatggtgcccacccagatta

SEQ ID NO: 21397 - DNA, 20 bp, Artificial Sequence
  chemically synthesized
atggtgcccacccagattaa

SEQ ID NO: 21398 - DNA, 20 bp, Artificial Sequence
  chemically synthesized
gtgcccacccagattaaggg

SEQ ID NO: 21399 - DNA, 20 bp, Artificial Sequence
  chemically synthesized
tgcccacccagattaagggt

SEQ ID NO: 21400 - DNA, 20 bp, Artificial Sequence
  chemically synthesized
aagggtgggtctgcctttcc

SEQ ID NO: 21401 - DNA, 20 bp, Artificial Sequence
  chemically synthesized
actaaaatgttaatctcctt

SEQ ID NO: 21402 - DNA, 20 bp, Artificial Sequence
  chemically synthesized
ctcctttggcaataccctca

SEQ ID NO: 21403 - DNA, 20 bp, Artificial Sequence
  chemically synthesized
aataccctcacagacacact

SEQ ID NO: 21404 - DNA, 20 bp, Artificial Sequence
  chemically synthesized
ataccctcacagacacactc

SEQ ID NO: 21405 - DNA, 20 bp, Artificial Sequence
  chemically synthesized
ttgcacacttcaatccaatc

SEQ ID NO: 21406 - DNA, 20 bp, Artificial Sequence
  chemically synthesized
aatccaatcaagttgacact

SEQ ID NO: 21407 - DNA, 20 bp, Artificial Sequence
  chemically synthesized
cactcagtattaaccatcac

SEQ ID NO: 21408 - DNA, 20 bp, Artificial Sequence
  chemically synthesized
agtccatcgcttgtcaactt

SEQ ID NO: 21409 - DNA, 20 bp, Artificial Sequence
  chemically synthesized
tgagcctatacacatcccct

SEQ ID NO: 21410 - DNA, 20 bp, Artificial Sequence
  chemically synthesized
gagcctatacacatcccctg

SEQ ID NO: 21411 - DNA, 20 bp, Artificial Sequence
  chemically synthesized
tcatacattatcttcaaata

SEQ ID NO: 21412 - DNA, 20 bp, Artificial Sequence
  chemically synthesized
cttcaaataaagacaacaat

SEQ ID NO: 21413 - DNA, 20 bp, Artificial Sequence
  chemically synthesized
aatacttaaatgctgatatg

SEQ ID NO: 21414 - DNA, 20 bp, Artificial Sequence
  chemically synthesized
aaatcttatgtcacatgata

SEQ ID NO: 21415 - DNA, 20 bp, Artificial Sequence
  chemically synthesized
aatcttatgtcacatgataa

SEQ ID NO: 21416 - DNA, 20 bp, Artificial Sequence
  chemically synthesized
atgtcacatgataaaggaaa

SEQ ID NO: 21417 - DNA, 20 bp, Artificial Sequence
  chemically synthesized
tgtcacatgataaaggaaaa

SEQ ID NO: 21418 - DNA, 20 bp, Artificial Sequence
  chemically synthesized
cacatgataaaggaaaaagg

SEQ ID NO: 21419 - DNA, 20 bp, Artificial Sequence
  chemically synthesized
gtaaaatgtatatattttct

SEQ ID NO: 21420 - DNA, 20 bp, Artificial Sequence
  chemically synthesized
tgtatatattttcttagtac

SEQ ID NO: 21421 - DNA, 20 bp, Artificial Sequence
  chemically synthesized
tttcttagtacaagtgtata

SEQ ID NO: 21422 - DNA, 20 bp, Artificial Sequence
  chemically synthesized
tacaagtgtatacagacacg

SEQ ID NO: 21423 - DNA, 20 bp, Artificial Sequence
  chemically synthesized
acaagtgtatacagacacga

SEQ ID NO: 21424 - DNA, 20 bp, Artificial Sequence
  chemically synthesized
cacgaaggtgtttttaacaa

SEQ ID NO: 21425 - DNA, 20 bp, Artificial Sequence
  chemically synthesized
gaaggtgtttttaacaaaag

SEQ ID NO: 21426 - DNA, 20 bp, Artificial Sequence
  chemically synthesized
aaggtgtttttaacaaaaga

SEQ ID NO: 21427 - DNA, 20 bp, Artificial Sequence
  chemically synthesized
ggtgtttttaacaaaagaag

SEQ ID NO: 21428 - DNA, 20 bp, Artificial Sequence
  chemically synthesized
gtgtttttaacaaaagaagg

SEQ ID NO: 21429 - DNA, 20 bp, Artificial Sequence
  chemically synthesized
ggaaatactcatgacaatta

SEQ ID NO: 21430 - DNA, 20 bp, Artificial Sequence
  chemically synthesized
acagtccttgtatctgcaat

SEQ ID NO: 21431 - DNA, 20 bp, Artificial Sequence
  chemically synthesized
tgcaattggtcacgtgatcg

SEQ ID NO: 21432 - DNA, 20 bp, Artificial Sequence
  chemically synthesized
attggtcacgtgatcgtagc

SEQ ID NO: 21433 - DNA, 20 bp, Artificial Sequence
  chemically synthesized
ttctgtattccctttgccct

SEQ ID NO: 21434 - DNA, 20 bp, Artificial Sequence
  chemically synthesized
gtattccctttgccctcagc

SEQ ID NO: 21435 - DNA, 20 bp, Artificial Sequence
  chemically synthesized
tttgccctcagcaagcacct

SEQ ID NO: 21436 - DNA, 20 bp, Artificial Sequence
  chemically synthesized
gccctcagcaagcacctcag

SEQ ID NO: 21437 - DNA, 20 bp, Artificial Sequence
  chemically synthesized
ccctcagcaagcacctcagc

SEQ ID NO: 21438 - DNA, 20 bp, Artificial Sequence
  chemically synthesized
ttttttttttttttttttcc

SEQ ID NO: 21439 - DNA, 20 bp, Artificial Sequence
  chemically synthesized
tttttttttttttttcctgg

SEQ ID NO: 21440 - DNA, 20 bp, Artificial Sequence
  chemically synthesized
tttttttttttttcctggtg

SEQ ID NO: 21441 - DNA, 20 bp, Artificial Sequence
  chemically synthesized
gtgacccaaacctttatttg

SEQ ID NO: 21442 - DNA, 20 bp, Artificial Sequence
  chemically synthesized
cctttatttgtagtcctgcc

SEQ ID NO: 21443 - DNA, 20 bp, Artificial Sequence
  chemically synthesized
atttgtagtcctgcctggaa

SEQ ID NO: 21444 - DNA, 20 bp, Artificial Sequence
  chemically synthesized
gtcctgcctggaatggcctg

SEQ ID NO: 21445 - DNA, 20 bp, Artificial Sequence
  chemically synthesized
ctgcctggaatggcctgtag

SEQ ID NO: 21446 - DNA, 20 bp, Artificial Sequence
  chemically synthesized
tttcccactgaccttaattc

SEQ ID NO: 21447 - DNA, 20 bp, Artificial Sequence
  chemically synthesized
ttcccactgaccttaattcc

SEQ ID NO: 21448 - DNA, 20 bp, Artificial Sequence
  chemically synthesized
ctgaccttaattccaggaca

SEQ ID NO: 21449 - DNA, 20 bp, Artificial Sequence
  chemically synthesized
ttccaggacatggtaaaact

SEQ ID NO: 21450 - DNA, 20 bp, Artificial Sequence
  chemically synthesized
ccaggacatggtaaaactaa

SEQ ID NO: 21451 - DNA, 20 bp, Artificial Sequence
  chemically synthesized
aaaactaagagacaccctaa

SEQ ID NO: 21452 - DNA, 20 bp, Artificial Sequence
  chemically synthesized
acgcttccttacctccattg

SEQ ID NO: 21453 - DNA, 20 bp, Artificial Sequence
  chemically synthesized
gcttccttacctccattgtg

SEQ ID NO: 21454 - DNA, 20 bp, Artificial Sequence
  chemically synthesized
ttacctccattgtggagttg

SEQ ID NO: 21455 - DNA, 20 bp, Artificial Sequence
  chemically synthesized
gtagactgatttcatcttga

SEQ ID NO: 21456 - DNA, 20 bp, Artificial Sequence
  chemically synthesized
ctgatttcatcttgatagtc

SEQ ID NO: 21457 - DNA, 20 bp, Artificial Sequence
  chemically synthesized
tgatttcatcttgatagtct

SEQ ID NO: 21458 - DNA, 20 bp, Artificial Sequence
  chemically synthesized
atagtctgggttaatcaccg

SEQ ID NO: 21459 - DNA, 20 bp, Artificial Sequence
  chemically synthesized
caacactgtaactctcttct

SEQ ID NO: 21460 - DNA, 20 bp, Artificial Sequence
  chemically synthesized
cttcttagcctgttgactta

SEQ ID NO: 21461 - DNA, 20 bp, Artificial Sequence
  chemically synthesized
ttcttagcctgttgacttaa

SEQ ID NO: 21462 - DNA, 20 bp, Artificial Sequence
  chemically synthesized
ttagcctgttgacttaaagg

SEQ ID NO: 21463 - DNA, 20 bp, Artificial Sequence
  chemically synthesized
tagcctgttgacttaaaggt

SEQ ID NO: 21464 - DNA, 20 bp, Artificial Sequence
  chemically synthesized
gcctgttgacttaaaggtgg

SEQ ID NO: 21465 - DNA, 20 bp, Artificial Sequence
  chemically synthesized
cctgttgacttaaaggtggg

SEQ ID NO: 21466 - DNA, 20 bp, Artificial Sequence
  chemically synthesized
tgttgacttaaaggtgggag

SEQ ID NO: 21467 - DNA, 20 bp, Artificial Sequence
  chemically synthesized
ttaaaggtgggaggagccca

SEQ ID NO: 21468 - DNA, 20 bp, Artificial Sequence
  chemically synthesized
tgggaggagcccaaagtgtc

SEQ ID NO: 21469 - DNA, 20 bp, Artificial Sequence
  chemically synthesized
gggaggagcccaaagtgtcc

SEQ ID NO: 21470 - DNA, 20 bp, Artificial Sequence
  chemically synthesized
aggagcccaaagtgtccagg

SEQ ID NO: 21471 - DNA, 20 bp, Artificial Sequence
  chemically synthesized
caggtggcaatcttaatttg

SEQ ID NO: 21472 - DNA, 20 bp, Artificial Sequence
  chemically synthesized
aatcttaatttgcagtttaa

SEQ ID NO: 21473 - DNA, 20 bp, Artificial Sequence
  chemically synthesized
ggaatcattattgtgtcacc

SEQ ID NO: 21474 - DNA, 20 bp, Artificial Sequence
  chemically synthesized
atcattattgtgtcacctgg

SEQ ID NO: 21475 - DNA, 20 bp, Artificial Sequence
  chemically synthesized
attattgtgtcacctggcgg

SEQ ID NO: 21476 - DNA, 20 bp, Artificial Sequence
  chemically synthesized
ggcggcagtgttcctccctc

SEQ ID NO: 21477 - DNA, 20 bp, Artificial Sequence
  chemically synthesized
gtgttcctccctctggaact

SEQ ID NO: 21478 - DNA, 20 bp, Artificial Sequence
  chemically synthesized
cctctggaactaagacctct

SEQ ID NO: 21479 - DNA, 20 bp, Artificial Sequence
  chemically synthesized
tggaactaagacctctaagc

SEQ ID NO: 21480 - DNA, 20 bp, Artificial Sequence
  chemically synthesized
aactaagacctctaagccag

SEQ ID NO: 21481 - DNA, 20 bp, Artificial Sequence
  chemically synthesized
gccagcagaacataatgcca

SEQ ID NO: 21482 - DNA, 20 bp, Artificial Sequence
  chemically synthesized
ccagcagaacataatgccat

SEQ ID NO: 21483 - DNA, 20 bp, Artificial Sequence
  chemically synthesized
agaacataatgccatgggaa

SEQ ID NO: 21484 - DNA, 20 bp, Artificial Sequence
  chemically synthesized
gaacataatgccatgggaac

SEQ ID NO: 21485 - DNA, 20 bp, Artificial Sequence
  chemically synthesized
cataatgccatgggaacagg

SEQ ID NO: 21486 - DNA, 20 bp, Artificial Sequence
  chemically synthesized
acaggaagcaaaaattttgc

SEQ ID NO: 21487 - DNA, 20 bp, Artificial Sequence
  chemically synthesized
ggaagcaaaaattttgctag

SEQ ID NO: 21488 - DNA, 20 bp, Artificial Sequence
  chemically synthesized
aaattttgctagtggaacac

SEQ ID NO: 21489 - DNA, 20 bp, Artificial Sequence
  chemically synthesized
aattttgctagtggaacact

SEQ ID NO: 21490 - DNA, 20 bp, Artificial Sequence
  chemically synthesized
attttgctagtggaacacta

SEQ ID NO: 21491 - DNA, 20 bp, Artificial Sequence
  chemically synthesized
ttttgctagtggaacactag

SEQ ID NO: 21492 - DNA, 20 bp, Artificial Sequence
  chemically synthesized
tagtggaacactaggggtga

SEQ ID NO: 21493 - DNA, 20 bp, Artificial Sequence
  chemically synthesized
ggaacactaggggtgatggt

SEQ ID NO: 21494 - DNA, 20 bp, Artificial Sequence
  chemically synthesized
acactaggggtgatggtgag

SEQ ID NO: 21495 - DNA, 20 bp, Artificial Sequence
  chemically synthesized
cacttccaccctttgattcc

SEQ ID NO: 21496 - DNA, 20 bp, Artificial Sequence
  chemically synthesized
ggacccgtgaatcctgtcta

SEQ ID NO: 21497 - DNA, 20 bp, Artificial Sequence
  chemically synthesized
gacccgtgaatcctgtctat

SEQ ID NO: 21498 - DNA, 20 bp, Artificial Sequence
  chemically synthesized
cccgtgaatcctgtctatgg

SEQ ID NO: 21499 - DNA, 20 bp, Artificial Sequence
  chemically synthesized
aatcctgtctatgggagaaa

SEQ ID NO: 21500 - DNA, 20 bp, Artificial Sequence
  chemically synthesized
ggagaaacagtaccatatat

SEQ ID NO: 21501 - DNA, 20 bp, Artificial Sequence
  chemically synthesized
ccatatattggacactgatt

SEQ ID NO: 21502 - DNA, 20 bp, Artificial Sequence
  chemically synthesized
atatattggacactgattca

SEQ ID NO: 21503 - DNA, 20 bp, Artificial Sequence
  chemically synthesized
acactgattcagagcataca

SEQ ID NO: 21504 - DNA, 20 bp, Artificial Sequence
  chemically synthesized
tcagagcatacacagccttc

SEQ ID NO: 21505 - DNA, 20 bp, Artificial Sequence
  chemically synthesized
agagcatacacagccttctg

SEQ ID NO: 21506 - DNA, 20 bp, Artificial Sequence
  chemically synthesized
ccttctggagaactttgccc

SEQ ID NO: 21507 - DNA, 20 bp, Artificial Sequence
  chemically synthesized
cttctggagaactttgcccc

SEQ ID NO: 21508 - DNA, 20 bp, Artificial Sequence
  chemically synthesized
aactttgccccaggcctgca

SEQ ID NO: 21509 - DNA, 20 bp, Artificial Sequence
  chemically synthesized
gcctgcaaagtattgtcacc

SEQ ID NO: 21510 - DNA, 20 bp, Artificial Sequence
  chemically synthesized
gcaaagtattgtcacctagt

SEQ ID NO: 21511 - DNA, 20 bp, Artificial Sequence
  chemically synthesized
cattgtaatcgtgacttcaa

SEQ ID NO: 21512 - DNA, 20 bp, Artificial Sequence
  chemically synthesized
attgtaatcgtgacttcaaa

SEQ ID NO: 21513 - DNA, 20 bp, Artificial Sequence
  chemically synthesized
gacttcaaaaggccattcaa

SEQ ID NO: 21514 - DNA, 20 bp, Artificial Sequence
  chemically synthesized
aggccattcaaaagctgctt

SEQ ID NO: 21515 - DNA, 20 bp, Artificial Sequence
  chemically synthesized
ggccattcaaaagctgcttc

SEQ ID NO: 21516 - DNA, 20 bp, Artificial Sequence
  chemically synthesized
caaaagctgcttcaggatga

SEQ ID NO: 21517 - DNA, 20 bp, Artificial Sequence
  chemically synthesized
aaaagctgcttcaggatgat

SEQ ID NO: 21518 - DNA, 20 bp, Artificial Sequence
  chemically synthesized
aaagctgcttcaggatgata

SEQ ID NO: 21519 - DNA, 20 bp, Artificial Sequence
  chemically synthesized
cttcaggatgatagggatca

SEQ ID NO: 21520 - DNA, 20 bp, Artificial Sequence
  chemically synthesized
aggatgatagggatcatggt

SEQ ID NO: 21521 - DNA, 20 bp, Artificial Sequence
  chemically synthesized
gatagggatcatggtaagac

SEQ ID NO: 21522 - DNA, 20 bp, Artificial Sequence
  chemically synthesized
gtaagaccagtaaattccat

SEQ ID NO: 21523 - DNA, 20 bp, Artificial Sequence
  chemically synthesized
ccagtaaattccatgagcat

SEQ ID NO: 21524 - DNA, 20 bp, Artificial Sequence
  chemically synthesized
agcccactgtcacacttctt

SEQ ID NO: 21525 - DNA, 20 bp, Artificial Sequence
  chemically synthesized
gtcacacttctttagccata

SEQ ID NO: 21526 - DNA, 20 bp, Artificial Sequence
  chemically synthesized
cacttctttagccataaagt

SEQ ID NO: 21527 - DNA, 20 bp, Artificial Sequence
  chemically synthesized
ttctttagccataaagtgag

SEQ ID NO: 21528 - DNA, 20 bp, Artificial Sequence
  chemically synthesized
tagccataaagtgagtggct

SEQ ID NO: 21529 - DNA, 20 bp, Artificial Sequence
  chemically synthesized
cataaagtgagtggcttggt

SEQ ID NO: 21530 - DNA, 20 bp, Artificial Sequence
  chemically synthesized
aaagtgagtggcttggtcag

SEQ ID NO: 21531 - DNA, 20 bp, Artificial Sequence
  chemically synthesized
tggtcagaagcaatgctgtg

SEQ ID NO: 21532 - DNA, 20 bp, Artificial Sequence
  chemically synthesized
tgctgtgtggaataccatga

SEQ ID NO: 21533 - DNA, 20 bp, Artificial Sequence
  chemically synthesized
tgtgtggaataccatgacag

SEQ ID NO: 21534 - DNA, 20 bp, Artificial Sequence
  chemically synthesized
gaataccatgacagtggata

SEQ ID NO: 21535 - DNA, 20 bp, Artificial Sequence
  chemically synthesized
tacggcattctgtgattcca

SEQ ID NO: 21536 - DNA, 20 bp, Artificial Sequence
  chemically synthesized
gcattctgtgattccatgga

SEQ ID NO: 21537 - DNA, 20 bp, Artificial Sequence
  chemically synthesized
ttctgtgattccatggatgg

SEQ ID NO: 21538 - DNA, 20 bp, Artificial Sequence
  chemically synthesized
gattccatggatggtagtct

SEQ ID NO: 21539 - DNA, 20 bp, Artificial Sequence
  chemically synthesized
atggatggtagtcttggcat

SEQ ID NO: 21540 - DNA, 20 bp, Artificial Sequence
  chemically synthesized
gtagtcttggcataagcatt

SEQ ID NO: 21541 - DNA, 20 bp, Artificial Sequence
  chemically synthesized
cttggcataagcattgagtt

SEQ ID NO: 21542 - DNA, 20 bp, Artificial Sequence
  chemically synthesized
ttggcataagcattgagttc

SEQ ID NO: 21543 - DNA, 20 bp, Artificial Sequence
  chemically synthesized
ataagcattgagttcaggat

SEQ ID NO: 21544 - DNA, 20 bp, Artificial Sequence
  chemically synthesized
taagcattgagttcaggatt

SEQ ID NO: 21545 - DNA, 20 bp, Artificial Sequence
  chemically synthesized
aggattgggaaacccatatc

SEQ ID NO: 21546 - DNA, 20 bp, Artificial Sequence
  chemically synthesized
gattgggaaacccatatcca

SEQ ID NO: 21547 - DNA, 20 bp, Artificial Sequence
  chemically synthesized
gggaaacccatatccagagt

SEQ ID NO: 21548 - DNA, 20 bp, Artificial Sequence
  chemically synthesized
tccagagtaagtgtctattc

SEQ ID NO: 21549 - DNA, 20 bp, Artificial Sequence
  chemically synthesized
gagtaagtgtctattccagt

SEQ ID NO: 21550 - DNA, 20 bp, Artificial Sequence
  chemically synthesized
agtaagtgtctattccagtg

SEQ ID NO: 21551 - DNA, 20 bp, Artificial Sequence
  chemically synthesized
gtgtctattccagtgaggac

SEQ ID NO: 21552 - DNA, 20 bp, Artificial Sequence
  chemically synthesized
agcctctgccctttccatga

SEQ ID NO: 21553 - DNA, 20 bp, Artificial Sequence
  chemically synthesized
ctctgccctttccatgatgg

SEQ ID NO: 21554 - DNA, 20 bp, Artificial Sequence
  chemically synthesized
ctgccctttccatgatggaa

SEQ ID NO: 21555 - DNA, 20 bp, Artificial Sequence
  chemically synthesized
tgccctttccatgatggaag

SEQ ID NO: 21556 - DNA, 20 bp, Artificial Sequence
  chemically synthesized
caatataatcaacctgccac

SEQ ID NO: 21557 - DNA, 20 bp, Artificial Sequence
  chemically synthesized
aatataatcaacctgccacc

SEQ ID NO: 21558 - DNA, 20 bp, Artificial Sequence
  chemically synthesized
ataatcaacctgccaccagg

SEQ ID NO: 21559 - DNA, 20 bp, Artificial Sequence
  chemically synthesized
tcaacctgccaccaggtagc

SEQ ID NO: 21560 - DNA, 20 bp, Artificial Sequence
  chemically synthesized
ggtagctggctgatcacccc

SEQ ID NO: 21561 - DNA, 20 bp, Artificial Sequence
  chemically synthesized
gtagctggctgatcaccccg

SEQ ID NO: 21562 - DNA, 20 bp, Artificial Sequence
  chemically synthesized
tggctgatcaccccgaggaa

SEQ ID NO: 21563 - DNA, 20 bp, Artificial Sequence
  chemically synthesized
ccgaggaatggtgccatatc

SEQ ID NO: 21564 - DNA, 20 bp, Artificial Sequence
  chemically synthesized
cgaggaatggtgccatatca

SEQ ID NO: 21565 - DNA, 20 bp, Artificial Sequence
  chemically synthesized
gaggaatggtgccatatcaa

SEQ ID NO: 21566 - DNA, 20 bp, Artificial Sequence
  chemically synthesized
atggtgccatatcaagggct

SEQ ID NO: 21567 - DNA, 20 bp, Artificial Sequence
  chemically synthesized
ccatatcaagggcttagtgt

SEQ ID NO: 21568 - DNA, 20 bp, Artificial Sequence
  chemically synthesized
ttagtgttggtctctgatgc

SEQ ID NO: 21569 - DNA, 20 bp, Artificial Sequence
  chemically synthesized
tgttggtctctgatgctggc

SEQ ID NO: 21570 - DNA, 20 bp, Artificial Sequence
  chemically synthesized
tggtctctgatgctggcaag

SEQ ID NO: 21571 - DNA, 20 bp, Artificial Sequence
  chemically synthesized
tctctgatgctggcaagcag

SEQ ID NO: 21572 - DNA, 20 bp, Artificial Sequence
  chemically synthesized
atgctggcaagcagtggctg

SEQ ID NO: 21573 - DNA, 20 bp, Artificial Sequence
  chemically synthesized
tggcaagcagtggctgtggc

SEQ ID NO: 21574 - DNA, 20 bp, Artificial Sequence
  chemically synthesized
ggcaagcagtggctgtggcc

SEQ ID NO: 21575 - DNA, 20 bp, Artificial Sequence
  chemically synthesized
agcagtggctgtggccaggt

SEQ ID NO: 21576 - DNA, 20 bp, Artificial Sequence
  chemically synthesized
ggctgtggccaggtcagctt

SEQ ID NO: 21577 - DNA, 20 bp, Artificial Sequence
  chemically synthesized
gtggccaggtcagctttggt

SEQ ID NO: 21578 - DNA, 20 bp, Artificial Sequence
  chemically synthesized
gccaggtcagctttggtgag

SEQ ID NO: 21579 - DNA, 20 bp, Artificial Sequence
  chemically synthesized
aggtcagctttggtgagtgg

SEQ ID NO: 21580 - DNA, 20 bp, Artificial Sequence
  chemically synthesized
gagtggaagtccatgttgct

SEQ ID NO: 21581 - DNA, 20 bp, Artificial Sequence
  chemically synthesized
aagtccatgttgctgagccc

SEQ ID NO: 21582 - DNA, 20 bp, Artificial Sequence
  chemically synthesized
aacttccatccctgcaactg

SEQ ID NO: 21583 - DNA, 20 bp, Artificial Sequence
  chemically synthesized
aactgtggccactttgttca

SEQ ID NO: 21584 - DNA, 20 bp, Artificial Sequence
  chemically synthesized
actgtggccactttgttcat

SEQ ID NO: 21585 - DNA, 20 bp, Artificial Sequence
  chemically synthesized
cactttgttcatgggtccat

SEQ ID NO: 21586 - DNA, 20 bp, Artificial Sequence
  chemically synthesized
ggtccattggacgatgacat

SEQ ID NO: 21587 - DNA, 20 bp, Artificial Sequence
  chemically synthesized
ccattggacgatgacatgag

SEQ ID NO: 21588 - DNA, 20 bp, Artificial Sequence
  chemically synthesized
ggacgatgacatgagtggcc

SEQ ID NO: 21589 - DNA, 20 bp, Artificial Sequence
  chemically synthesized
gacgatgacatgagtggcct

SEQ ID NO: 21590 - DNA, 20 bp, Artificial Sequence
  chemically synthesized
tgacatgagtggcctgggaa

SEQ ID NO: 21591 - DNA, 20 bp, Artificial Sequence
  chemically synthesized
gacatgagtggcctgggaaa

SEQ ID NO: 21592 - DNA, 20 bp, Artificial Sequence
  chemically synthesized
gagtggcctgggaaaaggct

SEQ ID NO: 21593 - DNA, 20 bp, Artificial Sequence
  chemically synthesized
tggcctgggaaaaggctgag

SEQ ID NO: 21594 - DNA, 20 bp, Artificial Sequence
  chemically synthesized
aaaaggctgagtggtgtcca

SEQ ID NO: 21595 - DNA, 20 bp, Artificial Sequence
  chemically synthesized
tattaaaatcctcttctgct

SEQ ID NO: 21596 - DNA, 20 bp, Artificial Sequence
  chemically synthesized
attaaaatcctcttctgctg

SEQ ID NO: 21597 - DNA, 20 bp, Artificial Sequence
  chemically synthesized
cttctgctgaggtcacccat

SEQ ID NO: 21598 - DNA, 20 bp, Artificial Sequence
  chemically synthesized
tgctgaggtcacccattggt

SEQ ID NO: 21599 - DNA, 20 bp, Artificial Sequence
  chemically synthesized
cccattggtgagcactcaca

SEQ ID NO: 21600 - DNA, 20 bp, Artificial Sequence
  chemically synthesized
ccattggtgagcactcacat

SEQ ID NO: 21601 - DNA, 20 bp, Artificial Sequence
  chemically synthesized
atgggatgaaaatatctttg

SEQ ID NO: 21602 - DNA, 20 bp, Artificial Sequence
  chemically synthesized
ttgtagtttttgactaatca

SEQ ID NO: 21603 - DNA, 20 bp, Artificial Sequence
  chemically synthesized
gtagtttttgactaatcata

SEQ ID NO: 21604 - DNA, 20 bp, Artificial Sequence
  chemically synthesized
tagtttttgactaatcatag

SEQ ID NO: 21605 - DNA, 20 bp, Artificial Sequence
  chemically synthesized
tttctttgtcatcaattttc

SEQ ID NO: 21606 - DNA, 20 bp, Artificial Sequence
  chemically synthesized
tttccagtcatgctttttcc

SEQ ID NO: 21607 - DNA, 20 bp, Artificial Sequence
  chemically synthesized
tttccaagtccctgaccatc

SEQ ID NO: 21608 - DNA, 20 bp, Artificial Sequence
  chemically synthesized
tgaccatctagccaaacctt

SEQ ID NO: 21609 - DNA, 20 bp, Artificial Sequence
  chemically synthesized
tctagccaaacctttggcta

SEQ ID NO: 21610 - DNA, 20 bp, Artificial Sequence
  chemically synthesized
tttggctacagcccatgaat

SEQ ID NO: 21611 - DNA, 20 bp, Artificial Sequence
  chemically synthesized
taagtatataatcgcaaatc

SEQ ID NO: 21612 - DNA, 20 bp, Artificial Sequence
  chemically synthesized
gccatttctccttctgtgca

SEQ ID NO: 21613 - DNA, 20 bp, Artificial Sequence
  chemically synthesized
ttctgtgcaaagtgcacaac

SEQ ID NO: 21614 - DNA, 20 bp, Artificial Sequence
  chemically synthesized
tctgtgcaaagtgcacaacc

SEQ ID NO: 21615 - DNA, 20 bp, Artificial Sequence
  chemically synthesized
acaaccaggcacactgctca

SEQ ID NO: 21616 - DNA, 20 bp, Artificial Sequence
  chemically synthesized
ctgctcaaagttctgccaac

SEQ ID NO: 21617 - DNA, 20 bp, Artificial Sequence
  chemically synthesized
tgctcaaagttctgccaact

SEQ ID NO: 21618 - DNA, 20 bp, Artificial Sequence
  chemically synthesized
tcaaagttctgccaactagg

SEQ ID NO: 21619 - DNA, 20 bp, Artificial Sequence
  chemically synthesized
ttcccttcaccgttgtcctt

SEQ ID NO: 21620 - DNA, 20 bp, Artificial Sequence
  chemically synthesized
tcccttcaccgttgtccttc

SEQ ID NO: 21621 - DNA, 20 bp, Artificial Sequence
  chemically synthesized
cccttcaccgttgtccttca

SEQ ID NO: 21622 - DNA, 20 bp, Artificial Sequence
  chemically synthesized
gttgtccttcagggatgtcc

SEQ ID NO: 21623 - DNA, 20 bp, Artificial Sequence
  chemically synthesized
tccttcagggatgtcctaga

SEQ ID NO: 21624 - DNA, 20 bp, Artificial Sequence
  chemically synthesized
ccttcagggatgtcctagaa

SEQ ID NO: 21625 - DNA, 20 bp, Artificial Sequence
  chemically synthesized
cttcagggatgtcctagaaa

SEQ ID NO: 21626 - DNA, 20 bp, Artificial Sequence
  chemically synthesized
ttcagggatgtcctagaaag

SEQ ID NO: 21627 - DNA, 20 bp, Artificial Sequence
  chemically synthesized
gatgtcctagaaaggggctg

SEQ ID NO: 21628 - DNA, 20 bp, Artificial Sequence
  chemically synthesized
agaaaggggctgtagtgctg

SEQ ID NO: 21629 - DNA, 20 bp, Artificial Sequence
  chemically synthesized
gtgctgcggctgtccacttt

SEQ ID NO: 21630 - DNA, 20 bp, Artificial Sequence
  chemically synthesized
tgctgcggctgtccactttt

SEQ ID NO: 21631 - DNA, 20 bp, Artificial Sequence
  chemically synthesized
tgcggctgtccacttttggg

SEQ ID NO: 21632 - DNA, 20 bp, Artificial Sequence
  chemically synthesized
ggtggtgcctgcatatcgtg

SEQ ID NO: 21633 - DNA, 20 bp, Artificial Sequence
  chemically synthesized
gtgcagaactatctgtgaac

SEQ ID NO: 21634 - DNA, 20 bp, Artificial Sequence
  chemically synthesized
tgcagaactatctgtgaacc

SEQ ID NO: 21635 - DNA, 20 bp, Artificial Sequence
  chemically synthesized
actatctgtgaaccaggacc

SEQ ID NO: 21636 - DNA, 20 bp, Artificial Sequence
  chemically synthesized
ctagtcttctcttcctctgt

SEQ ID NO: 21637 - DNA, 20 bp, Artificial Sequence
  chemically synthesized
cttcctctgtcagctgatca

SEQ ID NO: 21638 - DNA, 20 bp, Artificial Sequence
  chemically synthesized
ttcctctgtcagctgatcat

SEQ ID NO: 21639 - DNA, 20 bp, Artificial Sequence
  chemically synthesized
tcctctgtcagctgatcata

SEQ ID NO: 21640 - DNA, 20 bp, Artificial Sequence
  chemically synthesized
gatcatagggaactccccat

SEQ ID NO: 21641 - DNA, 20 bp, Artificial Sequence
  chemically synthesized
ggaactccccatgagaccat

SEQ ID NO: 21642 - DNA, 20 bp, Artificial Sequence
  chemically synthesized
tccccatgagaccatcggtg

SEQ ID NO: 21643 - DNA, 20 bp, Artificial Sequence
  chemically synthesized
tgagaccatcggtgcagtct

SEQ ID NO: 21644 - DNA, 20 bp, Artificial Sequence
  chemically synthesized
gagaccatcggtgcagtctc

SEQ ID NO: 21645 - DNA, 20 bp, Artificial Sequence
  chemically synthesized
agaccatcggtgcagtctca

SEQ ID NO: 21646 - DNA, 20 bp, Artificial Sequence
  chemically synthesized
accatcggtgcagtctcagg

SEQ ID NO: 21647 - DNA, 20 bp, Artificial Sequence
  chemically synthesized
catcggtgcagtctcaggga

SEQ ID NO: 21648 - DNA, 20 bp, Artificial Sequence
  chemically synthesized
ggtgcagtctcagggagaga

SEQ ID NO: 21649 - DNA, 20 bp, Artificial Sequence
  chemically synthesized
gcagtctcagggagagaaag

SEQ ID NO: 21650 - DNA, 20 bp, Artificial Sequence
  chemically synthesized
agggagagaaagcagtgtgt

SEQ ID NO: 21651 - DNA, 20 bp, Artificial Sequence
  chemically synthesized
gggagagaaagcagtgtgtc

SEQ ID NO: 21652 - DNA, 20 bp, Artificial Sequence
  chemically synthesized
gagagaaagcagtgtgtcag

SEQ ID NO: 21653 - DNA, 20 bp, Artificial Sequence
  chemically synthesized
agaaagcagtgtgtcaggag

SEQ ID NO: 21654 - DNA, 20 bp, Artificial Sequence
  chemically synthesized
aaagcagtgtgtcaggagtg

SEQ ID NO: 21655 - DNA, 20 bp, Artificial Sequence
  chemically synthesized
tgtgtcaggagtggagacca

SEQ ID NO: 21656 - DNA, 20 bp, Artificial Sequence
  chemically synthesized
gtgtcaggagtggagaccat

SEQ ID NO: 21657 - DNA, 20 bp, Artificial Sequence
  chemically synthesized
agtggagaccatgggcattt

SEQ ID NO: 21658 - DNA, 20 bp, Artificial Sequence
  chemically synthesized
ccctttctcatgtaacttac

SEQ ID NO: 21659 - DNA, 20 bp, Artificial Sequence
  chemically synthesized
atgtaacttactagtgcctt

SEQ ID NO: 21660 - DNA, 20 bp, Artificial Sequence
  chemically synthesized
tgtaacttactagtgccttc

SEQ ID NO: 21661 - DNA, 20 bp, Artificial Sequence
  chemically synthesized
agtgccttcaggatctgctc

SEQ ID NO: 21662 - DNA, 20 bp, Artificial Sequence
  chemically synthesized
tgatgcaatgctgctgtgca

SEQ ID NO: 21663 - DNA, 20 bp, Artificial Sequence
  chemically synthesized
gctgtgcacagcccacttta

SEQ ID NO: 21664 - DNA, 20 bp, Artificial Sequence
  chemically synthesized
tgcacagcccactttatggc

SEQ ID NO: 21665 - DNA, 20 bp, Artificial Sequence
  chemically synthesized
cagcccactttatggctaga

SEQ ID NO: 21666 - DNA, 20 bp, Artificial Sequence
  chemically synthesized
cactttatggctagatggat

SEQ ID NO: 21667 - DNA, 20 bp, Artificial Sequence
  chemically synthesized
ttatggctagatggatcaga

SEQ ID NO: 21668 - DNA, 20 bp, Artificial Sequence
  chemically synthesized
tagatggatcagaaagcacc

SEQ ID NO: 21669 - DNA, 20 bp, Artificial Sequence
  chemically synthesized
agaaagcacccagttcatga

SEQ ID NO: 21670 - DNA, 20 bp, Artificial Sequence
  chemically synthesized
gaaagcacccagttcatgat

SEQ ID NO: 21671 - DNA, 20 bp, Artificial Sequence
  chemically synthesized
agcacccagttcatgatagg

SEQ ID NO: 21672 - DNA, 20 bp, Artificial Sequence
  chemically synthesized
ccagttcatgataggcagtt

SEQ ID NO: 21673 - DNA, 20 bp, Artificial Sequence
  chemically synthesized
cagttcatgataggcagttc

SEQ ID NO: 21674 - DNA, 20 bp, Artificial Sequence
  chemically synthesized
gataggcagttcaggtcaca

SEQ ID NO: 21675 - DNA, 20 bp, Artificial Sequence
  chemically synthesized
catggtgacttgatgactca

SEQ ID NO: 21676 - DNA, 20 bp, Artificial Sequence
  chemically synthesized
caaatatttcgtttccacca

SEQ ID NO: 21677 - DNA, 20 bp, Artificial Sequence
  chemically synthesized
atttcgtttccaccaaagcc

SEQ ID NO: 21678 - DNA, 20 bp, Artificial Sequence
  chemically synthesized
tttccaccaaagcccagtaa

SEQ ID NO: 21679 - DNA, 20 bp, Artificial Sequence
  chemically synthesized
ttccaccaaagcccagtaac

SEQ ID NO: 21680 - DNA, 20 bp, Artificial Sequence
  chemically synthesized
ccaaagcccagtaacaggcc

SEQ ID NO: 21681 - DNA, 20 bp, Artificial Sequence
  chemically synthesized
aaagcccagtaacaggccaa

SEQ ID NO: 21682 - DNA, 20 bp, Artificial Sequence
  chemically synthesized
gccaagagctttctccctaa

SEQ ID NO: 21683 - DNA, 20 bp, Artificial Sequence
  chemically synthesized
caagagctttctccctaaaa

SEQ ID NO: 21684 - DNA, 20 bp, Artificial Sequence
  chemically synthesized
agagctttctccctaaaaga

SEQ ID NO: 21685 - DNA, 20 bp, Artificial Sequence
  chemically synthesized
gctttctccctaaaagagag

SEQ ID NO: 21686 - DNA, 20 bp, Artificial Sequence
  chemically synthesized
taaaagagagtagttatctg

SEQ ID NO: 21687 - DNA, 20 bp, Artificial Sequence
  chemically synthesized
aagagagtagttatctgcag

SEQ ID NO: 21688 - DNA, 20 bp, Artificial Sequence
  chemically synthesized
gagtagttatctgcagaaga

SEQ ID NO: 21689 - DNA, 20 bp, Artificial Sequence
  chemically synthesized
tagttatctgcagaagatgg

SEQ ID NO: 21690 - DNA, 20 bp, Artificial Sequence
  chemically synthesized
agttatctgcagaagatggc

SEQ ID NO: 21691 - DNA, 20 bp, Artificial Sequence
  chemically synthesized
gttatctgcagaagatggca

SEQ ID NO: 21692 - DNA, 20 bp, Artificial Sequence
  chemically synthesized
agggccttgctccaaaatcc

SEQ ID NO: 21693 - DNA, 20 bp, Artificial Sequence
  chemically synthesized
ggccttgctccaaaatccta

SEQ ID NO: 21694 - DNA, 20 bp, Artificial Sequence
  chemically synthesized
gccttgctccaaaatcctag

SEQ ID NO: 21695 - DNA, 20 bp, Artificial Sequence
  chemically synthesized
tagaggcctccgctgtgatt

SEQ ID NO: 21696 - DNA, 20 bp, Artificial Sequence
  chemically synthesized
agcctgccaaatgctccaaa

SEQ ID NO: 21697 - DNA, 20 bp, Artificial Sequence
  chemically synthesized
ctccaaacagcatccctatc

SEQ ID NO: 21698 - DNA, 20 bp, Artificial Sequence
  chemically synthesized
ctatctggcactgacacctc

SEQ ID NO: 21699 - DNA, 20 bp, Artificial Sequence
  chemically synthesized
actgacacctcaagcatcat

SEQ ID NO: 21700 - DNA, 20 bp, Artificial Sequence
  chemically synthesized
tcaagcatcattggatctgc

SEQ ID NO: 21701 - DNA, 20 bp, Artificial Sequence
  chemically synthesized
caagcatcattggatctgct

SEQ ID NO: 21702 - DNA, 20 bp, Artificial Sequence
  chemically synthesized
attggatctgctaggtcata

SEQ ID NO: 21703 - DNA, 20 bp, Artificial Sequence
  chemically synthesized
tctgctaggtcatatggccc

SEQ ID NO: 21704 - DNA, 20 bp, Artificial Sequence
  chemically synthesized
gctaggtcatatggcccaag

SEQ ID NO: 21705 - DNA, 20 bp, Artificial Sequence
  chemically synthesized
gtcatatggcccaagtggca

SEQ ID NO: 21706 - DNA, 20 bp, Artificial Sequence
  chemically synthesized
atatggcccaagtggcatag

SEQ ID NO: 21707 - DNA, 20 bp, Artificial Sequence
  chemically synthesized
aagtggcatagcagcttgca

SEQ ID NO: 21708 - DNA, 20 bp, Artificial Sequence
  chemically synthesized
tggcatagcagcttgcacag

SEQ ID NO: 21709 - DNA, 20 bp, Artificial Sequence
  chemically synthesized
tagcagcttgcacagcagcc

SEQ ID NO: 21710 - DNA, 20 bp, Artificial Sequence
  chemically synthesized
tgcacagcagcctggacctg

SEQ ID NO: 21711 - DNA, 20 bp, Artificial Sequence
  chemically synthesized
acagcagcctggacctgtgg

SEQ ID NO: 21712 - DNA, 20 bp, Artificial Sequence
  chemically synthesized
agcagcctggacctgtggca

SEQ ID NO: 21713 - DNA, 20 bp, Artificial Sequence
  chemically synthesized
tgtggcagagccttctgttc

SEQ ID NO: 21714 - DNA, 20 bp, Artificial Sequence
  chemically synthesized
ttctggactccactcaaaac

SEQ ID NO: 21715 - DNA, 20 bp, Artificial Sequence
  chemically synthesized
tggactccactcaaaactgg

SEQ ID NO: 21716 - DNA, 20 bp, Artificial Sequence
  chemically synthesized
actcaaaactggcagccttt

SEQ ID NO: 21717 - DNA, 20 bp, Artificial Sequence
  chemically synthesized
cttttggatcactcgataaa

SEQ ID NO: 21718 - DNA, 20 bp, Artificial Sequence
  chemically synthesized
ttttggatcactcgataaat

SEQ ID NO: 21719 - DNA, 20 bp, Artificial Sequence
  chemically synthesized
ggatcactcgataaatgggc

SEQ ID NO: 21720 - DNA, 20 bp, Artificial Sequence
  chemically synthesized
atcactcgataaatgggcca

SEQ ID NO: 21721 - DNA, 20 bp, Artificial Sequence
  chemically synthesized
ccagagtaacacacccaaat

SEQ ID NO: 21722 - DNA, 20 bp, Artificial Sequence
  chemically synthesized
cagagtaacacacccaaatc

SEQ ID NO: 21723 - DNA, 20 bp, Artificial Sequence
  chemically synthesized
tgttgcctccaaaatccaaa

SEQ ID NO: 21724 - DNA, 20 bp, Artificial Sequence
  chemically synthesized
gttgcctccaaaatccaaat

SEQ ID NO: 21725 - DNA, 20 bp, Artificial Sequence
  chemically synthesized
caaaatccaaataggcccac

SEQ ID NO: 21726 - DNA, 20 bp, Artificial Sequence
  chemically synthesized
aaaatccaaataggcccact

SEQ ID NO: 21727 - DNA, 20 bp, Artificial Sequence
  chemically synthesized
taggcgttgtgcctatttct

SEQ ID NO: 21728 - DNA, 20 bp, Artificial Sequence
  chemically synthesized
tgtgcctatttcttggttgt

SEQ ID NO: 21729 - DNA, 20 bp, Artificial Sequence
  chemically synthesized
tgcctatttcttggttgtaa

SEQ ID NO: 21730 - DNA, 20 bp, Artificial Sequence
  chemically synthesized
ctatttcttggttgtaagag

SEQ ID NO: 21731 - DNA, 20 bp, Artificial Sequence
  chemically synthesized
gttgtaagagtggccaaatg

SEQ ID NO: 21732 - DNA, 20 bp, Artificial Sequence
  chemically synthesized
cagcaaattatccttcactt

SEQ ID NO: 21733 - DNA, 20 bp, Artificial Sequence
  chemically synthesized
caaattatccttcactttag

SEQ ID NO: 21734 - DNA, 20 bp, Artificial Sequence
  chemically synthesized
aaattatccttcactttaga

SEQ ID NO: 21735 - DNA, 20 bp, Artificial Sequence
  chemically synthesized
actttagaaggaatatctca

SEQ ID NO: 21736 - DNA, 20 bp, Artificial Sequence
  chemically synthesized
tttagaaggaatatctcaaa

SEQ ID NO: 21737 - DNA, 20 bp, Artificial Sequence
  chemically synthesized
ctcaaagagccccaaaccat

SEQ ID NO: 21738 - DNA, 20 bp, Artificial Sequence
  chemically synthesized
ggacccctataaattttact

SEQ ID NO: 21739 - DNA, 20 bp, Artificial Sequence
  chemically synthesized
gacccctataaattttactg

SEQ ID NO: 21740 - DNA, 20 bp, Artificial Sequence
  chemically synthesized
ccctataaattttactgagg

SEQ ID NO: 21741 - DNA, 20 bp, Artificial Sequence
  chemically synthesized
tataaattttactgaggtag

SEQ ID NO: 21742 - DNA, 20 bp, Artificial Sequence
  chemically synthesized
ataaattttactgaggtaga

SEQ ID NO: 21743 - DNA, 20 bp, Artificial Sequence
  chemically synthesized
agaaggtccctgaatttaat

SEQ ID NO: 21744 - DNA, 20 bp, Artificial Sequence
  chemically synthesized
aaatgtctcatcaataaatc

SEQ ID NO: 21745 - DNA, 20 bp, Artificial Sequence
  chemically synthesized
gtttgctacttcttgctcac

SEQ ID NO: 21746 - DNA, 20 bp, Artificial Sequence
  chemically synthesized
tacttcttgctcactagttc

SEQ ID NO: 21747 - DNA, 20 bp, Artificial Sequence
  chemically synthesized
tcttgctcactagttccagt

SEQ ID NO: 21748 - DNA, 20 bp, Artificial Sequence
  chemically synthesized
tcagcatgtcatcaatgtaa

SEQ ID NO: 21749 - DNA, 20 bp, Artificial Sequence
  chemically synthesized
tggaccactgtgatatcttg

SEQ ID NO: 21750 - DNA, 20 bp, Artificial Sequence
  chemically synthesized
accactgtgatatcttgtgg

SEQ ID NO: 21751 - DNA, 20 bp, Artificial Sequence
  chemically synthesized
gtgatatcttgtggaagtga

SEQ ID NO: 21752 - DNA, 20 bp, Artificial Sequence
  chemically synthesized
tgatatcttgtggaagtgaa

SEQ ID NO: 21753 - DNA, 20 bp, Artificial Sequence
  chemically synthesized
atcttgtggaagtgaaaggt

SEQ ID NO: 21754 - DNA, 20 bp, Artificial Sequence
  chemically synthesized
tgtggaagtgaaaggtgagc

SEQ ID NO: 21755 - DNA, 20 bp, Artificial Sequence
  chemically synthesized
tgagcaagttctctccaaat

SEQ ID NO: 21756 - DNA, 20 bp, Artificial Sequence
  chemically synthesized
gttctctccaaataagatta

SEQ ID NO: 21757 - DNA, 20 bp, Artificial Sequence
  chemically synthesized
ccaaataagattatggcaca

SEQ ID NO: 21758 - DNA, 20 bp, Artificial Sequence
  chemically synthesized
ataagattatggcacaaagc

SEQ ID NO: 21759 - DNA, 20 bp, Artificial Sequence
  chemically synthesized
aagattatggcacaaagctg

SEQ ID NO: 21760 - DNA, 20 bp, Artificial Sequence
  chemically synthesized
gattatggcacaaagctgga

SEQ ID NO: 21761 - DNA, 20 bp, Artificial Sequence
  chemically synthesized
tggagagttgatatactcct

SEQ ID NO: 21762 - DNA, 20 bp, Artificial Sequence
  chemically synthesized
ttttctttcatcactttgtc

SEQ ID NO: 21763 - DNA, 20 bp, Artificial Sequence
  chemically synthesized
actttgtccagcgaacttac

SEQ ID NO: 21764 - DNA, 20 bp, Artificial Sequence
  chemically synthesized
gttccttgattctccacata

SEQ ID NO: 21765 - DNA, 20 bp, Artificial Sequence
  chemically synthesized
gattctccacatatagtcaa

SEQ ID NO: 21766 - DNA, 20 bp, Artificial Sequence
  chemically synthesized
agtcaaaagtattatgtata

SEQ ID NO: 21767 - DNA, 20 bp, Artificial Sequence
  chemically synthesized
caaaagtattatgtatacag

SEQ ID NO: 21768 - DNA, 20 bp, Artificial Sequence
  chemically synthesized
ctaaattccttgcctctcac

SEQ ID NO: 21769 - DNA, 20 bp, Artificial Sequence
  chemically synthesized
cctctcacaagcgttgaatc

SEQ ID NO: 21770 - DNA, 20 bp, Artificial Sequence
  chemically synthesized
tctcacaagcgttgaatcaa

SEQ ID NO: 21771 - DNA, 20 bp, Artificial Sequence
  chemically synthesized
ctctctaaacaattgatgcc

SEQ ID NO: 21772 - DNA, 20 bp, Artificial Sequence
  chemically synthesized
tctctaaacaattgatgcca

SEQ ID NO: 21773 - DNA, 20 bp, Artificial Sequence
  chemically synthesized
caattgatgccaaggattat

SEQ ID NO: 21774 - DNA, 20 bp, Artificial Sequence
  chemically synthesized
atcagtgttctccataccat

SEQ ID NO: 21775 - DNA, 20 bp, Artificial Sequence
  chemically synthesized
agtgttctccataccattag

SEQ ID NO: 21776 - DNA, 20 bp, Artificial Sequence
  chemically synthesized
gttctccataccattagaag

SEQ ID NO: 21777 - DNA, 20 bp, Artificial Sequence
  chemically synthesized
tctccataccattagaagaa

SEQ ID NO: 21778 - DNA, 20 bp, Artificial Sequence
  chemically synthesized
accattagaagaagagtcct

SEQ ID NO: 21779 - DNA, 20 bp, Artificial Sequence
  chemically synthesized
agaagagtccttagcatatt

SEQ ID NO: 21780 - DNA, 20 bp, Artificial Sequence
  chemically synthesized
gaagagtccttagcatattt

SEQ ID NO: 21781 - DNA, 20 bp, Artificial Sequence
  chemically synthesized
tatttgggtctaatcatatt

SEQ ID NO: 21782 - DNA, 20 bp, Artificial Sequence
  chemically synthesized
ttgggtctaatcatattaag

SEQ ID NO: 21783 - DNA, 20 bp, Artificial Sequence
  chemically synthesized
tcatattaagcagccaactc

SEQ ID NO: 21784 - DNA, 20 bp, Artificial Sequence
  chemically synthesized
agaaaccccaaaaccaatga

SEQ ID NO: 21785 - DNA, 20 bp, Artificial Sequence
  chemically synthesized
tccttaatattctgttcctc

SEQ ID NO: 21786 - DNA, 20 bp, Artificial Sequence
  chemically synthesized
tgttcctctagaaccactcc

SEQ ID NO: 21787 - DNA, 20 bp, Artificial Sequence
  chemically synthesized
cctggtaccaaaatctgtat

SEQ ID NO: 21788 - DNA, 20 bp, Artificial Sequence
  chemically synthesized
ctggtaccaaaatctgtatt

SEQ ID NO: 21789 - DNA, 20 bp, Artificial Sequence
  chemically synthesized
tggtaccaaaatctgtatta

SEQ ID NO: 21790 - DNA, 20 bp, Artificial Sequence
  chemically synthesized
aaatctgtattagggttcta

SEQ ID NO: 21791 - DNA, 20 bp, Artificial Sequence
  chemically synthesized
atctgtattagggttctaca

SEQ ID NO: 21792 - DNA, 20 bp, Artificial Sequence
  chemically synthesized
attagggttctacagagaaa

SEQ ID NO: 21793 - DNA, 20 bp, Artificial Sequence
  chemically synthesized
ctacagagaaacagaattaa

SEQ ID NO: 21794 - DNA, 20 bp, Artificial Sequence
  chemically synthesized
tacagagaaacagaattaat

SEQ ID NO: 21795 - DNA, 20 bp, Artificial Sequence
  chemically synthesized
cagagaaacagaattaatag

SEQ ID NO: 21796 - DNA, 20 bp, Artificial Sequence
  chemically synthesized
ctctatatctatatctatat

SEQ ID NO: 21797 - DNA, 20 bp, Artificial Sequence
  chemically synthesized
ctatatctatatctatatga

SEQ ID NO: 21798 - DNA, 20 bp, Artificial Sequence
  chemically synthesized
ctatatgagagtttattatg

SEQ ID NO: 21799 - DNA, 20 bp, Artificial Sequence
  chemically synthesized
gtattgactcacatgttcac

SEQ ID NO: 21800 - DNA, 20 bp, Artificial Sequence
  chemically synthesized
tattgactcacatgttcaca

SEQ ID NO: 21801 - DNA, 20 bp, Artificial Sequence
  chemically synthesized
atgttcacaaggtcccaaaa

SEQ ID NO: 21802 - DNA, 20 bp, Artificial Sequence
  chemically synthesized
tgttcacaaggtcccaaaac

SEQ ID NO: 21803 - DNA, 20 bp, Artificial Sequence
  chemically synthesized
tcccaaaacaggccatctgc

SEQ ID NO: 21804 - DNA, 20 bp, Artificial Sequence
  chemically synthesized
aaacaggccatctgccagct

SEQ ID NO: 21805 - DNA, 20 bp, Artificial Sequence
  chemically synthesized
aacaggccatctgccagctg

SEQ ID NO: 21806 - DNA, 20 bp, Artificial Sequence
  chemically synthesized
ccatctgccagctgaggaac

SEQ ID NO: 21807 - DNA, 20 bp, Artificial Sequence
  chemically synthesized
catctgccagctgaggaaca

SEQ ID NO: 21808 - DNA, 20 bp, Artificial Sequence
  chemically synthesized
ctgccagctgaggaacaagg

SEQ ID NO: 21809 - DNA, 20 bp, Artificial Sequence
  chemically synthesized
cagctgaggaacaaggaagc

SEQ ID NO: 21810 - DNA, 20 bp, Artificial Sequence
  chemically synthesized
tgaggaacaaggaagctagt

SEQ ID NO: 21811 - DNA, 20 bp, Artificial Sequence
  chemically synthesized
aggaacaaggaagctagtcg

SEQ ID NO: 21812 - DNA, 20 bp, Artificial Sequence
  chemically synthesized
ggaagctagtcggagtccca

SEQ ID NO: 21813 - DNA, 20 bp, Artificial Sequence
  chemically synthesized
tagtcggagtcccaaagctg

SEQ ID NO: 21814 - DNA, 20 bp, Artificial Sequence
  chemically synthesized
agtcccaaagctgaagaacc

SEQ ID NO: 21815 - DNA, 20 bp, Artificial Sequence
  chemically synthesized
tcccaaagctgaagaacctg

SEQ ID NO: 21816 - DNA, 20 bp, Artificial Sequence
  chemically synthesized
gaacctggagttcaatgttc

SEQ ID NO: 21817 - DNA, 20 bp, Artificial Sequence
  chemically synthesized
aacctggagttcaatgttcc

SEQ ID NO: 21818 - DNA, 20 bp, Artificial Sequence
  chemically synthesized
acctggagttcaatgttcca

SEQ ID NO: 21819 - DNA, 20 bp, Artificial Sequence
  chemically synthesized
tggagttcaatgttccaggg

SEQ ID NO: 21820 - DNA, 20 bp, Artificial Sequence
  chemically synthesized
ggagttcaatgttccagggc

SEQ ID NO: 21821 - DNA, 20 bp, Artificial Sequence
  chemically synthesized
gttcaatgttccagggcagg

SEQ ID NO: 21822 - DNA, 20 bp, Artificial Sequence
  chemically synthesized
gttccagggcaggaagaatc

SEQ ID NO: 21823 - DNA, 20 bp, Artificial Sequence
  chemically synthesized
agggcaggaagaatccagca

SEQ ID NO: 21824 - DNA, 20 bp, Artificial Sequence
  chemically synthesized
gggcaggaagaatccagcat

SEQ ID NO: 21825 - DNA, 20 bp, Artificial Sequence
  chemically synthesized
gcaggaagaatccagcatgg

SEQ ID NO: 21826 - DNA, 20 bp, Artificial Sequence
  chemically synthesized
tccagcatgggagaaaaatg

SEQ ID NO: 21827 - DNA, 20 bp, Artificial Sequence
  chemically synthesized
ccagcatgggagaaaaatgt

SEQ ID NO: 21828 - DNA, 20 bp, Artificial Sequence
  chemically synthesized
catgggagaaaaatgtaggc

SEQ ID NO: 21829 - DNA, 20 bp, Artificial Sequence
  chemically synthesized
atgggagaaaaatgtaggct

SEQ ID NO: 21830 - DNA, 20 bp, Artificial Sequence
  chemically synthesized
aaaatgtaggctgggatgcc

SEQ ID NO: 21831 - DNA, 20 bp, Artificial Sequence
  chemically synthesized
gctgggatgccaagccaatc

SEQ ID NO: 21832 - DNA, 20 bp, Artificial Sequence
  chemically synthesized
tttctgcctgctttatatcc

SEQ ID NO: 21833 - DNA, 20 bp, Artificial Sequence
  chemically synthesized
gctttatatcctggctgtgc

SEQ ID NO: 21834 - DNA, 20 bp, Artificial Sequence
  chemically synthesized
tggctgtgctggcaactgat

SEQ ID NO: 21835 - DNA, 20 bp, Artificial Sequence
  chemically synthesized
tgtgctggcaactgattaga

SEQ ID NO: 21836 - DNA, 20 bp, Artificial Sequence
  chemically synthesized
ctgattagatggtgcccacc

SEQ ID NO: 21837 - DNA, 20 bp, Artificial Sequence
  chemically synthesized
agatggtgcccacccagatt

SEQ ID NO: 21838 - DNA, 20 bp, Artificial Sequence
  chemically synthesized
gatggtgcccacccagatta

SEQ ID NO: 21839 - DNA, 20 bp, Artificial Sequence
  chemically synthesized
atggtgcccacccagattaa

SEQ ID NO: 21840 - DNA, 20 bp, Artificial Sequence
  chemically synthesized
gtgcccacccagattaaggg

SEQ ID NO: 21841 - DNA, 20 bp, Artificial Sequence
  chemically synthesized
tgcccacccagattaagggt

SEQ ID NO: 21842 - DNA, 20 bp, Artificial Sequence
  chemically synthesized
aagggtgggtctgccttccc

SEQ ID NO: 21843 - DNA, 20 bp, Artificial Sequence
  chemically synthesized
actgaaatattaatctcctt

SEQ ID NO: 21844 - DNA, 20 bp, Artificial Sequence
  chemically synthesized
ctcctttggtaacaccctca

SEQ ID NO: 21845 - DNA, 20 bp, Artificial Sequence
  chemically synthesized
acaccctcacagacacaccc

SEQ ID NO: 21846 - DNA, 20 bp, Artificial Sequence
  chemically synthesized
gatcattactttgcatcctt

SEQ ID NO: 21847 - DNA, 20 bp, Artificial Sequence
  chemically synthesized
ttgcatccttcagtccaatc

SEQ ID NO: 21848 - DNA, 20 bp, Artificial Sequence
  chemically synthesized
agtccaatcaagttgacact

SEQ ID NO: 21849 - DNA, 20 bp, Artificial Sequence
  chemically synthesized
acactcagtattaaccatca

SEQ ID NO: 21850 - DNA, 20 bp, Artificial Sequence
  chemically synthesized
catcacagtcactttctaat

SEQ ID NO: 21851 - DNA, 20 bp, Artificial Sequence
  chemically synthesized
atcacagtcactttctaatg

SEQ ID NO: 21852 - DNA, 20 bp, Artificial Sequence
  chemically synthesized
cagtcactttctaatgaggt

SEQ ID NO: 21853 - DNA, 20 bp, Artificial Sequence
  chemically synthesized
aggttggtttttttgttgtt

SEQ ID NO: 21854 - DNA, 20 bp, Artificial Sequence
  chemically synthesized
ttttgttgttgagttccttg

SEQ ID NO: 21855 - DNA, 20 bp, Artificial Sequence
  chemically synthesized
tccttgtagattctgtatat

SEQ ID NO: 21856 - DNA, 20 bp, Artificial Sequence
  chemically synthesized
ttagccttttgttgcattca

SEQ ID NO: 21857 - DNA, 20 bp, Artificial Sequence
  chemically synthesized
aatttttttttctcattctg

SEQ ID NO: 21858 - DNA, 20 bp, Artificial Sequence
  chemically synthesized
atttttttttctcattctgt

SEQ ID NO: 21859 - DNA, 20 bp, Artificial Sequence
  chemically synthesized
atccgtttactctgttgatt

SEQ ID NO: 21860 - DNA, 20 bp, Artificial Sequence
  chemically synthesized
tctgttgattcggtcttttg

SEQ ID NO: 21861 - DNA, 20 bp, Artificial Sequence
  chemically synthesized
tgattcggtcttttgcggtg

SEQ ID NO: 21862 - DNA, 20 bp, Artificial Sequence
  chemically synthesized
ttcggtcttttgcggtgcag

SEQ ID NO: 21863 - DNA, 20 bp, Artificial Sequence
  chemically synthesized
tttgcggtgcagaagcattt

SEQ ID NO: 21864 - DNA, 20 bp, Artificial Sequence
  chemically synthesized
agaagcattttagtttaatt

SEQ ID NO: 21865 - DNA, 20 bp, Artificial Sequence
  chemically synthesized
gtttttgtttttgttgtgtt

SEQ ID NO: 21866 - DNA, 20 bp, Artificial Sequence
  chemically synthesized
tttttgttgtgtttagtttt

SEQ ID NO: 21867 - DNA, 20 bp, Artificial Sequence
  chemically synthesized
ttttgttgtgtttagttttg

SEQ ID NO: 21868 - DNA, 20 bp, Artificial Sequence
  chemically synthesized
tgtgtttagttttgaggact

SEQ ID NO: 21869 - DNA, 20 bp, Artificial Sequence
  chemically synthesized
ttggtcataaattctttgcc

SEQ ID NO: 21870 - DNA, 20 bp, Artificial Sequence
  chemically synthesized
tggtcataaattctttgcct

SEQ ID NO: 21871 - DNA, 20 bp, Artificial Sequence
  chemically synthesized
tctaatttttaatcctcttt

SEQ ID NO: 21872 - DNA, 20 bp, Artificial Sequence
  chemically synthesized
taatttttaatcctctttta

SEQ ID NO: 21873 - DNA, 20 bp, Artificial Sequence
  chemically synthesized
tttacccccatttgacacat

SEQ ID NO: 21874 - DNA, 20 bp, Artificial Sequence
  chemically synthesized
atttgacacatgagctaatt

SEQ ID NO: 21875 - DNA, 20 bp, Artificial Sequence
  chemically synthesized
aattgagccttctgtctgtt

SEQ ID NO: 21876 - DNA, 20 bp, Artificial Sequence
  chemically synthesized
gagccttctgtctgttaagt

SEQ ID NO: 21877 - DNA, 20 bp, Artificial Sequence
  chemically synthesized
tgtctgttaagtaagttgac

SEQ ID NO: 21878 - DNA, 20 bp, Artificial Sequence
  chemically synthesized
gttaagtaagttgactagtt

SEQ ID NO: 21879 - DNA, 20 bp, Artificial Sequence
  chemically synthesized
taagttgactagttcagtgt

SEQ ID NO: 21880 - DNA, 20 bp, Artificial Sequence
  chemically synthesized
tttttgccatcataatgctt

SEQ ID NO: 21881 - DNA, 20 bp, Artificial Sequence
  chemically synthesized
tactctccttaattttcccc

SEQ ID NO: 21882 - DNA, 20 bp, Artificial Sequence
  chemically synthesized
actctccttaattttccccc

SEQ ID NO: 21883 - DNA, 20 bp, Artificial Sequence
  chemically synthesized
tccttaattttcccccagga

SEQ ID NO: 21884 - DNA, 20 bp, Artificial Sequence
  chemically synthesized
tttcccccaggatggttttc

SEQ ID NO: 21885 - DNA, 20 bp, Artificial Sequence
  chemically synthesized
ccaggatggttttctagatg

SEQ ID NO: 21886 - DNA, 20 bp, Artificial Sequence
  chemically synthesized
ttttctagatgtggacttgc

SEQ ID NO: 21887 - DNA, 20 bp, Artificial Sequence
  chemically synthesized
atgtggacttgctggatcca

SEQ ID NO: 21888 - DNA, 20 bp, Artificial Sequence
  chemically synthesized
ccaaatgtatccatatattg

SEQ ID NO: 21889 - DNA, 20 bp, Artificial Sequence
  chemically synthesized
attgtggctttgtgttttaa

SEQ ID NO: 21890 - DNA, 20 bp, Artificial Sequence
  chemically synthesized
tgtggctttgtgttttaata

SEQ ID NO: 21891 - DNA, 20 bp, Artificial Sequence
  chemically synthesized
gtggctttgtgttttaatag

SEQ ID NO: 21892 - DNA, 20 bp, Artificial Sequence
  chemically synthesized
gctttgtgttttaatagagg

SEQ ID NO: 21893 - DNA, 20 bp, Artificial Sequence
  chemically synthesized
ttgtgttttaatagaggtag

SEQ ID NO: 21894 - DNA, 20 bp, Artificial Sequence
  chemically synthesized
aatagaggtagcagcaatat

SEQ ID NO: 21895 - DNA, 20 bp, Artificial Sequence
  chemically synthesized
tagaggtagcagcaatatta

SEQ ID NO: 21896 - DNA, 20 bp, Artificial Sequence
  chemically synthesized
agaggtagcagcaatattag

SEQ ID NO: 21897 - DNA, 20 bp, Artificial Sequence
  chemically synthesized
aggtagcagcaatattagag

SEQ ID NO: 21898 - DNA, 20 bp, Artificial Sequence
  chemically synthesized
gtagcagcaatattagagga

SEQ ID NO: 21899 - DNA, 20 bp, Artificial Sequence
  chemically synthesized
caatattagaggagagaatt

SEQ ID NO: 21900 - DNA, 20 bp, Artificial Sequence
  chemically synthesized
aatattagaggagagaatta

SEQ ID NO: 21901 - DNA, 20 bp, Artificial Sequence
  chemically synthesized
agagaattaaggaacgattc

SEQ ID NO: 21902 - DNA, 20 bp, Artificial Sequence
  chemically synthesized
attaaggaacgattctagtg

SEQ ID NO: 21903 - DNA, 20 bp, Artificial Sequence
  chemically synthesized
aaggaacgattctagtgtag

SEQ ID NO: 21904 - DNA, 20 bp, Artificial Sequence
  chemically synthesized
aggaacgattctagtgtagc

SEQ ID NO: 21905 - DNA, 20 bp, Artificial Sequence
  chemically synthesized
cgattctagtgtagcaggac

SEQ ID NO: 21906 - DNA, 20 bp, Artificial Sequence
  chemically synthesized
aagctgcatacaaaacccct

SEQ ID NO: 21907 - DNA, 20 bp, Artificial Sequence
  chemically synthesized
tacaaaacccctcagacacc

SEQ ID NO: 21908 - DNA, 20 bp, Artificial Sequence
  chemically synthesized
acccctcagacaccgagtta

SEQ ID NO: 21909 - DNA, 20 bp, Artificial Sequence
  chemically synthesized
cctcagacaccgagttaaag

SEQ ID NO: 21910 - DNA, 20 bp, Artificial Sequence
  chemically synthesized
ctcagacaccgagttaaaga

SEQ ID NO: 21911 - DNA, 20 bp, Artificial Sequence
  chemically synthesized
agacaccgagttaaagaagg

SEQ ID NO: 21912 - DNA, 20 bp, Artificial Sequence
  chemically synthesized
gacaccgagttaaagaagga

SEQ ID NO: 21913 - DNA, 20 bp, Artificial Sequence
  chemically synthesized
acaccgagttaaagaaggaa

SEQ ID NO: 21914 - DNA, 20 bp, Artificial Sequence
  chemically synthesized
aaagaaggaagggctttatt

SEQ ID NO: 21915 - DNA, 20 bp, Artificial Sequence
  chemically synthesized
aaggaagggctttattcggc

SEQ ID NO: 21916 - DNA, 20 bp, Artificial Sequence
  chemically synthesized
aggaagggctttattcggct

SEQ ID NO: 21917 - DNA, 20 bp, Artificial Sequence
  chemically synthesized
gaagggctttattcggctgg

SEQ ID NO: 21918 - DNA, 20 bp, Artificial Sequence
  chemically synthesized
gctttattcggctgggagct

SEQ ID NO: 21919 - DNA, 20 bp, Artificial Sequence
  chemically synthesized
ctttattcggctgggagctt

SEQ ID NO: 21920 - DNA, 20 bp, Artificial Sequence
  chemically synthesized
attcggctgggagcttgggc

SEQ ID NO: 21921 - DNA, 20 bp, Artificial Sequence
  chemically synthesized
gactcacatctccaacaacc

SEQ ID NO: 21922 - DNA, 20 bp, Artificial Sequence
  chemically synthesized
atctccaacaaccaagctct

SEQ ID NO: 21923 - DNA, 20 bp, Artificial Sequence
  chemically synthesized
ctccaacaaccaagctctca

SEQ ID NO: 21924 - DNA, 20 bp, Artificial Sequence
  chemically synthesized
aacaaccaagctctcagagt

SEQ ID NO: 21925 - DNA, 20 bp, Artificial Sequence
  chemically synthesized
gagcaattcctgtccctttt

SEQ ID NO: 21926 - DNA, 20 bp, Artificial Sequence
  chemically synthesized
agcaattcctgtccctttta

SEQ ID NO: 21927 - DNA, 20 bp, Artificial Sequence
  chemically synthesized
gcaattcctgtcccttttaa

SEQ ID NO: 21928 - DNA, 20 bp, Artificial Sequence
  chemically synthesized
ttttaagggcttacaactct

SEQ ID NO: 21929 - DNA, 20 bp, Artificial Sequence
  chemically synthesized
tttaagggcttacaactcta

SEQ ID NO: 21930 - DNA, 20 bp, Artificial Sequence
  chemically synthesized
ttaagggcttacaactctaa

SEQ ID NO: 21931 - DNA, 20 bp, Artificial Sequence
  chemically synthesized
taagggcttacaactctaag

SEQ ID NO: 21932 - DNA, 20 bp, Artificial Sequence
  chemically synthesized
aagggcttacaactctaagg

SEQ ID NO: 21933 - DNA, 20 bp, Artificial Sequence
  chemically synthesized
actctaagggggtacatgac

SEQ ID NO: 21934 - DNA, 20 bp, Artificial Sequence
  chemically synthesized
ctctaagggggtacatgact

SEQ ID NO: 21935 - DNA, 20 bp, Artificial Sequence
  chemically synthesized
tctaagggggtacatgactg

SEQ ID NO: 21936 - DNA, 20 bp, Artificial Sequence
  chemically synthesized
ctaagggggtacatgactgg

SEQ ID NO: 21937 - DNA, 20 bp, Artificial Sequence
  chemically synthesized
tgactgggggctgcatgcac

SEQ ID NO: 21938 - DNA, 20 bp, Artificial Sequence
  chemically synthesized
gggctgcatgcactggtcat

SEQ ID NO: 21939 - DNA, 20 bp, Artificial Sequence
  chemically synthesized
gcatgcactggtcatcagaa

SEQ ID NO: 21940 - DNA, 20 bp, Artificial Sequence
  chemically synthesized
cactggtcatcagaatggaa

SEQ ID NO: 21941 - DNA, 20 bp, Artificial Sequence
  chemically synthesized
gtcatcagaatggaacagaa

SEQ ID NO: 21942 - DNA, 20 bp, Artificial Sequence
  chemically synthesized
tcatcagaatggaacagaac

SEQ ID NO: 21943 - DNA, 20 bp, Artificial Sequence
  chemically synthesized
cagaatggaacagaacagga

SEQ ID NO: 21944 - DNA, 20 bp, Artificial Sequence
  chemically synthesized
agaatggaacagaacaggac

SEQ ID NO: 21945 - DNA, 20 bp, Artificial Sequence
  chemically synthesized
gaatggaacagaacaggaca

SEQ ID NO: 21946 - DNA, 20 bp, Artificial Sequence
  chemically synthesized
tttcacactgcttttccata

SEQ ID NO: 21947 - DNA, 20 bp, Artificial Sequence
  chemically synthesized
ctgcttttccatacagtgtc

SEQ ID NO: 21948 - DNA, 20 bp, Artificial Sequence
  chemically synthesized
catacagtgtctggaatcta

SEQ ID NO: 21949 - DNA, 20 bp, Artificial Sequence
  chemically synthesized
gaatctatagataacataac

SEQ ID NO: 21950 - DNA, 20 bp, Artificial Sequence
  chemically synthesized
ctatagataacataactggc

SEQ ID NO: 21951 - DNA, 20 bp, Artificial Sequence
  chemically synthesized
tatagataacataactggcc

SEQ ID NO: 21952 - DNA, 20 bp, Artificial Sequence
  chemically synthesized
gataacataactggccaggt

SEQ ID NO: 21953 - DNA, 20 bp, Artificial Sequence
  chemically synthesized
ataacataactggccaggtc

SEQ ID NO: 21954 - DNA, 20 bp, Artificial Sequence
  chemically synthesized
taacataactggccaggtca

SEQ ID NO: 21955 - DNA, 20 bp, Artificial Sequence
  chemically synthesized
aacataactggccaggtcag

SEQ ID NO: 21956 - DNA, 20 bp, Artificial Sequence
  chemically synthesized
gtcaggggtctatctttaac

SEQ ID NO: 21957 - DNA, 20 bp, Artificial Sequence
  chemically synthesized
tcaggggtctatctttaacc

SEQ ID NO: 21958 - DNA, 20 bp, Artificial Sequence
  chemically synthesized
ggtctatctttaaccaggcc

SEQ ID NO: 21959 - DNA, 20 bp, Artificial Sequence
  chemically synthesized
gtctatctttaaccaggccc

SEQ ID NO: 21960 - DNA, 20 bp, Artificial Sequence
  chemically synthesized
ctttaaccaggcccaggatg

SEQ ID NO: 21961 - DNA, 20 bp, Artificial Sequence
  chemically synthesized
ccaggcccaggatgtggtct

SEQ ID NO: 21962 - DNA, 20 bp, Artificial Sequence
  chemically synthesized
caggcccaggatgtggtctc

SEQ ID NO: 21963 - DNA, 20 bp, Artificial Sequence
  chemically synthesized
ggtctcaggctgtttgcctg

SEQ ID NO: 21964 - DNA, 20 bp, Artificial Sequence
  chemically synthesized
tggatttcatttctgccttt

SEQ ID NO: 21965 - DNA, 20 bp, Artificial Sequence
  chemically synthesized
gtttttacttcttctttctt

SEQ ID NO: 21966 - DNA, 20 bp, Artificial Sequence
  chemically synthesized
ttttacttcttctttctttg

SEQ ID NO: 21967 - DNA, 20 bp, Artificial Sequence
  chemically synthesized
tttacttcttctttctttgg

SEQ ID NO: 21968 - DNA, 20 bp, Artificial Sequence
  chemically synthesized
acttcttctttctttggagg

SEQ ID NO: 21969 - DNA, 20 bp, Artificial Sequence
  chemically synthesized
ctttctttggaggcagaaat

SEQ ID NO: 21970 - DNA, 20 bp, Artificial Sequence
  chemically synthesized
tttctttggaggcagaaatt

SEQ ID NO: 21971 - DNA, 20 bp, Artificial Sequence
  chemically synthesized
attgggcataaaacaatatg

SEQ ID NO: 21972 - DNA, 20 bp, Artificial Sequence
  chemically synthesized
ttgggcataaaacaatatga

SEQ ID NO: 21973 - DNA, 20 bp, Artificial Sequence
  chemically synthesized
tgggcataaaacaatatgaa

SEQ ID NO: 21974 - DNA, 20 bp, Artificial Sequence
  chemically synthesized
gcataaaacaatatgaaggg

SEQ ID NO: 21975 - DNA, 20 bp, Artificial Sequence
  chemically synthesized
agggtggtctcctcccttac

SEQ ID NO: 21976 - DNA, 20 bp, Artificial Sequence
  chemically synthesized
gggtggtctcctcccttact

SEQ ID NO: 21977 - DNA, 20 bp, Artificial Sequence
  chemically synthesized
tggtctcctcccttactagg

SEQ ID NO: 21978 - DNA, 20 bp, Artificial Sequence
  chemically synthesized
gtctcctcccttactaggaa

SEQ ID NO: 21979 - DNA, 20 bp, Artificial Sequence
  chemically synthesized
ctcctcccttactaggaaga

SEQ ID NO: 21980 - DNA, 20 bp, Artificial Sequence
  chemically synthesized
ggaagagagaaataccatgt

SEQ ID NO: 21981 - DNA, 20 bp, Artificial Sequence
  chemically synthesized
gaaatacgtatttgtgttat

SEQ ID NO: 21982 - DNA, 20 bp, Artificial Sequence
  chemically synthesized
tgtgttattggatttgacat

SEQ ID NO: 21983 - DNA, 20 bp, Artificial Sequence
  chemically synthesized
gtgttattggatttgacatc

SEQ ID NO: 21984 - DNA, 20 bp, Artificial Sequence
  chemically synthesized
tgttattggatttgacatcg

SEQ ID NO: 21985 - DNA, 20 bp, Artificial Sequence
  chemically synthesized
attggatttgacatcggggt

SEQ ID NO: 21986 - DNA, 20 bp, Artificial Sequence
  chemically synthesized
tttgacatcggggttggacc

SEQ ID NO: 21987 - DNA, 20 bp, Artificial Sequence
  chemically synthesized
catcttctatgaacatctat

SEQ ID NO: 21988 - DNA, 20 bp, Artificial Sequence
  chemically synthesized
aagcacgttctccttatcaa

SEQ ID NO: 21989 - DNA, 20 bp, Artificial Sequence
  chemically synthesized
agcacgttctccttatcaaa

SEQ ID NO: 21990 - DNA, 20 bp, Artificial Sequence
  chemically synthesized
ttatcaaaaggtactttgct

SEQ ID NO: 21991 - DNA, 20 bp, Artificial Sequence
  chemically synthesized
tactttgcttggtgctttaa

SEQ ID NO: 21992 - DNA, 20 bp, Artificial Sequence
  chemically synthesized
ttaaaagataaatgactatg

SEQ ID NO: 21993 - DNA, 20 bp, Artificial Sequence
  chemically synthesized
agataaatgactatgtagct

SEQ ID NO: 21994 - DNA, 20 bp, Artificial Sequence
  chemically synthesized
gataaatgactatgtagctt

SEQ ID NO: 21995 - DNA, 20 bp, Artificial Sequence
  chemically synthesized
taaatgactatgtagcttag

SEQ ID NO: 21996 - DNA, 20 bp, Artificial Sequence
  chemically synthesized
ttcttcataattgaaaacca

SEQ ID NO: 21997 - DNA, 20 bp, Artificial Sequence
  chemically synthesized
ttcataattgaaaaccacag

SEQ ID NO: 21998 - DNA, 20 bp, Artificial Sequence
  chemically synthesized
gctgttatttgaacatacct

SEQ ID NO: 21999 - DNA, 20 bp, Artificial Sequence
  chemically synthesized
gaacatacctgagccccttc

SEQ ID NO: 22000 - DNA, 20 bp, Artificial Sequence
  chemically synthesized
gagccccttctggaccactg

SEQ ID NO: 22001 - DNA, 20 bp, Artificial Sequence
  chemically synthesized
agccccttctggaccactgt

SEQ ID NO: 22002 - DNA, 20 bp, Artificial Sequence
  chemically synthesized
ccccttctggaccactgtag

SEQ ID NO: 22003 - DNA, 20 bp, Artificial Sequence
  chemically synthesized
cttctggaccactgtaggag

SEQ ID NO: 22004 - DNA, 20 bp, Artificial Sequence
  chemically synthesized
ttctggaccactgtaggaga

SEQ ID NO: 22005 - DNA, 20 bp, Artificial Sequence
  chemically synthesized
ctggaccactgtaggagaag

SEQ ID NO: 22006 - DNA, 20 bp, Artificial Sequence
  chemically synthesized
tggaccactgtaggagaagg

SEQ ID NO: 22007 - DNA, 20 bp, Artificial Sequence
  chemically synthesized
accactgtaggagaaggagg

SEQ ID NO: 22008 - DNA, 20 bp, Artificial Sequence
  chemically synthesized
cactgtaggagaaggaggaa

SEQ ID NO: 22009 - DNA, 20 bp, Artificial Sequence
  chemically synthesized
ctgtaggagaaggaggaaga

SEQ ID NO: 22010 - DNA, 20 bp, Artificial Sequence
  chemically synthesized
tgtaggagaaggaggaagag

SEQ ID NO: 22011 - DNA, 20 bp, Artificial Sequence
  chemically synthesized
agaaggaggaagagaggtga

SEQ ID NO: 22012 - DNA, 20 bp, Artificial Sequence
  chemically synthesized
tgaaagtgatttctgctgct

SEQ ID NO: 22013 - DNA, 20 bp, Artificial Sequence
  chemically synthesized
gaaagtgatttctgctgctg

SEQ ID NO: 22014 - DNA, 20 bp, Artificial Sequence
  chemically synthesized
aaagtgatttctgctgctga

SEQ ID NO: 22015 - DNA, 20 bp, Artificial Sequence
  chemically synthesized
gagggcatgtatgatgacaa

SEQ ID NO: 22016 - DNA, 20 bp, Artificial Sequence
  chemically synthesized
agggcatgtatgatgacaat

SEQ ID NO: 22017 - DNA, 20 bp, Artificial Sequence
  chemically synthesized
gtcctaactttgacactaca

SEQ ID NO: 22018 - DNA, 20 bp, Artificial Sequence
  chemically synthesized
ctttgacactacaaagtgac

SEQ ID NO: 22019 - DNA, 20 bp, Artificial Sequence
  chemically synthesized
ttgacactacaaagtgactg

SEQ ID NO: 22020 - DNA, 20 bp, Artificial Sequence
  chemically synthesized
ctacaaagtgactggagctt

SEQ ID NO: 22021 - DNA, 20 bp, Artificial Sequence
  chemically synthesized
tacaaagtgactggagcttt

SEQ ID NO: 22022 - DNA, 20 bp, Artificial Sequence
  chemically synthesized
aagtgactggagctttaggc

SEQ ID NO: 22023 - DNA, 20 bp, Artificial Sequence
  chemically synthesized
tgactggagctttaggcaag

SEQ ID NO: 22024 - DNA, 20 bp, Artificial Sequence
  chemically synthesized
agttactccaattgtctttt

SEQ ID NO: 22025 - DNA, 20 bp, Artificial Sequence
  chemically synthesized
ttttcagactctttcttttt

SEQ ID NO: 22026 - DNA, 20 bp, Artificial Sequence
  chemically synthesized
tttcagactctttctttttg

SEQ ID NO: 22027 - DNA, 20 bp, Artificial Sequence
  chemically synthesized
tgaggtatttgacctctttg

SEQ ID NO: 22028 - DNA, 20 bp, Artificial Sequence
  chemically synthesized
atttgacctctttgcggcat

SEQ ID NO: 22029 - DNA, 20 bp, Artificial Sequence
  chemically synthesized
gctgctatttcacatgcacc

SEQ ID NO: 22030 - DNA, 20 bp, Artificial Sequence
  chemically synthesized
gctatttcacatgcacctag

SEQ ID NO: 22031 - DNA, 20 bp, Artificial Sequence
  chemically synthesized
ctatttcacatgcacctaga

SEQ ID NO: 22032 - DNA, 20 bp, Artificial Sequence
  chemically synthesized
tatttcacatgcacctagaa

SEQ ID NO: 22033 - DNA, 20 bp, Artificial Sequence
  chemically synthesized
aagggactttaaaacatgca

SEQ ID NO: 22034 - DNA, 20 bp, Artificial Sequence
  chemically synthesized
aacatgcacagaattgaaca

SEQ ID NO: 22035 - DNA, 20 bp, Artificial Sequence
  chemically synthesized
atgcacagaattgaacaaag

SEQ ID NO: 22036 - DNA, 20 bp, Artificial Sequence
  chemically synthesized
acaaagcagtaaccattcgt

SEQ ID NO: 22037 - DNA, 20 bp, Artificial Sequence
  chemically synthesized
tcaaatactattatttttga

SEQ ID NO: 22038 - DNA, 20 bp, Artificial Sequence
  chemically synthesized
caaatactattatttttgaa

SEQ ID NO: 22039 - DNA, 20 bp, Artificial Sequence
  chemically synthesized
ttgaaaggtaaataaatcct

SEQ ID NO: 22040 - DNA, 20 bp, Artificial Sequence
  chemically synthesized
tgaaaggtaaataaatcctt

SEQ ID NO: 22041 - DNA, 20 bp, Artificial Sequence
  chemically synthesized
ggtaaataaatccttgggct

SEQ ID NO: 22042 - DNA, 20 bp, Artificial Sequence
  chemically synthesized
aaataaatccttgggcttag

SEQ ID NO: 22043 - DNA, 20 bp, Artificial Sequence
  chemically synthesized
attgctaacctgaatgataa

SEQ ID NO: 22044 - DNA, 20 bp, Artificial Sequence
  chemically synthesized
agaaacttttttccttttaa

SEQ ID NO: 22045 - DNA, 20 bp, Artificial Sequence
  chemically synthesized
acttttttccttttaacagt

SEQ ID NO: 22046 - DNA, 20 bp, Artificial Sequence
  chemically synthesized
ttttttccttttaacagttg

SEQ ID NO: 22047 - DNA, 20 bp, Artificial Sequence
  chemically synthesized
tttttccttttaacagttgg

SEQ ID NO: 22048 - DNA, 20 bp, Artificial Sequence
  chemically synthesized
gaggcatctatactgtgatt

SEQ ID NO: 22049 - DNA, 20 bp, Artificial Sequence
  chemically synthesized
tctatactgtgattcagaca

SEQ ID NO: 22050 - DNA, 20 bp, Artificial Sequence
  chemically synthesized
ctatactgtgattcagacaa

SEQ ID NO: 22051 - DNA, 20 bp, Artificial Sequence
  chemically synthesized
tcagacaaaggccaaaacaa

SEQ ID NO: 22052 - DNA, 20 bp, Artificial Sequence
  chemically synthesized
gacaaaggccaaaacaacag

SEQ ID NO: 22053 - DNA, 20 bp, Artificial Sequence
  chemically synthesized
ccaaaacaacagcagatgaa

SEQ ID NO: 22054 - DNA, 20 bp, Artificial Sequence
  chemically synthesized
caaaacaacagcagatgaat

SEQ ID NO: 22055 - DNA, 20 bp, Artificial Sequence
  chemically synthesized
aaaacaacagcagatgaatg

SEQ ID NO: 22056 - DNA, 20 bp, Artificial Sequence
  chemically synthesized
aacaacagcagatgaatggg

SEQ ID NO: 22057 - DNA, 20 bp, Artificial Sequence
  chemically synthesized
caacagcagatgaatgggga

SEQ ID NO: 22058 - DNA, 20 bp, Artificial Sequence
  chemically synthesized
gggagagaactattttctga

SEQ ID NO: 22059 - DNA, 20 bp, Artificial Sequence
  chemically synthesized
ggagagaactattttctgat

SEQ ID NO: 22060 - DNA, 20 bp, Artificial Sequence
  chemically synthesized
ttctgataggtccatatttt

SEQ ID NO: 22061 - DNA, 20 bp, Artificial Sequence
  chemically synthesized
catattttgagcataatatg

SEQ ID NO: 22062 - DNA, 20 bp, Artificial Sequence
  chemically synthesized
ttgagcataatatgaagact

SEQ ID NO: 22063 - DNA, 20 bp, Artificial Sequence
  chemically synthesized
tgagcataatatgaagactc

SEQ ID NO: 22064 - DNA, 20 bp, Artificial Sequence
  chemically synthesized
gcataatatgaagactcagg

SEQ ID NO: 22065 - DNA, 20 bp, Artificial Sequence
  chemically synthesized
atatgaagactcaggtggaa

SEQ ID NO: 22066 - DNA, 20 bp, Artificial Sequence
  chemically synthesized
gaacctgtaaatgatgctgt

SEQ ID NO: 22067 - DNA, 20 bp, Artificial Sequence
  chemically synthesized
cctgtaaatgatgctgtcag

SEQ ID NO: 22068 - DNA, 20 bp, Artificial Sequence
  chemically synthesized
tgtaaatgatgctgtcagaa

SEQ ID NO: 22069 - DNA, 20 bp, Artificial Sequence
  chemically synthesized
aaatgatgctgtcagaagag

SEQ ID NO: 22070 - DNA, 20 bp, Artificial Sequence
  chemically synthesized
tgatgctgtcagaagagcag

SEQ ID NO: 22071 - DNA, 20 bp, Artificial Sequence
  chemically synthesized
gagcagtggacgcaatgaat

SEQ ID NO: 22072 - DNA, 20 bp, Artificial Sequence
  chemically synthesized
gtggacgcaatgaataagca

SEQ ID NO: 22073 - DNA, 20 bp, Artificial Sequence
  chemically synthesized
caatgaataagcatggctgc

SEQ ID NO: 22074 - DNA, 20 bp, Artificial Sequence
  chemically synthesized
acaggttcacactgttccac

SEQ ID NO: 22075 - DNA, 20 bp, Artificial Sequence
  chemically synthesized
gctgttgttttggcctttgt

SEQ ID NO: 22076 - DNA, 20 bp, Artificial Sequence
  chemically synthesized
gcaatttgtttaaagtaata

SEQ ID NO: 22077 - DNA, 20 bp, Artificial Sequence
  chemically synthesized
taaagtaataagggatggaa

SEQ ID NO: 22078 - DNA, 20 bp, Artificial Sequence
  chemically synthesized
cagatttttaaattagcatt

SEQ ID NO: 22079 - DNA, 20 bp, Artificial Sequence
  chemically synthesized
atttaggatccactaagccc

SEQ ID NO: 22080 - DNA, 20 bp, Artificial Sequence
  chemically synthesized
catattgttaagggacacca

SEQ ID NO: 22081 - DNA, 20 bp, Artificial Sequence
  chemically synthesized
ggtcaaatacctcaaaaaga

SEQ ID NO: 22082 - DNA, 20 bp, Artificial Sequence
  chemically synthesized
aaagagtctgaaaagacaat

SEQ ID NO: 22083 - DNA, 20 bp, Artificial Sequence
  chemically synthesized
cccccagtcatgtaccccct

SEQ ID NO: 22084 - DNA, 20 bp, Artificial Sequence
  chemically synthesized
tgtaagcccttaaaagggac

SEQ ID NO: 22085 - DNA, 20 bp, Artificial Sequence
  chemically synthesized
agagcttggttgttggagat

SEQ ID NO: 22086 - DNA, 20 bp, Artificial Sequence
  chemically synthesized
agtcttgcccaagctcccag

SEQ ID NO: 22087 - DNA, 20 bp, Artificial Sequence
  chemically synthesized
cttctttaactcggtgtctg

SEQ ID NO: 22088 - DNA, 20 bp, Artificial Sequence
  chemically synthesized
tgcagcttgtcctgctacac

SEQ ID NO: 22089 - DNA, 20 bp, Artificial Sequence
  chemically synthesized
aaaacacaaagccacaatat

SEQ ID NO: 22090 - DNA, 20 bp, Artificial Sequence
  chemically synthesized
atttggaaaatatgcacact

SEQ ID NO: 22091 - DNA, 20 bp, Artificial Sequence
  chemically synthesized
catcctgggggaaaattaag

SEQ ID NO: 22092 - DNA, 20 bp, Artificial Sequence
  chemically synthesized
aaaattaaggagagtatgaa

SEQ ID NO: 22093 - DNA, 20 bp, Artificial Sequence
  chemically synthesized
aattagctcatgtgtcaaat

SEQ ID NO: 22094 - DNA, 20 bp, Artificial Sequence
  chemically synthesized
gggaaagacaggctctaaaa

SEQ ID NO: 22095 - DNA, 20 bp, Artificial Sequence
  chemically synthesized
aattagatgtggcctaggca

SEQ ID NO: 22096 - DNA, 20 bp, Artificial Sequence
  chemically synthesized
tgcttctgcaccgcaaaaga

SEQ ID NO: 22097 - DNA, 20 bp, Artificial Sequence
  chemically synthesized
accgcaaaagaccgaatcaa

SEQ ID NO: 22098 - DNA, 20 bp, Artificial Sequence
  chemically synthesized
agaccgaatcaacagagtaa

SEQ ID NO: 22099 - DNA, 20 bp, Artificial Sequence
  chemically synthesized
cagagtaaacggataaccta

SEQ ID NO: 22100 - DNA, 20 bp, Artificial Sequence
  chemically synthesized
agaaaaaaaaattgcaaact

SEQ ID NO: 22101 - DNA, 20 bp, Artificial Sequence
  chemically synthesized
tgcaacaaaaggctaatata

SEQ ID NO: 22102 - DNA, 20 bp, Artificial Sequence
  chemically synthesized
agtgactgtgatggttaata

SEQ ID NO: 22103 - DNA, 20 bp, Artificial Sequence
  chemically synthesized
gtgtcaacttgattggactg

SEQ ID NO: 22104 - DNA, 20 bp, Artificial Sequence
  chemically synthesized
aaggatgcaaagtaatgatc

SEQ ID NO: 22105 - DNA, 20 bp, Artificial Sequence
  chemically synthesized
atgatcttgggtgtgtctgt

SEQ ID NO: 22106 - DNA, 20 bp, Artificial Sequence
  chemically synthesized
aaggcagacccacccttaat

SEQ ID NO: 22107 - DNA, 20 bp, Artificial Sequence
  chemically synthesized
taatcagttgccagcacagc

SEQ ID NO: 22108 - DNA, 20 bp, Artificial Sequence
  chemically synthesized
gcctacatttttctcccatg

SEQ ID NO: 22109 - DNA, 20 bp, Artificial Sequence
  chemically synthesized
ttttgggaccttgtgaacat

SEQ ID NO: 22110 - DNA, 20 bp, Artificial Sequence
  chemically synthesized
ctaatacagattttggtacc

SEQ ID NO: 22111 - DNA, 20 bp, Artificial Sequence
  chemically synthesized
caggagtggttctagaggaa

SEQ ID NO: 22112 - DNA, 20 bp, Artificial Sequence
  chemically synthesized
ttctagaggaacagaatatt

SEQ ID NO: 22113 - DNA, 20 bp, Artificial Sequence
  chemically synthesized
gaggaacagaatattaagga

SEQ ID NO: 22114 - DNA, 20 bp, Artificial Sequence
  chemically synthesized
tggagttctttcattggttt

SEQ ID NO: 22115 - DNA, 20 bp, Artificial Sequence
  chemically synthesized
ttcattggttttggggtttc

SEQ ID NO: 22116 - DNA, 20 bp, Artificial Sequence
  chemically synthesized
tccttggcatcaattgttta

SEQ ID NO: 22117 - DNA, 20 bp, Artificial Sequence
  chemically synthesized
ttcaacgcttgtgagaggca

SEQ ID NO: 22118 - DNA, 20 bp, Artificial Sequence
  chemically synthesized
aatacttttgactatatgtg

SEQ ID NO: 22119 - DNA, 20 bp, Artificial Sequence
  chemically synthesized
tgaaagaaaatgatgaactc

SEQ ID NO: 22120 - DNA, 20 bp, Artificial Sequence
  chemically synthesized
agcaagaagtagcaaacaca

SEQ ID NO: 22121 - DNA, 20 bp, Artificial Sequence
  chemically synthesized
gatgagacatttgtgggaca

SEQ ID NO: 22122 - DNA, 20 bp, Artificial Sequence
  chemically synthesized
tctacctcagtaaaatttat

SEQ ID NO: 22123 - DNA, 20 bp, Artificial Sequence
  chemically synthesized
gagatattccttctaaagtg

SEQ ID NO: 22124 - DNA, 20 bp, Artificial Sequence
  chemically synthesized
acaacgcctagtgggcctat

SEQ ID NO: 22125 - DNA, 20 bp, Artificial Sequence
  chemically synthesized
ggaggcaacatattcctgat

SEQ ID NO: 22126 - DNA, 20 bp, Artificial Sequence
  chemically synthesized
gtgttactctggcccattta

SEQ ID NO: 22127 - DNA, 20 bp, Artificial Sequence
  chemically synthesized
gatccaaaaggctgccagtt

SEQ ID NO: 22128 - DNA, 20 bp, Artificial Sequence
  chemically synthesized
aaaaggctgccagttttgag

SEQ ID NO: 22129 - DNA, 20 bp, Artificial Sequence
  chemically synthesized
ttgaggtgtcagtgccagat

SEQ ID NO: 22130 - DNA, 20 bp, Artificial Sequence
  chemically synthesized
tgtttggagcatttggcagg

SEQ ID NO: 22131 - DNA, 20 bp, Artificial Sequence
  chemically synthesized
tgaatcacagcggaggcctc

SEQ ID NO: 22132 - DNA, 20 bp, Artificial Sequence
  chemically synthesized
tggaaacgaaatatttgact

SEQ ID NO: 22133 - DNA, 20 bp, Artificial Sequence
  chemically synthesized
cctgaactgcctatcatgaa

SEQ ID NO: 22134 - DNA, 20 bp, Artificial Sequence
  chemically synthesized
actgcaccgatggtctcatg

SEQ ID NO: 22135 - DNA, 20 bp, Artificial Sequence
  chemically synthesized
gaaatttggggaagaggtat

SEQ ID NO: 22136 - DNA, 20 bp, Artificial Sequence
  chemically synthesized
caaagatattttcatcccat

SEQ ID NO: 22137 - DNA, 20 bp, Artificial Sequence
  chemically synthesized
tcccatgtgagtgctcacca

SEQ ID NO: 22138 - DNA, 20 bp, Artificial Sequence
  chemically synthesized
aatgggtgacctcagcagaa

SEQ ID NO: 22139 - DNA, 20 bp, Artificial Sequence
  chemically synthesized
aagaggattttaataatcaa

SEQ ID NO: 22140 - DNA, 20 bp, Artificial Sequence
  chemically synthesized
gattttaataatcaagtgga

SEQ ID NO: 22141 - DNA, 20 bp, Artificial Sequence
  chemically synthesized
aacaaagtggccacagttgc

SEQ ID NO: 22142 - DNA, 20 bp, Artificial Sequence
  chemically synthesized
cttgatatggcaccattcct

SEQ ID NO: 22143 - DNA, 20 bp, Artificial Sequence
  chemically synthesized
gggcagaggcttgtcctcac

SEQ ID NO: 22144 - DNA, 20 bp, Artificial Sequence
  chemically synthesized
cactggaatagacacttact

SEQ ID NO: 22145 - DNA, 20 bp, Artificial Sequence
  chemically synthesized
aatagacacttactctggat

SEQ ID NO: 22146 - DNA, 20 bp, Artificial Sequence
  chemically synthesized
tatgccaagactaccatcca

SEQ ID NO: 22147 - DNA, 20 bp, Artificial Sequence
  chemically synthesized
gactaccatccatggaatca

SEQ ID NO: 22148 - DNA, 20 bp, Artificial Sequence
  chemically synthesized
tgacagtgggctcatgctca

SEQ ID NO: 22149 - DNA, 20 bp, Artificial Sequence
  chemically synthesized
ctatcatcctgaagcagctt

SEQ ID NO: 22150 - DNA, 20 bp, Artificial Sequence
  chemically synthesized
tccagaaggctgtgtatgct

SEQ ID NO: 22151 - DNA, 20 bp, Artificial Sequence
  chemically synthesized
ggtactgtttctcccataga

SEQ ID NO: 22152 - DNA, 20 bp, Artificial Sequence
  chemically synthesized
ttctcccatagacaggattc

SEQ ID NO: 22153 - DNA, 20 bp, Artificial Sequence
  chemically synthesized
tagacaggattcacgggtcc

SEQ ID NO: 22154 - DNA, 20 bp, Artificial Sequence
  chemically synthesized
attcacgggtccaggaatca

SEQ ID NO: 22155 - DNA, 20 bp, Artificial Sequence
  chemically synthesized
ttaagtcaacaggctaagaa

SEQ ID NO: 22156 - DNA, 20 bp, Artificial Sequence
  chemically synthesized
gaggtaaggaagcgtatgca

SEQ ID NO: 22157 - DNA, 20 bp, Artificial Sequence
  chemically synthesized
atggaatataggagatccat

SEQ ID NO: 22158 - DNA, 20 bp, Artificial Sequence
  chemically synthesized
ctcttagttttaccatgtcc

SEQ ID NO: 22159 - DNA, 20 bp, Artificial Sequence
  chemically synthesized
gcaggactacaaataaaggt

SEQ ID NO: 22160 - DNA, 20 bp, Artificial Sequence
  chemically synthesized
aggtgcttgctgagggcaaa

SEQ ID NO: 22161 - DNA, 20 bp, Artificial Sequence
  chemically synthesized
tgctgagggcaaagggaata

SEQ ID NO: 22162 - DNA, 20 bp, Artificial Sequence
  chemically synthesized
atacaaggactgtaattgtc

SEQ ID NO: 22163 - DNA, 20 bp, Artificial Sequence
  chemically synthesized
tatgtaatagcatttgcaat

SEQ ID NO: 22164 - DNA, 20 bp, Artificial Sequence
  chemically synthesized
ggtgcattttcaattgcacg

SEQ ID NO: 22165 - DNA, 20 bp, Artificial Sequence
  chemically synthesized
gaagataatgtatgacctca

SEQ ID NO: 22166 - DNA, 20 bp, Artificial Sequence
  chemically synthesized
tggacttgtgatggttaata

SEQ ID NO: 22167 - DNA, 20 bp, Artificial Sequence
  chemically synthesized
aatactgagtgtcaacttga

SEQ ID NO: 22168 - DNA, 20 bp, Artificial Sequence
  chemically synthesized
aagtgtgcaaagtattgatc

SEQ ID NO: 22169 - DNA, 20 bp, Artificial Sequence
  chemically synthesized
ttgatcctgagtgtgtctgt

SEQ ID NO: 22170 - DNA, 20 bp, Artificial Sequence
  chemically synthesized
aaggcagacccacccttaat

SEQ ID NO: 22171 - DNA, 20 bp, Artificial Sequence
  chemically synthesized
taatcagttgccagtgtggc

SEQ ID NO: 22172 - DNA, 20 bp, Artificial Sequence
  chemically synthesized
gcctacatctttctcccatg

SEQ ID NO: 22173 - DNA, 20 bp, Artificial Sequence
  chemically synthesized
ttcaacatcactaataatca

SEQ ID NO: 22174 - DNA, 20 bp, Artificial Sequence
  chemically synthesized
tgatacctccttatgccagt

SEQ ID NO: 22175 - DNA, 20 bp, Artificial Sequence
  chemically synthesized
caaaaacagcagatgttggt

SEQ ID NO: 22176 - DNA, 20 bp, Artificial Sequence
  chemically synthesized
aatgcttatacactgttggt

SEQ ID NO: 22177 - DNA, 20 bp, Artificial Sequence
  chemically synthesized
tcaatcctgcaatcccacta

SEQ ID NO: 22178 - DNA, 20 bp, Artificial Sequence
  chemically synthesized
tgttcccaatagcaaagata

SEQ ID NO: 22179 - DNA, 20 bp, Artificial Sequence
  chemically synthesized
aaatgtctaccaatggacga

SEQ ID NO: 22180 - DNA, 20 bp, Artificial Sequence
  chemically synthesized
tatattactcagccataaaa

SEQ ID NO: 22181 - DNA, 20 bp, Artificial Sequence
  chemically synthesized
agccaagtgggagctaaacg

SEQ ID NO: 22182 - DNA, 20 bp, Artificial Sequence
  chemically synthesized
gatgagtaagcatagacata

SEQ ID NO: 22183 - DNA, 20 bp, Artificial Sequence
  chemically synthesized
ttgagactagagaaaggtgg

SEQ ID NO: 22184 - DNA, 20 bp, Artificial Sequence
  chemically synthesized
ctagagaaaggtgggaggat

SEQ ID NO: 22185 - DNA, 20 bp, Artificial Sequence
  chemically synthesized
atggtgaggactgaaaaact

SEQ ID NO: 22186 - DNA, 20 bp, Artificial Sequence
  chemically synthesized
gaggactgaaaaactacgga

SEQ ID NO: 22187 - DNA, 20 bp, Artificial Sequence
  chemically synthesized
gtccccacccaaatctcatc

SEQ ID NO: 22188 - DNA, 20 bp, Artificial Sequence
  chemically synthesized
taatcctcacgtgttgtggg

SEQ ID NO: 22189 - DNA, 20 bp, Artificial Sequence
  chemically synthesized
agggatttggagggaggtaa

SEQ ID NO: 22190 - DNA, 20 bp, Artificial Sequence
  chemically synthesized
ctcatgctcttctcgtgata

SEQ ID NO: 22191 - DNA, 20 bp, Artificial Sequence
  chemically synthesized
gcaagcaaaatatcacttaa

SEQ ID NO: 22192 - DNA, 20 bp, Artificial Sequence
  chemically synthesized
tcacttaatggggtaattaa

SEQ ID NO: 22193 - DNA, 20 bp, Artificial Sequence
  chemically synthesized
agggtgaagaaattgggcaa

SEQ ID NO: 22194 - DNA, 20 bp, Artificial Sequence
  chemically synthesized
ggcaaatggatgtcatgagg

SEQ ID NO: 22195 - DNA, 20 bp, Artificial Sequence
  chemically synthesized
tcagagcccaggccctaagc

SEQ ID NO: 22196 - DNA, 20 bp, Artificial Sequence
  chemically synthesized
gcccaggccctaagctggag

SEQ ID NO: 22197 - DNA, 20 bp, Artificial Sequence
  chemically synthesized
tggagtagagtgtgcaagga

SEQ ID NO: 22198 - DNA, 20 bp, Artificial Sequence
  chemically synthesized
agtgtgcaaggaaagagtaa

SEQ ID NO: 22199 - DNA, 20 bp, Artificial Sequence
  chemically synthesized
gaaagagtaataggattgaa

SEQ ID NO: 22200 - DNA, 20 bp, Artificial Sequence
  chemically synthesized
ccaggtaggaggacataggg

SEQ ID NO: 22201 - DNA, 20 bp, Artificial Sequence
  chemically synthesized
agacctccagtaaacttagg

SEQ ID NO: 22202 - DNA, 20 bp, Artificial Sequence
  chemically synthesized
actaaataataatcacatgt

SEQ ID NO: 22203 - DNA, 20 bp, Artificial Sequence
  chemically synthesized
ttgttcatgagctagagcaa

SEQ ID NO: 22204 - DNA, 20 bp, Artificial Sequence
  chemically synthesized
atgctattatatggtaccaa

SEQ ID NO: 22205 - DNA, 20 bp, Artificial Sequence
  chemically synthesized
aaaatgcaagcaattttcat

SEQ ID NO: 22206 - DNA, 20 bp, Artificial Sequence
  chemically synthesized
tacacaagctaattgtcctt

SEQ ID NO: 22207 - DNA, 20 bp, Artificial Sequence
  chemically synthesized
aagtttaaactgtcattgag

SEQ ID NO: 22208 - DNA, 20 bp, Artificial Sequence
  chemically synthesized
cagatgttatgtgatgagga

SEQ ID NO: 22209 - DNA, 20 bp, Artificial Sequence
  chemically synthesized
agaacttttctttaaagtgt

SEQ ID NO: 22210 - DNA, 20 bp, Artificial Sequence
  chemically synthesized
acaaaaatgcaaaatttcca

SEQ ID NO: 22211 - DNA, 20 bp, Artificial Sequence
  chemically synthesized
ttcatcttcatcttttccag

SEQ ID NO: 22212 - DNA, 20 bp, Artificial Sequence
  chemically synthesized
gatagtcccccatatagcct

SEQ ID NO: 22213 - DNA, 20 bp, Artificial Sequence
  chemically synthesized
gtagaaaatcccacataaga

SEQ ID NO: 22214 - DNA, 20 bp, Artificial Sequence
  chemically synthesized
tcccacataagagagaattc

SEQ ID NO: 22215 - DNA, 20 bp, Artificial Sequence
  chemically synthesized
agcaaggaagcctacccagt

SEQ ID NO: 22216 - DNA, 20 bp, Artificial Sequence
  chemically synthesized
acatctgcattatggactcc

SEQ ID NO: 22217 - DNA, 20 bp, Artificial Sequence
  chemically synthesized
tccaggaatcctagccacag

SEQ ID NO: 22218 - DNA, 20 bp, Artificial Sequence
  chemically synthesized
ctccagagaaggagctctca

SEQ ID NO: 22219 - DNA, 20 bp, Artificial Sequence
  chemically synthesized
ctgacatcccccacccacag

SEQ ID NO: 22220 - DNA, 20 bp, Artificial Sequence
  chemically synthesized
tactgctggctgctgtcacc

SEQ ID NO: 22221 - DNA, 20 bp, Artificial Sequence
  chemically synthesized
aggcattctgctgggggcct

SEQ ID NO: 22222 - DNA, 20 bp, Artificial Sequence
  chemically synthesized
gccggtgtccacacacacca

SEQ ID NO: 22223 - DNA, 20 bp, Artificial Sequence
  chemically synthesized
acctcctgcatgtgccacct

SEQ ID NO: 22224 - DNA, 20 bp, Artificial Sequence
  chemically synthesized
tgcagactgcttgggagcca

SEQ ID NO: 22225 - DNA, 20 bp, Artificial Sequence
  chemically synthesized
agcaaactgcctgaaggcca

SEQ ID NO: 22226 - DNA, 20 bp, Artificial Sequence
  chemically synthesized
cagccatggggcccaaggac

SEQ ID NO: 22227 - DNA, 20 bp, Artificial Sequence
  chemically synthesized
aagaaatatgacacttccaa

SEQ ID NO: 22228 - DNA, 20 bp, Artificial Sequence
  chemically synthesized
atttataaaattctggaaaa

SEQ ID NO: 22229 - DNA, 20 bp, Artificial Sequence
  chemically synthesized
aagaaatcagaaaaacaatt

SEQ ID NO: 22230 - DNA, 20 bp, Artificial Sequence
  chemically synthesized
tcagaaaaacaattcaggat

SEQ ID NO: 22231 - DNA, 20 bp, Artificial Sequence
  chemically synthesized
acccaagagatagatacaac

SEQ ID NO: 22232 - DNA, 20 bp, Artificial Sequence
  chemically synthesized
aaacagaaattctgtaactg

SEQ ID NO: 22233 - DNA, 20 bp, Artificial Sequence
  chemically synthesized
aatgatagaaaggaaaaaaa

SEQ ID NO: 22234 - DNA, 20 bp, Artificial Sequence
  chemically synthesized
agtcaaactgtcaaaagcca

SEQ ID NO: 22235 - DNA, 20 bp, Artificial Sequence
  chemically synthesized
cctcacaggccaggagaaga

SEQ ID NO: 22236 - DNA, 20 bp, Artificial Sequence
  chemically synthesized
tgaaagaaaaaaatgacacc

SEQ ID NO: 22237 - DNA, 20 bp, Artificial Sequence
  chemically synthesized
aacattgttcttcaaaaatg

SEQ ID NO: 22238 - DNA, 20 bp, Artificial Sequence
  chemically synthesized
tctgggcaagaaaaatttga

SEQ ID NO: 22239 - DNA, 20 bp, Artificial Sequence
  chemically synthesized
gctttacaagaaatatttaa

SEQ ID NO: 22240 - DNA, 20 bp, Artificial Sequence
  chemically synthesized
gaaagaaagagagagagaga

SEQ ID NO: 22241 - DNA, 20 bp, Artificial Sequence
  chemically synthesized
aaaaaaaaaacaaaacaacc

SEQ ID NO: 22242 - DNA, 20 bp, Artificial Sequence
  chemically synthesized
gaatcaattaacaaaatggc

SEQ ID NO: 22243 - DNA, 20 bp, Artificial Sequence
  chemically synthesized
aataatagccttgcatgtaa

SEQ ID NO: 22244 - DNA, 20 bp, Artificial Sequence
  chemically synthesized
gataaaaggaacaattcagc

SEQ ID NO: 22245 - DNA, 20 bp, Artificial Sequence
  chemically synthesized
agcaaatgttattagatata

SEQ ID NO: 22246 - DNA, 20 bp, Artificial Sequence
  chemically synthesized
attagatataaagggtgaaa

SEQ ID NO: 22247 - DNA, 20 bp, Artificial Sequence
  chemically synthesized
aatccaatacaataatagtt

SEQ ID NO: 22248 - DNA, 20 bp, Artificial Sequence
  chemically synthesized
agaaaattaacaaagaaaca

SEQ ID NO: 22249 - DNA, 20 bp, Artificial Sequence
  chemically synthesized
taaacttgactttagaccaa

SEQ ID NO: 22250 - DNA, 20 bp, Artificial Sequence
  chemically synthesized
aatatttcatccaacagcta

SEQ ID NO: 22251 - DNA, 20 bp, Artificial Sequence
  chemically synthesized
tcagcacatgacgcattccc

SEQ ID NO: 22252 - DNA, 20 bp, Artificial Sequence
  chemically synthesized
agcatcttctcagaccacaa

SEQ ID NO: 22253 - DNA, 20 bp, Artificial Sequence
  chemically synthesized
ggaaattaaacaacatgctc

SEQ ID NO: 22254 - DNA, 20 bp, Artificial Sequence
  chemically synthesized
atacaacataggaaaagcca

SEQ ID NO: 22255 - DNA, 20 bp, Artificial Sequence
  chemically synthesized
aatagagaaaaacaacaaca

SEQ ID NO: 22256 - DNA, 20 bp, Artificial Sequence
  chemically synthesized
tgttatttaaaaaagataaa

SEQ ID NO: 22257 - DNA, 20 bp, Artificial Sequence
  chemically synthesized
acacataccacctaccaaga

SEQ ID NO: 22258 - DNA, 20 bp, Artificial Sequence
  chemically synthesized
ctaccaagattgaattaaga

SEQ ID NO: 22259 - DNA, 20 bp, Artificial Sequence
  chemically synthesized
aaaacctgaacagaccagta

SEQ ID NO: 22260 - DNA, 20 bp, Artificial Sequence
  chemically synthesized
accagtaatgaataatgaaa

SEQ ID NO: 22261 - DNA, 20 bp, Artificial Sequence
  chemically synthesized
cttttaaaaattaaacagga

SEQ ID NO: 22262 - DNA, 20 bp, Artificial Sequence
  chemically synthesized
tcctgattccataaccagac

SEQ ID NO: 22263 - DNA, 20 bp, Artificial Sequence
  chemically synthesized
ctcaacaaaatactagcaaa

SEQ ID NO: 22264 - DNA, 20 bp, Artificial Sequence
  chemically synthesized
gataatacaccatgatcaag

SEQ ID NO: 22265 - DNA, 20 bp, Artificial Sequence
  chemically synthesized
tgatcaagtgggatttatac

SEQ ID NO: 22266 - DNA, 20 bp, Artificial Sequence
  chemically synthesized
aacccacagctaacatcata

SEQ ID NO: 22267 - DNA, 20 bp, Artificial Sequence
  chemically synthesized
tctaagaactgaaacaaaat

SEQ ID NO: 22268 - DNA, 20 bp, Artificial Sequence
  chemically synthesized
agctaaaaaataaaatattt

SEQ ID NO: 22269 - DNA, 20 bp, Artificial Sequence
  chemically synthesized
aaactacaaaacactgataa

SEQ ID NO: 22270 - DNA, 20 bp, Artificial Sequence
  chemically synthesized
tggagagatatcctatgttc

SEQ ID NO: 22271 - DNA, 20 bp, Artificial Sequence
  chemically synthesized
agacacttagaccaatggaa

SEQ ID NO: 22272 - DNA, 20 bp, Artificial Sequence
  chemically synthesized
agattttcaacaaaggtgac

SEQ ID NO: 22273 - DNA, 20 bp, Artificial Sequence
  chemically synthesized
aagaaatggtgctgaaaaaa

SEQ ID NO: 22274 - DNA, 20 bp, Artificial Sequence
  chemically synthesized
ctgaaaaaattggatatcca

SEQ ID NO: 22275 - DNA, 20 bp, Artificial Sequence
  chemically synthesized
cattggatatccatgtgcaa

SEQ ID NO: 22276 - DNA, 20 bp, Artificial Sequence
  chemically synthesized
aactggactgctgatatggt

SEQ ID NO: 22277 - DNA, 20 bp, Artificial Sequence
  chemically synthesized
aaatataatccccaacttct

SEQ ID NO: 22278 - DNA, 20 bp, Artificial Sequence
  chemically synthesized
cccaacttctcaggatcttg

SEQ ID NO: 22279 - DNA, 20 bp, Artificial Sequence
  chemically synthesized
agcatgtggaggctcgcatt

SEQ ID NO: 22280 - DNA, 20 bp, Artificial Sequence
  chemically synthesized
caggagacaccccaaatact

SEQ ID NO: 22281 - DNA, 20 bp, Artificial Sequence
  chemically synthesized
gagaagtttctgaccttacc

SEQ ID NO: 22282 - DNA, 20 bp, Artificial Sequence
  chemically synthesized
gtttctgaccttacctggag

SEQ ID NO: 22283 - DNA, 20 bp, Artificial Sequence
  chemically synthesized
agaaaggccctgggagctca

SEQ ID NO: 22284 - DNA, 20 bp, Artificial Sequence
  chemically synthesized
aggcatttacattactaaca

SEQ ID NO: 22285 - DNA, 20 bp, Artificial Sequence
  chemically synthesized
ggcctaaatgctccacttaa

SEQ ID NO: 22286 - DNA, 20 bp, Artificial Sequence
  chemically synthesized
catgcaaatggccaccaaaa

SEQ ID NO: 22287 - DNA, 20 bp, Artificial Sequence
  chemically synthesized
agaaagtcaacaaaaaaata

SEQ ID NO: 22288 - DNA, 20 bp, Artificial Sequence
  chemically synthesized
aaaaaaaagttcaggaccag

SEQ ID NO: 22289 - DNA, 20 bp, Artificial Sequence
  chemically synthesized
aggaccagatggattcacaa

SEQ ID NO: 22290 - DNA, 20 bp, Artificial Sequence
  chemically synthesized
attctactagacattcaaag

SEQ ID NO: 22291 - DNA, 20 bp, Artificial Sequence
  chemically synthesized
gatcaagcaggttccatgcc

SEQ ID NO: 22292 - DNA, 20 bp, Artificial Sequence
  chemically synthesized
caggttccatgccagggatg

SEQ ID NO: 22293 - DNA, 20 bp, Artificial Sequence
  chemically synthesized
aacccacagccaacataata

SEQ ID NO: 22294 - DNA, 20 bp, Artificial Sequence
  chemically synthesized
tctgagaactggaacaagac

SEQ ID NO: 22295 - DNA, 20 bp, Artificial Sequence
  chemically synthesized
gcaaagtttccagatacaag

SEQ ID NO: 22296 - DNA, 20 bp, Artificial Sequence
  chemically synthesized
acaccaacagcaaccaaatg

SEQ ID NO: 22297 - DNA, 20 bp, Artificial Sequence
  chemically synthesized
atataaaacgtactctcaag

SEQ ID NO: 22298 - DNA, 20 bp, Artificial Sequence
  chemically synthesized
cacagtgaagagacaagctg

SEQ ID NO: 22299 - DNA, 20 bp, Artificial Sequence
  chemically synthesized
atatttgcatacatttgaca

SEQ ID NO: 22300 - DNA, 20 bp, Artificial Sequence
  chemically synthesized
tttgacaaggaattaatctc

SEQ ID NO: 22301 - DNA, 20 bp, Artificial Sequence
  chemically synthesized
atctcattaaaaaattggca

SEQ ID NO: 22302 - DNA, 20 bp, Artificial Sequence
  chemically synthesized
agaagacatacaaatgcaca

SEQ ID NO: 22303 - DNA, 20 bp, Artificial Sequence
  chemically synthesized
agatatcatcttatgccagt

SEQ ID NO: 22304 - DNA, 20 bp, Artificial Sequence
  chemically synthesized
aataaataacacatgctggc

SEQ ID NO: 22305 - DNA, 20 bp, Artificial Sequence
  chemically synthesized
aagatccagcaatcttatta

SEQ ID NO: 22306 - DNA, 20 bp, Artificial Sequence
  chemically synthesized
tgggtatttatccaaaggaa

SEQ ID NO: 22307 - DNA, 20 bp, Artificial Sequence
  chemically synthesized
ttatccaaaggaaaagaatt

SEQ ID NO: 22308 - DNA, 20 bp, Artificial Sequence
  chemically synthesized
gattcacattagcaaagata

SEQ ID NO: 22309 - DNA, 20 bp, Artificial Sequence
  chemically synthesized
atcaacctaagtgtccatca

SEQ ID NO: 22310 - DNA, 20 bp, Artificial Sequence
  chemically synthesized
acctaagtgtccatcaatgg

SEQ ID NO: 22311 - DNA, 20 bp, Artificial Sequence
  chemically synthesized
aatgtggtgtatacacacaa

SEQ ID NO: 22312 - DNA, 20 bp, Artificial Sequence
  chemically synthesized
atcatttcatttgcagcaac

SEQ ID NO: 22313 - DNA, 20 bp, Artificial Sequence
  chemically synthesized
aagttaatatcatgtaggta

SEQ ID NO: 22314 - DNA, 20 bp, Artificial Sequence
  chemically synthesized
aatatcatgtaggtagagag

SEQ ID NO: 22315 - DNA, 20 bp, Artificial Sequence
  chemically synthesized
gaaacaggcagttagataga

SEQ ID NO: 22316 - DNA, 20 bp, Artificial Sequence
  chemically synthesized
tctgatgttcaatagcaaag

SEQ ID NO: 22317 - DNA, 20 bp, Artificial Sequence
  chemically synthesized
aacgataaatacttgaggtg

SEQ ID NO: 22318 - DNA, 20 bp, Artificial Sequence
  chemically synthesized
aaacttctctcttaacaagc

SEQ ID NO: 22319 - DNA, 20 bp, Artificial Sequence
  chemically synthesized
cttaacaagctagaatataa

SEQ ID NO: 22320 - DNA, 20 bp, Artificial Sequence
  chemically synthesized
tgaatgcaagagcatagaga

SEQ ID NO: 22321 - DNA, 20 bp, Artificial Sequence
  chemically synthesized
gaaaatacttaatatcatta

SEQ ID NO: 22322 - DNA, 20 bp, Artificial Sequence
  chemically synthesized
ttttaccacagcgtaggtca

SEQ ID NO: 22323 - DNA, 20 bp, Artificial Sequence
  chemically synthesized
atcactatttcaaagaagta

SEQ ID NO: 22324 - DNA, 20 bp, Artificial Sequence
  chemically synthesized
gaatagatatcagccaaaat

SEQ ID NO: 22325 - DNA, 20 bp, Artificial Sequence
  chemically synthesized
aggggcctagacatagcatg

SEQ ID NO: 22326 - DNA, 20 bp, Artificial Sequence
  chemically synthesized
gcatgctgaatgaaaaggaa

SEQ ID NO: 22327 - DNA, 20 bp, Artificial Sequence
  chemically synthesized
tgagctaacttcctcatttt

SEQ ID NO: 22328 - DNA, 20 bp, Artificial Sequence
  chemically synthesized
aagaaataagctaataccta

SEQ ID NO: 22329 - DNA, 20 bp, Artificial Sequence
  chemically synthesized
attaaatgctaggcacagtt

SEQ ID NO: 22330 - DNA, 20 bp, Artificial Sequence
  chemically synthesized
caacattacccaggtgatgg

SEQ ID NO: 22331 - DNA, 20 bp, Artificial Sequence
  chemically synthesized
tacccaggtgatggtggagt

SEQ ID NO: 22332 - DNA, 20 bp, Artificial Sequence
  chemically synthesized
gacagcaagatagtaagtaa

SEQ ID NO: 22333 - DNA, 20 bp, Artificial Sequence
  chemically synthesized
aggaatggagcaacaaattg

SEQ ID NO: 22334 - DNA, 20 bp, Artificial Sequence
  chemically synthesized
ttttgcttgtttgtttgaaa

SEQ ID NO: 22335 - DNA, 20 bp, Artificial Sequence
  chemically synthesized
tctcactctgtcaccccggc

SEQ ID NO: 22336 - DNA, 20 bp, Artificial Sequence
  chemically synthesized
ctgaagcctcactagaacgc

SEQ ID NO: 22337 - DNA, 20 bp, Artificial Sequence
  chemically synthesized
tttttaaatttctgtagaaa

SEQ ID NO: 22338 - DNA, 20 bp, Artificial Sequence
  chemically synthesized
aaagtgttgagattacaggt

SEQ ID NO: 22339 - DNA, 20 bp, Artificial Sequence
  chemically synthesized
aatcaccatgctgggccttg

SEQ ID NO: 22340 - DNA, 20 bp, Artificial Sequence
  chemically synthesized
atggatctttaaaagtggtg

SEQ ID NO: 22341 - DNA, 20 bp, Artificial Sequence
  chemically synthesized
aaacatcgttaggtctcggg

SEQ ID NO: 22342 - DNA, 20 bp, Artificial Sequence
  chemically synthesized
tcgttaggtctcgggaagga

SEQ ID NO: 22343 - DNA, 20 bp, Artificial Sequence
  chemically synthesized
tctgtgttaacaaaaaacag

SEQ ID NO: 22344 - DNA, 20 bp, Artificial Sequence
  chemically synthesized
tctgaaggtttagaaactcc

SEQ ID NO: 22345 - DNA, 20 bp, Artificial Sequence
  chemically synthesized
ctttagaactcctgtcctag

SEQ ID NO: 22346 - DNA, 20 bp, Artificial Sequence
  chemically synthesized
accactttgactctagtttt

SEQ ID NO: 22347 - DNA, 20 bp, Artificial Sequence
  chemically synthesized
ccttaacatgttaatttctc

SEQ ID NO: 22348 - DNA, 20 bp, Artificial Sequence
  chemically synthesized
agtaagacctgggcaaagga

SEQ ID NO: 22349 - DNA, 20 bp, Artificial Sequence
  chemically synthesized
tttgggcaaaactttccatc

SEQ ID NO: 22350 - DNA, 20 bp, Artificial Sequence
  chemically synthesized
acttagtacttcccactact

SEQ ID NO: 22351 - DNA, 20 bp, Artificial Sequence
  chemically synthesized
gtacttcccactactgtgga

SEQ ID NO: 22352 - DNA, 20 bp, Artificial Sequence
  chemically synthesized
tttgtcaattcttgaagatt

SEQ ID NO: 22353 - DNA, 20 bp, Artificial Sequence
  chemically synthesized
tgatacctaatagacacttg

SEQ ID NO: 22354 - DNA, 20 bp, Artificial Sequence
  chemically synthesized
agacacttgatgaatcctta

SEQ ID NO: 22355 - DNA, 20 bp, Artificial Sequence
  chemically synthesized
aatccttactgaataataaa

SEQ ID NO: 22356 - DNA, 20 bp, Artificial Sequence
  chemically synthesized
ctgaataataaaatggatta

SEQ ID NO: 22357 - DNA, 20 bp, Artificial Sequence
  chemically synthesized
aaaaggttattttgaagtct

SEQ ID NO: 22358 - DNA, 20 bp, Artificial Sequence
  chemically synthesized
tgggcaaaattctggcagca

SEQ ID NO: 22359 - DNA, 20 bp, Artificial Sequence
  chemically synthesized
ctaagaaaccttttgttttc

SEQ ID NO: 22360 - DNA, 20 bp, Artificial Sequence
  chemically synthesized
aaccttttgttttcttggat

SEQ ID NO: 22361 - DNA, 20 bp, Artificial Sequence
  chemically synthesized
aaaacatggtaagataactg

SEQ ID NO: 22362 - DNA, 20 bp, Artificial Sequence
  chemically synthesized
agaaactgttattcagttta

SEQ ID NO: 22363 - DNA, 20 bp, Artificial Sequence
  chemically synthesized
tcttacataatagtaaaaaa

SEQ ID NO: 22364 - DNA, 20 bp, Artificial Sequence
  chemically synthesized
cttgatcattaaatacctct

SEQ ID NO: 22365 - DNA, 20 bp, Artificial Sequence
  chemically synthesized
caatttgctctatgaactgg

SEQ ID NO: 22366 - DNA, 20 bp, Artificial Sequence
  chemically synthesized
tgctctatgaactggaggag

SEQ ID NO: 22367 - DNA, 20 bp, Artificial Sequence
  chemically synthesized
tatagtggcaatgtattatt

SEQ ID NO: 22368 - DNA, 20 bp, Artificial Sequence
  chemically synthesized
ataagtattaaaggcagctt

SEQ ID NO: 22369 - DNA, 20 bp, Artificial Sequence
  chemically synthesized
ttttatttcaaggcatactc

SEQ ID NO: 22370 - DNA, 20 bp, Artificial Sequence
  chemically synthesized
ttaaaaacacatgctcattt

SEQ ID NO: 22371 - DNA, 20 bp, Artificial Sequence
  chemically synthesized
ggataaagatctctgaggaa

SEQ ID NO: 22372 - DNA, 20 bp, Artificial Sequence
  chemically synthesized
ttctttctcactaaactaca

SEQ ID NO: 22373 - DNA, 20 bp, Artificial Sequence
  chemically synthesized
tgacttttaattttgatttt

SEQ ID NO: 22374 - DNA, 20 bp, Artificial Sequence
  chemically synthesized
ctttgaacagttagtataag

SEQ ID NO: 22375 - DNA, 20 bp, Artificial Sequence
  chemically synthesized
taaggtgaattctgattttt

SEQ ID NO: 22376 - DNA, 20 bp, Artificial Sequence
  chemically synthesized
gtcttgacacttttaaacta

SEQ ID NO: 22377 - DNA, 20 bp, Artificial Sequence
  chemically synthesized
ctagagagtataaacccaca

SEQ ID NO: 22378 - DNA, 20 bp, Artificial Sequence
  chemically synthesized
ttttgccttttgagaagctc

SEQ ID NO: 22379 - DNA, 20 bp, Artificial Sequence
  chemically synthesized
acattaattccaagctaatt

SEQ ID NO: 22380 - DNA, 20 bp, Artificial Sequence
  chemically synthesized
gcatttcatataattactaa

SEQ ID NO: 22381 - DNA, 20 bp, Artificial Sequence
  chemically synthesized
atataattactaacagaatg

SEQ ID NO: 22382 - DNA, 20 bp, Artificial Sequence
  chemically synthesized
tatttctatgttgtcataat

SEQ ID NO: 22383 - DNA, 20 bp, Artificial Sequence
  chemically synthesized
ctagcaattggttatcacta

SEQ ID NO: 22384 - DNA, 20 bp, Artificial Sequence
  chemically synthesized
cccactggggaagcccaccc

SEQ ID NO: 22385 - DNA, 20 bp, Artificial Sequence
  chemically synthesized
cacccagggatgttacagag

SEQ ID NO: 22386 - DNA, 20 bp, Artificial Sequence
  chemically synthesized
tacagtcctccgagactcct

SEQ ID NO: 22387 - DNA, 20 bp, Artificial Sequence
  chemically synthesized
gaacttacaggcacaaaagt

SEQ ID NO: 22388 - DNA, 20 bp, Artificial Sequence
  chemically synthesized
ggcacaaaagttagagttgg

SEQ ID NO: 22389 - DNA, 20 bp, Artificial Sequence
  chemically synthesized
aggctttggtagcttctctt

SEQ ID NO: 22390 - DNA, 20 bp, Artificial Sequence
  chemically synthesized
gaaatcttatgtgcttccca

SEQ ID NO: 22391 - DNA, 20 bp, Artificial Sequence
  chemically synthesized
acagaattcctggtggaagg

SEQ ID NO: 22392 - DNA, 20 bp, Artificial Sequence
  chemically synthesized
gaaagacgagaaagaggagg

SEQ ID NO: 22393 - DNA, 20 bp, Artificial Sequence
  chemically synthesized
gaagaattcctccttccacc

SEQ ID NO: 22394 - DNA, 20 bp, Artificial Sequence
  chemically synthesized
gcctgtaagttctcttctcc

SEQ ID NO: 22395 - DNA, 20 bp, Artificial Sequence
  chemically synthesized
ggattacaactaattgaaac

SEQ ID NO: 22396 - DNA, 20 bp, Artificial Sequence
  chemically synthesized
taattgaaacaggaattcaa

SEQ ID NO: 22397 - DNA, 20 bp, Artificial Sequence
  chemically synthesized
gagtctcggaggactgtaag

SEQ ID NO: 22398 - DNA, 20 bp, Artificial Sequence
  chemically synthesized
gatccctctctgtaacatcc

SEQ ID NO: 22399 - DNA, 20 bp, Artificial Sequence
  chemically synthesized
agtcgaagaacttcctgtgg

SEQ ID NO: 22400 - DNA, 20 bp, Artificial Sequence
  chemically synthesized
ggtttgtactgctcctgaag

SEQ ID NO: 22401 - DNA, 20 bp, Artificial Sequence
  chemically synthesized
acaccttcactaggtgactg

SEQ ID NO: 22402 - DNA, 20 bp, Artificial Sequence
  chemically synthesized
cactaggtgactgaggaatg

SEQ ID NO: 22403 - DNA, 20 bp, Artificial Sequence
  chemically synthesized
ctagtgataaccaattgcta

SEQ ID NO: 22404 - DNA, 20 bp, Artificial Sequence
  chemically synthesized
gagtgaggaaagcatttaaa

SEQ ID NO: 22405 - DNA, 20 bp, Artificial Sequence
  chemically synthesized
cttgtctattacaacaggct

SEQ ID NO: 22406 - DNA, 20 bp, Artificial Sequence
  chemically synthesized
gaaaatattagccattgcca

SEQ ID NO: 22407 - DNA, 20 bp, Artificial Sequence
  chemically synthesized
agtaattatatgaaatgctt

SEQ ID NO: 22408 - DNA, 20 bp, Artificial Sequence
  chemically synthesized
tttcatattcacaattagct

SEQ ID NO: 22409 - DNA, 20 bp, Artificial Sequence
  chemically synthesized
gcaaaatactgtgctccttt

SEQ ID NO: 22410 - DNA, 20 bp, Artificial Sequence
  chemically synthesized
cttcaatgctatgcttatgt

SEQ ID NO: 22411 - DNA, 20 bp, Artificial Sequence
  chemically synthesized
tcaaattgataaaacaattt

SEQ ID NO: 22412 - DNA, 20 bp, Artificial Sequence
  chemically synthesized
gaggtataacctcatctgtg

SEQ ID NO: 22413 - DNA, 20 bp, Artificial Sequence
  chemically synthesized
aaattataaaacaattcctt

SEQ ID NO: 22414 - DNA, 20 bp, Artificial Sequence
  chemically synthesized
aaaagtcatggttttgaagg

SEQ ID NO: 22415 - DNA, 20 bp, Artificial Sequence
  chemically synthesized
ctgagttcctcaagatcttg

SEQ ID NO: 22416 - DNA, 20 bp, Artificial Sequence
  chemically synthesized
agaatcaagccaactgattg

SEQ ID NO: 22417 - DNA, 20 bp, Artificial Sequence
  chemically synthesized
atgtctattacagtaatcta

SEQ ID NO: 22418 - DNA, 20 bp, Artificial Sequence
  chemically synthesized
aaaggatctgaaataataac

SEQ ID NO: 22419 - DNA, 20 bp, Artificial Sequence
  chemically synthesized
tggcatgcattctgaaaaat

SEQ ID NO: 22420 - DNA, 20 bp, Artificial Sequence
  chemically synthesized
tttgcctatgtagaagtgga

SEQ ID NO: 22421 - DNA, 20 bp, Artificial Sequence
  chemically synthesized
ttctctgtagtttagtgaga

SEQ ID NO: 22422 - DNA, 20 bp, Artificial Sequence
  chemically synthesized
cagaaccatctctatcacat

SEQ ID NO: 22423 - DNA, 20 bp, Artificial Sequence
  chemically synthesized
tctctatcacatgtgaatcc

SEQ ID NO: 22424 - DNA, 20 bp, Artificial Sequence
  chemically synthesized
tgaaataaaagttttctcta

SEQ ID NO: 22425 - DNA, 20 bp, Artificial Sequence
  chemically synthesized
ctcaaggacatagcttattg

SEQ ID NO: 22426 - DNA, 20 bp, Artificial Sequence
  chemically synthesized
ggaagggacttgttagcact

SEQ ID NO: 22427 - DNA, 20 bp, Artificial Sequence
  chemically synthesized
cagtgaaactaagttatttt

SEQ ID NO: 22428 - DNA, 20 bp, Artificial Sequence
  chemically synthesized
agtagcatgtgtgttgatct

SEQ ID NO: 22429 - DNA, 20 bp, Artificial Sequence
  chemically synthesized
tggtacatagaaaatgctca

SEQ ID NO: 22430 - DNA, 20 bp, Artificial Sequence
  chemically synthesized
ggtttgagattttcatatag

SEQ ID NO: 22431 - DNA, 20 bp, Artificial Sequence
  chemically synthesized
gtttctttaaatttaatgat

SEQ ID NO: 22432 - DNA, 20 bp, Artificial Sequence
  chemically synthesized
tatgaggtatcttagagatc

SEQ ID NO: 22433 - DNA, 20 bp, Artificial Sequence
  chemically synthesized
tttaatgatcaagcaaatgg

SEQ ID NO: 22434 - DNA, 20 bp, Artificial Sequence
  chemically synthesized
gcaaatggcagagttaggac

SEQ ID NO: 22435 - DNA, 20 bp, Artificial Sequence
  chemically synthesized
tcacttttttactattatgt

SEQ ID NO: 22436 - DNA, 20 bp, Artificial Sequence
  chemically synthesized
agtacttgcagtcaaaggtc

SEQ ID NO: 22437 - DNA, 20 bp, Artificial Sequence
  chemically synthesized
ctgaaaaagaaccccttaaa

SEQ ID NO: 22438 - DNA, 20 bp, Artificial Sequence
  chemically synthesized
aactgaataacagtttcttc

SEQ ID NO: 22439 - DNA, 20 bp, Artificial Sequence
  chemically synthesized
acagtttcttcatgaataaa

SEQ ID NO: 22440 - DNA, 20 bp, Artificial Sequence
  chemically synthesized
aacaaaaggtttcttaggag

SEQ ID NO: 22441 - DNA, 20 bp, Artificial Sequence
  chemically synthesized
ggagaagaatcccttgctgc

SEQ ID NO: 22442 - DNA, 20 bp, Artificial Sequence
  chemically synthesized
gtgaaaaacataacagatga

SEQ ID NO: 22443 - DNA, 20 bp, Artificial Sequence
  chemically synthesized
tgagagagtcacagttagtt

SEQ ID NO: 22444 - DNA, 20 bp, Artificial Sequence
  chemically synthesized
aatccattttattattcagt

SEQ ID NO: 22445 - DNA, 20 bp, Artificial Sequence
  chemically synthesized
gcactgagaggcgagggaga

SEQ ID NO: 22446 - DNA, 20 bp, Artificial Sequence
  chemically synthesized
gaggcgagggagatagagtt

SEQ ID NO: 22447 - DNA, 20 bp, Artificial Sequence
  chemically synthesized
agaactgattcttaatcttc

SEQ ID NO: 22448 - DNA, 20 bp, Artificial Sequence
  chemically synthesized
atacaatacagtcaaatgtg

SEQ ID NO: 22449 - DNA, 20 bp, Artificial Sequence
  chemically synthesized
taagactatacagtgtaccg

SEQ ID NO: 22450 - DNA, 20 bp, Artificial Sequence
  chemically synthesized
atacagtgtaccgtggaatg

SEQ ID NO: 22451 - DNA, 20 bp, Artificial Sequence
  chemically synthesized
gatgtttgagctgacacttg

SEQ ID NO: 22452 - DNA, 20 bp, Artificial Sequence
  chemically synthesized
gctcagagagggaaaaggag

SEQ ID NO: 22453 - DNA, 20 bp, Artificial Sequence
  chemically synthesized
actagattgtgaagctcagg

SEQ ID NO: 22454 - DNA, 20 bp, Artificial Sequence
  chemically synthesized
agggggagttaatagcctta

SEQ ID NO: 22455 - DNA, 20 bp, Artificial Sequence
  chemically synthesized
gccttaaggagttttgtctc

SEQ ID NO: 22456 - DNA, 20 bp, Artificial Sequence
  chemically synthesized
ttgtctccagggtatgaaca

SEQ ID NO: 22457 - DNA, 20 bp, Artificial Sequence
  chemically synthesized
cagggtatgaacaatgaatg

SEQ ID NO: 22458 - DNA, 20 bp, Artificial Sequence
  chemically synthesized
aattagactgtggtgtgacc

SEQ ID NO: 22459 - DNA, 20 bp, Artificial Sequence
  chemically synthesized
tctggagaaattaacatgtt

SEQ ID NO: 22460 - DNA, 20 bp, Artificial Sequence
  chemically synthesized
attaacatgttaaggatatt

SEQ ID NO: 22461 - DNA, 20 bp, Artificial Sequence
  chemically synthesized
cacataatgaaagttaattt

SEQ ID NO: 22462 - DNA, 20 bp, Artificial Sequence
  chemically synthesized
tcagtcttgacactacacct

SEQ ID NO: 22463 - DNA, 20 bp, Artificial Sequence
  chemically synthesized
atggtacaagtggcacaggg

SEQ ID NO: 22464 - DNA, 20 bp, Artificial Sequence
  chemically synthesized
cagggaagaattcagaaaac

SEQ ID NO: 22465 - DNA, 20 bp, Artificial Sequence
  chemically synthesized
ttatggaagaaattataata

SEQ ID NO: 22466 - DNA, 20 bp, Artificial Sequence
  chemically synthesized
tgagtccactcttctaggac

SEQ ID NO: 22467 - DNA, 20 bp, Artificial Sequence
  chemically synthesized
ctttgatataagtgaactca

SEQ ID NO: 22468 - DNA, 20 bp, Artificial Sequence
  chemically synthesized
tttctctagagcaaaatgaa

SEQ ID NO: 22469 - DNA, 20 bp, Artificial Sequence
  chemically synthesized
acttttcaaggctgaggtgg

SEQ ID NO: 22470 - DNA, 20 bp, Artificial Sequence
  chemically synthesized
tgggagaattgtttgagacc

SEQ ID NO: 22471 - DNA, 20 bp, Artificial Sequence
  chemically synthesized
gaattgtttgagaccaagag

SEQ ID NO: 22472 - DNA, 20 bp, Artificial Sequence
  chemically synthesized
tacctgagaggctaaagcag

SEQ ID NO: 22473 - DNA, 20 bp, Artificial Sequence
  chemically synthesized
ggctaaagcaggaggatcaa

SEQ ID NO: 22474 - DNA, 20 bp, Artificial Sequence
  chemically synthesized
ttgcaccattgcactccagc

SEQ ID NO: 22475 - DNA, 20 bp, Artificial Sequence
  chemically synthesized
ttgcactccagccggggtga

SEQ ID NO: 22476 - DNA, 20 bp, Artificial Sequence
  chemically synthesized
taaagtcagactgcatgatt

SEQ ID NO: 22477 - DNA, 20 bp, Artificial Sequence
  chemically synthesized
aattccaactccaccatcac

SEQ ID NO: 22478 - DNA, 20 bp, Artificial Sequence
  chemically synthesized
ttgtcataccagctttcact

SEQ ID NO: 22479 - DNA, 20 bp, Artificial Sequence
  chemically synthesized
cataccagctttcactttga

SEQ ID NO: 22480 - DNA, 20 bp, Artificial Sequence
  chemically synthesized
catcaatgttacttcaatca

SEQ ID NO: 22481 - DNA, 20 bp, Artificial Sequence
  chemically synthesized
atcacgggatgcatagtaat

SEQ ID NO: 22482 - DNA, 20 bp, Artificial Sequence
  chemically synthesized
tctttgccctaattactgat

SEQ ID NO: 22483 - DNA, 20 bp, Artificial Sequence
  chemically synthesized
caggtggtcttgttcaaagt

SEQ ID NO: 22484 - DNA, 20 bp, Artificial Sequence
  chemically synthesized
cagctgctttgattttaact

SEQ ID NO: 22485 - DNA, 20 bp, Artificial Sequence
  chemically synthesized
gcaactgtgttttggaacag

SEQ ID NO: 22486 - DNA, 20 bp, Artificial Sequence
  chemically synthesized
agtgttgccagatgacgact

SEQ ID NO: 22487 - DNA, 20 bp, Artificial Sequence
  chemically synthesized
agtattttcttttttaatgt

SEQ ID NO: 22488 - DNA, 20 bp, Artificial Sequence
  chemically synthesized
tatacctcaaatatgaaaat

SEQ ID NO: 22489 - DNA, 20 bp, Artificial Sequence
  chemically synthesized
aaaaagggctaaaatggtgt

SEQ ID NO: 22490 - DNA, 20 bp, Artificial Sequence
  chemically synthesized
taatgatcaagtcaggtatt

SEQ ID NO: 22491 - DNA, 20 bp, Artificial Sequence
  chemically synthesized
atgattttatatttgtatgg

SEQ ID NO: 22492 - DNA, 20 bp, Artificial Sequence
  chemically synthesized
gattccatatctttgctaat

SEQ ID NO: 22493 - DNA, 20 bp, Artificial Sequence
  chemically synthesized
accagtatctgtttattatt

SEQ ID NO: 22494 - DNA, 20 bp, Artificial Sequence
  chemically synthesized
ttattctgaattcttttcct

SEQ ID NO: 22495 - DNA, 20 bp, Artificial Sequence
  chemically synthesized
aatacccagtaataagattg

SEQ ID NO: 22496 - DNA, 20 bp, Artificial Sequence
  chemically synthesized
catgcttaccaatagtgcct

SEQ ID NO: 22497 - DNA, 20 bp, Artificial Sequence
  chemically synthesized
gattatttgtttttccactg

SEQ ID NO: 22498 - DNA, 20 bp, Artificial Sequence
  chemically synthesized
tttttccactgttgagttgt

SEQ ID NO: 22499 - DNA, 20 bp, Artificial Sequence
  chemically synthesized
ttaagtctttaatccatctt

SEQ ID NO: 22500 - DNA, 20 bp, Artificial Sequence
  chemically synthesized
cgttttatatggcaataaat

SEQ ID NO: 22501 - DNA, 20 bp, Artificial Sequence
  chemically synthesized
atttttgcatctattgtaca

SEQ ID NO: 22502 - DNA, 20 bp, Artificial Sequence
  chemically synthesized
tgcatctattgtacaagggg

SEQ ID NO: 22503 - DNA, 20 bp, Artificial Sequence
  chemically synthesized
tggttgctgttggtgtatag

SEQ ID NO: 22504 - DNA, 20 bp, Artificial Sequence
  chemically synthesized
tcttgtatctggaaactttg

SEQ ID NO: 22505 - DNA, 20 bp, Artificial Sequence
  chemically synthesized
cagttctaggagctttctgg

SEQ ID NO: 22506 - DNA, 20 bp, Artificial Sequence
  chemically synthesized
gagctttctggaggagtctt

SEQ ID NO: 22507 - DNA, 20 bp, Artificial Sequence
  chemically synthesized
ttgacttcctctttactgat

SEQ ID NO: 22508 - DNA, 20 bp, Artificial Sequence
  chemically synthesized
cttccagtactatgttgaag

SEQ ID NO: 22509 - DNA, 20 bp, Artificial Sequence
  chemically synthesized
ctatgttgaagaggagtggt

SEQ ID NO: 22510 - DNA, 20 bp, Artificial Sequence
  chemically synthesized
gtcttgttccagttctcaga

SEQ ID NO: 22511 - DNA, 20 bp, Artificial Sequence
  chemically synthesized
cattcaatattatgttggct

SEQ ID NO: 22512 - DNA, 20 bp, Artificial Sequence
  chemically synthesized
attttaatcataaatgtatg

SEQ ID NO: 22513 - DNA, 20 bp, Artificial Sequence
  chemically synthesized
taaatgtatgctggattttg

SEQ ID NO: 22514 - DNA, 20 bp, Artificial Sequence
  chemically synthesized
atggaacctgcttgatcatg

SEQ ID NO: 22515 - DNA, 20 bp, Artificial Sequence
  chemically synthesized
attatctttttgttatgttg

SEQ ID NO: 22516 - DNA, 20 bp, Artificial Sequence
  chemically synthesized
tggttatctagtattttgtt

SEQ ID NO: 22517 - DNA, 20 bp, Artificial Sequence
  chemically synthesized
ttggtgtgatgctggcttca

SEQ ID NO: 22518 - DNA, 20 bp, Artificial Sequence
  chemically synthesized
tgtgatgctggcttcataga

SEQ ID NO: 22519 - DNA, 20 bp, Artificial Sequence
  chemically synthesized
ttccttctttatctgtcttg

SEQ ID NO: 22520 - DNA, 20 bp, Artificial Sequence
  chemically synthesized
agatggggaccaattcctct

SEQ ID NO: 22521 - DNA, 20 bp, Artificial Sequence
  chemically synthesized
attcctctttgaatgtctag

SEQ ID NO: 22522 - DNA, 20 bp, Artificial Sequence
  chemically synthesized
atgtctagtagaattctgtt

SEQ ID NO: 22523 - DNA, 20 bp, Artificial Sequence
  chemically synthesized
ggagaaatttccacgcgctg

SEQ ID NO: 22524 - DNA, 20 bp, Artificial Sequence
  chemically synthesized
aatttccacgcgctgttgaa

SEQ ID NO: 22525 - DNA, 20 bp, Artificial Sequence
  chemically synthesized
gaatgtgtgttctgtggtta

SEQ ID NO: 22526 - DNA, 20 bp, Artificial Sequence
  chemically synthesized
aatgcctggctatgccaggc

SEQ ID NO: 22527 - DNA, 20 bp, Artificial Sequence
  chemically synthesized
agaccttcagtttctccagt

SEQ ID NO: 22528 - DNA, 20 bp, Artificial Sequence
  chemically synthesized
ggagtgtgtgtttaggagag

SEQ ID NO: 22529 - DNA, 20 bp, Artificial Sequence
  chemically synthesized
gttggggcactcacagtatt

SEQ ID NO: 22530 - DNA, 20 bp, Artificial Sequence
  chemically synthesized
cacagtatttggggtgtctc

SEQ ID NO: 22531 - DNA, 20 bp, Artificial Sequence
  chemically synthesized
ggagcaatctacttccttca

SEQ ID NO: 22532 - DNA, 20 bp, Artificial Sequence
  chemically synthesized
ctacttccttcagagggtct

SEQ ID NO: 22533 - DNA, 20 bp, Artificial Sequence
  chemically synthesized
agagggtctgtgggtcctct

SEQ ID NO: 22534 - DNA, 20 bp, Artificial Sequence
  chemically synthesized
ccacatgctgctctgtccat

SEQ ID NO: 22535 - DNA, 20 bp, Artificial Sequence
  chemically synthesized
cgccaagatcctgagaagtt

SEQ ID NO: 22536 - DNA, 20 bp, Artificial Sequence
  chemically synthesized
ccagttttattcttttgcac

SEQ ID NO: 22537 - DNA, 20 bp, Artificial Sequence
  chemically synthesized
cttttgcacatggatatcca

SEQ ID NO: 22538 - DNA, 20 bp, Artificial Sequence
  chemically synthesized
aatctgttggctataaatat

SEQ ID NO: 22539 - DNA, 20 bp, Artificial Sequence
  chemically synthesized
ctagcattgttcttttttca

SEQ ID NO: 22540 - DNA, 20 bp, Artificial Sequence
  chemically synthesized
ctattttgatagcggtcata

SEQ ID NO: 22541 - DNA, 20 bp, Artificial Sequence
  chemically synthesized
tatagaatctgtagattgct

SEQ ID NO: 22542 - DNA, 20 bp, Artificial Sequence
  chemically synthesized
atttttctgatccatgaaca

SEQ ID NO: 22543 - DNA, 20 bp, Artificial Sequence
  chemically synthesized
tatcagtgttttgtagtttt

SEQ ID NO: 22544 - DNA, 20 bp, Artificial Sequence
  chemically synthesized
tattttttagctattgtaaa

SEQ ID NO: 22545 - DNA, 20 bp, Artificial Sequence
  chemically synthesized
ttttgtctcctgtaacttta

SEQ ID NO: 22546 - DNA, 20 bp, Artificial Sequence
  chemically synthesized
tgaatttatttttcagcgct

SEQ ID NO: 22547 - DNA, 20 bp, Artificial Sequence
  chemically synthesized
cagcgctaagagtgctttgg

SEQ ID NO: 22548 - DNA, 20 bp, Artificial Sequence
  chemically synthesized
ctaggacttccagtattata

SEQ ID NO: 22549 - DNA, 20 bp, Artificial Sequence
  chemically synthesized
cttccagtattatattgaat

SEQ ID NO: 22550 - DNA, 20 bp, Artificial Sequence
  chemically synthesized
aattcagtatgatgttagct

SEQ ID NO: 22551 - DNA, 20 bp, Artificial Sequence
  chemically synthesized
gcagatagtttttatcatga

SEQ ID NO: 22552 - DNA, 20 bp, Artificial Sequence
  chemically synthesized
tgatcatggtgtattatctt

SEQ ID NO: 22553 - DNA, 20 bp, Artificial Sequence
  chemically synthesized
attatcttttggatgtactg

SEQ ID NO: 22554 - DNA, 20 bp, Artificial Sequence
  chemically synthesized
cagtttgctagtattttgtt

SEQ ID NO: 22555 - DNA, 20 bp, Artificial Sequence
  chemically synthesized
tttcacacctatgttccatc

SEQ ID NO: 22556 - DNA, 20 bp, Artificial Sequence
  chemically synthesized
cttgcatccttgtctggtta

SEQ ID NO: 22557 - DNA, 20 bp, Artificial Sequence
  chemically synthesized
tccttgtctggttatggaat

SEQ ID NO: 22558 - DNA, 20 bp, Artificial Sequence
  chemically synthesized
tcaggataatactggcctca

SEQ ID NO: 22559 - DNA, 20 bp, Artificial Sequence
  chemically synthesized
gataatactggcctcagaga

SEQ ID NO: 22560 - DNA, 20 bp, Artificial Sequence
  chemically synthesized
gcctcagagaatgagttagg

SEQ ID NO: 22561 - DNA, 20 bp, Artificial Sequence
  chemically synthesized
ccttcctgtttaatttttaa

SEQ ID NO: 22562 - DNA, 20 bp, Artificial Sequence
  chemically synthesized
tttctttccttctgctagtt

SEQ ID NO: 22563 - DNA, 20 bp, Artificial Sequence
  chemically synthesized
ctaacatatggtgtatcctg

SEQ ID NO: 22564 - DNA, 20 bp, Artificial Sequence
  chemically synthesized
ataaatatattctgtagctg

SEQ ID NO: 22565 - DNA, 20 bp, Artificial Sequence
  chemically synthesized
gatctatctgatgctgagat

SEQ ID NO: 22566 - DNA, 20 bp, Artificial Sequence
  chemically synthesized
aatccccaactattattgta

SEQ ID NO: 22567 - DNA, 20 bp, Artificial Sequence
  chemically synthesized
ataacatttgctttacatat

SEQ ID NO: 22568 - DNA, 20 bp, Artificial Sequence
  chemically synthesized
catatctggatgctctggtg

SEQ ID NO: 22569 - DNA, 20 bp, Artificial Sequence
  chemically synthesized
tggatgctctggtgttgagt

SEQ ID NO: 22570 - DNA, 20 bp, Artificial Sequence
  chemically synthesized
tggtgttgagtgtgaatgtt

SEQ ID NO: 22571 - DNA, 20 bp, Artificial Sequence
  chemically synthesized
agaattgttatatactcttg

SEQ ID NO: 22572 - DNA, 20 bp, Artificial Sequence
  chemically synthesized
ttcttataggcagcttacaa

SEQ ID NO: 22573 - DNA, 20 bp, Artificial Sequence
  chemically synthesized
attttctgtagtggtaacgt

SEQ ID NO: 22574 - DNA, 20 bp, Artificial Sequence
  chemically synthesized
gtaaagccagtctagtgata

SEQ ID NO: 22575 - DNA, 20 bp, Artificial Sequence
  chemically synthesized
atttttgaagaacaatgttg

SEQ ID NO: 22576 - DNA, 20 bp, Artificial Sequence
  chemically synthesized
catttttttctttcactatt

SEQ ID NO: 22577 - DNA, 20 bp, Artificial Sequence
  chemically synthesized
agacattttgcttgctgttt

SEQ ID NO: 22578 - DNA, 20 bp, Artificial Sequence
  chemically synthesized
ctttttgcattatattattt

SEQ ID NO: 22579 - DNA, 20 bp, Artificial Sequence
  chemically synthesized
aatttctgattttcatttgt

SEQ ID NO: 22580 - DNA, 20 bp, Artificial Sequence
  chemically synthesized
ccttctgggaaactgcaaat

SEQ ID NO: 22581 - DNA, 20 bp, Artificial Sequence
  chemically synthesized
ctgatctattgttgaagttt

SEQ ID NO: 22582 - DNA, 20 bp, Artificial Sequence
  chemically synthesized
ttcaataaactcttcagtta

SEQ ID NO: 22583 - DNA, 20 bp, Artificial Sequence
  chemically synthesized
attcttgttgtatctatctc

SEQ ID NO: 22584 - DNA, 20 bp, Artificial Sequence
  chemically synthesized
gtaaatttctcattcatatc

SEQ ID NO: 22585 - DNA, 20 bp, Artificial Sequence
  chemically synthesized
gatttctttttattgtttat

SEQ ID NO: 22586 - DNA, 20 bp, Artificial Sequence
  chemically synthesized
gcttccttaatatcaacatt

SEQ ID NO: 22587 - DNA, 20 bp, Artificial Sequence
  chemically synthesized
acattttggattcttttttc

SEQ ID NO: 22588 - DNA, 20 bp, Artificial Sequence
  chemically synthesized
tccactggcttatgttgctg

SEQ ID NO: 22589 - DNA, 20 bp, Artificial Sequence
  chemically synthesized
aagatgtatcttggtgttga

SEQ ID NO: 22590 - DNA, 20 bp, Artificial Sequence
  chemically synthesized
ctgtgattttttcagtggct

SEQ ID NO: 22591 - DNA, 20 bp, Artificial Sequence
  chemically synthesized
gatgaggttgtgctggagac

SEQ ID NO: 22592 - DNA, 20 bp, Artificial Sequence
  chemically synthesized
gtacattggcactgatggta

SEQ ID NO: 22593 - DNA, 20 bp, Artificial Sequence
  chemically synthesized
actgatggtaatgagtctag

SEQ ID NO: 22594 - DNA, 20 bp, Artificial Sequence
  chemically synthesized
ttggccttcaggcagtttgc

SEQ ID NO: 22595 - DNA, 20 bp, Artificial Sequence
  chemically synthesized
atagtagactgggctggtgt

SEQ ID NO: 22596 - DNA, 20 bp, Artificial Sequence
  chemically synthesized
ggtcctcaggcttctggaca

SEQ ID NO: 22597 - DNA, 20 bp, Artificial Sequence
  chemically synthesized
ttctggacagtgggtgtggt

SEQ ID NO: 22598 - DNA, 20 bp, Artificial Sequence
  chemically synthesized
gttggtggtggctgcaaggg

SEQ ID NO: 22599 - DNA, 20 bp, Artificial Sequence
  chemically synthesized
gttgtgatggcagtggcaga

SEQ ID NO: 22600 - DNA, 20 bp, Artificial Sequence
  chemically synthesized
gcccatcatcaggcttctgg

SEQ ID NO: 22601 - DNA, 20 bp, Artificial Sequence
  chemically synthesized
ttgcttaggtaccagtcatg

SEQ ID NO: 22602 - DNA, 20 bp, Artificial Sequence
  chemically synthesized
tggatggcacaaggctgtct

SEQ ID NO: 22603 - DNA, 20 bp, Artificial Sequence
  chemically synthesized
ttgaggaaggcaaagccagg

SEQ ID NO: 22604 - DNA, 20 bp, Artificial Sequence
  chemically synthesized
ggacaccggctatcataggc

SEQ ID NO: 22605 - DNA, 20 bp, Artificial Sequence
  chemically synthesized
ccggctatcataggctggag

SEQ ID NO: 22606 - DNA, 20 bp, Artificial Sequence
  chemically synthesized
agtgatcctcaggcccccag

SEQ ID NO: 22607 - DNA, 20 bp, Artificial Sequence
  chemically synthesized
tcaggcccccagcagaatgc

SEQ ID NO: 22608 - DNA, 20 bp, Artificial Sequence
  chemically synthesized
gcccccagcagaatgcctga

SEQ ID NO: 22609 - DNA, 20 bp, Artificial Sequence
  chemically synthesized
cattgttgccctgctcttga

SEQ ID NO: 22610 - DNA, 20 bp, Artificial Sequence
  chemically synthesized
gccctgctcttgaaggggtg

SEQ ID NO: 22611 - DNA, 20 bp, Artificial Sequence
  chemically synthesized
ttcagtggcagcagctataa

SEQ ID NO: 22612 - DNA, 20 bp, Artificial Sequence
  chemically synthesized
ccccagatggtggctgcaag

SEQ ID NO: 22613 - DNA, 20 bp, Artificial Sequence
  chemically synthesized
tgtgtagcagccctgctact

SEQ ID NO: 22614 - DNA, 20 bp, Artificial Sequence
  chemically synthesized
agccctgctactgggggtgg

SEQ ID NO: 22615 - DNA, 20 bp, Artificial Sequence
  chemically synthesized
gccagcagtagcactcagct

SEQ ID NO: 22616 - DNA, 20 bp, Artificial Sequence
  chemically synthesized
gtagcactcagctgtgggtg

SEQ ID NO: 22617 - DNA, 20 bp, Artificial Sequence
  chemically synthesized
ggggatgtcagcagagcttc

SEQ ID NO: 22618 - DNA, 20 bp, Artificial Sequence
  chemically synthesized
tgtagagatgcagatgatgt

SEQ ID NO: 22619 - DNA, 20 bp, Artificial Sequence
  chemically synthesized
ctgaggaacgatgtcatctg

SEQ ID NO: 22620 - DNA, 20 bp, Artificial Sequence
  chemically synthesized
gcaccttgctgctcagtaat

SEQ ID NO: 22621 - DNA, 20 bp, Artificial Sequence
  chemically synthesized
tgctcagtaatggggatggc

SEQ ID NO: 22622 - DNA, 20 bp, Artificial Sequence
  chemically synthesized
tcaagggactctcctgtggc

SEQ ID NO: 22623 - DNA, 20 bp, Artificial Sequence
  chemically synthesized
tctcctgtggctaggattcc

SEQ ID NO: 22624 - DNA, 20 bp, Artificial Sequence
  chemically synthesized
taatgcagatgtggaccact

SEQ ID NO: 22625 - DNA, 20 bp, Artificial Sequence
  chemically synthesized
ggagcctctctggcctcaca

SEQ ID NO: 22626 - DNA, 20 bp, Artificial Sequence
  chemically synthesized
ggcctcacagaggatcccta

SEQ ID NO: 22627 - DNA, 20 bp, Artificial Sequence
  chemically synthesized
tgcttcctgtcacttctctg

SEQ ID NO: 22628 - DNA, 20 bp, Artificial Sequence
  chemically synthesized
gtcacttctctgttgaattc

SEQ ID NO: 22629 - DNA, 20 bp, Artificial Sequence
  chemically synthesized
ttccagaattctctcttatg

SEQ ID NO: 22630 - DNA, 20 bp, Artificial Sequence
  chemically synthesized
tttggttctttgtggaggag

SEQ ID NO: 22631 - DNA, 20 bp, Artificial Sequence
  chemically synthesized
ggactatctgaaggcctcag

SEQ ID NO: 22632 - DNA, 20 bp, Artificial Sequence
  chemically synthesized
tcagatgagtaaaagaagta

SEQ ID NO: 22633 - DNA, 20 bp, Artificial Sequence
  chemically synthesized
atcatttgtttcttcaaata

SEQ ID NO: 22634 - DNA, 20 bp, Artificial Sequence
  chemically synthesized
ttgcatctaccaaagtgtat

SEQ ID NO: 22635 - DNA, 20 bp, Artificial Sequence
  chemically synthesized
aaatacgtaatctaacaaac

SEQ ID NO: 22636 - DNA, 20 bp, Artificial Sequence
  chemically synthesized
acaaggatgttttaagatct

SEQ ID NO: 22637 - DNA, 20 bp, Artificial Sequence
  chemically synthesized
gatgcatagttgcaaataaa

SEQ ID NO: 22638 - DNA, 20 bp, Artificial Sequence
  chemically synthesized
tgcaaataaaaggagttttc

SEQ ID NO: 22639 - DNA, 20 bp, Artificial Sequence
  chemically synthesized
tttggaaattttgcattttt

SEQ ID NO: 22640 - DNA, 20 bp, Artificial Sequence
  chemically synthesized
tgatggtttctaaaattgtc

SEQ ID NO: 22641 - DNA, 20 bp, Artificial Sequence
  chemically synthesized
atgttaacttagatttattg

SEQ ID NO: 22642 - DNA, 20 bp, Artificial Sequence
  chemically synthesized
tatgaaaattgcttgcattt

SEQ ID NO: 22643 - DNA, 20 bp, Artificial Sequence
  chemically synthesized
ctcttctcctttataaatta

SEQ ID NO: 22644 - DNA, 20 bp, Artificial Sequence
  chemically synthesized
ctatgtaaagtataagttac

SEQ ID NO: 22645 - DNA, 20 bp, Artificial Sequence
  chemically synthesized
aaacctgtagtctgatgaaa

SEQ ID NO: 22646 - DNA, 20 bp, Artificial Sequence
  chemically synthesized
aataaaattgctttttgcaa

SEQ ID NO: 22647 - DNA, 20 bp, Artificial Sequence
  chemically synthesized
attgagttgaagattgatgc

SEQ ID NO: 22648 - DNA, 20 bp, Artificial Sequence
  chemically synthesized
tgccaggatcttattacctc

SEQ ID NO: 22649 - DNA, 20 bp, Artificial Sequence
  chemically synthesized
attacctccaggatttcaca

SEQ ID NO: 22650 - DNA, 20 bp, Artificial Sequence
  chemically synthesized
aggatttcacaaaggatttc

SEQ ID NO: 22651 - DNA, 20 bp, Artificial Sequence
  chemically synthesized
ttataaagacatacctgaga

SEQ ID NO: 22652 - DNA, 20 bp, Artificial Sequence
  chemically synthesized
cactatcacgagaagagcat

SEQ ID NO: 22653 - DNA, 20 bp, Artificial Sequence
  chemically synthesized
aaatccctcccacaacacgt

SEQ ID NO: 22654 - DNA, 20 bp, Artificial Sequence
  chemically synthesized
actacaattcaagatgagat

SEQ ID NO: 22655 - DNA, 20 bp, Artificial Sequence
  chemically synthesized
gggacacagtcaagctgtat

SEQ ID NO: 22656 - DNA, 20 bp, Artificial Sequence
  chemically synthesized
agctgtatcagggtacaagc

SEQ ID NO: 22657 - DNA, 20 bp, Artificial Sequence
  chemically synthesized
agtggaccatcacctgaaaa

SEQ ID NO: 22658 - DNA, 20 bp, Artificial Sequence
  chemically synthesized
ctgtgtttgactttctgttt

SEQ ID NO: 22659 - DNA, 20 bp, Artificial Sequence
  chemically synthesized
tgtttctgagttatttcact

SEQ ID NO: 22660 - DNA, 20 bp, Artificial Sequence
  chemically synthesized
gatttcattcttttttatgg

SEQ ID NO: 22661 - DNA, 20 bp, Artificial Sequence
  chemically synthesized
ttaatatgatctctttcact

SEQ ID NO: 22662 - DNA, 20 bp, Artificial Sequence
  chemically synthesized
tttgggtccatacccagtag

SEQ ID NO: 22663 - DNA, 20 bp, Artificial Sequence
  chemically synthesized
catacccagtagtgggattg

SEQ ID NO: 22664 - DNA, 20 bp, Artificial Sequence
  chemically synthesized
ccagtagtgggattgcagga

SEQ ID NO: 22665 - DNA, 20 bp, Artificial Sequence
  chemically synthesized
cctgagctcactgtatttgt

SEQ ID NO: 22666 - DNA, 20 bp, Artificial Sequence
  chemically synthesized
atatagatttagatataaaa

SEQ ID NO: 22667 - DNA, 20 bp, Artificial Sequence
  chemically synthesized
agtcccaaagctgaaggact

SEQ ID NO: 22668 - DNA, 20 bp, Artificial Sequence
  chemically synthesized
gcttggaggctaagccagtc

SEQ ID NO: 22669 - DNA, 20 bp, Artificial Sequence
  chemically synthesized
agatggtgcccacccagatt

SEQ ID NO: 22670 - DNA, 20 bp, Artificial Sequence
  chemically synthesized
ggtgcccacccagattaagg

SEQ ID NO: 22671 - DNA, 20 bp, Artificial Sequence
  chemically synthesized
aataccctcacagacacact

SEQ ID NO: 22672 - DNA, 20 bp, Artificial Sequence
  chemically synthesized
tttttttttttttttcctgg

SEQ ID NO: 22673 - DNA, 20 bp, Artificial Sequence
  chemically synthesized
cctttatttgtagtcctgcc

SEQ ID NO: 22674 - DNA, 20 bp, Artificial Sequence
  chemically synthesized
taaaactaagagacacccta

SEQ ID NO: 22675 - DNA, 20 bp, Artificial Sequence
  chemically synthesized
acgcttccttacctccattg

SEQ ID NO: 22676 - DNA, 20 bp, Artificial Sequence
  chemically synthesized
actgatttcatcttgatagt

SEQ ID NO: 22677 - DNA, 20 bp, Artificial Sequence
  chemically synthesized
aatcttaatttgcagtttaa

SEQ ID NO: 22678 - DNA, 20 bp, Artificial Sequence
  chemically synthesized
aattttgctagtggaacact

SEQ ID NO: 22679 - DNA, 20 bp, Artificial Sequence
  chemically synthesized
gtggaacactaggggtgatg

SEQ ID NO: 22680 - DNA, 20 bp, Artificial Sequence
  chemically synthesized
accctttgattcctggaccc

SEQ ID NO: 22681 - DNA, 20 bp, Artificial Sequence
  chemically synthesized
aggccattcaaaagctgctt

SEQ ID NO: 22682 - DNA, 20 bp, Artificial Sequence
  chemically synthesized
aaaagctgcttcaggatgat

SEQ ID NO: 22683 - DNA, 20 bp, Artificial Sequence
  chemically synthesized
cacacttctttagccataaa

SEQ ID NO: 22684 - DNA, 20 bp, Artificial Sequence
  chemically synthesized
tggtcagaagcaatgctgtg

SEQ ID NO: 22685 - DNA, 20 bp, Artificial Sequence
  chemically synthesized
ctgtgtggaataccatgaca

SEQ ID NO: 22686 - DNA, 20 bp, Artificial Sequence
  chemically synthesized
atacggcattctgtgattcc

SEQ ID NO: 22687 - DNA, 20 bp, Artificial Sequence
  chemically synthesized
tggtagtcttggcataagca

SEQ ID NO: 22688 - DNA, 20 bp, Artificial Sequence
  chemically synthesized
cttggcataagcattgagtt

SEQ ID NO: 22689 - DNA, 20 bp, Artificial Sequence
  chemically synthesized
aggattgggaaacccatatc

SEQ ID NO: 22690 - DNA, 20 bp, Artificial Sequence
  chemically synthesized
gtagctggctgatcaccccg

SEQ ID NO: 22691 - DNA, 20 bp, Artificial Sequence
  chemically synthesized
ctgtggccaggtcagctttg

SEQ ID NO: 22692 - DNA, 20 bp, Artificial Sequence
  chemically synthesized
caactgtggccactttgttc

SEQ ID NO: 22693 - DNA, 20 bp, Artificial Sequence
  chemically synthesized
tgggtccattggacgatgac

SEQ ID NO: 22694 - DNA, 20 bp, Artificial Sequence
  chemically synthesized
atgagtggcctgggaaaagg

SEQ ID NO: 22695 - DNA, 20 bp, Artificial Sequence
  chemically synthesized
aaaaggctgagtggtgtcca

SEQ ID NO: 22696 - DNA, 20 bp, Artificial Sequence
  chemically synthesized
cccattggtgagcactcaca

SEQ ID NO: 22697 - DNA, 20 bp, Artificial Sequence
  chemically synthesized
caaacctttggctacagccc

SEQ ID NO: 22698 - DNA, 20 bp, Artificial Sequence
  chemically synthesized
tcccttcaccgttgtccttc

SEQ ID NO: 22699 - DNA, 20 bp, Artificial Sequence
  chemically synthesized
agtgctgcggctgtccactt

SEQ ID NO: 22700 - DNA, 20 bp, Artificial Sequence
  chemically synthesized
gggagagaaagcagtgtgtc

SEQ ID NO: 22701 - DNA, 20 bp, Artificial Sequence
  chemically synthesized
atgtaacttactagtgcctt

SEQ ID NO: 22702 - DNA, 20 bp, Artificial Sequence
  chemically synthesized
acagcccactttatggctag

SEQ ID NO: 22703 - DNA, 20 bp, Artificial Sequence
  chemically synthesized
caagagctttctccctaaaa

SEQ ID NO: 22704 - DNA, 20 bp, Artificial Sequence
  chemically synthesized
cactgacacctcaagcatca

SEQ ID NO: 22705 - DNA, 20 bp, Artificial Sequence
  chemically synthesized
cactcaaaactggcagcctt

SEQ ID NO: 22706 - DNA, 20 bp, Artificial Sequence
  chemically synthesized
ggatcactcgataaatgggc

SEQ ID NO: 22707 - DNA, 20 bp, Artificial Sequence
  chemically synthesized
cagagtaacacacccaaatc

SEQ ID NO: 22708 - DNA, 20 bp, Artificial Sequence
  chemically synthesized
tgtgcctatttcttggttgt

SEQ ID NO: 22709 - DNA, 20 bp, Artificial Sequence
  chemically synthesized
aaattatccttcactttaga

SEQ ID NO: 22710 - DNA, 20 bp, Artificial Sequence
  chemically synthesized
tttactgaggtagaaggtcc

SEQ ID NO: 22711 - DNA, 20 bp, Artificial Sequence
  chemically synthesized
aagattatggcacaaagctg

SEQ ID NO: 22712 - DNA, 20 bp, Artificial Sequence
  chemically synthesized
gctggagagttgatatactc

SEQ ID NO: 22713 - DNA, 20 bp, Artificial Sequence
  chemically synthesized
ttccttgcctctcacaagcg

SEQ ID NO: 22714 - DNA, 20 bp, Artificial Sequence
  chemically synthesized
cctctcacaagcgttgaatc

SEQ ID NO: 22715 - DNA, 20 bp, Artificial Sequence
  chemically synthesized
ctctctaaacaattgatgcc

SEQ ID NO: 22716 - DNA, 20 bp, Artificial Sequence
  chemically synthesized
gttctccataccattagaag

SEQ ID NO: 22717 - DNA, 20 bp, Artificial Sequence
  chemically synthesized
aagaagagtccttagcatat

SEQ ID NO: 22718 - DNA, 20 bp, Artificial Sequence
  chemically synthesized
cctggtaccaaaatctgtat

SEQ ID NO: 22719 - DNA, 20 bp, Artificial Sequence
  chemically synthesized
attagggttctacagagaaa

SEQ ID NO: 22720 - DNA, 20 bp, Artificial Sequence
  chemically synthesized
ctctatatctatatctatat

SEQ ID NO: 22721 - DNA, 20 bp, Artificial Sequence
  chemically synthesized
tgaggaacaaggaagctagt

SEQ ID NO: 22722 - DNA, 20 bp, Artificial Sequence
  chemically synthesized
agtcccaaagctgaagaacc

SEQ ID NO: 22723 - DNA, 20 bp, Artificial Sequence
  chemically synthesized
gttcaatgttccagggcagg

SEQ ID NO: 22724 - DNA, 20 bp, Artificial Sequence
  chemically synthesized
catgggagaaaaatgtaggc

SEQ ID NO: 22725 - DNA, 20 bp, Artificial Sequence
  chemically synthesized
agatggtgcccacccagatt

SEQ ID NO: 22726 - DNA, 20 bp, Artificial Sequence
  chemically synthesized
ggtgcccacccagattaagg

SEQ ID NO: 22727 - DNA, 20 bp, Artificial Sequence
  chemically synthesized
tgaggttggtttttttgttg

SEQ ID NO: 22728 - DNA, 20 bp, Artificial Sequence
  chemically synthesized
tactctccttaattttcccc

SEQ ID NO: 22729 - DNA, 20 bp, Artificial Sequence
  chemically synthesized
gttttctagatgtggacttg

SEQ ID NO: 22730 - DNA, 20 bp, Artificial Sequence
  chemically synthesized
gtagcagcaatattagagga

SEQ ID NO: 22731 - DNA, 20 bp, Artificial Sequence
  chemically synthesized
catacaaaacccctcagaca

SEQ ID NO: 22732 - DNA, 20 bp, Artificial Sequence
  chemically synthesized
atctccaacaaccaagctct

SEQ ID NO: 22733 - DNA, 20 bp, Artificial Sequence
  chemically synthesized
ttaagggcttacaactctaa

SEQ ID NO: 22734 - DNA, 20 bp, Artificial Sequence
  chemically synthesized
gggctgcatgcactggtcat

SEQ ID NO: 22735 - DNA, 20 bp, Artificial Sequence
  chemically synthesized
agaatggaacagaacaggac

SEQ ID NO: 22736 - DNA, 20 bp, Artificial Sequence
  chemically synthesized
ctgcttttccatacagtgtc

SEQ ID NO: 22737 - DNA, 20 bp, Artificial Sequence
  chemically synthesized
ataacataactggccaggtc

SEQ ID NO: 22738 - DNA, 20 bp, Artificial Sequence
  chemically synthesized
ggtctatctttaaccaggcc

SEQ ID NO: 22739 - DNA, 20 bp, Artificial Sequence
  chemically synthesized
tggtctcaggctgtttgcct

SEQ ID NO: 22740 - DNA, 20 bp, Artificial Sequence
  chemically synthesized
attgggcataaaacaatatg

SEQ ID NO: 22741 - DNA, 20 bp, Artificial Sequence
  chemically synthesized
ggaagagagaaataccatgt

SEQ ID NO: 22742 - DNA, 20 bp, Artificial Sequence
  chemically synthesized
tgaaatacgtatttgtgtta

SEQ ID NO: 22743 - DNA, 20 bp, Artificial Sequence
  chemically synthesized
tgtgttattggatttgacat

SEQ ID NO: 22744 - DNA, 20 bp, Artificial Sequence
  chemically synthesized
tgagggcatgtatgatgaca

SEQ ID NO: 22745 - DNA, 20 bp, Artificial Sequence
  chemically synthesized
aagggactttaaaacatgca

SEQ ID NO: 22746 - DNA, 20 bp, Artificial Sequence
  chemically synthesized
taaataaatccttgggctta

SEQ ID NO: 22747 - DNA, 20 bp, Artificial Sequence
  chemically synthesized
actttaaacaaattgctaac

SEQ ID NO: 22748 - DNA, 20 bp, Artificial Sequence
  chemically synthesized
aaaggccaaaacaacagcag

SEQ ID NO: 22749 - DNA, 20 bp, Artificial Sequence
  chemically synthesized
tcagaagagcagtggacgca

SEQ ID NO: 22750 - DNA, 20 bp, Artificial Sequence
  chemically synthesized
atgctcaaaatatggaccta

SEQ ID NO: 22751 - DNA, 20 bp, Artificial Sequence
  chemically synthesized
aaagaggtcaaatacctcaa

SEQ ID NO: 22752 - DNA, 20 bp, Artificial Sequence
  chemically synthesized
catcatacatgccctcagca

SEQ ID NO: 22753 - DNA, 20 bp, Artificial Sequence
  chemically synthesized
ctgctgtggttttcaattat

SEQ ID NO: 22754 - DNA, 20 bp, Artificial Sequence
  chemically synthesized
tatgcccaatttctgcctcc

SEQ ID NO: 22755 - DNA, 20 bp, Artificial Sequence
  chemically synthesized
gaagaagtaaaaactaaaag

SEQ ID NO: 22756 - DNA, 20 bp, Artificial Sequence
  chemically synthesized
atgcagcttgtcctgctaca

SEQ ID NO: 22757 - DNA, 20 bp, Artificial Sequence
  chemically synthesized
tggatccagcaagtccacat

SEQ ID NO: 22758 - DNA, 20 bp, Artificial Sequence
  chemically synthesized
agcattatgatggcaaaaaa

SEQ ID NO: 22759 - DNA, 20 bp, Artificial Sequence
  chemically synthesized
aaattagatgtggcctaggc

SEQ ID NO: 22760 - DNA, 20 bp, Artificial Sequence
  chemically synthesized
acagagtaaacggataacct

SEQ ID NO: 22761 - DNA, 20 bp, Artificial Sequence
  chemically synthesized
taaacggataacctacagaa

SEQ ID NO: 22762 - DNA, 20 bp, Artificial Sequence
  chemically synthesized
atgcaacaaaaggctaatat

SEQ ID NO: 22763 - DNA, 20 bp, Artificial Sequence
  chemically synthesized
caacaaaaaaaccaacctca

SEQ ID NO: 22764 - DNA, 20 bp, Artificial Sequence
  chemically synthesized
acagccaggatataaagcag

SEQ ID NO: 22765 - DNA, 20 bp, Artificial Sequence
  chemically synthesized
ccaggagtggttctagagga

SEQ ID NO: 22766 - DNA, 20 bp, Artificial Sequence
  chemically synthesized
taatacttttgactatatgt

SEQ ID NO: 22767 - DNA, 20 bp, Artificial Sequence
  chemically synthesized
gttcgctggacaaagtgatg

SEQ ID NO: 22768 - DNA, 20 bp, Artificial Sequence
  chemically synthesized
catttggccactcttacaac

SEQ ID NO: 22769 - DNA, 20 bp, Artificial Sequence
  chemically synthesized
agataactactctcttttag

SEQ ID NO: 22770 - DNA, 20 bp, Artificial Sequence
  chemically synthesized
gaaggcactagtaagttaca

SEQ ID NO: 22771 - DNA, 20 bp, Artificial Sequence
  chemically synthesized
gttgtgcactttgcacagaa

SEQ ID NO: 22772 - DNA, 20 bp, Artificial Sequence
  chemically synthesized
atgactggaaaattgatgac

SEQ ID NO: 22773 - DNA, 20 bp, Artificial Sequence
  chemically synthesized
agactaccatccatggaatc

SEQ ID NO: 22774 - DNA, 20 bp, Artificial Sequence
  chemically synthesized
ttgctgagggcaaagggaat

SEQ ID NO: 22775 - DNA, 20 bp, Artificial Sequence
  chemically synthesized
gtgtctgtatacacttgtac

SEQ ID NO: 22776 - DNA, 20 bp, Artificial Sequence
  chemically synthesized
gtggccaggatataaagcag

SEQ ID NO: 22777 - DNA, 20 bp, Artificial Sequence
  chemically synthesized
gttcaacatcactaataatc

SEQ ID NO: 22778 - DNA, 20 bp, Artificial Sequence
  chemically synthesized
atgatacctccttatgccag

SEQ ID NO: 22779 - DNA, 20 bp, Artificial Sequence
  chemically synthesized
tgttggtgaggatgtggaga

SEQ ID NO: 22780 - DNA, 20 bp, Artificial Sequence
  chemically synthesized
aaatgcttatacactgttgg

SEQ ID NO: 22781 - DNA, 20 bp, Artificial Sequence
  chemically synthesized
catgaagatttcttaaagaa

SEQ ID NO: 22782 - DNA, 20 bp, Artificial Sequence
  chemically synthesized
ctaccaatggacgattggat

SEQ ID NO: 22783 - DNA, 20 bp, Artificial Sequence
  chemically synthesized
atatattactcagccataaa

SEQ ID NO: 22784 - DNA, 20 bp, Artificial Sequence
  chemically synthesized
agaatgaaatcatgtcttct

SEQ ID NO: 22785 - DNA, 20 bp, Artificial Sequence
  chemically synthesized
attatcctcagtgaaataac

SEQ ID NO: 22786 - DNA, 20 bp, Artificial Sequence
  chemically synthesized
ctcagtgaaataactcagaa

SEQ ID NO: 22787 - DNA, 20 bp, Artificial Sequence
  chemically synthesized
cgatgagtaagcatagacat

SEQ ID NO: 22788 - DNA, 20 bp, Artificial Sequence
  chemically synthesized
aataatagacacttgagact

SEQ ID NO: 22789 - DNA, 20 bp, Artificial Sequence
  chemically synthesized
aatggggtaattaaaagggt

SEQ ID NO: 22790 - DNA, 20 bp, Artificial Sequence
  chemically synthesized
cactaaataataatcacatg

SEQ ID NO: 22791 - DNA, 20 bp, Artificial Sequence
  chemically synthesized
gctagagcaaggggatgact

SEQ ID NO: 22792 - DNA, 20 bp, Artificial Sequence
  chemically synthesized
ctacacaagctaattgtcct

SEQ ID NO: 22793 - DNA, 20 bp, Artificial Sequence
  chemically synthesized
tcagatgttatgtgatgagg

SEQ ID NO: 22794 - DNA, 20 bp, Artificial Sequence
  chemically synthesized
atagaacacatgaggaggaa

SEQ ID NO: 22795 - DNA, 20 bp, Artificial Sequence
  chemically synthesized
tcctcaaattctggacaatt

SEQ ID NO: 22796 - DNA, 20 bp, Artificial Sequence
  chemically synthesized
cacaaaaatgcaaaatttcc

SEQ ID NO: 22797 - DNA, 20 bp, Artificial Sequence
  chemically synthesized
cttcatcttcatcttttcca

SEQ ID NO: 22798 - DNA, 20 bp, Artificial Sequence
  chemically synthesized
gaaatagagattctttattt

SEQ ID NO: 22799 - DNA, 20 bp, Artificial Sequence
  chemically synthesized
tgatttgggaaatgaaatga

SEQ ID NO: 22800 - DNA, 20 bp, Artificial Sequence
  chemically synthesized
gattatgctctttcagtcta

SEQ ID NO: 22801 - DNA, 20 bp, Artificial Sequence
  chemically synthesized
acaaagaaccaaaatagtaa

SEQ ID NO: 22802 - DNA, 20 bp, Artificial Sequence
  chemically synthesized
agtagaaaatcccacataag

SEQ ID NO: 22803 - DNA, 20 bp, Artificial Sequence
  chemically synthesized
ctacacatttataagctccc

SEQ ID NO: 22804 - DNA, 20 bp, Artificial Sequence
  chemically synthesized
aagcaaactgcctgaaggcc

SEQ ID NO: 22805 - DNA, 20 bp, Artificial Sequence
  chemically synthesized
gactatgctgctgtatgcac

SEQ ID NO: 22806 - DNA, 20 bp, Artificial Sequence
  chemically synthesized
atcaacaccaagatacatct

SEQ ID NO: 22807 - DNA, 20 bp, Artificial Sequence
  chemically synthesized
caaaataaacataaaaaggt

SEQ ID NO: 22808 - DNA, 20 bp, Artificial Sequence
  chemically synthesized
catttataaaattctggaaa

SEQ ID NO: 22809 - DNA, 20 bp, Artificial Sequence
  chemically synthesized
agaactcagataaacaataa

SEQ ID NO: 22810 - DNA, 20 bp, Artificial Sequence
  chemically synthesized
agataaacaataaaaagaaa

SEQ ID NO: 22811 - DNA, 20 bp, Artificial Sequence
  chemically synthesized
aaaacaattcaggatatgaa

SEQ ID NO: 22812 - DNA, 20 bp, Artificial Sequence
  chemically synthesized
tacccaagagatagatacaa

SEQ ID NO: 22813 - DNA, 20 bp, Artificial Sequence
  chemically synthesized
atacaacaagaatgaaccaa

SEQ ID NO: 22814 - DNA, 20 bp, Artificial Sequence
  chemically synthesized
tgtaactgaagagtttattg

SEQ ID NO: 22815 - DNA, 20 bp, Artificial Sequence
  chemically synthesized
acaatagatcagatcaagca

SEQ ID NO: 22816 - DNA, 20 bp, Artificial Sequence
  chemically synthesized
taaaattagctggtcaaatg

SEQ ID NO: 22817 - DNA, 20 bp, Artificial Sequence
  chemically synthesized
aaatgatagaaaggaaaaaa

SEQ ID NO: 22818 - DNA, 20 bp, Artificial Sequence
  chemically synthesized
tgaaaacttgtcaagtctag

SEQ ID NO: 22819 - DNA, 20 bp, Artificial Sequence
  chemically synthesized
gacatccagacaaatgaaaa

SEQ ID NO: 22820 - DNA, 20 bp, Artificial Sequence
  chemically synthesized
gattaacagcagatttctca

SEQ ID NO: 22821 - DNA, 20 bp, Artificial Sequence
  chemically synthesized
atgatatattcaaaatagtg

SEQ ID NO: 22822 - DNA, 20 bp, Artificial Sequence
  chemically synthesized
taaataaaatcttttctggg

SEQ ID NO: 22823 - DNA, 20 bp, Artificial Sequence
  chemically synthesized
ctatcactagactggcttta

SEQ ID NO: 22824 - DNA, 20 bp, Artificial Sequence
  chemically synthesized
gagcaaaacacaaataaaga

SEQ ID NO: 22825 - DNA, 20 bp, Artificial Sequence
  chemically synthesized
agaactcaaacgttaccact

SEQ ID NO: 22826 - DNA, 20 bp, Artificial Sequence
  chemically synthesized
caaaccacaatcataaataa

SEQ ID NO: 22827 - DNA, 20 bp, Artificial Sequence
  chemically synthesized
ccacaatcataaataataag

SEQ ID NO: 22828 - DNA, 20 bp, Artificial Sequence
  chemically synthesized
aatcataaataataagaaag

SEQ ID NO: 22829 - DNA, 20 bp, Artificial Sequence
  chemically synthesized
ataaataataagaaagaaag

SEQ ID NO: 22830 - DNA, 20 bp, Artificial Sequence
  chemically synthesized
ataataagaaagaaagaaag

SEQ ID NO: 22831 - DNA, 20 bp, Artificial Sequence
  chemically synthesized
agaaagaaagagagagagag

SEQ ID NO: 22832 - DNA, 20 bp, Artificial Sequence
  chemically synthesized
agagagagagagagagaatg

SEQ ID NO: 22833 - DNA, 20 bp, Artificial Sequence
  chemically synthesized
agagagagagagaatgaaag

SEQ ID NO: 22834 - DNA, 20 bp, Artificial Sequence
  chemically synthesized
aagaaagaaaaggaaggaag

SEQ ID NO: 22835 - DNA, 20 bp, Artificial Sequence
  chemically synthesized
acccagttgtaagctgccta

SEQ ID NO: 22836 - DNA, 20 bp, Artificial Sequence
  chemically synthesized
atgaaagatcttccatacaa

SEQ ID NO: 22837 - DNA, 20 bp, Artificial Sequence
  chemically synthesized
tattagatataaagggtgaa

SEQ ID NO: 22838 - DNA, 20 bp, Artificial Sequence
  chemically synthesized
gcatcagatagatcatctag

SEQ ID NO: 22839 - DNA, 20 bp, Artificial Sequence
  chemically synthesized
catctagacagaaaattaac

SEQ ID NO: 22840 - DNA, 20 bp, Artificial Sequence
  chemically synthesized
caatatttcatccaacagct

SEQ ID NO: 22841 - DNA, 20 bp, Artificial Sequence
  chemically synthesized
cagaccacaatggaataaaa

SEQ ID NO: 22842 - DNA, 20 bp, Artificial Sequence
  chemically synthesized
ataaaactagaaatcaataa

SEQ ID NO: 22843 - DNA, 20 bp, Artificial Sequence
  chemically synthesized
ctgaatgaacgttatgtcaa

SEQ ID NO: 22844 - DNA, 20 bp, Artificial Sequence
  chemically synthesized
taaacacttaaattaaaaac

SEQ ID NO: 22845 - DNA, 20 bp, Artificial Sequence
  chemically synthesized
taatcatgtacctcaacaag

SEQ ID NO: 22846 - DNA, 20 bp, Artificial Sequence
  chemically synthesized
aacccaaaactagcagaagg

SEQ ID NO: 22847 - DNA, 20 bp, Artificial Sequence
  chemically synthesized
acagaagaacttaatgaaat

SEQ ID NO: 22848 - DNA, 20 bp, Artificial Sequence
  chemically synthesized
atagctctagctagactaac

SEQ ID NO: 22849 - DNA, 20 bp, Artificial Sequence
  chemically synthesized
aaaagagaagagactgaaat

SEQ ID NO: 22850 - DNA, 20 bp, Artificial Sequence
  chemically synthesized
agagactgaaataaagaaaa

SEQ ID NO: 22851 - DNA, 20 bp, Artificial Sequence
  chemically synthesized
taaagaaaatcagaaataaa

SEQ ID NO: 22852 - DNA, 20 bp, Artificial Sequence
  chemically synthesized
aatatattacaaccgatacc

SEQ ID NO: 22853 - DNA, 20 bp, Artificial Sequence
  chemically synthesized
ttacaaccgataccacagaa

SEQ ID NO: 22854 - DNA, 20 bp, Artificial Sequence
  chemically synthesized
accacctaccaagattgaat

SEQ ID NO: 22855 - DNA, 20 bp, Artificial Sequence
  chemically synthesized
cctaccaagattgaattaag

SEQ ID NO: 22856 - DNA, 20 bp, Artificial Sequence
  chemically synthesized
caagattgaattaagaaaga

SEQ ID NO: 22857 - DNA, 20 bp, Artificial Sequence
  chemically synthesized
gtagtaaaaagtctcccaaa

SEQ ID NO: 22858 - DNA, 20 bp, Artificial Sequence
  chemically synthesized
tcaaattttaccaaactttc

SEQ ID NO: 22859 - DNA, 20 bp, Artificial Sequence
  chemically synthesized
atatgatcatctcaatagat

SEQ ID NO: 22860 - DNA, 20 bp, Artificial Sequence
  chemically synthesized
ctagccacagctttcaggtc

SEQ ID NO: 22861 - DNA, 20 bp, Artificial Sequence
  chemically synthesized
ccacagctttcaggtcagag

SEQ ID NO: 22862 - DNA, 20 bp, Artificial Sequence
  chemically synthesized
agctttcaggtcagagaaag

SEQ ID NO: 22863 - DNA, 20 bp, Artificial Sequence
  chemically synthesized
ttcaggtcagagaaagaaag

SEQ ID NO: 22864 - DNA, 20 bp, Artificial Sequence
  chemically synthesized
cagatgacatgattttatac

SEQ ID NO: 22865 - DNA, 20 bp, Artificial Sequence
  chemically synthesized
aaaactacaaaacactgata

SEQ ID NO: 22866 - DNA, 20 bp, Artificial Sequence
  chemically synthesized
tgataaaagaattgaaaagg

SEQ ID NO: 22867 - DNA, 20 bp, Artificial Sequence
  chemically synthesized
agatatcctatgttcatgga

SEQ ID NO: 22868 - DNA, 20 bp, Artificial Sequence
  chemically synthesized
aaatagcaatgtcatttttc

SEQ ID NO: 22869 - DNA, 20 bp, Artificial Sequence
  chemically synthesized
cagacacttagaccaatgga

SEQ ID NO: 22870 - DNA, 20 bp, Artificial Sequence
  chemically synthesized
aatggaagagaatagagaac

SEQ ID NO: 22871 - DNA, 20 bp, Artificial Sequence
  chemically synthesized
cagattttcaacaaaggtga

SEQ ID NO: 22872 - DNA, 20 bp, Artificial Sequence
  chemically synthesized
tgaggaaaggacacagtgtt

SEQ ID NO: 22873 - DNA, 20 bp, Artificial Sequence
  chemically synthesized
ccattggatatccatgtgca

SEQ ID NO: 22874 - DNA, 20 bp, Artificial Sequence
  chemically synthesized
cctaaacacacactcccact

SEQ ID NO: 22875 - DNA, 20 bp, Artificial Sequence
  chemically synthesized
tacaggtgtagaggaagcag

SEQ ID NO: 22876 - DNA, 20 bp, Artificial Sequence
  chemically synthesized
agaacaattactaatagacc

SEQ ID NO: 22877 - DNA, 20 bp, Artificial Sequence
  chemically synthesized
gcactagacagttcatcaag

SEQ ID NO: 22878 - DNA, 20 bp, Artificial Sequence
  chemically synthesized
caggaccagatggattcaca

SEQ ID NO: 22879 - DNA, 20 bp, Artificial Sequence
  chemically synthesized
cagggaaggacataaccaaa

SEQ ID NO: 22880 - DNA, 20 bp, Artificial Sequence
  chemically synthesized
acatgatcatctcaatagat

SEQ ID NO: 22881 - DNA, 20 bp, Artificial Sequence
  chemically synthesized
ccagggcaatcagacaaaac

SEQ ID NO: 22882 - DNA, 20 bp, Artificial Sequence
  chemically synthesized
ttaaaaccctaaagactcct

SEQ ID NO: 22883 - DNA, 20 bp, Artificial Sequence
  chemically synthesized
tacaccaacagcaaccaaat

SEQ ID NO: 22884 - DNA, 20 bp, Artificial Sequence
  chemically synthesized
ttaaaactataaaactacta

SEQ ID NO: 22885 - DNA, 20 bp, Artificial Sequence
  chemically synthesized
aagagacaagctgttgaatg

SEQ ID NO: 22886 - DNA, 20 bp, Artificial Sequence
  chemically synthesized
atttgacaaggaattaatct

SEQ ID NO: 22887 - DNA, 20 bp, Artificial Sequence
  chemically synthesized
gaattaatctccagaatata

SEQ ID NO: 22888 - DNA, 20 bp, Artificial Sequence
  chemically synthesized
gctcaacattactaatcatc

SEQ ID NO: 22889 - DNA, 20 bp, Artificial Sequence
  chemically synthesized
gagatatcatcttatgccag

SEQ ID NO: 22890 - DNA, 20 bp, Artificial Sequence
  chemically synthesized
ctgggtatttatccaaagga

SEQ ID NO: 22891 - DNA, 20 bp, Artificial Sequence
  chemically synthesized
tttatccaaaggaaaagaat

SEQ ID NO: 22892 - DNA, 20 bp, Artificial Sequence
  chemically synthesized
gtgtccatcaatggatgaat

SEQ ID NO: 22893 - DNA, 20 bp, Artificial Sequence
  chemically synthesized
ttaaacgaaataagccaggc

SEQ ID NO: 22894 - DNA, 20 bp, Artificial Sequence
  chemically synthesized
taatatcatgtaggtagaga

SEQ ID NO: 22895 - DNA, 20 bp, Artificial Sequence
  chemically synthesized
tgtaggtagagagtagaatg

SEQ ID NO: 22896 - DNA, 20 bp, Artificial Sequence
  chemically synthesized
gaatgacagaaaccagaggt

SEQ ID NO: 22897 - DNA, 20 bp, Artificial Sequence
  chemically synthesized
ttgtatatttcaaaatagta

SEQ ID NO: 22898 - DNA, 20 bp, Artificial Sequence
  chemically synthesized
tcttgaaatgttcctaacac

SEQ ID NO: 22899 - DNA, 20 bp, Artificial Sequence
  chemically synthesized
aaacacgtcatatatcaata

SEQ ID NO: 22900 - DNA, 20 bp, Artificial Sequence
  chemically synthesized
caaacttctctcttaacaag

SEQ ID NO: 22901 - DNA, 20 bp, Artificial Sequence
  chemically synthesized
ggttttattctgacattaaa

SEQ ID NO: 22902 - DNA, 20 bp, Artificial Sequence
  chemically synthesized
agtatcacaactttcacctg

SEQ ID NO: 22903 - DNA, 20 bp, Artificial Sequence
  chemically synthesized
aatcactatttcaaagaagt

SEQ ID NO: 22904 - DNA, 20 bp, Artificial Sequence
  chemically synthesized
tatacatattatacacatat

SEQ ID NO: 22905 - DNA, 20 bp, Artificial Sequence
  chemically synthesized
tccacatcagtaattagggc

SEQ ID NO: 22906 - DNA, 20 bp, Artificial Sequence
  chemically synthesized
attttatgaataaattttat

SEQ ID NO: 22907 - DNA, 20 bp, Artificial Sequence
  chemically synthesized
tacaggtagattttatatat

SEQ ID NO: 22908 - DNA, 20 bp, Artificial Sequence
  chemically synthesized
gtgagcctccatggccagct

SEQ ID NO: 22909 - DNA, 20 bp, Artificial Sequence
  chemically synthesized
gagaaattttttaaatttct

SEQ ID NO: 22910 - DNA, 20 bp, Artificial Sequence
  chemically synthesized
tttaaaagtggtggggggta

SEQ ID NO: 22911 - DNA, 20 bp, Artificial Sequence
  chemically synthesized
gatccttttcattttgctct

SEQ ID NO: 22912 - DNA, 20 bp, Artificial Sequence
  chemically synthesized
aagtgtgaagtcctcttctc

SEQ ID NO: 22913 - DNA, 20 bp, Artificial Sequence
  chemically synthesized
tagatataatttctgaaggt

SEQ ID NO: 22914 - DNA, 20 bp, Artificial Sequence
  chemically synthesized
gttctgagcaagtgtgtgca

SEQ ID NO: 22915 - DNA, 20 bp, Artificial Sequence
  chemically synthesized
agtacttcccactactgtgg

SEQ ID NO: 22916 - DNA, 20 bp, Artificial Sequence
  chemically synthesized
caaacctctaggtaactagg

SEQ ID NO: 22917 - DNA, 20 bp, Artificial Sequence
  chemically synthesized
atttgtcaattcttgaagat

SEQ ID NO: 22918 - DNA, 20 bp, Artificial Sequence
  chemically synthesized
aaaaaggttattttgaagtc

SEQ ID NO: 22919 - DNA, 20 bp, Artificial Sequence
  chemically synthesized
gcagcaagggattcttctcc

SEQ ID NO: 22920 - DNA, 20 bp, Artificial Sequence
  chemically synthesized
tgaatacatttccttgtttg

SEQ ID NO: 22921 - DNA, 20 bp, Artificial Sequence
  chemically synthesized
ataacattcattttattcat

SEQ ID NO: 22922 - DNA, 20 bp, Artificial Sequence
  chemically synthesized
tcagtttaaggggttctttt

SEQ ID NO: 22923 - DNA, 20 bp, Artificial Sequence
  chemically synthesized
gggttctttttcagaaagtt

SEQ ID NO: 22924 - DNA, 20 bp, Artificial Sequence
  chemically synthesized
aaattcaaatcattaaattt

SEQ ID NO: 22925 - DNA, 20 bp, Artificial Sequence
  chemically synthesized
ttccccttgaaagggaaatg

SEQ ID NO: 22926 - DNA, 20 bp, Artificial Sequence
  chemically synthesized
cattaatgtttgttaaatga

SEQ ID NO: 22927 - DNA, 20 bp, Artificial Sequence
  chemically synthesized
tgagctcctgcccactctct

SEQ ID NO: 22928 - DNA, 20 bp, Artificial Sequence
  chemically synthesized
tggactggaaaaatttgtga

SEQ ID NO: 22929 - DNA, 20 bp, Artificial Sequence
  chemically synthesized
aggataaagatctctgagga

SEQ ID NO: 22930 - DNA, 20 bp, Artificial Sequence
  chemically synthesized
aagaatacaaaataatttaa

SEQ ID NO: 22931 - DNA, 20 bp, Artificial Sequence
  chemically synthesized
aaataatttaaaaagaaaca

SEQ ID NO: 22932 - DNA, 20 bp, Artificial Sequence
  chemically synthesized
attctttctcactaaactac

SEQ ID NO: 22933 - DNA, 20 bp, Artificial Sequence
  chemically synthesized
ataaggtgaattctgatttt

SEQ ID NO: 22934 - DNA, 20 bp, Artificial Sequence
  chemically synthesized
tcctacataagcatagcatt

SEQ ID NO: 22935 - DNA, 20 bp, Artificial Sequence
  chemically synthesized
agcatttcatataattacta

SEQ ID NO: 22936 - DNA, 20 bp, Artificial Sequence
  chemically synthesized
gtttaattatactattttgc

SEQ ID NO: 22937 - DNA, 20 bp, Artificial Sequence
  chemically synthesized
tgaaatcttatgtgcttccc

SEQ ID NO: 22938 - DNA, 20 bp, Artificial Sequence
  chemically synthesized
accgtcctcacaatacctgc

SEQ ID NO: 22939 - DNA, 20 bp, Artificial Sequence
  chemically synthesized
acaatacctgcccagaaaga

SEQ ID NO: 22940 - DNA, 20 bp, Artificial Sequence
  chemically synthesized
agaaagacgagaaagaggag

SEQ ID NO: 22941 - DNA, 20 bp, Artificial Sequence
  chemically synthesized
ggagtctcggaggactgtaa

SEQ ID NO: 22942 - DNA, 20 bp, Artificial Sequence
  chemically synthesized
cttgtgtatgtgttgaagag

SEQ ID NO: 22943 - DNA, 20 bp, Artificial Sequence
  chemically synthesized
aaaatccatattatgacaac

SEQ ID NO: 22944 - DNA, 20 bp, Artificial Sequence
  chemically synthesized
tagtaattatatgaaatgct

SEQ ID NO: 22945 - DNA, 20 bp, Artificial Sequence
  chemically synthesized
ggcaaaatactgtgctcctt

SEQ ID NO: 22946 - DNA, 20 bp, Artificial Sequence
  chemically synthesized
ttatgtaggaattataaaat

SEQ ID NO: 22947 - DNA, 20 bp, Artificial Sequence
  chemically synthesized
actattgaaggaacattagc

SEQ ID NO: 22948 - DNA, 20 bp, Artificial Sequence
  chemically synthesized
gctgagttcctcaagatctt

SEQ ID NO: 22949 - DNA, 20 bp, Artificial Sequence
  chemically synthesized
taaaggatctgaaataataa

SEQ ID NO: 22950 - DNA, 20 bp, Artificial Sequence
  chemically synthesized
atggcatgcattctgaaaaa

SEQ ID NO: 22951 - DNA, 20 bp, Artificial Sequence
  chemically synthesized
ttttgcctatgtagaagtgg

SEQ ID NO: 22952 - DNA, 20 bp, Artificial Sequence
  chemically synthesized
tcttattctctgtagtttag

SEQ ID NO: 22953 - DNA, 20 bp, Artificial Sequence
  chemically synthesized
attctctgtagtttagtgag

SEQ ID NO: 22954 - DNA, 20 bp, Artificial Sequence
  chemically synthesized
gtgagaaagaatctaggagg

SEQ ID NO: 22955 - DNA, 20 bp, Artificial Sequence
  chemically synthesized
tctagaacagtgcctggtac

SEQ ID NO: 22956 - DNA, 20 bp, Artificial Sequence
  chemically synthesized
ttcacttttttactattatg

SEQ ID NO: 22957 - DNA, 20 bp, Artificial Sequence
  chemically synthesized
caaggaaatgtattcacatc

SEQ ID NO: 22958 - DNA, 20 bp, Artificial Sequence
  chemically synthesized
aaacaaaaggtttcttagga

SEQ ID NO: 22959 - DNA, 20 bp, Artificial Sequence
  chemically synthesized
aggagaagaatcccttgctg

SEQ ID NO: 22960 - DNA, 20 bp, Artificial Sequence
  chemically synthesized
agaggcgagggagatagagt

SEQ ID NO: 22961 - DNA, 20 bp, Artificial Sequence
  chemically synthesized
cagaactgattcttaatctt

SEQ ID NO: 22962 - DNA, 20 bp, Artificial Sequence
  chemically synthesized
gaaggataaatagctaaagg

SEQ ID NO: 22963 - DNA, 20 bp, Artificial Sequence
  chemically synthesized
ctcagaacattacaaactct

SEQ ID NO: 22964 - DNA, 20 bp, Artificial Sequence
  chemically synthesized
acacataatgaaagttaatt

SEQ ID NO: 22965 - DNA, 20 bp, Artificial Sequence
  chemically synthesized
tgcttccctcttaaaatgga

SEQ ID NO: 22966 - DNA, 20 bp, Artificial Sequence
  chemically synthesized
catggtacaagtggcacagg

SEQ ID NO: 22967 - DNA, 20 bp, Artificial Sequence
  chemically synthesized
caagtggcacagggaagaat

SEQ ID NO: 22968 - DNA, 20 bp, Artificial Sequence
  chemically synthesized
ctagagtcaaagtggttatg

SEQ ID NO: 22969 - DNA, 20 bp, Artificial Sequence
  chemically synthesized
ctcaaggagtttctaaacct

SEQ ID NO: 22970 - DNA, 20 bp, Artificial Sequence
  chemically synthesized
cacttttcaaggctgaggtg

SEQ ID NO: 22971 - DNA, 20 bp, Artificial Sequence
  chemically synthesized
catagggagaccctgtttct

SEQ ID NO: 22972 - DNA, 20 bp, Artificial Sequence
  chemically synthesized
taataatgttgtgaaaatta

SEQ ID NO: 22973 - DNA, 20 bp, Artificial Sequence
  chemically synthesized
ttgcatttttaaacacaaaa

SEQ ID NO: 22974 - DNA, 20 bp, Artificial Sequence
  chemically synthesized
ctttgattttaactgaggat

SEQ ID NO: 22975 - DNA, 20 bp, Artificial Sequence
  chemically synthesized
agagagagcgagagagaggc

SEQ ID NO: 22976 - DNA, 20 bp, Artificial Sequence
  chemically synthesized
aagtattttcttttttaatg

SEQ ID NO: 22977 - DNA, 20 bp, Artificial Sequence
  chemically synthesized
gctaaaatggtgttggaata

SEQ ID NO: 22978 - DNA, 20 bp, Artificial Sequence
  chemically synthesized
tttggtgtgatgctggcttc

SEQ ID NO: 22979 - DNA, 20 bp, Artificial Sequence
  chemically synthesized
gttccttctttatctgtctt

SEQ ID NO: 22980 - DNA, 20 bp, Artificial Sequence
  chemically synthesized
aattcctctttgaatgtcta

SEQ ID NO: 22981 - DNA, 20 bp, Artificial Sequence
  chemically synthesized
cctatcatatggtctacctt

SEQ ID NO: 22982 - DNA, 20 bp, Artificial Sequence
  chemically synthesized
aaatttccacgcgctgttga

SEQ ID NO: 22983 - DNA, 20 bp, Artificial Sequence
  chemically synthesized
taactcaactccaggtaagg

SEQ ID NO: 22984 - DNA, 20 bp, Artificial Sequence
  chemically synthesized
gctattttgatagcggtcat

SEQ ID NO: 22985 - DNA, 20 bp, Artificial Sequence
  chemically synthesized
agctagtttattattggtgt

SEQ ID NO: 22986 - DNA, 20 bp, Artificial Sequence
  chemically synthesized
atcaggataatactggcctc

SEQ ID NO: 22987 - DNA, 20 bp, Artificial Sequence
  chemically synthesized
ggcctcagagaatgagttag

SEQ ID NO: 22988 - DNA, 20 bp, Artificial Sequence
  chemically synthesized
tccttcctgtttaattttta

SEQ ID NO: 22989 - DNA, 20 bp, Artificial Sequence
  chemically synthesized
tcttggtaggtggtatgtgt

SEQ ID NO: 22990 - DNA, 20 bp, Artificial Sequence
  chemically synthesized
tgatctatctgatgctgaga

SEQ ID NO: 22991 - DNA, 20 bp, Artificial Sequence
  chemically synthesized
ctggtgttgagtgtgaatgt

SEQ ID NO: 22992 - DNA, 20 bp, Artificial Sequence
  chemically synthesized
ttccttcaaatttttcttgc

SEQ ID NO: 22993 - DNA, 20 bp, Artificial Sequence
  chemically synthesized
ctggcctgtgaggtttctgc

SEQ ID NO: 22994 - DNA, 20 bp, Artificial Sequence
  chemically synthesized
tttcaataaactcttcagtt

SEQ ID NO: 22995 - DNA, 20 bp, Artificial Sequence
  chemically synthesized
aacattttggattctttttt

SEQ ID NO: 22996 - DNA, 20 bp, Artificial Sequence
  chemically synthesized
ttccactggcttatgttgct

SEQ ID NO: 22997 - DNA, 20 bp, Artificial Sequence
  chemically synthesized
tgatgaggttgtgctggaga

SEQ ID NO: 22998 - DNA, 20 bp, Artificial Sequence
  chemically synthesized
gagtgatcctcaggccccca

SEQ ID NO: 22999 - DNA, 20 bp, Artificial Sequence
  chemically synthesized
tgtcacttctctgttgaatt

SEQ ID NO: 23000 - DNA, 20 bp, Artificial Sequence
  chemically synthesized
aatcatttgtttcttcaaat

SEQ ID NO: 23001 - DNA, 20 bp, Artificial Sequence
  chemically synthesized
catctaataaatgtgtacca

SEQ ID NO: 23002 - DNA, 20 bp, Artificial Sequence
  chemically synthesized
ctcctggaaaagatgaagat

SEQ ID NO: 23003 - DNA, 20 bp, Artificial Sequence
  chemically synthesized
gaaaataagtctacagaaga

SEQ ID NO: 23004 - DNA, 20 bp, Artificial Sequence
  chemically synthesized
tttttgtggatagtggtttt

SEQ ID NO: 23005 - DNA, 20 bp, Artificial Sequence
  chemically synthesized
agatgtgactcccacacttt

SEQ ID NO: 23006 - DNA, 20 bp, Artificial Sequence
  chemically synthesized
ttgatggtttctaaaattgt

SEQ ID NO: 23007 - DNA, 20 bp, Artificial Sequence
  chemically synthesized
agttactggaataatacatt

SEQ ID NO: 23008 - DNA, 20 bp, Artificial Sequence
  chemically synthesized
aacttacaatcatggcagaa

SEQ ID NO: 23009 - DNA, 20 bp, Artificial Sequence
  chemically synthesized
tagttctgtttctagttctt

SEQ ID NO: 23010 - DNA, 20 bp, Artificial Sequence
  chemically synthesized
ggcaggaagcatccagcatg

SEQ ID NO: 23011 - DNA, 20 bp, Artificial Sequence
  chemically synthesized
acccgtgaatcctgtctatg

SEQ ID NO: 23012 - DNA, 20 bp, Artificial Sequence
  chemically synthesized
gaaaaggctgagtggtgtcc

SEQ ID NO: 23013 - DNA, 20 bp, Artificial Sequence
  chemically synthesized
cgttgtccttcagggatgtc

SEQ ID NO: 23014 - DNA, 20 bp, Artificial Sequence
  chemically synthesized
ccatcggtgcagtctcaggg

SEQ ID NO: 23015 - DNA, 20 bp, Artificial Sequence
  chemically synthesized
ccactttatggctagatgga

SEQ ID NO: 23016 - DNA, 20 bp, Artificial Sequence
  chemically synthesized
atcatattaagcagccaact

SEQ ID NO: 23017 - DNA, 20 bp, Artificial Sequence
  chemically synthesized
aatctgtattagggttctac

SEQ ID NO: 23018 - DNA, 20 bp, Artificial Sequence
  chemically synthesized
tattagggttctacagagaa

SEQ ID NO: 23019 - DNA, 20 bp, Artificial Sequence
  chemically synthesized
agttcaatgttccagggcag

SEQ ID NO: 23020 - DNA, 20 bp, Artificial Sequence
  chemically synthesized
ggcaggaagaatccagcatg

SEQ ID NO: 23021 - DNA, 20 bp, Artificial Sequence
  chemically synthesized
ggtagcagcaatattagagg

SEQ ID NO: 23022 - DNA, 20 bp, Artificial Sequence
  chemically synthesized
ggggctgcatgcactggtca

SEQ ID NO: 23023 - DNA, 20 bp, Artificial Sequence
  chemically synthesized
tacttcttctttctttggag

SEQ ID NO: 23024 - DNA, 20 bp, Artificial Sequence
  chemically synthesized
tctcctcccttactaggaag

SEQ ID NO: 23025 - DNA, 20 bp, Artificial Sequence
  chemically synthesized
aggaagagagaaataccatg

SEQ ID NO: 23026 - DNA, 20 bp, Artificial Sequence
  chemically synthesized
gaagggactttaaaacatgc

SEQ ID NO: 23027 - DNA, 20 bp, Artificial Sequence
  chemically synthesized
aattgctaacctgaatgata

SEQ ID NO: 23028 - DNA, 20 bp, Artificial Sequence
  chemically synthesized
cctccaaagaaagaagaagt

SEQ ID NO: 23029 - DNA, 20 bp, Artificial Sequence
  chemically synthesized
aatattgctgctacctctat

SEQ ID NO: 23030 - DNA, 20 bp, Artificial Sequence
  chemically synthesized
atccagcaagtccacatcta

SEQ ID NO: 23031 - DNA, 20 bp, Artificial Sequence
  chemically synthesized
agaatttatgaccaagtcct

SEQ ID NO: 23032 - DNA, 20 bp, Artificial Sequence
  chemically synthesized
tcctcaaaactaaacacaac

SEQ ID NO: 23033 - DNA, 20 bp, Artificial Sequence
  chemically synthesized
aaactaaacacaacaaaaac

SEQ ID NO: 23034 - DNA, 20 bp, Artificial Sequence
  chemically synthesized
tacaaggaactcaacaacaa

SEQ ID NO: 23035 - DNA, 20 bp, Artificial Sequence
  chemically synthesized
atggacctctatgattagtc

SEQ ID NO: 23036 - DNA, 20 bp, Artificial Sequence
  chemically synthesized
tatttcctccttcttttgtt

SEQ ID NO: 23037 - DNA, 20 bp, Artificial Sequence
  chemically synthesized
ggatataaagcaggcagaaa

SEQ ID NO: 23038 - DNA, 20 bp, Artificial Sequence
  chemically synthesized
aataatcagagaatgcaaat

SEQ ID NO: 23039 - DNA, 20 bp, Artificial Sequence
  chemically synthesized
tggctatcattataaagttc

SEQ ID NO: 23040 - DNA, 20 bp, Artificial Sequence
  chemically synthesized
taggagtatggtgaggactg

SEQ ID NO: 23041 - DNA, 20 bp, Artificial Sequence
  chemically synthesized
catttttcactgctgtcttt

SEQ ID NO: 23042 - DNA, 20 bp, Artificial Sequence
  chemically synthesized
aaatatatctaagctttctt

SEQ ID NO: 23043 - DNA, 20 bp, Artificial Sequence
  chemically synthesized
tatttacattttttatcctt

SEQ ID NO: 23044 - DNA, 20 bp, Artificial Sequence
  chemically synthesized
tgcatcttactcagagatct

SEQ ID NO: 23045 - DNA, 20 bp, Artificial Sequence
  chemically synthesized
ttgggaaatgaaatgaaaag

SEQ ID NO: 23046 - DNA, 20 bp, Artificial Sequence
  chemically synthesized
tctttcagtctattagaaat

SEQ ID NO: 23047 - DNA, 20 bp, Artificial Sequence
  chemically synthesized
agaaaaaagtcttcccctac

SEQ ID NO: 23048 - DNA, 20 bp, Artificial Sequence
  chemically synthesized
cccctacaaaaacaaattta

SEQ ID NO: 23049 - DNA, 20 bp, Artificial Sequence
  chemically synthesized
aaacaataaaaagaaatcag

SEQ ID NO: 23050 - DNA, 20 bp, Artificial Sequence
  chemically synthesized
aagaaatacaaaatacattc

SEQ ID NO: 23051 - DNA, 20 bp, Artificial Sequence
  chemically synthesized
tacgtaacaacacaatagct

SEQ ID NO: 23052 - DNA, 20 bp, Artificial Sequence
  chemically synthesized
aagccaaagagtaagaactc

SEQ ID NO: 23053 - DNA, 20 bp, Artificial Sequence
  chemically synthesized
tatacaactaactggtagag

SEQ ID NO: 23054 - DNA, 20 bp, Artificial Sequence
  chemically synthesized
gaaaaggaaggaaggaagaa

SEQ ID NO: 23055 - DNA, 20 bp, Artificial Sequence
  chemically synthesized
aaggaaggaagaaaaaaaca

SEQ ID NO: 23056 - DNA, 20 bp, Artificial Sequence
  chemically synthesized
caaaacaaacaaactaaaaa

SEQ ID NO: 23057 - DNA, 20 bp, Artificial Sequence
  chemically synthesized
caaacaaactaaaaaaaaaa

SEQ ID NO: 23058 - DNA, 20 bp, Artificial Sequence
  chemically synthesized
atagactggctaaatagatt

SEQ ID NO: 23059 - DNA, 20 bp, Artificial Sequence
  chemically synthesized
gataaaattgactttaaata

SEQ ID NO: 23060 - DNA, 20 bp, Artificial Sequence
  chemically synthesized
cttctcagaccacaatggaa

SEQ ID NO: 23061 - DNA, 20 bp, Artificial Sequence
  chemically synthesized
aactagaaatcaataacaag

SEQ ID NO: 23062 - DNA, 20 bp, Artificial Sequence
  chemically synthesized
atcaataacaagaaaaactt

SEQ ID NO: 23063 - DNA, 20 bp, Artificial Sequence
  chemically synthesized
tatcaataaacacttaaatt

SEQ ID NO: 23064 - DNA, 20 bp, Artificial Sequence
  chemically synthesized
acaagctagaaaagcaagaa

SEQ ID NO: 23065 - DNA, 20 bp, Artificial Sequence
  chemically synthesized
agaaaagcaagaacaaaacc

SEQ ID NO: 23066 - DNA, 20 bp, Artificial Sequence
  chemically synthesized
aagaacttaatgaaatagag

SEQ ID NO: 23067 - DNA, 20 bp, Artificial Sequence
  chemically synthesized
ttatgaacaaccatacacta

SEQ ID NO: 23068 - DNA, 20 bp, Artificial Sequence
  chemically synthesized
gattgaattaagaaagaata

SEQ ID NO: 23069 - DNA, 20 bp, Artificial Sequence
  chemically synthesized
aattttaccaaactttcaaa

SEQ ID NO: 23070 - DNA, 20 bp, Artificial Sequence
  chemically synthesized
gacaaggatgcaagtaaaaa

SEQ ID NO: 23071 - DNA, 20 bp, Artificial Sequence
  chemically synthesized
atcacatcaacaaaaagaac

SEQ ID NO: 23072 - DNA, 20 bp, Artificial Sequence
  chemically synthesized
atttaacattccttcatgat

SEQ ID NO: 23073 - DNA, 20 bp, Artificial Sequence
  chemically synthesized
tgacatgattttatacctag

SEQ ID NO: 23074 - DNA, 20 bp, Artificial Sequence
  chemically synthesized
taaatttaaccaaggaaccg

SEQ ID NO: 23075 - DNA, 20 bp, Artificial Sequence
  chemically synthesized
aaccgaaaaacctctattcg

SEQ ID NO: 23076 - DNA, 20 bp, Artificial Sequence
  chemically synthesized
aacctctattcggaaaacta

SEQ ID NO: 23077 - DNA, 20 bp, Artificial Sequence
  chemically synthesized
gtcatttttcacagaaatgg

SEQ ID NO: 23078 - DNA, 20 bp, Artificial Sequence
  chemically synthesized
gatatccatgtgcaaaagaa

SEQ ID NO: 23079 - DNA, 20 bp, Artificial Sequence
  chemically synthesized
ggccaccaaaagtgagtagg

SEQ ID NO: 23080 - DNA, 20 bp, Artificial Sequence
  chemically synthesized
ctatgaagccagcatcacac

SEQ ID NO: 23081 - DNA, 20 bp, Artificial Sequence
  chemically synthesized
ggaaggacataaccaaaaaa

SEQ ID NO: 23082 - DNA, 20 bp, Artificial Sequence
  chemically synthesized
tacaccacataaacagattt

SEQ ID NO: 23083 - DNA, 20 bp, Artificial Sequence
  chemically synthesized
tcctagccagggcaatcaga

SEQ ID NO: 23084 - DNA, 20 bp, Artificial Sequence
  chemically synthesized
atgatatgatcatttacctt

SEQ ID NO: 23085 - DNA, 20 bp, Artificial Sequence
  chemically synthesized
aacccctatttattgccata

SEQ ID NO: 23086 - DNA, 20 bp, Artificial Sequence
  chemically synthesized
atggattaaagacttaaata

SEQ ID NO: 23087 - DNA, 20 bp, Artificial Sequence
  chemically synthesized
aaagacttaaatataaaact

SEQ ID NO: 23088 - DNA, 20 bp, Artificial Sequence
  chemically synthesized
aaatataaaacttaaaacta

SEQ ID NO: 23089 - DNA, 20 bp, Artificial Sequence
  chemically synthesized
aaactataaaactactaaaa

SEQ ID NO: 23090 - DNA, 20 bp, Artificial Sequence
  chemically synthesized
ctcaaacaactcaacagtgg

SEQ ID NO: 23091 - DNA, 20 bp, Artificial Sequence
  chemically synthesized
atcatcagagaaatgcaaat

SEQ ID NO: 23092 - DNA, 20 bp, Artificial Sequence
  chemically synthesized
aaattagtatagccactatg

SEQ ID NO: 23093 - DNA, 20 bp, Artificial Sequence
  chemically synthesized
aaagtagggtgattatagtt

SEQ ID NO: 23094 - DNA, 20 bp, Artificial Sequence
  chemically synthesized
acatataacaatgaggtggt

SEQ ID NO: 23095 - DNA, 20 bp, Artificial Sequence
  chemically synthesized
ctaatctcaccctcctgttc

SEQ ID NO: 23096 - DNA, 20 bp, Artificial Sequence
  chemically synthesized
aggagaaaaagaggaagaac

SEQ ID NO: 23097 - DNA, 20 bp, Artificial Sequence
  chemically synthesized
ctctagagaaaagccatttg

SEQ ID NO: 23098 - DNA, 20 bp, Artificial Sequence
  chemically synthesized
ggaaaacttctgtgttaaca

SEQ ID NO: 23099 - DNA, 20 bp, Artificial Sequence
  chemically synthesized
agcaatacgttggcttaggc

SEQ ID NO: 23100 - DNA, 20 bp, Artificial Sequence
  chemically synthesized
atttttcccccacatttggg

SEQ ID NO: 23101 - DNA, 20 bp, Artificial Sequence
  chemically synthesized
actggtaacagtgcttcttc

SEQ ID NO: 23102 - DNA, 20 bp, Artificial Sequence
  chemically synthesized
cattgttcataccctggaga

SEQ ID NO: 23103 - DNA, 20 bp, Artificial Sequence
  chemically synthesized
gaagtctgagaattagtacc

SEQ ID NO: 23104 - DNA, 20 bp, Artificial Sequence
  chemically synthesized
atacatttccttgtttgcca

SEQ ID NO: 23105 - DNA, 20 bp, Artificial Sequence
  chemically synthesized
atctataggacatttccttt

SEQ ID NO: 23106 - DNA, 20 bp, Artificial Sequence
  chemically synthesized
cattgtggggacctctccac

SEQ ID NO: 23107 - DNA, 20 bp, Artificial Sequence
  chemically synthesized
taaaggcagcttaggggttg

SEQ ID NO: 23108 - DNA, 20 bp, Artificial Sequence
  chemically synthesized
gctcctgcccactctctaga

SEQ ID NO: 23109 - DNA, 20 bp, Artificial Sequence
  chemically synthesized
caggaactttgggcatattt

SEQ ID NO: 23110 - DNA, 20 bp, Artificial Sequence
  chemically synthesized
gtgactagaaaaaggacatt

SEQ ID NO: 23111 - DNA, 20 bp, Artificial Sequence
  chemically synthesized
atcttgaggaactcagcctt

SEQ ID NO: 23112 - DNA, 20 bp, Artificial Sequence
  chemically synthesized
cttttgagaagctcctgaat

SEQ ID NO: 23113 - DNA, 20 bp, Artificial Sequence
  chemically synthesized
tattttgctgagaaaaattt

SEQ ID NO: 23114 - DNA, 20 bp, Artificial Sequence
  chemically synthesized
aataaagaaaatcaaattga

SEQ ID NO: 23115 - DNA, 20 bp, Artificial Sequence
  chemically synthesized
taaagacatctgtaaaatta

SEQ ID NO: 23116 - DNA, 20 bp, Artificial Sequence
  chemically synthesized
ggacatagcttattggtgga

SEQ ID NO: 23117 - DNA, 20 bp, Artificial Sequence
  chemically synthesized
attatgtaagaattaaatat

SEQ ID NO: 23118 - DNA, 20 bp, Artificial Sequence
  chemically synthesized
ggaaatgtattcacatccaa

SEQ ID NO: 23119 - DNA, 20 bp, Artificial Sequence
  chemically synthesized
ccatgaacaatggaaacgtg

SEQ ID NO: 23120 - DNA, 20 bp, Artificial Sequence
  chemically synthesized
tagttacctagaggtttggg

SEQ ID NO: 23121 - DNA, 20 bp, Artificial Sequence
  chemically synthesized
gtggcacagggaagaattca

SEQ ID NO: 23122 - DNA, 20 bp, Artificial Sequence
  chemically synthesized
gtgaaacacacgatctatgt

SEQ ID NO: 23123 - DNA, 20 bp, Artificial Sequence
  chemically synthesized
ttcaatgacctacgctgtgg

SEQ ID NO: 23124 - DNA, 20 bp, Artificial Sequence
  chemically synthesized
tttcttttttaatgtcagaa

SEQ ID NO: 23125 - DNA, 20 bp, Artificial Sequence
  chemically synthesized
aaatgtgctttataaatagt

SEQ ID NO: 23126 - DNA, 20 bp, Artificial Sequence
  chemically synthesized
aagtgtgctatataaacagt

SEQ ID NO: 23127 - DNA, 20 bp, Artificial Sequence
  chemically synthesized
tcaaggataaaaaatgtaaa

SEQ ID NO: 23128 - DNA, 20 bp, Artificial Sequence
  chemically synthesized
aacttctttttgatacagta

SEQ ID NO: 23129 - DNA, 20 bp, Artificial Sequence
  chemically synthesized
ttaagaaatatagtagctat

SEQ ID NO: 23130 - DNA, 20 bp, Artificial Sequence
  chemically synthesized
gactgggtaatttataagga

SEQ ID NO: 23131 - DNA, 20 bp, Artificial Sequence
  chemically synthesized
aaagggggaaaagccgctta

SEQ ID NO: 23132 - DNA, 20 bp, Artificial Sequence
  chemically synthesized
cataattatgcctaacatac

SEQ ID NO: 23133 - DNA, 20 bp, Artificial Sequence
  chemically synthesized
accttaattccaggacatgg

SEQ ID NO: 23134 - DNA, 20 bp, Artificial Sequence
  chemically synthesized
cttctgttctggactccact

SEQ ID NO: 23135 - DNA, 20 bp, Artificial Sequence
  chemically synthesized
gcagccaactccagaaaccc

SEQ ID NO: 23136 - DNA, 20 bp, Artificial Sequence
  chemically synthesized
ctcacatgttcacaaggtcc

SEQ ID NO: 23137 - DNA, 20 bp, Artificial Sequence
  chemically synthesized
gtagcaggacaagctgcata

SEQ ID NO: 23138 - DNA, 20 bp, Artificial Sequence
  chemically synthesized
ttggaggcagaaattgggca

SEQ ID NO: 23139 - DNA, 20 bp, Artificial Sequence
  chemically synthesized
taggagatttcttcataatt

SEQ ID NO: 23140 - DNA, 20 bp, Artificial Sequence
  chemically synthesized
catgcacctagaagggactt

SEQ ID NO: 23141 - DNA, 20 bp, Artificial Sequence
  chemically synthesized
actgtgattcagacaaaggc

SEQ ID NO: 23142 - DNA, 20 bp, Artificial Sequence
  chemically synthesized
ttctctccccattcatctgc

SEQ ID NO: 23143 - DNA, 20 bp, Artificial Sequence
  chemically synthesized
cctccaactgttaaaaggaa

SEQ ID NO: 23144 - DNA, 20 bp, Artificial Sequence
  chemically synthesized
tattatcattcaggttagca

SEQ ID NO: 23145 - DNA, 20 bp, Artificial Sequence
  chemically synthesized
taataagggatggaaatgag

SEQ ID NO: 23146 - DNA, 20 bp, Artificial Sequence
  chemically synthesized
catttaggatccactaagcc

SEQ ID NO: 23147 - DNA, 20 bp, Artificial Sequence
  chemically synthesized
aagggacaccaacgaatggt

SEQ ID NO: 23148 - DNA, 20 bp, Artificial Sequence
  chemically synthesized
actgctttgttcaattctgt

SEQ ID NO: 23149 - DNA, 20 bp, Artificial Sequence
  chemically synthesized
tatgttcaaataacagctgc

SEQ ID NO: 23150 - DNA, 20 bp, Artificial Sequence
  chemically synthesized
agtaccttttgataaggaga

SEQ ID NO: 23151 - DNA, 20 bp, Artificial Sequence
  chemically synthesized
tgcttatagatgttcataga

SEQ ID NO: 23152 - DNA, 20 bp, Artificial Sequence
  chemically synthesized
agggaggagaccacccttca

SEQ ID NO: 23153 - DNA, 20 bp, Artificial Sequence
  chemically synthesized
acctggccagttatgttatc

SEQ ID NO: 23154 - DNA, 20 bp, Artificial Sequence
  chemically synthesized
ggacaggaattgctcactct

SEQ ID NO: 23155 - DNA, 20 bp, Artificial Sequence
  chemically synthesized
cttctttaactcggtgtctg

SEQ ID NO: 23156 - DNA, 20 bp, Artificial Sequence
  chemically synthesized
ggtgtctgaggggttttgta

SEQ ID NO: 23157 - DNA, 20 bp, Artificial Sequence
  chemically synthesized
aattaaggagagtatgaaaa

SEQ ID NO: 23158 - DNA, 20 bp, Artificial Sequence
  chemically synthesized
caaatgggggtaaaataata

SEQ ID NO: 23159 - DNA, 20 bp, Artificial Sequence
  chemically synthesized
agggaaagacaggctctaaa

SEQ ID NO: 23160 - DNA, 20 bp, Artificial Sequence
  chemically synthesized
aatgggacttaattaaacta

SEQ ID NO: 23161 - DNA, 20 bp, Artificial Sequence
  chemically synthesized
atggttaatactgagtgtca

SEQ ID NO: 23162 - DNA, 20 bp, Artificial Sequence
  chemically synthesized
gtctgtgagggtgttaccaa

SEQ ID NO: 23163 - DNA, 20 bp, Artificial Sequence
  chemically synthesized
aggcagaaaaatgtgaaaag

SEQ ID NO: 23164 - DNA, 20 bp, Artificial Sequence
  chemically synthesized
gaaaaatgtgaaaaggctag

SEQ ID NO: 23165 - DNA, 20 bp, Artificial Sequence
  chemically synthesized
agcctacatttttctcccat

SEQ ID NO: 23166 - DNA, 20 bp, Artificial Sequence
  chemically synthesized
gaacattgaactccaggttc

SEQ ID NO: 23167 - DNA, 20 bp, Artificial Sequence
  chemically synthesized
tcttcagctttgggactccg

SEQ ID NO: 23168 - DNA, 20 bp, Artificial Sequence
  chemically synthesized
tgttcctcagctggcagatg

SEQ ID NO: 23169 - DNA, 20 bp, Artificial Sequence
  chemically synthesized
agatatatatctcctattaa

SEQ ID NO: 23170 - DNA, 20 bp, Artificial Sequence
  chemically synthesized
gtttctctgtagaaccctaa

SEQ ID NO: 23171 - DNA, 20 bp, Artificial Sequence
  chemically synthesized
attaaggatggagttctttc

SEQ ID NO: 23172 - DNA, 20 bp, Artificial Sequence
  chemically synthesized
tggagttctttcattggttt

SEQ ID NO: 23173 - DNA, 20 bp, Artificial Sequence
  chemically synthesized
gttttggggtttctggagtt

SEQ ID NO: 23174 - DNA, 20 bp, Artificial Sequence
  chemically synthesized
tttctggagttggctgctta

SEQ ID NO: 23175 - DNA, 20 bp, Artificial Sequence
  chemically synthesized
cactgataatccttggcatc

SEQ ID NO: 23176 - DNA, 20 bp, Artificial Sequence
  chemically synthesized
aaaataaatgcatttgacac

SEQ ID NO: 23177 - DNA, 20 bp, Artificial Sequence
  chemically synthesized
tgcatttgacactcttgatt

SEQ ID NO: 23178 - DNA, 20 bp, Artificial Sequence
  chemically synthesized
ggaacatagtgaagttggtt

SEQ ID NO: 23179 - DNA, 20 bp, Artificial Sequence
  chemically synthesized
actcaggagtatatcaactc

SEQ ID NO: 23180 - DNA, 20 bp, Artificial Sequence
  chemically synthesized
gagcaagaagtagcaaacac

SEQ ID NO: 23181 - DNA, 20 bp, Artificial Sequence
  chemically synthesized
ggacagaggatgggaaataa

SEQ ID NO: 23182 - DNA, 20 bp, Artificial Sequence
  chemically synthesized
agtaaaatttataggggtcc

SEQ ID NO: 23183 - DNA, 20 bp, Artificial Sequence
  chemically synthesized
cacaacgcctagtgggccta

SEQ ID NO: 23184 - DNA, 20 bp, Artificial Sequence
  chemically synthesized
ggattttggaggcaacatat

SEQ ID NO: 23185 - DNA, 20 bp, Artificial Sequence
  chemically synthesized
atcgagtgatccaaaaggct

SEQ ID NO: 23186 - DNA, 20 bp, Artificial Sequence
  chemically synthesized
atatgacctagcagatccaa

SEQ ID NO: 23187 - DNA, 20 bp, Artificial Sequence
  chemically synthesized
gtgtcagtgccagataggga

SEQ ID NO: 23188 - DNA, 20 bp, Artificial Sequence
  chemically synthesized
ctgaatcacagcggaggcct

SEQ ID NO: 23189 - DNA, 20 bp, Artificial Sequence
  chemically synthesized
agaaagctcttggcctgtta

SEQ ID NO: 23190 - DNA, 20 bp, Artificial Sequence
  chemically synthesized
tgaactgcctatcatgaact

SEQ ID NO: 23191 - DNA, 20 bp, Artificial Sequence
  chemically synthesized
agcaaatggaagtggtatat

SEQ ID NO: 23192 - DNA, 20 bp, Artificial Sequence
  chemically synthesized
tggaagtggtatatatgcga

SEQ ID NO: 23193 - DNA, 20 bp, Artificial Sequence
  chemically synthesized
catggtctccactcctgaca

SEQ ID NO: 23194 - DNA, 20 bp, Artificial Sequence
  chemically synthesized
tttgcacagaaggagaaatg

SEQ ID NO: 23195 - DNA, 20 bp, Artificial Sequence
  chemically synthesized
agaaggagaaatggccagat

SEQ ID NO: 23196 - DNA, 20 bp, Artificial Sequence
  chemically synthesized
cttattcatgggctgtagcc

SEQ ID NO: 23197 - DNA, 20 bp, Artificial Sequence
  chemically synthesized
agaggtatgtggatggacct

SEQ ID NO: 23198 - DNA, 20 bp, Artificial Sequence
  chemically synthesized
caatgggtgacctcagcaga

SEQ ID NO: 23199 - DNA, 20 bp, Artificial Sequence
  chemically synthesized
cacagttgcagggatggaag

SEQ ID NO: 23200 - DNA, 20 bp, Artificial Sequence
  chemically synthesized
aaagctgacctggccacagc

SEQ ID NO: 23201 - DNA, 20 bp, Artificial Sequence
  chemically synthesized
cagccagctacctggtggca

SEQ ID NO: 23202 - DNA, 20 bp, Artificial Sequence
  chemically synthesized
tcttccatcatggaaagggc

SEQ ID NO: 23203 - DNA, 20 bp, Artificial Sequence
  chemically synthesized
aatagacacttactctggat

SEQ ID NO: 23204 - DNA, 20 bp, Artificial Sequence
  chemically synthesized
gggtttcccaatcctgaact

SEQ ID NO: 23205 - DNA, 20 bp, Artificial Sequence
  chemically synthesized
tgtcatggtattccacacag

SEQ ID NO: 23206 - DNA, 20 bp, Artificial Sequence
  chemically synthesized
catgatccctatcatcctga

SEQ ID NO: 23207 - DNA, 20 bp, Artificial Sequence
  chemically synthesized
ttttgaatggccttttgaag

SEQ ID NO: 23208 - DNA, 20 bp, Artificial Sequence
  chemically synthesized
aatcagtgtccaatatatgg

SEQ ID NO: 23209 - DNA, 20 bp, Artificial Sequence
  chemically synthesized
tggtactgtttctcccatag

SEQ ID NO: 23210 - DNA, 20 bp, Artificial Sequence
  chemically synthesized
tagtgttccactagcaaaat

SEQ ID NO: 23211 - DNA, 20 bp, Artificial Sequence
  chemically synthesized
ttcccatggcattatgttct

SEQ ID NO: 23212 - DNA, 20 bp, Artificial Sequence
  chemically synthesized
actgccgccaggtgacacaa

SEQ ID NO: 23213 - DNA, 20 bp, Artificial Sequence
  chemically synthesized
tgattccattaaactgcaaa

SEQ ID NO: 23214 - DNA, 20 bp, Artificial Sequence
  chemically synthesized
gagagttacagtgttggctg

SEQ ID NO: 23215 - DNA, 20 bp, Artificial Sequence
  chemically synthesized
ggagatccattagggtgtct

SEQ ID NO: 23216 - DNA, 20 bp, Artificial Sequence
  chemically synthesized
ttccaggcaggactacaaat

SEQ ID NO: 23217 - DNA, 20 bp, Artificial Sequence
  chemically synthesized
aaaaaagacaagacctgctg

SEQ ID NO: 23218 - DNA, 20 bp, Artificial Sequence
  chemically synthesized
tttttcctttatcatgtgac

SEQ ID NO: 23219 - DNA, 20 bp, Artificial Sequence
  chemically synthesized
atatcagcatttaagtattg

SEQ ID NO: 23220 - DNA, 20 bp, Artificial Sequence
  chemically synthesized
ttatgtaatagcatttgcaa

SEQ ID NO: 23221 - DNA, 20 bp, Artificial Sequence
  chemically synthesized
gcattttcaattgcacgaag

SEQ ID NO: 23222 - DNA, 20 bp, Artificial Sequence
  chemically synthesized
atggttaatactgagtgtca

SEQ ID NO: 23223 - DNA, 20 bp, Artificial Sequence
  chemically synthesized
taatactgagtgtcaacttg

SEQ ID NO: 23224 - DNA, 20 bp, Artificial Sequence
  chemically synthesized
gtctgtgagggtattgccaa

SEQ ID NO: 23225 - DNA, 20 bp, Artificial Sequence
  chemically synthesized
aaaacatgtgaaaatcctgg

SEQ ID NO: 23226 - DNA, 20 bp, Artificial Sequence
  chemically synthesized
ctacatctttctcccatgct

SEQ ID NO: 23227 - DNA, 20 bp, Artificial Sequence
  chemically synthesized
aaacattggactccaagtcc

SEQ ID NO: 23228 - DNA, 20 bp, Artificial Sequence
  chemically synthesized
ccttcagctttgggacttgg

SEQ ID NO: 23229 - DNA, 20 bp, Artificial Sequence
  chemically synthesized
ttggactggcttccttgctc

SEQ ID NO: 23230 - DNA, 20 bp, Artificial Sequence
  chemically synthesized
agatggcctattgtgggacc

SEQ ID NO: 23231 - DNA, 20 bp, Artificial Sequence
  chemically synthesized
gtgaggatgtggagacaaga

SEQ ID NO: 23232 - DNA, 20 bp, Artificial Sequence
  chemically synthesized
aaactttatggaagacagca

SEQ ID NO: 23233 - DNA, 20 bp, Artificial Sequence
  chemically synthesized
caacctaaatgtctaccaat

SEQ ID NO: 23234 - DNA, 20 bp, Artificial Sequence
  chemically synthesized
tatggtgaggactgaaaaac

SEQ ID NO: 23235 - DNA, 20 bp, Artificial Sequence
  chemically synthesized
aacatacatatgtaaggaac

SEQ ID NO: 23236 - DNA, 20 bp, Artificial Sequence
  chemically synthesized
aacccgagcttgtaccctga

SEQ ID NO: 23237 - DNA, 20 bp, Artificial Sequence
  chemically synthesized
ataatcctcacgtgttgtgg

SEQ ID NO: 23238 - DNA, 20 bp, Artificial Sequence
  chemically synthesized
agtgagttcttacaagatct

SEQ ID NO: 23239 - DNA, 20 bp, Artificial Sequence
  chemically synthesized
caagatctgatggttttata

SEQ ID NO: 23240 - DNA, 20 bp, Artificial Sequence
  chemically synthesized
ttataagcggcttttccccc

SEQ ID NO: 23241 - DNA, 20 bp, Artificial Sequence
  chemically synthesized
ctgctgccatgtgaagaagg

SEQ ID NO: 23242 - DNA, 20 bp, Artificial Sequence
  chemically synthesized
tgccatgtgaagaaggacat

SEQ ID NO: 23243 - DNA, 20 bp, Artificial Sequence
  chemically synthesized
catgtttgtttcttcttctg

SEQ ID NO: 23244 - DNA, 20 bp, Artificial Sequence
  chemically synthesized
tttcttcttctgccatgatt

SEQ ID NO: 23245 - DNA, 20 bp, Artificial Sequence
  chemically synthesized
tgtggaactgtgagacaatt

SEQ ID NO: 23246 - DNA, 20 bp, Artificial Sequence
  chemically synthesized
aaaaatataaaataaattag

SEQ ID NO: 23247 - DNA, 20 bp, Artificial Sequence
  chemically synthesized
gagtgtgcaaggaaagagta

SEQ ID NO: 23248 - DNA, 20 bp, Artificial Sequence
  chemically synthesized
gtgagaatacacaaataatc

SEQ ID NO: 23249 - DNA, 20 bp, Artificial Sequence
  chemically synthesized
atattccatttcatcagact

SEQ ID NO: 23250 - DNA, 20 bp, Artificial Sequence
  chemically synthesized
gatgctattatatggtacca

SEQ ID NO: 23251 - DNA, 20 bp, Artificial Sequence
  chemically synthesized
taagaatttcatctttaagg

SEQ ID NO: 23252 - DNA, 20 bp, Artificial Sequence
  chemically synthesized
agttttttactgtatcaaaa

SEQ ID NO: 23253 - DNA, 20 bp, Artificial Sequence
  chemically synthesized
tctagactggacaagaacag

SEQ ID NO: 23254 - DNA, 20 bp, Artificial Sequence
  chemically synthesized
agcaacatatttaaatatat

SEQ ID NO: 23255 - DNA, 20 bp, Artificial Sequence
  chemically synthesized
cttttccaggagaatatacc

SEQ ID NO: 23256 - DNA, 20 bp, Artificial Sequence
  chemically synthesized
tctgatggtacacatttatt

SEQ ID NO: 23257 - DNA, 20 bp, Artificial Sequence
  chemically synthesized
actcagagatcttaaaacat

SEQ ID NO: 23258 - DNA, 20 bp, Artificial Sequence
  chemically synthesized
atcttaaaacatccttgttt

SEQ ID NO: 23259 - DNA, 20 bp, Artificial Sequence
  chemically synthesized
tgaagaacataagggggaaa

SEQ ID NO: 23260 - DNA, 20 bp, Artificial Sequence
  chemically synthesized
gattctttatttgaagaaac

SEQ ID NO: 23261 - DNA, 20 bp, Artificial Sequence
  chemically synthesized
tttatttgaagaaacaaatg

SEQ ID NO: 23262 - DNA, 20 bp, Artificial Sequence
  chemically synthesized
tagtcccccatatagcctta

SEQ ID NO: 23263 - DNA, 20 bp, Artificial Sequence
  chemically synthesized
atagccttagagtgtttaaa

SEQ ID NO: 23264 - DNA, 20 bp, Artificial Sequence
  chemically synthesized
gtctattagaaataaaaaca

SEQ ID NO: 23265 - DNA, 20 bp, Artificial Sequence
  chemically synthesized
gcttaaaaaatttcaaggga

SEQ ID NO: 23266 - DNA, 20 bp, Artificial Sequence
  chemically synthesized
aaatttcaagggaaggggct

SEQ ID NO: 23267 - DNA, 20 bp, Artificial Sequence
  chemically synthesized
ctgaggtcaggaacacccag

SEQ ID NO: 23268 - DNA, 20 bp, Artificial Sequence
  chemically synthesized
ccaccaccaacaccagtgca

SEQ ID NO: 23269 - DNA, 20 bp, Artificial Sequence
  chemically synthesized
aaacagaaattctgtaactg

SEQ ID NO: 23270 - DNA, 20 bp, Artificial Sequence
  chemically synthesized
agtgaacaaatattcaaatt

SEQ ID NO: 23271 - DNA, 20 bp, Artificial Sequence
  chemically synthesized
tcacttataagggaacttcc

SEQ ID NO: 23272 - DNA, 20 bp, Artificial Sequence
  chemically synthesized
aagggaacttccacaagatt

SEQ ID NO: 23273 - DNA, 20 bp, Artificial Sequence
  chemically synthesized
cacaagattaacagattaac

SEQ ID NO: 23274 - DNA, 20 bp, Artificial Sequence
  chemically synthesized
aaggaattcactatcactag

SEQ ID NO: 23275 - DNA, 20 bp, Artificial Sequence
  chemically synthesized
caataatagccttgcatgta

SEQ ID NO: 23276 - DNA, 20 bp, Artificial Sequence
  chemically synthesized
tgaaagatatagactggcta

SEQ ID NO: 23277 - DNA, 20 bp, Artificial Sequence
  chemically synthesized
gaatccaatacaataatagt

SEQ ID NO: 23278 - DNA, 20 bp, Artificial Sequence
  chemically synthesized
cagaaaattaacaaagaaac

SEQ ID NO: 23279 - DNA, 20 bp, Artificial Sequence
  chemically synthesized
agcaaaagcagtgctaagag

SEQ ID NO: 23280 - DNA, 20 bp, Artificial Sequence
  chemically synthesized
acacttaaattaaaaacata

SEQ ID NO: 23281 - DNA, 20 bp, Artificial Sequence
  chemically synthesized
aaatagagaaaaacaacaac

SEQ ID NO: 23282 - DNA, 20 bp, Artificial Sequence
  chemically synthesized
aaccgataccacagaaatag

SEQ ID NO: 23283 - DNA, 20 bp, Artificial Sequence
  chemically synthesized
ttctggacacataccaccta

SEQ ID NO: 23284 - DNA, 20 bp, Artificial Sequence
  chemically synthesized
aaaagaaaatttcaagacca

SEQ ID NO: 23285 - DNA, 20 bp, Artificial Sequence
  chemically synthesized
attctctgaggccagtatta

SEQ ID NO: 23286 - DNA, 20 bp, Artificial Sequence
  chemically synthesized
agataatacaccatgatcaa

SEQ ID NO: 23287 - DNA, 20 bp, Artificial Sequence
  chemically synthesized
ataatactggaagtcctagc

SEQ ID NO: 23288 - DNA, 20 bp, Artificial Sequence
  chemically synthesized
actgtccatctttccagatg

SEQ ID NO: 23289 - DNA, 20 bp, Artificial Sequence
  chemically synthesized
aaatcagcatatgaaacaag

SEQ ID NO: 23290 - DNA, 20 bp, Artificial Sequence
  chemically synthesized
ccatactacccaaagcaatc

SEQ ID NO: 23291 - DNA, 20 bp, Artificial Sequence
  chemically synthesized
aatgctagaggtatcatact

SEQ ID NO: 23292 - DNA, 20 bp, Artificial Sequence
  chemically synthesized
gcatccacatatttatagcc

SEQ ID NO: 23293 - DNA, 20 bp, Artificial Sequence
  chemically synthesized
gaataaaactggactgctga

SEQ ID NO: 23294 - DNA, 20 bp, Artificial Sequence
  chemically synthesized
ctggactgctgatatggttt

SEQ ID NO: 23295 - DNA, 20 bp, Artificial Sequence
  chemically synthesized
cttggcggatgggaggtagg

SEQ ID NO: 23296 - DNA, 20 bp, Artificial Sequence
  chemically synthesized
cccacagaccctctgaagga

SEQ ID NO: 23297 - DNA, 20 bp, Artificial Sequence
  chemically synthesized
tcccactggagaaactgaag

SEQ ID NO: 23298 - DNA, 20 bp, Artificial Sequence
  chemically synthesized
actgaaggtctgtttgtggg

SEQ ID NO: 23299 - DNA, 20 bp, Artificial Sequence
  chemically synthesized
cagaaagtcaacaaaaaaat

SEQ ID NO: 23300 - DNA, 20 bp, Artificial Sequence
  chemically synthesized
taacagaccaataacaagca

SEQ ID NO: 23301 - DNA, 20 bp, Artificial Sequence
  chemically synthesized
caaaaaaaagttcaggacca

SEQ ID NO: 23302 - DNA, 20 bp, Artificial Sequence
  chemically synthesized
ttccatgccagggatgcagg

SEQ ID NO: 23303 - DNA, 20 bp, Artificial Sequence
  chemically synthesized
taagtgtgatacaccacata

SEQ ID NO: 23304 - DNA, 20 bp, Artificial Sequence
  chemically synthesized
caacaaaatccagcatacat

SEQ ID NO: 23305 - DNA, 20 bp, Artificial Sequence
  chemically synthesized
taaagaggaagtcaaactgt

SEQ ID NO: 23306 - DNA, 20 bp, Artificial Sequence
  chemically synthesized
gaactgataaaataattcag

SEQ ID NO: 23307 - DNA, 20 bp, Artificial Sequence
  chemically synthesized
catataaaacgtactctcaa

SEQ ID NO: 23308 - DNA, 20 bp, Artificial Sequence
  chemically synthesized
ataagggagacacttcaaga

SEQ ID NO: 23309 - DNA, 20 bp, Artificial Sequence
  chemically synthesized
cttcaagacatggctttggg

SEQ ID NO: 23310 - DNA, 20 bp, Artificial Sequence
  chemically synthesized
tcttatgccagttagaatca

SEQ ID NO: 23311 - DNA, 20 bp, Artificial Sequence
  chemically synthesized
agccactatggaaaacaata

SEQ ID NO: 23312 - DNA, 20 bp, Artificial Sequence
  chemically synthesized
ataaacagatactggtacca

SEQ ID NO: 23313 - DNA, 20 bp, Artificial Sequence
  chemically synthesized
gtaccacactgtttattgca

SEQ ID NO: 23314 - DNA, 20 bp, Artificial Sequence
  chemically synthesized
tgatgttcaatagcaaagta

SEQ ID NO: 23315 - DNA, 20 bp, Artificial Sequence
  chemically synthesized
tcgatctcatattggttgag

SEQ ID NO: 23316 - DNA, 20 bp, Artificial Sequence
  chemically synthesized
ccctgtactgtcttgctgtg

SEQ ID NO: 23317 - DNA, 20 bp, Artificial Sequence
  chemically synthesized
tgtcctccccatatttttac

SEQ ID NO: 23318 - DNA, 20 bp, Artificial Sequence
  chemically synthesized
catatttttacctcggtttt

SEQ ID NO: 23319 - DNA, 20 bp, Artificial Sequence
  chemically synthesized
ttatatagcacactttgtgc

SEQ ID NO: 23320 - DNA, 20 bp, Artificial Sequence
  chemically synthesized
cactttgtgctatagtttac

SEQ ID NO: 23321 - DNA, 20 bp, Artificial Sequence
  chemically synthesized
catatttgaggtataaacca

SEQ ID NO: 23322 - DNA, 20 bp, Artificial Sequence
  chemically synthesized
tatttttaaatctgcaaata

SEQ ID NO: 23323 - DNA, 20 bp, Artificial Sequence
  chemically synthesized
acttaatatcattaatgaat

SEQ ID NO: 23324 - DNA, 20 bp, Artificial Sequence
  chemically synthesized
ttcctggaacaacatggggg

SEQ ID NO: 23325 - DNA, 20 bp, Artificial Sequence
  chemically synthesized
gagaaatttcactattttgt

SEQ ID NO: 23326 - DNA, 20 bp, Artificial Sequence
  chemically synthesized
aggcagcaggtctggtagga

SEQ ID NO: 23327 - DNA, 20 bp, Artificial Sequence
  chemically synthesized
tgaaaaggaagtgagtagac

SEQ ID NO: 23328 - DNA, 20 bp, Artificial Sequence
  chemically synthesized
cttgaagctgtgcaaccaag

SEQ ID NO: 23329 - DNA, 20 bp, Artificial Sequence
  chemically synthesized
gcatagtttttacatagatc

SEQ ID NO: 23330 - DNA, 20 bp, Artificial Sequence
  chemically synthesized
tgtgtttcacatggtgtgat

SEQ ID NO: 23331 - DNA, 20 bp, Artificial Sequence
  chemically synthesized
agatgccattgacatggccc

SEQ ID NO: 23332 - DNA, 20 bp, Artificial Sequence
  chemically synthesized
aatcctaattactatgcatc

SEQ ID NO: 23333 - DNA, 20 bp, Artificial Sequence
  chemically synthesized
ttttcctattatttctcttt

SEQ ID NO: 23334 - DNA, 20 bp, Artificial Sequence
  chemically synthesized
gaaataagctaatacctaca

SEQ ID NO: 23335 - DNA, 20 bp, Artificial Sequence
  chemically synthesized
taaatgctaggcacagttct

SEQ ID NO: 23336 - DNA, 20 bp, Artificial Sequence
  chemically synthesized
attttcacaacattattaca

SEQ ID NO: 23337 - DNA, 20 bp, Artificial Sequence
  chemically synthesized
agcaacaaattgatggatct

SEQ ID NO: 23338 - DNA, 20 bp, Artificial Sequence
  chemically synthesized
aaattgatggatctttttgc

SEQ ID NO: 23339 - DNA, 20 bp, Artificial Sequence
  chemically synthesized
tgatggatctttttgctttt

SEQ ID NO: 23340 - DNA, 20 bp, Artificial Sequence
  chemically synthesized
ggatctttttgcttttgctt

SEQ ID NO: 23341 - DNA, 20 bp, Artificial Sequence
  chemically synthesized
actgaagcctcactagaacg

SEQ ID NO: 23342 - DNA, 20 bp, Artificial Sequence
  chemically synthesized
cgcctggattcaattgatcc

SEQ ID NO: 23343 - DNA, 20 bp, Artificial Sequence
  chemically synthesized
cacctcagccttgaaaagtg

SEQ ID NO: 23344 - DNA, 20 bp, Artificial Sequence
  chemically synthesized
aatttttagatataatttct

SEQ ID NO: 23345 - DNA, 20 bp, Artificial Sequence
  chemically synthesized
tcttccataaccactttgac

SEQ ID NO: 23346 - DNA, 20 bp, Artificial Sequence
  chemically synthesized
taaattatgtccagcaatac

SEQ ID NO: 23347 - DNA, 20 bp, Artificial Sequence
  chemically synthesized
cgttggcttaggcaaaaaca

SEQ ID NO: 23348 - DNA, 20 bp, Artificial Sequence
  chemically synthesized
ccttaacatgttaatttctc

SEQ ID NO: 23349 - DNA, 20 bp, Artificial Sequence
  chemically synthesized
tgagcaagtgtgtgcagaag

SEQ ID NO: 23350 - DNA, 20 bp, Artificial Sequence
  chemically synthesized
tcctctccctcaactggtaa

SEQ ID NO: 23351 - DNA, 20 bp, Artificial Sequence
  chemically synthesized
cttaaggctattaactcccc

SEQ ID NO: 23352 - DNA, 20 bp, Artificial Sequence
  chemically synthesized
atatatagttctctcacata

SEQ ID NO: 23353 - DNA, 20 bp, Artificial Sequence
  chemically synthesized
ctcaaacatctcatcattag

SEQ ID NO: 23354 - DNA, 20 bp, Artificial Sequence
  chemically synthesized
tctacaaatttgtcaattct

SEQ ID NO: 23355 - DNA, 20 bp, Artificial Sequence
  chemically synthesized
gaatccttactgaataataa

SEQ ID NO: 23356 - DNA, 20 bp, Artificial Sequence
  chemically synthesized
aactgtgactctctcatctg

SEQ ID NO: 23357 - DNA, 20 bp, Artificial Sequence
  chemically synthesized
tctctcatctgttatgtttt

SEQ ID NO: 23358 - DNA, 20 bp, Artificial Sequence
  chemically synthesized
atgggcaaaattctggcagc

SEQ ID NO: 23359 - DNA, 20 bp, Artificial Sequence
  chemically synthesized
gattcttctcctaagaaacc

SEQ ID NO: 23360 - DNA, 20 bp, Artificial Sequence
  chemically synthesized
tcttggatgtgaatacattt

SEQ ID NO: 23361 - DNA, 20 bp, Artificial Sequence
  chemically synthesized
tattcatgaagaaactgtta

SEQ ID NO: 23362 - DNA, 20 bp, Artificial Sequence
  chemically synthesized
gtttaaggggttctttttca

SEQ ID NO: 23363 - DNA, 20 bp, Artificial Sequence
  chemically synthesized
aggacatttcctttgaaaac

SEQ ID NO: 23364 - DNA, 20 bp, Artificial Sequence
  chemically synthesized
atcctggtcctaactctgcc

SEQ ID NO: 23365 - DNA, 20 bp, Artificial Sequence
  chemically synthesized
ttgctctatgaactggagga

SEQ ID NO: 23366 - DNA, 20 bp, Artificial Sequence
  chemically synthesized
gatagaaaataagtattaaa

SEQ ID NO: 23367 - DNA, 20 bp, Artificial Sequence
  chemically synthesized
cctgagatcaacacacatgc

SEQ ID NO: 23368 - DNA, 20 bp, Artificial Sequence
  chemically synthesized
ttataagatccataaaataa

SEQ ID NO: 23369 - DNA, 20 bp, Artificial Sequence
  chemically synthesized
cccaggtaacagtgctccat

SEQ ID NO: 23370 - DNA, 20 bp, Artificial Sequence
  chemically synthesized
acttgtgcagagatcttctg

SEQ ID NO: 23371 - DNA, 20 bp, Artificial Sequence
  chemically synthesized
cccagtgctaacaagtccct

SEQ ID NO: 23372 - DNA, 20 bp, Artificial Sequence
  chemically synthesized
cttttatttcaaggcatact

SEQ ID NO: 23373 - DNA, 20 bp, Artificial Sequence
  chemically synthesized
aatacttcacttctctgtaa

SEQ ID NO: 23374 - DNA, 20 bp, Artificial Sequence
  chemically synthesized
tgtaataaggtttctgtcct

SEQ ID NO: 23375 - DNA, 20 bp, Artificial Sequence
  chemically synthesized
ctaaactacagagaataaga

SEQ ID NO: 23376 - DNA, 20 bp, Artificial Sequence
  chemically synthesized
taggcaaaattgacttttaa

SEQ ID NO: 23377 - DNA, 20 bp, Artificial Sequence
  chemically synthesized
aacagttagtataaggtgaa

SEQ ID NO: 23378 - DNA, 20 bp, Artificial Sequence
  chemically synthesized
catatataatgcatttaatt

SEQ ID NO: 23379 - DNA, 20 bp, Artificial Sequence
  chemically synthesized
taattttgagattatgctgg

SEQ ID NO: 23380 - DNA, 20 bp, Artificial Sequence
  chemically synthesized
ctggttattatttcagatcc

SEQ ID NO: 23381 - DNA, 20 bp, Artificial Sequence
  chemically synthesized
caacacatgacataatttca

SEQ ID NO: 23382 - DNA, 20 bp, Artificial Sequence
  chemically synthesized
tgccatttacccagcaatca

SEQ ID NO: 23383 - DNA, 20 bp, Artificial Sequence
  chemically synthesized
atttacccagcaatcagttg

SEQ ID NO: 23384 - DNA, 20 bp, Artificial Sequence
  chemically synthesized
gagagtataaacccacaagg

SEQ ID NO: 23385 - DNA, 20 bp, Artificial Sequence
  chemically synthesized
gaggttatacctcactcgca

SEQ ID NO: 23386 - DNA, 20 bp, Artificial Sequence
  chemically synthesized
actcgcaaattgttttatca

SEQ ID NO: 23387 - DNA, 20 bp, Artificial Sequence
  chemically synthesized
ttactaacagaatgtagagt

SEQ ID NO: 23388 - DNA, 20 bp, Artificial Sequence
  chemically synthesized
atatacatcttcctaaaata

SEQ ID NO: 23389 - DNA, 20 bp, Artificial Sequence
  chemically synthesized
ttatttctatgttgtcataa

SEQ ID NO: 23390 - DNA, 20 bp, Artificial Sequence
  chemically synthesized
aaatgtagcctaaatatata

SEQ ID NO: 23391 - DNA, 20 bp, Artificial Sequence
  chemically synthesized
cctaaatatatattccgttt

SEQ ID NO: 23392 - DNA, 20 bp, Artificial Sequence
  chemically synthesized
cctccgagactcctttgaat

SEQ ID NO: 23393 - DNA, 20 bp, Artificial Sequence
  chemically synthesized
agttagagttggtagagtta

SEQ ID NO: 23394 - DNA, 20 bp, Artificial Sequence
  chemically synthesized
tggtagagttaccaggcttt

SEQ ID NO: 23395 - DNA, 20 bp, Artificial Sequence
  chemically synthesized
aactagtagcatgaaatctt

SEQ ID NO: 23396 - DNA, 20 bp, Artificial Sequence
  chemically synthesized
aggaattctgtgggaagcac

SEQ ID NO: 23397 - DNA, 20 bp, Artificial Sequence
  chemically synthesized
agcacataagatttcatgct

SEQ ID NO: 23398 - DNA, 20 bp, Artificial Sequence
  chemically synthesized
tgcctgtaagttctcttctc

SEQ ID NO: 23399 - DNA, 20 bp, Artificial Sequence
  chemically synthesized
gtctcggaggactgtaagaa

SEQ ID NO: 23400 - DNA, 20 bp, Artificial Sequence
  chemically synthesized
cctctctgtaacatccctgg

SEQ ID NO: 23401 - DNA, 20 bp, Artificial Sequence
  chemically synthesized
gaggagttactgctctttga

SEQ ID NO: 23402 - DNA, 20 bp, Artificial Sequence
  chemically synthesized
ttgcttgggaagtgaccaat

SEQ ID NO: 23403 - DNA, 20 bp, Artificial Sequence
  chemically synthesized
aggtgactgaggaatgtaga

SEQ ID NO: 23404 - DNA, 20 bp, Artificial Sequence
  chemically synthesized
aaaaagttaatatttacatt

SEQ ID NO: 23405 - DNA, 20 bp, Artificial Sequence
  chemically synthesized
tttattttaggaagatgtat

SEQ ID NO: 23406 - DNA, 20 bp, Artificial Sequence
  chemically synthesized
attctgttagtaattatatg

SEQ ID NO: 23407 - DNA, 20 bp, Artificial Sequence
  chemically synthesized
taattatatgaaatgcttaa

SEQ ID NO: 23408 - DNA, 20 bp, Artificial Sequence
  chemically synthesized
aagaatgtttcatattcaca

SEQ ID NO: 23409 - DNA, 20 bp, Artificial Sequence
  chemically synthesized
attcacaattagcttggaat

SEQ ID NO: 23410 - DNA, 20 bp, Artificial Sequence
  chemically synthesized
tggaattaatgttttaattc

SEQ ID NO: 23411 - DNA, 20 bp, Artificial Sequence
  chemically synthesized
agtaatttttttcttcaatg

SEQ ID NO: 23412 - DNA, 20 bp, Artificial Sequence
  chemically synthesized
aaggtagagaaccacaatgt

SEQ ID NO: 23413 - DNA, 20 bp, Artificial Sequence
  chemically synthesized
aaattataaaacaattcctt

SEQ ID NO: 23414 - DNA, 20 bp, Artificial Sequence
  chemically synthesized
ttccttgtgggtttatactc

SEQ ID NO: 23415 - DNA, 20 bp, Artificial Sequence
  chemically synthesized
aacattagcaaagaaaaagt

SEQ ID NO: 23416 - DNA, 20 bp, Artificial Sequence
  chemically synthesized
agatcttgaagaatcaagcc

SEQ ID NO: 23417 - DNA, 20 bp, Artificial Sequence
  chemically synthesized
gtaaatggcagtgatgactt

SEQ ID NO: 23418 - DNA, 20 bp, Artificial Sequence
  chemically synthesized
taacacatttatttttcatt

SEQ ID NO: 23419 - DNA, 20 bp, Artificial Sequence
  chemically synthesized
caaagcacggtcttattctc

SEQ ID NO: 23420 - DNA, 20 bp, Artificial Sequence
  chemically synthesized
aagtgaagtattttatgtgt

SEQ ID NO: 23421 - DNA, 20 bp, Artificial Sequence
  chemically synthesized
attttatgtgtacctgtttc

SEQ ID NO: 23422 - DNA, 20 bp, Artificial Sequence
  chemically synthesized
atctttatcctgaaatgagc

SEQ ID NO: 23423 - DNA, 20 bp, Artificial Sequence
  chemically synthesized
ctagtcacaaatttttccag

SEQ ID NO: 23424 - DNA, 20 bp, Artificial Sequence
  chemically synthesized
cccggagtatgccttgaaat

SEQ ID NO: 23425 - DNA, 20 bp, Artificial Sequence
  chemically synthesized
agtgggcaggagctcaagga

SEQ ID NO: 23426 - DNA, 20 bp, Artificial Sequence
  chemically synthesized
ctgcacctgagcagagcccc

SEQ ID NO: 23427 - DNA, 20 bp, Artificial Sequence
  chemically synthesized
ctggtacatagaaaatgctc

SEQ ID NO: 23428 - DNA, 20 bp, Artificial Sequence
  chemically synthesized
atggatttttttttgaaaaa

SEQ ID NO: 23429 - DNA, 20 bp, Artificial Sequence
  chemically synthesized
ttccctttcaaggggaaggg

SEQ ID NO: 23430 - DNA, 20 bp, Artificial Sequence
  chemically synthesized
tttgtggagaggtccccaca

SEQ ID NO: 23431 - DNA, 20 bp, Artificial Sequence
  chemically synthesized
ttaatattatcatagcctgg

SEQ ID NO: 23432 - DNA, 20 bp, Artificial Sequence
  chemically synthesized
ttatcatagcctggtatggt

SEQ ID NO: 23433 - DNA, 20 bp, Artificial Sequence
  chemically synthesized
ttcatatagatggataatta

SEQ ID NO: 23434 - DNA, 20 bp, Artificial Sequence
  chemically synthesized
tcctaataatacattgccac

SEQ ID NO: 23435 - DNA, 20 bp, Artificial Sequence
  chemically synthesized
cactatagtttctttaaatt

SEQ ID NO: 23436 - DNA, 20 bp, Artificial Sequence
  chemically synthesized
ctcctccagttcatagagca

SEQ ID NO: 23437 - DNA, 20 bp, Artificial Sequence
  chemically synthesized
agcaaatggcagagttagga

SEQ ID NO: 23438 - DNA, 20 bp, Artificial Sequence
  chemically synthesized
taagaattaaatattaaaac

SEQ ID NO: 23439 - DNA, 20 bp, Artificial Sequence
  chemically synthesized
cagtacttgcagtcaaaggt

SEQ ID NO: 23440 - DNA, 20 bp, Artificial Sequence
  chemically synthesized
aagaaccccttaaactgaat

SEQ ID NO: 23441 - DNA, 20 bp, Artificial Sequence
  chemically synthesized
tatactctccagttatctta

SEQ ID NO: 23442 - DNA, 20 bp, Artificial Sequence
  chemically synthesized
tattcacatccaagaaaaca

SEQ ID NO: 23443 - DNA, 20 bp, Artificial Sequence
  chemically synthesized
taacagatgagagagtcaca

SEQ ID NO: 23444 - DNA, 20 bp, Artificial Sequence
  chemically synthesized
ttaatattaaccttgaaatt

SEQ ID NO: 23445 - DNA, 20 bp, Artificial Sequence
  chemically synthesized
taatccattttattattcag

SEQ ID NO: 23446 - DNA, 20 bp, Artificial Sequence
  chemically synthesized
agatagagttaagaatacag

SEQ ID NO: 23447 - DNA, 20 bp, Artificial Sequence
  chemically synthesized
cagtgtaccgtggaatgggg

SEQ ID NO: 23448 - DNA, 20 bp, Artificial Sequence
  chemically synthesized
ggtttctaacctagttacct

SEQ ID NO: 23449 - DNA, 20 bp, Artificial Sequence
  chemically synthesized
gaaaaacctctctaatgatg

SEQ ID NO: 23450 - DNA, 20 bp, Artificial Sequence
  chemically synthesized
gatgggagagacctgcaggg

SEQ ID NO: 23451 - DNA, 20 bp, Artificial Sequence
  chemically synthesized
agggggagttaatagcctta

SEQ ID NO: 23452 - DNA, 20 bp, Artificial Sequence
  chemically synthesized
gggaagtactaagtagtcag

SEQ ID NO: 23453 - DNA, 20 bp, Artificial Sequence
  chemically synthesized
ctgtggtgtgacccaggatg

SEQ ID NO: 23454 - DNA, 20 bp, Artificial Sequence
  chemically synthesized
tttgcccaaatgtgggggaa

SEQ ID NO: 23455 - DNA, 20 bp, Artificial Sequence
  chemically synthesized
aggatatttaggatcattaa

SEQ ID NO: 23456 - DNA, 20 bp, Artificial Sequence
  chemically synthesized
gagcgatgtagtccctaaat

SEQ ID NO: 23457 - DNA, 20 bp, Artificial Sequence
  chemically synthesized
cttaaaatggactagaaaca

SEQ ID NO: 23458 - DNA, 20 bp, Artificial Sequence
  chemically synthesized
cgtattgctggacataattt

SEQ ID NO: 23459 - DNA, 20 bp, Artificial Sequence
  chemically synthesized
ctttgatataagtgaactca

SEQ ID NO: 23460 - DNA, 20 bp, Artificial Sequence
  chemically synthesized
gaagaggacttcacacttcc

SEQ ID NO: 23461 - DNA, 20 bp, Artificial Sequence
  chemically synthesized
gccgtaaagaacaactgctc

SEQ ID NO: 23462 - DNA, 20 bp, Artificial Sequence
  chemically synthesized
agtttaatactaggctactc

SEQ ID NO: 23463 - DNA, 20 bp, Artificial Sequence
  chemically synthesized
cggctgttttttgttaacac

SEQ ID NO: 23464 - DNA, 20 bp, Artificial Sequence
  chemically synthesized
gttaacacagaagttttcca

SEQ ID NO: 23465 - DNA, 20 bp, Artificial Sequence
  chemically synthesized
ccatccttcccgagacctaa

SEQ ID NO: 23466 - DNA, 20 bp, Artificial Sequence
  chemically synthesized
acgatgtttatctttcgtga

SEQ ID NO: 23467 - DNA, 20 bp, Artificial Sequence
  chemically synthesized
agatccatcaaggcccagca

SEQ ID NO: 23468 - DNA, 20 bp, Artificial Sequence
  chemically synthesized
tttcaaggctgaggtgggag

SEQ ID NO: 23469 - DNA, 20 bp, Artificial Sequence
  chemically synthesized
gcctggggaacatagggaga

SEQ ID NO: 23470 - DNA, 20 bp, Artificial Sequence
  chemically synthesized
attgaatccaggcgttctag

SEQ ID NO: 23471 - DNA, 20 bp, Artificial Sequence
  chemically synthesized
ttctagtgaggcttcagtga

SEQ ID NO: 23472 - DNA, 20 bp, Artificial Sequence
  chemically synthesized
gccggggtgacagagtgaga

SEQ ID NO: 23473 - DNA, 20 bp, Artificial Sequence
  chemically synthesized
tctacagctaaagtcagact

SEQ ID NO: 23474 - DNA, 20 bp, Artificial Sequence
  chemically synthesized
ccaccatcacctgggtaatg

SEQ ID NO: 23475 - DNA, 20 bp, Artificial Sequence
  chemically synthesized
attacatagcatctctgtgc

SEQ ID NO: 23476 - DNA, 20 bp, Artificial Sequence
  chemically synthesized
ttaataaacactctgtaggt

SEQ ID NO: 23477 - DNA, 20 bp, Artificial Sequence
  chemically synthesized
gttagctcatgtattgtcat

SEQ ID NO: 23478 - DNA, 20 bp, Artificial Sequence
  chemically synthesized
aatcacgggatgcatagtaa

SEQ ID NO: 23479 - DNA, 20 bp, Artificial Sequence
  chemically synthesized
acacacgatctatgtaaaaa

SEQ ID NO: 23480 - DNA, 20 bp, Artificial Sequence
  chemically synthesized
gtaaaaactatgcttggttg

SEQ ID NO: 23481 - DNA, 20 bp, Artificial Sequence
  chemically synthesized
cctcccactgccaagactgc

SEQ ID NO: 23482 - DNA, 20 bp, Artificial Sequence
  chemically synthesized
cactgccaagactgcagctg

SEQ ID NO: 23483 - DNA, 20 bp, Artificial Sequence
  chemically synthesized
tctaagtgtataatgacttc

SEQ ID NO: 23484 - DNA, 20 bp, Artificial Sequence
  chemically synthesized
gacttcctctgcttctgcaa

SEQ ID NO: 23485 - DNA, 20 bp, Artificial Sequence
  chemically synthesized
ctgtgttttggaacaggagg

SEQ ID NO: 23486 - DNA, 20 bp, Artificial Sequence
  chemically synthesized
tattctatacttctttgaaa

SEQ ID NO: 23487 - DNA, 20 bp, Artificial Sequence
  chemically synthesized
agtgttgccagatgacgact

SEQ ID NO: 23488 - DNA, 20 bp, Artificial Sequence
  chemically synthesized
agatcaataaaatacaaagt

SEQ ID NO: 23489 - DNA, 20 bp, Artificial Sequence
  chemically synthesized
tcagaataaaaccatttatt

SEQ ID NO: 23490 - DNA, 20 bp, Artificial Sequence
  chemically synthesized
tatatgtgtatgtaaatctc

SEQ ID NO: 23491 - DNA, 20 bp, Artificial Sequence
  chemically synthesized
gctcttgcattcacttatat

SEQ ID NO: 23492 - DNA, 20 bp, Artificial Sequence
  chemically synthesized
atattctagcttgttaagag

SEQ ID NO: 23493 - DNA, 20 bp, Artificial Sequence
  chemically synthesized
agagagaagtttggggcaaa

SEQ ID NO: 23494 - DNA, 20 bp, Artificial Sequence
  chemically synthesized
cagggaaatgtctggaggga

SEQ ID NO: 23495 - DNA, 20 bp, Artificial Sequence
  chemically synthesized
ctttcttttattgatatatg

SEQ ID NO: 23496 - DNA, 20 bp, Artificial Sequence
  chemically synthesized
tattcatcacctcaagtatt

SEQ ID NO: 23497 - DNA, 20 bp, Artificial Sequence
  chemically synthesized
ctattttgaaatatacaata

SEQ ID NO: 23498 - DNA, 20 bp, Artificial Sequence
  chemically synthesized
catattccttctatctaact

SEQ ID NO: 23499 - DNA, 20 bp, Artificial Sequence
  chemically synthesized
cgtacacacctttctctacc

SEQ ID NO: 23500 - DNA, 20 bp, Artificial Sequence
  chemically synthesized
gcaaaatttgtctttctatg

SEQ ID NO: 23501 - DNA, 20 bp, Artificial Sequence
  chemically synthesized
gtctttctatgcctggctta

SEQ ID NO: 23502 - DNA, 20 bp, Artificial Sequence
  chemically synthesized
tttcgtttaacataatgact

SEQ ID NO: 23503 - DNA, 20 bp, Artificial Sequence
  chemically synthesized
catccatgttgctgcaaatg

SEQ ID NO: 23504 - DNA, 20 bp, Artificial Sequence
  chemically synthesized
catccattgatggacactta

SEQ ID NO: 23505 - DNA, 20 bp, Artificial Sequence
  chemically synthesized
ataaacagtgtggtaccagt

SEQ ID NO: 23506 - DNA, 20 bp, Artificial Sequence
  chemically synthesized
ctttggataaatacccagta

SEQ ID NO: 23507 - DNA, 20 bp, Artificial Sequence
  chemically synthesized
gatcttatgatagttcaatt

SEQ ID NO: 23508 - DNA, 20 bp, Artificial Sequence
  chemically synthesized
agctttttggtaaatctaca

SEQ ID NO: 23509 - DNA, 20 bp, Artificial Sequence
  chemically synthesized
catagtggctatactaattt

SEQ ID NO: 23510 - DNA, 20 bp, Artificial Sequence
  chemically synthesized
ttattaatttatttaaatca

SEQ ID NO: 23511 - DNA, 20 bp, Artificial Sequence
  chemically synthesized
ggcataagatgatatctcat

SEQ ID NO: 23512 - DNA, 20 bp, Artificial Sequence
  chemically synthesized
aagatgatatctcattgtgg

SEQ ID NO: 23513 - DNA, 20 bp, Artificial Sequence
  chemically synthesized
ggttttgatttgcatttctc

SEQ ID NO: 23514 - DNA, 20 bp, Artificial Sequence
  chemically synthesized
tatcctttgccaatttttta

SEQ ID NO: 23515 - DNA, 20 bp, Artificial Sequence
  chemically synthesized
gccaattttttaatgagatt

SEQ ID NO: 23516 - DNA, 20 bp, Artificial Sequence
  chemically synthesized
tatttgtttttccactgttg

SEQ ID NO: 23517 - DNA, 20 bp, Artificial Sequence
  chemically synthesized
tttttccactgttgagttgt

SEQ ID NO: 23518 - DNA, 20 bp, Artificial Sequence
  chemically synthesized
tttgagtttcttatatattc

SEQ ID NO: 23519 - DNA, 20 bp, Artificial Sequence
  chemically synthesized
gcaaatattttctcgcattc

SEQ ID NO: 23520 - DNA, 20 bp, Artificial Sequence
  chemically synthesized
aacagcttgtctcttcactg

SEQ ID NO: 23521 - DNA, 20 bp, Artificial Sequence
  chemically synthesized
gcttgtctcttcactgtgtt

SEQ ID NO: 23522 - DNA, 20 bp, Artificial Sequence
  chemically synthesized
cctttactgtgcagatgtat

SEQ ID NO: 23523 - DNA, 20 bp, Artificial Sequence
  chemically synthesized
atatagtcccatttgtctat

SEQ ID NO: 23524 - DNA, 20 bp, Artificial Sequence
  chemically synthesized
tctatttttgcttttgttgc

SEQ ID NO: 23525 - DNA, 20 bp, Artificial Sequence
  chemically synthesized
catgtcttgaagtgtctccc

SEQ ID NO: 23526 - DNA, 20 bp, Artificial Sequence
  chemically synthesized
tctcccttatgttttctttt

SEQ ID NO: 23527 - DNA, 20 bp, Artificial Sequence
  chemically synthesized
atgttttcttttagtagttt

SEQ ID NO: 23528 - DNA, 20 bp, Artificial Sequence
  chemically synthesized
cttttagtagttttatagtt

SEQ ID NO: 23529 - DNA, 20 bp, Artificial Sequence
  chemically synthesized
gtctttaatccatcttgaga

SEQ ID NO: 23530 - DNA, 20 bp, Artificial Sequence
  chemically synthesized
tattgtacaaggggttgagt

SEQ ID NO: 23531 - DNA, 20 bp, Artificial Sequence
  chemically synthesized
tacaaggggttgagttcttg

SEQ ID NO: 23532 - DNA, 20 bp, Artificial Sequence
  chemically synthesized
ctgttggtgtatagaagagt

SEQ ID NO: 23533 - DNA, 20 bp, Artificial Sequence
  chemically synthesized
tgaattattttatcagttct

SEQ ID NO: 23534 - DNA, 20 bp, Artificial Sequence
  chemically synthesized
gagctttctggaggagtctt

SEQ ID NO: 23535 - DNA, 20 bp, Artificial Sequence
  chemically synthesized
tcatatcatcagcaaacagt

SEQ ID NO: 23536 - DNA, 20 bp, Artificial Sequence
  chemically synthesized
tgacagtttgacttcctctt

SEQ ID NO: 23537 - DNA, 20 bp, Artificial Sequence
  chemically synthesized
gatttgaatgccctttattt

SEQ ID NO: 23538 - DNA, 20 bp, Artificial Sequence
  chemically synthesized
gccctttatttctttgtttt

SEQ ID NO: 23539 - DNA, 20 bp, Artificial Sequence
  chemically synthesized
cttgttccagttctcagagg

SEQ ID NO: 23540 - DNA, 20 bp, Artificial Sequence
  chemically synthesized
cattcaatattatgttggct

SEQ ID NO: 23541 - DNA, 20 bp, Artificial Sequence
  chemically synthesized
ttggctgtgggtttgtcaca

SEQ ID NO: 23542 - DNA, 20 bp, Artificial Sequence
  chemically synthesized
actgaggtatgtctcttgta

SEQ ID NO: 23543 - DNA, 20 bp, Artificial Sequence
  chemically synthesized
cattttaatcataaatgtat

SEQ ID NO: 23544 - DNA, 20 bp, Artificial Sequence
  chemically synthesized
aatgtatgctggattttgtt

SEQ ID NO: 23545 - DNA, 20 bp, Artificial Sequence
  chemically synthesized
tattgagatgatcatgtaat

SEQ ID NO: 23546 - DNA, 20 bp, Artificial Sequence
  chemically synthesized
catgtaatttttgtttttaa

SEQ ID NO: 23547 - DNA, 20 bp, Artificial Sequence
  chemically synthesized
ccctgcatccctggcatgga

SEQ ID NO: 23548 - DNA, 20 bp, Artificial Sequence
  chemically synthesized
catggaacctgcttgatcat

SEQ ID NO: 23549 - DNA, 20 bp, Artificial Sequence
  chemically synthesized
ttggttatctagtattttgt

SEQ ID NO: 23550 - DNA, 20 bp, Artificial Sequence
  chemically synthesized
gttcatcaaggctatcagtc

SEQ ID NO: 23551 - DNA, 20 bp, Artificial Sequence
  chemically synthesized
cttttttggttatgtccttc

SEQ ID NO: 23552 - DNA, 20 bp, Artificial Sequence
  chemically synthesized
ttccctggttttggtgtgat

SEQ ID NO: 23553 - DNA, 20 bp, Artificial Sequence
  chemically synthesized
tttaattaccaattaaatct

SEQ ID NO: 23554 - DNA, 20 bp, Artificial Sequence
  chemically synthesized
agctccagtgttaggtgcat

SEQ ID NO: 23555 - DNA, 20 bp, Artificial Sequence
  chemically synthesized
agtgttaggtgcatatatgt

SEQ ID NO: 23556 - DNA, 20 bp, Artificial Sequence
  chemically synthesized
tctttgtctcttttaactgc

SEQ ID NO: 23557 - DNA, 20 bp, Artificial Sequence
  chemically synthesized
tcttttaactgctgttgctt

SEQ ID NO: 23558 - DNA, 20 bp, Artificial Sequence
  chemically synthesized
ttaactgctgttgctttaaa

SEQ ID NO: 23559 - DNA, 20 bp, Artificial Sequence
  chemically synthesized
tgagctcccagggcctttct

SEQ ID NO: 23560 - DNA, 20 bp, Artificial Sequence
  chemically synthesized
acttctcccacaaacagacc

SEQ ID NO: 23561 - DNA, 20 bp, Artificial Sequence
  chemically synthesized
tcagtttctccagtgggagt

SEQ ID NO: 23562 - DNA, 20 bp, Artificial Sequence
  chemically synthesized
cagagggtctgtgggtcctc

SEQ ID NO: 23563 - DNA, 20 bp, Artificial Sequence
  chemically synthesized
ctgtgggtcctctcaggatt

SEQ ID NO: 23564 - DNA, 20 bp, Artificial Sequence
  chemically synthesized
ccgccaagatcctgagaagt

SEQ ID NO: 23565 - DNA, 20 bp, Artificial Sequence
  chemically synthesized
gttggggattatatttcaac

SEQ ID NO: 23566 - DNA, 20 bp, Artificial Sequence
  chemically synthesized
catccaaaccatatcagcag

SEQ ID NO: 23567 - DNA, 20 bp, Artificial Sequence
  chemically synthesized
ctgttctaatgtcagtatca

SEQ ID NO: 23568 - DNA, 20 bp, Artificial Sequence
  chemically synthesized
ttttttaatttcatacaaat

SEQ ID NO: 23569 - DNA, 20 bp, Artificial Sequence
  chemically synthesized
taatttcatacaaattttag

SEQ ID NO: 23570 - DNA, 20 bp, Artificial Sequence
  chemically synthesized
gatagcggtcatatagaatc

SEQ ID NO: 23571 - DNA, 20 bp, Artificial Sequence
  chemically synthesized
gcggtcatatagaatctgta

SEQ ID NO: 23572 - DNA, 20 bp, Artificial Sequence
  chemically synthesized
tgaacataggatatctctcc

SEQ ID NO: 23573 - DNA, 20 bp, Artificial Sequence
  chemically synthesized
gtccttttcaattcttttat

SEQ ID NO: 23574 - DNA, 20 bp, Artificial Sequence
  chemically synthesized
caattcttttatcagtgttt

SEQ ID NO: 23575 - DNA, 20 bp, Artificial Sequence
  chemically synthesized
tgttttgtagttttccgaat

SEQ ID NO: 23576 - DNA, 20 bp, Artificial Sequence
  chemically synthesized
ttattttttagctattgtaa

SEQ ID NO: 23577 - DNA, 20 bp, Artificial Sequence
  chemically synthesized
ccttcttaatttccttctca

SEQ ID NO: 23578 - DNA, 20 bp, Artificial Sequence
  chemically synthesized
ttattattggtgtgtagaaa

SEQ ID NO: 23579 - DNA, 20 bp, Artificial Sequence
  chemically synthesized
tattggtgtgtagaaacatt

SEQ ID NO: 23580 - DNA, 20 bp, Artificial Sequence
  chemically synthesized
gaaacattgcttgtttcata

SEQ ID NO: 23581 - DNA, 20 bp, Artificial Sequence
  chemically synthesized
aatttatttttcagcgctaa

SEQ ID NO: 23582 - DNA, 20 bp, Artificial Sequence
  chemically synthesized
taagagtgctttggtggagt

SEQ ID NO: 23583 - DNA, 20 bp, Artificial Sequence
  chemically synthesized
tcatgtcatctggaaagatg

SEQ ID NO: 23584 - DNA, 20 bp, Artificial Sequence
  chemically synthesized
gatggaagtgggcatcctta

SEQ ID NO: 23585 - DNA, 20 bp, Artificial Sequence
  chemically synthesized
tttgtttcagttcttagagg

SEQ ID NO: 23586 - DNA, 20 bp, Artificial Sequence
  chemically synthesized
cagttcttagaggaaaggct

SEQ ID NO: 23587 - DNA, 20 bp, Artificial Sequence
  chemically synthesized
aattcagtatgatgttagct

SEQ ID NO: 23588 - DNA, 20 bp, Artificial Sequence
  chemically synthesized
tatattgagatatgttcctt

SEQ ID NO: 23589 - DNA, 20 bp, Artificial Sequence
  chemically synthesized
tccttctatgattggctgca

SEQ ID NO: 23590 - DNA, 20 bp, Artificial Sequence
  chemically synthesized
tgtatctattgagatgatca

SEQ ID NO: 23591 - DNA, 20 bp, Artificial Sequence
  chemically synthesized
ttgatgtgatgtatcacatt

SEQ ID NO: 23592 - DNA, 20 bp, Artificial Sequence
  chemically synthesized
tattatcttttggatgtact

SEQ ID NO: 23593 - DNA, 20 bp, Artificial Sequence
  chemically synthesized
cttttggatgtactgttgga

SEQ ID NO: 23594 - DNA, 20 bp, Artificial Sequence
  chemically synthesized
tcagtttgctagtattttgt

SEQ ID NO: 23595 - DNA, 20 bp, Artificial Sequence
  chemically synthesized
ttccatcagggatattgacc

SEQ ID NO: 23596 - DNA, 20 bp, Artificial Sequence
  chemically synthesized
atgagttagggagaattcct

SEQ ID NO: 23597 - DNA, 20 bp, Artificial Sequence
  chemically synthesized
aaaagaatttaaggagactt

SEQ ID NO: 23598 - DNA, 20 bp, Artificial Sequence
  chemically synthesized
gagacttgttagttttcttt

SEQ ID NO: 23599 - DNA, 20 bp, Artificial Sequence
  chemically synthesized
ttttttgggagactttttac

SEQ ID NO: 23600 - DNA, 20 bp, Artificial Sequence
  chemically synthesized
attattcattactggtctgt

SEQ ID NO: 23601 - DNA, 20 bp, Artificial Sequence
  chemically synthesized
ccagaaatttattaatttcc

SEQ ID NO: 23602 - DNA, 20 bp, Artificial Sequence
  chemically synthesized
tattaatttcctctagattt

SEQ ID NO: 23603 - DNA, 20 bp, Artificial Sequence
  chemically synthesized
taatatattttcttttttat

SEQ ID NO: 23604 - DNA, 20 bp, Artificial Sequence
  chemically synthesized
tcattttgctaatcccttgt

SEQ ID NO: 23605 - DNA, 20 bp, Artificial Sequence
  chemically synthesized
ttcattttttctttccttct

SEQ ID NO: 23606 - DNA, 20 bp, Artificial Sequence
  chemically synthesized
tttctttccttctgctagtt

SEQ ID NO: 23607 - DNA, 20 bp, Artificial Sequence
  chemically synthesized
ctgctagttttgggttttgt

SEQ ID NO: 23608 - DNA, 20 bp, Artificial Sequence
  chemically synthesized
ttgggttttgttcttgcttt

SEQ ID NO: 23609 - DNA, 20 bp, Artificial Sequence
  chemically synthesized
cttttctagcttgttgaggt

SEQ ID NO: 23610 - DNA, 20 bp, Artificial Sequence
  chemically synthesized
ctagcttgttgaggtacatg

SEQ ID NO: 23611 - DNA, 20 bp, Artificial Sequence
  chemically synthesized
attatatatttgaaatcttt

SEQ ID NO: 23612 - DNA, 20 bp, Artificial Sequence
  chemically synthesized
tctttctatgtttttaattt

SEQ ID NO: 23613 - DNA, 20 bp, Artificial Sequence
  chemically synthesized
tttaatttaagtgtttattg

SEQ ID NO: 23614 - DNA, 20 bp, Artificial Sequence
  chemically synthesized
ttgataagcttctctcttag

SEQ ID NO: 23615 - DNA, 20 bp, Artificial Sequence
  chemically synthesized
gcactgcttttgctgtatcc

SEQ ID NO: 23616 - DNA, 20 bp, Artificial Sequence
  chemically synthesized
tatgttgtatttcaattttc

SEQ ID NO: 23617 - DNA, 20 bp, Artificial Sequence
  chemically synthesized
tttcatttgtttcaaaaaat

SEQ ID NO: 23618 - DNA, 20 bp, Artificial Sequence
  chemically synthesized
ataacgttcattcaggagca

SEQ ID NO: 23619 - DNA, 20 bp, Artificial Sequence
  chemically synthesized
tttaatttccatgtatttgt

SEQ ID NO: 23620 - DNA, 20 bp, Artificial Sequence
  chemically synthesized
ccatgtatttgtataggttt

SEQ ID NO: 23621 - DNA, 20 bp, Artificial Sequence
  chemically synthesized
ggttttaaagtttttcttgt

SEQ ID NO: 23622 - DNA, 20 bp, Artificial Sequence
  chemically synthesized
agtttttcttgttattgatt

SEQ ID NO: 23623 - DNA, 20 bp, Artificial Sequence
  chemically synthesized
tattccattgtggtctgaga

SEQ ID NO: 23624 - DNA, 20 bp, Artificial Sequence
  chemically synthesized
gtggtctgagaagatgctta

SEQ ID NO: 23625 - DNA, 20 bp, Artificial Sequence
  chemically synthesized
tagatccatttggtctaaag

SEQ ID NO: 23626 - DNA, 20 bp, Artificial Sequence
  chemically synthesized
tctaaagtcaagtttaaatc

SEQ ID NO: 23627 - DNA, 20 bp, Artificial Sequence
  chemically synthesized
tctagatgatctatctgatg

SEQ ID NO: 23628 - DNA, 20 bp, Artificial Sequence
  chemically synthesized
aaatccccaactattattgt

SEQ ID NO: 23629 - DNA, 20 bp, Artificial Sequence
  chemically synthesized
caccctttatatctaataac

SEQ ID NO: 23630 - DNA, 20 bp, Artificial Sequence
  chemically synthesized
gatgctctggtgttgagtgt

SEQ ID NO: 23631 - DNA, 20 bp, Artificial Sequence
  chemically synthesized
atgtaatgacttttgtctct

SEQ ID NO: 23632 - DNA, 20 bp, Artificial Sequence
  chemically synthesized
tataactacttttgctcatt

SEQ ID NO: 23633 - DNA, 20 bp, Artificial Sequence
  chemically synthesized
tatttatctttacaagtgag

SEQ ID NO: 23634 - DNA, 20 bp, Artificial Sequence
  chemically synthesized
agtgagataagtttcttata

SEQ ID NO: 23635 - DNA, 20 bp, Artificial Sequence
  chemically synthesized
agcttacaactgggtcatat

SEQ ID NO: 23636 - DNA, 20 bp, Artificial Sequence
  chemically synthesized
caaggctattattgacatgt

SEQ ID NO: 23637 - DNA, 20 bp, Artificial Sequence
  chemically synthesized
cttattcctgccattttgtt

SEQ ID NO: 23638 - DNA, 20 bp, Artificial Sequence
  chemically synthesized
cattttgttaattgattcct

SEQ ID NO: 23639 - DNA, 20 bp, Artificial Sequence
  chemically synthesized
tgttaattgattcctggttg

SEQ ID NO: 23640 - DNA, 20 bp, Artificial Sequence
  chemically synthesized
cctggttgttttgttttttt

SEQ ID NO: 23641 - DNA, 20 bp, Artificial Sequence
  chemically synthesized
gttgttttgtttttttttta

SEQ ID NO: 23642 - DNA, 20 bp, Artificial Sequence
  chemically synthesized
ttttgttttttttttagttt

SEQ ID NO: 23643 - DNA, 20 bp, Artificial Sequence
  chemically synthesized
ttttttttagtttgtttgtt

SEQ ID NO: 23644 - DNA, 20 bp, Artificial Sequence
  chemically synthesized
ctttctttctttcttattat

SEQ ID NO: 23645 - DNA, 20 bp, Artificial Sequence
  chemically synthesized
tctttcttattatttatgat

SEQ ID NO: 23646 - DNA, 20 bp, Artificial Sequence
  chemically synthesized
tattatttatgattgtggtt

SEQ ID NO: 23647 - DNA, 20 bp, Artificial Sequence
  chemically synthesized
ttggtgattttctgtagtgg

SEQ ID NO: 23648 - DNA, 20 bp, Artificial Sequence
  chemically synthesized
gagttctttctcttctttat

SEQ ID NO: 23649 - DNA, 20 bp, Artificial Sequence
  chemically synthesized
ttcaaatttttcttgcccag

SEQ ID NO: 23650 - DNA, 20 bp, Artificial Sequence
  chemically synthesized
tcccatcttctcctggcctg

SEQ ID NO: 23651 - DNA, 20 bp, Artificial Sequence
  chemically synthesized
cccttataagtgactagaca

SEQ ID NO: 23652 - DNA, 20 bp, Artificial Sequence
  chemically synthesized
aagtgactagacattttgct

SEQ ID NO: 23653 - DNA, 20 bp, Artificial Sequence
  chemically synthesized
ctgttttagagttcttactc

SEQ ID NO: 23654 - DNA, 20 bp, Artificial Sequence
  chemically synthesized
gttcttactctttggctttt

SEQ ID NO: 23655 - DNA, 20 bp, Artificial Sequence
  chemically synthesized
gactataatgtgctgtggag

SEQ ID NO: 23656 - DNA, 20 bp, Artificial Sequence
  chemically synthesized
gcattatattatttgggaat

SEQ ID NO: 23657 - DNA, 20 bp, Artificial Sequence
  chemically synthesized
tacatttcttgctagacttg

SEQ ID NO: 23658 - DNA, 20 bp, Artificial Sequence
  chemically synthesized
ttcagctattgtgttgttac

SEQ ID NO: 23659 - DNA, 20 bp, Artificial Sequence
  chemically synthesized
ttcaagttctgaaatttttc

SEQ ID NO: 23660 - DNA, 20 bp, Artificial Sequence
  chemically synthesized
tgcttgatctgatctattgt

SEQ ID NO: 23661 - DNA, 20 bp, Artificial Sequence
  chemically synthesized
aaactcttcagttacagaat

SEQ ID NO: 23662 - DNA, 20 bp, Artificial Sequence
  chemically synthesized
aatttctcattcatatcctg

SEQ ID NO: 23663 - DNA, 20 bp, Artificial Sequence
  chemically synthesized
attcatatcctgaattgttt

SEQ ID NO: 23664 - DNA, 20 bp, Artificial Sequence
  chemically synthesized
ttgtttttctgatttctttt

SEQ ID NO: 23665 - DNA, 20 bp, Artificial Sequence
  chemically synthesized
ctgagttctcttgtgtctca

SEQ ID NO: 23666 - DNA, 20 bp, Artificial Sequence
  chemically synthesized
agcttccttaatatcaacat

SEQ ID NO: 23667 - DNA, 20 bp, Artificial Sequence
  chemically synthesized
tataaatgtcttttttttcc

SEQ ID NO: 23668 - DNA, 20 bp, Artificial Sequence
  chemically synthesized
tgtcatatttcttcaccttt

SEQ ID NO: 23669 - DNA, 20 bp, Artificial Sequence
  chemically synthesized
tgatatctctgcatctggtg

SEQ ID NO: 23670 - DNA, 20 bp, Artificial Sequence
  chemically synthesized
tctgcatctggtgtaatgat

SEQ ID NO: 23671 - DNA, 20 bp, Artificial Sequence
  chemically synthesized
ctggtgtaatgattgctgct

SEQ ID NO: 23672 - DNA, 20 bp, Artificial Sequence
  chemically synthesized
tgctgcttccagttttgtaa

SEQ ID NO: 23673 - DNA, 20 bp, Artificial Sequence
  chemically synthesized
tttctgaagatgtatcttgg

SEQ ID NO: 23674 - DNA, 20 bp, Artificial Sequence
  chemically synthesized
ggtgttgattgagtagggca

SEQ ID NO: 23675 - DNA, 20 bp, Artificial Sequence
  chemically synthesized
gattgagtagggcactttga

SEQ ID NO: 23676 - DNA, 20 bp, Artificial Sequence
  chemically synthesized
gccaacagtatcatcagtgt

SEQ ID NO: 23677 - DNA, 20 bp, Artificial Sequence
  chemically synthesized
tcagtgtctgtgattttttc

SEQ ID NO: 23678 - DNA, 20 bp, Artificial Sequence
  chemically synthesized
gatggtaatgagtctagttg

SEQ ID NO: 23679 - DNA, 20 bp, Artificial Sequence
  chemically synthesized
ggttgattctttggccttca

SEQ ID NO: 23680 - DNA, 20 bp, Artificial Sequence
  chemically synthesized
gattctttggccttcaggca

SEQ ID NO: 23681 - DNA, 20 bp, Artificial Sequence
  chemically synthesized
ctgggctggtgtgtgggtcc

SEQ ID NO: 23682 - DNA, 20 bp, Artificial Sequence
  chemically synthesized
gtgccagttgtgatggcagt

SEQ ID NO: 23683 - DNA, 20 bp, Artificial Sequence
  chemically synthesized
cagattgggtaggcccatca

SEQ ID NO: 23684 - DNA, 20 bp, Artificial Sequence
  chemically synthesized
catcatcaggcttctgggag

SEQ ID NO: 23685 - DNA, 20 bp, Artificial Sequence
  chemically synthesized
tgtctctgggttcccagaca

SEQ ID NO: 23686 - DNA, 20 bp, Artificial Sequence
  chemically synthesized
tcttgaaggggtgcggggtg

SEQ ID NO: 23687 - DNA, 20 bp, Artificial Sequence
  chemically synthesized
taaatgggttgctggtgggc

SEQ ID NO: 23688 - DNA, 20 bp, Artificial Sequence
  chemically synthesized
agtggggtagcattttctta

SEQ ID NO: 23689 - DNA, 20 bp, Artificial Sequence
  chemically synthesized
ctgtgggtgggggatgtcag

SEQ ID NO: 23690 - DNA, 20 bp, Artificial Sequence
  chemically synthesized
ttctctggagcaatgccttt

SEQ ID NO: 23691 - DNA, 20 bp, Artificial Sequence
  chemically synthesized
gtcaagggactctcctgtgg

SEQ ID NO: 23692 - DNA, 20 bp, Artificial Sequence
  chemically synthesized
tcacagaggatccctactgg

SEQ ID NO: 23693 - DNA, 20 bp, Artificial Sequence
  chemically synthesized
gatccctactgggtaggctt

SEQ ID NO: 23694 - DNA, 20 bp, Artificial Sequence
  chemically synthesized
tccctccccttcattgcctt

SEQ ID NO: 23695 - DNA, 20 bp, Artificial Sequence
  chemically synthesized
attccagaattctctcttat

SEQ ID NO: 23696 - DNA, 20 bp, Artificial Sequence
  chemically synthesized
gccccttcccttgaaatttt

SEQ ID NO: 23697 - DNA, 20 bp, Artificial Sequence
  chemically synthesized
cccttgaaattttttaagct

SEQ ID NO: 23698 - DNA, 20 bp, Artificial Sequence
  chemically synthesized
agaagtagcgaattagttaa

SEQ ID NO: 23699 - DNA, 20 bp, Artificial Sequence
  chemically synthesized
ttcatttcccaaatcaaatc

SEQ ID NO: 23700 - DNA, 20 bp, Artificial Sequence
  chemically synthesized
ttatgttcttcagcaaataa

SEQ ID NO: 23701 - DNA, 20 bp, Artificial Sequence
  chemically synthesized
atacgtaatctaacaaacaa

SEQ ID NO: 23702 - DNA, 20 bp, Artificial Sequence
  chemically synthesized
gatgcatagttgcaaataaa

SEQ ID NO: 23703 - DNA, 20 bp, Artificial Sequence
  chemically synthesized
aattttgcatttttgtggat

SEQ ID NO: 23704 - DNA, 20 bp, Artificial Sequence
  chemically synthesized
ttgtggatagtggttttgaa

SEQ ID NO: 23705 - DNA, 20 bp, Artificial Sequence
  chemically synthesized
tagttgcccttgcaaattgg

SEQ ID NO: 23706 - DNA, 20 bp, Artificial Sequence
  chemically synthesized
tttcctcaacaaataatttt

SEQ ID NO: 23707 - DNA, 20 bp, Artificial Sequence
  chemically synthesized
atgacatcaatttatgttaa

SEQ ID NO: 23708 - DNA, 20 bp, Artificial Sequence
  chemically synthesized
tgtctgttcttgtccagtct

SEQ ID NO: 23709 - DNA, 20 bp, Artificial Sequence
  chemically synthesized
ttcttgtccagtctagaagt

SEQ ID NO: 23710 - DNA, 20 bp, Artificial Sequence
  chemically synthesized
ctcatcacataacatctgaa

SEQ ID NO: 23711 - DNA, 20 bp, Artificial Sequence
  chemically synthesized
attatcagactctgctcaat

SEQ ID NO: 23712 - DNA, 20 bp, Artificial Sequence
  chemically synthesized
agatgaaattcttaaggaca

SEQ ID NO: 23713 - DNA, 20 bp, Artificial Sequence
  chemically synthesized
cttgtgtagactcatatgaa

SEQ ID NO: 23714 - DNA, 20 bp, Artificial Sequence
  chemically synthesized
atgaagttctactttgtgac

SEQ ID NO: 23715 - DNA, 20 bp, Artificial Sequence
  chemically synthesized
accattgattgtgactattg

SEQ ID NO: 23716 - DNA, 20 bp, Artificial Sequence
  chemically synthesized
ctgtagtctgatgaaatgga

SEQ ID NO: 23717 - DNA, 20 bp, Artificial Sequence
  chemically synthesized
aagtaatatataagtaataa

SEQ ID NO: 23718 - DNA, 20 bp, Artificial Sequence
  chemically synthesized
attgctttttgcaattgagt

SEQ ID NO: 23719 - DNA, 20 bp, Artificial Sequence
  chemically synthesized
atgccaggatcttattacct

SEQ ID NO: 23720 - DNA, 20 bp, Artificial Sequence
  chemically synthesized
tattacctccaggatttcac

SEQ ID NO: 23721 - DNA, 20 bp, Artificial Sequence
  chemically synthesized
aaagtattgctcaagtaatc

SEQ ID NO: 23722 - DNA, 20 bp, Artificial Sequence
  chemically synthesized
gattatttgtgtattctcac

SEQ ID NO: 23723 - DNA, 20 bp, Artificial Sequence
  chemically synthesized
tgtcacgggaaatatcctgc

SEQ ID NO: 23724 - DNA, 20 bp, Artificial Sequence
  chemically synthesized
tctttccttgcacactctac

SEQ ID NO: 23725 - DNA, 20 bp, Artificial Sequence
  chemically synthesized
aattaccccattaagtgata

SEQ ID NO: 23726 - DNA, 20 bp, Artificial Sequence
  chemically synthesized
tatgtactagttcgttatca

SEQ ID NO: 23727 - DNA, 20 bp, Artificial Sequence
  chemically synthesized
ctgggtaatttataaggaaa

SEQ ID NO: 23728 - DNA, 20 bp, Artificial Sequence
  chemically synthesized
tgccaagcaaaagggggaaa

SEQ ID NO: 23729 - DNA, 20 bp, Artificial Sequence
  chemically synthesized
gagcatgagagtaacctcct

SEQ ID NO: 23730 - DNA, 20 bp, Artificial Sequence
  chemically synthesized
caaatccctcccacaacacg

SEQ ID NO: 23731 - DNA, 20 bp, Artificial Sequence
  chemically synthesized
tatgggaactacaattcaag

SEQ ID NO: 23732 - DNA, 20 bp, Artificial Sequence
  chemically synthesized
atgttgcatagtggtgaagt

SEQ ID NO: 23733 - DNA, 20 bp, Artificial Sequence
  chemically synthesized
agtgaatgttgtatccaatc

SEQ ID NO: 23734 - DNA, 20 bp, Artificial Sequence
  chemically synthesized
tattatttcattctatatgt

SEQ ID NO: 23735 - DNA, 20 bp, Artificial Sequence
  chemically synthesized
tctatatgtctatgcttact

SEQ ID NO: 23736 - DNA, 20 bp, Artificial Sequence
  chemically synthesized
tctcactaaatgagaacata

SEQ ID NO: 23737 - DNA, 20 bp, Artificial Sequence
  chemically synthesized
agaacatactgtgtttgact

SEQ ID NO: 23738 - DNA, 20 bp, Artificial Sequence
  chemically synthesized
ataatgtcctccagttctaa

SEQ ID NO: 23739 - DNA, 20 bp, Artificial Sequence
  chemically synthesized
taaccatgtttctagagaag

SEQ ID NO: 23740 - DNA, 20 bp, Artificial Sequence
  chemically synthesized
cgtccattggtagacattta

SEQ ID NO: 23741 - DNA, 20 bp, Artificial Sequence
  chemically synthesized
ctttgggtccatacccagta

SEQ ID NO: 23742 - DNA, 20 bp, Artificial Sequence
  chemically synthesized
ccatacccagtagtgggatt

SEQ ID NO: 23743 - DNA, 20 bp, Artificial Sequence
  chemically synthesized
attgcaggattgaatggtag

SEQ ID NO: 23744 - DNA, 20 bp, Artificial Sequence
  chemically synthesized
aatcttcatgctgtcttcca

SEQ ID NO: 23745 - DNA, 20 bp, Artificial Sequence
  chemically synthesized
tccacatcctcaccaacatc

SEQ ID NO: 23746 - DNA, 20 bp, Artificial Sequence
  chemically synthesized
ggcataaggaggtatcatat

SEQ ID NO: 23747 - DNA, 20 bp, Artificial Sequence
  chemically synthesized
tggtggttttaatttgcatt

SEQ ID NO: 23748 - DNA, 20 bp, Artificial Sequence
  chemically synthesized
agtgatgttgaacttttttt

SEQ ID NO: 23749 - DNA, 20 bp, Artificial Sequence
  chemically synthesized
tagatagatagatagataga

SEQ ID NO: 23750 - DNA, 20 bp, Artificial Sequence
  chemically synthesized
atatagatttagatataaaa

SEQ ID NO: 23751 - DNA, 20 bp, Artificial Sequence
  chemically synthesized
aagctgaaggacttggagtc

SEQ ID NO: 23752 - DNA, 20 bp, Artificial Sequence
  chemically synthesized
atccagcatgggagaaagat

SEQ ID NO: 23753 - DNA, 20 bp, Artificial Sequence
  chemically synthesized
ggcttggaggctaagccagt

SEQ ID NO: 23754 - DNA, 20 bp, Artificial Sequence
  chemically synthesized
taagccagtccaggattttc

SEQ ID NO: 23755 - DNA, 20 bp, Artificial Sequence
  chemically synthesized
ttttcacatgttttttttct

SEQ ID NO: 23756 - DNA, 20 bp, Artificial Sequence
  chemically synthesized
tatatcctggccacactggc

SEQ ID NO: 23757 - DNA, 20 bp, Artificial Sequence
  chemically synthesized
aactgattagatggtgccca

SEQ ID NO: 23758 - DNA, 20 bp, Artificial Sequence
  chemically synthesized
agtattaaccatcacaagtc

SEQ ID NO: 23759 - DNA, 20 bp, Artificial Sequence
  chemically synthesized
acaagtgtatacagacacga

SEQ ID NO: 23760 - DNA, 20 bp, Artificial Sequence
  chemically synthesized
tcctgcctggaatggcctgt

SEQ ID NO: 23761 - DNA, 20 bp, Artificial Sequence
  chemically synthesized
ggatctcctatattccatgc

SEQ ID NO: 23762 - DNA, 20 bp, Artificial Sequence
  chemically synthesized
acctccattgtggagttgta

SEQ ID NO: 23763 - DNA, 20 bp, Artificial Sequence
  chemically synthesized
tccaggtggcaatcttaatt

SEQ ID NO: 23764 - DNA, 20 bp, Artificial Sequence
  chemically synthesized
cttccacttccacttccacc

SEQ ID NO: 23765 - DNA, 20 bp, Artificial Sequence
  chemically synthesized
aaacagtaccatatattgga

SEQ ID NO: 23766 - DNA, 20 bp, Artificial Sequence
  chemically synthesized
acttcaaaaggccattcaaa

SEQ ID NO: 23767 - DNA, 20 bp, Artificial Sequence
  chemically synthesized
acttctttagccataaagtg

SEQ ID NO: 23768 - DNA, 20 bp, Artificial Sequence
  chemically synthesized
atgacagtggatacggcatt

SEQ ID NO: 23769 - DNA, 20 bp, Artificial Sequence
  chemically synthesized
tcttggcataagcattgagt

SEQ ID NO: 23770 - DNA, 20 bp, Artificial Sequence
  chemically synthesized
ccgaggaatggtgccatatc

SEQ ID NO: 23771 - DNA, 20 bp, Artificial Sequence
  chemically synthesized
caagcagtggctgtggccag

SEQ ID NO: 23772 - DNA, 20 bp, Artificial Sequence
  chemically synthesized
cagaattgatcatcctatcc

SEQ ID NO: 23773 - DNA, 20 bp, Artificial Sequence
  chemically synthesized
acatgggatgaaaatatctt

SEQ ID NO: 23774 - DNA, 20 bp, Artificial Sequence
  chemically synthesized
ctttgtcatcaattttccag

SEQ ID NO: 23775 - DNA, 20 bp, Artificial Sequence
  chemically synthesized
gctcaaagttctgccaacta

SEQ ID NO: 23776 - DNA, 20 bp, Artificial Sequence
  chemically synthesized
tgatgactcatagtcaaata

SEQ ID NO: 23777 - DNA, 20 bp, Artificial Sequence
  chemically synthesized
ccaaagcccagtaacaggcc

SEQ ID NO: 23778 - DNA, 20 bp, Artificial Sequence
  chemically synthesized
caaaatcctagaggcctccg

SEQ ID NO: 23779 - DNA, 20 bp, Artificial Sequence
  chemically synthesized
tcatatggcccaagtggcat

SEQ ID NO: 23780 - DNA, 20 bp, Artificial Sequence
  chemically synthesized
gtagaaggtccctgaattta

SEQ ID NO: 23781 - DNA, 20 bp, Artificial Sequence
  chemically synthesized
atgtctcatcaataaatcca

SEQ ID NO: 23782 - DNA, 20 bp, Artificial Sequence
  chemically synthesized
ggtgagcaagttctctccaa

SEQ ID NO: 23783 - DNA, 20 bp, Artificial Sequence
  chemically synthesized
ccaaccaacttcactatgtt

SEQ ID NO: 23784 - DNA, 20 bp, Artificial Sequence
  chemically synthesized
actctctaaacaattgatgc

SEQ ID NO: 23785 - DNA, 20 bp, Artificial Sequence
  chemically synthesized
ctctatatctatatctatat

SEQ ID NO: 23786 - DNA, 20 bp, Artificial Sequence
  chemically synthesized
tagccttttcacatttttct

SEQ ID NO: 23787 - DNA, 20 bp, Artificial Sequence
  chemically synthesized
tatatcctggctgtgctggc

SEQ ID NO: 23788 - DNA, 20 bp, Artificial Sequence
  chemically synthesized
aactgattagatggtgccca

SEQ ID NO: 23789 - DNA, 20 bp, Artificial Sequence
  chemically synthesized
cacagtcactttctaatgag

SEQ ID NO: 23790 - DNA, 20 bp, Artificial Sequence
  chemically synthesized
ttttttgttgttgagttcct

SEQ ID NO: 23791 - DNA, 20 bp, Artificial Sequence
  chemically synthesized
tattagccttttgttgcatt

SEQ ID NO: 23792 - DNA, 20 bp, Artificial Sequence
  chemically synthesized
tttttctcattctgtaggtt

SEQ ID NO: 23793 - DNA, 20 bp, Artificial Sequence
  chemically synthesized
tgtaggttatccgtttactc

SEQ ID NO: 23794 - DNA, 20 bp, Artificial Sequence
  chemically synthesized
cttttgcggtgcagaagcat

SEQ ID NO: 23795 - DNA, 20 bp, Artificial Sequence
  chemically synthesized
agtttaattaagtcccattt

SEQ ID NO: 23796 - DNA, 20 bp, Artificial Sequence
  chemically synthesized
attaagtcccatttgtctgt

SEQ ID NO: 23797 - DNA, 20 bp, Artificial Sequence
  chemically synthesized
tttgtctgtttttgtttttg

SEQ ID NO: 23798 - DNA, 20 bp, Artificial Sequence
  chemically synthesized
ctgtttttgtttttgttgtg

SEQ ID NO: 23799 - DNA, 20 bp, Artificial Sequence
  chemically synthesized
aagttgactagttcagtgta

SEQ ID NO: 23800 - DNA, 20 bp, Artificial Sequence
  chemically synthesized
tttctaattttttgccatca

SEQ ID NO: 23801 - DNA, 20 bp, Artificial Sequence
  chemically synthesized
tctccttaattttcccccag

SEQ ID NO: 23802 - DNA, 20 bp, Artificial Sequence
  chemically synthesized
ttccaaatgtatccatatat

SEQ ID NO: 23803 - DNA, 20 bp, Artificial Sequence
  chemically synthesized
tgtatccatatattgtggct

SEQ ID NO: 23804 - DNA, 20 bp, Artificial Sequence
  chemically synthesized
tattagaggagagaattaag

SEQ ID NO: 23805 - DNA, 20 bp, Artificial Sequence
  chemically synthesized
agacaccgagttaaagaagg

SEQ ID NO: 23806 - DNA, 20 bp, Artificial Sequence
  chemically synthesized
aggaagggctttattcggct

SEQ ID NO: 23807 - DNA, 20 bp, Artificial Sequence
  chemically synthesized
gagcaattcctgtccctttt

SEQ ID NO: 23808 - DNA, 20 bp, Artificial Sequence
  chemically synthesized
cagaatggaacagaacagga

SEQ ID NO: 23809 - DNA, 20 bp, Artificial Sequence
  chemically synthesized
gaacaggacagggattttca

SEQ ID NO: 23810 - DNA, 20 bp, Artificial Sequence
  chemically synthesized
aggcccaggatgtggtctca

SEQ ID NO: 23811 - DNA, 20 bp, Artificial Sequence
  chemically synthesized
gtggtctcaggctgtttgcc

SEQ ID NO: 23812 - DNA, 20 bp, Artificial Sequence
  chemically synthesized
tgtggatttcatttctgcct

SEQ ID NO: 23813 - DNA, 20 bp, Artificial Sequence
  chemically synthesized
atgaaatacgtatttgtgtt

SEQ ID NO: 23814 - DNA, 20 bp, Artificial Sequence
  chemically synthesized
gttctccttatcaaaaggta

SEQ ID NO: 23815 - DNA, 20 bp, Artificial Sequence
  chemically synthesized
ttatcaaaaggtactttgct

SEQ ID NO: 23816 - DNA, 20 bp, Artificial Sequence
  chemically synthesized
ctttaaaagataaatgacta

SEQ ID NO: 23817 - DNA, 20 bp, Artificial Sequence
  chemically synthesized
gataaatgactatgtagctt

SEQ ID NO: 23818 - DNA, 20 bp, Artificial Sequence
  chemically synthesized
agaaggaggaagagaggtga

SEQ ID NO: 23819 - DNA, 20 bp, Artificial Sequence
  chemically synthesized
ctttgacactacaaagtgac

SEQ ID NO: 23820 - DNA, 20 bp, Artificial Sequence
  chemically synthesized
tttgaaaggtaaataaatcc

SEQ ID NO: 23821 - DNA, 20 bp, Artificial Sequence
  chemically synthesized
aacagttggaggcatctata

SEQ ID NO: 23822 - DNA, 22 bp, Artificial Sequence
  chemically synthesized
gcagccatgcttattcattgcg

SEQ ID NO: 23823 - DNA, 22 bp, Artificial Sequence
  chemically synthesized
attcattgcgtccactgctctt

SEQ ID NO: 23824 - DNA, 22 bp, Artificial Sequence
  chemically synthesized
ttcattgcgtccactgctcttc

SEQ ID NO: 23825 - DNA, 22 bp, Artificial Sequence
  chemically synthesized
attgcgtccactgctcttctga

SEQ ID NO: 23826 - DNA, 22 bp, Artificial Sequence
  chemically synthesized
cgtccactgctcttctgacagc

SEQ ID NO: 23827 - DNA, 22 bp, Artificial Sequence
  chemically synthesized
ctcttctgacagcatcatttac

SEQ ID NO: 23828 - DNA, 22 bp, Artificial Sequence
  chemically synthesized
ttctgacagcatcatttacagg

SEQ ID NO: 23829 - DNA, 22 bp, Artificial Sequence
  chemically synthesized
ctgacagcatcatttacaggtt

SEQ ID NO: 23830 - DNA, 22 bp, Artificial Sequence
  chemically synthesized
tgacagcatcatttacaggttc

SEQ ID NO: 23831 - DNA, 22 bp, Artificial Sequence
  chemically synthesized
acagcatcatttacaggttcac

SEQ ID NO: 23832 - DNA, 22 bp, Artificial Sequence
  chemically synthesized
acaggttcacactgttccacct

SEQ ID NO: 23833 - DNA, 22 bp, Artificial Sequence
  chemically synthesized
caggttcacactgttccacctg

SEQ ID NO: 23834 - DNA, 22 bp, Artificial Sequence
  chemically synthesized
acactgttccacctgagtcttc

SEQ ID NO: 23835 - DNA, 22 bp, Artificial Sequence
  chemically synthesized
ttccacctgagtcttcatatta

SEQ ID NO: 23836 - DNA, 22 bp, Artificial Sequence
  chemically synthesized
cacctgagtcttcatattatgc

SEQ ID NO: 23837 - DNA, 22 bp, Artificial Sequence
  chemically synthesized
agtcttcatattatgctcaaaa

SEQ ID NO: 23838 - DNA, 22 bp, Artificial Sequence
  chemically synthesized
catattatgctcaaaatatgga

SEQ ID NO: 23839 - DNA, 22 bp, Artificial Sequence
  chemically synthesized
atattatgctcaaaatatggac

SEQ ID NO: 23840 - DNA, 22 bp, Artificial Sequence
  chemically synthesized
tgctcaaaatatggacctatca

SEQ ID NO: 23841 - DNA, 22 bp, Artificial Sequence
  chemically synthesized
aaaatatggacctatcagaaaa

SEQ ID NO: 23842 - DNA, 22 bp, Artificial Sequence
  chemically synthesized
tcagaaaatagttctctcccca

SEQ ID NO: 23843 - DNA, 22 bp, Artificial Sequence
  chemically synthesized
tctccccattcatctgctgttg

SEQ ID NO: 23844 - DNA, 22 bp, Artificial Sequence
  chemically synthesized
tccccattcatctgctgttgtt

SEQ ID NO: 23845 - DNA, 22 bp, Artificial Sequence
  chemically synthesized
cccattcatctgctgttgtttt

SEQ ID NO: 23846 - DNA, 22 bp, Artificial Sequence
  chemically synthesized
atctgctgttgttttggccttt

SEQ ID NO: 23847 - DNA, 22 bp, Artificial Sequence
  chemically synthesized
ctgttgttttggcctttgtctg

SEQ ID NO: 23848 - DNA, 22 bp, Artificial Sequence
  chemically synthesized
ttgttttggcctttgtctgaat

SEQ ID NO: 23849 - DNA, 22 bp, Artificial Sequence
  chemically synthesized
ttttggcctttgtctgaatcac

SEQ ID NO: 23850 - DNA, 22 bp, Artificial Sequence
  chemically synthesized
tggcctttgtctgaatcacagt

SEQ ID NO: 23851 - DNA, 22 bp, Artificial Sequence
  chemically synthesized
ggcctttgtctgaatcacagta

SEQ ID NO: 23852 - DNA, 22 bp, Artificial Sequence
  chemically synthesized
gcctttgtctgaatcacagtat

SEQ ID NO: 23853 - DNA, 22 bp, Artificial Sequence
  chemically synthesized
tgtctgaatcacagtatagatg

SEQ ID NO: 23854 - DNA, 22 bp, Artificial Sequence
  chemically synthesized
gtctgaatcacagtatagatgc

SEQ ID NO: 23855 - DNA, 22 bp, Artificial Sequence
  chemically synthesized
tctgaatcacagtatagatgcc

SEQ ID NO: 23856 - DNA, 22 bp, Artificial Sequence
  chemically synthesized
aatcacagtatagatgcctcca

SEQ ID NO: 23857 - DNA, 22 bp, Artificial Sequence
  chemically synthesized
caactgttaaaaggaaaaaagt

SEQ ID NO: 23858 - DNA, 22 bp, Artificial Sequence
  chemically synthesized
ttaaaaggaaaaaagtttctat

SEQ ID NO: 23859 - DNA, 22 bp, Artificial Sequence
  chemically synthesized
aaaggaaaaaagtttctattat

SEQ ID NO: 23860 - DNA, 22 bp, Artificial Sequence
  chemically synthesized
ctattatcattcaggttagcaa

SEQ ID NO: 23861 - DNA, 22 bp, Artificial Sequence
  chemically synthesized
tattatcattcaggttagcaat

SEQ ID NO: 23862 - DNA, 22 bp, Artificial Sequence
  chemically synthesized
ttatcattcaggttagcaattt

SEQ ID NO: 23863 - DNA, 22 bp, Artificial Sequence
  chemically synthesized
tcattcaggttagcaatttgtt

SEQ ID NO: 23864 - DNA, 22 bp, Artificial Sequence
  chemically synthesized
aggttagcaatttgtttaaagt

SEQ ID NO: 23865 - DNA, 22 bp, Artificial Sequence
  chemically synthesized
gcaatttgtttaaagtaataag

SEQ ID NO: 23866 - DNA, 22 bp, Artificial Sequence
  chemically synthesized
gtttaaagtaataagggatgga

SEQ ID NO: 23867 - DNA, 22 bp, Artificial Sequence
  chemically synthesized
tttaaagtaataagggatggaa

SEQ ID NO: 23868 - DNA, 22 bp, Artificial Sequence
  chemically synthesized
aaagtaataagggatggaaatg

SEQ ID NO: 23869 - DNA, 22 bp, Artificial Sequence
  chemically synthesized
aagtaataagggatggaaatga

SEQ ID NO: 23870 - DNA, 22 bp, Artificial Sequence
  chemically synthesized
agatttttaaattagcatttag

SEQ ID NO: 23871 - DNA, 22 bp, Artificial Sequence
  chemically synthesized
ttaaattagcatttaggatcca

SEQ ID NO: 23872 - DNA, 22 bp, Artificial Sequence
  chemically synthesized
taaattagcatttaggatccac

SEQ ID NO: 23873 - DNA, 22 bp, Artificial Sequence
  chemically synthesized
aaattagcatttaggatccact

SEQ ID NO: 23874 - DNA, 22 bp, Artificial Sequence
  chemically synthesized
aattagcatttaggatccacta

SEQ ID NO: 23875 - DNA, 22 bp, Artificial Sequence
  chemically synthesized
gcatttaggatccactaagccc

SEQ ID NO: 23876 - DNA, 22 bp, Artificial Sequence
  chemically synthesized
aggatccactaagcccaaggat

SEQ ID NO: 23877 - DNA, 22 bp, Artificial Sequence
  chemically synthesized
ggatccactaagcccaaggatt

SEQ ID NO: 23878 - DNA, 22 bp, Artificial Sequence
  chemically synthesized
agcccaaggatttatttacctt

SEQ ID NO: 23879 - DNA, 22 bp, Artificial Sequence
  chemically synthesized
atttacctttcaaaaataatag

SEQ ID NO: 23880 - DNA, 22 bp, Artificial Sequence
  chemically synthesized
tttacctttcaaaaataatagt

SEQ ID NO: 23881 - DNA, 22 bp, Artificial Sequence
  chemically synthesized
acctttcaaaaataatagtatt

SEQ ID NO: 23882 - DNA, 22 bp, Artificial Sequence
  chemically synthesized
cctttcaaaaataatagtattt

SEQ ID NO: 23883 - DNA, 22 bp, Artificial Sequence
  chemically synthesized
tcaaaaataatagtatttgaca

SEQ ID NO: 23884 - DNA, 22 bp, Artificial Sequence
  chemically synthesized
caaaaataatagtatttgacat

SEQ ID NO: 23885 - DNA, 22 bp, Artificial Sequence
  chemically synthesized
aaaaataatagtatttgacata

SEQ ID NO: 23886 - DNA, 22 bp, Artificial Sequence
  chemically synthesized
gacatattgttaagggacacca

SEQ ID NO: 23887 - DNA, 22 bp, Artificial Sequence
  chemically synthesized
acatattgttaagggacaccaa

SEQ ID NO: 23888 - DNA, 22 bp, Artificial Sequence
  chemically synthesized
ttaagggacaccaacgaatggt

SEQ ID NO: 23889 - DNA, 22 bp, Artificial Sequence
  chemically synthesized
agggacaccaacgaatggttac

SEQ ID NO: 23890 - DNA, 22 bp, Artificial Sequence
  chemically synthesized
ctgctttgttcaattctgtgca

SEQ ID NO: 23891 - DNA, 22 bp, Artificial Sequence
  chemically synthesized
ctttgttcaattctgtgcatgt

SEQ ID NO: 23892 - DNA, 22 bp, Artificial Sequence
  chemically synthesized
tgttcaattctgtgcatgtttt

SEQ ID NO: 23893 - DNA, 22 bp, Artificial Sequence
  chemically synthesized
gttcaattctgtgcatgtttta

SEQ ID NO: 23894 - DNA, 22 bp, Artificial Sequence
  chemically synthesized
ttcaattctgtgcatgttttaa

SEQ ID NO: 23895 - DNA, 22 bp, Artificial Sequence
  chemically synthesized
aattctgtgcatgttttaaagt

SEQ ID NO: 23896 - DNA, 22 bp, Artificial Sequence
  chemically synthesized
tgtgcatgttttaaagtccctt

SEQ ID NO: 23897 - DNA, 22 bp, Artificial Sequence
  chemically synthesized
tgcatgttttaaagtcccttct

SEQ ID NO: 23898 - DNA, 22 bp, Artificial Sequence
  chemically synthesized
taaagtcccttctaggtgcatg

SEQ ID NO: 23899 - DNA, 22 bp, Artificial Sequence
  chemically synthesized
aaagtcccttctaggtgcatgt

SEQ ID NO: 23900 - DNA, 22 bp, Artificial Sequence
  chemically synthesized
aagtcccttctaggtgcatgtg

SEQ ID NO: 23901 - DNA, 22 bp, Artificial Sequence
  chemically synthesized
ctaggtgcatgtgaaatagcag

SEQ ID NO: 23902 - DNA, 22 bp, Artificial Sequence
  chemically synthesized
taggtgcatgtgaaatagcagc

SEQ ID NO: 23903 - DNA, 22 bp, Artificial Sequence
  chemically synthesized
ggtgcatgtgaaatagcagcag

SEQ ID NO: 23904 - DNA, 22 bp, Artificial Sequence
  chemically synthesized
atgccgcaaagaggtcaaatac

SEQ ID NO: 23905 - DNA, 22 bp, Artificial Sequence
  chemically synthesized
aaaaagaaagagtctgaaaaga

SEQ ID NO: 23906 - DNA, 22 bp, Artificial Sequence
  chemically synthesized
aaaagacaattggagtaactac

SEQ ID NO: 23907 - DNA, 22 bp, Artificial Sequence
  chemically synthesized
gagtaactacttgcctaaagct

SEQ ID NO: 23908 - DNA, 22 bp, Artificial Sequence
  chemically synthesized
cttgcctaaagctccagtcact

SEQ ID NO: 23909 - DNA, 22 bp, Artificial Sequence
  chemically synthesized
gcctaaagctccagtcactttg

SEQ ID NO: 23910 - DNA, 22 bp, Artificial Sequence
  chemically synthesized
cctaaagctccagtcactttgt

SEQ ID NO: 23911 - DNA, 22 bp, Artificial Sequence
  chemically synthesized
aagctccagtcactttgtagtg

SEQ ID NO: 23912 - DNA, 22 bp, Artificial Sequence
  chemically synthesized
cagtcactttgtagtgtcaaag

SEQ ID NO: 23913 - DNA, 22 bp, Artificial Sequence
  chemically synthesized
tgtagtgtcaaagttaggacaa

SEQ ID NO: 23914 - DNA, 22 bp, Artificial Sequence
  chemically synthesized
gtagtgtcaaagttaggacaaa

SEQ ID NO: 23915 - DNA, 22 bp, Artificial Sequence
  chemically synthesized
tagtgtcaaagttaggacaaat

SEQ ID NO: 23916 - DNA, 22 bp, Artificial Sequence
  chemically synthesized
ggacaaatacccattgtcatca

SEQ ID NO: 23917 - DNA, 22 bp, Artificial Sequence
  chemically synthesized
tcatcatacatgccctcagcag

SEQ ID NO: 23918 - DNA, 22 bp, Artificial Sequence
  chemically synthesized
agcagcagaaatcactttcacc

SEQ ID NO: 23919 - DNA, 22 bp, Artificial Sequence
  chemically synthesized
tcacctctcttcctccttctcc

SEQ ID NO: 23920 - DNA, 22 bp, Artificial Sequence
  chemically synthesized
cacctctcttcctccttctcct

SEQ ID NO: 23921 - DNA, 22 bp, Artificial Sequence
  chemically synthesized
acctctcttcctccttctccta

SEQ ID NO: 23922 - DNA, 22 bp, Artificial Sequence
  chemically synthesized
tcttcctccttctcctacagtg

SEQ ID NO: 23923 - DNA, 22 bp, Artificial Sequence
  chemically synthesized
ttcctccttctcctacagtggt

SEQ ID NO: 23924 - DNA, 22 bp, Artificial Sequence
  chemically synthesized
cctccttctcctacagtggtcc

SEQ ID NO: 23925 - DNA, 22 bp, Artificial Sequence
  chemically synthesized
ctccttctcctacagtggtcca

SEQ ID NO: 23926 - DNA, 22 bp, Artificial Sequence
  chemically synthesized
cttctcctacagtggtccagaa

SEQ ID NO: 23927 - DNA, 22 bp, Artificial Sequence
  chemically synthesized
ctcctacagtggtccagaaggg

SEQ ID NO: 23928 - DNA, 22 bp, Artificial Sequence
  chemically synthesized
tcctacagtggtccagaagggg

SEQ ID NO: 23929 - DNA, 22 bp, Artificial Sequence
  chemically synthesized
ctacagtggtccagaaggggct

SEQ ID NO: 23930 - DNA, 22 bp, Artificial Sequence
  chemically synthesized
cagtggtccagaaggggctcag

SEQ ID NO: 23931 - DNA, 22 bp, Artificial Sequence
  chemically synthesized
aggtatgttcaaataacagctg

SEQ ID NO: 23932 - DNA, 22 bp, Artificial Sequence
  chemically synthesized
aaataacagctgctgtggtttt

SEQ ID NO: 23933 - DNA, 22 bp, Artificial Sequence
  chemically synthesized
ctgtggttttcaattatgaaga

SEQ ID NO: 23934 - DNA, 22 bp, Artificial Sequence
  chemically synthesized
tggttttcaattatgaagaaat

SEQ ID NO: 23935 - DNA, 22 bp, Artificial Sequence
  chemically synthesized
tcaattatgaagaaatctccta

SEQ ID NO: 23936 - DNA, 22 bp, Artificial Sequence
  chemically synthesized
caattatgaagaaatctcctaa

SEQ ID NO: 23937 - DNA, 22 bp, Artificial Sequence
  chemically synthesized
aattatgaagaaatctcctaag

SEQ ID NO: 23938 - DNA, 22 bp, Artificial Sequence
  chemically synthesized
tgaagaaatctcctaagctaca

SEQ ID NO: 23939 - DNA, 22 bp, Artificial Sequence
  chemically synthesized
ctaagctacatagtcatttatc

SEQ ID NO: 23940 - DNA, 22 bp, Artificial Sequence
  chemically synthesized
agctacatagtcatttatcttt

SEQ ID NO: 23941 - DNA, 22 bp, Artificial Sequence
  chemically synthesized
catagtcatttatcttttaaag

SEQ ID NO: 23942 - DNA, 22 bp, Artificial Sequence
  chemically synthesized
atcttttaaagcaccaagcaaa

SEQ ID NO: 23943 - DNA, 22 bp, Artificial Sequence
  chemically synthesized
tcttttaaagcaccaagcaaag

SEQ ID NO: 23944 - DNA, 22 bp, Artificial Sequence
  chemically synthesized
ttaaagcaccaagcaaagtacc

SEQ ID NO: 23945 - DNA, 22 bp, Artificial Sequence
  chemically synthesized
taaagcaccaagcaaagtacct

SEQ ID NO: 23946 - DNA, 22 bp, Artificial Sequence
  chemically synthesized
aaagcaccaagcaaagtacctt

SEQ ID NO: 23947 - DNA, 22 bp, Artificial Sequence
  chemically synthesized
aagcaccaagcaaagtaccttt

SEQ ID NO: 23948 - DNA, 22 bp, Artificial Sequence
  chemically synthesized
ttgataaggagaacgtgcttat

SEQ ID NO: 23949 - DNA, 22 bp, Artificial Sequence
  chemically synthesized
tgataaggagaacgtgcttata

SEQ ID NO: 23950 - DNA, 22 bp, Artificial Sequence
  chemically synthesized
gataaggagaacgtgcttatag

SEQ ID NO: 23951 - DNA, 22 bp, Artificial Sequence
  chemically synthesized
ataaggagaacgtgcttataga

SEQ ID NO: 23952 - DNA, 22 bp, Artificial Sequence
  chemically synthesized
atagatgttcatagaagatgct

SEQ ID NO: 23953 - DNA, 22 bp, Artificial Sequence
  chemically synthesized
tagatgttcatagaagatgctt

SEQ ID NO: 23954 - DNA, 22 bp, Artificial Sequence
  chemically synthesized
atagaagatgcttggtccaacc

SEQ ID NO: 23955 - DNA, 22 bp, Artificial Sequence
  chemically synthesized
ggtccaaccccgatgtcaaatc

SEQ ID NO: 23956 - DNA, 22 bp, Artificial Sequence
  chemically synthesized
gtccaaccccgatgtcaaatcc

SEQ ID NO: 23957 - DNA, 22 bp, Artificial Sequence
  chemically synthesized
cattctcacatggtatttctct

SEQ ID NO: 23958 - DNA, 22 bp, Artificial Sequence
  chemically synthesized
attctcacatggtatttctctc

SEQ ID NO: 23959 - DNA, 22 bp, Artificial Sequence
  chemically synthesized
tcacatggtatttctctcttcc

SEQ ID NO: 23960 - DNA, 22 bp, Artificial Sequence
  chemically synthesized
acatggtatttctctcttccta

SEQ ID NO: 23961 - DNA, 22 bp, Artificial Sequence
  chemically synthesized
ctctcttcctagtaagggagga

SEQ ID NO: 23962 - DNA, 22 bp, Artificial Sequence
  chemically synthesized
tctcttcctagtaagggaggag

SEQ ID NO: 23963 - DNA, 22 bp, Artificial Sequence
  chemically synthesized
tcttcctagtaagggaggagac

SEQ ID NO: 23964 - DNA, 22 bp, Artificial Sequence
  chemically synthesized
ttcctagtaagggaggagacca

SEQ ID NO: 23965 - DNA, 22 bp, Artificial Sequence
  chemically synthesized
cctagtaagggaggagaccacc

SEQ ID NO: 23966 - DNA, 22 bp, Artificial Sequence
  chemically synthesized
ctagtaagggaggagaccaccc

SEQ ID NO: 23967 - DNA, 22 bp, Artificial Sequence
  chemically synthesized
gtaagggaggagaccacccttc

SEQ ID NO: 23968 - DNA, 22 bp, Artificial Sequence
  chemically synthesized
catattgttttatgcccaattt

SEQ ID NO: 23969 - DNA, 22 bp, Artificial Sequence
  chemically synthesized
atattgttttatgcccaatttc

SEQ ID NO: 23970 - DNA, 22 bp, Artificial Sequence
  chemically synthesized
ttttatgcccaatttctgcctc

SEQ ID NO: 23971 - DNA, 22 bp, Artificial Sequence
  chemically synthesized
tatgcccaatttctgcctccaa

SEQ ID NO: 23972 - DNA, 22 bp, Artificial Sequence
  chemically synthesized
atgcccaatttctgcctccaaa

SEQ ID NO: 23973 - DNA, 22 bp, Artificial Sequence
  chemically synthesized
tgcccaatttctgcctccaaag

SEQ ID NO: 23974 - DNA, 22 bp, Artificial Sequence
  chemically synthesized
ctgcctccaaagaaagaagaag

SEQ ID NO: 23975 - DNA, 22 bp, Artificial Sequence
  chemically synthesized
tgcctccaaagaaagaagaagt

SEQ ID NO: 23976 - DNA, 22 bp, Artificial Sequence
  chemically synthesized
cctccaaagaaagaagaagtaa

SEQ ID NO: 23977 - DNA, 22 bp, Artificial Sequence
  chemically synthesized
caaagaaagaagaagtaaaaac

SEQ ID NO: 23978 - DNA, 22 bp, Artificial Sequence
  chemically synthesized
aaaggcagaaatgaaatccaca

SEQ ID NO: 23979 - DNA, 22 bp, Artificial Sequence
  chemically synthesized
agaccacatcctgggcctggtt

SEQ ID NO: 23980 - DNA, 22 bp, Artificial Sequence
  chemically synthesized
ggcctggttaaagatagacccc

SEQ ID NO: 23981 - DNA, 22 bp, Artificial Sequence
  chemically synthesized
gttaaagatagacccctgacct

SEQ ID NO: 23982 - DNA, 22 bp, Artificial Sequence
  chemically synthesized
aagatagacccctgacctggcc

SEQ ID NO: 23983 - DNA, 22 bp, Artificial Sequence
  chemically synthesized
acctggccagttatgttatcta

SEQ ID NO: 23984 - DNA, 22 bp, Artificial Sequence
  chemically synthesized
gccagttatgttatctatagat

SEQ ID NO: 23985 - DNA, 22 bp, Artificial Sequence
  chemically synthesized
tgttatctatagattccagaca

SEQ ID NO: 23986 - DNA, 22 bp, Artificial Sequence
  chemically synthesized
tctatagattccagacactgta

SEQ ID NO: 23987 - DNA, 22 bp, Artificial Sequence
  chemically synthesized
tagattccagacactgtatgga

SEQ ID NO: 23988 - DNA, 22 bp, Artificial Sequence
  chemically synthesized
cagacactgtatggaaaagcag

SEQ ID NO: 23989 - DNA, 22 bp, Artificial Sequence
  chemically synthesized
tatggaaaagcagtgtgaaaat

SEQ ID NO: 23990 - DNA, 22 bp, Artificial Sequence
  chemically synthesized
tcctgttctgttccattctgat

SEQ ID NO: 23991 - DNA, 22 bp, Artificial Sequence
  chemically synthesized
ttctgttccattctgatgacca

SEQ ID NO: 23992 - DNA, 22 bp, Artificial Sequence
  chemically synthesized
tgttccattctgatgaccagtg

SEQ ID NO: 23993 - DNA, 22 bp, Artificial Sequence
  chemically synthesized
ttccattctgatgaccagtgca

SEQ ID NO: 23994 - DNA, 22 bp, Artificial Sequence
  chemically synthesized
cattctgatgaccagtgcatgc

SEQ ID NO: 23995 - DNA, 22 bp, Artificial Sequence
  chemically synthesized
tgatgaccagtgcatgcagccc

SEQ ID NO: 23996 - DNA, 22 bp, Artificial Sequence
  chemically synthesized
atgaccagtgcatgcagccccc

SEQ ID NO: 23997 - DNA, 22 bp, Artificial Sequence
  chemically synthesized
agagttgtaagcccttaaaagg

SEQ ID NO: 23998 - DNA, 22 bp, Artificial Sequence
  chemically synthesized
gagttgtaagcccttaaaaggg

SEQ ID NO: 23999 - DNA, 22 bp, Artificial Sequence
  chemically synthesized
taagcccttaaaagggacagga

SEQ ID NO: 24000 - DNA, 22 bp, Artificial Sequence
  chemically synthesized
aaaagggacaggaattgctcac

SEQ ID NO: 24001 - DNA, 22 bp, Artificial Sequence
  chemically synthesized
aaagggacaggaattgctcact

SEQ ID NO: 24002 - DNA, 22 bp, Artificial Sequence
  chemically synthesized
ctcactctgagagcttggttgt

SEQ ID NO: 24003 - DNA, 22 bp, Artificial Sequence
  chemically synthesized
actctgagagcttggttgttgg

SEQ ID NO: 24004 - DNA, 22 bp, Artificial Sequence
  chemically synthesized
tgagagcttggttgttggagat

SEQ ID NO: 24005 - DNA, 22 bp, Artificial Sequence
  chemically synthesized
agagcttggttgttggagatgt

SEQ ID NO: 24006 - DNA, 22 bp, Artificial Sequence
  chemically synthesized
ggttgttggagatgtgagtctt

SEQ ID NO: 24007 - DNA, 22 bp, Artificial Sequence
  chemically synthesized
gttgttggagatgtgagtcttg

SEQ ID NO: 24008 - DNA, 22 bp, Artificial Sequence
  chemically synthesized
ttggagatgtgagtcttgccca

SEQ ID NO: 24009 - DNA, 22 bp, Artificial Sequence
  chemically synthesized
gagatgtgagtcttgcccaagc

SEQ ID NO: 24010 - DNA, 22 bp, Artificial Sequence
  chemically synthesized
gcccaagctcccagccgaataa

SEQ ID NO: 24011 - DNA, 22 bp, Artificial Sequence
  chemically synthesized
cccaagctcccagccgaataaa

SEQ ID NO: 24012 - DNA, 22 bp, Artificial Sequence
  chemically synthesized
ccagccgaataaagcccttcct

SEQ ID NO: 24013 - DNA, 22 bp, Artificial Sequence
  chemically synthesized
ccttctttaactcggtgtctga

SEQ ID NO: 24014 - DNA, 22 bp, Artificial Sequence
  chemically synthesized
cttctttaactcggtgtctgag

SEQ ID NO: 24015 - DNA, 22 bp, Artificial Sequence
  chemically synthesized
ctttaactcggtgtctgagggg

SEQ ID NO: 24016 - DNA, 22 bp, Artificial Sequence
  chemically synthesized
tttaactcggtgtctgaggggt

SEQ ID NO: 24017 - DNA, 22 bp, Artificial Sequence
  chemically synthesized
taactcggtgtctgaggggttt

SEQ ID NO: 24018 - DNA, 22 bp, Artificial Sequence
  chemically synthesized
aactcggtgtctgaggggtttt

SEQ ID NO: 24019 - DNA, 22 bp, Artificial Sequence
  chemically synthesized
actcggtgtctgaggggttttg

SEQ ID NO: 24020 - DNA, 22 bp, Artificial Sequence
  chemically synthesized
ggtgtctgaggggttttgtatg

SEQ ID NO: 24021 - DNA, 22 bp, Artificial Sequence
  chemically synthesized
aggggttttgtatgcagcttgt

SEQ ID NO: 24022 - DNA, 22 bp, Artificial Sequence
  chemically synthesized
tgtatgcagcttgtcctgctac

SEQ ID NO: 24023 - DNA, 22 bp, Artificial Sequence
  chemically synthesized
gtatgcagcttgtcctgctaca

SEQ ID NO: 24024 - DNA, 22 bp, Artificial Sequence
  chemically synthesized
tatgcagcttgtcctgctacac

SEQ ID NO: 24025 - DNA, 22 bp, Artificial Sequence
  chemically synthesized
gtcctgctacactagaatcgtt

SEQ ID NO: 24026 - DNA, 22 bp, Artificial Sequence
  chemically synthesized
tcctgctacactagaatcgttc

SEQ ID NO: 24027 - DNA, 22 bp, Artificial Sequence
  chemically synthesized
ctacactagaatcgttccttaa

SEQ ID NO: 24028 - DNA, 22 bp, Artificial Sequence
  chemically synthesized
cactagaatcgttccttaattc

SEQ ID NO: 24029 - DNA, 22 bp, Artificial Sequence
  chemically synthesized
gaatcgttccttaattctctcc

SEQ ID NO: 24030 - DNA, 22 bp, Artificial Sequence
  chemically synthesized
cttaattctctcctctaatatt

SEQ ID NO: 24031 - DNA, 22 bp, Artificial Sequence
  chemically synthesized
aattctctcctctaatattgct

SEQ ID NO: 24032 - DNA, 22 bp, Artificial Sequence
  chemically synthesized
attctctcctctaatattgctg

SEQ ID NO: 24033 - DNA, 22 bp, Artificial Sequence
  chemically synthesized
tctcctctaatattgctgctac

SEQ ID NO: 24034 - DNA, 22 bp, Artificial Sequence
  chemically synthesized
tcctctaatattgctgctacct

SEQ ID NO: 24035 - DNA, 22 bp, Artificial Sequence
  chemically synthesized
ctctaatattgctgctacctct

SEQ ID NO: 24036 - DNA, 22 bp, Artificial Sequence
  chemically synthesized
taatattgctgctacctctatt

SEQ ID NO: 24037 - DNA, 22 bp, Artificial Sequence
  chemically synthesized
atattgctgctacctctattaa

SEQ ID NO: 24038 - DNA, 22 bp, Artificial Sequence
  chemically synthesized
ctgctacctctattaaaacaca

SEQ ID NO: 24039 - DNA, 22 bp, Artificial Sequence
  chemically synthesized
ctacctctattaaaacacaaag

SEQ ID NO: 24040 - DNA, 22 bp, Artificial Sequence
  chemically synthesized
cctctattaaaacacaaagcca

SEQ ID NO: 24041 - DNA, 22 bp, Artificial Sequence
  chemically synthesized
tattaaaacacaaagccacaat

SEQ ID NO: 24042 - DNA, 22 bp, Artificial Sequence
  chemically synthesized
ttaaaacacaaagccacaatat

SEQ ID NO: 24043 - DNA, 22 bp, Artificial Sequence
  chemically synthesized
aaacacaaagccacaatatatg

SEQ ID NO: 24044 - DNA, 22 bp, Artificial Sequence
  chemically synthesized
ggaaaatatgcacactttggat

SEQ ID NO: 24045 - DNA, 22 bp, Artificial Sequence
  chemically synthesized
gaaaatatgcacactttggatc

SEQ ID NO: 24046 - DNA, 22 bp, Artificial Sequence
  chemically synthesized
tggatccagcaagtccacatct

SEQ ID NO: 24047 - DNA, 22 bp, Artificial Sequence
  chemically synthesized
ggatccagcaagtccacatcta

SEQ ID NO: 24048 - DNA, 22 bp, Artificial Sequence
  chemically synthesized
gatccagcaagtccacatctag

SEQ ID NO: 24049 - DNA, 22 bp, Artificial Sequence
  chemically synthesized
gaaaaccatcctgggggaaaat

SEQ ID NO: 24050 - DNA, 22 bp, Artificial Sequence
  chemically synthesized
ggggaaaattaaggagagtatg

SEQ ID NO: 24051 - DNA, 22 bp, Artificial Sequence
  chemically synthesized
aggagagtatgaaaaggatgtt

SEQ ID NO: 24052 - DNA, 22 bp, Artificial Sequence
  chemically synthesized
actaaagcattatgatggcaaa

SEQ ID NO: 24053 - DNA, 22 bp, Artificial Sequence
  chemically synthesized
ctaaagcattatgatggcaaaa

SEQ ID NO: 24054 - DNA, 22 bp, Artificial Sequence
  chemically synthesized
aagcattatgatggcaaaaaat

SEQ ID NO: 24055 - DNA, 22 bp, Artificial Sequence
  chemically synthesized
tgatggcaaaaaattagaaaca

SEQ ID NO: 24056 - DNA, 22 bp, Artificial Sequence
  chemically synthesized
gaaacaacttacactgaactag

SEQ ID NO: 24057 - DNA, 22 bp, Artificial Sequence
  chemically synthesized
acactgaactagtcaacttact

SEQ ID NO: 24058 - DNA, 22 bp, Artificial Sequence
  chemically synthesized
cactgaactagtcaacttactt

SEQ ID NO: 24059 - DNA, 22 bp, Artificial Sequence
  chemically synthesized
aactagtcaacttacttaacag

SEQ ID NO: 24060 - DNA, 22 bp, Artificial Sequence
  chemically synthesized
gtcaacttacttaacagacaga

SEQ ID NO: 24061 - DNA, 22 bp, Artificial Sequence
  chemically synthesized
acttaacagacagaaggctcaa

SEQ ID NO: 24062 - DNA, 22 bp, Artificial Sequence
  chemically synthesized
cttaacagacagaaggctcaat

SEQ ID NO: 24063 - DNA, 22 bp, Artificial Sequence
  chemically synthesized
aacagacagaaggctcaattag

SEQ ID NO: 24064 - DNA, 22 bp, Artificial Sequence
  chemically synthesized
acagacagaaggctcaattagc

SEQ ID NO: 24065 - DNA, 22 bp, Artificial Sequence
  chemically synthesized
aattagctcatgtgtcaaatgg

SEQ ID NO: 24066 - DNA, 22 bp, Artificial Sequence
  chemically synthesized
gctcatgtgtcaaatgggggta

SEQ ID NO: 24067 - DNA, 22 bp, Artificial Sequence
  chemically synthesized
atgtgtcaaatgggggtaaaat

SEQ ID NO: 24068 - DNA, 22 bp, Artificial Sequence
  chemically synthesized
agtttggagggaaagacaggct

SEQ ID NO: 24069 - DNA, 22 bp, Artificial Sequence
  chemically synthesized
gtttggagggaaagacaggctc

SEQ ID NO: 24070 - DNA, 22 bp, Artificial Sequence
  chemically synthesized
ggagggaaagacaggctctaaa

SEQ ID NO: 24071 - DNA, 22 bp, Artificial Sequence
  chemically synthesized
gagggaaagacaggctctaaaa

SEQ ID NO: 24072 - DNA, 22 bp, Artificial Sequence
  chemically synthesized
taaaagaggattaaaaattaga

SEQ ID NO: 24073 - DNA, 22 bp, Artificial Sequence
  chemically synthesized
aaagaggattaaaaattagatg

SEQ ID NO: 24074 - DNA, 22 bp, Artificial Sequence
  chemically synthesized
aaaattagatgtggcctaggca

SEQ ID NO: 24075 - DNA, 22 bp, Artificial Sequence
  chemically synthesized
gatgtggcctaggcaaagaatt

SEQ ID NO: 24076 - DNA, 22 bp, Artificial Sequence
  chemically synthesized
ggcaaagaatttatgaccaagt

SEQ ID NO: 24077 - DNA, 22 bp, Artificial Sequence
  chemically synthesized
atgaccaagtcctcaaaactaa

SEQ ID NO: 24078 - DNA, 22 bp, Artificial Sequence
  chemically synthesized
tgaccaagtcctcaaaactaaa

SEQ ID NO: 24079 - DNA, 22 bp, Artificial Sequence
  chemically synthesized
aaaactaaacacaacaaaaaca

SEQ ID NO: 24080 - DNA, 22 bp, Artificial Sequence
  chemically synthesized
aacacaacaaaaacaaaaacag

SEQ ID NO: 24081 - DNA, 22 bp, Artificial Sequence
  chemically synthesized
aattaaactaaaatgcttctgc

SEQ ID NO: 24082 - DNA, 22 bp, Artificial Sequence
  chemically synthesized
attaaactaaaatgcttctgca

SEQ ID NO: 24083 - DNA, 22 bp, Artificial Sequence
  chemically synthesized
aactaaaatgcttctgcaccgc

SEQ ID NO: 24084 - DNA, 22 bp, Artificial Sequence
  chemically synthesized
aaatgcttctgcaccgcaaaag

SEQ ID NO: 24085 - DNA, 22 bp, Artificial Sequence
  chemically synthesized
ctgcaccgcaaaagaccgaatc

SEQ ID NO: 24086 - DNA, 22 bp, Artificial Sequence
  chemically synthesized
tgcaccgcaaaagaccgaatca

SEQ ID NO: 24087 - DNA, 22 bp, Artificial Sequence
  chemically synthesized
caccgcaaaagaccgaatcaac

SEQ ID NO: 24088 - DNA, 22 bp, Artificial Sequence
  chemically synthesized
cagaatgagaaaaaaaaattgc

SEQ ID NO: 24089 - DNA, 22 bp, Artificial Sequence
  chemically synthesized
caaactatgaatgcaacaaaag

SEQ ID NO: 24090 - DNA, 22 bp, Artificial Sequence
  chemically synthesized
tgaatgcaacaaaaggctaata

SEQ ID NO: 24091 - DNA, 22 bp, Artificial Sequence
  chemically synthesized
atatacagaatctacaaggaac

SEQ ID NO: 24092 - DNA, 22 bp, Artificial Sequence
  chemically synthesized
caaggaactcaacaacaaaaaa

SEQ ID NO: 24093 - DNA, 22 bp, Artificial Sequence
  chemically synthesized
aacaacaaaaaaaccaacctca

SEQ ID NO: 24094 - DNA, 22 bp, Artificial Sequence
  chemically synthesized
attagaaagtgactgtgatggt

SEQ ID NO: 24095 - DNA, 22 bp, Artificial Sequence
  chemically synthesized
gaaagtgactgtgatggttaat

SEQ ID NO: 24096 - DNA, 22 bp, Artificial Sequence
  chemically synthesized
tgatggttaatactgagtgtca

SEQ ID NO: 24097 - DNA, 22 bp, Artificial Sequence
  chemically synthesized
atactgagtgtcaacttgattg

SEQ ID NO: 24098 - DNA, 22 bp, Artificial Sequence
  chemically synthesized
agtgtcaacttgattggactga

SEQ ID NO: 24099 - DNA, 22 bp, Artificial Sequence
  chemically synthesized
gattggactgaaggatgcaaag

SEQ ID NO: 24100 - DNA, 22 bp, Artificial Sequence
  chemically synthesized
attggactgaaggatgcaaagt

SEQ ID NO: 24101 - DNA, 22 bp, Artificial Sequence
  chemically synthesized
gactgaaggatgcaaagtaatg

SEQ ID NO: 24102 - DNA, 22 bp, Artificial Sequence
  chemically synthesized
aaggatgcaaagtaatgatctt

SEQ ID NO: 24103 - DNA, 22 bp, Artificial Sequence
  chemically synthesized
gggtgtgtctgtgagggtgtta

SEQ ID NO: 24104 - DNA, 22 bp, Artificial Sequence
  chemically synthesized
ggtgtgtctgtgagggtgttac

SEQ ID NO: 24105 - DNA, 22 bp, Artificial Sequence
  chemically synthesized
tgagggtgttaccaaaggagat

SEQ ID NO: 24106 - DNA, 22 bp, Artificial Sequence
  chemically synthesized
ccaaaggagattaatatttcag

SEQ ID NO: 24107 - DNA, 22 bp, Artificial Sequence
  chemically synthesized
atatttcagtcagtgggctggg

SEQ ID NO: 24108 - DNA, 22 bp, Artificial Sequence
  chemically synthesized
cagtcagtgggctggggaaggc

SEQ ID NO: 24109 - DNA, 22 bp, Artificial Sequence
  chemically synthesized
agtcagtgggctggggaaggca

SEQ ID NO: 24110 - DNA, 22 bp, Artificial Sequence
  chemically synthesized
gggaaggcagacccacccttaa

SEQ ID NO: 24111 - DNA, 22 bp, Artificial Sequence
  chemically synthesized
aatctgggtgggcaccatctaa

SEQ ID NO: 24112 - DNA, 22 bp, Artificial Sequence
  chemically synthesized
atctgggtgggcaccatctaat

SEQ ID NO: 24113 - DNA, 22 bp, Artificial Sequence
  chemically synthesized
ggtgggcaccatctaatcagtt

SEQ ID NO: 24114 - DNA, 22 bp, Artificial Sequence
  chemically synthesized
atcagttgccagcacagccagg

SEQ ID NO: 24115 - DNA, 22 bp, Artificial Sequence
  chemically synthesized
ccagcacagccaggatataaag

SEQ ID NO: 24116 - DNA, 22 bp, Artificial Sequence
  chemically synthesized
gattggcttggcatcccagcct

SEQ ID NO: 24117 - DNA, 22 bp, Artificial Sequence
  chemically synthesized
gcttggcatcccagcctacatt

SEQ ID NO: 24118 - DNA, 22 bp, Artificial Sequence
  chemically synthesized
ggcatcccagcctacatttttc

SEQ ID NO: 24119 - DNA, 22 bp, Artificial Sequence
  chemically synthesized
gcatcccagcctacatttttct

SEQ ID NO: 24120 - DNA, 22 bp, Artificial Sequence
  chemically synthesized
catttttctcccatgctggatt

SEQ ID NO: 24121 - DNA, 22 bp, Artificial Sequence
  chemically synthesized
ttctcccatgctggattcttcc

SEQ ID NO: 24122 - DNA, 22 bp, Artificial Sequence
  chemically synthesized
tctcccatgctggattcttcct

SEQ ID NO: 24123 - DNA, 22 bp, Artificial Sequence
  chemically synthesized
ctcccatgctggattcttcctg

SEQ ID NO: 24124 - DNA, 22 bp, Artificial Sequence
  chemically synthesized
tcccatgctggattcttcctgc

SEQ ID NO: 24125 - DNA, 22 bp, Artificial Sequence
  chemically synthesized
ccatgctggattcttcctgccc

SEQ ID NO: 24126 - DNA, 22 bp, Artificial Sequence
  chemically synthesized
gattcttcctgccctggaacat

SEQ ID NO: 24127 - DNA, 22 bp, Artificial Sequence
  chemically synthesized
ttcctgccctggaacattgaac

SEQ ID NO: 24128 - DNA, 22 bp, Artificial Sequence
  chemically synthesized
cctgccctggaacattgaactc

SEQ ID NO: 24129 - DNA, 22 bp, Artificial Sequence
  chemically synthesized
ctgccctggaacattgaactcc

SEQ ID NO: 24130 - DNA, 22 bp, Artificial Sequence
  chemically synthesized
ccctggaacattgaactccagg

SEQ ID NO: 24131 - DNA, 22 bp, Artificial Sequence
  chemically synthesized
gaacattgaactccaggttctt

SEQ ID NO: 24132 - DNA, 22 bp, Artificial Sequence
  chemically synthesized
aactccaggttcttcagctttg

SEQ ID NO: 24133 - DNA, 22 bp, Artificial Sequence
  chemically synthesized
caggttcttcagctttgggact

SEQ ID NO: 24134 - DNA, 22 bp, Artificial Sequence
  chemically synthesized
ttcagctttgggactccgacta

SEQ ID NO: 24135 - DNA, 22 bp, Artificial Sequence
  chemically synthesized
cagctttgggactccgactagc

SEQ ID NO: 24136 - DNA, 22 bp, Artificial Sequence
  chemically synthesized
agctttgggactccgactagct

SEQ ID NO: 24137 - DNA, 22 bp, Artificial Sequence
  chemically synthesized
tgggactccgactagcttcctt

SEQ ID NO: 24138 - DNA, 22 bp, Artificial Sequence
  chemically synthesized
gggactccgactagcttccttg

SEQ ID NO: 24139 - DNA, 22 bp, Artificial Sequence
  chemically synthesized
ggactccgactagcttccttgt

SEQ ID NO: 24140 - DNA, 22 bp, Artificial Sequence
  chemically synthesized
cgactagcttccttgttcctca

SEQ ID NO: 24141 - DNA, 22 bp, Artificial Sequence
  chemically synthesized
gcttccttgttcctcagctggc

SEQ ID NO: 24142 - DNA, 22 bp, Artificial Sequence
  chemically synthesized
ccttgttcctcagctggcagat

SEQ ID NO: 24143 - DNA, 22 bp, Artificial Sequence
  chemically synthesized
cttgttcctcagctggcagatg

SEQ ID NO: 24144 - DNA, 22 bp, Artificial Sequence
  chemically synthesized
gttcctcagctggcagatggcc

SEQ ID NO: 24145 - DNA, 22 bp, Artificial Sequence
  chemically synthesized
ttcctcagctggcagatggcct

SEQ ID NO: 24146 - DNA, 22 bp, Artificial Sequence
  chemically synthesized
ctcagctggcagatggcctgtt

SEQ ID NO: 24147 - DNA, 22 bp, Artificial Sequence
  chemically synthesized
agctggcagatggcctgttttg

SEQ ID NO: 24148 - DNA, 22 bp, Artificial Sequence
  chemically synthesized
gcagatggcctgttttgggacc

SEQ ID NO: 24149 - DNA, 22 bp, Artificial Sequence
  chemically synthesized
ttttgggaccttgtgaacatgt

SEQ ID NO: 24150 - DNA, 22 bp, Artificial Sequence
  chemically synthesized
tgggaccttgtgaacatgtgag

SEQ ID NO: 24151 - DNA, 22 bp, Artificial Sequence
  chemically synthesized
gggaccttgtgaacatgtgagt

SEQ ID NO: 24152 - DNA, 22 bp, Artificial Sequence
  chemically synthesized
ggaccttgtgaacatgtgagtc

SEQ ID NO: 24153 - DNA, 22 bp, Artificial Sequence
  chemically synthesized
gtgaacatgtgagtcaatacta

SEQ ID NO: 24154 - DNA, 22 bp, Artificial Sequence
  chemically synthesized
tgaacatgtgagtcaatactac

SEQ ID NO: 24155 - DNA, 22 bp, Artificial Sequence
  chemically synthesized
cataataaactctcatatagat

SEQ ID NO: 24156 - DNA, 22 bp, Artificial Sequence
  chemically synthesized
tcatatagatatagatatagag

SEQ ID NO: 24157 - DNA, 22 bp, Artificial Sequence
  chemically synthesized
atatagatatagatatagagat

SEQ ID NO: 24158 - DNA, 22 bp, Artificial Sequence
  chemically synthesized
ctattaattctgtttctctgta

SEQ ID NO: 24159 - DNA, 22 bp, Artificial Sequence
  chemically synthesized
ttaattctgtttctctgtagaa

SEQ ID NO: 24160 - DNA, 22 bp, Artificial Sequence
  chemically synthesized
attctgtttctctgtagaaccc

SEQ ID NO: 24161 - DNA, 22 bp, Artificial Sequence
  chemically synthesized
tgtttctctgtagaaccctaat

SEQ ID NO: 24162 - DNA, 22 bp, Artificial Sequence
  chemically synthesized
tttctctgtagaaccctaatac

SEQ ID NO: 24163 - DNA, 22 bp, Artificial Sequence
  chemically synthesized
ctctgtagaaccctaatacaga

SEQ ID NO: 24164 - DNA, 22 bp, Artificial Sequence
  chemically synthesized
tctgtagaaccctaatacagat

SEQ ID NO: 24165 - DNA, 22 bp, Artificial Sequence
  chemically synthesized
tgtagaaccctaatacagattt

SEQ ID NO: 24166 - DNA, 22 bp, Artificial Sequence
  chemically synthesized
tagaaccctaatacagattttg

SEQ ID NO: 24167 - DNA, 22 bp, Artificial Sequence
  chemically synthesized
atacagattttggtaccaggag

SEQ ID NO: 24168 - DNA, 22 bp, Artificial Sequence
  chemically synthesized
tggtaccaggagtggttctaga

SEQ ID NO: 24169 - DNA, 22 bp, Artificial Sequence
  chemically synthesized
ggtaccaggagtggttctagag

SEQ ID NO: 24170 - DNA, 22 bp, Artificial Sequence
  chemically synthesized
gtaccaggagtggttctagagg

SEQ ID NO: 24171 - DNA, 22 bp, Artificial Sequence
  chemically synthesized
tagaggaacagaatattaagga

SEQ ID NO: 24172 - DNA, 22 bp, Artificial Sequence
  chemically synthesized
gaggaacagaatattaaggatg

SEQ ID NO: 24173 - DNA, 22 bp, Artificial Sequence
  chemically synthesized
aggatggagttctttcattggt

SEQ ID NO: 24174 - DNA, 22 bp, Artificial Sequence
  chemically synthesized
tttcattggttttggggtttct

SEQ ID NO: 24175 - DNA, 22 bp, Artificial Sequence
  chemically synthesized
tcattggttttggggtttctgg

SEQ ID NO: 24176 - DNA, 22 bp, Artificial Sequence
  chemically synthesized
cattggttttggggtttctgga

SEQ ID NO: 24177 - DNA, 22 bp, Artificial Sequence
  chemically synthesized
attggttttggggtttctggag

SEQ ID NO: 24178 - DNA, 22 bp, Artificial Sequence
  chemically synthesized
gttttggggtttctggagttgg

SEQ ID NO: 24179 - DNA, 22 bp, Artificial Sequence
  chemically synthesized
tggggtttctggagttggctgc

SEQ ID NO: 24180 - DNA, 22 bp, Artificial Sequence
  chemically synthesized
ggggtttctggagttggctgct

SEQ ID NO: 24181 - DNA, 22 bp, Artificial Sequence
  chemically synthesized
gggtttctggagttggctgctt

SEQ ID NO: 24182 - DNA, 22 bp, Artificial Sequence
  chemically synthesized
ctggagttggctgcttaatatg

SEQ ID NO: 24183 - DNA, 22 bp, Artificial Sequence
  chemically synthesized
tggagttggctgcttaatatga

SEQ ID NO: 24184 - DNA, 22 bp, Artificial Sequence
  chemically synthesized
gagttggctgcttaatatgatt

SEQ ID NO: 24185 - DNA, 22 bp, Artificial Sequence
  chemically synthesized
gctgcttaatatgattagaccc

SEQ ID NO: 24186 - DNA, 22 bp, Artificial Sequence
  chemically synthesized
cttaatatgattagacccaaat

SEQ ID NO: 24187 - DNA, 22 bp, Artificial Sequence
  chemically synthesized
aatatgattagacccaaatatg

SEQ ID NO: 24188 - DNA, 22 bp, Artificial Sequence
  chemically synthesized
atatgattagacccaaatatgc

SEQ ID NO: 24189 - DNA, 22 bp, Artificial Sequence
  chemically synthesized
gacccaaatatgctaaggactc

SEQ ID NO: 24190 - DNA, 22 bp, Artificial Sequence
  chemically synthesized
aggactcttcttctaatggtat

SEQ ID NO: 24191 - DNA, 22 bp, Artificial Sequence
  chemically synthesized
ttcttctaatggtatggagaac

SEQ ID NO: 24192 - DNA, 22 bp, Artificial Sequence
  chemically synthesized
cttctaatggtatggagaacac

SEQ ID NO: 24193 - DNA, 22 bp, Artificial Sequence
  chemically synthesized
ttctaatggtatggagaacact

SEQ ID NO: 24194 - DNA, 22 bp, Artificial Sequence
  chemically synthesized
ctaatggtatggagaacactga

SEQ ID NO: 24195 - DNA, 22 bp, Artificial Sequence
  chemically synthesized
taatggtatggagaacactgat

SEQ ID NO: 24196 - DNA, 22 bp, Artificial Sequence
  chemically synthesized
atggtatggagaacactgataa

SEQ ID NO: 24197 - DNA, 22 bp, Artificial Sequence
  chemically synthesized
ataatccttggcatcaattgtt

SEQ ID NO: 24198 - DNA, 22 bp, Artificial Sequence
  chemically synthesized
ggcatcaattgtttagagagtt

SEQ ID NO: 24199 - DNA, 22 bp, Artificial Sequence
  chemically synthesized
gcatcaattgtttagagagtta

SEQ ID NO: 24200 - DNA, 22 bp, Artificial Sequence
  chemically synthesized
tttagagagttatgcaaaataa

SEQ ID NO: 24201 - DNA, 22 bp, Artificial Sequence
  chemically synthesized
agagagttatgcaaaataaatg

SEQ ID NO: 24202 - DNA, 22 bp, Artificial Sequence
  chemically synthesized
gagagttatgcaaaataaatgc

SEQ ID NO: 24203 - DNA, 22 bp, Artificial Sequence
  chemically synthesized
tgcaaaataaatgcatttgaca

SEQ ID NO: 24204 - DNA, 22 bp, Artificial Sequence
  chemically synthesized
gacactcttgattcaacgcttg

SEQ ID NO: 24205 - DNA, 22 bp, Artificial Sequence
  chemically synthesized
acactcttgattcaacgcttgt

SEQ ID NO: 24206 - DNA, 22 bp, Artificial Sequence
  chemically synthesized
ttgattcaacgcttgtgagagg

SEQ ID NO: 24207 - DNA, 22 bp, Artificial Sequence
  chemically synthesized
gattcaacgcttgtgagaggca

SEQ ID NO: 24208 - DNA, 22 bp, Artificial Sequence
  chemically synthesized
attcaacgcttgtgagaggcaa

SEQ ID NO: 24209 - DNA, 22 bp, Artificial Sequence
  chemically synthesized
aacgcttgtgagaggcaaggaa

SEQ ID NO: 24210 - DNA, 22 bp, Artificial Sequence
  chemically synthesized
gtgagaggcaaggaatttagct

SEQ ID NO: 24211 - DNA, 22 bp, Artificial Sequence
  chemically synthesized
tgagaggcaaggaatttagcta

SEQ ID NO: 24212 - DNA, 22 bp, Artificial Sequence
  chemically synthesized
agctactgtatacataatactt

SEQ ID NO: 24213 - DNA, 22 bp, Artificial Sequence
  chemically synthesized
gctactgtatacataatacttt

SEQ ID NO: 24214 - DNA, 22 bp, Artificial Sequence
  chemically synthesized
ctgtatacataatacttttgac

SEQ ID NO: 24215 - DNA, 22 bp, Artificial Sequence
  chemically synthesized
tatacataatacttttgactat

SEQ ID NO: 24216 - DNA, 22 bp, Artificial Sequence
  chemically synthesized
ttgactatatgtggagaatcaa

SEQ ID NO: 24217 - DNA, 22 bp, Artificial Sequence
  chemically synthesized
tgactatatgtggagaatcaag

SEQ ID NO: 24218 - DNA, 22 bp, Artificial Sequence
  chemically synthesized
gactatatgtggagaatcaagg

SEQ ID NO: 24219 - DNA, 22 bp, Artificial Sequence
  chemically synthesized
actatatgtggagaatcaagga

SEQ ID NO: 24220 - DNA, 22 bp, Artificial Sequence
  chemically synthesized
tatgtggagaatcaaggaacat

SEQ ID NO: 24221 - DNA, 22 bp, Artificial Sequence
  chemically synthesized
gttggttgcttgtaagttcgct

SEQ ID NO: 24222 - DNA, 22 bp, Artificial Sequence
  chemically synthesized
gttgcttgtaagttcgctggac

SEQ ID NO: 24223 - DNA, 22 bp, Artificial Sequence
  chemically synthesized
cttgtaagttcgctggacaaag

SEQ ID NO: 24224 - DNA, 22 bp, Artificial Sequence
  chemically synthesized
gtaagttcgctggacaaagtga

SEQ ID NO: 24225 - DNA, 22 bp, Artificial Sequence
  chemically synthesized
taagttcgctggacaaagtgat

SEQ ID NO: 24226 - DNA, 22 bp, Artificial Sequence
  chemically synthesized
gctggacaaagtgatgaaagaa

SEQ ID NO: 24227 - DNA, 22 bp, Artificial Sequence
  chemically synthesized
gacaaagtgatgaaagaaaatg

SEQ ID NO: 24228 - DNA, 22 bp, Artificial Sequence
  chemically synthesized
aggagtatatcaactctccagc

SEQ ID NO: 24229 - DNA, 22 bp, Artificial Sequence
  chemically synthesized
tccagctttgtgccataatctt

SEQ ID NO: 24230 - DNA, 22 bp, Artificial Sequence
  chemically synthesized
cagctttgtgccataatcttat

SEQ ID NO: 24231 - DNA, 22 bp, Artificial Sequence
  chemically synthesized
tgtgccataatcttatttggag

SEQ ID NO: 24232 - DNA, 22 bp, Artificial Sequence
  chemically synthesized
gtgccataatcttatttggaga

SEQ ID NO: 24233 - DNA, 22 bp, Artificial Sequence
  chemically synthesized
tgccataatcttatttggagag

SEQ ID NO: 24234 - DNA, 22 bp, Artificial Sequence
  chemically synthesized
atttggagagaacttgctcacc

SEQ ID NO: 24235 - DNA, 22 bp, Artificial Sequence
  chemically synthesized
tttggagagaacttgctcacct

SEQ ID NO: 24236 - DNA, 22 bp, Artificial Sequence
  chemically synthesized
ggagagaacttgctcacctttc

SEQ ID NO: 24237 - DNA, 22 bp, Artificial Sequence
  chemically synthesized
gagagaacttgctcacctttca

SEQ ID NO: 24238 - DNA, 22 bp, Artificial Sequence
  chemically synthesized
gctcacctttcacttccacaag

SEQ ID NO: 24239 - DNA, 22 bp, Artificial Sequence
  chemically synthesized
ctcacctttcacttccacaaga

SEQ ID NO: 24240 - DNA, 22 bp, Artificial Sequence
  chemically synthesized
acctttcacttccacaagatat

SEQ ID NO: 24241 - DNA, 22 bp, Artificial Sequence
  chemically synthesized
tcacttccacaagatatcacag

SEQ ID NO: 24242 - DNA, 22 bp, Artificial Sequence
  chemically synthesized
cacttccacaagatatcacagt

SEQ ID NO: 24243 - DNA, 22 bp, Artificial Sequence
  chemically synthesized
acttccacaagatatcacagtg

SEQ ID NO: 24244 - DNA, 22 bp, Artificial Sequence
  chemically synthesized
ccacaagatatcacagtggtcc

SEQ ID NO: 24245 - DNA, 22 bp, Artificial Sequence
  chemically synthesized
cacaagatatcacagtggtcca

SEQ ID NO: 24246 - DNA, 22 bp, Artificial Sequence
  chemically synthesized
cattgatgacatgctgactgga

SEQ ID NO: 24247 - DNA, 22 bp, Artificial Sequence
  chemically synthesized
atgacatgctgactggaactag

SEQ ID NO: 24248 - DNA, 22 bp, Artificial Sequence
  chemically synthesized
actggaactagtgagcaagaag

SEQ ID NO: 24249 - DNA, 22 bp, Artificial Sequence
  chemically synthesized
gaactagtgagcaagaagtagc

SEQ ID NO: 24250 - DNA, 22 bp, Artificial Sequence
  chemically synthesized
gtgagcaagaagtagcaaacac

SEQ ID NO: 24251 - DNA, 22 bp, Artificial Sequence
  chemically synthesized
gatttattgatgagacatttgt

SEQ ID NO: 24252 - DNA, 22 bp, Artificial Sequence
  chemically synthesized
attgatgagacatttgtgggac

SEQ ID NO: 24253 - DNA, 22 bp, Artificial Sequence
  chemically synthesized
ttgatgagacatttgtgggaca

SEQ ID NO: 24254 - DNA, 22 bp, Artificial Sequence
  chemically synthesized
atgagacatttgtgggacagag

SEQ ID NO: 24255 - DNA, 22 bp, Artificial Sequence
  chemically synthesized
gtgggacagaggatgggaaata

SEQ ID NO: 24256 - DNA, 22 bp, Artificial Sequence
  chemically synthesized
tgggacagaggatgggaaataa

SEQ ID NO: 24257 - DNA, 22 bp, Artificial Sequence
  chemically synthesized
attaaattcagggaccttctac

SEQ ID NO: 24258 - DNA, 22 bp, Artificial Sequence
  chemically synthesized
aattcagggaccttctacctca

SEQ ID NO: 24259 - DNA, 22 bp, Artificial Sequence
  chemically synthesized
agggaccttctacctcagtaaa

SEQ ID NO: 24260 - DNA, 22 bp, Artificial Sequence
  chemically synthesized
ctacctcagtaaaatttatagg

SEQ ID NO: 24261 - DNA, 22 bp, Artificial Sequence
  chemically synthesized
tacctcagtaaaatttataggg

SEQ ID NO: 24262 - DNA, 22 bp, Artificial Sequence
  chemically synthesized
cctcagtaaaatttataggggt

SEQ ID NO: 24263 - DNA, 22 bp, Artificial Sequence
  chemically synthesized
agtaaaatttataggggtccaa

SEQ ID NO: 24264 - DNA, 22 bp, Artificial Sequence
  chemically synthesized
ataggggtccaatggtttgggg

SEQ ID NO: 24265 - DNA, 22 bp, Artificial Sequence
  chemically synthesized
taggggtccaatggtttggggc

SEQ ID NO: 24266 - DNA, 22 bp, Artificial Sequence
  chemically synthesized
ggggctctttgagatattcctt

SEQ ID NO: 24267 - DNA, 22 bp, Artificial Sequence
  chemically synthesized
gggctctttgagatattccttc

SEQ ID NO: 24268 - DNA, 22 bp, Artificial Sequence
  chemically synthesized
tttgagatattccttctaaagt

SEQ ID NO: 24269 - DNA, 22 bp, Artificial Sequence
  chemically synthesized
tgagatattccttctaaagtga

SEQ ID NO: 24270 - DNA, 22 bp, Artificial Sequence
  chemically synthesized
gagatattccttctaaagtgaa

SEQ ID NO: 24271 - DNA, 22 bp, Artificial Sequence
  chemically synthesized
agatattccttctaaagtgaag

SEQ ID NO: 24272 - DNA, 22 bp, Artificial Sequence
  chemically synthesized
cttctaaagtgaaggataattt

SEQ ID NO: 24273 - DNA, 22 bp, Artificial Sequence
  chemically synthesized
ctaaagtgaaggataatttgct

SEQ ID NO: 24274 - DNA, 22 bp, Artificial Sequence
  chemically synthesized
taaagtgaaggataatttgctg

SEQ ID NO: 24275 - DNA, 22 bp, Artificial Sequence
  chemically synthesized
aagtgaaggataatttgctgca

SEQ ID NO: 24276 - DNA, 22 bp, Artificial Sequence
  chemically synthesized
gctgcatttggccactcttaca

SEQ ID NO: 24277 - DNA, 22 bp, Artificial Sequence
  chemically synthesized
ctgcatttggccactcttacaa

SEQ ID NO: 24278 - DNA, 22 bp, Artificial Sequence
  chemically synthesized
catttggccactcttacaacca

SEQ ID NO: 24279 - DNA, 22 bp, Artificial Sequence
  chemically synthesized
ggccactcttacaaccaagaaa

SEQ ID NO: 24280 - DNA, 22 bp, Artificial Sequence
  chemically synthesized
gccactcttacaaccaagaaat

SEQ ID NO: 24281 - DNA, 22 bp, Artificial Sequence
  chemically synthesized
ttacaaccaagaaataggcaca

SEQ ID NO: 24282 - DNA, 22 bp, Artificial Sequence
  chemically synthesized
acaaccaagaaataggcacaac

SEQ ID NO: 24283 - DNA, 22 bp, Artificial Sequence
  chemically synthesized
caaccaagaaataggcacaacg

SEQ ID NO: 24284 - DNA, 22 bp, Artificial Sequence
  chemically synthesized
gtgggcctatttggattttgga

SEQ ID NO: 24285 - DNA, 22 bp, Artificial Sequence
  chemically synthesized
tttggattttggaggcaacata

SEQ ID NO: 24286 - DNA, 22 bp, Artificial Sequence
  chemically synthesized
ggattttggaggcaacatattc

SEQ ID NO: 24287 - DNA, 22 bp, Artificial Sequence
  chemically synthesized
gattttggaggcaacatattcc

SEQ ID NO: 24288 - DNA, 22 bp, Artificial Sequence
  chemically synthesized
tggaggcaacatattcctgatt

SEQ ID NO: 24289 - DNA, 22 bp, Artificial Sequence
  chemically synthesized
ggaggcaacatattcctgattt

SEQ ID NO: 24290 - DNA, 22 bp, Artificial Sequence
  chemically synthesized
gaggcaacatattcctgatttg

SEQ ID NO: 24291 - DNA, 22 bp, Artificial Sequence
  chemically synthesized
ctgatttgggtgtgttactctg

SEQ ID NO: 24292 - DNA, 22 bp, Artificial Sequence
  chemically synthesized
atttgggtgtgttactctggcc

SEQ ID NO: 24293 - DNA, 22 bp, Artificial Sequence
  chemically synthesized
gggtgtgttactctggcccatt

SEQ ID NO: 24294 - DNA, 22 bp, Artificial Sequence
  chemically synthesized
ggtgtgttactctggcccattt

SEQ ID NO: 24295 - DNA, 22 bp, Artificial Sequence
  chemically synthesized
ctctggcccatttatcgagtga

SEQ ID NO: 24296 - DNA, 22 bp, Artificial Sequence
  chemically synthesized
tggcccatttatcgagtgatcc

SEQ ID NO: 24297 - DNA, 22 bp, Artificial Sequence
  chemically synthesized
gcccatttatcgagtgatccaa

SEQ ID NO: 24298 - DNA, 22 bp, Artificial Sequence
  chemically synthesized
atcgagtgatccaaaaggctgc

SEQ ID NO: 24299 - DNA, 22 bp, Artificial Sequence
  chemically synthesized
tcgagtgatccaaaaggctgcc

SEQ ID NO: 24300 - DNA, 22 bp, Artificial Sequence
  chemically synthesized
ccagttttgagtggagtccaga

SEQ ID NO: 24301 - DNA, 22 bp, Artificial Sequence
  chemically synthesized
tgagtggagtccagaacagaag

SEQ ID NO: 24302 - DNA, 22 bp, Artificial Sequence
  chemically synthesized
gagtggagtccagaacagaagg

SEQ ID NO: 24303 - DNA, 22 bp, Artificial Sequence
  chemically synthesized
agtggagtccagaacagaaggc

SEQ ID NO: 24304 - DNA, 22 bp, Artificial Sequence
  chemically synthesized
tgccacaggtccaggctgctgt

SEQ ID NO: 24305 - DNA, 22 bp, Artificial Sequence
  chemically synthesized
ccacaggtccaggctgctgtgc

SEQ ID NO: 24306 - DNA, 22 bp, Artificial Sequence
  chemically synthesized
ctgtgcaagctgctatgccact

SEQ ID NO: 24307 - DNA, 22 bp, Artificial Sequence
  chemically synthesized
tgcaagctgctatgccacttgg

SEQ ID NO: 24308 - DNA, 22 bp, Artificial Sequence
  chemically synthesized
ctatgccacttgggccatatga

SEQ ID NO: 24309 - DNA, 22 bp, Artificial Sequence
  chemically synthesized
tgccacttgggccatatgacct

SEQ ID NO: 24310 - DNA, 22 bp, Artificial Sequence
  chemically synthesized
gggccatatgacctagcagatc

SEQ ID NO: 24311 - DNA, 22 bp, Artificial Sequence
  chemically synthesized
ggccatatgacctagcagatcc

SEQ ID NO: 24312 - DNA, 22 bp, Artificial Sequence
  chemically synthesized
gcagatccaatgatgcttgagg

SEQ ID NO: 24313 - DNA, 22 bp, Artificial Sequence
  chemically synthesized
gaggtgtcagtgccagataggg

SEQ ID NO: 24314 - DNA, 22 bp, Artificial Sequence
  chemically synthesized
aggtgtcagtgccagataggga

SEQ ID NO: 24315 - DNA, 22 bp, Artificial Sequence
  chemically synthesized
tttggagcatttggcaggctga

SEQ ID NO: 24316 - DNA, 22 bp, Artificial Sequence
  chemically synthesized
ggagcatttggcaggctgaatc

SEQ ID NO: 24317 - DNA, 22 bp, Artificial Sequence
  chemically synthesized
gagcatttggcaggctgaatca

SEQ ID NO: 24318 - DNA, 22 bp, Artificial Sequence
  chemically synthesized
ggcaggctgaatcacagcggag

SEQ ID NO: 24319 - DNA, 22 bp, Artificial Sequence
  chemically synthesized
gcaggctgaatcacagcggagg

SEQ ID NO: 24320 - DNA, 22 bp, Artificial Sequence
  chemically synthesized
aatcacagcggaggcctctagg

SEQ ID NO: 24321 - DNA, 22 bp, Artificial Sequence
  chemically synthesized
taggattttggagcaaggccct

SEQ ID NO: 24322 - DNA, 22 bp, Artificial Sequence
  chemically synthesized
ggattttggagcaaggccctgc

SEQ ID NO: 24323 - DNA, 22 bp, Artificial Sequence
  chemically synthesized
tggagcaaggccctgccatctt

SEQ ID NO: 24324 - DNA, 22 bp, Artificial Sequence
  chemically synthesized
ggagcaaggccctgccatcttc

SEQ ID NO: 24325 - DNA, 22 bp, Artificial Sequence
  chemically synthesized
gagcaaggccctgccatcttct

SEQ ID NO: 24326 - DNA, 22 bp, Artificial Sequence
  chemically synthesized
ccatcttctgcagataactact

SEQ ID NO: 24327 - DNA, 22 bp, Artificial Sequence
  chemically synthesized
ctgcagataactactctctttt

SEQ ID NO: 24328 - DNA, 22 bp, Artificial Sequence
  chemically synthesized
tgcagataactactctctttta

SEQ ID NO: 24329 - DNA, 22 bp, Artificial Sequence
  chemically synthesized
cagataactactctcttttagg

SEQ ID NO: 24330 - DNA, 22 bp, Artificial Sequence
  chemically synthesized
ctctcttttagggagaaagctc

SEQ ID NO: 24331 - DNA, 22 bp, Artificial Sequence
  chemically synthesized
tcttttagggagaaagctcttg

SEQ ID NO: 24332 - DNA, 22 bp, Artificial Sequence
  chemically synthesized
ttttagggagaaagctcttggc

SEQ ID NO: 24333 - DNA, 22 bp, Artificial Sequence
  chemically synthesized
ttagggagaaagctcttggcct

SEQ ID NO: 24334 - DNA, 22 bp, Artificial Sequence
  chemically synthesized
tagggagaaagctcttggcctg

SEQ ID NO: 24335 - DNA, 22 bp, Artificial Sequence
  chemically synthesized
agggagaaagctcttggcctgt

SEQ ID NO: 24336 - DNA, 22 bp, Artificial Sequence
  chemically synthesized
gggagaaagctcttggcctgtt

SEQ ID NO: 24337 - DNA, 22 bp, Artificial Sequence
  chemically synthesized
ttggcctgttactgggctttgg

SEQ ID NO: 24338 - DNA, 22 bp, Artificial Sequence
  chemically synthesized
ggcctgttactgggctttggtg

SEQ ID NO: 24339 - DNA, 22 bp, Artificial Sequence
  chemically synthesized
gcctgttactgggctttggtgg

SEQ ID NO: 24340 - DNA, 22 bp, Artificial Sequence
  chemically synthesized
ttactgggctttggtggaaacg

SEQ ID NO: 24341 - DNA, 22 bp, Artificial Sequence
  chemically synthesized
ctgggctttggtggaaacgaaa

SEQ ID NO: 24342 - DNA, 22 bp, Artificial Sequence
  chemically synthesized
ggctttggtggaaacgaaatat

SEQ ID NO: 24343 - DNA, 22 bp, Artificial Sequence
  chemically synthesized
tggtggaaacgaaatatttgac

SEQ ID NO: 24344 - DNA, 22 bp, Artificial Sequence
  chemically synthesized
ggtggaaacgaaatatttgact

SEQ ID NO: 24345 - DNA, 22 bp, Artificial Sequence
  chemically synthesized
gtggaaacgaaatatttgacta

SEQ ID NO: 24346 - DNA, 22 bp, Artificial Sequence
  chemically synthesized
gactatgagtcatcaagtcacc

SEQ ID NO: 24347 - DNA, 22 bp, Artificial Sequence
  chemically synthesized
actatgagtcatcaagtcacca

SEQ ID NO: 24348 - DNA, 22 bp, Artificial Sequence
  chemically synthesized
tgagtcatcaagtcaccatgtg

SEQ ID NO: 24349 - DNA, 22 bp, Artificial Sequence
  chemically synthesized
aactgcctatcatgaactgggt

SEQ ID NO: 24350 - DNA, 22 bp, Artificial Sequence
  chemically synthesized
cctatcatgaactgggtgcttt

SEQ ID NO: 24351 - DNA, 22 bp, Artificial Sequence
  chemically synthesized
tcatgaactgggtgctttctga

SEQ ID NO: 24352 - DNA, 22 bp, Artificial Sequence
  chemically synthesized
ggtgctttctgatccatctagc

SEQ ID NO: 24353 - DNA, 22 bp, Artificial Sequence
  chemically synthesized
tctgatccatctagccataaag

SEQ ID NO: 24354 - DNA, 22 bp, Artificial Sequence
  chemically synthesized
ctgatccatctagccataaagt

SEQ ID NO: 24355 - DNA, 22 bp, Artificial Sequence
  chemically synthesized
tgatccatctagccataaagtg

SEQ ID NO: 24356 - DNA, 22 bp, Artificial Sequence
  chemically synthesized
atccatctagccataaagtggg

SEQ ID NO: 24357 - DNA, 22 bp, Artificial Sequence
  chemically synthesized
gccataaagtgggctgtgcaca

SEQ ID NO: 24358 - DNA, 22 bp, Artificial Sequence
  chemically synthesized
tgcacagcagcattgcatcagc

SEQ ID NO: 24359 - DNA, 22 bp, Artificial Sequence
  chemically synthesized
catcagcaaatggaagtggtat

SEQ ID NO: 24360 - DNA, 22 bp, Artificial Sequence
  chemically synthesized
ggcttgagcagatcctgaaggc

SEQ ID NO: 24361 - DNA, 22 bp, Artificial Sequence
  chemically synthesized
gagcagatcctgaaggcactag

SEQ ID NO: 24362 - DNA, 22 bp, Artificial Sequence
  chemically synthesized
agcagatcctgaaggcactagt

SEQ ID NO: 24363 - DNA, 22 bp, Artificial Sequence
  chemically synthesized
aaggcactagtaagttacatga

SEQ ID NO: 24364 - DNA, 22 bp, Artificial Sequence
  chemically synthesized
gtaagttacatgagaaaggggc

SEQ ID NO: 24365 - DNA, 22 bp, Artificial Sequence
  chemically synthesized
catgagaaaggggctcaaatgc

SEQ ID NO: 24366 - DNA, 22 bp, Artificial Sequence
  chemically synthesized
aaatgcccatggtctccactcc

SEQ ID NO: 24367 - DNA, 22 bp, Artificial Sequence
  chemically synthesized
cactcctgacacactgctttct

SEQ ID NO: 24368 - DNA, 22 bp, Artificial Sequence
  chemically synthesized
ctgacacactgctttctctccc

SEQ ID NO: 24369 - DNA, 22 bp, Artificial Sequence
  chemically synthesized
acacactgctttctctccctga

SEQ ID NO: 24370 - DNA, 22 bp, Artificial Sequence
  chemically synthesized
ctttctctccctgagactgcac

SEQ ID NO: 24371 - DNA, 22 bp, Artificial Sequence
  chemically synthesized
tctctccctgagactgcaccga

SEQ ID NO: 24372 - DNA, 22 bp, Artificial Sequence
  chemically synthesized
ctctccctgagactgcaccgat

SEQ ID NO: 24373 - DNA, 22 bp, Artificial Sequence
  chemically synthesized
tctccctgagactgcaccgatg

SEQ ID NO: 24374 - DNA, 22 bp, Artificial Sequence
  chemically synthesized
tccctgagactgcaccgatggt

SEQ ID NO: 24375 - DNA, 22 bp, Artificial Sequence
  chemically synthesized
cctgagactgcaccgatggtct

SEQ ID NO: 24376 - DNA, 22 bp, Artificial Sequence
  chemically synthesized
agactgcaccgatggtctcatg

SEQ ID NO: 24377 - DNA, 22 bp, Artificial Sequence
  chemically synthesized
caccgatggtctcatggggagt

SEQ ID NO: 24378 - DNA, 22 bp, Artificial Sequence
  chemically synthesized
atggggagttccctatgatcag

SEQ ID NO: 24379 - DNA, 22 bp, Artificial Sequence
  chemically synthesized
cctatgatcagctgacagagga

SEQ ID NO: 24380 - DNA, 22 bp, Artificial Sequence
  chemically synthesized
tgatcagctgacagaggaagag

SEQ ID NO: 24381 - DNA, 22 bp, Artificial Sequence
  chemically synthesized
acagaggaagagaagactaggt

SEQ ID NO: 24382 - DNA, 22 bp, Artificial Sequence
  chemically synthesized
ggtcctggttcacagatagttc

SEQ ID NO: 24383 - DNA, 22 bp, Artificial Sequence
  chemically synthesized
gttcacagatagttctgcacga

SEQ ID NO: 24384 - DNA, 22 bp, Artificial Sequence
  chemically synthesized
acagatagttctgcacgatatg

SEQ ID NO: 24385 - DNA, 22 bp, Artificial Sequence
  chemically synthesized
tgcacgatatgcaggcaccacc

SEQ ID NO: 24386 - DNA, 22 bp, Artificial Sequence
  chemically synthesized
cacgatatgcaggcaccaccca

SEQ ID NO: 24387 - DNA, 22 bp, Artificial Sequence
  chemically synthesized
cagcccctttctaggacatccc

SEQ ID NO: 24388 - DNA, 22 bp, Artificial Sequence
  chemically synthesized
tctaggacatccctgaaggaca

SEQ ID NO: 24389 - DNA, 22 bp, Artificial Sequence
  chemically synthesized
ctaggacatccctgaaggacaa

SEQ ID NO: 24390 - DNA, 22 bp, Artificial Sequence
  chemically synthesized
taggacatccctgaaggacaac

SEQ ID NO: 24391 - DNA, 22 bp, Artificial Sequence
  chemically synthesized
ggacatccctgaaggacaacgg

SEQ ID NO: 24392 - DNA, 22 bp, Artificial Sequence
  chemically synthesized
aaggacaacggtgaagggaaat

SEQ ID NO: 24393 - DNA, 22 bp, Artificial Sequence
  chemically synthesized
cctagttggcagaactttgagc

SEQ ID NO: 24394 - DNA, 22 bp, Artificial Sequence
  chemically synthesized
ctagttggcagaactttgagca

SEQ ID NO: 24395 - DNA, 22 bp, Artificial Sequence
  chemically synthesized
gttggcagaactttgagcagtg

SEQ ID NO: 24396 - DNA, 22 bp, Artificial Sequence
  chemically synthesized
gcagaactttgagcagtgtgcc

SEQ ID NO: 24397 - DNA, 22 bp, Artificial Sequence
  chemically synthesized
tgagcagtgtgcctggttgtgc

SEQ ID NO: 24398 - DNA, 22 bp, Artificial Sequence
  chemically synthesized
gagcagtgtgcctggttgtgca

SEQ ID NO: 24399 - DNA, 22 bp, Artificial Sequence
  chemically synthesized
agcagtgtgcctggttgtgcac

SEQ ID NO: 24400 - DNA, 22 bp, Artificial Sequence
  chemically synthesized
gttgtgcactttgcacagaagg

SEQ ID NO: 24401 - DNA, 22 bp, Artificial Sequence
  chemically synthesized
tgcactttgcacagaaggagaa

SEQ ID NO: 24402 - DNA, 22 bp, Artificial Sequence
  chemically synthesized
tgcacagaaggagaaatggcca

SEQ ID NO: 24403 - DNA, 22 bp, Artificial Sequence
  chemically synthesized
gcacagaaggagaaatggccag

SEQ ID NO: 24404 - DNA, 22 bp, Artificial Sequence
  chemically synthesized
cacagaaggagaaatggccaga

SEQ ID NO: 24405 - DNA, 22 bp, Artificial Sequence
  chemically synthesized
gcgattatatacttattcatgg

SEQ ID NO: 24406 - DNA, 22 bp, Artificial Sequence
  chemically synthesized
cgattatatacttattcatggg

SEQ ID NO: 24407 - DNA, 22 bp, Artificial Sequence
  chemically synthesized
tatacttattcatgggctgtag

SEQ ID NO: 24408 - DNA, 22 bp, Artificial Sequence
  chemically synthesized
attcatgggctgtagccaaagg

SEQ ID NO: 24409 - DNA, 22 bp, Artificial Sequence
  chemically synthesized
ttcatgggctgtagccaaaggt

SEQ ID NO: 24410 - DNA, 22 bp, Artificial Sequence
  chemically synthesized
atgggctgtagccaaaggtttg

SEQ ID NO: 24411 - DNA, 22 bp, Artificial Sequence
  chemically synthesized
tagccaaaggtttggctagatg

SEQ ID NO: 24412 - DNA, 22 bp, Artificial Sequence
  chemically synthesized
ggctagatggtcagggacttgg

SEQ ID NO: 24413 - DNA, 22 bp, Artificial Sequence
  chemically synthesized
gctagatggtcagggacttgga

SEQ ID NO: 24414 - DNA, 22 bp, Artificial Sequence
  chemically synthesized
gatggtcagggacttggaaaaa

SEQ ID NO: 24415 - DNA, 22 bp, Artificial Sequence
  chemically synthesized
ggaaaaagcatgactggaaaat

SEQ ID NO: 24416 - DNA, 22 bp, Artificial Sequence
  chemically synthesized
gaaaaagcatgactggaaaatt

SEQ ID NO: 24417 - DNA, 22 bp, Artificial Sequence
  chemically synthesized
gaaaattgatgacaaagaaatt

SEQ ID NO: 24418 - DNA, 22 bp, Artificial Sequence
  chemically synthesized
atgacaaagaaatttggggaag

SEQ ID NO: 24419 - DNA, 22 bp, Artificial Sequence
  chemically synthesized
ggggaagaggtatgtggatgga

SEQ ID NO: 24420 - DNA, 22 bp, Artificial Sequence
  chemically synthesized
gggaagaggtatgtggatggac

SEQ ID NO: 24421 - DNA, 22 bp, Artificial Sequence
  chemically synthesized
tatgattagtcaaaaactacaa

SEQ ID NO: 24422 - DNA, 22 bp, Artificial Sequence
  chemically synthesized
tgattagtcaaaaactacaaag

SEQ ID NO: 24423 - DNA, 22 bp, Artificial Sequence
  chemically synthesized
gtcaaaaactacaaagatattt

SEQ ID NO: 24424 - DNA, 22 bp, Artificial Sequence
  chemically synthesized
caaagatattttcatcccatgt

SEQ ID NO: 24425 - DNA, 22 bp, Artificial Sequence
  chemically synthesized
tcatcccatgtgagtgctcacc

SEQ ID NO: 24426 - DNA, 22 bp, Artificial Sequence
  chemically synthesized
catcccatgtgagtgctcacca

SEQ ID NO: 24427 - DNA, 22 bp, Artificial Sequence
  chemically synthesized
atcccatgtgagtgctcaccaa

SEQ ID NO: 24428 - DNA, 22 bp, Artificial Sequence
  chemically synthesized
accaatgggtgacctcagcaga

SEQ ID NO: 24429 - DNA, 22 bp, Artificial Sequence
  chemically synthesized
agcagaagaggattttaataat

SEQ ID NO: 24430 - DNA, 22 bp, Artificial Sequence
  chemically synthesized
taataatcaagtggataggatg

SEQ ID NO: 24431 - DNA, 22 bp, Artificial Sequence
  chemically synthesized
aataatcaagtggataggatga

SEQ ID NO: 24432 - DNA, 22 bp, Artificial Sequence
  chemically synthesized
ataatcaagtggataggatgat

SEQ ID NO: 24433 - DNA, 22 bp, Artificial Sequence
  chemically synthesized
tgtggacaccactcagcctttt

SEQ ID NO: 24434 - DNA, 22 bp, Artificial Sequence
  chemically synthesized
tggacaccactcagccttttcc

SEQ ID NO: 24435 - DNA, 22 bp, Artificial Sequence
  chemically synthesized
agccttttcccaggccactcat

SEQ ID NO: 24436 - DNA, 22 bp, Artificial Sequence
  chemically synthesized
ttcccaggccactcatgtcatc

SEQ ID NO: 24437 - DNA, 22 bp, Artificial Sequence
  chemically synthesized
tcccaggccactcatgtcatcg

SEQ ID NO: 24438 - DNA, 22 bp, Artificial Sequence
  chemically synthesized
cccaggccactcatgtcatcgt

SEQ ID NO: 24439 - DNA, 22 bp, Artificial Sequence
  chemically synthesized
ccaggccactcatgtcatcgtc

SEQ ID NO: 24440 - DNA, 22 bp, Artificial Sequence
  chemically synthesized
atgtcatcgtccaatggaccca

SEQ ID NO: 24441 - DNA, 22 bp, Artificial Sequence
  chemically synthesized
cagggatggaagttatgcttgg

SEQ ID NO: 24442 - DNA, 22 bp, Artificial Sequence
  chemically synthesized
tgcttgggctcagcaacatgga

SEQ ID NO: 24443 - DNA, 22 bp, Artificial Sequence
  chemically synthesized
gggctcagcaacatggacttcc

SEQ ID NO: 24444 - DNA, 22 bp, Artificial Sequence
  chemically synthesized
ggctcagcaacatggacttcca

SEQ ID NO: 24445 - DNA, 22 bp, Artificial Sequence
  chemically synthesized
agcaacatggacttccactcac

SEQ ID NO: 24446 - DNA, 22 bp, Artificial Sequence
  chemically synthesized
ccactcaccaaagctgacctgg

SEQ ID NO: 24447 - DNA, 22 bp, Artificial Sequence
  chemically synthesized
cactcaccaaagctgacctggc

SEQ ID NO: 24448 - DNA, 22 bp, Artificial Sequence
  chemically synthesized
accaaagctgacctggccacag

SEQ ID NO: 24449 - DNA, 22 bp, Artificial Sequence
  chemically synthesized
acctggccacagccactgcttg

SEQ ID NO: 24450 - DNA, 22 bp, Artificial Sequence
  chemically synthesized
gccacagccactgcttgccagc

SEQ ID NO: 24451 - DNA, 22 bp, Artificial Sequence
  chemically synthesized
cttgccagcatcagagaccaac

SEQ ID NO: 24452 - DNA, 22 bp, Artificial Sequence
  chemically synthesized
gccagcatcagagaccaacact

SEQ ID NO: 24453 - DNA, 22 bp, Artificial Sequence
  chemically synthesized
ccagcatcagagaccaacacta

SEQ ID NO: 24454 - DNA, 22 bp, Artificial Sequence
  chemically synthesized
agcccttgatatggcaccattc

SEQ ID NO: 24455 - DNA, 22 bp, Artificial Sequence
  chemically synthesized
gatatggcaccattcctcgggg

SEQ ID NO: 24456 - DNA, 22 bp, Artificial Sequence
  chemically synthesized
atatggcaccattcctcggggt

SEQ ID NO: 24457 - DNA, 22 bp, Artificial Sequence
  chemically synthesized
ctcggggtgatcagccagctac

SEQ ID NO: 24458 - DNA, 22 bp, Artificial Sequence
  chemically synthesized
ggggtgatcagccagctacctg

SEQ ID NO: 24459 - DNA, 22 bp, Artificial Sequence
  chemically synthesized
cctggtggcaggttgattatat

SEQ ID NO: 24460 - DNA, 22 bp, Artificial Sequence
  chemically synthesized
gtggcaggttgattatattgga

SEQ ID NO: 24461 - DNA, 22 bp, Artificial Sequence
  chemically synthesized
attatattggacctcttccatc

SEQ ID NO: 24462 - DNA, 22 bp, Artificial Sequence
  chemically synthesized
tattggacctcttccatcatgg

SEQ ID NO: 24463 - DNA, 22 bp, Artificial Sequence
  chemically synthesized
gacctcttccatcatggaaagg

SEQ ID NO: 24464 - DNA, 22 bp, Artificial Sequence
  chemically synthesized
ttccatcatggaaagggcagag

SEQ ID NO: 24465 - DNA, 22 bp, Artificial Sequence
  chemically synthesized
ccatcatggaaagggcagaggc

SEQ ID NO: 24466 - DNA, 22 bp, Artificial Sequence
  chemically synthesized
catcatggaaagggcagaggct

SEQ ID NO: 24467 - DNA, 22 bp, Artificial Sequence
  chemically synthesized
gtcctcactggaatagacactt

SEQ ID NO: 24468 - DNA, 22 bp, Artificial Sequence
  chemically synthesized
tcctcactggaatagacactta

SEQ ID NO: 24469 - DNA, 22 bp, Artificial Sequence
  chemically synthesized
actggaatagacacttactctg

SEQ ID NO: 24470 - DNA, 22 bp, Artificial Sequence
  chemically synthesized
gaatagacacttactctggata

SEQ ID NO: 24471 - DNA, 22 bp, Artificial Sequence
  chemically synthesized
actctggatatgggtttcccaa

SEQ ID NO: 24472 - DNA, 22 bp, Artificial Sequence
  chemically synthesized
ctctggatatgggtttcccaat

SEQ ID NO: 24473 - DNA, 22 bp, Artificial Sequence
  chemically synthesized
tggatatgggtttcccaatcct

SEQ ID NO: 24474 - DNA, 22 bp, Artificial Sequence
  chemically synthesized
gatatgggtttcccaatcctga

SEQ ID NO: 24475 - DNA, 22 bp, Artificial Sequence
  chemically synthesized
cccaatcctgaactcaatgctt

SEQ ID NO: 24476 - DNA, 22 bp, Artificial Sequence
  chemically synthesized
ccaatcctgaactcaatgctta

SEQ ID NO: 24477 - DNA, 22 bp, Artificial Sequence
  chemically synthesized
aactcaatgcttatgccaagac

SEQ ID NO: 24478 - DNA, 22 bp, Artificial Sequence
  chemically synthesized
aatgcttatgccaagactacca

SEQ ID NO: 24479 - DNA, 22 bp, Artificial Sequence
  chemically synthesized
atgccaagactaccatccatgg

SEQ ID NO: 24480 - DNA, 22 bp, Artificial Sequence
  chemically synthesized
tgccaagactaccatccatgga

SEQ ID NO: 24481 - DNA, 22 bp, Artificial Sequence
  chemically synthesized
ccatccatggaatcacagaatg

SEQ ID NO: 24482 - DNA, 22 bp, Artificial Sequence
  chemically synthesized
tcatggtattccacacagcatt

SEQ ID NO: 24483 - DNA, 22 bp, Artificial Sequence
  chemically synthesized
cacacagcattgcttctgacca

SEQ ID NO: 24484 - DNA, 22 bp, Artificial Sequence
  chemically synthesized
cttctgaccaagccactcactt

SEQ ID NO: 24485 - DNA, 22 bp, Artificial Sequence
  chemically synthesized
ctgaccaagccactcactttat

SEQ ID NO: 24486 - DNA, 22 bp, Artificial Sequence
  chemically synthesized
tgaccaagccactcactttatg

SEQ ID NO: 24487 - DNA, 22 bp, Artificial Sequence
  chemically synthesized
accaagccactcactttatggc

SEQ ID NO: 24488 - DNA, 22 bp, Artificial Sequence
  chemically synthesized
actttatggctaaagaagtgtg

SEQ ID NO: 24489 - DNA, 22 bp, Artificial Sequence
  chemically synthesized
tatggctaaagaagtgtgacag

SEQ ID NO: 24490 - DNA, 22 bp, Artificial Sequence
  chemically synthesized
atggctaaagaagtgtgacagt

SEQ ID NO: 24491 - DNA, 22 bp, Artificial Sequence
  chemically synthesized
tggctaaagaagtgtgacagtg

SEQ ID NO: 24492 - DNA, 22 bp, Artificial Sequence
  chemically synthesized
aagaagtgtgacagtgggctca

SEQ ID NO: 24493 - DNA, 22 bp, Artificial Sequence
  chemically synthesized
atgctcatggaatttactggtc

SEQ ID NO: 24494 - DNA, 22 bp, Artificial Sequence
  chemically synthesized
atggaatttactggtcttacca

SEQ ID NO: 24495 - DNA, 22 bp, Artificial Sequence
  chemically synthesized
actggtcttaccatgatcccta

SEQ ID NO: 24496 - DNA, 22 bp, Artificial Sequence
  chemically synthesized
ctggtcttaccatgatccctat

SEQ ID NO: 24497 - DNA, 22 bp, Artificial Sequence
  chemically synthesized
gtcttaccatgatccctatcat

SEQ ID NO: 24498 - DNA, 22 bp, Artificial Sequence
  chemically synthesized
accatgatccctatcatcctga

SEQ ID NO: 24499 - DNA, 22 bp, Artificial Sequence
  chemically synthesized
ccatgatccctatcatcctgaa

SEQ ID NO: 24500 - DNA, 22 bp, Artificial Sequence
  chemically synthesized
tcatcctgaagcagcttttgaa

SEQ ID NO: 24501 - DNA, 22 bp, Artificial Sequence
  chemically synthesized
aagcagcttttgaatggccttt

SEQ ID NO: 24502 - DNA, 22 bp, Artificial Sequence
  chemically synthesized
ttgaatggccttttgaagtcac

SEQ ID NO: 24503 - DNA, 22 bp, Artificial Sequence
  chemically synthesized
tgaatggccttttgaagtcacg

SEQ ID NO: 24504 - DNA, 22 bp, Artificial Sequence
  chemically synthesized
gaatggccttttgaagtcacga

SEQ ID NO: 24505 - DNA, 22 bp, Artificial Sequence
  chemically synthesized
aatggccttttgaagtcacgat

SEQ ID NO: 24506 - DNA, 22 bp, Artificial Sequence
  chemically synthesized
ttgaagtcacgattacaatgcc

SEQ ID NO: 24507 - DNA, 22 bp, Artificial Sequence
  chemically synthesized
tgaagtcacgattacaatgcca

SEQ ID NO: 24508 - DNA, 22 bp, Artificial Sequence
  chemically synthesized
gaagtcacgattacaatgccaa

SEQ ID NO: 24509 - DNA, 22 bp, Artificial Sequence
  chemically synthesized
aagtcacgattacaatgccaac

SEQ ID NO: 24510 - DNA, 22 bp, Artificial Sequence
  chemically synthesized
caatgccaactaggtgacaata

SEQ ID NO: 24511 - DNA, 22 bp, Artificial Sequence
  chemically synthesized
ggtgacaatactttgcaggcct

SEQ ID NO: 24512 - DNA, 22 bp, Artificial Sequence
  chemically synthesized
tgcaggcctggggcaaagttct

SEQ ID NO: 24513 - DNA, 22 bp, Artificial Sequence
  chemically synthesized
gcaggcctggggcaaagttctc

SEQ ID NO: 24514 - DNA, 22 bp, Artificial Sequence
  chemically synthesized
caggcctggggcaaagttctcc

SEQ ID NO: 24515 - DNA, 22 bp, Artificial Sequence
  chemically synthesized
gggcaaagttctccagaaggct

SEQ ID NO: 24516 - DNA, 22 bp, Artificial Sequence
  chemically synthesized
tccagaaggctgtgtatgctct

SEQ ID NO: 24517 - DNA, 22 bp, Artificial Sequence
  chemically synthesized
cagaaggctgtgtatgctctga

SEQ ID NO: 24518 - DNA, 22 bp, Artificial Sequence
  chemically synthesized
tgtatgctctgaatcagtgtcc

SEQ ID NO: 24519 - DNA, 22 bp, Artificial Sequence
  chemically synthesized
tgaatcagtgtccaatatatgg

SEQ ID NO: 24520 - DNA, 22 bp, Artificial Sequence
  chemically synthesized
aatcagtgtccaatatatggta

SEQ ID NO: 24521 - DNA, 22 bp, Artificial Sequence
  chemically synthesized
tttctcccatagacaggattca

SEQ ID NO: 24522 - DNA, 22 bp, Artificial Sequence
  chemically synthesized
ctcccatagacaggattcacgg

SEQ ID NO: 24523 - DNA, 22 bp, Artificial Sequence
  chemically synthesized
tcccatagacaggattcacggg

SEQ ID NO: 24524 - DNA, 22 bp, Artificial Sequence
  chemically synthesized
ccatagacaggattcacgggtc

SEQ ID NO: 24525 - DNA, 22 bp, Artificial Sequence
  chemically synthesized
acgggtccaggaatcaaagggt

SEQ ID NO: 24526 - DNA, 22 bp, Artificial Sequence
  chemically synthesized
accatcacccctagtgttccac

SEQ ID NO: 24527 - DNA, 22 bp, Artificial Sequence
  chemically synthesized
gtgttccactagcaaaattttt

SEQ ID NO: 24528 - DNA, 22 bp, Artificial Sequence
  chemically synthesized
cactagcaaaatttttgcttcc

SEQ ID NO: 24529 - DNA, 22 bp, Artificial Sequence
  chemically synthesized
gcaaaatttttgcttcctgttc

SEQ ID NO: 24530 - DNA, 22 bp, Artificial Sequence
  chemically synthesized
ttgcttcctgttcccatggcat

SEQ ID NO: 24531 - DNA, 22 bp, Artificial Sequence
  chemically synthesized
tgcttcctgttcccatggcatt

SEQ ID NO: 24532 - DNA, 22 bp, Artificial Sequence
  chemically synthesized
gcttcctgttcccatggcatta

SEQ ID NO: 24533 - DNA, 22 bp, Artificial Sequence
  chemically synthesized
cttcctgttcccatggcattat

SEQ ID NO: 24534 - DNA, 22 bp, Artificial Sequence
  chemically synthesized
cctgttcccatggcattatgtt

SEQ ID NO: 24535 - DNA, 22 bp, Artificial Sequence
  chemically synthesized
ctgttcccatggcattatgttc

SEQ ID NO: 24536 - DNA, 22 bp, Artificial Sequence
  chemically synthesized
ttcccatggcattatgttctgc

SEQ ID NO: 24537 - DNA, 22 bp, Artificial Sequence
  chemically synthesized
ccatggcattatgttctgctgg

SEQ ID NO: 24538 - DNA, 22 bp, Artificial Sequence
  chemically synthesized
tgttctgctggcttagaggtct

SEQ ID NO: 24539 - DNA, 22 bp, Artificial Sequence
  chemically synthesized
tgctggcttagaggtcttagtt

SEQ ID NO: 24540 - DNA, 22 bp, Artificial Sequence
  chemically synthesized
ctggcttagaggtcttagttcc

SEQ ID NO: 24541 - DNA, 22 bp, Artificial Sequence
  chemically synthesized
gcttagaggtcttagttccaga

SEQ ID NO: 24542 - DNA, 22 bp, Artificial Sequence
  chemically synthesized
agaggtcttagttccagaggga

SEQ ID NO: 24543 - DNA, 22 bp, Artificial Sequence
  chemically synthesized
gaggtcttagttccagagggag

SEQ ID NO: 24544 - DNA, 22 bp, Artificial Sequence
  chemically synthesized
agttccagagggaggaacactg

SEQ ID NO: 24545 - DNA, 22 bp, Artificial Sequence
  chemically synthesized
gttccagagggaggaacactgc

SEQ ID NO: 24546 - DNA, 22 bp, Artificial Sequence
  chemically synthesized
cagagggaggaacactgccgcc

SEQ ID NO: 24547 - DNA, 22 bp, Artificial Sequence
  chemically synthesized
ccgccaggtgacacaataatga

SEQ ID NO: 24548 - DNA, 22 bp, Artificial Sequence
  chemically synthesized
cattaaactgcaaattaagatt

SEQ ID NO: 24549 - DNA, 22 bp, Artificial Sequence
  chemically synthesized
aactgcaaattaagattgccac

SEQ ID NO: 24550 - DNA, 22 bp, Artificial Sequence
  chemically synthesized
caaattaagattgccacctgga

SEQ ID NO: 24551 - DNA, 22 bp, Artificial Sequence
  chemically synthesized
agattgccacctggacactttg

SEQ ID NO: 24552 - DNA, 22 bp, Artificial Sequence
  chemically synthesized
ccacctggacactttgggctcc

SEQ ID NO: 24553 - DNA, 22 bp, Artificial Sequence
  chemically synthesized
gacactttgggctcctcccacc

SEQ ID NO: 24554 - DNA, 22 bp, Artificial Sequence
  chemically synthesized
tgggctcctcccacctttaagt

SEQ ID NO: 24555 - DNA, 22 bp, Artificial Sequence
  chemically synthesized
gggctcctcccacctttaagtc

SEQ ID NO: 24556 - DNA, 22 bp, Artificial Sequence
  chemically synthesized
ggctcctcccacctttaagtca

SEQ ID NO: 24557 - DNA, 22 bp, Artificial Sequence
  chemically synthesized
ctcccacctttaagtcaacagg

SEQ ID NO: 24558 - DNA, 22 bp, Artificial Sequence
  chemically synthesized
ccacctttaagtcaacaggcta

SEQ ID NO: 24559 - DNA, 22 bp, Artificial Sequence
  chemically synthesized
taagtcaacaggctaagaagag

SEQ ID NO: 24560 - DNA, 22 bp, Artificial Sequence
  chemically synthesized
aagtcaacaggctaagaagaga

SEQ ID NO: 24561 - DNA, 22 bp, Artificial Sequence
  chemically synthesized
agtcaacaggctaagaagagag

SEQ ID NO: 24562 - DNA, 22 bp, Artificial Sequence
  chemically synthesized
agaagagagttacagtgttggc

SEQ ID NO: 24563 - DNA, 22 bp, Artificial Sequence
  chemically synthesized
cagtgttggctgcggtgattaa

SEQ ID NO: 24564 - DNA, 22 bp, Artificial Sequence
  chemically synthesized
gctgcggtgattaacccagact

SEQ ID NO: 24565 - DNA, 22 bp, Artificial Sequence
  chemically synthesized
cggtgattaacccagactatca

SEQ ID NO: 24566 - DNA, 22 bp, Artificial Sequence
  chemically synthesized
acccagactatcaagatgaaat

SEQ ID NO: 24567 - DNA, 22 bp, Artificial Sequence
  chemically synthesized
tcaagatgaaatcagtctacaa

SEQ ID NO: 24568 - DNA, 22 bp, Artificial Sequence
  chemically synthesized
caactccacaatggaggtaagg

SEQ ID NO: 24569 - DNA, 22 bp, Artificial Sequence
  chemically synthesized
cacaatggaggtaaggaagcgt

SEQ ID NO: 24570 - DNA, 22 bp, Artificial Sequence
  chemically synthesized
gggtgtctcttagttttaccat

SEQ ID NO: 24571 - DNA, 22 bp, Artificial Sequence
  chemically synthesized
ttagttttaccatgtcctggaa

SEQ ID NO: 24572 - DNA, 22 bp, Artificial Sequence
  chemically synthesized
agttttaccatgtcctggaatt

SEQ ID NO: 24573 - DNA, 22 bp, Artificial Sequence
  chemically synthesized
gttttaccatgtcctggaatta

SEQ ID NO: 24574 - DNA, 22 bp, Artificial Sequence
  chemically synthesized
taccatgtcctggaattaaggt

SEQ ID NO: 24575 - DNA, 22 bp, Artificial Sequence
  chemically synthesized
accatgtcctggaattaaggtc

SEQ ID NO: 24576 - DNA, 22 bp, Artificial Sequence
  chemically synthesized
ccatgtcctggaattaaggtca

SEQ ID NO: 24577 - DNA, 22 bp, Artificial Sequence
  chemically synthesized
gaattaaggtcagtgggaaact

SEQ ID NO: 24578 - DNA, 22 bp, Artificial Sequence
  chemically synthesized
aggtcagtgggaaactactaca

SEQ ID NO: 24579 - DNA, 22 bp, Artificial Sequence
  chemically synthesized
ctacaggccattccaggcagga

SEQ ID NO: 24580 - DNA, 22 bp, Artificial Sequence
  chemically synthesized
caggccattccaggcaggacta

SEQ ID NO: 24581 - DNA, 22 bp, Artificial Sequence
  chemically synthesized
caggcaggactacaaataaagg

SEQ ID NO: 24582 - DNA, 22 bp, Artificial Sequence
  chemically synthesized
caaataaaggtttgggtcactc

SEQ ID NO: 24583 - DNA, 22 bp, Artificial Sequence
  chemically synthesized
gggtcactccaccaggaaaaaa

SEQ ID NO: 24584 - DNA, 22 bp, Artificial Sequence
  chemically synthesized
ggtcactccaccaggaaaaaaa

SEQ ID NO: 24585 - DNA, 22 bp, Artificial Sequence
  chemically synthesized
caccaggaaaaaaaaaaaaaaa

SEQ ID NO: 24586 - DNA, 22 bp, Artificial Sequence
  chemically synthesized
ctgaggtgcttgctgagggcaa

SEQ ID NO: 24587 - DNA, 22 bp, Artificial Sequence
  chemically synthesized
aggtgcttgctgagggcaaagg

SEQ ID NO: 24588 - DNA, 22 bp, Artificial Sequence
  chemically synthesized
gctgagggcaaagggaatacag

SEQ ID NO: 24589 - DNA, 22 bp, Artificial Sequence
  chemically synthesized
ctgagggcaaagggaatacaga

SEQ ID NO: 24590 - DNA, 22 bp, Artificial Sequence
  chemically synthesized
agggcaaagggaatacagaata

SEQ ID NO: 24591 - DNA, 22 bp, Artificial Sequence
  chemically synthesized
cgatcacgtgaccaattgcaga

SEQ ID NO: 24592 - DNA, 22 bp, Artificial Sequence
  chemically synthesized
cagatacaaggactgtaattgt

SEQ ID NO: 24593 - DNA, 22 bp, Artificial Sequence
  chemically synthesized
taattgtcatgagtatttcctc

SEQ ID NO: 24594 - DNA, 22 bp, Artificial Sequence
  chemically synthesized
tcatgagtatttcctccttctt

SEQ ID NO: 24595 - DNA, 22 bp, Artificial Sequence
  chemically synthesized
cctccttcttttgttaaaaaca

SEQ ID NO: 24596 - DNA, 22 bp, Artificial Sequence
  chemically synthesized
ctccttcttttgttaaaaacac

SEQ ID NO: 24597 - DNA, 22 bp, Artificial Sequence
  chemically synthesized
cttcttttgttaaaaacacctt

SEQ ID NO: 24598 - DNA, 22 bp, Artificial Sequence
  chemically synthesized
cttttgttaaaaacaccttcgt

SEQ ID NO: 24599 - DNA, 22 bp, Artificial Sequence
  chemically synthesized
ttttgttaaaaacaccttcgtg

SEQ ID NO: 24600 - DNA, 22 bp, Artificial Sequence
  chemically synthesized
ttgttaaaaacaccttcgtgtc

SEQ ID NO: 24601 - DNA, 22 bp, Artificial Sequence
  chemically synthesized
tgttaaaaacaccttcgtgtct

SEQ ID NO: 24602 - DNA, 22 bp, Artificial Sequence
  chemically synthesized
gttaaaaacaccttcgtgtctg

SEQ ID NO: 24603 - DNA, 22 bp, Artificial Sequence
  chemically synthesized
ttaaaaacaccttcgtgtctgt

SEQ ID NO: 24604 - DNA, 22 bp, Artificial Sequence
  chemically synthesized
aaaacaccttcgtgtctgtata

SEQ ID NO: 24605 - DNA, 22 bp, Artificial Sequence
  chemically synthesized
cgtgtctgtatacacttgtact

SEQ ID NO: 24606 - DNA, 22 bp, Artificial Sequence
  chemically synthesized
gtgtctgtatacacttgtacta

SEQ ID NO: 24607 - DNA, 22 bp, Artificial Sequence
  chemically synthesized
tatacacttgtactaagaaaat

SEQ ID NO: 24608 - DNA, 22 bp, Artificial Sequence
  chemically synthesized
gtactaagaaaatatatacatt

SEQ ID NO: 24609 - DNA, 22 bp, Artificial Sequence
  chemically synthesized
tactaagaaaatatatacattt

SEQ ID NO: 24610 - DNA, 22 bp, Artificial Sequence
  chemically synthesized
agaaaatatatacattttactt

SEQ ID NO: 24611 - DNA, 22 bp, Artificial Sequence
  chemically synthesized
tacttcctttttcctttatcat

SEQ ID NO: 24612 - DNA, 22 bp, Artificial Sequence
  chemically synthesized
acttcctttttcctttatcatg

SEQ ID NO: 24613 - DNA, 22 bp, Artificial Sequence
  chemically synthesized
cttcctttttcctttatcatgt

SEQ ID NO: 24614 - DNA, 22 bp, Artificial Sequence
  chemically synthesized
cctttttcctttatcatgtgac

SEQ ID NO: 24615 - DNA, 22 bp, Artificial Sequence
  chemically synthesized
ctttttcctttatcatgtgaca

SEQ ID NO: 24616 - DNA, 22 bp, Artificial Sequence
  chemically synthesized
tttcctttatcatgtgacataa

SEQ ID NO: 24617 - DNA, 22 bp, Artificial Sequence
  chemically synthesized
ttcctttatcatgtgacataag

SEQ ID NO: 24618 - DNA, 22 bp, Artificial Sequence
  chemically synthesized
tcctttatcatgtgacataaga

SEQ ID NO: 24619 - DNA, 22 bp, Artificial Sequence
  chemically synthesized
cctttatcatgtgacataagat

SEQ ID NO: 24620 - DNA, 22 bp, Artificial Sequence
  chemically synthesized
ctttatcatgtgacataagatt

SEQ ID NO: 24621 - DNA, 22 bp, Artificial Sequence
  chemically synthesized
tatcatgtgacataagatttat

SEQ ID NO: 24622 - DNA, 22 bp, Artificial Sequence
  chemically synthesized
atcatgtgacataagatttatt

SEQ ID NO: 24623 - DNA, 22 bp, Artificial Sequence
  chemically synthesized
tcatgtgacataagatttattg

SEQ ID NO: 24624 - DNA, 22 bp, Artificial Sequence
  chemically synthesized
attgacttcatatcagcattta

SEQ ID NO: 24625 - DNA, 22 bp, Artificial Sequence
  chemically synthesized
ttgacttcatatcagcatttaa

SEQ ID NO: 24626 - DNA, 22 bp, Artificial Sequence
  chemically synthesized
acttcatatcagcatttaagta

SEQ ID NO: 24627 - DNA, 22 bp, Artificial Sequence
  chemically synthesized
catatcagcatttaagtattgt

SEQ ID NO: 24628 - DNA, 22 bp, Artificial Sequence
  chemically synthesized
atatcagcatttaagtattgtt

SEQ ID NO: 24629 - DNA, 22 bp, Artificial Sequence
  chemically synthesized
aagtattgttaagtttatgtaa

SEQ ID NO: 24630 - DNA, 22 bp, Artificial Sequence
  chemically synthesized
agtattgttaagtttatgtaat

SEQ ID NO: 24631 - DNA, 22 bp, Artificial Sequence
  chemically synthesized
ttaagtttatgtaatagcattt

SEQ ID NO: 24632 - DNA, 22 bp, Artificial Sequence
  chemically synthesized
agtttatgtaatagcatttgca

SEQ ID NO: 24633 - DNA, 22 bp, Artificial Sequence
  chemically synthesized
atgtaatagcatttgcaatggg

SEQ ID NO: 24634 - DNA, 22 bp, Artificial Sequence
  chemically synthesized
tgtaatagcatttgcaatgggg

SEQ ID NO: 24635 - DNA, 22 bp, Artificial Sequence
  chemically synthesized
gcaatggggattggtgcatttt

SEQ ID NO: 24636 - DNA, 22 bp, Artificial Sequence
  chemically synthesized
caatggggattggtgcattttc

SEQ ID NO: 24637 - DNA, 22 bp, Artificial Sequence
  chemically synthesized
gtgcattttcaattgcacgaag

SEQ ID NO: 24638 - DNA, 22 bp, Artificial Sequence
  chemically synthesized
tcaattgcacgaaggatagttt

SEQ ID NO: 24639 - DNA, 22 bp, Artificial Sequence
  chemically synthesized
caattgcacgaaggatagtttt

SEQ ID NO: 24640 - DNA, 22 bp, Artificial Sequence
  chemically synthesized
aattgcacgaaggatagtttta

SEQ ID NO: 24641 - DNA, 22 bp, Artificial Sequence
  chemically synthesized
cacgaaggatagttttagtatg

SEQ ID NO: 24642 - DNA, 22 bp, Artificial Sequence
  chemically synthesized
tagtatgttaggcataattatg

SEQ ID NO: 24643 - DNA, 22 bp, Artificial Sequence
  chemically synthesized
agtatgttaggcataattatga

SEQ ID NO: 24644 - DNA, 22 bp, Artificial Sequence
  chemically synthesized
gtatgttaggcataattatgac

SEQ ID NO: 24645 - DNA, 22 bp, Artificial Sequence
  chemically synthesized
ggcataattatgacttattgtt

SEQ ID NO: 24646 - DNA, 22 bp, Artificial Sequence
  chemically synthesized
tgacttattgttgtctttattt

SEQ ID NO: 24647 - DNA, 22 bp, Artificial Sequence
  chemically synthesized
attgttgtctttatttgaagat

SEQ ID NO: 24648 - DNA, 22 bp, Artificial Sequence
  chemically synthesized
ttgttgtctttatttgaagata

SEQ ID NO: 24649 - DNA, 22 bp, Artificial Sequence
  chemically synthesized
ttgtctttatttgaagataatg

SEQ ID NO: 24650 - DNA, 22 bp, Artificial Sequence
  chemically synthesized
tctttatttgaagataatgtat

SEQ ID NO: 24651 - DNA, 22 bp, Artificial Sequence
  chemically synthesized
tatttgaagataatgtatgacc

SEQ ID NO: 24652 - DNA, 22 bp, Artificial Sequence
  chemically synthesized
atttgaagataatgtatgacct

SEQ ID NO: 24653 - DNA, 22 bp, Artificial Sequence
  chemically synthesized
tttgaagataatgtatgacctc

SEQ ID NO: 24654 - DNA, 22 bp, Artificial Sequence
  chemically synthesized
gaagataatgtatgacctcagg

SEQ ID NO: 24655 - DNA, 22 bp, Artificial Sequence
  chemically synthesized
aagataatgtatgacctcaggg

SEQ ID NO: 24656 - DNA, 22 bp, Artificial Sequence
  chemically synthesized
aggggatgtgtataggctcaag

SEQ ID NO: 24657 - DNA, 22 bp, Artificial Sequence
  chemically synthesized
aagttgacaagcgatggacttg

SEQ ID NO: 24658 - DNA, 22 bp, Artificial Sequence
  chemically synthesized
acaagcgatggacttgtgatgg

SEQ ID NO: 24659 - DNA, 22 bp, Artificial Sequence
  chemically synthesized
gtgatggttaatactgagtgtc

SEQ ID NO: 24660 - DNA, 22 bp, Artificial Sequence
  chemically synthesized
tgatggttaatactgagtgtca

SEQ ID NO: 24661 - DNA, 22 bp, Artificial Sequence
  chemically synthesized
atactgagtgtcaacttgattg

SEQ ID NO: 24662 - DNA, 22 bp, Artificial Sequence
  chemically synthesized
agtgtcaacttgattggattga

SEQ ID NO: 24663 - DNA, 22 bp, Artificial Sequence
  chemically synthesized
gattggattgaagtgtgcaaag

SEQ ID NO: 24664 - DNA, 22 bp, Artificial Sequence
  chemically synthesized
attggattgaagtgtgcaaagt

SEQ ID NO: 24665 - DNA, 22 bp, Artificial Sequence
  chemically synthesized
gattgaagtgtgcaaagtattg

SEQ ID NO: 24666 - DNA, 22 bp, Artificial Sequence
  chemically synthesized
aagtgtgcaaagtattgatcct

SEQ ID NO: 24667 - DNA, 22 bp, Artificial Sequence
  chemically synthesized
atcctgagtgtgtctgtgaggg

SEQ ID NO: 24668 - DNA, 22 bp, Artificial Sequence
  chemically synthesized
agtgtgtctgtgagggtattgc

SEQ ID NO: 24669 - DNA, 22 bp, Artificial Sequence
  chemically synthesized
tgagggtattgccaaaggagat

SEQ ID NO: 24670 - DNA, 22 bp, Artificial Sequence
  chemically synthesized
ccaaaggagattaacattttag

SEQ ID NO: 24671 - DNA, 22 bp, Artificial Sequence
  chemically synthesized
acattttagtcagtgggctggg

SEQ ID NO: 24672 - DNA, 22 bp, Artificial Sequence
  chemically synthesized
tagtcagtgggctgggaaaggc

SEQ ID NO: 24673 - DNA, 22 bp, Artificial Sequence
  chemically synthesized
agtcagtgggctgggaaaggca

SEQ ID NO: 24674 - DNA, 22 bp, Artificial Sequence
  chemically synthesized
gtcagtgggctgggaaaggcag

SEQ ID NO: 24675 - DNA, 22 bp, Artificial Sequence
  chemically synthesized
ggaaaggcagacccacccttaa

SEQ ID NO: 24676 - DNA, 22 bp, Artificial Sequence
  chemically synthesized
aatctgggtgggcaccatctaa

SEQ ID NO: 24677 - DNA, 22 bp, Artificial Sequence
  chemically synthesized
atctgggtgggcaccatctaat

SEQ ID NO: 24678 - DNA, 22 bp, Artificial Sequence
  chemically synthesized
ggtgggcaccatctaatcagtt

SEQ ID NO: 24679 - DNA, 22 bp, Artificial Sequence
  chemically synthesized
atcagttgccagtgtggccagg

SEQ ID NO: 24680 - DNA, 22 bp, Artificial Sequence
  chemically synthesized
ccagtgtggccaggatataaag

SEQ ID NO: 24681 - DNA, 22 bp, Artificial Sequence
  chemically synthesized
gactggcttagcctccaagcct

SEQ ID NO: 24682 - DNA, 22 bp, Artificial Sequence
  chemically synthesized
gcttagcctccaagcctacatc

SEQ ID NO: 24683 - DNA, 22 bp, Artificial Sequence
  chemically synthesized
agcctccaagcctacatctttc

SEQ ID NO: 24684 - DNA, 22 bp, Artificial Sequence
  chemically synthesized
gcctccaagcctacatctttct

SEQ ID NO: 24685 - DNA, 22 bp, Artificial Sequence
  chemically synthesized
caagcctacatctttctcccat

SEQ ID NO: 24686 - DNA, 22 bp, Artificial Sequence
  chemically synthesized
catctttctcccatgctggatg

SEQ ID NO: 24687 - DNA, 22 bp, Artificial Sequence
  chemically synthesized
tctcccatgctggatgcttcct

SEQ ID NO: 24688 - DNA, 22 bp, Artificial Sequence
  chemically synthesized
ctcccatgctggatgcttcctg

SEQ ID NO: 24689 - DNA, 22 bp, Artificial Sequence
  chemically synthesized
tcccatgctggatgcttcctgc

SEQ ID NO: 24690 - DNA, 22 bp, Artificial Sequence
  chemically synthesized
ccatgctggatgcttcctgccc

SEQ ID NO: 24691 - DNA, 22 bp, Artificial Sequence
  chemically synthesized
gatgcttcctgccctcaaacat

SEQ ID NO: 24692 - DNA, 22 bp, Artificial Sequence
  chemically synthesized
cctgccctcaaacattggactc

SEQ ID NO: 24693 - DNA, 22 bp, Artificial Sequence
  chemically synthesized
ctgccctcaaacattggactcc

SEQ ID NO: 24694 - DNA, 22 bp, Artificial Sequence
  chemically synthesized
ccctcaaacattggactccaag

SEQ ID NO: 24695 - DNA, 22 bp, Artificial Sequence
  chemically synthesized
aaacattggactccaagtcctt

SEQ ID NO: 24696 - DNA, 22 bp, Artificial Sequence
  chemically synthesized
gactccaagtccttcagctttg

SEQ ID NO: 24697 - DNA, 22 bp, Artificial Sequence
  chemically synthesized
caagtccttcagctttgggact

SEQ ID NO: 24698 - DNA, 22 bp, Artificial Sequence
  chemically synthesized
cagctttgggacttggactggc

SEQ ID NO: 24699 - DNA, 22 bp, Artificial Sequence
  chemically synthesized
agctttgggacttggactggct

SEQ ID NO: 24700 - DNA, 22 bp, Artificial Sequence
  chemically synthesized
tgggacttggactggcttcctt

SEQ ID NO: 24701 - DNA, 22 bp, Artificial Sequence
  chemically synthesized
gggacttggactggcttccttg

SEQ ID NO: 24702 - DNA, 22 bp, Artificial Sequence
  chemically synthesized
ggacttggactggcttccttgc

SEQ ID NO: 24703 - DNA, 22 bp, Artificial Sequence
  chemically synthesized
ggactggcttccttgctcctct

SEQ ID NO: 24704 - DNA, 22 bp, Artificial Sequence
  chemically synthesized
gactggcttccttgctcctctg

SEQ ID NO: 24705 - DNA, 22 bp, Artificial Sequence
  chemically synthesized
gcttccttgctcctctgcttgc

SEQ ID NO: 24706 - DNA, 22 bp, Artificial Sequence
  chemically synthesized
ccttgctcctctgcttgcagat

SEQ ID NO: 24707 - DNA, 22 bp, Artificial Sequence
  chemically synthesized
cttgctcctctgcttgcagatg

SEQ ID NO: 24708 - DNA, 22 bp, Artificial Sequence
  chemically synthesized
gctcctctgcttgcagatggcc

SEQ ID NO: 24709 - DNA, 22 bp, Artificial Sequence
  chemically synthesized
ctcctctgcttgcagatggcct

SEQ ID NO: 24710 - DNA, 22 bp, Artificial Sequence
  chemically synthesized
ctctgcttgcagatggcctatt

SEQ ID NO: 24711 - DNA, 22 bp, Artificial Sequence
  chemically synthesized
tgcttgcagatggcctattgtg

SEQ ID NO: 24712 - DNA, 22 bp, Artificial Sequence
  chemically synthesized
cttgcagatggcctattgtggg

SEQ ID NO: 24713 - DNA, 22 bp, Artificial Sequence
  chemically synthesized
gcagatggcctattgtgggacc

SEQ ID NO: 24714 - DNA, 22 bp, Artificial Sequence
  chemically synthesized
cagatggcctattgtgggacct

SEQ ID NO: 24715 - DNA, 22 bp, Artificial Sequence
  chemically synthesized
ttgtgggaccttgtgattgtgt

SEQ ID NO: 24716 - DNA, 22 bp, Artificial Sequence
  chemically synthesized
tgggaccttgtgattgtgtaag

SEQ ID NO: 24717 - DNA, 22 bp, Artificial Sequence
  chemically synthesized
gtgattgtgtaagttaacacta

SEQ ID NO: 24718 - DNA, 22 bp, Artificial Sequence
  chemically synthesized
tgattgtgtaagttaacactac

SEQ ID NO: 24719 - DNA, 22 bp, Artificial Sequence
  chemically synthesized
tgtaagttaacactacttaata

SEQ ID NO: 24720 - DNA, 22 bp, Artificial Sequence
  chemically synthesized
acactacttaataaactccctt

SEQ ID NO: 24721 - DNA, 22 bp, Artificial Sequence
  chemically synthesized
cttaataaactcccttttatat

SEQ ID NO: 24722 - DNA, 22 bp, Artificial Sequence
  chemically synthesized
aataaactcccttttatatcta

SEQ ID NO: 24723 - DNA, 22 bp, Artificial Sequence
  chemically synthesized
ataaactcccttttatatctaa

SEQ ID NO: 24724 - DNA, 22 bp, Artificial Sequence
  chemically synthesized
ccttttatatctaaatctatat

SEQ ID NO: 24725 - DNA, 22 bp, Artificial Sequence
  chemically synthesized
ttatatctaaatctatatctat

SEQ ID NO: 24726 - DNA, 22 bp, Artificial Sequence
  chemically synthesized
tatatctaaatctatatctatc

SEQ ID NO: 24727 - DNA, 22 bp, Artificial Sequence
  chemically synthesized
atatctaaatctatatctatct

SEQ ID NO: 24728 - DNA, 22 bp, Artificial Sequence
  chemically synthesized
tatctaaatctatatctatcta

SEQ ID NO: 24729 - DNA, 22 bp, Artificial Sequence
  chemically synthesized
aatctatatctatctatctatc

SEQ ID NO: 24730 - DNA, 22 bp, Artificial Sequence
  chemically synthesized
tatctatctatctatctatcta

SEQ ID NO: 24731 - DNA, 22 bp, Artificial Sequence
  chemically synthesized
tctatctatctatctatctatc

SEQ ID NO: 24732 - DNA, 22 bp, Artificial Sequence
  chemically synthesized
tctatctatctatctatctatc

SEQ ID NO: 24733 - DNA, 22 bp, Artificial Sequence
  chemically synthesized
tctatctatctatctatctatc

SEQ ID NO: 24734 - DNA, 22 bp, Artificial Sequence
  chemically synthesized
tctatctatctatctatctatc

SEQ ID NO: 24735 - DNA, 22 bp, Artificial Sequence
  chemically synthesized
tctatctatctatctatctatc

SEQ ID NO: 24736 - DNA, 22 bp, Artificial Sequence
  chemically synthesized
tctatctatctatctatctcct

SEQ ID NO: 24737 - DNA, 22 bp, Artificial Sequence
  chemically synthesized
tctatctatctatctcctatta

SEQ ID NO: 24738 - DNA, 22 bp, Artificial Sequence
  chemically synthesized
tctatctatctcctattagttc

SEQ ID NO: 24739 - DNA, 22 bp, Artificial Sequence
  chemically synthesized
tctatctcctattagttctgtc

SEQ ID NO: 24740 - DNA, 22 bp, Artificial Sequence
  chemically synthesized
tctcctattagttctgtctctc

SEQ ID NO: 24741 - DNA, 22 bp, Artificial Sequence
  chemically synthesized
ctattagttctgtctctctagg

SEQ ID NO: 24742 - DNA, 22 bp, Artificial Sequence
  chemically synthesized
ttagttctgtctctctagggaa

SEQ ID NO: 24743 - DNA, 22 bp, Artificial Sequence
  chemically synthesized
gttctgtctctctagggaaccc

SEQ ID NO: 24744 - DNA, 22 bp, Artificial Sequence
  chemically synthesized
tgtctctctagggaaccctgac

SEQ ID NO: 24745 - DNA, 22 bp, Artificial Sequence
  chemically synthesized
tctctctagggaaccctgacaa

SEQ ID NO: 24746 - DNA, 22 bp, Artificial Sequence
  chemically synthesized
tctagggaaccctgacaaatac

SEQ ID NO: 24747 - DNA, 22 bp, Artificial Sequence
  chemically synthesized
tagggaaccctgacaaatacag

SEQ ID NO: 24748 - DNA, 22 bp, Artificial Sequence
  chemically synthesized
gggaaccctgacaaatacagtg

SEQ ID NO: 24749 - DNA, 22 bp, Artificial Sequence
  chemically synthesized
acaaatacagtgagctcaggtc

SEQ ID NO: 24750 - DNA, 22 bp, Artificial Sequence
  chemically synthesized
aggtcctgagcagacattttcc

SEQ ID NO: 24751 - DNA, 22 bp, Artificial Sequence
  chemically synthesized
agcagacattttccaaaagaag

SEQ ID NO: 24752 - DNA, 22 bp, Artificial Sequence
  chemically synthesized
tccaaaagaagacatacaagtg

SEQ ID NO: 24753 - DNA, 22 bp, Artificial Sequence
  chemically synthesized
ccaaaagaagacatacaagtgg

SEQ ID NO: 24754 - DNA, 22 bp, Artificial Sequence
  chemically synthesized
caaaagaagacatacaagtggc

SEQ ID NO: 24755 - DNA, 22 bp, Artificial Sequence
  chemically synthesized
aacatcactaataatcagagaa

SEQ ID NO: 24756 - DNA, 22 bp, Artificial Sequence
  chemically synthesized
ataatcagagaatgcaaattaa

SEQ ID NO: 24757 - DNA, 22 bp, Artificial Sequence
  chemically synthesized
aaaccaccatatgatacctcct

SEQ ID NO: 24758 - DNA, 22 bp, Artificial Sequence
  chemically synthesized
cttatgccagtcagaatggcta

SEQ ID NO: 24759 - DNA, 22 bp, Artificial Sequence
  chemically synthesized
atgccagtcagaatggctatca

SEQ ID NO: 24760 - DNA, 22 bp, Artificial Sequence
  chemically synthesized
tgccagtcagaatggctatcat

SEQ ID NO: 24761 - DNA, 22 bp, Artificial Sequence
  chemically synthesized
tcattataaagttcaaaaacag

SEQ ID NO: 24762 - DNA, 22 bp, Artificial Sequence
  chemically synthesized
taaagttcaaaaacagcagatg

SEQ ID NO: 24763 - DNA, 22 bp, Artificial Sequence
  chemically synthesized
aaaaacagcagatgttggtgag

SEQ ID NO: 24764 - DNA, 22 bp, Artificial Sequence
  chemically synthesized
gtgaggatgtggagacaagaaa

SEQ ID NO: 24765 - DNA, 22 bp, Artificial Sequence
  chemically synthesized
atacactgttggtaagaatgta

SEQ ID NO: 24766 - DNA, 22 bp, Artificial Sequence
  chemically synthesized
tacactgttggtaagaatgtaa

SEQ ID NO: 24767 - DNA, 22 bp, Artificial Sequence
  chemically synthesized
ttggtaagaatgtaaattagta

SEQ ID NO: 24768 - DNA, 22 bp, Artificial Sequence
  chemically synthesized
gtaagaatgtaaattagtacaa

SEQ ID NO: 24769 - DNA, 22 bp, Artificial Sequence
  chemically synthesized
gtacaaactttatggaagacag

SEQ ID NO: 24770 - DNA, 22 bp, Artificial Sequence
  chemically synthesized
tatggaagacagcatgaagatt

SEQ ID NO: 24771 - DNA, 22 bp, Artificial Sequence
  chemically synthesized
atggaagacagcatgaagattt

SEQ ID NO: 24772 - DNA, 22 bp, Artificial Sequence
  chemically synthesized
tggaagacagcatgaagatttc

SEQ ID NO: 24773 - DNA, 22 bp, Artificial Sequence
  chemically synthesized
cttaaagaactagaaacagaac

SEQ ID NO: 24774 - DNA, 22 bp, Artificial Sequence
  chemically synthesized
ttaaagaactagaaacagaact

SEQ ID NO: 24775 - DNA, 22 bp, Artificial Sequence
  chemically synthesized
aaagaactagaaacagaactac

SEQ ID NO: 24776 - DNA, 22 bp, Artificial Sequence
  chemically synthesized
aagaactagaaacagaactacc

SEQ ID NO: 24777 - DNA, 22 bp, Artificial Sequence
  chemically synthesized
gaaacagaactaccattcaatc

SEQ ID NO: 24778 - DNA, 22 bp, Artificial Sequence
  chemically synthesized
ccattcaatcctgcaatcccac

SEQ ID NO: 24779 - DNA, 22 bp, Artificial Sequence
  chemically synthesized
aatcctgcaatcccactactgg

SEQ ID NO: 24780 - DNA, 22 bp, Artificial Sequence
  chemically synthesized
caatcccactactgggtatgga

SEQ ID NO: 24781 - DNA, 22 bp, Artificial Sequence
  chemically synthesized
ctgggtatggacccaaagtgaa

SEQ ID NO: 24782 - DNA, 22 bp, Artificial Sequence
  chemically synthesized
ggtatggacccaaagtgaaaga

SEQ ID NO: 24783 - DNA, 22 bp, Artificial Sequence
  chemically synthesized
aaaaagatatctgcattagtat

SEQ ID NO: 24784 - DNA, 22 bp, Artificial Sequence
  chemically synthesized
cattagtatgttcaaagtagca

SEQ ID NO: 24785 - DNA, 22 bp, Artificial Sequence
  chemically synthesized
gtatgttcaaagtagcactgtt

SEQ ID NO: 24786 - DNA, 22 bp, Artificial Sequence
  chemically synthesized
aaagtagcactgttcccaatag

SEQ ID NO: 24787 - DNA, 22 bp, Artificial Sequence
  chemically synthesized
ttcccaatagcaaagatatgga

SEQ ID NO: 24788 - DNA, 22 bp, Artificial Sequence
  chemically synthesized
ccaatagcaaagatatggaatc

SEQ ID NO: 24789 - DNA, 22 bp, Artificial Sequence
  chemically synthesized
aatgtctaccaatggacgattg

SEQ ID NO: 24790 - DNA, 22 bp, Artificial Sequence
  chemically synthesized
ccaatggacgattggataaaga

SEQ ID NO: 24791 - DNA, 22 bp, Artificial Sequence
  chemically synthesized
gataaagaaaatgtggtgtata

SEQ ID NO: 24792 - DNA, 22 bp, Artificial Sequence
  chemically synthesized
atatacatatatattactcagc

SEQ ID NO: 24793 - DNA, 22 bp, Artificial Sequence
  chemically synthesized
tatacatatatattactcagcc

SEQ ID NO: 24794 - DNA, 22 bp, Artificial Sequence
  chemically synthesized
ctcagccataaaaaagaatgaa

SEQ ID NO: 24795 - DNA, 22 bp, Artificial Sequence
  chemically synthesized
agccataaaaaagaatgaaatc

SEQ ID NO: 24796 - DNA, 22 bp, Artificial Sequence
  chemically synthesized
ctctagaaacatggttagaact

SEQ ID NO: 24797 - DNA, 22 bp, Artificial Sequence
  chemically synthesized
tctagaaacatggttagaactg

SEQ ID NO: 24798 - DNA, 22 bp, Artificial Sequence
  chemically synthesized
tagaaacatggttagaactgga

SEQ ID NO: 24799 - DNA, 22 bp, Artificial Sequence
  chemically synthesized
gaaacatggttagaactggagg

SEQ ID NO: 24800 - DNA, 22 bp, Artificial Sequence
  chemically synthesized
gaactggaggacattatcctca

SEQ ID NO: 24801 - DNA, 22 bp, Artificial Sequence
  chemically synthesized
gaggacattatcctcagtgaaa

SEQ ID NO: 24802 - DNA, 22 bp, Artificial Sequence
  chemically synthesized
tcctcagtgaaataactcagaa

SEQ ID NO: 24803 - DNA, 22 bp, Artificial Sequence
  chemically synthesized
agtgaaataactcagaaacaga

SEQ ID NO: 24804 - DNA, 22 bp, Artificial Sequence
  chemically synthesized
agaaacagaaagtcaaacacag

SEQ ID NO: 24805 - DNA, 22 bp, Artificial Sequence
  chemically synthesized
tcatttagtgagagccaagtgg

SEQ ID NO: 24806 - DNA, 22 bp, Artificial Sequence
  chemically synthesized
atttagtgagagccaagtggga

SEQ ID NO: 24807 - DNA, 22 bp, Artificial Sequence
  chemically synthesized
agtgagagccaagtgggagcta

SEQ ID NO: 24808 - DNA, 22 bp, Artificial Sequence
  chemically synthesized
gtgagagccaagtgggagctaa

SEQ ID NO: 24809 - DNA, 22 bp, Artificial Sequence
  chemically synthesized
aacgatgagtaagcatagacat

SEQ ID NO: 24810 - DNA, 22 bp, Artificial Sequence
  chemically synthesized
gagactagagaaaggtgggagg

SEQ ID NO: 24811 - DNA, 22 bp, Artificial Sequence
  chemically synthesized
agactagagaaaggtgggagga

SEQ ID NO: 24812 - DNA, 22 bp, Artificial Sequence
  chemically synthesized
gagaaaggtgggaggataggag

SEQ ID NO: 24813 - DNA, 22 bp, Artificial Sequence
  chemically synthesized
aaaaactacggattggatacaa

SEQ ID NO: 24814 - DNA, 22 bp, Artificial Sequence
  chemically synthesized
cggattggatacaacattcact

SEQ ID NO: 24815 - DNA, 22 bp, Artificial Sequence
  chemically synthesized
gatacaacattcacttttcagg

SEQ ID NO: 24816 - DNA, 22 bp, Artificial Sequence
  chemically synthesized
acttttcaggtgatggtccact

SEQ ID NO: 24817 - DNA, 22 bp, Artificial Sequence
  chemically synthesized
ttcaggtgatggtccactaaaa

SEQ ID NO: 24818 - DNA, 22 bp, Artificial Sequence
  chemically synthesized
tcaggtgatggtccactaaaag

SEQ ID NO: 24819 - DNA, 22 bp, Artificial Sequence
  chemically synthesized
caggtgatggtccactaaaagc

SEQ ID NO: 24820 - DNA, 22 bp, Artificial Sequence
  chemically synthesized
aggtgatggtccactaaaagct

SEQ ID NO: 24821 - DNA, 22 bp, Artificial Sequence
  chemically synthesized
aaagctcagacttcaccactat

SEQ ID NO: 24822 - DNA, 22 bp, Artificial Sequence
  chemically synthesized
agacttcaccactatgcaacat

SEQ ID NO: 24823 - DNA, 22 bp, Artificial Sequence
  chemically synthesized
caccactatgcaacatacatat

SEQ ID NO: 24824 - DNA, 22 bp, Artificial Sequence
  chemically synthesized
accactatgcaacatacatatg

SEQ ID NO: 24825 - DNA, 22 bp, Artificial Sequence
  chemically synthesized
tgcaacatacatatgtaaggaa

SEQ ID NO: 24826 - DNA, 22 bp, Artificial Sequence
  chemically synthesized
gtaccctgatacagcttgactg

SEQ ID NO: 24827 - DNA, 22 bp, Artificial Sequence
  chemically synthesized
taccctgatacagcttgactgt

SEQ ID NO: 24828 - DNA, 22 bp, Artificial Sequence
  chemically synthesized
atacagcttgactgtgtcccca

SEQ ID NO: 24829 - DNA, 22 bp, Artificial Sequence
  chemically synthesized
gactgtgtccccacccaaatct

SEQ ID NO: 24830 - DNA, 22 bp, Artificial Sequence
  chemically synthesized
actgtgtccccacccaaatctc

SEQ ID NO: 24831 - DNA, 22 bp, Artificial Sequence
  chemically synthesized
tgtccccacccaaatctcatct

SEQ ID NO: 24832 - DNA, 22 bp, Artificial Sequence
  chemically synthesized
atcttgaattgtagttcccata

SEQ ID NO: 24833 - DNA, 22 bp, Artificial Sequence
  chemically synthesized
gaattgtagttcccataatcct

SEQ ID NO: 24834 - DNA, 22 bp, Artificial Sequence
  chemically synthesized
aattgtagttcccataatcctc

SEQ ID NO: 24835 - DNA, 22 bp, Artificial Sequence
  chemically synthesized
tagttcccataatcctcacgtg

SEQ ID NO: 24836 - DNA, 22 bp, Artificial Sequence
  chemically synthesized
ccataatcctcacgtgttgtgg

SEQ ID NO: 24837 - DNA, 22 bp, Artificial Sequence
  chemically synthesized
acgtgttgtgggagggatttgg

SEQ ID NO: 24838 - DNA, 22 bp, Artificial Sequence
  chemically synthesized
tgggagggatttggagggaggt

SEQ ID NO: 24839 - DNA, 22 bp, Artificial Sequence
  chemically synthesized
ggagggaggtaattgaatcata

SEQ ID NO: 24840 - DNA, 22 bp, Artificial Sequence
  chemically synthesized
gagggaggtaattgaatcatag

SEQ ID NO: 24841 - DNA, 22 bp, Artificial Sequence
  chemically synthesized
aatcatagaggaggttactctc

SEQ ID NO: 24842 - DNA, 22 bp, Artificial Sequence
  chemically synthesized
ctctcatgctcttctcgtgata

SEQ ID NO: 24843 - DNA, 22 bp, Artificial Sequence
  chemically synthesized
tcatgctcttctcgtgatagtg

SEQ ID NO: 24844 - DNA, 22 bp, Artificial Sequence
  chemically synthesized
atgctcttctcgtgatagtgag

SEQ ID NO: 24845 - DNA, 22 bp, Artificial Sequence
  chemically synthesized
ttctcgtgatagtgagttctta

SEQ ID NO: 24846 - DNA, 22 bp, Artificial Sequence
  chemically synthesized
ctcgtgatagtgagttcttaca

SEQ ID NO: 24847 - DNA, 22 bp, Artificial Sequence
  chemically synthesized
tcgtgatagtgagttcttacaa

SEQ ID NO: 24848 - DNA, 22 bp, Artificial Sequence
  chemically synthesized
gtgatagtgagttcttacaaga

SEQ ID NO: 24849 - DNA, 22 bp, Artificial Sequence
  chemically synthesized
ttacaagatctgatggttttat

SEQ ID NO: 24850 - DNA, 22 bp, Artificial Sequence
  chemically synthesized
acaagatctgatggttttataa

SEQ ID NO: 24851 - DNA, 22 bp, Artificial Sequence
  chemically synthesized
caagatctgatggttttataag

SEQ ID NO: 24852 - DNA, 22 bp, Artificial Sequence
  chemically synthesized
atggttttataagcggcttttc

SEQ ID NO: 24853 - DNA, 22 bp, Artificial Sequence
  chemically synthesized
tataagcggcttttcccccttt

SEQ ID NO: 24854 - DNA, 22 bp, Artificial Sequence
  chemically synthesized
ataagcggcttttccccctttt

SEQ ID NO: 24855 - DNA, 22 bp, Artificial Sequence
  chemically synthesized
taagcggcttttcccccttttg

SEQ ID NO: 24856 - DNA, 22 bp, Artificial Sequence
  chemically synthesized
ttcccccttttgcttggcactt

SEQ ID NO: 24857 - DNA, 22 bp, Artificial Sequence
  chemically synthesized
tcccccttttgcttggcacttc

SEQ ID NO: 24858 - DNA, 22 bp, Artificial Sequence
  chemically synthesized
cccccttttgcttggcacttct

SEQ ID NO: 24859 - DNA, 22 bp, Artificial Sequence
  chemically synthesized
ccccttttgcttggcacttcta

SEQ ID NO: 24860 - DNA, 22 bp, Artificial Sequence
  chemically synthesized
ttgcttggcacttctacttgct

SEQ ID NO: 24861 - DNA, 22 bp, Artificial Sequence
  chemically synthesized
tgcttggcacttctacttgctg

SEQ ID NO: 24862 - DNA, 22 bp, Artificial Sequence
  chemically synthesized
gcttggcacttctacttgctgc

SEQ ID NO: 24863 - DNA, 22 bp, Artificial Sequence
  chemically synthesized
cttggcacttctacttgctgct

SEQ ID NO: 24864 - DNA, 22 bp, Artificial Sequence
  chemically synthesized
ggcacttctacttgctgctgcc

SEQ ID NO: 24865 - DNA, 22 bp, Artificial Sequence
  chemically synthesized
gcacttctacttgctgctgcca

SEQ ID NO: 24866 - DNA, 22 bp, Artificial Sequence
  chemically synthesized
ctacttgctgctgccatgtgaa

SEQ ID NO: 24867 - DNA, 22 bp, Artificial Sequence
  chemically synthesized
tacttgctgctgccatgtgaag

SEQ ID NO: 24868 - DNA, 22 bp, Artificial Sequence
  chemically synthesized
cttgctgctgccatgtgaagaa

SEQ ID NO: 24869 - DNA, 22 bp, Artificial Sequence
  chemically synthesized
gctgctgccatgtgaagaagga

SEQ ID NO: 24870 - DNA, 22 bp, Artificial Sequence
  chemically synthesized
ctgctgccatgtgaagaaggac

SEQ ID NO: 24871 - DNA, 22 bp, Artificial Sequence
  chemically synthesized
ctgccatgtgaagaaggacatg

SEQ ID NO: 24872 - DNA, 22 bp, Artificial Sequence
  chemically synthesized
ccatgtgaagaaggacatgttt

SEQ ID NO: 24873 - DNA, 22 bp, Artificial Sequence
  chemically synthesized
gtttcttcttctgccatgattg

SEQ ID NO: 24874 - DNA, 22 bp, Artificial Sequence
  chemically synthesized
tttcttcttctgccatgattgt

SEQ ID NO: 24875 - DNA, 22 bp, Artificial Sequence
  chemically synthesized
cttcttctgccatgattgtaag

SEQ ID NO: 24876 - DNA, 22 bp, Artificial Sequence
  chemically synthesized
ttcttctgccatgattgtaagt

SEQ ID NO: 24877 - DNA, 22 bp, Artificial Sequence
  chemically synthesized
cttctgccatgattgtaagttt

SEQ ID NO: 24878 - DNA, 22 bp, Artificial Sequence
  chemically synthesized
ttctgccatgattgtaagtttc

SEQ ID NO: 24879 - DNA, 22 bp, Artificial Sequence
  chemically synthesized
ctgccatgattgtaagtttccc

SEQ ID NO: 24880 - DNA, 22 bp, Artificial Sequence
  chemically synthesized
tgccatgattgtaagtttcccg

SEQ ID NO: 24881 - DNA, 22 bp, Artificial Sequence
  chemically synthesized
ccatgattgtaagtttcccgag

SEQ ID NO: 24882 - DNA, 22 bp, Artificial Sequence
  chemically synthesized
taagtttcccgaggcctcccca

SEQ ID NO: 24883 - DNA, 22 bp, Artificial Sequence
  chemically synthesized
cccgaggcctccccagccctgt

SEQ ID NO: 24884 - DNA, 22 bp, Artificial Sequence
  chemically synthesized
ccgaggcctccccagccctgtg

SEQ ID NO: 24885 - DNA, 22 bp, Artificial Sequence
  chemically synthesized
cccagccctgtggaactgtgag

SEQ ID NO: 24886 - DNA, 22 bp, Artificial Sequence
  chemically synthesized
tggaactgtgagacaattaaac

SEQ ID NO: 24887 - DNA, 22 bp, Artificial Sequence
  chemically synthesized
tgagacaattaaacgttttttc

SEQ ID NO: 24888 - DNA, 22 bp, Artificial Sequence
  chemically synthesized
aacgttttttccttataaatta

SEQ ID NO: 24889 - DNA, 22 bp, Artificial Sequence
  chemically synthesized
tttccttataaattacccagtc

SEQ ID NO: 24890 - DNA, 22 bp, Artificial Sequence
  chemically synthesized
ttccttataaattacccagtct

SEQ ID NO: 24891 - DNA, 22 bp, Artificial Sequence
  chemically synthesized
tccttataaattacccagtctc

SEQ ID NO: 24892 - DNA, 22 bp, Artificial Sequence
  chemically synthesized
ccttataaattacccagtctca

SEQ ID NO: 24893 - DNA, 22 bp, Artificial Sequence
  chemically synthesized
cttataaattacccagtctcag

SEQ ID NO: 24894 - DNA, 22 bp, Artificial Sequence
  chemically synthesized
ataaattacccagtctcaggta

SEQ ID NO: 24895 - DNA, 22 bp, Artificial Sequence
  chemically synthesized
taaattacccagtctcaggtat

SEQ ID NO: 24896 - DNA, 22 bp, Artificial Sequence
  chemically synthesized
cccagtctcaggtatgtcttta

SEQ ID NO: 24897 - DNA, 22 bp, Artificial Sequence
  chemically synthesized
aggtatgtctttataagcagca

SEQ ID NO: 24898 - DNA, 22 bp, Artificial Sequence
  chemically synthesized
tataagcagcatgataacgaac

SEQ ID NO: 24899 - DNA, 22 bp, Artificial Sequence
  chemically synthesized
ataagcagcatgataacgaact

SEQ ID NO: 24900 - DNA, 22 bp, Artificial Sequence
  chemically synthesized
taagcagcatgataacgaacta

SEQ ID NO: 24901 - DNA, 22 bp, Artificial Sequence
  chemically synthesized
gtacataccttctaaatatata

SEQ ID NO: 24902 - DNA, 22 bp, Artificial Sequence
  chemically synthesized
ctaaatatatataaataaattt

SEQ ID NO: 24903 - DNA, 22 bp, Artificial Sequence
  chemically synthesized
taaatatatataaataaatttt

SEQ ID NO: 24904 - DNA, 22 bp, Artificial Sequence
  chemically synthesized
aatatatataaataaattttaa

SEQ ID NO: 24905 - DNA, 22 bp, Artificial Sequence
  chemically synthesized
taaaaatataaaataaattaga

SEQ ID NO: 24906 - DNA, 22 bp, Artificial Sequence
  chemically synthesized
aaaaatataaaataaattagat

SEQ ID NO: 24907 - DNA, 22 bp, Artificial Sequence
  chemically synthesized
aaaatataaaataaattagatc

SEQ ID NO: 24908 - DNA, 22 bp, Artificial Sequence
  chemically synthesized
gatctgattgaaaaggcaaaaa

SEQ ID NO: 24909 - DNA, 22 bp, Artificial Sequence
  chemically synthesized
attgaaaaggcaaaaattgagc

SEQ ID NO: 24910 - DNA, 22 bp, Artificial Sequence
  chemically synthesized
aaaaggcaaaaattgagcaagc

SEQ ID NO: 24911 - DNA, 22 bp, Artificial Sequence
  chemically synthesized
agcaagcaaaatatcacttaat

SEQ ID NO: 24912 - DNA, 22 bp, Artificial Sequence
  chemically synthesized
aatggggtaattaaaagggtga

SEQ ID NO: 24913 - DNA, 22 bp, Artificial Sequence
  chemically synthesized
atggggtaattaaaagggtgaa

SEQ ID NO: 24914 - DNA, 22 bp, Artificial Sequence
  chemically synthesized
aaagggtgaagaaattgggcaa

SEQ ID NO: 24915 - DNA, 22 bp, Artificial Sequence
  chemically synthesized
ggcaaatggatgtcatgaggag

SEQ ID NO: 24916 - DNA, 22 bp, Artificial Sequence
  chemically synthesized
ttaggcagaggtaatggtcaga

SEQ ID NO: 24917 - DNA, 22 bp, Artificial Sequence
  chemically synthesized
taggcagaggtaatggtcagag

SEQ ID NO: 24918 - DNA, 22 bp, Artificial Sequence
  chemically synthesized
aggcagaggtaatggtcagagc

SEQ ID NO: 24919 - DNA, 22 bp, Artificial Sequence
  chemically synthesized
ggcagaggtaatggtcagagcc

SEQ ID NO: 24920 - DNA, 22 bp, Artificial Sequence
  chemically synthesized
agctggagtagagtgtgcaagg

SEQ ID NO: 24921 - DNA, 22 bp, Artificial Sequence
  chemically synthesized
gagtagagtgtgcaaggaaaga

SEQ ID NO: 24922 - DNA, 22 bp, Artificial Sequence
  chemically synthesized
aaaaggataaccaggtaggagg

SEQ ID NO: 24923 - DNA, 22 bp, Artificial Sequence
  chemically synthesized
cagtaaacttaggcaggatatt

SEQ ID NO: 24924 - DNA, 22 bp, Artificial Sequence
  chemically synthesized
aggcaggatatttcccgtgaca

SEQ ID NO: 24925 - DNA, 22 bp, Artificial Sequence
  chemically synthesized
ggcaggatatttcccgtgacag

SEQ ID NO: 24926 - DNA, 22 bp, Artificial Sequence
  chemically synthesized
cccgtgacagcactaaataata

SEQ ID NO: 24927 - DNA, 22 bp, Artificial Sequence
  chemically synthesized
ccgtgacagcactaaataataa

SEQ ID NO: 24928 - DNA, 22 bp, Artificial Sequence
  chemically synthesized
aataataatcacatgtgagaat

SEQ ID NO: 24929 - DNA, 22 bp, Artificial Sequence
  chemically synthesized
tcgattacttgagcaatacttt

SEQ ID NO: 24930 - DNA, 22 bp, Artificial Sequence
  chemically synthesized
cttgagcaatactttgttcatg

SEQ ID NO: 24931 - DNA, 22 bp, Artificial Sequence
  chemically synthesized
gagcaatactttgttcatgagc

SEQ ID NO: 24932 - DNA, 22 bp, Artificial Sequence
  chemically synthesized
agcaatactttgttcatgagct

SEQ ID NO: 24933 - DNA, 22 bp, Artificial Sequence
  chemically synthesized
tgttcatgagctagagcaaggg

SEQ ID NO: 24934 - DNA, 22 bp, Artificial Sequence
  chemically synthesized
gttcatgagctagagcaagggg

SEQ ID NO: 24935 - DNA, 22 bp, Artificial Sequence
  chemically synthesized
ttcatgagctagagcaagggga

SEQ ID NO: 24936 - DNA, 22 bp, Artificial Sequence
  chemically synthesized
atgagctagagcaaggggatga

SEQ ID NO: 24937 - DNA, 22 bp, Artificial Sequence
  chemically synthesized
gagcaaggggatgactcaagaa

SEQ ID NO: 24938 - DNA, 22 bp, Artificial Sequence
  chemically synthesized
aagaaatcctttgtgaaatcct

SEQ ID NO: 24939 - DNA, 22 bp, Artificial Sequence
  chemically synthesized
tgtgaaatcctggaggtaataa

SEQ ID NO: 24940 - DNA, 22 bp, Artificial Sequence
  chemically synthesized
gtgaaatcctggaggtaataag

SEQ ID NO: 24941 - DNA, 22 bp, Artificial Sequence
  chemically synthesized
tgaaatcctggaggtaataaga

SEQ ID NO: 24942 - DNA, 22 bp, Artificial Sequence
  chemically synthesized
gaggtaataagatcctggcatc

SEQ ID NO: 24943 - DNA, 22 bp, Artificial Sequence
  chemically synthesized
gcatcaatcttcaactcaattg

SEQ ID NO: 24944 - DNA, 22 bp, Artificial Sequence
  chemically synthesized
caactcaattgcaaaaagcaat

SEQ ID NO: 24945 - DNA, 22 bp, Artificial Sequence
  chemically synthesized
aactcaattgcaaaaagcaatt

SEQ ID NO: 24946 - DNA, 22 bp, Artificial Sequence
  chemically synthesized
aattgcaaaaagcaattttatt

SEQ ID NO: 24947 - DNA, 22 bp, Artificial Sequence
  chemically synthesized
caaaaagcaattttattactta

SEQ ID NO: 24948 - DNA, 22 bp, Artificial Sequence
  chemically synthesized
tattacttatatattacttctc

SEQ ID NO: 24949 - DNA, 22 bp, Artificial Sequence
  chemically synthesized
attacttatatattacttctca

SEQ ID NO: 24950 - DNA, 22 bp, Artificial Sequence
  chemically synthesized
ttacttatatattacttctcat

SEQ ID NO: 24951 - DNA, 22 bp, Artificial Sequence
  chemically synthesized
cttatatattacttctcatttt

SEQ ID NO: 24952 - DNA, 22 bp, Artificial Sequence
  chemically synthesized
atatattacttctcatttttca

SEQ ID NO: 24953 - DNA, 22 bp, Artificial Sequence
  chemically synthesized
tatattacttctcatttttcac

SEQ ID NO: 24954 - DNA, 22 bp, Artificial Sequence
  chemically synthesized
cttctcatttttcactgctgtc

SEQ ID NO: 24955 - DNA, 22 bp, Artificial Sequence
  chemically synthesized
ctcatttttcactgctgtcttt

SEQ ID NO: 24956 - DNA, 22 bp, Artificial Sequence
  chemically synthesized
tcatttttcactgctgtctttc

SEQ ID NO: 24957 - DNA, 22 bp, Artificial Sequence
  chemically synthesized
atttttcactgctgtctttcaa

SEQ ID NO: 24958 - DNA, 22 bp, Artificial Sequence
  chemically synthesized
ttcactgctgtctttcaaaaca

SEQ ID NO: 24959 - DNA, 22 bp, Artificial Sequence
  chemically synthesized
tcactgctgtctttcaaaacat

SEQ ID NO: 24960 - DNA, 22 bp, Artificial Sequence
  chemically synthesized
cactgctgtctttcaaaacata

SEQ ID NO: 24961 - DNA, 22 bp, Artificial Sequence
  chemically synthesized
actgctgtctttcaaaacatat

SEQ ID NO: 24962 - DNA, 22 bp, Artificial Sequence
  chemically synthesized
ctgtctttcaaaacatattcca

SEQ ID NO: 24963 - DNA, 22 bp, Artificial Sequence
  chemically synthesized
tctttcaaaacatattccattt

SEQ ID NO: 24964 - DNA, 22 bp, Artificial Sequence
  chemically synthesized
tcaaaacatattccatttcatc

SEQ ID NO: 24965 - DNA, 22 bp, Artificial Sequence
  chemically synthesized
caaaacatattccatttcatca

SEQ ID NO: 24966 - DNA, 22 bp, Artificial Sequence
  chemically synthesized
aaaacatattccatttcatcag

SEQ ID NO: 24967 - DNA, 22 bp, Artificial Sequence
  chemically synthesized
catttcatcagactacaggttt

SEQ ID NO: 24968 - DNA, 22 bp, Artificial Sequence
  chemically synthesized
catcagactacaggttttaata

SEQ ID NO: 24969 - DNA, 22 bp, Artificial Sequence
  chemically synthesized
atcagactacaggttttaatag

SEQ ID NO: 24970 - DNA, 22 bp, Artificial Sequence
  chemically synthesized
caggttttaatagctactatat

SEQ ID NO: 24971 - DNA, 22 bp, Artificial Sequence
  chemically synthesized
taatagctactatatttcttaa

SEQ ID NO: 24972 - DNA, 22 bp, Artificial Sequence
  chemically synthesized
aatagctactatatttcttaaa

SEQ ID NO: 24973 - DNA, 22 bp, Artificial Sequence
  chemically synthesized
atagctactatatttcttaaat

SEQ ID NO: 24974 - DNA, 22 bp, Artificial Sequence
  chemically synthesized
ctatatttcttaaatgtattat

SEQ ID NO: 24975 - DNA, 22 bp, Artificial Sequence
  chemically synthesized
tatttcttaaatgtattattcc

SEQ ID NO: 24976 - DNA, 22 bp, Artificial Sequence
  chemically synthesized
cttaaatgtattattccagtaa

SEQ ID NO: 24977 - DNA, 22 bp, Artificial Sequence
  chemically synthesized
ttaaatgtattattccagtaac

SEQ ID NO: 24978 - DNA, 22 bp, Artificial Sequence
  chemically synthesized
aaatgtattattccagtaactt

SEQ ID NO: 24979 - DNA, 22 bp, Artificial Sequence
  chemically synthesized
aatgtattattccagtaactta

SEQ ID NO: 24980 - DNA, 22 bp, Artificial Sequence
  chemically synthesized
ttccagtaacttatactttaca

SEQ ID NO: 24981 - DNA, 22 bp, Artificial Sequence
  chemically synthesized
cagtaacttatactttacatag

SEQ ID NO: 24982 - DNA, 22 bp, Artificial Sequence
  chemically synthesized
atactttacatagtaaatctta

SEQ ID NO: 24983 - DNA, 22 bp, Artificial Sequence
  chemically synthesized
tactttacatagtaaatcttat

SEQ ID NO: 24984 - DNA, 22 bp, Artificial Sequence
  chemically synthesized
tacatagtaaatcttatcaata

SEQ ID NO: 24985 - DNA, 22 bp, Artificial Sequence
  chemically synthesized
acatagtaaatcttatcaatag

SEQ ID NO: 24986 - DNA, 22 bp, Artificial Sequence
  chemically synthesized
catagtaaatcttatcaatagt

SEQ ID NO: 24987 - DNA, 22 bp, Artificial Sequence
  chemically synthesized
atcaatagtcacaatcaatggt

SEQ ID NO: 24988 - DNA, 22 bp, Artificial Sequence
  chemically synthesized
tcaatagtcacaatcaatggtc

SEQ ID NO: 24989 - DNA, 22 bp, Artificial Sequence
  chemically synthesized
catctggagacattacttttag

SEQ ID NO: 24990 - DNA, 22 bp, Artificial Sequence
  chemically synthesized
atctggagacattacttttagc

SEQ ID NO: 24991 - DNA, 22 bp, Artificial Sequence
  chemically synthesized
gagacattacttttagcctgag

SEQ ID NO: 24992 - DNA, 22 bp, Artificial Sequence
  chemically synthesized
cttttagcctgagccatgcaaa

SEQ ID NO: 24993 - DNA, 22 bp, Artificial Sequence
  chemically synthesized
ttagcctgagccatgcaaaata

SEQ ID NO: 24994 - DNA, 22 bp, Artificial Sequence
  chemically synthesized
tagcctgagccatgcaaaatat

SEQ ID NO: 24995 - DNA, 22 bp, Artificial Sequence
  chemically synthesized
agcctgagccatgcaaaatata

SEQ ID NO: 24996 - DNA, 22 bp, Artificial Sequence
  chemically synthesized
gcctgagccatgcaaaatatac

SEQ ID NO: 24997 - DNA, 22 bp, Artificial Sequence
  chemically synthesized
agccatgcaaaatatacttttt

SEQ ID NO: 24998 - DNA, 22 bp, Artificial Sequence
  chemically synthesized
tttggaaaattgccctttgaaa

SEQ ID NO: 24999 - DNA, 22 bp, Artificial Sequence
  chemically synthesized
ttggaaaattgccctttgaaag

SEQ ID NO: 25000 - DNA, 22 bp, Artificial Sequence
  chemically synthesized
tggaaaattgccctttgaaagg

SEQ ID NO: 25001 - DNA, 22 bp, Artificial Sequence
  chemically synthesized
ggaaaattgccctttgaaaggc

SEQ ID NO: 25002 - DNA, 22 bp, Artificial Sequence
  chemically synthesized
gaaaattgccctttgaaaggcg

SEQ ID NO: 25003 - DNA, 22 bp, Artificial Sequence
  chemically synthesized
ccctttgaaaggcgagacacaa

SEQ ID NO: 25004 - DNA, 22 bp, Artificial Sequence
  chemically synthesized
tgaaaggcgagacacaaaaggc

SEQ ID NO: 25005 - DNA, 22 bp, Artificial Sequence
  chemically synthesized
gaaaggcgagacacaaaaggca

SEQ ID NO: 25006 - DNA, 22 bp, Artificial Sequence
  chemically synthesized
aaaggcgagacacaaaaggcaa

SEQ ID NO: 25007 - DNA, 22 bp, Artificial Sequence
  chemically synthesized
atgctattatatggtaccaata

SEQ ID NO: 25008 - DNA, 22 bp, Artificial Sequence
  chemically synthesized
ttatatggtaccaataggattc

SEQ ID NO: 25009 - DNA, 22 bp, Artificial Sequence
  chemically synthesized
tatggtaccaataggattcatt

SEQ ID NO: 25010 - DNA, 22 bp, Artificial Sequence
  chemically synthesized
attaatttataaaggagaagag

SEQ ID NO: 25011 - DNA, 22 bp, Artificial Sequence
  chemically synthesized
atttataaaggagaagagctaa

SEQ ID NO: 25012 - DNA, 22 bp, Artificial Sequence
  chemically synthesized
ataaaggagaagagctaatgta

SEQ ID NO: 25013 - DNA, 22 bp, Artificial Sequence
  chemically synthesized
taaaggagaagagctaatgtaa

SEQ ID NO: 25014 - DNA, 22 bp, Artificial Sequence
  chemically synthesized
atgtaactccaaaatgcaagca

SEQ ID NO: 25015 - DNA, 22 bp, Artificial Sequence
  chemically synthesized
caaaatgcaagcaattttcata

SEQ ID NO: 25016 - DNA, 22 bp, Artificial Sequence
  chemically synthesized
tcatatgagtctacacaagcta

SEQ ID NO: 25017 - DNA, 22 bp, Artificial Sequence
  chemically synthesized
catatgagtctacacaagctaa

SEQ ID NO: 25018 - DNA, 22 bp, Artificial Sequence
  chemically synthesized
atatgagtctacacaagctaat

SEQ ID NO: 25019 - DNA, 22 bp, Artificial Sequence
  chemically synthesized
cacaagctaattgtccttaaga

SEQ ID NO: 25020 - DNA, 22 bp, Artificial Sequence
  chemically synthesized
attgtccttaagaatttcatct

SEQ ID NO: 25021 - DNA, 22 bp, Artificial Sequence
  chemically synthesized
tccttaagaatttcatctttaa

SEQ ID NO: 25022 - DNA, 22 bp, Artificial Sequence
  chemically synthesized
aagaatttcatctttaaggaaa

SEQ ID NO: 25023 - DNA, 22 bp, Artificial Sequence
  chemically synthesized
agaatttcatctttaaggaaaa

SEQ ID NO: 25024 - DNA, 22 bp, Artificial Sequence
  chemically synthesized
catctttaaggaaaagtttttt

SEQ ID NO: 25025 - DNA, 22 bp, Artificial Sequence
  chemically synthesized
atctttaaggaaaagtttttta

SEQ ID NO: 25026 - DNA, 22 bp, Artificial Sequence
  chemically synthesized
taaggaaaagttttttactgta

SEQ ID NO: 25027 - DNA, 22 bp, Artificial Sequence
  chemically synthesized
aaggaaaagttttttactgtat

SEQ ID NO: 25028 - DNA, 22 bp, Artificial Sequence
  chemically synthesized
aggaaaagttttttactgtatc

SEQ ID NO: 25029 - DNA, 22 bp, Artificial Sequence
  chemically synthesized
tttactgtatcaaaaagaagtt

SEQ ID NO: 25030 - DNA, 22 bp, Artificial Sequence
  chemically synthesized
ttactgtatcaaaaagaagttt

SEQ ID NO: 25031 - DNA, 22 bp, Artificial Sequence
  chemically synthesized
tactgtatcaaaaagaagttta

SEQ ID NO: 25032 - DNA, 22 bp, Artificial Sequence
  chemically synthesized
actgtatcaaaaagaagtttaa

SEQ ID NO: 25033 - DNA, 22 bp, Artificial Sequence
  chemically synthesized
ctgtatcaaaaagaagtttaaa

SEQ ID NO: 25034 - DNA, 22 bp, Artificial Sequence
  chemically synthesized
tatcaaaaagaagtttaaactg

SEQ ID NO: 25035 - DNA, 22 bp, Artificial Sequence
  chemically synthesized
aaactgtcattgagcagagtct

SEQ ID NO: 25036 - DNA, 22 bp, Artificial Sequence
  chemically synthesized
aactgtcattgagcagagtctg

SEQ ID NO: 25037 - DNA, 22 bp, Artificial Sequence
  chemically synthesized
tcattgagcagagtctgataat

SEQ ID NO: 25038 - DNA, 22 bp, Artificial Sequence
  chemically synthesized
agcagagtctgataataaggac

SEQ ID NO: 25039 - DNA, 22 bp, Artificial Sequence
  chemically synthesized
ataataaggacactgtcaaatc

SEQ ID NO: 25040 - DNA, 22 bp, Artificial Sequence
  chemically synthesized
tcaaatcacagttcagatgtta

SEQ ID NO: 25041 - DNA, 22 bp, Artificial Sequence
  chemically synthesized
agatgttatgtgatgaggacag

SEQ ID NO: 25042 - DNA, 22 bp, Artificial Sequence
  chemically synthesized
tgtgatgaggacagaatagaac

SEQ ID NO: 25043 - DNA, 22 bp, Artificial Sequence
  chemically synthesized
ctagactggacaagaacagaca

SEQ ID NO: 25044 - DNA, 22 bp, Artificial Sequence
  chemically synthesized
tagactggacaagaacagacat

SEQ ID NO: 25045 - DNA, 22 bp, Artificial Sequence
  chemically synthesized
gactggacaagaacagacatga

SEQ ID NO: 25046 - DNA, 22 bp, Artificial Sequence
  chemically synthesized
gacaagaacagacatgattaac

SEQ ID NO: 25047 - DNA, 22 bp, Artificial Sequence
  chemically synthesized
acttaaccatccaacaataaat

SEQ ID NO: 25048 - DNA, 22 bp, Artificial Sequence
  chemically synthesized
aaccatccaacaataaatctaa

SEQ ID NO: 25049 - DNA, 22 bp, Artificial Sequence
  chemically synthesized
accatccaacaataaatctaag

SEQ ID NO: 25050 - DNA, 22 bp, Artificial Sequence
  chemically synthesized
agttaacataaattgatgtcat

SEQ ID NO: 25051 - DNA, 22 bp, Artificial Sequence
  chemically synthesized
acataaattgatgtcatctact

SEQ ID NO: 25052 - DNA, 22 bp, Artificial Sequence
  chemically synthesized
atgtcatctactacatctaagt

SEQ ID NO: 25053 - DNA, 22 bp, Artificial Sequence
  chemically synthesized
ctacatctaagtatttcctcaa

SEQ ID NO: 25054 - DNA, 22 bp, Artificial Sequence
  chemically synthesized
catctaagtatttcctcaaatt

SEQ ID NO: 25055 - DNA, 22 bp, Artificial Sequence
  chemically synthesized
agtatttcctcaaattctggac

SEQ ID NO: 25056 - DNA, 22 bp, Artificial Sequence
  chemically synthesized
cctcaaattctggacaatttta

SEQ ID NO: 25057 - DNA, 22 bp, Artificial Sequence
  chemically synthesized
ctcaaattctggacaattttag

SEQ ID NO: 25058 - DNA, 22 bp, Artificial Sequence
  chemically synthesized
aaattctggacaattttagaaa

SEQ ID NO: 25059 - DNA, 22 bp, Artificial Sequence
  chemically synthesized
tggacaattttagaaaccatca

SEQ ID NO: 25060 - DNA, 22 bp, Artificial Sequence
  chemically synthesized
gacaattttagaaaccatcaaa

SEQ ID NO: 25061 - DNA, 22 bp, Artificial Sequence
  chemically synthesized
tagaaaccatcaaaattatttg

SEQ ID NO: 25062 - DNA, 22 bp, Artificial Sequence
  chemically synthesized
agaaaccatcaaaattatttgt

SEQ ID NO: 25063 - DNA, 22 bp, Artificial Sequence
  chemically synthesized
gaaaccatcaaaattatttgtt

SEQ ID NO: 25064 - DNA, 22 bp, Artificial Sequence
  chemically synthesized
tttgttgaggaaaaataaactt

SEQ ID NO: 25065 - DNA, 22 bp, Artificial Sequence
  chemically synthesized
gttgaggaaaaataaacttagc

SEQ ID NO: 25066 - DNA, 22 bp, Artificial Sequence
  chemically synthesized
ttgaggaaaaataaacttagcc

SEQ ID NO: 25067 - DNA, 22 bp, Artificial Sequence
  chemically synthesized
aggaaaaataaacttagccaat

SEQ ID NO: 25068 - DNA, 22 bp, Artificial Sequence
  chemically synthesized
agccaatttgcaagggcaacta

SEQ ID NO: 25069 - DNA, 22 bp, Artificial Sequence
  chemically synthesized
gccaatttgcaagggcaactaa

SEQ ID NO: 25070 - DNA, 22 bp, Artificial Sequence
  chemically synthesized
gcaagggcaactaaaatgaaga

SEQ ID NO: 25071 - DNA, 22 bp, Artificial Sequence
  chemically synthesized
caagggcaactaaaatgaagaa

SEQ ID NO: 25072 - DNA, 22 bp, Artificial Sequence
  chemically synthesized
aaatgaagaacttttctttaaa

SEQ ID NO: 25073 - DNA, 22 bp, Artificial Sequence
  chemically synthesized
ttctttaaagtgtgggagtcac

SEQ ID NO: 25074 - DNA, 22 bp, Artificial Sequence
  chemically synthesized
tctttaaagtgtgggagtcaca

SEQ ID NO: 25075 - DNA, 22 bp, Artificial Sequence
  chemically synthesized
ctttaaagtgtgggagtcacat

SEQ ID NO: 25076 - DNA, 22 bp, Artificial Sequence
  chemically synthesized
tttaaagtgtgggagtcacatc

SEQ ID NO: 25077 - DNA, 22 bp, Artificial Sequence
  chemically synthesized
taaagtgtgggagtcacatctt

SEQ ID NO: 25078 - DNA, 22 bp, Artificial Sequence
  chemically synthesized
aaagtgtgggagtcacatctta

SEQ ID NO: 25079 - DNA, 22 bp, Artificial Sequence
  chemically synthesized
aagtgtgggagtcacatcttag

SEQ ID NO: 25080 - DNA, 22 bp, Artificial Sequence
  chemically synthesized
agcaacatatttaaatatatct

SEQ ID NO: 25081 - DNA, 22 bp, Artificial Sequence
  chemically synthesized
gcaacatatttaaatatatcta

SEQ ID NO: 25082 - DNA, 22 bp, Artificial Sequence
  chemically synthesized
aaatatatctaagctttcttca

SEQ ID NO: 25083 - DNA, 22 bp, Artificial Sequence
  chemically synthesized
aatatatctaagctttcttcaa

SEQ ID NO: 25084 - DNA, 22 bp, Artificial Sequence
  chemically synthesized
agctttcttcaaaaccactatc

SEQ ID NO: 25085 - DNA, 22 bp, Artificial Sequence
  chemically synthesized
tcttcaaaaccactatccacaa

SEQ ID NO: 25086 - DNA, 22 bp, Artificial Sequence
  chemically synthesized
cttcaaaaccactatccacaaa

SEQ ID NO: 25087 - DNA, 22 bp, Artificial Sequence
  chemically synthesized
ttcaaaaccactatccacaaaa

SEQ ID NO: 25088 - DNA, 22 bp, Artificial Sequence
  chemically synthesized
caaaaccactatccacaaaaat

SEQ ID NO: 25089 - DNA, 22 bp, Artificial Sequence
  chemically synthesized
aaaaccactatccacaaaaatg

SEQ ID NO: 25090 - DNA, 22 bp, Artificial Sequence
  chemically synthesized
tccacaaaaatgcaaaatttcc

SEQ ID NO: 25091 - DNA, 22 bp, Artificial Sequence
  chemically synthesized
ccaaagaatttctcctcttctg

SEQ ID NO: 25092 - DNA, 22 bp, Artificial Sequence
  chemically synthesized
caaagaatttctcctcttctgt

SEQ ID NO: 25093 - DNA, 22 bp, Artificial Sequence
  chemically synthesized
ctcctcttctgtagacttattt

SEQ ID NO: 25094 - DNA, 22 bp, Artificial Sequence
  chemically synthesized
tcctcttctgtagacttatttt

SEQ ID NO: 25095 - DNA, 22 bp, Artificial Sequence
  chemically synthesized
ctcttctgtagacttattttct

SEQ ID NO: 25096 - DNA, 22 bp, Artificial Sequence
  chemically synthesized
ttctgtagacttattttcttca

SEQ ID NO: 25097 - DNA, 22 bp, Artificial Sequence
  chemically synthesized
ctgtagacttattttcttcatc

SEQ ID NO: 25098 - DNA, 22 bp, Artificial Sequence
  chemically synthesized
tgtagacttattttcttcatct

SEQ ID NO: 25099 - DNA, 22 bp, Artificial Sequence
  chemically synthesized
tagacttattttcttcatcttc

SEQ ID NO: 25100 - DNA, 22 bp, Artificial Sequence
  chemically synthesized
attttcttcatcttcatctttt

SEQ ID NO: 25101 - DNA, 22 bp, Artificial Sequence
  chemically synthesized
ttttcttcatcttcatcttttc

SEQ ID NO: 25102 - DNA, 22 bp, Artificial Sequence
  chemically synthesized
tcttcatcttcatcttttccag

SEQ ID NO: 25103 - DNA, 22 bp, Artificial Sequence
  chemically synthesized
cttcatcttcatcttttccagg

SEQ ID NO: 25104 - DNA, 22 bp, Artificial Sequence
  chemically synthesized
ttcatcttcatcttttccagga

SEQ ID NO: 25105 - DNA, 22 bp, Artificial Sequence
  chemically synthesized
catcttcatcttttccaggaga

SEQ ID NO: 25106 - DNA, 22 bp, Artificial Sequence
  chemically synthesized
atcttcatcttttccaggagaa

SEQ ID NO: 25107 - DNA, 22 bp, Artificial Sequence
  chemically synthesized
catcttttccaggagaatatac

SEQ ID NO: 25108 - DNA, 22 bp, Artificial Sequence
  chemically synthesized
atcttttccaggagaatatacc

SEQ ID NO: 25109 - DNA, 22 bp, Artificial Sequence
  chemically synthesized
ttccaggagaatataccataag

SEQ ID NO: 25110 - DNA, 22 bp, Artificial Sequence
  chemically synthesized
tccaggagaatataccataagt

SEQ ID NO: 25111 - DNA, 22 bp, Artificial Sequence
  chemically synthesized
ccaggagaatataccataagtt

SEQ ID NO: 25112 - DNA, 22 bp, Artificial Sequence
  chemically synthesized
caggagaatataccataagttt

SEQ ID NO: 25113 - DNA, 22 bp, Artificial Sequence
  chemically synthesized
ctgatggtacacatttattaga

SEQ ID NO: 25114 - DNA, 22 bp, Artificial Sequence
  chemically synthesized
tgatggtacacatttattagat

SEQ ID NO: 25115 - DNA, 22 bp, Artificial Sequence
  chemically synthesized
atggtacacatttattagatgt

SEQ ID NO: 25116 - DNA, 22 bp, Artificial Sequence
  chemically synthesized
attagatgttttatttacattt

SEQ ID NO: 25117 - DNA, 22 bp, Artificial Sequence
  chemically synthesized
ttagatgttttatttacatttt

SEQ ID NO: 25118 - DNA, 22 bp, Artificial Sequence
  chemically synthesized
gatgttttatttacatttttta

SEQ ID NO: 25119 - DNA, 22 bp, Artificial Sequence
  chemically synthesized
tatttacattttttatccttga

SEQ ID NO: 25120 - DNA, 22 bp, Artificial Sequence
  chemically synthesized
atttacattttttatccttgaa

SEQ ID NO: 25121 - DNA, 22 bp, Artificial Sequence
  chemically synthesized
tttacattttttatccttgaaa

SEQ ID NO: 25122 - DNA, 22 bp, Artificial Sequence
  chemically synthesized
acattttttatccttgaaaact

SEQ ID NO: 25123 - DNA, 22 bp, Artificial Sequence
  chemically synthesized
cattttttatccttgaaaactc

SEQ ID NO: 25124 - DNA, 22 bp, Artificial Sequence
  chemically synthesized
tttatccttgaaaactcctttt

SEQ ID NO: 25125 - DNA, 22 bp, Artificial Sequence
  chemically synthesized
ttatccttgaaaactcctttta

SEQ ID NO: 25126 - DNA, 22 bp, Artificial Sequence
  chemically synthesized
tatccttgaaaactccttttat

SEQ ID NO: 25127 - DNA, 22 bp, Artificial Sequence
  chemically synthesized
atccttgaaaactccttttatt

SEQ ID NO: 25128 - DNA, 22 bp, Artificial Sequence
  chemically synthesized
tccttgaaaactccttttattt

SEQ ID NO: 25129 - DNA, 22 bp, Artificial Sequence
  chemically synthesized
gaaaactccttttatttgcaac

SEQ ID NO: 25130 - DNA, 22 bp, Artificial Sequence
  chemically synthesized
aaaactccttttatttgcaact

SEQ ID NO: 25131 - DNA, 22 bp, Artificial Sequence
  chemically synthesized
cttttatttgcaactatgcatc

SEQ ID NO: 25132 - DNA, 22 bp, Artificial Sequence
  chemically synthesized
ttatttgcaactatgcatctta

SEQ ID NO: 25133 - DNA, 22 bp, Artificial Sequence
  chemically synthesized
tatttgcaactatgcatcttac

SEQ ID NO: 25134 - DNA, 22 bp, Artificial Sequence
  chemically synthesized
atttgcaactatgcatcttact

SEQ ID NO: 25135 - DNA, 22 bp, Artificial Sequence
  chemically synthesized
tttgcaactatgcatcttactc

SEQ ID NO: 25136 - DNA, 22 bp, Artificial Sequence
  chemically synthesized
gcaactatgcatcttactcaga

SEQ ID NO: 25137 - DNA, 22 bp, Artificial Sequence
  chemically synthesized
caactatgcatcttactcagag

SEQ ID NO: 25138 - DNA, 22 bp, Artificial Sequence
  chemically synthesized
tgcatcttactcagagatctta

SEQ ID NO: 25139 - DNA, 22 bp, Artificial Sequence
  chemically synthesized
actcagagatcttaaaacatcc

SEQ ID NO: 25140 - DNA, 22 bp, Artificial Sequence
  chemically synthesized
ctcagagatcttaaaacatcct

SEQ ID NO: 25141 - DNA, 22 bp, Artificial Sequence
  chemically synthesized
agagatcttaaaacatccttgt

SEQ ID NO: 25142 - DNA, 22 bp, Artificial Sequence
  chemically synthesized
aaaacatccttgtttgttagat

SEQ ID NO: 25143 - DNA, 22 bp, Artificial Sequence
  chemically synthesized
aaacatccttgtttgttagatt

SEQ ID NO: 25144 - DNA, 22 bp, Artificial Sequence
  chemically synthesized
gtttgttagattacgtatttca

SEQ ID NO: 25145 - DNA, 22 bp, Artificial Sequence
  chemically synthesized
tttgttagattacgtatttcaa

SEQ ID NO: 25146 - DNA, 22 bp, Artificial Sequence
  chemically synthesized
gttagattacgtatttcaaatt

SEQ ID NO: 25147 - DNA, 22 bp, Artificial Sequence
  chemically synthesized
ttagattacgtatttcaaattc

SEQ ID NO: 25148 - DNA, 22 bp, Artificial Sequence
  chemically synthesized
gattacgtatttcaaattcata

SEQ ID NO: 25149 - DNA, 22 bp, Artificial Sequence
  chemically synthesized
cgtatttcaaattcatatacac

SEQ ID NO: 25150 - DNA, 22 bp, Artificial Sequence
  chemically synthesized
caaattcatatacactttggta

SEQ ID NO: 25151 - DNA, 22 bp, Artificial Sequence
  chemically synthesized
aaattcatatacactttggtag

SEQ ID NO: 25152 - DNA, 22 bp, Artificial Sequence
  chemically synthesized
atatacactttggtagatgcaa

SEQ ID NO: 25153 - DNA, 22 bp, Artificial Sequence
  chemically synthesized
tggtagatgcaaacatttttat

SEQ ID NO: 25154 - DNA, 22 bp, Artificial Sequence
  chemically synthesized
ggtagatgcaaacatttttatt

SEQ ID NO: 25155 - DNA, 22 bp, Artificial Sequence
  chemically synthesized
gtagatgcaaacatttttattt

SEQ ID NO: 25156 - DNA, 22 bp, Artificial Sequence
  chemically synthesized
ttatttgctgaagaacataagg

SEQ ID NO: 25157 - DNA, 22 bp, Artificial Sequence
  chemically synthesized
tatttgctgaagaacataaggg

SEQ ID NO: 25158 - DNA, 22 bp, Artificial Sequence
  chemically synthesized
atttgctgaagaacataagggg

SEQ ID NO: 25159 - DNA, 22 bp, Artificial Sequence
  chemically synthesized
tttgctgaagaacataaggggg

SEQ ID NO: 25160 - DNA, 22 bp, Artificial Sequence
  chemically synthesized
gctgaagaacataagggggaaa

SEQ ID NO: 25161 - DNA, 22 bp, Artificial Sequence
  chemically synthesized
ctgaagaacataagggggaaat

SEQ ID NO: 25162 - DNA, 22 bp, Artificial Sequence
  chemically synthesized
aagaacataagggggaaataga

SEQ ID NO: 25163 - DNA, 22 bp, Artificial Sequence
  chemically synthesized
tttatttgaagaaacaaatgat

SEQ ID NO: 25164 - DNA, 22 bp, Artificial Sequence
  chemically synthesized
tatttgaagaaacaaatgattt

SEQ ID NO: 25165 - DNA, 22 bp, Artificial Sequence
  chemically synthesized
atttgaagaaacaaatgatttg

SEQ ID NO: 25166 - DNA, 22 bp, Artificial Sequence
  chemically synthesized
tttgaagaaacaaatgatttga

SEQ ID NO: 25167 - DNA, 22 bp, Artificial Sequence
  chemically synthesized
gaagaaacaaatgatttgattt

SEQ ID NO: 25168 - DNA, 22 bp, Artificial Sequence
  chemically synthesized
aagaaacaaatgatttgatttg

SEQ ID NO: 25169 - DNA, 22 bp, Artificial Sequence
  chemically synthesized
gatttgggaaatgaaatgaaaa

SEQ ID NO: 25170 - DNA, 22 bp, Artificial Sequence
  chemically synthesized
atttgggaaatgaaatgaaaag

SEQ ID NO: 25171 - DNA, 22 bp, Artificial Sequence
  chemically synthesized
gggaaatgaaatgaaaagaaaa

SEQ ID NO: 25172 - DNA, 22 bp, Artificial Sequence
  chemically synthesized
ggaaatgaaatgaaaagaaaaa

SEQ ID NO: 25173 - DNA, 22 bp, Artificial Sequence
  chemically synthesized
actaattcgctacttcttttac

SEQ ID NO: 25174 - DNA, 22 bp, Artificial Sequence
  chemically synthesized
attcgctacttcttttactcat

SEQ ID NO: 25175 - DNA, 22 bp, Artificial Sequence
  chemically synthesized
gctacttcttttactcatctga

SEQ ID NO: 25176 - DNA, 22 bp, Artificial Sequence
  chemically synthesized
cttcttttactcatctgaggcc

SEQ ID NO: 25177 - DNA, 22 bp, Artificial Sequence
  chemically synthesized
cttttactcatctgaggccttc

SEQ ID NO: 25178 - DNA, 22 bp, Artificial Sequence
  chemically synthesized
ttttactcatctgaggccttca

SEQ ID NO: 25179 - DNA, 22 bp, Artificial Sequence
  chemically synthesized
ttactcatctgaggccttcaga

SEQ ID NO: 25180 - DNA, 22 bp, Artificial Sequence
  chemically synthesized
tactcatctgaggccttcagat

SEQ ID NO: 25181 - DNA, 22 bp, Artificial Sequence
  chemically synthesized
actcatctgaggccttcagata

SEQ ID NO: 25182 - DNA, 22 bp, Artificial Sequence
  chemically synthesized
ctcatctgaggccttcagatag

SEQ ID NO: 25183 - DNA, 22 bp, Artificial Sequence
  chemically synthesized
atctgaggccttcagatagtcc

SEQ ID NO: 25184 - DNA, 22 bp, Artificial Sequence
  chemically synthesized
aggccttcagatagtcccccat

SEQ ID NO: 25185 - DNA, 22 bp, Artificial Sequence
  chemically synthesized
cagatagtcccccatatagcct

SEQ ID NO: 25186 - DNA, 22 bp, Artificial Sequence
  chemically synthesized
agatagtcccccatatagcctt

SEQ ID NO: 25187 - DNA, 22 bp, Artificial Sequence
  chemically synthesized
agagtgtttaaaatatgattat

SEQ ID NO: 25188 - DNA, 22 bp, Artificial Sequence
  chemically synthesized
gagtgtttaaaatatgattatg

SEQ ID NO: 25189 - DNA, 22 bp, Artificial Sequence
  chemically synthesized
aaaatatgattatgctctttca

SEQ ID NO: 25190 - DNA, 22 bp, Artificial Sequence
  chemically synthesized
aaatatgattatgctctttcag

SEQ ID NO: 25191 - DNA, 22 bp, Artificial Sequence
  chemically synthesized
tgctctttcagtctattagaaa

SEQ ID NO: 25192 - DNA, 22 bp, Artificial Sequence
  chemically synthesized
tttcagtctattagaaataaaa

SEQ ID NO: 25193 - DNA, 22 bp, Artificial Sequence
  chemically synthesized
tcagtctattagaaataaaaac

SEQ ID NO: 25194 - DNA, 22 bp, Artificial Sequence
  chemically synthesized
cagtctattagaaataaaaaca

SEQ ID NO: 25195 - DNA, 22 bp, Artificial Sequence
  chemically synthesized
agtctattagaaataaaaacat

SEQ ID NO: 25196 - DNA, 22 bp, Artificial Sequence
  chemically synthesized
ttagaaataaaaacataaagct

SEQ ID NO: 25197 - DNA, 22 bp, Artificial Sequence
  chemically synthesized
gaaataaaaacataaagcttaa

SEQ ID NO: 25198 - DNA, 22 bp, Artificial Sequence
  chemically synthesized
aaaaaatttcaagggaaggggc

SEQ ID NO: 25199 - DNA, 22 bp, Artificial Sequence
  chemically synthesized
aaaaatttcaagggaaggggct

SEQ ID NO: 25200 - DNA, 22 bp, Artificial Sequence
  chemically synthesized
caagggaaggggcttgaagatt

SEQ ID NO: 25201 - DNA, 22 bp, Artificial Sequence
  chemically synthesized
aagggaaggggcttgaagatta

SEQ ID NO: 25202 - DNA, 22 bp, Artificial Sequence
  chemically synthesized
gaagattactgactaagggcag

SEQ ID NO: 25203 - DNA, 22 bp, Artificial Sequence
  chemically synthesized
aagattactgactaagggcagc

SEQ ID NO: 25204 - DNA, 22 bp, Artificial Sequence
  chemically synthesized
ctgactaagggcagctgacact

SEQ ID NO: 25205 - DNA, 22 bp, Artificial Sequence
  chemically synthesized
actaagggcagctgacactcac

SEQ ID NO: 25206 - DNA, 22 bp, Artificial Sequence
  chemically synthesized
agggcagctgacactcacctcc

SEQ ID NO: 25207 - DNA, 22 bp, Artificial Sequence
  chemically synthesized
acactcacctcctccacaaaga

SEQ ID NO: 25208 - DNA, 22 bp, Artificial Sequence
  chemically synthesized
acctcctccacaaagaaccaaa

SEQ ID NO: 25209 - DNA, 22 bp, Artificial Sequence
  chemically synthesized
ctccacaaagaaccaaaatagt

SEQ ID NO: 25210 - DNA, 22 bp, Artificial Sequence
  chemically synthesized
cacaaagaaccaaaatagtaag

SEQ ID NO: 25211 - DNA, 22 bp, Artificial Sequence
  chemically synthesized
tggaattcaacagagaagtgac

SEQ ID NO: 25212 - DNA, 22 bp, Artificial Sequence
  chemically synthesized
gaattcaacagagaagtgacag

SEQ ID NO: 25213 - DNA, 22 bp, Artificial Sequence
  chemically synthesized
aacagagaagtgacaggaagca

SEQ ID NO: 25214 - DNA, 22 bp, Artificial Sequence
  chemically synthesized
aggcaatgaaggggagggaagc

SEQ ID NO: 25215 - DNA, 22 bp, Artificial Sequence
  chemically synthesized
cccagtagggatcctctgtgag

SEQ ID NO: 25216 - DNA, 22 bp, Artificial Sequence
  chemically synthesized
tgtgaggccagagaggctcccc

SEQ ID NO: 25217 - DNA, 22 bp, Artificial Sequence
  chemically synthesized
tgaggccagagaggctccccag

SEQ ID NO: 25218 - DNA, 22 bp, Artificial Sequence
  chemically synthesized
cccagtgcatcgaaagttaagt

SEQ ID NO: 25219 - DNA, 22 bp, Artificial Sequence
  chemically synthesized
agtgactgactcccagtggtcc

SEQ ID NO: 25220 - DNA, 22 bp, Artificial Sequence
  chemically synthesized
actcccagtggtccacatctgc

SEQ ID NO: 25221 - DNA, 22 bp, Artificial Sequence
  chemically synthesized
ccagtggtccacatctgcatta

SEQ ID NO: 25222 - DNA, 22 bp, Artificial Sequence
  chemically synthesized
cattatggactccaggaatcct

SEQ ID NO: 25223 - DNA, 22 bp, Artificial Sequence
  chemically synthesized
tggactccaggaatcctagcca

SEQ ID NO: 25224 - DNA, 22 bp, Artificial Sequence
  chemically synthesized
caggaatcctagccacaggaga

SEQ ID NO: 25225 - DNA, 22 bp, Artificial Sequence
  chemically synthesized
gccacaggagagtcccttgacc

SEQ ID NO: 25226 - DNA, 22 bp, Artificial Sequence
  chemically synthesized
gaccatgcaggccttgagacta

SEQ ID NO: 25227 - DNA, 22 bp, Artificial Sequence
  chemically synthesized
accatgcaggccttgagactat

SEQ ID NO: 25228 - DNA, 22 bp, Artificial Sequence
  chemically synthesized
gagactatcataaggaactgcc

SEQ ID NO: 25229 - DNA, 22 bp, Artificial Sequence
  chemically synthesized
agactatcataaggaactgccc

SEQ ID NO: 25230 - DNA, 22 bp, Artificial Sequence
  chemically synthesized
tcataaggaactgcccagcaat

SEQ ID NO: 25231 - DNA, 22 bp, Artificial Sequence
  chemically synthesized
cccagcaatcgcacaaaggcat

SEQ ID NO: 25232 - DNA, 22 bp, Artificial Sequence
  chemically synthesized
ctccagagaaggagctctcact

SEQ ID NO: 25233 - DNA, 22 bp, Artificial Sequence
  chemically synthesized
cagagaaggagctctcactggg

SEQ ID NO: 25234 - DNA, 22 bp, Artificial Sequence
  chemically synthesized
tcactgggtcccacccctgcca

SEQ ID NO: 25235 - DNA, 22 bp, Artificial Sequence
  chemically synthesized
actgggtcccacccctgccatc

SEQ ID NO: 25236 - DNA, 22 bp, Artificial Sequence
  chemically synthesized
ggtcccacccctgccatcccca

SEQ ID NO: 25237 - DNA, 22 bp, Artificial Sequence
  chemically synthesized
ccatccccattactgagcagca

SEQ ID NO: 25238 - DNA, 22 bp, Artificial Sequence
  chemically synthesized
ctgagcagcaaggtgccatttt

SEQ ID NO: 25239 - DNA, 22 bp, Artificial Sequence
  chemically synthesized
agcagcaaggtgccattttgag

SEQ ID NO: 25240 - DNA, 22 bp, Artificial Sequence
  chemically synthesized
tgagagcccaacacccaccaga

SEQ ID NO: 25241 - DNA, 22 bp, Artificial Sequence
  chemically synthesized
gagagcccaacacccaccagat

SEQ ID NO: 25242 - DNA, 22 bp, Artificial Sequence
  chemically synthesized
agagcccaacacccaccagatg

SEQ ID NO: 25243 - DNA, 22 bp, Artificial Sequence
  chemically synthesized
ctcagaccccaacatcatctgc

SEQ ID NO: 25244 - DNA, 22 bp, Artificial Sequence
  chemically synthesized
agaccccaacatcatctgcatc

SEQ ID NO: 25245 - DNA, 22 bp, Artificial Sequence
  chemically synthesized
catctctacatccctgaagctc

SEQ ID NO: 25246 - DNA, 22 bp, Artificial Sequence
  chemically synthesized
tacatccctgaagctctgctga

SEQ ID NO: 25247 - DNA, 22 bp, Artificial Sequence
  chemically synthesized
catccctgaagctctgctgaca

SEQ ID NO: 25248 - DNA, 22 bp, Artificial Sequence
  chemically synthesized
aagctctgctgacatcccccac

SEQ ID NO: 25249 - DNA, 22 bp, Artificial Sequence
  chemically synthesized
tgctgacatcccccacccacag

SEQ ID NO: 25250 - DNA, 22 bp, Artificial Sequence
  chemically synthesized
ctgacatcccccacccacagct

SEQ ID NO: 25251 - DNA, 22 bp, Artificial Sequence
  chemically synthesized
acatcccccacccacagctgag

SEQ ID NO: 25252 - DNA, 22 bp, Artificial Sequence
  chemically synthesized
agtgctactgctggctgctgtc

SEQ ID NO: 25253 - DNA, 22 bp, Artificial Sequence
  chemically synthesized
ctgctggctgctgtcaccaggg

SEQ ID NO: 25254 - DNA, 22 bp, Artificial Sequence
  chemically synthesized
ctggctgctgtcaccagggata

SEQ ID NO: 25255 - DNA, 22 bp, Artificial Sequence
  chemically synthesized
gctgctgtcaccagggataaag

SEQ ID NO: 25256 - DNA, 22 bp, Artificial Sequence
  chemically synthesized
ctgtcaccagggataaagtgtg

SEQ ID NO: 25257 - DNA, 22 bp, Artificial Sequence
  chemically synthesized
tcaccagggataaagtgtgtca

SEQ ID NO: 25258 - DNA, 22 bp, Artificial Sequence
  chemically synthesized
gaagtggactcccccaccccca

SEQ ID NO: 25259 - DNA, 22 bp, Artificial Sequence
  chemically synthesized
ccccacccccagtagcagggct

SEQ ID NO: 25260 - DNA, 22 bp, Artificial Sequence
  chemically synthesized
ctacacatttataagctcccta

SEQ ID NO: 25261 - DNA, 22 bp, Artificial Sequence
  chemically synthesized
cacatttataagctccctaaga

SEQ ID NO: 25262 - DNA, 22 bp, Artificial Sequence
  chemically synthesized
ataagctccctaagaaaatgct

SEQ ID NO: 25263 - DNA, 22 bp, Artificial Sequence
  chemically synthesized
taagctccctaagaaaatgcta

SEQ ID NO: 25264 - DNA, 22 bp, Artificial Sequence
  chemically synthesized
cctaagaaaatgctaccccact

SEQ ID NO: 25265 - DNA, 22 bp, Artificial Sequence
  chemically synthesized
agaaaatgctaccccacttgca

SEQ ID NO: 25266 - DNA, 22 bp, Artificial Sequence
  chemically synthesized
ccccacttgcagccaccatctg

SEQ ID NO: 25267 - DNA, 22 bp, Artificial Sequence
  chemically synthesized
gcagccaccatctggggctgaa

SEQ ID NO: 25268 - DNA, 22 bp, Artificial Sequence
  chemically synthesized
cagccaccatctggggctgaaa

SEQ ID NO: 25269 - DNA, 22 bp, Artificial Sequence
  chemically synthesized
gggctgaaacacatgcccacca

SEQ ID NO: 25270 - DNA, 22 bp, Artificial Sequence
  chemically synthesized
aaacacatgcccaccagcaacc

SEQ ID NO: 25271 - DNA, 22 bp, Artificial Sequence
  chemically synthesized
atagctgctgccactgaaagca

SEQ ID NO: 25272 - DNA, 22 bp, Artificial Sequence
  chemically synthesized
tagctgctgccactgaaagcaa

SEQ ID NO: 25273 - DNA, 22 bp, Artificial Sequence
  chemically synthesized
ctgccactgaaagcaacacacc

SEQ ID NO: 25274 - DNA, 22 bp, Artificial Sequence
  chemically synthesized
ccactgaaagcaacacaccccg

SEQ ID NO: 25275 - DNA, 22 bp, Artificial Sequence
  chemically synthesized
aaagcaacacaccccgcacccc

SEQ ID NO: 25276 - DNA, 22 bp, Artificial Sequence
  chemically synthesized
caagagcagggcaacaatgcag

SEQ ID NO: 25277 - DNA, 22 bp, Artificial Sequence
  chemically synthesized
aagagcagggcaacaatgcagt

SEQ ID NO: 25278 - DNA, 22 bp, Artificial Sequence
  chemically synthesized
ctaattcactcaggcattctgc

SEQ ID NO: 25279 - DNA, 22 bp, Artificial Sequence
  chemically synthesized
attcactcaggcattctgctgg

SEQ ID NO: 25280 - DNA, 22 bp, Artificial Sequence
  chemically synthesized
actcaggcattctgctgggggc

SEQ ID NO: 25281 - DNA, 22 bp, Artificial Sequence
  chemically synthesized
aggcattctgctgggggcctga

SEQ ID NO: 25282 - DNA, 22 bp, Artificial Sequence
  chemically synthesized
tgctgggggcctgaggatcact

SEQ ID NO: 25283 - DNA, 22 bp, Artificial Sequence
  chemically synthesized
ctgggggcctgaggatcactcc

SEQ ID NO: 25284 - DNA, 22 bp, Artificial Sequence
  chemically synthesized
ggggcctgaggatcactccact

SEQ ID NO: 25285 - DNA, 22 bp, Artificial Sequence
  chemically synthesized
aggatcactccactccagccta

SEQ ID NO: 25286 - DNA, 22 bp, Artificial Sequence
  chemically synthesized
cactccagcctatgatagccgg

SEQ ID NO: 25287 - DNA, 22 bp, Artificial Sequence
  chemically synthesized
cagcctatgatagccggtgtcc

SEQ ID NO: 25288 - DNA, 22 bp, Artificial Sequence
  chemically synthesized
tgatagccggtgtccacacaca

SEQ ID NO: 25289 - DNA, 22 bp, Artificial Sequence
  chemically synthesized
agtggcctgaggtcaggaacac

SEQ ID NO: 25290 - DNA, 22 bp, Artificial Sequence
  chemically synthesized
aggtcaggaacacccagcctgg

SEQ ID NO: 25291 - DNA, 22 bp, Artificial Sequence
  chemically synthesized
gctttgccttcctcaatgccta

SEQ ID NO: 25292 - DNA, 22 bp, Artificial Sequence
  chemically synthesized
tgccttcctcaatgcctaagca

SEQ ID NO: 25293 - DNA, 22 bp, Artificial Sequence
  chemically synthesized
gccttcctcaatgcctaagcaa

SEQ ID NO: 25294 - DNA, 22 bp, Artificial Sequence
  chemically synthesized
ccttcctcaatgcctaagcaag

SEQ ID NO: 25295 - DNA, 22 bp, Artificial Sequence
  chemically synthesized
cctcaatgcctaagcaagttgt

SEQ ID NO: 25296 - DNA, 22 bp, Artificial Sequence
  chemically synthesized
ctcaatgcctaagcaagttgtc

SEQ ID NO: 25297 - DNA, 22 bp, Artificial Sequence
  chemically synthesized
aatgcctaagcaagttgtctgg

SEQ ID NO: 25298 - DNA, 22 bp, Artificial Sequence
  chemically synthesized
agcaagttgtctgggaacccag

SEQ ID NO: 25299 - DNA, 22 bp, Artificial Sequence
  chemically synthesized
tctgggaacccagagacagcct

SEQ ID NO: 25300 - DNA, 22 bp, Artificial Sequence
  chemically synthesized
ggaacccagagacagccttgtg

SEQ ID NO: 25301 - DNA, 22 bp, Artificial Sequence
  chemically synthesized
gtgccatccaccatgactggta

SEQ ID NO: 25302 - DNA, 22 bp, Artificial Sequence
  chemically synthesized
tgccatccaccatgactggtac

SEQ ID NO: 25303 - DNA, 22 bp, Artificial Sequence
  chemically synthesized
gtacctaagcaaccctcccaga

SEQ ID NO: 25304 - DNA, 22 bp, Artificial Sequence
  chemically synthesized
agcaaccctcccagaagcctga

SEQ ID NO: 25305 - DNA, 22 bp, Artificial Sequence
  chemically synthesized
ccagaagcctgatgatgggcct

SEQ ID NO: 25306 - DNA, 22 bp, Artificial Sequence
  chemically synthesized
atgatgggcctacccaatctgc

SEQ ID NO: 25307 - DNA, 22 bp, Artificial Sequence
  chemically synthesized
cccaatctgccactgccatcac

SEQ ID NO: 25308 - DNA, 22 bp, Artificial Sequence
  chemically synthesized
ccactgccatcacaactggcac

SEQ ID NO: 25309 - DNA, 22 bp, Artificial Sequence
  chemically synthesized
ccatcacaactggcacctcctg

SEQ ID NO: 25310 - DNA, 22 bp, Artificial Sequence
  chemically synthesized
gcacctcctgcatgtgccacct

SEQ ID NO: 25311 - DNA, 22 bp, Artificial Sequence
  chemically synthesized
ctgcatgtgccacctgtgggtc

SEQ ID NO: 25312 - DNA, 22 bp, Artificial Sequence
  chemically synthesized
catgtgccacctgtgggtctga

SEQ ID NO: 25313 - DNA, 22 bp, Artificial Sequence
  chemically synthesized
tgggtctgaagactggctcatt

SEQ ID NO: 25314 - DNA, 22 bp, Artificial Sequence
  chemically synthesized
aagactggctcattcagccctt

SEQ ID NO: 25315 - DNA, 22 bp, Artificial Sequence
  chemically synthesized
gctcattcagcccttgcagcca

SEQ ID NO: 25316 - DNA, 22 bp, Artificial Sequence
  chemically synthesized
attcagcccttgcagccaccac

SEQ ID NO: 25317 - DNA, 22 bp, Artificial Sequence
  chemically synthesized
agcccttgcagccaccaccaac

SEQ ID NO: 25318 - DNA, 22 bp, Artificial Sequence
  chemically synthesized
gcagccaccaccaacaccagtg

SEQ ID NO: 25319 - DNA, 22 bp, Artificial Sequence
  chemically synthesized
cagccaccaccaacaccagtgc

SEQ ID NO: 25320 - DNA, 22 bp, Artificial Sequence
  chemically synthesized
cttgggagccagagggttgtcc

SEQ ID NO: 25321 - DNA, 22 bp, Artificial Sequence
  chemically synthesized
gggagccagagggttgtcctgc

SEQ ID NO: 25322 - DNA, 22 bp, Artificial Sequence
  chemically synthesized
ggagccagagggttgtcctgca

SEQ ID NO: 25323 - DNA, 22 bp, Artificial Sequence
  chemically synthesized
tcctgcagttgctacagccatc

SEQ ID NO: 25324 - DNA, 22 bp, Artificial Sequence
  chemically synthesized
cagttgctacagccatcaccca

SEQ ID NO: 25325 - DNA, 22 bp, Artificial Sequence
  chemically synthesized
ctacagccatcacccacaccac

SEQ ID NO: 25326 - DNA, 22 bp, Artificial Sequence
  chemically synthesized
cagccatcacccacaccacacc

SEQ ID NO: 25327 - DNA, 22 bp, Artificial Sequence
  chemically synthesized
tccagaagcctgaggacccaca

SEQ ID NO: 25328 - DNA, 22 bp, Artificial Sequence
  chemically synthesized
aggacccacacaccagcccagt

SEQ ID NO: 25329 - DNA, 22 bp, Artificial Sequence
  chemically synthesized
ctatggccactactgacaccca

SEQ ID NO: 25330 - DNA, 22 bp, Artificial Sequence
  chemically synthesized
tggccactactgacacccaagc

SEQ ID NO: 25331 - DNA, 22 bp, Artificial Sequence
  chemically synthesized
ctgacacccaagcaaactgcct

SEQ ID NO: 25332 - DNA, 22 bp, Artificial Sequence
  chemically synthesized
acacccaagcaaactgcctgaa

SEQ ID NO: 25333 - DNA, 22 bp, Artificial Sequence
  chemically synthesized
cctgaaggccaaagaatcaacc

SEQ ID NO: 25334 - DNA, 22 bp, Artificial Sequence
  chemically synthesized
aaggccaaagaatcaacccaac

SEQ ID NO: 25335 - DNA, 22 bp, Artificial Sequence
  chemically synthesized
gactcattaccatcagtgccaa

SEQ ID NO: 25336 - DNA, 22 bp, Artificial Sequence
  chemically synthesized
attaccatcagtgccaatgtac

SEQ ID NO: 25337 - DNA, 22 bp, Artificial Sequence
  chemically synthesized
ccatcagtgccaatgtacacag

SEQ ID NO: 25338 - DNA, 22 bp, Artificial Sequence
  chemically synthesized
ggcccaccaccaccactggggc

SEQ ID NO: 25339 - DNA, 22 bp, Artificial Sequence
  chemically synthesized
gggccaaggactggcccacttg

SEQ ID NO: 25340 - DNA, 22 bp, Artificial Sequence
  chemically synthesized
gcccacttgatattcttgtctc

SEQ ID NO: 25341 - DNA, 22 bp, Artificial Sequence
  chemically synthesized
gatattcttgtctccagcacaa

SEQ ID NO: 25342 - DNA, 22 bp, Artificial Sequence
  chemically synthesized
atattcttgtctccagcacaac

SEQ ID NO: 25343 - DNA, 22 bp, Artificial Sequence
  chemically synthesized
ttgtctccagcacaacctcatc

SEQ ID NO: 25344 - DNA, 22 bp, Artificial Sequence
  chemically synthesized
gtctccagcacaacctcatcac

SEQ ID NO: 25345 - DNA, 22 bp, Artificial Sequence
  chemically synthesized
tctccagcacaacctcatcacc

SEQ ID NO: 25346 - DNA, 22 bp, Artificial Sequence
  chemically synthesized
cagcacaacctcatcaccacct

SEQ ID NO: 25347 - DNA, 22 bp, Artificial Sequence
  chemically synthesized
atcaccaccttcactaacaaat

SEQ ID NO: 25348 - DNA, 22 bp, Artificial Sequence
  chemically synthesized
cactaacaaatgcaccctaagc

SEQ ID NO: 25349 - DNA, 22 bp, Artificial Sequence
  chemically synthesized
actaacaaatgcaccctaagcc

SEQ ID NO: 25350 - DNA, 22 bp, Artificial Sequence
  chemically synthesized
acaaatgcaccctaagccactg

SEQ ID NO: 25351 - DNA, 22 bp, Artificial Sequence
  chemically synthesized
agccactgaaaaaatcacagac

SEQ ID NO: 25352 - DNA, 22 bp, Artificial Sequence
  chemically synthesized
aaaaaatcacagacactgatga

SEQ ID NO: 25353 - DNA, 22 bp, Artificial Sequence
  chemically synthesized
atgatactgttggcagctgaaa

SEQ ID NO: 25354 - DNA, 22 bp, Artificial Sequence
  chemically synthesized
ttggcagctgaaaaaaaataat

SEQ ID NO: 25355 - DNA, 22 bp, Artificial Sequence
  chemically synthesized
gcagctgaaaaaaaataatatg

SEQ ID NO: 25356 - DNA, 22 bp, Artificial Sequence
  chemically synthesized
aaaaaaaataatatgaagacta

SEQ ID NO: 25357 - DNA, 22 bp, Artificial Sequence
  chemically synthesized
tgctgctgtatgcacctagaaa

SEQ ID NO: 25358 - DNA, 22 bp, Artificial Sequence
  chemically synthesized
ctgtatgcacctagaaatcaaa

SEQ ID NO: 25359 - DNA, 22 bp, Artificial Sequence
  chemically synthesized
tatgcacctagaaatcaaaatc

SEQ ID NO: 25360 - DNA, 22 bp, Artificial Sequence
  chemically synthesized
gaaatcaaaatcaaagtgccct

SEQ ID NO: 25361 - DNA, 22 bp, Artificial Sequence
  chemically synthesized
ctcaatcaacaccaagatacat

SEQ ID NO: 25362 - DNA, 22 bp, Artificial Sequence
  chemically synthesized
aatcaacaccaagatacatctt

SEQ ID NO: 25363 - DNA, 22 bp, Artificial Sequence
  chemically synthesized
cagaaaaaagtcttcccctaca

SEQ ID NO: 25364 - DNA, 22 bp, Artificial Sequence
  chemically synthesized
agaaaaaagtcttcccctacaa

SEQ ID NO: 25365 - DNA, 22 bp, Artificial Sequence
  chemically synthesized
cccctacaaaaacaaatttaca

SEQ ID NO: 25366 - DNA, 22 bp, Artificial Sequence
  chemically synthesized
ccctacaaaaacaaatttacaa

SEQ ID NO: 25367 - DNA, 22 bp, Artificial Sequence
  chemically synthesized
caaaaacaaatttacaaaactg

SEQ ID NO: 25368 - DNA, 22 bp, Artificial Sequence
  chemically synthesized
acaaaactggaagcagcaatca

SEQ ID NO: 25369 - DNA, 22 bp, Artificial Sequence
  chemically synthesized
caaaactggaagcagcaatcat

SEQ ID NO: 25370 - DNA, 22 bp, Artificial Sequence
  chemically synthesized
gaagcagcaatcattacaccag

SEQ ID NO: 25371 - DNA, 22 bp, Artificial Sequence
  chemically synthesized
caccagatgcagagatatcaat

SEQ ID NO: 25372 - DNA, 22 bp, Artificial Sequence
  chemically synthesized
ccaaaggaatttaataattctt

SEQ ID NO: 25373 - DNA, 22 bp, Artificial Sequence
  chemically synthesized
caaaggaatttaataattcttc

SEQ ID NO: 25374 - DNA, 22 bp, Artificial Sequence
  chemically synthesized
aataattcttcagcaacataag

SEQ ID NO: 25375 - DNA, 22 bp, Artificial Sequence
  chemically synthesized
ataattcttcagcaacataagc

SEQ ID NO: 25376 - DNA, 22 bp, Artificial Sequence
  chemically synthesized
ttcagcaacataagccagtgga

SEQ ID NO: 25377 - DNA, 22 bp, Artificial Sequence
  chemically synthesized
cagcaacataagccagtggaaa

SEQ ID NO: 25378 - DNA, 22 bp, Artificial Sequence
  chemically synthesized
agcaacataagccagtggaaaa

SEQ ID NO: 25379 - DNA, 22 bp, Artificial Sequence
  chemically synthesized
ataaaattctggaaaaaagaat

SEQ ID NO: 25380 - DNA, 22 bp, Artificial Sequence
  chemically synthesized
taaaattctggaaaaaagaatc

SEQ ID NO: 25381 - DNA, 22 bp, Artificial Sequence
  chemically synthesized
tggaaaaaagaatccaaaatgt

SEQ ID NO: 25382 - DNA, 22 bp, Artificial Sequence
  chemically synthesized
gaaaaaagaatccaaaatgttg

SEQ ID NO: 25383 - DNA, 22 bp, Artificial Sequence
  chemically synthesized
atattaaggaagctcagtgaga

SEQ ID NO: 25384 - DNA, 22 bp, Artificial Sequence
  chemically synthesized
aggaagctcagtgagacacaag

SEQ ID NO: 25385 - DNA, 22 bp, Artificial Sequence
  chemically synthesized
agtgagacacaagagaactcag

SEQ ID NO: 25386 - DNA, 22 bp, Artificial Sequence
  chemically synthesized
agataaacaataaaaagaaatc

SEQ ID NO: 25387 - DNA, 22 bp, Artificial Sequence
  chemically synthesized
aggatatgaatgagaaatttac

SEQ ID NO: 25388 - DNA, 22 bp, Artificial Sequence
  chemically synthesized
acccaagagatagatacaacaa

SEQ ID NO: 25389 - DNA, 22 bp, Artificial Sequence
  chemically synthesized
cccaagagatagatacaacaag

SEQ ID NO: 25390 - DNA, 22 bp, Artificial Sequence
  chemically synthesized
tgtaactgaagagtttattgaa

SEQ ID NO: 25391 - DNA, 22 bp, Artificial Sequence
  chemically synthesized
taactgaagagtttattgaaag

SEQ ID NO: 25392 - DNA, 22 bp, Artificial Sequence
  chemically synthesized
aagagtttattgaaagaaatac

SEQ ID NO: 25393 - DNA, 22 bp, Artificial Sequence
  chemically synthesized
attgaaagaaatacaaaataca

SEQ ID NO: 25394 - DNA, 22 bp, Artificial Sequence
  chemically synthesized
ttgaaagaaatacaaaatacat

SEQ ID NO: 25395 - DNA, 22 bp, Artificial Sequence
  chemically synthesized
aaagaaatacaaaatacattca

SEQ ID NO: 25396 - DNA, 22 bp, Artificial Sequence
  chemically synthesized
aaaaacttcaacaatagatcag

SEQ ID NO: 25397 - DNA, 22 bp, Artificial Sequence
  chemically synthesized
caacaatagatcagatcaagca

SEQ ID NO: 25398 - DNA, 22 bp, Artificial Sequence
  chemically synthesized
aacaatagatcagatcaagcag

SEQ ID NO: 25399 - DNA, 22 bp, Artificial Sequence
  chemically synthesized
cagaacttgaagacaggtcttt

SEQ ID NO: 25400 - DNA, 22 bp, Artificial Sequence
  chemically synthesized
agaacttgaagacaggtctttt

SEQ ID NO: 25401 - DNA, 22 bp, Artificial Sequence
  chemically synthesized
gaagacaggtcttttaaaatta

SEQ ID NO: 25402 - DNA, 22 bp, Artificial Sequence
  chemically synthesized
aagacaggtcttttaaaattag

SEQ ID NO: 25403 - DNA, 22 bp, Artificial Sequence
  chemically synthesized
ttaaaattagctggtcaaatga

SEQ ID NO: 25404 - DNA, 22 bp, Artificial Sequence
  chemically synthesized
taaaattagctggtcaaatgat

SEQ ID NO: 25405 - DNA, 22 bp, Artificial Sequence
  chemically synthesized
aaaattagctggtcaaatgata

SEQ ID NO: 25406 - DNA, 22 bp, Artificial Sequence
  chemically synthesized
aaattagctggtcaaatgatag

SEQ ID NO: 25407 - DNA, 22 bp, Artificial Sequence
  chemically synthesized
gctggtcaaatgatagaaagga

SEQ ID NO: 25408 - DNA, 22 bp, Artificial Sequence
  chemically synthesized
gtcaaatgatagaaaggaaaaa

SEQ ID NO: 25409 - DNA, 22 bp, Artificial Sequence
  chemically synthesized
taaagtgaacaaatattcaaat

SEQ ID NO: 25410 - DNA, 22 bp, Artificial Sequence
  chemically synthesized
aaatttgcagtttcccagaagg

SEQ ID NO: 25411 - DNA, 22 bp, Artificial Sequence
  chemically synthesized
gcagtttcccagaaggtaaaga

SEQ ID NO: 25412 - DNA, 22 bp, Artificial Sequence
  chemically synthesized
cagtttcccagaaggtaaagag

SEQ ID NO: 25413 - DNA, 22 bp, Artificial Sequence
  chemically synthesized
cccagaaggtaaagagaacatg

SEQ ID NO: 25414 - DNA, 22 bp, Artificial Sequence
  chemically synthesized
ccagaaggtaaagagaacatga

SEQ ID NO: 25415 - DNA, 22 bp, Artificial Sequence
  chemically synthesized
cgtaacaacacaatagctgaaa

SEQ ID NO: 25416 - DNA, 22 bp, Artificial Sequence
  chemically synthesized
aaaacttgtcaagtctagcaag

SEQ ID NO: 25417 - DNA, 22 bp, Artificial Sequence
  chemically synthesized
gtcaagtctagcaagaaatgta

SEQ ID NO: 25418 - DNA, 22 bp, Artificial Sequence
  chemically synthesized
tcaagtctagcaagaaatgtag

SEQ ID NO: 25419 - DNA, 22 bp, Artificial Sequence
  chemically synthesized
gcaagaaatgtagacatccaga

SEQ ID NO: 25420 - DNA, 22 bp, Artificial Sequence
  chemically synthesized
ccaaataatataatgcaaaaag

SEQ ID NO: 25421 - DNA, 22 bp, Artificial Sequence
  chemically synthesized
ttctccacagcacattatagtc

SEQ ID NO: 25422 - DNA, 22 bp, Artificial Sequence
  chemically synthesized
ctccacagcacattatagtcaa

SEQ ID NO: 25423 - DNA, 22 bp, Artificial Sequence
  chemically synthesized
tccacagcacattatagtcaaa

SEQ ID NO: 25424 - DNA, 22 bp, Artificial Sequence
  chemically synthesized
cacagcacattatagtcaaact

SEQ ID NO: 25425 - DNA, 22 bp, Artificial Sequence
  chemically synthesized
tagtcaaactgtcaaaagccaa

SEQ ID NO: 25426 - DNA, 22 bp, Artificial Sequence
  chemically synthesized
tcaaaagccaaagagtaagaac

SEQ ID NO: 25427 - DNA, 22 bp, Artificial Sequence
  chemically synthesized
taaaacagcaagcaaaatgtct

SEQ ID NO: 25428 - DNA, 22 bp, Artificial Sequence
  chemically synthesized
aaacagcaagcaaaatgtctag

SEQ ID NO: 25429 - DNA, 22 bp, Artificial Sequence
  chemically synthesized
gtcacttataagggaacttcca

SEQ ID NO: 25430 - DNA, 22 bp, Artificial Sequence
  chemically synthesized
ataagggaacttccacaagatt

SEQ ID NO: 25431 - DNA, 22 bp, Artificial Sequence
  chemically synthesized
taagggaacttccacaagatta

SEQ ID NO: 25432 - DNA, 22 bp, Artificial Sequence
  chemically synthesized
ccacaagattaacagattaaca

SEQ ID NO: 25433 - DNA, 22 bp, Artificial Sequence
  chemically synthesized
cacaagattaacagattaacag

SEQ ID NO: 25434 - DNA, 22 bp, Artificial Sequence
  chemically synthesized
acagattaacagcagatttctc

SEQ ID NO: 25435 - DNA, 22 bp, Artificial Sequence
  chemically synthesized
acagcagatttctcagcagaaa

SEQ ID NO: 25436 - DNA, 22 bp, Artificial Sequence
  chemically synthesized
ctcagcagaaacctcacaggcc

SEQ ID NO: 25437 - DNA, 22 bp, Artificial Sequence
  chemically synthesized
tcagcagaaacctcacaggcca

SEQ ID NO: 25438 - DNA, 22 bp, Artificial Sequence
  chemically synthesized
agcagaaacctcacaggccagg

SEQ ID NO: 25439 - DNA, 22 bp, Artificial Sequence
  chemically synthesized
acaggccaggagaagatgggat

SEQ ID NO: 25440 - DNA, 22 bp, Artificial Sequence
  chemically synthesized
aaaatagtgaaagaaaaaaatg

SEQ ID NO: 25441 - DNA, 22 bp, Artificial Sequence
  chemically synthesized
tacccagcaacattgttcttca

SEQ ID NO: 25442 - DNA, 22 bp, Artificial Sequence
  chemically synthesized
ttcttcaaaaatgaaggataaa

SEQ ID NO: 25443 - DNA, 22 bp, Artificial Sequence
  chemically synthesized
ttcaaaaatgaaggataaataa

SEQ ID NO: 25444 - DNA, 22 bp, Artificial Sequence
  chemically synthesized
caaaaatgaaggataaataaaa

SEQ ID NO: 25445 - DNA, 22 bp, Artificial Sequence
  chemically synthesized
aaaaatgaaggataaataaaat

SEQ ID NO: 25446 - DNA, 22 bp, Artificial Sequence
  chemically synthesized
ttctgggcaagaaaaatttgaa

SEQ ID NO: 25447 - DNA, 22 bp, Artificial Sequence
  chemically synthesized
tctgggcaagaaaaatttgaag

SEQ ID NO: 25448 - DNA, 22 bp, Artificial Sequence
  chemically synthesized
ctgggcaagaaaaatttgaagg

SEQ ID NO: 25449 - DNA, 22 bp, Artificial Sequence
  chemically synthesized
tgggcaagaaaaatttgaagga

SEQ ID NO: 25450 - DNA, 22 bp, Artificial Sequence
  chemically synthesized
ggcaagaaaaatttgaaggaat

SEQ ID NO: 25451 - DNA, 22 bp, Artificial Sequence
  chemically synthesized
gaaggaattcactatcactaga

SEQ ID NO: 25452 - DNA, 22 bp, Artificial Sequence
  chemically synthesized
aaggaattcactatcactagac

SEQ ID NO: 25453 - DNA, 22 bp, Artificial Sequence
  chemically synthesized
actatcactagactggctttac

SEQ ID NO: 25454 - DNA, 22 bp, Artificial Sequence
  chemically synthesized
tcactagactggctttacaaga

SEQ ID NO: 25455 - DNA, 22 bp, Artificial Sequence
  chemically synthesized
gactggctttacaagaaatatt

SEQ ID NO: 25456 - DNA, 22 bp, Artificial Sequence
  chemically synthesized
gctttacaagaaatatttaagg

SEQ ID NO: 25457 - DNA, 22 bp, Artificial Sequence
  chemically synthesized
tacaagaaatatttaagggagt

SEQ ID NO: 25458 - DNA, 22 bp, Artificial Sequence
  chemically synthesized
acaagaaatatttaagggagtc

SEQ ID NO: 25459 - DNA, 22 bp, Artificial Sequence
  chemically synthesized
caagaaatatttaagggagtcc

SEQ ID NO: 25460 - DNA, 22 bp, Artificial Sequence
  chemically synthesized
aagggagtcctacacatgaaag

SEQ ID NO: 25461 - DNA, 22 bp, Artificial Sequence
  chemically synthesized
agggagtcctacacatgaaagt

SEQ ID NO: 25462 - DNA, 22 bp, Artificial Sequence
  chemically synthesized
cacatgaaagtgacaggacact

SEQ ID NO: 25463 - DNA, 22 bp, Artificial Sequence
  chemically synthesized
ccattatgaagacacacaaagg

SEQ ID NO: 25464 - DNA, 22 bp, Artificial Sequence
  chemically synthesized
tgaagacacacaaaggtataca

SEQ ID NO: 25465 - DNA, 22 bp, Artificial Sequence
  chemically synthesized
actggtagagcaaaacacaaat

SEQ ID NO: 25466 - DNA, 22 bp, Artificial Sequence
  chemically synthesized
gtagagcaaaacacaaataaag

SEQ ID NO: 25467 - DNA, 22 bp, Artificial Sequence
  chemically synthesized
aaacgttaccactacagaaaat

SEQ ID NO: 25468 - DNA, 22 bp, Artificial Sequence
  chemically synthesized
ccactacagaaaatcaccaaac

SEQ ID NO: 25469 - DNA, 22 bp, Artificial Sequence
  chemically synthesized
cagaaaatcaccaaaccacaat

SEQ ID NO: 25470 - DNA, 22 bp, Artificial Sequence
  chemically synthesized
aaaaaaaaacaaaacaaccagg

SEQ ID NO: 25471 - DNA, 22 bp, Artificial Sequence
  chemically synthesized
acaaaatggcaggaataagctc

SEQ ID NO: 25472 - DNA, 22 bp, Artificial Sequence
  chemically synthesized
tcacatgtcaataatagccttg

SEQ ID NO: 25473 - DNA, 22 bp, Artificial Sequence
  chemically synthesized
acatgtcaataatagccttgca

SEQ ID NO: 25474 - DNA, 22 bp, Artificial Sequence
  chemically synthesized
gcatgtaaatggattaaattgt

SEQ ID NO: 25475 - DNA, 22 bp, Artificial Sequence
  chemically synthesized
catgtaaatggattaaattgtt

SEQ ID NO: 25476 - DNA, 22 bp, Artificial Sequence
  chemically synthesized
aattgttacttgaaagatatag

SEQ ID NO: 25477 - DNA, 22 bp, Artificial Sequence
  chemically synthesized
ttacttgaaagatatagactgg

SEQ ID NO: 25478 - DNA, 22 bp, Artificial Sequence
  chemically synthesized
cttgaaagatatagactggcta

SEQ ID NO: 25479 - DNA, 22 bp, Artificial Sequence
  chemically synthesized
gaaagatatagactggctaaat

SEQ ID NO: 25480 - DNA, 22 bp, Artificial Sequence
  chemically synthesized
aaagatatagactggctaaata

SEQ ID NO: 25481 - DNA, 22 bp, Artificial Sequence
  chemically synthesized
gctaaatagatttaaaacaaaa

SEQ ID NO: 25482 - DNA, 22 bp, Artificial Sequence
  chemically synthesized
aatagatttaaaacaaaaatat

SEQ ID NO: 25483 - DNA, 22 bp, Artificial Sequence
  chemically synthesized
aaaacaaaaatatgacccagtt

SEQ ID NO: 25484 - DNA, 22 bp, Artificial Sequence
  chemically synthesized
aaacaaaaatatgacccagttg

SEQ ID NO: 25485 - DNA, 22 bp, Artificial Sequence
  chemically synthesized
taagctgcctataagaaactta

SEQ ID NO: 25486 - DNA, 22 bp, Artificial Sequence
  chemically synthesized
cctataagaaacttatctcact

SEQ ID NO: 25487 - DNA, 22 bp, Artificial Sequence
  chemically synthesized
taagaaacttatctcacttgta

SEQ ID NO: 25488 - DNA, 22 bp, Artificial Sequence
  chemically synthesized
atctcacttgtaaagataaata

SEQ ID NO: 25489 - DNA, 22 bp, Artificial Sequence
  chemically synthesized
tctcacttgtaaagataaatat

SEQ ID NO: 25490 - DNA, 22 bp, Artificial Sequence
  chemically synthesized
acttgtaaagataaatatagac

SEQ ID NO: 25491 - DNA, 22 bp, Artificial Sequence
  chemically synthesized
gtaaagataaatatagactgaa

SEQ ID NO: 25492 - DNA, 22 bp, Artificial Sequence
  chemically synthesized
taaagataaatatagactgaaa

SEQ ID NO: 25493 - DNA, 22 bp, Artificial Sequence
  chemically synthesized
aaagtaaaaagatgaaagatct

SEQ ID NO: 25494 - DNA, 22 bp, Artificial Sequence
  chemically synthesized
ccatacaaagagaaaccaaaaa

SEQ ID NO: 25495 - DNA, 22 bp, Artificial Sequence
  chemically synthesized
catacaaagagaaaccaaaaat

SEQ ID NO: 25496 - DNA, 22 bp, Artificial Sequence
  chemically synthesized
tacctataacagataaaattga

SEQ ID NO: 25497 - DNA, 22 bp, Artificial Sequence
  chemically synthesized
taacagataaaattgactttaa

SEQ ID NO: 25498 - DNA, 22 bp, Artificial Sequence
  chemically synthesized
actttaaataaaaaacactaag

SEQ ID NO: 25499 - DNA, 22 bp, Artificial Sequence
  chemically synthesized
taaataaaaaacactaagagac

SEQ ID NO: 25500 - DNA, 22 bp, Artificial Sequence
  chemically synthesized
aaataaaaaacactaagagaca

SEQ ID NO: 25501 - DNA, 22 bp, Artificial Sequence
  chemically synthesized
aataaaaaacactaagagacaa

SEQ ID NO: 25502 - DNA, 22 bp, Artificial Sequence
  chemically synthesized
agagacaaaagtcattacataa

SEQ ID NO: 25503 - DNA, 22 bp, Artificial Sequence
  chemically synthesized
cataatgataaaaggaacaatt

SEQ ID NO: 25504 - DNA, 22 bp, Artificial Sequence
  chemically synthesized
agcaagagtatataacaattct

SEQ ID NO: 25505 - DNA, 22 bp, Artificial Sequence
  chemically synthesized
taaacattcacactcaacacca

SEQ ID NO: 25506 - DNA, 22 bp, Artificial Sequence
  chemically synthesized
aacattcacactcaacaccaga

SEQ ID NO: 25507 - DNA, 22 bp, Artificial Sequence
  chemically synthesized
acactcaacaccagagcatcca

SEQ ID NO: 25508 - DNA, 22 bp, Artificial Sequence
  chemically synthesized
aacaccagagcatccagatatg

SEQ ID NO: 25509 - DNA, 22 bp, Artificial Sequence
  chemically synthesized
ttagatataaagggtgaaatag

SEQ ID NO: 25510 - DNA, 22 bp, Artificial Sequence
  chemically synthesized
gatataaagggtgaaatagaat

SEQ ID NO: 25511 - DNA, 22 bp, Artificial Sequence
  chemically synthesized
gggatttcaacattctaatctc

SEQ ID NO: 25512 - DNA, 22 bp, Artificial Sequence
  chemically synthesized
caacattctaatctcagcatca

SEQ ID NO: 25513 - DNA, 22 bp, Artificial Sequence
  chemically synthesized
aacattctaatctcagcatcag

SEQ ID NO: 25514 - DNA, 22 bp, Artificial Sequence
  chemically synthesized
taatctcagcatcagatagatc

SEQ ID NO: 25515 - DNA, 22 bp, Artificial Sequence
  chemically synthesized
atctcagcatcagatagatcat

SEQ ID NO: 25516 - DNA, 22 bp, Artificial Sequence
  chemically synthesized
agcatcagatagatcatctaga

SEQ ID NO: 25517 - DNA, 22 bp, Artificial Sequence
  chemically synthesized
gacagaaaattaacaaagaaac

SEQ ID NO: 25518 - DNA, 22 bp, Artificial Sequence
  chemically synthesized
acaaagaaacattggatttaaa

SEQ ID NO: 25519 - DNA, 22 bp, Artificial Sequence
  chemically synthesized
gatttaaacttgactttagacc

SEQ ID NO: 25520 - DNA, 22 bp, Artificial Sequence
  chemically synthesized
aaacttgactttagaccaaatg

SEQ ID NO: 25521 - DNA, 22 bp, Artificial Sequence
  chemically synthesized
aacttgactttagaccaaatgg

SEQ ID NO: 25522 - DNA, 22 bp, Artificial Sequence
  chemically synthesized
gactttagaccaaatggatcta

SEQ ID NO: 25523 - DNA, 22 bp, Artificial Sequence
  chemically synthesized
actttagaccaaatggatctaa

SEQ ID NO: 25524 - DNA, 22 bp, Artificial Sequence
  chemically synthesized
tagaccaaatggatctaacatt

SEQ ID NO: 25525 - DNA, 22 bp, Artificial Sequence
  chemically synthesized
agaccaaatggatctaacattt

SEQ ID NO: 25526 - DNA, 22 bp, Artificial Sequence
  chemically synthesized
gaccaaatggatctaacattta

SEQ ID NO: 25527 - DNA, 22 bp, Artificial Sequence
  chemically synthesized
acatttacacaatatttcatcc

SEQ ID NO: 25528 - DNA, 22 bp, Artificial Sequence
  chemically synthesized
acacaatatttcatccaacagc

SEQ ID NO: 25529 - DNA, 22 bp, Artificial Sequence
  chemically synthesized
cacaatatttcatccaacagct

SEQ ID NO: 25530 - DNA, 22 bp, Artificial Sequence
  chemically synthesized
catccaacagctacagaatata

SEQ ID NO: 25531 - DNA, 22 bp, Artificial Sequence
  chemically synthesized
atccaacagctacagaatatat

SEQ ID NO: 25532 - DNA, 22 bp, Artificial Sequence
  chemically synthesized
cagaatatatttatctcatcag

SEQ ID NO: 25533 - DNA, 22 bp, Artificial Sequence
  chemically synthesized
atctcatcagcacatgacgcat

SEQ ID NO: 25534 - DNA, 22 bp, Artificial Sequence
  chemically synthesized
tctcatcagcacatgacgcatt

SEQ ID NO: 25535 - DNA, 22 bp, Artificial Sequence
  chemically synthesized
atcagcacatgacgcattcccc

SEQ ID NO: 25536 - DNA, 22 bp, Artificial Sequence
  chemically synthesized
cccaggatacaccatatgttag

SEQ ID NO: 25537 - DNA, 22 bp, Artificial Sequence
  chemically synthesized
gaacacaaaagaagtctcaact

SEQ ID NO: 25538 - DNA, 22 bp, Artificial Sequence
  chemically synthesized
aactaatttgaaatatttgaaa

SEQ ID NO: 25539 - DNA, 22 bp, Artificial Sequence
  chemically synthesized
atttgaaatatttgaaatcata

SEQ ID NO: 25540 - DNA, 22 bp, Artificial Sequence
  chemically synthesized
gaaatatttgaaatcatattaa

SEQ ID NO: 25541 - DNA, 22 bp, Artificial Sequence
  chemically synthesized
aaatatttgaaatcatattaag

SEQ ID NO: 25542 - DNA, 22 bp, Artificial Sequence
  chemically synthesized
gaaatcatattaagcatcttct

SEQ ID NO: 25543 - DNA, 22 bp, Artificial Sequence
  chemically synthesized
aaatcatattaagcatcttctc

SEQ ID NO: 25544 - DNA, 22 bp, Artificial Sequence
  chemically synthesized
agcatcttctcagaccacaatg

SEQ ID NO: 25545 - DNA, 22 bp, Artificial Sequence
  chemically synthesized
ctcagaccacaatggaataaaa

SEQ ID NO: 25546 - DNA, 22 bp, Artificial Sequence
  chemically synthesized
tcagaccacaatggaataaaac

SEQ ID NO: 25547 - DNA, 22 bp, Artificial Sequence
  chemically synthesized
agaccacaatggaataaaacta

SEQ ID NO: 25548 - DNA, 22 bp, Artificial Sequence
  chemically synthesized
gaaatcaataacaagaaaaact

SEQ ID NO: 25549 - DNA, 22 bp, Artificial Sequence
  chemically synthesized
taaaacctatacaaatacatgg

SEQ ID NO: 25550 - DNA, 22 bp, Artificial Sequence
  chemically synthesized
aaaacctatacaaatacatgga

SEQ ID NO: 25551 - DNA, 22 bp, Artificial Sequence
  chemically synthesized
aaacctatacaaatacatggaa

SEQ ID NO: 25552 - DNA, 22 bp, Artificial Sequence
  chemically synthesized
tacaaatacatggaaattaaac

SEQ ID NO: 25553 - DNA, 22 bp, Artificial Sequence
  chemically synthesized
aacaacatgctcctgaatgaac

SEQ ID NO: 25554 - DNA, 22 bp, Artificial Sequence
  chemically synthesized
ctgaatgaacgttatgtcaaga

SEQ ID NO: 25555 - DNA, 22 bp, Artificial Sequence
  chemically synthesized
aatgaacgttatgtcaagaaga

SEQ ID NO: 25556 - DNA, 22 bp, Artificial Sequence
  chemically synthesized
tgtcaagaagaaaattaagaag

SEQ ID NO: 25557 - DNA, 22 bp, Artificial Sequence
  chemically synthesized
agaaggaaatcaaaaatttttt

SEQ ID NO: 25558 - DNA, 22 bp, Artificial Sequence
  chemically synthesized
tttgaaacaaatgaaaattgaa

SEQ ID NO: 25559 - DNA, 22 bp, Artificial Sequence
  chemically synthesized
ttgaaacaaatgaaaattgaaa

SEQ ID NO: 25560 - DNA, 22 bp, Artificial Sequence
  chemically synthesized
tgaaacaaatgaaaattgaaat

SEQ ID NO: 25561 - DNA, 22 bp, Artificial Sequence
  chemically synthesized
gaaacaaatgaaaattgaaata

SEQ ID NO: 25562 - DNA, 22 bp, Artificial Sequence
  chemically synthesized
aaacaaatgaaaattgaaatac

SEQ ID NO: 25563 - DNA, 22 bp, Artificial Sequence
  chemically synthesized
aaatacaacataggaaaagcca

SEQ ID NO: 25564 - DNA, 22 bp, Artificial Sequence
  chemically synthesized
agagagaagcttatcaataaac

SEQ ID NO: 25565 - DNA, 22 bp, Artificial Sequence
  chemically synthesized
atcaataaacacttaaattaaa

SEQ ID NO: 25566 - DNA, 22 bp, Artificial Sequence
  chemically synthesized
tcaataaacacttaaattaaaa

SEQ ID NO: 25567 - DNA, 22 bp, Artificial Sequence
  chemically synthesized
aaattaaaaacatagaaagatt

SEQ ID NO: 25568 - DNA, 22 bp, Artificial Sequence
  chemically synthesized
aattaaaaacatagaaagattt

SEQ ID NO: 25569 - DNA, 22 bp, Artificial Sequence
  chemically synthesized
aaaacatagaaagatttcaaat

SEQ ID NO: 25570 - DNA, 22 bp, Artificial Sequence
  chemically synthesized
caaatatataatctaatcatgt

SEQ ID NO: 25571 - DNA, 22 bp, Artificial Sequence
  chemically synthesized
aaatatataatctaatcatgta

SEQ ID NO: 25572 - DNA, 22 bp, Artificial Sequence
  chemically synthesized
atcatgtacctcaacaagctag

SEQ ID NO: 25573 - DNA, 22 bp, Artificial Sequence
  chemically synthesized
aacaagctagaaaagcaagaac

SEQ ID NO: 25574 - DNA, 22 bp, Artificial Sequence
  chemically synthesized
gaaaagcaagaacaaaacccaa

SEQ ID NO: 25575 - DNA, 22 bp, Artificial Sequence
  chemically synthesized
gcagaaggaaagaaaaaatgaa

SEQ ID NO: 25576 - DNA, 22 bp, Artificial Sequence
  chemically synthesized
aatgaaatagagaaaaacaaca

SEQ ID NO: 25577 - DNA, 22 bp, Artificial Sequence
  chemically synthesized
atgaaatagagaaaaacaacaa

SEQ ID NO: 25578 - DNA, 22 bp, Artificial Sequence
  chemically synthesized
gcaaaatgaaaagttgttattt

SEQ ID NO: 25579 - DNA, 22 bp, Artificial Sequence
  chemically synthesized
ttatttaaaaaagataaaatgg

SEQ ID NO: 25580 - DNA, 22 bp, Artificial Sequence
  chemically synthesized
tttaaaaaagataaaatggata

SEQ ID NO: 25581 - DNA, 22 bp, Artificial Sequence
  chemically synthesized
aaaaaagataaaatggatatag

SEQ ID NO: 25582 - DNA, 22 bp, Artificial Sequence
  chemically synthesized
aaaaagataaaatggatatagc

SEQ ID NO: 25583 - DNA, 22 bp, Artificial Sequence
  chemically synthesized
tagctagactaaccaagaaaaa

SEQ ID NO: 25584 - DNA, 22 bp, Artificial Sequence
  chemically synthesized
gctagactaaccaagaaaaaga

SEQ ID NO: 25585 - DNA, 22 bp, Artificial Sequence
  chemically synthesized
gactaaccaagaaaaagagaag

SEQ ID NO: 25586 - DNA, 22 bp, Artificial Sequence
  chemically synthesized
accaagaaaaagagaagagact

SEQ ID NO: 25587 - DNA, 22 bp, Artificial Sequence
  chemically synthesized
aaataaagaaaatcagaaataa

SEQ ID NO: 25588 - DNA, 22 bp, Artificial Sequence
  chemically synthesized
caaccgataccacagaaataga

SEQ ID NO: 25589 - DNA, 22 bp, Artificial Sequence
  chemically synthesized
tcagagactattatgaacaacc

SEQ ID NO: 25590 - DNA, 22 bp, Artificial Sequence
  chemically synthesized
ttatgaacaaccatacactaaa

SEQ ID NO: 25591 - DNA, 22 bp, Artificial Sequence
  chemically synthesized
tgaacaaccatacactaaaaaa

SEQ ID NO: 25592 - DNA, 22 bp, Artificial Sequence
  chemically synthesized
aaaaactgaaaaatctagagga

SEQ ID NO: 25593 - DNA, 22 bp, Artificial Sequence
  chemically synthesized
aaaaatctagaggaaattaata

SEQ ID NO: 25594 - DNA, 22 bp, Artificial Sequence
  chemically synthesized
gaggaaattaataaatttctgg

SEQ ID NO: 25595 - DNA, 22 bp, Artificial Sequence
  chemically synthesized
ataaatttctggacacatacca

SEQ ID NO: 25596 - DNA, 22 bp, Artificial Sequence
  chemically synthesized
ctggacacataccacctaccaa

SEQ ID NO: 25597 - DNA, 22 bp, Artificial Sequence
  chemically synthesized
tggacacataccacctaccaag

SEQ ID NO: 25598 - DNA, 22 bp, Artificial Sequence
  chemically synthesized
gacacataccacctaccaagat

SEQ ID NO: 25599 - DNA, 22 bp, Artificial Sequence
  chemically synthesized
ccaagattgaattaagaaagaa

SEQ ID NO: 25600 - DNA, 22 bp, Artificial Sequence
  chemically synthesized
aattaagaaagaatagaaaacc

SEQ ID NO: 25601 - DNA, 22 bp, Artificial Sequence
  chemically synthesized
agaaagaatagaaaacctgaac

SEQ ID NO: 25602 - DNA, 22 bp, Artificial Sequence
  chemically synthesized
aacagaccagtaatgaataatg

SEQ ID NO: 25603 - DNA, 22 bp, Artificial Sequence
  chemically synthesized
aatcagtagtaaaaagtctccc

SEQ ID NO: 25604 - DNA, 22 bp, Artificial Sequence
  chemically synthesized
ccaaaaaagaaaatttcaagac

SEQ ID NO: 25605 - DNA, 22 bp, Artificial Sequence
  chemically synthesized
caagaccagatggctttactgt

SEQ ID NO: 25606 - DNA, 22 bp, Artificial Sequence
  chemically synthesized
aagaccagatggctttactgtc

SEQ ID NO: 25607 - DNA, 22 bp, Artificial Sequence
  chemically synthesized
tactgtcaaattttaccaaact

SEQ ID NO: 25608 - DNA, 22 bp, Artificial Sequence
  chemically synthesized
actgtcaaattttaccaaactt

SEQ ID NO: 25609 - DNA, 22 bp, Artificial Sequence
  chemically synthesized
ctgtcaaattttaccaaacttt

SEQ ID NO: 25610 - DNA, 22 bp, Artificial Sequence
  chemically synthesized
tcaaattttaccaaactttcaa

SEQ ID NO: 25611 - DNA, 22 bp, Artificial Sequence
  chemically synthesized
taccaaactttcaaagaaaact

SEQ ID NO: 25612 - DNA, 22 bp, Artificial Sequence
  chemically synthesized
accaaactttcaaagaaaacta

SEQ ID NO: 25613 - DNA, 22 bp, Artificial Sequence
  chemically synthesized
ccaaactttcaaagaaaactaa

SEQ ID NO: 25614 - DNA, 22 bp, Artificial Sequence
  chemically synthesized
tcaaagaaaactaacaagtctc

SEQ ID NO: 25615 - DNA, 22 bp, Artificial Sequence
  chemically synthesized
caaagaaaactaacaagtctcc

SEQ ID NO: 25616 - DNA, 22 bp, Artificial Sequence
  chemically synthesized
aaagaaaactaacaagtctcct

SEQ ID NO: 25617 - DNA, 22 bp, Artificial Sequence
  chemically synthesized
acaagtctccttaaattctttt

SEQ ID NO: 25618 - DNA, 22 bp, Artificial Sequence
  chemically synthesized
cttaaattcttttaaaaattaa

SEQ ID NO: 25619 - DNA, 22 bp, Artificial Sequence
  chemically synthesized
aaattcttttaaaaattaaaca

SEQ ID NO: 25620 - DNA, 22 bp, Artificial Sequence
  chemically synthesized
aattcttttaaaaattaaacag

SEQ ID NO: 25621 - DNA, 22 bp, Artificial Sequence
  chemically synthesized
ttttaaaaattaaacaggaagg

SEQ ID NO: 25622 - DNA, 22 bp, Artificial Sequence
  chemically synthesized
ttaaaaattaaacaggaaggaa

SEQ ID NO: 25623 - DNA, 22 bp, Artificial Sequence
  chemically synthesized
taaaaattaaacaggaaggaat

SEQ ID NO: 25624 - DNA, 22 bp, Artificial Sequence
  chemically synthesized
aaaaattaaacaggaaggaatt

SEQ ID NO: 25625 - DNA, 22 bp, Artificial Sequence
  chemically synthesized
aaaattaaacaggaaggaattc

SEQ ID NO: 25626 - DNA, 22 bp, Artificial Sequence
  chemically synthesized
aacaggaaggaattctccctaa

SEQ ID NO: 25627 - DNA, 22 bp, Artificial Sequence
  chemically synthesized
tccctaactcattctctgaggc

SEQ ID NO: 25628 - DNA, 22 bp, Artificial Sequence
  chemically synthesized
cctaactcattctctgaggcca

SEQ ID NO: 25629 - DNA, 22 bp, Artificial Sequence
  chemically synthesized
actcattctctgaggccagtat

SEQ ID NO: 25630 - DNA, 22 bp, Artificial Sequence
  chemically synthesized
attctctgaggccagtattatc

SEQ ID NO: 25631 - DNA, 22 bp, Artificial Sequence
  chemically synthesized
tctgaggccagtattatcctga

SEQ ID NO: 25632 - DNA, 22 bp, Artificial Sequence
  chemically synthesized
tgaggccagtattatcctgatt

SEQ ID NO: 25633 - DNA, 22 bp, Artificial Sequence
  chemically synthesized
aggccagtattatcctgattcc

SEQ ID NO: 25634 - DNA, 22 bp, Artificial Sequence
  chemically synthesized
tcctgattccataaccagacaa

SEQ ID NO: 25635 - DNA, 22 bp, Artificial Sequence
  chemically synthesized
attccataaccagacaaggatg

SEQ ID NO: 25636 - DNA, 22 bp, Artificial Sequence
  chemically synthesized
cataaccagacaaggatgcaag

SEQ ID NO: 25637 - DNA, 22 bp, Artificial Sequence
  chemically synthesized
caggtcaatatccctgatggaa

SEQ ID NO: 25638 - DNA, 22 bp, Artificial Sequence
  chemically synthesized
atggaacataggtgtgaaaatc

SEQ ID NO: 25639 - DNA, 22 bp, Artificial Sequence
  chemically synthesized
aacaaaatactagcaaactgaa

SEQ ID NO: 25640 - DNA, 22 bp, Artificial Sequence
  chemically synthesized
gcaaactgaatccaacagtaca

SEQ ID NO: 25641 - DNA, 22 bp, Artificial Sequence
  chemically synthesized
aatccaacagtacatccaaaag

SEQ ID NO: 25642 - DNA, 22 bp, Artificial Sequence
  chemically synthesized
atactagggttgcaagaacagt

SEQ ID NO: 25643 - DNA, 22 bp, Artificial Sequence
  chemically synthesized
tactagggttgcaagaacagtt

SEQ ID NO: 25644 - DNA, 22 bp, Artificial Sequence
  chemically synthesized
gggttgcaagaacagttcaaat

SEQ ID NO: 25645 - DNA, 22 bp, Artificial Sequence
  chemically synthesized
caagaacagttcaaatcaataa

SEQ ID NO: 25646 - DNA, 22 bp, Artificial Sequence
  chemically synthesized
aaatcaataaatgtgatacatc

SEQ ID NO: 25647 - DNA, 22 bp, Artificial Sequence
  chemically synthesized
aatagatacagaaaaagtattt

SEQ ID NO: 25648 - DNA, 22 bp, Artificial Sequence
  chemically synthesized
gataaaatttaacattccttca

SEQ ID NO: 25649 - DNA, 22 bp, Artificial Sequence
  chemically synthesized
ataaaatttaacattccttcat

SEQ ID NO: 25650 - DNA, 22 bp, Artificial Sequence
  chemically synthesized
aacattccttcatgataaaaac

SEQ ID NO: 25651 - DNA, 22 bp, Artificial Sequence
  chemically synthesized
acattccttcatgataaaaact

SEQ ID NO: 25652 - DNA, 22 bp, Artificial Sequence
  chemically synthesized
cttcatgataaaaactatctgc

SEQ ID NO: 25653 - DNA, 22 bp, Artificial Sequence
  chemically synthesized
catgataaaaactatctgcagc

SEQ ID NO: 25654 - DNA, 22 bp, Artificial Sequence
  chemically synthesized
atgataaaaactatctgcagcc

SEQ ID NO: 25655 - DNA, 22 bp, Artificial Sequence
  chemically synthesized
tctgcagccaatcatagaagga

SEQ ID NO: 25656 - DNA, 22 bp, Artificial Sequence
  chemically synthesized
cagccaatcatagaaggaacat

SEQ ID NO: 25657 - DNA, 22 bp, Artificial Sequence
  chemically synthesized
aatataataaaagtcatatatg

SEQ ID NO: 25658 - DNA, 22 bp, Artificial Sequence
  chemically synthesized
acatcatactgaattgggaaaa

SEQ ID NO: 25659 - DNA, 22 bp, Artificial Sequence
  chemically synthesized
aattgggaaaagctggaagcct

SEQ ID NO: 25660 - DNA, 22 bp, Artificial Sequence
  chemically synthesized
ggaaaagctggaagcctttcct

SEQ ID NO: 25661 - DNA, 22 bp, Artificial Sequence
  chemically synthesized
gaagcctttcctctaagaactg

SEQ ID NO: 25662 - DNA, 22 bp, Artificial Sequence
  chemically synthesized
tcctctaagaactgaaacaaaa

SEQ ID NO: 25663 - DNA, 22 bp, Artificial Sequence
  chemically synthesized
cctctaagaactgaaacaaaat

SEQ ID NO: 25664 - DNA, 22 bp, Artificial Sequence
  chemically synthesized
ctctaagaactgaaacaaaata

SEQ ID NO: 25665 - DNA, 22 bp, Artificial Sequence
  chemically synthesized
taagaactgaaacaaaataagg

SEQ ID NO: 25666 - DNA, 22 bp, Artificial Sequence
  chemically synthesized
agaactgaaacaaaataaggat

SEQ ID NO: 25667 - DNA, 22 bp, Artificial Sequence
  chemically synthesized
aaacaaaataaggatgcccact

SEQ ID NO: 25668 - DNA, 22 bp, Artificial Sequence
  chemically synthesized
ccatcactcctattcaatataa

SEQ ID NO: 25669 - DNA, 22 bp, Artificial Sequence
  chemically synthesized
catcactcctattcaatataat

SEQ ID NO: 25670 - DNA, 22 bp, Artificial Sequence
  chemically synthesized
ctattcaatataatactggaag

SEQ ID NO: 25671 - DNA, 22 bp, Artificial Sequence
  chemically synthesized
ttcaatataatactggaagtcc

SEQ ID NO: 25672 - DNA, 22 bp, Artificial Sequence
  chemically synthesized
aatataatactggaagtcctag

SEQ ID NO: 25673 - DNA, 22 bp, Artificial Sequence
  chemically synthesized
gaagtcctagccacagctttca

SEQ ID NO: 25674 - DNA, 22 bp, Artificial Sequence
  chemically synthesized
gccacagctttcaggtcagaga

SEQ ID NO: 25675 - DNA, 22 bp, Artificial Sequence
  chemically synthesized
tcaggtcagagaaagaaagaaa

SEQ ID NO: 25676 - DNA, 22 bp, Artificial Sequence
  chemically synthesized
caggtcagagaaagaaagaaag

SEQ ID NO: 25677 - DNA, 22 bp, Artificial Sequence
  chemically synthesized
aggtcagagaaagaaagaaaga

SEQ ID NO: 25678 - DNA, 22 bp, Artificial Sequence
  chemically synthesized
tccatctttccagatgacatga

SEQ ID NO: 25679 - DNA, 22 bp, Artificial Sequence
  chemically synthesized
tccagatgacatgattttatac

SEQ ID NO: 25680 - DNA, 22 bp, Artificial Sequence
  chemically synthesized
ccagatgacatgattttatacc

SEQ ID NO: 25681 - DNA, 22 bp, Artificial Sequence
  chemically synthesized
cagatgacatgattttatacct

SEQ ID NO: 25682 - DNA, 22 bp, Artificial Sequence
  chemically synthesized
tatacctagaaaaaccaagact

SEQ ID NO: 25683 - DNA, 22 bp, Artificial Sequence
  chemically synthesized
atacctagaaaaaccaagactc

SEQ ID NO: 25684 - DNA, 22 bp, Artificial Sequence
  chemically synthesized
tacctagaaaaaccaagactcc

SEQ ID NO: 25685 - DNA, 22 bp, Artificial Sequence
  chemically synthesized
gaaaaaccaagactccaccaaa

SEQ ID NO: 25686 - DNA, 22 bp, Artificial Sequence
  chemically synthesized
caccaaagcactcttagcgctg

SEQ ID NO: 25687 - DNA, 22 bp, Artificial Sequence
  chemically synthesized
ttagcgctgaaaaataaattca

SEQ ID NO: 25688 - DNA, 22 bp, Artificial Sequence
  chemically synthesized
agcgctgaaaaataaattcagt

SEQ ID NO: 25689 - DNA, 22 bp, Artificial Sequence
  chemically synthesized
gcgctgaaaaataaattcagta

SEQ ID NO: 25690 - DNA, 22 bp, Artificial Sequence
  chemically synthesized
aaaaataaattcagtaaagtta

SEQ ID NO: 25691 - DNA, 22 bp, Artificial Sequence
  chemically synthesized
agtaaagttacaggagacaaaa

SEQ ID NO: 25692 - DNA, 22 bp, Artificial Sequence
  chemically synthesized
caggagacaaaatcagcatatg

SEQ ID NO: 25693 - DNA, 22 bp, Artificial Sequence
  chemically synthesized
ctacacaccaataataaactag

SEQ ID NO: 25694 - DNA, 22 bp, Artificial Sequence
  chemically synthesized
tacacaccaataataaactagc

SEQ ID NO: 25695 - DNA, 22 bp, Artificial Sequence
  chemically synthesized
cacaccaataataaactagctg

SEQ ID NO: 25696 - DNA, 22 bp, Artificial Sequence
  chemically synthesized
gctgagaaggaaattaagaagg

SEQ ID NO: 25697 - DNA, 22 bp, Artificial Sequence
  chemically synthesized
agaaggaaattaagaaggcaat

SEQ ID NO: 25698 - DNA, 22 bp, Artificial Sequence
  chemically synthesized
agaaggcaatcccatttacaat

SEQ ID NO: 25699 - DNA, 22 bp, Artificial Sequence
  chemically synthesized
acaatagctaaaaaataaaata

SEQ ID NO: 25700 - DNA, 22 bp, Artificial Sequence
  chemically synthesized
caatagctaaaaaataaaatat

SEQ ID NO: 25701 - DNA, 22 bp, Artificial Sequence
  chemically synthesized
aaaaataaaatatttagggata

SEQ ID NO: 25702 - DNA, 22 bp, Artificial Sequence
  chemically synthesized
agggataaatttaaccaaggaa

SEQ ID NO: 25703 - DNA, 22 bp, Artificial Sequence
  chemically synthesized
gggataaatttaaccaaggaac

SEQ ID NO: 25704 - DNA, 22 bp, Artificial Sequence
  chemically synthesized
aaccaaggaaccgaaaaacctc

SEQ ID NO: 25705 - DNA, 22 bp, Artificial Sequence
  chemically synthesized
accaaggaaccgaaaaacctct

SEQ ID NO: 25706 - DNA, 22 bp, Artificial Sequence
  chemically synthesized
tattcggaaaactacaaaacac

SEQ ID NO: 25707 - DNA, 22 bp, Artificial Sequence
  chemically synthesized
ttcggaaaactacaaaacactg

SEQ ID NO: 25708 - DNA, 22 bp, Artificial Sequence
  chemically synthesized
ggaaaactacaaaacactgata

SEQ ID NO: 25709 - DNA, 22 bp, Artificial Sequence
  chemically synthesized
caaaacactgataaaagaattg

SEQ ID NO: 25710 - DNA, 22 bp, Artificial Sequence
  chemically synthesized
ataaaagaattgaaaaggacag

SEQ ID NO: 25711 - DNA, 22 bp, Artificial Sequence
  chemically synthesized
aaaaggacagaaacaaatggag

SEQ ID NO: 25712 - DNA, 22 bp, Artificial Sequence
  chemically synthesized
tgttcatggatcagaaaaatta

SEQ ID NO: 25713 - DNA, 22 bp, Artificial Sequence
  chemically synthesized
atggatcagaaaaattaatatt

SEQ ID NO: 25714 - DNA, 22 bp, Artificial Sequence
  chemically synthesized
atattgttaaaatggccatact

SEQ ID NO: 25715 - DNA, 22 bp, Artificial Sequence
  chemically synthesized
ttaaaatggccatactacccaa

SEQ ID NO: 25716 - DNA, 22 bp, Artificial Sequence
  chemically synthesized
aaatggccatactacccaaagc

SEQ ID NO: 25717 - DNA, 22 bp, Artificial Sequence
  chemically synthesized
cccaaagcaatctacagattct

SEQ ID NO: 25718 - DNA, 22 bp, Artificial Sequence
  chemically synthesized
cagattctatatgaccgctatc

SEQ ID NO: 25719 - DNA, 22 bp, Artificial Sequence
  chemically synthesized
tatatgaccgctatcaaaatag

SEQ ID NO: 25720 - DNA, 22 bp, Artificial Sequence
  chemically synthesized
tatgaccgctatcaaaatagca

SEQ ID NO: 25721 - DNA, 22 bp, Artificial Sequence
  chemically synthesized
tcaaaatagcaatgtcattttt

SEQ ID NO: 25722 - DNA, 22 bp, Artificial Sequence
  chemically synthesized
ttcacagaaatggaaaaaccaa

SEQ ID NO: 25723 - DNA, 22 bp, Artificial Sequence
  chemically synthesized
tcacagaaatggaaaaaccaat

SEQ ID NO: 25724 - DNA, 22 bp, Artificial Sequence
  chemically synthesized
cacagaaatggaaaaaccaatc

SEQ ID NO: 25725 - DNA, 22 bp, Artificial Sequence
  chemically synthesized
acagaaatggaaaaaccaatct

SEQ ID NO: 25726 - DNA, 22 bp, Artificial Sequence
  chemically synthesized
aaatttgtatgaaattaaaaaa

SEQ ID NO: 25727 - DNA, 22 bp, Artificial Sequence
  chemically synthesized
gtatgaaattaaaaaatagctc

SEQ ID NO: 25728 - DNA, 22 bp, Artificial Sequence
  chemically synthesized
tatgaaattaaaaaatagctcc

SEQ ID NO: 25729 - DNA, 22 bp, Artificial Sequence
  chemically synthesized
aaaaatagctccagtagccaaa

SEQ ID NO: 25730 - DNA, 22 bp, Artificial Sequence
  chemically synthesized
cagtagccaaagtcatcctgtg

SEQ ID NO: 25731 - DNA, 22 bp, Artificial Sequence
  chemically synthesized
tgaaaaaagaacaatgctagag

SEQ ID NO: 25732 - DNA, 22 bp, Artificial Sequence
  chemically synthesized
gaggtatcatactacctgattt

SEQ ID NO: 25733 - DNA, 22 bp, Artificial Sequence
  chemically synthesized
cctgatttcaaagtatattaca

SEQ ID NO: 25734 - DNA, 22 bp, Artificial Sequence
  chemically synthesized
atttcaaagtatattacaaaag

SEQ ID NO: 25735 - DNA, 22 bp, Artificial Sequence
  chemically synthesized
caaagtatattacaaaagtata

SEQ ID NO: 25736 - DNA, 22 bp, Artificial Sequence
  chemically synthesized
aaagtatattacaaaagtatag

SEQ ID NO: 25737 - DNA, 22 bp, Artificial Sequence
  chemically synthesized
caaaagtataggaacctaaaca

SEQ ID NO: 25738 - DNA, 22 bp, Artificial Sequence
  chemically synthesized
aacagcatgatactgacattag

SEQ ID NO: 25739 - DNA, 22 bp, Artificial Sequence
  chemically synthesized
acattagaacagacacttagac

SEQ ID NO: 25740 - DNA, 22 bp, Artificial Sequence
  chemically synthesized
gaacagacacttagaccaatgg

SEQ ID NO: 25741 - DNA, 22 bp, Artificial Sequence
  chemically synthesized
agaccaatggaagagaatagag

SEQ ID NO: 25742 - DNA, 22 bp, Artificial Sequence
  chemically synthesized
gaccaatggaagagaatagaga

SEQ ID NO: 25743 - DNA, 22 bp, Artificial Sequence
  chemically synthesized
gaaatgcatccacatatttata

SEQ ID NO: 25744 - DNA, 22 bp, Artificial Sequence
  chemically synthesized
atagccaacagattttcaacaa

SEQ ID NO: 25745 - DNA, 22 bp, Artificial Sequence
  chemically synthesized
tagccaacagattttcaacaaa

SEQ ID NO: 25746 - DNA, 22 bp, Artificial Sequence
  chemically synthesized
tcaacaaaggtgacaagaatat

SEQ ID NO: 25747 - DNA, 22 bp, Artificial Sequence
  chemically synthesized
caacaaaggtgacaagaatata

SEQ ID NO: 25748 - DNA, 22 bp, Artificial Sequence
  chemically synthesized
aacaaaggtgacaagaatatac

SEQ ID NO: 25749 - DNA, 22 bp, Artificial Sequence
  chemically synthesized
aggaaaggacacagtgttcaag

SEQ ID NO: 25750 - DNA, 22 bp, Artificial Sequence
  chemically synthesized
aagaaatggtgctgaaaaaatt

SEQ ID NO: 25751 - DNA, 22 bp, Artificial Sequence
  chemically synthesized
aaaaaattggatatccattgga

SEQ ID NO: 25752 - DNA, 22 bp, Artificial Sequence
  chemically synthesized
gatatccattggatatccatgt

SEQ ID NO: 25753 - DNA, 22 bp, Artificial Sequence
  chemically synthesized
gatatccatgtgcaaaagaata

SEQ ID NO: 25754 - DNA, 22 bp, Artificial Sequence
  chemically synthesized
gactgctgatatggtttggatg

SEQ ID NO: 25755 - DNA, 22 bp, Artificial Sequence
  chemically synthesized
ctgatatggtttggatgtttgt

SEQ ID NO: 25756 - DNA, 22 bp, Artificial Sequence
  chemically synthesized
atatggtttggatgtttgttcc

SEQ ID NO: 25757 - DNA, 22 bp, Artificial Sequence
  chemically synthesized
ggatgtttgttccctccaaatc

SEQ ID NO: 25758 - DNA, 22 bp, Artificial Sequence
  chemically synthesized
gatgtttgttccctccaaatct

SEQ ID NO: 25759 - DNA, 22 bp, Artificial Sequence
  chemically synthesized
gttccctccaaatctcatgttg

SEQ ID NO: 25760 - DNA, 22 bp, Artificial Sequence
  chemically synthesized
ttccctccaaatctcatgttga

SEQ ID NO: 25761 - DNA, 22 bp, Artificial Sequence
  chemically synthesized
cctccaaatctcatgttgaaat

SEQ ID NO: 25762 - DNA, 22 bp, Artificial Sequence
  chemically synthesized
caaatctcatgttgaaatataa

SEQ ID NO: 25763 - DNA, 22 bp, Artificial Sequence
  chemically synthesized
atgttgaaatataatccccaac

SEQ ID NO: 25764 - DNA, 22 bp, Artificial Sequence
  chemically synthesized
aaatataatccccaacttctca

SEQ ID NO: 25765 - DNA, 22 bp, Artificial Sequence
  chemically synthesized
ctcaggatcttggcggatggga

SEQ ID NO: 25766 - DNA, 22 bp, Artificial Sequence
  chemically synthesized
tcaggatcttggcggatgggag

SEQ ID NO: 25767 - DNA, 22 bp, Artificial Sequence
  chemically synthesized
aggatcttggcggatgggaggt

SEQ ID NO: 25768 - DNA, 22 bp, Artificial Sequence
  chemically synthesized
ggcggatgggaggtaggcctag

SEQ ID NO: 25769 - DNA, 22 bp, Artificial Sequence
  chemically synthesized
gcggatgggaggtaggcctaga

SEQ ID NO: 25770 - DNA, 22 bp, Artificial Sequence
  chemically synthesized
gattgcagctccaactcagatg

SEQ ID NO: 25771 - DNA, 22 bp, Artificial Sequence
  chemically synthesized
cagctccaactcagatggacag

SEQ ID NO: 25772 - DNA, 22 bp, Artificial Sequence
  chemically synthesized
caactcagatggacagagcagc

SEQ ID NO: 25773 - DNA, 22 bp, Artificial Sequence
  chemically synthesized
agatggacagagcagcatgtgg

SEQ ID NO: 25774 - DNA, 22 bp, Artificial Sequence
  chemically synthesized
gcattgtgaattttagctgcag

SEQ ID NO: 25775 - DNA, 22 bp, Artificial Sequence
  chemically synthesized
tgaattttagctgcagatagac

SEQ ID NO: 25776 - DNA, 22 bp, Artificial Sequence
  chemically synthesized
tagctgcagatagactgcaaga

SEQ ID NO: 25777 - DNA, 22 bp, Artificial Sequence
  chemically synthesized
agctgcagatagactgcaagaa

SEQ ID NO: 25778 - DNA, 22 bp, Artificial Sequence
  chemically synthesized
gctgcagatagactgcaagaac

SEQ ID NO: 25779 - DNA, 22 bp, Artificial Sequence
  chemically synthesized
cagatagactgcaagaacaaac

SEQ ID NO: 25780 - DNA, 22 bp, Artificial Sequence
  chemically synthesized
caagaacaaaccagcaatcctg

SEQ ID NO: 25781 - DNA, 22 bp, Artificial Sequence
  chemically synthesized
agaggacccacagaccctctga

SEQ ID NO: 25782 - DNA, 22 bp, Artificial Sequence
  chemically synthesized
tgaaggaagtagattgctcctg

SEQ ID NO: 25783 - DNA, 22 bp, Artificial Sequence
  chemically synthesized
aaggaagtagattgctcctgca

SEQ ID NO: 25784 - DNA, 22 bp, Artificial Sequence
  chemically synthesized
ctcctgcaggacccaggagaca

SEQ ID NO: 25785 - DNA, 22 bp, Artificial Sequence
  chemically synthesized
ctgcaggacccaggagacaccc

SEQ ID NO: 25786 - DNA, 22 bp, Artificial Sequence
  chemically synthesized
caggacccaggagacaccccaa

SEQ ID NO: 25787 - DNA, 22 bp, Artificial Sequence
  chemically synthesized
tgagtgccccaactgcggaagt

SEQ ID NO: 25788 - DNA, 22 bp, Artificial Sequence
  chemically synthesized
cggaagtgggaaagggagatcc

SEQ ID NO: 25789 - DNA, 22 bp, Artificial Sequence
  chemically synthesized
ctctcctaaacacacactccca

SEQ ID NO: 25790 - DNA, 22 bp, Artificial Sequence
  chemically synthesized
tcctaaacacacactcccactg

SEQ ID NO: 25791 - DNA, 22 bp, Artificial Sequence
  chemically synthesized
ctaaacacacactcccactgga

SEQ ID NO: 25792 - DNA, 22 bp, Artificial Sequence
  chemically synthesized
aacacacactcccactggagaa

SEQ ID NO: 25793 - DNA, 22 bp, Artificial Sequence
  chemically synthesized
ccactggagaaactgaaggtct

SEQ ID NO: 25794 - DNA, 22 bp, Artificial Sequence
  chemically synthesized
gagaaactgaaggtctgtttgt

SEQ ID NO: 25795 - DNA, 22 bp, Artificial Sequence
  chemically synthesized
aaggtctgtttgtgggagaagt

SEQ ID NO: 25796 - DNA, 22 bp, Artificial Sequence
  chemically synthesized
tttgtgggagaagtttctgacc

SEQ ID NO: 25797 - DNA, 22 bp, Artificial Sequence
  chemically synthesized
gtgggagaagtttctgacctta

SEQ ID NO: 25798 - DNA, 22 bp, Artificial Sequence
  chemically synthesized
tgggagaagtttctgaccttac

SEQ ID NO: 25799 - DNA, 22 bp, Artificial Sequence
  chemically synthesized
ctgaccttacctggagttgagt

SEQ ID NO: 25800 - DNA, 22 bp, Artificial Sequence
  chemically synthesized
tgaccttacctggagttgagtt

SEQ ID NO: 25801 - DNA, 22 bp, Artificial Sequence
  chemically synthesized
accttacctggagttgagttaa

SEQ ID NO: 25802 - DNA, 22 bp, Artificial Sequence
  chemically synthesized
acctggagttgagttaacttag

SEQ ID NO: 25803 - DNA, 22 bp, Artificial Sequence
  chemically synthesized
cctggagttgagttaacttaga

SEQ ID NO: 25804 - DNA, 22 bp, Artificial Sequence
  chemically synthesized
gagttgagttaacttagagagc

SEQ ID NO: 25805 - DNA, 22 bp, Artificial Sequence
  chemically synthesized
agttaacttagagagctgagca

SEQ ID NO: 25806 - DNA, 22 bp, Artificial Sequence
  chemically synthesized
acttagagagctgagcaaaata

SEQ ID NO: 25807 - DNA, 22 bp, Artificial Sequence
  chemically synthesized
agagagctgagcaaaatacagg

SEQ ID NO: 25808 - DNA, 22 bp, Artificial Sequence
  chemically synthesized
gagagctgagcaaaatacaggt

SEQ ID NO: 25809 - DNA, 22 bp, Artificial Sequence
  chemically synthesized
agcaaaatacaggtgtagagga

SEQ ID NO: 25810 - DNA, 22 bp, Artificial Sequence
  chemically synthesized
ggagctcactgggtccctgagc

SEQ ID NO: 25811 - DNA, 22 bp, Artificial Sequence
  chemically synthesized
actgggtccctgagcaggccat

SEQ ID NO: 25812 - DNA, 22 bp, Artificial Sequence
  chemically synthesized
ggtccctgagcaggccattcct

SEQ ID NO: 25813 - DNA, 22 bp, Artificial Sequence
  chemically synthesized
agcaggccattcctgcctggca

SEQ ID NO: 25814 - DNA, 22 bp, Artificial Sequence
  chemically synthesized
ctgcctggcatagccaggcatt

SEQ ID NO: 25815 - DNA, 22 bp, Artificial Sequence
  chemically synthesized
cctggcatagccaggcatttac

SEQ ID NO: 25816 - DNA, 22 bp, Artificial Sequence
  chemically synthesized
gcatagccaggcatttacatta

SEQ ID NO: 25817 - DNA, 22 bp, Artificial Sequence
  chemically synthesized
acattactaacattgaatgtaa

SEQ ID NO: 25818 - DNA, 22 bp, Artificial Sequence
  chemically synthesized
cattactaacattgaatgtaaa

SEQ ID NO: 25819 - DNA, 22 bp, Artificial Sequence
  chemically synthesized
ctaacattgaatgtaaatggcc

SEQ ID NO: 25820 - DNA, 22 bp, Artificial Sequence
  chemically synthesized
acattgaatgtaaatggcctaa

SEQ ID NO: 25821 - DNA, 22 bp, Artificial Sequence
  chemically synthesized
aatgtaaatggcctaaatgctc

SEQ ID NO: 25822 - DNA, 22 bp, Artificial Sequence
  chemically synthesized
aatgctccacttaaaagggtga

SEQ ID NO: 25823 - DNA, 22 bp, Artificial Sequence
  chemically synthesized
cacttaaaagggtgaaaaaggt

SEQ ID NO: 25824 - DNA, 22 bp, Artificial Sequence
  chemically synthesized
aaaagggtgaaaaaggtatttc

SEQ ID NO: 25825 - DNA, 22 bp, Artificial Sequence
  chemically synthesized
aaagggtgaaaaaggtatttca

SEQ ID NO: 25826 - DNA, 22 bp, Artificial Sequence
  chemically synthesized
catgcaaatggccaccaaaagt

SEQ ID NO: 25827 - DNA, 22 bp, Artificial Sequence
  chemically synthesized
atgcaaatggccaccaaaagtg

SEQ ID NO: 25828 - DNA, 22 bp, Artificial Sequence
  chemically synthesized
taaagcaacagcagttaaaaga

SEQ ID NO: 25829 - DNA, 22 bp, Artificial Sequence
  chemically synthesized
aaagcaacagcagttaaaagag

SEQ ID NO: 25830 - DNA, 22 bp, Artificial Sequence
  chemically synthesized
aagcaacagcagttaaaagaga

SEQ ID NO: 25831 - DNA, 22 bp, Artificial Sequence
  chemically synthesized
aaagagacaaagagggacatta

SEQ ID NO: 25832 - DNA, 22 bp, Artificial Sequence
  chemically synthesized
tataatggtaaaaggccttgtc

SEQ ID NO: 25833 - DNA, 22 bp, Artificial Sequence
  chemically synthesized
gtccaacaggaaaatatcacaa

SEQ ID NO: 25834 - DNA, 22 bp, Artificial Sequence
  chemically synthesized
tccaacaggaaaatatcacaat

SEQ ID NO: 25835 - DNA, 22 bp, Artificial Sequence
  chemically synthesized
aaacatatatgcacctaacact

SEQ ID NO: 25836 - DNA, 22 bp, Artificial Sequence
  chemically synthesized
aacatatatgcacctaacactg

SEQ ID NO: 25837 - DNA, 22 bp, Artificial Sequence
  chemically synthesized
acactggagctcccaaatttat

SEQ ID NO: 25838 - DNA, 22 bp, Artificial Sequence
  chemically synthesized
gagctcccaaatttatagaaca

SEQ ID NO: 25839 - DNA, 22 bp, Artificial Sequence
  chemically synthesized
ccaaatttatagaacaattact

SEQ ID NO: 25840 - DNA, 22 bp, Artificial Sequence
  chemically synthesized
atagaacaattactaatagacc

SEQ ID NO: 25841 - DNA, 22 bp, Artificial Sequence
  chemically synthesized
tagaacaattactaatagacct

SEQ ID NO: 25842 - DNA, 22 bp, Artificial Sequence
  chemically synthesized
ctaatagacctaagaaatgaga

SEQ ID NO: 25843 - DNA, 22 bp, Artificial Sequence
  chemically synthesized
atagacctaagaaatgagatag

SEQ ID NO: 25844 - DNA, 22 bp, Artificial Sequence
  chemically synthesized
agaaatgagatagacagcaaca

SEQ ID NO: 25845 - DNA, 22 bp, Artificial Sequence
  chemically synthesized
caatacttcattgacagcacta

SEQ ID NO: 25846 - DNA, 22 bp, Artificial Sequence
  chemically synthesized
aatacttcattgacagcactag

SEQ ID NO: 25847 - DNA, 22 bp, Artificial Sequence
  chemically synthesized
cattgacagcactagacagttc

SEQ ID NO: 25848 - DNA, 22 bp, Artificial Sequence
  chemically synthesized
attgacagcactagacagttca

SEQ ID NO: 25849 - DNA, 22 bp, Artificial Sequence
  chemically synthesized
acagcactagacagttcatcaa

SEQ ID NO: 25850 - DNA, 22 bp, Artificial Sequence
  chemically synthesized
gacagttcatcaagacagaaag

SEQ ID NO: 25851 - DNA, 22 bp, Artificial Sequence
  chemically synthesized
atcaagacagaaagtcaacaaa

SEQ ID NO: 25852 - DNA, 22 bp, Artificial Sequence
  chemically synthesized
aaattataccttagaacaaatg

SEQ ID NO: 25853 - DNA, 22 bp, Artificial Sequence
  chemically synthesized
aattataccttagaacaaatgg

SEQ ID NO: 25854 - DNA, 22 bp, Artificial Sequence
  chemically synthesized
taccttagaacaaatggactta

SEQ ID NO: 25855 - DNA, 22 bp, Artificial Sequence
  chemically synthesized
agaacaaatggacttaacagtt

SEQ ID NO: 25856 - DNA, 22 bp, Artificial Sequence
  chemically synthesized
gaacaaatggacttaacagtta

SEQ ID NO: 25857 - DNA, 22 bp, Artificial Sequence
  chemically synthesized
aacagttatatacagaacattt

SEQ ID NO: 25858 - DNA, 22 bp, Artificial Sequence
  chemically synthesized
acagttatatacagaacatttc

SEQ ID NO: 25859 - DNA, 22 bp, Artificial Sequence
  chemically synthesized
tatacagaacatttcatccaat

SEQ ID NO: 25860 - DNA, 22 bp, Artificial Sequence
  chemically synthesized
catccaataaccacagaacaca

SEQ ID NO: 25861 - DNA, 22 bp, Artificial Sequence
  chemically synthesized
atccaataaccacagaacacac

SEQ ID NO: 25862 - DNA, 22 bp, Artificial Sequence
  chemically synthesized
tattcaacagcgcgtggaaatt

SEQ ID NO: 25863 - DNA, 22 bp, Artificial Sequence
  chemically synthesized
ttcaacagcgcgtggaaatttc

SEQ ID NO: 25864 - DNA, 22 bp, Artificial Sequence
  chemically synthesized
aacagcgcgtggaaatttctcc

SEQ ID NO: 25865 - DNA, 22 bp, Artificial Sequence
  chemically synthesized
ctccaaggtagaccatatgata

SEQ ID NO: 25866 - DNA, 22 bp, Artificial Sequence
  chemically synthesized
tccaaggtagaccatatgatag

SEQ ID NO: 25867 - DNA, 22 bp, Artificial Sequence
  chemically synthesized
caaggtagaccatatgataggc

SEQ ID NO: 25868 - DNA, 22 bp, Artificial Sequence
  chemically synthesized
aataaatttactaacagaccaa

SEQ ID NO: 25869 - DNA, 22 bp, Artificial Sequence
  chemically synthesized
actaacagaccaataacaagca

SEQ ID NO: 25870 - DNA, 22 bp, Artificial Sequence
  chemically synthesized
ctaacagaccaataacaagcag

SEQ ID NO: 25871 - DNA, 22 bp, Artificial Sequence
  chemically synthesized
acagaccaataacaagcagtga

SEQ ID NO: 25872 - DNA, 22 bp, Artificial Sequence
  chemically synthesized
aattggtaattaaaaaattacc

SEQ ID NO: 25873 - DNA, 22 bp, Artificial Sequence
  chemically synthesized
attggtaattaaaaaattacca

SEQ ID NO: 25874 - DNA, 22 bp, Artificial Sequence
  chemically synthesized
gtaattaaaaaattaccaacca

SEQ ID NO: 25875 - DNA, 22 bp, Artificial Sequence
  chemically synthesized
aaaaattaccaaccaaaaaaaa

SEQ ID NO: 25876 - DNA, 22 bp, Artificial Sequence
  chemically synthesized
ccaaccaaaaaaaagttcagga

SEQ ID NO: 25877 - DNA, 22 bp, Artificial Sequence
  chemically synthesized
aggaccagatggattcacaaca

SEQ ID NO: 25878 - DNA, 22 bp, Artificial Sequence
  chemically synthesized
acaacagaattctactagacat

SEQ ID NO: 25879 - DNA, 22 bp, Artificial Sequence
  chemically synthesized
tactagacattcaaagaggaat

SEQ ID NO: 25880 - DNA, 22 bp, Artificial Sequence
  chemically synthesized
ctagacattcaaagaggaattg

SEQ ID NO: 25881 - DNA, 22 bp, Artificial Sequence
  chemically synthesized
gacattcaaagaggaattggtc

SEQ ID NO: 25882 - DNA, 22 bp, Artificial Sequence
  chemically synthesized
aaagaggaattggtccccatct

SEQ ID NO: 25883 - DNA, 22 bp, Artificial Sequence
  chemically synthesized
gtccccatctttttgacactat

SEQ ID NO: 25884 - DNA, 22 bp, Artificial Sequence
  chemically synthesized
tttgacactattctacaagaca

SEQ ID NO: 25885 - DNA, 22 bp, Artificial Sequence
  chemically synthesized
ttgacactattctacaagacag

SEQ ID NO: 25886 - DNA, 22 bp, Artificial Sequence
  chemically synthesized
tgacactattctacaagacaga

SEQ ID NO: 25887 - DNA, 22 bp, Artificial Sequence
  chemically synthesized
gacactattctacaagacagat

SEQ ID NO: 25888 - DNA, 22 bp, Artificial Sequence
  chemically synthesized
acactattctacaagacagata

SEQ ID NO: 25889 - DNA, 22 bp, Artificial Sequence
  chemically synthesized
ttctacaagacagataaagaag

SEQ ID NO: 25890 - DNA, 22 bp, Artificial Sequence
  chemically synthesized
tacaagacagataaagaaggaa

SEQ ID NO: 25891 - DNA, 22 bp, Artificial Sequence
  chemically synthesized
caagacagataaagaaggaacc

SEQ ID NO: 25892 - DNA, 22 bp, Artificial Sequence
  chemically synthesized
ccctaattcattctatgaagcc

SEQ ID NO: 25893 - DNA, 22 bp, Artificial Sequence
  chemically synthesized
attcattctatgaagccagcat

SEQ ID NO: 25894 - DNA, 22 bp, Artificial Sequence
  chemically synthesized
attctatgaagccagcatcaca

SEQ ID NO: 25895 - DNA, 22 bp, Artificial Sequence
  chemically synthesized
tatgaagccagcatcacaccaa

SEQ ID NO: 25896 - DNA, 22 bp, Artificial Sequence
  chemically synthesized
tgaagccagcatcacaccaaaa

SEQ ID NO: 25897 - DNA, 22 bp, Artificial Sequence
  chemically synthesized
cagactgatagccttgatgaac

SEQ ID NO: 25898 - DNA, 22 bp, Artificial Sequence
  chemically synthesized
atagccttgatgaacatagatg

SEQ ID NO: 25899 - DNA, 22 bp, Artificial Sequence
  chemically synthesized
gatgaacatagatgctaaaatc

SEQ ID NO: 25900 - DNA, 22 bp, Artificial Sequence
  chemically synthesized
atgaacatagatgctaaaatcc

SEQ ID NO: 25901 - DNA, 22 bp, Artificial Sequence
  chemically synthesized
aaatccttaacaaaatactaga

SEQ ID NO: 25902 - DNA, 22 bp, Artificial Sequence
  chemically synthesized
aacaaaatactagataaccaaa

SEQ ID NO: 25903 - DNA, 22 bp, Artificial Sequence
  chemically synthesized
acaaaatactagataaccaaat

SEQ ID NO: 25904 - DNA, 22 bp, Artificial Sequence
  chemically synthesized
gataaccaaattcaacaacata

SEQ ID NO: 25905 - DNA, 22 bp, Artificial Sequence
  chemically synthesized
aacaacataacaaaaagataat

SEQ ID NO: 25906 - DNA, 22 bp, Artificial Sequence
  chemically synthesized
catgccagggatgcagggttgg

SEQ ID NO: 25907 - DNA, 22 bp, Artificial Sequence
  chemically synthesized
gtttgacatctgcaagtcaata

SEQ ID NO: 25908 - DNA, 22 bp, Artificial Sequence
  chemically synthesized
gacatctgcaagtcaataagtg

SEQ ID NO: 25909 - DNA, 22 bp, Artificial Sequence
  chemically synthesized
acatctgcaagtcaataagtgt

SEQ ID NO: 25910 - DNA, 22 bp, Artificial Sequence
  chemically synthesized
caagtcaataagtgtgatacac

SEQ ID NO: 25911 - DNA, 22 bp, Artificial Sequence
  chemically synthesized
aaaaacaaaaattacatgatca

SEQ ID NO: 25912 - DNA, 22 bp, Artificial Sequence
  chemically synthesized
aaaacaaaaattacatgatcat

SEQ ID NO: 25913 - DNA, 22 bp, Artificial Sequence
  chemically synthesized
catgatcatctcaatagatgca

SEQ ID NO: 25914 - DNA, 22 bp, Artificial Sequence
  chemically synthesized
aatagatgcagaaaaagcattc

SEQ ID NO: 25915 - DNA, 22 bp, Artificial Sequence
  chemically synthesized
aacaaaatccagcatacattta

SEQ ID NO: 25916 - DNA, 22 bp, Artificial Sequence
  chemically synthesized
atgattaaaatgctcagcaaaa

SEQ ID NO: 25917 - DNA, 22 bp, Artificial Sequence
  chemically synthesized
tgattaaaatgctcagcaaaat

SEQ ID NO: 25918 - DNA, 22 bp, Artificial Sequence
  chemically synthesized
aaatgctcagcaaaatcagcat

SEQ ID NO: 25919 - DNA, 22 bp, Artificial Sequence
  chemically synthesized
agcaaaatcagcatacaagaga

SEQ ID NO: 25920 - DNA, 22 bp, Artificial Sequence
  chemically synthesized
agtgtaataaaagccatctgtg

SEQ ID NO: 25921 - DNA, 22 bp, Artificial Sequence
  chemically synthesized
tgacaaacccacagccaacata

SEQ ID NO: 25922 - DNA, 22 bp, Artificial Sequence
  chemically synthesized
aatggggaaaagttgaaagcat

SEQ ID NO: 25923 - DNA, 22 bp, Artificial Sequence
  chemically synthesized
aaagcattccctctgagaactg

SEQ ID NO: 25924 - DNA, 22 bp, Artificial Sequence
  chemically synthesized
cctctgagaactggaacaagac

SEQ ID NO: 25925 - DNA, 22 bp, Artificial Sequence
  chemically synthesized
tgagaactggaacaagacaagg

SEQ ID NO: 25926 - DNA, 22 bp, Artificial Sequence
  chemically synthesized
agaactggaacaagacaaggat

SEQ ID NO: 25927 - DNA, 22 bp, Artificial Sequence
  chemically synthesized
gaacaagacaaggatgcccact

SEQ ID NO: 25928 - DNA, 22 bp, Artificial Sequence
  chemically synthesized
tcaccactcctcttcaacatag

SEQ ID NO: 25929 - DNA, 22 bp, Artificial Sequence
  chemically synthesized
accactcctcttcaacatagta

SEQ ID NO: 25930 - DNA, 22 bp, Artificial Sequence
  chemically synthesized
ctcttcaacatagtactggaag

SEQ ID NO: 25931 - DNA, 22 bp, Artificial Sequence
  chemically synthesized
ttcaacatagtactggaagtcc

SEQ ID NO: 25932 - DNA, 22 bp, Artificial Sequence
  chemically synthesized
caacatagtactggaagtccta

SEQ ID NO: 25933 - DNA, 22 bp, Artificial Sequence
  chemically synthesized
aacatagtactggaagtcctag

SEQ ID NO: 25934 - DNA, 22 bp, Artificial Sequence
  chemically synthesized
gaagtcctagccagggcaatca

SEQ ID NO: 25935 - DNA, 22 bp, Artificial Sequence
  chemically synthesized
gccagggcaatcagacaaaaca

SEQ ID NO: 25936 - DNA, 22 bp, Artificial Sequence
  chemically synthesized
aaatcagtaaagaggaagtcaa

SEQ ID NO: 25937 - DNA, 22 bp, Artificial Sequence
  chemically synthesized
tcactgtttgctgatgatatga

SEQ ID NO: 25938 - DNA, 22 bp, Artificial Sequence
  chemically synthesized
tttgctgatgatatgatcattt

SEQ ID NO: 25939 - DNA, 22 bp, Artificial Sequence
  chemically synthesized
gctgatgatatgatcatttacc

SEQ ID NO: 25940 - DNA, 22 bp, Artificial Sequence
  chemically synthesized
ctgatgatatgatcatttacct

SEQ ID NO: 25941 - DNA, 22 bp, Artificial Sequence
  chemically synthesized
atgatatgatcatttaccttta

SEQ ID NO: 25942 - DNA, 22 bp, Artificial Sequence
  chemically synthesized
acctttaaaaccctaaagactc

SEQ ID NO: 25943 - DNA, 22 bp, Artificial Sequence
  chemically synthesized
cctttaaaaccctaaagactcc

SEQ ID NO: 25944 - DNA, 22 bp, Artificial Sequence
  chemically synthesized
taaaaccctaaagactcctcca

SEQ ID NO: 25945 - DNA, 22 bp, Artificial Sequence
  chemically synthesized
aaaaccctaaagactcctccag

SEQ ID NO: 25946 - DNA, 22 bp, Artificial Sequence
  chemically synthesized
aaaccctaaagactcctccaga

SEQ ID NO: 25947 - DNA, 22 bp, Artificial Sequence
  chemically synthesized
aagactcctccagaaagctcct

SEQ ID NO: 25948 - DNA, 22 bp, Artificial Sequence
  chemically synthesized
ctccagaaagctcctagaactg

SEQ ID NO: 25949 - DNA, 22 bp, Artificial Sequence
  chemically synthesized
cagaaagctcctagaactgata

SEQ ID NO: 25950 - DNA, 22 bp, Artificial Sequence
  chemically synthesized
ctagaactgataaaataattca

SEQ ID NO: 25951 - DNA, 22 bp, Artificial Sequence
  chemically synthesized
gaactgataaaataattcagca

SEQ ID NO: 25952 - DNA, 22 bp, Artificial Sequence
  chemically synthesized
ataaaataattcagcaaagttt

SEQ ID NO: 25953 - DNA, 22 bp, Artificial Sequence
  chemically synthesized
agcaaagtttccagatacaaga

SEQ ID NO: 25954 - DNA, 22 bp, Artificial Sequence
  chemically synthesized
ccagatacaagatgaatgcaca

SEQ ID NO: 25955 - DNA, 22 bp, Artificial Sequence
  chemically synthesized
cagatacaagatgaatgcacac

SEQ ID NO: 25956 - DNA, 22 bp, Artificial Sequence
  chemically synthesized
ttctatacaccaacagcaacca

SEQ ID NO: 25957 - DNA, 22 bp, Artificial Sequence
  chemically synthesized
ctatacaccaacagcaaccaaa

SEQ ID NO: 25958 - DNA, 22 bp, Artificial Sequence
  chemically synthesized
tatacaccaacagcaaccaaat

SEQ ID NO: 25959 - DNA, 22 bp, Artificial Sequence
  chemically synthesized
tacaccaacagcaaccaaatgg

SEQ ID NO: 25960 - DNA, 22 bp, Artificial Sequence
  chemically synthesized
aaccccttgtacaatagatgca

SEQ ID NO: 25961 - DNA, 22 bp, Artificial Sequence
  chemically synthesized
gtacaatagatgcaaaaatggc

SEQ ID NO: 25962 - DNA, 22 bp, Artificial Sequence
  chemically synthesized
tacaatagatgcaaaaatggcc

SEQ ID NO: 25963 - DNA, 22 bp, Artificial Sequence
  chemically synthesized
atacaacccctatttattgcca

SEQ ID NO: 25964 - DNA, 22 bp, Artificial Sequence
  chemically synthesized
tttattgccatataaaacgtac

SEQ ID NO: 25965 - DNA, 22 bp, Artificial Sequence
  chemically synthesized
attgccatataaaacgtactct

SEQ ID NO: 25966 - DNA, 22 bp, Artificial Sequence
  chemically synthesized
ttgccatataaaacgtactctc

SEQ ID NO: 25967 - DNA, 22 bp, Artificial Sequence
  chemically synthesized
ccatataaaacgtactctcaag

SEQ ID NO: 25968 - DNA, 22 bp, Artificial Sequence
  chemically synthesized
tcaagatggattaaagacttaa

SEQ ID NO: 25969 - DNA, 22 bp, Artificial Sequence
  chemically synthesized
aagatggattaaagacttaaat

SEQ ID NO: 25970 - DNA, 22 bp, Artificial Sequence
  chemically synthesized
aagacttaaatataaaacttaa

SEQ ID NO: 25971 - DNA, 22 bp, Artificial Sequence
  chemically synthesized
aaatataaaacttaaaactata

SEQ ID NO: 25972 - DNA, 22 bp, Artificial Sequence
  chemically synthesized
aatataaaacttaaaactataa

SEQ ID NO: 25973 - DNA, 22 bp, Artificial Sequence
  chemically synthesized
aaaactataaaactactaaaag

SEQ ID NO: 25974 - DNA, 22 bp, Artificial Sequence
  chemically synthesized
aaactataaaactactaaaaga

SEQ ID NO: 25975 - DNA, 22 bp, Artificial Sequence
  chemically synthesized
taaaactactaaaagaaaacat

SEQ ID NO: 25976 - DNA, 22 bp, Artificial Sequence
  chemically synthesized
ctaaaagaaaacataagggaga

SEQ ID NO: 25977 - DNA, 22 bp, Artificial Sequence
  chemically synthesized
aaagaaaacataagggagacac

SEQ ID NO: 25978 - DNA, 22 bp, Artificial Sequence
  chemically synthesized
caagacatggctttgggcaaag

SEQ ID NO: 25979 - DNA, 22 bp, Artificial Sequence
  chemically synthesized
aagacatggctttgggcaaaga

SEQ ID NO: 25980 - DNA, 22 bp, Artificial Sequence
  chemically synthesized
tgggcaaagattttatggccaa

SEQ ID NO: 25981 - DNA, 22 bp, Artificial Sequence
  chemically synthesized
gggcaaagattttatggccaag

SEQ ID NO: 25982 - DNA, 22 bp, Artificial Sequence
  chemically synthesized
ggcaaagattttatggccaaga

SEQ ID NO: 25983 - DNA, 22 bp, Artificial Sequence
  chemically synthesized
tatggccaagacctcaaaagca

SEQ ID NO: 25984 - DNA, 22 bp, Artificial Sequence
  chemically synthesized
atggccaagacctcaaaagcac

SEQ ID NO: 25985 - DNA, 22 bp, Artificial Sequence
  chemically synthesized
tggccaagacctcaaaagcaca

SEQ ID NO: 25986 - DNA, 22 bp, Artificial Sequence
  chemically synthesized
aaaagcacaggcaacaaaagca

SEQ ID NO: 25987 - DNA, 22 bp, Artificial Sequence
  chemically synthesized
tattaagctaaaatacatctgc

SEQ ID NO: 25988 - DNA, 22 bp, Artificial Sequence
  chemically synthesized
agctaaaatacatctgcacagt

SEQ ID NO: 25989 - DNA, 22 bp, Artificial Sequence
  chemically synthesized
aaatacatctgcacagtaaagg

SEQ ID NO: 25990 - DNA, 22 bp, Artificial Sequence
  chemically synthesized
cacagtaaaggaaacaatcaac

SEQ ID NO: 25991 - DNA, 22 bp, Artificial Sequence
  chemically synthesized
ttgaatgcgagaaaatatttgc

SEQ ID NO: 25992 - DNA, 22 bp, Artificial Sequence
  chemically synthesized
aatgcgagaaaatatttgcata

SEQ ID NO: 25993 - DNA, 22 bp, Artificial Sequence
  chemically synthesized
gcatacatttgacaaggaatta

SEQ ID NO: 25994 - DNA, 22 bp, Artificial Sequence
  chemically synthesized
catacatttgacaaggaattaa

SEQ ID NO: 25995 - DNA, 22 bp, Artificial Sequence
  chemically synthesized
gacaaggaattaatctccagaa

SEQ ID NO: 25996 - DNA, 22 bp, Artificial Sequence
  chemically synthesized
acaaggaattaatctccagaat

SEQ ID NO: 25997 - DNA, 22 bp, Artificial Sequence
  chemically synthesized
atctccagaatatataagaaac

SEQ ID NO: 25998 - DNA, 22 bp, Artificial Sequence
  chemically synthesized
cagaatatataagaaactcaaa

SEQ ID NO: 25999 - DNA, 22 bp, Artificial Sequence
  chemically synthesized
aaacaactcaacagtggaaaaa

SEQ ID NO: 26000 - DNA, 22 bp, Artificial Sequence
  chemically synthesized
aacagtggaaaaacaaataatc

SEQ ID NO: 26001 - DNA, 22 bp, Artificial Sequence
  chemically synthesized
attaaaaaattggcaaaggata

SEQ ID NO: 26002 - DNA, 22 bp, Artificial Sequence
  chemically synthesized
aaaaattggcaaaggatatttt

SEQ ID NO: 26003 - DNA, 22 bp, Artificial Sequence
  chemically synthesized
gcaaaggatatttttcaaaaga

SEQ ID NO: 26004 - DNA, 22 bp, Artificial Sequence
  chemically synthesized
ttcaaaagaagacatacaaatg

SEQ ID NO: 26005 - DNA, 22 bp, Artificial Sequence
  chemically synthesized
tcaaaagaagacatacaaatgc

SEQ ID NO: 26006 - DNA, 22 bp, Artificial Sequence
  chemically synthesized
caaaagaagacatacaaatgca

SEQ ID NO: 26007 - DNA, 22 bp, Artificial Sequence
  chemically synthesized
aaaagaagacatacaaatgcac

SEQ ID NO: 26008 - DNA, 22 bp, Artificial Sequence
  chemically synthesized
ctcaacattactaatcatcaga

SEQ ID NO: 26009 - DNA, 22 bp, Artificial Sequence
  chemically synthesized
aacattactaatcatcagagaa

SEQ ID NO: 26010 - DNA, 22 bp, Artificial Sequence
  chemically synthesized
ctaatcatcagagaaatgcaaa

SEQ ID NO: 26011 - DNA, 22 bp, Artificial Sequence
  chemically synthesized
atcatcagagaaatgcaaatca

SEQ ID NO: 26012 - DNA, 22 bp, Artificial Sequence
  chemically synthesized
atgccagttagaatcatcatga

SEQ ID NO: 26013 - DNA, 22 bp, Artificial Sequence
  chemically synthesized
tgccagttagaatcatcatgat

SEQ ID NO: 26014 - DNA, 22 bp, Artificial Sequence
  chemically synthesized
gaatcatcatgatttaaataaa

SEQ ID NO: 26015 - DNA, 22 bp, Artificial Sequence
  chemically synthesized
aaataaattaataaataaataa

SEQ ID NO: 26016 - DNA, 22 bp, Artificial Sequence
  chemically synthesized
aataaattaataaataaataac

SEQ ID NO: 26017 - DNA, 22 bp, Artificial Sequence
  chemically synthesized
ataaataaataacacatgctgg

SEQ ID NO: 26018 - DNA, 22 bp, Artificial Sequence
  chemically synthesized
gcaaggatgtgaaggaaaaggc

SEQ ID NO: 26019 - DNA, 22 bp, Artificial Sequence
  chemically synthesized
gtaggcactattggtaagcatg

SEQ ID NO: 26020 - DNA, 22 bp, Artificial Sequence
  chemically synthesized
ttggtaagcatgcaaattagta

SEQ ID NO: 26021 - DNA, 22 bp, Artificial Sequence
  chemically synthesized
gtaagcatgcaaattagtatag

SEQ ID NO: 26022 - DNA, 22 bp, Artificial Sequence
  chemically synthesized
gtatagccactatggaaaacaa

SEQ ID NO: 26023 - DNA, 22 bp, Artificial Sequence
  chemically synthesized
tggaaaacaatatgtagattta

SEQ ID NO: 26024 - DNA, 22 bp, Artificial Sequence
  chemically synthesized
accaaaaagctaaaaattgaac

SEQ ID NO: 26025 - DNA, 22 bp, Artificial Sequence
  chemically synthesized
ccaaaaagctaaaaattgaact

SEQ ID NO: 26026 - DNA, 22 bp, Artificial Sequence
  chemically synthesized
aaaattgaactatcataagatc

SEQ ID NO: 26027 - DNA, 22 bp, Artificial Sequence
  chemically synthesized
aactatcataagatccagcaat

SEQ ID NO: 26028 - DNA, 22 bp, Artificial Sequence
  chemically synthesized
tcataagatccagcaatcttat

SEQ ID NO: 26029 - DNA, 22 bp, Artificial Sequence
  chemically synthesized
attactgggtatttatccaaag

SEQ ID NO: 26030 - DNA, 22 bp, Artificial Sequence
  chemically synthesized
ttactgggtatttatccaaagg

SEQ ID NO: 26031 - DNA, 22 bp, Artificial Sequence
  chemically synthesized
ctgggtatttatccaaaggaaa

SEQ ID NO: 26032 - DNA, 22 bp, Artificial Sequence
  chemically synthesized
ggtatttatccaaaggaaaaga

SEQ ID NO: 26033 - DNA, 22 bp, Artificial Sequence
  chemically synthesized
atccaaaggaaaagaattcaga

SEQ ID NO: 26034 - DNA, 22 bp, Artificial Sequence
  chemically synthesized
tccaaaggaaaagaattcagaa

SEQ ID NO: 26035 - DNA, 22 bp, Artificial Sequence
  chemically synthesized
agaataataaacagatactggt

SEQ ID NO: 26036 - DNA, 22 bp, Artificial Sequence
  chemically synthesized
gtaccacactgtttattgcagc

SEQ ID NO: 26037 - DNA, 22 bp, Artificial Sequence
  chemically synthesized
tttattgcagcacgattcacat

SEQ ID NO: 26038 - DNA, 22 bp, Artificial Sequence
  chemically synthesized
attgcagcacgattcacattag

SEQ ID NO: 26039 - DNA, 22 bp, Artificial Sequence
  chemically synthesized
ttgcagcacgattcacattagc

SEQ ID NO: 26040 - DNA, 22 bp, Artificial Sequence
  chemically synthesized
cagcacgattcacattagcaaa

SEQ ID NO: 26041 - DNA, 22 bp, Artificial Sequence
  chemically synthesized
acattagcaaagatatggaatc

SEQ ID NO: 26042 - DNA, 22 bp, Artificial Sequence
  chemically synthesized
gcaaagatatggaatcaaccta

SEQ ID NO: 26043 - DNA, 22 bp, Artificial Sequence
  chemically synthesized
agtgtccatcaatggatgaatg

SEQ ID NO: 26044 - DNA, 22 bp, Artificial Sequence
  chemically synthesized
aatattattcaaccatacaaat

SEQ ID NO: 26045 - DNA, 22 bp, Artificial Sequence
  chemically synthesized
ttcaaccatacaaatataaaat

SEQ ID NO: 26046 - DNA, 22 bp, Artificial Sequence
  chemically synthesized
aaccatacaaatataaaatcat

SEQ ID NO: 26047 - DNA, 22 bp, Artificial Sequence
  chemically synthesized
catttgcagcaacatggatgaa

SEQ ID NO: 26048 - DNA, 22 bp, Artificial Sequence
  chemically synthesized
atttgcagcaacatggatgaaa

SEQ ID NO: 26049 - DNA, 22 bp, Artificial Sequence
  chemically synthesized
gcagcaacatggatgaaactgg

SEQ ID NO: 26050 - DNA, 22 bp, Artificial Sequence
  chemically synthesized
cagcaacatggatgaaactgga

SEQ ID NO: 26051 - DNA, 22 bp, Artificial Sequence
  chemically synthesized
gaagtcattatgttaaacgaaa

SEQ ID NO: 26052 - DNA, 22 bp, Artificial Sequence
  chemically synthesized
tgttaaacgaaataagccaggc

SEQ ID NO: 26053 - DNA, 22 bp, Artificial Sequence
  chemically synthesized
aacgaaataagccaggcataga

SEQ ID NO: 26054 - DNA, 22 bp, Artificial Sequence
  chemically synthesized
tgcatgttctcactgatatgtg

SEQ ID NO: 26055 - DNA, 22 bp, Artificial Sequence
  chemically synthesized
gcatgttctcactgatatgtgg

SEQ ID NO: 26056 - DNA, 22 bp, Artificial Sequence
  chemically synthesized
catgttctcactgatatgtggg

SEQ ID NO: 26057 - DNA, 22 bp, Artificial Sequence
  chemically synthesized
tcactgatatgtgggagctaaa

SEQ ID NO: 26058 - DNA, 22 bp, Artificial Sequence
  chemically synthesized
actgatatgtgggagctaaaaa

SEQ ID NO: 26059 - DNA, 22 bp, Artificial Sequence
  chemically synthesized
atatgtgggagctaaaaaagtt

SEQ ID NO: 26060 - DNA, 22 bp, Artificial Sequence
  chemically synthesized
aaaaagttaatatcatgtaggt

SEQ ID NO: 26061 - DNA, 22 bp, Artificial Sequence
  chemically synthesized
atatcatgtaggtagagagtag

SEQ ID NO: 26062 - DNA, 22 bp, Artificial Sequence
  chemically synthesized
tgggaggaagggagacgaagag

SEQ ID NO: 26063 - DNA, 22 bp, Artificial Sequence
  chemically synthesized
gttaatggaaacaggcagttag

SEQ ID NO: 26064 - DNA, 22 bp, Artificial Sequence
  chemically synthesized
atggaaacaggcagttagatag

SEQ ID NO: 26065 - DNA, 22 bp, Artificial Sequence
  chemically synthesized
gatagaaggaatatgttctgat

SEQ ID NO: 26066 - DNA, 22 bp, Artificial Sequence
  chemically synthesized
tgatgttcaatagcaaagtagg

SEQ ID NO: 26067 - DNA, 22 bp, Artificial Sequence
  chemically synthesized
atgttcaatagcaaagtagggt

SEQ ID NO: 26068 - DNA, 22 bp, Artificial Sequence
  chemically synthesized
aatagcaaagtagggtgattat

SEQ ID NO: 26069 - DNA, 22 bp, Artificial Sequence
  chemically synthesized
tagttaaaaacaatatattgta

SEQ ID NO: 26070 - DNA, 22 bp, Artificial Sequence
  chemically synthesized
aaaacaatatattgtatatttc

SEQ ID NO: 26071 - DNA, 22 bp, Artificial Sequence
  chemically synthesized
tatatttcaaaatagtagaaga

SEQ ID NO: 26072 - DNA, 22 bp, Artificial Sequence
  chemically synthesized
caaaatagtagaagaaaggtct

SEQ ID NO: 26073 - DNA, 22 bp, Artificial Sequence
  chemically synthesized
aaaatagtagaagaaaggtctt

SEQ ID NO: 26074 - DNA, 22 bp, Artificial Sequence
  chemically synthesized
gaaatgttcctaacacatagaa

SEQ ID NO: 26075 - DNA, 22 bp, Artificial Sequence
  chemically synthesized
aaatgttcctaacacatagaaa

SEQ ID NO: 26076 - DNA, 22 bp, Artificial Sequence
  chemically synthesized
ctaacacatagaaacgataaat

SEQ ID NO: 26077 - DNA, 22 bp, Artificial Sequence
  chemically synthesized
acacatagaaacgataaatact

SEQ ID NO: 26078 - DNA, 22 bp, Artificial Sequence
  chemically synthesized
gaggtgatgaataccccaaata

SEQ ID NO: 26079 - DNA, 22 bp, Artificial Sequence
  chemically synthesized
aggtgatgaataccccaaatac

SEQ ID NO: 26080 - DNA, 22 bp, Artificial Sequence
  chemically synthesized
acttgatcattatacattatat

SEQ ID NO: 26081 - DNA, 22 bp, Artificial Sequence
  chemically synthesized
gatcattatacattatatgcat

SEQ ID NO: 26082 - DNA, 22 bp, Artificial Sequence
  chemically synthesized
atcattatacattatatgcatg

SEQ ID NO: 26083 - DNA, 22 bp, Artificial Sequence
  chemically synthesized
tacattatatgcatgtaacaaa

SEQ ID NO: 26084 - DNA, 22 bp, Artificial Sequence
  chemically synthesized
tatgcatgtaacaaaatgtcac

SEQ ID NO: 26085 - DNA, 22 bp, Artificial Sequence
  chemically synthesized
atacatataaacacgtcatata

SEQ ID NO: 26086 - DNA, 22 bp, Artificial Sequence
  chemically synthesized
atattggttgaggcctgattgt

SEQ ID NO: 26087 - DNA, 22 bp, Artificial Sequence
  chemically synthesized
gttgaggcctgattgtaagtaa

SEQ ID NO: 26088 - DNA, 22 bp, Artificial Sequence
  chemically synthesized
aggcctgattgtaagtaaatct

SEQ ID NO: 26089 - DNA, 22 bp, Artificial Sequence
  chemically synthesized
attgtaagtaaatctttgtccc

SEQ ID NO: 26090 - DNA, 22 bp, Artificial Sequence
  chemically synthesized
taagtaaatctttgtccctcca

SEQ ID NO: 26091 - DNA, 22 bp, Artificial Sequence
  chemically synthesized
tgtccctccagacatttccctg

SEQ ID NO: 26092 - DNA, 22 bp, Artificial Sequence
  chemically synthesized
gtccctccagacatttccctgt

SEQ ID NO: 26093 - DNA, 22 bp, Artificial Sequence
  chemically synthesized
tccctccagacatttccctgta

SEQ ID NO: 26094 - DNA, 22 bp, Artificial Sequence
  chemically synthesized
cagacatttccctgtactgtct

SEQ ID NO: 26095 - DNA, 22 bp, Artificial Sequence
  chemically synthesized
ccctgtactgtcttgctgtgag

SEQ ID NO: 26096 - DNA, 22 bp, Artificial Sequence
  chemically synthesized
cctgtactgtcttgctgtgagg

SEQ ID NO: 26097 - DNA, 22 bp, Artificial Sequence
  chemically synthesized
tactgtcttgctgtgaggagct

SEQ ID NO: 26098 - DNA, 22 bp, Artificial Sequence
  chemically synthesized
tcttgctgtgaggagcttcttt

SEQ ID NO: 26099 - DNA, 22 bp, Artificial Sequence
  chemically synthesized
gctgtgaggagcttcttttact

SEQ ID NO: 26100 - DNA, 22 bp, Artificial Sequence
  chemically synthesized
ctgtgaggagcttcttttactg

SEQ ID NO: 26101 - DNA, 22 bp, Artificial Sequence
  chemically synthesized
tgaggagcttcttttactgcta

SEQ ID NO: 26102 - DNA, 22 bp, Artificial Sequence
  chemically synthesized
cttttactgctatttcttatat

SEQ ID NO: 26103 - DNA, 22 bp, Artificial Sequence
  chemically synthesized
ttttactgctatttcttatatt

SEQ ID NO: 26104 - DNA, 22 bp, Artificial Sequence
  chemically synthesized
ttactgctatttcttatattcc

SEQ ID NO: 26105 - DNA, 22 bp, Artificial Sequence
  chemically synthesized
tactgctatttcttatattcca

SEQ ID NO: 26106 - DNA, 22 bp, Artificial Sequence
  chemically synthesized
actgctatttcttatattccaa

SEQ ID NO: 26107 - DNA, 22 bp, Artificial Sequence
  chemically synthesized
ctgctatttcttatattccaac

SEQ ID NO: 26108 - DNA, 22 bp, Artificial Sequence
  chemically synthesized
ctatttcttatattccaacacc

SEQ ID NO: 26109 - DNA, 22 bp, Artificial Sequence
  chemically synthesized
tttcttatattccaacaccatt

SEQ ID NO: 26110 - DNA, 22 bp, Artificial Sequence
  chemically synthesized
cttatattccaacaccatttta

SEQ ID NO: 26111 - DNA, 22 bp, Artificial Sequence
  chemically synthesized
ttatattccaacaccattttag

SEQ ID NO: 26112 - DNA, 22 bp, Artificial Sequence
  chemically synthesized
atattccaacaccattttagcc

SEQ ID NO: 26113 - DNA, 22 bp, Artificial Sequence
  chemically synthesized
tattccaacaccattttagccc

SEQ ID NO: 26114 - DNA, 22 bp, Artificial Sequence
  chemically synthesized
caacaccattttagcccttttt

SEQ ID NO: 26115 - DNA, 22 bp, Artificial Sequence
  chemically synthesized
tagcccttttttgtcctcccca

SEQ ID NO: 26116 - DNA, 22 bp, Artificial Sequence
  chemically synthesized
agcccttttttgtcctccccat

SEQ ID NO: 26117 - DNA, 22 bp, Artificial Sequence
  chemically synthesized
gcccttttttgtcctccccata

SEQ ID NO: 26118 - DNA, 22 bp, Artificial Sequence
  chemically synthesized
ttttgtcctccccatattttta

SEQ ID NO: 26119 - DNA, 22 bp, Artificial Sequence
  chemically synthesized
tttgtcctccccatatttttac

SEQ ID NO: 26120 - DNA, 22 bp, Artificial Sequence
  chemically synthesized
ttgtcctccccatatttttacc

SEQ ID NO: 26121 - DNA, 22 bp, Artificial Sequence
  chemically synthesized
tgtcctccccatatttttacct

SEQ ID NO: 26122 - DNA, 22 bp, Artificial Sequence
  chemically synthesized
gtcctccccatatttttacctc

SEQ ID NO: 26123 - DNA, 22 bp, Artificial Sequence
  chemically synthesized
tcctccccatatttttacctcg

SEQ ID NO: 26124 - DNA, 22 bp, Artificial Sequence
  chemically synthesized
cccatatttttacctcggtttt

SEQ ID NO: 26125 - DNA, 22 bp, Artificial Sequence
  chemically synthesized
ttacctcggtttttactgttta

SEQ ID NO: 26126 - DNA, 22 bp, Artificial Sequence
  chemically synthesized
tacctcggtttttactgtttat

SEQ ID NO: 26127 - DNA, 22 bp, Artificial Sequence
  chemically synthesized
acctcggtttttactgtttata

SEQ ID NO: 26128 - DNA, 22 bp, Artificial Sequence
  chemically synthesized
cctcggtttttactgtttatat

SEQ ID NO: 26129 - DNA, 22 bp, Artificial Sequence
  chemically synthesized
ggtttttactgtttatatagca

SEQ ID NO: 26130 - DNA, 22 bp, Artificial Sequence
  chemically synthesized
ttactgtttatatagcacactt

SEQ ID NO: 26131 - DNA, 22 bp, Artificial Sequence
  chemically synthesized
tactgtttatatagcacacttt

SEQ ID NO: 26132 - DNA, 22 bp, Artificial Sequence
  chemically synthesized
actgtttatatagcacactttg

SEQ ID NO: 26133 - DNA, 22 bp, Artificial Sequence
  chemically synthesized
ctgtttatatagcacactttgt

SEQ ID NO: 26134 - DNA, 22 bp, Artificial Sequence
  chemically synthesized
tttatatagcacactttgtgct

SEQ ID NO: 26135 - DNA, 22 bp, Artificial Sequence
  chemically synthesized
atatagcacactttgtgctata

SEQ ID NO: 26136 - DNA, 22 bp, Artificial Sequence
  chemically synthesized
tatagcacactttgtgctatag

SEQ ID NO: 26137 - DNA, 22 bp, Artificial Sequence
  chemically synthesized
tgtgctatagtttacctcagtt

SEQ ID NO: 26138 - DNA, 22 bp, Artificial Sequence
  chemically synthesized
gtgctatagtttacctcagttt

SEQ ID NO: 26139 - DNA, 22 bp, Artificial Sequence
  chemically synthesized
tgctatagtttacctcagtttt

SEQ ID NO: 26140 - DNA, 22 bp, Artificial Sequence
  chemically synthesized
tagtttacctcagtttttacta

SEQ ID NO: 26141 - DNA, 22 bp, Artificial Sequence
  chemically synthesized
acctcagtttttactatttata

SEQ ID NO: 26142 - DNA, 22 bp, Artificial Sequence
  chemically synthesized
cctcagtttttactatttataa

SEQ ID NO: 26143 - DNA, 22 bp, Artificial Sequence
  chemically synthesized
agtttttactatttataaagca

SEQ ID NO: 26144 - DNA, 22 bp, Artificial Sequence
  chemically synthesized
ttactatttataaagcacattt

SEQ ID NO: 26145 - DNA, 22 bp, Artificial Sequence
  chemically synthesized
tactatttataaagcacatttt

SEQ ID NO: 26146 - DNA, 22 bp, Artificial Sequence
  chemically synthesized
actatttataaagcacattttg

SEQ ID NO: 26147 - DNA, 22 bp, Artificial Sequence
  chemically synthesized
ctatttataaagcacattttgc

SEQ ID NO: 26148 - DNA, 22 bp, Artificial Sequence
  chemically synthesized
tttataaagcacattttgcccc

SEQ ID NO: 26149 - DNA, 22 bp, Artificial Sequence
  chemically synthesized
ataaagcacattttgccccaaa

SEQ ID NO: 26150 - DNA, 22 bp, Artificial Sequence
  chemically synthesized
taaagcacattttgccccaaac

SEQ ID NO: 26151 - DNA, 22 bp, Artificial Sequence
  chemically synthesized
tgccccaaacttctctcttaac

SEQ ID NO: 26152 - DNA, 22 bp, Artificial Sequence
  chemically synthesized
gccccaaacttctctcttaaca

SEQ ID NO: 26153 - DNA, 22 bp, Artificial Sequence
  chemically synthesized
ccccaaacttctctcttaacaa

SEQ ID NO: 26154 - DNA, 22 bp, Artificial Sequence
  chemically synthesized
ctctcttaacaagctagaatat

SEQ ID NO: 26155 - DNA, 22 bp, Artificial Sequence
  chemically synthesized
tctcttaacaagctagaatata

SEQ ID NO: 26156 - DNA, 22 bp, Artificial Sequence
  chemically synthesized
tcttaacaagctagaatataag

SEQ ID NO: 26157 - DNA, 22 bp, Artificial Sequence
  chemically synthesized
ttaacaagctagaatataagtg

SEQ ID NO: 26158 - DNA, 22 bp, Artificial Sequence
  chemically synthesized
aacaagctagaatataagtgaa

SEQ ID NO: 26159 - DNA, 22 bp, Artificial Sequence
  chemically synthesized
acaagctagaatataagtgaat

SEQ ID NO: 26160 - DNA, 22 bp, Artificial Sequence
  chemically synthesized
gaatataagtgaatgcaagagc

SEQ ID NO: 26161 - DNA, 22 bp, Artificial Sequence
  chemically synthesized
ctattttcatatttgaggtata

SEQ ID NO: 26162 - DNA, 22 bp, Artificial Sequence
  chemically synthesized
ttttcatatttgaggtataaac

SEQ ID NO: 26163 - DNA, 22 bp, Artificial Sequence
  chemically synthesized
tcatatttgaggtataaaccaa

SEQ ID NO: 26164 - DNA, 22 bp, Artificial Sequence
  chemically synthesized
catatttgaggtataaaccaag

SEQ ID NO: 26165 - DNA, 22 bp, Artificial Sequence
  chemically synthesized
atatttgaggtataaaccaagg

SEQ ID NO: 26166 - DNA, 22 bp, Artificial Sequence
  chemically synthesized
gaggtataaaccaaggagattt

SEQ ID NO: 26167 - DNA, 22 bp, Artificial Sequence
  chemically synthesized
aggtataaaccaaggagattta

SEQ ID NO: 26168 - DNA, 22 bp, Artificial Sequence
  chemically synthesized
acatacacatatatatttttaa

SEQ ID NO: 26169 - DNA, 22 bp, Artificial Sequence
  chemically synthesized
catacacatatatatttttaaa

SEQ ID NO: 26170 - DNA, 22 bp, Artificial Sequence
  chemically synthesized
ttaaatctgcaaataaatggtt

SEQ ID NO: 26171 - DNA, 22 bp, Artificial Sequence
  chemically synthesized
taaatctgcaaataaatggttt

SEQ ID NO: 26172 - DNA, 22 bp, Artificial Sequence
  chemically synthesized
aaatctgcaaataaatggtttt

SEQ ID NO: 26173 - DNA, 22 bp, Artificial Sequence
  chemically synthesized
aatctgcaaataaatggtttta

SEQ ID NO: 26174 - DNA, 22 bp, Artificial Sequence
  chemically synthesized
caaataaatggttttattctga

SEQ ID NO: 26175 - DNA, 22 bp, Artificial Sequence
  chemically synthesized
tattctgacattaaaaaagaaa

SEQ ID NO: 26176 - DNA, 22 bp, Artificial Sequence
  chemically synthesized
attctgacattaaaaaagaaaa

SEQ ID NO: 26177 - DNA, 22 bp, Artificial Sequence
  chemically synthesized
ttctgacattaaaaaagaaaat

SEQ ID NO: 26178 - DNA, 22 bp, Artificial Sequence
  chemically synthesized
tgacattaaaaaagaaaatact

SEQ ID NO: 26179 - DNA, 22 bp, Artificial Sequence
  chemically synthesized
acattaaaaaagaaaatactta

SEQ ID NO: 26180 - DNA, 22 bp, Artificial Sequence
  chemically synthesized
aaaaagaaaatacttaatatca

SEQ ID NO: 26181 - DNA, 22 bp, Artificial Sequence
  chemically synthesized
aatatcattaatgaatgatcgt

SEQ ID NO: 26182 - DNA, 22 bp, Artificial Sequence
  chemically synthesized
atatcattaatgaatgatcgtt

SEQ ID NO: 26183 - DNA, 22 bp, Artificial Sequence
  chemically synthesized
atgaatgatcgttttaccacag

SEQ ID NO: 26184 - DNA, 22 bp, Artificial Sequence
  chemically synthesized
taccacagcgtaggtcattgaa

SEQ ID NO: 26185 - DNA, 22 bp, Artificial Sequence
  chemically synthesized
accacagcgtaggtcattgaat

SEQ ID NO: 26186 - DNA, 22 bp, Artificial Sequence
  chemically synthesized
ccacagcgtaggtcattgaatt

SEQ ID NO: 26187 - DNA, 22 bp, Artificial Sequence
  chemically synthesized
aatttgaacttaaccttcactt

SEQ ID NO: 26188 - DNA, 22 bp, Artificial Sequence
  chemically synthesized
gaacttaaccttcactttcaaa

SEQ ID NO: 26189 - DNA, 22 bp, Artificial Sequence
  chemically synthesized
aacttaaccttcactttcaaac

SEQ ID NO: 26190 - DNA, 22 bp, Artificial Sequence
  chemically synthesized
aaccttcactttcaaacaagta

SEQ ID NO: 26191 - DNA, 22 bp, Artificial Sequence
  chemically synthesized
accttcactttcaaacaagtac

SEQ ID NO: 26192 - DNA, 22 bp, Artificial Sequence
  chemically synthesized
cactttcaaacaagtactttgt

SEQ ID NO: 26193 - DNA, 22 bp, Artificial Sequence
  chemically synthesized
actttcaaacaagtactttgta

SEQ ID NO: 26194 - DNA, 22 bp, Artificial Sequence
  chemically synthesized
tcaaacaagtactttgtatttt

SEQ ID NO: 26195 - DNA, 22 bp, Artificial Sequence
  chemically synthesized
caaacaagtactttgtatttta

SEQ ID NO: 26196 - DNA, 22 bp, Artificial Sequence
  chemically synthesized
aaacaagtactttgtattttat

SEQ ID NO: 26197 - DNA, 22 bp, Artificial Sequence
  chemically synthesized
tgtattttattgatctctattt

SEQ ID NO: 26198 - DNA, 22 bp, Artificial Sequence
  chemically synthesized
gtattttattgatctctatttt

SEQ ID NO: 26199 - DNA, 22 bp, Artificial Sequence
  chemically synthesized
tattttattgatctctattttc

SEQ ID NO: 26200 - DNA, 22 bp, Artificial Sequence
  chemically synthesized
tattgatctctattttcctgga

SEQ ID NO: 26201 - DNA, 22 bp, Artificial Sequence
  chemically synthesized
attgatctctattttcctggaa

SEQ ID NO: 26202 - DNA, 22 bp, Artificial Sequence
  chemically synthesized
ttgatctctattttcctggaac

SEQ ID NO: 26203 - DNA, 22 bp, Artificial Sequence
  chemically synthesized
atctctattttcctggaacaac

SEQ ID NO: 26204 - DNA, 22 bp, Artificial Sequence
  chemically synthesized
tattttcctggaacaacatggg

SEQ ID NO: 26205 - DNA, 22 bp, Artificial Sequence
  chemically synthesized
ttttcctggaacaacatggggg

SEQ ID NO: 26206 - DNA, 22 bp, Artificial Sequence
  chemically synthesized
tcctggaacaacatgggggcta

SEQ ID NO: 26207 - DNA, 22 bp, Artificial Sequence
  chemically synthesized
cctggaacaacatgggggctat

SEQ ID NO: 26208 - DNA, 22 bp, Artificial Sequence
  chemically synthesized
ctggaacaacatgggggctatg

SEQ ID NO: 26209 - DNA, 22 bp, Artificial Sequence
  chemically synthesized
gaacaacatgggggctatgttt

SEQ ID NO: 26210 - DNA, 22 bp, Artificial Sequence
  chemically synthesized
tgtttagcgtgaggacaaagta

SEQ ID NO: 26211 - DNA, 22 bp, Artificial Sequence
  chemically synthesized
agcgtgaggacaaagtatcaca

SEQ ID NO: 26212 - DNA, 22 bp, Artificial Sequence
  chemically synthesized
gcgtgaggacaaagtatcacaa

SEQ ID NO: 26213 - DNA, 22 bp, Artificial Sequence
  chemically synthesized
tcacctgaaagaaaagatgagc

SEQ ID NO: 26214 - DNA, 22 bp, Artificial Sequence
  chemically synthesized
cacctgaaagaaaagatgagct

SEQ ID NO: 26215 - DNA, 22 bp, Artificial Sequence
  chemically synthesized
acctgaaagaaaagatgagcta

SEQ ID NO: 26216 - DNA, 22 bp, Artificial Sequence
  chemically synthesized
aaagaaaagatgagctaccatg

SEQ ID NO: 26217 - DNA, 22 bp, Artificial Sequence
  chemically synthesized
ccatggtacatataacaatgag

SEQ ID NO: 26218 - DNA, 22 bp, Artificial Sequence
  chemically synthesized
aaactctaagtcgtcatctggc

SEQ ID NO: 26219 - DNA, 22 bp, Artificial Sequence
  chemically synthesized
taagtcgtcatctggcaacact

SEQ ID NO: 26220 - DNA, 22 bp, Artificial Sequence
  chemically synthesized
agtcgtcatctggcaacactgc

SEQ ID NO: 26221 - DNA, 22 bp, Artificial Sequence
  chemically synthesized
gcaacactgccaatttactaaa

SEQ ID NO: 26222 - DNA, 22 bp, Artificial Sequence
  chemically synthesized
ccaatttactaaaaatcactat

SEQ ID NO: 26223 - DNA, 22 bp, Artificial Sequence
  chemically synthesized
actaaaaatcactatttcaaag

SEQ ID NO: 26224 - DNA, 22 bp, Artificial Sequence
  chemically synthesized
ctaaaaatcactatttcaaaga

SEQ ID NO: 26225 - DNA, 22 bp, Artificial Sequence
  chemically synthesized
aaaatcactatttcaaagaagt

SEQ ID NO: 26226 - DNA, 22 bp, Artificial Sequence
  chemically synthesized
tttcaaagaagtatagaataga

SEQ ID NO: 26227 - DNA, 22 bp, Artificial Sequence
  chemically synthesized
caaagaagtatagaatagatat

SEQ ID NO: 26228 - DNA, 22 bp, Artificial Sequence
  chemically synthesized
aaagaagtatagaatagatatc

SEQ ID NO: 26229 - DNA, 22 bp, Artificial Sequence
  chemically synthesized
tttctctgcctctctctcgctc

SEQ ID NO: 26230 - DNA, 22 bp, Artificial Sequence
  chemically synthesized
tctctgcctctctctcgctctc

SEQ ID NO: 26231 - DNA, 22 bp, Artificial Sequence
  chemically synthesized
ctctgcctctctctcgctctct

SEQ ID NO: 26232 - DNA, 22 bp, Artificial Sequence
  chemically synthesized
tctgcctctctctcgctctctc

SEQ ID NO: 26233 - DNA, 22 bp, Artificial Sequence
  chemically synthesized
tgcctctctctcgctctctctc

SEQ ID NO: 26234 - DNA, 22 bp, Artificial Sequence
  chemically synthesized
cctctctctcgctctctctctc

SEQ ID NO: 26235 - DNA, 22 bp, Artificial Sequence
  chemically synthesized
tctctcgctctctctctctctc

SEQ ID NO: 26236 - DNA, 22 bp, Artificial Sequence
  chemically synthesized
tctcgctctctctctctctctc

SEQ ID NO: 26237 - DNA, 22 bp, Artificial Sequence
  chemically synthesized
tcgctctctctctctctctccc

SEQ ID NO: 26238 - DNA, 22 bp, Artificial Sequence
  chemically synthesized
gctctctctctctctctccccc

SEQ ID NO: 26239 - DNA, 22 bp, Artificial Sequence
  chemically synthesized
tctctctctctctcccccatct

SEQ ID NO: 26240 - DNA, 22 bp, Artificial Sequence
  chemically synthesized
tctctctctctcccccatctct

SEQ ID NO: 26241 - DNA, 22 bp, Artificial Sequence
  chemically synthesized
tctctctctcccccatctctct

SEQ ID NO: 26242 - DNA, 22 bp, Artificial Sequence
  chemically synthesized
tctctctcccccatctctctct

SEQ ID NO: 26243 - DNA, 22 bp, Artificial Sequence
  chemically synthesized
tctctcccccatctctctctgt

SEQ ID NO: 26244 - DNA, 22 bp, Artificial Sequence
  chemically synthesized
tctcccccatctctctctgtct

SEQ ID NO: 26245 - DNA, 22 bp, Artificial Sequence
  chemically synthesized
tcccccatctctctctgtctct

SEQ ID NO: 26246 - DNA, 22 bp, Artificial Sequence
  chemically synthesized
ccccatctctctctgtctctct

SEQ ID NO: 26247 - DNA, 22 bp, Artificial Sequence
  chemically synthesized
tctctgtctctctctctatata

SEQ ID NO: 26248 - DNA, 22 bp, Artificial Sequence
  chemically synthesized
tctgtctctctctctatatata

SEQ ID NO: 26249 - DNA, 22 bp, Artificial Sequence
  chemically synthesized
tgtctctctctctatatatatg

SEQ ID NO: 26250 - DNA, 22 bp, Artificial Sequence
  chemically synthesized
tctctctctctatatatatgta

SEQ ID NO: 26251 - DNA, 22 bp, Artificial Sequence
  chemically synthesized
tctctctatatatatgtataca

SEQ ID NO: 26252 - DNA, 22 bp, Artificial Sequence
  chemically synthesized
tctctatatatatgtatacaca

SEQ ID NO: 26253 - DNA, 22 bp, Artificial Sequence
  chemically synthesized
tctatatatatgtatacacaca

SEQ ID NO: 26254 - DNA, 22 bp, Artificial Sequence
  chemically synthesized
tatatatatgtatacacacata

SEQ ID NO: 26255 - DNA, 22 bp, Artificial Sequence
  chemically synthesized
tatatatgtatacacacatata

SEQ ID NO: 26256 - DNA, 22 bp, Artificial Sequence
  chemically synthesized
tacacatatggagaaatttcac

SEQ ID NO: 26257 - DNA, 22 bp, Artificial Sequence
  chemically synthesized
cactattttgtatatgcttaaa

SEQ ID NO: 26258 - DNA, 22 bp, Artificial Sequence
  chemically synthesized
actattttgtatatgcttaaaa

SEQ ID NO: 26259 - DNA, 22 bp, Artificial Sequence
  chemically synthesized
ttttgtatatgcttaaaaatta

SEQ ID NO: 26260 - DNA, 22 bp, Artificial Sequence
  chemically synthesized
tgtatatgcttaaaaattacag

SEQ ID NO: 26261 - DNA, 22 bp, Artificial Sequence
  chemically synthesized
gtatatgcttaaaaattacaga

SEQ ID NO: 26262 - DNA, 22 bp, Artificial Sequence
  chemically synthesized
tatatgcttaaaaattacagac

SEQ ID NO: 26263 - DNA, 22 bp, Artificial Sequence
  chemically synthesized
aaaaattacagactttggaagt

SEQ ID NO: 26264 - DNA, 22 bp, Artificial Sequence
  chemically synthesized
aaaattacagactttggaagtc

SEQ ID NO: 26265 - DNA, 22 bp, Artificial Sequence
  chemically synthesized
cagactttggaagtcatatgac

SEQ ID NO: 26266 - DNA, 22 bp, Artificial Sequence
  chemically synthesized
tggaagtcatatgactatttca

SEQ ID NO: 26267 - DNA, 22 bp, Artificial Sequence
  chemically synthesized
ggaagtcatatgactatttcag

SEQ ID NO: 26268 - DNA, 22 bp, Artificial Sequence
  chemically synthesized
gaagtcatatgactatttcagt

SEQ ID NO: 26269 - DNA, 22 bp, Artificial Sequence
  chemically synthesized
tttcagtgtgtgtggctactaa

SEQ ID NO: 26270 - DNA, 22 bp, Artificial Sequence
  chemically synthesized
cagtgtgtgtggctactaatct

SEQ ID NO: 26271 - DNA, 22 bp, Artificial Sequence
  chemically synthesized
agtgtgtgtggctactaatctc

SEQ ID NO: 26272 - DNA, 22 bp, Artificial Sequence
  chemically synthesized
ctaatctcaccctcctgttcca

SEQ ID NO: 26273 - DNA, 22 bp, Artificial Sequence
  chemically synthesized
atctcaccctcctgttccaaaa

SEQ ID NO: 26274 - DNA, 22 bp, Artificial Sequence
  chemically synthesized
accctcctgttccaaaacacag

SEQ ID NO: 26275 - DNA, 22 bp, Artificial Sequence
  chemically synthesized
ctgttccaaaacacagttgcag

SEQ ID NO: 26276 - DNA, 22 bp, Artificial Sequence
  chemically synthesized
ttccaaaacacagttgcagaag

SEQ ID NO: 26277 - DNA, 22 bp, Artificial Sequence
  chemically synthesized
caaaacacagttgcagaagcag

SEQ ID NO: 26278 - DNA, 22 bp, Artificial Sequence
  chemically synthesized
cagaagcagaggaagtcattat

SEQ ID NO: 26279 - DNA, 22 bp, Artificial Sequence
  chemically synthesized
tacacttagaacatcattttat

SEQ ID NO: 26280 - DNA, 22 bp, Artificial Sequence
  chemically synthesized
agaacatcattttataaggcag

SEQ ID NO: 26281 - DNA, 22 bp, Artificial Sequence
  chemically synthesized
gaacatcattttataaggcagc

SEQ ID NO: 26282 - DNA, 22 bp, Artificial Sequence
  chemically synthesized
tataaggcagcaggtctggtag

SEQ ID NO: 26283 - DNA, 22 bp, Artificial Sequence
  chemically synthesized
ataaggcagcaggtctggtagg

SEQ ID NO: 26284 - DNA, 22 bp, Artificial Sequence
  chemically synthesized
taaggcagcaggtctggtagga

SEQ ID NO: 26285 - DNA, 22 bp, Artificial Sequence
  chemically synthesized
gtaggaaggagattaggtgcta

SEQ ID NO: 26286 - DNA, 22 bp, Artificial Sequence
  chemically synthesized
ggtgctacttgtgacaaaggtc

SEQ ID NO: 26287 - DNA, 22 bp, Artificial Sequence
  chemically synthesized
cttgtgacaaaggtcagcaaat

SEQ ID NO: 26288 - DNA, 22 bp, Artificial Sequence
  chemically synthesized
gtgacaaaggtcagcaaatatt

SEQ ID NO: 26289 - DNA, 22 bp, Artificial Sequence
  chemically synthesized
tgacaaaggtcagcaaatattt

SEQ ID NO: 26290 - DNA, 22 bp, Artificial Sequence
  chemically synthesized
gtgttcccagcacttttctaga

SEQ ID NO: 26291 - DNA, 22 bp, Artificial Sequence
  chemically synthesized
tgttcccagcacttttctagat

SEQ ID NO: 26292 - DNA, 22 bp, Artificial Sequence
  chemically synthesized
ccagcacttttctagatcctca

SEQ ID NO: 26293 - DNA, 22 bp, Artificial Sequence
  chemically synthesized
ttctagatcctcagttaaaatc

SEQ ID NO: 26294 - DNA, 22 bp, Artificial Sequence
  chemically synthesized
tctagatcctcagttaaaatca

SEQ ID NO: 26295 - DNA, 22 bp, Artificial Sequence
  chemically synthesized
ctagatcctcagttaaaatcaa

SEQ ID NO: 26296 - DNA, 22 bp, Artificial Sequence
  chemically synthesized
tagatcctcagttaaaatcaaa

SEQ ID NO: 26297 - DNA, 22 bp, Artificial Sequence
  chemically synthesized
gatcctcagttaaaatcaaagc

SEQ ID NO: 26298 - DNA, 22 bp, Artificial Sequence
  chemically synthesized
agttaaaatcaaagcagctgca

SEQ ID NO: 26299 - DNA, 22 bp, Artificial Sequence
  chemically synthesized
aaatcaaagcagctgcagtctt

SEQ ID NO: 26300 - DNA, 22 bp, Artificial Sequence
  chemically synthesized
cagtcttggcagtgggaggtga

SEQ ID NO: 26301 - DNA, 22 bp, Artificial Sequence
  chemically synthesized
ggcagtgggaggtgatactcac

SEQ ID NO: 26302 - DNA, 22 bp, Artificial Sequence
  chemically synthesized
gcagtgggaggtgatactcaca

SEQ ID NO: 26303 - DNA, 22 bp, Artificial Sequence
  chemically synthesized
acactttgaacaagaccacctg

SEQ ID NO: 26304 - DNA, 22 bp, Artificial Sequence
  chemically synthesized
tgaacaagaccacctgcactac

SEQ ID NO: 26305 - DNA, 22 bp, Artificial Sequence
  chemically synthesized
gaacaagaccacctgcactacc

SEQ ID NO: 26306 - DNA, 22 bp, Artificial Sequence
  chemically synthesized
aacaagaccacctgcactacct

SEQ ID NO: 26307 - DNA, 22 bp, Artificial Sequence
  chemically synthesized
cactacctacaatggcagctcc

SEQ ID NO: 26308 - DNA, 22 bp, Artificial Sequence
  chemically synthesized
cctacaatggcagctccaaata

SEQ ID NO: 26309 - DNA, 22 bp, Artificial Sequence
  chemically synthesized
caatggcagctccaaatatttt

SEQ ID NO: 26310 - DNA, 22 bp, Artificial Sequence
  chemically synthesized
caaatattttatatgaaagggg

SEQ ID NO: 26311 - DNA, 22 bp, Artificial Sequence
  chemically synthesized
tatatgaaaggggcctagacat

SEQ ID NO: 26312 - DNA, 22 bp, Artificial Sequence
  chemically synthesized
atatgaaaggggcctagacata

SEQ ID NO: 26313 - DNA, 22 bp, Artificial Sequence
  chemically synthesized
tatgaaaggggcctagacatag

SEQ ID NO: 26314 - DNA, 22 bp, Artificial Sequence
  chemically synthesized
gacatagcatgctgaatgaaaa

SEQ ID NO: 26315 - DNA, 22 bp, Artificial Sequence
  chemically synthesized
aatgaaaaggaagtgagtagac

SEQ ID NO: 26316 - DNA, 22 bp, Artificial Sequence
  chemically synthesized
gtgctttccttgaagctgtgca

SEQ ID NO: 26317 - DNA, 22 bp, Artificial Sequence
  chemically synthesized
tccttgaagctgtgcaaccaag

SEQ ID NO: 26318 - DNA, 22 bp, Artificial Sequence
  chemically synthesized
ccttgaagctgtgcaaccaagc

SEQ ID NO: 26319 - DNA, 22 bp, Artificial Sequence
  chemically synthesized
cttgaagctgtgcaaccaagca

SEQ ID NO: 26320 - DNA, 22 bp, Artificial Sequence
  chemically synthesized
gaagctgtgcaaccaagcatag

SEQ ID NO: 26321 - DNA, 22 bp, Artificial Sequence
  chemically synthesized
aagctgtgcaaccaagcatagt

SEQ ID NO: 26322 - DNA, 22 bp, Artificial Sequence
  chemically synthesized
tgcaaccaagcatagtttttac

SEQ ID NO: 26323 - DNA, 22 bp, Artificial Sequence
  chemically synthesized
ttacatagatcgtgtgtttcac

SEQ ID NO: 26324 - DNA, 22 bp, Artificial Sequence
  chemically synthesized
tacatagatcgtgtgtttcaca

SEQ ID NO: 26325 - DNA, 22 bp, Artificial Sequence
  chemically synthesized
acatagatcgtgtgtttcacat

SEQ ID NO: 26326 - DNA, 22 bp, Artificial Sequence
  chemically synthesized
catagatcgtgtgtttcacatg

SEQ ID NO: 26327 - DNA, 22 bp, Artificial Sequence
  chemically synthesized
cacatggtgtgataacagcttg

SEQ ID NO: 26328 - DNA, 22 bp, Artificial Sequence
  chemically synthesized
acatggtgtgataacagcttga

SEQ ID NO: 26329 - DNA, 22 bp, Artificial Sequence
  chemically synthesized
gagatgccattgacatggccca

SEQ ID NO: 26330 - DNA, 22 bp, Artificial Sequence
  chemically synthesized
agatgccattgacatggcccac

SEQ ID NO: 26331 - DNA, 22 bp, Artificial Sequence
  chemically synthesized
acatggcccaccggcttatcca

SEQ ID NO: 26332 - DNA, 22 bp, Artificial Sequence
  chemically synthesized
atccacatcagtaattagggca

SEQ ID NO: 26333 - DNA, 22 bp, Artificial Sequence
  chemically synthesized
tccacatcagtaattagggcaa

SEQ ID NO: 26334 - DNA, 22 bp, Artificial Sequence
  chemically synthesized
gggcaaagaaatcctaattact

SEQ ID NO: 26335 - DNA, 22 bp, Artificial Sequence
  chemically synthesized
attactatgcatcccgtgattg

SEQ ID NO: 26336 - DNA, 22 bp, Artificial Sequence
  chemically synthesized
ctatgcatcccgtgattgaagt

SEQ ID NO: 26337 - DNA, 22 bp, Artificial Sequence
  chemically synthesized
tgcatcccgtgattgaagtaac

SEQ ID NO: 26338 - DNA, 22 bp, Artificial Sequence
  chemically synthesized
aagtaacattgatgtatacata

SEQ ID NO: 26339 - DNA, 22 bp, Artificial Sequence
  chemically synthesized
atgtatacatattttttcctat

SEQ ID NO: 26340 - DNA, 22 bp, Artificial Sequence
  chemically synthesized
tttcctattatttctctttttg

SEQ ID NO: 26341 - DNA, 22 bp, Artificial Sequence
  chemically synthesized
ttcctattatttctctttttgt

SEQ ID NO: 26342 - DNA, 22 bp, Artificial Sequence
  chemically synthesized
tcctattatttctctttttgtg

SEQ ID NO: 26343 - DNA, 22 bp, Artificial Sequence
  chemically synthesized
cctattatttctctttttgtgt

SEQ ID NO: 26344 - DNA, 22 bp, Artificial Sequence
  chemically synthesized
ctattatttctctttttgtgtt

SEQ ID NO: 26345 - DNA, 22 bp, Artificial Sequence
  chemically synthesized
ttatttctctttttgtgtttaa

SEQ ID NO: 26346 - DNA, 22 bp, Artificial Sequence
  chemically synthesized
tttctctttttgtgtttaaaaa

SEQ ID NO: 26347 - DNA, 22 bp, Artificial Sequence
  chemically synthesized
ctctttttgtgtttaaaaatgc

SEQ ID NO: 26348 - DNA, 22 bp, Artificial Sequence
  chemically synthesized
tctttttgtgtttaaaaatgca

SEQ ID NO: 26349 - DNA, 22 bp, Artificial Sequence
  chemically synthesized
tttttgtgtttaaaaatgcaat

SEQ ID NO: 26350 - DNA, 22 bp, Artificial Sequence
  chemically synthesized
tttgtgtttaaaaatgcaatta

SEQ ID NO: 26351 - DNA, 22 bp, Artificial Sequence
  chemically synthesized
ttgtgtttaaaaatgcaattat

SEQ ID NO: 26352 - DNA, 22 bp, Artificial Sequence
  chemically synthesized
tgtgtttaaaaatgcaattatg

SEQ ID NO: 26353 - DNA, 22 bp, Artificial Sequence
  chemically synthesized
gtgtttaaaaatgcaattatgg

SEQ ID NO: 26354 - DNA, 22 bp, Artificial Sequence
  chemically synthesized
tgtttaaaaatgcaattatgga

SEQ ID NO: 26355 - DNA, 22 bp, Artificial Sequence
  chemically synthesized
aaaaatgcaattatggactcat

SEQ ID NO: 26356 - DNA, 22 bp, Artificial Sequence
  chemically synthesized
aaaatgcaattatggactcatt

SEQ ID NO: 26357 - DNA, 22 bp, Artificial Sequence
  chemically synthesized
tggactcattcaaagtgaaagc

SEQ ID NO: 26358 - DNA, 22 bp, Artificial Sequence
  chemically synthesized
attcaaagtgaaagctggtatg

SEQ ID NO: 26359 - DNA, 22 bp, Artificial Sequence
  chemically synthesized
aaagtgaaagctggtatgacaa

SEQ ID NO: 26360 - DNA, 22 bp, Artificial Sequence
  chemically synthesized
gtatgacaatacatgagctaac

SEQ ID NO: 26361 - DNA, 22 bp, Artificial Sequence
  chemically synthesized
acttcctcattttatgaataaa

SEQ ID NO: 26362 - DNA, 22 bp, Artificial Sequence
  chemically synthesized
cctcattttatgaataaatttt

SEQ ID NO: 26363 - DNA, 22 bp, Artificial Sequence
  chemically synthesized
ctcattttatgaataaatttta

SEQ ID NO: 26364 - DNA, 22 bp, Artificial Sequence
  chemically synthesized
attttatgaataaattttataa

SEQ ID NO: 26365 - DNA, 22 bp, Artificial Sequence
  chemically synthesized
tatgaataaattttataaagaa

SEQ ID NO: 26366 - DNA, 22 bp, Artificial Sequence
  chemically synthesized
atgaataaattttataaagaaa

SEQ ID NO: 26367 - DNA, 22 bp, Artificial Sequence
  chemically synthesized
tgaataaattttataaagaaat

SEQ ID NO: 26368 - DNA, 22 bp, Artificial Sequence
  chemically synthesized
tataaagaaataagctaatacc

SEQ ID NO: 26369 - DNA, 22 bp, Artificial Sequence
  chemically synthesized
ataaagaaataagctaatacct

SEQ ID NO: 26370 - DNA, 22 bp, Artificial Sequence
  chemically synthesized
taaagaaataagctaataccta

SEQ ID NO: 26371 - DNA, 22 bp, Artificial Sequence
  chemically synthesized
atacctacagagtgtttattaa

SEQ ID NO: 26372 - DNA, 22 bp, Artificial Sequence
  chemically synthesized
cagagtgtttattaaatgctag

SEQ ID NO: 26373 - DNA, 22 bp, Artificial Sequence
  chemically synthesized
attaaatgctaggcacagttct

SEQ ID NO: 26374 - DNA, 22 bp, Artificial Sequence
  chemically synthesized
ttaaatgctaggcacagttctg

SEQ ID NO: 26375 - DNA, 22 bp, Artificial Sequence
  chemically synthesized
aatgctaggcacagttctgagt

SEQ ID NO: 26376 - DNA, 22 bp, Artificial Sequence
  chemically synthesized
ggcacagttctgagtgatttac

SEQ ID NO: 26377 - DNA, 22 bp, Artificial Sequence
  chemically synthesized
tgagtgatttacaactggtatt

SEQ ID NO: 26378 - DNA, 22 bp, Artificial Sequence
  chemically synthesized
agtgatttacaactggtatttc

SEQ ID NO: 26379 - DNA, 22 bp, Artificial Sequence
  chemically synthesized
acaactggtatttcttttaatt

SEQ ID NO: 26380 - DNA, 22 bp, Artificial Sequence
  chemically synthesized
caactggtatttcttttaattt

SEQ ID NO: 26381 - DNA, 22 bp, Artificial Sequence
  chemically synthesized
gtatttcttttaattttcacaa

SEQ ID NO: 26382 - DNA, 22 bp, Artificial Sequence
  chemically synthesized
cttttaattttcacaacattat

SEQ ID NO: 26383 - DNA, 22 bp, Artificial Sequence
  chemically synthesized
ttttaattttcacaacattatt

SEQ ID NO: 26384 - DNA, 22 bp, Artificial Sequence
  chemically synthesized
ttaattttcacaacattattac

SEQ ID NO: 26385 - DNA, 22 bp, Artificial Sequence
  chemically synthesized
taattttcacaacattattaca

SEQ ID NO: 26386 - DNA, 22 bp, Artificial Sequence
  chemically synthesized
aattttcacaacattattacag

SEQ ID NO: 26387 - DNA, 22 bp, Artificial Sequence
  chemically synthesized
attttcacaacattattacagg

SEQ ID NO: 26388 - DNA, 22 bp, Artificial Sequence
  chemically synthesized
tcacaacattattacaggtaga

SEQ ID NO: 26389 - DNA, 22 bp, Artificial Sequence
  chemically synthesized
cacaacattattacaggtagat

SEQ ID NO: 26390 - DNA, 22 bp, Artificial Sequence
  chemically synthesized
acaacattattacaggtagatt

SEQ ID NO: 26391 - DNA, 22 bp, Artificial Sequence
  chemically synthesized
ttacaggtagattttatatatg

SEQ ID NO: 26392 - DNA, 22 bp, Artificial Sequence
  chemically synthesized
caggtagattttatatatggag

SEQ ID NO: 26393 - DNA, 22 bp, Artificial Sequence
  chemically synthesized
tatatatggagaaactgaggca

SEQ ID NO: 26394 - DNA, 22 bp, Artificial Sequence
  chemically synthesized
atatatggagaaactgaggcac

SEQ ID NO: 26395 - DNA, 22 bp, Artificial Sequence
  chemically synthesized
tatatggagaaactgaggcaca

SEQ ID NO: 26396 - DNA, 22 bp, Artificial Sequence
  chemically synthesized
aggcacagagatgctatgtaat

SEQ ID NO: 26397 - DNA, 22 bp, Artificial Sequence
  chemically synthesized
tgtaataaatctcaacattacc

SEQ ID NO: 26398 - DNA, 22 bp, Artificial Sequence
  chemically synthesized
aacattacccaggtgatggtgg

SEQ ID NO: 26399 - DNA, 22 bp, Artificial Sequence
  chemically synthesized
cccaggtgatggtggagttgga

SEQ ID NO: 26400 - DNA, 22 bp, Artificial Sequence
  chemically synthesized
gaattccaaatcatgcagtctg

SEQ ID NO: 26401 - DNA, 22 bp, Artificial Sequence
  chemically synthesized
caaatcatgcagtctgacttta

SEQ ID NO: 26402 - DNA, 22 bp, Artificial Sequence
  chemically synthesized
actttagctgtagacagcaaga

SEQ ID NO: 26403 - DNA, 22 bp, Artificial Sequence
  chemically synthesized
tagctgtagacagcaagatagt

SEQ ID NO: 26404 - DNA, 22 bp, Artificial Sequence
  chemically synthesized
agctgtagacagcaagatagta

SEQ ID NO: 26405 - DNA, 22 bp, Artificial Sequence
  chemically synthesized
gctgtagacagcaagatagtaa

SEQ ID NO: 26406 - DNA, 22 bp, Artificial Sequence
  chemically synthesized
tagacagcaagatagtaagtaa

SEQ ID NO: 26407 - DNA, 22 bp, Artificial Sequence
  chemically synthesized
atggatctttttgcttttgctt

SEQ ID NO: 26408 - DNA, 22 bp, Artificial Sequence
  chemically synthesized
tttgcttttgcttgtttgtttg

SEQ ID NO: 26409 - DNA, 22 bp, Artificial Sequence
  chemically synthesized
ttgcttttgcttgtttgtttga

SEQ ID NO: 26410 - DNA, 22 bp, Artificial Sequence
  chemically synthesized
tgcttttgcttgtttgtttgaa

SEQ ID NO: 26411 - DNA, 22 bp, Artificial Sequence
  chemically synthesized
gcttttgcttgtttgtttgaaa

SEQ ID NO: 26412 - DNA, 22 bp, Artificial Sequence
  chemically synthesized
cttttgcttgtttgtttgaaac

SEQ ID NO: 26413 - DNA, 22 bp, Artificial Sequence
  chemically synthesized
ttgcttgtttgtttgaaacagg

SEQ ID NO: 26414 - DNA, 22 bp, Artificial Sequence
  chemically synthesized
tgcttgtttgtttgaaacaggg

SEQ ID NO: 26415 - DNA, 22 bp, Artificial Sequence
  chemically synthesized
gcttgtttgtttgaaacagggt

SEQ ID NO: 26416 - DNA, 22 bp, Artificial Sequence
  chemically synthesized
cttgtttgtttgaaacagggtc

SEQ ID NO: 26417 - DNA, 22 bp, Artificial Sequence
  chemically synthesized
gtttgtttgaaacagggtctca

SEQ ID NO: 26418 - DNA, 22 bp, Artificial Sequence
  chemically synthesized
tttgtttgaaacagggtctcac

SEQ ID NO: 26419 - DNA, 22 bp, Artificial Sequence
  chemically synthesized
gtttgaaacagggtctcactct

SEQ ID NO: 26420 - DNA, 22 bp, Artificial Sequence
  chemically synthesized
tttgaaacagggtctcactctg

SEQ ID NO: 26421 - DNA, 22 bp, Artificial Sequence
  chemically synthesized
gaaacagggtctcactctgtca

SEQ ID NO: 26422 - DNA, 22 bp, Artificial Sequence
  chemically synthesized
aaacagggtctcactctgtcac

SEQ ID NO: 26423 - DNA, 22 bp, Artificial Sequence
  chemically synthesized
actctgtcaccccggctggagt

SEQ ID NO: 26424 - DNA, 22 bp, Artificial Sequence
  chemically synthesized
tgtcaccccggctggagtgcaa

SEQ ID NO: 26425 - DNA, 22 bp, Artificial Sequence
  chemically synthesized
tcaccccggctggagtgcaatg

SEQ ID NO: 26426 - DNA, 22 bp, Artificial Sequence
  chemically synthesized
gagtgcaatggtgcaatcttgc

SEQ ID NO: 26427 - DNA, 22 bp, Artificial Sequence
  chemically synthesized
gctcactgaagcctcactagaa

SEQ ID NO: 26428 - DNA, 22 bp, Artificial Sequence
  chemically synthesized
ctcactgaagcctcactagaac

SEQ ID NO: 26429 - DNA, 22 bp, Artificial Sequence
  chemically synthesized
actgaagcctcactagaacgcc

SEQ ID NO: 26430 - DNA, 22 bp, Artificial Sequence
  chemically synthesized
aagcctcactagaacgcctgga

SEQ ID NO: 26431 - DNA, 22 bp, Artificial Sequence
  chemically synthesized
actagaacgcctggattcaatt

SEQ ID NO: 26432 - DNA, 22 bp, Artificial Sequence
  chemically synthesized
gaacgcctggattcaattgatc

SEQ ID NO: 26433 - DNA, 22 bp, Artificial Sequence
  chemically synthesized
gattcaattgatcctcctgctt

SEQ ID NO: 26434 - DNA, 22 bp, Artificial Sequence
  chemically synthesized
aattgatcctcctgctttagcc

SEQ ID NO: 26435 - DNA, 22 bp, Artificial Sequence
  chemically synthesized
atcctcctgctttagcctctca

SEQ ID NO: 26436 - DNA, 22 bp, Artificial Sequence
  chemically synthesized
ctgctttagcctctcaggtagc

SEQ ID NO: 26437 - DNA, 22 bp, Artificial Sequence
  chemically synthesized
ctttagcctctcaggtagctag

SEQ ID NO: 26438 - DNA, 22 bp, Artificial Sequence
  chemically synthesized
tagcctctcaggtagctaggac

SEQ ID NO: 26439 - DNA, 22 bp, Artificial Sequence
  chemically synthesized
agcctctcaggtagctaggact

SEQ ID NO: 26440 - DNA, 22 bp, Artificial Sequence
  chemically synthesized
gcctctcaggtagctaggacta

SEQ ID NO: 26441 - DNA, 22 bp, Artificial Sequence
  chemically synthesized
tcaggtagctaggactacaggt

SEQ ID NO: 26442 - DNA, 22 bp, Artificial Sequence
  chemically synthesized
aggtagctaggactacaggtgt

SEQ ID NO: 26443 - DNA, 22 bp, Artificial Sequence
  chemically synthesized
ggactacaggtgtgagcctcca

SEQ ID NO: 26444 - DNA, 22 bp, Artificial Sequence
  chemically synthesized
caggtgtgagcctccatggcca

SEQ ID NO: 26445 - DNA, 22 bp, Artificial Sequence
  chemically synthesized
catggccagctagagaaatttt

SEQ ID NO: 26446 - DNA, 22 bp, Artificial Sequence
  chemically synthesized
gagaaattttttaaatttctgt

SEQ ID NO: 26447 - DNA, 22 bp, Artificial Sequence
  chemically synthesized
tttaaatttctgtagaaacagg

SEQ ID NO: 26448 - DNA, 22 bp, Artificial Sequence
  chemically synthesized
ttaaatttctgtagaaacaggg

SEQ ID NO: 26449 - DNA, 22 bp, Artificial Sequence
  chemically synthesized
taaatttctgtagaaacagggt

SEQ ID NO: 26450 - DNA, 22 bp, Artificial Sequence
  chemically synthesized
aaatttctgtagaaacagggtc

SEQ ID NO: 26451 - DNA, 22 bp, Artificial Sequence
  chemically synthesized
aatttctgtagaaacagggtct

SEQ ID NO: 26452 - DNA, 22 bp, Artificial Sequence
  chemically synthesized
ctgtagaaacagggtctcccta

SEQ ID NO: 26453 - DNA, 22 bp, Artificial Sequence
  chemically synthesized
tgtagaaacagggtctccctat

SEQ ID NO: 26454 - DNA, 22 bp, Artificial Sequence
  chemically synthesized
tagaaacagggtctccctatgt

SEQ ID NO: 26455 - DNA, 22 bp, Artificial Sequence
  chemically synthesized
cctatgttccccaggctggtat

SEQ ID NO: 26456 - DNA, 22 bp, Artificial Sequence
  chemically synthesized
tgttccccaggctggtatccaa

SEQ ID NO: 26457 - DNA, 22 bp, Artificial Sequence
  chemically synthesized
cccaggctggtatccaactctt

SEQ ID NO: 26458 - DNA, 22 bp, Artificial Sequence
  chemically synthesized
gtatccaactcttggtctcaaa

SEQ ID NO: 26459 - DNA, 22 bp, Artificial Sequence
  chemically synthesized
ttggtctcaaacaattctccca

SEQ ID NO: 26460 - DNA, 22 bp, Artificial Sequence
  chemically synthesized
ggtctcaaacaattctcccacc

SEQ ID NO: 26461 - DNA, 22 bp, Artificial Sequence
  chemically synthesized
gtctcaaacaattctcccacct

SEQ ID NO: 26462 - DNA, 22 bp, Artificial Sequence
  chemically synthesized
aaacaattctcccacctcagcc

SEQ ID NO: 26463 - DNA, 22 bp, Artificial Sequence
  chemically synthesized
tcccacctcagccttgaaaagt

SEQ ID NO: 26464 - DNA, 22 bp, Artificial Sequence
  chemically synthesized
ccacctcagccttgaaaagtgt

SEQ ID NO: 26465 - DNA, 22 bp, Artificial Sequence
  chemically synthesized
agccttgaaaagtgttgagatt

SEQ ID NO: 26466 - DNA, 22 bp, Artificial Sequence
  chemically synthesized
gaaaagtgttgagattacaggt

SEQ ID NO: 26467 - DNA, 22 bp, Artificial Sequence
  chemically synthesized
aaaagtgttgagattacaggtg

SEQ ID NO: 26468 - DNA, 22 bp, Artificial Sequence
  chemically synthesized
agattacaggtgtgaatcacca

SEQ ID NO: 26469 - DNA, 22 bp, Artificial Sequence
  chemically synthesized
caggtgtgaatcaccatgctgg

SEQ ID NO: 26470 - DNA, 22 bp, Artificial Sequence
  chemically synthesized
ggccttgatggatctttaaaag

SEQ ID NO: 26471 - DNA, 22 bp, Artificial Sequence
  chemically synthesized
gatggatctttaaaagtggtgg

SEQ ID NO: 26472 - DNA, 22 bp, Artificial Sequence
  chemically synthesized
atggatctttaaaagtggtggg

SEQ ID NO: 26473 - DNA, 22 bp, Artificial Sequence
  chemically synthesized
taaaagtggtggggggtaggag

SEQ ID NO: 26474 - DNA, 22 bp, Artificial Sequence
  chemically synthesized
aaaagtggtggggggtaggaga

SEQ ID NO: 26475 - DNA, 22 bp, Artificial Sequence
  chemically synthesized
aaagtggtggggggtaggagaa

SEQ ID NO: 26476 - DNA, 22 bp, Artificial Sequence
  chemically synthesized
ggtctcgggaaggatgggatcc

SEQ ID NO: 26477 - DNA, 22 bp, Artificial Sequence
  chemically synthesized
gggaaggatgggatccttttca

SEQ ID NO: 26478 - DNA, 22 bp, Artificial Sequence
  chemically synthesized
ttcattttgctctagagaaaag

SEQ ID NO: 26479 - DNA, 22 bp, Artificial Sequence
  chemically synthesized
tcattttgctctagagaaaagc

SEQ ID NO: 26480 - DNA, 22 bp, Artificial Sequence
  chemically synthesized
cattttgctctagagaaaagcc

SEQ ID NO: 26481 - DNA, 22 bp, Artificial Sequence
  chemically synthesized
attttgctctagagaaaagcca

SEQ ID NO: 26482 - DNA, 22 bp, Artificial Sequence
  chemically synthesized
tgctctagagaaaagccatttg

SEQ ID NO: 26483 - DNA, 22 bp, Artificial Sequence
  chemically synthesized
gctctagagaaaagccatttgg

SEQ ID NO: 26484 - DNA, 22 bp, Artificial Sequence
  chemically synthesized
ctctagagaaaagccatttgga

SEQ ID NO: 26485 - DNA, 22 bp, Artificial Sequence
  chemically synthesized
tagagaaaagccatttggaaaa

SEQ ID NO: 26486 - DNA, 22 bp, Artificial Sequence
  chemically synthesized
gagaaaagccatttggaaaact

SEQ ID NO: 26487 - DNA, 22 bp, Artificial Sequence
  chemically synthesized
ggaaaacttctgtgttaacaaa

SEQ ID NO: 26488 - DNA, 22 bp, Artificial Sequence
  chemically synthesized
gaaaacttctgtgttaacaaaa

SEQ ID NO: 26489 - DNA, 22 bp, Artificial Sequence
  chemically synthesized
ctgtgttaacaaaaaacagccg

SEQ ID NO: 26490 - DNA, 22 bp, Artificial Sequence
  chemically synthesized
tgtgttaacaaaaaacagccga

SEQ ID NO: 26491 - DNA, 22 bp, Artificial Sequence
  chemically synthesized
tgttaacaaaaaacagccgagt

SEQ ID NO: 26492 - DNA, 22 bp, Artificial Sequence
  chemically synthesized
acaaaaaacagccgagtagcct

SEQ ID NO: 26493 - DNA, 22 bp, Artificial Sequence
  chemically synthesized
gtattaaactttagagcagttg

SEQ ID NO: 26494 - DNA, 22 bp, Artificial Sequence
  chemically synthesized
aactttagagcagttgttcttt

SEQ ID NO: 26495 - DNA, 22 bp, Artificial Sequence
  chemically synthesized
tagagcagttgttctttacggc

SEQ ID NO: 26496 - DNA, 22 bp, Artificial Sequence
  chemically synthesized
agagcagttgttctttacggca

SEQ ID NO: 26497 - DNA, 22 bp, Artificial Sequence
  chemically synthesized
gagcagttgttctttacggcaa

SEQ ID NO: 26498 - DNA, 22 bp, Artificial Sequence
  chemically synthesized
ttctttacggcaattacagggg

SEQ ID NO: 26499 - DNA, 22 bp, Artificial Sequence
  chemically synthesized
tttacggcaattacaggggcct

SEQ ID NO: 26500 - DNA, 22 bp, Artificial Sequence
  chemically synthesized
tacggcaattacaggggccttc

SEQ ID NO: 26501 - DNA, 22 bp, Artificial Sequence
  chemically synthesized
acggcaattacaggggccttca

SEQ ID NO: 26502 - DNA, 22 bp, Artificial Sequence
  chemically synthesized
cggcaattacaggggccttcag

SEQ ID NO: 26503 - DNA, 22 bp, Artificial Sequence
  chemically synthesized
caggggccttcaggaagctgat

SEQ ID NO: 26504 - DNA, 22 bp, Artificial Sequence
  chemically synthesized
caggaagctgatggaagtgtga

SEQ ID NO: 26505 - DNA, 22 bp, Artificial Sequence
  chemically synthesized
aggaagctgatggaagtgtgaa

SEQ ID NO: 26506 - DNA, 22 bp, Artificial Sequence
  chemically synthesized
atggaagtgtgaagtcctcttc

SEQ ID NO: 26507 - DNA, 22 bp, Artificial Sequence
  chemically synthesized
ttctcagagaaaagtacttcta

SEQ ID NO: 26508 - DNA, 22 bp, Artificial Sequence
  chemically synthesized
ctcagagaaaagtacttctata

SEQ ID NO: 26509 - DNA, 22 bp, Artificial Sequence
  chemically synthesized
tcagagaaaagtacttctatat

SEQ ID NO: 26510 - DNA, 22 bp, Artificial Sequence
  chemically synthesized
agagaaaagtacttctatatac

SEQ ID NO: 26511 - DNA, 22 bp, Artificial Sequence
  chemically synthesized
ctatatacgtgcacctaatttt

SEQ ID NO: 26512 - DNA, 22 bp, Artificial Sequence
  chemically synthesized
tatatacgtgcacctaattttt

SEQ ID NO: 26513 - DNA, 22 bp, Artificial Sequence
  chemically synthesized
tatacgtgcacctaatttttag

SEQ ID NO: 26514 - DNA, 22 bp, Artificial Sequence
  chemically synthesized
atttttagatataatttctgaa

SEQ ID NO: 26515 - DNA, 22 bp, Artificial Sequence
  chemically synthesized
ttagatataatttctgaaggtt

SEQ ID NO: 26516 - DNA, 22 bp, Artificial Sequence
  chemically synthesized
tagatataatttctgaaggttt

SEQ ID NO: 26517 - DNA, 22 bp, Artificial Sequence
  chemically synthesized
agatataatttctgaaggttta

SEQ ID NO: 26518 - DNA, 22 bp, Artificial Sequence
  chemically synthesized
gatataatttctgaaggtttag

SEQ ID NO: 26519 - DNA, 22 bp, Artificial Sequence
  chemically synthesized
ctgaaggtttagaaactccttg

SEQ ID NO: 26520 - DNA, 22 bp, Artificial Sequence
  chemically synthesized
tgaaggtttagaaactccttga

SEQ ID NO: 26521 - DNA, 22 bp, Artificial Sequence
  chemically synthesized
aaggtttagaaactccttgagt

SEQ ID NO: 26522 - DNA, 22 bp, Artificial Sequence
  chemically synthesized
agaaactccttgagttcactta

SEQ ID NO: 26523 - DNA, 22 bp, Artificial Sequence
  chemically synthesized
gaaactccttgagttcacttat

SEQ ID NO: 26524 - DNA, 22 bp, Artificial Sequence
  chemically synthesized
cttgagttcacttatatcaaag

SEQ ID NO: 26525 - DNA, 22 bp, Artificial Sequence
  chemically synthesized
gagttcacttatatcaaagtcc

SEQ ID NO: 26526 - DNA, 22 bp, Artificial Sequence
  chemically synthesized
agttcacttatatcaaagtcct

SEQ ID NO: 26527 - DNA, 22 bp, Artificial Sequence
  chemically synthesized
acttatatcaaagtcctcacct

SEQ ID NO: 26528 - DNA, 22 bp, Artificial Sequence
  chemically synthesized
atatcaaagtcctcacctttag

SEQ ID NO: 26529 - DNA, 22 bp, Artificial Sequence
  chemically synthesized
tatcaaagtcctcacctttaga

SEQ ID NO: 26530 - DNA, 22 bp, Artificial Sequence
  chemically synthesized
acctttagaactcctgtcctag

SEQ ID NO: 26531 - DNA, 22 bp, Artificial Sequence
  chemically synthesized
tagaactcctgtcctagaagag

SEQ ID NO: 26532 - DNA, 22 bp, Artificial Sequence
  chemically synthesized
agaactcctgtcctagaagagt

SEQ ID NO: 26533 - DNA, 22 bp, Artificial Sequence
  chemically synthesized
gaactcctgtcctagaagagtg

SEQ ID NO: 26534 - DNA, 22 bp, Artificial Sequence
  chemically synthesized
ctgtcctagaagagtggactca

SEQ ID NO: 26535 - DNA, 22 bp, Artificial Sequence
  chemically synthesized
tcctagaagagtggactcatta

SEQ ID NO: 26536 - DNA, 22 bp, Artificial Sequence
  chemically synthesized
gaagagtggactcattattata

SEQ ID NO: 26537 - DNA, 22 bp, Artificial Sequence
  chemically synthesized
attattataatttcttccataa

SEQ ID NO: 26538 - DNA, 22 bp, Artificial Sequence
  chemically synthesized
ttataatttcttccataaccac

SEQ ID NO: 26539 - DNA, 22 bp, Artificial Sequence
  chemically synthesized
taatttcttccataaccacttt

SEQ ID NO: 26540 - DNA, 22 bp, Artificial Sequence
  chemically synthesized
cttccataaccactttgactct

SEQ ID NO: 26541 - DNA, 22 bp, Artificial Sequence
  chemically synthesized
ttccataaccactttgactcta

SEQ ID NO: 26542 - DNA, 22 bp, Artificial Sequence
  chemically synthesized
ccataaccactttgactctagt

SEQ ID NO: 26543 - DNA, 22 bp, Artificial Sequence
  chemically synthesized
cataaccactttgactctagtt

SEQ ID NO: 26544 - DNA, 22 bp, Artificial Sequence
  chemically synthesized
tgactctagttttctgaattct

SEQ ID NO: 26545 - DNA, 22 bp, Artificial Sequence
  chemically synthesized
gactctagttttctgaattctt

SEQ ID NO: 26546 - DNA, 22 bp, Artificial Sequence
  chemically synthesized
actctagttttctgaattcttc

SEQ ID NO: 26547 - DNA, 22 bp, Artificial Sequence
  chemically synthesized
tagttttctgaattcttccctg

SEQ ID NO: 26548 - DNA, 22 bp, Artificial Sequence
  chemically synthesized
gttttctgaattcttccctgtg

SEQ ID NO: 26549 - DNA, 22 bp, Artificial Sequence
  chemically synthesized
tctgaattcttccctgtgccac

SEQ ID NO: 26550 - DNA, 22 bp, Artificial Sequence
  chemically synthesized
ctgaattcttccctgtgccact

SEQ ID NO: 26551 - DNA, 22 bp, Artificial Sequence
  chemically synthesized
tgaattcttccctgtgccactt

SEQ ID NO: 26552 - DNA, 22 bp, Artificial Sequence
  chemically synthesized
aattcttccctgtgccacttgt

SEQ ID NO: 26553 - DNA, 22 bp, Artificial Sequence
  chemically synthesized
ttccctgtgccacttgtaccat

SEQ ID NO: 26554 - DNA, 22 bp, Artificial Sequence
  chemically synthesized
ccctgtgccacttgtaccatgt

SEQ ID NO: 26555 - DNA, 22 bp, Artificial Sequence
  chemically synthesized
cctgtgccacttgtaccatgta

SEQ ID NO: 26556 - DNA, 22 bp, Artificial Sequence
  chemically synthesized
tgccacttgtaccatgtaattc

SEQ ID NO: 26557 - DNA, 22 bp, Artificial Sequence
  chemically synthesized
gtaccatgtaattcagaggtgt

SEQ ID NO: 26558 - DNA, 22 bp, Artificial Sequence
  chemically synthesized
taccatgtaattcagaggtgta

SEQ ID NO: 26559 - DNA, 22 bp, Artificial Sequence
  chemically synthesized
agaggtgtagtgtcaagactga

SEQ ID NO: 26560 - DNA, 22 bp, Artificial Sequence
  chemically synthesized
aggaggaagcaggtaaattatg

SEQ ID NO: 26561 - DNA, 22 bp, Artificial Sequence
  chemically synthesized
tgtccagcaatacgttggctta

SEQ ID NO: 26562 - DNA, 22 bp, Artificial Sequence
  chemically synthesized
gcttaggcaaaaacaaattgtt

SEQ ID NO: 26563 - DNA, 22 bp, Artificial Sequence
  chemically synthesized
aggcaaaaacaaattgtttcta

SEQ ID NO: 26564 - DNA, 22 bp, Artificial Sequence
  chemically synthesized
ggcaaaaacaaattgtttctag

SEQ ID NO: 26565 - DNA, 22 bp, Artificial Sequence
  chemically synthesized
tttctagtccattttaagaggg

SEQ ID NO: 26566 - DNA, 22 bp, Artificial Sequence
  chemically synthesized
ctagtccattttaagagggaag

SEQ ID NO: 26567 - DNA, 22 bp, Artificial Sequence
  chemically synthesized
tagtccattttaagagggaagc

SEQ ID NO: 26568 - DNA, 22 bp, Artificial Sequence
  chemically synthesized
gtccattttaagagggaagcat

SEQ ID NO: 26569 - DNA, 22 bp, Artificial Sequence
  chemically synthesized
taagagggaagcatttatttag

SEQ ID NO: 26570 - DNA, 22 bp, Artificial Sequence
  chemically synthesized
aagagggaagcatttatttagg

SEQ ID NO: 26571 - DNA, 22 bp, Artificial Sequence
  chemically synthesized
agagggaagcatttatttaggg

SEQ ID NO: 26572 - DNA, 22 bp, Artificial Sequence
  chemically synthesized
atttagggactacatcgctcaa

SEQ ID NO: 26573 - DNA, 22 bp, Artificial Sequence
  chemically synthesized
tttagggactacatcgctcaag

SEQ ID NO: 26574 - DNA, 22 bp, Artificial Sequence
  chemically synthesized
agggactacatcgctcaagtct

SEQ ID NO: 26575 - DNA, 22 bp, Artificial Sequence
  chemically synthesized
gggactacatcgctcaagtctt

SEQ ID NO: 26576 - DNA, 22 bp, Artificial Sequence
  chemically synthesized
catcgctcaagtctttacaatt

SEQ ID NO: 26577 - DNA, 22 bp, Artificial Sequence
  chemically synthesized
aagtctttacaattcttaaatt

SEQ ID NO: 26578 - DNA, 22 bp, Artificial Sequence
  chemically synthesized
tacaattcttaaattaactttc

SEQ ID NO: 26579 - DNA, 22 bp, Artificial Sequence
  chemically synthesized
acaattcttaaattaactttca

SEQ ID NO: 26580 - DNA, 22 bp, Artificial Sequence
  chemically synthesized
caattcttaaattaactttcat

SEQ ID NO: 26581 - DNA, 22 bp, Artificial Sequence
  chemically synthesized
ttaaattaactttcattatgtg

SEQ ID NO: 26582 - DNA, 22 bp, Artificial Sequence
  chemically synthesized
aaattaactttcattatgtgtg

SEQ ID NO: 26583 - DNA, 22 bp, Artificial Sequence
  chemically synthesized
aattaactttcattatgtgtga

SEQ ID NO: 26584 - DNA, 22 bp, Artificial Sequence
  chemically synthesized
actttcattatgtgtgacaaca

SEQ ID NO: 26585 - DNA, 22 bp, Artificial Sequence
  chemically synthesized
tcattatgtgtgacaacattta

SEQ ID NO: 26586 - DNA, 22 bp, Artificial Sequence
  chemically synthesized
cattatgtgtgacaacatttat

SEQ ID NO: 26587 - DNA, 22 bp, Artificial Sequence
  chemically synthesized
attatgtgtgacaacatttatt

SEQ ID NO: 26588 - DNA, 22 bp, Artificial Sequence
  chemically synthesized
tgtgtgacaacatttattaaac

SEQ ID NO: 26589 - DNA, 22 bp, Artificial Sequence
  chemically synthesized
attaaacttttttaatgatcct

SEQ ID NO: 26590 - DNA, 22 bp, Artificial Sequence
  chemically synthesized
ttaaacttttttaatgatccta

SEQ ID NO: 26591 - DNA, 22 bp, Artificial Sequence
  chemically synthesized
aacttttttaatgatcctaaat

SEQ ID NO: 26592 - DNA, 22 bp, Artificial Sequence
  chemically synthesized
ttttaatgatcctaaatatcct

SEQ ID NO: 26593 - DNA, 22 bp, Artificial Sequence
  chemically synthesized
tttaatgatcctaaatatcctt

SEQ ID NO: 26594 - DNA, 22 bp, Artificial Sequence
  chemically synthesized
ttaatgatcctaaatatcctta

SEQ ID NO: 26595 - DNA, 22 bp, Artificial Sequence
  chemically synthesized
taatgatcctaaatatccttaa

SEQ ID NO: 26596 - DNA, 22 bp, Artificial Sequence
  chemically synthesized
aatgatcctaaatatccttaac

SEQ ID NO: 26597 - DNA, 22 bp, Artificial Sequence
  chemically synthesized
atgatcctaaatatccttaaca

SEQ ID NO: 26598 - DNA, 22 bp, Artificial Sequence
  chemically synthesized
aatatccttaacatgttaattt

SEQ ID NO: 26599 - DNA, 22 bp, Artificial Sequence
  chemically synthesized
aacatgttaatttctccagagt

SEQ ID NO: 26600 - DNA, 22 bp, Artificial Sequence
  chemically synthesized
acatgttaatttctccagagtt

SEQ ID NO: 26601 - DNA, 22 bp, Artificial Sequence
  chemically synthesized
atttctccagagtttgtaatgt

SEQ ID NO: 26602 - DNA, 22 bp, Artificial Sequence
  chemically synthesized
ctccagagtttgtaatgttctg

SEQ ID NO: 26603 - DNA, 22 bp, Artificial Sequence
  chemically synthesized
tccagagtttgtaatgttctga

SEQ ID NO: 26604 - DNA, 22 bp, Artificial Sequence
  chemically synthesized
cagagtttgtaatgttctgagc

SEQ ID NO: 26605 - DNA, 22 bp, Artificial Sequence
  chemically synthesized
gtaatgttctgagcaagtgtgt

SEQ ID NO: 26606 - DNA, 22 bp, Artificial Sequence
  chemically synthesized
taatgttctgagcaagtgtgtg

SEQ ID NO: 26607 - DNA, 22 bp, Artificial Sequence
  chemically synthesized
tgagcaagtgtgtgcagaagaa

SEQ ID NO: 26608 - DNA, 22 bp, Artificial Sequence
  chemically synthesized
agcaagtgtgtgcagaagaaat

SEQ ID NO: 26609 - DNA, 22 bp, Artificial Sequence
  chemically synthesized
tagtaagacctgggcaaaggag

SEQ ID NO: 26610 - DNA, 22 bp, Artificial Sequence
  chemically synthesized
ggcaaaggagagagtaaacatt

SEQ ID NO: 26611 - DNA, 22 bp, Artificial Sequence
  chemically synthesized
ttcccccacatttgggcaaaac

SEQ ID NO: 26612 - DNA, 22 bp, Artificial Sequence
  chemically synthesized
tcccccacatttgggcaaaact

SEQ ID NO: 26613 - DNA, 22 bp, Artificial Sequence
  chemically synthesized
cccccacatttgggcaaaactt

SEQ ID NO: 26614 - DNA, 22 bp, Artificial Sequence
  chemically synthesized
ccccacatttgggcaaaacttt

SEQ ID NO: 26615 - DNA, 22 bp, Artificial Sequence
  chemically synthesized
gggcaaaactttccatcctggg

SEQ ID NO: 26616 - DNA, 22 bp, Artificial Sequence
  chemically synthesized
ggcaaaactttccatcctgggt

SEQ ID NO: 26617 - DNA, 22 bp, Artificial Sequence
  chemically synthesized
tccatcctgggtcacaccacag

SEQ ID NO: 26618 - DNA, 22 bp, Artificial Sequence
  chemically synthesized
ccatcctgggtcacaccacagt

SEQ ID NO: 26619 - DNA, 22 bp, Artificial Sequence
  chemically synthesized
catcctgggtcacaccacagtc

SEQ ID NO: 26620 - DNA, 22 bp, Artificial Sequence
  chemically synthesized
ggtcacaccacagtctaatttc

SEQ ID NO: 26621 - DNA, 22 bp, Artificial Sequence
  chemically synthesized
atttccctcctctcctctccct

SEQ ID NO: 26622 - DNA, 22 bp, Artificial Sequence
  chemically synthesized
ccctcctctcctctccctcaac

SEQ ID NO: 26623 - DNA, 22 bp, Artificial Sequence
  chemically synthesized
cctcctctcctctccctcaact

SEQ ID NO: 26624 - DNA, 22 bp, Artificial Sequence
  chemically synthesized
ctctcctctccctcaactggta

SEQ ID NO: 26625 - DNA, 22 bp, Artificial Sequence
  chemically synthesized
tcctctccctcaactggtaaca

SEQ ID NO: 26626 - DNA, 22 bp, Artificial Sequence
  chemically synthesized
ctctccctcaactggtaacagt

SEQ ID NO: 26627 - DNA, 22 bp, Artificial Sequence
  chemically synthesized
tccctcaactggtaacagtgct

SEQ ID NO: 26628 - DNA, 22 bp, Artificial Sequence
  chemically synthesized
cctcaactggtaacagtgcttc

SEQ ID NO: 26629 - DNA, 22 bp, Artificial Sequence
  chemically synthesized
aactggtaacagtgcttcttcc

SEQ ID NO: 26630 - DNA, 22 bp, Artificial Sequence
  chemically synthesized
gtaacagtgcttcttccaaaac

SEQ ID NO: 26631 - DNA, 22 bp, Artificial Sequence
  chemically synthesized
cttccaaaacatacctgactac

SEQ ID NO: 26632 - DNA, 22 bp, Artificial Sequence
  chemically synthesized
ttccaaaacatacctgactact

SEQ ID NO: 26633 - DNA, 22 bp, Artificial Sequence
  chemically synthesized
ccaaaacatacctgactactta

SEQ ID NO: 26634 - DNA, 22 bp, Artificial Sequence
  chemically synthesized
caaaacatacctgactacttag

SEQ ID NO: 26635 - DNA, 22 bp, Artificial Sequence
  chemically synthesized
actacttagtacttcccactac

SEQ ID NO: 26636 - DNA, 22 bp, Artificial Sequence
  chemically synthesized
cttagtacttcccactactgtg

SEQ ID NO: 26637 - DNA, 22 bp, Artificial Sequence
  chemically synthesized
agtacttcccactactgtggat

SEQ ID NO: 26638 - DNA, 22 bp, Artificial Sequence
  chemically synthesized
gtacttcccactactgtggata

SEQ ID NO: 26639 - DNA, 22 bp, Artificial Sequence
  chemically synthesized
cccactactgtggatagaattt

SEQ ID NO: 26640 - DNA, 22 bp, Artificial Sequence
  chemically synthesized
ccactactgtggatagaatttc

SEQ ID NO: 26641 - DNA, 22 bp, Artificial Sequence
  chemically synthesized
ctgtggatagaatttcagtgac

SEQ ID NO: 26642 - DNA, 22 bp, Artificial Sequence
  chemically synthesized
tggatagaatttcagtgactcc

SEQ ID NO: 26643 - DNA, 22 bp, Artificial Sequence
  chemically synthesized
cagtgactcctcattcattgtt

SEQ ID NO: 26644 - DNA, 22 bp, Artificial Sequence
  chemically synthesized
agtgactcctcattcattgttc

SEQ ID NO: 26645 - DNA, 22 bp, Artificial Sequence
  chemically synthesized
ctcattcattgttcataccctg

SEQ ID NO: 26646 - DNA, 22 bp, Artificial Sequence
  chemically synthesized
attcattgttcataccctggag

SEQ ID NO: 26647 - DNA, 22 bp, Artificial Sequence
  chemically synthesized
attgttcataccctggagacaa

SEQ ID NO: 26648 - DNA, 22 bp, Artificial Sequence
  chemically synthesized
ttcataccctggagacaaaact

SEQ ID NO: 26649 - DNA, 22 bp, Artificial Sequence
  chemically synthesized
ataccctggagacaaaactcct

SEQ ID NO: 26650 - DNA, 22 bp, Artificial Sequence
  chemically synthesized
gagacaaaactccttaaggcta

SEQ ID NO: 26651 - DNA, 22 bp, Artificial Sequence
  chemically synthesized
cttaaggctattaactccccct

SEQ ID NO: 26652 - DNA, 22 bp, Artificial Sequence
  chemically synthesized
aaggctattaactccccctgag

SEQ ID NO: 26653 - DNA, 22 bp, Artificial Sequence
  chemically synthesized
aggctattaactccccctgagc

SEQ ID NO: 26654 - DNA, 22 bp, Artificial Sequence
  chemically synthesized
ttaactccccctgagcttcaca

SEQ ID NO: 26655 - DNA, 22 bp, Artificial Sequence
  chemically synthesized
actccccctgagcttcacaatc

SEQ ID NO: 26656 - DNA, 22 bp, Artificial Sequence
  chemically synthesized
cccctgagcttcacaatctagt

SEQ ID NO: 26657 - DNA, 22 bp, Artificial Sequence
  chemically synthesized
agcttcacaatctagtccctgc

SEQ ID NO: 26658 - DNA, 22 bp, Artificial Sequence
  chemically synthesized
cacaatctagtccctgcaggtc

SEQ ID NO: 26659 - DNA, 22 bp, Artificial Sequence
  chemically synthesized
acaatctagtccctgcaggtct

SEQ ID NO: 26660 - DNA, 22 bp, Artificial Sequence
  chemically synthesized
gtccctgcaggtctctcccatc

SEQ ID NO: 26661 - DNA, 22 bp, Artificial Sequence
  chemically synthesized
caggtctctcccatcttctctc

SEQ ID NO: 26662 - DNA, 22 bp, Artificial Sequence
  chemically synthesized
tcccatcttctctcatactcct

SEQ ID NO: 26663 - DNA, 22 bp, Artificial Sequence
  chemically synthesized
ccatcttctctcatactcctct

SEQ ID NO: 26664 - DNA, 22 bp, Artificial Sequence
  chemically synthesized
ctctcatactcctctccttttc

SEQ ID NO: 26665 - DNA, 22 bp, Artificial Sequence
  chemically synthesized
tctcatactcctctccttttcc

SEQ ID NO: 26666 - DNA, 22 bp, Artificial Sequence
  chemically synthesized
tcatactcctctccttttccct

SEQ ID NO: 26667 - DNA, 22 bp, Artificial Sequence
  chemically synthesized
atactcctctccttttccctct

SEQ ID NO: 26668 - DNA, 22 bp, Artificial Sequence
  chemically synthesized
ctctccttttccctctctgagc

SEQ ID NO: 26669 - DNA, 22 bp, Artificial Sequence
  chemically synthesized
tccttttccctctctgagcccc

SEQ ID NO: 26670 - DNA, 22 bp, Artificial Sequence
  chemically synthesized
cttttccctctctgagccccgc

SEQ ID NO: 26671 - DNA, 22 bp, Artificial Sequence
  chemically synthesized
ttccctctctgagccccgctca

SEQ ID NO: 26672 - DNA, 22 bp, Artificial Sequence
  chemically synthesized
tccctctctgagccccgctcag

SEQ ID NO: 26673 - DNA, 22 bp, Artificial Sequence
  chemically synthesized
ccctctctgagccccgctcaga

SEQ ID NO: 26674 - DNA, 22 bp, Artificial Sequence
  chemically synthesized
cctctctgagccccgctcagat

SEQ ID NO: 26675 - DNA, 22 bp, Artificial Sequence
  chemically synthesized
tctgagccccgctcagatcttc

SEQ ID NO: 26676 - DNA, 22 bp, Artificial Sequence
  chemically synthesized
tgagccccgctcagatcttcga

SEQ ID NO: 26677 - DNA, 22 bp, Artificial Sequence
  chemically synthesized
agccccgctcagatcttcgaac

SEQ ID NO: 26678 - DNA, 22 bp, Artificial Sequence
  chemically synthesized
agatcttcgaacagagaacact

SEQ ID NO: 26679 - DNA, 22 bp, Artificial Sequence
  chemically synthesized
cgaacagagaacacttctgcat

SEQ ID NO: 26680 - DNA, 22 bp, Artificial Sequence
  chemically synthesized
gaacagagaacacttctgcatc

SEQ ID NO: 26681 - DNA, 22 bp, Artificial Sequence
  chemically synthesized
ctgcatcttggcatatatagtt

SEQ ID NO: 26682 - DNA, 22 bp, Artificial Sequence
  chemically synthesized
tgcatcttggcatatatagttc

SEQ ID NO: 26683 - DNA, 22 bp, Artificial Sequence
  chemically synthesized
catcttggcatatatagttctc

SEQ ID NO: 26684 - DNA, 22 bp, Artificial Sequence
  chemically synthesized
ggcatatatagttctctcacat

SEQ ID NO: 26685 - DNA, 22 bp, Artificial Sequence
  chemically synthesized
gcatatatagttctctcacata

SEQ ID NO: 26686 - DNA, 22 bp, Artificial Sequence
  chemically synthesized
tctcacatagaacgctttctcc

SEQ ID NO: 26687 - DNA, 22 bp, Artificial Sequence
  chemically synthesized
tcacatagaacgctttctcccc

SEQ ID NO: 26688 - DNA, 22 bp, Artificial Sequence
  chemically synthesized
acatagaacgctttctcccctt

SEQ ID NO: 26689 - DNA, 22 bp, Artificial Sequence
  chemically synthesized
tctcccctttagctatttatcc

SEQ ID NO: 26690 - DNA, 22 bp, Artificial Sequence
  chemically synthesized
ctcccctttagctatttatcct

SEQ ID NO: 26691 - DNA, 22 bp, Artificial Sequence
  chemically synthesized
tcccctttagctatttatcctt

SEQ ID NO: 26692 - DNA, 22 bp, Artificial Sequence
  chemically synthesized
ccctttagctatttatccttca

SEQ ID NO: 26693 - DNA, 22 bp, Artificial Sequence
  chemically synthesized
tagctatttatccttcaagtgt

SEQ ID NO: 26694 - DNA, 22 bp, Artificial Sequence
  chemically synthesized
agctatttatccttcaagtgtc

SEQ ID NO: 26695 - DNA, 22 bp, Artificial Sequence
  chemically synthesized
gctatttatccttcaagtgtca

SEQ ID NO: 26696 - DNA, 22 bp, Artificial Sequence
  chemically synthesized
tttatccttcaagtgtcagctc

SEQ ID NO: 26697 - DNA, 22 bp, Artificial Sequence
  chemically synthesized
atccttcaagtgtcagctcaaa

SEQ ID NO: 26698 - DNA, 22 bp, Artificial Sequence
  chemically synthesized
tccttcaagtgtcagctcaaac

SEQ ID NO: 26699 - DNA, 22 bp, Artificial Sequence
  chemically synthesized
caagtgtcagctcaaacatctc

SEQ ID NO: 26700 - DNA, 22 bp, Artificial Sequence
  chemically synthesized
aagtgtcagctcaaacatctca

SEQ ID NO: 26701 - DNA, 22 bp, Artificial Sequence
  chemically synthesized
aaacatctcatcattagagagg

SEQ ID NO: 26702 - DNA, 22 bp, Artificial Sequence
  chemically synthesized
atcattagagaggtttttccca

SEQ ID NO: 26703 - DNA, 22 bp, Artificial Sequence
  chemically synthesized
gagaggtttttcccaaacctct

SEQ ID NO: 26704 - DNA, 22 bp, Artificial Sequence
  chemically synthesized
ttcccaaacctctaggtaacta

SEQ ID NO: 26705 - DNA, 22 bp, Artificial Sequence
  chemically synthesized
tcccaaacctctaggtaactag

SEQ ID NO: 26706 - DNA, 22 bp, Artificial Sequence
  chemically synthesized
cccaaacctctaggtaactagg

SEQ ID NO: 26707 - DNA, 22 bp, Artificial Sequence
  chemically synthesized
ccaaacctctaggtaactaggt

SEQ ID NO: 26708 - DNA, 22 bp, Artificial Sequence
  chemically synthesized
taggtaactaggttagaaacca

SEQ ID NO: 26709 - DNA, 22 bp, Artificial Sequence
  chemically synthesized
ggtaactaggttagaaaccact

SEQ ID NO: 26710 - DNA, 22 bp, Artificial Sequence
  chemically synthesized
ggttagaaaccactccccattc

SEQ ID NO: 26711 - DNA, 22 bp, Artificial Sequence
  chemically synthesized
gaaaccactccccattccacgg

SEQ ID NO: 26712 - DNA, 22 bp, Artificial Sequence
  chemically synthesized
cccattccacggtacactgtat

SEQ ID NO: 26713 - DNA, 22 bp, Artificial Sequence
  chemically synthesized
cacggtacactgtatagtctta

SEQ ID NO: 26714 - DNA, 22 bp, Artificial Sequence
  chemically synthesized
tatagtcttaggacacctggtt

SEQ ID NO: 26715 - DNA, 22 bp, Artificial Sequence
  chemically synthesized
aggacacctggttcccttagtc

SEQ ID NO: 26716 - DNA, 22 bp, Artificial Sequence
  chemically synthesized
ggacacctggttcccttagtct

SEQ ID NO: 26717 - DNA, 22 bp, Artificial Sequence
  chemically synthesized
gttcccttagtctcacactcat

SEQ ID NO: 26718 - DNA, 22 bp, Artificial Sequence
  chemically synthesized
ccttagtctcacactcatcaca

SEQ ID NO: 26719 - DNA, 22 bp, Artificial Sequence
  chemically synthesized
agtctcacactcatcacatttg

SEQ ID NO: 26720 - DNA, 22 bp, Artificial Sequence
  chemically synthesized
gtctcacactcatcacatttga

SEQ ID NO: 26721 - DNA, 22 bp, Artificial Sequence
  chemically synthesized
acactcatcacatttgactgta

SEQ ID NO: 26722 - DNA, 22 bp, Artificial Sequence
  chemically synthesized
atcacatttgactgtattgtat

SEQ ID NO: 26723 - DNA, 22 bp, Artificial Sequence
  chemically synthesized
gactgtattgtatgttcaatgt

SEQ ID NO: 26724 - DNA, 22 bp, Artificial Sequence
  chemically synthesized
actgtattgtatgttcaatgtc

SEQ ID NO: 26725 - DNA, 22 bp, Artificial Sequence
  chemically synthesized
tattgtatgttcaatgtctacc

SEQ ID NO: 26726 - DNA, 22 bp, Artificial Sequence
  chemically synthesized
tatgttcaatgtctaccttcta

SEQ ID NO: 26727 - DNA, 22 bp, Artificial Sequence
  chemically synthesized
aatgtctaccttctacaaattt

SEQ ID NO: 26728 - DNA, 22 bp, Artificial Sequence
  chemically synthesized
ccttctacaaatttgtcaattc

SEQ ID NO: 26729 - DNA, 22 bp, Artificial Sequence
  chemically synthesized
ctacaaatttgtcaattcttga

SEQ ID NO: 26730 - DNA, 22 bp, Artificial Sequence
  chemically synthesized
tacaaatttgtcaattcttgaa

SEQ ID NO: 26731 - DNA, 22 bp, Artificial Sequence
  chemically synthesized
caaatttgtcaattcttgaaga

SEQ ID NO: 26732 - DNA, 22 bp, Artificial Sequence
  chemically synthesized
gtcaattcttgaagattaagaa

SEQ ID NO: 26733 - DNA, 22 bp, Artificial Sequence
  chemically synthesized
tcaattcttgaagattaagaat

SEQ ID NO: 26734 - DNA, 22 bp, Artificial Sequence
  chemically synthesized
ttgaagattaagaatcagttct

SEQ ID NO: 26735 - DNA, 22 bp, Artificial Sequence
  chemically synthesized
gaagattaagaatcagttctgt

SEQ ID NO: 26736 - DNA, 22 bp, Artificial Sequence
  chemically synthesized
aagattaagaatcagttctgta

SEQ ID NO: 26737 - DNA, 22 bp, Artificial Sequence
  chemically synthesized
agaatcagttctgtattcttaa

SEQ ID NO: 26738 - DNA, 22 bp, Artificial Sequence
  chemically synthesized
tgtattcttaactctatctccc

SEQ ID NO: 26739 - DNA, 22 bp, Artificial Sequence
  chemically synthesized
tattcttaactctatctccctc

SEQ ID NO: 26740 - DNA, 22 bp, Artificial Sequence
  chemically synthesized
ttaactctatctccctcgcctc

SEQ ID NO: 26741 - DNA, 22 bp, Artificial Sequence
  chemically synthesized
aactctatctccctcgcctctc

SEQ ID NO: 26742 - DNA, 22 bp, Artificial Sequence
  chemically synthesized
actctatctccctcgcctctca

SEQ ID NO: 26743 - DNA, 22 bp, Artificial Sequence
  chemically synthesized
tatctccctcgcctctcagtgc

SEQ ID NO: 26744 - DNA, 22 bp, Artificial Sequence
  chemically synthesized
tctccctcgcctctcagtgcct

SEQ ID NO: 26745 - DNA, 22 bp, Artificial Sequence
  chemically synthesized
cctcgcctctcagtgcctgata

SEQ ID NO: 26746 - DNA, 22 bp, Artificial Sequence
  chemically synthesized
gcctctcagtgcctgataccta

SEQ ID NO: 26747 - DNA, 22 bp, Artificial Sequence
  chemically synthesized
tcagtgcctgatacctaataga

SEQ ID NO: 26748 - DNA, 22 bp, Artificial Sequence
  chemically synthesized
agtgcctgatacctaatagaca

SEQ ID NO: 26749 - DNA, 22 bp, Artificial Sequence
  chemically synthesized
atacctaatagacacttgatga

SEQ ID NO: 26750 - DNA, 22 bp, Artificial Sequence
  chemically synthesized
atagacacttgatgaatcctta

SEQ ID NO: 26751 - DNA, 22 bp, Artificial Sequence
  chemically synthesized
gatgaatccttactgaataata

SEQ ID NO: 26752 - DNA, 22 bp, Artificial Sequence
  chemically synthesized
atgaatccttactgaataataa

SEQ ID NO: 26753 - DNA, 22 bp, Artificial Sequence
  chemically synthesized
actgaataataaaatggattaa

SEQ ID NO: 26754 - DNA, 22 bp, Artificial Sequence
  chemically synthesized
ctgaataataaaatggattaat

SEQ ID NO: 26755 - DNA, 22 bp, Artificial Sequence
  chemically synthesized
aataataaaatggattaatgaa

SEQ ID NO: 26756 - DNA, 22 bp, Artificial Sequence
  chemically synthesized
atgaataaaagcaataaatttc

SEQ ID NO: 26757 - DNA, 22 bp, Artificial Sequence
  chemically synthesized
caaggttaatattaataaatta

SEQ ID NO: 26758 - DNA, 22 bp, Artificial Sequence
  chemically synthesized
aaggttaatattaataaattaa

SEQ ID NO: 26759 - DNA, 22 bp, Artificial Sequence
  chemically synthesized
atattaataaattaaaaaggtt

SEQ ID NO: 26760 - DNA, 22 bp, Artificial Sequence
  chemically synthesized
ataaattaaaaaggttattttg

SEQ ID NO: 26761 - DNA, 22 bp, Artificial Sequence
  chemically synthesized
aaaaggttattttgaagtctga

SEQ ID NO: 26762 - DNA, 22 bp, Artificial Sequence
  chemically synthesized
ttttgaagtctgagaattagta

SEQ ID NO: 26763 - DNA, 22 bp, Artificial Sequence
  chemically synthesized
tgaagtctgagaattagtaccc

SEQ ID NO: 26764 - DNA, 22 bp, Artificial Sequence
  chemically synthesized
gaagtctgagaattagtaccca

SEQ ID NO: 26765 - DNA, 22 bp, Artificial Sequence
  chemically synthesized
aagtctgagaattagtacccaa

SEQ ID NO: 26766 - DNA, 22 bp, Artificial Sequence
  chemically synthesized
agaattagtacccaaaactaac

SEQ ID NO: 26767 - DNA, 22 bp, Artificial Sequence
  chemically synthesized
gtacccaaaactaactgtgact

SEQ ID NO: 26768 - DNA, 22 bp, Artificial Sequence
  chemically synthesized
actgtgactctctcatctgtta

SEQ ID NO: 26769 - DNA, 22 bp, Artificial Sequence
  chemically synthesized
tgactctctcatctgttatgtt

SEQ ID NO: 26770 - DNA, 22 bp, Artificial Sequence
  chemically synthesized
tctcatctgttatgtttttcac

SEQ ID NO: 26771 - DNA, 22 bp, Artificial Sequence
  chemically synthesized
tcatctgttatgtttttcacgt

SEQ ID NO: 26772 - DNA, 22 bp, Artificial Sequence
  chemically synthesized
atctgttatgtttttcacgttt

SEQ ID NO: 26773 - DNA, 22 bp, Artificial Sequence
  chemically synthesized
ttatgtttttcacgtttccatt

SEQ ID NO: 26774 - DNA, 22 bp, Artificial Sequence
  chemically synthesized
tgtttttcacgtttccattgtt

SEQ ID NO: 26775 - DNA, 22 bp, Artificial Sequence
  chemically synthesized
ttcacgtttccattgttcatgg

SEQ ID NO: 26776 - DNA, 22 bp, Artificial Sequence
  chemically synthesized
tcacgtttccattgttcatggg

SEQ ID NO: 26777 - DNA, 22 bp, Artificial Sequence
  chemically synthesized
cacgtttccattgttcatgggc

SEQ ID NO: 26778 - DNA, 22 bp, Artificial Sequence
  chemically synthesized
acgtttccattgttcatgggca

SEQ ID NO: 26779 - DNA, 22 bp, Artificial Sequence
  chemically synthesized
ccattgttcatgggcaaaattc

SEQ ID NO: 26780 - DNA, 22 bp, Artificial Sequence
  chemically synthesized
cattgttcatgggcaaaattct

SEQ ID NO: 26781 - DNA, 22 bp, Artificial Sequence
  chemically synthesized
ttcatgggcaaaattctggcag

SEQ ID NO: 26782 - DNA, 22 bp, Artificial Sequence
  chemically synthesized
atgggcaaaattctggcagcaa

SEQ ID NO: 26783 - DNA, 22 bp, Artificial Sequence
  chemically synthesized
tggcagcaagggattcttctcc

SEQ ID NO: 26784 - DNA, 22 bp, Artificial Sequence
  chemically synthesized
gcagcaagggattcttctccta

SEQ ID NO: 26785 - DNA, 22 bp, Artificial Sequence
  chemically synthesized
ttctcctaagaaaccttttgtt

SEQ ID NO: 26786 - DNA, 22 bp, Artificial Sequence
  chemically synthesized
ctcctaagaaaccttttgtttt

SEQ ID NO: 26787 - DNA, 22 bp, Artificial Sequence
  chemically synthesized
tcctaagaaaccttttgttttc

SEQ ID NO: 26788 - DNA, 22 bp, Artificial Sequence
  chemically synthesized
ctaagaaaccttttgttttctt

SEQ ID NO: 26789 - DNA, 22 bp, Artificial Sequence
  chemically synthesized
agaaaccttttgttttcttgga

SEQ ID NO: 26790 - DNA, 22 bp, Artificial Sequence
  chemically synthesized
ttgttttcttggatgtgaatac

SEQ ID NO: 26791 - DNA, 22 bp, Artificial Sequence
  chemically synthesized
tgttttcttggatgtgaataca

SEQ ID NO: 26792 - DNA, 22 bp, Artificial Sequence
  chemically synthesized
gttttcttggatgtgaatacat

SEQ ID NO: 26793 - DNA, 22 bp, Artificial Sequence
  chemically synthesized
ttttcttggatgtgaatacatt

SEQ ID NO: 26794 - DNA, 22 bp, Artificial Sequence
  chemically synthesized
tcttggatgtgaatacatttcc

SEQ ID NO: 26795 - DNA, 22 bp, Artificial Sequence
  chemically synthesized
cttggatgtgaatacatttcct

SEQ ID NO: 26796 - DNA, 22 bp, Artificial Sequence
  chemically synthesized
ttggatgtgaatacatttcctt

SEQ ID NO: 26797 - DNA, 22 bp, Artificial Sequence
  chemically synthesized
ggatgtgaatacatttccttgt

SEQ ID NO: 26798 - DNA, 22 bp, Artificial Sequence
  chemically synthesized
gatgtgaatacatttccttgtt

SEQ ID NO: 26799 - DNA, 22 bp, Artificial Sequence
  chemically synthesized
ccttgtttgccagaaaacatgg

SEQ ID NO: 26800 - DNA, 22 bp, Artificial Sequence
  chemically synthesized
cttgtttgccagaaaacatggt

SEQ ID NO: 26801 - DNA, 22 bp, Artificial Sequence
  chemically synthesized
gtttgccagaaaacatggtaag

SEQ ID NO: 26802 - DNA, 22 bp, Artificial Sequence
  chemically synthesized
tttgccagaaaacatggtaaga

SEQ ID NO: 26803 - DNA, 22 bp, Artificial Sequence
  chemically synthesized
gccagaaaacatggtaagataa

SEQ ID NO: 26804 - DNA, 22 bp, Artificial Sequence
  chemically synthesized
ccagaaaacatggtaagataac

SEQ ID NO: 26805 - DNA, 22 bp, Artificial Sequence
  chemically synthesized
gagagtataacattcattttat

SEQ ID NO: 26806 - DNA, 22 bp, Artificial Sequence
  chemically synthesized
attttattcatgaagaaactgt

SEQ ID NO: 26807 - DNA, 22 bp, Artificial Sequence
  chemically synthesized
tattcatgaagaaactgttatt

SEQ ID NO: 26808 - DNA, 22 bp, Artificial Sequence
  chemically synthesized
attcatgaagaaactgttattc

SEQ ID NO: 26809 - DNA, 22 bp, Artificial Sequence
  chemically synthesized
ttcatgaagaaactgttattca

SEQ ID NO: 26810 - DNA, 22 bp, Artificial Sequence
  chemically synthesized
atgaagaaactgttattcagtt

SEQ ID NO: 26811 - DNA, 22 bp, Artificial Sequence
  chemically synthesized
ttattcagtttaaggggttctt

SEQ ID NO: 26812 - DNA, 22 bp, Artificial Sequence
  chemically synthesized
ttcagtttaaggggttcttttt

SEQ ID NO: 26813 - DNA, 22 bp, Artificial Sequence
  chemically synthesized
agtttaaggggttctttttcag

SEQ ID NO: 26814 - DNA, 22 bp, Artificial Sequence
  chemically synthesized
aaggggttctttttcagaaagt

SEQ ID NO: 26815 - DNA, 22 bp, Artificial Sequence
  chemically synthesized
aggggttctttttcagaaagtt

SEQ ID NO: 26816 - DNA, 22 bp, Artificial Sequence
  chemically synthesized
tttttcagaaagtttcagaaat

SEQ ID NO: 26817 - DNA, 22 bp, Artificial Sequence
  chemically synthesized
tttcagaaagtttcagaaatcc

SEQ ID NO: 26818 - DNA, 22 bp, Artificial Sequence
  chemically synthesized
ttcagaaagtttcagaaatcca

SEQ ID NO: 26819 - DNA, 22 bp, Artificial Sequence
  chemically synthesized
tcagaaagtttcagaaatccaa

SEQ ID NO: 26820 - DNA, 22 bp, Artificial Sequence
  chemically synthesized
cagaaagtttcagaaatccaag

SEQ ID NO: 26821 - DNA, 22 bp, Artificial Sequence
  chemically synthesized
agaaagtttcagaaatccaaga

SEQ ID NO: 26822 - DNA, 22 bp, Artificial Sequence
  chemically synthesized
cagaaatccaagacctttgact

SEQ ID NO: 26823 - DNA, 22 bp, Artificial Sequence
  chemically synthesized
agaaatccaagacctttgactg

SEQ ID NO: 26824 - DNA, 22 bp, Artificial Sequence
  chemically synthesized
tgactgcaagtactgtgttctt

SEQ ID NO: 26825 - DNA, 22 bp, Artificial Sequence
  chemically synthesized
gactgcaagtactgtgttcttt

SEQ ID NO: 26826 - DNA, 22 bp, Artificial Sequence
  chemically synthesized
actgcaagtactgtgttctttc

SEQ ID NO: 26827 - DNA, 22 bp, Artificial Sequence
  chemically synthesized
caagtactgtgttctttcatct

SEQ ID NO: 26828 - DNA, 22 bp, Artificial Sequence
  chemically synthesized
tgttctttcatctataggacat

SEQ ID NO: 26829 - DNA, 22 bp, Artificial Sequence
  chemically synthesized
tttcatctataggacatttcct

SEQ ID NO: 26830 - DNA, 22 bp, Artificial Sequence
  chemically synthesized
tcatctataggacatttccttt

SEQ ID NO: 26831 - DNA, 22 bp, Artificial Sequence
  chemically synthesized
catctataggacatttcctttg

SEQ ID NO: 26832 - DNA, 22 bp, Artificial Sequence
  chemically synthesized
atctataggacatttcctttga

SEQ ID NO: 26833 - DNA, 22 bp, Artificial Sequence
  chemically synthesized
taggacatttcctttgaaaact

SEQ ID NO: 26834 - DNA, 22 bp, Artificial Sequence
  chemically synthesized
cctttgaaaactgaggttttaa

SEQ ID NO: 26835 - DNA, 22 bp, Artificial Sequence
  chemically synthesized
ctttgaaaactgaggttttaat

SEQ ID NO: 26836 - DNA, 22 bp, Artificial Sequence
  chemically synthesized
tgaaaactgaggttttaatatt

SEQ ID NO: 26837 - DNA, 22 bp, Artificial Sequence
  chemically synthesized
gaaaactgaggttttaatattt

SEQ ID NO: 26838 - DNA, 22 bp, Artificial Sequence
  chemically synthesized
aaaactgaggttttaatattta

SEQ ID NO: 26839 - DNA, 22 bp, Artificial Sequence
  chemically synthesized
aggttttaatatttaattctta

SEQ ID NO: 26840 - DNA, 22 bp, Artificial Sequence
  chemically synthesized
taatatttaattcttacataat

SEQ ID NO: 26841 - DNA, 22 bp, Artificial Sequence
  chemically synthesized
aatatttaattcttacataata

SEQ ID NO: 26842 - DNA, 22 bp, Artificial Sequence
  chemically synthesized
atatttaattcttacataatag

SEQ ID NO: 26843 - DNA, 22 bp, Artificial Sequence
  chemically synthesized
aattcttacataatagtaaaaa

SEQ ID NO: 26844 - DNA, 22 bp, Artificial Sequence
  chemically synthesized
attcttacataatagtaaaaaa

SEQ ID NO: 26845 - DNA, 22 bp, Artificial Sequence
  chemically synthesized
ttacataatagtaaaaaagtga

SEQ ID NO: 26846 - DNA, 22 bp, Artificial Sequence
  chemically synthesized
acataatagtaaaaaagtgaat

SEQ ID NO: 26847 - DNA, 22 bp, Artificial Sequence
  chemically synthesized
cataatagtaaaaaagtgaatt

SEQ ID NO: 26848 - DNA, 22 bp, Artificial Sequence
  chemically synthesized
gccttggaaaagacctaaatcc

SEQ ID NO: 26849 - DNA, 22 bp, Artificial Sequence
  chemically synthesized
ggaaaagacctaaatcctggtc

SEQ ID NO: 26850 - DNA, 22 bp, Artificial Sequence
  chemically synthesized
gaaaagacctaaatcctggtcc

SEQ ID NO: 26851 - DNA, 22 bp, Artificial Sequence
  chemically synthesized
aatcctggtcctaactctgcca

SEQ ID NO: 26852 - DNA, 22 bp, Artificial Sequence
  chemically synthesized
gtcctaactctgccatttgctt

SEQ ID NO: 26853 - DNA, 22 bp, Artificial Sequence
  chemically synthesized
actctgccatttgcttgatcat

SEQ ID NO: 26854 - DNA, 22 bp, Artificial Sequence
  chemically synthesized
tgccatttgcttgatcattaaa

SEQ ID NO: 26855 - DNA, 22 bp, Artificial Sequence
  chemically synthesized
ccatttgcttgatcattaaata

SEQ ID NO: 26856 - DNA, 22 bp, Artificial Sequence
  chemically synthesized
gcttgatcattaaatacctcta

SEQ ID NO: 26857 - DNA, 22 bp, Artificial Sequence
  chemically synthesized
cttgatcattaaatacctctac

SEQ ID NO: 26858 - DNA, 22 bp, Artificial Sequence
  chemically synthesized
gatcattaaatacctctacgaa

SEQ ID NO: 26859 - DNA, 22 bp, Artificial Sequence
  chemically synthesized
atcattaaatacctctacgaat

SEQ ID NO: 26860 - DNA, 22 bp, Artificial Sequence
  chemically synthesized
aatacctctacgaatcaatttg

SEQ ID NO: 26861 - DNA, 22 bp, Artificial Sequence
  chemically synthesized
tacgaatcaatttgctctatga

SEQ ID NO: 26862 - DNA, 22 bp, Artificial Sequence
  chemically synthesized
cgaatcaatttgctctatgaac

SEQ ID NO: 26863 - DNA, 22 bp, Artificial Sequence
  chemically synthesized
gctctatgaactggaggagtgg

SEQ ID NO: 26864 - DNA, 22 bp, Artificial Sequence
  chemically synthesized
ctctatgaactggaggagtggg

SEQ ID NO: 26865 - DNA, 22 bp, Artificial Sequence
  chemically synthesized
tatgaactggaggagtgggatt

SEQ ID NO: 26866 - DNA, 22 bp, Artificial Sequence
  chemically synthesized
tgaactggaggagtgggattca

SEQ ID NO: 26867 - DNA, 22 bp, Artificial Sequence
  chemically synthesized
gaggagtgggattcatgatctc

SEQ ID NO: 26868 - DNA, 22 bp, Artificial Sequence
  chemically synthesized
atgatctctaagatacctcata

SEQ ID NO: 26869 - DNA, 22 bp, Artificial Sequence
  chemically synthesized
taagatacctcatatcactact

SEQ ID NO: 26870 - DNA, 22 bp, Artificial Sequence
  chemically synthesized
agatacctcatatcactactat

SEQ ID NO: 26871 - DNA, 22 bp, Artificial Sequence
  chemically synthesized
atatcactactatgaaatgcag

SEQ ID NO: 26872 - DNA, 22 bp, Artificial Sequence
  chemically synthesized
ctatgaaatgcagggaagtaaa

SEQ ID NO: 26873 - DNA, 22 bp, Artificial Sequence
  chemically synthesized
tgaaatgcagggaagtaaaaat

SEQ ID NO: 26874 - DNA, 22 bp, Artificial Sequence
  chemically synthesized
aaatcattaaatttaaagaaac

SEQ ID NO: 26875 - DNA, 22 bp, Artificial Sequence
  chemically synthesized
aatttaaagaaactatagtggc

SEQ ID NO: 26876 - DNA, 22 bp, Artificial Sequence
  chemically synthesized
aaagaaactatagtggcaatgt

SEQ ID NO: 26877 - DNA, 22 bp, Artificial Sequence
  chemically synthesized
aagaaactatagtggcaatgta

SEQ ID NO: 26878 - DNA, 22 bp, Artificial Sequence
  chemically synthesized
tagtggcaatgtattattagga

SEQ ID NO: 26879 - DNA, 22 bp, Artificial Sequence
  chemically synthesized
ttaggaataaacacaataatta

SEQ ID NO: 26880 - DNA, 22 bp, Artificial Sequence
  chemically synthesized
ggaataaacacaataattatcc

SEQ ID NO: 26881 - DNA, 22 bp, Artificial Sequence
  chemically synthesized
tccatctatatgaaaatctcaa

SEQ ID NO: 26882 - DNA, 22 bp, Artificial Sequence
  chemically synthesized
tatgaaaatctcaaaccatacc

SEQ ID NO: 26883 - DNA, 22 bp, Artificial Sequence
  chemically synthesized
aaaccataccaggctatgataa

SEQ ID NO: 26884 - DNA, 22 bp, Artificial Sequence
  chemically synthesized
tgataatattaaaataaagata

SEQ ID NO: 26885 - DNA, 22 bp, Artificial Sequence
  chemically synthesized
aaataaagatacattgaagatg

SEQ ID NO: 26886 - DNA, 22 bp, Artificial Sequence
  chemically synthesized
aagatgatatcaacttgtgtaa

SEQ ID NO: 26887 - DNA, 22 bp, Artificial Sequence
  chemically synthesized
gtgtaaatcacattgtggggac

SEQ ID NO: 26888 - DNA, 22 bp, Artificial Sequence
  chemically synthesized
tgtaaatcacattgtggggacc

SEQ ID NO: 26889 - DNA, 22 bp, Artificial Sequence
  chemically synthesized
tggggacctctccacaaaaaca

SEQ ID NO: 26890 - DNA, 22 bp, Artificial Sequence
  chemically synthesized
tccacaaaaacacttcccttcc

SEQ ID NO: 26891 - DNA, 22 bp, Artificial Sequence
  chemically synthesized
cacaaaaacacttcccttcccc

SEQ ID NO: 26892 - DNA, 22 bp, Artificial Sequence
  chemically synthesized
cccttccccttgaaagggaaat

SEQ ID NO: 26893 - DNA, 22 bp, Artificial Sequence
  chemically synthesized
ccttccccttgaaagggaaatg

SEQ ID NO: 26894 - DNA, 22 bp, Artificial Sequence
  chemically synthesized
ccccttgaaagggaaatgatag

SEQ ID NO: 26895 - DNA, 22 bp, Artificial Sequence
  chemically synthesized
cccttgaaagggaaatgataga

SEQ ID NO: 26896 - DNA, 22 bp, Artificial Sequence
  chemically synthesized
gaaagggaaatgatagaaaata

SEQ ID NO: 26897 - DNA, 22 bp, Artificial Sequence
  chemically synthesized
aaagggaaatgatagaaaataa

SEQ ID NO: 26898 - DNA, 22 bp, Artificial Sequence
  chemically synthesized
aaggcagcttaggggttgaaaa

SEQ ID NO: 26899 - DNA, 22 bp, Artificial Sequence
  chemically synthesized
aggggttgaaaaacaaattttt

SEQ ID NO: 26900 - DNA, 22 bp, Artificial Sequence
  chemically synthesized
ggggttgaaaaacaaatttttt

SEQ ID NO: 26901 - DNA, 22 bp, Artificial Sequence
  chemically synthesized
aaaaacaaattttttcaaaaaa

SEQ ID NO: 26902 - DNA, 22 bp, Artificial Sequence
  chemically synthesized
tttcaaaaaaaaatccattgag

SEQ ID NO: 26903 - DNA, 22 bp, Artificial Sequence
  chemically synthesized
ttcaaaaaaaaatccattgagc

SEQ ID NO: 26904 - DNA, 22 bp, Artificial Sequence
  chemically synthesized
tcaaaaaaaaatccattgagca

SEQ ID NO: 26905 - DNA, 22 bp, Artificial Sequence
  chemically synthesized
caaaaaaaaatccattgagcat

SEQ ID NO: 26906 - DNA, 22 bp, Artificial Sequence
  chemically synthesized
aaaaaaaaatccattgagcatt

SEQ ID NO: 26907 - DNA, 22 bp, Artificial Sequence
  chemically synthesized
agcattttctatgtaccaggca

SEQ ID NO: 26908 - DNA, 22 bp, Artificial Sequence
  chemically synthesized
tctatgtaccaggcactgttct

SEQ ID NO: 26909 - DNA, 22 bp, Artificial Sequence
  chemically synthesized
ctatgtaccaggcactgttcta

SEQ ID NO: 26910 - DNA, 22 bp, Artificial Sequence
  chemically synthesized
tatgtaccaggcactgttctag

SEQ ID NO: 26911 - DNA, 22 bp, Artificial Sequence
  chemically synthesized
tgtaccaggcactgttctagac

SEQ ID NO: 26912 - DNA, 22 bp, Artificial Sequence
  chemically synthesized
ttctagaccctgagatcaacac

SEQ ID NO: 26913 - DNA, 22 bp, Artificial Sequence
  chemically synthesized
tagaccctgagatcaacacaca

SEQ ID NO: 26914 - DNA, 22 bp, Artificial Sequence
  chemically synthesized
gaccctgagatcaacacacatg

SEQ ID NO: 26915 - DNA, 22 bp, Artificial Sequence
  chemically synthesized
agatcaacacacatgctactga

SEQ ID NO: 26916 - DNA, 22 bp, Artificial Sequence
  chemically synthesized
ctgattataagatccataaaat

SEQ ID NO: 26917 - DNA, 22 bp, Artificial Sequence
  chemically synthesized
attataagatccataaaataac

SEQ ID NO: 26918 - DNA, 22 bp, Artificial Sequence
  chemically synthesized
taagatccataaaataacttag

SEQ ID NO: 26919 - DNA, 22 bp, Artificial Sequence
  chemically synthesized
agtttcactggcgtgttcccag

SEQ ID NO: 26920 - DNA, 22 bp, Artificial Sequence
  chemically synthesized
gtttcactggcgtgttcccagt

SEQ ID NO: 26921 - DNA, 22 bp, Artificial Sequence
  chemically synthesized
cactggcgtgttcccagtgccc

SEQ ID NO: 26922 - DNA, 22 bp, Artificial Sequence
  chemically synthesized
actggcgtgttcccagtgccca

SEQ ID NO: 26923 - DNA, 22 bp, Artificial Sequence
  chemically synthesized
gcgtgttcccagtgcccaggta

SEQ ID NO: 26924 - DNA, 22 bp, Artificial Sequence
  chemically synthesized
ccagtgcccaggtaacagtgct

SEQ ID NO: 26925 - DNA, 22 bp, Artificial Sequence
  chemically synthesized
cattaatgtttgttaaatgatg

SEQ ID NO: 26926 - DNA, 22 bp, Artificial Sequence
  chemically synthesized
atgtttgttaaatgatgagaaa

SEQ ID NO: 26927 - DNA, 22 bp, Artificial Sequence
  chemically synthesized
gttaaatgatgagaaaagagga

SEQ ID NO: 26928 - DNA, 22 bp, Artificial Sequence
  chemically synthesized
ttaaatgatgagaaaagaggaa

SEQ ID NO: 26929 - DNA, 22 bp, Artificial Sequence
  chemically synthesized
aatgatgagaaaagaggaaagc

SEQ ID NO: 26930 - DNA, 22 bp, Artificial Sequence
  chemically synthesized
tgctcaggtgcaggaacttgtg

SEQ ID NO: 26931 - DNA, 22 bp, Artificial Sequence
  chemically synthesized
ctcaggtgcaggaacttgtgca

SEQ ID NO: 26932 - DNA, 22 bp, Artificial Sequence
  chemically synthesized
aggtgcaggaacttgtgcagag

SEQ ID NO: 26933 - DNA, 22 bp, Artificial Sequence
  chemically synthesized
gtgcagagatcttctggactga

SEQ ID NO: 26934 - DNA, 22 bp, Artificial Sequence
  chemically synthesized
tgcagagatcttctggactgat

SEQ ID NO: 26935 - DNA, 22 bp, Artificial Sequence
  chemically synthesized
ctggactgattcccagtgctaa

SEQ ID NO: 26936 - DNA, 22 bp, Artificial Sequence
  chemically synthesized
tggactgattcccagtgctaac

SEQ ID NO: 26937 - DNA, 22 bp, Artificial Sequence
  chemically synthesized
gactgattcccagtgctaacaa

SEQ ID NO: 26938 - DNA, 22 bp, Artificial Sequence
  chemically synthesized
attcccagtgctaacaagtccc

SEQ ID NO: 26939 - DNA, 22 bp, Artificial Sequence
  chemically synthesized
ccagtgctaacaagtcccttcc

SEQ ID NO: 26940 - DNA, 22 bp, Artificial Sequence
  chemically synthesized
acaagtcccttccagttttatc

SEQ ID NO: 26941 - DNA, 22 bp, Artificial Sequence
  chemically synthesized
ccagttttatccaccaataagc

SEQ ID NO: 26942 - DNA, 22 bp, Artificial Sequence
  chemically synthesized
cagttttatccaccaataagct

SEQ ID NO: 26943 - DNA, 22 bp, Artificial Sequence
  chemically synthesized
tatccaccaataagctatgtcc

SEQ ID NO: 26944 - DNA, 22 bp, Artificial Sequence
  chemically synthesized
atccaccaataagctatgtcct

SEQ ID NO: 26945 - DNA, 22 bp, Artificial Sequence
  chemically synthesized
tccaccaataagctatgtcctt

SEQ ID NO: 26946 - DNA, 22 bp, Artificial Sequence
  chemically synthesized
tgtccttgagctcctgcccact

SEQ ID NO: 26947 - DNA, 22 bp, Artificial Sequence
  chemically synthesized
gagctcctgcccactctctaga

SEQ ID NO: 26948 - DNA, 22 bp, Artificial Sequence
  chemically synthesized
agctcctgcccactctctagag

SEQ ID NO: 26949 - DNA, 22 bp, Artificial Sequence
  chemically synthesized
ctgcccactctctagagaaaac

SEQ ID NO: 26950 - DNA, 22 bp, Artificial Sequence
  chemically synthesized
cccactctctagagaaaacttt

SEQ ID NO: 26951 - DNA, 22 bp, Artificial Sequence
  chemically synthesized
tctagagaaaacttttatttca

SEQ ID NO: 26952 - DNA, 22 bp, Artificial Sequence
  chemically synthesized
tagagaaaacttttatttcaag

SEQ ID NO: 26953 - DNA, 22 bp, Artificial Sequence
  chemically synthesized
gagaaaacttttatttcaaggc

SEQ ID NO: 26954 - DNA, 22 bp, Artificial Sequence
  chemically synthesized
ttatttcaaggcatactccggg

SEQ ID NO: 26955 - DNA, 22 bp, Artificial Sequence
  chemically synthesized
tatttcaaggcatactccggga

SEQ ID NO: 26956 - DNA, 22 bp, Artificial Sequence
  chemically synthesized
atttcaaggcatactccgggat

SEQ ID NO: 26957 - DNA, 22 bp, Artificial Sequence
  chemically synthesized
tttcaaggcatactccgggatt

SEQ ID NO: 26958 - DNA, 22 bp, Artificial Sequence
  chemically synthesized
caaggcatactccgggattcac

SEQ ID NO: 26959 - DNA, 22 bp, Artificial Sequence
  chemically synthesized
aaggcatactccgggattcaca

SEQ ID NO: 26960 - DNA, 22 bp, Artificial Sequence
  chemically synthesized
cgggattcacatgtgatagaga

SEQ ID NO: 26961 - DNA, 22 bp, Artificial Sequence
  chemically synthesized
acatgtgatagagatggttctg

SEQ ID NO: 26962 - DNA, 22 bp, Artificial Sequence
  chemically synthesized
tgttcccaggaactttgggcat

SEQ ID NO: 26963 - DNA, 22 bp, Artificial Sequence
  chemically synthesized
ttcccaggaactttgggcatat

SEQ ID NO: 26964 - DNA, 22 bp, Artificial Sequence
  chemically synthesized
ccaggaactttgggcatattta

SEQ ID NO: 26965 - DNA, 22 bp, Artificial Sequence
  chemically synthesized
tgggcatatttaaaaactggac

SEQ ID NO: 26966 - DNA, 22 bp, Artificial Sequence
  chemically synthesized
gggcatatttaaaaactggact

SEQ ID NO: 26967 - DNA, 22 bp, Artificial Sequence
  chemically synthesized
ggcatatttaaaaactggactg

SEQ ID NO: 26968 - DNA, 22 bp, Artificial Sequence
  chemically synthesized
aaaaactggactggaaaaattt

SEQ ID NO: 26969 - DNA, 22 bp, Artificial Sequence
  chemically synthesized
aaaactggactggaaaaatttg

SEQ ID NO: 26970 - DNA, 22 bp, Artificial Sequence
  chemically synthesized
gactggaaaaatttgtgactag

SEQ ID NO: 26971 - DNA, 22 bp, Artificial Sequence
  chemically synthesized
gaaaaatttgtgactagaaaaa

SEQ ID NO: 26972 - DNA, 22 bp, Artificial Sequence
  chemically synthesized
gtgactagaaaaaggacattaa

SEQ ID NO: 26973 - DNA, 22 bp, Artificial Sequence
  chemically synthesized
tgactagaaaaaggacattaaa

SEQ ID NO: 26974 - DNA, 22 bp, Artificial Sequence
  chemically synthesized
gaaaaaggacattaaaaacaca

SEQ ID NO: 26975 - DNA, 22 bp, Artificial Sequence
  chemically synthesized
aaaacacatgctcatttcagga

SEQ ID NO: 26976 - DNA, 22 bp, Artificial Sequence
  chemically synthesized
atttcaggataaagatctctga

SEQ ID NO: 26977 - DNA, 22 bp, Artificial Sequence
  chemically synthesized
caggataaagatctctgaggaa

SEQ ID NO: 26978 - DNA, 22 bp, Artificial Sequence
  chemically synthesized
aggataaagatctctgaggaaa

SEQ ID NO: 26979 - DNA, 22 bp, Artificial Sequence
  chemically synthesized
tgaggaaaagaatacaaaataa

SEQ ID NO: 26980 - DNA, 22 bp, Artificial Sequence
  chemically synthesized
aggaaaagaatacaaaataatt

SEQ ID NO: 26981 - DNA, 22 bp, Artificial Sequence
  chemically synthesized
aaaaagaaacaacagaaacagg

SEQ ID NO: 26982 - DNA, 22 bp, Artificial Sequence
  chemically synthesized
aaaagaaacaacagaaacaggt

SEQ ID NO: 26983 - DNA, 22 bp, Artificial Sequence
  chemically synthesized
cacttctctgtaataaggtttc

SEQ ID NO: 26984 - DNA, 22 bp, Artificial Sequence
  chemically synthesized
acttctctgtaataaggtttct

SEQ ID NO: 26985 - DNA, 22 bp, Artificial Sequence
  chemically synthesized
ctctgtaataaggtttctgtcc

SEQ ID NO: 26986 - DNA, 22 bp, Artificial Sequence
  chemically synthesized
tctgtaataaggtttctgtcct

SEQ ID NO: 26987 - DNA, 22 bp, Artificial Sequence
  chemically synthesized
tgtaataaggtttctgtcctcc

SEQ ID NO: 26988 - DNA, 22 bp, Artificial Sequence
  chemically synthesized
taataaggtttctgtcctccta

SEQ ID NO: 26989 - DNA, 22 bp, Artificial Sequence
  chemically synthesized
ctgtcctcctagattctttctc

SEQ ID NO: 26990 - DNA, 22 bp, Artificial Sequence
  chemically synthesized
tgtcctcctagattctttctca

SEQ ID NO: 26991 - DNA, 22 bp, Artificial Sequence
  chemically synthesized
tcctcctagattctttctcact

SEQ ID NO: 26992 - DNA, 22 bp, Artificial Sequence
  chemically synthesized
ctagattctttctcactaaact

SEQ ID NO: 26993 - DNA, 22 bp, Artificial Sequence
  chemically synthesized
gattctttctcactaaactaca

SEQ ID NO: 26994 - DNA, 22 bp, Artificial Sequence
  chemically synthesized
tttctcactaaactacagagaa

SEQ ID NO: 26995 - DNA, 22 bp, Artificial Sequence
  chemically synthesized
tctcactaaactacagagaata

SEQ ID NO: 26996 - DNA, 22 bp, Artificial Sequence
  chemically synthesized
ctcactaaactacagagaataa

SEQ ID NO: 26997 - DNA, 22 bp, Artificial Sequence
  chemically synthesized
tcactaaactacagagaataag

SEQ ID NO: 26998 - DNA, 22 bp, Artificial Sequence
  chemically synthesized
actaaactacagagaataagac

SEQ ID NO: 26999 - DNA, 22 bp, Artificial Sequence
  chemically synthesized
aactacagagaataagaccgtg

SEQ ID NO: 27000 - DNA, 22 bp, Artificial Sequence
  chemically synthesized
cagagaataagaccgtgctttg

SEQ ID NO: 27001 - DNA, 22 bp, Artificial Sequence
  chemically synthesized
tgttctcttatatgcattctgt

SEQ ID NO: 27002 - DNA, 22 bp, Artificial Sequence
  chemically synthesized
gttctcttatatgcattctgtc

SEQ ID NO: 27003 - DNA, 22 bp, Artificial Sequence
  chemically synthesized
ttctcttatatgcattctgtcc

SEQ ID NO: 27004 - DNA, 22 bp, Artificial Sequence
  chemically synthesized
tcttatatgcattctgtccact

SEQ ID NO: 27005 - DNA, 22 bp, Artificial Sequence
  chemically synthesized
ttatatgcattctgtccacttc

SEQ ID NO: 27006 - DNA, 22 bp, Artificial Sequence
  chemically synthesized
atatgcattctgtccacttcta

SEQ ID NO: 27007 - DNA, 22 bp, Artificial Sequence
  chemically synthesized
tatgcattctgtccacttctac

SEQ ID NO: 27008 - DNA, 22 bp, Artificial Sequence
  chemically synthesized
tgtccacttctacataggcaaa

SEQ ID NO: 27009 - DNA, 22 bp, Artificial Sequence
  chemically synthesized
tccacttctacataggcaaaat

SEQ ID NO: 27010 - DNA, 22 bp, Artificial Sequence
  chemically synthesized
ctacataggcaaaattgacttt

SEQ ID NO: 27011 - DNA, 22 bp, Artificial Sequence
  chemically synthesized
tacataggcaaaattgactttt

SEQ ID NO: 27012 - DNA, 22 bp, Artificial Sequence
  chemically synthesized
cataggcaaaattgacttttaa

SEQ ID NO: 27013 - DNA, 22 bp, Artificial Sequence
  chemically synthesized
acttttaattttgattttatga

SEQ ID NO: 27014 - DNA, 22 bp, Artificial Sequence
  chemically synthesized
ttaattttgattttatgaatgc

SEQ ID NO: 27015 - DNA, 22 bp, Artificial Sequence
  chemically synthesized
taattttgattttatgaatgca

SEQ ID NO: 27016 - DNA, 22 bp, Artificial Sequence
  chemically synthesized
aattttgattttatgaatgcat

SEQ ID NO: 27017 - DNA, 22 bp, Artificial Sequence
  chemically synthesized
attttgattttatgaatgcata

SEQ ID NO: 27018 - DNA, 22 bp, Artificial Sequence
  chemically synthesized
tgattttatgaatgcatacaca

SEQ ID NO: 27019 - DNA, 22 bp, Artificial Sequence
  chemically synthesized
gattttatgaatgcatacacac

SEQ ID NO: 27020 - DNA, 22 bp, Artificial Sequence
  chemically synthesized
attttatgaatgcatacacacg

SEQ ID NO: 27021 - DNA, 22 bp, Artificial Sequence
  chemically synthesized
tatgaatgcatacacacgagaa

SEQ ID NO: 27022 - DNA, 22 bp, Artificial Sequence
  chemically synthesized
atgaatgcatacacacgagaac

SEQ ID NO: 27023 - DNA, 22 bp, Artificial Sequence
  chemically synthesized
tgaatgcatacacacgagaact

SEQ ID NO: 27024 - DNA, 22 bp, Artificial Sequence
  chemically synthesized
tgaacagttagtataaggtgaa

SEQ ID NO: 27025 - DNA, 22 bp, Artificial Sequence
  chemically synthesized
gaacagttagtataaggtgaat

SEQ ID NO: 27026 - DNA, 22 bp, Artificial Sequence
  chemically synthesized
aacagttagtataaggtgaatt

SEQ ID NO: 27027 - DNA, 22 bp, Artificial Sequence
  chemically synthesized
gtataaggtgaattctgatttt

SEQ ID NO: 27028 - DNA, 22 bp, Artificial Sequence
  chemically synthesized
tgatttttcagaatgcatgcca

SEQ ID NO: 27029 - DNA, 22 bp, Artificial Sequence
  chemically synthesized
atttttcagaatgcatgccata

SEQ ID NO: 27030 - DNA, 22 bp, Artificial Sequence
  chemically synthesized
ttcagaatgcatgccatatata

SEQ ID NO: 27031 - DNA, 22 bp, Artificial Sequence
  chemically synthesized
tcagaatgcatgccatatataa

SEQ ID NO: 27032 - DNA, 22 bp, Artificial Sequence
  chemically synthesized
cagaatgcatgccatatataat

SEQ ID NO: 27033 - DNA, 22 bp, Artificial Sequence
  chemically synthesized
agaatgcatgccatatataatg

SEQ ID NO: 27034 - DNA, 22 bp, Artificial Sequence
  chemically synthesized
aattttgagattatgctggctc

SEQ ID NO: 27035 - DNA, 22 bp, Artificial Sequence
  chemically synthesized
attttgagattatgctggctct

SEQ ID NO: 27036 - DNA, 22 bp, Artificial Sequence
  chemically synthesized
tgagattatgctggctctgatt

SEQ ID NO: 27037 - DNA, 22 bp, Artificial Sequence
  chemically synthesized
gagattatgctggctctgatta

SEQ ID NO: 27038 - DNA, 22 bp, Artificial Sequence
  chemically synthesized
agattatgctggctctgattag

SEQ ID NO: 27039 - DNA, 22 bp, Artificial Sequence
  chemically synthesized
tgctggctctgattagccaaaa

SEQ ID NO: 27040 - DNA, 22 bp, Artificial Sequence
  chemically synthesized
gctctgattagccaaaagaagg

SEQ ID NO: 27041 - DNA, 22 bp, Artificial Sequence
  chemically synthesized
tgattagccaaaagaaggaagt

SEQ ID NO: 27042 - DNA, 22 bp, Artificial Sequence
  chemically synthesized
attagccaaaagaaggaagtaa

SEQ ID NO: 27043 - DNA, 22 bp, Artificial Sequence
  chemically synthesized
gccaaaagaaggaagtaatata

SEQ ID NO: 27044 - DNA, 22 bp, Artificial Sequence
  chemically synthesized
tggttattatttcagatccttt

SEQ ID NO: 27045 - DNA, 22 bp, Artificial Sequence
  chemically synthesized
gttattatttcagatcctttag

SEQ ID NO: 27046 - DNA, 22 bp, Artificial Sequence
  chemically synthesized
ttatttcagatcctttagatta

SEQ ID NO: 27047 - DNA, 22 bp, Artificial Sequence
  chemically synthesized
tttcagatcctttagattactg

SEQ ID NO: 27048 - DNA, 22 bp, Artificial Sequence
  chemically synthesized
cagatcctttagattactgtaa

SEQ ID NO: 27049 - DNA, 22 bp, Artificial Sequence
  chemically synthesized
agatcctttagattactgtaat

SEQ ID NO: 27050 - DNA, 22 bp, Artificial Sequence
  chemically synthesized
tagattactgtaatagacatga

SEQ ID NO: 27051 - DNA, 22 bp, Artificial Sequence
  chemically synthesized
agattactgtaatagacatgaa

SEQ ID NO: 27052 - DNA, 22 bp, Artificial Sequence
  chemically synthesized
gattactgtaatagacatgaaa

SEQ ID NO: 27053 - DNA, 22 bp, Artificial Sequence
  chemically synthesized
ctgtaatagacatgaaatagta

SEQ ID NO: 27054 - DNA, 22 bp, Artificial Sequence
  chemically synthesized
taatagacatgaaatagtaaac

SEQ ID NO: 27055 - DNA, 22 bp, Artificial Sequence
  chemically synthesized
tatatcacaacacatgacataa

SEQ ID NO: 27056 - DNA, 22 bp, Artificial Sequence
  chemically synthesized
cagatcgtttaaatcacacaag

SEQ ID NO: 27057 - DNA, 22 bp, Artificial Sequence
  chemically synthesized
agatcgtttaaatcacacaagt

SEQ ID NO: 27058 - DNA, 22 bp, Artificial Sequence
  chemically synthesized
aaatcacacaagtcatcactgc

SEQ ID NO: 27059 - DNA, 22 bp, Artificial Sequence
  chemically synthesized
aatcacacaagtcatcactgcc

SEQ ID NO: 27060 - DNA, 22 bp, Artificial Sequence
  chemically synthesized
ccatttacccagcaatcagttg

SEQ ID NO: 27061 - DNA, 22 bp, Artificial Sequence
  chemically synthesized
acccagcaatcagttggcttga

SEQ ID NO: 27062 - DNA, 22 bp, Artificial Sequence
  chemically synthesized
cccagcaatcagttggcttgat

SEQ ID NO: 27063 - DNA, 22 bp, Artificial Sequence
  chemically synthesized
gcttgattcttcaagatcttga

SEQ ID NO: 27064 - DNA, 22 bp, Artificial Sequence
  chemically synthesized
gattcttcaagatcttgaggaa

SEQ ID NO: 27065 - DNA, 22 bp, Artificial Sequence
  chemically synthesized
attcttcaagatcttgaggaac

SEQ ID NO: 27066 - DNA, 22 bp, Artificial Sequence
  chemically synthesized
ttcaagatcttgaggaactcag

SEQ ID NO: 27067 - DNA, 22 bp, Artificial Sequence
  chemically synthesized
caagatcttgaggaactcagcc

SEQ ID NO: 27068 - DNA, 22 bp, Artificial Sequence
  chemically synthesized
aagatcttgaggaactcagcct

SEQ ID NO: 27069 - DNA, 22 bp, Artificial Sequence
  chemically synthesized
gaggaactcagccttcaaaacc

SEQ ID NO: 27070 - DNA, 22 bp, Artificial Sequence
  chemically synthesized
aggaactcagccttcaaaacca

SEQ ID NO: 27071 - DNA, 22 bp, Artificial Sequence
  chemically synthesized
agccttcaaaaccatgactttt

SEQ ID NO: 27072 - DNA, 22 bp, Artificial Sequence
  chemically synthesized
caaaaccatgactttttctttg

SEQ ID NO: 27073 - DNA, 22 bp, Artificial Sequence
  chemically synthesized
aaaaccatgactttttctttgc

SEQ ID NO: 27074 - DNA, 22 bp, Artificial Sequence
  chemically synthesized
tttctttgctaatgttccttca

SEQ ID NO: 27075 - DNA, 22 bp, Artificial Sequence
  chemically synthesized
ttctttgctaatgttccttcaa

SEQ ID NO: 27076 - DNA, 22 bp, Artificial Sequence
  chemically synthesized
tctttgctaatgttccttcaat

SEQ ID NO: 27077 - DNA, 22 bp, Artificial Sequence
  chemically synthesized
ctttgctaatgttccttcaata

SEQ ID NO: 27078 - DNA, 22 bp, Artificial Sequence
  chemically synthesized
tttgctaatgttccttcaatag

SEQ ID NO: 27079 - DNA, 22 bp, Artificial Sequence
  chemically synthesized
tgctaatgttccttcaatagtc

SEQ ID NO: 27080 - DNA, 22 bp, Artificial Sequence
  chemically synthesized
gctaatgttccttcaatagtct

SEQ ID NO: 27081 - DNA, 22 bp, Artificial Sequence
  chemically synthesized
ctaatgttccttcaatagtctt

SEQ ID NO: 27082 - DNA, 22 bp, Artificial Sequence
  chemically synthesized
atgttccttcaatagtcttgac

SEQ ID NO: 27083 - DNA, 22 bp, Artificial Sequence
  chemically synthesized
cttcaatagtcttgacactttt

SEQ ID NO: 27084 - DNA, 22 bp, Artificial Sequence
  chemically synthesized
caatagtcttgacacttttaaa

SEQ ID NO: 27085 - DNA, 22 bp, Artificial Sequence
  chemically synthesized
aatagtcttgacacttttaaac

SEQ ID NO: 27086 - DNA, 22 bp, Artificial Sequence
  chemically synthesized
gacacttttaaactagagagta

SEQ ID NO: 27087 - DNA, 22 bp, Artificial Sequence
  chemically synthesized
acacttttaaactagagagtat

SEQ ID NO: 27088 - DNA, 22 bp, Artificial Sequence
  chemically synthesized
ttaaactagagagtataaaccc

SEQ ID NO: 27089 - DNA, 22 bp, Artificial Sequence
  chemically synthesized
taaactagagagtataaaccca

SEQ ID NO: 27090 - DNA, 22 bp, Artificial Sequence
  chemically synthesized
aaactagagagtataaacccac

SEQ ID NO: 27091 - DNA, 22 bp, Artificial Sequence
  chemically synthesized
aactagagagtataaacccaca

SEQ ID NO: 27092 - DNA, 22 bp, Artificial Sequence
  chemically synthesized
gagagtataaacccacaaggaa

SEQ ID NO: 27093 - DNA, 22 bp, Artificial Sequence
  chemically synthesized
ttttataattttacagatgtct

SEQ ID NO: 27094 - DNA, 22 bp, Artificial Sequence
  chemically synthesized
tataattttacagatgtcttta

SEQ ID NO: 27095 - DNA, 22 bp, Artificial Sequence
  chemically synthesized
ataattttacagatgtctttat

SEQ ID NO: 27096 - DNA, 22 bp, Artificial Sequence
  chemically synthesized
taattttacagatgtctttatt

SEQ ID NO: 27097 - DNA, 22 bp, Artificial Sequence
  chemically synthesized
tacagatgtctttattttcaaa

SEQ ID NO: 27098 - DNA, 22 bp, Artificial Sequence
  chemically synthesized
acagatgtctttattttcaaaa

SEQ ID NO: 27099 - DNA, 22 bp, Artificial Sequence
  chemically synthesized
cagatgtctttattttcaaaat

SEQ ID NO: 27100 - DNA, 22 bp, Artificial Sequence
  chemically synthesized
tattttcaaaatcatttacatt

SEQ ID NO: 27101 - DNA, 22 bp, Artificial Sequence
  chemically synthesized
attttcaaaatcatttacattg

SEQ ID NO: 27102 - DNA, 22 bp, Artificial Sequence
  chemically synthesized
ttttcaaaatcatttacattgt

SEQ ID NO: 27103 - DNA, 22 bp, Artificial Sequence
  chemically synthesized
tcaaaatcatttacattgtggt

SEQ ID NO: 27104 - DNA, 22 bp, Artificial Sequence
  chemically synthesized
caaaatcatttacattgtggtt

SEQ ID NO: 27105 - DNA, 22 bp, Artificial Sequence
  chemically synthesized
aaaatcatttacattgtggttc

SEQ ID NO: 27106 - DNA, 22 bp, Artificial Sequence
  chemically synthesized
acattgtggttctctaccttgc

SEQ ID NO: 27107 - DNA, 22 bp, Artificial Sequence
  chemically synthesized
cattgtggttctctaccttgcc

SEQ ID NO: 27108 - DNA, 22 bp, Artificial Sequence
  chemically synthesized
tggttctctaccttgccttctc

SEQ ID NO: 27109 - DNA, 22 bp, Artificial Sequence
  chemically synthesized
tctaccttgccttctcttaccc

SEQ ID NO: 27110 - DNA, 22 bp, Artificial Sequence
  chemically synthesized
taccttgccttctcttacccag

SEQ ID NO: 27111 - DNA, 22 bp, Artificial Sequence
  chemically synthesized
ccttgccttctcttacccagca

SEQ ID NO: 27112 - DNA, 22 bp, Artificial Sequence
  chemically synthesized
gccttctcttacccagcacaga

SEQ ID NO: 27113 - DNA, 22 bp, Artificial Sequence
  chemically synthesized
ccttctcttacccagcacagat

SEQ ID NO: 27114 - DNA, 22 bp, Artificial Sequence
  chemically synthesized
ctcttacccagcacagatgagg

SEQ ID NO: 27115 - DNA, 22 bp, Artificial Sequence
  chemically synthesized
tcttacccagcacagatgaggt

SEQ ID NO: 27116 - DNA, 22 bp, Artificial Sequence
  chemically synthesized
ttacccagcacagatgaggtta

SEQ ID NO: 27117 - DNA, 22 bp, Artificial Sequence
  chemically synthesized
acccagcacagatgaggttata

SEQ ID NO: 27118 - DNA, 22 bp, Artificial Sequence
  chemically synthesized
cccagcacagatgaggttatac

SEQ ID NO: 27119 - DNA, 22 bp, Artificial Sequence
  chemically synthesized
tacctcactcgcaaattgtttt

SEQ ID NO: 27120 - DNA, 22 bp, Artificial Sequence
  chemically synthesized
actcgcaaattgttttatcaat

SEQ ID NO: 27121 - DNA, 22 bp, Artificial Sequence
  chemically synthesized
gcaaattgttttatcaatttga

SEQ ID NO: 27122 - DNA, 22 bp, Artificial Sequence
  chemically synthesized
ttttatcaatttgattttcttt

SEQ ID NO: 27123 - DNA, 22 bp, Artificial Sequence
  chemically synthesized
tatcaatttgattttctttatt

SEQ ID NO: 27124 - DNA, 22 bp, Artificial Sequence
  chemically synthesized
atcaatttgattttctttattt

SEQ ID NO: 27125 - DNA, 22 bp, Artificial Sequence
  chemically synthesized
tcaatttgattttctttatttt

SEQ ID NO: 27126 - DNA, 22 bp, Artificial Sequence
  chemically synthesized
gattttctttattttataattc

SEQ ID NO: 27127 - DNA, 22 bp, Artificial Sequence
  chemically synthesized
attttctttattttataattcc

SEQ ID NO: 27128 - DNA, 22 bp, Artificial Sequence
  chemically synthesized
tctttattttataattcctaca

SEQ ID NO: 27129 - DNA, 22 bp, Artificial Sequence
  chemically synthesized
ctttattttataattcctacat

SEQ ID NO: 27130 - DNA, 22 bp, Artificial Sequence
  chemically synthesized
tttattttataattcctacata

SEQ ID NO: 27131 - DNA, 22 bp, Artificial Sequence
  chemically synthesized
tattttataattcctacataag

SEQ ID NO: 27132 - DNA, 22 bp, Artificial Sequence
  chemically synthesized
attttataattcctacataagc

SEQ ID NO: 27133 - DNA, 22 bp, Artificial Sequence
  chemically synthesized
ttttataattcctacataagca

SEQ ID NO: 27134 - DNA, 22 bp, Artificial Sequence
  chemically synthesized
tataattcctacataagcatag

SEQ ID NO: 27135 - DNA, 22 bp, Artificial Sequence
  chemically synthesized
ataattcctacataagcatagc

SEQ ID NO: 27136 - DNA, 22 bp, Artificial Sequence
  chemically synthesized
taattcctacataagcatagca

SEQ ID NO: 27137 - DNA, 22 bp, Artificial Sequence
  chemically synthesized
ctacataagcatagcattgaag

SEQ ID NO: 27138 - DNA, 22 bp, Artificial Sequence
  chemically synthesized
cataagcatagcattgaagaaa

SEQ ID NO: 27139 - DNA, 22 bp, Artificial Sequence
  chemically synthesized
aagaaaaaaattactttcattc

SEQ ID NO: 27140 - DNA, 22 bp, Artificial Sequence
  chemically synthesized
ctttcattctgaaaggagcaca

SEQ ID NO: 27141 - DNA, 22 bp, Artificial Sequence
  chemically synthesized
tcattctgaaaggagcacagta

SEQ ID NO: 27142 - DNA, 22 bp, Artificial Sequence
  chemically synthesized
cattctgaaaggagcacagtat

SEQ ID NO: 27143 - DNA, 22 bp, Artificial Sequence
  chemically synthesized
attctgaaaggagcacagtatt

SEQ ID NO: 27144 - DNA, 22 bp, Artificial Sequence
  chemically synthesized
tgaaaggagcacagtattttgc

SEQ ID NO: 27145 - DNA, 22 bp, Artificial Sequence
  chemically synthesized
aaaggagcacagtattttgcct

SEQ ID NO: 27146 - DNA, 22 bp, Artificial Sequence
  chemically synthesized
tgccttttgagaagctcctgaa

SEQ ID NO: 27147 - DNA, 22 bp, Artificial Sequence
  chemically synthesized
gccttttgagaagctcctgaat

SEQ ID NO: 27148 - DNA, 22 bp, Artificial Sequence
  chemically synthesized
ccttttgagaagctcctgaatt

SEQ ID NO: 27149 - DNA, 22 bp, Artificial Sequence
  chemically synthesized
ttgagaagctcctgaattaaaa

SEQ ID NO: 27150 - DNA, 22 bp, Artificial Sequence
  chemically synthesized
tgagaagctcctgaattaaaac

SEQ ID NO: 27151 - DNA, 22 bp, Artificial Sequence
  chemically synthesized
gagaagctcctgaattaaaaca

SEQ ID NO: 27152 - DNA, 22 bp, Artificial Sequence
  chemically synthesized
agaagctcctgaattaaaacat

SEQ ID NO: 27153 - DNA, 22 bp, Artificial Sequence
  chemically synthesized
ctgaattaaaacattaattcca

SEQ ID NO: 27154 - DNA, 22 bp, Artificial Sequence
  chemically synthesized
aattaaaacattaattccaagc

SEQ ID NO: 27155 - DNA, 22 bp, Artificial Sequence
  chemically synthesized
aaacattaattccaagctaatt

SEQ ID NO: 27156 - DNA, 22 bp, Artificial Sequence
  chemically synthesized
attccaagctaattgtgaatat

SEQ ID NO: 27157 - DNA, 22 bp, Artificial Sequence
  chemically synthesized
caagctaattgtgaatatgaaa

SEQ ID NO: 27158 - DNA, 22 bp, Artificial Sequence
  chemically synthesized
attgtgaatatgaaacattctt

SEQ ID NO: 27159 - DNA, 22 bp, Artificial Sequence
  chemically synthesized
tgaatatgaaacattcttaagc

SEQ ID NO: 27160 - DNA, 22 bp, Artificial Sequence
  chemically synthesized
ttaagcatttcatataattact

SEQ ID NO: 27161 - DNA, 22 bp, Artificial Sequence
  chemically synthesized
aagcatttcatataattactaa

SEQ ID NO: 27162 - DNA, 22 bp, Artificial Sequence
  chemically synthesized
agcatttcatataattactaac

SEQ ID NO: 27163 - DNA, 22 bp, Artificial Sequence
  chemically synthesized
catataattactaacagaatgt

SEQ ID NO: 27164 - DNA, 22 bp, Artificial Sequence
  chemically synthesized
atataattactaacagaatgta

SEQ ID NO: 27165 - DNA, 22 bp, Artificial Sequence
  chemically synthesized
ctaacagaatgtagagttgagg

SEQ ID NO: 27166 - DNA, 22 bp, Artificial Sequence
  chemically synthesized
acagaatgtagagttgaggttt

SEQ ID NO: 27167 - DNA, 22 bp, Artificial Sequence
  chemically synthesized
aggtttccaactggttctaatc

SEQ ID NO: 27168 - DNA, 22 bp, Artificial Sequence
  chemically synthesized
ccaactggttctaatcacatat

SEQ ID NO: 27169 - DNA, 22 bp, Artificial Sequence
  chemically synthesized
caactggttctaatcacatata

SEQ ID NO: 27170 - DNA, 22 bp, Artificial Sequence
  chemically synthesized
gttctaatcacatatacatctt

SEQ ID NO: 27171 - DNA, 22 bp, Artificial Sequence
  chemically synthesized
taatcacatatacatcttccta

SEQ ID NO: 27172 - DNA, 22 bp, Artificial Sequence
  chemically synthesized
atcacatatacatcttcctaaa

SEQ ID NO: 27173 - DNA, 22 bp, Artificial Sequence
  chemically synthesized
cctaaaataaaatgtttaatta

SEQ ID NO: 27174 - DNA, 22 bp, Artificial Sequence
  chemically synthesized
ctaaaataaaatgtttaattat

SEQ ID NO: 27175 - DNA, 22 bp, Artificial Sequence
  chemically synthesized
aaataaaatgtttaattatact

SEQ ID NO: 27176 - DNA, 22 bp, Artificial Sequence
  chemically synthesized
aattatactattttgctgagaa

SEQ ID NO: 27177 - DNA, 22 bp, Artificial Sequence
  chemically synthesized
attatactattttgctgagaaa

SEQ ID NO: 27178 - DNA, 22 bp, Artificial Sequence
  chemically synthesized
tactattttgctgagaaaaatt

SEQ ID NO: 27179 - DNA, 22 bp, Artificial Sequence
  chemically synthesized
ttttgctgagaaaaattttaaa

SEQ ID NO: 27180 - DNA, 22 bp, Artificial Sequence
  chemically synthesized
tgctgagaaaaattttaaaaca

SEQ ID NO: 27181 - DNA, 22 bp, Artificial Sequence
  chemically synthesized
gctgagaaaaattttaaaacaa

SEQ ID NO: 27182 - DNA, 22 bp, Artificial Sequence
  chemically synthesized
ctgagaaaaattttaaaacaaa

SEQ ID NO: 27183 - DNA, 22 bp, Artificial Sequence
  chemically synthesized
agaaaaattttaaaacaaaaaa

SEQ ID NO: 27184 - DNA, 22 bp, Artificial Sequence
  chemically synthesized
taaaacaaaaaatgtaaatatt

SEQ ID NO: 27185 - DNA, 22 bp, Artificial Sequence
  chemically synthesized
aaaacaaaaaatgtaaatatta

SEQ ID NO: 27186 - DNA, 22 bp, Artificial Sequence
  chemically synthesized
aaacaaaaaatgtaaatattaa

SEQ ID NO: 27187 - DNA, 22 bp, Artificial Sequence
  chemically synthesized
actttttatttctatgttgtca

SEQ ID NO: 27188 - DNA, 22 bp, Artificial Sequence
  chemically synthesized
tttatttctatgttgtcataat

SEQ ID NO: 27189 - DNA, 22 bp, Artificial Sequence
  chemically synthesized
ttatttctatgttgtcataata

SEQ ID NO: 27190 - DNA, 22 bp, Artificial Sequence
  chemically synthesized
tatttctatgttgtcataatat

SEQ ID NO: 27191 - DNA, 22 bp, Artificial Sequence
  chemically synthesized
atttctatgttgtcataatatg

SEQ ID NO: 27192 - DNA, 22 bp, Artificial Sequence
  chemically synthesized
tttctatgttgtcataatatgg

SEQ ID NO: 27193 - DNA, 22 bp, Artificial Sequence
  chemically synthesized
ctatgttgtcataatatggatt

SEQ ID NO: 27194 - DNA, 22 bp, Artificial Sequence
  chemically synthesized
tatgttgtcataatatggattt

SEQ ID NO: 27195 - DNA, 22 bp, Artificial Sequence
  chemically synthesized
tgttgtcataatatggatttta

SEQ ID NO: 27196 - DNA, 22 bp, Artificial Sequence
  chemically synthesized
tcataatatggattttaaattt

SEQ ID NO: 27197 - DNA, 22 bp, Artificial Sequence
  chemically synthesized
taaattttaatttaaatgcaca

SEQ ID NO: 27198 - DNA, 22 bp, Artificial Sequence
  chemically synthesized
aaattttaatttaaatgcacat

SEQ ID NO: 27199 - DNA, 22 bp, Artificial Sequence
  chemically synthesized
aattttaatttaaatgcacatt

SEQ ID NO: 27200 - DNA, 22 bp, Artificial Sequence
  chemically synthesized
taatttaaatgcacattccatg

SEQ ID NO: 27201 - DNA, 22 bp, Artificial Sequence
  chemically synthesized
aatttaaatgcacattccatgg

SEQ ID NO: 27202 - DNA, 22 bp, Artificial Sequence
  chemically synthesized
atttaaatgcacattccatggc

SEQ ID NO: 27203 - DNA, 22 bp, Artificial Sequence
  chemically synthesized
aaatgcacattccatggcaatg

SEQ ID NO: 27204 - DNA, 22 bp, Artificial Sequence
  chemically synthesized
aatgcacattccatggcaatgg

SEQ ID NO: 27205 - DNA, 22 bp, Artificial Sequence
  chemically synthesized
catggcaatggctaatattttc

SEQ ID NO: 27206 - DNA, 22 bp, Artificial Sequence
  chemically synthesized
atattttcaactttctccctct

SEQ ID NO: 27207 - DNA, 22 bp, Artificial Sequence
  chemically synthesized
tcaactttctccctcttcaaca

SEQ ID NO: 27208 - DNA, 22 bp, Artificial Sequence
  chemically synthesized
caactttctccctcttcaacac

SEQ ID NO: 27209 - DNA, 22 bp, Artificial Sequence
  chemically synthesized
aactttctccctcttcaacaca

SEQ ID NO: 27210 - DNA, 22 bp, Artificial Sequence
  chemically synthesized
tctccctcttcaacacatacac

SEQ ID NO: 27211 - DNA, 22 bp, Artificial Sequence
  chemically synthesized
ctccctcttcaacacatacaca

SEQ ID NO: 27212 - DNA, 22 bp, Artificial Sequence
  chemically synthesized
tccctcttcaacacatacacaa

SEQ ID NO: 27213 - DNA, 22 bp, Artificial Sequence
  chemically synthesized
cctcttcaacacatacacaagt

SEQ ID NO: 27214 - DNA, 22 bp, Artificial Sequence
  chemically synthesized
ttcaacacatacacaagtctgt

SEQ ID NO: 27215 - DNA, 22 bp, Artificial Sequence
  chemically synthesized
caacacatacacaagtctgtat

SEQ ID NO: 27216 - DNA, 22 bp, Artificial Sequence
  chemically synthesized
aacacatacacaagtctgtatt

SEQ ID NO: 27217 - DNA, 22 bp, Artificial Sequence
  chemically synthesized
tattcatagcctgttgtaatag

SEQ ID NO: 27218 - DNA, 22 bp, Artificial Sequence
  chemically synthesized
atagcctgttgtaatagacaag

SEQ ID NO: 27219 - DNA, 22 bp, Artificial Sequence
  chemically synthesized
ttgtaatagacaaggttaaatg

SEQ ID NO: 27220 - DNA, 22 bp, Artificial Sequence
  chemically synthesized
taatagacaaggttaaatgtag

SEQ ID NO: 27221 - DNA, 22 bp, Artificial Sequence
  chemically synthesized
aatgtagcctaaatatatattc

SEQ ID NO: 27222 - DNA, 22 bp, Artificial Sequence
  chemically synthesized
aatatatattccgtttaaatgc

SEQ ID NO: 27223 - DNA, 22 bp, Artificial Sequence
  chemically synthesized
cgtttaaatgctttcctcactc

SEQ ID NO: 27224 - DNA, 22 bp, Artificial Sequence
  chemically synthesized
aaatgctttcctcactcactag

SEQ ID NO: 27225 - DNA, 22 bp, Artificial Sequence
  chemically synthesized
aatgctttcctcactcactagc

SEQ ID NO: 27226 - DNA, 22 bp, Artificial Sequence
  chemically synthesized
tcctcactcactagcaattggt

SEQ ID NO: 27227 - DNA, 22 bp, Artificial Sequence
  chemically synthesized
cctcactcactagcaattggtt

SEQ ID NO: 27228 - DNA, 22 bp, Artificial Sequence
  chemically synthesized
ctcactcactagcaattggtta

SEQ ID NO: 27229 - DNA, 22 bp, Artificial Sequence
  chemically synthesized
actcactagcaattggttatca

SEQ ID NO: 27230 - DNA, 22 bp, Artificial Sequence
  chemically synthesized
actagcaattggttatcactag

SEQ ID NO: 27231 - DNA, 22 bp, Artificial Sequence
  chemically synthesized
gcaattggttatcactagagag

SEQ ID NO: 27232 - DNA, 22 bp, Artificial Sequence
  chemically synthesized
gttatcactagagagttatctg

SEQ ID NO: 27233 - DNA, 22 bp, Artificial Sequence
  chemically synthesized
tcactagagagttatctgtgaa

SEQ ID NO: 27234 - DNA, 22 bp, Artificial Sequence
  chemically synthesized
gagagttatctgtgaaatctta

SEQ ID NO: 27235 - DNA, 22 bp, Artificial Sequence
  chemically synthesized
tctgtgaaatcttactctacat

SEQ ID NO: 27236 - DNA, 22 bp, Artificial Sequence
  chemically synthesized
tgaaatcttactctacattcct

SEQ ID NO: 27237 - DNA, 22 bp, Artificial Sequence
  chemically synthesized
actctacattcctcagtcacct

SEQ ID NO: 27238 - DNA, 22 bp, Artificial Sequence
  chemically synthesized
ctctacattcctcagtcaccta

SEQ ID NO: 27239 - DNA, 22 bp, Artificial Sequence
  chemically synthesized
tacattcctcagtcacctagtg

SEQ ID NO: 27240 - DNA, 22 bp, Artificial Sequence
  chemically synthesized
cattcctcagtcacctagtgaa

SEQ ID NO: 27241 - DNA, 22 bp, Artificial Sequence
  chemically synthesized
ctcagtcacctagtgaaggtgt

SEQ ID NO: 27242 - DNA, 22 bp, Artificial Sequence
  chemically synthesized
agtcacctagtgaaggtgtact

SEQ ID NO: 27243 - DNA, 22 bp, Artificial Sequence
  chemically synthesized
gtgaaggtgtactgatccacct

SEQ ID NO: 27244 - DNA, 22 bp, Artificial Sequence
  chemically synthesized
atccaccttcaggagcagtaca

SEQ ID NO: 27245 - DNA, 22 bp, Artificial Sequence
  chemically synthesized
caggagcagtacaaacctttat

SEQ ID NO: 27246 - DNA, 22 bp, Artificial Sequence
  chemically synthesized
aggagcagtacaaacctttatt

SEQ ID NO: 27247 - DNA, 22 bp, Artificial Sequence
  chemically synthesized
tattggtcacttcccaagcaac

SEQ ID NO: 27248 - DNA, 22 bp, Artificial Sequence
  chemically synthesized
attggtcacttcccaagcaact

SEQ ID NO: 27249 - DNA, 22 bp, Artificial Sequence
  chemically synthesized
ttggtcacttcccaagcaactt

SEQ ID NO: 27250 - DNA, 22 bp, Artificial Sequence
  chemically synthesized
gtcacttcccaagcaacttcaa

SEQ ID NO: 27251 - DNA, 22 bp, Artificial Sequence
  chemically synthesized
cccaagcaacttcaaagagcag

SEQ ID NO: 27252 - DNA, 22 bp, Artificial Sequence
  chemically synthesized
ccaagcaacttcaaagagcagt

SEQ ID NO: 27253 - DNA, 22 bp, Artificial Sequence
  chemically synthesized
caaagagcagtaactcctccac

SEQ ID NO: 27254 - DNA, 22 bp, Artificial Sequence
  chemically synthesized
aaagagcagtaactcctccaca

SEQ ID NO: 27255 - DNA, 22 bp, Artificial Sequence
  chemically synthesized
ctccacaggaagttcttcgact

SEQ ID NO: 27256 - DNA, 22 bp, Artificial Sequence
  chemically synthesized
cacaggaagttcttcgacttcc

SEQ ID NO: 27257 - DNA, 22 bp, Artificial Sequence
  chemically synthesized
ttcgacttcccactggggaagc

SEQ ID NO: 27258 - DNA, 22 bp, Artificial Sequence
  chemically synthesized
cgacttcccactggggaagccc

SEQ ID NO: 27259 - DNA, 22 bp, Artificial Sequence
  chemically synthesized
gacttcccactggggaagccca

SEQ ID NO: 27260 - DNA, 22 bp, Artificial Sequence
  chemically synthesized
cccactggggaagcccacccag

SEQ ID NO: 27261 - DNA, 22 bp, Artificial Sequence
  chemically synthesized
ccactggggaagcccacccagg

SEQ ID NO: 27262 - DNA, 22 bp, Artificial Sequence
  chemically synthesized
gggaagcccacccagggatgtt

SEQ ID NO: 27263 - DNA, 22 bp, Artificial Sequence
  chemically synthesized
cagagagggatcggcctcgaag

SEQ ID NO: 27264 - DNA, 22 bp, Artificial Sequence
  chemically synthesized
gaagcattcttcttacagtcct

SEQ ID NO: 27265 - DNA, 22 bp, Artificial Sequence
  chemically synthesized
ttcttacagtcctccgagactc

SEQ ID NO: 27266 - DNA, 22 bp, Artificial Sequence
  chemically synthesized
cttacagtcctccgagactcct

SEQ ID NO: 27267 - DNA, 22 bp, Artificial Sequence
  chemically synthesized
ttacagtcctccgagactcctt

SEQ ID NO: 27268 - DNA, 22 bp, Artificial Sequence
  chemically synthesized
acagtcctccgagactcctttg

SEQ ID NO: 27269 - DNA, 22 bp, Artificial Sequence
  chemically synthesized
cagtcctccgagactcctttga

SEQ ID NO: 27270 - DNA, 22 bp, Artificial Sequence
  chemically synthesized
cgagactcctttgaattcctgt

SEQ ID NO: 27271 - DNA, 22 bp, Artificial Sequence
  chemically synthesized
ctttgaattcctgtttcaatta

SEQ ID NO: 27272 - DNA, 22 bp, Artificial Sequence
  chemically synthesized
tgaattcctgtttcaattagtt

SEQ ID NO: 27273 - DNA, 22 bp, Artificial Sequence
  chemically synthesized
gaattcctgtttcaattagttg

SEQ ID NO: 27274 - DNA, 22 bp, Artificial Sequence
  chemically synthesized
aattcctgtttcaattagttgt

SEQ ID NO: 27275 - DNA, 22 bp, Artificial Sequence
  chemically synthesized
ctgtttcaattagttgtaatcc

SEQ ID NO: 27276 - DNA, 22 bp, Artificial Sequence
  chemically synthesized
tttcaattagttgtaatcccag

SEQ ID NO: 27277 - DNA, 22 bp, Artificial Sequence
  chemically synthesized
caattagttgtaatcccaggag

SEQ ID NO: 27278 - DNA, 22 bp, Artificial Sequence
  chemically synthesized
aattagttgtaatcccaggaga

SEQ ID NO: 27279 - DNA, 22 bp, Artificial Sequence
  chemically synthesized
gttgtaatcccaggagaagaga

SEQ ID NO: 27280 - DNA, 22 bp, Artificial Sequence
  chemically synthesized
taatcccaggagaagagaactt

SEQ ID NO: 27281 - DNA, 22 bp, Artificial Sequence
  chemically synthesized
acaggcacaaaagttagagttg

SEQ ID NO: 27282 - DNA, 22 bp, Artificial Sequence
  chemically synthesized
caggcacaaaagttagagttgg

SEQ ID NO: 27283 - DNA, 22 bp, Artificial Sequence
  chemically synthesized
gagttggtagagttaccaggct

SEQ ID NO: 27284 - DNA, 22 bp, Artificial Sequence
  chemically synthesized
gtagagttaccaggctttggta

SEQ ID NO: 27285 - DNA, 22 bp, Artificial Sequence
  chemically synthesized
ccaggctttggtagcttctctt

SEQ ID NO: 27286 - DNA, 22 bp, Artificial Sequence
  chemically synthesized
tggtagcttctcttgggaataa

SEQ ID NO: 27287 - DNA, 22 bp, Artificial Sequence
  chemically synthesized
ggtagcttctcttgggaataaa

SEQ ID NO: 27288 - DNA, 22 bp, Artificial Sequence
  chemically synthesized
gtagcttctcttgggaataaac

SEQ ID NO: 27289 - DNA, 22 bp, Artificial Sequence
  chemically synthesized
ctcttgggaataaactagtagc

SEQ ID NO: 27290 - DNA, 22 bp, Artificial Sequence
  chemically synthesized
tcttgggaataaactagtagca

SEQ ID NO: 27291 - DNA, 22 bp, Artificial Sequence
  chemically synthesized
ttgggaataaactagtagcatg

SEQ ID NO: 27292 - DNA, 22 bp, Artificial Sequence
  chemically synthesized
gggaataaactagtagcatgaa

SEQ ID NO: 27293 - DNA, 22 bp, Artificial Sequence
  chemically synthesized
ggaataaactagtagcatgaaa

SEQ ID NO: 27294 - DNA, 22 bp, Artificial Sequence
  chemically synthesized
gtagcatgaaatcttatgtgct

SEQ ID NO: 27295 - DNA, 22 bp, Artificial Sequence
  chemically synthesized
atgtgcttcccacagaattcct

SEQ ID NO: 27296 - DNA, 22 bp, Artificial Sequence
  chemically synthesized
tgtgcttcccacagaattcctg

SEQ ID NO: 27297 - DNA, 22 bp, Artificial Sequence
  chemically synthesized
cccacagaattcctggtggaag

SEQ ID NO: 27298 - DNA, 22 bp, Artificial Sequence
  chemically synthesized
ccacagaattcctggtggaagg

SEQ ID NO: 27299 - DNA, 22 bp, Artificial Sequence
  chemically synthesized
ctggtggaaggaggaattcttc

SEQ ID NO: 27300 - DNA, 22 bp, Artificial Sequence
  chemically synthesized
gtggaaggaggaattcttcctc

SEQ ID NO: 27301 - DNA, 22 bp, Artificial Sequence
  chemically synthesized
ttcctcctctttctcgtctttc

SEQ ID NO: 27302 - DNA, 22 bp, Artificial Sequence
  chemically synthesized
cctcctctttctcgtctttctg

SEQ ID NO: 27303 - DNA, 22 bp, Artificial Sequence
  chemically synthesized
ctcctctttctcgtctttctgg

SEQ ID NO: 27304 - DNA, 22 bp, Artificial Sequence
  chemically synthesized
ctctttctcgtctttctgggca

SEQ ID NO: 27305 - DNA, 22 bp, Artificial Sequence
  chemically synthesized
tttctcgtctttctgggcaggt

SEQ ID NO: 27306 - DNA, 22 bp, Artificial Sequence
  chemically synthesized
tctcgtctttctgggcaggtat

SEQ ID NO: 27307 - DNA, 22 bp, Artificial Sequence
  chemically synthesized
ctcgtctttctgggcaggtatt

SEQ ID NO: 27308 - DNA, 22 bp, Artificial Sequence
  chemically synthesized
tcgtctttctgggcaggtattg

SEQ ID NO: 27309 - DNA, 22 bp, Artificial Sequence
  chemically synthesized
gtctttctgggcaggtattgtg

SEQ ID NO: 27310 - DNA, 22 bp, Artificial Sequence
  chemically synthesized
tctgggcaggtattgtgaggac

SEQ ID NO: 27311 - DNA, 22 bp, Artificial Sequence
  chemically synthesized
ctgggcaggtattgtgaggacg

SEQ ID NO: 27312 - DNA, 22 bp, Artificial Sequence
  chemically synthesized
tgggcaggtattgtgaggacgg

SEQ ID NO: 27313 - DNA, 22 bp, Artificial Sequence
  chemically synthesized
ggcaggtattgtgaggacggta

SEQ ID NO: 27314 - DNA, 22 bp, Artificial Sequence
  chemically synthesized
tgaggacggtatctgccctgtc

SEQ ID NO: 27315 - DNA, 22 bp, Artificial Sequence
  chemically synthesized
acagggcagataccgtcctcac

SEQ ID NO: 27316 - DNA, 22 bp, Artificial Sequence
  chemically synthesized
acaatacctgcccagaaagacg

SEQ ID NO: 27317 - DNA, 22 bp, Artificial Sequence
  chemically synthesized
cccagaaagacgagaaagagga

SEQ ID NO: 27318 - DNA, 22 bp, Artificial Sequence
  chemically synthesized
ctccttccaccaggaattctgt

SEQ ID NO: 27319 - DNA, 22 bp, Artificial Sequence
  chemically synthesized
cttccaccaggaattctgtggg

SEQ ID NO: 27320 - DNA, 22 bp, Artificial Sequence
  chemically synthesized
ccaccaggaattctgtgggaag

SEQ ID NO: 27321 - DNA, 22 bp, Artificial Sequence
  chemically synthesized
caccaggaattctgtgggaagc

SEQ ID NO: 27322 - DNA, 22 bp, Artificial Sequence
  chemically synthesized
tgtgggaagcacataagatttc

SEQ ID NO: 27323 - DNA, 22 bp, Artificial Sequence
  chemically synthesized
tgggaagcacataagatttcat

SEQ ID NO: 27324 - DNA, 22 bp, Artificial Sequence
  chemically synthesized
catgctactagtttattcccaa

SEQ ID NO: 27325 - DNA, 22 bp, Artificial Sequence
  chemically synthesized
atgctactagtttattcccaag

SEQ ID NO: 27326 - DNA, 22 bp, Artificial Sequence
  chemically synthesized
ctagtttattcccaagagaagc

SEQ ID NO: 27327 - DNA, 22 bp, Artificial Sequence
  chemically synthesized
gtttattcccaagagaagctac

SEQ ID NO: 27328 - DNA, 22 bp, Artificial Sequence
  chemically synthesized
attcccaagagaagctaccaaa

SEQ ID NO: 27329 - DNA, 22 bp, Artificial Sequence
  chemically synthesized
ttcccaagagaagctaccaaag

SEQ ID NO: 27330 - DNA, 22 bp, Artificial Sequence
  chemically synthesized
ccaagagaagctaccaaagcct

SEQ ID NO: 27331 - DNA, 22 bp, Artificial Sequence
  chemically synthesized
ccaaagcctggtaactctacca

SEQ ID NO: 27332 - DNA, 22 bp, Artificial Sequence
  chemically synthesized
gtaactctaccaactctaactt

SEQ ID NO: 27333 - DNA, 22 bp, Artificial Sequence
  chemically synthesized
taccaactctaacttttgtgcc

SEQ ID NO: 27334 - DNA, 22 bp, Artificial Sequence
  chemically synthesized
ccaactctaacttttgtgcctg

SEQ ID NO: 27335 - DNA, 22 bp, Artificial Sequence
  chemically synthesized
taacttttgtgcctgtaagttc

SEQ ID NO: 27336 - DNA, 22 bp, Artificial Sequence
  chemically synthesized
acttttgtgcctgtaagttctc

SEQ ID NO: 27337 - DNA, 22 bp, Artificial Sequence
  chemically synthesized
ttgtgcctgtaagttctcttct

SEQ ID NO: 27338 - DNA, 22 bp, Artificial Sequence
  chemically synthesized
tgtgcctgtaagttctcttctc

SEQ ID NO: 27339 - DNA, 22 bp, Artificial Sequence
  chemically synthesized
gtgcctgtaagttctcttctcc

SEQ ID NO: 27340 - DNA, 22 bp, Artificial Sequence
  chemically synthesized
tgcctgtaagttctcttctcct

SEQ ID NO: 27341 - DNA, 22 bp, Artificial Sequence
  chemically synthesized
taagttctcttctcctgggatt

SEQ ID NO: 27342 - DNA, 22 bp, Artificial Sequence
  chemically synthesized
tcttctcctgggattacaacta

SEQ ID NO: 27343 - DNA, 22 bp, Artificial Sequence
  chemically synthesized
ttctcctgggattacaactaat

SEQ ID NO: 27344 - DNA, 22 bp, Artificial Sequence
  chemically synthesized
ctcctgggattacaactaattg

SEQ ID NO: 27345 - DNA, 22 bp, Artificial Sequence
  chemically synthesized
tcctgggattacaactaattga

SEQ ID NO: 27346 - DNA, 22 bp, Artificial Sequence
  chemically synthesized
ctgggattacaactaattgaaa

SEQ ID NO: 27347 - DNA, 22 bp, Artificial Sequence
  chemically synthesized
ggattacaactaattgaaacag

SEQ ID NO: 27348 - DNA, 22 bp, Artificial Sequence
  chemically synthesized
caactaattgaaacaggaattc

SEQ ID NO: 27349 - DNA, 22 bp, Artificial Sequence
  chemically synthesized
attgaaacaggaattcaaagga

SEQ ID NO: 27350 - DNA, 22 bp, Artificial Sequence
  chemically synthesized
aaacaggaattcaaaggagtct

SEQ ID NO: 27351 - DNA, 22 bp, Artificial Sequence
  chemically synthesized
aaaggagtctcggaggactgta

SEQ ID NO: 27352 - DNA, 22 bp, Artificial Sequence
  chemically synthesized
ggaggactgtaagaagaatgct

SEQ ID NO: 27353 - DNA, 22 bp, Artificial Sequence
  chemically synthesized
taagaagaatgcttcgaggccg

SEQ ID NO: 27354 - DNA, 22 bp, Artificial Sequence
  chemically synthesized
cgaggccgatccctctctgtaa

SEQ ID NO: 27355 - DNA, 22 bp, Artificial Sequence
  chemically synthesized
gaggccgatccctctctgtaac

SEQ ID NO: 27356 - DNA, 22 bp, Artificial Sequence
  chemically synthesized
tctgtaacatccctgggtgggc

SEQ ID NO: 27357 - DNA, 22 bp, Artificial Sequence
  chemically synthesized
tgtaacatccctgggtgggctt

SEQ ID NO: 27358 - DNA, 22 bp, Artificial Sequence
  chemically synthesized
taacatccctgggtgggcttcc

SEQ ID NO: 27359 - DNA, 22 bp, Artificial Sequence
  chemically synthesized
ggtgggcttccccagtgggaag

SEQ ID NO: 27360 - DNA, 22 bp, Artificial Sequence
  chemically synthesized
ccccagtgggaagtcgaagaac

SEQ ID NO: 27361 - DNA, 22 bp, Artificial Sequence
  chemically synthesized
cccagtgggaagtcgaagaact

SEQ ID NO: 27362 - DNA, 22 bp, Artificial Sequence
  chemically synthesized
cctgtggaggagttactgctct

SEQ ID NO: 27363 - DNA, 22 bp, Artificial Sequence
  chemically synthesized
ctgtggaggagttactgctctt

SEQ ID NO: 27364 - DNA, 22 bp, Artificial Sequence
  chemically synthesized
tggaggagttactgctctttga

SEQ ID NO: 27365 - DNA, 22 bp, Artificial Sequence
  chemically synthesized
ctgctctttgaagttgcttggg

SEQ ID NO: 27366 - DNA, 22 bp, Artificial Sequence
  chemically synthesized
ctctttgaagttgcttgggaag

SEQ ID NO: 27367 - DNA, 22 bp, Artificial Sequence
  chemically synthesized
tttgaagttgcttgggaagtga

SEQ ID NO: 27368 - DNA, 22 bp, Artificial Sequence
  chemically synthesized
tgaagttgcttgggaagtgacc

SEQ ID NO: 27369 - DNA, 22 bp, Artificial Sequence
  chemically synthesized
gaagttgcttgggaagtgacca

SEQ ID NO: 27370 - DNA, 22 bp, Artificial Sequence
  chemically synthesized
aagttgcttgggaagtgaccaa

SEQ ID NO: 27371 - DNA, 22 bp, Artificial Sequence
  chemically synthesized
cttgggaagtgaccaataaagg

SEQ ID NO: 27372 - DNA, 22 bp, Artificial Sequence
  chemically synthesized
gggaagtgaccaataaaggttt

SEQ ID NO: 27373 - DNA, 22 bp, Artificial Sequence
  chemically synthesized
ggaagtgaccaataaaggtttg

SEQ ID NO: 27374 - DNA, 22 bp, Artificial Sequence
  chemically synthesized
gtactgctcctgaaggtggatc

SEQ ID NO: 27375 - DNA, 22 bp, Artificial Sequence
  chemically synthesized
tactgctcctgaaggtggatca

SEQ ID NO: 27376 - DNA, 22 bp, Artificial Sequence
  chemically synthesized
ctcctgaaggtggatcagtaca

SEQ ID NO: 27377 - DNA, 22 bp, Artificial Sequence
  chemically synthesized
ctgaaggtggatcagtacacct

SEQ ID NO: 27378 - DNA, 22 bp, Artificial Sequence
  chemically synthesized
aaggtggatcagtacaccttca

SEQ ID NO: 27379 - DNA, 22 bp, Artificial Sequence
  chemically synthesized
cactaggtgactgaggaatgta

SEQ ID NO: 27380 - DNA, 22 bp, Artificial Sequence
  chemically synthesized
actaggtgactgaggaatgtag

SEQ ID NO: 27381 - DNA, 22 bp, Artificial Sequence
  chemically synthesized
ggtgactgaggaatgtagagta

SEQ ID NO: 27382 - DNA, 22 bp, Artificial Sequence
  chemically synthesized
aggaatgtagagtaagatttca

SEQ ID NO: 27383 - DNA, 22 bp, Artificial Sequence
  chemically synthesized
cacagataactctctagtgata

SEQ ID NO: 27384 - DNA, 22 bp, Artificial Sequence
  chemically synthesized
acagataactctctagtgataa

SEQ ID NO: 27385 - DNA, 22 bp, Artificial Sequence
  chemically synthesized
tctagtgataaccaattgctag

SEQ ID NO: 27386 - DNA, 22 bp, Artificial Sequence
  chemically synthesized
tagtgataaccaattgctagtg

SEQ ID NO: 27387 - DNA, 22 bp, Artificial Sequence
  chemically synthesized
gtgataaccaattgctagtgag

SEQ ID NO: 27388 - DNA, 22 bp, Artificial Sequence
  chemically synthesized
ctagtgagtgaggaaagcattt

SEQ ID NO: 27389 - DNA, 22 bp, Artificial Sequence
  chemically synthesized
gtgagtgaggaaagcatttaaa

SEQ ID NO: 27390 - DNA, 22 bp, Artificial Sequence
  chemically synthesized
aaacggaatatatatttaggct

SEQ ID NO: 27391 - DNA, 22 bp, Artificial Sequence
  chemically synthesized
aacggaatatatatttaggcta

SEQ ID NO: 27392 - DNA, 22 bp, Artificial Sequence
  chemically synthesized
aggctacatttaaccttgtcta

SEQ ID NO: 27393 - DNA, 22 bp, Artificial Sequence
  chemically synthesized
ggctacatttaaccttgtctat

SEQ ID NO: 27394 - DNA, 22 bp, Artificial Sequence
  chemically synthesized
catttaaccttgtctattacaa

SEQ ID NO: 27395 - DNA, 22 bp, Artificial Sequence
  chemically synthesized
aaccttgtctattacaacaggc

SEQ ID NO: 27396 - DNA, 22 bp, Artificial Sequence
  chemically synthesized
accttgtctattacaacaggct

SEQ ID NO: 27397 - DNA, 22 bp, Artificial Sequence
  chemically synthesized
gtctattacaacaggctatgaa

SEQ ID NO: 27398 - DNA, 22 bp, Artificial Sequence
  chemically synthesized
tctattacaacaggctatgaat

SEQ ID NO: 27399 - DNA, 22 bp, Artificial Sequence
  chemically synthesized
ttacaacaggctatgaatacag

SEQ ID NO: 27400 - DNA, 22 bp, Artificial Sequence
  chemically synthesized
caacaggctatgaatacagact

SEQ ID NO: 27401 - DNA, 22 bp, Artificial Sequence
  chemically synthesized
tgaatacagacttgtgtatgtg

SEQ ID NO: 27402 - DNA, 22 bp, Artificial Sequence
  chemically synthesized
gtgtatgtgttgaagagggaga

SEQ ID NO: 27403 - DNA, 22 bp, Artificial Sequence
  chemically synthesized
tgtatgtgttgaagagggagaa

SEQ ID NO: 27404 - DNA, 22 bp, Artificial Sequence
  chemically synthesized
aagagggagaaagttgaaaata

SEQ ID NO: 27405 - DNA, 22 bp, Artificial Sequence
  chemically synthesized
aaaatattagccattgccatgg

SEQ ID NO: 27406 - DNA, 22 bp, Artificial Sequence
  chemically synthesized
gccattgccatggaatgtgcat

SEQ ID NO: 27407 - DNA, 22 bp, Artificial Sequence
  chemically synthesized
ccatggaatgtgcatttaaatt

SEQ ID NO: 27408 - DNA, 22 bp, Artificial Sequence
  chemically synthesized
aaattaaaatttaaaatccata

SEQ ID NO: 27409 - DNA, 22 bp, Artificial Sequence
  chemically synthesized
aattaaaatttaaaatccatat

SEQ ID NO: 27410 - DNA, 22 bp, Artificial Sequence
  chemically synthesized
aaatttaaaatccatattatga

SEQ ID NO: 27411 - DNA, 22 bp, Artificial Sequence
  chemically synthesized
aaaatccatattatgacaacat

SEQ ID NO: 27412 - DNA, 22 bp, Artificial Sequence
  chemically synthesized
aaatccatattatgacaacata

SEQ ID NO: 27413 - DNA, 22 bp, Artificial Sequence
  chemically synthesized
tgacaacatagaaataaaaagt

SEQ ID NO: 27414 - DNA, 22 bp, Artificial Sequence
  chemically synthesized
atatttacattttttgttttaa

SEQ ID NO: 27415 - DNA, 22 bp, Artificial Sequence
  chemically synthesized
acattttttgttttaaaatttt

SEQ ID NO: 27416 - DNA, 22 bp, Artificial Sequence
  chemically synthesized
cattttttgttttaaaattttt

SEQ ID NO: 27417 - DNA, 22 bp, Artificial Sequence
  chemically synthesized
tttgttttaaaatttttctcag

SEQ ID NO: 27418 - DNA, 22 bp, Artificial Sequence
  chemically synthesized
ttgttttaaaatttttctcagc

SEQ ID NO: 27419 - DNA, 22 bp, Artificial Sequence
  chemically synthesized
tgttttaaaatttttctcagca

SEQ ID NO: 27420 - DNA, 22 bp, Artificial Sequence
  chemically synthesized
gttttaaaatttttctcagcaa

SEQ ID NO: 27421 - DNA, 22 bp, Artificial Sequence
  chemically synthesized
ttttaaaatttttctcagcaaa

SEQ ID NO: 27422 - DNA, 22 bp, Artificial Sequence
  chemically synthesized
taaaatttttctcagcaaaata

SEQ ID NO: 27423 - DNA, 22 bp, Artificial Sequence
  chemically synthesized
aaaatttttctcagcaaaatag

SEQ ID NO: 27424 - DNA, 22 bp, Artificial Sequence
  chemically synthesized
aaatttttctcagcaaaatagt

SEQ ID NO: 27425 - DNA, 22 bp, Artificial Sequence
  chemically synthesized
ttctcagcaaaatagtataatt

SEQ ID NO: 27426 - DNA, 22 bp, Artificial Sequence
  chemically synthesized
tctcagcaaaatagtataatta

SEQ ID NO: 27427 - DNA, 22 bp, Artificial Sequence
  chemically synthesized
ctcagcaaaatagtataattaa

SEQ ID NO: 27428 - DNA, 22 bp, Artificial Sequence
  chemically synthesized
tcagcaaaatagtataattaaa

SEQ ID NO: 27429 - DNA, 22 bp, Artificial Sequence
  chemically synthesized
agcaaaatagtataattaaaca

SEQ ID NO: 27430 - DNA, 22 bp, Artificial Sequence
  chemically synthesized
aacattttattttaggaagatg

SEQ ID NO: 27431 - DNA, 22 bp, Artificial Sequence
  chemically synthesized
tattttaggaagatgtatatgt

SEQ ID NO: 27432 - DNA, 22 bp, Artificial Sequence
  chemically synthesized
attttaggaagatgtatatgtg

SEQ ID NO: 27433 - DNA, 22 bp, Artificial Sequence
  chemically synthesized
ttttaggaagatgtatatgtga

SEQ ID NO: 27434 - DNA, 22 bp, Artificial Sequence
  chemically synthesized
taggaagatgtatatgtgatta

SEQ ID NO: 27435 - DNA, 22 bp, Artificial Sequence
  chemically synthesized
aggaagatgtatatgtgattag

SEQ ID NO: 27436 - DNA, 22 bp, Artificial Sequence
  chemically synthesized
ggaagatgtatatgtgattaga

SEQ ID NO: 27437 - DNA, 22 bp, Artificial Sequence
  chemically synthesized
gaaccagttggaaacctcaact

SEQ ID NO: 27438 - DNA, 22 bp, Artificial Sequence
  chemically synthesized
gaaacctcaactctacattctg

SEQ ID NO: 27439 - DNA, 22 bp, Artificial Sequence
  chemically synthesized
aactctacattctgttagtaat

SEQ ID NO: 27440 - DNA, 22 bp, Artificial Sequence
  chemically synthesized
tacattctgttagtaattatat

SEQ ID NO: 27441 - DNA, 22 bp, Artificial Sequence
  chemically synthesized
cattctgttagtaattatatga

SEQ ID NO: 27442 - DNA, 22 bp, Artificial Sequence
  chemically synthesized
tgttagtaattatatgaaatgc

SEQ ID NO: 27443 - DNA, 22 bp, Artificial Sequence
  chemically synthesized
ttagtaattatatgaaatgctt

SEQ ID NO: 27444 - DNA, 22 bp, Artificial Sequence
  chemically synthesized
gtaattatatgaaatgcttaag

SEQ ID NO: 27445 - DNA, 22 bp, Artificial Sequence
  chemically synthesized
tatgaaatgcttaagaatgttt

SEQ ID NO: 27446 - DNA, 22 bp, Artificial Sequence
  chemically synthesized
aagaatgtttcatattcacaat

SEQ ID NO: 27447 - DNA, 22 bp, Artificial Sequence
  chemically synthesized
agaatgtttcatattcacaatt

SEQ ID NO: 27448 - DNA, 22 bp, Artificial Sequence
  chemically synthesized
catattcacaattagcttggaa

SEQ ID NO: 27449 - DNA, 22 bp, Artificial Sequence
  chemically synthesized
atattcacaattagcttggaat

SEQ ID NO: 27450 - DNA, 22 bp, Artificial Sequence
  chemically synthesized
acaattagcttggaattaatgt

SEQ ID NO: 27451 - DNA, 22 bp, Artificial Sequence
  chemically synthesized
gcttggaattaatgttttaatt

SEQ ID NO: 27452 - DNA, 22 bp, Artificial Sequence
  chemically synthesized
ggaattaatgttttaattcagg

SEQ ID NO: 27453 - DNA, 22 bp, Artificial Sequence
  chemically synthesized
gaattaatgttttaattcagga

SEQ ID NO: 27454 - DNA, 22 bp, Artificial Sequence
  chemically synthesized
atgttttaattcaggagcttct

SEQ ID NO: 27455 - DNA, 22 bp, Artificial Sequence
  chemically synthesized
taattcaggagcttctcaaaag

SEQ ID NO: 27456 - DNA, 22 bp, Artificial Sequence
  chemically synthesized
aattcaggagcttctcaaaagg

SEQ ID NO: 27457 - DNA, 22 bp, Artificial Sequence
  chemically synthesized
attcaggagcttctcaaaaggc

SEQ ID NO: 27458 - DNA, 22 bp, Artificial Sequence
  chemically synthesized
aggagcttctcaaaaggcaaaa

SEQ ID NO: 27459 - DNA, 22 bp, Artificial Sequence
  chemically synthesized
ctcaaaaggcaaaatactgtgc

SEQ ID NO: 27460 - DNA, 22 bp, Artificial Sequence
  chemically synthesized
tcaaaaggcaaaatactgtgct

SEQ ID NO: 27461 - DNA, 22 bp, Artificial Sequence
  chemically synthesized
aaaaggcaaaatactgtgctcc

SEQ ID NO: 27462 - DNA, 22 bp, Artificial Sequence
  chemically synthesized
tgctcctttcagaatgaaagta

SEQ ID NO: 27463 - DNA, 22 bp, Artificial Sequence
  chemically synthesized
ctttcagaatgaaagtaatttt

SEQ ID NO: 27464 - DNA, 22 bp, Artificial Sequence
  chemically synthesized
tcagaatgaaagtaattttttt

SEQ ID NO: 27465 - DNA, 22 bp, Artificial Sequence
  chemically synthesized
cagaatgaaagtaatttttttc

SEQ ID NO: 27466 - DNA, 22 bp, Artificial Sequence
  chemically synthesized
agaatgaaagtaatttttttct

SEQ ID NO: 27467 - DNA, 22 bp, Artificial Sequence
  chemically synthesized
ttttcttcaatgctatgcttat

SEQ ID NO: 27468 - DNA, 22 bp, Artificial Sequence
  chemically synthesized
tttcttcaatgctatgcttatg

SEQ ID NO: 27469 - DNA, 22 bp, Artificial Sequence
  chemically synthesized
ttcttcaatgctatgcttatgt

SEQ ID NO: 27470 - DNA, 22 bp, Artificial Sequence
  chemically synthesized
tcttcaatgctatgcttatgta

SEQ ID NO: 27471 - DNA, 22 bp, Artificial Sequence
  chemically synthesized
cttcaatgctatgcttatgtag

SEQ ID NO: 27472 - DNA, 22 bp, Artificial Sequence
  chemically synthesized
ttcaatgctatgcttatgtagg

SEQ ID NO: 27473 - DNA, 22 bp, Artificial Sequence
  chemically synthesized
caatgctatgcttatgtaggaa

SEQ ID NO: 27474 - DNA, 22 bp, Artificial Sequence
  chemically synthesized
aatgctatgcttatgtaggaat

SEQ ID NO: 27475 - DNA, 22 bp, Artificial Sequence
  chemically synthesized
tgcttatgtaggaattataaaa

SEQ ID NO: 27476 - DNA, 22 bp, Artificial Sequence
  chemically synthesized
atgtaggaattataaaataaag

SEQ ID NO: 27477 - DNA, 22 bp, Artificial Sequence
  chemically synthesized
tgtaggaattataaaataaaga

SEQ ID NO: 27478 - DNA, 22 bp, Artificial Sequence
  chemically synthesized
taaaataaagaaaatcaaattg

SEQ ID NO: 27479 - DNA, 22 bp, Artificial Sequence
  chemically synthesized
ataaaacaatttgcgagtgagg

SEQ ID NO: 27480 - DNA, 22 bp, Artificial Sequence
  chemically synthesized
gcgagtgaggtataacctcatc

SEQ ID NO: 27481 - DNA, 22 bp, Artificial Sequence
  chemically synthesized
cgagtgaggtataacctcatct

SEQ ID NO: 27482 - DNA, 22 bp, Artificial Sequence
  chemically synthesized
atctgtgctgggtaagagaagg

SEQ ID NO: 27483 - DNA, 22 bp, Artificial Sequence
  chemically synthesized
tgctgggtaagagaaggcaagg

SEQ ID NO: 27484 - DNA, 22 bp, Artificial Sequence
  chemically synthesized
ggtaagagaaggcaaggtagag

SEQ ID NO: 27485 - DNA, 22 bp, Artificial Sequence
  chemically synthesized
tgaaaataaagacatctgtaaa

SEQ ID NO: 27486 - DNA, 22 bp, Artificial Sequence
  chemically synthesized
gaaaataaagacatctgtaaaa

SEQ ID NO: 27487 - DNA, 22 bp, Artificial Sequence
  chemically synthesized
aaaataaagacatctgtaaaat

SEQ ID NO: 27488 - DNA, 22 bp, Artificial Sequence
  chemically synthesized
taaaattataaaacaattcctt

SEQ ID NO: 27489 - DNA, 22 bp, Artificial Sequence
  chemically synthesized
taaaacaattccttgtgggttt

SEQ ID NO: 27490 - DNA, 22 bp, Artificial Sequence
  chemically synthesized
cttgtgggtttatactctctag

SEQ ID NO: 27491 - DNA, 22 bp, Artificial Sequence
  chemically synthesized
gtgggtttatactctctagttt

SEQ ID NO: 27492 - DNA, 22 bp, Artificial Sequence
  chemically synthesized
tgggtttatactctctagttta

SEQ ID NO: 27493 - DNA, 22 bp, Artificial Sequence
  chemically synthesized
atactctctagtttaaaagtgt

SEQ ID NO: 27494 - DNA, 22 bp, Artificial Sequence
  chemically synthesized
tactctctagtttaaaagtgtc

SEQ ID NO: 27495 - DNA, 22 bp, Artificial Sequence
  chemically synthesized
tctagtttaaaagtgtcaagac

SEQ ID NO: 27496 - DNA, 22 bp, Artificial Sequence
  chemically synthesized
tagtttaaaagtgtcaagacta

SEQ ID NO: 27497 - DNA, 22 bp, Artificial Sequence
  chemically synthesized
gtttaaaagtgtcaagactatt

SEQ ID NO: 27498 - DNA, 22 bp, Artificial Sequence
  chemically synthesized
aaaagtgtcaagactattgaag

SEQ ID NO: 27499 - DNA, 22 bp, Artificial Sequence
  chemically synthesized
aaagtgtcaagactattgaagg

SEQ ID NO: 27500 - DNA, 22 bp, Artificial Sequence
  chemically synthesized
ttgaaggaacattagcaaagaa

SEQ ID NO: 27501 - DNA, 22 bp, Artificial Sequence
  chemically synthesized
aaggaacattagcaaagaaaaa

SEQ ID NO: 27502 - DNA, 22 bp, Artificial Sequence
  chemically synthesized
gcaaagaaaaagtcatggtttt

SEQ ID NO: 27503 - DNA, 22 bp, Artificial Sequence
  chemically synthesized
tgaaggctgagttcctcaagat

SEQ ID NO: 27504 - DNA, 22 bp, Artificial Sequence
  chemically synthesized
gaaggctgagttcctcaagatc

SEQ ID NO: 27505 - DNA, 22 bp, Artificial Sequence
  chemically synthesized
aaggctgagttcctcaagatct

SEQ ID NO: 27506 - DNA, 22 bp, Artificial Sequence
  chemically synthesized
agttcctcaagatcttgaagaa

SEQ ID NO: 27507 - DNA, 22 bp, Artificial Sequence
  chemically synthesized
ctcaagatcttgaagaatcaag

SEQ ID NO: 27508 - DNA, 22 bp, Artificial Sequence
  chemically synthesized
aagatcttgaagaatcaagcca

SEQ ID NO: 27509 - DNA, 22 bp, Artificial Sequence
  chemically synthesized
gaagaatcaagccaactgattg

SEQ ID NO: 27510 - DNA, 22 bp, Artificial Sequence
  chemically synthesized
aagaatcaagccaactgattgc

SEQ ID NO: 27511 - DNA, 22 bp, Artificial Sequence
  chemically synthesized
attgctgggtaaatggcagtga

SEQ ID NO: 27512 - DNA, 22 bp, Artificial Sequence
  chemically synthesized
ctgggtaaatggcagtgatgac

SEQ ID NO: 27513 - DNA, 22 bp, Artificial Sequence
  chemically synthesized
ggtaaatggcagtgatgacttg

SEQ ID NO: 27514 - DNA, 22 bp, Artificial Sequence
  chemically synthesized
gtgtgatttaaacgatctgaaa

SEQ ID NO: 27515 - DNA, 22 bp, Artificial Sequence
  chemically synthesized
tgtgatttaaacgatctgaaat

SEQ ID NO: 27516 - DNA, 22 bp, Artificial Sequence
  chemically synthesized
aaacgatctgaaattatgtcat

SEQ ID NO: 27517 - DNA, 22 bp, Artificial Sequence
  chemically synthesized
aacgatctgaaattatgtcatg

SEQ ID NO: 27518 - DNA, 22 bp, Artificial Sequence
  chemically synthesized
aaattatgtcatgtgttgtgat

SEQ ID NO: 27519 - DNA, 22 bp, Artificial Sequence
  chemically synthesized
tgtcatgtgttgtgatatataa

SEQ ID NO: 27520 - DNA, 22 bp, Artificial Sequence
  chemically synthesized
tgatatataacacatttatttt

SEQ ID NO: 27521 - DNA, 22 bp, Artificial Sequence
  chemically synthesized
atttttcattttgtgtttacta

SEQ ID NO: 27522 - DNA, 22 bp, Artificial Sequence
  chemically synthesized
tttttcattttgtgtttactat

SEQ ID NO: 27523 - DNA, 22 bp, Artificial Sequence
  chemically synthesized
ttcattttgtgtttactatttc

SEQ ID NO: 27524 - DNA, 22 bp, Artificial Sequence
  chemically synthesized
tcattttgtgtttactatttca

SEQ ID NO: 27525 - DNA, 22 bp, Artificial Sequence
  chemically synthesized
cattttgtgtttactatttcat

SEQ ID NO: 27526 - DNA, 22 bp, Artificial Sequence
  chemically synthesized
attttgtgtttactatttcatg

SEQ ID NO: 27527 - DNA, 22 bp, Artificial Sequence
  chemically synthesized
tgtgtttactatttcatgtcta

SEQ ID NO: 27528 - DNA, 22 bp, Artificial Sequence
  chemically synthesized
gtgtttactatttcatgtctat

SEQ ID NO: 27529 - DNA, 22 bp, Artificial Sequence
  chemically synthesized
tgtttactatttcatgtctatt

SEQ ID NO: 27530 - DNA, 22 bp, Artificial Sequence
  chemically synthesized
actatttcatgtctattacagt

SEQ ID NO: 27531 - DNA, 22 bp, Artificial Sequence
  chemically synthesized
ctatttcatgtctattacagta

SEQ ID NO: 27532 - DNA, 22 bp, Artificial Sequence
  chemically synthesized
tttcatgtctattacagtaatc

SEQ ID NO: 27533 - DNA, 22 bp, Artificial Sequence
  chemically synthesized
catgtctattacagtaatctaa

SEQ ID NO: 27534 - DNA, 22 bp, Artificial Sequence
  chemically synthesized
atgtctattacagtaatctaaa

SEQ ID NO: 27535 - DNA, 22 bp, Artificial Sequence
  chemically synthesized
ttacagtaatctaaaggatctg

SEQ ID NO: 27536 - DNA, 22 bp, Artificial Sequence
  chemically synthesized
cagtaatctaaaggatctgaaa

SEQ ID NO: 27537 - DNA, 22 bp, Artificial Sequence
  chemically synthesized
aaggatctgaaataataaccag

SEQ ID NO: 27538 - DNA, 22 bp, Artificial Sequence
  chemically synthesized
aaataataaccagaatgtgata

SEQ ID NO: 27539 - DNA, 22 bp, Artificial Sequence
  chemically synthesized
cttccttcttttggctaatcag

SEQ ID NO: 27540 - DNA, 22 bp, Artificial Sequence
  chemically synthesized
ccttcttttggctaatcagagc

SEQ ID NO: 27541 - DNA, 22 bp, Artificial Sequence
  chemically synthesized
cttcttttggctaatcagagcc

SEQ ID NO: 27542 - DNA, 22 bp, Artificial Sequence
  chemically synthesized
cttttggctaatcagagccagc

SEQ ID NO: 27543 - DNA, 22 bp, Artificial Sequence
  chemically synthesized
ttttggctaatcagagccagca

SEQ ID NO: 27544 - DNA, 22 bp, Artificial Sequence
  chemically synthesized
ttggctaatcagagccagcata

SEQ ID NO: 27545 - DNA, 22 bp, Artificial Sequence
  chemically synthesized
tggctaatcagagccagcataa

SEQ ID NO: 27546 - DNA, 22 bp, Artificial Sequence
  chemically synthesized
ggctaatcagagccagcataat

SEQ ID NO: 27547 - DNA, 22 bp, Artificial Sequence
  chemically synthesized
gctaatcagagccagcataatc

SEQ ID NO: 27548 - DNA, 22 bp, Artificial Sequence
  chemically synthesized
atcagagccagcataatctcaa

SEQ ID NO: 27549 - DNA, 22 bp, Artificial Sequence
  chemically synthesized
aaaattaaatgcattatatatg

SEQ ID NO: 27550 - DNA, 22 bp, Artificial Sequence
  chemically synthesized
aatgcattatatatggcatgca

SEQ ID NO: 27551 - DNA, 22 bp, Artificial Sequence
  chemically synthesized
tatatggcatgcattctgaaaa

SEQ ID NO: 27552 - DNA, 22 bp, Artificial Sequence
  chemically synthesized
tgaaaaatcagaattcacctta

SEQ ID NO: 27553 - DNA, 22 bp, Artificial Sequence
  chemically synthesized
aaaaatcagaattcaccttata

SEQ ID NO: 27554 - DNA, 22 bp, Artificial Sequence
  chemically synthesized
accttatactaactgttcaaag

SEQ ID NO: 27555 - DNA, 22 bp, Artificial Sequence
  chemically synthesized
atactaactgttcaaagttctc

SEQ ID NO: 27556 - DNA, 22 bp, Artificial Sequence
  chemically synthesized
tactaactgttcaaagttctcg

SEQ ID NO: 27557 - DNA, 22 bp, Artificial Sequence
  chemically synthesized
actgttcaaagttctcgtgtgt

SEQ ID NO: 27558 - DNA, 22 bp, Artificial Sequence
  chemically synthesized
ttcaaagttctcgtgtgtatgc

SEQ ID NO: 27559 - DNA, 22 bp, Artificial Sequence
  chemically synthesized
aaagttctcgtgtgtatgcatt

SEQ ID NO: 27560 - DNA, 22 bp, Artificial Sequence
  chemically synthesized
tcgtgtgtatgcattcataaaa

SEQ ID NO: 27561 - DNA, 22 bp, Artificial Sequence
  chemically synthesized
gtgtgtatgcattcataaaatc

SEQ ID NO: 27562 - DNA, 22 bp, Artificial Sequence
  chemically synthesized
ataaaatcaaaattaaaagtca

SEQ ID NO: 27563 - DNA, 22 bp, Artificial Sequence
  chemically synthesized
aaagtcaattttgcctatgtag

SEQ ID NO: 27564 - DNA, 22 bp, Artificial Sequence
  chemically synthesized
tgcctatgtagaagtggacaga

SEQ ID NO: 27565 - DNA, 22 bp, Artificial Sequence
  chemically synthesized
gcctatgtagaagtggacagaa

SEQ ID NO: 27566 - DNA, 22 bp, Artificial Sequence
  chemically synthesized
cctatgtagaagtggacagaat

SEQ ID NO: 27567 - DNA, 22 bp, Artificial Sequence
  chemically synthesized
tgtagaagtggacagaatgcat

SEQ ID NO: 27568 - DNA, 22 bp, Artificial Sequence
  chemically synthesized
attctctgtagtttagtgagaa

SEQ ID NO: 27569 - DNA, 22 bp, Artificial Sequence
  chemically synthesized
ttctctgtagtttagtgagaaa

SEQ ID NO: 27570 - DNA, 22 bp, Artificial Sequence
  chemically synthesized
tctgtagtttagtgagaaagaa

SEQ ID NO: 27571 - DNA, 22 bp, Artificial Sequence
  chemically synthesized
tgtagtttagtgagaaagaatc

SEQ ID NO: 27572 - DNA, 22 bp, Artificial Sequence
  chemically synthesized
tagtttagtgagaaagaatcta

SEQ ID NO: 27573 - DNA, 22 bp, Artificial Sequence
  chemically synthesized
agtgagaaagaatctaggagga

SEQ ID NO: 27574 - DNA, 22 bp, Artificial Sequence
  chemically synthesized
gtgagaaagaatctaggaggac

SEQ ID NO: 27575 - DNA, 22 bp, Artificial Sequence
  chemically synthesized
ggaggacagaaaccttattaca

SEQ ID NO: 27576 - DNA, 22 bp, Artificial Sequence
  chemically synthesized
attacagagaagtgaagtattt

SEQ ID NO: 27577 - DNA, 22 bp, Artificial Sequence
  chemically synthesized
ttacagagaagtgaagtatttt

SEQ ID NO: 27578 - DNA, 22 bp, Artificial Sequence
  chemically synthesized
cagagaagtgaagtattttatg

SEQ ID NO: 27579 - DNA, 22 bp, Artificial Sequence
  chemically synthesized
tatgtgtacctgtttctgttgt

SEQ ID NO: 27580 - DNA, 22 bp, Artificial Sequence
  chemically synthesized
atgtgtacctgtttctgttgtt

SEQ ID NO: 27581 - DNA, 22 bp, Artificial Sequence
  chemically synthesized
tgtgtacctgtttctgttgttt

SEQ ID NO: 27582 - DNA, 22 bp, Artificial Sequence
  chemically synthesized
tttctgttgtttctttttaaat

SEQ ID NO: 27583 - DNA, 22 bp, Artificial Sequence
  chemically synthesized
ctgttgtttctttttaaattat

SEQ ID NO: 27584 - DNA, 22 bp, Artificial Sequence
  chemically synthesized
tgttgtttctttttaaattatt

SEQ ID NO: 27585 - DNA, 22 bp, Artificial Sequence
  chemically synthesized
ttgtttctttttaaattatttt

SEQ ID NO: 27586 - DNA, 22 bp, Artificial Sequence
  chemically synthesized
tttctttttaaattattttgta

SEQ ID NO: 27587 - DNA, 22 bp, Artificial Sequence
  chemically synthesized
ctttttaaattattttgtattc

SEQ ID NO: 27588 - DNA, 22 bp, Artificial Sequence
  chemically synthesized
tttttaaattattttgtattct

SEQ ID NO: 27589 - DNA, 22 bp, Artificial Sequence
  chemically synthesized
tttaaattattttgtattcttt

SEQ ID NO: 27590 - DNA, 22 bp, Artificial Sequence
  chemically synthesized
ttaaattattttgtattctttt

SEQ ID NO: 27591 - DNA, 22 bp, Artificial Sequence
  chemically synthesized
taaattattttgtattcttttc

SEQ ID NO: 27592 - DNA, 22 bp, Artificial Sequence
  chemically synthesized
aaattattttgtattcttttcc

SEQ ID NO: 27593 - DNA, 22 bp, Artificial Sequence
  chemically synthesized
aattattttgtattcttttcct

SEQ ID NO: 27594 - DNA, 22 bp, Artificial Sequence
  chemically synthesized
ttttgtattcttttcctcagag

SEQ ID NO: 27595 - DNA, 22 bp, Artificial Sequence
  chemically synthesized
tgtattcttttcctcagagatc

SEQ ID NO: 27596 - DNA, 22 bp, Artificial Sequence
  chemically synthesized
gtattcttttcctcagagatct

SEQ ID NO: 27597 - DNA, 22 bp, Artificial Sequence
  chemically synthesized
tattcttttcctcagagatctt

SEQ ID NO: 27598 - DNA, 22 bp, Artificial Sequence
  chemically synthesized
ttttcctcagagatctttatcc

SEQ ID NO: 27599 - DNA, 22 bp, Artificial Sequence
  chemically synthesized
ttcctcagagatctttatcctg

SEQ ID NO: 27600 - DNA, 22 bp, Artificial Sequence
  chemically synthesized
tcctcagagatctttatcctga

SEQ ID NO: 27601 - DNA, 22 bp, Artificial Sequence
  chemically synthesized
cctcagagatctttatcctgaa

SEQ ID NO: 27602 - DNA, 22 bp, Artificial Sequence
  chemically synthesized
ctcagagatctttatcctgaaa

SEQ ID NO: 27603 - DNA, 22 bp, Artificial Sequence
  chemically synthesized
agagatctttatcctgaaatga

SEQ ID NO: 27604 - DNA, 22 bp, Artificial Sequence
  chemically synthesized
tatcctgaaatgagcatgtgtt

SEQ ID NO: 27605 - DNA, 22 bp, Artificial Sequence
  chemically synthesized
atcctgaaatgagcatgtgttt

SEQ ID NO: 27606 - DNA, 22 bp, Artificial Sequence
  chemically synthesized
tcctgaaatgagcatgtgtttt

SEQ ID NO: 27607 - DNA, 22 bp, Artificial Sequence
  chemically synthesized
aaatgagcatgtgtttttaatg

SEQ ID NO: 27608 - DNA, 22 bp, Artificial Sequence
  chemically synthesized
ttaatgtcctttttctagtcac

SEQ ID NO: 27609 - DNA, 22 bp, Artificial Sequence
  chemically synthesized
taatgtcctttttctagtcaca

SEQ ID NO: 27610 - DNA, 22 bp, Artificial Sequence
  chemically synthesized
aatgtcctttttctagtcacaa

SEQ ID NO: 27611 - DNA, 22 bp, Artificial Sequence
  chemically synthesized
atgtcctttttctagtcacaaa

SEQ ID NO: 27612 - DNA, 22 bp, Artificial Sequence
  chemically synthesized
tttctagtcacaaatttttcca

SEQ ID NO: 27613 - DNA, 22 bp, Artificial Sequence
  chemically synthesized
ttctagtcacaaatttttccag

SEQ ID NO: 27614 - DNA, 22 bp, Artificial Sequence
  chemically synthesized
tctagtcacaaatttttccagt

SEQ ID NO: 27615 - DNA, 22 bp, Artificial Sequence
  chemically synthesized
ctagtcacaaatttttccagtc

SEQ ID NO: 27616 - DNA, 22 bp, Artificial Sequence
  chemically synthesized
tagtcacaaatttttccagtcc

SEQ ID NO: 27617 - DNA, 22 bp, Artificial Sequence
  chemically synthesized
gtcacaaatttttccagtccag

SEQ ID NO: 27618 - DNA, 22 bp, Artificial Sequence
  chemically synthesized
ttccagtccagtttttaaatat

SEQ ID NO: 27619 - DNA, 22 bp, Artificial Sequence
  chemically synthesized
tccagtccagtttttaaatatg

SEQ ID NO: 27620 - DNA, 22 bp, Artificial Sequence
  chemically synthesized
ccagtccagtttttaaatatgc

SEQ ID NO: 27621 - DNA, 22 bp, Artificial Sequence
  chemically synthesized
cagtccagtttttaaatatgcc

SEQ ID NO: 27622 - DNA, 22 bp, Artificial Sequence
  chemically synthesized
ttaaatatgcccaaagttcctg

SEQ ID NO: 27623 - DNA, 22 bp, Artificial Sequence
  chemically synthesized
taaatatgcccaaagttcctgg

SEQ ID NO: 27624 - DNA, 22 bp, Artificial Sequence
  chemically synthesized
aaatatgcccaaagttcctggg

SEQ ID NO: 27625 - DNA, 22 bp, Artificial Sequence
  chemically synthesized
aatatgcccaaagttcctggga

SEQ ID NO: 27626 - DNA, 22 bp, Artificial Sequence
  chemically synthesized
ctgggaacagaaccatctctat

SEQ ID NO: 27627 - DNA, 22 bp, Artificial Sequence
  chemically synthesized
ggaacagaaccatctctatcac

SEQ ID NO: 27628 - DNA, 22 bp, Artificial Sequence
  chemically synthesized
tatcacatgtgaatcccggagt

SEQ ID NO: 27629 - DNA, 22 bp, Artificial Sequence
  chemically synthesized
tcacatgtgaatcccggagtat

SEQ ID NO: 27630 - DNA, 22 bp, Artificial Sequence
  chemically synthesized
gaaataaaagttttctctagag

SEQ ID NO: 27631 - DNA, 22 bp, Artificial Sequence
  chemically synthesized
aaataaaagttttctctagaga

SEQ ID NO: 27632 - DNA, 22 bp, Artificial Sequence
  chemically synthesized
tctctagagagtgggcaggagc

SEQ ID NO: 27633 - DNA, 22 bp, Artificial Sequence
  chemically synthesized
ctctagagagtgggcaggagct

SEQ ID NO: 27634 - DNA, 22 bp, Artificial Sequence
  chemically synthesized
tctagagagtgggcaggagctc

SEQ ID NO: 27635 - DNA, 22 bp, Artificial Sequence
  chemically synthesized
tagagagtgggcaggagctcaa

SEQ ID NO: 27636 - DNA, 22 bp, Artificial Sequence
  chemically synthesized
gagagtgggcaggagctcaagg

SEQ ID NO: 27637 - DNA, 22 bp, Artificial Sequence
  chemically synthesized
aaggacatagcttattggtgga

SEQ ID NO: 27638 - DNA, 22 bp, Artificial Sequence
  chemically synthesized
attggtggataaaactggaagg

SEQ ID NO: 27639 - DNA, 22 bp, Artificial Sequence
  chemically synthesized
ttggtggataaaactggaaggg

SEQ ID NO: 27640 - DNA, 22 bp, Artificial Sequence
  chemically synthesized
gtggataaaactggaagggact

SEQ ID NO: 27641 - DNA, 22 bp, Artificial Sequence
  chemically synthesized
gaagggacttgttagcactggg

SEQ ID NO: 27642 - DNA, 22 bp, Artificial Sequence
  chemically synthesized
gttagcactgggaatcagtcca

SEQ ID NO: 27643 - DNA, 22 bp, Artificial Sequence
  chemically synthesized
ttagcactgggaatcagtccag

SEQ ID NO: 27644 - DNA, 22 bp, Artificial Sequence
  chemically synthesized
gcactgggaatcagtccagaag

SEQ ID NO: 27645 - DNA, 22 bp, Artificial Sequence
  chemically synthesized
ggaatcagtccagaagatctct

SEQ ID NO: 27646 - DNA, 22 bp, Artificial Sequence
  chemically synthesized
tgcacaagttcctgcacctgag

SEQ ID NO: 27647 - DNA, 22 bp, Artificial Sequence
  chemically synthesized
cacaagttcctgcacctgagca

SEQ ID NO: 27648 - DNA, 22 bp, Artificial Sequence
  chemically synthesized
ctgcacctgagcagagcccctt

SEQ ID NO: 27649 - DNA, 22 bp, Artificial Sequence
  chemically synthesized
cacctgagcagagccccttctg

SEQ ID NO: 27650 - DNA, 22 bp, Artificial Sequence
  chemically synthesized
agcagagccccttctgctttcc

SEQ ID NO: 27651 - DNA, 22 bp, Artificial Sequence
  chemically synthesized
ctgctttcctcttttctcatca

SEQ ID NO: 27652 - DNA, 22 bp, Artificial Sequence
  chemically synthesized
tgctttcctcttttctcatcat

SEQ ID NO: 27653 - DNA, 22 bp, Artificial Sequence
  chemically synthesized
ctttcctcttttctcatcattt

SEQ ID NO: 27654 - DNA, 22 bp, Artificial Sequence
  chemically synthesized
tcctcttttctcatcatttaac

SEQ ID NO: 27655 - DNA, 22 bp, Artificial Sequence
  chemically synthesized
cctcttttctcatcatttaaca

SEQ ID NO: 27656 - DNA, 22 bp, Artificial Sequence
  chemically synthesized
ctcttttctcatcatttaacaa

SEQ ID NO: 27657 - DNA, 22 bp, Artificial Sequence
  chemically synthesized
ttttctcatcatttaacaaaca

SEQ ID NO: 27658 - DNA, 22 bp, Artificial Sequence
  chemically synthesized
ttctcatcatttaacaaacatt

SEQ ID NO: 27659 - DNA, 22 bp, Artificial Sequence
  chemically synthesized
tctcatcatttaacaaacatta

SEQ ID NO: 27660 - DNA, 22 bp, Artificial Sequence
  chemically synthesized
ctcatcatttaacaaacattaa

SEQ ID NO: 27661 - DNA, 22 bp, Artificial Sequence
  chemically synthesized
tcatcatttaacaaacattaat

SEQ ID NO: 27662 - DNA, 22 bp, Artificial Sequence
  chemically synthesized
atcatttaacaaacattaatgg

SEQ ID NO: 27663 - DNA, 22 bp, Artificial Sequence
  chemically synthesized
aacaaacattaatggagcactg

SEQ ID NO: 27664 - DNA, 22 bp, Artificial Sequence
  chemically synthesized
acaaacattaatggagcactgt

SEQ ID NO: 27665 - DNA, 22 bp, Artificial Sequence
  chemically synthesized
atggagcactgttacctgggca

SEQ ID NO: 27666 - DNA, 22 bp, Artificial Sequence
  chemically synthesized
ttacctgggcactgggaacacg

SEQ ID NO: 27667 - DNA, 22 bp, Artificial Sequence
  chemically synthesized
cctgggcactgggaacacgcca

SEQ ID NO: 27668 - DNA, 22 bp, Artificial Sequence
  chemically synthesized
ggcactgggaacacgccagtga

SEQ ID NO: 27669 - DNA, 22 bp, Artificial Sequence
  chemically synthesized
ggaacacgccagtgaaactaag

SEQ ID NO: 27670 - DNA, 22 bp, Artificial Sequence
  chemically synthesized
agttattttatggatcttataa

SEQ ID NO: 27671 - DNA, 22 bp, Artificial Sequence
  chemically synthesized
ttttatggatcttataatcagt

SEQ ID NO: 27672 - DNA, 22 bp, Artificial Sequence
  chemically synthesized
tatggatcttataatcagtagc

SEQ ID NO: 27673 - DNA, 22 bp, Artificial Sequence
  chemically synthesized
atggatcttataatcagtagca

SEQ ID NO: 27674 - DNA, 22 bp, Artificial Sequence
  chemically synthesized
tggatcttataatcagtagcat

SEQ ID NO: 27675 - DNA, 22 bp, Artificial Sequence
  chemically synthesized
ataatcagtagcatgtgtgttg

SEQ ID NO: 27676 - DNA, 22 bp, Artificial Sequence
  chemically synthesized
taatcagtagcatgtgtgttga

SEQ ID NO: 27677 - DNA, 22 bp, Artificial Sequence
  chemically synthesized
atctcagggtctagaacagtgc

SEQ ID NO: 27678 - DNA, 22 bp, Artificial Sequence
  chemically synthesized
agggtctagaacagtgcctggt

SEQ ID NO: 27679 - DNA, 22 bp, Artificial Sequence
  chemically synthesized
gaacagtgcctggtacatagaa

SEQ ID NO: 27680 - DNA, 22 bp, Artificial Sequence
  chemically synthesized
gtacatagaaaatgctcaatgg

SEQ ID NO: 27681 - DNA, 22 bp, Artificial Sequence
  chemically synthesized
aatggatttttttttgaaaaaa

SEQ ID NO: 27682 - DNA, 22 bp, Artificial Sequence
  chemically synthesized
ttttttgaaaaaatttgttttt

SEQ ID NO: 27683 - DNA, 22 bp, Artificial Sequence
  chemically synthesized
tttttgaaaaaatttgtttttc

SEQ ID NO: 27684 - DNA, 22 bp, Artificial Sequence
  chemically synthesized
ttttgaaaaaatttgtttttca

SEQ ID NO: 27685 - DNA, 22 bp, Artificial Sequence
  chemically synthesized
tttgaaaaaatttgtttttcaa

SEQ ID NO: 27686 - DNA, 22 bp, Artificial Sequence
  chemically synthesized
ttgaaaaaatttgtttttcaac

SEQ ID NO: 27687 - DNA, 22 bp, Artificial Sequence
  chemically synthesized
tgaaaaaatttgtttttcaacc

SEQ ID NO: 27688 - DNA, 22 bp, Artificial Sequence
  chemically synthesized
gaaaaaatttgtttttcaaccc

SEQ ID NO: 27689 - DNA, 22 bp, Artificial Sequence
  chemically synthesized
aaaaaatttgtttttcaacccc

SEQ ID NO: 27690 - DNA, 22 bp, Artificial Sequence
  chemically synthesized
gtttttcaacccctaagctgcc

SEQ ID NO: 27691 - DNA, 22 bp, Artificial Sequence
  chemically synthesized
tttttcaacccctaagctgcct

SEQ ID NO: 27692 - DNA, 22 bp, Artificial Sequence
  chemically synthesized
ttcaacccctaagctgccttta

SEQ ID NO: 27693 - DNA, 22 bp, Artificial Sequence
  chemically synthesized
tcaacccctaagctgcctttaa

SEQ ID NO: 27694 - DNA, 22 bp, Artificial Sequence
  chemically synthesized
caacccctaagctgcctttaat

SEQ ID NO: 27695 - DNA, 22 bp, Artificial Sequence
  chemically synthesized
aacccctaagctgcctttaata

SEQ ID NO: 27696 - DNA, 22 bp, Artificial Sequence
  chemically synthesized
agctgcctttaatacttatttt

SEQ ID NO: 27697 - DNA, 22 bp, Artificial Sequence
  chemically synthesized
cctttaatacttattttctatc

SEQ ID NO: 27698 - DNA, 22 bp, Artificial Sequence
  chemically synthesized
taatacttattttctatcattt

SEQ ID NO: 27699 - DNA, 22 bp, Artificial Sequence
  chemically synthesized
aatacttattttctatcatttc

SEQ ID NO: 27700 - DNA, 22 bp, Artificial Sequence
  chemically synthesized
atacttattttctatcatttcc

SEQ ID NO: 27701 - DNA, 22 bp, Artificial Sequence
  chemically synthesized
attttctatcatttccctttca

SEQ ID NO: 27702 - DNA, 22 bp, Artificial Sequence
  chemically synthesized
ttttctatcatttccctttcaa

SEQ ID NO: 27703 - DNA, 22 bp, Artificial Sequence
  chemically synthesized
tctatcatttccctttcaaggg

SEQ ID NO: 27704 - DNA, 22 bp, Artificial Sequence
  chemically synthesized
ctatcatttccctttcaagggg

SEQ ID NO: 27705 - DNA, 22 bp, Artificial Sequence
  chemically synthesized
tatcatttccctttcaagggga

SEQ ID NO: 27706 - DNA, 22 bp, Artificial Sequence
  chemically synthesized
tcatttccctttcaaggggaag

SEQ ID NO: 27707 - DNA, 22 bp, Artificial Sequence
  chemically synthesized
ccctttcaaggggaagggaagt

SEQ ID NO: 27708 - DNA, 22 bp, Artificial Sequence
  chemically synthesized
cctttcaaggggaagggaagtg

SEQ ID NO: 27709 - DNA, 22 bp, Artificial Sequence
  chemically synthesized
tcaaggggaagggaagtgtttt

SEQ ID NO: 27710 - DNA, 22 bp, Artificial Sequence
  chemically synthesized
caaggggaagggaagtgttttt

SEQ ID NO: 27711 - DNA, 22 bp, Artificial Sequence
  chemically synthesized
aaggggaagggaagtgtttttg

SEQ ID NO: 27712 - DNA, 22 bp, Artificial Sequence
  chemically synthesized
ttgtggagaggtccccacaatg

SEQ ID NO: 27713 - DNA, 22 bp, Artificial Sequence
  chemically synthesized
tgtggagaggtccccacaatgt

SEQ ID NO: 27714 - DNA, 22 bp, Artificial Sequence
  chemically synthesized
gtggagaggtccccacaatgtg

SEQ ID NO: 27715 - DNA, 22 bp, Artificial Sequence
  chemically synthesized
tggagaggtccccacaatgtga

SEQ ID NO: 27716 - DNA, 22 bp, Artificial Sequence
  chemically synthesized
acacaagttgatatcatcttca

SEQ ID NO: 27717 - DNA, 22 bp, Artificial Sequence
  chemically synthesized
cacaagttgatatcatcttcaa

SEQ ID NO: 27718 - DNA, 22 bp, Artificial Sequence
  chemically synthesized
atatcatcttcaatgtatcttt

SEQ ID NO: 27719 - DNA, 22 bp, Artificial Sequence
  chemically synthesized
caatgtatctttattttaatat

SEQ ID NO: 27720 - DNA, 22 bp, Artificial Sequence
  chemically synthesized
aatgtatctttattttaatatt

SEQ ID NO: 27721 - DNA, 22 bp, Artificial Sequence
  chemically synthesized
tattttaatattatcatagcct

SEQ ID NO: 27722 - DNA, 22 bp, Artificial Sequence
  chemically synthesized
attttaatattatcatagcctg

SEQ ID NO: 27723 - DNA, 22 bp, Artificial Sequence
  chemically synthesized
ttttaatattatcatagcctgg

SEQ ID NO: 27724 - DNA, 22 bp, Artificial Sequence
  chemically synthesized
taatattatcatagcctggtat

SEQ ID NO: 27725 - DNA, 22 bp, Artificial Sequence
  chemically synthesized
aatattatcatagcctggtatg

SEQ ID NO: 27726 - DNA, 22 bp, Artificial Sequence
  chemically synthesized
atattatcatagcctggtatgg

SEQ ID NO: 27727 - DNA, 22 bp, Artificial Sequence
  chemically synthesized
tcatagcctggtatggtttgag

SEQ ID NO: 27728 - DNA, 22 bp, Artificial Sequence
  chemically synthesized
gtatggtttgagattttcatat

SEQ ID NO: 27729 - DNA, 22 bp, Artificial Sequence
  chemically synthesized
gagattttcatatagatggata

SEQ ID NO: 27730 - DNA, 22 bp, Artificial Sequence
  chemically synthesized
agattttcatatagatggataa

SEQ ID NO: 27731 - DNA, 22 bp, Artificial Sequence
  chemically synthesized
tcatatagatggataattattg

SEQ ID NO: 27732 - DNA, 22 bp, Artificial Sequence
  chemically synthesized
catatagatggataattattgt

SEQ ID NO: 27733 - DNA, 22 bp, Artificial Sequence
  chemically synthesized
atatagatggataattattgtg

SEQ ID NO: 27734 - DNA, 22 bp, Artificial Sequence
  chemically synthesized
ttgtgtttattcctaataatac

SEQ ID NO: 27735 - DNA, 22 bp, Artificial Sequence
  chemically synthesized
tgtttattcctaataatacatt

SEQ ID NO: 27736 - DNA, 22 bp, Artificial Sequence
  chemically synthesized
attcctaataatacattgccac

SEQ ID NO: 27737 - DNA, 22 bp, Artificial Sequence
  chemically synthesized
ttcctaataatacattgccact

SEQ ID NO: 27738 - DNA, 22 bp, Artificial Sequence
  chemically synthesized
ctaataatacattgccactata

SEQ ID NO: 27739 - DNA, 22 bp, Artificial Sequence
  chemically synthesized
ataatacattgccactatagtt

SEQ ID NO: 27740 - DNA, 22 bp, Artificial Sequence
  chemically synthesized
ccactatagtttctttaaattt

SEQ ID NO: 27741 - DNA, 22 bp, Artificial Sequence
  chemically synthesized
tagtttctttaaatttaatgat

SEQ ID NO: 27742 - DNA, 22 bp, Artificial Sequence
  chemically synthesized
ctttaaatttaatgatttgaat

SEQ ID NO: 27743 - DNA, 22 bp, Artificial Sequence
  chemically synthesized
tttaaatttaatgatttgaatt

SEQ ID NO: 27744 - DNA, 22 bp, Artificial Sequence
  chemically synthesized
taaatttaatgatttgaatttt

SEQ ID NO: 27745 - DNA, 22 bp, Artificial Sequence
  chemically synthesized
aaatttaatgatttgaattttt

SEQ ID NO: 27746 - DNA, 22 bp, Artificial Sequence
  chemically synthesized
aatttaatgatttgaattttta

SEQ ID NO: 27747 - DNA, 22 bp, Artificial Sequence
  chemically synthesized
aatgatttgaatttttacttcc

SEQ ID NO: 27748 - DNA, 22 bp, Artificial Sequence
  chemically synthesized
atgatttgaatttttacttccc

SEQ ID NO: 27749 - DNA, 22 bp, Artificial Sequence
  chemically synthesized
gaatttttacttccctgcattt

SEQ ID NO: 27750 - DNA, 22 bp, Artificial Sequence
  chemically synthesized
aatttttacttccctgcatttc

SEQ ID NO: 27751 - DNA, 22 bp, Artificial Sequence
  chemically synthesized
ttacttccctgcatttcatagt

SEQ ID NO: 27752 - DNA, 22 bp, Artificial Sequence
  chemically synthesized
tacttccctgcatttcatagta

SEQ ID NO: 27753 - DNA, 22 bp, Artificial Sequence
  chemically synthesized
acttccctgcatttcatagtag

SEQ ID NO: 27754 - DNA, 22 bp, Artificial Sequence
  chemically synthesized
cttccctgcatttcatagtagt

SEQ ID NO: 27755 - DNA, 22 bp, Artificial Sequence
  chemically synthesized
ccctgcatttcatagtagtgat

SEQ ID NO: 27756 - DNA, 22 bp, Artificial Sequence
  chemically synthesized
cctgcatttcatagtagtgata

SEQ ID NO: 27757 - DNA, 22 bp, Artificial Sequence
  chemically synthesized
catttcatagtagtgatatgag

SEQ ID NO: 27758 - DNA, 22 bp, Artificial Sequence
  chemically synthesized
catagtagtgatatgaggtatc

SEQ ID NO: 27759 - DNA, 22 bp, Artificial Sequence
  chemically synthesized
atagtagtgatatgaggtatct

SEQ ID NO: 27760 - DNA, 22 bp, Artificial Sequence
  chemically synthesized
agagatcatgaatcccactcct

SEQ ID NO: 27761 - DNA, 22 bp, Artificial Sequence
  chemically synthesized
gagatcatgaatcccactcctc

SEQ ID NO: 27762 - DNA, 22 bp, Artificial Sequence
  chemically synthesized
ctccagttcatagagcaaattg

SEQ ID NO: 27763 - DNA, 22 bp, Artificial Sequence
  chemically synthesized
cagttcatagagcaaattgatt

SEQ ID NO: 27764 - DNA, 22 bp, Artificial Sequence
  chemically synthesized
atagagcaaattgattcgtaga

SEQ ID NO: 27765 - DNA, 22 bp, Artificial Sequence
  chemically synthesized
attcgtagaggtatttaatgat

SEQ ID NO: 27766 - DNA, 22 bp, Artificial Sequence
  chemically synthesized
gtagaggtatttaatgatcaag

SEQ ID NO: 27767 - DNA, 22 bp, Artificial Sequence
  chemically synthesized
aatgatcaagcaaatggcagag

SEQ ID NO: 27768 - DNA, 22 bp, Artificial Sequence
  chemically synthesized
atgatcaagcaaatggcagagt

SEQ ID NO: 27769 - DNA, 22 bp, Artificial Sequence
  chemically synthesized
ggaccaggatttaggtcttttc

SEQ ID NO: 27770 - DNA, 22 bp, Artificial Sequence
  chemically synthesized
aggtcttttccaaggccaattc

SEQ ID NO: 27771 - DNA, 22 bp, Artificial Sequence
  chemically synthesized
ggtcttttccaaggccaattca

SEQ ID NO: 27772 - DNA, 22 bp, Artificial Sequence
  chemically synthesized
ttccaaggccaattcacttttt

SEQ ID NO: 27773 - DNA, 22 bp, Artificial Sequence
  chemically synthesized
tccaaggccaattcactttttt

SEQ ID NO: 27774 - DNA, 22 bp, Artificial Sequence
  chemically synthesized
ccaaggccaattcactttttta

SEQ ID NO: 27775 - DNA, 22 bp, Artificial Sequence
  chemically synthesized
caaggccaattcacttttttac

SEQ ID NO: 27776 - DNA, 22 bp, Artificial Sequence
  chemically synthesized
acttttttactattatgtaaga

SEQ ID NO: 27777 - DNA, 22 bp, Artificial Sequence
  chemically synthesized
ttttactattatgtaagaatta

SEQ ID NO: 27778 - DNA, 22 bp, Artificial Sequence
  chemically synthesized
tttactattatgtaagaattaa

SEQ ID NO: 27779 - DNA, 22 bp, Artificial Sequence
  chemically synthesized
ttactattatgtaagaattaaa

SEQ ID NO: 27780 - DNA, 22 bp, Artificial Sequence
  chemically synthesized
tactattatgtaagaattaaat

SEQ ID NO: 27781 - DNA, 22 bp, Artificial Sequence
  chemically synthesized
actattatgtaagaattaaata

SEQ ID NO: 27782 - DNA, 22 bp, Artificial Sequence
  chemically synthesized
ctattatgtaagaattaaatat

SEQ ID NO: 27783 - DNA, 22 bp, Artificial Sequence
  chemically synthesized
ttatgtaagaattaaatattaa

SEQ ID NO: 27784 - DNA, 22 bp, Artificial Sequence
  chemically synthesized
tgtaagaattaaatattaaaac

SEQ ID NO: 27785 - DNA, 22 bp, Artificial Sequence
  chemically synthesized
aatattaaaacctcagttttca

SEQ ID NO: 27786 - DNA, 22 bp, Artificial Sequence
  chemically synthesized
aaacctcagttttcaaaggaaa

SEQ ID NO: 27787 - DNA, 22 bp, Artificial Sequence
  chemically synthesized
agttttcaaaggaaatgtccta

SEQ ID NO: 27788 - DNA, 22 bp, Artificial Sequence
  chemically synthesized
tcaaaggaaatgtcctatagat

SEQ ID NO: 27789 - DNA, 22 bp, Artificial Sequence
  chemically synthesized
caaaggaaatgtcctatagatg

SEQ ID NO: 27790 - DNA, 22 bp, Artificial Sequence
  chemically synthesized
aaaggaaatgtcctatagatga

SEQ ID NO: 27791 - DNA, 22 bp, Artificial Sequence
  chemically synthesized
tagatgaaagaacacagtactt

SEQ ID NO: 27792 - DNA, 22 bp, Artificial Sequence
  chemically synthesized
gcagtcaaaggtcttggatttc

SEQ ID NO: 27793 - DNA, 22 bp, Artificial Sequence
  chemically synthesized
cagtcaaaggtcttggatttct

SEQ ID NO: 27794 - DNA, 22 bp, Artificial Sequence
  chemically synthesized
ggatttctgaaactttctgaaa

SEQ ID NO: 27795 - DNA, 22 bp, Artificial Sequence
  chemically synthesized
gatttctgaaactttctgaaaa

SEQ ID NO: 27796 - DNA, 22 bp, Artificial Sequence
  chemically synthesized
ctgaaactttctgaaaaagaac

SEQ ID NO: 27797 - DNA, 22 bp, Artificial Sequence
  chemically synthesized
tgaaactttctgaaaaagaacc

SEQ ID NO: 27798 - DNA, 22 bp, Artificial Sequence
  chemically synthesized
aaactttctgaaaaagaacccc

SEQ ID NO: 27799 - DNA, 22 bp, Artificial Sequence
  chemically synthesized
tctgaaaaagaaccccttaaac

SEQ ID NO: 27800 - DNA, 22 bp, Artificial Sequence
  chemically synthesized
ctgaaaaagaaccccttaaact

SEQ ID NO: 27801 - DNA, 22 bp, Artificial Sequence
  chemically synthesized
tgaaaaagaaccccttaaactg

SEQ ID NO: 27802 - DNA, 22 bp, Artificial Sequence
  chemically synthesized
aaaaagaaccccttaaactgaa

SEQ ID NO: 27803 - DNA, 22 bp, Artificial Sequence
  chemically synthesized
aaactgaataacagtttcttca

SEQ ID NO: 27804 - DNA, 22 bp, Artificial Sequence
  chemically synthesized
aactgaataacagtttcttcat

SEQ ID NO: 27805 - DNA, 22 bp, Artificial Sequence
  chemically synthesized
aataacagtttcttcatgaata

SEQ ID NO: 27806 - DNA, 22 bp, Artificial Sequence
  chemically synthesized
cttcatgaataaaatgaatgtt

SEQ ID NO: 27807 - DNA, 22 bp, Artificial Sequence
  chemically synthesized
ttcatgaataaaatgaatgtta

SEQ ID NO: 27808 - DNA, 22 bp, Artificial Sequence
  chemically synthesized
catgaataaaatgaatgttata

SEQ ID NO: 27809 - DNA, 22 bp, Artificial Sequence
  chemically synthesized
atgaataaaatgaatgttatac

SEQ ID NO: 27810 - DNA, 22 bp, Artificial Sequence
  chemically synthesized
tactctccagttatcttaccat

SEQ ID NO: 27811 - DNA, 22 bp, Artificial Sequence
  chemically synthesized
tccagttatcttaccatgtttt

SEQ ID NO: 27812 - DNA, 22 bp, Artificial Sequence
  chemically synthesized
cagttatcttaccatgttttct

SEQ ID NO: 27813 - DNA, 22 bp, Artificial Sequence
  chemically synthesized
tcttaccatgttttctggcaaa

SEQ ID NO: 27814 - DNA, 22 bp, Artificial Sequence
  chemically synthesized
accatgttttctggcaaacaag

SEQ ID NO: 27815 - DNA, 22 bp, Artificial Sequence
  chemically synthesized
ccatgttttctggcaaacaagg

SEQ ID NO: 27816 - DNA, 22 bp, Artificial Sequence
  chemically synthesized
tctggcaaacaaggaaatgtat

SEQ ID NO: 27817 - DNA, 22 bp, Artificial Sequence
  chemically synthesized
ctggcaaacaaggaaatgtatt

SEQ ID NO: 27818 - DNA, 22 bp, Artificial Sequence
  chemically synthesized
tggcaaacaaggaaatgtattc

SEQ ID NO: 27819 - DNA, 22 bp, Artificial Sequence
  chemically synthesized
gcaaacaaggaaatgtattcac

SEQ ID NO: 27820 - DNA, 22 bp, Artificial Sequence
  chemically synthesized
acatccaagaaaacaaaaggtt

SEQ ID NO: 27821 - DNA, 22 bp, Artificial Sequence
  chemically synthesized
cttaggagaagaatcccttgct

SEQ ID NO: 27822 - DNA, 22 bp, Artificial Sequence
  chemically synthesized
ttaggagaagaatcccttgctg

SEQ ID NO: 27823 - DNA, 22 bp, Artificial Sequence
  chemically synthesized
aggagaagaatcccttgctgcc

SEQ ID NO: 27824 - DNA, 22 bp, Artificial Sequence
  chemically synthesized
ggagaagaatcccttgctgcca

SEQ ID NO: 27825 - DNA, 22 bp, Artificial Sequence
  chemically synthesized
gctgccagaattttgcccatga

SEQ ID NO: 27826 - DNA, 22 bp, Artificial Sequence
  chemically synthesized
ctgccagaattttgcccatgaa

SEQ ID NO: 27827 - DNA, 22 bp, Artificial Sequence
  chemically synthesized
ccagaattttgcccatgaacaa

SEQ ID NO: 27828 - DNA, 22 bp, Artificial Sequence
  chemically synthesized
tgcccatgaacaatggaaacgt

SEQ ID NO: 27829 - DNA, 22 bp, Artificial Sequence
  chemically synthesized
gcccatgaacaatggaaacgtg

SEQ ID NO: 27830 - DNA, 22 bp, Artificial Sequence
  chemically synthesized
cccatgaacaatggaaacgtga

SEQ ID NO: 27831 - DNA, 22 bp, Artificial Sequence
  chemically synthesized
gttttgggtactaattctcaga

SEQ ID NO: 27832 - DNA, 22 bp, Artificial Sequence
  chemically synthesized
tgggtactaattctcagacttc

SEQ ID NO: 27833 - DNA, 22 bp, Artificial Sequence
  chemically synthesized
gggtactaattctcagacttca

SEQ ID NO: 27834 - DNA, 22 bp, Artificial Sequence
  chemically synthesized
ggtactaattctcagacttcaa

SEQ ID NO: 27835 - DNA, 22 bp, Artificial Sequence
  chemically synthesized
attctcagacttcaaaataacc

SEQ ID NO: 27836 - DNA, 22 bp, Artificial Sequence
  chemically synthesized
tcagacttcaaaataacctttt

SEQ ID NO: 27837 - DNA, 22 bp, Artificial Sequence
  chemically synthesized
agacttcaaaataaccttttta

SEQ ID NO: 27838 - DNA, 22 bp, Artificial Sequence
  chemically synthesized
caaaataacctttttaatttat

SEQ ID NO: 27839 - DNA, 22 bp, Artificial Sequence
  chemically synthesized
aaaataacctttttaatttatt

SEQ ID NO: 27840 - DNA, 22 bp, Artificial Sequence
  chemically synthesized
tttaatttattaatattaacct

SEQ ID NO: 27841 - DNA, 22 bp, Artificial Sequence
  chemically synthesized
ttaatttattaatattaacctt

SEQ ID NO: 27842 - DNA, 22 bp, Artificial Sequence
  chemically synthesized
taatttattaatattaaccttg

SEQ ID NO: 27843 - DNA, 22 bp, Artificial Sequence
  chemically synthesized
aatttattaatattaaccttga

SEQ ID NO: 27844 - DNA, 22 bp, Artificial Sequence
  chemically synthesized
atttattaatattaaccttgaa

SEQ ID NO: 27845 - DNA, 22 bp, Artificial Sequence
  chemically synthesized
attaatattaaccttgaaattt

SEQ ID NO: 27846 - DNA, 22 bp, Artificial Sequence
  chemically synthesized
ttaatattaaccttgaaattta

SEQ ID NO: 27847 - DNA, 22 bp, Artificial Sequence
  chemically synthesized
atattaaccttgaaatttattg

SEQ ID NO: 27848 - DNA, 22 bp, Artificial Sequence
  chemically synthesized
accttgaaatttattgctttta

SEQ ID NO: 27849 - DNA, 22 bp, Artificial Sequence
  chemically synthesized
gaaatttattgcttttattcat

SEQ ID NO: 27850 - DNA, 22 bp, Artificial Sequence
  chemically synthesized
aaatttattgcttttattcatt

SEQ ID NO: 27851 - DNA, 22 bp, Artificial Sequence
  chemically synthesized
attgcttttattcattaatcca

SEQ ID NO: 27852 - DNA, 22 bp, Artificial Sequence
  chemically synthesized
ttgcttttattcattaatccat

SEQ ID NO: 27853 - DNA, 22 bp, Artificial Sequence
  chemically synthesized
cttttattcattaatccatttt

SEQ ID NO: 27854 - DNA, 22 bp, Artificial Sequence
  chemically synthesized
ttattcattaatccattttatt

SEQ ID NO: 27855 - DNA, 22 bp, Artificial Sequence
  chemically synthesized
tattcattaatccattttatta

SEQ ID NO: 27856 - DNA, 22 bp, Artificial Sequence
  chemically synthesized
attcattaatccattttattat

SEQ ID NO: 27857 - DNA, 22 bp, Artificial Sequence
  chemically synthesized
ttcattaatccattttattatt

SEQ ID NO: 27858 - DNA, 22 bp, Artificial Sequence
  chemically synthesized
attaatccattttattattcag

SEQ ID NO: 27859 - DNA, 22 bp, Artificial Sequence
  chemically synthesized
atccattttattattcagtaag

SEQ ID NO: 27860 - DNA, 22 bp, Artificial Sequence
  chemically synthesized
tattattcagtaaggattcatc

SEQ ID NO: 27861 - DNA, 22 bp, Artificial Sequence
  chemically synthesized
attattcagtaaggattcatca

SEQ ID NO: 27862 - DNA, 22 bp, Artificial Sequence
  chemically synthesized
ttattcagtaaggattcatcaa

SEQ ID NO: 27863 - DNA, 22 bp, Artificial Sequence
  chemically synthesized
ttcagtaaggattcatcaagtg

SEQ ID NO: 27864 - DNA, 22 bp, Artificial Sequence
  chemically synthesized
agtaaggattcatcaagtgtct

SEQ ID NO: 27865 - DNA, 22 bp, Artificial Sequence
  chemically synthesized
atcaagtgtctattaggtatca

SEQ ID NO: 27866 - DNA, 22 bp, Artificial Sequence
  chemically synthesized
ttaggtatcaggcactgagagg

SEQ ID NO: 27867 - DNA, 22 bp, Artificial Sequence
  chemically synthesized
ggtatcaggcactgagaggcga

SEQ ID NO: 27868 - DNA, 22 bp, Artificial Sequence
  chemically synthesized
agaggcgagggagatagagtta

SEQ ID NO: 27869 - DNA, 22 bp, Artificial Sequence
  chemically synthesized
agaatacagaactgattcttaa

SEQ ID NO: 27870 - DNA, 22 bp, Artificial Sequence
  chemically synthesized
attcttaatcttcaagaattga

SEQ ID NO: 27871 - DNA, 22 bp, Artificial Sequence
  chemically synthesized
ttaatcttcaagaattgacaaa

SEQ ID NO: 27872 - DNA, 22 bp, Artificial Sequence
  chemically synthesized
aatcttcaagaattgacaaatt

SEQ ID NO: 27873 - DNA, 22 bp, Artificial Sequence
  chemically synthesized
atcttcaagaattgacaaattt

SEQ ID NO: 27874 - DNA, 22 bp, Artificial Sequence
  chemically synthesized
caagaattgacaaatttgtaga

SEQ ID NO: 27875 - DNA, 22 bp, Artificial Sequence
  chemically synthesized
aagaattgacaaatttgtagaa

SEQ ID NO: 27876 - DNA, 22 bp, Artificial Sequence
  chemically synthesized
acaaatttgtagaaggtagaca

SEQ ID NO: 27877 - DNA, 22 bp, Artificial Sequence
  chemically synthesized
gtagaaggtagacattgaacat

SEQ ID NO: 27878 - DNA, 22 bp, Artificial Sequence
  chemically synthesized
tagaaggtagacattgaacata

SEQ ID NO: 27879 - DNA, 22 bp, Artificial Sequence
  chemically synthesized
aacatacaatacagtcaaatgt

SEQ ID NO: 27880 - DNA, 22 bp, Artificial Sequence
  chemically synthesized
agggaaccaggtgtcctaagac

SEQ ID NO: 27881 - DNA, 22 bp, Artificial Sequence
  chemically synthesized
agactatacagtgtaccgtgga

SEQ ID NO: 27882 - DNA, 22 bp, Artificial Sequence
  chemically synthesized
tacagtgtaccgtggaatgggg

SEQ ID NO: 27883 - DNA, 22 bp, Artificial Sequence
  chemically synthesized
ctaacctagttacctagaggtt

SEQ ID NO: 27884 - DNA, 22 bp, Artificial Sequence
  chemically synthesized
taacctagttacctagaggttt

SEQ ID NO: 27885 - DNA, 22 bp, Artificial Sequence
  chemically synthesized
acctagttacctagaggtttgg

SEQ ID NO: 27886 - DNA, 22 bp, Artificial Sequence
  chemically synthesized
gttacctagaggtttgggaaaa

SEQ ID NO: 27887 - DNA, 22 bp, Artificial Sequence
  chemically synthesized
cctagaggtttgggaaaaacct

SEQ ID NO: 27888 - DNA, 22 bp, Artificial Sequence
  chemically synthesized
gaggtttgggaaaaacctctct

SEQ ID NO: 27889 - DNA, 22 bp, Artificial Sequence
  chemically synthesized
gggaaaaacctctctaatgatg

SEQ ID NO: 27890 - DNA, 22 bp, Artificial Sequence
  chemically synthesized
ggaaaaacctctctaatgatga

SEQ ID NO: 27891 - DNA, 22 bp, Artificial Sequence
  chemically synthesized
tctaatgatgagatgtttgagc

SEQ ID NO: 27892 - DNA, 22 bp, Artificial Sequence
  chemically synthesized
taatgatgagatgtttgagctg

SEQ ID NO: 27893 - DNA, 22 bp, Artificial Sequence
  chemically synthesized
atgatgagatgtttgagctgac

SEQ ID NO: 27894 - DNA, 22 bp, Artificial Sequence
  chemically synthesized
gagctgacacttgaaggataaa

SEQ ID NO: 27895 - DNA, 22 bp, Artificial Sequence
  chemically synthesized
agctgacacttgaaggataaat

SEQ ID NO: 27896 - DNA, 22 bp, Artificial Sequence
  chemically synthesized
acacttgaaggataaatagcta

SEQ ID NO: 27897 - DNA, 22 bp, Artificial Sequence
  chemically synthesized
gaaggataaatagctaaagggg

SEQ ID NO: 27898 - DNA, 22 bp, Artificial Sequence
  chemically synthesized
aaggataaatagctaaagggga

SEQ ID NO: 27899 - DNA, 22 bp, Artificial Sequence
  chemically synthesized
aaggggagaaagcgttctatgt

SEQ ID NO: 27900 - DNA, 22 bp, Artificial Sequence
  chemically synthesized
tatgtgagagaactatatatgc

SEQ ID NO: 27901 - DNA, 22 bp, Artificial Sequence
  chemically synthesized
tgtgagagaactatatatgcca

SEQ ID NO: 27902 - DNA, 22 bp, Artificial Sequence
  chemically synthesized
tatatgccaagatgcagaagtg

SEQ ID NO: 27903 - DNA, 22 bp, Artificial Sequence
  chemically synthesized
tctgttcgaagatctgagcggg

SEQ ID NO: 27904 - DNA, 22 bp, Artificial Sequence
  chemically synthesized
tgttcgaagatctgagcggggc

SEQ ID NO: 27905 - DNA, 22 bp, Artificial Sequence
  chemically synthesized
ttcgaagatctgagcggggctc

SEQ ID NO: 27906 - DNA, 22 bp, Artificial Sequence
  chemically synthesized
gaagatctgagcggggctcaga

SEQ ID NO: 27907 - DNA, 22 bp, Artificial Sequence
  chemically synthesized
agcggggctcagagagggaaaa

SEQ ID NO: 27908 - DNA, 22 bp, Artificial Sequence
  chemically synthesized
agagagggaaaaggagaggagt

SEQ ID NO: 27909 - DNA, 22 bp, Artificial Sequence
  chemically synthesized
cagggactagattgtgaagctc

SEQ ID NO: 27910 - DNA, 22 bp, Artificial Sequence
  chemically synthesized
gattgtgaagctcagggggagt

SEQ ID NO: 27911 - DNA, 22 bp, Artificial Sequence
  chemically synthesized
tgaagctcagggggagttaata

SEQ ID NO: 27912 - DNA, 22 bp, Artificial Sequence
  chemically synthesized
agggggagttaatagccttaag

SEQ ID NO: 27913 - DNA, 22 bp, Artificial Sequence
  chemically synthesized
atagccttaaggagttttgtct

SEQ ID NO: 27914 - DNA, 22 bp, Artificial Sequence
  chemically synthesized
aaggagttttgtctccagggta

SEQ ID NO: 27915 - DNA, 22 bp, Artificial Sequence
  chemically synthesized
aggagttttgtctccagggtat

SEQ ID NO: 27916 - DNA, 22 bp, Artificial Sequence
  chemically synthesized
tgtctccagggtatgaacaatg

SEQ ID NO: 27917 - DNA, 22 bp, Artificial Sequence
  chemically synthesized
gtctccagggtatgaacaatga

SEQ ID NO: 27918 - DNA, 22 bp, Artificial Sequence
  chemically synthesized
tctccagggtatgaacaatgaa

SEQ ID NO: 27919 - DNA, 22 bp, Artificial Sequence
  chemically synthesized
cagggtatgaacaatgaatgag

SEQ ID NO: 27920 - DNA, 22 bp, Artificial Sequence
  chemically synthesized
aaattctatccacagtagtggg

SEQ ID NO: 27921 - DNA, 22 bp, Artificial Sequence
  chemically synthesized
tatccacagtagtgggaagtac

SEQ ID NO: 27922 - DNA, 22 bp, Artificial Sequence
  chemically synthesized
tccacagtagtgggaagtacta

SEQ ID NO: 27923 - DNA, 22 bp, Artificial Sequence
  chemically synthesized
agtagtcaggtatgttttggaa

SEQ ID NO: 27924 - DNA, 22 bp, Artificial Sequence
  chemically synthesized
tggaagaagcactgttaccagt

SEQ ID NO: 27925 - DNA, 22 bp, Artificial Sequence
  chemically synthesized
ggaagaagcactgttaccagtt

SEQ ID NO: 27926 - DNA, 22 bp, Artificial Sequence
  chemically synthesized
gaagaagcactgttaccagttg

SEQ ID NO: 27927 - DNA, 22 bp, Artificial Sequence
  chemically synthesized
ttaccagttgagggagaggaga

SEQ ID NO: 27928 - DNA, 22 bp, Artificial Sequence
  chemically synthesized
ccagttgagggagaggagagga

SEQ ID NO: 27929 - DNA, 22 bp, Artificial Sequence
  chemically synthesized
agggagaggagaggagggaaat

SEQ ID NO: 27930 - DNA, 22 bp, Artificial Sequence
  chemically synthesized
gactgtggtgtgacccaggatg

SEQ ID NO: 27931 - DNA, 22 bp, Artificial Sequence
  chemically synthesized
tggtgtgacccaggatggaaag

SEQ ID NO: 27932 - DNA, 22 bp, Artificial Sequence
  chemically synthesized
tgcccaaatgtgggggaaaaat

SEQ ID NO: 27933 - DNA, 22 bp, Artificial Sequence
  chemically synthesized
gcccaaatgtgggggaaaaatg

SEQ ID NO: 27934 - DNA, 22 bp, Artificial Sequence
  chemically synthesized
cccaaatgtgggggaaaaatgt

SEQ ID NO: 27935 - DNA, 22 bp, Artificial Sequence
  chemically synthesized
actctctcctttgcccaggtct

SEQ ID NO: 27936 - DNA, 22 bp, Artificial Sequence
  chemically synthesized
ctctctcctttgcccaggtctt

SEQ ID NO: 27937 - DNA, 22 bp, Artificial Sequence
  chemically synthesized
tctcctttgcccaggtcttact

SEQ ID NO: 27938 - DNA, 22 bp, Artificial Sequence
  chemically synthesized
tcctttgcccaggtcttactac

SEQ ID NO: 27939 - DNA, 22 bp, Artificial Sequence
  chemically synthesized
ctttgcccaggtcttactacaa

SEQ ID NO: 27940 - DNA, 22 bp, Artificial Sequence
  chemically synthesized
tgcccaggtcttactacaatca

SEQ ID NO: 27941 - DNA, 22 bp, Artificial Sequence
  chemically synthesized
gcccaggtcttactacaatcat

SEQ ID NO: 27942 - DNA, 22 bp, Artificial Sequence
  chemically synthesized
cccaggtcttactacaatcatt

SEQ ID NO: 27943 - DNA, 22 bp, Artificial Sequence
  chemically synthesized
actacaatcatttcttctgcac

SEQ ID NO: 27944 - DNA, 22 bp, Artificial Sequence
  chemically synthesized
ctacaatcatttcttctgcaca

SEQ ID NO: 27945 - DNA, 22 bp, Artificial Sequence
  chemically synthesized
caatcatttcttctgcacacac

SEQ ID NO: 27946 - DNA, 22 bp, Artificial Sequence
  chemically synthesized
cttctgcacacacttgctcaga

SEQ ID NO: 27947 - DNA, 22 bp, Artificial Sequence
  chemically synthesized
ttctgcacacacttgctcagaa

SEQ ID NO: 27948 - DNA, 22 bp, Artificial Sequence
  chemically synthesized
ctgcacacacttgctcagaaca

SEQ ID NO: 27949 - DNA, 22 bp, Artificial Sequence
  chemically synthesized
tgcacacacttgctcagaacat

SEQ ID NO: 27950 - DNA, 22 bp, Artificial Sequence
  chemically synthesized
cacacacttgctcagaacatta

SEQ ID NO: 27951 - DNA, 22 bp, Artificial Sequence
  chemically synthesized
gctcagaacattacaaactctg

SEQ ID NO: 27952 - DNA, 22 bp, Artificial Sequence
  chemically synthesized
ctcagaacattacaaactctgg

SEQ ID NO: 27953 - DNA, 22 bp, Artificial Sequence
  chemically synthesized
agaacattacaaactctggaga

SEQ ID NO: 27954 - DNA, 22 bp, Artificial Sequence
  chemically synthesized
caaactctggagaaattaacat

SEQ ID NO: 27955 - DNA, 22 bp, Artificial Sequence
  chemically synthesized
tggagaaattaacatgttaagg

SEQ ID NO: 27956 - DNA, 22 bp, Artificial Sequence
  chemically synthesized
gagaaattaacatgttaaggat

SEQ ID NO: 27957 - DNA, 22 bp, Artificial Sequence
  chemically synthesized
acatgttaaggatatttaggat

SEQ ID NO: 27958 - DNA, 22 bp, Artificial Sequence
  chemically synthesized
aggatatttaggatcattaaaa

SEQ ID NO: 27959 - DNA, 22 bp, Artificial Sequence
  chemically synthesized
aggatcattaaaaaagtttaat

SEQ ID NO: 27960 - DNA, 22 bp, Artificial Sequence
  chemically synthesized
ggatcattaaaaaagtttaata

SEQ ID NO: 27961 - DNA, 22 bp, Artificial Sequence
  chemically synthesized
aaaaagtttaataaatgttgtc

SEQ ID NO: 27962 - DNA, 22 bp, Artificial Sequence
  chemically synthesized
aataaatgttgtcacacataat

SEQ ID NO: 27963 - DNA, 22 bp, Artificial Sequence
  chemically synthesized
ataaatgttgtcacacataatg

SEQ ID NO: 27964 - DNA, 22 bp, Artificial Sequence
  chemically synthesized
tcacacataatgaaagttaatt

SEQ ID NO: 27965 - DNA, 22 bp, Artificial Sequence
  chemically synthesized
atttaagaattgtaaagacttg

SEQ ID NO: 27966 - DNA, 22 bp, Artificial Sequence
  chemically synthesized
aagaattgtaaagacttgagcg

SEQ ID NO: 27967 - DNA, 22 bp, Artificial Sequence
  chemically synthesized
agaattgtaaagacttgagcga

SEQ ID NO: 27968 - DNA, 22 bp, Artificial Sequence
  chemically synthesized
taaagacttgagcgatgtagtc

SEQ ID NO: 27969 - DNA, 22 bp, Artificial Sequence
  chemically synthesized
gagcgatgtagtccctaaataa

SEQ ID NO: 27970 - DNA, 22 bp, Artificial Sequence
  chemically synthesized
agcgatgtagtccctaaataaa

SEQ ID NO: 27971 - DNA, 22 bp, Artificial Sequence
  chemically synthesized
aataaatgcttccctcttaaaa

SEQ ID NO: 27972 - DNA, 22 bp, Artificial Sequence
  chemically synthesized
ccctcttaaaatggactagaaa

SEQ ID NO: 27973 - DNA, 22 bp, Artificial Sequence
  chemically synthesized
cctcttaaaatggactagaaac

SEQ ID NO: 27974 - DNA, 22 bp, Artificial Sequence
  chemically synthesized
ttaaaatggactagaaacaatt

SEQ ID NO: 27975 - DNA, 22 bp, Artificial Sequence
  chemically synthesized
aaaatggactagaaacaatttg

SEQ ID NO: 27976 - DNA, 22 bp, Artificial Sequence
  chemically synthesized
aaatggactagaaacaatttgt

SEQ ID NO: 27977 - DNA, 22 bp, Artificial Sequence
  chemically synthesized
gaaacaatttgtttttgcctaa

SEQ ID NO: 27978 - DNA, 22 bp, Artificial Sequence
  chemically synthesized
gtttttgcctaagccaacgtat

SEQ ID NO: 27979 - DNA, 22 bp, Artificial Sequence
  chemically synthesized
tttttgcctaagccaacgtatt

SEQ ID NO: 27980 - DNA, 22 bp, Artificial Sequence
  chemically synthesized
ttgcctaagccaacgtattgct

SEQ ID NO: 27981 - DNA, 22 bp, Artificial Sequence
  chemically synthesized
tgcctaagccaacgtattgctg

SEQ ID NO: 27982 - DNA, 22 bp, Artificial Sequence
  chemically synthesized
gcctaagccaacgtattgctgg

SEQ ID NO: 27983 - DNA, 22 bp, Artificial Sequence
  chemically synthesized
cctaagccaacgtattgctgga

SEQ ID NO: 27984 - DNA, 22 bp, Artificial Sequence
  chemically synthesized
agccaacgtattgctggacata

SEQ ID NO: 27985 - DNA, 22 bp, Artificial Sequence
  chemically synthesized
ctggacataatttacctgcttc

SEQ ID NO: 27986 - DNA, 22 bp, Artificial Sequence
  chemically synthesized
gacataatttacctgcttcctc

SEQ ID NO: 27987 - DNA, 22 bp, Artificial Sequence
  chemically synthesized
acctgcttcctcctcagtcttg

SEQ ID NO: 27988 - DNA, 22 bp, Artificial Sequence
  chemically synthesized
cctgcttcctcctcagtcttga

SEQ ID NO: 27989 - DNA, 22 bp, Artificial Sequence
  chemically synthesized
cttcctcctcagtcttgacact

SEQ ID NO: 27990 - DNA, 22 bp, Artificial Sequence
  chemically synthesized
cctcctcagtcttgacactaca

SEQ ID NO: 27991 - DNA, 22 bp, Artificial Sequence
  chemically synthesized
ctcctcagtcttgacactacac

SEQ ID NO: 27992 - DNA, 22 bp, Artificial Sequence
  chemically synthesized
ctcagtcttgacactacacctc

SEQ ID NO: 27993 - DNA, 22 bp, Artificial Sequence
  chemically synthesized
agtcttgacactacacctctga

SEQ ID NO: 27994 - DNA, 22 bp, Artificial Sequence
  chemically synthesized
gacactacacctctgaattaca

SEQ ID NO: 27995 - DNA, 22 bp, Artificial Sequence
  chemically synthesized
acactacacctctgaattacat

SEQ ID NO: 27996 - DNA, 22 bp, Artificial Sequence
  chemically synthesized
cacctctgaattacatggtaca

SEQ ID NO: 27997 - DNA, 22 bp, Artificial Sequence
  chemically synthesized
tgaattacatggtacaagtggc

SEQ ID NO: 27998 - DNA, 22 bp, Artificial Sequence
  chemically synthesized
aattacatggtacaagtggcac

SEQ ID NO: 27999 - DNA, 22 bp, Artificial Sequence
  chemically synthesized
catggtacaagtggcacaggga

SEQ ID NO: 28000 - DNA, 22 bp, Artificial Sequence
  chemically synthesized
agaaaactagagtcaaagtggt

SEQ ID NO: 28001 - DNA, 22 bp, Artificial Sequence
  chemically synthesized
gagtcaaagtggttatggaaga

SEQ ID NO: 28002 - DNA, 22 bp, Artificial Sequence
  chemically synthesized
tggaagaaattataataatgag

SEQ ID NO: 28003 - DNA, 22 bp, Artificial Sequence
  chemically synthesized
taataatgagtccactcttcta

SEQ ID NO: 28004 - DNA, 22 bp, Artificial Sequence
  chemically synthesized
ttctaggacaggagttctaaag

SEQ ID NO: 28005 - DNA, 22 bp, Artificial Sequence
  chemically synthesized
ctaggacaggagttctaaaggt

SEQ ID NO: 28006 - DNA, 22 bp, Artificial Sequence
  chemically synthesized
taggacaggagttctaaaggtg

SEQ ID NO: 28007 - DNA, 22 bp, Artificial Sequence
  chemically synthesized
ggacaggagttctaaaggtgag

SEQ ID NO: 28008 - DNA, 22 bp, Artificial Sequence
  chemically synthesized
taaaggtgaggactttgatata

SEQ ID NO: 28009 - DNA, 22 bp, Artificial Sequence
  chemically synthesized
aaggtgaggactttgatataag

SEQ ID NO: 28010 - DNA, 22 bp, Artificial Sequence
  chemically synthesized
tgatataagtgaactcaaggag

SEQ ID NO: 28011 - DNA, 22 bp, Artificial Sequence
  chemically synthesized
gatataagtgaactcaaggagt

SEQ ID NO: 28012 - DNA, 22 bp, Artificial Sequence
  chemically synthesized
atataagtgaactcaaggagtt

SEQ ID NO: 28013 - DNA, 22 bp, Artificial Sequence
  chemically synthesized
aaggagtttctaaaccttcaga

SEQ ID NO: 28014 - DNA, 22 bp, Artificial Sequence
  chemically synthesized
ctaaaccttcagaaattatatc

SEQ ID NO: 28015 - DNA, 22 bp, Artificial Sequence
  chemically synthesized
taaaccttcagaaattatatct

SEQ ID NO: 28016 - DNA, 22 bp, Artificial Sequence
  chemically synthesized
aaccttcagaaattatatctaa

SEQ ID NO: 28017 - DNA, 22 bp, Artificial Sequence
  chemically synthesized
cagaaattatatctaaaaatta

SEQ ID NO: 28018 - DNA, 22 bp, Artificial Sequence
  chemically synthesized
agaaattatatctaaaaattag

SEQ ID NO: 28019 - DNA, 22 bp, Artificial Sequence
  chemically synthesized
tatctaaaaattaggtgcacgt

SEQ ID NO: 28020 - DNA, 22 bp, Artificial Sequence
  chemically synthesized
aaaattaggtgcacgtatatag

SEQ ID NO: 28021 - DNA, 22 bp, Artificial Sequence
  chemically synthesized
ggtgcacgtatatagaagtact

SEQ ID NO: 28022 - DNA, 22 bp, Artificial Sequence
  chemically synthesized
ttctctgagaagaggacttcac

SEQ ID NO: 28023 - DNA, 22 bp, Artificial Sequence
  chemically synthesized
tctctgagaagaggacttcaca

SEQ ID NO: 28024 - DNA, 22 bp, Artificial Sequence
  chemically synthesized
ctctgagaagaggacttcacac

SEQ ID NO: 28025 - DNA, 22 bp, Artificial Sequence
  chemically synthesized
tctgagaagaggacttcacact

SEQ ID NO: 28026 - DNA, 22 bp, Artificial Sequence
  chemically synthesized
tgagaagaggacttcacacttc

SEQ ID NO: 28027 - DNA, 22 bp, Artificial Sequence
  chemically synthesized
agaagaggacttcacacttcca

SEQ ID NO: 28028 - DNA, 22 bp, Artificial Sequence
  chemically synthesized
cacacttccatcagcttcctga

SEQ ID NO: 28029 - DNA, 22 bp, Artificial Sequence
  chemically synthesized
acacttccatcagcttcctgaa

SEQ ID NO: 28030 - DNA, 22 bp, Artificial Sequence
  chemically synthesized
ccatcagcttcctgaaggcccc

SEQ ID NO: 28031 - DNA, 22 bp, Artificial Sequence
  chemically synthesized
catcagcttcctgaaggcccct

SEQ ID NO: 28032 - DNA, 22 bp, Artificial Sequence
  chemically synthesized
cctgaaggcccctgtaattgcc

SEQ ID NO: 28033 - DNA, 22 bp, Artificial Sequence
  chemically synthesized
ctgaaggcccctgtaattgccg

SEQ ID NO: 28034 - DNA, 22 bp, Artificial Sequence
  chemically synthesized
aaggcccctgtaattgccgtaa

SEQ ID NO: 28035 - DNA, 22 bp, Artificial Sequence
  chemically synthesized
taattgccgtaaagaacaactg

SEQ ID NO: 28036 - DNA, 22 bp, Artificial Sequence
  chemically synthesized
ccgtaaagaacaactgctctaa

SEQ ID NO: 28037 - DNA, 22 bp, Artificial Sequence
  chemically synthesized
ctctaaagtttaatactaggct

SEQ ID NO: 28038 - DNA, 22 bp, Artificial Sequence
  chemically synthesized
taaagtttaatactaggctact

SEQ ID NO: 28039 - DNA, 22 bp, Artificial Sequence
  chemically synthesized
aagtttaatactaggctactcg

SEQ ID NO: 28040 - DNA, 22 bp, Artificial Sequence
  chemically synthesized
aatactaggctactcggctgtt

SEQ ID NO: 28041 - DNA, 22 bp, Artificial Sequence
  chemically synthesized
atactaggctactcggctgttt

SEQ ID NO: 28042 - DNA, 22 bp, Artificial Sequence
  chemically synthesized
ggctactcggctgttttttgtt

SEQ ID NO: 28043 - DNA, 22 bp, Artificial Sequence
  chemically synthesized
ctcggctgttttttgttaacac

SEQ ID NO: 28044 - DNA, 22 bp, Artificial Sequence
  chemically synthesized
ggctgttttttgttaacacaga

SEQ ID NO: 28045 - DNA, 22 bp, Artificial Sequence
  chemically synthesized
ttttttgttaacacagaagttt

SEQ ID NO: 28046 - DNA, 22 bp, Artificial Sequence
  chemically synthesized
tttgttaacacagaagttttcc

SEQ ID NO: 28047 - DNA, 22 bp, Artificial Sequence
  chemically synthesized
ttgttaacacagaagttttcca

SEQ ID NO: 28048 - DNA, 22 bp, Artificial Sequence
  chemically synthesized
tgttaacacagaagttttccaa

SEQ ID NO: 28049 - DNA, 22 bp, Artificial Sequence
  chemically synthesized
gttaacacagaagttttccaaa

SEQ ID NO: 28050 - DNA, 22 bp, Artificial Sequence
  chemically synthesized
ttaacacagaagttttccaaat

SEQ ID NO: 28051 - DNA, 22 bp, Artificial Sequence
  chemically synthesized
acacagaagttttccaaatggc

SEQ ID NO: 28052 - DNA, 22 bp, Artificial Sequence
  chemically synthesized
tccaaatggcttttctctagag

SEQ ID NO: 28053 - DNA, 22 bp, Artificial Sequence
  chemically synthesized
ccaaatggcttttctctagagc

SEQ ID NO: 28054 - DNA, 22 bp, Artificial Sequence
  chemically synthesized
caaatggcttttctctagagca

SEQ ID NO: 28055 - DNA, 22 bp, Artificial Sequence
  chemically synthesized
ttctctagagcaaaatgaaaag

SEQ ID NO: 28056 - DNA, 22 bp, Artificial Sequence
  chemically synthesized
tctctagagcaaaatgaaaagg

SEQ ID NO: 28057 - DNA, 22 bp, Artificial Sequence
  chemically synthesized
ctctagagcaaaatgaaaagga

SEQ ID NO: 28058 - DNA, 22 bp, Artificial Sequence
  chemically synthesized
tctagagcaaaatgaaaaggat

SEQ ID NO: 28059 - DNA, 22 bp, Artificial Sequence
  chemically synthesized
tagagcaaaatgaaaaggatcc

SEQ ID NO: 28060 - DNA, 22 bp, Artificial Sequence
  chemically synthesized
gagcaaaatgaaaaggatccca

SEQ ID NO: 28061 - DNA, 22 bp, Artificial Sequence
  chemically synthesized
cccgagacctaacgatgtttat

SEQ ID NO: 28062 - DNA, 22 bp, Artificial Sequence
  chemically synthesized
ccgagacctaacgatgtttatc

SEQ ID NO: 28063 - DNA, 22 bp, Artificial Sequence
  chemically synthesized
acgatgtttatctttcgtgata

SEQ ID NO: 28064 - DNA, 22 bp, Artificial Sequence
  chemically synthesized
atctttcgtgatactgtttttg

SEQ ID NO: 28065 - DNA, 22 bp, Artificial Sequence
  chemically synthesized
tctttcgtgatactgtttttgt

SEQ ID NO: 28066 - DNA, 22 bp, Artificial Sequence
  chemically synthesized
tcgtgatactgtttttgttctt

SEQ ID NO: 28067 - DNA, 22 bp, Artificial Sequence
  chemically synthesized
cgtgatactgtttttgttcttc

SEQ ID NO: 28068 - DNA, 22 bp, Artificial Sequence
  chemically synthesized
gtgatactgtttttgttcttcc

SEQ ID NO: 28069 - DNA, 22 bp, Artificial Sequence
  chemically synthesized
tttttgttcttcctctttttct

SEQ ID NO: 28070 - DNA, 22 bp, Artificial Sequence
  chemically synthesized
ttgttcttcctctttttctcct

SEQ ID NO: 28071 - DNA, 22 bp, Artificial Sequence
  chemically synthesized
tgttcttcctctttttctccta

SEQ ID NO: 28072 - DNA, 22 bp, Artificial Sequence
  chemically synthesized
gttcttcctctttttctcctac

SEQ ID NO: 28073 - DNA, 22 bp, Artificial Sequence
  chemically synthesized
ttcttcctctttttctcctacc

SEQ ID NO: 28074 - DNA, 22 bp, Artificial Sequence
  chemically synthesized
ttcctctttttctcctaccccc

SEQ ID NO: 28075 - DNA, 22 bp, Artificial Sequence
  chemically synthesized
cctctttttctcctacccccca

SEQ ID NO: 28076 - DNA, 22 bp, Artificial Sequence
  chemically synthesized
ctctttttctcctaccccccac

SEQ ID NO: 28077 - DNA, 22 bp, Artificial Sequence
  chemically synthesized
tttttctcctaccccccaccac

SEQ ID NO: 28078 - DNA, 22 bp, Artificial Sequence
  chemically synthesized
tttctcctaccccccaccactt

SEQ ID NO: 28079 - DNA, 22 bp, Artificial Sequence
  chemically synthesized
ttctcctaccccccaccacttt

SEQ ID NO: 28080 - DNA, 22 bp, Artificial Sequence
  chemically synthesized
tctcctaccccccaccactttt

SEQ ID NO: 28081 - DNA, 22 bp, Artificial Sequence
  chemically synthesized
ctcctaccccccaccactttta

SEQ ID NO: 28082 - DNA, 22 bp, Artificial Sequence
  chemically synthesized
tcctaccccccaccacttttaa

SEQ ID NO: 28083 - DNA, 22 bp, Artificial Sequence
  chemically synthesized
ctaccccccaccacttttaaag

SEQ ID NO: 28084 - DNA, 22 bp, Artificial Sequence
  chemically synthesized
ccccccaccacttttaaagatc

SEQ ID NO: 28085 - DNA, 22 bp, Artificial Sequence
  chemically synthesized
ttaaagatccatcaaggcccag

SEQ ID NO: 28086 - DNA, 22 bp, Artificial Sequence
  chemically synthesized
taaagatccatcaaggcccagc

SEQ ID NO: 28087 - DNA, 22 bp, Artificial Sequence
  chemically synthesized
aaagatccatcaaggcccagca

SEQ ID NO: 28088 - DNA, 22 bp, Artificial Sequence
  chemically synthesized
aagatccatcaaggcccagcat

SEQ ID NO: 28089 - DNA, 22 bp, Artificial Sequence
  chemically synthesized
acacctgtaatctcaacacttt

SEQ ID NO: 28090 - DNA, 22 bp, Artificial Sequence
  chemically synthesized
taatctcaacacttttcaaggc

SEQ ID NO: 28091 - DNA, 22 bp, Artificial Sequence
  chemically synthesized
aacacttttcaaggctgaggtg

SEQ ID NO: 28092 - DNA, 22 bp, Artificial Sequence
  chemically synthesized
ttcaaggctgaggtgggagaat

SEQ ID NO: 28093 - DNA, 22 bp, Artificial Sequence
  chemically synthesized
tcaaggctgaggtgggagaatt

SEQ ID NO: 28094 - DNA, 22 bp, Artificial Sequence
  chemically synthesized
caaggctgaggtgggagaattg

SEQ ID NO: 28095 - DNA, 22 bp, Artificial Sequence
  chemically synthesized
aaggctgaggtgggagaattgt

SEQ ID NO: 28096 - DNA, 22 bp, Artificial Sequence
  chemically synthesized
aggtgggagaattgtttgagac

SEQ ID NO: 28097 - DNA, 22 bp, Artificial Sequence
  chemically synthesized
tttgagaccaagagttggatac

SEQ ID NO: 28098 - DNA, 22 bp, Artificial Sequence
  chemically synthesized
gagaccaagagttggataccag

SEQ ID NO: 28099 - DNA, 22 bp, Artificial Sequence
  chemically synthesized
agaccaagagttggataccagc

SEQ ID NO: 28100 - DNA, 22 bp, Artificial Sequence
  chemically synthesized
gataccagcctggggaacatag

SEQ ID NO: 28101 - DNA, 22 bp, Artificial Sequence
  chemically synthesized
gggaacatagggagaccctgtt

SEQ ID NO: 28102 - DNA, 22 bp, Artificial Sequence
  chemically synthesized
tttctacagaaatttaaaaaat

SEQ ID NO: 28103 - DNA, 22 bp, Artificial Sequence
  chemically synthesized
ctacagaaatttaaaaaatttc

SEQ ID NO: 28104 - DNA, 22 bp, Artificial Sequence
  chemically synthesized
tacagaaatttaaaaaatttct

SEQ ID NO: 28105 - DNA, 22 bp, Artificial Sequence
  chemically synthesized
cagaaatttaaaaaatttctct

SEQ ID NO: 28106 - DNA, 22 bp, Artificial Sequence
  chemically synthesized
aaaaaatttctctagctggcca

SEQ ID NO: 28107 - DNA, 22 bp, Artificial Sequence
  chemically synthesized
aaaaatttctctagctggccat

SEQ ID NO: 28108 - DNA, 22 bp, Artificial Sequence
  chemically synthesized
ctctagctggccatggaggctc

SEQ ID NO: 28109 - DNA, 22 bp, Artificial Sequence
  chemically synthesized
tctagctggccatggaggctca

SEQ ID NO: 28110 - DNA, 22 bp, Artificial Sequence
  chemically synthesized
tagctggccatggaggctcaca

SEQ ID NO: 28111 - DNA, 22 bp, Artificial Sequence
  chemically synthesized
gctggccatggaggctcacacc

SEQ ID NO: 28112 - DNA, 22 bp, Artificial Sequence
  chemically synthesized
gccatggaggctcacacctgta

SEQ ID NO: 28113 - DNA, 22 bp, Artificial Sequence
  chemically synthesized
acacctgtagtcctagctacct

SEQ ID NO: 28114 - DNA, 22 bp, Artificial Sequence
  chemically synthesized
tagtcctagctacctgagaggc

SEQ ID NO: 28115 - DNA, 22 bp, Artificial Sequence
  chemically synthesized
gctacctgagaggctaaagcag

SEQ ID NO: 28116 - DNA, 22 bp, Artificial Sequence
  chemically synthesized
cctgagaggctaaagcaggagg

SEQ ID NO: 28117 - DNA, 22 bp, Artificial Sequence
  chemically synthesized
agaggctaaagcaggaggatca

SEQ ID NO: 28118 - DNA, 22 bp, Artificial Sequence
  chemically synthesized
aagcaggaggatcaattgaatc

SEQ ID NO: 28119 - DNA, 22 bp, Artificial Sequence
  chemically synthesized
aatccaggcgttctagtgaggc

SEQ ID NO: 28120 - DNA, 22 bp, Artificial Sequence
  chemically synthesized
tagtgaggcttcagtgagcaag

SEQ ID NO: 28121 - DNA, 22 bp, Artificial Sequence
  chemically synthesized
gtgaggcttcagtgagcaagat

SEQ ID NO: 28122 - DNA, 22 bp, Artificial Sequence
  chemically synthesized
cagtgagcaagattgcaccatt

SEQ ID NO: 28123 - DNA, 22 bp, Artificial Sequence
  chemically synthesized
agtgagcaagattgcaccattg

SEQ ID NO: 28124 - DNA, 22 bp, Artificial Sequence
  chemically synthesized
caccattgcactccagccgggg

SEQ ID NO: 28125 - DNA, 22 bp, Artificial Sequence
  chemically synthesized
cactccagccggggtgacagag

SEQ ID NO: 28126 - DNA, 22 bp, Artificial Sequence
  chemically synthesized
cagccggggtgacagagtgaga

SEQ ID NO: 28127 - DNA, 22 bp, Artificial Sequence
  chemically synthesized
tttcaaacaaacaagcaaaagc

SEQ ID NO: 28128 - DNA, 22 bp, Artificial Sequence
  chemically synthesized
caaacaaacaagcaaaagcaaa

SEQ ID NO: 28129 - DNA, 22 bp, Artificial Sequence
  chemically synthesized
aaacaaacaagcaaaagcaaaa

SEQ ID NO: 28130 - DNA, 22 bp, Artificial Sequence
  chemically synthesized
gttgctccattcctttacttac

SEQ ID NO: 28131 - DNA, 22 bp, Artificial Sequence
  chemically synthesized
ttgctccattcctttacttact

SEQ ID NO: 28132 - DNA, 22 bp, Artificial Sequence
  chemically synthesized
ctccattcctttacttactatc

SEQ ID NO: 28133 - DNA, 22 bp, Artificial Sequence
  chemically synthesized
cattcctttacttactatcttg

SEQ ID NO: 28134 - DNA, 22 bp, Artificial Sequence
  chemically synthesized
ctttacttactatcttgctgtc

SEQ ID NO: 28135 - DNA, 22 bp, Artificial Sequence
  chemically synthesized
tacttactatcttgctgtctac

SEQ ID NO: 28136 - DNA, 22 bp, Artificial Sequence
  chemically synthesized
acttactatcttgctgtctaca

SEQ ID NO: 28137 - DNA, 22 bp, Artificial Sequence
  chemically synthesized
cttactatcttgctgtctacag

SEQ ID NO: 28138 - DNA, 22 bp, Artificial Sequence
  chemically synthesized
actatcttgctgtctacagcta

SEQ ID NO: 28139 - DNA, 22 bp, Artificial Sequence
  chemically synthesized
ctatcttgctgtctacagctaa

SEQ ID NO: 28140 - DNA, 22 bp, Artificial Sequence
  chemically synthesized
tcttgctgtctacagctaaagt

SEQ ID NO: 28141 - DNA, 22 bp, Artificial Sequence
  chemically synthesized
gctgtctacagctaaagtcaga

SEQ ID NO: 28142 - DNA, 22 bp, Artificial Sequence
  chemically synthesized
ctgtctacagctaaagtcagac

SEQ ID NO: 28143 - DNA, 22 bp, Artificial Sequence
  chemically synthesized
tctacagctaaagtcagactgc

SEQ ID NO: 28144 - DNA, 22 bp, Artificial Sequence
  chemically synthesized
cagctaaagtcagactgcatga

SEQ ID NO: 28145 - DNA, 22 bp, Artificial Sequence
  chemically synthesized
aagtcagactgcatgatttgga

SEQ ID NO: 28146 - DNA, 22 bp, Artificial Sequence
  chemically synthesized
catgatttggaattccaactcc

SEQ ID NO: 28147 - DNA, 22 bp, Artificial Sequence
  chemically synthesized
ggaattccaactccaccatcac

SEQ ID NO: 28148 - DNA, 22 bp, Artificial Sequence
  chemically synthesized
gaattccaactccaccatcacc

SEQ ID NO: 28149 - DNA, 22 bp, Artificial Sequence
  chemically synthesized
caactccaccatcacctgggta

SEQ ID NO: 28150 - DNA, 22 bp, Artificial Sequence
  chemically synthesized
caccatcacctgggtaatgttg

SEQ ID NO: 28151 - DNA, 22 bp, Artificial Sequence
  chemically synthesized
ggtaatgttgagatttattaca

SEQ ID NO: 28152 - DNA, 22 bp, Artificial Sequence
  chemically synthesized
agatttattacatagcatctct

SEQ ID NO: 28153 - DNA, 22 bp, Artificial Sequence
  chemically synthesized
attacatagcatctctgtgcct

SEQ ID NO: 28154 - DNA, 22 bp, Artificial Sequence
  chemically synthesized
ttacatagcatctctgtgcctc

SEQ ID NO: 28155 - DNA, 22 bp, Artificial Sequence
  chemically synthesized
catagcatctctgtgcctcagt

SEQ ID NO: 28156 - DNA, 22 bp, Artificial Sequence
  chemically synthesized
tgtgcctcagtttctccatata

SEQ ID NO: 28157 - DNA, 22 bp, Artificial Sequence
  chemically synthesized
tgcctcagtttctccatatata

SEQ ID NO: 28158 - DNA, 22 bp, Artificial Sequence
  chemically synthesized
agtttctccatatataaaatct

SEQ ID NO: 28159 - DNA, 22 bp, Artificial Sequence
  chemically synthesized
ctccatatataaaatctacctg

SEQ ID NO: 28160 - DNA, 22 bp, Artificial Sequence
  chemically synthesized
tccatatataaaatctacctgt

SEQ ID NO: 28161 - DNA, 22 bp, Artificial Sequence
  chemically synthesized
catatataaaatctacctgtaa

SEQ ID NO: 28162 - DNA, 22 bp, Artificial Sequence
  chemically synthesized
cctgtaataatgttgtgaaaat

SEQ ID NO: 28163 - DNA, 22 bp, Artificial Sequence
  chemically synthesized
taataatgttgtgaaaattaaa

SEQ ID NO: 28164 - DNA, 22 bp, Artificial Sequence
  chemically synthesized
tgaaaattaaaagaaataccag

SEQ ID NO: 28165 - DNA, 22 bp, Artificial Sequence
  chemically synthesized
aaagaaataccagttgtaaatc

SEQ ID NO: 28166 - DNA, 22 bp, Artificial Sequence
  chemically synthesized
taaatcactcagaactgtgcct

SEQ ID NO: 28167 - DNA, 22 bp, Artificial Sequence
  chemically synthesized
agaactgtgcctagcatttaat

SEQ ID NO: 28168 - DNA, 22 bp, Artificial Sequence
  chemically synthesized
tgcctagcatttaataaacact

SEQ ID NO: 28169 - DNA, 22 bp, Artificial Sequence
  chemically synthesized
gcatttaataaacactctgtag

SEQ ID NO: 28170 - DNA, 22 bp, Artificial Sequence
  chemically synthesized
aataaacactctgtaggtatta

SEQ ID NO: 28171 - DNA, 22 bp, Artificial Sequence
  chemically synthesized
ataaacactctgtaggtattag

SEQ ID NO: 28172 - DNA, 22 bp, Artificial Sequence
  chemically synthesized
tgtaggtattagcttatttctt

SEQ ID NO: 28173 - DNA, 22 bp, Artificial Sequence
  chemically synthesized
taggtattagcttatttcttta

SEQ ID NO: 28174 - DNA, 22 bp, Artificial Sequence
  chemically synthesized
gcttatttctttataaaattta

SEQ ID NO: 28175 - DNA, 22 bp, Artificial Sequence
  chemically synthesized
atttctttataaaatttattca

SEQ ID NO: 28176 - DNA, 22 bp, Artificial Sequence
  chemically synthesized
tttctttataaaatttattcat

SEQ ID NO: 28177 - DNA, 22 bp, Artificial Sequence
  chemically synthesized
ctttataaaatttattcataaa

SEQ ID NO: 28178 - DNA, 22 bp, Artificial Sequence
  chemically synthesized
tttataaaatttattcataaaa

SEQ ID NO: 28179 - DNA, 22 bp, Artificial Sequence
  chemically synthesized
tataaaatttattcataaaatg

SEQ ID NO: 28180 - DNA, 22 bp, Artificial Sequence
  chemically synthesized
ataaaatttattcataaaatga

SEQ ID NO: 28181 - DNA, 22 bp, Artificial Sequence
  chemically synthesized
taaaatttattcataaaatgag

SEQ ID NO: 28182 - DNA, 22 bp, Artificial Sequence
  chemically synthesized
attcataaaatgaggaagttag

SEQ ID NO: 28183 - DNA, 22 bp, Artificial Sequence
  chemically synthesized
ttcataaaatgaggaagttagc

SEQ ID NO: 28184 - DNA, 22 bp, Artificial Sequence
  chemically synthesized
ataaaatgaggaagttagctca

SEQ ID NO: 28185 - DNA, 22 bp, Artificial Sequence
  chemically synthesized
gctcatgtattgtcataccagc

SEQ ID NO: 28186 - DNA, 22 bp, Artificial Sequence
  chemically synthesized
atgtattgtcataccagctttc

SEQ ID NO: 28187 - DNA, 22 bp, Artificial Sequence
  chemically synthesized
tcataccagctttcactttgaa

SEQ ID NO: 28188 - DNA, 22 bp, Artificial Sequence
  chemically synthesized
tcactttgaatgagtccataat

SEQ ID NO: 28189 - DNA, 22 bp, Artificial Sequence
  chemically synthesized
cactttgaatgagtccataatt

SEQ ID NO: 28190 - DNA, 22 bp, Artificial Sequence
  chemically synthesized
actttgaatgagtccataattg

SEQ ID NO: 28191 - DNA, 22 bp, Artificial Sequence
  chemically synthesized
tgaatgagtccataattgcatt

SEQ ID NO: 28192 - DNA, 22 bp, Artificial Sequence
  chemically synthesized
gaatgagtccataattgcattt

SEQ ID NO: 28193 - DNA, 22 bp, Artificial Sequence
  chemically synthesized
aatgagtccataattgcatttt

SEQ ID NO: 28194 - DNA, 22 bp, Artificial Sequence
  chemically synthesized
catttttaaacacaaaaagaga

SEQ ID NO: 28195 - DNA, 22 bp, Artificial Sequence
  chemically synthesized
ttaaacacaaaaagagaaataa

SEQ ID NO: 28196 - DNA, 22 bp, Artificial Sequence
  chemically synthesized
taaacacaaaaagagaaataat

SEQ ID NO: 28197 - DNA, 22 bp, Artificial Sequence
  chemically synthesized
aaacacaaaaagagaaataata

SEQ ID NO: 28198 - DNA, 22 bp, Artificial Sequence
  chemically synthesized
aacacaaaaagagaaataatag

SEQ ID NO: 28199 - DNA, 22 bp, Artificial Sequence
  chemically synthesized
cttcaatcacgggatgcatagt

SEQ ID NO: 28200 - DNA, 22 bp, Artificial Sequence
  chemically synthesized
caatcacgggatgcatagtaat

SEQ ID NO: 28201 - DNA, 22 bp, Artificial Sequence
  chemically synthesized
aatcacgggatgcatagtaatt

SEQ ID NO: 28202 - DNA, 22 bp, Artificial Sequence
  chemically synthesized
ggatttctttgccctaattact

SEQ ID NO: 28203 - DNA, 22 bp, Artificial Sequence
  chemically synthesized
ctttgccctaattactgatgtg

SEQ ID NO: 28204 - DNA, 22 bp, Artificial Sequence
  chemically synthesized
tttgccctaattactgatgtgg

SEQ ID NO: 28205 - DNA, 22 bp, Artificial Sequence
  chemically synthesized
tgccctaattactgatgtggat

SEQ ID NO: 28206 - DNA, 22 bp, Artificial Sequence
  chemically synthesized
gccctaattactgatgtggata

SEQ ID NO: 28207 - DNA, 22 bp, Artificial Sequence
  chemically synthesized
ccctaattactgatgtggataa

SEQ ID NO: 28208 - DNA, 22 bp, Artificial Sequence
  chemically synthesized
attactgatgtggataagccgg

SEQ ID NO: 28209 - DNA, 22 bp, Artificial Sequence
  chemically synthesized
ctgatgtggataagccggtggg

SEQ ID NO: 28210 - DNA, 22 bp, Artificial Sequence
  chemically synthesized
atgtggataagccggtgggcca

SEQ ID NO: 28211 - DNA, 22 bp, Artificial Sequence
  chemically synthesized
aagctgttatcacaccatgtga

SEQ ID NO: 28212 - DNA, 22 bp, Artificial Sequence
  chemically synthesized
ttatcacaccatgtgaaacaca

SEQ ID NO: 28213 - DNA, 22 bp, Artificial Sequence
  chemically synthesized
tcacaccatgtgaaacacacga

SEQ ID NO: 28214 - DNA, 22 bp, Artificial Sequence
  chemically synthesized
tgtaaaaactatgcttggttgc

SEQ ID NO: 28215 - DNA, 22 bp, Artificial Sequence
  chemically synthesized
tgcttggttgcacagcttcaag

SEQ ID NO: 28216 - DNA, 22 bp, Artificial Sequence
  chemically synthesized
ggttgcacagcttcaaggaaag

SEQ ID NO: 28217 - DNA, 22 bp, Artificial Sequence
  chemically synthesized
gttgcacagcttcaaggaaagc

SEQ ID NO: 28218 - DNA, 22 bp, Artificial Sequence
  chemically synthesized
cacagcttcaaggaaagcacta

SEQ ID NO: 28219 - DNA, 22 bp, Artificial Sequence
  chemically synthesized
caaggaaagcactagtctactc

SEQ ID NO: 28220 - DNA, 22 bp, Artificial Sequence
  chemically synthesized
aaggaaagcactagtctactca

SEQ ID NO: 28221 - DNA, 22 bp, Artificial Sequence
  chemically synthesized
gtctactcacttccttttcatt

SEQ ID NO: 28222 - DNA, 22 bp, Artificial Sequence
  chemically synthesized
ctcacttccttttcattcagca

SEQ ID NO: 28223 - DNA, 22 bp, Artificial Sequence
  chemically synthesized
acttccttttcattcagcatgc

SEQ ID NO: 28224 - DNA, 22 bp, Artificial Sequence
  chemically synthesized
ccttttcattcagcatgctatg

SEQ ID NO: 28225 - DNA, 22 bp, Artificial Sequence
  chemically synthesized
cttttcattcagcatgctatgt

SEQ ID NO: 28226 - DNA, 22 bp, Artificial Sequence
  chemically synthesized
ttcattcagcatgctatgtcta

SEQ ID NO: 28227 - DNA, 22 bp, Artificial Sequence
  chemically synthesized
tcattcagcatgctatgtctag

SEQ ID NO: 28228 - DNA, 22 bp, Artificial Sequence
  chemically synthesized
cattcagcatgctatgtctagg

SEQ ID NO: 28229 - DNA, 22 bp, Artificial Sequence
  chemically synthesized
attcagcatgctatgtctaggc

SEQ ID NO: 28230 - DNA, 22 bp, Artificial Sequence
  chemically synthesized
agcatgctatgtctaggcccct

SEQ ID NO: 28231 - DNA, 22 bp, Artificial Sequence
  chemically synthesized
tgtctaggcccctttcatataa

SEQ ID NO: 28232 - DNA, 22 bp, Artificial Sequence
  chemically synthesized
ggcccctttcatataaaatatt

SEQ ID NO: 28233 - DNA, 22 bp, Artificial Sequence
  chemically synthesized
tcatataaaatatttggagctg

SEQ ID NO: 28234 - DNA, 22 bp, Artificial Sequence
  chemically synthesized
catataaaatatttggagctgc

SEQ ID NO: 28235 - DNA, 22 bp, Artificial Sequence
  chemically synthesized
atataaaatatttggagctgcc

SEQ ID NO: 28236 - DNA, 22 bp, Artificial Sequence
  chemically synthesized
ggagctgccattgtaggtagtg

SEQ ID NO: 28237 - DNA, 22 bp, Artificial Sequence
  chemically synthesized
gagctgccattgtaggtagtgc

SEQ ID NO: 28238 - DNA, 22 bp, Artificial Sequence
  chemically synthesized
ccattgtaggtagtgcaggtgg

SEQ ID NO: 28239 - DNA, 22 bp, Artificial Sequence
  chemically synthesized
taggtagtgcaggtggtcttgt

SEQ ID NO: 28240 - DNA, 22 bp, Artificial Sequence
  chemically synthesized
gttcaaagtgtgagtatcacct

SEQ ID NO: 28241 - DNA, 22 bp, Artificial Sequence
  chemically synthesized
ttcaaagtgtgagtatcacctc

SEQ ID NO: 28242 - DNA, 22 bp, Artificial Sequence
  chemically synthesized
aaagtgtgagtatcacctccca

SEQ ID NO: 28243 - DNA, 22 bp, Artificial Sequence
  chemically synthesized
ccactgccaagactgcagctgc

SEQ ID NO: 28244 - DNA, 22 bp, Artificial Sequence
  chemically synthesized
ccaagactgcagctgctttgat

SEQ ID NO: 28245 - DNA, 22 bp, Artificial Sequence
  chemically synthesized
cagctgctttgattttaactga

SEQ ID NO: 28246 - DNA, 22 bp, Artificial Sequence
  chemically synthesized
ctttgattttaactgaggatct

SEQ ID NO: 28247 - DNA, 22 bp, Artificial Sequence
  chemically synthesized
tgattttaactgaggatctaga

SEQ ID NO: 28248 - DNA, 22 bp, Artificial Sequence
  chemically synthesized
gattttaactgaggatctagaa

SEQ ID NO: 28249 - DNA, 22 bp, Artificial Sequence
  chemically synthesized
attttaactgaggatctagaaa

SEQ ID NO: 28250 - DNA, 22 bp, Artificial Sequence
  chemically synthesized
taactgaggatctagaaaagtg

SEQ ID NO: 28251 - DNA, 22 bp, Artificial Sequence
  chemically synthesized
aactgaggatctagaaaagtgc

SEQ ID NO: 28252 - DNA, 22 bp, Artificial Sequence
  chemically synthesized
actgaggatctagaaaagtgct

SEQ ID NO: 28253 - DNA, 22 bp, Artificial Sequence
  chemically synthesized
aggatctagaaaagtgctggga

SEQ ID NO: 28254 - DNA, 22 bp, Artificial Sequence
  chemically synthesized
gaaaagtgctgggaacacaaat

SEQ ID NO: 28255 - DNA, 22 bp, Artificial Sequence
  chemically synthesized
ggaacacaaatatttgctgacc

SEQ ID NO: 28256 - DNA, 22 bp, Artificial Sequence
  chemically synthesized
gctgacctttgtcacaagtagc

SEQ ID NO: 28257 - DNA, 22 bp, Artificial Sequence
  chemically synthesized
ctgacctttgtcacaagtagca

SEQ ID NO: 28258 - DNA, 22 bp, Artificial Sequence
  chemically synthesized
acctttgtcacaagtagcacct

SEQ ID NO: 28259 - DNA, 22 bp, Artificial Sequence
  chemically synthesized
tgtcacaagtagcacctaatct

SEQ ID NO: 28260 - DNA, 22 bp, Artificial Sequence
  chemically synthesized
gtcacaagtagcacctaatctc

SEQ ID NO: 28261 - DNA, 22 bp, Artificial Sequence
  chemically synthesized
tcacaagtagcacctaatctcc

SEQ ID NO: 28262 - DNA, 22 bp, Artificial Sequence
  chemically synthesized
atctccttcctaccagacctgc

SEQ ID NO: 28263 - DNA, 22 bp, Artificial Sequence
  chemically synthesized
cttcctaccagacctgctgcct

SEQ ID NO: 28264 - DNA, 22 bp, Artificial Sequence
  chemically synthesized
cctaccagacctgctgccttat

SEQ ID NO: 28265 - DNA, 22 bp, Artificial Sequence
  chemically synthesized
ctaccagacctgctgccttata

SEQ ID NO: 28266 - DNA, 22 bp, Artificial Sequence
  chemically synthesized
ccagacctgctgccttataaaa

SEQ ID NO: 28267 - DNA, 22 bp, Artificial Sequence
  chemically synthesized
ctgccttataaaatgatgttct

SEQ ID NO: 28268 - DNA, 22 bp, Artificial Sequence
  chemically synthesized
ccttataaaatgatgttctaag

SEQ ID NO: 28269 - DNA, 22 bp, Artificial Sequence
  chemically synthesized
ataaaatgatgttctaagtgta

SEQ ID NO: 28270 - DNA, 22 bp, Artificial Sequence
  chemically synthesized
taaaatgatgttctaagtgtat

SEQ ID NO: 28271 - DNA, 22 bp, Artificial Sequence
  chemically synthesized
taagtgtataatgacttcctct

SEQ ID NO: 28272 - DNA, 22 bp, Artificial Sequence
  chemically synthesized
agtgtataatgacttcctctgc

SEQ ID NO: 28273 - DNA, 22 bp, Artificial Sequence
  chemically synthesized
cctctgcttctgcaactgtgtt

SEQ ID NO: 28274 - DNA, 22 bp, Artificial Sequence
  chemically synthesized
ctctgcttctgcaactgtgttt

SEQ ID NO: 28275 - DNA, 22 bp, Artificial Sequence
  chemically synthesized
tgcttctgcaactgtgttttgg

SEQ ID NO: 28276 - DNA, 22 bp, Artificial Sequence
  chemically synthesized
cttctgcaactgtgttttggaa

SEQ ID NO: 28277 - DNA, 22 bp, Artificial Sequence
  chemically synthesized
ctgcaactgtgttttggaacag

SEQ ID NO: 28278 - DNA, 22 bp, Artificial Sequence
  chemically synthesized
tgcaactgtgttttggaacagg

SEQ ID NO: 28279 - DNA, 22 bp, Artificial Sequence
  chemically synthesized
caactgtgttttggaacaggag

SEQ ID NO: 28280 - DNA, 22 bp, Artificial Sequence
  chemically synthesized
tgttttggaacaggagggtgag

SEQ ID NO: 28281 - DNA, 22 bp, Artificial Sequence
  chemically synthesized
tggaacaggagggtgagattag

SEQ ID NO: 28282 - DNA, 22 bp, Artificial Sequence
  chemically synthesized
ggaacaggagggtgagattagt

SEQ ID NO: 28283 - DNA, 22 bp, Artificial Sequence
  chemically synthesized
gaacaggagggtgagattagta

SEQ ID NO: 28284 - DNA, 22 bp, Artificial Sequence
  chemically synthesized
gtagccacacacactgaaatag

SEQ ID NO: 28285 - DNA, 22 bp, Artificial Sequence
  chemically synthesized
aaatagtcatatgacttccaaa

SEQ ID NO: 28286 - DNA, 22 bp, Artificial Sequence
  chemically synthesized
ccaaagtctgtaatttttaagc

SEQ ID NO: 28287 - DNA, 22 bp, Artificial Sequence
  chemically synthesized
caaagtctgtaatttttaagca

SEQ ID NO: 28288 - DNA, 22 bp, Artificial Sequence
  chemically synthesized
taatttttaagcatatacaaaa

SEQ ID NO: 28289 - DNA, 22 bp, Artificial Sequence
  chemically synthesized
ttaagcatatacaaaatagtga

SEQ ID NO: 28290 - DNA, 22 bp, Artificial Sequence
  chemically synthesized
taagcatatacaaaatagtgaa

SEQ ID NO: 28291 - DNA, 22 bp, Artificial Sequence
  chemically synthesized
aagcatatacaaaatagtgaaa

SEQ ID NO: 28292 - DNA, 22 bp, Artificial Sequence
  chemically synthesized
agcatatacaaaatagtgaaat

SEQ ID NO: 28293 - DNA, 22 bp, Artificial Sequence
  chemically synthesized
ctccatatgtgtataatatgta

SEQ ID NO: 28294 - DNA, 22 bp, Artificial Sequence
  chemically synthesized
tccatatgtgtataatatgtat

SEQ ID NO: 28295 - DNA, 22 bp, Artificial Sequence
  chemically synthesized
catatgtgtataatatgtatat

SEQ ID NO: 28296 - DNA, 22 bp, Artificial Sequence
  chemically synthesized
attttggctgatatctattcta

SEQ ID NO: 28297 - DNA, 22 bp, Artificial Sequence
  chemically synthesized
ttttggctgatatctattctat

SEQ ID NO: 28298 - DNA, 22 bp, Artificial Sequence
  chemically synthesized
tggctgatatctattctatact

SEQ ID NO: 28299 - DNA, 22 bp, Artificial Sequence
  chemically synthesized
ggctgatatctattctatactt

SEQ ID NO: 28300 - DNA, 22 bp, Artificial Sequence
  chemically synthesized
gctgatatctattctatacttc

SEQ ID NO: 28301 - DNA, 22 bp, Artificial Sequence
  chemically synthesized
atatctattctatacttctttg

SEQ ID NO: 28302 - DNA, 22 bp, Artificial Sequence
  chemically synthesized
ttctatacttctttgaaatagt

SEQ ID NO: 28303 - DNA, 22 bp, Artificial Sequence
  chemically synthesized
tatacttctttgaaatagtgat

SEQ ID NO: 28304 - DNA, 22 bp, Artificial Sequence
  chemically synthesized
tacttctttgaaatagtgattt

SEQ ID NO: 28305 - DNA, 22 bp, Artificial Sequence
  chemically synthesized
ctttgaaatagtgatttttagt

SEQ ID NO: 28306 - DNA, 22 bp, Artificial Sequence
  chemically synthesized
tttgaaatagtgatttttagta

SEQ ID NO: 28307 - DNA, 22 bp, Artificial Sequence
  chemically synthesized
tgaaatagtgatttttagtaaa

SEQ ID NO: 28308 - DNA, 22 bp, Artificial Sequence
  chemically synthesized
gaaatagtgatttttagtaaat

SEQ ID NO: 28309 - DNA, 22 bp, Artificial Sequence
  chemically synthesized
aaatagtgatttttagtaaatt

SEQ ID NO: 28310 - DNA, 22 bp, Artificial Sequence
  chemically synthesized
ttagtaaattggcagtgttgcc

SEQ ID NO: 28311 - DNA, 22 bp, Artificial Sequence
  chemically synthesized
tagtaaattggcagtgttgcca

SEQ ID NO: 28312 - DNA, 22 bp, Artificial Sequence
  chemically synthesized
agtaaattggcagtgttgccag

SEQ ID NO: 28313 - DNA, 22 bp, Artificial Sequence
  chemically synthesized
gtaaattggcagtgttgccaga

SEQ ID NO: 28314 - DNA, 22 bp, Artificial Sequence
  chemically synthesized
gcagtgttgccagatgacgact

SEQ ID NO: 28315 - DNA, 22 bp, Artificial Sequence
  chemically synthesized
ccagatgacgacttagagtttt

SEQ ID NO: 28316 - DNA, 22 bp, Artificial Sequence
  chemically synthesized
agagttttaaccacctcattgt

SEQ ID NO: 28317 - DNA, 22 bp, Artificial Sequence
  chemically synthesized
gagttttaaccacctcattgtt

SEQ ID NO: 28318 - DNA, 22 bp, Artificial Sequence
  chemically synthesized
taaccacctcattgttatatgt

SEQ ID NO: 28319 - DNA, 22 bp, Artificial Sequence
  chemically synthesized
aaccacctcattgttatatgta

SEQ ID NO: 28320 - DNA, 22 bp, Artificial Sequence
  chemically synthesized
accacctcattgttatatgtac

SEQ ID NO: 28321 - DNA, 22 bp, Artificial Sequence
  chemically synthesized
attgttatatgtaccatggtag

SEQ ID NO: 28322 - DNA, 22 bp, Artificial Sequence
  chemically synthesized
ttatatgtaccatggtagctca

SEQ ID NO: 28323 - DNA, 22 bp, Artificial Sequence
  chemically synthesized
tatgtaccatggtagctcatct

SEQ ID NO: 28324 - DNA, 22 bp, Artificial Sequence
  chemically synthesized
atcttttctttcaggtgaaagt

SEQ ID NO: 28325 - DNA, 22 bp, Artificial Sequence
  chemically synthesized
ttctttcaggtgaaagttgtga

SEQ ID NO: 28326 - DNA, 22 bp, Artificial Sequence
  chemically synthesized
tctttcaggtgaaagttgtgat

SEQ ID NO: 28327 - DNA, 22 bp, Artificial Sequence
  chemically synthesized
ctttcaggtgaaagttgtgata

SEQ ID NO: 28328 - DNA, 22 bp, Artificial Sequence
  chemically synthesized
tttcaggtgaaagttgtgatac

SEQ ID NO: 28329 - DNA, 22 bp, Artificial Sequence
  chemically synthesized
tcaggtgaaagttgtgatactt

SEQ ID NO: 28330 - DNA, 22 bp, Artificial Sequence
  chemically synthesized
caggtgaaagttgtgatacttt

SEQ ID NO: 28331 - DNA, 22 bp, Artificial Sequence
  chemically synthesized
aggtgaaagttgtgatactttg

SEQ ID NO: 28332 - DNA, 22 bp, Artificial Sequence
  chemically synthesized
tgatactttgtcctcacgctaa

SEQ ID NO: 28333 - DNA, 22 bp, Artificial Sequence
  chemically synthesized
tgtcctcacgctaaacatagcc

SEQ ID NO: 28334 - DNA, 22 bp, Artificial Sequence
  chemically synthesized
gtcctcacgctaaacatagccc

SEQ ID NO: 28335 - DNA, 22 bp, Artificial Sequence
  chemically synthesized
tcctcacgctaaacatagcccc

SEQ ID NO: 28336 - DNA, 22 bp, Artificial Sequence
  chemically synthesized
acgctaaacatagcccccatgt

SEQ ID NO: 28337 - DNA, 22 bp, Artificial Sequence
  chemically synthesized
aacatagcccccatgttgttcc

SEQ ID NO: 28338 - DNA, 22 bp, Artificial Sequence
  chemically synthesized
ttccaggaaaatagagatcaat

SEQ ID NO: 28339 - DNA, 22 bp, Artificial Sequence
  chemically synthesized
caggaaaatagagatcaataaa

SEQ ID NO: 28340 - DNA, 22 bp, Artificial Sequence
  chemically synthesized
gtttgaaagtgaaggttaagtt

SEQ ID NO: 28341 - DNA, 22 bp, Artificial Sequence
  chemically synthesized
tttgaaagtgaaggttaagttc

SEQ ID NO: 28342 - DNA, 22 bp, Artificial Sequence
  chemically synthesized
gaaagtgaaggttaagttcaaa

SEQ ID NO: 28343 - DNA, 22 bp, Artificial Sequence
  chemically synthesized
aaagtgaaggttaagttcaaat

SEQ ID NO: 28344 - DNA, 22 bp, Artificial Sequence
  chemically synthesized
agttcaaattcaatgacctacg

SEQ ID NO: 28345 - DNA, 22 bp, Artificial Sequence
  chemically synthesized
aaattcaatgacctacgctgtg

SEQ ID NO: 28346 - DNA, 22 bp, Artificial Sequence
  chemically synthesized
aatgacctacgctgtggtaaaa

SEQ ID NO: 28347 - DNA, 22 bp, Artificial Sequence
  chemically synthesized
cgctgtggtaaaacgatcattc

SEQ ID NO: 28348 - DNA, 22 bp, Artificial Sequence
  chemically synthesized
tggtaaaacgatcattcattaa

SEQ ID NO: 28349 - DNA, 22 bp, Artificial Sequence
  chemically synthesized
attaatgatattaagtattttc

SEQ ID NO: 28350 - DNA, 22 bp, Artificial Sequence
  chemically synthesized
atgatattaagtattttctttt

SEQ ID NO: 28351 - DNA, 22 bp, Artificial Sequence
  chemically synthesized
agtattttcttttttaatgtca

SEQ ID NO: 28352 - DNA, 22 bp, Artificial Sequence
  chemically synthesized
tcttttttaatgtcagaataaa

SEQ ID NO: 28353 - DNA, 22 bp, Artificial Sequence
  chemically synthesized
cttttttaatgtcagaataaaa

SEQ ID NO: 28354 - DNA, 22 bp, Artificial Sequence
  chemically synthesized
ttttttaatgtcagaataaaac

SEQ ID NO: 28355 - DNA, 22 bp, Artificial Sequence
  chemically synthesized
ttttaatgtcagaataaaacca

SEQ ID NO: 28356 - DNA, 22 bp, Artificial Sequence
  chemically synthesized
tttaatgtcagaataaaaccat

SEQ ID NO: 28357 - DNA, 22 bp, Artificial Sequence
  chemically synthesized
ttaatgtcagaataaaaccatt

SEQ ID NO: 28358 - DNA, 22 bp, Artificial Sequence
  chemically synthesized
taatgtcagaataaaaccattt

SEQ ID NO: 28359 - DNA, 22 bp, Artificial Sequence
  chemically synthesized
aatgtcagaataaaaccattta

SEQ ID NO: 28360 - DNA, 22 bp, Artificial Sequence
  chemically synthesized
atgtcagaataaaaccatttat

SEQ ID NO: 28361 - DNA, 22 bp, Artificial Sequence
  chemically synthesized
atttgcagatttaaaaatatat

SEQ ID NO: 28362 - DNA, 22 bp, Artificial Sequence
  chemically synthesized
tttgcagatttaaaaatatata

SEQ ID NO: 28363 - DNA, 22 bp, Artificial Sequence
  chemically synthesized
gcagatttaaaaatatatatgt

SEQ ID NO: 28364 - DNA, 22 bp, Artificial Sequence
  chemically synthesized
cagatttaaaaatatatatgtg

SEQ ID NO: 28365 - DNA, 22 bp, Artificial Sequence
  chemically synthesized
aaaaatatatatgtgtatgtaa

SEQ ID NO: 28366 - DNA, 22 bp, Artificial Sequence
  chemically synthesized
aaaatatatatgtgtatgtaaa

SEQ ID NO: 28367 - DNA, 22 bp, Artificial Sequence
  chemically synthesized
cttggtttatacctcaaatatg

SEQ ID NO: 28368 - DNA, 22 bp, Artificial Sequence
  chemically synthesized
ggtttatacctcaaatatgaaa

SEQ ID NO: 28369 - DNA, 22 bp, Artificial Sequence
  chemically synthesized
gtttatacctcaaatatgaaaa

SEQ ID NO: 28370 - DNA, 22 bp, Artificial Sequence
  chemically synthesized
atacctcaaatatgaaaatagg

SEQ ID NO: 28371 - DNA, 22 bp, Artificial Sequence
  chemically synthesized
tacctcaaatatgaaaatagga

SEQ ID NO: 28372 - DNA, 22 bp, Artificial Sequence
  chemically synthesized
aaatatgaaaataggaatgacc

SEQ ID NO: 28373 - DNA, 22 bp, Artificial Sequence
  chemically synthesized
tctctatgctcttgcattcact

SEQ ID NO: 28374 - DNA, 22 bp, Artificial Sequence
  chemically synthesized
tatgctcttgcattcacttata

SEQ ID NO: 28375 - DNA, 22 bp, Artificial Sequence
  chemically synthesized
tgctcttgcattcacttatatt

SEQ ID NO: 28376 - DNA, 22 bp, Artificial Sequence
  chemically synthesized
ttgcattcacttatattctagc

SEQ ID NO: 28377 - DNA, 22 bp, Artificial Sequence
  chemically synthesized
gcattcacttatattctagctt

SEQ ID NO: 28378 - DNA, 22 bp, Artificial Sequence
  chemically synthesized
cattcacttatattctagcttg

SEQ ID NO: 28379 - DNA, 22 bp, Artificial Sequence
  chemically synthesized
acttatattctagcttgttaag

SEQ ID NO: 28380 - DNA, 22 bp, Artificial Sequence
  chemically synthesized
atattctagcttgttaagagag

SEQ ID NO: 28381 - DNA, 22 bp, Artificial Sequence
  chemically synthesized
tattctagcttgttaagagaga

SEQ ID NO: 28382 - DNA, 22 bp, Artificial Sequence
  chemically synthesized
tagcttgttaagagagaagttt

SEQ ID NO: 28383 - DNA, 22 bp, Artificial Sequence
  chemically synthesized
gcttgttaagagagaagtttgg

SEQ ID NO: 28384 - DNA, 22 bp, Artificial Sequence
  chemically synthesized
gttaagagagaagtttggggca

SEQ ID NO: 28385 - DNA, 22 bp, Artificial Sequence
  chemically synthesized
ttaagagagaagtttggggcaa

SEQ ID NO: 28386 - DNA, 22 bp, Artificial Sequence
  chemically synthesized
agagagaagtttggggcaaaat

SEQ ID NO: 28387 - DNA, 22 bp, Artificial Sequence
  chemically synthesized
ggggcaaaatgtgctttataaa

SEQ ID NO: 28388 - DNA, 22 bp, Artificial Sequence
  chemically synthesized
gggcaaaatgtgctttataaat

SEQ ID NO: 28389 - DNA, 22 bp, Artificial Sequence
  chemically synthesized
tataaatagtaaaaactgaggt

SEQ ID NO: 28390 - DNA, 22 bp, Artificial Sequence
  chemically synthesized
ataaatagtaaaaactgaggta

SEQ ID NO: 28391 - DNA, 22 bp, Artificial Sequence
  chemically synthesized
taaatagtaaaaactgaggtaa

SEQ ID NO: 28392 - DNA, 22 bp, Artificial Sequence
  chemically synthesized
aggtaaactatagcacaaagtg

SEQ ID NO: 28393 - DNA, 22 bp, Artificial Sequence
  chemically synthesized
tagcacaaagtgtgctatataa

SEQ ID NO: 28394 - DNA, 22 bp, Artificial Sequence
  chemically synthesized
tataaacagtaaaaaccgaggt

SEQ ID NO: 28395 - DNA, 22 bp, Artificial Sequence
  chemically synthesized
aaatggtgttggaatataagaa

SEQ ID NO: 28396 - DNA, 22 bp, Artificial Sequence
  chemically synthesized
gaatataagaaatagcagtaaa

SEQ ID NO: 28397 - DNA, 22 bp, Artificial Sequence
  chemically synthesized
ctcacagcaagacagtacaggg

SEQ ID NO: 28398 - DNA, 22 bp, Artificial Sequence
  chemically synthesized
acagcaagacagtacagggaaa

SEQ ID NO: 28399 - DNA, 22 bp, Artificial Sequence
  chemically synthesized
gagggacaaagatttacttaca

SEQ ID NO: 28400 - DNA, 22 bp, Artificial Sequence
  chemically synthesized
acttacaatcaggcctcaacca

SEQ ID NO: 28401 - DNA, 22 bp, Artificial Sequence
  chemically synthesized
cttacaatcaggcctcaaccaa

SEQ ID NO: 28402 - DNA, 22 bp, Artificial Sequence
  chemically synthesized
acaatcaggcctcaaccaatat

SEQ ID NO: 28403 - DNA, 22 bp, Artificial Sequence
  chemically synthesized
caatcaggcctcaaccaatatg

SEQ ID NO: 28404 - DNA, 22 bp, Artificial Sequence
  chemically synthesized
aaccaatatgagatcgactttc

SEQ ID NO: 28405 - DNA, 22 bp, Artificial Sequence
  chemically synthesized
tcttttattgatatatgacgtg

SEQ ID NO: 28406 - DNA, 22 bp, Artificial Sequence
  chemically synthesized
cttttattgatatatgacgtgt

SEQ ID NO: 28407 - DNA, 22 bp, Artificial Sequence
  chemically synthesized
ttttattgatatatgacgtgtt

SEQ ID NO: 28408 - DNA, 22 bp, Artificial Sequence
  chemically synthesized
ttattgatatatgacgtgttta

SEQ ID NO: 28409 - DNA, 22 bp, Artificial Sequence
  chemically synthesized
tattgatatatgacgtgtttat

SEQ ID NO: 28410 - DNA, 22 bp, Artificial Sequence
  chemically synthesized
attgatatatgacgtgtttata

SEQ ID NO: 28411 - DNA, 22 bp, Artificial Sequence
  chemically synthesized
ttgatatatgacgtgtttatat

SEQ ID NO: 28412 - DNA, 22 bp, Artificial Sequence
  chemically synthesized
atatatgacgtgtttatatgta

SEQ ID NO: 28413 - DNA, 22 bp, Artificial Sequence
  chemically synthesized
atatgtatcaggtacatgtgac

SEQ ID NO: 28414 - DNA, 22 bp, Artificial Sequence
  chemically synthesized
tatgtatcaggtacatgtgaca

SEQ ID NO: 28415 - DNA, 22 bp, Artificial Sequence
  chemically synthesized
tgttacatgcatataatgtata

SEQ ID NO: 28416 - DNA, 22 bp, Artificial Sequence
  chemically synthesized
gttacatgcatataatgtataa

SEQ ID NO: 28417 - DNA, 22 bp, Artificial Sequence
  chemically synthesized
ttacatgcatataatgtataat

SEQ ID NO: 28418 - DNA, 22 bp, Artificial Sequence
  chemically synthesized
catgcatataatgtataatgat

SEQ ID NO: 28419 - DNA, 22 bp, Artificial Sequence
  chemically synthesized
ggggtattcatcacctcaagta

SEQ ID NO: 28420 - DNA, 22 bp, Artificial Sequence
  chemically synthesized
gggtattcatcacctcaagtat

SEQ ID NO: 28421 - DNA, 22 bp, Artificial Sequence
  chemically synthesized
atcacctcaagtatttatcgtt

SEQ ID NO: 28422 - DNA, 22 bp, Artificial Sequence
  chemically synthesized
aagtatttatcgtttctatgtg

SEQ ID NO: 28423 - DNA, 22 bp, Artificial Sequence
  chemically synthesized
atcgtttctatgtgttaggaac

SEQ ID NO: 28424 - DNA, 22 bp, Artificial Sequence
  chemically synthesized
tcgtttctatgtgttaggaaca

SEQ ID NO: 28425 - DNA, 22 bp, Artificial Sequence
  chemically synthesized
ctatgtgttaggaacatttcaa

SEQ ID NO: 28426 - DNA, 22 bp, Artificial Sequence
  chemically synthesized
tatgtgttaggaacatttcaag

SEQ ID NO: 28427 - DNA, 22 bp, Artificial Sequence
  chemically synthesized
tgtgttaggaacatttcaagac

SEQ ID NO: 28428 - DNA, 22 bp, Artificial Sequence
  chemically synthesized
ggaacatttcaagacctttctt

SEQ ID NO: 28429 - DNA, 22 bp, Artificial Sequence
  chemically synthesized
caagacctttcttctactattt

SEQ ID NO: 28430 - DNA, 22 bp, Artificial Sequence
  chemically synthesized
aagacctttcttctactatttt

SEQ ID NO: 28431 - DNA, 22 bp, Artificial Sequence
  chemically synthesized
tcttctactattttgaaatata

SEQ ID NO: 28432 - DNA, 22 bp, Artificial Sequence
  chemically synthesized
cttctactattttgaaatatac

SEQ ID NO: 28433 - DNA, 22 bp, Artificial Sequence
  chemically synthesized
ttctactattttgaaatataca

SEQ ID NO: 28434 - DNA, 22 bp, Artificial Sequence
  chemically synthesized
ctactattttgaaatatacaat

SEQ ID NO: 28435 - DNA, 22 bp, Artificial Sequence
  chemically synthesized
tactattttgaaatatacaata

SEQ ID NO: 28436 - DNA, 22 bp, Artificial Sequence
  chemically synthesized
ctattttgaaatatacaatata

SEQ ID NO: 28437 - DNA, 22 bp, Artificial Sequence
  chemically synthesized
ttttgaaatatacaatatattg

SEQ ID NO: 28438 - DNA, 22 bp, Artificial Sequence
  chemically synthesized
tgaaatatacaatatattgttt

SEQ ID NO: 28439 - DNA, 22 bp, Artificial Sequence
  chemically synthesized
gaaatatacaatatattgtttt

SEQ ID NO: 28440 - DNA, 22 bp, Artificial Sequence
  chemically synthesized
aaatatacaatatattgttttt

SEQ ID NO: 28441 - DNA, 22 bp, Artificial Sequence
  chemically synthesized
tttttaactataatcaccctac

SEQ ID NO: 28442 - DNA, 22 bp, Artificial Sequence
  chemically synthesized
ttaactataatcaccctacttt

SEQ ID NO: 28443 - DNA, 22 bp, Artificial Sequence
  chemically synthesized
taactataatcaccctactttg

SEQ ID NO: 28444 - DNA, 22 bp, Artificial Sequence
  chemically synthesized
aactataatcaccctactttgc

SEQ ID NO: 28445 - DNA, 22 bp, Artificial Sequence
  chemically synthesized
actataatcaccctactttgct

SEQ ID NO: 28446 - DNA, 22 bp, Artificial Sequence
  chemically synthesized
taatcaccctactttgctattg

SEQ ID NO: 28447 - DNA, 22 bp, Artificial Sequence
  chemically synthesized
ctttgctattgaacatcagaac

SEQ ID NO: 28448 - DNA, 22 bp, Artificial Sequence
  chemically synthesized
tgctattgaacatcagaacata

SEQ ID NO: 28449 - DNA, 22 bp, Artificial Sequence
  chemically synthesized
gctattgaacatcagaacatat

SEQ ID NO: 28450 - DNA, 22 bp, Artificial Sequence
  chemically synthesized
ctattgaacatcagaacatatt

SEQ ID NO: 28451 - DNA, 22 bp, Artificial Sequence
  chemically synthesized
ttgaacatcagaacatattcct

SEQ ID NO: 28452 - DNA, 22 bp, Artificial Sequence
  chemically synthesized
aacatcagaacatattccttct

SEQ ID NO: 28453 - DNA, 22 bp, Artificial Sequence
  chemically synthesized
cttctatctaactgcctgtttc

SEQ ID NO: 28454 - DNA, 22 bp, Artificial Sequence
  chemically synthesized
ctatctaactgcctgtttccat

SEQ ID NO: 28455 - DNA, 22 bp, Artificial Sequence
  chemically synthesized
tatctaactgcctgtttccatt

SEQ ID NO: 28456 - DNA, 22 bp, Artificial Sequence
  chemically synthesized
tctaactgcctgtttccattaa

SEQ ID NO: 28457 - DNA, 22 bp, Artificial Sequence
  chemically synthesized
actgcctgtttccattaaccaa

SEQ ID NO: 28458 - DNA, 22 bp, Artificial Sequence
  chemically synthesized
cctgtttccattaaccaacttc

SEQ ID NO: 28459 - DNA, 22 bp, Artificial Sequence
  chemically synthesized
tttccattaaccaacttctctt

SEQ ID NO: 28460 - DNA, 22 bp, Artificial Sequence
  chemically synthesized
ccattaaccaacttctcttcgt

SEQ ID NO: 28461 - DNA, 22 bp, Artificial Sequence
  chemically synthesized
cattaaccaacttctcttcgtc

SEQ ID NO: 28462 - DNA, 22 bp, Artificial Sequence
  chemically synthesized
accaacttctcttcgtctccct

SEQ ID NO: 28463 - DNA, 22 bp, Artificial Sequence
  chemically synthesized
ctcttcgtctcccttcctccca

SEQ ID NO: 28464 - DNA, 22 bp, Artificial Sequence
  chemically synthesized
tcttcgtctcccttcctcccat

SEQ ID NO: 28465 - DNA, 22 bp, Artificial Sequence
  chemically synthesized
ttcgtctcccttcctcccataa

SEQ ID NO: 28466 - DNA, 22 bp, Artificial Sequence
  chemically synthesized
cgtctcccttcctcccataacg

SEQ ID NO: 28467 - DNA, 22 bp, Artificial Sequence
  chemically synthesized
gtctcccttcctcccataacgt

SEQ ID NO: 28468 - DNA, 22 bp, Artificial Sequence
  chemically synthesized
ccttcctcccataacgtacaca

SEQ ID NO: 28469 - DNA, 22 bp, Artificial Sequence
  chemically synthesized
cctcccataacgtacacacctt

SEQ ID NO: 28470 - DNA, 22 bp, Artificial Sequence
  chemically synthesized
ctcccataacgtacacaccttt

SEQ ID NO: 28471 - DNA, 22 bp, Artificial Sequence
  chemically synthesized
ccataacgtacacacctttctc

SEQ ID NO: 28472 - DNA, 22 bp, Artificial Sequence
  chemically synthesized
tctctacctctggtttctgtca

SEQ ID NO: 28473 - DNA, 22 bp, Artificial Sequence
  chemically synthesized
ctctacctctggtttctgtcat

SEQ ID NO: 28474 - DNA, 22 bp, Artificial Sequence
  chemically synthesized
tctacctctggtttctgtcatt

SEQ ID NO: 28475 - DNA, 22 bp, Artificial Sequence
  chemically synthesized
tacctctggtttctgtcattct

SEQ ID NO: 28476 - DNA, 22 bp, Artificial Sequence
  chemically synthesized
cctctggtttctgtcattctac

SEQ ID NO: 28477 - DNA, 22 bp, Artificial Sequence
  chemically synthesized
tggtttctgtcattctactctc

SEQ ID NO: 28478 - DNA, 22 bp, Artificial Sequence
  chemically synthesized
gtttctgtcattctactctcta

SEQ ID NO: 28479 - DNA, 22 bp, Artificial Sequence
  chemically synthesized
ctgtcattctactctctaccta

SEQ ID NO: 28480 - DNA, 22 bp, Artificial Sequence
  chemically synthesized
tgtcattctactctctacctac

SEQ ID NO: 28481 - DNA, 22 bp, Artificial Sequence
  chemically synthesized
tcattctactctctacctacat

SEQ ID NO: 28482 - DNA, 22 bp, Artificial Sequence
  chemically synthesized
tactctctacctacatgatatt

SEQ ID NO: 28483 - DNA, 22 bp, Artificial Sequence
  chemically synthesized
ctctctacctacatgatattaa

SEQ ID NO: 28484 - DNA, 22 bp, Artificial Sequence
  chemically synthesized
tctacctacatgatattaactt

SEQ ID NO: 28485 - DNA, 22 bp, Artificial Sequence
  chemically synthesized
tacctacatgatattaactttt

SEQ ID NO: 28486 - DNA, 22 bp, Artificial Sequence
  chemically synthesized
cctacatgatattaactttttt

SEQ ID NO: 28487 - DNA, 22 bp, Artificial Sequence
  chemically synthesized
catgatattaacttttttagct

SEQ ID NO: 28488 - DNA, 22 bp, Artificial Sequence
  chemically synthesized
acttttttagctcccacatatc

SEQ ID NO: 28489 - DNA, 22 bp, Artificial Sequence
  chemically synthesized
ttttagctcccacatatcagtg

SEQ ID NO: 28490 - DNA, 22 bp, Artificial Sequence
  chemically synthesized
tttagctcccacatatcagtga

SEQ ID NO: 28491 - DNA, 22 bp, Artificial Sequence
  chemically synthesized
ttagctcccacatatcagtgag

SEQ ID NO: 28492 - DNA, 22 bp, Artificial Sequence
  chemically synthesized
tagctcccacatatcagtgaga

SEQ ID NO: 28493 - DNA, 22 bp, Artificial Sequence
  chemically synthesized
agctcccacatatcagtgagaa

SEQ ID NO: 28494 - DNA, 22 bp, Artificial Sequence
  chemically synthesized
gctcccacatatcagtgagaac

SEQ ID NO: 28495 - DNA, 22 bp, Artificial Sequence
  chemically synthesized
ccacatatcagtgagaacatgc

SEQ ID NO: 28496 - DNA, 22 bp, Artificial Sequence
  chemically synthesized
gtctttctatgcctggcttatt

SEQ ID NO: 28497 - DNA, 22 bp, Artificial Sequence
  chemically synthesized
tctttctatgcctggcttattt

SEQ ID NO: 28498 - DNA, 22 bp, Artificial Sequence
  chemically synthesized
tctatgcctggcttatttcgtt

SEQ ID NO: 28499 - DNA, 22 bp, Artificial Sequence
  chemically synthesized
ctatgcctggcttatttcgttt

SEQ ID NO: 28500 - DNA, 22 bp, Artificial Sequence
  chemically synthesized
tatgcctggcttatttcgttta

SEQ ID NO: 28501 - DNA, 22 bp, Artificial Sequence
  chemically synthesized
tgcctggcttatttcgtttaac

SEQ ID NO: 28502 - DNA, 22 bp, Artificial Sequence
  chemically synthesized
gcttatttcgtttaacataatg

SEQ ID NO: 28503 - DNA, 22 bp, Artificial Sequence
  chemically synthesized
atttcgtttaacataatgactt

SEQ ID NO: 28504 - DNA, 22 bp, Artificial Sequence
  chemically synthesized
tttcgtttaacataatgacttc

SEQ ID NO: 28505 - DNA, 22 bp, Artificial Sequence
  chemically synthesized
cgtttaacataatgacttccag

SEQ ID NO: 28506 - DNA, 22 bp, Artificial Sequence
  chemically synthesized
gtttaacataatgacttccagt

SEQ ID NO: 28507 - DNA, 22 bp, Artificial Sequence
  chemically synthesized
aacataatgacttccagtttca

SEQ ID NO: 28508 - DNA, 22 bp, Artificial Sequence
  chemically synthesized
acataatgacttccagtttcat

SEQ ID NO: 28509 - DNA, 22 bp, Artificial Sequence
  chemically synthesized
ccagtttcatccatgttgctgc

SEQ ID NO: 28510 - DNA, 22 bp, Artificial Sequence
  chemically synthesized
cagtttcatccatgttgctgca

SEQ ID NO: 28511 - DNA, 22 bp, Artificial Sequence
  chemically synthesized
catccatgttgctgcaaatgaa

SEQ ID NO: 28512 - DNA, 22 bp, Artificial Sequence
  chemically synthesized
atccatgttgctgcaaatgaaa

SEQ ID NO: 28513 - DNA, 22 bp, Artificial Sequence
  chemically synthesized
ctgcaaatgaaatgattttata

SEQ ID NO: 28514 - DNA, 22 bp, Artificial Sequence
  chemically synthesized
caaatgaaatgattttatattt

SEQ ID NO: 28515 - DNA, 22 bp, Artificial Sequence
  chemically synthesized
tatatttgtatggttgaataat

SEQ ID NO: 28516 - DNA, 22 bp, Artificial Sequence
  chemically synthesized
atatttgtatggttgaataata

SEQ ID NO: 28517 - DNA, 22 bp, Artificial Sequence
  chemically synthesized
tatttgtatggttgaataatat

SEQ ID NO: 28518 - DNA, 22 bp, Artificial Sequence
  chemically synthesized
gtatggttgaataatattcaat

SEQ ID NO: 28519 - DNA, 22 bp, Artificial Sequence
  chemically synthesized
tatggttgaataatattcaatt

SEQ ID NO: 28520 - DNA, 22 bp, Artificial Sequence
  chemically synthesized
aataatattcaattgtgtgtat

SEQ ID NO: 28521 - DNA, 22 bp, Artificial Sequence
  chemically synthesized
aattgtgtgtatacaccacatt

SEQ ID NO: 28522 - DNA, 22 bp, Artificial Sequence
  chemically synthesized
tgtgtatacaccacattttctt

SEQ ID NO: 28523 - DNA, 22 bp, Artificial Sequence
  chemically synthesized
tcttcattcatccattgatgga

SEQ ID NO: 28524 - DNA, 22 bp, Artificial Sequence
  chemically synthesized
cttcattcatccattgatggac

SEQ ID NO: 28525 - DNA, 22 bp, Artificial Sequence
  chemically synthesized
ttcattcatccattgatggaca

SEQ ID NO: 28526 - DNA, 22 bp, Artificial Sequence
  chemically synthesized
cattcatccattgatggacact

SEQ ID NO: 28527 - DNA, 22 bp, Artificial Sequence
  chemically synthesized
attcatccattgatggacactt

SEQ ID NO: 28528 - DNA, 22 bp, Artificial Sequence
  chemically synthesized
atccattgatggacacttaggt

SEQ ID NO: 28529 - DNA, 22 bp, Artificial Sequence
  chemically synthesized
atggacacttaggttgattcca

SEQ ID NO: 28530 - DNA, 22 bp, Artificial Sequence
  chemically synthesized
aggttgattccatatctttgct

SEQ ID NO: 28531 - DNA, 22 bp, Artificial Sequence
  chemically synthesized
ggttgattccatatctttgcta

SEQ ID NO: 28532 - DNA, 22 bp, Artificial Sequence
  chemically synthesized
attccatatctttgctaatgtg

SEQ ID NO: 28533 - DNA, 22 bp, Artificial Sequence
  chemically synthesized
catatctttgctaatgtgaatc

SEQ ID NO: 28534 - DNA, 22 bp, Artificial Sequence
  chemically synthesized
tgctaatgtgaatcgtgctgca

SEQ ID NO: 28535 - DNA, 22 bp, Artificial Sequence
  chemically synthesized
gctaatgtgaatcgtgctgcaa

SEQ ID NO: 28536 - DNA, 22 bp, Artificial Sequence
  chemically synthesized
ctaatgtgaatcgtgctgcaat

SEQ ID NO: 28537 - DNA, 22 bp, Artificial Sequence
  chemically synthesized
atgtgaatcgtgctgcaataaa

SEQ ID NO: 28538 - DNA, 22 bp, Artificial Sequence
  chemically synthesized
caataaacagtgtggtaccagt

SEQ ID NO: 28539 - DNA, 22 bp, Artificial Sequence
  chemically synthesized
tttattattctgaattcttttc

SEQ ID NO: 28540 - DNA, 22 bp, Artificial Sequence
  chemically synthesized
attattctgaattcttttcctt

SEQ ID NO: 28541 - DNA, 22 bp, Artificial Sequence
  chemically synthesized
ttattctgaattcttttccttt

SEQ ID NO: 28542 - DNA, 22 bp, Artificial Sequence
  chemically synthesized
ttctgaattcttttcctttgga

SEQ ID NO: 28543 - DNA, 22 bp, Artificial Sequence
  chemically synthesized
tgaattcttttcctttggataa

SEQ ID NO: 28544 - DNA, 22 bp, Artificial Sequence
  chemically synthesized
aattcttttcctttggataaat

SEQ ID NO: 28545 - DNA, 22 bp, Artificial Sequence
  chemically synthesized
ttttcctttggataaataccca

SEQ ID NO: 28546 - DNA, 22 bp, Artificial Sequence
  chemically synthesized
ttcctttggataaatacccagt

SEQ ID NO: 28547 - DNA, 22 bp, Artificial Sequence
  chemically synthesized
tcctttggataaatacccagta

SEQ ID NO: 28548 - DNA, 22 bp, Artificial Sequence
  chemically synthesized
cctttggataaatacccagtaa

SEQ ID NO: 28549 - DNA, 22 bp, Artificial Sequence
  chemically synthesized
ctttggataaatacccagtaat

SEQ ID NO: 28550 - DNA, 22 bp, Artificial Sequence
  chemically synthesized
tggataaatacccagtaataag

SEQ ID NO: 28551 - DNA, 22 bp, Artificial Sequence
  chemically synthesized
ggataaatacccagtaataaga

SEQ ID NO: 28552 - DNA, 22 bp, Artificial Sequence
  chemically synthesized
gataaatacccagtaataagat

SEQ ID NO: 28553 - DNA, 22 bp, Artificial Sequence
  chemically synthesized
ctggatcttatgatagttcaat

SEQ ID NO: 28554 - DNA, 22 bp, Artificial Sequence
  chemically synthesized
gatcttatgatagttcaatttt

SEQ ID NO: 28555 - DNA, 22 bp, Artificial Sequence
  chemically synthesized
atgatagttcaatttttagctt

SEQ ID NO: 28556 - DNA, 22 bp, Artificial Sequence
  chemically synthesized
tgatagttcaatttttagcttt

SEQ ID NO: 28557 - DNA, 22 bp, Artificial Sequence
  chemically synthesized
aatttttagctttttggtaaat

SEQ ID NO: 28558 - DNA, 22 bp, Artificial Sequence
  chemically synthesized
ttagctttttggtaaatctaca

SEQ ID NO: 28559 - DNA, 22 bp, Artificial Sequence
  chemically synthesized
tagctttttggtaaatctacat

SEQ ID NO: 28560 - DNA, 22 bp, Artificial Sequence
  chemically synthesized
agctttttggtaaatctacata

SEQ ID NO: 28561 - DNA, 22 bp, Artificial Sequence
  chemically synthesized
gctttttggtaaatctacatat

SEQ ID NO: 28562 - DNA, 22 bp, Artificial Sequence
  chemically synthesized
tttggtaaatctacatattgtt

SEQ ID NO: 28563 - DNA, 22 bp, Artificial Sequence
  chemically synthesized
ttggtaaatctacatattgttt

SEQ ID NO: 28564 - DNA, 22 bp, Artificial Sequence
  chemically synthesized
tggtaaatctacatattgtttt

SEQ ID NO: 28565 - DNA, 22 bp, Artificial Sequence
  chemically synthesized
ggtaaatctacatattgttttc

SEQ ID NO: 28566 - DNA, 22 bp, Artificial Sequence
  chemically synthesized
gtaaatctacatattgttttcc

SEQ ID NO: 28567 - DNA, 22 bp, Artificial Sequence
  chemically synthesized
catattgttttccatagtggct

SEQ ID NO: 28568 - DNA, 22 bp, Artificial Sequence
  chemically synthesized
ttttccatagtggctatactaa

SEQ ID NO: 28569 - DNA, 22 bp, Artificial Sequence
  chemically synthesized
tccatagtggctatactaattt

SEQ ID NO: 28570 - DNA, 22 bp, Artificial Sequence
  chemically synthesized
ccatagtggctatactaatttg

SEQ ID NO: 28571 - DNA, 22 bp, Artificial Sequence
  chemically synthesized
catagtggctatactaatttgc

SEQ ID NO: 28572 - DNA, 22 bp, Artificial Sequence
  chemically synthesized
tactaatttgcatgcttaccaa

SEQ ID NO: 28573 - DNA, 22 bp, Artificial Sequence
  chemically synthesized
atttgcatgcttaccaatagtg

SEQ ID NO: 28574 - DNA, 22 bp, Artificial Sequence
  chemically synthesized
gcatgcttaccaatagtgccta

SEQ ID NO: 28575 - DNA, 22 bp, Artificial Sequence
  chemically synthesized
catgcttaccaatagtgcctac

SEQ ID NO: 28576 - DNA, 22 bp, Artificial Sequence
  chemically synthesized
accaatagtgcctacgagtgcc

SEQ ID NO: 28577 - DNA, 22 bp, Artificial Sequence
  chemically synthesized
ccaatagtgcctacgagtgcct

SEQ ID NO: 28578 - DNA, 22 bp, Artificial Sequence
  chemically synthesized
cgagtgccttttccttcacatc

SEQ ID NO: 28579 - DNA, 22 bp, Artificial Sequence
  chemically synthesized
ttccttcacatccttgccagca

SEQ ID NO: 28580 - DNA, 22 bp, Artificial Sequence
  chemically synthesized
tccttcacatccttgccagcat

SEQ ID NO: 28581 - DNA, 22 bp, Artificial Sequence
  chemically synthesized
ccttcacatccttgccagcatg

SEQ ID NO: 28582 - DNA, 22 bp, Artificial Sequence
  chemically synthesized
cttcacatccttgccagcatgt

SEQ ID NO: 28583 - DNA, 22 bp, Artificial Sequence
  chemically synthesized
cacatccttgccagcatgtgtt

SEQ ID NO: 28584 - DNA, 22 bp, Artificial Sequence
  chemically synthesized
acatccttgccagcatgtgtta

SEQ ID NO: 28585 - DNA, 22 bp, Artificial Sequence
  chemically synthesized
gccagcatgtgttatttattta

SEQ ID NO: 28586 - DNA, 22 bp, Artificial Sequence
  chemically synthesized
ccagcatgtgttatttatttat

SEQ ID NO: 28587 - DNA, 22 bp, Artificial Sequence
  chemically synthesized
tttatttattaatttatttaaa

SEQ ID NO: 28588 - DNA, 22 bp, Artificial Sequence
  chemically synthesized
atttattaatttatttaaatca

SEQ ID NO: 28589 - DNA, 22 bp, Artificial Sequence
  chemically synthesized
tttattaatttatttaaatcat

SEQ ID NO: 28590 - DNA, 22 bp, Artificial Sequence
  chemically synthesized
attaatttatttaaatcatgat

SEQ ID NO: 28591 - DNA, 22 bp, Artificial Sequence
  chemically synthesized
ttaatttatttaaatcatgatg

SEQ ID NO: 28592 - DNA, 22 bp, Artificial Sequence
  chemically synthesized
atttatttaaatcatgatgatt

SEQ ID NO: 28593 - DNA, 22 bp, Artificial Sequence
  chemically synthesized
atttaaatcatgatgattctaa

SEQ ID NO: 28594 - DNA, 22 bp, Artificial Sequence
  chemically synthesized
tttaaatcatgatgattctaac

SEQ ID NO: 28595 - DNA, 22 bp, Artificial Sequence
  chemically synthesized
aaatcatgatgattctaactgg

SEQ ID NO: 28596 - DNA, 22 bp, Artificial Sequence
  chemically synthesized
aatcatgatgattctaactggc

SEQ ID NO: 28597 - DNA, 22 bp, Artificial Sequence
  chemically synthesized
taactggcataagatgatatct

SEQ ID NO: 28598 - DNA, 22 bp, Artificial Sequence
  chemically synthesized
actggcataagatgatatctca

SEQ ID NO: 28599 - DNA, 22 bp, Artificial Sequence
  chemically synthesized
gcataagatgatatctcattgt

SEQ ID NO: 28600 - DNA, 22 bp, Artificial Sequence
  chemically synthesized
attgtggttttgatttgcattt

SEQ ID NO: 28601 - DNA, 22 bp, Artificial Sequence
  chemically synthesized
tggttttgatttgcatttctct

SEQ ID NO: 28602 - DNA, 22 bp, Artificial Sequence
  chemically synthesized
tgatttgcatttctctgatgat

SEQ ID NO: 28603 - DNA, 22 bp, Artificial Sequence
  chemically synthesized
gatttgcatttctctgatgatt

SEQ ID NO: 28604 - DNA, 22 bp, Artificial Sequence
  chemically synthesized
atttgcatttctctgatgatta

SEQ ID NO: 28605 - DNA, 22 bp, Artificial Sequence
  chemically synthesized
gcatttctctgatgattagtaa

SEQ ID NO: 28606 - DNA, 22 bp, Artificial Sequence
  chemically synthesized
catttctctgatgattagtaat

SEQ ID NO: 28607 - DNA, 22 bp, Artificial Sequence
  chemically synthesized
ctctgatgattagtaatgttga

SEQ ID NO: 28608 - DNA, 22 bp, Artificial Sequence
  chemically synthesized
tctgatgattagtaatgttgag

SEQ ID NO: 28609 - DNA, 22 bp, Artificial Sequence
  chemically synthesized
tgatgattagtaatgttgagca

SEQ ID NO: 28610 - DNA, 22 bp, Artificial Sequence
  chemically synthesized
atgattagtaatgttgagcaat

SEQ ID NO: 28611 - DNA, 22 bp, Artificial Sequence
  chemically synthesized
gtaatgttgagcaatttcccca

SEQ ID NO: 28612 - DNA, 22 bp, Artificial Sequence
  chemically synthesized
agcaatttccccatacccattg

SEQ ID NO: 28613 - DNA, 22 bp, Artificial Sequence
  chemically synthesized
ccccatacccattgtgcatttg

SEQ ID NO: 28614 - DNA, 22 bp, Artificial Sequence
  chemically synthesized
cccatacccattgtgcatttgt

SEQ ID NO: 28615 - DNA, 22 bp, Artificial Sequence
  chemically synthesized
tgcatttgtatgtcttcttttg

SEQ ID NO: 28616 - DNA, 22 bp, Artificial Sequence
  chemically synthesized
gtatgtcttcttttgaaaaata

SEQ ID NO: 28617 - DNA, 22 bp, Artificial Sequence
  chemically synthesized
tatgtcttcttttgaaaaatat

SEQ ID NO: 28618 - DNA, 22 bp, Artificial Sequence
  chemically synthesized
cttttgaaaaatatcctttgcc

SEQ ID NO: 28619 - DNA, 22 bp, Artificial Sequence
  chemically synthesized
ttttgaaaaatatcctttgcca

SEQ ID NO: 28620 - DNA, 22 bp, Artificial Sequence
  chemically synthesized
ttgaaaaatatcctttgccaat

SEQ ID NO: 28621 - DNA, 22 bp, Artificial Sequence
  chemically synthesized
tgaaaaatatcctttgccaatt

SEQ ID NO: 28622 - DNA, 22 bp, Artificial Sequence
  chemically synthesized
gaaaaatatcctttgccaattt

SEQ ID NO: 28623 - DNA, 22 bp, Artificial Sequence
  chemically synthesized
aaaaatatcctttgccaatttt

SEQ ID NO: 28624 - DNA, 22 bp, Artificial Sequence
  chemically synthesized
tgccaattttttaatgagatta

SEQ ID NO: 28625 - DNA, 22 bp, Artificial Sequence
  chemically synthesized
gccaattttttaatgagattat

SEQ ID NO: 28626 - DNA, 22 bp, Artificial Sequence
  chemically synthesized
ccaattttttaatgagattatt

SEQ ID NO: 28627 - DNA, 22 bp, Artificial Sequence
  chemically synthesized
tttaatgagattatttgttttt

SEQ ID NO: 28628 - DNA, 22 bp, Artificial Sequence
  chemically synthesized
ttaatgagattatttgtttttc

SEQ ID NO: 28629 - DNA, 22 bp, Artificial Sequence
  chemically synthesized
taatgagattatttgtttttcc

SEQ ID NO: 28630 - DNA, 22 bp, Artificial Sequence
  chemically synthesized
aatgagattatttgtttttcca

SEQ ID NO: 28631 - DNA, 22 bp, Artificial Sequence
  chemically synthesized
atgagattatttgtttttccac

SEQ ID NO: 28632 - DNA, 22 bp, Artificial Sequence
  chemically synthesized
tttgtttttccactgttgagtt

SEQ ID NO: 28633 - DNA, 22 bp, Artificial Sequence
  chemically synthesized
gtttttccactgttgagttgtt

SEQ ID NO: 28634 - DNA, 22 bp, Artificial Sequence
  chemically synthesized
tttttccactgttgagttgttt

SEQ ID NO: 28635 - DNA, 22 bp, Artificial Sequence
  chemically synthesized
ttccactgttgagttgtttgag

SEQ ID NO: 28636 - DNA, 22 bp, Artificial Sequence
  chemically synthesized
tccactgttgagttgtttgagt

SEQ ID NO: 28637 - DNA, 22 bp, Artificial Sequence
  chemically synthesized
ccactgttgagttgtttgagtt

SEQ ID NO: 28638 - DNA, 22 bp, Artificial Sequence
  chemically synthesized
cactgttgagttgtttgagttt

SEQ ID NO: 28639 - DNA, 22 bp, Artificial Sequence
  chemically synthesized
ttgagttgtttgagtttcttat

SEQ ID NO: 28640 - DNA, 22 bp, Artificial Sequence
  chemically synthesized
agttgtttgagtttcttatata

SEQ ID NO: 28641 - DNA, 22 bp, Artificial Sequence
  chemically synthesized
tttgagtttcttatatattctg

SEQ ID NO: 28642 - DNA, 22 bp, Artificial Sequence
  chemically synthesized
gagtttcttatatattctggag

SEQ ID NO: 28643 - DNA, 22 bp, Artificial Sequence
  chemically synthesized
agtttcttatatattctggaga

SEQ ID NO: 28644 - DNA, 22 bp, Artificial Sequence
  chemically synthesized
cttatatattctggagattaat

SEQ ID NO: 28645 - DNA, 22 bp, Artificial Sequence
  chemically synthesized
ttatatattctggagattaatt

SEQ ID NO: 28646 - DNA, 22 bp, Artificial Sequence
  chemically synthesized
atatattctggagattaattcc

SEQ ID NO: 28647 - DNA, 22 bp, Artificial Sequence
  chemically synthesized
tatattctggagattaattcct

SEQ ID NO: 28648 - DNA, 22 bp, Artificial Sequence
  chemically synthesized
tggagattaattccttgtcaaa

SEQ ID NO: 28649 - DNA, 22 bp, Artificial Sequence
  chemically synthesized
gagattaattccttgtcaaatg

SEQ ID NO: 28650 - DNA, 22 bp, Artificial Sequence
  chemically synthesized
attccttgtcaaatgtatgcaa

SEQ ID NO: 28651 - DNA, 22 bp, Artificial Sequence
  chemically synthesized
cttgtcaaatgtatgcaaatat

SEQ ID NO: 28652 - DNA, 22 bp, Artificial Sequence
  chemically synthesized
gtcaaatgtatgcaaatatttt

SEQ ID NO: 28653 - DNA, 22 bp, Artificial Sequence
  chemically synthesized
tcaaatgtatgcaaatattttc

SEQ ID NO: 28654 - DNA, 22 bp, Artificial Sequence
  chemically synthesized
tctcgcattcaacagcttgtct

SEQ ID NO: 28655 - DNA, 22 bp, Artificial Sequence
  chemically synthesized
ctcgcattcaacagcttgtctc

SEQ ID NO: 28656 - DNA, 22 bp, Artificial Sequence
  chemically synthesized
tcgcattcaacagcttgtctct

SEQ ID NO: 28657 - DNA, 22 bp, Artificial Sequence
  chemically synthesized
gcattcaacagcttgtctcttc

SEQ ID NO: 28658 - DNA, 22 bp, Artificial Sequence
  chemically synthesized
aacagcttgtctcttcactgtg

SEQ ID NO: 28659 - DNA, 22 bp, Artificial Sequence
  chemically synthesized
gtctcttcactgtgttgattgt

SEQ ID NO: 28660 - DNA, 22 bp, Artificial Sequence
  chemically synthesized
tctcttcactgtgttgattgtt

SEQ ID NO: 28661 - DNA, 22 bp, Artificial Sequence
  chemically synthesized
ttcactgtgttgattgtttcct

SEQ ID NO: 28662 - DNA, 22 bp, Artificial Sequence
  chemically synthesized
cactgtgttgattgtttccttt

SEQ ID NO: 28663 - DNA, 22 bp, Artificial Sequence
  chemically synthesized
actgtgttgattgtttccttta

SEQ ID NO: 28664 - DNA, 22 bp, Artificial Sequence
  chemically synthesized
tgttgattgtttcctttactgt

SEQ ID NO: 28665 - DNA, 22 bp, Artificial Sequence
  chemically synthesized
attgtttcctttactgtgcaga

SEQ ID NO: 28666 - DNA, 22 bp, Artificial Sequence
  chemically synthesized
tttcctttactgtgcagatgta

SEQ ID NO: 28667 - DNA, 22 bp, Artificial Sequence
  chemically synthesized
cctttactgtgcagatgtattt

SEQ ID NO: 28668 - DNA, 22 bp, Artificial Sequence
  chemically synthesized
ctttactgtgcagatgtatttt

SEQ ID NO: 28669 - DNA, 22 bp, Artificial Sequence
  chemically synthesized
tactgtgcagatgtattttagc

SEQ ID NO: 28670 - DNA, 22 bp, Artificial Sequence
  chemically synthesized
actgtgcagatgtattttagct

SEQ ID NO: 28671 - DNA, 22 bp, Artificial Sequence
  chemically synthesized
ctgtgcagatgtattttagctt

SEQ ID NO: 28672 - DNA, 22 bp, Artificial Sequence
  chemically synthesized
tgcagatgtattttagcttaat

SEQ ID NO: 28673 - DNA, 22 bp, Artificial Sequence
  chemically synthesized
tagcttaatatagtcccatttg

SEQ ID NO: 28674 - DNA, 22 bp, Artificial Sequence
  chemically synthesized
agcttaatatagtcccatttgt

SEQ ID NO: 28675 - DNA, 22 bp, Artificial Sequence
  chemically synthesized
gcttaatatagtcccatttgtc

SEQ ID NO: 28676 - DNA, 22 bp, Artificial Sequence
  chemically synthesized
aatatagtcccatttgtctatt

SEQ ID NO: 28677 - DNA, 22 bp, Artificial Sequence
  chemically synthesized
atatagtcccatttgtctattt

SEQ ID NO: 28678 - DNA, 22 bp, Artificial Sequence
  chemically synthesized
gtctatttttgcttttgttgcc

SEQ ID NO: 28679 - DNA, 22 bp, Artificial Sequence
  chemically synthesized
tctatttttgcttttgttgcct

SEQ ID NO: 28680 - DNA, 22 bp, Artificial Sequence
  chemically synthesized
tttttgcttttgttgcctgtgc

SEQ ID NO: 28681 - DNA, 22 bp, Artificial Sequence
  chemically synthesized
ttgcttttgttgcctgtgcttt

SEQ ID NO: 28682 - DNA, 22 bp, Artificial Sequence
  chemically synthesized
tgcttttgttgcctgtgctttt

SEQ ID NO: 28683 - DNA, 22 bp, Artificial Sequence
  chemically synthesized
gcttttgttgcctgtgcttttg

SEQ ID NO: 28684 - DNA, 22 bp, Artificial Sequence
  chemically synthesized
cttttgttgcctgtgcttttga

SEQ ID NO: 28685 - DNA, 22 bp, Artificial Sequence
  chemically synthesized
ttgttgcctgtgcttttgaggt

SEQ ID NO: 28686 - DNA, 22 bp, Artificial Sequence
  chemically synthesized
tgttgcctgtgcttttgaggtc

SEQ ID NO: 28687 - DNA, 22 bp, Artificial Sequence
  chemically synthesized
gttgcctgtgcttttgaggtct

SEQ ID NO: 28688 - DNA, 22 bp, Artificial Sequence
  chemically synthesized
ttgcctgtgcttttgaggtctt

SEQ ID NO: 28689 - DNA, 22 bp, Artificial Sequence
  chemically synthesized
cctgtgcttttgaggtcttggc

SEQ ID NO: 28690 - DNA, 22 bp, Artificial Sequence
  chemically synthesized
tgcttttgaggtcttggccata

SEQ ID NO: 28691 - DNA, 22 bp, Artificial Sequence
  chemically synthesized
ttgaggtcttggccataaaatc

SEQ ID NO: 28692 - DNA, 22 bp, Artificial Sequence
  chemically synthesized
tgaggtcttggccataaaatct

SEQ ID NO: 28693 - DNA, 22 bp, Artificial Sequence
  chemically synthesized
gaggtcttggccataaaatctt

SEQ ID NO: 28694 - DNA, 22 bp, Artificial Sequence
  chemically synthesized
aggtcttggccataaaatcttt

SEQ ID NO: 28695 - DNA, 22 bp, Artificial Sequence
  chemically synthesized
ggccataaaatctttgcccaaa

SEQ ID NO: 28696 - DNA, 22 bp, Artificial Sequence
  chemically synthesized
gccataaaatctttgcccaaag

SEQ ID NO: 28697 - DNA, 22 bp, Artificial Sequence
  chemically synthesized
tgcccaaagccatgtcttgaag

SEQ ID NO: 28698 - DNA, 22 bp, Artificial Sequence
  chemically synthesized
gcccaaagccatgtcttgaagt

SEQ ID NO: 28699 - DNA, 22 bp, Artificial Sequence
  chemically synthesized
cccaaagccatgtcttgaagtg

SEQ ID NO: 28700 - DNA, 22 bp, Artificial Sequence
  chemically synthesized
gaagtgtctcccttatgttttc

SEQ ID NO: 28701 - DNA, 22 bp, Artificial Sequence
  chemically synthesized
aagtgtctcccttatgttttct

SEQ ID NO: 28702 - DNA, 22 bp, Artificial Sequence
  chemically synthesized
ccttatgttttcttttagtagt

SEQ ID NO: 28703 - DNA, 22 bp, Artificial Sequence
  chemically synthesized
atgttttcttttagtagtttta

SEQ ID NO: 28704 - DNA, 22 bp, Artificial Sequence
  chemically synthesized
tgttttcttttagtagttttat

SEQ ID NO: 28705 - DNA, 22 bp, Artificial Sequence
  chemically synthesized
tcttttagtagttttatagttt

SEQ ID NO: 28706 - DNA, 22 bp, Artificial Sequence
  chemically synthesized
cttttagtagttttatagtttt

SEQ ID NO: 28707 - DNA, 22 bp, Artificial Sequence
  chemically synthesized
ttttagtagttttatagtttta

SEQ ID NO: 28708 - DNA, 22 bp, Artificial Sequence
  chemically synthesized
ttagtagttttatagttttaag

SEQ ID NO: 28709 - DNA, 22 bp, Artificial Sequence
  chemically synthesized
tagtagttttatagttttaagt

SEQ ID NO: 28710 - DNA, 22 bp, Artificial Sequence
  chemically synthesized
agtagttttatagttttaagtt

SEQ ID NO: 28711 - DNA, 22 bp, Artificial Sequence
  chemically synthesized
gtagttttatagttttaagttt

SEQ ID NO: 28712 - DNA, 22 bp, Artificial Sequence
  chemically synthesized
tatagttttaagttttatattt

SEQ ID NO: 28713 - DNA, 22 bp, Artificial Sequence
  chemically synthesized
atagttttaagttttatattta

SEQ ID NO: 28714 - DNA, 22 bp, Artificial Sequence
  chemically synthesized
tagttttaagttttatatttaa

SEQ ID NO: 28715 - DNA, 22 bp, Artificial Sequence
  chemically synthesized
taagttttatatttaagtcttt

SEQ ID NO: 28716 - DNA, 22 bp, Artificial Sequence
  chemically synthesized
aagttttatatttaagtcttta

SEQ ID NO: 28717 - DNA, 22 bp, Artificial Sequence
  chemically synthesized
agttttatatttaagtctttaa

SEQ ID NO: 28718 - DNA, 22 bp, Artificial Sequence
  chemically synthesized
tatatttaagtctttaatccat

SEQ ID NO: 28719 - DNA, 22 bp, Artificial Sequence
  chemically synthesized
atatttaagtctttaatccatc

SEQ ID NO: 28720 - DNA, 22 bp, Artificial Sequence
  chemically synthesized
tatttaagtctttaatccatct

SEQ ID NO: 28721 - DNA, 22 bp, Artificial Sequence
  chemically synthesized
aagtctttaatccatcttgaga

SEQ ID NO: 28722 - DNA, 22 bp, Artificial Sequence
  chemically synthesized
agtctttaatccatcttgagag

SEQ ID NO: 28723 - DNA, 22 bp, Artificial Sequence
  chemically synthesized
taatccatcttgagagtacgtt

SEQ ID NO: 28724 - DNA, 22 bp, Artificial Sequence
  chemically synthesized
aatccatcttgagagtacgttt

SEQ ID NO: 28725 - DNA, 22 bp, Artificial Sequence
  chemically synthesized
atccatcttgagagtacgtttt

SEQ ID NO: 28726 - DNA, 22 bp, Artificial Sequence
  chemically synthesized
gagagtacgttttatatggcaa

SEQ ID NO: 28727 - DNA, 22 bp, Artificial Sequence
  chemically synthesized
agagtacgttttatatggcaat

SEQ ID NO: 28728 - DNA, 22 bp, Artificial Sequence
  chemically synthesized
tatatggcaataaataggggtt

SEQ ID NO: 28729 - DNA, 22 bp, Artificial Sequence
  chemically synthesized
atatggcaataaataggggttg

SEQ ID NO: 28730 - DNA, 22 bp, Artificial Sequence
  chemically synthesized
tatggcaataaataggggttgt

SEQ ID NO: 28731 - DNA, 22 bp, Artificial Sequence
  chemically synthesized
tattaggccatttttgcatcta

SEQ ID NO: 28732 - DNA, 22 bp, Artificial Sequence
  chemically synthesized
ggccatttttgcatctattgta

SEQ ID NO: 28733 - DNA, 22 bp, Artificial Sequence
  chemically synthesized
ttgcatctattgtacaaggggt

SEQ ID NO: 28734 - DNA, 22 bp, Artificial Sequence
  chemically synthesized
tgcatctattgtacaaggggtt

SEQ ID NO: 28735 - DNA, 22 bp, Artificial Sequence
  chemically synthesized
gcatctattgtacaaggggttg

SEQ ID NO: 28736 - DNA, 22 bp, Artificial Sequence
  chemically synthesized
catctattgtacaaggggttga

SEQ ID NO: 28737 - DNA, 22 bp, Artificial Sequence
  chemically synthesized
ttgtacaaggggttgagttctt

SEQ ID NO: 28738 - DNA, 22 bp, Artificial Sequence
  chemically synthesized
tacaaggggttgagttcttgat

SEQ ID NO: 28739 - DNA, 22 bp, Artificial Sequence
  chemically synthesized
agttcttgatttgattctccat

SEQ ID NO: 28740 - DNA, 22 bp, Artificial Sequence
  chemically synthesized
ttgatttgattctccatttggt

SEQ ID NO: 28741 - DNA, 22 bp, Artificial Sequence
  chemically synthesized
gatttgattctccatttggttg

SEQ ID NO: 28742 - DNA, 22 bp, Artificial Sequence
  chemically synthesized
atttgattctccatttggttgc

SEQ ID NO: 28743 - DNA, 22 bp, Artificial Sequence
  chemically synthesized
gattctccatttggttgctgtt

SEQ ID NO: 28744 - DNA, 22 bp, Artificial Sequence
  chemically synthesized
attctccatttggttgctgttg

SEQ ID NO: 28745 - DNA, 22 bp, Artificial Sequence
  chemically synthesized
tccatttggttgctgttggtgt

SEQ ID NO: 28746 - DNA, 22 bp, Artificial Sequence
  chemically synthesized
catttggttgctgttggtgtat

SEQ ID NO: 28747 - DNA, 22 bp, Artificial Sequence
  chemically synthesized
ggttgctgttggtgtatagaag

SEQ ID NO: 28748 - DNA, 22 bp, Artificial Sequence
  chemically synthesized
gttgctgttggtgtatagaaga

SEQ ID NO: 28749 - DNA, 22 bp, Artificial Sequence
  chemically synthesized
ctgttggtgtatagaagagtta

SEQ ID NO: 28750 - DNA, 22 bp, Artificial Sequence
  chemically synthesized
ttggtgtatagaagagttactg

SEQ ID NO: 28751 - DNA, 22 bp, Artificial Sequence
  chemically synthesized
gtgtatagaagagttactgatt

SEQ ID NO: 28752 - DNA, 22 bp, Artificial Sequence
  chemically synthesized
ctgatttgtgtgcattcatctt

SEQ ID NO: 28753 - DNA, 22 bp, Artificial Sequence
  chemically synthesized
atttgtgtgcattcatcttgta

SEQ ID NO: 28754 - DNA, 22 bp, Artificial Sequence
  chemically synthesized
gtgtgcattcatcttgtatctg

SEQ ID NO: 28755 - DNA, 22 bp, Artificial Sequence
  chemically synthesized
tgtgcattcatcttgtatctgg

SEQ ID NO: 28756 - DNA, 22 bp, Artificial Sequence
  chemically synthesized
atcttgtatctggaaactttgc

SEQ ID NO: 28757 - DNA, 22 bp, Artificial Sequence
  chemically synthesized
gtatctggaaactttgctgaat

SEQ ID NO: 28758 - DNA, 22 bp, Artificial Sequence
  chemically synthesized
tatctggaaactttgctgaatt

SEQ ID NO: 28759 - DNA, 22 bp, Artificial Sequence
  chemically synthesized
gaaactttgctgaattatttta

SEQ ID NO: 28760 - DNA, 22 bp, Artificial Sequence
  chemically synthesized
tgctgaattattttatcagttc

SEQ ID NO: 28761 - DNA, 22 bp, Artificial Sequence
  chemically synthesized
gctgaattattttatcagttct

SEQ ID NO: 28762 - DNA, 22 bp, Artificial Sequence
  chemically synthesized
ctgaattattttatcagttcta

SEQ ID NO: 28763 - DNA, 22 bp, Artificial Sequence
  chemically synthesized
aattattttatcagttctagga

SEQ ID NO: 28764 - DNA, 22 bp, Artificial Sequence
  chemically synthesized
ttttatcagttctaggagcttt

SEQ ID NO: 28765 - DNA, 22 bp, Artificial Sequence
  chemically synthesized
tatcagttctaggagctttctg

SEQ ID NO: 28766 - DNA, 22 bp, Artificial Sequence
  chemically synthesized
atcagttctaggagctttctgg

SEQ ID NO: 28767 - DNA, 22 bp, Artificial Sequence
  chemically synthesized
tcagttctaggagctttctgga

SEQ ID NO: 28768 - DNA, 22 bp, Artificial Sequence
  chemically synthesized
taggagctttctggaggagtct

SEQ ID NO: 28769 - DNA, 22 bp, Artificial Sequence
  chemically synthesized
ggagctttctggaggagtcttt

SEQ ID NO: 28770 - DNA, 22 bp, Artificial Sequence
  chemically synthesized
tctggaggagtctttagggttt

SEQ ID NO: 28771 - DNA, 22 bp, Artificial Sequence
  chemically synthesized
ctggaggagtctttagggtttt

SEQ ID NO: 28772 - DNA, 22 bp, Artificial Sequence
  chemically synthesized
tggaggagtctttagggtttta

SEQ ID NO: 28773 - DNA, 22 bp, Artificial Sequence
  chemically synthesized
gaggagtctttagggttttaaa

SEQ ID NO: 28774 - DNA, 22 bp, Artificial Sequence
  chemically synthesized
tagggttttaaaggtaaatgat

SEQ ID NO: 28775 - DNA, 22 bp, Artificial Sequence
  chemically synthesized
agggttttaaaggtaaatgatc

SEQ ID NO: 28776 - DNA, 22 bp, Artificial Sequence
  chemically synthesized
gggttttaaaggtaaatgatca

SEQ ID NO: 28777 - DNA, 22 bp, Artificial Sequence
  chemically synthesized
taaaggtaaatgatcatatcat

SEQ ID NO: 28778 - DNA, 22 bp, Artificial Sequence
  chemically synthesized
aaaggtaaatgatcatatcatc

SEQ ID NO: 28779 - DNA, 22 bp, Artificial Sequence
  chemically synthesized
aaggtaaatgatcatatcatca

SEQ ID NO: 28780 - DNA, 22 bp, Artificial Sequence
  chemically synthesized
gacttcctctttactgatttga

SEQ ID NO: 28781 - DNA, 22 bp, Artificial Sequence
  chemically synthesized
acttcctctttactgatttgaa

SEQ ID NO: 28782 - DNA, 22 bp, Artificial Sequence
  chemically synthesized
cctctttactgatttgaatgcc

SEQ ID NO: 28783 - DNA, 22 bp, Artificial Sequence
  chemically synthesized
ctctttactgatttgaatgccc

SEQ ID NO: 28784 - DNA, 22 bp, Artificial Sequence
  chemically synthesized
tttactgatttgaatgcccttt

SEQ ID NO: 28785 - DNA, 22 bp, Artificial Sequence
  chemically synthesized
tactgatttgaatgccctttat

SEQ ID NO: 28786 - DNA, 22 bp, Artificial Sequence
  chemically synthesized
actgatttgaatgccctttatt

SEQ ID NO: 28787 - DNA, 22 bp, Artificial Sequence
  chemically synthesized
ctgatttgaatgccctttattt

SEQ ID NO: 28788 - DNA, 22 bp, Artificial Sequence
  chemically synthesized
atttgaatgccctttatttctt

SEQ ID NO: 28789 - DNA, 22 bp, Artificial Sequence
  chemically synthesized
gaatgccctttatttctttgtt

SEQ ID NO: 28790 - DNA, 22 bp, Artificial Sequence
  chemically synthesized
aatgccctttatttctttgttt

SEQ ID NO: 28791 - DNA, 22 bp, Artificial Sequence
  chemically synthesized
tatttctttgttttgtctgatt

SEQ ID NO: 28792 - DNA, 22 bp, Artificial Sequence
  chemically synthesized
atttctttgttttgtctgattg

SEQ ID NO: 28793 - DNA, 22 bp, Artificial Sequence
  chemically synthesized
tttctttgttttgtctgattgc

SEQ ID NO: 28794 - DNA, 22 bp, Artificial Sequence
  chemically synthesized
ctttgttttgtctgattgccct

SEQ ID NO: 28795 - DNA, 22 bp, Artificial Sequence
  chemically synthesized
tttgttttgtctgattgccctg

SEQ ID NO: 28796 - DNA, 22 bp, Artificial Sequence
  chemically synthesized
tgttttgtctgattgccctggc

SEQ ID NO: 28797 - DNA, 22 bp, Artificial Sequence
  chemically synthesized
gttttgtctgattgccctggct

SEQ ID NO: 28798 - DNA, 22 bp, Artificial Sequence
  chemically synthesized
ttttgtctgattgccctggcta

SEQ ID NO: 28799 - DNA, 22 bp, Artificial Sequence
  chemically synthesized
tgtctgattgccctggctagga

SEQ ID NO: 28800 - DNA, 22 bp, Artificial Sequence
  chemically synthesized
gtctgattgccctggctaggac

SEQ ID NO: 28801 - DNA, 22 bp, Artificial Sequence
  chemically synthesized
tctgattgccctggctaggact

SEQ ID NO: 28802 - DNA, 22 bp, Artificial Sequence
  chemically synthesized
attgccctggctaggacttcca

SEQ ID NO: 28803 - DNA, 22 bp, Artificial Sequence
  chemically synthesized
ccctggctaggacttccagtac

SEQ ID NO: 28804 - DNA, 22 bp, Artificial Sequence
  chemically synthesized
gctaggacttccagtactatgt

SEQ ID NO: 28805 - DNA, 22 bp, Artificial Sequence
  chemically synthesized
ggacttccagtactatgttgaa

SEQ ID NO: 28806 - DNA, 22 bp, Artificial Sequence
  chemically synthesized
ccagtactatgttgaagaggag

SEQ ID NO: 28807 - DNA, 22 bp, Artificial Sequence
  chemically synthesized
cagtactatgttgaagaggagt

SEQ ID NO: 28808 - DNA, 22 bp, Artificial Sequence
  chemically synthesized
tgttgaagaggagtggtgagag

SEQ ID NO: 28809 - DNA, 22 bp, Artificial Sequence
  chemically synthesized
aagaggagtggtgagagtgggc

SEQ ID NO: 28810 - DNA, 22 bp, Artificial Sequence
  chemically synthesized
gtcttgttccagttctcagagg

SEQ ID NO: 28811 - DNA, 22 bp, Artificial Sequence
  chemically synthesized
tcttgttccagttctcagaggg

SEQ ID NO: 28812 - DNA, 22 bp, Artificial Sequence
  chemically synthesized
gttccagttctcagagggaatg

SEQ ID NO: 28813 - DNA, 22 bp, Artificial Sequence
  chemically synthesized
ttccagttctcagagggaatgc

SEQ ID NO: 28814 - DNA, 22 bp, Artificial Sequence
  chemically synthesized
cagttctcagagggaatgcttt

SEQ ID NO: 28815 - DNA, 22 bp, Artificial Sequence
  chemically synthesized
tcagagggaatgctttcaactt

SEQ ID NO: 28816 - DNA, 22 bp, Artificial Sequence
  chemically synthesized
agagggaatgctttcaactttt

SEQ ID NO: 28817 - DNA, 22 bp, Artificial Sequence
  chemically synthesized
tcaacttttccccattcaatat

SEQ ID NO: 28818 - DNA, 22 bp, Artificial Sequence
  chemically synthesized
caacttttccccattcaatatt

SEQ ID NO: 28819 - DNA, 22 bp, Artificial Sequence
  chemically synthesized
aacttttccccattcaatatta

SEQ ID NO: 28820 - DNA, 22 bp, Artificial Sequence
  chemically synthesized
ttccccattcaatattatgttg

SEQ ID NO: 28821 - DNA, 22 bp, Artificial Sequence
  chemically synthesized
tccccattcaatattatgttgg

SEQ ID NO: 28822 - DNA, 22 bp, Artificial Sequence
  chemically synthesized
ccccattcaatattatgttggc

SEQ ID NO: 28823 - DNA, 22 bp, Artificial Sequence
  chemically synthesized
cccattcaatattatgttggct

SEQ ID NO: 28824 - DNA, 22 bp, Artificial Sequence
  chemically synthesized
aatattatgttggctgtgggtt

SEQ ID NO: 28825 - DNA, 22 bp, Artificial Sequence
  chemically synthesized
tgttggctgtgggtttgtcaca

SEQ ID NO: 28826 - DNA, 22 bp, Artificial Sequence
  chemically synthesized
gctgtgggtttgtcacagatgg

SEQ ID NO: 28827 - DNA, 22 bp, Artificial Sequence
  chemically synthesized
tgggtttgtcacagatggcttt

SEQ ID NO: 28828 - DNA, 22 bp, Artificial Sequence
  chemically synthesized
gtcacagatggcttttattaca

SEQ ID NO: 28829 - DNA, 22 bp, Artificial Sequence
  chemically synthesized
tcacagatggcttttattacac

SEQ ID NO: 28830 - DNA, 22 bp, Artificial Sequence
  chemically synthesized
ttattacactgaggtatgtctc

SEQ ID NO: 28831 - DNA, 22 bp, Artificial Sequence
  chemically synthesized
tattacactgaggtatgtctct

SEQ ID NO: 28832 - DNA, 22 bp, Artificial Sequence
  chemically synthesized
attacactgaggtatgtctctt

SEQ ID NO: 28833 - DNA, 22 bp, Artificial Sequence
  chemically synthesized
ttacactgaggtatgtctcttg

SEQ ID NO: 28834 - DNA, 22 bp, Artificial Sequence
  chemically synthesized
cactgaggtatgtctcttgtat

SEQ ID NO: 28835 - DNA, 22 bp, Artificial Sequence
  chemically synthesized
aggtatgtctcttgtatgctga

SEQ ID NO: 28836 - DNA, 22 bp, Artificial Sequence
  chemically synthesized
ttgtatgctgattttgctgagc

SEQ ID NO: 28837 - DNA, 22 bp, Artificial Sequence
  chemically synthesized
gtatgctgattttgctgagcat

SEQ ID NO: 28838 - DNA, 22 bp, Artificial Sequence
  chemically synthesized
tatgctgattttgctgagcatt

SEQ ID NO: 28839 - DNA, 22 bp, Artificial Sequence
  chemically synthesized
attttgctgagcattttaatca

SEQ ID NO: 28840 - DNA, 22 bp, Artificial Sequence
  chemically synthesized
tgctgagcattttaatcataaa

SEQ ID NO: 28841 - DNA, 22 bp, Artificial Sequence
  chemically synthesized
gctgagcattttaatcataaat

SEQ ID NO: 28842 - DNA, 22 bp, Artificial Sequence
  chemically synthesized
ctgagcattttaatcataaatg

SEQ ID NO: 28843 - DNA, 22 bp, Artificial Sequence
  chemically synthesized
agcattttaatcataaatgtat

SEQ ID NO: 28844 - DNA, 22 bp, Artificial Sequence
  chemically synthesized
taatcataaatgtatgctggat

SEQ ID NO: 28845 - DNA, 22 bp, Artificial Sequence
  chemically synthesized
aatcataaatgtatgctggatt

SEQ ID NO: 28846 - DNA, 22 bp, Artificial Sequence
  chemically synthesized
atcataaatgtatgctggattt

SEQ ID NO: 28847 - DNA, 22 bp, Artificial Sequence
  chemically synthesized
gattttgttgaatgctttttct

SEQ ID NO: 28848 - DNA, 22 bp, Artificial Sequence
  chemically synthesized
tgttgaatgctttttctgcatc

SEQ ID NO: 28849 - DNA, 22 bp, Artificial Sequence
  chemically synthesized
gttgaatgctttttctgcatct

SEQ ID NO: 28850 - DNA, 22 bp, Artificial Sequence
  chemically synthesized
ttgaatgctttttctgcatcta

SEQ ID NO: 28851 - DNA, 22 bp, Artificial Sequence
  chemically synthesized
aatgctttttctgcatctattg

SEQ ID NO: 28852 - DNA, 22 bp, Artificial Sequence
  chemically synthesized
tttctgcatctattgagatgat

SEQ ID NO: 28853 - DNA, 22 bp, Artificial Sequence
  chemically synthesized
ttctgcatctattgagatgatc

SEQ ID NO: 28854 - DNA, 22 bp, Artificial Sequence
  chemically synthesized
tctgcatctattgagatgatca

SEQ ID NO: 28855 - DNA, 22 bp, Artificial Sequence
  chemically synthesized
ctgcatctattgagatgatcat

SEQ ID NO: 28856 - DNA, 22 bp, Artificial Sequence
  chemically synthesized
tgcatctattgagatgatcatg

SEQ ID NO: 28857 - DNA, 22 bp, Artificial Sequence
  chemically synthesized
catctattgagatgatcatgta

SEQ ID NO: 28858 - DNA, 22 bp, Artificial Sequence
  chemically synthesized
ttgagatgatcatgtaattttt

SEQ ID NO: 28859 - DNA, 22 bp, Artificial Sequence
  chemically synthesized
agatgatcatgtaatttttgtt

SEQ ID NO: 28860 - DNA, 22 bp, Artificial Sequence
  chemically synthesized
ttgtttttaaatctgtttatgt

SEQ ID NO: 28861 - DNA, 22 bp, Artificial Sequence
  chemically synthesized
tgtttttaaatctgtttatgtg

SEQ ID NO: 28862 - DNA, 22 bp, Artificial Sequence
  chemically synthesized
gtttttaaatctgtttatgtgg

SEQ ID NO: 28863 - DNA, 22 bp, Artificial Sequence
  chemically synthesized
tttttaaatctgtttatgtggt

SEQ ID NO: 28864 - DNA, 22 bp, Artificial Sequence
  chemically synthesized
ttaaatctgtttatgtggtgta

SEQ ID NO: 28865 - DNA, 22 bp, Artificial Sequence
  chemically synthesized
taaatctgtttatgtggtgtat

SEQ ID NO: 28866 - DNA, 22 bp, Artificial Sequence
  chemically synthesized
aaatctgtttatgtggtgtatc

SEQ ID NO: 28867 - DNA, 22 bp, Artificial Sequence
  chemically synthesized
aatctgtttatgtggtgtatca

SEQ ID NO: 28868 - DNA, 22 bp, Artificial Sequence
  chemically synthesized
tttatgtggtgtatcacactta

SEQ ID NO: 28869 - DNA, 22 bp, Artificial Sequence
  chemically synthesized
atgtggtgtatcacacttattg

SEQ ID NO: 28870 - DNA, 22 bp, Artificial Sequence
  chemically synthesized
tgtggtgtatcacacttattga

SEQ ID NO: 28871 - DNA, 22 bp, Artificial Sequence
  chemically synthesized
attgacttgcagatgtcaaacc

SEQ ID NO: 28872 - DNA, 22 bp, Artificial Sequence
  chemically synthesized
ttgacttgcagatgtcaaacca

SEQ ID NO: 28873 - DNA, 22 bp, Artificial Sequence
  chemically synthesized
acttgcagatgtcaaaccaacc

SEQ ID NO: 28874 - DNA, 22 bp, Artificial Sequence
  chemically synthesized
gcagatgtcaaaccaaccctgc

SEQ ID NO: 28875 - DNA, 22 bp, Artificial Sequence
  chemically synthesized
cagatgtcaaaccaaccctgca

SEQ ID NO: 28876 - DNA, 22 bp, Artificial Sequence
  chemically synthesized
catccctggcatggaacctgct

SEQ ID NO: 28877 - DNA, 22 bp, Artificial Sequence
  chemically synthesized
gcatggaacctgcttgatcatg

SEQ ID NO: 28878 - DNA, 22 bp, Artificial Sequence
  chemically synthesized
cttgatcatggtggattatctt

SEQ ID NO: 28879 - DNA, 22 bp, Artificial Sequence
  chemically synthesized
gatcatggtggattatcttttt

SEQ ID NO: 28880 - DNA, 22 bp, Artificial Sequence
  chemically synthesized
atcatggtggattatctttttg

SEQ ID NO: 28881 - DNA, 22 bp, Artificial Sequence
  chemically synthesized
tctttttgttatgttgttgaat

SEQ ID NO: 28882 - DNA, 22 bp, Artificial Sequence
  chemically synthesized
tttgttatgttgttgaatttgg

SEQ ID NO: 28883 - DNA, 22 bp, Artificial Sequence
  chemically synthesized
ttgttatgttgttgaatttggt

SEQ ID NO: 28884 - DNA, 22 bp, Artificial Sequence
  chemically synthesized
tgttatgttgttgaatttggtt

SEQ ID NO: 28885 - DNA, 22 bp, Artificial Sequence
  chemically synthesized
gttatgttgttgaatttggtta

SEQ ID NO: 28886 - DNA, 22 bp, Artificial Sequence
  chemically synthesized
ttatgttgttgaatttggttat

SEQ ID NO: 28887 - DNA, 22 bp, Artificial Sequence
  chemically synthesized
tgttgttgaatttggttatcta

SEQ ID NO: 28888 - DNA, 22 bp, Artificial Sequence
  chemically synthesized
ttgaatttggttatctagtatt

SEQ ID NO: 28889 - DNA, 22 bp, Artificial Sequence
  chemically synthesized
aatttggttatctagtattttg

SEQ ID NO: 28890 - DNA, 22 bp, Artificial Sequence
  chemically synthesized
ggttatctagtattttgttaag

SEQ ID NO: 28891 - DNA, 22 bp, Artificial Sequence
  chemically synthesized
gttatctagtattttgttaagg

SEQ ID NO: 28892 - DNA, 22 bp, Artificial Sequence
  chemically synthesized
tctagtattttgttaaggattt

SEQ ID NO: 28893 - DNA, 22 bp, Artificial Sequence
  chemically synthesized
gtattttgttaaggattttagc

SEQ ID NO: 28894 - DNA, 22 bp, Artificial Sequence
  chemically synthesized
tgttaaggattttagcatctat

SEQ ID NO: 28895 - DNA, 22 bp, Artificial Sequence
  chemically synthesized
gttaaggattttagcatctatg

SEQ ID NO: 28896 - DNA, 22 bp, Artificial Sequence
  chemically synthesized
ttaaggattttagcatctatgt

SEQ ID NO: 28897 - DNA, 22 bp, Artificial Sequence
  chemically synthesized
aggattttagcatctatgttca

SEQ ID NO: 28898 - DNA, 22 bp, Artificial Sequence
  chemically synthesized
tagcatctatgttcatcaaggc

SEQ ID NO: 28899 - DNA, 22 bp, Artificial Sequence
  chemically synthesized
agcatctatgttcatcaaggct

SEQ ID NO: 28900 - DNA, 22 bp, Artificial Sequence
  chemically synthesized
gcatctatgttcatcaaggcta

SEQ ID NO: 28901 - DNA, 22 bp, Artificial Sequence
  chemically synthesized
tgttcatcaaggctatcagtct

SEQ ID NO: 28902 - DNA, 22 bp, Artificial Sequence
  chemically synthesized
atcaaggctatcagtctgtagt

SEQ ID NO: 28903 - DNA, 22 bp, Artificial Sequence
  chemically synthesized
tcagtctgtagttttctttttt

SEQ ID NO: 28904 - DNA, 22 bp, Artificial Sequence
  chemically synthesized
tagttttcttttttggttatgt

SEQ ID NO: 28905 - DNA, 22 bp, Artificial Sequence
  chemically synthesized
tcttttttggttatgtccttcc

SEQ ID NO: 28906 - DNA, 22 bp, Artificial Sequence
  chemically synthesized
cttttttggttatgtccttccc

SEQ ID NO: 28907 - DNA, 22 bp, Artificial Sequence
  chemically synthesized
ttttttggttatgtccttccct

SEQ ID NO: 28908 - DNA, 22 bp, Artificial Sequence
  chemically synthesized
ttttggttatgtccttccctgg

SEQ ID NO: 28909 - DNA, 22 bp, Artificial Sequence
  chemically synthesized
tttggttatgtccttccctggt

SEQ ID NO: 28910 - DNA, 22 bp, Artificial Sequence
  chemically synthesized
ttggttatgtccttccctggtt

SEQ ID NO: 28911 - DNA, 22 bp, Artificial Sequence
  chemically synthesized
tggttatgtccttccctggttt

SEQ ID NO: 28912 - DNA, 22 bp, Artificial Sequence
  chemically synthesized
ggttatgtccttccctggtttt

SEQ ID NO: 28913 - DNA, 22 bp, Artificial Sequence
  chemically synthesized
gttatgtccttccctggttttg

SEQ ID NO: 28914 - DNA, 22 bp, Artificial Sequence
  chemically synthesized
tgtccttccctggttttggtgt

SEQ ID NO: 28915 - DNA, 22 bp, Artificial Sequence
  chemically synthesized
ccctggttttggtgtgatgctg

SEQ ID NO: 28916 - DNA, 22 bp, Artificial Sequence
  chemically synthesized
cctggttttggtgtgatgctgg

SEQ ID NO: 28917 - DNA, 22 bp, Artificial Sequence
  chemically synthesized
gttttggtgtgatgctggcttc

SEQ ID NO: 28918 - DNA, 22 bp, Artificial Sequence
  chemically synthesized
tggtgtgatgctggcttcatag

SEQ ID NO: 28919 - DNA, 22 bp, Artificial Sequence
  chemically synthesized
ggtgtgatgctggcttcataga

SEQ ID NO: 28920 - DNA, 22 bp, Artificial Sequence
  chemically synthesized
gtgtgatgctggcttcatagaa

SEQ ID NO: 28921 - DNA, 22 bp, Artificial Sequence
  chemically synthesized
gcttcatagaatgaattagggc

SEQ ID NO: 28922 - DNA, 22 bp, Artificial Sequence
  chemically synthesized
catagaatgaattagggcaggt

SEQ ID NO: 28923 - DNA, 22 bp, Artificial Sequence
  chemically synthesized
atagaatgaattagggcaggtt

SEQ ID NO: 28924 - DNA, 22 bp, Artificial Sequence
  chemically synthesized
gggcaggttccttctttatctg

SEQ ID NO: 28925 - DNA, 22 bp, Artificial Sequence
  chemically synthesized
cttctttatctgtcttgtagaa

SEQ ID NO: 28926 - DNA, 22 bp, Artificial Sequence
  chemically synthesized
ctttatctgtcttgtagaatag

SEQ ID NO: 28927 - DNA, 22 bp, Artificial Sequence
  chemically synthesized
tttatctgtcttgtagaatagt

SEQ ID NO: 28928 - DNA, 22 bp, Artificial Sequence
  chemically synthesized
tatctgtcttgtagaatagtgt

SEQ ID NO: 28929 - DNA, 22 bp, Artificial Sequence
  chemically synthesized
atctgtcttgtagaatagtgtc

SEQ ID NO: 28930 - DNA, 22 bp, Artificial Sequence
  chemically synthesized
tctgtcttgtagaatagtgtca

SEQ ID NO: 28931 - DNA, 22 bp, Artificial Sequence
  chemically synthesized
tcttgtagaatagtgtcaaaaa

SEQ ID NO: 28932 - DNA, 22 bp, Artificial Sequence
  chemically synthesized
gtagaatagtgtcaaaaagatg

SEQ ID NO: 28933 - DNA, 22 bp, Artificial Sequence
  chemically synthesized
tagaatagtgtcaaaaagatgg

SEQ ID NO: 28934 - DNA, 22 bp, Artificial Sequence
  chemically synthesized
ctctttgaatgtctagtagaat

SEQ ID NO: 28935 - DNA, 22 bp, Artificial Sequence
  chemically synthesized
tttgaatgtctagtagaattct

SEQ ID NO: 28936 - DNA, 22 bp, Artificial Sequence
  chemically synthesized
tgaatgtctagtagaattctgt

SEQ ID NO: 28937 - DNA, 22 bp, Artificial Sequence
  chemically synthesized
gaatgtctagtagaattctgtt

SEQ ID NO: 28938 - DNA, 22 bp, Artificial Sequence
  chemically synthesized
aatgtctagtagaattctgttg

SEQ ID NO: 28939 - DNA, 22 bp, Artificial Sequence
  chemically synthesized
gtagaattctgttgtgaatcca

SEQ ID NO: 28940 - DNA, 22 bp, Artificial Sequence
  chemically synthesized
tgttgtgaatccatctggtcct

SEQ ID NO: 28941 - DNA, 22 bp, Artificial Sequence
  chemically synthesized
ttgtgaatccatctggtcctga

SEQ ID NO: 28942 - DNA, 22 bp, Artificial Sequence
  chemically synthesized
tgaatccatctggtcctgaact

SEQ ID NO: 28943 - DNA, 22 bp, Artificial Sequence
  chemically synthesized
gtcctgaacttttttttggttg

SEQ ID NO: 28944 - DNA, 22 bp, Artificial Sequence
  chemically synthesized
aacttttttttggttggtaatt

SEQ ID NO: 28945 - DNA, 22 bp, Artificial Sequence
  chemically synthesized
ttttttggttggtaatttttta

SEQ ID NO: 28946 - DNA, 22 bp, Artificial Sequence
  chemically synthesized
tttttggttggtaattttttaa

SEQ ID NO: 28947 - DNA, 22 bp, Artificial Sequence
  chemically synthesized
ttttggttggtaattttttaat

SEQ ID NO: 28948 - DNA, 22 bp, Artificial Sequence
  chemically synthesized
tttggttggtaattttttaatt

SEQ ID NO: 28949 - DNA, 22 bp, Artificial Sequence
  chemically synthesized
ttggttggtaattttttaatta

SEQ ID NO: 28950 - DNA, 22 bp, Artificial Sequence
  chemically synthesized
tggttggtaattttttaattac

SEQ ID NO: 28951 - DNA, 22 bp, Artificial Sequence
  chemically synthesized
ggttggtaattttttaattacc

SEQ ID NO: 28952 - DNA, 22 bp, Artificial Sequence
  chemically synthesized
gttggtaattttttaattacca

SEQ ID NO: 28953 - DNA, 22 bp, Artificial Sequence
  chemically synthesized
gtaattttttaattaccaatta

SEQ ID NO: 28954 - DNA, 22 bp, Artificial Sequence
  chemically synthesized
tttaattaccaattaaatctca

SEQ ID NO: 28955 - DNA, 22 bp, Artificial Sequence
  chemically synthesized
ttaattaccaattaaatctcac

SEQ ID NO: 28956 - DNA, 22 bp, Artificial Sequence
  chemically synthesized
taattaccaattaaatctcact

SEQ ID NO: 28957 - DNA, 22 bp, Artificial Sequence
  chemically synthesized
aattaccaattaaatctcactg

SEQ ID NO: 28958 - DNA, 22 bp, Artificial Sequence
  chemically synthesized
attaccaattaaatctcactgc

SEQ ID NO: 28959 - DNA, 22 bp, Artificial Sequence
  chemically synthesized
ccaattaaatctcactgcttgt

SEQ ID NO: 28960 - DNA, 22 bp, Artificial Sequence
  chemically synthesized
aatctcactgcttgttattggt

SEQ ID NO: 28961 - DNA, 22 bp, Artificial Sequence
  chemically synthesized
actgcttgttattggtctgtta

SEQ ID NO: 28962 - DNA, 22 bp, Artificial Sequence
  chemically synthesized
cttgttattggtctgttagtaa

SEQ ID NO: 28963 - DNA, 22 bp, Artificial Sequence
  chemically synthesized
gttattggtctgttagtaaatt

SEQ ID NO: 28964 - DNA, 22 bp, Artificial Sequence
  chemically synthesized
ttattggtctgttagtaaattt

SEQ ID NO: 28965 - DNA, 22 bp, Artificial Sequence
  chemically synthesized
ttggtctgttagtaaatttatt

SEQ ID NO: 28966 - DNA, 22 bp, Artificial Sequence
  chemically synthesized
gtctgttagtaaatttattgag

SEQ ID NO: 28967 - DNA, 22 bp, Artificial Sequence
  chemically synthesized
ttagtaaatttattgaggctca

SEQ ID NO: 28968 - DNA, 22 bp, Artificial Sequence
  chemically synthesized
gtaaatttattgaggctcattt

SEQ ID NO: 28969 - DNA, 22 bp, Artificial Sequence
  chemically synthesized
attgaggctcatttcatggcct

SEQ ID NO: 28970 - DNA, 22 bp, Artificial Sequence
  chemically synthesized
ttgaggctcatttcatggccta

SEQ ID NO: 28971 - DNA, 22 bp, Artificial Sequence
  chemically synthesized
aggctcatttcatggcctatca

SEQ ID NO: 28972 - DNA, 22 bp, Artificial Sequence
  chemically synthesized
atttcatggcctatcatatggt

SEQ ID NO: 28973 - DNA, 22 bp, Artificial Sequence
  chemically synthesized
catggcctatcatatggtctac

SEQ ID NO: 28974 - DNA, 22 bp, Artificial Sequence
  chemically synthesized
atggcctatcatatggtctacc

SEQ ID NO: 28975 - DNA, 22 bp, Artificial Sequence
  chemically synthesized
tcatatggtctaccttggagaa

SEQ ID NO: 28976 - DNA, 22 bp, Artificial Sequence
  chemically synthesized
ccttggagaaatttccacgcgc

SEQ ID NO: 28977 - DNA, 22 bp, Artificial Sequence
  chemically synthesized
ggagaaatttccacgcgctgtt

SEQ ID NO: 28978 - DNA, 22 bp, Artificial Sequence
  chemically synthesized
gagaaatttccacgcgctgttg

SEQ ID NO: 28979 - DNA, 22 bp, Artificial Sequence
  chemically synthesized
ccacgcgctgttgaatagaatg

SEQ ID NO: 28980 - DNA, 22 bp, Artificial Sequence
  chemically synthesized
cacgcgctgttgaatagaatgt

SEQ ID NO: 28981 - DNA, 22 bp, Artificial Sequence
  chemically synthesized
ttgaatagaatgtgtgttctgt

SEQ ID NO: 28982 - DNA, 22 bp, Artificial Sequence
  chemically synthesized
aatagaatgtgtgttctgtggt

SEQ ID NO: 28983 - DNA, 22 bp, Artificial Sequence
  chemically synthesized
tgtggttattggatgaaatgtt

SEQ ID NO: 28984 - DNA, 22 bp, Artificial Sequence
  chemically synthesized
tggttattggatgaaatgttct

SEQ ID NO: 28985 - DNA, 22 bp, Artificial Sequence
  chemically synthesized
ttggatgaaatgttctgtatat

SEQ ID NO: 28986 - DNA, 22 bp, Artificial Sequence
  chemically synthesized
gatgaaatgttctgtatataac

SEQ ID NO: 28987 - DNA, 22 bp, Artificial Sequence
  chemically synthesized
tgtatataactgttaagtccat

SEQ ID NO: 28988 - DNA, 22 bp, Artificial Sequence
  chemically synthesized
tatataactgttaagtccattt

SEQ ID NO: 28989 - DNA, 22 bp, Artificial Sequence
  chemically synthesized
ttaagtccatttgttctaaggt

SEQ ID NO: 28990 - DNA, 22 bp, Artificial Sequence
  chemically synthesized
agtccatttgttctaaggtata

SEQ ID NO: 28991 - DNA, 22 bp, Artificial Sequence
  chemically synthesized
gttctaaggtataatttaaatc

SEQ ID NO: 28992 - DNA, 22 bp, Artificial Sequence
  chemically synthesized
ttctaaggtataatttaaatcc

SEQ ID NO: 28993 - DNA, 22 bp, Artificial Sequence
  chemically synthesized
taaggtataatttaaatccatt

SEQ ID NO: 28994 - DNA, 22 bp, Artificial Sequence
  chemically synthesized
aggtataatttaaatccattat

SEQ ID NO: 28995 - DNA, 22 bp, Artificial Sequence
  chemically synthesized
aaatccattatttttttgttga

SEQ ID NO: 28996 - DNA, 22 bp, Artificial Sequence
  chemically synthesized
aatccattatttttttgttgac

SEQ ID NO: 28997 - DNA, 22 bp, Artificial Sequence
  chemically synthesized
tttttttgttgactttctgtct

SEQ ID NO: 28998 - DNA, 22 bp, Artificial Sequence
  chemically synthesized
ttttgttgactttctgtcttga

SEQ ID NO: 28999 - DNA, 22 bp, Artificial Sequence
  chemically synthesized
tttgttgactttctgtcttgat

SEQ ID NO: 29000 - DNA, 22 bp, Artificial Sequence
  chemically synthesized
ttgttgactttctgtcttgatg

SEQ ID NO: 29001 - DNA, 22 bp, Artificial Sequence
  chemically synthesized
tgttgactttctgtcttgatga

SEQ ID NO: 29002 - DNA, 22 bp, Artificial Sequence
  chemically synthesized
gttgactttctgtcttgatgaa

SEQ ID NO: 29003 - DNA, 22 bp, Artificial Sequence
  chemically synthesized
ttgactttctgtcttgatgaac

SEQ ID NO: 29004 - DNA, 22 bp, Artificial Sequence
  chemically synthesized
actttctgtcttgatgaactgt

SEQ ID NO: 29005 - DNA, 22 bp, Artificial Sequence
  chemically synthesized
tctgtcttgatgaactgtctag

SEQ ID NO: 29006 - DNA, 22 bp, Artificial Sequence
  chemically synthesized
ctgtcttgatgaactgtctagt

SEQ ID NO: 29007 - DNA, 22 bp, Artificial Sequence
  chemically synthesized
tgtcttgatgaactgtctagtg

SEQ ID NO: 29008 - DNA, 22 bp, Artificial Sequence
  chemically synthesized
tcttgatgaactgtctagtgct

SEQ ID NO: 29009 - DNA, 22 bp, Artificial Sequence
  chemically synthesized
gatgaactgtctagtgctgtca

SEQ ID NO: 29010 - DNA, 22 bp, Artificial Sequence
  chemically synthesized
atgaactgtctagtgctgtcaa

SEQ ID NO: 29011 - DNA, 22 bp, Artificial Sequence
  chemically synthesized
tctagtgctgtcaatgaagtat

SEQ ID NO: 29012 - DNA, 22 bp, Artificial Sequence
  chemically synthesized
gtgctgtcaatgaagtattgaa

SEQ ID NO: 29013 - DNA, 22 bp, Artificial Sequence
  chemically synthesized
tcaatgaagtattgaagtcccc

SEQ ID NO: 29014 - DNA, 22 bp, Artificial Sequence
  chemically synthesized
aagtcccccactattattgtgt

SEQ ID NO: 29015 - DNA, 22 bp, Artificial Sequence
  chemically synthesized
ttattgtgttgctgtctatctc

SEQ ID NO: 29016 - DNA, 22 bp, Artificial Sequence
  chemically synthesized
ttgtgttgctgtctatctcatt

SEQ ID NO: 29017 - DNA, 22 bp, Artificial Sequence
  chemically synthesized
tgttgctgtctatctcatttct

SEQ ID NO: 29018 - DNA, 22 bp, Artificial Sequence
  chemically synthesized
ctgtctatctcatttcttaggt

SEQ ID NO: 29019 - DNA, 22 bp, Artificial Sequence
  chemically synthesized
tctatctcatttcttaggtcta

SEQ ID NO: 29020 - DNA, 22 bp, Artificial Sequence
  chemically synthesized
tctcatttcttaggtctattag

SEQ ID NO: 29021 - DNA, 22 bp, Artificial Sequence
  chemically synthesized
atttcttaggtctattagtaat

SEQ ID NO: 29022 - DNA, 22 bp, Artificial Sequence
  chemically synthesized
cttaggtctattagtaattgtt

SEQ ID NO: 29023 - DNA, 22 bp, Artificial Sequence
  chemically synthesized
ttaggtctattagtaattgttc

SEQ ID NO: 29024 - DNA, 22 bp, Artificial Sequence
  chemically synthesized
aggtctattagtaattgttcta

SEQ ID NO: 29025 - DNA, 22 bp, Artificial Sequence
  chemically synthesized
ggtctattagtaattgttctat

SEQ ID NO: 29026 - DNA, 22 bp, Artificial Sequence
  chemically synthesized
ttagtaattgttctataaattt

SEQ ID NO: 29027 - DNA, 22 bp, Artificial Sequence
  chemically synthesized
gtaattgttctataaatttggg

SEQ ID NO: 29028 - DNA, 22 bp, Artificial Sequence
  chemically synthesized
ttctataaatttgggagctcca

SEQ ID NO: 29029 - DNA, 22 bp, Artificial Sequence
  chemically synthesized
tataaatttgggagctccagtg

SEQ ID NO: 29030 - DNA, 22 bp, Artificial Sequence
  chemically synthesized
taaatttgggagctccagtgtt

SEQ ID NO: 29031 - DNA, 22 bp, Artificial Sequence
  chemically synthesized
gggagctccagtgttaggtgca

SEQ ID NO: 29032 - DNA, 22 bp, Artificial Sequence
  chemically synthesized
ggagctccagtgttaggtgcat

SEQ ID NO: 29033 - DNA, 22 bp, Artificial Sequence
  chemically synthesized
cagtgttaggtgcatatatgtt

SEQ ID NO: 29034 - DNA, 22 bp, Artificial Sequence
  chemically synthesized
ggtgcatatatgtttaagattg

SEQ ID NO: 29035 - DNA, 22 bp, Artificial Sequence
  chemically synthesized
aagattgtgatattttcctgtt

SEQ ID NO: 29036 - DNA, 22 bp, Artificial Sequence
  chemically synthesized
agattgtgatattttcctgttg

SEQ ID NO: 29037 - DNA, 22 bp, Artificial Sequence
  chemically synthesized
tgatattttcctgttggacaag

SEQ ID NO: 29038 - DNA, 22 bp, Artificial Sequence
  chemically synthesized
tcctgttggacaaggcctttta

SEQ ID NO: 29039 - DNA, 22 bp, Artificial Sequence
  chemically synthesized
cctgttggacaaggccttttac

SEQ ID NO: 29040 - DNA, 22 bp, Artificial Sequence
  chemically synthesized
ctgttggacaaggccttttacc

SEQ ID NO: 29041 - DNA, 22 bp, Artificial Sequence
  chemically synthesized
ttggacaaggccttttaccatt

SEQ ID NO: 29042 - DNA, 22 bp, Artificial Sequence
  chemically synthesized
gacaaggccttttaccattata

SEQ ID NO: 29043 - DNA, 22 bp, Artificial Sequence
  chemically synthesized
ttaccattatataatgtccctc

SEQ ID NO: 29044 - DNA, 22 bp, Artificial Sequence
  chemically synthesized
taccattatataatgtccctct

SEQ ID NO: 29045 - DNA, 22 bp, Artificial Sequence
  chemically synthesized
accattatataatgtccctctt

SEQ ID NO: 29046 - DNA, 22 bp, Artificial Sequence
  chemically synthesized
ccattatataatgtccctcttt

SEQ ID NO: 29047 - DNA, 22 bp, Artificial Sequence
  chemically synthesized
tataatgtccctctttgtctct

SEQ ID NO: 29048 - DNA, 22 bp, Artificial Sequence
  chemically synthesized
tttgtctcttttaactgctgtt

SEQ ID NO: 29049 - DNA, 22 bp, Artificial Sequence
  chemically synthesized
tgtctcttttaactgctgttgc

SEQ ID NO: 29050 - DNA, 22 bp, Artificial Sequence
  chemically synthesized
gtctcttttaactgctgttgct

SEQ ID NO: 29051 - DNA, 22 bp, Artificial Sequence
  chemically synthesized
tctcttttaactgctgttgctt

SEQ ID NO: 29052 - DNA, 22 bp, Artificial Sequence
  chemically synthesized
ttttaactgctgttgctttaaa

SEQ ID NO: 29053 - DNA, 22 bp, Artificial Sequence
  chemically synthesized
ttaactgctgttgctttaaagt

SEQ ID NO: 29054 - DNA, 22 bp, Artificial Sequence
  chemically synthesized
taactgctgttgctttaaagtt

SEQ ID NO: 29055 - DNA, 22 bp, Artificial Sequence
  chemically synthesized
aactgctgttgctttaaagttt

SEQ ID NO: 29056 - DNA, 22 bp, Artificial Sequence
  chemically synthesized
actgctgttgctttaaagtttg

SEQ ID NO: 29057 - DNA, 22 bp, Artificial Sequence
  chemically synthesized
ctgttgctttaaagtttgtttt

SEQ ID NO: 29058 - DNA, 22 bp, Artificial Sequence
  chemically synthesized
ttgctttaaagtttgttttgcc

SEQ ID NO: 29059 - DNA, 22 bp, Artificial Sequence
  chemically synthesized
ctttaaagtttgttttgcctac

SEQ ID NO: 29060 - DNA, 22 bp, Artificial Sequence
  chemically synthesized
taaagtttgttttgcctactca

SEQ ID NO: 29061 - DNA, 22 bp, Artificial Sequence
  chemically synthesized
aaagtttgttttgcctactcac

SEQ ID NO: 29062 - DNA, 22 bp, Artificial Sequence
  chemically synthesized
aagtttgttttgcctactcact

SEQ ID NO: 29063 - DNA, 22 bp, Artificial Sequence
  chemically synthesized
gttttgcctactcacttttggt

SEQ ID NO: 29064 - DNA, 22 bp, Artificial Sequence
  chemically synthesized
ttttgcctactcacttttggtg

SEQ ID NO: 29065 - DNA, 22 bp, Artificial Sequence
  chemically synthesized
tgcctactcacttttggtggcc

SEQ ID NO: 29066 - DNA, 22 bp, Artificial Sequence
  chemically synthesized
gcctactcacttttggtggcca

SEQ ID NO: 29067 - DNA, 22 bp, Artificial Sequence
  chemically synthesized
cctactcacttttggtggccat

SEQ ID NO: 29068 - DNA, 22 bp, Artificial Sequence
  chemically synthesized
ctcacttttggtggccatttgc

SEQ ID NO: 29069 - DNA, 22 bp, Artificial Sequence
  chemically synthesized
acttttggtggccatttgcatg

SEQ ID NO: 29070 - DNA, 22 bp, Artificial Sequence
  chemically synthesized
ttggtggccatttgcatgaaat

SEQ ID NO: 29071 - DNA, 22 bp, Artificial Sequence
  chemically synthesized
tggtggccatttgcatgaaata

SEQ ID NO: 29072 - DNA, 22 bp, Artificial Sequence
  chemically synthesized
ggtggccatttgcatgaaatac

SEQ ID NO: 29073 - DNA, 22 bp, Artificial Sequence
  chemically synthesized
gtggccatttgcatgaaatacc

SEQ ID NO: 29074 - DNA, 22 bp, Artificial Sequence
  chemically synthesized
gcatgaaatacctttttcaccc

SEQ ID NO: 29075 - DNA, 22 bp, Artificial Sequence
  chemically synthesized
catgaaatacctttttcaccct

SEQ ID NO: 29076 - DNA, 22 bp, Artificial Sequence
  chemically synthesized
tttcacccttttaagtggagca

SEQ ID NO: 29077 - DNA, 22 bp, Artificial Sequence
  chemically synthesized
ttcacccttttaagtggagcat

SEQ ID NO: 29078 - DNA, 22 bp, Artificial Sequence
  chemically synthesized
tcacccttttaagtggagcatt

SEQ ID NO: 29079 - DNA, 22 bp, Artificial Sequence
  chemically synthesized
cacccttttaagtggagcattt

SEQ ID NO: 29080 - DNA, 22 bp, Artificial Sequence
  chemically synthesized
acccttttaagtggagcattta

SEQ ID NO: 29081 - DNA, 22 bp, Artificial Sequence
  chemically synthesized
ttaagtggagcatttaggccat

SEQ ID NO: 29082 - DNA, 22 bp, Artificial Sequence
  chemically synthesized
taagtggagcatttaggccatt

SEQ ID NO: 29083 - DNA, 22 bp, Artificial Sequence
  chemically synthesized
aagtggagcatttaggccattt

SEQ ID NO: 29084 - DNA, 22 bp, Artificial Sequence
  chemically synthesized
agtggagcatttaggccattta

SEQ ID NO: 29085 - DNA, 22 bp, Artificial Sequence
  chemically synthesized
aggccatttacattcaatgtta

SEQ ID NO: 29086 - DNA, 22 bp, Artificial Sequence
  chemically synthesized
ggccatttacattcaatgttag

SEQ ID NO: 29087 - DNA, 22 bp, Artificial Sequence
  chemically synthesized
acattcaatgttagtaatgtaa

SEQ ID NO: 29088 - DNA, 22 bp, Artificial Sequence
  chemically synthesized
cattcaatgttagtaatgtaaa

SEQ ID NO: 29089 - DNA, 22 bp, Artificial Sequence
  chemically synthesized
aatgttagtaatgtaaatgcct

SEQ ID NO: 29090 - DNA, 22 bp, Artificial Sequence
  chemically synthesized
gtaatgtaaatgcctggctatg

SEQ ID NO: 29091 - DNA, 22 bp, Artificial Sequence
  chemically synthesized
gctatgccaggcaggaatggcc

SEQ ID NO: 29092 - DNA, 22 bp, Artificial Sequence
  chemically synthesized
tgccaggcaggaatggcctgct

SEQ ID NO: 29093 - DNA, 22 bp, Artificial Sequence
  chemically synthesized
ctcagggacccagtgagctccc

SEQ ID NO: 29094 - DNA, 22 bp, Artificial Sequence
  chemically synthesized
agggacccagtgagctcccagg

SEQ ID NO: 29095 - DNA, 22 bp, Artificial Sequence
  chemically synthesized
ccagggcctttctcactgcttc

SEQ ID NO: 29096 - DNA, 22 bp, Artificial Sequence
  chemically synthesized
tctcactgcttcctctacacct

SEQ ID NO: 29097 - DNA, 22 bp, Artificial Sequence
  chemically synthesized
ctcactgcttcctctacacctg

SEQ ID NO: 29098 - DNA, 22 bp, Artificial Sequence
  chemically synthesized
tcactgcttcctctacacctgt

SEQ ID NO: 29099 - DNA, 22 bp, Artificial Sequence
  chemically synthesized
actgcttcctctacacctgtat

SEQ ID NO: 29100 - DNA, 22 bp, Artificial Sequence
  chemically synthesized
cttcctctacacctgtattttg

SEQ ID NO: 29101 - DNA, 22 bp, Artificial Sequence
  chemically synthesized
cctctacacctgtattttgctc

SEQ ID NO: 29102 - DNA, 22 bp, Artificial Sequence
  chemically synthesized
ctctacacctgtattttgctca

SEQ ID NO: 29103 - DNA, 22 bp, Artificial Sequence
  chemically synthesized
tacacctgtattttgctcagct

SEQ ID NO: 29104 - DNA, 22 bp, Artificial Sequence
  chemically synthesized
cacctgtattttgctcagctct

SEQ ID NO: 29105 - DNA, 22 bp, Artificial Sequence
  chemically synthesized
tattttgctcagctctctaagt

SEQ ID NO: 29106 - DNA, 22 bp, Artificial Sequence
  chemically synthesized
tgctcagctctctaagttaact

SEQ ID NO: 29107 - DNA, 22 bp, Artificial Sequence
  chemically synthesized
gctcagctctctaagttaactc

SEQ ID NO: 29108 - DNA, 22 bp, Artificial Sequence
  chemically synthesized
ctcagctctctaagttaactca

SEQ ID NO: 29109 - DNA, 22 bp, Artificial Sequence
  chemically synthesized
agctctctaagttaactcaact

SEQ ID NO: 29110 - DNA, 22 bp, Artificial Sequence
  chemically synthesized
tctaagttaactcaactccagg

SEQ ID NO: 29111 - DNA, 22 bp, Artificial Sequence
  chemically synthesized
taagttaactcaactccaggta

SEQ ID NO: 29112 - DNA, 22 bp, Artificial Sequence
  chemically synthesized
agttaactcaactccaggtaag

SEQ ID NO: 29113 - DNA, 22 bp, Artificial Sequence
  chemically synthesized
actcaactccaggtaaggtcag

SEQ ID NO: 29114 - DNA, 22 bp, Artificial Sequence
  chemically synthesized
aactccaggtaaggtcagaaac

SEQ ID NO: 29115 - DNA, 22 bp, Artificial Sequence
  chemically synthesized
caggtaaggtcagaaacttctc

SEQ ID NO: 29116 - DNA, 22 bp, Artificial Sequence
  chemically synthesized
ctcccacaaacagaccttcagt

SEQ ID NO: 29117 - DNA, 22 bp, Artificial Sequence
  chemically synthesized
tcccacaaacagaccttcagtt

SEQ ID NO: 29118 - DNA, 22 bp, Artificial Sequence
  chemically synthesized
ccacaaacagaccttcagtttc

SEQ ID NO: 29119 - DNA, 22 bp, Artificial Sequence
  chemically synthesized
cagtttctccagtgggagtgtg

SEQ ID NO: 29120 - DNA, 22 bp, Artificial Sequence
  chemically synthesized
agtttctccagtgggagtgtgt

SEQ ID NO: 29121 - DNA, 22 bp, Artificial Sequence
  chemically synthesized
ctccagtgggagtgtgtgttta

SEQ ID NO: 29122 - DNA, 22 bp, Artificial Sequence
  chemically synthesized
tccagtgggagtgtgtgtttag

SEQ ID NO: 29123 - DNA, 22 bp, Artificial Sequence
  chemically synthesized
cagtgggagtgtgtgtttagga

SEQ ID NO: 29124 - DNA, 22 bp, Artificial Sequence
  chemically synthesized
aggagaggaggatctccctttc

SEQ ID NO: 29125 - DNA, 22 bp, Artificial Sequence
  chemically synthesized
ggagaggaggatctccctttcc

SEQ ID NO: 29126 - DNA, 22 bp, Artificial Sequence
  chemically synthesized
cctttcccacttccgcagttgg

SEQ ID NO: 29127 - DNA, 22 bp, Artificial Sequence
  chemically synthesized
tcccacttccgcagttggggca

SEQ ID NO: 29128 - DNA, 22 bp, Artificial Sequence
  chemically synthesized
cccacttccgcagttggggcac

SEQ ID NO: 29129 - DNA, 22 bp, Artificial Sequence
  chemically synthesized
ccacttccgcagttggggcact

SEQ ID NO: 29130 - DNA, 22 bp, Artificial Sequence
  chemically synthesized
ccgcagttggggcactcacagt

SEQ ID NO: 29131 - DNA, 22 bp, Artificial Sequence
  chemically synthesized
cgcagttggggcactcacagta

SEQ ID NO: 29132 - DNA, 22 bp, Artificial Sequence
  chemically synthesized
gggcactcacagtatttggggt

SEQ ID NO: 29133 - DNA, 22 bp, Artificial Sequence
  chemically synthesized
acagtatttggggtgtctcctg

SEQ ID NO: 29134 - DNA, 22 bp, Artificial Sequence
  chemically synthesized
ggggtgtctcctgggtcctgca

SEQ ID NO: 29135 - DNA, 22 bp, Artificial Sequence
  chemically synthesized
gggtgtctcctgggtcctgcag

SEQ ID NO: 29136 - DNA, 22 bp, Artificial Sequence
  chemically synthesized
ctgggtcctgcaggagcaatct

SEQ ID NO: 29137 - DNA, 22 bp, Artificial Sequence
  chemically synthesized
ggtcctgcaggagcaatctact

SEQ ID NO: 29138 - DNA, 22 bp, Artificial Sequence
  chemically synthesized
caggagcaatctacttccttca

SEQ ID NO: 29139 - DNA, 22 bp, Artificial Sequence
  chemically synthesized
cttccttcagagggtctgtggg

SEQ ID NO: 29140 - DNA, 22 bp, Artificial Sequence
  chemically synthesized
ccttcagagggtctgtgggtcc

SEQ ID NO: 29141 - DNA, 22 bp, Artificial Sequence
  chemically synthesized
cttcagagggtctgtgggtcct

SEQ ID NO: 29142 - DNA, 22 bp, Artificial Sequence
  chemically synthesized
cagagggtctgtgggtcctctc

SEQ ID NO: 29143 - DNA, 22 bp, Artificial Sequence
  chemically synthesized
agagggtctgtgggtcctctca

SEQ ID NO: 29144 - DNA, 22 bp, Artificial Sequence
  chemically synthesized
tgggtcctctcaggattgctgg

SEQ ID NO: 29145 - DNA, 22 bp, Artificial Sequence
  chemically synthesized
tcaggattgctggtttgttctt

SEQ ID NO: 29146 - DNA, 22 bp, Artificial Sequence
  chemically synthesized
aggattgctggtttgttcttgc

SEQ ID NO: 29147 - DNA, 22 bp, Artificial Sequence
  chemically synthesized
ctggtttgttcttgcagtctat

SEQ ID NO: 29148 - DNA, 22 bp, Artificial Sequence
  chemically synthesized
gtttgttcttgcagtctatctg

SEQ ID NO: 29149 - DNA, 22 bp, Artificial Sequence
  chemically synthesized
gttcttgcagtctatctgcagc

SEQ ID NO: 29150 - DNA, 22 bp, Artificial Sequence
  chemically synthesized
ttcttgcagtctatctgcagct

SEQ ID NO: 29151 - DNA, 22 bp, Artificial Sequence
  chemically synthesized
ttgcagtctatctgcagctaaa

SEQ ID NO: 29152 - DNA, 22 bp, Artificial Sequence
  chemically synthesized
gcagtctatctgcagctaaaat

SEQ ID NO: 29153 - DNA, 22 bp, Artificial Sequence
  chemically synthesized
cagtctatctgcagctaaaatt

SEQ ID NO: 29154 - DNA, 22 bp, Artificial Sequence
  chemically synthesized
tctgcagctaaaattcacaatg

SEQ ID NO: 29155 - DNA, 22 bp, Artificial Sequence
  chemically synthesized
cagctaaaattcacaatgcgag

SEQ ID NO: 29156 - DNA, 22 bp, Artificial Sequence
  chemically synthesized
aaattcacaatgcgagcctcca

SEQ ID NO: 29157 - DNA, 22 bp, Artificial Sequence
  chemically synthesized
acaatgcgagcctccacatgct

SEQ ID NO: 29158 - DNA, 22 bp, Artificial Sequence
  chemically synthesized
cacatgctgctctgtccatctg

SEQ ID NO: 29159 - DNA, 22 bp, Artificial Sequence
  chemically synthesized
ctctgtccatctgagttggagc

SEQ ID NO: 29160 - DNA, 22 bp, Artificial Sequence
  chemically synthesized
tgtccatctgagttggagctgc

SEQ ID NO: 29161 - DNA, 22 bp, Artificial Sequence
  chemically synthesized
tccatctgagttggagctgcaa

SEQ ID NO: 29162 - DNA, 22 bp, Artificial Sequence
  chemically synthesized
agttggagctgcaatctaggcc

SEQ ID NO: 29163 - DNA, 22 bp, Artificial Sequence
  chemically synthesized
gagctgcaatctaggcctacct

SEQ ID NO: 29164 - DNA, 22 bp, Artificial Sequence
  chemically synthesized
caatctaggcctacctcccatc

SEQ ID NO: 29165 - DNA, 22 bp, Artificial Sequence
  chemically synthesized
ggcctacctcccatccgccaag

SEQ ID NO: 29166 - DNA, 22 bp, Artificial Sequence
  chemically synthesized
cctcccatccgccaagatcctg

SEQ ID NO: 29167 - DNA, 22 bp, Artificial Sequence
  chemically synthesized
ccatccgccaagatcctgagaa

SEQ ID NO: 29168 - DNA, 22 bp, Artificial Sequence
  chemically synthesized
agaagttggggattatatttca

SEQ ID NO: 29169 - DNA, 22 bp, Artificial Sequence
  chemically synthesized
gggattatatttcaacatgaga

SEQ ID NO: 29170 - DNA, 22 bp, Artificial Sequence
  chemically synthesized
tatttcaacatgagatttggag

SEQ ID NO: 29171 - DNA, 22 bp, Artificial Sequence
  chemically synthesized
caacatgagatttggagggaac

SEQ ID NO: 29172 - DNA, 22 bp, Artificial Sequence
  chemically synthesized
aacatgagatttggagggaaca

SEQ ID NO: 29173 - DNA, 22 bp, Artificial Sequence
  chemically synthesized
ggagggaacaaacatccaaacc

SEQ ID NO: 29174 - DNA, 22 bp, Artificial Sequence
  chemically synthesized
gagggaacaaacatccaaacca

SEQ ID NO: 29175 - DNA, 22 bp, Artificial Sequence
  chemically synthesized
tattcttttgcacatggatatc

SEQ ID NO: 29176 - DNA, 22 bp, Artificial Sequence
  chemically synthesized
attcttttgcacatggatatcc

SEQ ID NO: 29177 - DNA, 22 bp, Artificial Sequence
  chemically synthesized
ttcttttgcacatggatatcca

SEQ ID NO: 29178 - DNA, 22 bp, Artificial Sequence
  chemically synthesized
ttttgcacatggatatccaatg

SEQ ID NO: 29179 - DNA, 22 bp, Artificial Sequence
  chemically synthesized
ttgcacatggatatccaatgga

SEQ ID NO: 29180 - DNA, 22 bp, Artificial Sequence
  chemically synthesized
tgcacatggatatccaatggat

SEQ ID NO: 29181 - DNA, 22 bp, Artificial Sequence
  chemically synthesized
gcacatggatatccaatggata

SEQ ID NO: 29182 - DNA, 22 bp, Artificial Sequence
  chemically synthesized
cacatggatatccaatggatat

SEQ ID NO: 29183 - DNA, 22 bp, Artificial Sequence
  chemically synthesized
tttcagcaccatttcttgaaca

SEQ ID NO: 29184 - DNA, 22 bp, Artificial Sequence
  chemically synthesized
ttcagcaccatttcttgaacac

SEQ ID NO: 29185 - DNA, 22 bp, Artificial Sequence
  chemically synthesized
tcagcaccatttcttgaacact

SEQ ID NO: 29186 - DNA, 22 bp, Artificial Sequence
  chemically synthesized
cagcaccatttcttgaacactg

SEQ ID NO: 29187 - DNA, 22 bp, Artificial Sequence
  chemically synthesized
agcaccatttcttgaacactgt

SEQ ID NO: 29188 - DNA, 22 bp, Artificial Sequence
  chemically synthesized
cttgaacactgtgtcctttcct

SEQ ID NO: 29189 - DNA, 22 bp, Artificial Sequence
  chemically synthesized
ttgaacactgtgtcctttcctc

SEQ ID NO: 29190 - DNA, 22 bp, Artificial Sequence
  chemically synthesized
gaacactgtgtcctttcctcaa

SEQ ID NO: 29191 - DNA, 22 bp, Artificial Sequence
  chemically synthesized
aacactgtgtcctttcctcaat

SEQ ID NO: 29192 - DNA, 22 bp, Artificial Sequence
  chemically synthesized
tgtcctttcctcaatgtatatt

SEQ ID NO: 29193 - DNA, 22 bp, Artificial Sequence
  chemically synthesized
tcctcaatgtatattcttgtca

SEQ ID NO: 29194 - DNA, 22 bp, Artificial Sequence
  chemically synthesized
cctcaatgtatattcttgtcac

SEQ ID NO: 29195 - DNA, 22 bp, Artificial Sequence
  chemically synthesized
ctcaatgtatattcttgtcacc

SEQ ID NO: 29196 - DNA, 22 bp, Artificial Sequence
  chemically synthesized
aatgtatattcttgtcaccttt

SEQ ID NO: 29197 - DNA, 22 bp, Artificial Sequence
  chemically synthesized
ttgtcacctttgttgaaaatct

SEQ ID NO: 29198 - DNA, 22 bp, Artificial Sequence
  chemically synthesized
gtcacctttgttgaaaatctgt

SEQ ID NO: 29199 - DNA, 22 bp, Artificial Sequence
  chemically synthesized
tcacctttgttgaaaatctgtt

SEQ ID NO: 29200 - DNA, 22 bp, Artificial Sequence
  chemically synthesized
tgttgaaaatctgttggctata

SEQ ID NO: 29201 - DNA, 22 bp, Artificial Sequence
  chemically synthesized
gttgaaaatctgttggctataa

SEQ ID NO: 29202 - DNA, 22 bp, Artificial Sequence
  chemically synthesized
ttgaaaatctgttggctataaa

SEQ ID NO: 29203 - DNA, 22 bp, Artificial Sequence
  chemically synthesized
aaaatctgttggctataaatat

SEQ ID NO: 29204 - DNA, 22 bp, Artificial Sequence
  chemically synthesized
ttggctataaatatgtggatgc

SEQ ID NO: 29205 - DNA, 22 bp, Artificial Sequence
  chemically synthesized
gctataaatatgtggatgcatt

SEQ ID NO: 29206 - DNA, 22 bp, Artificial Sequence
  chemically synthesized
taaatatgtggatgcatttcta

SEQ ID NO: 29207 - DNA, 22 bp, Artificial Sequence
  chemically synthesized
ctaggttctctattctcttcca

SEQ ID NO: 29208 - DNA, 22 bp, Artificial Sequence
  chemically synthesized
taggttctctattctcttccat

SEQ ID NO: 29209 - DNA, 22 bp, Artificial Sequence
  chemically synthesized
ggttctctattctcttccattg

SEQ ID NO: 29210 - DNA, 22 bp, Artificial Sequence
  chemically synthesized
tctattctcttccattggtcta

SEQ ID NO: 29211 - DNA, 22 bp, Artificial Sequence
  chemically synthesized
tattctcttccattggtctaag

SEQ ID NO: 29212 - DNA, 22 bp, Artificial Sequence
  chemically synthesized
ttctcttccattggtctaagtg

SEQ ID NO: 29213 - DNA, 22 bp, Artificial Sequence
  chemically synthesized
tcttccattggtctaagtgtct

SEQ ID NO: 29214 - DNA, 22 bp, Artificial Sequence
  chemically synthesized
ttccattggtctaagtgtctgt

SEQ ID NO: 29215 - DNA, 22 bp, Artificial Sequence
  chemically synthesized
ccattggtctaagtgtctgttc

SEQ ID NO: 29216 - DNA, 22 bp, Artificial Sequence
  chemically synthesized
cattggtctaagtgtctgttct

SEQ ID NO: 29217 - DNA, 22 bp, Artificial Sequence
  chemically synthesized
gtctaagtgtctgttctaatgt

SEQ ID NO: 29218 - DNA, 22 bp, Artificial Sequence
  chemically synthesized
agtgtctgttctaatgtcagta

SEQ ID NO: 29219 - DNA, 22 bp, Artificial Sequence
  chemically synthesized
ttctaatgtcagtatcatgctg

SEQ ID NO: 29220 - DNA, 22 bp, Artificial Sequence
  chemically synthesized
taatgtcagtatcatgctgttt

SEQ ID NO: 29221 - DNA, 22 bp, Artificial Sequence
  chemically synthesized
atgtcagtatcatgctgtttag

SEQ ID NO: 29222 - DNA, 22 bp, Artificial Sequence
  chemically synthesized
tttaggttcctatacttttgta

SEQ ID NO: 29223 - DNA, 22 bp, Artificial Sequence
  chemically synthesized
aggttcctatacttttgtaata

SEQ ID NO: 29224 - DNA, 22 bp, Artificial Sequence
  chemically synthesized
ggttcctatacttttgtaatat

SEQ ID NO: 29225 - DNA, 22 bp, Artificial Sequence
  chemically synthesized
ctatacttttgtaatatacttt

SEQ ID NO: 29226 - DNA, 22 bp, Artificial Sequence
  chemically synthesized
tacttttgtaatatactttgaa

SEQ ID NO: 29227 - DNA, 22 bp, Artificial Sequence
  chemically synthesized
ttgtaatatactttgaaatcag

SEQ ID NO: 29228 - DNA, 22 bp, Artificial Sequence
  chemically synthesized
tgtaatatactttgaaatcagg

SEQ ID NO: 29229 - DNA, 22 bp, Artificial Sequence
  chemically synthesized
gtaatatactttgaaatcaggt

SEQ ID NO: 29230 - DNA, 22 bp, Artificial Sequence
  chemically synthesized
taatatactttgaaatcaggta

SEQ ID NO: 29231 - DNA, 22 bp, Artificial Sequence
  chemically synthesized
tgaaatcaggtagtatgatacc

SEQ ID NO: 29232 - DNA, 22 bp, Artificial Sequence
  chemically synthesized
gaaatcaggtagtatgatacct

SEQ ID NO: 29233 - DNA, 22 bp, Artificial Sequence
  chemically synthesized
aaatcaggtagtatgatacctc

SEQ ID NO: 29234 - DNA, 22 bp, Artificial Sequence
  chemically synthesized
tagcattgttcttttttcacag

SEQ ID NO: 29235 - DNA, 22 bp, Artificial Sequence
  chemically synthesized
gcattgttcttttttcacagga

SEQ ID NO: 29236 - DNA, 22 bp, Artificial Sequence
  chemically synthesized
ttcttttttcacaggatgactt

SEQ ID NO: 29237 - DNA, 22 bp, Artificial Sequence
  chemically synthesized
ttttttcacaggatgactttgg

SEQ ID NO: 29238 - DNA, 22 bp, Artificial Sequence
  chemically synthesized
ttttcacaggatgactttggct

SEQ ID NO: 29239 - DNA, 22 bp, Artificial Sequence
  chemically synthesized
tttcacaggatgactttggcta

SEQ ID NO: 29240 - DNA, 22 bp, Artificial Sequence
  chemically synthesized
ttcacaggatgactttggctac

SEQ ID NO: 29241 - DNA, 22 bp, Artificial Sequence
  chemically synthesized
tcacaggatgactttggctact

SEQ ID NO: 29242 - DNA, 22 bp, Artificial Sequence
  chemically synthesized
cacaggatgactttggctactg

SEQ ID NO: 29243 - DNA, 22 bp, Artificial Sequence
  chemically synthesized
acaggatgactttggctactgg

SEQ ID NO: 29244 - DNA, 22 bp, Artificial Sequence
  chemically synthesized
tggctactggagctatttttta

SEQ ID NO: 29245 - DNA, 22 bp, Artificial Sequence
  chemically synthesized
ggctactggagctattttttaa

SEQ ID NO: 29246 - DNA, 22 bp, Artificial Sequence
  chemically synthesized
gctactggagctattttttaat

SEQ ID NO: 29247 - DNA, 22 bp, Artificial Sequence
  chemically synthesized
ctggagctattttttaatttca

SEQ ID NO: 29248 - DNA, 22 bp, Artificial Sequence
  chemically synthesized
gagctattttttaatttcatac

SEQ ID NO: 29249 - DNA, 22 bp, Artificial Sequence
  chemically synthesized
ttttttaatttcatacaaattt

SEQ ID NO: 29250 - DNA, 22 bp, Artificial Sequence
  chemically synthesized
tttaatttcatacaaattttag

SEQ ID NO: 29251 - DNA, 22 bp, Artificial Sequence
  chemically synthesized
ttaatttcatacaaattttaga

SEQ ID NO: 29252 - DNA, 22 bp, Artificial Sequence
  chemically synthesized
taatttcatacaaattttagat

SEQ ID NO: 29253 - DNA, 22 bp, Artificial Sequence
  chemically synthesized
aatttcatacaaattttagatt

SEQ ID NO: 29254 - DNA, 22 bp, Artificial Sequence
  chemically synthesized
atttcatacaaattttagattg

SEQ ID NO: 29255 - DNA, 22 bp, Artificial Sequence
  chemically synthesized
catacaaattttagattggttt

SEQ ID NO: 29256 - DNA, 22 bp, Artificial Sequence
  chemically synthesized
atacaaattttagattggtttt

SEQ ID NO: 29257 - DNA, 22 bp, Artificial Sequence
  chemically synthesized
tagattggtttttccatttctg

SEQ ID NO: 29258 - DNA, 22 bp, Artificial Sequence
  chemically synthesized
agattggtttttccatttctgt

SEQ ID NO: 29259 - DNA, 22 bp, Artificial Sequence
  chemically synthesized
gattggtttttccatttctgtg

SEQ ID NO: 29260 - DNA, 22 bp, Artificial Sequence
  chemically synthesized
gtttttccatttctgtgaaaaa

SEQ ID NO: 29261 - DNA, 22 bp, Artificial Sequence
  chemically synthesized
ttccatttctgtgaaaaatgac

SEQ ID NO: 29262 - DNA, 22 bp, Artificial Sequence
  chemically synthesized
tccatttctgtgaaaaatgaca

SEQ ID NO: 29263 - DNA, 22 bp, Artificial Sequence
  chemically synthesized
ccatttctgtgaaaaatgacat

SEQ ID NO: 29264 - DNA, 22 bp, Artificial Sequence
  chemically synthesized
catttctgtgaaaaatgacatt

SEQ ID NO: 29265 - DNA, 22 bp, Artificial Sequence
  chemically synthesized
ctgtgaaaaatgacattgctat

SEQ ID NO: 29266 - DNA, 22 bp, Artificial Sequence
  chemically synthesized
tgtgaaaaatgacattgctatt

SEQ ID NO: 29267 - DNA, 22 bp, Artificial Sequence
  chemically synthesized
tgaaaaatgacattgctatttt

SEQ ID NO: 29268 - DNA, 22 bp, Artificial Sequence
  chemically synthesized
ctattttgatagcggtcatata

SEQ ID NO: 29269 - DNA, 22 bp, Artificial Sequence
  chemically synthesized
ttttgatagcggtcatatagaa

SEQ ID NO: 29270 - DNA, 22 bp, Artificial Sequence
  chemically synthesized
tgatagcggtcatatagaatct

SEQ ID NO: 29271 - DNA, 22 bp, Artificial Sequence
  chemically synthesized
gatagcggtcatatagaatctg

SEQ ID NO: 29272 - DNA, 22 bp, Artificial Sequence
  chemically synthesized
atagcggtcatatagaatctgt

SEQ ID NO: 29273 - DNA, 22 bp, Artificial Sequence
  chemically synthesized
tagattgctttgggtagtatgg

SEQ ID NO: 29274 - DNA, 22 bp, Artificial Sequence
  chemically synthesized
ctttgggtagtatggccatttt

SEQ ID NO: 29275 - DNA, 22 bp, Artificial Sequence
  chemically synthesized
tgggtagtatggccattttaac

SEQ ID NO: 29276 - DNA, 22 bp, Artificial Sequence
  chemically synthesized
gggtagtatggccattttaaca

SEQ ID NO: 29277 - DNA, 22 bp, Artificial Sequence
  chemically synthesized
ggtagtatggccattttaacaa

SEQ ID NO: 29278 - DNA, 22 bp, Artificial Sequence
  chemically synthesized
taacaatattaatttttctgat

SEQ ID NO: 29279 - DNA, 22 bp, Artificial Sequence
  chemically synthesized
aacaatattaatttttctgatc

SEQ ID NO: 29280 - DNA, 22 bp, Artificial Sequence
  chemically synthesized
acaatattaatttttctgatcc

SEQ ID NO: 29281 - DNA, 22 bp, Artificial Sequence
  chemically synthesized
atttttctgatccatgaacata

SEQ ID NO: 29282 - DNA, 22 bp, Artificial Sequence
  chemically synthesized
ttctgatccatgaacataggat

SEQ ID NO: 29283 - DNA, 22 bp, Artificial Sequence
  chemically synthesized
tctgatccatgaacataggata

SEQ ID NO: 29284 - DNA, 22 bp, Artificial Sequence
  chemically synthesized
ctgatccatgaacataggatat

SEQ ID NO: 29285 - DNA, 22 bp, Artificial Sequence
  chemically synthesized
tgatccatgaacataggatatc

SEQ ID NO: 29286 - DNA, 22 bp, Artificial Sequence
  chemically synthesized
atccatgaacataggatatctc

SEQ ID NO: 29287 - DNA, 22 bp, Artificial Sequence
  chemically synthesized
tccatttgtttctgtccttttc

SEQ ID NO: 29288 - DNA, 22 bp, Artificial Sequence
  chemically synthesized
catttgtttctgtccttttcaa

SEQ ID NO: 29289 - DNA, 22 bp, Artificial Sequence
  chemically synthesized
gtttctgtccttttcaattctt

SEQ ID NO: 29290 - DNA, 22 bp, Artificial Sequence
  chemically synthesized
tttctgtccttttcaattcttt

SEQ ID NO: 29291 - DNA, 22 bp, Artificial Sequence
  chemically synthesized
ctgtccttttcaattcttttat

SEQ ID NO: 29292 - DNA, 22 bp, Artificial Sequence
  chemically synthesized
tgtccttttcaattcttttatc

SEQ ID NO: 29293 - DNA, 22 bp, Artificial Sequence
  chemically synthesized
tccttttcaattcttttatcag

SEQ ID NO: 29294 - DNA, 22 bp, Artificial Sequence
  chemically synthesized
ttcaattcttttatcagtgttt

SEQ ID NO: 29295 - DNA, 22 bp, Artificial Sequence
  chemically synthesized
tcaattcttttatcagtgtttt

SEQ ID NO: 29296 - DNA, 22 bp, Artificial Sequence
  chemically synthesized
caattcttttatcagtgttttg

SEQ ID NO: 29297 - DNA, 22 bp, Artificial Sequence
  chemically synthesized
aattcttttatcagtgttttgt

SEQ ID NO: 29298 - DNA, 22 bp, Artificial Sequence
  chemically synthesized
ttttatcagtgttttgtagttt

SEQ ID NO: 29299 - DNA, 22 bp, Artificial Sequence
  chemically synthesized
ttatcagtgttttgtagttttc

SEQ ID NO: 29300 - DNA, 22 bp, Artificial Sequence
  chemically synthesized
tatcagtgttttgtagttttcc

SEQ ID NO: 29301 - DNA, 22 bp, Artificial Sequence
  chemically synthesized
atcagtgttttgtagttttccg

SEQ ID NO: 29302 - DNA, 22 bp, Artificial Sequence
  chemically synthesized
tcagtgttttgtagttttccga

SEQ ID NO: 29303 - DNA, 22 bp, Artificial Sequence
  chemically synthesized
tgtagttttccgaatagaggtt

SEQ ID NO: 29304 - DNA, 22 bp, Artificial Sequence
  chemically synthesized
gtagttttccgaatagaggttt

SEQ ID NO: 29305 - DNA, 22 bp, Artificial Sequence
  chemically synthesized
tagttttccgaatagaggtttt

SEQ ID NO: 29306 - DNA, 22 bp, Artificial Sequence
  chemically synthesized
tccgaatagaggtttttcggtt

SEQ ID NO: 29307 - DNA, 22 bp, Artificial Sequence
  chemically synthesized
ccgaatagaggtttttcggttc

SEQ ID NO: 29308 - DNA, 22 bp, Artificial Sequence
  chemically synthesized
cgaatagaggtttttcggttcc

SEQ ID NO: 29309 - DNA, 22 bp, Artificial Sequence
  chemically synthesized
ttcggttccttggttaaattta

SEQ ID NO: 29310 - DNA, 22 bp, Artificial Sequence
  chemically synthesized
tcggttccttggttaaatttat

SEQ ID NO: 29311 - DNA, 22 bp, Artificial Sequence
  chemically synthesized
cggttccttggttaaatttatc

SEQ ID NO: 29312 - DNA, 22 bp, Artificial Sequence
  chemically synthesized
ggttccttggttaaatttatcc

SEQ ID NO: 29313 - DNA, 22 bp, Artificial Sequence
  chemically synthesized
cttggttaaatttatccctaaa

SEQ ID NO: 29314 - DNA, 22 bp, Artificial Sequence
  chemically synthesized
ggttaaatttatccctaaatat

SEQ ID NO: 29315 - DNA, 22 bp, Artificial Sequence
  chemically synthesized
gttaaatttatccctaaatatt

SEQ ID NO: 29316 - DNA, 22 bp, Artificial Sequence
  chemically synthesized
aatttatccctaaatattttat

SEQ ID NO: 29317 - DNA, 22 bp, Artificial Sequence
  chemically synthesized
atccctaaatattttatttttt

SEQ ID NO: 29318 - DNA, 22 bp, Artificial Sequence
  chemically synthesized
tccctaaatattttatttttta

SEQ ID NO: 29319 - DNA, 22 bp, Artificial Sequence
  chemically synthesized
aatattttattttttagctatt

SEQ ID NO: 29320 - DNA, 22 bp, Artificial Sequence
  chemically synthesized
tattttttagctattgtaaatg

SEQ ID NO: 29321 - DNA, 22 bp, Artificial Sequence
  chemically synthesized
attttttagctattgtaaatgg

SEQ ID NO: 29322 - DNA, 22 bp, Artificial Sequence
  chemically synthesized
ttttttagctattgtaaatggg

SEQ ID NO: 29323 - DNA, 22 bp, Artificial Sequence
  chemically synthesized
tttagctattgtaaatgggatt

SEQ ID NO: 29324 - DNA, 22 bp, Artificial Sequence
  chemically synthesized
ttagctattgtaaatgggattg

SEQ ID NO: 29325 - DNA, 22 bp, Artificial Sequence
  chemically synthesized
tagctattgtaaatgggattgc

SEQ ID NO: 29326 - DNA, 22 bp, Artificial Sequence
  chemically synthesized
agctattgtaaatgggattgcc

SEQ ID NO: 29327 - DNA, 22 bp, Artificial Sequence
  chemically synthesized
gctattgtaaatgggattgcct

SEQ ID NO: 29328 - DNA, 22 bp, Artificial Sequence
  chemically synthesized
ttgtaaatgggattgccttctt

SEQ ID NO: 29329 - DNA, 22 bp, Artificial Sequence
  chemically synthesized
taaatgggattgccttcttaat

SEQ ID NO: 29330 - DNA, 22 bp, Artificial Sequence
  chemically synthesized
ccttcttaatttccttctcagc

SEQ ID NO: 29331 - DNA, 22 bp, Artificial Sequence
  chemically synthesized
cttaatttccttctcagctagt

SEQ ID NO: 29332 - DNA, 22 bp, Artificial Sequence
  chemically synthesized
ttaatttccttctcagctagtt

SEQ ID NO: 29333 - DNA, 22 bp, Artificial Sequence
  chemically synthesized
aatttccttctcagctagttta

SEQ ID NO: 29334 - DNA, 22 bp, Artificial Sequence
  chemically synthesized
atttccttctcagctagtttat

SEQ ID NO: 29335 - DNA, 22 bp, Artificial Sequence
  chemically synthesized
ccttctcagctagtttattatt

SEQ ID NO: 29336 - DNA, 22 bp, Artificial Sequence
  chemically synthesized
cttctcagctagtttattattg

SEQ ID NO: 29337 - DNA, 22 bp, Artificial Sequence
  chemically synthesized
ctcagctagtttattattggtg

SEQ ID NO: 29338 - DNA, 22 bp, Artificial Sequence
  chemically synthesized
tcagctagtttattattggtgt

SEQ ID NO: 29339 - DNA, 22 bp, Artificial Sequence
  chemically synthesized
agctagtttattattggtgtgt

SEQ ID NO: 29340 - DNA, 22 bp, Artificial Sequence
  chemically synthesized
gtttattattggtgtgtagaaa

SEQ ID NO: 29341 - DNA, 22 bp, Artificial Sequence
  chemically synthesized
attattggtgtgtagaaacatt

SEQ ID NO: 29342 - DNA, 22 bp, Artificial Sequence
  chemically synthesized
ttattggtgtgtagaaacattg

SEQ ID NO: 29343 - DNA, 22 bp, Artificial Sequence
  chemically synthesized
ttggtgtgtagaaacattgctt

SEQ ID NO: 29344 - DNA, 22 bp, Artificial Sequence
  chemically synthesized
gtgtgtagaaacattgcttgtt

SEQ ID NO: 29345 - DNA, 22 bp, Artificial Sequence
  chemically synthesized
cttgtttcatatgctgattttg

SEQ ID NO: 29346 - DNA, 22 bp, Artificial Sequence
  chemically synthesized
gtttcatatgctgattttgtct

SEQ ID NO: 29347 - DNA, 22 bp, Artificial Sequence
  chemically synthesized
tttcatatgctgattttgtctc

SEQ ID NO: 29348 - DNA, 22 bp, Artificial Sequence
  chemically synthesized
catatgctgattttgtctcctg

SEQ ID NO: 29349 - DNA, 22 bp, Artificial Sequence
  chemically synthesized
atatgctgattttgtctcctgt

SEQ ID NO: 29350 - DNA, 22 bp, Artificial Sequence
  chemically synthesized
attttgtctcctgtaactttac

SEQ ID NO: 29351 - DNA, 22 bp, Artificial Sequence
  chemically synthesized
tgtctcctgtaactttactgaa

SEQ ID NO: 29352 - DNA, 22 bp, Artificial Sequence
  chemically synthesized
gtctcctgtaactttactgaat

SEQ ID NO: 29353 - DNA, 22 bp, Artificial Sequence
  chemically synthesized
tctcctgtaactttactgaatt

SEQ ID NO: 29354 - DNA, 22 bp, Artificial Sequence
  chemically synthesized
ctgtaactttactgaatttatt

SEQ ID NO: 29355 - DNA, 22 bp, Artificial Sequence
  chemically synthesized
taactttactgaatttattttt

SEQ ID NO: 29356 - DNA, 22 bp, Artificial Sequence
  chemically synthesized
tactgaatttatttttcagcgc

SEQ ID NO: 29357 - DNA, 22 bp, Artificial Sequence
  chemically synthesized
actgaatttatttttcagcgct

SEQ ID NO: 29358 - DNA, 22 bp, Artificial Sequence
  chemically synthesized
ctgaatttatttttcagcgcta

SEQ ID NO: 29359 - DNA, 22 bp, Artificial Sequence
  chemically synthesized
aatttatttttcagcgctaaga

SEQ ID NO: 29360 - DNA, 22 bp, Artificial Sequence
  chemically synthesized
atttttcagcgctaagagtgct

SEQ ID NO: 29361 - DNA, 22 bp, Artificial Sequence
  chemically synthesized
tttttcagcgctaagagtgctt

SEQ ID NO: 29362 - DNA, 22 bp, Artificial Sequence
  chemically synthesized
ttcagcgctaagagtgctttgg

SEQ ID NO: 29363 - DNA, 22 bp, Artificial Sequence
  chemically synthesized
tcagcgctaagagtgctttggt

SEQ ID NO: 29364 - DNA, 22 bp, Artificial Sequence
  chemically synthesized
cagcgctaagagtgctttggtg

SEQ ID NO: 29365 - DNA, 22 bp, Artificial Sequence
  chemically synthesized
agcgctaagagtgctttggtgg

SEQ ID NO: 29366 - DNA, 22 bp, Artificial Sequence
  chemically synthesized
agagtgctttggtggagtcttg

SEQ ID NO: 29367 - DNA, 22 bp, Artificial Sequence
  chemically synthesized
tggtggagtcttggtttttcta

SEQ ID NO: 29368 - DNA, 22 bp, Artificial Sequence
  chemically synthesized
ggtggagtcttggtttttctag

SEQ ID NO: 29369 - DNA, 22 bp, Artificial Sequence
  chemically synthesized
gtggagtcttggtttttctagg

SEQ ID NO: 29370 - DNA, 22 bp, Artificial Sequence
  chemically synthesized
ggtttttctaggtataaaatca

SEQ ID NO: 29371 - DNA, 22 bp, Artificial Sequence
  chemically synthesized
gtttttctaggtataaaatcat

SEQ ID NO: 29372 - DNA, 22 bp, Artificial Sequence
  chemically synthesized
ttctaggtataaaatcatgtca

SEQ ID NO: 29373 - DNA, 22 bp, Artificial Sequence
  chemically synthesized
tctaggtataaaatcatgtcat

SEQ ID NO: 29374 - DNA, 22 bp, Artificial Sequence
  chemically synthesized
ctaggtataaaatcatgtcatc

SEQ ID NO: 29375 - DNA, 22 bp, Artificial Sequence
  chemically synthesized
taggtataaaatcatgtcatct

SEQ ID NO: 29376 - DNA, 22 bp, Artificial Sequence
  chemically synthesized
ggtataaaatcatgtcatctgg

SEQ ID NO: 29377 - DNA, 22 bp, Artificial Sequence
  chemically synthesized
gaaagatggacagtttgacttc

SEQ ID NO: 29378 - DNA, 22 bp, Artificial Sequence
  chemically synthesized
gacttcatcttttcctatttgc

SEQ ID NO: 29379 - DNA, 22 bp, Artificial Sequence
  chemically synthesized
acttcatcttttcctatttgca

SEQ ID NO: 29380 - DNA, 22 bp, Artificial Sequence
  chemically synthesized
catcttttcctatttgcatgcc

SEQ ID NO: 29381 - DNA, 22 bp, Artificial Sequence
  chemically synthesized
atcttttcctatttgcatgcct

SEQ ID NO: 29382 - DNA, 22 bp, Artificial Sequence
  chemically synthesized
ttcctatttgcatgccttttct

SEQ ID NO: 29383 - DNA, 22 bp, Artificial Sequence
  chemically synthesized
tcctatttgcatgccttttctt

SEQ ID NO: 29384 - DNA, 22 bp, Artificial Sequence
  chemically synthesized
cctatttgcatgccttttcttt

SEQ ID NO: 29385 - DNA, 22 bp, Artificial Sequence
  chemically synthesized
ctatttgcatgccttttctttc

SEQ ID NO: 29386 - DNA, 22 bp, Artificial Sequence
  chemically synthesized
tttgcatgccttttctttcttt

SEQ ID NO: 29387 - DNA, 22 bp, Artificial Sequence
  chemically synthesized
gcatgccttttctttctttctt

SEQ ID NO: 29388 - DNA, 22 bp, Artificial Sequence
  chemically synthesized
catgccttttctttctttcttt

SEQ ID NO: 29389 - DNA, 22 bp, Artificial Sequence
  chemically synthesized
ttctttctttctttctctgacc

SEQ ID NO: 29390 - DNA, 22 bp, Artificial Sequence
  chemically synthesized
tctttctttctttctctgacct

SEQ ID NO: 29391 - DNA, 22 bp, Artificial Sequence
  chemically synthesized
ctttctttctttctctgacctg

SEQ ID NO: 29392 - DNA, 22 bp, Artificial Sequence
  chemically synthesized
tttctttctttctctgacctga

SEQ ID NO: 29393 - DNA, 22 bp, Artificial Sequence
  chemically synthesized
tctttctttctctgacctgaaa

SEQ ID NO: 29394 - DNA, 22 bp, Artificial Sequence
  chemically synthesized
ctttctttctctgacctgaaag

SEQ ID NO: 29395 - DNA, 22 bp, Artificial Sequence
  chemically synthesized
tttctttctctgacctgaaagc

SEQ ID NO: 29396 - DNA, 22 bp, Artificial Sequence
  chemically synthesized
tctttctctgacctgaaagctg

SEQ ID NO: 29397 - DNA, 22 bp, Artificial Sequence
  chemically synthesized
ctttctctgacctgaaagctgt

SEQ ID NO: 29398 - DNA, 22 bp, Artificial Sequence
  chemically synthesized
tttctctgacctgaaagctgtg

SEQ ID NO: 29399 - DNA, 22 bp, Artificial Sequence
  chemically synthesized
tctctgacctgaaagctgtggc

SEQ ID NO: 29400 - DNA, 22 bp, Artificial Sequence
  chemically synthesized
ctctgacctgaaagctgtggct

SEQ ID NO: 29401 - DNA, 22 bp, Artificial Sequence
  chemically synthesized
tctgacctgaaagctgtggcta

SEQ ID NO: 29402 - DNA, 22 bp, Artificial Sequence
  chemically synthesized
tgacctgaaagctgtggctagg

SEQ ID NO: 29403 - DNA, 22 bp, Artificial Sequence
  chemically synthesized
acctgaaagctgtggctaggac

SEQ ID NO: 29404 - DNA, 22 bp, Artificial Sequence
  chemically synthesized
aaagctgtggctaggacttcca

SEQ ID NO: 29405 - DNA, 22 bp, Artificial Sequence
  chemically synthesized
tggctaggacttccagtattat

SEQ ID NO: 29406 - DNA, 22 bp, Artificial Sequence
  chemically synthesized
ggacttccagtattatattgaa

SEQ ID NO: 29407 - DNA, 22 bp, Artificial Sequence
  chemically synthesized
ccagtattatattgaataggag

SEQ ID NO: 29408 - DNA, 22 bp, Artificial Sequence
  chemically synthesized
cagtattatattgaataggagt

SEQ ID NO: 29409 - DNA, 22 bp, Artificial Sequence
  chemically synthesized
tattgaataggagtgatggaag

SEQ ID NO: 29410 - DNA, 22 bp, Artificial Sequence
  chemically synthesized
aataggagtgatggaagtgggc

SEQ ID NO: 29411 - DNA, 22 bp, Artificial Sequence
  chemically synthesized
attttgtttcagttcttagagg

SEQ ID NO: 29412 - DNA, 22 bp, Artificial Sequence
  chemically synthesized
ttttgtttcagttcttagagga

SEQ ID NO: 29413 - DNA, 22 bp, Artificial Sequence
  chemically synthesized
tgtttcagttcttagaggaaag

SEQ ID NO: 29414 - DNA, 22 bp, Artificial Sequence
  chemically synthesized
gtttcagttcttagaggaaagg

SEQ ID NO: 29415 - DNA, 22 bp, Artificial Sequence
  chemically synthesized
tttcagttcttagaggaaaggc

SEQ ID NO: 29416 - DNA, 22 bp, Artificial Sequence
  chemically synthesized
cagttcttagaggaaaggcttc

SEQ ID NO: 29417 - DNA, 22 bp, Artificial Sequence
  chemically synthesized
agttcttagaggaaaggcttcc

SEQ ID NO: 29418 - DNA, 22 bp, Artificial Sequence
  chemically synthesized
ttagaggaaaggcttccagctt

SEQ ID NO: 29419 - DNA, 22 bp, Artificial Sequence
  chemically synthesized
agaggaaaggcttccagctttt

SEQ ID NO: 29420 - DNA, 22 bp, Artificial Sequence
  chemically synthesized
gaggaaaggcttccagcttttc

SEQ ID NO: 29421 - DNA, 22 bp, Artificial Sequence
  chemically synthesized
ccagcttttcccaattcagtat

SEQ ID NO: 29422 - DNA, 22 bp, Artificial Sequence
  chemically synthesized
cagcttttcccaattcagtatg

SEQ ID NO: 29423 - DNA, 22 bp, Artificial Sequence
  chemically synthesized
ttcccaattcagtatgatgtta

SEQ ID NO: 29424 - DNA, 22 bp, Artificial Sequence
  chemically synthesized
tcccaattcagtatgatgttag

SEQ ID NO: 29425 - DNA, 22 bp, Artificial Sequence
  chemically synthesized
cccaattcagtatgatgttagc

SEQ ID NO: 29426 - DNA, 22 bp, Artificial Sequence
  chemically synthesized
ccaattcagtatgatgttagct

SEQ ID NO: 29427 - DNA, 22 bp, Artificial Sequence
  chemically synthesized
agtatgatgttagctgtgggtt

SEQ ID NO: 29428 - DNA, 22 bp, Artificial Sequence
  chemically synthesized
gctgtgggtttgtcatatatga

SEQ ID NO: 29429 - DNA, 22 bp, Artificial Sequence
  chemically synthesized
tgggtttgtcatatatgacttt

SEQ ID NO: 29430 - DNA, 22 bp, Artificial Sequence
  chemically synthesized
gtcatatatgacttttattata

SEQ ID NO: 29431 - DNA, 22 bp, Artificial Sequence
  chemically synthesized
tcatatatgacttttattatat

SEQ ID NO: 29432 - DNA, 22 bp, Artificial Sequence
  chemically synthesized
ttattatattgagatatgttcc

SEQ ID NO: 29433 - DNA, 22 bp, Artificial Sequence
  chemically synthesized
tattatattgagatatgttcct

SEQ ID NO: 29434 - DNA, 22 bp, Artificial Sequence
  chemically synthesized
attatattgagatatgttcctt

SEQ ID NO: 29435 - DNA, 22 bp, Artificial Sequence
  chemically synthesized
ttatattgagatatgttccttc

SEQ ID NO: 29436 - DNA, 22 bp, Artificial Sequence
  chemically synthesized
tattgagatatgttccttctat

SEQ ID NO: 29437 - DNA, 22 bp, Artificial Sequence
  chemically synthesized
agatatgttccttctatgattg

SEQ ID NO: 29438 - DNA, 22 bp, Artificial Sequence
  chemically synthesized
cttctatgattggctgcagata

SEQ ID NO: 29439 - DNA, 22 bp, Artificial Sequence
  chemically synthesized
ctatgattggctgcagatagtt

SEQ ID NO: 29440 - DNA, 22 bp, Artificial Sequence
  chemically synthesized
tatgattggctgcagatagttt

SEQ ID NO: 29441 - DNA, 22 bp, Artificial Sequence
  chemically synthesized
tgattggctgcagatagttttt

SEQ ID NO: 29442 - DNA, 22 bp, Artificial Sequence
  chemically synthesized
gctgcagatagtttttatcatg

SEQ ID NO: 29443 - DNA, 22 bp, Artificial Sequence
  chemically synthesized
cagatagtttttatcatgaagg

SEQ ID NO: 29444 - DNA, 22 bp, Artificial Sequence
  chemically synthesized
ttatcatgaaggaatgttaaat

SEQ ID NO: 29445 - DNA, 22 bp, Artificial Sequence
  chemically synthesized
tatcatgaaggaatgttaaatt

SEQ ID NO: 29446 - DNA, 22 bp, Artificial Sequence
  chemically synthesized
atcatgaaggaatgttaaattt

SEQ ID NO: 29447 - DNA, 22 bp, Artificial Sequence
  chemically synthesized
tcatgaaggaatgttaaatttt

SEQ ID NO: 29448 - DNA, 22 bp, Artificial Sequence
  chemically synthesized
aattttatcaaatactttttct

SEQ ID NO: 29449 - DNA, 22 bp, Artificial Sequence
  chemically synthesized
tatcaaatactttttctgtatc

SEQ ID NO: 29450 - DNA, 22 bp, Artificial Sequence
  chemically synthesized
atcaaatactttttctgtatct

SEQ ID NO: 29451 - DNA, 22 bp, Artificial Sequence
  chemically synthesized
tcaaatactttttctgtatcta

SEQ ID NO: 29452 - DNA, 22 bp, Artificial Sequence
  chemically synthesized
tttctgtatctattgagatgat

SEQ ID NO: 29453 - DNA, 22 bp, Artificial Sequence
  chemically synthesized
ttctgtatctattgagatgatc

SEQ ID NO: 29454 - DNA, 22 bp, Artificial Sequence
  chemically synthesized
tctgtatctattgagatgatca

SEQ ID NO: 29455 - DNA, 22 bp, Artificial Sequence
  chemically synthesized
ctgtatctattgagatgatcat

SEQ ID NO: 29456 - DNA, 22 bp, Artificial Sequence
  chemically synthesized
tgtatctattgagatgatcata

SEQ ID NO: 29457 - DNA, 22 bp, Artificial Sequence
  chemically synthesized
tatctattgagatgatcatatg

SEQ ID NO: 29458 - DNA, 22 bp, Artificial Sequence
  chemically synthesized
ttgagatgatcatatggttttt

SEQ ID NO: 29459 - DNA, 22 bp, Artificial Sequence
  chemically synthesized
agatgatcatatggtttttgtt

SEQ ID NO: 29460 - DNA, 22 bp, Artificial Sequence
  chemically synthesized
ttgttctttttgttgatgtgat

SEQ ID NO: 29461 - DNA, 22 bp, Artificial Sequence
  chemically synthesized
tgttctttttgttgatgtgatg

SEQ ID NO: 29462 - DNA, 22 bp, Artificial Sequence
  chemically synthesized
gttctttttgttgatgtgatgt

SEQ ID NO: 29463 - DNA, 22 bp, Artificial Sequence
  chemically synthesized
ttctttttgttgatgtgatgta

SEQ ID NO: 29464 - DNA, 22 bp, Artificial Sequence
  chemically synthesized
tttttgttgatgtgatgtatca

SEQ ID NO: 29465 - DNA, 22 bp, Artificial Sequence
  chemically synthesized
tttgttgatgtgatgtatcaca

SEQ ID NO: 29466 - DNA, 22 bp, Artificial Sequence
  chemically synthesized
ttgttgatgtgatgtatcacat

SEQ ID NO: 29467 - DNA, 22 bp, Artificial Sequence
  chemically synthesized
tgttgatgtgatgtatcacatt

SEQ ID NO: 29468 - DNA, 22 bp, Artificial Sequence
  chemically synthesized
gttgatgtgatgtatcacattt

SEQ ID NO: 29469 - DNA, 22 bp, Artificial Sequence
  chemically synthesized
ttgatgtgatgtatcacattta

SEQ ID NO: 29470 - DNA, 22 bp, Artificial Sequence
  chemically synthesized
atgtgatgtatcacatttattg

SEQ ID NO: 29471 - DNA, 22 bp, Artificial Sequence
  chemically synthesized
attgatttgaactgttcttgca

SEQ ID NO: 29472 - DNA, 22 bp, Artificial Sequence
  chemically synthesized
ttgatttgaactgttcttgcaa

SEQ ID NO: 29473 - DNA, 22 bp, Artificial Sequence
  chemically synthesized
atttgaactgttcttgcaaccc

SEQ ID NO: 29474 - DNA, 22 bp, Artificial Sequence
  chemically synthesized
gaactgttcttgcaaccctagt

SEQ ID NO: 29475 - DNA, 22 bp, Artificial Sequence
  chemically synthesized
aactgttcttgcaaccctagta

SEQ ID NO: 29476 - DNA, 22 bp, Artificial Sequence
  chemically synthesized
ttcttgcaaccctagtataaat

SEQ ID NO: 29477 - DNA, 22 bp, Artificial Sequence
  chemically synthesized
ttgcaaccctagtataaatccc

SEQ ID NO: 29478 - DNA, 22 bp, Artificial Sequence
  chemically synthesized
gcaaccctagtataaatcccac

SEQ ID NO: 29479 - DNA, 22 bp, Artificial Sequence
  chemically synthesized
caaccctagtataaatcccact

SEQ ID NO: 29480 - DNA, 22 bp, Artificial Sequence
  chemically synthesized
gtataaatcccacttgatcatg

SEQ ID NO: 29481 - DNA, 22 bp, Artificial Sequence
  chemically synthesized
gatcatggtgtattatcttttg

SEQ ID NO: 29482 - DNA, 22 bp, Artificial Sequence
  chemically synthesized
atcatggtgtattatcttttgg

SEQ ID NO: 29483 - DNA, 22 bp, Artificial Sequence
  chemically synthesized
tcttttggatgtactgttggat

SEQ ID NO: 29484 - DNA, 22 bp, Artificial Sequence
  chemically synthesized
ttggatgtactgttggattcag

SEQ ID NO: 29485 - DNA, 22 bp, Artificial Sequence
  chemically synthesized
tggatgtactgttggattcagt

SEQ ID NO: 29486 - DNA, 22 bp, Artificial Sequence
  chemically synthesized
ggatgtactgttggattcagtt

SEQ ID NO: 29487 - DNA, 22 bp, Artificial Sequence
  chemically synthesized
gatgtactgttggattcagttt

SEQ ID NO: 29488 - DNA, 22 bp, Artificial Sequence
  chemically synthesized
ttggattcagtttgctagtatt

SEQ ID NO: 29489 - DNA, 22 bp, Artificial Sequence
  chemically synthesized
gattcagtttgctagtattttg

SEQ ID NO: 29490 - DNA, 22 bp, Artificial Sequence
  chemically synthesized
agtttgctagtattttgttgag

SEQ ID NO: 29491 - DNA, 22 bp, Artificial Sequence
  chemically synthesized
gctagtattttgttgaggattt

SEQ ID NO: 29492 - DNA, 22 bp, Artificial Sequence
  chemically synthesized
ctagtattttgttgaggatttt

SEQ ID NO: 29493 - DNA, 22 bp, Artificial Sequence
  chemically synthesized
gtattttgttgaggattttcac

SEQ ID NO: 29494 - DNA, 22 bp, Artificial Sequence
  chemically synthesized
tgttgaggattttcacacctat

SEQ ID NO: 29495 - DNA, 22 bp, Artificial Sequence
  chemically synthesized
gttgaggattttcacacctatg

SEQ ID NO: 29496 - DNA, 22 bp, Artificial Sequence
  chemically synthesized
ttgaggattttcacacctatgt

SEQ ID NO: 29497 - DNA, 22 bp, Artificial Sequence
  chemically synthesized
aggattttcacacctatgttcc

SEQ ID NO: 29498 - DNA, 22 bp, Artificial Sequence
  chemically synthesized
tcacacctatgttccatcaggg

SEQ ID NO: 29499 - DNA, 22 bp, Artificial Sequence
  chemically synthesized
cacacctatgttccatcaggga

SEQ ID NO: 29500 - DNA, 22 bp, Artificial Sequence
  chemically synthesized
acacctatgttccatcagggat

SEQ ID NO: 29501 - DNA, 22 bp, Artificial Sequence
  chemically synthesized
tgttccatcagggatattgacc

SEQ ID NO: 29502 - DNA, 22 bp, Artificial Sequence
  chemically synthesized
catcagggatattgacctgcag

SEQ ID NO: 29503 - DNA, 22 bp, Artificial Sequence
  chemically synthesized
acctgcagttttatttttactt

SEQ ID NO: 29504 - DNA, 22 bp, Artificial Sequence
  chemically synthesized
cagttttatttttacttgcatc

SEQ ID NO: 29505 - DNA, 22 bp, Artificial Sequence
  chemically synthesized
tatttttacttgcatccttgtc

SEQ ID NO: 29506 - DNA, 22 bp, Artificial Sequence
  chemically synthesized
atttttacttgcatccttgtct

SEQ ID NO: 29507 - DNA, 22 bp, Artificial Sequence
  chemically synthesized
tttttacttgcatccttgtctg

SEQ ID NO: 29508 - DNA, 22 bp, Artificial Sequence
  chemically synthesized
ttacttgcatccttgtctggtt

SEQ ID NO: 29509 - DNA, 22 bp, Artificial Sequence
  chemically synthesized
tacttgcatccttgtctggtta

SEQ ID NO: 29510 - DNA, 22 bp, Artificial Sequence
  chemically synthesized
acttgcatccttgtctggttat

SEQ ID NO: 29511 - DNA, 22 bp, Artificial Sequence
  chemically synthesized
cttgcatccttgtctggttatg

SEQ ID NO: 29512 - DNA, 22 bp, Artificial Sequence
  chemically synthesized
gcatccttgtctggttatggaa

SEQ ID NO: 29513 - DNA, 22 bp, Artificial Sequence
  chemically synthesized
catccttgtctggttatggaat

SEQ ID NO: 29514 - DNA, 22 bp, Artificial Sequence
  chemically synthesized
gtctggttatggaatcaggata

SEQ ID NO: 29515 - DNA, 22 bp, Artificial Sequence
  chemically synthesized
tctggttatggaatcaggataa

SEQ ID NO: 29516 - DNA, 22 bp, Artificial Sequence
  chemically synthesized
gttatggaatcaggataatact

SEQ ID NO: 29517 - DNA, 22 bp, Artificial Sequence
  chemically synthesized
tggaatcaggataatactggcc

SEQ ID NO: 29518 - DNA, 22 bp, Artificial Sequence
  chemically synthesized
gcctcagagaatgagttaggga

SEQ ID NO: 29519 - DNA, 22 bp, Artificial Sequence
  chemically synthesized
agagaatgagttagggagaatt

SEQ ID NO: 29520 - DNA, 22 bp, Artificial Sequence
  chemically synthesized
gggagaattccttcctgtttaa

SEQ ID NO: 29521 - DNA, 22 bp, Artificial Sequence
  chemically synthesized
cttcctgtttaatttttaaaag

SEQ ID NO: 29522 - DNA, 22 bp, Artificial Sequence
  chemically synthesized
cctgtttaatttttaaaagaat

SEQ ID NO: 29523 - DNA, 22 bp, Artificial Sequence
  chemically synthesized
ctgtttaatttttaaaagaatt

SEQ ID NO: 29524 - DNA, 22 bp, Artificial Sequence
  chemically synthesized
tttaatttttaaaagaatttaa

SEQ ID NO: 29525 - DNA, 22 bp, Artificial Sequence
  chemically synthesized
aatttttaaaagaatttaagga

SEQ ID NO: 29526 - DNA, 22 bp, Artificial Sequence
  chemically synthesized
atttttaaaagaatttaaggag

SEQ ID NO: 29527 - DNA, 22 bp, Artificial Sequence
  chemically synthesized
ttaaaagaatttaaggagactt

SEQ ID NO: 29528 - DNA, 22 bp, Artificial Sequence
  chemically synthesized
taaaagaatttaaggagacttg

SEQ ID NO: 29529 - DNA, 22 bp, Artificial Sequence
  chemically synthesized
aaaagaatttaaggagacttgt

SEQ ID NO: 29530 - DNA, 22 bp, Artificial Sequence
  chemically synthesized
aaagaatttaaggagacttgtt

SEQ ID NO: 29531 - DNA, 22 bp, Artificial Sequence
  chemically synthesized
aaggagacttgttagttttctt

SEQ ID NO: 29532 - DNA, 22 bp, Artificial Sequence
  chemically synthesized
aggagacttgttagttttcttt

SEQ ID NO: 29533 - DNA, 22 bp, Artificial Sequence
  chemically synthesized
gttagttttctttgaaagtttg

SEQ ID NO: 29534 - DNA, 22 bp, Artificial Sequence
  chemically synthesized
ttagttttctttgaaagtttgg

SEQ ID NO: 29535 - DNA, 22 bp, Artificial Sequence
  chemically synthesized
gttttctttgaaagtttggtaa

SEQ ID NO: 29536 - DNA, 22 bp, Artificial Sequence
  chemically synthesized
tctttgaaagtttggtaaaatt

SEQ ID NO: 29537 - DNA, 22 bp, Artificial Sequence
  chemically synthesized
ctttgaaagtttggtaaaattt

SEQ ID NO: 29538 - DNA, 22 bp, Artificial Sequence
  chemically synthesized
tttgaaagtttggtaaaatttg

SEQ ID NO: 29539 - DNA, 22 bp, Artificial Sequence
  chemically synthesized
tgaaagtttggtaaaatttgac

SEQ ID NO: 29540 - DNA, 22 bp, Artificial Sequence
  chemically synthesized
gaaagtttggtaaaatttgaca

SEQ ID NO: 29541 - DNA, 22 bp, Artificial Sequence
  chemically synthesized
aaagtttggtaaaatttgacag

SEQ ID NO: 29542 - DNA, 22 bp, Artificial Sequence
  chemically synthesized
ggtaaaatttgacagtaaagcc

SEQ ID NO: 29543 - DNA, 22 bp, Artificial Sequence
  chemically synthesized
gtaaaatttgacagtaaagcca

SEQ ID NO: 29544 - DNA, 22 bp, Artificial Sequence
  chemically synthesized
gacagtaaagccatctggtctt

SEQ ID NO: 29545 - DNA, 22 bp, Artificial Sequence
  chemically synthesized
acagtaaagccatctggtcttg

SEQ ID NO: 29546 - DNA, 22 bp, Artificial Sequence
  chemically synthesized
gtcttgaaattttcttttttgg

SEQ ID NO: 29547 - DNA, 22 bp, Artificial Sequence
  chemically synthesized
gaaattttcttttttgggagac

SEQ ID NO: 29548 - DNA, 22 bp, Artificial Sequence
  chemically synthesized
aaattttcttttttgggagact

SEQ ID NO: 29549 - DNA, 22 bp, Artificial Sequence
  chemically synthesized
tcttttttgggagactttttac

SEQ ID NO: 29550 - DNA, 22 bp, Artificial Sequence
  chemically synthesized
cttttttgggagactttttact

SEQ ID NO: 29551 - DNA, 22 bp, Artificial Sequence
  chemically synthesized
ttttttgggagactttttacta

SEQ ID NO: 29552 - DNA, 22 bp, Artificial Sequence
  chemically synthesized
ttttgggagactttttactact

SEQ ID NO: 29553 - DNA, 22 bp, Artificial Sequence
  chemically synthesized
tttgggagactttttactactg

SEQ ID NO: 29554 - DNA, 22 bp, Artificial Sequence
  chemically synthesized
ttgggagactttttactactga

SEQ ID NO: 29555 - DNA, 22 bp, Artificial Sequence
  chemically synthesized
tgggagactttttactactgat

SEQ ID NO: 29556 - DNA, 22 bp, Artificial Sequence
  chemically synthesized
gggagactttttactactgatt

SEQ ID NO: 29557 - DNA, 22 bp, Artificial Sequence
  chemically synthesized
ggagactttttactactgattc

SEQ ID NO: 29558 - DNA, 22 bp, Artificial Sequence
  chemically synthesized
tttactactgattcaatttcat

SEQ ID NO: 29559 - DNA, 22 bp, Artificial Sequence
  chemically synthesized
ttactactgattcaatttcatt

SEQ ID NO: 29560 - DNA, 22 bp, Artificial Sequence
  chemically synthesized
tactactgattcaatttcatta

SEQ ID NO: 29561 - DNA, 22 bp, Artificial Sequence
  chemically synthesized
actactgattcaatttcattat

SEQ ID NO: 29562 - DNA, 22 bp, Artificial Sequence
  chemically synthesized
ctactgattcaatttcattatt

SEQ ID NO: 29563 - DNA, 22 bp, Artificial Sequence
  chemically synthesized
ctgattcaatttcattattcat

SEQ ID NO: 29564 - DNA, 22 bp, Artificial Sequence
  chemically synthesized
attcaatttcattattcattac

SEQ ID NO: 29565 - DNA, 22 bp, Artificial Sequence
  chemically synthesized
aatttcattattcattactggt

SEQ ID NO: 29566 - DNA, 22 bp, Artificial Sequence
  chemically synthesized
cattattcattactggtctgtt

SEQ ID NO: 29567 - DNA, 22 bp, Artificial Sequence
  chemically synthesized
attattcattactggtctgttc

SEQ ID NO: 29568 - DNA, 22 bp, Artificial Sequence
  chemically synthesized
ttcattactggtctgttcaggt

SEQ ID NO: 29569 - DNA, 22 bp, Artificial Sequence
  chemically synthesized
attactggtctgttcaggtttt

SEQ ID NO: 29570 - DNA, 22 bp, Artificial Sequence
  chemically synthesized
ctggtctgttcaggttttctat

SEQ ID NO: 29571 - DNA, 22 bp, Artificial Sequence
  chemically synthesized
gtctgttcaggttttctattct

SEQ ID NO: 29572 - DNA, 22 bp, Artificial Sequence
  chemically synthesized
ttcaggttttctattctttctt

SEQ ID NO: 29573 - DNA, 22 bp, Artificial Sequence
  chemically synthesized
aggttttctattctttcttaat

SEQ ID NO: 29574 - DNA, 22 bp, Artificial Sequence
  chemically synthesized
tctattctttcttaattcaatc

SEQ ID NO: 29575 - DNA, 22 bp, Artificial Sequence
  chemically synthesized
ctattctttcttaattcaatct

SEQ ID NO: 29576 - DNA, 22 bp, Artificial Sequence
  chemically synthesized
tattctttcttaattcaatctt

SEQ ID NO: 29577 - DNA, 22 bp, Artificial Sequence
  chemically synthesized
ttctttcttaattcaatcttgg

SEQ ID NO: 29578 - DNA, 22 bp, Artificial Sequence
  chemically synthesized
tttcttaattcaatcttggtag

SEQ ID NO: 29579 - DNA, 22 bp, Artificial Sequence
  chemically synthesized
tcttaattcaatcttggtaggt

SEQ ID NO: 29580 - DNA, 22 bp, Artificial Sequence
  chemically synthesized
cttaattcaatcttggtaggtg

SEQ ID NO: 29581 - DNA, 22 bp, Artificial Sequence
  chemically synthesized
ttaattcaatcttggtaggtgg

SEQ ID NO: 29582 - DNA, 22 bp, Artificial Sequence
  chemically synthesized
aattcaatcttggtaggtggta

SEQ ID NO: 29583 - DNA, 22 bp, Artificial Sequence
  chemically synthesized
attcaatcttggtaggtggtat

SEQ ID NO: 29584 - DNA, 22 bp, Artificial Sequence
  chemically synthesized
aatcttggtaggtggtatgtgt

SEQ ID NO: 29585 - DNA, 22 bp, Artificial Sequence
  chemically synthesized
ggtaggtggtatgtgtccagaa

SEQ ID NO: 29586 - DNA, 22 bp, Artificial Sequence
  chemically synthesized
gtaggtggtatgtgtccagaaa

SEQ ID NO: 29587 - DNA, 22 bp, Artificial Sequence
  chemically synthesized
attaatttcctctagatttttc

SEQ ID NO: 29588 - DNA, 22 bp, Artificial Sequence
  chemically synthesized
ttaatttcctctagatttttca

SEQ ID NO: 29589 - DNA, 22 bp, Artificial Sequence
  chemically synthesized
atttcctctagatttttcagtt

SEQ ID NO: 29590 - DNA, 22 bp, Artificial Sequence
  chemically synthesized
cctctagatttttcagtttttt

SEQ ID NO: 29591 - DNA, 22 bp, Artificial Sequence
  chemically synthesized
ctctagatttttcagtttttta

SEQ ID NO: 29592 - DNA, 22 bp, Artificial Sequence
  chemically synthesized
tagatttttcagttttttagtg

SEQ ID NO: 29593 - DNA, 22 bp, Artificial Sequence
  chemically synthesized
gatttttcagttttttagtgta

SEQ ID NO: 29594 - DNA, 22 bp, Artificial Sequence
  chemically synthesized
ttcagttttttagtgtatggtt

SEQ ID NO: 29595 - DNA, 22 bp, Artificial Sequence
  chemically synthesized
tcagttttttagtgtatggttg

SEQ ID NO: 29596 - DNA, 22 bp, Artificial Sequence
  chemically synthesized
cagttttttagtgtatggttgt

SEQ ID NO: 29597 - DNA, 22 bp, Artificial Sequence
  chemically synthesized
agttttttagtgtatggttgtt

SEQ ID NO: 29598 - DNA, 22 bp, Artificial Sequence
  chemically synthesized
tttagtgtatggttgttcataa

SEQ ID NO: 29599 - DNA, 22 bp, Artificial Sequence
  chemically synthesized
ttagtgtatggttgttcataat

SEQ ID NO: 29600 - DNA, 22 bp, Artificial Sequence
  chemically synthesized
tagtgtatggttgttcataata

SEQ ID NO: 29601 - DNA, 22 bp, Artificial Sequence
  chemically synthesized
agtgtatggttgttcataatag

SEQ ID NO: 29602 - DNA, 22 bp, Artificial Sequence
  chemically synthesized
gtgtatggttgttcataatagt

SEQ ID NO: 29603 - DNA, 22 bp, Artificial Sequence
  chemically synthesized
ttcataatagtctctgataatc

SEQ ID NO: 29604 - DNA, 22 bp, Artificial Sequence
  chemically synthesized
ataatagtctctgataatcttt

SEQ ID NO: 29605 - DNA, 22 bp, Artificial Sequence
  chemically synthesized
tgataatcttttctatttctgt

SEQ ID NO: 29606 - DNA, 22 bp, Artificial Sequence
  chemically synthesized
ataatcttttctatttctgtgg

SEQ ID NO: 29607 - DNA, 22 bp, Artificial Sequence
  chemically synthesized
ttctatttctgtggtatcggtt

SEQ ID NO: 29608 - DNA, 22 bp, Artificial Sequence
  chemically synthesized
tctatttctgtggtatcggttg

SEQ ID NO: 29609 - DNA, 22 bp, Artificial Sequence
  chemically synthesized
ctatttctgtggtatcggttgt

SEQ ID NO: 29610 - DNA, 22 bp, Artificial Sequence
  chemically synthesized
tatttctgtggtatcggttgta

SEQ ID NO: 29611 - DNA, 22 bp, Artificial Sequence
  chemically synthesized
tttctgtggtatcggttgtaat

SEQ ID NO: 29612 - DNA, 22 bp, Artificial Sequence
  chemically synthesized
ctgtggtatcggttgtaatata

SEQ ID NO: 29613 - DNA, 22 bp, Artificial Sequence
  chemically synthesized
tgtggtatcggttgtaatatat

SEQ ID NO: 29614 - DNA, 22 bp, Artificial Sequence
  chemically synthesized
tggtatcggttgtaatatattt

SEQ ID NO: 29615 - DNA, 22 bp, Artificial Sequence
  chemically synthesized
taatatattttcttttttattt

SEQ ID NO: 29616 - DNA, 22 bp, Artificial Sequence
  chemically synthesized
tcttttttatttctgattttct

SEQ ID NO: 29617 - DNA, 22 bp, Artificial Sequence
  chemically synthesized
cttttttatttctgattttctt

SEQ ID NO: 29618 - DNA, 22 bp, Artificial Sequence
  chemically synthesized
ttttttatttctgattttcttt

SEQ ID NO: 29619 - DNA, 22 bp, Artificial Sequence
  chemically synthesized
ttttatttctgattttctttat

SEQ ID NO: 29620 - DNA, 22 bp, Artificial Sequence
  chemically synthesized
tttatttctgattttctttatt

SEQ ID NO: 29621 - DNA, 22 bp, Artificial Sequence
  chemically synthesized
ttatttctgattttctttattt

SEQ ID NO: 29622 - DNA, 22 bp, Artificial Sequence
  chemically synthesized
tatttctgattttctttatttc

SEQ ID NO: 29623 - DNA, 22 bp, Artificial Sequence
  chemically synthesized
atttctgattttctttatttca

SEQ ID NO: 29624 - DNA, 22 bp, Artificial Sequence
  chemically synthesized
tttctgattttctttatttcag

SEQ ID NO: 29625 - DNA, 22 bp, Artificial Sequence
  chemically synthesized
ctgattttctttatttcagtct

SEQ ID NO: 29626 - DNA, 22 bp, Artificial Sequence
  chemically synthesized
tgattttctttatttcagtctc

SEQ ID NO: 29627 - DNA, 22 bp, Artificial Sequence
  chemically synthesized
attttctttatttcagtctctt

SEQ ID NO: 29628 - DNA, 22 bp, Artificial Sequence
  chemically synthesized
tctttatttcagtctcttctct

SEQ ID NO: 29629 - DNA, 22 bp, Artificial Sequence
  chemically synthesized
ctttatttcagtctcttctctt

SEQ ID NO: 29630 - DNA, 22 bp, Artificial Sequence
  chemically synthesized
tttatttcagtctcttctcttt

SEQ ID NO: 29631 - DNA, 22 bp, Artificial Sequence
  chemically synthesized
tatttcagtctcttctcttttt

SEQ ID NO: 29632 - DNA, 22 bp, Artificial Sequence
  chemically synthesized
atttcagtctcttctctttttc

SEQ ID NO: 29633 - DNA, 22 bp, Artificial Sequence
  chemically synthesized
tttcagtctcttctctttttct

SEQ ID NO: 29634 - DNA, 22 bp, Artificial Sequence
  chemically synthesized
cagtctcttctctttttcttgg

SEQ ID NO: 29635 - DNA, 22 bp, Artificial Sequence
  chemically synthesized
agtctcttctctttttcttggt

SEQ ID NO: 29636 - DNA, 22 bp, Artificial Sequence
  chemically synthesized
ttctctttttcttggttagtct

SEQ ID NO: 29637 - DNA, 22 bp, Artificial Sequence
  chemically synthesized
ctctttttcttggttagtctag

SEQ ID NO: 29638 - DNA, 22 bp, Artificial Sequence
  chemically synthesized
tctttttcttggttagtctagc

SEQ ID NO: 29639 - DNA, 22 bp, Artificial Sequence
  chemically synthesized
tttttcttggttagtctagcta

SEQ ID NO: 29640 - DNA, 22 bp, Artificial Sequence
  chemically synthesized
tttcttggttagtctagctaga

SEQ ID NO: 29641 - DNA, 22 bp, Artificial Sequence
  chemically synthesized
ttcttggttagtctagctagag

SEQ ID NO: 29642 - DNA, 22 bp, Artificial Sequence
  chemically synthesized
tcttggttagtctagctagagc

SEQ ID NO: 29643 - DNA, 22 bp, Artificial Sequence
  chemically synthesized
cttggttagtctagctagagct

SEQ ID NO: 29644 - DNA, 22 bp, Artificial Sequence
  chemically synthesized
ttggttagtctagctagagcta

SEQ ID NO: 29645 - DNA, 22 bp, Artificial Sequence
  chemically synthesized
ggttagtctagctagagctata

SEQ ID NO: 29646 - DNA, 22 bp, Artificial Sequence
  chemically synthesized
gttagtctagctagagctatat

SEQ ID NO: 29647 - DNA, 22 bp, Artificial Sequence
  chemically synthesized
gtctagctagagctatatccat

SEQ ID NO: 29648 - DNA, 22 bp, Artificial Sequence
  chemically synthesized
gctagagctatatccattttat

SEQ ID NO: 29649 - DNA, 22 bp, Artificial Sequence
  chemically synthesized
gagctatatccattttatcttt

SEQ ID NO: 29650 - DNA, 22 bp, Artificial Sequence
  chemically synthesized
tatccattttatcttttttaaa

SEQ ID NO: 29651 - DNA, 22 bp, Artificial Sequence
  chemically synthesized
tatcttttttaaataacaactt

SEQ ID NO: 29652 - DNA, 22 bp, Artificial Sequence
  chemically synthesized
atcttttttaaataacaacttt

SEQ ID NO: 29653 - DNA, 22 bp, Artificial Sequence
  chemically synthesized
tcttttttaaataacaactttt

SEQ ID NO: 29654 - DNA, 22 bp, Artificial Sequence
  chemically synthesized
ttttaaataacaacttttcatt

SEQ ID NO: 29655 - DNA, 22 bp, Artificial Sequence
  chemically synthesized
tttaaataacaacttttcattt

SEQ ID NO: 29656 - DNA, 22 bp, Artificial Sequence
  chemically synthesized
ttaaataacaacttttcatttt

SEQ ID NO: 29657 - DNA, 22 bp, Artificial Sequence
  chemically synthesized
taaataacaacttttcattttg

SEQ ID NO: 29658 - DNA, 22 bp, Artificial Sequence
  chemically synthesized
aaataacaacttttcattttgc

SEQ ID NO: 29659 - DNA, 22 bp, Artificial Sequence
  chemically synthesized
aataacaacttttcattttgct

SEQ ID NO: 29660 - DNA, 22 bp, Artificial Sequence
  chemically synthesized
ttcattttgctaatcccttgtt

SEQ ID NO: 29661 - DNA, 22 bp, Artificial Sequence
  chemically synthesized
tcattttgctaatcccttgttg

SEQ ID NO: 29662 - DNA, 22 bp, Artificial Sequence
  chemically synthesized
cattttgctaatcccttgttgt

SEQ ID NO: 29663 - DNA, 22 bp, Artificial Sequence
  chemically synthesized
attttgctaatcccttgttgtt

SEQ ID NO: 29664 - DNA, 22 bp, Artificial Sequence
  chemically synthesized
tgctaatcccttgttgttgttt

SEQ ID NO: 29665 - DNA, 22 bp, Artificial Sequence
  chemically synthesized
gctaatcccttgttgttgtttt

SEQ ID NO: 29666 - DNA, 22 bp, Artificial Sequence
  chemically synthesized
ctaatcccttgttgttgttttt

SEQ ID NO: 29667 - DNA, 22 bp, Artificial Sequence
  chemically synthesized
atcccttgttgttgtttttctc

SEQ ID NO: 29668 - DNA, 22 bp, Artificial Sequence
  chemically synthesized
gttgttgtttttctctatttca

SEQ ID NO: 29669 - DNA, 22 bp, Artificial Sequence
  chemically synthesized
ttgttgtttttctctatttcat

SEQ ID NO: 29670 - DNA, 22 bp, Artificial Sequence
  chemically synthesized
ttgtttttctctatttcattaa

SEQ ID NO: 29671 - DNA, 22 bp, Artificial Sequence
  chemically synthesized
tttttctctatttcattaagtt

SEQ ID NO: 29672 - DNA, 22 bp, Artificial Sequence
  chemically synthesized
ttctctatttcattaagttctt

SEQ ID NO: 29673 - DNA, 22 bp, Artificial Sequence
  chemically synthesized
tctctatttcattaagttcttc

SEQ ID NO: 29674 - DNA, 22 bp, Artificial Sequence
  chemically synthesized
ctctatttcattaagttcttct

SEQ ID NO: 29675 - DNA, 22 bp, Artificial Sequence
  chemically synthesized
tctatttcattaagttcttctg

SEQ ID NO: 29676 - DNA, 22 bp, Artificial Sequence
  chemically synthesized
tatttcattaagttcttctgtt

SEQ ID NO: 29677 - DNA, 22 bp, Artificial Sequence
  chemically synthesized
tttcattaagttcttctgttct

SEQ ID NO: 29678 - DNA, 22 bp, Artificial Sequence
  chemically synthesized
cattaagttcttctgttcttca

SEQ ID NO: 29679 - DNA, 22 bp, Artificial Sequence
  chemically synthesized
attaagttcttctgttcttcat

SEQ ID NO: 29680 - DNA, 22 bp, Artificial Sequence
  chemically synthesized
agttcttctgttcttcattttt

SEQ ID NO: 29681 - DNA, 22 bp, Artificial Sequence
  chemically synthesized
ttctgttcttcattttttcttt

SEQ ID NO: 29682 - DNA, 22 bp, Artificial Sequence
  chemically synthesized
ctgttcttcattttttctttcc

SEQ ID NO: 29683 - DNA, 22 bp, Artificial Sequence
  chemically synthesized
tgttcttcattttttctttcct

SEQ ID NO: 29684 - DNA, 22 bp, Artificial Sequence
  chemically synthesized
ttcttcattttttctttccttc

SEQ ID NO: 29685 - DNA, 22 bp, Artificial Sequence
  chemically synthesized
ttcattttttctttccttctgc

SEQ ID NO: 29686 - DNA, 22 bp, Artificial Sequence
  chemically synthesized
cattttttctttccttctgcta

SEQ ID NO: 29687 - DNA, 22 bp, Artificial Sequence
  chemically synthesized
attttttctttccttctgctag

SEQ ID NO: 29688 - DNA, 22 bp, Artificial Sequence
  chemically synthesized
tttctttccttctgctagtttt

SEQ ID NO: 29689 - DNA, 22 bp, Artificial Sequence
  chemically synthesized
ttctttccttctgctagttttg

SEQ ID NO: 29690 - DNA, 22 bp, Artificial Sequence
  chemically synthesized
tctttccttctgctagttttgg

SEQ ID NO: 29691 - DNA, 22 bp, Artificial Sequence
  chemically synthesized
ctttccttctgctagttttggg

SEQ ID NO: 29692 - DNA, 22 bp, Artificial Sequence
  chemically synthesized
tttccttctgctagttttgggt

SEQ ID NO: 29693 - DNA, 22 bp, Artificial Sequence
  chemically synthesized
tccttctgctagttttgggttt

SEQ ID NO: 29694 - DNA, 22 bp, Artificial Sequence
  chemically synthesized
ccttctgctagttttgggtttt

SEQ ID NO: 29695 - DNA, 22 bp, Artificial Sequence
  chemically synthesized
cttctgctagttttgggttttg

SEQ ID NO: 29696 - DNA, 22 bp, Artificial Sequence
  chemically synthesized
ctgctagttttgggttttgttc

SEQ ID NO: 29697 - DNA, 22 bp, Artificial Sequence
  chemically synthesized
tgctagttttgggttttgttct

SEQ ID NO: 29698 - DNA, 22 bp, Artificial Sequence
  chemically synthesized
ctagttttgggttttgttcttg

SEQ ID NO: 29699 - DNA, 22 bp, Artificial Sequence
  chemically synthesized
gttttgggttttgttcttgctt

SEQ ID NO: 29700 - DNA, 22 bp, Artificial Sequence
  chemically synthesized
tgggttttgttcttgcttttct

SEQ ID NO: 29701 - DNA, 22 bp, Artificial Sequence
  chemically synthesized
gggttttgttcttgcttttcta

SEQ ID NO: 29702 - DNA, 22 bp, Artificial Sequence
  chemically synthesized
ggttttgttcttgcttttctag

SEQ ID NO: 29703 - DNA, 22 bp, Artificial Sequence
  chemically synthesized
tgttcttgcttttctagcttgt

SEQ ID NO: 29704 - DNA, 22 bp, Artificial Sequence
  chemically synthesized
gttcttgcttttctagcttgtt

SEQ ID NO: 29705 - DNA, 22 bp, Artificial Sequence
  chemically synthesized
ttcttgcttttctagcttgttg

SEQ ID NO: 29706 - DNA, 22 bp, Artificial Sequence
  chemically synthesized
ttgcttttctagcttgttgagg

SEQ ID NO: 29707 - DNA, 22 bp, Artificial Sequence
  chemically synthesized
gcttttctagcttgttgaggta

SEQ ID NO: 29708 - DNA, 22 bp, Artificial Sequence
  chemically synthesized
cttttctagcttgttgaggtac

SEQ ID NO: 29709 - DNA, 22 bp, Artificial Sequence
  chemically synthesized
ttctagcttgttgaggtacatg

SEQ ID NO: 29710 - DNA, 22 bp, Artificial Sequence
  chemically synthesized
tctagcttgttgaggtacatga

SEQ ID NO: 29711 - DNA, 22 bp, Artificial Sequence
  chemically synthesized
ctagcttgttgaggtacatgat

SEQ ID NO: 29712 - DNA, 22 bp, Artificial Sequence
  chemically synthesized
tagcttgttgaggtacatgatt

SEQ ID NO: 29713 - DNA, 22 bp, Artificial Sequence
  chemically synthesized
gcttgttgaggtacatgattag

SEQ ID NO: 29714 - DNA, 22 bp, Artificial Sequence
  chemically synthesized
gttgaggtacatgattagatta

SEQ ID NO: 29715 - DNA, 22 bp, Artificial Sequence
  chemically synthesized
ttgaggtacatgattagattat

SEQ ID NO: 29716 - DNA, 22 bp, Artificial Sequence
  chemically synthesized
aggtacatgattagattatata

SEQ ID NO: 29717 - DNA, 22 bp, Artificial Sequence
  chemically synthesized
gattatatatttgaaatctttc

SEQ ID NO: 29718 - DNA, 22 bp, Artificial Sequence
  chemically synthesized
tatatttgaaatctttctatgt

SEQ ID NO: 29719 - DNA, 22 bp, Artificial Sequence
  chemically synthesized
gaaatctttctatgtttttaat

SEQ ID NO: 29720 - DNA, 22 bp, Artificial Sequence
  chemically synthesized
aaatctttctatgtttttaatt

SEQ ID NO: 29721 - DNA, 22 bp, Artificial Sequence
  chemically synthesized
tctatgtttttaatttaagtgt

SEQ ID NO: 29722 - DNA, 22 bp, Artificial Sequence
  chemically synthesized
ctatgtttttaatttaagtgtt

SEQ ID NO: 29723 - DNA, 22 bp, Artificial Sequence
  chemically synthesized
tatgtttttaatttaagtgttt

SEQ ID NO: 29724 - DNA, 22 bp, Artificial Sequence
  chemically synthesized
tgtttttaatttaagtgtttat

SEQ ID NO: 29725 - DNA, 22 bp, Artificial Sequence
  chemically synthesized
ttaatttaagtgtttattgata

SEQ ID NO: 29726 - DNA, 22 bp, Artificial Sequence
  chemically synthesized
taatttaagtgtttattgataa

SEQ ID NO: 29727 - DNA, 22 bp, Artificial Sequence
  chemically synthesized
aatttaagtgtttattgataag

SEQ ID NO: 29728 - DNA, 22 bp, Artificial Sequence
  chemically synthesized
atttaagtgtttattgataagc

SEQ ID NO: 29729 - DNA, 22 bp, Artificial Sequence
  chemically synthesized
aagtgtttattgataagcttct

SEQ ID NO: 29730 - DNA, 22 bp, Artificial Sequence
  chemically synthesized
agtgtttattgataagcttctc

SEQ ID NO: 29731 - DNA, 22 bp, Artificial Sequence
  chemically synthesized
attgataagcttctctcttagc

SEQ ID NO: 29732 - DNA, 22 bp, Artificial Sequence
  chemically synthesized
ttgataagcttctctcttagca

SEQ ID NO: 29733 - DNA, 22 bp, Artificial Sequence
  chemically synthesized
ataagcttctctcttagcactg

SEQ ID NO: 29734 - DNA, 22 bp, Artificial Sequence
  chemically synthesized
ctctcttagcactgcttttgct

SEQ ID NO: 29735 - DNA, 22 bp, Artificial Sequence
  chemically synthesized
tctcttagcactgcttttgctg

SEQ ID NO: 29736 - DNA, 22 bp, Artificial Sequence
  chemically synthesized
tcttagcactgcttttgctgta

SEQ ID NO: 29737 - DNA, 22 bp, Artificial Sequence
  chemically synthesized
ttagcactgcttttgctgtatc

SEQ ID NO: 29738 - DNA, 22 bp, Artificial Sequence
  chemically synthesized
agcactgcttttgctgtatccc

SEQ ID NO: 29739 - DNA, 22 bp, Artificial Sequence
  chemically synthesized
gcactgcttttgctgtatccca

SEQ ID NO: 29740 - DNA, 22 bp, Artificial Sequence
  chemically synthesized
cttttgctgtatcccatggctt

SEQ ID NO: 29741 - DNA, 22 bp, Artificial Sequence
  chemically synthesized
ttgctgtatcccatggcttttc

SEQ ID NO: 29742 - DNA, 22 bp, Artificial Sequence
  chemically synthesized
tgctgtatcccatggcttttcc

SEQ ID NO: 29743 - DNA, 22 bp, Artificial Sequence
  chemically synthesized
gctgtatcccatggcttttcct

SEQ ID NO: 29744 - DNA, 22 bp, Artificial Sequence
  chemically synthesized
ctgtatcccatggcttttccta

SEQ ID NO: 29745 - DNA, 22 bp, Artificial Sequence
  chemically synthesized
tatcccatggcttttcctatgt

SEQ ID NO: 29746 - DNA, 22 bp, Artificial Sequence
  chemically synthesized
ttcctatgttgtatttcaattt

SEQ ID NO: 29747 - DNA, 22 bp, Artificial Sequence
  chemically synthesized
tcctatgttgtatttcaatttt

SEQ ID NO: 29748 - DNA, 22 bp, Artificial Sequence
  chemically synthesized
cctatgttgtatttcaattttc

SEQ ID NO: 29749 - DNA, 22 bp, Artificial Sequence
  chemically synthesized
ctatgttgtatttcaattttca

SEQ ID NO: 29750 - DNA, 22 bp, Artificial Sequence
  chemically synthesized
tgttgtatttcaattttcattt

SEQ ID NO: 29751 - DNA, 22 bp, Artificial Sequence
  chemically synthesized
tatttcaattttcatttgtttc

SEQ ID NO: 29752 - DNA, 22 bp, Artificial Sequence
  chemically synthesized
caattttcatttgtttcaaaaa

SEQ ID NO: 29753 - DNA, 22 bp, Artificial Sequence
  chemically synthesized
aattttcatttgtttcaaaaaa

SEQ ID NO: 29754 - DNA, 22 bp, Artificial Sequence
  chemically synthesized
tcatttgtttcaaaaaattttt

SEQ ID NO: 29755 - DNA, 22 bp, Artificial Sequence
  chemically synthesized
catttgtttcaaaaaatttttg

SEQ ID NO: 29756 - DNA, 22 bp, Artificial Sequence
  chemically synthesized
atttgtttcaaaaaatttttga

SEQ ID NO: 29757 - DNA, 22 bp, Artificial Sequence
  chemically synthesized
gtttcaaaaaatttttgatttc

SEQ ID NO: 29758 - DNA, 22 bp, Artificial Sequence
  chemically synthesized
tttcaaaaaatttttgatttcc

SEQ ID NO: 29759 - DNA, 22 bp, Artificial Sequence
  chemically synthesized
caaaaaatttttgatttccttc

SEQ ID NO: 29760 - DNA, 22 bp, Artificial Sequence
  chemically synthesized
aaaaaatttttgatttccttct

SEQ ID NO: 29761 - DNA, 22 bp, Artificial Sequence
  chemically synthesized
ttgatttccttcttaattttct

SEQ ID NO: 29762 - DNA, 22 bp, Artificial Sequence
  chemically synthesized
tgatttccttcttaattttctt

SEQ ID NO: 29763 - DNA, 22 bp, Artificial Sequence
  chemically synthesized
gatttccttcttaattttcttc

SEQ ID NO: 29764 - DNA, 22 bp, Artificial Sequence
  chemically synthesized
atttccttcttaattttcttct

SEQ ID NO: 29765 - DNA, 22 bp, Artificial Sequence
  chemically synthesized
ccttcttaattttcttcttgac

SEQ ID NO: 29766 - DNA, 22 bp, Artificial Sequence
  chemically synthesized
cttcttaattttcttcttgaca

SEQ ID NO: 29767 - DNA, 22 bp, Artificial Sequence
  chemically synthesized
cttaattttcttcttgacataa

SEQ ID NO: 29768 - DNA, 22 bp, Artificial Sequence
  chemically synthesized
ttaattttcttcttgacataac

SEQ ID NO: 29769 - DNA, 22 bp, Artificial Sequence
  chemically synthesized
aattttcttcttgacataacgt

SEQ ID NO: 29770 - DNA, 22 bp, Artificial Sequence
  chemically synthesized
attttcttcttgacataacgtt

SEQ ID NO: 29771 - DNA, 22 bp, Artificial Sequence
  chemically synthesized
tcttcttgacataacgttcatt

SEQ ID NO: 29772 - DNA, 22 bp, Artificial Sequence
  chemically synthesized
cttcttgacataacgttcattc

SEQ ID NO: 29773 - DNA, 22 bp, Artificial Sequence
  chemically synthesized
ttcttgacataacgttcattca

SEQ ID NO: 29774 - DNA, 22 bp, Artificial Sequence
  chemically synthesized
cttgacataacgttcattcagg

SEQ ID NO: 29775 - DNA, 22 bp, Artificial Sequence
  chemically synthesized
ttgacataacgttcattcagga

SEQ ID NO: 29776 - DNA, 22 bp, Artificial Sequence
  chemically synthesized
gacataacgttcattcaggagc

SEQ ID NO: 29777 - DNA, 22 bp, Artificial Sequence
  chemically synthesized
acataacgttcattcaggagca

SEQ ID NO: 29778 - DNA, 22 bp, Artificial Sequence
  chemically synthesized
attcaggagcatgttgtttaat

SEQ ID NO: 29779 - DNA, 22 bp, Artificial Sequence
  chemically synthesized
aggagcatgttgtttaatttcc

SEQ ID NO: 29780 - DNA, 22 bp, Artificial Sequence
  chemically synthesized
tttaatttccatgtatttgtat

SEQ ID NO: 29781 - DNA, 22 bp, Artificial Sequence
  chemically synthesized
aatttccatgtatttgtatagg

SEQ ID NO: 29782 - DNA, 22 bp, Artificial Sequence
  chemically synthesized
atttccatgtatttgtataggt

SEQ ID NO: 29783 - DNA, 22 bp, Artificial Sequence
  chemically synthesized
ccatgtatttgtataggtttta

SEQ ID NO: 29784 - DNA, 22 bp, Artificial Sequence
  chemically synthesized
catgtatttgtataggttttaa

SEQ ID NO: 29785 - DNA, 22 bp, Artificial Sequence
  chemically synthesized
gtataggttttaaagtttttct

SEQ ID NO: 29786 - DNA, 22 bp, Artificial Sequence
  chemically synthesized
tataggttttaaagtttttctt

SEQ ID NO: 29787 - DNA, 22 bp, Artificial Sequence
  chemically synthesized
taaagtttttcttgttattgat

SEQ ID NO: 29788 - DNA, 22 bp, Artificial Sequence
  chemically synthesized
aaagtttttcttgttattgatt

SEQ ID NO: 29789 - DNA, 22 bp, Artificial Sequence
  chemically synthesized
aagtttttcttgttattgattt

SEQ ID NO: 29790 - DNA, 22 bp, Artificial Sequence
  chemically synthesized
ttcttgttattgatttctagtt

SEQ ID NO: 29791 - DNA, 22 bp, Artificial Sequence
  chemically synthesized
tcttgttattgatttctagttt

SEQ ID NO: 29792 - DNA, 22 bp, Artificial Sequence
  chemically synthesized
cttgttattgatttctagtttt

SEQ ID NO: 29793 - DNA, 22 bp, Artificial Sequence
  chemically synthesized
ttgttattgatttctagtttta

SEQ ID NO: 29794 - DNA, 22 bp, Artificial Sequence
  chemically synthesized
gttattgatttctagttttatt

SEQ ID NO: 29795 - DNA, 22 bp, Artificial Sequence
  chemically synthesized
ttattgatttctagttttattc

SEQ ID NO: 29796 - DNA, 22 bp, Artificial Sequence
  chemically synthesized
ttgatttctagttttattccat

SEQ ID NO: 29797 - DNA, 22 bp, Artificial Sequence
  chemically synthesized
atttctagttttattccattgt

SEQ ID NO: 29798 - DNA, 22 bp, Artificial Sequence
  chemically synthesized
ctagttttattccattgtggtc

SEQ ID NO: 29799 - DNA, 22 bp, Artificial Sequence
  chemically synthesized
tagttttattccattgtggtct

SEQ ID NO: 29800 - DNA, 22 bp, Artificial Sequence
  chemically synthesized
gttttattccattgtggtctga

SEQ ID NO: 29801 - DNA, 22 bp, Artificial Sequence
  chemically synthesized
tattccattgtggtctgagaag

SEQ ID NO: 29802 - DNA, 22 bp, Artificial Sequence
  chemically synthesized
attccattgtggtctgagaaga

SEQ ID NO: 29803 - DNA, 22 bp, Artificial Sequence
  chemically synthesized
ttccattgtggtctgagaagat

SEQ ID NO: 29804 - DNA, 22 bp, Artificial Sequence
  chemically synthesized
cattgtggtctgagaagatgct

SEQ ID NO: 29805 - DNA, 22 bp, Artificial Sequence
  chemically synthesized
tggtctgagaagatgcttaata

SEQ ID NO: 29806 - DNA, 22 bp, Artificial Sequence
  chemically synthesized
agaagatgcttaatatgatttc

SEQ ID NO: 29807 - DNA, 22 bp, Artificial Sequence
  chemically synthesized
aatatgatttcaaatatttcaa

SEQ ID NO: 29808 - DNA, 22 bp, Artificial Sequence
  chemically synthesized
atatgatttcaaatatttcaaa

SEQ ID NO: 29809 - DNA, 22 bp, Artificial Sequence
  chemically synthesized
caaatatttcaaattagttgag

SEQ ID NO: 29810 - DNA, 22 bp, Artificial Sequence
  chemically synthesized
aaatatttcaaattagttgaga

SEQ ID NO: 29811 - DNA, 22 bp, Artificial Sequence
  chemically synthesized
caaattagttgagacttctttt

SEQ ID NO: 29812 - DNA, 22 bp, Artificial Sequence
  chemically synthesized
aaattagttgagacttcttttg

SEQ ID NO: 29813 - DNA, 22 bp, Artificial Sequence
  chemically synthesized
gttgagacttcttttgtgttct

SEQ ID NO: 29814 - DNA, 22 bp, Artificial Sequence
  chemically synthesized
agacttcttttgtgttctaaca

SEQ ID NO: 29815 - DNA, 22 bp, Artificial Sequence
  chemically synthesized
cttttgtgttctaacatatggt

SEQ ID NO: 29816 - DNA, 22 bp, Artificial Sequence
  chemically synthesized
ttttgtgttctaacatatggtg

SEQ ID NO: 29817 - DNA, 22 bp, Artificial Sequence
  chemically synthesized
ttgtgttctaacatatggtgta

SEQ ID NO: 29818 - DNA, 22 bp, Artificial Sequence
  chemically synthesized
tgtgttctaacatatggtgtat

SEQ ID NO: 29819 - DNA, 22 bp, Artificial Sequence
  chemically synthesized
gtgttctaacatatggtgtatc

SEQ ID NO: 29820 - DNA, 22 bp, Artificial Sequence
  chemically synthesized
tgttctaacatatggtgtatcc

SEQ ID NO: 29821 - DNA, 22 bp, Artificial Sequence
  chemically synthesized
taacatatggtgtatcctgggg

SEQ ID NO: 29822 - DNA, 22 bp, Artificial Sequence
  chemically synthesized
acatatggtgtatcctggggaa

SEQ ID NO: 29823 - DNA, 22 bp, Artificial Sequence
  chemically synthesized
gggaatgcgtcatgtgctgatg

SEQ ID NO: 29824 - DNA, 22 bp, Artificial Sequence
  chemically synthesized
atgagataaatatattctgtag

SEQ ID NO: 29825 - DNA, 22 bp, Artificial Sequence
  chemically synthesized
tgtagctgttggatgaaatatt

SEQ ID NO: 29826 - DNA, 22 bp, Artificial Sequence
  chemically synthesized
tagctgttggatgaaatattgt

SEQ ID NO: 29827 - DNA, 22 bp, Artificial Sequence
  chemically synthesized
ttggatgaaatattgtgtaaat

SEQ ID NO: 29828 - DNA, 22 bp, Artificial Sequence
  chemically synthesized
gatgaaatattgtgtaaatgtt

SEQ ID NO: 29829 - DNA, 22 bp, Artificial Sequence
  chemically synthesized
tgtaaatgttagatccatttgg

SEQ ID NO: 29830 - DNA, 22 bp, Artificial Sequence
  chemically synthesized
gatccatttggtctaaagtcaa

SEQ ID NO: 29831 - DNA, 22 bp, Artificial Sequence
  chemically synthesized
ggtctaaagtcaagtttaaatc

SEQ ID NO: 29832 - DNA, 22 bp, Artificial Sequence
  chemically synthesized
gtctaaagtcaagtttaaatcc

SEQ ID NO: 29833 - DNA, 22 bp, Artificial Sequence
  chemically synthesized
aagtcaagtttaaatccaatgt

SEQ ID NO: 29834 - DNA, 22 bp, Artificial Sequence
  chemically synthesized
aaatccaatgtttctttgttaa

SEQ ID NO: 29835 - DNA, 22 bp, Artificial Sequence
  chemically synthesized
aatccaatgtttctttgttaat

SEQ ID NO: 29836 - DNA, 22 bp, Artificial Sequence
  chemically synthesized
ctttgttaattttctgtctaga

SEQ ID NO: 29837 - DNA, 22 bp, Artificial Sequence
  chemically synthesized
tttgttaattttctgtctagat

SEQ ID NO: 29838 - DNA, 22 bp, Artificial Sequence
  chemically synthesized
tgttaattttctgtctagatga

SEQ ID NO: 29839 - DNA, 22 bp, Artificial Sequence
  chemically synthesized
gttaattttctgtctagatgat

SEQ ID NO: 29840 - DNA, 22 bp, Artificial Sequence
  chemically synthesized
ttaattttctgtctagatgatc

SEQ ID NO: 29841 - DNA, 22 bp, Artificial Sequence
  chemically synthesized
attttctgtctagatgatctat

SEQ ID NO: 29842 - DNA, 22 bp, Artificial Sequence
  chemically synthesized
tctgtctagatgatctatctga

SEQ ID NO: 29843 - DNA, 22 bp, Artificial Sequence
  chemically synthesized
ctgtctagatgatctatctgat

SEQ ID NO: 29844 - DNA, 22 bp, Artificial Sequence
  chemically synthesized
tgtctagatgatctatctgatg

SEQ ID NO: 29845 - DNA, 22 bp, Artificial Sequence
  chemically synthesized
tctagatgatctatctgatgct

SEQ ID NO: 29846 - DNA, 22 bp, Artificial Sequence
  chemically synthesized
gatgatctatctgatgctgaga

SEQ ID NO: 29847 - DNA, 22 bp, Artificial Sequence
  chemically synthesized
tctgatgctgagattagaatgt

SEQ ID NO: 29848 - DNA, 22 bp, Artificial Sequence
  chemically synthesized
atgctgagattagaatgttgaa

SEQ ID NO: 29849 - DNA, 22 bp, Artificial Sequence
  chemically synthesized
agattagaatgttgaaatcccc

SEQ ID NO: 29850 - DNA, 22 bp, Artificial Sequence
  chemically synthesized
gaatgttgaaatccccaactat

SEQ ID NO: 29851 - DNA, 22 bp, Artificial Sequence
  chemically synthesized
aaatccccaactattattgtat

SEQ ID NO: 29852 - DNA, 22 bp, Artificial Sequence
  chemically synthesized
ttattgtattggattctatttc

SEQ ID NO: 29853 - DNA, 22 bp, Artificial Sequence
  chemically synthesized
ttgtattggattctatttcacc

SEQ ID NO: 29854 - DNA, 22 bp, Artificial Sequence
  chemically synthesized
tattggattctatttcaccctt

SEQ ID NO: 29855 - DNA, 22 bp, Artificial Sequence
  chemically synthesized
gattctatttcaccctttatat

SEQ ID NO: 29856 - DNA, 22 bp, Artificial Sequence
  chemically synthesized
tatttcaccctttatatctaat

SEQ ID NO: 29857 - DNA, 22 bp, Artificial Sequence
  chemically synthesized
tttcaccctttatatctaataa

SEQ ID NO: 29858 - DNA, 22 bp, Artificial Sequence
  chemically synthesized
caccctttatatctaataacat

SEQ ID NO: 29859 - DNA, 22 bp, Artificial Sequence
  chemically synthesized
accctttatatctaataacatt

SEQ ID NO: 29860 - DNA, 22 bp, Artificial Sequence
  chemically synthesized
tatatctaataacatttgcttt

SEQ ID NO: 29861 - DNA, 22 bp, Artificial Sequence
  chemically synthesized
atatctaataacatttgcttta

SEQ ID NO: 29862 - DNA, 22 bp, Artificial Sequence
  chemically synthesized
tatctaataacatttgctttac

SEQ ID NO: 29863 - DNA, 22 bp, Artificial Sequence
  chemically synthesized
ataacatttgctttacatatct

SEQ ID NO: 29864 - DNA, 22 bp, Artificial Sequence
  chemically synthesized
gctttacatatctggatgctct

SEQ ID NO: 29865 - DNA, 22 bp, Artificial Sequence
  chemically synthesized
ctttacatatctggatgctctg

SEQ ID NO: 29866 - DNA, 22 bp, Artificial Sequence
  chemically synthesized
tacatatctggatgctctggtg

SEQ ID NO: 29867 - DNA, 22 bp, Artificial Sequence
  chemically synthesized
acatatctggatgctctggtgt

SEQ ID NO: 29868 - DNA, 22 bp, Artificial Sequence
  chemically synthesized
catatctggatgctctggtgtt

SEQ ID NO: 29869 - DNA, 22 bp, Artificial Sequence
  chemically synthesized
gatgctctggtgttgagtgtga

SEQ ID NO: 29870 - DNA, 22 bp, Artificial Sequence
  chemically synthesized
tggtgttgagtgtgaatgttta

SEQ ID NO: 29871 - DNA, 22 bp, Artificial Sequence
  chemically synthesized
gtgttgagtgtgaatgtttaga

SEQ ID NO: 29872 - DNA, 22 bp, Artificial Sequence
  chemically synthesized
agtgtgaatgtttagaattgtt

SEQ ID NO: 29873 - DNA, 22 bp, Artificial Sequence
  chemically synthesized
agaattgttatatactcttgct

SEQ ID NO: 29874 - DNA, 22 bp, Artificial Sequence
  chemically synthesized
gaattgttatatactcttgctg

SEQ ID NO: 29875 - DNA, 22 bp, Artificial Sequence
  chemically synthesized
ttatatactcttgctgaattgt

SEQ ID NO: 29876 - DNA, 22 bp, Artificial Sequence
  chemically synthesized
tatactcttgctgaattgttcc

SEQ ID NO: 29877 - DNA, 22 bp, Artificial Sequence
  chemically synthesized
ttgctgaattgttccttttatc

SEQ ID NO: 29878 - DNA, 22 bp, Artificial Sequence
  chemically synthesized
gctgaattgttccttttatcat

SEQ ID NO: 29879 - DNA, 22 bp, Artificial Sequence
  chemically synthesized
ctgaattgttccttttatcatt

SEQ ID NO: 29880 - DNA, 22 bp, Artificial Sequence
  chemically synthesized
aattgttccttttatcattatg

SEQ ID NO: 29881 - DNA, 22 bp, Artificial Sequence
  chemically synthesized
ttccttttatcattatgtaatg

SEQ ID NO: 29882 - DNA, 22 bp, Artificial Sequence
  chemically synthesized
cttttatcattatgtaatgact

SEQ ID NO: 29883 - DNA, 22 bp, Artificial Sequence
  chemically synthesized
ttatcattatgtaatgactttt

SEQ ID NO: 29884 - DNA, 22 bp, Artificial Sequence
  chemically synthesized
tatcattatgtaatgacttttg

SEQ ID NO: 29885 - DNA, 22 bp, Artificial Sequence
  chemically synthesized
atcattatgtaatgacttttgt

SEQ ID NO: 29886 - DNA, 22 bp, Artificial Sequence
  chemically synthesized
tcattatgtaatgacttttgtc

SEQ ID NO: 29887 - DNA, 22 bp, Artificial Sequence
  chemically synthesized
tgtaatgacttttgtctcttag

SEQ ID NO: 29888 - DNA, 22 bp, Artificial Sequence
  chemically synthesized
ttgtctcttagtgttttttatt

SEQ ID NO: 29889 - DNA, 22 bp, Artificial Sequence
  chemically synthesized
tgtctcttagtgttttttattt

SEQ ID NO: 29890 - DNA, 22 bp, Artificial Sequence
  chemically synthesized
gtctcttagtgttttttattta

SEQ ID NO: 29891 - DNA, 22 bp, Artificial Sequence
  chemically synthesized
tctcttagtgttttttatttaa

SEQ ID NO: 29892 - DNA, 22 bp, Artificial Sequence
  chemically synthesized
ttagtgttttttatttaaagtc

SEQ ID NO: 29893 - DNA, 22 bp, Artificial Sequence
  chemically synthesized
agtgttttttatttaaagtcaa

SEQ ID NO: 29894 - DNA, 22 bp, Artificial Sequence
  chemically synthesized
gtgttttttatttaaagtcaat

SEQ ID NO: 29895 - DNA, 22 bp, Artificial Sequence
  chemically synthesized
tttatttaaagtcaattttatc

SEQ ID NO: 29896 - DNA, 22 bp, Artificial Sequence
  chemically synthesized
ttatttaaagtcaattttatct

SEQ ID NO: 29897 - DNA, 22 bp, Artificial Sequence
  chemically synthesized
tatttaaagtcaattttatctg

SEQ ID NO: 29898 - DNA, 22 bp, Artificial Sequence
  chemically synthesized
atttaaagtcaattttatctgt

SEQ ID NO: 29899 - DNA, 22 bp, Artificial Sequence
  chemically synthesized
tttaaagtcaattttatctgtt

SEQ ID NO: 29900 - DNA, 22 bp, Artificial Sequence
  chemically synthesized
aaagtcaattttatctgttata

SEQ ID NO: 29901 - DNA, 22 bp, Artificial Sequence
  chemically synthesized
aagtcaattttatctgttatag

SEQ ID NO: 29902 - DNA, 22 bp, Artificial Sequence
  chemically synthesized
tatctgttataggtataactac

SEQ ID NO: 29903 - DNA, 22 bp, Artificial Sequence
  chemically synthesized
atctgttataggtataactact

SEQ ID NO: 29904 - DNA, 22 bp, Artificial Sequence
  chemically synthesized
tctgttataggtataactactt

SEQ ID NO: 29905 - DNA, 22 bp, Artificial Sequence
  chemically synthesized
ttataggtataactacttttgc

SEQ ID NO: 29906 - DNA, 22 bp, Artificial Sequence
  chemically synthesized
taggtataactacttttgctca

SEQ ID NO: 29907 - DNA, 22 bp, Artificial Sequence
  chemically synthesized
cttttgctcatttttggtttct

SEQ ID NO: 29908 - DNA, 22 bp, Artificial Sequence
  chemically synthesized
ttgctcatttttggtttctctt

SEQ ID NO: 29909 - DNA, 22 bp, Artificial Sequence
  chemically synthesized
tgctcatttttggtttctcttt

SEQ ID NO: 29910 - DNA, 22 bp, Artificial Sequence
  chemically synthesized
gctcatttttggtttctctttg

SEQ ID NO: 29911 - DNA, 22 bp, Artificial Sequence
  chemically synthesized
ctcatttttggtttctctttgt

SEQ ID NO: 29912 - DNA, 22 bp, Artificial Sequence
  chemically synthesized
atttttggtttctctttgtatg

SEQ ID NO: 29913 - DNA, 22 bp, Artificial Sequence
  chemically synthesized
ttggtttctctttgtatggaag

SEQ ID NO: 29914 - DNA, 22 bp, Artificial Sequence
  chemically synthesized
tggtttctctttgtatggaaga

SEQ ID NO: 29915 - DNA, 22 bp, Artificial Sequence
  chemically synthesized
ggtttctctttgtatggaagat

SEQ ID NO: 29916 - DNA, 22 bp, Artificial Sequence
  chemically synthesized
gtttctctttgtatggaagatc

SEQ ID NO: 29917 - DNA, 22 bp, Artificial Sequence
  chemically synthesized
ctctttgtatggaagatctttc

SEQ ID NO: 29918 - DNA, 22 bp, Artificial Sequence
  chemically synthesized
tctttgtatggaagatctttca

SEQ ID NO: 29919 - DNA, 22 bp, Artificial Sequence
  chemically synthesized
tttgtatggaagatctttcatc

SEQ ID NO: 29920 - DNA, 22 bp, Artificial Sequence
  chemically synthesized
tgtatggaagatctttcatctt

SEQ ID NO: 29921 - DNA, 22 bp, Artificial Sequence
  chemically synthesized
gtatggaagatctttcatcttt

SEQ ID NO: 29922 - DNA, 22 bp, Artificial Sequence
  chemically synthesized
tatggaagatctttcatctttt

SEQ ID NO: 29923 - DNA, 22 bp, Artificial Sequence
  chemically synthesized
tcatctttttactttcagtcta

SEQ ID NO: 29924 - DNA, 22 bp, Artificial Sequence
  chemically synthesized
catctttttactttcagtctat

SEQ ID NO: 29925 - DNA, 22 bp, Artificial Sequence
  chemically synthesized
atctttttactttcagtctata

SEQ ID NO: 29926 - DNA, 22 bp, Artificial Sequence
  chemically synthesized
tttactttcagtctatatttat

SEQ ID NO: 29927 - DNA, 22 bp, Artificial Sequence
  chemically synthesized
ttactttcagtctatatttatc

SEQ ID NO: 29928 - DNA, 22 bp, Artificial Sequence
  chemically synthesized
tactttcagtctatatttatct

SEQ ID NO: 29929 - DNA, 22 bp, Artificial Sequence
  chemically synthesized
actttcagtctatatttatctt

SEQ ID NO: 29930 - DNA, 22 bp, Artificial Sequence
  chemically synthesized
ctttcagtctatatttatcttt

SEQ ID NO: 29931 - DNA, 22 bp, Artificial Sequence
  chemically synthesized
tcagtctatatttatctttaca

SEQ ID NO: 29932 - DNA, 22 bp, Artificial Sequence
  chemically synthesized
cagtctatatttatctttacaa

SEQ ID NO: 29933 - DNA, 22 bp, Artificial Sequence
  chemically synthesized
agtctatatttatctttacaag

SEQ ID NO: 29934 - DNA, 22 bp, Artificial Sequence
  chemically synthesized
tatttatctttacaagtgagat

SEQ ID NO: 29935 - DNA, 22 bp, Artificial Sequence
  chemically synthesized
atctttacaagtgagataagtt

SEQ ID NO: 29936 - DNA, 22 bp, Artificial Sequence
  chemically synthesized
tctttacaagtgagataagttt

SEQ ID NO: 29937 - DNA, 22 bp, Artificial Sequence
  chemically synthesized
tacaagtgagataagtttctta

SEQ ID NO: 29938 - DNA, 22 bp, Artificial Sequence
  chemically synthesized
acaagtgagataagtttcttat

SEQ ID NO: 29939 - DNA, 22 bp, Artificial Sequence
  chemically synthesized
caagtgagataagtttcttata

SEQ ID NO: 29940 - DNA, 22 bp, Artificial Sequence
  chemically synthesized
cttataggcagcttacaactgg

SEQ ID NO: 29941 - DNA, 22 bp, Artificial Sequence
  chemically synthesized
ttataggcagcttacaactggg

SEQ ID NO: 29942 - DNA, 22 bp, Artificial Sequence
  chemically synthesized
ataggcagcttacaactgggtc

SEQ ID NO: 29943 - DNA, 22 bp, Artificial Sequence
  chemically synthesized
taggcagcttacaactgggtca

SEQ ID NO: 29944 - DNA, 22 bp, Artificial Sequence
  chemically synthesized
acaactgggtcatatttttgtt

SEQ ID NO: 29945 - DNA, 22 bp, Artificial Sequence
  chemically synthesized
caactgggtcatatttttgttt

SEQ ID NO: 29946 - DNA, 22 bp, Artificial Sequence
  chemically synthesized
ggtcatatttttgttttaaatc

SEQ ID NO: 29947 - DNA, 22 bp, Artificial Sequence
  chemically synthesized
ttgttttaaatctatttagcca

SEQ ID NO: 29948 - DNA, 22 bp, Artificial Sequence
  chemically synthesized
tgttttaaatctatttagccag

SEQ ID NO: 29949 - DNA, 22 bp, Artificial Sequence
  chemically synthesized
gttttaaatctatttagccagt

SEQ ID NO: 29950 - DNA, 22 bp, Artificial Sequence
  chemically synthesized
ttttaaatctatttagccagtc

SEQ ID NO: 29951 - DNA, 22 bp, Artificial Sequence
  chemically synthesized
taaatctatttagccagtctat

SEQ ID NO: 29952 - DNA, 22 bp, Artificial Sequence
  chemically synthesized
aaatctatttagccagtctata

SEQ ID NO: 29953 - DNA, 22 bp, Artificial Sequence
  chemically synthesized
aatctatttagccagtctatat

SEQ ID NO: 29954 - DNA, 22 bp, Artificial Sequence
  chemically synthesized
tttagccagtctatatctttca

SEQ ID NO: 29955 - DNA, 22 bp, Artificial Sequence
  chemically synthesized
agccagtctatatctttcaagt

SEQ ID NO: 29956 - DNA, 22 bp, Artificial Sequence
  chemically synthesized
gccagtctatatctttcaagta

SEQ ID NO: 29957 - DNA, 22 bp, Artificial Sequence
  chemically synthesized
tatctttcaagtaacaatttaa

SEQ ID NO: 29958 - DNA, 22 bp, Artificial Sequence
  chemically synthesized
tcaagtaacaatttaatccatt

SEQ ID NO: 29959 - DNA, 22 bp, Artificial Sequence
  chemically synthesized
caagtaacaatttaatccattt

SEQ ID NO: 29960 - DNA, 22 bp, Artificial Sequence
  chemically synthesized
aagtaacaatttaatccattta

SEQ ID NO: 29961 - DNA, 22 bp, Artificial Sequence
  chemically synthesized
aatccatttacatgcaaggcta

SEQ ID NO: 29962 - DNA, 22 bp, Artificial Sequence
  chemically synthesized
atccatttacatgcaaggctat

SEQ ID NO: 29963 - DNA, 22 bp, Artificial Sequence
  chemically synthesized
acatgcaaggctattattgaca

SEQ ID NO: 29964 - DNA, 22 bp, Artificial Sequence
  chemically synthesized
catgcaaggctattattgacat

SEQ ID NO: 29965 - DNA, 22 bp, Artificial Sequence
  chemically synthesized
ttattgacatgtgagagcttat

SEQ ID NO: 29966 - DNA, 22 bp, Artificial Sequence
  chemically synthesized
ttgacatgtgagagcttattcc

SEQ ID NO: 29967 - DNA, 22 bp, Artificial Sequence
  chemically synthesized
acatgtgagagcttattcctgc

SEQ ID NO: 29968 - DNA, 22 bp, Artificial Sequence
  chemically synthesized
attcctgccattttgttaattg

SEQ ID NO: 29969 - DNA, 22 bp, Artificial Sequence
  chemically synthesized
ttcctgccattttgttaattga

SEQ ID NO: 29970 - DNA, 22 bp, Artificial Sequence
  chemically synthesized
ctgccattttgttaattgattc

SEQ ID NO: 29971 - DNA, 22 bp, Artificial Sequence
  chemically synthesized
ccattttgttaattgattcctg

SEQ ID NO: 29972 - DNA, 22 bp, Artificial Sequence
  chemically synthesized
tgttaattgattcctggttgtt

SEQ ID NO: 29973 - DNA, 22 bp, Artificial Sequence
  chemically synthesized
gttaattgattcctggttgttt

SEQ ID NO: 29974 - DNA, 22 bp, Artificial Sequence
  chemically synthesized
ttaattgattcctggttgtttt

SEQ ID NO: 29975 - DNA, 22 bp, Artificial Sequence
  chemically synthesized
attgattcctggttgttttgtt

SEQ ID NO: 29976 - DNA, 22 bp, Artificial Sequence
  chemically synthesized
attcctggttgttttgtttttt

SEQ ID NO: 29977 - DNA, 22 bp, Artificial Sequence
  chemically synthesized
ctggttgttttgtttttttttt

SEQ ID NO: 29978 - DNA, 22 bp, Artificial Sequence
  chemically synthesized
gttgttttgttttttttttagt

SEQ ID NO: 29979 - DNA, 22 bp, Artificial Sequence
  chemically synthesized
ttttgttttttttttagtttgt

SEQ ID NO: 29980 - DNA, 22 bp, Artificial Sequence
  chemically synthesized
tgttttttttttagtttgtttg

SEQ ID NO: 29981 - DNA, 22 bp, Artificial Sequence
  chemically synthesized
gttttttttttagtttgtttgt

SEQ ID NO: 29982 - DNA, 22 bp, Artificial Sequence
  chemically synthesized
ttttttttttagtttgtttgtt

SEQ ID NO: 29983 - DNA, 22 bp, Artificial Sequence
  chemically synthesized
tttttttagtttgtttgttttg

SEQ ID NO: 29984 - DNA, 22 bp, Artificial Sequence
  chemically synthesized
ttttttagtttgtttgttttgt

SEQ ID NO: 29985 - DNA, 22 bp, Artificial Sequence
  chemically synthesized
tttttagtttgtttgttttgtg

SEQ ID NO: 29986 - DNA, 22 bp, Artificial Sequence
  chemically synthesized
ttttagtttgtttgttttgtgt

SEQ ID NO: 29987 - DNA, 22 bp, Artificial Sequence
  chemically synthesized
tttagtttgtttgttttgtgtt

SEQ ID NO: 29988 - DNA, 22 bp, Artificial Sequence
  chemically synthesized
ttagtttgtttgttttgtgttt

SEQ ID NO: 29989 - DNA, 22 bp, Artificial Sequence
  chemically synthesized
tagtttgtttgttttgtgtttt

SEQ ID NO: 29990 - DNA, 22 bp, Artificial Sequence
  chemically synthesized
agtttgtttgttttgtgttttt

SEQ ID NO: 29991 - DNA, 22 bp, Artificial Sequence
  chemically synthesized
gtttgtttgttttgtgtttttt

SEQ ID NO: 29992 - DNA, 22 bp, Artificial Sequence
  chemically synthesized
gtttgttttgtgtttttttctt

SEQ ID NO: 29993 - DNA, 22 bp, Artificial Sequence
  chemically synthesized
tttgttttgtgtttttttcttc

SEQ ID NO: 29994 - DNA, 22 bp, Artificial Sequence
  chemically synthesized
gttttgtgtttttttcttcctt

SEQ ID NO: 29995 - DNA, 22 bp, Artificial Sequence
  chemically synthesized
ttttgtgtttttttcttccttc

SEQ ID NO: 29996 - DNA, 22 bp, Artificial Sequence
  chemically synthesized
tgtgtttttttcttccttcctt

SEQ ID NO: 29997 - DNA, 22 bp, Artificial Sequence
  chemically synthesized
gtgtttttttcttccttccttc

SEQ ID NO: 29998 - DNA, 22 bp, Artificial Sequence
  chemically synthesized
tgtttttttcttccttccttcc

SEQ ID NO: 29999 - DNA, 22 bp, Artificial Sequence
  chemically synthesized
ttttcttccttccttccttttc

SEQ ID NO: 30000 - DNA, 22 bp, Artificial Sequence
  chemically synthesized
tttcttccttccttccttttct

SEQ ID NO: 30001 - DNA, 22 bp, Artificial Sequence
  chemically synthesized
ttcttccttccttccttttctt

SEQ ID NO: 30002 - DNA, 22 bp, Artificial Sequence
  chemically synthesized
tcttccttccttccttttcttt

SEQ ID NO: 30003 - DNA, 22 bp, Artificial Sequence
  chemically synthesized
cttccttccttccttttctttc

SEQ ID NO: 30004 - DNA, 22 bp, Artificial Sequence
  chemically synthesized
ttccttccttccttttctttct

SEQ ID NO: 30005 - DNA, 22 bp, Artificial Sequence
  chemically synthesized
ccttccttccttttctttcttt

SEQ ID NO: 30006 - DNA, 22 bp, Artificial Sequence
  chemically synthesized
cttccttccttttctttctttc

SEQ ID NO: 30007 - DNA, 22 bp, Artificial Sequence
  chemically synthesized
ccttccttttctttctttcatt

SEQ ID NO: 30008 - DNA, 22 bp, Artificial Sequence
  chemically synthesized
cttccttttctttctttcattc

SEQ ID NO: 30009 - DNA, 22 bp, Artificial Sequence
  chemically synthesized
ccttttctttctttcattctct

SEQ ID NO: 30010 - DNA, 22 bp, Artificial Sequence
  chemically synthesized
cttttctttctttcattctctc

SEQ ID NO: 30011 - DNA, 22 bp, Artificial Sequence
  chemically synthesized
ttctttctttcattctctctct

SEQ ID NO: 30012 - DNA, 22 bp, Artificial Sequence
  chemically synthesized
tctttctttcattctctctctc

SEQ ID NO: 30013 - DNA, 22 bp, Artificial Sequence
  chemically synthesized
ctttctttcattctctctctct

SEQ ID NO: 30014 - DNA, 22 bp, Artificial Sequence
  chemically synthesized
tttctttcattctctctctctc

SEQ ID NO: 30015 - DNA, 22 bp, Artificial Sequence
  chemically synthesized
tctttcattctctctctctctc

SEQ ID NO: 30016 - DNA, 22 bp, Artificial Sequence
  chemically synthesized
ctttcattctctctctctctct

SEQ ID NO: 30017 - DNA, 22 bp, Artificial Sequence
  chemically synthesized
tttcattctctctctctctctc

SEQ ID NO: 30018 - DNA, 22 bp, Artificial Sequence
  chemically synthesized
tcattctctctctctctctctt

SEQ ID NO: 30019 - DNA, 22 bp, Artificial Sequence
  chemically synthesized
cattctctctctctctctcttt

SEQ ID NO: 30020 - DNA, 22 bp, Artificial Sequence
  chemically synthesized
attctctctctctctctctttc

SEQ ID NO: 30021 - DNA, 22 bp, Artificial Sequence
  chemically synthesized
tctctctctctctctttctttc

SEQ ID NO: 30022 - DNA, 22 bp, Artificial Sequence
  chemically synthesized
tctctctctctctttctttctt

SEQ ID NO: 30023 - DNA, 22 bp, Artificial Sequence
  chemically synthesized
tctctctctctttctttctttc

SEQ ID NO: 30024 - DNA, 22 bp, Artificial Sequence
  chemically synthesized
tctctctctttctttctttctt

SEQ ID NO: 30025 - DNA, 22 bp, Artificial Sequence
  chemically synthesized
tctctctttctttctttctttc

SEQ ID NO: 30026 - DNA, 22 bp, Artificial Sequence
  chemically synthesized
tctctttctttctttctttctt

SEQ ID NO: 30027 - DNA, 22 bp, Artificial Sequence
  chemically synthesized
tctttctttctttctttctttc

SEQ ID NO: 30028 - DNA, 22 bp, Artificial Sequence
  chemically synthesized
tttctttctttctttctttctt

SEQ ID NO: 30029 - DNA, 22 bp, Artificial Sequence
  chemically synthesized
tctttctttctttctttcttat

SEQ ID NO: 30030 - DNA, 22 bp, Artificial Sequence
  chemically synthesized
ctttctttctttctttcttatt

SEQ ID NO: 30031 - DNA, 22 bp, Artificial Sequence
  chemically synthesized
tttctttctttctttcttatta

SEQ ID NO: 30032 - DNA, 22 bp, Artificial Sequence
  chemically synthesized
tctttctttctttcttattatt

SEQ ID NO: 30033 - DNA, 22 bp, Artificial Sequence
  chemically synthesized
ctttctttctttcttattattt

SEQ ID NO: 30034 - DNA, 22 bp, Artificial Sequence
  chemically synthesized
tttctttctttcttattattta

SEQ ID NO: 30035 - DNA, 22 bp, Artificial Sequence
  chemically synthesized
tctttctttcttattatttatg

SEQ ID NO: 30036 - DNA, 22 bp, Artificial Sequence
  chemically synthesized
ctttctttcttattatttatga

SEQ ID NO: 30037 - DNA, 22 bp, Artificial Sequence
  chemically synthesized
tttctttcttattatttatgat

SEQ ID NO: 30038 - DNA, 22 bp, Artificial Sequence
  chemically synthesized
tctttcttattatttatgattg

SEQ ID NO: 30039 - DNA, 22 bp, Artificial Sequence
  chemically synthesized
ctttcttattatttatgattgt

SEQ ID NO: 30040 - DNA, 22 bp, Artificial Sequence
  chemically synthesized
tttcttattatttatgattgtg

SEQ ID NO: 30041 - DNA, 22 bp, Artificial Sequence
  chemically synthesized
tcttattatttatgattgtggt

SEQ ID NO: 30042 - DNA, 22 bp, Artificial Sequence
  chemically synthesized
cttattatttatgattgtggtt

SEQ ID NO: 30043 - DNA, 22 bp, Artificial Sequence
  chemically synthesized
ttattatttatgattgtggttt

SEQ ID NO: 30044 - DNA, 22 bp, Artificial Sequence
  chemically synthesized
attatttatgattgtggtttgg

SEQ ID NO: 30045 - DNA, 22 bp, Artificial Sequence
  chemically synthesized
ttatttatgattgtggtttggt

SEQ ID NO: 30046 - DNA, 22 bp, Artificial Sequence
  chemically synthesized
tttatgattgtggtttggtgat

SEQ ID NO: 30047 - DNA, 22 bp, Artificial Sequence
  chemically synthesized
atgattgtggtttggtgatttt

SEQ ID NO: 30048 - DNA, 22 bp, Artificial Sequence
  chemically synthesized
tgattgtggtttggtgattttc

SEQ ID NO: 30049 - DNA, 22 bp, Artificial Sequence
  chemically synthesized
tggtttggtgattttctgtagt

SEQ ID NO: 30050 - DNA, 22 bp, Artificial Sequence
  chemically synthesized
ggtgattttctgtagtggtaac

SEQ ID NO: 30051 - DNA, 22 bp, Artificial Sequence
  chemically synthesized
gtgattttctgtagtggtaacg

SEQ ID NO: 30052 - DNA, 22 bp, Artificial Sequence
  chemically synthesized
tctgtagtggtaacgtttgagt

SEQ ID NO: 30053 - DNA, 22 bp, Artificial Sequence
  chemically synthesized
ctgtagtggtaacgtttgagtt

SEQ ID NO: 30054 - DNA, 22 bp, Artificial Sequence
  chemically synthesized
tgtagtggtaacgtttgagttc

SEQ ID NO: 30055 - DNA, 22 bp, Artificial Sequence
  chemically synthesized
tagtggtaacgtttgagttctt

SEQ ID NO: 30056 - DNA, 22 bp, Artificial Sequence
  chemically synthesized
gagttctttctcttctttattt

SEQ ID NO: 30057 - DNA, 22 bp, Artificial Sequence
  chemically synthesized
agttctttctcttctttatttg

SEQ ID NO: 30058 - DNA, 22 bp, Artificial Sequence
  chemically synthesized
tttctcttctttatttgtgttt

SEQ ID NO: 30059 - DNA, 22 bp, Artificial Sequence
  chemically synthesized
tctcttctttatttgtgttttg

SEQ ID NO: 30060 - DNA, 22 bp, Artificial Sequence
  chemically synthesized
ctcttctttatttgtgttttgc

SEQ ID NO: 30061 - DNA, 22 bp, Artificial Sequence
  chemically synthesized
tcttctttatttgtgttttgct

SEQ ID NO: 30062 - DNA, 22 bp, Artificial Sequence
  chemically synthesized
ttctttatttgtgttttgctct

SEQ ID NO: 30063 - DNA, 22 bp, Artificial Sequence
  chemically synthesized
ctttatttgtgttttgctctac

SEQ ID NO: 30064 - DNA, 22 bp, Artificial Sequence
  chemically synthesized
tttatttgtgttttgctctacc

SEQ ID NO: 30065 - DNA, 22 bp, Artificial Sequence
  chemically synthesized
tatttgtgttttgctctaccag

SEQ ID NO: 30066 - DNA, 22 bp, Artificial Sequence
  chemically synthesized
atttgtgttttgctctaccagt

SEQ ID NO: 30067 - DNA, 22 bp, Artificial Sequence
  chemically synthesized
tttgtgttttgctctaccagtt

SEQ ID NO: 30068 - DNA, 22 bp, Artificial Sequence
  chemically synthesized
gtgttttgctctaccagttagt

SEQ ID NO: 30069 - DNA, 22 bp, Artificial Sequence
  chemically synthesized
tgttttgctctaccagttagtt

SEQ ID NO: 30070 - DNA, 22 bp, Artificial Sequence
  chemically synthesized
tgctctaccagttagttgtata

SEQ ID NO: 30071 - DNA, 22 bp, Artificial Sequence
  chemically synthesized
gctctaccagttagttgtatac

SEQ ID NO: 30072 - DNA, 22 bp, Artificial Sequence
  chemically synthesized
ctctaccagttagttgtatacc

SEQ ID NO: 30073 - DNA, 22 bp, Artificial Sequence
  chemically synthesized
taccagttagttgtataccttt

SEQ ID NO: 30074 - DNA, 22 bp, Artificial Sequence
  chemically synthesized
ccagttagttgtatacctttgt

SEQ ID NO: 30075 - DNA, 22 bp, Artificial Sequence
  chemically synthesized
gttgtatacctttgtgtgtctt

SEQ ID NO: 30076 - DNA, 22 bp, Artificial Sequence
  chemically synthesized
tatacctttgtgtgtcttcata

SEQ ID NO: 30077 - DNA, 22 bp, Artificial Sequence
  chemically synthesized
tgtgtgtcttcataatggcagt

SEQ ID NO: 30078 - DNA, 22 bp, Artificial Sequence
  chemically synthesized
gtgtgtcttcataatggcagtg

SEQ ID NO: 30079 - DNA, 22 bp, Artificial Sequence
  chemically synthesized
tgtgtcttcataatggcagtgt

SEQ ID NO: 30080 - DNA, 22 bp, Artificial Sequence
  chemically synthesized
cataatggcagtgtcctgtcac

SEQ ID NO: 30081 - DNA, 22 bp, Artificial Sequence
  chemically synthesized
ataatggcagtgtcctgtcact

SEQ ID NO: 30082 - DNA, 22 bp, Artificial Sequence
  chemically synthesized
tcactttcatgtgtaggactcc

SEQ ID NO: 30083 - DNA, 22 bp, Artificial Sequence
  chemically synthesized
tcatgtgtaggactcccttaaa

SEQ ID NO: 30084 - DNA, 22 bp, Artificial Sequence
  chemically synthesized
catgtgtaggactcccttaaat

SEQ ID NO: 30085 - DNA, 22 bp, Artificial Sequence
  chemically synthesized
atgtgtaggactcccttaaata

SEQ ID NO: 30086 - DNA, 22 bp, Artificial Sequence
  chemically synthesized
ccttaaatatttcttgtaaagc

SEQ ID NO: 30087 - DNA, 22 bp, Artificial Sequence
  chemically synthesized
aaatatttcttgtaaagccagt

SEQ ID NO: 30088 - DNA, 22 bp, Artificial Sequence
  chemically synthesized
aatatttcttgtaaagccagtc

SEQ ID NO: 30089 - DNA, 22 bp, Artificial Sequence
  chemically synthesized
cttgtaaagccagtctagtgat

SEQ ID NO: 30090 - DNA, 22 bp, Artificial Sequence
  chemically synthesized
ttgtaaagccagtctagtgata

SEQ ID NO: 30091 - DNA, 22 bp, Artificial Sequence
  chemically synthesized
gtaaagccagtctagtgatagt

SEQ ID NO: 30092 - DNA, 22 bp, Artificial Sequence
  chemically synthesized
taaagccagtctagtgatagtg

SEQ ID NO: 30093 - DNA, 22 bp, Artificial Sequence
  chemically synthesized
gtgatagtgaattccttcaaat

SEQ ID NO: 30094 - DNA, 22 bp, Artificial Sequence
  chemically synthesized
cttcaaatttttcttgcccaga

SEQ ID NO: 30095 - DNA, 22 bp, Artificial Sequence
  chemically synthesized
caaatttttcttgcccagaaaa

SEQ ID NO: 30096 - DNA, 22 bp, Artificial Sequence
  chemically synthesized
aaatttttcttgcccagaaaag

SEQ ID NO: 30097 - DNA, 22 bp, Artificial Sequence
  chemically synthesized
ttcttgcccagaaaagatttta

SEQ ID NO: 30098 - DNA, 22 bp, Artificial Sequence
  chemically synthesized
tcttgcccagaaaagattttat

SEQ ID NO: 30099 - DNA, 22 bp, Artificial Sequence
  chemically synthesized
cttgcccagaaaagattttatt

SEQ ID NO: 30100 - DNA, 22 bp, Artificial Sequence
  chemically synthesized
ttgcccagaaaagattttattt

SEQ ID NO: 30101 - DNA, 22 bp, Artificial Sequence
  chemically synthesized
gcccagaaaagattttatttat

SEQ ID NO: 30102 - DNA, 22 bp, Artificial Sequence
  chemically synthesized
cccagaaaagattttatttatc

SEQ ID NO: 30103 - DNA, 22 bp, Artificial Sequence
  chemically synthesized
tatttatccttcatttttgaag

SEQ ID NO: 30104 - DNA, 22 bp, Artificial Sequence
  chemically synthesized
atttatccttcatttttgaaga

SEQ ID NO: 30105 - DNA, 22 bp, Artificial Sequence
  chemically synthesized
tttatccttcatttttgaagaa

SEQ ID NO: 30106 - DNA, 22 bp, Artificial Sequence
  chemically synthesized
atccttcatttttgaagaacaa

SEQ ID NO: 30107 - DNA, 22 bp, Artificial Sequence
  chemically synthesized
tccttcatttttgaagaacaat

SEQ ID NO: 30108 - DNA, 22 bp, Artificial Sequence
  chemically synthesized
catttttgaagaacaatgttgc

SEQ ID NO: 30109 - DNA, 22 bp, Artificial Sequence
  chemically synthesized
atttttgaagaacaatgttgct

SEQ ID NO: 30110 - DNA, 22 bp, Artificial Sequence
  chemically synthesized
ttgaagaacaatgttgctgggt

SEQ ID NO: 30111 - DNA, 22 bp, Artificial Sequence
  chemically synthesized
tgaagaacaatgttgctgggta

SEQ ID NO: 30112 - DNA, 22 bp, Artificial Sequence
  chemically synthesized
gaagaacaatgttgctgggtat

SEQ ID NO: 30113 - DNA, 22 bp, Artificial Sequence
  chemically synthesized
aagaacaatgttgctgggtata

SEQ ID NO: 30114 - DNA, 22 bp, Artificial Sequence
  chemically synthesized
ctgggtataacatccttggtgt

SEQ ID NO: 30115 - DNA, 22 bp, Artificial Sequence
  chemically synthesized
ggtataacatccttggtgtcat

SEQ ID NO: 30116 - DNA, 22 bp, Artificial Sequence
  chemically synthesized
ggtgtcatttttttctttcact

SEQ ID NO: 30117 - DNA, 22 bp, Artificial Sequence
  chemically synthesized
gtgtcatttttttctttcacta

SEQ ID NO: 30118 - DNA, 22 bp, Artificial Sequence
  chemically synthesized
ttttctttcactattttgaata

SEQ ID NO: 30119 - DNA, 22 bp, Artificial Sequence
  chemically synthesized
tttctttcactattttgaatat

SEQ ID NO: 30120 - DNA, 22 bp, Artificial Sequence
  chemically synthesized
ttctttcactattttgaatata

SEQ ID NO: 30121 - DNA, 22 bp, Artificial Sequence
  chemically synthesized
tctttcactattttgaatatat

SEQ ID NO: 30122 - DNA, 22 bp, Artificial Sequence
  chemically synthesized
ctttcactattttgaatatatc

SEQ ID NO: 30123 - DNA, 22 bp, Artificial Sequence
  chemically synthesized
tttcactattttgaatatatca

SEQ ID NO: 30124 - DNA, 22 bp, Artificial Sequence
  chemically synthesized
tcactattttgaatatatcatc

SEQ ID NO: 30125 - DNA, 22 bp, Artificial Sequence
  chemically synthesized
cactattttgaatatatcatcc

SEQ ID NO: 30126 - DNA, 22 bp, Artificial Sequence
  chemically synthesized
actattttgaatatatcatccc

SEQ ID NO: 30127 - DNA, 22 bp, Artificial Sequence
  chemically synthesized
ttttgaatatatcatcccatct

SEQ ID NO: 30128 - DNA, 22 bp, Artificial Sequence
  chemically synthesized
tgaatatatcatcccatcttct

SEQ ID NO: 30129 - DNA, 22 bp, Artificial Sequence
  chemically synthesized
gaatatatcatcccatcttctc

SEQ ID NO: 30130 - DNA, 22 bp, Artificial Sequence
  chemically synthesized
aatatatcatcccatcttctcc

SEQ ID NO: 30131 - DNA, 22 bp, Artificial Sequence
  chemically synthesized
ctcctggcctgtgaggtttctg

SEQ ID NO: 30132 - DNA, 22 bp, Artificial Sequence
  chemically synthesized
tcctggcctgtgaggtttctgc

SEQ ID NO: 30133 - DNA, 22 bp, Artificial Sequence
  chemically synthesized
ctggcctgtgaggtttctgctg

SEQ ID NO: 30134 - DNA, 22 bp, Artificial Sequence
  chemically synthesized
gcctgtgaggtttctgctgaga

SEQ ID NO: 30135 - DNA, 22 bp, Artificial Sequence
  chemically synthesized
tgaggtttctgctgagaaatct

SEQ ID NO: 30136 - DNA, 22 bp, Artificial Sequence
  chemically synthesized
ctgctgagaaatctgctgttaa

SEQ ID NO: 30137 - DNA, 22 bp, Artificial Sequence
  chemically synthesized
tgctgagaaatctgctgttaat

SEQ ID NO: 30138 - DNA, 22 bp, Artificial Sequence
  chemically synthesized
ctgagaaatctgctgttaatct

SEQ ID NO: 30139 - DNA, 22 bp, Artificial Sequence
  chemically synthesized
agaaatctgctgttaatctgtt

SEQ ID NO: 30140 - DNA, 22 bp, Artificial Sequence
  chemically synthesized
ctgttaatctgttaatcttgtg

SEQ ID NO: 30141 - DNA, 22 bp, Artificial Sequence
  chemically synthesized
ttaatctgttaatcttgtggaa

SEQ ID NO: 30142 - DNA, 22 bp, Artificial Sequence
  chemically synthesized
atctgttaatcttgtggaagtt

SEQ ID NO: 30143 - DNA, 22 bp, Artificial Sequence
  chemically synthesized
ttaatcttgtggaagttccctt

SEQ ID NO: 30144 - DNA, 22 bp, Artificial Sequence
  chemically synthesized
atcttgtggaagttcccttata

SEQ ID NO: 30145 - DNA, 22 bp, Artificial Sequence
  chemically synthesized
gtggaagttcccttataagtga

SEQ ID NO: 30146 - DNA, 22 bp, Artificial Sequence
  chemically synthesized
tggaagttcccttataagtgac

SEQ ID NO: 30147 - DNA, 22 bp, Artificial Sequence
  chemically synthesized
ccttataagtgactagacattt

SEQ ID NO: 30148 - DNA, 22 bp, Artificial Sequence
  chemically synthesized
ataagtgactagacattttgct

SEQ ID NO: 30149 - DNA, 22 bp, Artificial Sequence
  chemically synthesized
taagtgactagacattttgctt

SEQ ID NO: 30150 - DNA, 22 bp, Artificial Sequence
  chemically synthesized
gacattttgcttgctgttttag

SEQ ID NO: 30151 - DNA, 22 bp, Artificial Sequence
  chemically synthesized
tgcttgctgttttagagttctt

SEQ ID NO: 30152 - DNA, 22 bp, Artificial Sequence
  chemically synthesized
gcttgctgttttagagttctta

SEQ ID NO: 30153 - DNA, 22 bp, Artificial Sequence
  chemically synthesized
cttgctgttttagagttcttac

SEQ ID NO: 30154 - DNA, 22 bp, Artificial Sequence
  chemically synthesized
gctgttttagagttcttactct

SEQ ID NO: 30155 - DNA, 22 bp, Artificial Sequence
  chemically synthesized
ctgttttagagttcttactctt

SEQ ID NO: 30156 - DNA, 22 bp, Artificial Sequence
  chemically synthesized
ttttagagttcttactctttgg

SEQ ID NO: 30157 - DNA, 22 bp, Artificial Sequence
  chemically synthesized
tagagttcttactctttggctt

SEQ ID NO: 30158 - DNA, 22 bp, Artificial Sequence
  chemically synthesized
agagttcttactctttggcttt

SEQ ID NO: 30159 - DNA, 22 bp, Artificial Sequence
  chemically synthesized
gagttcttactctttggctttt

SEQ ID NO: 30160 - DNA, 22 bp, Artificial Sequence
  chemically synthesized
ttactctttggcttttgacagt

SEQ ID NO: 30161 - DNA, 22 bp, Artificial Sequence
  chemically synthesized
actctttggcttttgacagttt

SEQ ID NO: 30162 - DNA, 22 bp, Artificial Sequence
  chemically synthesized
ctctttggcttttgacagtttg

SEQ ID NO: 30163 - DNA, 22 bp, Artificial Sequence
  chemically synthesized
tttggcttttgacagtttgact

SEQ ID NO: 30164 - DNA, 22 bp, Artificial Sequence
  chemically synthesized
tggcttttgacagtttgactat

SEQ ID NO: 30165 - DNA, 22 bp, Artificial Sequence
  chemically synthesized
ggcttttgacagtttgactata

SEQ ID NO: 30166 - DNA, 22 bp, Artificial Sequence
  chemically synthesized
gcttttgacagtttgactataa

SEQ ID NO: 30167 - DNA, 22 bp, Artificial Sequence
  chemically synthesized
ttgacagtttgactataatgtg

SEQ ID NO: 30168 - DNA, 22 bp, Artificial Sequence
  chemically synthesized
tgacagtttgactataatgtgc

SEQ ID NO: 30169 - DNA, 22 bp, Artificial Sequence
  chemically synthesized
gacagtttgactataatgtgct

SEQ ID NO: 30170 - DNA, 22 bp, Artificial Sequence
  chemically synthesized
acagtttgactataatgtgctg

SEQ ID NO: 30171 - DNA, 22 bp, Artificial Sequence
  chemically synthesized
gactataatgtgctgtggagaa

SEQ ID NO: 30172 - DNA, 22 bp, Artificial Sequence
  chemically synthesized
actataatgtgctgtggagaag

SEQ ID NO: 30173 - DNA, 22 bp, Artificial Sequence
  chemically synthesized
taatgtgctgtggagaagagct

SEQ ID NO: 30174 - DNA, 22 bp, Artificial Sequence
  chemically synthesized
tggagaagagctttttgcatta

SEQ ID NO: 30175 - DNA, 22 bp, Artificial Sequence
  chemically synthesized
tttgcattatattatttgggaa

SEQ ID NO: 30176 - DNA, 22 bp, Artificial Sequence
  chemically synthesized
ttgcattatattatttgggaat

SEQ ID NO: 30177 - DNA, 22 bp, Artificial Sequence
  chemically synthesized
tgcattatattatttgggaatt

SEQ ID NO: 30178 - DNA, 22 bp, Artificial Sequence
  chemically synthesized
gcattatattatttgggaattt

SEQ ID NO: 30179 - DNA, 22 bp, Artificial Sequence
  chemically synthesized
cattatattatttgggaatttc

SEQ ID NO: 30180 - DNA, 22 bp, Artificial Sequence
  chemically synthesized
tattatttgggaatttctgatt

SEQ ID NO: 30181 - DNA, 22 bp, Artificial Sequence
  chemically synthesized
tttgggaatttctgattttcat

SEQ ID NO: 30182 - DNA, 22 bp, Artificial Sequence
  chemically synthesized
gggaatttctgattttcatttg

SEQ ID NO: 30183 - DNA, 22 bp, Artificial Sequence
  chemically synthesized
ggaatttctgattttcatttgt

SEQ ID NO: 30184 - DNA, 22 bp, Artificial Sequence
  chemically synthesized
ctgattttcatttgtctggatg

SEQ ID NO: 30185 - DNA, 22 bp, Artificial Sequence
  chemically synthesized
tgattttcatttgtctggatgt

SEQ ID NO: 30186 - DNA, 22 bp, Artificial Sequence
  chemically synthesized
attttcatttgtctggatgtct

SEQ ID NO: 30187 - DNA, 22 bp, Artificial Sequence
  chemically synthesized
tcatttgtctggatgtctacat

SEQ ID NO: 30188 - DNA, 22 bp, Artificial Sequence
  chemically synthesized
catttgtctggatgtctacatt

SEQ ID NO: 30189 - DNA, 22 bp, Artificial Sequence
  chemically synthesized
atttgtctggatgtctacattt

SEQ ID NO: 30190 - DNA, 22 bp, Artificial Sequence
  chemically synthesized
gtctggatgtctacatttcttg

SEQ ID NO: 30191 - DNA, 22 bp, Artificial Sequence
  chemically synthesized
tctggatgtctacatttcttgc

SEQ ID NO: 30192 - DNA, 22 bp, Artificial Sequence
  chemically synthesized
gatgtctacatttcttgctaga

SEQ ID NO: 30193 - DNA, 22 bp, Artificial Sequence
  chemically synthesized
catttcttgctagacttgacaa

SEQ ID NO: 30194 - DNA, 22 bp, Artificial Sequence
  chemically synthesized
cttgctagacttgacaagtttt

SEQ ID NO: 30195 - DNA, 22 bp, Artificial Sequence
  chemically synthesized
ttgctagacttgacaagttttc

SEQ ID NO: 30196 - DNA, 22 bp, Artificial Sequence
  chemically synthesized
gctagacttgacaagttttcag

SEQ ID NO: 30197 - DNA, 22 bp, Artificial Sequence
  chemically synthesized
ctagacttgacaagttttcagc

SEQ ID NO: 30198 - DNA, 22 bp, Artificial Sequence
  chemically synthesized
gacttgacaagttttcagctat

SEQ ID NO: 30199 - DNA, 22 bp, Artificial Sequence
  chemically synthesized
gacaagttttcagctattgtgt

SEQ ID NO: 30200 - DNA, 22 bp, Artificial Sequence
  chemically synthesized
acaagttttcagctattgtgtt

SEQ ID NO: 30201 - DNA, 22 bp, Artificial Sequence
  chemically synthesized
tcagctattgtgttgttacgta

SEQ ID NO: 30202 - DNA, 22 bp, Artificial Sequence
  chemically synthesized
cagctattgtgttgttacgtag

SEQ ID NO: 30203 - DNA, 22 bp, Artificial Sequence
  chemically synthesized
agctattgtgttgttacgtagg

SEQ ID NO: 30204 - DNA, 22 bp, Artificial Sequence
  chemically synthesized
ttgtgttgttacgtaggtttcc

SEQ ID NO: 30205 - DNA, 22 bp, Artificial Sequence
  chemically synthesized
tgttgttacgtaggtttcctac

SEQ ID NO: 30206 - DNA, 22 bp, Artificial Sequence
  chemically synthesized
ttacgtaggtttcctacacctt

SEQ ID NO: 30207 - DNA, 22 bp, Artificial Sequence
  chemically synthesized
cgtaggtttcctacacctttca

SEQ ID NO: 30208 - DNA, 22 bp, Artificial Sequence
  chemically synthesized
cctacacctttcatgttctctt

SEQ ID NO: 30209 - DNA, 22 bp, Artificial Sequence
  chemically synthesized
ctacacctttcatgttctcttt

SEQ ID NO: 30210 - DNA, 22 bp, Artificial Sequence
  chemically synthesized
cacctttcatgttctctttacc

SEQ ID NO: 30211 - DNA, 22 bp, Artificial Sequence
  chemically synthesized
tcatgttctctttaccttctgg

SEQ ID NO: 30212 - DNA, 22 bp, Artificial Sequence
  chemically synthesized
catgttctctttaccttctggg

SEQ ID NO: 30213 - DNA, 22 bp, Artificial Sequence
  chemically synthesized
atgttctctttaccttctggga

SEQ ID NO: 30214 - DNA, 22 bp, Artificial Sequence
  chemically synthesized
tctttaccttctgggaaactgc

SEQ ID NO: 30215 - DNA, 22 bp, Artificial Sequence
  chemically synthesized
tttaccttctgggaaactgcaa

SEQ ID NO: 30216 - DNA, 22 bp, Artificial Sequence
  chemically synthesized
taccttctgggaaactgcaaat

SEQ ID NO: 30217 - DNA, 22 bp, Artificial Sequence
  chemically synthesized
accttctgggaaactgcaaatt

SEQ ID NO: 30218 - DNA, 22 bp, Artificial Sequence
  chemically synthesized
ccttctgggaaactgcaaattt

SEQ ID NO: 30219 - DNA, 22 bp, Artificial Sequence
  chemically synthesized
ctgggaaactgcaaatttgaat

SEQ ID NO: 30220 - DNA, 22 bp, Artificial Sequence
  chemically synthesized
tgggaaactgcaaatttgaata

SEQ ID NO: 30221 - DNA, 22 bp, Artificial Sequence
  chemically synthesized
ggaaactgcaaatttgaatatt

SEQ ID NO: 30222 - DNA, 22 bp, Artificial Sequence
  chemically synthesized
caaatttgaatatttgttcact

SEQ ID NO: 30223 - DNA, 22 bp, Artificial Sequence
  chemically synthesized
gaatatttgttcactttatagt

SEQ ID NO: 30224 - DNA, 22 bp, Artificial Sequence
  chemically synthesized
aatatttgttcactttatagtg

SEQ ID NO: 30225 - DNA, 22 bp, Artificial Sequence
  chemically synthesized
gttcactttatagtgcctcata

SEQ ID NO: 30226 - DNA, 22 bp, Artificial Sequence
  chemically synthesized
ttcactttatagtgcctcatat

SEQ ID NO: 30227 - DNA, 22 bp, Artificial Sequence
  chemically synthesized
actttatagtgcctcatatgtc

SEQ ID NO: 30228 - DNA, 22 bp, Artificial Sequence
  chemically synthesized
tatagtgcctcatatgtcacat

SEQ ID NO: 30229 - DNA, 22 bp, Artificial Sequence
  chemically synthesized
atagtgcctcatatgtcacata

SEQ ID NO: 30230 - DNA, 22 bp, Artificial Sequence
  chemically synthesized
tagtgcctcatatgtcacatac

SEQ ID NO: 30231 - DNA, 22 bp, Artificial Sequence
  chemically synthesized
atatgtcacatacactttgttc

SEQ ID NO: 30232 - DNA, 22 bp, Artificial Sequence
  chemically synthesized
tgttcattctttttttttcctt

SEQ ID NO: 30233 - DNA, 22 bp, Artificial Sequence
  chemically synthesized
gttcattctttttttttccttt

SEQ ID NO: 30234 - DNA, 22 bp, Artificial Sequence
  chemically synthesized
ttcattctttttttttcctttc

SEQ ID NO: 30235 - DNA, 22 bp, Artificial Sequence
  chemically synthesized
attctttttttttcctttctat

SEQ ID NO: 30236 - DNA, 22 bp, Artificial Sequence
  chemically synthesized
tttttttttcctttctatcatt

SEQ ID NO: 30237 - DNA, 22 bp, Artificial Sequence
  chemically synthesized
tttttttcctttctatcatttg

SEQ ID NO: 30238 - DNA, 22 bp, Artificial Sequence
  chemically synthesized
ttttttcctttctatcatttga

SEQ ID NO: 30239 - DNA, 22 bp, Artificial Sequence
  chemically synthesized
tttttcctttctatcatttgac

SEQ ID NO: 30240 - DNA, 22 bp, Artificial Sequence
  chemically synthesized
ttttcctttctatcatttgacc

SEQ ID NO: 30241 - DNA, 22 bp, Artificial Sequence
  chemically synthesized
tttcctttctatcatttgacca

SEQ ID NO: 30242 - DNA, 22 bp, Artificial Sequence
  chemically synthesized
ttcctttctatcatttgaccag

SEQ ID NO: 30243 - DNA, 22 bp, Artificial Sequence
  chemically synthesized
tcctttctatcatttgaccagc

SEQ ID NO: 30244 - DNA, 22 bp, Artificial Sequence
  chemically synthesized
cctttctatcatttgaccagct

SEQ ID NO: 30245 - DNA, 22 bp, Artificial Sequence
  chemically synthesized
ctttctatcatttgaccagcta

SEQ ID NO: 30246 - DNA, 22 bp, Artificial Sequence
  chemically synthesized
tctatcatttgaccagctaatt

SEQ ID NO: 30247 - DNA, 22 bp, Artificial Sequence
  chemically synthesized
ctatcatttgaccagctaattt

SEQ ID NO: 30248 - DNA, 22 bp, Artificial Sequence
  chemically synthesized
tatcatttgaccagctaatttt

SEQ ID NO: 30249 - DNA, 22 bp, Artificial Sequence
  chemically synthesized
tcatttgaccagctaattttaa

SEQ ID NO: 30250 - DNA, 22 bp, Artificial Sequence
  chemically synthesized
gaccagctaattttaaaagacc

SEQ ID NO: 30251 - DNA, 22 bp, Artificial Sequence
  chemically synthesized
accagctaattttaaaagacct

SEQ ID NO: 30252 - DNA, 22 bp, Artificial Sequence
  chemically synthesized
attttaaaagacctgtcttcaa

SEQ ID NO: 30253 - DNA, 22 bp, Artificial Sequence
  chemically synthesized
taaaagacctgtcttcaagttc

SEQ ID NO: 30254 - DNA, 22 bp, Artificial Sequence
  chemically synthesized
aaaagacctgtcttcaagttct

SEQ ID NO: 30255 - DNA, 22 bp, Artificial Sequence
  chemically synthesized
aaagacctgtcttcaagttctg

SEQ ID NO: 30256 - DNA, 22 bp, Artificial Sequence
  chemically synthesized
tcttcaagttctgaaatttttc

SEQ ID NO: 30257 - DNA, 22 bp, Artificial Sequence
  chemically synthesized
caagttctgaaatttttcttct

SEQ ID NO: 30258 - DNA, 22 bp, Artificial Sequence
  chemically synthesized
aagttctgaaatttttcttctg

SEQ ID NO: 30259 - DNA, 22 bp, Artificial Sequence
  chemically synthesized
tgaaatttttcttctgcttgat

SEQ ID NO: 30260 - DNA, 22 bp, Artificial Sequence
  chemically synthesized
aaatttttcttctgcttgatct

SEQ ID NO: 30261 - DNA, 22 bp, Artificial Sequence
  chemically synthesized
ttcttctgcttgatctgatcta

SEQ ID NO: 30262 - DNA, 22 bp, Artificial Sequence
  chemically synthesized
tcttctgcttgatctgatctat

SEQ ID NO: 30263 - DNA, 22 bp, Artificial Sequence
  chemically synthesized
cttctgcttgatctgatctatt

SEQ ID NO: 30264 - DNA, 22 bp, Artificial Sequence
  chemically synthesized
ttctgcttgatctgatctattg

SEQ ID NO: 30265 - DNA, 22 bp, Artificial Sequence
  chemically synthesized
ctgcttgatctgatctattgtt

SEQ ID NO: 30266 - DNA, 22 bp, Artificial Sequence
  chemically synthesized
tgcttgatctgatctattgttg

SEQ ID NO: 30267 - DNA, 22 bp, Artificial Sequence
  chemically synthesized
cttgatctgatctattgttgaa

SEQ ID NO: 30268 - DNA, 22 bp, Artificial Sequence
  chemically synthesized
gatctgatctattgttgaagtt

SEQ ID NO: 30269 - DNA, 22 bp, Artificial Sequence
  chemically synthesized
atctgatctattgttgaagttt

SEQ ID NO: 30270 - DNA, 22 bp, Artificial Sequence
  chemically synthesized
atctattgttgaagtttttgaa

SEQ ID NO: 30271 - DNA, 22 bp, Artificial Sequence
  chemically synthesized
ttgttgaagtttttgaatgtat

SEQ ID NO: 30272 - DNA, 22 bp, Artificial Sequence
  chemically synthesized
ttgaagtttttgaatgtatttt

SEQ ID NO: 30273 - DNA, 22 bp, Artificial Sequence
  chemically synthesized
aagtttttgaatgtattttgta

SEQ ID NO: 30274 - DNA, 22 bp, Artificial Sequence
  chemically synthesized
ttgaatgtattttgtatttctt

SEQ ID NO: 30275 - DNA, 22 bp, Artificial Sequence
  chemically synthesized
tgaatgtattttgtatttcttt

SEQ ID NO: 30276 - DNA, 22 bp, Artificial Sequence
  chemically synthesized
gaatgtattttgtatttctttc

SEQ ID NO: 30277 - DNA, 22 bp, Artificial Sequence
  chemically synthesized
aatgtattttgtatttctttca

SEQ ID NO: 30278 - DNA, 22 bp, Artificial Sequence
  chemically synthesized
tgtatttctttcaataaactct

SEQ ID NO: 30279 - DNA, 22 bp, Artificial Sequence
  chemically synthesized
gtatttctttcaataaactctt

SEQ ID NO: 30280 - DNA, 22 bp, Artificial Sequence
  chemically synthesized
tatttctttcaataaactcttc

SEQ ID NO: 30281 - DNA, 22 bp, Artificial Sequence
  chemically synthesized
ctttcaataaactcttcagtta

SEQ ID NO: 30282 - DNA, 22 bp, Artificial Sequence
  chemically synthesized
tttcaataaactcttcagttac

SEQ ID NO: 30283 - DNA, 22 bp, Artificial Sequence
  chemically synthesized
tcaataaactcttcagttacag

SEQ ID NO: 30284 - DNA, 22 bp, Artificial Sequence
  chemically synthesized
caataaactcttcagttacaga

SEQ ID NO: 30285 - DNA, 22 bp, Artificial Sequence
  chemically synthesized
aataaactcttcagttacagaa

SEQ ID NO: 30286 - DNA, 22 bp, Artificial Sequence
  chemically synthesized
ttcagttacagaatttctgttt

SEQ ID NO: 30287 - DNA, 22 bp, Artificial Sequence
  chemically synthesized
cagttacagaatttctgtttgg

SEQ ID NO: 30288 - DNA, 22 bp, Artificial Sequence
  chemically synthesized
agttacagaatttctgtttggt

SEQ ID NO: 30289 - DNA, 22 bp, Artificial Sequence
  chemically synthesized
cagaatttctgtttggttcatt

SEQ ID NO: 30290 - DNA, 22 bp, Artificial Sequence
  chemically synthesized
ctgtttggttcattcttgttgt

SEQ ID NO: 30291 - DNA, 22 bp, Artificial Sequence
  chemically synthesized
tgtttggttcattcttgttgta

SEQ ID NO: 30292 - DNA, 22 bp, Artificial Sequence
  chemically synthesized
tttggttcattcttgttgtatc

SEQ ID NO: 30293 - DNA, 22 bp, Artificial Sequence
  chemically synthesized
ggttcattcttgttgtatctat

SEQ ID NO: 30294 - DNA, 22 bp, Artificial Sequence
  chemically synthesized
gttcattcttgttgtatctatc

SEQ ID NO: 30295 - DNA, 22 bp, Artificial Sequence
  chemically synthesized
attcttgttgtatctatctctt

SEQ ID NO: 30296 - DNA, 22 bp, Artificial Sequence
  chemically synthesized
ttgttgtatctatctcttgggt

SEQ ID NO: 30297 - DNA, 22 bp, Artificial Sequence
  chemically synthesized
gttgtatctatctcttgggtaa

SEQ ID NO: 30298 - DNA, 22 bp, Artificial Sequence
  chemically synthesized
ttgtatctatctcttgggtaaa

SEQ ID NO: 30299 - DNA, 22 bp, Artificial Sequence
  chemically synthesized
tatctatctcttgggtaaattt

SEQ ID NO: 30300 - DNA, 22 bp, Artificial Sequence
  chemically synthesized
tctcttgggtaaatttctcatt

SEQ ID NO: 30301 - DNA, 22 bp, Artificial Sequence
  chemically synthesized
ttgggtaaatttctcattcata

SEQ ID NO: 30302 - DNA, 22 bp, Artificial Sequence
  chemically synthesized
gggtaaatttctcattcatatc

SEQ ID NO: 30303 - DNA, 22 bp, Artificial Sequence
  chemically synthesized
ggtaaatttctcattcatatcc

SEQ ID NO: 30304 - DNA, 22 bp, Artificial Sequence
  chemically synthesized
ctcattcatatcctgaattgtt

SEQ ID NO: 30305 - DNA, 22 bp, Artificial Sequence
  chemically synthesized
tcattcatatcctgaattgttt

SEQ ID NO: 30306 - DNA, 22 bp, Artificial Sequence
  chemically synthesized
attcatatcctgaattgttttt

SEQ ID NO: 30307 - DNA, 22 bp, Artificial Sequence
  chemically synthesized
atatcctgaattgtttttctga

SEQ ID NO: 30308 - DNA, 22 bp, Artificial Sequence
  chemically synthesized
aattgtttttctgatttctttt

SEQ ID NO: 30309 - DNA, 22 bp, Artificial Sequence
  chemically synthesized
tttttctgatttctttttattg

SEQ ID NO: 30310 - DNA, 22 bp, Artificial Sequence
  chemically synthesized
ttctgatttctttttattgttt

SEQ ID NO: 30311 - DNA, 22 bp, Artificial Sequence
  chemically synthesized
tctgatttctttttattgttta

SEQ ID NO: 30312 - DNA, 22 bp, Artificial Sequence
  chemically synthesized
ctgatttctttttattgtttat

SEQ ID NO: 30313 - DNA, 22 bp, Artificial Sequence
  chemically synthesized
tgatttctttttattgtttatc

SEQ ID NO: 30314 - DNA, 22 bp, Artificial Sequence
  chemically synthesized
atttctttttattgtttatctg

SEQ ID NO: 30315 - DNA, 22 bp, Artificial Sequence
  chemically synthesized
ctttttattgtttatctgagtt

SEQ ID NO: 30316 - DNA, 22 bp, Artificial Sequence
  chemically synthesized
tttttattgtttatctgagttc

SEQ ID NO: 30317 - DNA, 22 bp, Artificial Sequence
  chemically synthesized
tttattgtttatctgagttctc

SEQ ID NO: 30318 - DNA, 22 bp, Artificial Sequence
  chemically synthesized
ttattgtttatctgagttctct

SEQ ID NO: 30319 - DNA, 22 bp, Artificial Sequence
  chemically synthesized
tattgtttatctgagttctctt

SEQ ID NO: 30320 - DNA, 22 bp, Artificial Sequence
  chemically synthesized
attgtttatctgagttctcttg

SEQ ID NO: 30321 - DNA, 22 bp, Artificial Sequence
  chemically synthesized
ttgtttatctgagttctcttgt

SEQ ID NO: 30322 - DNA, 22 bp, Artificial Sequence
  chemically synthesized
tttatctgagttctcttgtgtc

SEQ ID NO: 30323 - DNA, 22 bp, Artificial Sequence
  chemically synthesized
atctgagttctcttgtgtctca

SEQ ID NO: 30324 - DNA, 22 bp, Artificial Sequence
  chemically synthesized
tctgagttctcttgtgtctcac

SEQ ID NO: 30325 - DNA, 22 bp, Artificial Sequence
  chemically synthesized
agttctcttgtgtctcactgag

SEQ ID NO: 30326 - DNA, 22 bp, Artificial Sequence
  chemically synthesized
tcttgtgtctcactgagcttcc

SEQ ID NO: 30327 - DNA, 22 bp, Artificial Sequence
  chemically synthesized
ttgtgtctcactgagcttcctt

SEQ ID NO: 30328 - DNA, 22 bp, Artificial Sequence
  chemically synthesized
gtgtctcactgagcttccttaa

SEQ ID NO: 30329 - DNA, 22 bp, Artificial Sequence
  chemically synthesized
tgtctcactgagcttccttaat

SEQ ID NO: 30330 - DNA, 22 bp, Artificial Sequence
  chemically synthesized
actgagcttccttaatatcaac

SEQ ID NO: 30331 - DNA, 22 bp, Artificial Sequence
  chemically synthesized
agcttccttaatatcaacattt

SEQ ID NO: 30332 - DNA, 22 bp, Artificial Sequence
  chemically synthesized
ccttaatatcaacattttggat

SEQ ID NO: 30333 - DNA, 22 bp, Artificial Sequence
  chemically synthesized
cttaatatcaacattttggatt

SEQ ID NO: 30334 - DNA, 22 bp, Artificial Sequence
  chemically synthesized
aatatcaacattttggattctt

SEQ ID NO: 30335 - DNA, 22 bp, Artificial Sequence
  chemically synthesized
atatcaacattttggattcttt

SEQ ID NO: 30336 - DNA, 22 bp, Artificial Sequence
  chemically synthesized
tggattcttttttccagaattt

SEQ ID NO: 30337 - DNA, 22 bp, Artificial Sequence
  chemically synthesized
ggattcttttttccagaatttt

SEQ ID NO: 30338 - DNA, 22 bp, Artificial Sequence
  chemically synthesized
gattcttttttccagaatttta

SEQ ID NO: 30339 - DNA, 22 bp, Artificial Sequence
  chemically synthesized
ttttttccagaattttataaat

SEQ ID NO: 30340 - DNA, 22 bp, Artificial Sequence
  chemically synthesized
ttttccagaattttataaatgt

SEQ ID NO: 30341 - DNA, 22 bp, Artificial Sequence
  chemically synthesized
tttccagaattttataaatgtc

SEQ ID NO: 30342 - DNA, 22 bp, Artificial Sequence
  chemically synthesized
ttccagaattttataaatgtct

SEQ ID NO: 30343 - DNA, 22 bp, Artificial Sequence
  chemically synthesized
tccagaattttataaatgtctt

SEQ ID NO: 30344 - DNA, 22 bp, Artificial Sequence
  chemically synthesized
ccagaattttataaatgtcttt

SEQ ID NO: 30345 - DNA, 22 bp, Artificial Sequence
  chemically synthesized
cagaattttataaatgtctttt

SEQ ID NO: 30346 - DNA, 22 bp, Artificial Sequence
  chemically synthesized
tataaatgtcttttttttccac

SEQ ID NO: 30347 - DNA, 22 bp, Artificial Sequence
  chemically synthesized
ataaatgtcttttttttccact

SEQ ID NO: 30348 - DNA, 22 bp, Artificial Sequence
  chemically synthesized
taaatgtcttttttttccactg

SEQ ID NO: 30349 - DNA, 22 bp, Artificial Sequence
  chemically synthesized
ttttttccactggcttatgttg

SEQ ID NO: 30350 - DNA, 22 bp, Artificial Sequence
  chemically synthesized
tttttccactggcttatgttgc

SEQ ID NO: 30351 - DNA, 22 bp, Artificial Sequence
  chemically synthesized
ttttccactggcttatgttgct

SEQ ID NO: 30352 - DNA, 22 bp, Artificial Sequence
  chemically synthesized
tttccactggcttatgttgctg

SEQ ID NO: 30353 - DNA, 22 bp, Artificial Sequence
  chemically synthesized
ttccactggcttatgttgctga

SEQ ID NO: 30354 - DNA, 22 bp, Artificial Sequence
  chemically synthesized
tccactggcttatgttgctgaa

SEQ ID NO: 30355 - DNA, 22 bp, Artificial Sequence
  chemically synthesized
ccactggcttatgttgctgaag

SEQ ID NO: 30356 - DNA, 22 bp, Artificial Sequence
  chemically synthesized
cactggcttatgttgctgaaga

SEQ ID NO: 30357 - DNA, 22 bp, Artificial Sequence
  chemically synthesized
gcttatgttgctgaagaattat

SEQ ID NO: 30358 - DNA, 22 bp, Artificial Sequence
  chemically synthesized
atgttgctgaagaattattaaa

SEQ ID NO: 30359 - DNA, 22 bp, Artificial Sequence
  chemically synthesized
tgttgctgaagaattattaaat

SEQ ID NO: 30360 - DNA, 22 bp, Artificial Sequence
  chemically synthesized
ctgaagaattattaaattcctt

SEQ ID NO: 30361 - DNA, 22 bp, Artificial Sequence
  chemically synthesized
aagaattattaaattcctttgg

SEQ ID NO: 30362 - DNA, 22 bp, Artificial Sequence
  chemically synthesized
ttaaattcctttggaagtgtca

SEQ ID NO: 30363 - DNA, 22 bp, Artificial Sequence
  chemically synthesized
aattcctttggaagtgtcatat

SEQ ID NO: 30364 - DNA, 22 bp, Artificial Sequence
  chemically synthesized
ctttggaagtgtcatatttctt

SEQ ID NO: 30365 - DNA, 22 bp, Artificial Sequence
  chemically synthesized
tggaagtgtcatatttcttcac

SEQ ID NO: 30366 - DNA, 22 bp, Artificial Sequence
  chemically synthesized
ggaagtgtcatatttcttcacc

SEQ ID NO: 30367 - DNA, 22 bp, Artificial Sequence
  chemically synthesized
gaagtgtcatatttcttcacct

SEQ ID NO: 30368 - DNA, 22 bp, Artificial Sequence
  chemically synthesized
cttcacctttttatgtttattt

SEQ ID NO: 30369 - DNA, 22 bp, Artificial Sequence
  chemically synthesized
ttcacctttttatgtttatttt

SEQ ID NO: 30370 - DNA, 22 bp, Artificial Sequence
  chemically synthesized
cacctttttatgtttattttgt

SEQ ID NO: 30371 - DNA, 22 bp, Artificial Sequence
  chemically synthesized
acctttttatgtttattttgtt

SEQ ID NO: 30372 - DNA, 22 bp, Artificial Sequence
  chemically synthesized
tttatgtttattttgttcttgc

SEQ ID NO: 30373 - DNA, 22 bp, Artificial Sequence
  chemically synthesized
ttatgtttattttgttcttgca

SEQ ID NO: 30374 - DNA, 22 bp, Artificial Sequence
  chemically synthesized
tatgtttattttgttcttgcat

SEQ ID NO: 30375 - DNA, 22 bp, Artificial Sequence
  chemically synthesized
atgtttattttgttcttgcatt

SEQ ID NO: 30376 - DNA, 22 bp, Artificial Sequence
  chemically synthesized
tgtttattttgttcttgcattg

SEQ ID NO: 30377 - DNA, 22 bp, Artificial Sequence
  chemically synthesized
attttgttcttgcattgatatc

SEQ ID NO: 30378 - DNA, 22 bp, Artificial Sequence
  chemically synthesized
ttttgttcttgcattgatatct

SEQ ID NO: 30379 - DNA, 22 bp, Artificial Sequence
  chemically synthesized
tgttcttgcattgatatctctg

SEQ ID NO: 30380 - DNA, 22 bp, Artificial Sequence
  chemically synthesized
gttcttgcattgatatctctgc

SEQ ID NO: 30381 - DNA, 22 bp, Artificial Sequence
  chemically synthesized
ttcttgcattgatatctctgca

SEQ ID NO: 30382 - DNA, 22 bp, Artificial Sequence
  chemically synthesized
ttgcattgatatctctgcatct

SEQ ID NO: 30383 - DNA, 22 bp, Artificial Sequence
  chemically synthesized
gcattgatatctctgcatctgg

SEQ ID NO: 30384 - DNA, 22 bp, Artificial Sequence
  chemically synthesized
cattgatatctctgcatctggt

SEQ ID NO: 30385 - DNA, 22 bp, Artificial Sequence
  chemically synthesized
atatctctgcatctggtgtaat

SEQ ID NO: 30386 - DNA, 22 bp, Artificial Sequence
  chemically synthesized
tgcatctggtgtaatgattgct

SEQ ID NO: 30387 - DNA, 22 bp, Artificial Sequence
  chemically synthesized
catctggtgtaatgattgctgc

SEQ ID NO: 30388 - DNA, 22 bp, Artificial Sequence
  chemically synthesized
gtgtaatgattgctgcttccag

SEQ ID NO: 30389 - DNA, 22 bp, Artificial Sequence
  chemically synthesized
ctgcttccagttttgtaaattt

SEQ ID NO: 30390 - DNA, 22 bp, Artificial Sequence
  chemically synthesized
cttccagttttgtaaatttgtt

SEQ ID NO: 30391 - DNA, 22 bp, Artificial Sequence
  chemically synthesized
ccagttttgtaaatttgttttt

SEQ ID NO: 30392 - DNA, 22 bp, Artificial Sequence
  chemically synthesized
cagttttgtaaatttgtttttg

SEQ ID NO: 30393 - DNA, 22 bp, Artificial Sequence
  chemically synthesized
tgtaaatttgtttttgtagggg

SEQ ID NO: 30394 - DNA, 22 bp, Artificial Sequence
  chemically synthesized
gtaaatttgtttttgtagggga

SEQ ID NO: 30395 - DNA, 22 bp, Artificial Sequence
  chemically synthesized
taaatttgtttttgtaggggaa

SEQ ID NO: 30396 - DNA, 22 bp, Artificial Sequence
  chemically synthesized
gtttttgtaggggaagactttt

SEQ ID NO: 30397 - DNA, 22 bp, Artificial Sequence
  chemically synthesized
tttttgtaggggaagacttttt

SEQ ID NO: 30398 - DNA, 22 bp, Artificial Sequence
  chemically synthesized
ttgtaggggaagacttttttct

SEQ ID NO: 30399 - DNA, 22 bp, Artificial Sequence
  chemically synthesized
tgtaggggaagacttttttctg

SEQ ID NO: 30400 - DNA, 22 bp, Artificial Sequence
  chemically synthesized
gtaggggaagacttttttctga

SEQ ID NO: 30401 - DNA, 22 bp, Artificial Sequence
  chemically synthesized
taggggaagacttttttctgaa

SEQ ID NO: 30402 - DNA, 22 bp, Artificial Sequence
  chemically synthesized
ttttctgaagatgtatcttggt

SEQ ID NO: 30403 - DNA, 22 bp, Artificial Sequence
  chemically synthesized
tttctgaagatgtatcttggtg

SEQ ID NO: 30404 - DNA, 22 bp, Artificial Sequence
  chemically synthesized
ttctgaagatgtatcttggtgt

SEQ ID NO: 30405 - DNA, 22 bp, Artificial Sequence
  chemically synthesized
tctgaagatgtatcttggtgtt

SEQ ID NO: 30406 - DNA, 22 bp, Artificial Sequence
  chemically synthesized
ctgaagatgtatcttggtgttg

SEQ ID NO: 30407 - DNA, 22 bp, Artificial Sequence
  chemically synthesized
tgaagatgtatcttggtgttga

SEQ ID NO: 30408 - DNA, 22 bp, Artificial Sequence
  chemically synthesized
aagatgtatcttggtgttgatt

SEQ ID NO: 30409 - DNA, 22 bp, Artificial Sequence
  chemically synthesized
ggtgttgattgagtagggcact

SEQ ID NO: 30410 - DNA, 22 bp, Artificial Sequence
  chemically synthesized
gtgttgattgagtagggcactt

SEQ ID NO: 30411 - DNA, 22 bp, Artificial Sequence
  chemically synthesized
attgagtagggcactttgattt

SEQ ID NO: 30412 - DNA, 22 bp, Artificial Sequence
  chemically synthesized
agtagggcactttgattttgat

SEQ ID NO: 30413 - DNA, 22 bp, Artificial Sequence
  chemically synthesized
tgattttgatttctaggtgcat

SEQ ID NO: 30414 - DNA, 22 bp, Artificial Sequence
  chemically synthesized
gattttgatttctaggtgcata

SEQ ID NO: 30415 - DNA, 22 bp, Artificial Sequence
  chemically synthesized
attttgatttctaggtgcatac

SEQ ID NO: 30416 - DNA, 22 bp, Artificial Sequence
  chemically synthesized
tgatttctaggtgcatacagca

SEQ ID NO: 30417 - DNA, 22 bp, Artificial Sequence
  chemically synthesized
gatttctaggtgcatacagcag

SEQ ID NO: 30418 - DNA, 22 bp, Artificial Sequence
  chemically synthesized
atttctaggtgcatacagcagc

SEQ ID NO: 30419 - DNA, 22 bp, Artificial Sequence
  chemically synthesized
ctaggtgcatacagcagcatag

SEQ ID NO: 30420 - DNA, 22 bp, Artificial Sequence
  chemically synthesized
taggtgcatacagcagcatagt

SEQ ID NO: 30421 - DNA, 22 bp, Artificial Sequence
  chemically synthesized
ggtgcatacagcagcatagtct

SEQ ID NO: 30422 - DNA, 22 bp, Artificial Sequence
  chemically synthesized
catattattttttttcagctgc

SEQ ID NO: 30423 - DNA, 22 bp, Artificial Sequence
  chemically synthesized
atattattttttttcagctgcc

SEQ ID NO: 30424 - DNA, 22 bp, Artificial Sequence
  chemically synthesized
ttttttttcagctgccaacagt

SEQ ID NO: 30425 - DNA, 22 bp, Artificial Sequence
  chemically synthesized
tttttcagctgccaacagtatc

SEQ ID NO: 30426 - DNA, 22 bp, Artificial Sequence
  chemically synthesized
ttttcagctgccaacagtatca

SEQ ID NO: 30427 - DNA, 22 bp, Artificial Sequence
  chemically synthesized
tttcagctgccaacagtatcat

SEQ ID NO: 30428 - DNA, 22 bp, Artificial Sequence
  chemically synthesized
ttcagctgccaacagtatcatc

SEQ ID NO: 30429 - DNA, 22 bp, Artificial Sequence
  chemically synthesized
tcagctgccaacagtatcatca

SEQ ID NO: 30430 - DNA, 22 bp, Artificial Sequence
  chemically synthesized
cagctgccaacagtatcatcag

SEQ ID NO: 30431 - DNA, 22 bp, Artificial Sequence
  chemically synthesized
agctgccaacagtatcatcagt

SEQ ID NO: 30432 - DNA, 22 bp, Artificial Sequence
  chemically synthesized
ccaacagtatcatcagtgtctg

SEQ ID NO: 30433 - DNA, 22 bp, Artificial Sequence
  chemically synthesized
tgattttttcagtggcttaggg

SEQ ID NO: 30434 - DNA, 22 bp, Artificial Sequence
  chemically synthesized
tttcagtggcttagggtgcatt

SEQ ID NO: 30435 - DNA, 22 bp, Artificial Sequence
  chemically synthesized
ttcagtggcttagggtgcattt

SEQ ID NO: 30436 - DNA, 22 bp, Artificial Sequence
  chemically synthesized
tcagtggcttagggtgcatttg

SEQ ID NO: 30437 - DNA, 22 bp, Artificial Sequence
  chemically synthesized
cagtggcttagggtgcatttgt

SEQ ID NO: 30438 - DNA, 22 bp, Artificial Sequence
  chemically synthesized
agtggcttagggtgcatttgtt

SEQ ID NO: 30439 - DNA, 22 bp, Artificial Sequence
  chemically synthesized
agggtgcatttgttagtgaagg

SEQ ID NO: 30440 - DNA, 22 bp, Artificial Sequence
  chemically synthesized
gggtgcatttgttagtgaaggt

SEQ ID NO: 30441 - DNA, 22 bp, Artificial Sequence
  chemically synthesized
gttagtgaaggtggtgatgagg

SEQ ID NO: 30442 - DNA, 22 bp, Artificial Sequence
  chemically synthesized
ttagtgaaggtggtgatgaggt

SEQ ID NO: 30443 - DNA, 22 bp, Artificial Sequence
  chemically synthesized
gtgaaggtggtgatgaggttgt

SEQ ID NO: 30444 - DNA, 22 bp, Artificial Sequence
  chemically synthesized
tgctggagacaagaatatcaag

SEQ ID NO: 30445 - DNA, 22 bp, Artificial Sequence
  chemically synthesized
gagacaagaatatcaagtgggc

SEQ ID NO: 30446 - DNA, 22 bp, Artificial Sequence
  chemically synthesized
ggccccagtggtggtggtgggc

SEQ ID NO: 30447 - DNA, 22 bp, Artificial Sequence
  chemically synthesized
gccccagtggtggtggtgggcc

SEQ ID NO: 30448 - DNA, 22 bp, Artificial Sequence
  chemically synthesized
gcattcctgtccttgggcccca

SEQ ID NO: 30449 - DNA, 22 bp, Artificial Sequence
  chemically synthesized
ctgtccttgggccccatggctg

SEQ ID NO: 30450 - DNA, 22 bp, Artificial Sequence
  chemically synthesized
tccttgggccccatggctgtgt

SEQ ID NO: 30451 - DNA, 22 bp, Artificial Sequence
  chemically synthesized
gggccccatggctgtgtacatt

SEQ ID NO: 30452 - DNA, 22 bp, Artificial Sequence
  chemically synthesized
ggccccatggctgtgtacattg

SEQ ID NO: 30453 - DNA, 22 bp, Artificial Sequence
  chemically synthesized
tgtacattggcactgatggtaa

SEQ ID NO: 30454 - DNA, 22 bp, Artificial Sequence
  chemically synthesized
gcactgatggtaatgagtctag

SEQ ID NO: 30455 - DNA, 22 bp, Artificial Sequence
  chemically synthesized
atggtaatgagtctagttgggt

SEQ ID NO: 30456 - DNA, 22 bp, Artificial Sequence
  chemically synthesized
gttgggttgattctttggcctt

SEQ ID NO: 30457 - DNA, 22 bp, Artificial Sequence
  chemically synthesized
ggttgattctttggccttcagg

SEQ ID NO: 30458 - DNA, 22 bp, Artificial Sequence
  chemically synthesized
attctttggccttcaggcagtt

SEQ ID NO: 30459 - DNA, 22 bp, Artificial Sequence
  chemically synthesized
tttggccttcaggcagtttgct

SEQ ID NO: 30460 - DNA, 22 bp, Artificial Sequence
  chemically synthesized
tggccttcaggcagtttgcttg

SEQ ID NO: 30461 - DNA, 22 bp, Artificial Sequence
  chemically synthesized
ggccttcaggcagtttgcttgg

SEQ ID NO: 30462 - DNA, 22 bp, Artificial Sequence
  chemically synthesized
gccttcaggcagtttgcttggg

SEQ ID NO: 30463 - DNA, 22 bp, Artificial Sequence
  chemically synthesized
caggcagtttgcttgggtgtca

SEQ ID NO: 30464 - DNA, 22 bp, Artificial Sequence
  chemically synthesized
aggcagtttgcttgggtgtcag

SEQ ID NO: 30465 - DNA, 22 bp, Artificial Sequence
  chemically synthesized
gcttgggtgtcagtagtggcca

SEQ ID NO: 30466 - DNA, 22 bp, Artificial Sequence
  chemically synthesized
cttgggtgtcagtagtggccat

SEQ ID NO: 30467 - DNA, 22 bp, Artificial Sequence
  chemically synthesized
gggtgtcagtagtggccatagt

SEQ ID NO: 30468 - DNA, 22 bp, Artificial Sequence
  chemically synthesized
ggtgtcagtagtggccatagta

SEQ ID NO: 30469 - DNA, 22 bp, Artificial Sequence
  chemically synthesized
ggctggtgtgtgggtcctcagg

SEQ ID NO: 30470 - DNA, 22 bp, Artificial Sequence
  chemically synthesized
gtgtgtgggtcctcaggcttct

SEQ ID NO: 30471 - DNA, 22 bp, Artificial Sequence
  chemically synthesized
aggcttctggacagtgggtgtg

SEQ ID NO: 30472 - DNA, 22 bp, Artificial Sequence
  chemically synthesized
ctggacagtgggtgtggtgtgg

SEQ ID NO: 30473 - DNA, 22 bp, Artificial Sequence
  chemically synthesized
tggacagtgggtgtggtgtggg

SEQ ID NO: 30474 - DNA, 22 bp, Artificial Sequence
  chemically synthesized
gacagtgggtgtggtgtgggtg

SEQ ID NO: 30475 - DNA, 22 bp, Artificial Sequence
  chemically synthesized
tagcaactgcaggacaaccctc

SEQ ID NO: 30476 - DNA, 22 bp, Artificial Sequence
  chemically synthesized
caggacaaccctctggctccca

SEQ ID NO: 30477 - DNA, 22 bp, Artificial Sequence
  chemically synthesized
tggctcccaagcagtctgcact

SEQ ID NO: 30478 - DNA, 22 bp, Artificial Sequence
  chemically synthesized
gctcccaagcagtctgcactgg

SEQ ID NO: 30479 - DNA, 22 bp, Artificial Sequence
  chemically synthesized
ccaagcagtctgcactggtgtt

SEQ ID NO: 30480 - DNA, 22 bp, Artificial Sequence
  chemically synthesized
cactggtgttggtggtggctgc

SEQ ID NO: 30481 - DNA, 22 bp, Artificial Sequence
  chemically synthesized
gtgttggtggtggctgcaaggg

SEQ ID NO: 30482 - DNA, 22 bp, Artificial Sequence
  chemically synthesized
gtggtggctgcaagggctgaat

SEQ ID NO: 30483 - DNA, 22 bp, Artificial Sequence
  chemically synthesized
caagggctgaatgagccagtct

SEQ ID NO: 30484 - DNA, 22 bp, Artificial Sequence
  chemically synthesized
aatgagccagtcttcagaccca

SEQ ID NO: 30485 - DNA, 22 bp, Artificial Sequence
  chemically synthesized
cagacccacaggtggcacatgc

SEQ ID NO: 30486 - DNA, 22 bp, Artificial Sequence
  chemically synthesized
agacccacaggtggcacatgca

SEQ ID NO: 30487 - DNA, 22 bp, Artificial Sequence
  chemically synthesized
tgatggcagtggcagattgggt

SEQ ID NO: 30488 - DNA, 22 bp, Artificial Sequence
  chemically synthesized
ggtaggcccatcatcaggcttc

SEQ ID NO: 30489 - DNA, 22 bp, Artificial Sequence
  chemically synthesized
ctgggagggttgcttaggtacc

SEQ ID NO: 30490 - DNA, 22 bp, Artificial Sequence
  chemically synthesized
tgggagggttgcttaggtacca

SEQ ID NO: 30491 - DNA, 22 bp, Artificial Sequence
  chemically synthesized
ggagggttgcttaggtaccagt

SEQ ID NO: 30492 - DNA, 22 bp, Artificial Sequence
  chemically synthesized
cttaggtaccagtcatggtgga

SEQ ID NO: 30493 - DNA, 22 bp, Artificial Sequence
  chemically synthesized
aggtaccagtcatggtggatgg

SEQ ID NO: 30494 - DNA, 22 bp, Artificial Sequence
  chemically synthesized
ggtaccagtcatggtggatggc

SEQ ID NO: 30495 - DNA, 22 bp, Artificial Sequence
  chemically synthesized
tctctgggttcccagacaactt

SEQ ID NO: 30496 - DNA, 22 bp, Artificial Sequence
  chemically synthesized
tgggttcccagacaacttgctt

SEQ ID NO: 30497 - DNA, 22 bp, Artificial Sequence
  chemically synthesized
ggttcccagacaacttgcttag

SEQ ID NO: 30498 - DNA, 22 bp, Artificial Sequence
  chemically synthesized
ccagacaacttgcttaggcatt

SEQ ID NO: 30499 - DNA, 22 bp, Artificial Sequence
  chemically synthesized
gcttaggcattgaggaaggcaa

SEQ ID NO: 30500 - DNA, 22 bp, Artificial Sequence
  chemically synthesized
cttaggcattgaggaaggcaaa

SEQ ID NO: 30501 - DNA, 22 bp, Artificial Sequence
  chemically synthesized
aggcattgaggaaggcaaagcc

SEQ ID NO: 30502 - DNA, 22 bp, Artificial Sequence
  chemically synthesized
ggcattgaggaaggcaaagcca

SEQ ID NO: 30503 - DNA, 22 bp, Artificial Sequence
  chemically synthesized
aggaaggcaaagccaggctggg

SEQ ID NO: 30504 - DNA, 22 bp, Artificial Sequence
  chemically synthesized
ggtgttcctgacctcaggccac

SEQ ID NO: 30505 - DNA, 22 bp, Artificial Sequence
  chemically synthesized
ctgacctcaggccactcagtgg

SEQ ID NO: 30506 - DNA, 22 bp, Artificial Sequence
  chemically synthesized
acctcaggccactcagtggtgt

SEQ ID NO: 30507 - DNA, 22 bp, Artificial Sequence
  chemically synthesized
aggccactcagtggtgtgtgtg

SEQ ID NO: 30508 - DNA, 22 bp, Artificial Sequence
  chemically synthesized
agtggtgtgtgtggacaccggc

SEQ ID NO: 30509 - DNA, 22 bp, Artificial Sequence
  chemically synthesized
tcataggctggagtggagtgat

SEQ ID NO: 30510 - DNA, 22 bp, Artificial Sequence
  chemically synthesized
gagtggagtgatcctcaggccc

SEQ ID NO: 30511 - DNA, 22 bp, Artificial Sequence
  chemically synthesized
aggcccccagcagaatgcctga

SEQ ID NO: 30512 - DNA, 22 bp, Artificial Sequence
  chemically synthesized
agtgaattagcagctactgcat

SEQ ID NO: 30513 - DNA, 22 bp, Artificial Sequence
  chemically synthesized
gcagctactgcattgttgccct

SEQ ID NO: 30514 - DNA, 22 bp, Artificial Sequence
  chemically synthesized
ctgcattgttgccctgctcttg

SEQ ID NO: 30515 - DNA, 22 bp, Artificial Sequence
  chemically synthesized
cattgttgccctgctcttgaag

SEQ ID NO: 30516 - DNA, 22 bp, Artificial Sequence
  chemically synthesized
ttgccctgctcttgaaggggtg

SEQ ID NO: 30517 - DNA, 22 bp, Artificial Sequence
  chemically synthesized
ccctgctcttgaaggggtgcgg

SEQ ID NO: 30518 - DNA, 22 bp, Artificial Sequence
  chemically synthesized
ctcttgaaggggtgcggggtgt

SEQ ID NO: 30519 - DNA, 22 bp, Artificial Sequence
  chemically synthesized
ttgaaggggtgcggggtgtgtt

SEQ ID NO: 30520 - DNA, 22 bp, Artificial Sequence
  chemically synthesized
gaaggggtgcggggtgtgttgc

SEQ ID NO: 30521 - DNA, 22 bp, Artificial Sequence
  chemically synthesized
aaggggtgcggggtgtgttgct

SEQ ID NO: 30522 - DNA, 22 bp, Artificial Sequence
  chemically synthesized
ctttcagtggcagcagctataa

SEQ ID NO: 30523 - DNA, 22 bp, Artificial Sequence
  chemically synthesized
tcagtggcagcagctataaatg

SEQ ID NO: 30524 - DNA, 22 bp, Artificial Sequence
  chemically synthesized
cagtggcagcagctataaatgg

SEQ ID NO: 30525 - DNA, 22 bp, Artificial Sequence
  chemically synthesized
agtggcagcagctataaatggg

SEQ ID NO: 30526 - DNA, 22 bp, Artificial Sequence
  chemically synthesized
taaatgggttgctggtgggcat

SEQ ID NO: 30527 - DNA, 22 bp, Artificial Sequence
  chemically synthesized
ctggtgggcatgtgtttcagcc

SEQ ID NO: 30528 - DNA, 22 bp, Artificial Sequence
  chemically synthesized
gtgggcatgtgtttcagcccca

SEQ ID NO: 30529 - DNA, 22 bp, Artificial Sequence
  chemically synthesized
cagccccagatggtggctgcaa

SEQ ID NO: 30530 - DNA, 22 bp, Artificial Sequence
  chemically synthesized
agccccagatggtggctgcaag

SEQ ID NO: 30531 - DNA, 22 bp, Artificial Sequence
  chemically synthesized
caagtggggtagcattttctta

SEQ ID NO: 30532 - DNA, 22 bp, Artificial Sequence
  chemically synthesized
tcttagggagcttataaatgtg

SEQ ID NO: 30533 - DNA, 22 bp, Artificial Sequence
  chemically synthesized
cttagggagcttataaatgtgt

SEQ ID NO: 30534 - DNA, 22 bp, Artificial Sequence
  chemically synthesized
ttagggagcttataaatgtgta

SEQ ID NO: 30535 - DNA, 22 bp, Artificial Sequence
  chemically synthesized
agggagcttataaatgtgtagc

SEQ ID NO: 30536 - DNA, 22 bp, Artificial Sequence
  chemically synthesized
gggagcttataaatgtgtagca

SEQ ID NO: 30537 - DNA, 22 bp, Artificial Sequence
  chemically synthesized
ataaatgtgtagcagccctgct

SEQ ID NO: 30538 - DNA, 22 bp, Artificial Sequence
  chemically synthesized
taaatgtgtagcagccctgcta

SEQ ID NO: 30539 - DNA, 22 bp, Artificial Sequence
  chemically synthesized
ctactgggggtgggggagtcca

SEQ ID NO: 30540 - DNA, 22 bp, Artificial Sequence
  chemically synthesized
ctgggggtgggggagtccactt

SEQ ID NO: 30541 - DNA, 22 bp, Artificial Sequence
  chemically synthesized
ggggtgggggagtccacttcta

SEQ ID NO: 30542 - DNA, 22 bp, Artificial Sequence
  chemically synthesized
ctaatgacacactttatccctg

SEQ ID NO: 30543 - DNA, 22 bp, Artificial Sequence
  chemically synthesized
taatgacacactttatccctgg

SEQ ID NO: 30544 - DNA, 22 bp, Artificial Sequence
  chemically synthesized
atgacacactttatccctggtg

SEQ ID NO: 30545 - DNA, 22 bp, Artificial Sequence
  chemically synthesized
tatccctggtgacagcagccag

SEQ ID NO: 30546 - DNA, 22 bp, Artificial Sequence
  chemically synthesized
atccctggtgacagcagccagc

SEQ ID NO: 30547 - DNA, 22 bp, Artificial Sequence
  chemically synthesized
tccctggtgacagcagccagca

SEQ ID NO: 30548 - DNA, 22 bp, Artificial Sequence
  chemically synthesized
gtgacagcagccagcagtagca

SEQ ID NO: 30549 - DNA, 22 bp, Artificial Sequence
  chemically synthesized
agctgtgggtgggggatgtcag

SEQ ID NO: 30550 - DNA, 22 bp, Artificial Sequence
  chemically synthesized
tgggtgggggatgtcagcagag

SEQ ID NO: 30551 - DNA, 22 bp, Artificial Sequence
  chemically synthesized
cagggatgtagagatgcagatg

SEQ ID NO: 30552 - DNA, 22 bp, Artificial Sequence
  chemically synthesized
agggatgtagagatgcagatga

SEQ ID NO: 30553 - DNA, 22 bp, Artificial Sequence
  chemically synthesized
gggtctgaggaacgatgtcatc

SEQ ID NO: 30554 - DNA, 22 bp, Artificial Sequence
  chemically synthesized
aggaacgatgtcatctggtggg

SEQ ID NO: 30555 - DNA, 22 bp, Artificial Sequence
  chemically synthesized
gtgggtgttgggctctcaaaat

SEQ ID NO: 30556 - DNA, 22 bp, Artificial Sequence
  chemically synthesized
ggctctcaaaatggcaccttgc

SEQ ID NO: 30557 - DNA, 22 bp, Artificial Sequence
  chemically synthesized
tcaaaatggcaccttgctgctc

SEQ ID NO: 30558 - DNA, 22 bp, Artificial Sequence
  chemically synthesized
aaaatggcaccttgctgctcag

SEQ ID NO: 30559 - DNA, 22 bp, Artificial Sequence
  chemically synthesized
gctgctcagtaatggggatggc

SEQ ID NO: 30560 - DNA, 22 bp, Artificial Sequence
  chemically synthesized
ctgctcagtaatggggatggca

SEQ ID NO: 30561 - DNA, 22 bp, Artificial Sequence
  chemically synthesized
ctcagtaatggggatggcaggg

SEQ ID NO: 30562 - DNA, 22 bp, Artificial Sequence
  chemically synthesized
agtaatggggatggcaggggtg

SEQ ID NO: 30563 - DNA, 22 bp, Artificial Sequence
  chemically synthesized
cttctctggagcaatgcctttg

SEQ ID NO: 30564 - DNA, 22 bp, Artificial Sequence
  chemically synthesized
ctctggagcaatgcctttgtgc

SEQ ID NO: 30565 - DNA, 22 bp, Artificial Sequence
  chemically synthesized
tctggagcaatgcctttgtgcg

SEQ ID NO: 30566 - DNA, 22 bp, Artificial Sequence
  chemically synthesized
tggagcaatgcctttgtgcgat

SEQ ID NO: 30567 - DNA, 22 bp, Artificial Sequence
  chemically synthesized
gagcaatgcctttgtgcgattg

SEQ ID NO: 30568 - DNA, 22 bp, Artificial Sequence
  chemically synthesized
tgtgcgattgctgggcagttcc

SEQ ID NO: 30569 - DNA, 22 bp, Artificial Sequence
  chemically synthesized
gtgcgattgctgggcagttcct

SEQ ID NO: 30570 - DNA, 22 bp, Artificial Sequence
  chemically synthesized
tgcgattgctgggcagttcctt

SEQ ID NO: 30571 - DNA, 22 bp, Artificial Sequence
  chemically synthesized
ctgggcagttccttatgatagt

SEQ ID NO: 30572 - DNA, 22 bp, Artificial Sequence
  chemically synthesized
ggcagttccttatgatagtctc

SEQ ID NO: 30573 - DNA, 22 bp, Artificial Sequence
  chemically synthesized
cttatgatagtctcaaggcctg

SEQ ID NO: 30574 - DNA, 22 bp, Artificial Sequence
  chemically synthesized
atgatagtctcaaggcctgcat

SEQ ID NO: 30575 - DNA, 22 bp, Artificial Sequence
  chemically synthesized
tgatagtctcaaggcctgcatg

SEQ ID NO: 30576 - DNA, 22 bp, Artificial Sequence
  chemically synthesized
aaggcctgcatggtcaagggac

SEQ ID NO: 30577 - DNA, 22 bp, Artificial Sequence
  chemically synthesized
catggtcaagggactctcctgt

SEQ ID NO: 30578 - DNA, 22 bp, Artificial Sequence
  chemically synthesized
tcctgtggctaggattcctgga

SEQ ID NO: 30579 - DNA, 22 bp, Artificial Sequence
  chemically synthesized
ctgtggctaggattcctggagt

SEQ ID NO: 30580 - DNA, 22 bp, Artificial Sequence
  chemically synthesized
tggctaggattcctggagtcca

SEQ ID NO: 30581 - DNA, 22 bp, Artificial Sequence
  chemically synthesized
ggattcctggagtccataatgc

SEQ ID NO: 30582 - DNA, 22 bp, Artificial Sequence
  chemically synthesized
ctggagtccataatgcagatgt

SEQ ID NO: 30583 - DNA, 22 bp, Artificial Sequence
  chemically synthesized
gagtccataatgcagatgtgga

SEQ ID NO: 30584 - DNA, 22 bp, Artificial Sequence
  chemically synthesized
ggagtcagtcacttaactttcg

SEQ ID NO: 30585 - DNA, 22 bp, Artificial Sequence
  chemically synthesized
aactttcgatgcactggggagc

SEQ ID NO: 30586 - DNA, 22 bp, Artificial Sequence
  chemically synthesized
actttcgatgcactggggagcc

SEQ ID NO: 30587 - DNA, 22 bp, Artificial Sequence
  chemically synthesized
tcgatgcactggggagcctctc

SEQ ID NO: 30588 - DNA, 22 bp, Artificial Sequence
  chemically synthesized
cgatgcactggggagcctctct

SEQ ID NO: 30589 - DNA, 22 bp, Artificial Sequence
  chemically synthesized
gatgcactggggagcctctctg

SEQ ID NO: 30590 - DNA, 22 bp, Artificial Sequence
  chemically synthesized
gggagcctctctggcctcacag

SEQ ID NO: 30591 - DNA, 22 bp, Artificial Sequence
  chemically synthesized
tctggcctcacagaggatccct

SEQ ID NO: 30592 - DNA, 22 bp, Artificial Sequence
  chemically synthesized
tggcctcacagaggatccctac

SEQ ID NO: 30593 - DNA, 22 bp, Artificial Sequence
  chemically synthesized
gcctcacagaggatccctactg

SEQ ID NO: 30594 - DNA, 22 bp, Artificial Sequence
  chemically synthesized
acagaggatccctactgggtag

SEQ ID NO: 30595 - DNA, 22 bp, Artificial Sequence
  chemically synthesized
ctgggtaggcttccttgcttcc

SEQ ID NO: 30596 - DNA, 22 bp, Artificial Sequence
  chemically synthesized
ggtaggcttccttgcttccctc

SEQ ID NO: 30597 - DNA, 22 bp, Artificial Sequence
  chemically synthesized
ccttgcttccctccccttcatt

SEQ ID NO: 30598 - DNA, 22 bp, Artificial Sequence
  chemically synthesized
cttgcttccctccccttcattg

SEQ ID NO: 30599 - DNA, 22 bp, Artificial Sequence
  chemically synthesized
gcttccctccccttcattgcct

SEQ ID NO: 30600 - DNA, 22 bp, Artificial Sequence
  chemically synthesized
cttccctccccttcattgcctt

SEQ ID NO: 30601 - DNA, 22 bp, Artificial Sequence
  chemically synthesized
ccctccccttcattgccttaga

SEQ ID NO: 30602 - DNA, 22 bp, Artificial Sequence
  chemically synthesized
cctccccttcattgccttagat

SEQ ID NO: 30603 - DNA, 22 bp, Artificial Sequence
  chemically synthesized
cccttcattgccttagatgctt

SEQ ID NO: 30604 - DNA, 22 bp, Artificial Sequence
  chemically synthesized
cattgccttagatgcttcctgt

SEQ ID NO: 30605 - DNA, 22 bp, Artificial Sequence
  chemically synthesized
attgccttagatgcttcctgtc

SEQ ID NO: 30606 - DNA, 22 bp, Artificial Sequence
  chemically synthesized
ccttagatgcttcctgtcactt

SEQ ID NO: 30607 - DNA, 22 bp, Artificial Sequence
  chemically synthesized
agatgcttcctgtcacttctct

SEQ ID NO: 30608 - DNA, 22 bp, Artificial Sequence
  chemically synthesized
gatgcttcctgtcacttctctg

SEQ ID NO: 30609 - DNA, 22 bp, Artificial Sequence
  chemically synthesized
cctgtcacttctctgttgaatt

SEQ ID NO: 30610 - DNA, 22 bp, Artificial Sequence
  chemically synthesized
ctgtcacttctctgttgaattc

SEQ ID NO: 30611 - DNA, 22 bp, Artificial Sequence
  chemically synthesized
tcacttctctgttgaattccag

SEQ ID NO: 30612 - DNA, 22 bp, Artificial Sequence
  chemically synthesized
ctctgttgaattccagaattct

SEQ ID NO: 30613 - DNA, 22 bp, Artificial Sequence
  chemically synthesized
tctgttgaattccagaattctc

SEQ ID NO: 30614 - DNA, 22 bp, Artificial Sequence
  chemically synthesized
tgttgaattccagaattctctc

SEQ ID NO: 30615 - DNA, 22 bp, Artificial Sequence
  chemically synthesized
ttgaattccagaattctctctt

SEQ ID NO: 30616 - DNA, 22 bp, Artificial Sequence
  chemically synthesized
aattccagaattctctcttatg

SEQ ID NO: 30617 - DNA, 22 bp, Artificial Sequence
  chemically synthesized
cagaattctctcttatgtggga

SEQ ID NO: 30618 - DNA, 22 bp, Artificial Sequence
  chemically synthesized
tctcttatgtgggattttctac

SEQ ID NO: 30619 - DNA, 22 bp, Artificial Sequence
  chemically synthesized
tcttatgtgggattttctactt

SEQ ID NO: 30620 - DNA, 22 bp, Artificial Sequence
  chemically synthesized
ttatgtgggattttctacttac

SEQ ID NO: 30621 - DNA, 22 bp, Artificial Sequence
  chemically synthesized
atgtgggattttctacttacta

SEQ ID NO: 30622 - DNA, 22 bp, Artificial Sequence
  chemically synthesized
tgtgggattttctacttactat

SEQ ID NO: 30623 - DNA, 22 bp, Artificial Sequence
  chemically synthesized
tctacttactattttggttctt

SEQ ID NO: 30624 - DNA, 22 bp, Artificial Sequence
  chemically synthesized
ctacttactattttggttcttt

SEQ ID NO: 30625 - DNA, 22 bp, Artificial Sequence
  chemically synthesized
tacttactattttggttctttg

SEQ ID NO: 30626 - DNA, 22 bp, Artificial Sequence
  chemically synthesized
cttactattttggttctttgtg

SEQ ID NO: 30627 - DNA, 22 bp, Artificial Sequence
  chemically synthesized
actattttggttctttgtggag

SEQ ID NO: 30628 - DNA, 22 bp, Artificial Sequence
  chemically synthesized
ctattttggttctttgtggagg

SEQ ID NO: 30629 - DNA, 22 bp, Artificial Sequence
  chemically synthesized
ttttggttctttgtggaggagg

SEQ ID NO: 30630 - DNA, 22 bp, Artificial Sequence
  chemically synthesized
tggttctttgtggaggaggtga

SEQ ID NO: 30631 - DNA, 22 bp, Artificial Sequence
  chemically synthesized
ggttctttgtggaggaggtgag

SEQ ID NO: 30632 - DNA, 22 bp, Artificial Sequence
  chemically synthesized
gttctttgtggaggaggtgagt

SEQ ID NO: 30633 - DNA, 22 bp, Artificial Sequence
  chemically synthesized
tttgtggaggaggtgagtgtca

SEQ ID NO: 30634 - DNA, 22 bp, Artificial Sequence
  chemically synthesized
tgtggaggaggtgagtgtcagc

SEQ ID NO: 30635 - DNA, 22 bp, Artificial Sequence
  chemically synthesized
gtggaggaggtgagtgtcagct

SEQ ID NO: 30636 - DNA, 22 bp, Artificial Sequence
  chemically synthesized
tggaggaggtgagtgtcagctg

SEQ ID NO: 30637 - DNA, 22 bp, Artificial Sequence
  chemically synthesized
cccttagtcagtaatcttcaag

SEQ ID NO: 30638 - DNA, 22 bp, Artificial Sequence
  chemically synthesized
agtcagtaatcttcaagcccct

SEQ ID NO: 30639 - DNA, 22 bp, Artificial Sequence
  chemically synthesized
gtcagtaatcttcaagcccctt

SEQ ID NO: 30640 - DNA, 22 bp, Artificial Sequence
  chemically synthesized
caagccccttcccttgaaattt

SEQ ID NO: 30641 - DNA, 22 bp, Artificial Sequence
  chemically synthesized
aagccccttcccttgaaatttt

SEQ ID NO: 30642 - DNA, 22 bp, Artificial Sequence
  chemically synthesized
cccttgaaattttttaagcttt

SEQ ID NO: 30643 - DNA, 22 bp, Artificial Sequence
  chemically synthesized
ccttgaaattttttaagcttta

SEQ ID NO: 30644 - DNA, 22 bp, Artificial Sequence
  chemically synthesized
gaaattttttaagctttatgtt

SEQ ID NO: 30645 - DNA, 22 bp, Artificial Sequence
  chemically synthesized
aaattttttaagctttatgttt

SEQ ID NO: 30646 - DNA, 22 bp, Artificial Sequence
  chemically synthesized
tttaagctttatgtttttattt

SEQ ID NO: 30647 - DNA, 22 bp, Artificial Sequence
  chemically synthesized
ttaagctttatgtttttatttc

SEQ ID NO: 30648 - DNA, 22 bp, Artificial Sequence
  chemically synthesized
taagctttatgtttttatttct

SEQ ID NO: 30649 - DNA, 22 bp, Artificial Sequence
  chemically synthesized
aagctttatgtttttatttcta

SEQ ID NO: 30650 - DNA, 22 bp, Artificial Sequence
  chemically synthesized
agctttatgtttttatttctaa

SEQ ID NO: 30651 - DNA, 22 bp, Artificial Sequence
  chemically synthesized
tatgtttttatttctaatagac

SEQ ID NO: 30652 - DNA, 22 bp, Artificial Sequence
  chemically synthesized
atgtttttatttctaatagact

SEQ ID NO: 30653 - DNA, 22 bp, Artificial Sequence
  chemically synthesized
tgtttttatttctaatagactg

SEQ ID NO: 30654 - DNA, 22 bp, Artificial Sequence
  chemically synthesized
ttatttctaatagactgaaaga

SEQ ID NO: 30655 - DNA, 22 bp, Artificial Sequence
  chemically synthesized
tatttctaatagactgaaagag

SEQ ID NO: 30656 - DNA, 22 bp, Artificial Sequence
  chemically synthesized
atttctaatagactgaaagagc

SEQ ID NO: 30657 - DNA, 22 bp, Artificial Sequence
  chemically synthesized
tttctaatagactgaaagagca

SEQ ID NO: 30658 - DNA, 22 bp, Artificial Sequence
  chemically synthesized
ctaatagactgaaagagcataa

SEQ ID NO: 30659 - DNA, 22 bp, Artificial Sequence
  chemically synthesized
taatagactgaaagagcataat

SEQ ID NO: 30660 - DNA, 22 bp, Artificial Sequence
  chemically synthesized
atagactgaaagagcataatca

SEQ ID NO: 30661 - DNA, 22 bp, Artificial Sequence
  chemically synthesized
aaagagcataatcatattttaa

SEQ ID NO: 30662 - DNA, 22 bp, Artificial Sequence
  chemically synthesized
taaacactctaaggctatatgg

SEQ ID NO: 30663 - DNA, 22 bp, Artificial Sequence
  chemically synthesized
aaacactctaaggctatatggg

SEQ ID NO: 30664 - DNA, 22 bp, Artificial Sequence
  chemically synthesized
aacactctaaggctatatgggg

SEQ ID NO: 30665 - DNA, 22 bp, Artificial Sequence
  chemically synthesized
taaggctatatgggggactatc

SEQ ID NO: 30666 - DNA, 22 bp, Artificial Sequence
  chemically synthesized
aggctatatgggggactatctg

SEQ ID NO: 30667 - DNA, 22 bp, Artificial Sequence
  chemically synthesized
tatgggggactatctgaaggcc

SEQ ID NO: 30668 - DNA, 22 bp, Artificial Sequence
  chemically synthesized
tctgaaggcctcagatgagtaa

SEQ ID NO: 30669 - DNA, 22 bp, Artificial Sequence
  chemically synthesized
aaggcctcagatgagtaaaaga

SEQ ID NO: 30670 - DNA, 22 bp, Artificial Sequence
  chemically synthesized
agatgagtaaaagaagtagcga

SEQ ID NO: 30671 - DNA, 22 bp, Artificial Sequence
  chemically synthesized
gttaactatgtttttcttttca

SEQ ID NO: 30672 - DNA, 22 bp, Artificial Sequence
  chemically synthesized
actatgtttttcttttcatttc

SEQ ID NO: 30673 - DNA, 22 bp, Artificial Sequence
  chemically synthesized
tgtttttcttttcatttcattt

SEQ ID NO: 30674 - DNA, 22 bp, Artificial Sequence
  chemically synthesized
ttcttttcatttcatttcccaa

SEQ ID NO: 30675 - DNA, 22 bp, Artificial Sequence
  chemically synthesized
tcttttcatttcatttcccaaa

SEQ ID NO: 30676 - DNA, 22 bp, Artificial Sequence
  chemically synthesized
cttttcatttcatttcccaaat

SEQ ID NO: 30677 - DNA, 22 bp, Artificial Sequence
  chemically synthesized
ttttcatttcatttcccaaatc

SEQ ID NO: 30678 - DNA, 22 bp, Artificial Sequence
  chemically synthesized
ttcatttcatttcccaaatcaa

SEQ ID NO: 30679 - DNA, 22 bp, Artificial Sequence
  chemically synthesized
tcatttcatttcccaaatcaaa

SEQ ID NO: 30680 - DNA, 22 bp, Artificial Sequence
  chemically synthesized
catttcatttcccaaatcaaat

SEQ ID NO: 30681 - DNA, 22 bp, Artificial Sequence
  chemically synthesized
atttcatttcccaaatcaaatc

SEQ ID NO: 30682 - DNA, 22 bp, Artificial Sequence
  chemically synthesized
catttcccaaatcaaatcattt

SEQ ID NO: 30683 - DNA, 22 bp, Artificial Sequence
  chemically synthesized
atttcccaaatcaaatcatttg

SEQ ID NO: 30684 - DNA, 22 bp, Artificial Sequence
  chemically synthesized
cccaaatcaaatcatttgtttc

SEQ ID NO: 30685 - DNA, 22 bp, Artificial Sequence
  chemically synthesized
ccaaatcaaatcatttgtttct

SEQ ID NO: 30686 - DNA, 22 bp, Artificial Sequence
  chemically synthesized
gtttcttcaaataaagaatctc

SEQ ID NO: 30687 - DNA, 22 bp, Artificial Sequence
  chemically synthesized
tttcttcaaataaagaatctct

SEQ ID NO: 30688 - DNA, 22 bp, Artificial Sequence
  chemically synthesized
cttcaaataaagaatctctatt

SEQ ID NO: 30689 - DNA, 22 bp, Artificial Sequence
  chemically synthesized
ttcaaataaagaatctctattt

SEQ ID NO: 30690 - DNA, 22 bp, Artificial Sequence
  chemically synthesized
caaataaagaatctctatttcc

SEQ ID NO: 30691 - DNA, 22 bp, Artificial Sequence
  chemically synthesized
aaataaagaatctctatttccc

SEQ ID NO: 30692 - DNA, 22 bp, Artificial Sequence
  chemically synthesized
tatttcccccttatgttcttca

SEQ ID NO: 30693 - DNA, 22 bp, Artificial Sequence
  chemically synthesized
tttcccccttatgttcttcagc

SEQ ID NO: 30694 - DNA, 22 bp, Artificial Sequence
  chemically synthesized
cccccttatgttcttcagcaaa

SEQ ID NO: 30695 - DNA, 22 bp, Artificial Sequence
  chemically synthesized
ccccttatgttcttcagcaaat

SEQ ID NO: 30696 - DNA, 22 bp, Artificial Sequence
  chemically synthesized
atgttcttcagcaaataaaaat

SEQ ID NO: 30697 - DNA, 22 bp, Artificial Sequence
  chemically synthesized
tgttcttcagcaaataaaaatg

SEQ ID NO: 30698 - DNA, 22 bp, Artificial Sequence
  chemically synthesized
ttcagcaaataaaaatgtttgc

SEQ ID NO: 30699 - DNA, 22 bp, Artificial Sequence
  chemically synthesized
cagcaaataaaaatgtttgcat

SEQ ID NO: 30700 - DNA, 22 bp, Artificial Sequence
  chemically synthesized
agcaaataaaaatgtttgcatc

SEQ ID NO: 30701 - DNA, 22 bp, Artificial Sequence
  chemically synthesized
gcatctaccaaagtgtatatga

SEQ ID NO: 30702 - DNA, 22 bp, Artificial Sequence
  chemically synthesized
catctaccaaagtgtatatgaa

SEQ ID NO: 30703 - DNA, 22 bp, Artificial Sequence
  chemically synthesized
ccaaagtgtatatgaatttgaa

SEQ ID NO: 30704 - DNA, 22 bp, Artificial Sequence
  chemically synthesized
gaaatacgtaatctaacaaaca

SEQ ID NO: 30705 - DNA, 22 bp, Artificial Sequence
  chemically synthesized
aaatacgtaatctaacaaacaa

SEQ ID NO: 30706 - DNA, 22 bp, Artificial Sequence
  chemically synthesized
acaaacaaggatgttttaagat

SEQ ID NO: 30707 - DNA, 22 bp, Artificial Sequence
  chemically synthesized
taagatctctgagtaagatgca

SEQ ID NO: 30708 - DNA, 22 bp, Artificial Sequence
  chemically synthesized
aagatctctgagtaagatgcat

SEQ ID NO: 30709 - DNA, 22 bp, Artificial Sequence
  chemically synthesized
agatctctgagtaagatgcata

SEQ ID NO: 30710 - DNA, 22 bp, Artificial Sequence
  chemically synthesized
tgagtaagatgcatagttgcaa

SEQ ID NO: 30711 - DNA, 22 bp, Artificial Sequence
  chemically synthesized
agtaagatgcatagttgcaaat

SEQ ID NO: 30712 - DNA, 22 bp, Artificial Sequence
  chemically synthesized
caaataaaaggagttttcaagg

SEQ ID NO: 30713 - DNA, 22 bp, Artificial Sequence
  chemically synthesized
tcaaggataaaaaatgtaaata

SEQ ID NO: 30714 - DNA, 22 bp, Artificial Sequence
  chemically synthesized
caaggataaaaaatgtaaataa

SEQ ID NO: 30715 - DNA, 22 bp, Artificial Sequence
  chemically synthesized
aaggataaaaaatgtaaataaa

SEQ ID NO: 30716 - DNA, 22 bp, Artificial Sequence
  chemically synthesized
ataaatgtgtaccatcagaaac

SEQ ID NO: 30717 - DNA, 22 bp, Artificial Sequence
  chemically synthesized
atggtatattctcctggaaaag

SEQ ID NO: 30718 - DNA, 22 bp, Artificial Sequence
  chemically synthesized
tggtatattctcctggaaaaga

SEQ ID NO: 30719 - DNA, 22 bp, Artificial Sequence
  chemically synthesized
tcctggaaaagatgaagatgaa

SEQ ID NO: 30720 - DNA, 22 bp, Artificial Sequence
  chemically synthesized
ctggaaaagatgaagatgaaga

SEQ ID NO: 30721 - DNA, 22 bp, Artificial Sequence
  chemically synthesized
gaaaagatgaagatgaagaaaa

SEQ ID NO: 30722 - DNA, 22 bp, Artificial Sequence
  chemically synthesized
cagaagaggagaaattctttgg

SEQ ID NO: 30723 - DNA, 22 bp, Artificial Sequence
  chemically synthesized
tttggaaattttgcatttttgt

SEQ ID NO: 30724 - DNA, 22 bp, Artificial Sequence
  chemically synthesized
tggaaattttgcatttttgtgg

SEQ ID NO: 30725 - DNA, 22 bp, Artificial Sequence
  chemically synthesized
ggaaattttgcatttttgtgga

SEQ ID NO: 30726 - DNA, 22 bp, Artificial Sequence
  chemically synthesized
gaaattttgcatttttgtggat

SEQ ID NO: 30727 - DNA, 22 bp, Artificial Sequence
  chemically synthesized
tgcatttttgtggatagtggtt

SEQ ID NO: 30728 - DNA, 22 bp, Artificial Sequence
  chemically synthesized
gcatttttgtggatagtggttt

SEQ ID NO: 30729 - DNA, 22 bp, Artificial Sequence
  chemically synthesized
catttttgtggatagtggtttt

SEQ ID NO: 30730 - DNA, 22 bp, Artificial Sequence
  chemically synthesized
ttgtggatagtggttttgaaga

SEQ ID NO: 30731 - DNA, 22 bp, Artificial Sequence
  chemically synthesized
tgtggatagtggttttgaagaa

SEQ ID NO: 30732 - DNA, 22 bp, Artificial Sequence
  chemically synthesized
gtggatagtggttttgaagaaa

SEQ ID NO: 30733 - DNA, 22 bp, Artificial Sequence
  chemically synthesized
tggatagtggttttgaagaaag

SEQ ID NO: 30734 - DNA, 22 bp, Artificial Sequence
  chemically synthesized
tgaagaaagcttagatatattt

SEQ ID NO: 30735 - DNA, 22 bp, Artificial Sequence
  chemically synthesized
gaagaaagcttagatatattta

SEQ ID NO: 30736 - DNA, 22 bp, Artificial Sequence
  chemically synthesized
aagaaagcttagatatatttaa

SEQ ID NO: 30737 - DNA, 22 bp, Artificial Sequence
  chemically synthesized
agatatatttaaatatgttgct

SEQ ID NO: 30738 - DNA, 22 bp, Artificial Sequence
  chemically synthesized
gatatatttaaatatgttgcta

SEQ ID NO: 30739 - DNA, 22 bp, Artificial Sequence
  chemically synthesized
aaatatgttgctaagatgtgac

SEQ ID NO: 30740 - DNA, 22 bp, Artificial Sequence
  chemically synthesized
aatatgttgctaagatgtgact

SEQ ID NO: 30741 - DNA, 22 bp, Artificial Sequence
  chemically synthesized
ctaagatgtgactcccacactt

SEQ ID NO: 30742 - DNA, 22 bp, Artificial Sequence
  chemically synthesized
agatgtgactcccacactttaa

SEQ ID NO: 30743 - DNA, 22 bp, Artificial Sequence
  chemically synthesized
ccacactttaaagaaaagttct

SEQ ID NO: 30744 - DNA, 22 bp, Artificial Sequence
  chemically synthesized
taaagaaaagttcttcatttta

SEQ ID NO: 30745 - DNA, 22 bp, Artificial Sequence
  chemically synthesized
aaagaaaagttcttcattttag

SEQ ID NO: 30746 - DNA, 22 bp, Artificial Sequence
  chemically synthesized
aagaaaagttcttcattttagt

SEQ ID NO: 30747 - DNA, 22 bp, Artificial Sequence
  chemically synthesized
ttcattttagttgcccttgcaa

SEQ ID NO: 30748 - DNA, 22 bp, Artificial Sequence
  chemically synthesized
cattttagttgcccttgcaaat

SEQ ID NO: 30749 - DNA, 22 bp, Artificial Sequence
  chemically synthesized
attttagttgcccttgcaaatt

SEQ ID NO: 30750 - DNA, 22 bp, Artificial Sequence
  chemically synthesized
tagttgcccttgcaaattggct

SEQ ID NO: 30751 - DNA, 22 bp, Artificial Sequence
  chemically synthesized
agttgcccttgcaaattggcta

SEQ ID NO: 30752 - DNA, 22 bp, Artificial Sequence
  chemically synthesized
gttgcccttgcaaattggctaa

SEQ ID NO: 30753 - DNA, 22 bp, Artificial Sequence
  chemically synthesized
cccttgcaaattggctaagttt

SEQ ID NO: 30754 - DNA, 22 bp, Artificial Sequence
  chemically synthesized
gcaaattggctaagtttatttt

SEQ ID NO: 30755 - DNA, 22 bp, Artificial Sequence
  chemically synthesized
caaattggctaagtttattttt

SEQ ID NO: 30756 - DNA, 22 bp, Artificial Sequence
  chemically synthesized
gctaagtttatttttcctcaac

SEQ ID NO: 30757 - DNA, 22 bp, Artificial Sequence
  chemically synthesized
agtttatttttcctcaacaaat

SEQ ID NO: 30758 - DNA, 22 bp, Artificial Sequence
  chemically synthesized
atttttcctcaacaaataattt

SEQ ID NO: 30759 - DNA, 22 bp, Artificial Sequence
  chemically synthesized
tttttcctcaacaaataatttt

SEQ ID NO: 30760 - DNA, 22 bp, Artificial Sequence
  chemically synthesized
ttcctcaacaaataattttgat

SEQ ID NO: 30761 - DNA, 22 bp, Artificial Sequence
  chemically synthesized
tcctcaacaaataattttgatg

SEQ ID NO: 30762 - DNA, 22 bp, Artificial Sequence
  chemically synthesized
cctcaacaaataattttgatgg

SEQ ID NO: 30763 - DNA, 22 bp, Artificial Sequence
  chemically synthesized
ctcaacaaataattttgatggt

SEQ ID NO: 30764 - DNA, 22 bp, Artificial Sequence
  chemically synthesized
aacaaataattttgatggtttc

SEQ ID NO: 30765 - DNA, 22 bp, Artificial Sequence
  chemically synthesized
tgatggtttctaaaattgtcca

SEQ ID NO: 30766 - DNA, 22 bp, Artificial Sequence
  chemically synthesized
gatggtttctaaaattgtccag

SEQ ID NO: 30767 - DNA, 22 bp, Artificial Sequence
  chemically synthesized
atggtttctaaaattgtccaga

SEQ ID NO: 30768 - DNA, 22 bp, Artificial Sequence
  chemically synthesized
ctaaaattgtccagaatttgag

SEQ ID NO: 30769 - DNA, 22 bp, Artificial Sequence
  chemically synthesized
taaaattgtccagaatttgagg

SEQ ID NO: 30770 - DNA, 22 bp, Artificial Sequence
  chemically synthesized
aaattgtccagaatttgaggaa

SEQ ID NO: 30771 - DNA, 22 bp, Artificial Sequence
  chemically synthesized
tccagaatttgaggaaatactt

SEQ ID NO: 30772 - DNA, 22 bp, Artificial Sequence
  chemically synthesized
gaggaaatacttagatgtagta

SEQ ID NO: 30773 - DNA, 22 bp, Artificial Sequence
  chemically synthesized
aggaaatacttagatgtagtag

SEQ ID NO: 30774 - DNA, 22 bp, Artificial Sequence
  chemically synthesized
agatgtagtagatgacatcaat

SEQ ID NO: 30775 - DNA, 22 bp, Artificial Sequence
  chemically synthesized
gatgtagtagatgacatcaatt

SEQ ID NO: 30776 - DNA, 22 bp, Artificial Sequence
  chemically synthesized
atgttaacttagatttattgtt

SEQ ID NO: 30777 - DNA, 22 bp, Artificial Sequence
  chemically synthesized
tgttaacttagatttattgttg

SEQ ID NO: 30778 - DNA, 22 bp, Artificial Sequence
  chemically synthesized
acttagatttattgttggatgg

SEQ ID NO: 30779 - DNA, 22 bp, Artificial Sequence
  chemically synthesized
agatttattgttggatggttaa

SEQ ID NO: 30780 - DNA, 22 bp, Artificial Sequence
  chemically synthesized
gatttattgttggatggttaag

SEQ ID NO: 30781 - DNA, 22 bp, Artificial Sequence
  chemically synthesized
attgttggatggttaagttaat

SEQ ID NO: 30782 - DNA, 22 bp, Artificial Sequence
  chemically synthesized
ttgttggatggttaagttaatc

SEQ ID NO: 30783 - DNA, 22 bp, Artificial Sequence
  chemically synthesized
ttggatggttaagttaatcatg

SEQ ID NO: 30784 - DNA, 22 bp, Artificial Sequence
  chemically synthesized
gatggttaagttaatcatgtct

SEQ ID NO: 30785 - DNA, 22 bp, Artificial Sequence
  chemically synthesized
agttaatcatgtctgttcttgt

SEQ ID NO: 30786 - DNA, 22 bp, Artificial Sequence
  chemically synthesized
atcatgtctgttcttgtccagt

SEQ ID NO: 30787 - DNA, 22 bp, Artificial Sequence
  chemically synthesized
ttcttgtccagtctagaagttt

SEQ ID NO: 30788 - DNA, 22 bp, Artificial Sequence
  chemically synthesized
ttgtccagtctagaagtttctg

SEQ ID NO: 30789 - DNA, 22 bp, Artificial Sequence
  chemically synthesized
gtccagtctagaagtttctgct

SEQ ID NO: 30790 - DNA, 22 bp, Artificial Sequence
  chemically synthesized
tccagtctagaagtttctgctt

SEQ ID NO: 30791 - DNA, 22 bp, Artificial Sequence
  chemically synthesized
gaagtttctgcttcctcctcat

SEQ ID NO: 30792 - DNA, 22 bp, Artificial Sequence
  chemically synthesized
ctgcttcctcctcatgtgttct

SEQ ID NO: 30793 - DNA, 22 bp, Artificial Sequence
  chemically synthesized
tgcttcctcctcatgtgttcta

SEQ ID NO: 30794 - DNA, 22 bp, Artificial Sequence
  chemically synthesized
cttcctcctcatgtgttctatt

SEQ ID NO: 30795 - DNA, 22 bp, Artificial Sequence
  chemically synthesized
cctcctcatgtgttctattctg

SEQ ID NO: 30796 - DNA, 22 bp, Artificial Sequence
  chemically synthesized
ctcctcatgtgttctattctgt

SEQ ID NO: 30797 - DNA, 22 bp, Artificial Sequence
  chemically synthesized
ctcatgtgttctattctgtcct

SEQ ID NO: 30798 - DNA, 22 bp, Artificial Sequence
  chemically synthesized
atgtgttctattctgtcctcat

SEQ ID NO: 30799 - DNA, 22 bp, Artificial Sequence
  chemically synthesized
tattctgtcctcatcacataac

SEQ ID NO: 30800 - DNA, 22 bp, Artificial Sequence
  chemically synthesized
ttctgtcctcatcacataacat

SEQ ID NO: 30801 - DNA, 22 bp, Artificial Sequence
  chemically synthesized
tgtcctcatcacataacatctg

SEQ ID NO: 30802 - DNA, 22 bp, Artificial Sequence
  chemically synthesized
tcctcatcacataacatctgaa

SEQ ID NO: 30803 - DNA, 22 bp, Artificial Sequence
  chemically synthesized
atcacataacatctgaactgtg

SEQ ID NO: 30804 - DNA, 22 bp, Artificial Sequence
  chemically synthesized
aactgtgatttgacagtgtcct

SEQ ID NO: 30805 - DNA, 22 bp, Artificial Sequence
  chemically synthesized
tgatttgacagtgtccttatta

SEQ ID NO: 30806 - DNA, 22 bp, Artificial Sequence
  chemically synthesized
gacagtgtccttattatcagac

SEQ ID NO: 30807 - DNA, 22 bp, Artificial Sequence
  chemically synthesized
acagtgtccttattatcagact

SEQ ID NO: 30808 - DNA, 22 bp, Artificial Sequence
  chemically synthesized
attatcagactctgctcaatga

SEQ ID NO: 30809 - DNA, 22 bp, Artificial Sequence
  chemically synthesized
ttatcagactctgctcaatgac

SEQ ID NO: 30810 - DNA, 22 bp, Artificial Sequence
  chemically synthesized
tcagactctgctcaatgacagt

SEQ ID NO: 30811 - DNA, 22 bp, Artificial Sequence
  chemically synthesized
tgctcaatgacagtttaaactt

SEQ ID NO: 30812 - DNA, 22 bp, Artificial Sequence
  chemically synthesized
ctcaatgacagtttaaacttct

SEQ ID NO: 30813 - DNA, 22 bp, Artificial Sequence
  chemically synthesized
aatgacagtttaaacttctttt

SEQ ID NO: 30814 - DNA, 22 bp, Artificial Sequence
  chemically synthesized
aaacttctttttgatacagtaa

SEQ ID NO: 30815 - DNA, 22 bp, Artificial Sequence
  chemically synthesized
aacttctttttgatacagtaaa

SEQ ID NO: 30816 - DNA, 22 bp, Artificial Sequence
  chemically synthesized
ctttttgatacagtaaaaaact

SEQ ID NO: 30817 - DNA, 22 bp, Artificial Sequence
  chemically synthesized
tttttgatacagtaaaaaactt

SEQ ID NO: 30818 - DNA, 22 bp, Artificial Sequence
  chemically synthesized
tttgatacagtaaaaaactttt

SEQ ID NO: 30819 - DNA, 22 bp, Artificial Sequence
  chemically synthesized
ttgatacagtaaaaaacttttc

SEQ ID NO: 30820 - DNA, 22 bp, Artificial Sequence
  chemically synthesized
tgatacagtaaaaaacttttcc

SEQ ID NO: 30821 - DNA, 22 bp, Artificial Sequence
  chemically synthesized
gatacagtaaaaaacttttcct

SEQ ID NO: 30822 - DNA, 22 bp, Artificial Sequence
  chemically synthesized
atacagtaaaaaacttttcctt

SEQ ID NO: 30823 - DNA, 22 bp, Artificial Sequence
  chemically synthesized
ttccttaaagatgaaattctta

SEQ ID NO: 30824 - DNA, 22 bp, Artificial Sequence
  chemically synthesized
tccttaaagatgaaattcttaa

SEQ ID NO: 30825 - DNA, 22 bp, Artificial Sequence
  chemically synthesized
ccttaaagatgaaattcttaag

SEQ ID NO: 30826 - DNA, 22 bp, Artificial Sequence
  chemically synthesized
cttaaagatgaaattcttaagg

SEQ ID NO: 30827 - DNA, 22 bp, Artificial Sequence
  chemically synthesized
aaagatgaaattcttaaggaca

SEQ ID NO: 30828 - DNA, 22 bp, Artificial Sequence
  chemically synthesized
aagatgaaattcttaaggacaa

SEQ ID NO: 30829 - DNA, 22 bp, Artificial Sequence
  chemically synthesized
ttaaggacaattagcttgtgta

SEQ ID NO: 30830 - DNA, 22 bp, Artificial Sequence
  chemically synthesized
aaggacaattagcttgtgtaga

SEQ ID NO: 30831 - DNA, 22 bp, Artificial Sequence
  chemically synthesized
aggacaattagcttgtgtagac

SEQ ID NO: 30832 - DNA, 22 bp, Artificial Sequence
  chemically synthesized
gcttgtgtagactcatatgaaa

SEQ ID NO: 30833 - DNA, 22 bp, Artificial Sequence
  chemically synthesized
gtgtagactcatatgaaaattg

SEQ ID NO: 30834 - DNA, 22 bp, Artificial Sequence
  chemically synthesized
tgtagactcatatgaaaattgc

SEQ ID NO: 30835 - DNA, 22 bp, Artificial Sequence
  chemically synthesized
atatgaaaattgcttgcatttt

SEQ ID NO: 30836 - DNA, 22 bp, Artificial Sequence
  chemically synthesized
cttgcattttggagttacatta

SEQ ID NO: 30837 - DNA, 22 bp, Artificial Sequence
  chemically synthesized
gcattttggagttacattagct

SEQ ID NO: 30838 - DNA, 22 bp, Artificial Sequence
  chemically synthesized
cattttggagttacattagctc

SEQ ID NO: 30839 - DNA, 22 bp, Artificial Sequence
  chemically synthesized
tggagttacattagctcttctc

SEQ ID NO: 30840 - DNA, 22 bp, Artificial Sequence
  chemically synthesized
ggagttacattagctcttctcc

SEQ ID NO: 30841 - DNA, 22 bp, Artificial Sequence
  chemically synthesized
gagttacattagctcttctcct

SEQ ID NO: 30842 - DNA, 22 bp, Artificial Sequence
  chemically synthesized
cattagctcttctcctttataa

SEQ ID NO: 30843 - DNA, 22 bp, Artificial Sequence
  chemically synthesized
gctcttctcctttataaattaa

SEQ ID NO: 30844 - DNA, 22 bp, Artificial Sequence
  chemically synthesized
ttctcctttataaattaatgaa

SEQ ID NO: 30845 - DNA, 22 bp, Artificial Sequence
  chemically synthesized
ctcctttataaattaatgaatc

SEQ ID NO: 30846 - DNA, 22 bp, Artificial Sequence
  chemically synthesized
tcctttataaattaatgaatcc

SEQ ID NO: 30847 - DNA, 22 bp, Artificial Sequence
  chemically synthesized
ctttataaattaatgaatccta

SEQ ID NO: 30848 - DNA, 22 bp, Artificial Sequence
  chemically synthesized
tataaattaatgaatcctattg

SEQ ID NO: 30849 - DNA, 22 bp, Artificial Sequence
  chemically synthesized
ataaattaatgaatcctattgg

SEQ ID NO: 30850 - DNA, 22 bp, Artificial Sequence
  chemically synthesized
taaattaatgaatcctattggt

SEQ ID NO: 30851 - DNA, 22 bp, Artificial Sequence
  chemically synthesized
atgaatcctattggtaccatat

SEQ ID NO: 30852 - DNA, 22 bp, Artificial Sequence
  chemically synthesized
ttggtaccatataatagcatca

SEQ ID NO: 30853 - DNA, 22 bp, Artificial Sequence
  chemically synthesized
gtaccatataatagcatcaaca

SEQ ID NO: 30854 - DNA, 22 bp, Artificial Sequence
  chemically synthesized
gccttttgtgtctcgcctttca

SEQ ID NO: 30855 - DNA, 22 bp, Artificial Sequence
  chemically synthesized
ccttttgtgtctcgcctttcaa

SEQ ID NO: 30856 - DNA, 22 bp, Artificial Sequence
  chemically synthesized
ttgtgtctcgcctttcaaaggg

SEQ ID NO: 30857 - DNA, 22 bp, Artificial Sequence
  chemically synthesized
tgtgtctcgcctttcaaagggc

SEQ ID NO: 30858 - DNA, 22 bp, Artificial Sequence
  chemically synthesized
gtgtctcgcctttcaaagggca

SEQ ID NO: 30859 - DNA, 22 bp, Artificial Sequence
  chemically synthesized
tgtctcgcctttcaaagggcaa

SEQ ID NO: 30860 - DNA, 22 bp, Artificial Sequence
  chemically synthesized
gcctttcaaagggcaattttcc

SEQ ID NO: 30861 - DNA, 22 bp, Artificial Sequence
  chemically synthesized
tcaaagggcaattttccaaaaa

SEQ ID NO: 30862 - DNA, 22 bp, Artificial Sequence
  chemically synthesized
caaagggcaattttccaaaaag

SEQ ID NO: 30863 - DNA, 22 bp, Artificial Sequence
  chemically synthesized
aaagggcaattttccaaaaagt

SEQ ID NO: 30864 - DNA, 22 bp, Artificial Sequence
  chemically synthesized
tccaaaaagtatattttgcatg

SEQ ID NO: 30865 - DNA, 22 bp, Artificial Sequence
  chemically synthesized
ccaaaaagtatattttgcatgg

SEQ ID NO: 30866 - DNA, 22 bp, Artificial Sequence
  chemically synthesized
caaaaagtatattttgcatggc

SEQ ID NO: 30867 - DNA, 22 bp, Artificial Sequence
  chemically synthesized
tgcatggctcaggctaaaagta

SEQ ID NO: 30868 - DNA, 22 bp, Artificial Sequence
  chemically synthesized
gcatggctcaggctaaaagtaa

SEQ ID NO: 30869 - DNA, 22 bp, Artificial Sequence
  chemically synthesized
catggctcaggctaaaagtaat

SEQ ID NO: 30870 - DNA, 22 bp, Artificial Sequence
  chemically synthesized
aggctaaaagtaatgtctccag

SEQ ID NO: 30871 - DNA, 22 bp, Artificial Sequence
  chemically synthesized
aaagtaatgtctccagatgaag

SEQ ID NO: 30872 - DNA, 22 bp, Artificial Sequence
  chemically synthesized
cagatgaagttctactttgtga

SEQ ID NO: 30873 - DNA, 22 bp, Artificial Sequence
  chemically synthesized
tactttgtgaccattgattgtg

SEQ ID NO: 30874 - DNA, 22 bp, Artificial Sequence
  chemically synthesized
ctttgtgaccattgattgtgac

SEQ ID NO: 30875 - DNA, 22 bp, Artificial Sequence
  chemically synthesized
tgtgaccattgattgtgactat

SEQ ID NO: 30876 - DNA, 22 bp, Artificial Sequence
  chemically synthesized
gtgaccattgattgtgactatt

SEQ ID NO: 30877 - DNA, 22 bp, Artificial Sequence
  chemically synthesized
tgaccattgattgtgactattg

SEQ ID NO: 30878 - DNA, 22 bp, Artificial Sequence
  chemically synthesized
attgtgactattgataagattt

SEQ ID NO: 30879 - DNA, 22 bp, Artificial Sequence
  chemically synthesized
tgactattgataagatttacta

SEQ ID NO: 30880 - DNA, 22 bp, Artificial Sequence
  chemically synthesized
ttgataagatttactatgtaaa

SEQ ID NO: 30881 - DNA, 22 bp, Artificial Sequence
  chemically synthesized
ataagatttactatgtaaagta

SEQ ID NO: 30882 - DNA, 22 bp, Artificial Sequence
  chemically synthesized
actatgtaaagtataagttact

SEQ ID NO: 30883 - DNA, 22 bp, Artificial Sequence
  chemically synthesized
ctatgtaaagtataagttactg

SEQ ID NO: 30884 - DNA, 22 bp, Artificial Sequence
  chemically synthesized
tgtaaagtataagttactggaa

SEQ ID NO: 30885 - DNA, 22 bp, Artificial Sequence
  chemically synthesized
ctggaataatacatttaagaaa

SEQ ID NO: 30886 - DNA, 22 bp, Artificial Sequence
  chemically synthesized
gaataatacatttaagaaatat

SEQ ID NO: 30887 - DNA, 22 bp, Artificial Sequence
  chemically synthesized
aagaaatatagtagctattaaa

SEQ ID NO: 30888 - DNA, 22 bp, Artificial Sequence
  chemically synthesized
agaaatatagtagctattaaaa

SEQ ID NO: 30889 - DNA, 22 bp, Artificial Sequence
  chemically synthesized
ttaaaacctgtagtctgatgaa

SEQ ID NO: 30890 - DNA, 22 bp, Artificial Sequence
  chemically synthesized
aaacctgtagtctgatgaaatg

SEQ ID NO: 30891 - DNA, 22 bp, Artificial Sequence
  chemically synthesized
tagtctgatgaaatggaatatg

SEQ ID NO: 30892 - DNA, 22 bp, Artificial Sequence
  chemically synthesized
atgaaatggaatatgttttgaa

SEQ ID NO: 30893 - DNA, 22 bp, Artificial Sequence
  chemically synthesized
tgaaagacagcagtgaaaaatg

SEQ ID NO: 30894 - DNA, 22 bp, Artificial Sequence
  chemically synthesized
gaaagacagcagtgaaaaatga

SEQ ID NO: 30895 - DNA, 22 bp, Artificial Sequence
  chemically synthesized
aaagacagcagtgaaaaatgag

SEQ ID NO: 30896 - DNA, 22 bp, Artificial Sequence
  chemically synthesized
ctttttgcaattgagttgaaga

SEQ ID NO: 30897 - DNA, 22 bp, Artificial Sequence
  chemically synthesized
tttgcaattgagttgaagattg

SEQ ID NO: 30898 - DNA, 22 bp, Artificial Sequence
  chemically synthesized
ttgcaattgagttgaagattga

SEQ ID NO: 30899 - DNA, 22 bp, Artificial Sequence
  chemically synthesized
tgcaattgagttgaagattgat

SEQ ID NO: 30900 - DNA, 22 bp, Artificial Sequence
  chemically synthesized
gcaattgagttgaagattgatg

SEQ ID NO: 30901 - DNA, 22 bp, Artificial Sequence
  chemically synthesized
caattgagttgaagattgatgc

SEQ ID NO: 30902 - DNA, 22 bp, Artificial Sequence
  chemically synthesized
agttgaagattgatgccaggat

SEQ ID NO: 30903 - DNA, 22 bp, Artificial Sequence
  chemically synthesized
aagattgatgccaggatcttat

SEQ ID NO: 30904 - DNA, 22 bp, Artificial Sequence
  chemically synthesized
atgccaggatcttattacctcc

SEQ ID NO: 30905 - DNA, 22 bp, Artificial Sequence
  chemically synthesized
attacctccaggatttcacaaa

SEQ ID NO: 30906 - DNA, 22 bp, Artificial Sequence
  chemically synthesized
ttacctccaggatttcacaaag

SEQ ID NO: 30907 - DNA, 22 bp, Artificial Sequence
  chemically synthesized
cctccaggatttcacaaaggat

SEQ ID NO: 30908 - DNA, 22 bp, Artificial Sequence
  chemically synthesized
caggatttcacaaaggatttct

SEQ ID NO: 30909 - DNA, 22 bp, Artificial Sequence
  chemically synthesized
cacaaaggatttcttgagtcat

SEQ ID NO: 30910 - DNA, 22 bp, Artificial Sequence
  chemically synthesized
acaaaggatttcttgagtcatc

SEQ ID NO: 30911 - DNA, 22 bp, Artificial Sequence
  chemically synthesized
cttgagtcatccccttgctcta

SEQ ID NO: 30912 - DNA, 22 bp, Artificial Sequence
  chemically synthesized
ttgagtcatccccttgctctag

SEQ ID NO: 30913 - DNA, 22 bp, Artificial Sequence
  chemically synthesized
gagtcatccccttgctctagct

SEQ ID NO: 30914 - DNA, 22 bp, Artificial Sequence
  chemically synthesized
agtcatccccttgctctagctc

SEQ ID NO: 30915 - DNA, 22 bp, Artificial Sequence
  chemically synthesized
gctctagctcatgaacaaagta

SEQ ID NO: 30916 - DNA, 22 bp, Artificial Sequence
  chemically synthesized
ctctagctcatgaacaaagtat

SEQ ID NO: 30917 - DNA, 22 bp, Artificial Sequence
  chemically synthesized
tagctcatgaacaaagtattgc

SEQ ID NO: 30918 - DNA, 22 bp, Artificial Sequence
  chemically synthesized
gctcatgaacaaagtattgctc

SEQ ID NO: 30919 - DNA, 22 bp, Artificial Sequence
  chemically synthesized
atgaacaaagtattgctcaagt

SEQ ID NO: 30920 - DNA, 22 bp, Artificial Sequence
  chemically synthesized
ctcaagtaatcgacagattatt

SEQ ID NO: 30921 - DNA, 22 bp, Artificial Sequence
  chemically synthesized
aagtaatcgacagattatttgt

SEQ ID NO: 30922 - DNA, 22 bp, Artificial Sequence
  chemically synthesized
tttgtgtattctcacatgtgat

SEQ ID NO: 30923 - DNA, 22 bp, Artificial Sequence
  chemically synthesized
gtgtattctcacatgtgattat

SEQ ID NO: 30924 - DNA, 22 bp, Artificial Sequence
  chemically synthesized
tgtattctcacatgtgattatt

SEQ ID NO: 30925 - DNA, 22 bp, Artificial Sequence
  chemically synthesized
tcacatgtgattattatttagt

SEQ ID NO: 30926 - DNA, 22 bp, Artificial Sequence
  chemically synthesized
acatgtgattattatttagtgc

SEQ ID NO: 30927 - DNA, 22 bp, Artificial Sequence
  chemically synthesized
ttatttagtgctgtcacgggaa

SEQ ID NO: 30928 - DNA, 22 bp, Artificial Sequence
  chemically synthesized
tttagtgctgtcacgggaaata

SEQ ID NO: 30929 - DNA, 22 bp, Artificial Sequence
  chemically synthesized
agtgctgtcacgggaaatatcc

SEQ ID NO: 30930 - DNA, 22 bp, Artificial Sequence
  chemically synthesized
gtgctgtcacgggaaatatcct

SEQ ID NO: 30931 - DNA, 22 bp, Artificial Sequence
  chemically synthesized
tcacgggaaatatcctgcctaa

SEQ ID NO: 30932 - DNA, 22 bp, Artificial Sequence
  chemically synthesized
cctaagtttactggaggtcttc

SEQ ID NO: 30933 - DNA, 22 bp, Artificial Sequence
  chemically synthesized
agtttactggaggtcttcctcc

SEQ ID NO: 30934 - DNA, 22 bp, Artificial Sequence
  chemically synthesized
actggaggtcttcctcccctta

SEQ ID NO: 30935 - DNA, 22 bp, Artificial Sequence
  chemically synthesized
ctggaggtcttcctccccttac

SEQ ID NO: 30936 - DNA, 22 bp, Artificial Sequence
  chemically synthesized
gaggtcttcctccccttacccc

SEQ ID NO: 30937 - DNA, 22 bp, Artificial Sequence
  chemically synthesized
cctccccttacccctccctatg

SEQ ID NO: 30938 - DNA, 22 bp, Artificial Sequence
  chemically synthesized
ctccccttacccctccctatgt

SEQ ID NO: 30939 - DNA, 22 bp, Artificial Sequence
  chemically synthesized
cccttacccctccctatgtcct

SEQ ID NO: 30940 - DNA, 22 bp, Artificial Sequence
  chemically synthesized
acccctccctatgtcctcctac

SEQ ID NO: 30941 - DNA, 22 bp, Artificial Sequence
  chemically synthesized
cccctccctatgtcctcctacc

SEQ ID NO: 30942 - DNA, 22 bp, Artificial Sequence
  chemically synthesized
cctatgtcctcctacctggtta

SEQ ID NO: 30943 - DNA, 22 bp, Artificial Sequence
  chemically synthesized
tgtcctcctacctggttatcct

SEQ ID NO: 30944 - DNA, 22 bp, Artificial Sequence
  chemically synthesized
ctacctggttatccttttcaat

SEQ ID NO: 30945 - DNA, 22 bp, Artificial Sequence
  chemically synthesized
cctggttatccttttcaatcct

SEQ ID NO: 30946 - DNA, 22 bp, Artificial Sequence
  chemically synthesized
gttatccttttcaatcctatta

SEQ ID NO: 30947 - DNA, 22 bp, Artificial Sequence
  chemically synthesized
tccttttcaatcctattactct

SEQ ID NO: 30948 - DNA, 22 bp, Artificial Sequence
  chemically synthesized
ttcaatcctattactctttcct

SEQ ID NO: 30949 - DNA, 22 bp, Artificial Sequence
  chemically synthesized
tcaatcctattactctttcctt

SEQ ID NO: 30950 - DNA, 22 bp, Artificial Sequence
  chemically synthesized
caatcctattactctttccttg

SEQ ID NO: 30951 - DNA, 22 bp, Artificial Sequence
  chemically synthesized
aatcctattactctttccttgc

SEQ ID NO: 30952 - DNA, 22 bp, Artificial Sequence
  chemically synthesized
ttactctttccttgcacactct

SEQ ID NO: 30953 - DNA, 22 bp, Artificial Sequence
  chemically synthesized
ctctttccttgcacactctact

SEQ ID NO: 30954 - DNA, 22 bp, Artificial Sequence
  chemically synthesized
tttccttgcacactctactcca

SEQ ID NO: 30955 - DNA, 22 bp, Artificial Sequence
  chemically synthesized
tccttgcacactctactccagc

SEQ ID NO: 30956 - DNA, 22 bp, Artificial Sequence
  chemically synthesized
ccttgcacactctactccagct

SEQ ID NO: 30957 - DNA, 22 bp, Artificial Sequence
  chemically synthesized
cttgcacactctactccagctt

SEQ ID NO: 30958 - DNA, 22 bp, Artificial Sequence
  chemically synthesized
gcacactctactccagcttagg

SEQ ID NO: 30959 - DNA, 22 bp, Artificial Sequence
  chemically synthesized
cacactctactccagcttaggg

SEQ ID NO: 30960 - DNA, 22 bp, Artificial Sequence
  chemically synthesized
tactccagcttagggcctgggc

SEQ ID NO: 30961 - DNA, 22 bp, Artificial Sequence
  chemically synthesized
ctccagcttagggcctgggctc

SEQ ID NO: 30962 - DNA, 22 bp, Artificial Sequence
  chemically synthesized
cagcttagggcctgggctctga

SEQ ID NO: 30963 - DNA, 22 bp, Artificial Sequence
  chemically synthesized
agggcctgggctctgaccatta

SEQ ID NO: 30964 - DNA, 22 bp, Artificial Sequence
  chemically synthesized
gggcctgggctctgaccattac

SEQ ID NO: 30965 - DNA, 22 bp, Artificial Sequence
  chemically synthesized
ggctctgaccattacctctgcc

SEQ ID NO: 30966 - DNA, 22 bp, Artificial Sequence
  chemically synthesized
tgaccattacctctgcctaaaa

SEQ ID NO: 30967 - DNA, 22 bp, Artificial Sequence
  chemically synthesized
accattacctctgcctaaaaat

SEQ ID NO: 30968 - DNA, 22 bp, Artificial Sequence
  chemically synthesized
cctctgcctaaaaattcctcct

SEQ ID NO: 30969 - DNA, 22 bp, Artificial Sequence
  chemically synthesized
tgcctaaaaattcctcctcatg

SEQ ID NO: 30970 - DNA, 22 bp, Artificial Sequence
  chemically synthesized
cctaaaaattcctcctcatgac

SEQ ID NO: 30971 - DNA, 22 bp, Artificial Sequence
  chemically synthesized
aaaattcctcctcatgacatcc

SEQ ID NO: 30972 - DNA, 22 bp, Artificial Sequence
  chemically synthesized
ctcctcatgacatccatttgcc

SEQ ID NO: 30973 - DNA, 22 bp, Artificial Sequence
  chemically synthesized
ctcatgacatccatttgcccaa

SEQ ID NO: 30974 - DNA, 22 bp, Artificial Sequence
  chemically synthesized
atgacatccatttgcccaattt

SEQ ID NO: 30975 - DNA, 22 bp, Artificial Sequence
  chemically synthesized
gcccaatttcttcaccctttta

SEQ ID NO: 30976 - DNA, 22 bp, Artificial Sequence
  chemically synthesized
cccaatttcttcacccttttaa

SEQ ID NO: 30977 - DNA, 22 bp, Artificial Sequence
  chemically synthesized
cttcacccttttaattacccca

SEQ ID NO: 30978 - DNA, 22 bp, Artificial Sequence
  chemically synthesized
ttcacccttttaattaccccat

SEQ ID NO: 30979 - DNA, 22 bp, Artificial Sequence
  chemically synthesized
cacccttttaattaccccatta

SEQ ID NO: 30980 - DNA, 22 bp, Artificial Sequence
  chemically synthesized
acccttttaattaccccattaa

SEQ ID NO: 30981 - DNA, 22 bp, Artificial Sequence
  chemically synthesized
ttaattaccccattaagtgata

SEQ ID NO: 30982 - DNA, 22 bp, Artificial Sequence
  chemically synthesized
taattaccccattaagtgatat

SEQ ID NO: 30983 - DNA, 22 bp, Artificial Sequence
  chemically synthesized
aattaccccattaagtgatatt

SEQ ID NO: 30984 - DNA, 22 bp, Artificial Sequence
  chemically synthesized
attaccccattaagtgatattt

SEQ ID NO: 30985 - DNA, 22 bp, Artificial Sequence
  chemically synthesized
ccccattaagtgatattttgct

SEQ ID NO: 30986 - DNA, 22 bp, Artificial Sequence
  chemically synthesized
agtgatattttgcttgctcaat

SEQ ID NO: 30987 - DNA, 22 bp, Artificial Sequence
  chemically synthesized
tgcttgctcaatttttgccttt

SEQ ID NO: 30988 - DNA, 22 bp, Artificial Sequence
  chemically synthesized
gcttgctcaatttttgcctttt

SEQ ID NO: 30989 - DNA, 22 bp, Artificial Sequence
  chemically synthesized
cttgctcaatttttgccttttc

SEQ ID NO: 30990 - DNA, 22 bp, Artificial Sequence
  chemically synthesized
gctcaatttttgccttttcaat

SEQ ID NO: 30991 - DNA, 22 bp, Artificial Sequence
  chemically synthesized
ctcaatttttgccttttcaatc

SEQ ID NO: 30992 - DNA, 22 bp, Artificial Sequence
  chemically synthesized
aatttttgccttttcaatcaga

SEQ ID NO: 30993 - DNA, 22 bp, Artificial Sequence
  chemically synthesized
ttgccttttcaatcagatctaa

SEQ ID NO: 30994 - DNA, 22 bp, Artificial Sequence
  chemically synthesized
tgccttttcaatcagatctaat

SEQ ID NO: 30995 - DNA, 22 bp, Artificial Sequence
  chemically synthesized
gccttttcaatcagatctaatt

SEQ ID NO: 30996 - DNA, 22 bp, Artificial Sequence
  chemically synthesized
ccttttcaatcagatctaattt

SEQ ID NO: 30997 - DNA, 22 bp, Artificial Sequence
  chemically synthesized
ttcaatcagatctaatttattt

SEQ ID NO: 30998 - DNA, 22 bp, Artificial Sequence
  chemically synthesized
tcaatcagatctaatttatttt

SEQ ID NO: 30999 - DNA, 22 bp, Artificial Sequence
  chemically synthesized
caatcagatctaatttatttta

SEQ ID NO: 31000 - DNA, 22 bp, Artificial Sequence
  chemically synthesized
aatcagatctaatttattttat

SEQ ID NO: 31001 - DNA, 22 bp, Artificial Sequence
  chemically synthesized
atttattttatatttttaaaat

SEQ ID NO: 31002 - DNA, 22 bp, Artificial Sequence
  chemically synthesized
attttatatttttaaaatttat

SEQ ID NO: 31003 - DNA, 22 bp, Artificial Sequence
  chemically synthesized
ttttatatttttaaaatttatt

SEQ ID NO: 31004 - DNA, 22 bp, Artificial Sequence
  chemically synthesized
tatatttttaaaatttatttat

SEQ ID NO: 31005 - DNA, 22 bp, Artificial Sequence
  chemically synthesized
atatttttaaaatttatttata

SEQ ID NO: 31006 - DNA, 22 bp, Artificial Sequence
  chemically synthesized
tatttttaaaatttatttatat

SEQ ID NO: 31007 - DNA, 22 bp, Artificial Sequence
  chemically synthesized
ttaaaatttatttatatatatt

SEQ ID NO: 31008 - DNA, 22 bp, Artificial Sequence
  chemically synthesized
taaaatttatttatatatattt

SEQ ID NO: 31009 - DNA, 22 bp, Artificial Sequence
  chemically synthesized
aaaatttatttatatatattta

SEQ ID NO: 31010 - DNA, 22 bp, Artificial Sequence
  chemically synthesized
aaatttatttatatatatttag

SEQ ID NO: 31011 - DNA, 22 bp, Artificial Sequence
  chemically synthesized
atttatatatatttagaaggta

SEQ ID NO: 31012 - DNA, 22 bp, Artificial Sequence
  chemically synthesized
tttatatatatttagaaggtat

SEQ ID NO: 31013 - DNA, 22 bp, Artificial Sequence
  chemically synthesized
atatatatttagaaggtatgta

SEQ ID NO: 31014 - DNA, 22 bp, Artificial Sequence
  chemically synthesized
tatatatttagaaggtatgtac

SEQ ID NO: 31015 - DNA, 22 bp, Artificial Sequence
  chemically synthesized
agaaggtatgtactagttcgtt

SEQ ID NO: 31016 - DNA, 22 bp, Artificial Sequence
  chemically synthesized
gaaggtatgtactagttcgtta

SEQ ID NO: 31017 - DNA, 22 bp, Artificial Sequence
  chemically synthesized
gttcgttatcatgctgcttata

SEQ ID NO: 31018 - DNA, 22 bp, Artificial Sequence
  chemically synthesized
gttatcatgctgcttataaaga

SEQ ID NO: 31019 - DNA, 22 bp, Artificial Sequence
  chemically synthesized
tcatgctgcttataaagacata

SEQ ID NO: 31020 - DNA, 22 bp, Artificial Sequence
  chemically synthesized
cttataaagacatacctgagac

SEQ ID NO: 31021 - DNA, 22 bp, Artificial Sequence
  chemically synthesized
ataaagacatacctgagactgg

SEQ ID NO: 31022 - DNA, 22 bp, Artificial Sequence
  chemically synthesized
taaagacatacctgagactggg

SEQ ID NO: 31023 - DNA, 22 bp, Artificial Sequence
  chemically synthesized
agactgggtaatttataaggaa

SEQ ID NO: 31024 - DNA, 22 bp, Artificial Sequence
  chemically synthesized
ggtaatttataaggaaaaaacg

SEQ ID NO: 31025 - DNA, 22 bp, Artificial Sequence
  chemically synthesized
ataaggaaaaaacgtttaattg

SEQ ID NO: 31026 - DNA, 22 bp, Artificial Sequence
  chemically synthesized
taaggaaaaaacgtttaattgt

SEQ ID NO: 31027 - DNA, 22 bp, Artificial Sequence
  chemically synthesized
aattgtctcacagttccacagg

SEQ ID NO: 31028 - DNA, 22 bp, Artificial Sequence
  chemically synthesized
attgtctcacagttccacaggg

SEQ ID NO: 31029 - DNA, 22 bp, Artificial Sequence
  chemically synthesized
tctcacagttccacagggctgg

SEQ ID NO: 31030 - DNA, 22 bp, Artificial Sequence
  chemically synthesized
acagttccacagggctggggag

SEQ ID NO: 31031 - DNA, 22 bp, Artificial Sequence
  chemically synthesized
cacagggctggggaggcctcgg

SEQ ID NO: 31032 - DNA, 22 bp, Artificial Sequence
  chemically synthesized
gggaggcctcgggaaacttaca

SEQ ID NO: 31033 - DNA, 22 bp, Artificial Sequence
  chemically synthesized
gggaaacttacaatcatggcag

SEQ ID NO: 31034 - DNA, 22 bp, Artificial Sequence
  chemically synthesized
acaatcatggcagaagaagaaa

SEQ ID NO: 31035 - DNA, 22 bp, Artificial Sequence
  chemically synthesized
caatcatggcagaagaagaaac

SEQ ID NO: 31036 - DNA, 22 bp, Artificial Sequence
  chemically synthesized
cttcacatggcagcagcaagta

SEQ ID NO: 31037 - DNA, 22 bp, Artificial Sequence
  chemically synthesized
ttcacatggcagcagcaagtag

SEQ ID NO: 31038 - DNA, 22 bp, Artificial Sequence
  chemically synthesized
cacatggcagcagcaagtagaa

SEQ ID NO: 31039 - DNA, 22 bp, Artificial Sequence
  chemically synthesized
acatggcagcagcaagtagaag

SEQ ID NO: 31040 - DNA, 22 bp, Artificial Sequence
  chemically synthesized
ataaaaccatcagatcttgtaa

SEQ ID NO: 31041 - DNA, 22 bp, Artificial Sequence
  chemically synthesized
taaaaccatcagatcttgtaag

SEQ ID NO: 31042 - DNA, 22 bp, Artificial Sequence
  chemically synthesized
gtaagaactcactatcacgaga

SEQ ID NO: 31043 - DNA, 22 bp, Artificial Sequence
  chemically synthesized
taagaactcactatcacgagaa

SEQ ID NO: 31044 - DNA, 22 bp, Artificial Sequence
  chemically synthesized
actatcacgagaagagcatgag

SEQ ID NO: 31045 - DNA, 22 bp, Artificial Sequence
  chemically synthesized
tcacgagaagagcatgagagta

SEQ ID NO: 31046 - DNA, 22 bp, Artificial Sequence
  chemically synthesized
ctctatgattcaattacctccc

SEQ ID NO: 31047 - DNA, 22 bp, Artificial Sequence
  chemically synthesized
tatgattcaattacctccctcc

SEQ ID NO: 31048 - DNA, 22 bp, Artificial Sequence
  chemically synthesized
tgattcaattacctccctccaa

SEQ ID NO: 31049 - DNA, 22 bp, Artificial Sequence
  chemically synthesized
aattacctccctccaaatccct

SEQ ID NO: 31050 - DNA, 22 bp, Artificial Sequence
  chemically synthesized
cctccctccaaatccctcccac

SEQ ID NO: 31051 - DNA, 22 bp, Artificial Sequence
  chemically synthesized
cctccaaatccctcccacaaca

SEQ ID NO: 31052 - DNA, 22 bp, Artificial Sequence
  chemically synthesized
caaatccctcccacaacacgtg

SEQ ID NO: 31053 - DNA, 22 bp, Artificial Sequence
  chemically synthesized
ccacaacacgtgaggattatgg

SEQ ID NO: 31054 - DNA, 22 bp, Artificial Sequence
  chemically synthesized
tgggaactacaattcaagatga

SEQ ID NO: 31055 - DNA, 22 bp, Artificial Sequence
  chemically synthesized
caattcaagatgagatttgggt

SEQ ID NO: 31056 - DNA, 22 bp, Artificial Sequence
  chemically synthesized
aagatgagatttgggtggggac

SEQ ID NO: 31057 - DNA, 22 bp, Artificial Sequence
  chemically synthesized
gggtggggacacagtcaagctg

SEQ ID NO: 31058 - DNA, 22 bp, Artificial Sequence
  chemically synthesized
ggtggggacacagtcaagctgt

SEQ ID NO: 31059 - DNA, 22 bp, Artificial Sequence
  chemically synthesized
tatcagggtacaagctcgggtt

SEQ ID NO: 31060 - DNA, 22 bp, Artificial Sequence
  chemically synthesized
gggttccttacatatgtatgtt

SEQ ID NO: 31061 - DNA, 22 bp, Artificial Sequence
  chemically synthesized
cttacatatgtatgttgcatag

SEQ ID NO: 31062 - DNA, 22 bp, Artificial Sequence
  chemically synthesized
acatatgtatgttgcatagtgg

SEQ ID NO: 31063 - DNA, 22 bp, Artificial Sequence
  chemically synthesized
catatgtatgttgcatagtggt

SEQ ID NO: 31064 - DNA, 22 bp, Artificial Sequence
  chemically synthesized
catagtggtgaagtctgagctt

SEQ ID NO: 31065 - DNA, 22 bp, Artificial Sequence
  chemically synthesized
agcttttagtggaccatcacct

SEQ ID NO: 31066 - DNA, 22 bp, Artificial Sequence
  chemically synthesized
ttagtggaccatcacctgaaaa

SEQ ID NO: 31067 - DNA, 22 bp, Artificial Sequence
  chemically synthesized
tagtggaccatcacctgaaaag

SEQ ID NO: 31068 - DNA, 22 bp, Artificial Sequence
  chemically synthesized
agtggaccatcacctgaaaagt

SEQ ID NO: 31069 - DNA, 22 bp, Artificial Sequence
  chemically synthesized
gtggaccatcacctgaaaagtg

SEQ ID NO: 31070 - DNA, 22 bp, Artificial Sequence
  chemically synthesized
aaaagtgaatgttgtatccaat

SEQ ID NO: 31071 - DNA, 22 bp, Artificial Sequence
  chemically synthesized
tatccaatccgtagtttttcag

SEQ ID NO: 31072 - DNA, 22 bp, Artificial Sequence
  chemically synthesized
ttcagtcctcaccatactccta

SEQ ID NO: 31073 - DNA, 22 bp, Artificial Sequence
  chemically synthesized
tcagtcctcaccatactcctat

SEQ ID NO: 31074 - DNA, 22 bp, Artificial Sequence
  chemically synthesized
cagtcctcaccatactcctatc

SEQ ID NO: 31075 - DNA, 22 bp, Artificial Sequence
  chemically synthesized
agtcctcaccatactcctatcc

SEQ ID NO: 31076 - DNA, 22 bp, Artificial Sequence
  chemically synthesized
accatactcctatcctcccacc

SEQ ID NO: 31077 - DNA, 22 bp, Artificial Sequence
  chemically synthesized
ctatcctcccacctttctctag

SEQ ID NO: 31078 - DNA, 22 bp, Artificial Sequence
  chemically synthesized
tcctcccacctttctctagtct

SEQ ID NO: 31079 - DNA, 22 bp, Artificial Sequence
  chemically synthesized
ccacctttctctagtctcaagt

SEQ ID NO: 31080 - DNA, 22 bp, Artificial Sequence
  chemically synthesized
tctctagtctcaagtgtctatt

SEQ ID NO: 31081 - DNA, 22 bp, Artificial Sequence
  chemically synthesized
ctctagtctcaagtgtctatta

SEQ ID NO: 31082 - DNA, 22 bp, Artificial Sequence
  chemically synthesized
tctagtctcaagtgtctattat

SEQ ID NO: 31083 - DNA, 22 bp, Artificial Sequence
  chemically synthesized
tagtctcaagtgtctattattt

SEQ ID NO: 31084 - DNA, 22 bp, Artificial Sequence
  chemically synthesized
gtctcaagtgtctattatttca

SEQ ID NO: 31085 - DNA, 22 bp, Artificial Sequence
  chemically synthesized
aagtgtctattatttcattcta

SEQ ID NO: 31086 - DNA, 22 bp, Artificial Sequence
  chemically synthesized
ttatttcattctatatgtctat

SEQ ID NO: 31087 - DNA, 22 bp, Artificial Sequence
  chemically synthesized
tttcattctatatgtctatgct

SEQ ID NO: 31088 - DNA, 22 bp, Artificial Sequence
  chemically synthesized
cattctatatgtctatgcttac

SEQ ID NO: 31089 - DNA, 22 bp, Artificial Sequence
  chemically synthesized
attctatatgtctatgcttact

SEQ ID NO: 31090 - DNA, 22 bp, Artificial Sequence
  chemically synthesized
tatatgtctatgcttactcatc

SEQ ID NO: 31091 - DNA, 22 bp, Artificial Sequence
  chemically synthesized
tatgtctatgcttactcatcgt

SEQ ID NO: 31092 - DNA, 22 bp, Artificial Sequence
  chemically synthesized
tgcttactcatcgtttagctcc

SEQ ID NO: 31093 - DNA, 22 bp, Artificial Sequence
  chemically synthesized
actcatcgtttagctcccactt

SEQ ID NO: 31094 - DNA, 22 bp, Artificial Sequence
  chemically synthesized
ctcatcgtttagctcccacttg

SEQ ID NO: 31095 - DNA, 22 bp, Artificial Sequence
  chemically synthesized
atcgtttagctcccacttggct

SEQ ID NO: 31096 - DNA, 22 bp, Artificial Sequence
  chemically synthesized
agctcccacttggctctcacta

SEQ ID NO: 31097 - DNA, 22 bp, Artificial Sequence
  chemically synthesized
gctcccacttggctctcactaa

SEQ ID NO: 31098 - DNA, 22 bp, Artificial Sequence
  chemically synthesized
ccacttggctctcactaaatga

SEQ ID NO: 31099 - DNA, 22 bp, Artificial Sequence
  chemically synthesized
ggctctcactaaatgagaacat

SEQ ID NO: 31100 - DNA, 22 bp, Artificial Sequence
  chemically synthesized
gctctcactaaatgagaacata

SEQ ID NO: 31101 - DNA, 22 bp, Artificial Sequence
  chemically synthesized
tcactaaatgagaacatactgt

SEQ ID NO: 31102 - DNA, 22 bp, Artificial Sequence
  chemically synthesized
actaaatgagaacatactgtgt

SEQ ID NO: 31103 - DNA, 22 bp, Artificial Sequence
  chemically synthesized
aatgagaacatactgtgtttga

SEQ ID NO: 31104 - DNA, 22 bp, Artificial Sequence
  chemically synthesized
tgtttgactttctgtttctgag

SEQ ID NO: 31105 - DNA, 22 bp, Artificial Sequence
  chemically synthesized
gactttctgtttctgagttatt

SEQ ID NO: 31106 - DNA, 22 bp, Artificial Sequence
  chemically synthesized
actttctgtttctgagttattt

SEQ ID NO: 31107 - DNA, 22 bp, Artificial Sequence
  chemically synthesized
tctgtttctgagttatttcact

SEQ ID NO: 31108 - DNA, 22 bp, Artificial Sequence
  chemically synthesized
ctgtttctgagttatttcactg

SEQ ID NO: 31109 - DNA, 22 bp, Artificial Sequence
  chemically synthesized
tgtttctgagttatttcactga

SEQ ID NO: 31110 - DNA, 22 bp, Artificial Sequence
  chemically synthesized
tttctgagttatttcactgagg

SEQ ID NO: 31111 - DNA, 22 bp, Artificial Sequence
  chemically synthesized
ctgagttatttcactgaggata

SEQ ID NO: 31112 - DNA, 22 bp, Artificial Sequence
  chemically synthesized
tgagttatttcactgaggataa

SEQ ID NO: 31113 - DNA, 22 bp, Artificial Sequence
  chemically synthesized
agttatttcactgaggataatg

SEQ ID NO: 31114 - DNA, 22 bp, Artificial Sequence
  chemically synthesized
tttcactgaggataatgtcctc

SEQ ID NO: 31115 - DNA, 22 bp, Artificial Sequence
  chemically synthesized
cactgaggataatgtcctccag

SEQ ID NO: 31116 - DNA, 22 bp, Artificial Sequence
  chemically synthesized
actgaggataatgtcctccagt

SEQ ID NO: 31117 - DNA, 22 bp, Artificial Sequence
  chemically synthesized
aggataatgtcctccagttcta

SEQ ID NO: 31118 - DNA, 22 bp, Artificial Sequence
  chemically synthesized
cagttctaaccatgtttctaga

SEQ ID NO: 31119 - DNA, 22 bp, Artificial Sequence
  chemically synthesized
taaccatgtttctagagaagac

SEQ ID NO: 31120 - DNA, 22 bp, Artificial Sequence
  chemically synthesized
accatgtttctagagaagacat

SEQ ID NO: 31121 - DNA, 22 bp, Artificial Sequence
  chemically synthesized
ctagagaagacatgatttcatt

SEQ ID NO: 31122 - DNA, 22 bp, Artificial Sequence
  chemically synthesized
tagagaagacatgatttcattc

SEQ ID NO: 31123 - DNA, 22 bp, Artificial Sequence
  chemically synthesized
gagaagacatgatttcattctt

SEQ ID NO: 31124 - DNA, 22 bp, Artificial Sequence
  chemically synthesized
cattcttttttatggctgagta

SEQ ID NO: 31125 - DNA, 22 bp, Artificial Sequence
  chemically synthesized
attcttttttatggctgagtaa

SEQ ID NO: 31126 - DNA, 22 bp, Artificial Sequence
  chemically synthesized
ttttttatggctgagtaatata

SEQ ID NO: 31127 - DNA, 22 bp, Artificial Sequence
  chemically synthesized
ttttatggctgagtaatatata

SEQ ID NO: 31128 - DNA, 22 bp, Artificial Sequence
  chemically synthesized
tttatggctgagtaatatatat

SEQ ID NO: 31129 - DNA, 22 bp, Artificial Sequence
  chemically synthesized
ttatggctgagtaatatatatg

SEQ ID NO: 31130 - DNA, 22 bp, Artificial Sequence
  chemically synthesized
tatggctgagtaatatatatgt

SEQ ID NO: 31131 - DNA, 22 bp, Artificial Sequence
  chemically synthesized
atggctgagtaatatatatgta

SEQ ID NO: 31132 - DNA, 22 bp, Artificial Sequence
  chemically synthesized
tggctgagtaatatatatgtat

SEQ ID NO: 31133 - DNA, 22 bp, Artificial Sequence
  chemically synthesized
agtaatatatatgtatataaat

SEQ ID NO: 31134 - DNA, 22 bp, Artificial Sequence
  chemically synthesized
tctttatccaatcgtccattgg

SEQ ID NO: 31135 - DNA, 22 bp, Artificial Sequence
  chemically synthesized
ctttatccaatcgtccattggt

SEQ ID NO: 31136 - DNA, 22 bp, Artificial Sequence
  chemically synthesized
tttatccaatcgtccattggta

SEQ ID NO: 31137 - DNA, 22 bp, Artificial Sequence
  chemically synthesized
tatccaatcgtccattggtaga

SEQ ID NO: 31138 - DNA, 22 bp, Artificial Sequence
  chemically synthesized
atccaatcgtccattggtagac

SEQ ID NO: 31139 - DNA, 22 bp, Artificial Sequence
  chemically synthesized
tccaatcgtccattggtagaca

SEQ ID NO: 31140 - DNA, 22 bp, Artificial Sequence
  chemically synthesized
gtagacatttaggttgattcca

SEQ ID NO: 31141 - DNA, 22 bp, Artificial Sequence
  chemically synthesized
aggttgattccatatctttgct

SEQ ID NO: 31142 - DNA, 22 bp, Artificial Sequence
  chemically synthesized
ggttgattccatatctttgcta

SEQ ID NO: 31143 - DNA, 22 bp, Artificial Sequence
  chemically synthesized
attccatatctttgctattggg

SEQ ID NO: 31144 - DNA, 22 bp, Artificial Sequence
  chemically synthesized
catatctttgctattgggaaca

SEQ ID NO: 31145 - DNA, 22 bp, Artificial Sequence
  chemically synthesized
tgctattgggaacagtgctact

SEQ ID NO: 31146 - DNA, 22 bp, Artificial Sequence
  chemically synthesized
gctattgggaacagtgctactt

SEQ ID NO: 31147 - DNA, 22 bp, Artificial Sequence
  chemically synthesized
ctattgggaacagtgctacttt

SEQ ID NO: 31148 - DNA, 22 bp, Artificial Sequence
  chemically synthesized
ttgggaacagtgctactttgaa

SEQ ID NO: 31149 - DNA, 22 bp, Artificial Sequence
  chemically synthesized
ggaacagtgctactttgaacat

SEQ ID NO: 31150 - DNA, 22 bp, Artificial Sequence
  chemically synthesized
ctttgaacatactaatgcagat

SEQ ID NO: 31151 - DNA, 22 bp, Artificial Sequence
  chemically synthesized
tgaacatactaatgcagatatc

SEQ ID NO: 31152 - DNA, 22 bp, Artificial Sequence
  chemically synthesized
gaacatactaatgcagatatct

SEQ ID NO: 31153 - DNA, 22 bp, Artificial Sequence
  chemically synthesized
aacatactaatgcagatatctt

SEQ ID NO: 31154 - DNA, 22 bp, Artificial Sequence
  chemically synthesized
atgcagatatcttttttaatat

SEQ ID NO: 31155 - DNA, 22 bp, Artificial Sequence
  chemically synthesized
ttttaatatgatctctttcact

SEQ ID NO: 31156 - DNA, 22 bp, Artificial Sequence
  chemically synthesized
tttaatatgatctctttcactt

SEQ ID NO: 31157 - DNA, 22 bp, Artificial Sequence
  chemically synthesized
ttaatatgatctctttcacttt

SEQ ID NO: 31158 - DNA, 22 bp, Artificial Sequence
  chemically synthesized
taatatgatctctttcactttg

SEQ ID NO: 31159 - DNA, 22 bp, Artificial Sequence
  chemically synthesized
aatatgatctctttcactttgg

SEQ ID NO: 31160 - DNA, 22 bp, Artificial Sequence
  chemically synthesized
atatgatctctttcactttggg

SEQ ID NO: 31161 - DNA, 22 bp, Artificial Sequence
  chemically synthesized
tttcactttgggtccataccca

SEQ ID NO: 31162 - DNA, 22 bp, Artificial Sequence
  chemically synthesized
tcactttgggtccatacccagt

SEQ ID NO: 31163 - DNA, 22 bp, Artificial Sequence
  chemically synthesized
cactttgggtccatacccagta

SEQ ID NO: 31164 - DNA, 22 bp, Artificial Sequence
  chemically synthesized
actttgggtccatacccagtag

SEQ ID NO: 31165 - DNA, 22 bp, Artificial Sequence
  chemically synthesized
tgggtccatacccagtagtggg

SEQ ID NO: 31166 - DNA, 22 bp, Artificial Sequence
  chemically synthesized
gggtccatacccagtagtggga

SEQ ID NO: 31167 - DNA, 22 bp, Artificial Sequence
  chemically synthesized
ggtccatacccagtagtgggat

SEQ ID NO: 31168 - DNA, 22 bp, Artificial Sequence
  chemically synthesized
caggattgaatggtagttctgt

SEQ ID NO: 31169 - DNA, 22 bp, Artificial Sequence
  chemically synthesized
aatggtagttctgtttctagtt

SEQ ID NO: 31170 - DNA, 22 bp, Artificial Sequence
  chemically synthesized
tgtttctagttctttaagaaat

SEQ ID NO: 31171 - DNA, 22 bp, Artificial Sequence
  chemically synthesized
tttctagttctttaagaaatct

SEQ ID NO: 31172 - DNA, 22 bp, Artificial Sequence
  chemically synthesized
ctagttctttaagaaatcttca

SEQ ID NO: 31173 - DNA, 22 bp, Artificial Sequence
  chemically synthesized
tagttctttaagaaatcttcat

SEQ ID NO: 31174 - DNA, 22 bp, Artificial Sequence
  chemically synthesized
gttctttaagaaatcttcatgc

SEQ ID NO: 31175 - DNA, 22 bp, Artificial Sequence
  chemically synthesized
tttaagaaatcttcatgctgtc

SEQ ID NO: 31176 - DNA, 22 bp, Artificial Sequence
  chemically synthesized
taagaaatcttcatgctgtctt

SEQ ID NO: 31177 - DNA, 22 bp, Artificial Sequence
  chemically synthesized
aagaaatcttcatgctgtcttc

SEQ ID NO: 31178 - DNA, 22 bp, Artificial Sequence
  chemically synthesized
agaaatcttcatgctgtcttcc

SEQ ID NO: 31179 - DNA, 22 bp, Artificial Sequence
  chemically synthesized
catgctgtcttccataaagttt

SEQ ID NO: 31180 - DNA, 22 bp, Artificial Sequence
  chemically synthesized
atgctgtcttccataaagtttg

SEQ ID NO: 31181 - DNA, 22 bp, Artificial Sequence
  chemically synthesized
tcttccataaagtttgtactaa

SEQ ID NO: 31182 - DNA, 22 bp, Artificial Sequence
  chemically synthesized
ccataaagtttgtactaattta

SEQ ID NO: 31183 - DNA, 22 bp, Artificial Sequence
  chemically synthesized
cataaagtttgtactaatttac

SEQ ID NO: 31184 - DNA, 22 bp, Artificial Sequence
  chemically synthesized
gtactaatttacattcttacca

SEQ ID NO: 31185 - DNA, 22 bp, Artificial Sequence
  chemically synthesized
tactaatttacattcttaccaa

SEQ ID NO: 31186 - DNA, 22 bp, Artificial Sequence
  chemically synthesized
atttacattcttaccaacagtg

SEQ ID NO: 31187 - DNA, 22 bp, Artificial Sequence
  chemically synthesized
acattcttaccaacagtgtata

SEQ ID NO: 31188 - DNA, 22 bp, Artificial Sequence
  chemically synthesized
cattcttaccaacagtgtataa

SEQ ID NO: 31189 - DNA, 22 bp, Artificial Sequence
  chemically synthesized
ttaccaacagtgtataagcatt

SEQ ID NO: 31190 - DNA, 22 bp, Artificial Sequence
  chemically synthesized
accaacagtgtataagcatttt

SEQ ID NO: 31191 - DNA, 22 bp, Artificial Sequence
  chemically synthesized
ccaacagtgtataagcattttc

SEQ ID NO: 31192 - DNA, 22 bp, Artificial Sequence
  chemically synthesized
tcttgtctccacatcctcacca

SEQ ID NO: 31193 - DNA, 22 bp, Artificial Sequence
  chemically synthesized
cttgtctccacatcctcaccaa

SEQ ID NO: 31194 - DNA, 22 bp, Artificial Sequence
  chemically synthesized
ttgtctccacatcctcaccaac

SEQ ID NO: 31195 - DNA, 22 bp, Artificial Sequence
  chemically synthesized
gtctccacatcctcaccaacat

SEQ ID NO: 31196 - DNA, 22 bp, Artificial Sequence
  chemically synthesized
tctccacatcctcaccaacatc

SEQ ID NO: 31197 - DNA, 22 bp, Artificial Sequence
  chemically synthesized
cacatcctcaccaacatctgct

SEQ ID NO: 31198 - DNA, 22 bp, Artificial Sequence
  chemically synthesized
accaacatctgctgtttttgaa

SEQ ID NO: 31199 - DNA, 22 bp, Artificial Sequence
  chemically synthesized
ctgtttttgaactttataatga

SEQ ID NO: 31200 - DNA, 22 bp, Artificial Sequence
  chemically synthesized
tttttgaactttataatgatag

SEQ ID NO: 31201 - DNA, 22 bp, Artificial Sequence
  chemically synthesized
ttgaactttataatgatagcca

SEQ ID NO: 31202 - DNA, 22 bp, Artificial Sequence
  chemically synthesized
tgaactttataatgatagccat

SEQ ID NO: 31203 - DNA, 22 bp, Artificial Sequence
  chemically synthesized
gaactttataatgatagccatt

SEQ ID NO: 31204 - DNA, 22 bp, Artificial Sequence
  chemically synthesized
aactttataatgatagccattc

SEQ ID NO: 31205 - DNA, 22 bp, Artificial Sequence
  chemically synthesized
tataatgatagccattctgact

SEQ ID NO: 31206 - DNA, 22 bp, Artificial Sequence
  chemically synthesized
ataatgatagccattctgactg

SEQ ID NO: 31207 - DNA, 22 bp, Artificial Sequence
  chemically synthesized
taatgatagccattctgactgg

SEQ ID NO: 31208 - DNA, 22 bp, Artificial Sequence
  chemically synthesized
tgactggcataaggaggtatca

SEQ ID NO: 31209 - DNA, 22 bp, Artificial Sequence
  chemically synthesized
actggcataaggaggtatcata

SEQ ID NO: 31210 - DNA, 22 bp, Artificial Sequence
  chemically synthesized
gcataaggaggtatcatatggt

SEQ ID NO: 31211 - DNA, 22 bp, Artificial Sequence
  chemically synthesized
taatttgcattctctgattatt

SEQ ID NO: 31212 - DNA, 22 bp, Artificial Sequence
  chemically synthesized
aatttgcattctctgattatta

SEQ ID NO: 31213 - DNA, 22 bp, Artificial Sequence
  chemically synthesized
atttgcattctctgattattag

SEQ ID NO: 31214 - DNA, 22 bp, Artificial Sequence
  chemically synthesized
gcattctctgattattagtgat

SEQ ID NO: 31215 - DNA, 22 bp, Artificial Sequence
  chemically synthesized
cattctctgattattagtgatg

SEQ ID NO: 31216 - DNA, 22 bp, Artificial Sequence
  chemically synthesized
tctgattattagtgatgttgaa

SEQ ID NO: 31217 - DNA, 22 bp, Artificial Sequence
  chemically synthesized
tgattattagtgatgttgaact

SEQ ID NO: 31218 - DNA, 22 bp, Artificial Sequence
  chemically synthesized
attattagtgatgttgaacttt

SEQ ID NO: 31219 - DNA, 22 bp, Artificial Sequence
  chemically synthesized
ttagtgatgttgaacttttttt

SEQ ID NO: 31220 - DNA, 22 bp, Artificial Sequence
  chemically synthesized
gtgatgttgaacttttttttga

SEQ ID NO: 31221 - DNA, 22 bp, Artificial Sequence
  chemically synthesized
aacttttttttgacgtttattg

SEQ ID NO: 31222 - DNA, 22 bp, Artificial Sequence
  chemically synthesized
ttttttgacgtttattggccac

SEQ ID NO: 31223 - DNA, 22 bp, Artificial Sequence
  chemically synthesized
tttttgacgtttattggccact

SEQ ID NO: 31224 - DNA, 22 bp, Artificial Sequence
  chemically synthesized
ttttgacgtttattggccactt

SEQ ID NO: 31225 - DNA, 22 bp, Artificial Sequence
  chemically synthesized
tttgacgtttattggccacttg

SEQ ID NO: 31226 - DNA, 22 bp, Artificial Sequence
  chemically synthesized
ttgacgtttattggccacttgt

SEQ ID NO: 31227 - DNA, 22 bp, Artificial Sequence
  chemically synthesized
tgacgtttattggccacttgta

SEQ ID NO: 31228 - DNA, 22 bp, Artificial Sequence
  chemically synthesized
gacgtttattggccacttgtat

SEQ ID NO: 31229 - DNA, 22 bp, Artificial Sequence
  chemically synthesized
acgtttattggccacttgtatg

SEQ ID NO: 31230 - DNA, 22 bp, Artificial Sequence
  chemically synthesized
attggccacttgtatgtcttct

SEQ ID NO: 31231 - DNA, 22 bp, Artificial Sequence
  chemically synthesized
ttggccacttgtatgtcttctt

SEQ ID NO: 31232 - DNA, 22 bp, Artificial Sequence
  chemically synthesized
gccacttgtatgtcttcttttg

SEQ ID NO: 31233 - DNA, 22 bp, Artificial Sequence
  chemically synthesized
gtatgtcttcttttggaaaatg

SEQ ID NO: 31234 - DNA, 22 bp, Artificial Sequence
  chemically synthesized
tatgtcttcttttggaaaatgt

SEQ ID NO: 31235 - DNA, 22 bp, Artificial Sequence
  chemically synthesized
cttttggaaaatgtctgctcag

SEQ ID NO: 31236 - DNA, 22 bp, Artificial Sequence
  chemically synthesized
ttttggaaaatgtctgctcagg

SEQ ID NO: 31237 - DNA, 22 bp, Artificial Sequence
  chemically synthesized
ttggaaaatgtctgctcaggac

SEQ ID NO: 31238 - DNA, 22 bp, Artificial Sequence
  chemically synthesized
tggaaaatgtctgctcaggacc

SEQ ID NO: 31239 - DNA, 22 bp, Artificial Sequence
  chemically synthesized
ggaaaatgtctgctcaggacct

SEQ ID NO: 31240 - DNA, 22 bp, Artificial Sequence
  chemically synthesized
gaaaatgtctgctcaggacctg

SEQ ID NO: 31241 - DNA, 22 bp, Artificial Sequence
  chemically synthesized
ctcaggacctgagctcactgta

SEQ ID NO: 31242 - DNA, 22 bp, Artificial Sequence
  chemically synthesized
aggacctgagctcactgtattt

SEQ ID NO: 31243 - DNA, 22 bp, Artificial Sequence
  chemically synthesized
agctcactgtatttgtcagggt

SEQ ID NO: 31244 - DNA, 22 bp, Artificial Sequence
  chemically synthesized
actgtatttgtcagggttccct

SEQ ID NO: 31245 - DNA, 22 bp, Artificial Sequence
  chemically synthesized
tatttgtcagggttccctagag

SEQ ID NO: 31246 - DNA, 22 bp, Artificial Sequence
  chemically synthesized
gtcagggttccctagagagaca

SEQ ID NO: 31247 - DNA, 22 bp, Artificial Sequence
  chemically synthesized
tcagggttccctagagagacag

SEQ ID NO: 31248 - DNA, 22 bp, Artificial Sequence
  chemically synthesized
cctagagagacagaactaatag

SEQ ID NO: 31249 - DNA, 22 bp, Artificial Sequence
  chemically synthesized
gagagacagaactaataggaga

SEQ ID NO: 31250 - DNA, 22 bp, Artificial Sequence
  chemically synthesized
ataggagatagatagatagata

SEQ ID NO: 31251 - DNA, 22 bp, Artificial Sequence
  chemically synthesized
agatataaaagggagtttatta

SEQ ID NO: 31252 - DNA, 22 bp, Artificial Sequence
  chemically synthesized
gatataaaagggagtttattaa

SEQ ID NO: 31253 - DNA, 22 bp, Artificial Sequence
  chemically synthesized
attaagtagtgttaacttacac

SEQ ID NO: 31254 - DNA, 22 bp, Artificial Sequence
  chemically synthesized
ttaagtagtgttaacttacaca

SEQ ID NO: 31255 - DNA, 22 bp, Artificial Sequence
  chemically synthesized
agtagtgttaacttacacaatc

SEQ ID NO: 31256 - DNA, 22 bp, Artificial Sequence
  chemically synthesized
acttacacaatcacaaggtccc

SEQ ID NO: 31257 - DNA, 22 bp, Artificial Sequence
  chemically synthesized
acacaatcacaaggtcccacaa

SEQ ID NO: 31258 - DNA, 22 bp, Artificial Sequence
  chemically synthesized
cacaatcacaaggtcccacaat

SEQ ID NO: 31259 - DNA, 22 bp, Artificial Sequence
  chemically synthesized
caagcagaggagcaaggaagcc

SEQ ID NO: 31260 - DNA, 22 bp, Artificial Sequence
  chemically synthesized
aaggacttggagtccaatgttt

SEQ ID NO: 31261 - DNA, 22 bp, Artificial Sequence
  chemically synthesized
ggagtccaatgtttgagggcag

SEQ ID NO: 31262 - DNA, 22 bp, Artificial Sequence
  chemically synthesized
gagtccaatgtttgagggcagg

SEQ ID NO: 31263 - DNA, 22 bp, Artificial Sequence
  chemically synthesized
gagggcaggaagcatccagcat

SEQ ID NO: 31264 - DNA, 22 bp, Artificial Sequence
  chemically synthesized
agggcaggaagcatccagcatg

SEQ ID NO: 31265 - DNA, 22 bp, Artificial Sequence
  chemically synthesized
ggaggctaagccagtccaggat

SEQ ID NO: 31266 - DNA, 22 bp, Artificial Sequence
  chemically synthesized
gaggctaagccagtccaggatt

SEQ ID NO: 31267 - DNA, 22 bp, Artificial Sequence
  chemically synthesized
agccagtccaggattttcacat

SEQ ID NO: 31268 - DNA, 22 bp, Artificial Sequence
  chemically synthesized
tcacatgttttttttctgcctg

SEQ ID NO: 31269 - DNA, 22 bp, Artificial Sequence
  chemically synthesized
cacatgttttttttctgcctgc

SEQ ID NO: 31270 - DNA, 22 bp, Artificial Sequence
  chemically synthesized
acatgttttttttctgcctgct

SEQ ID NO: 31271 - DNA, 22 bp, Artificial Sequence
  chemically synthesized
tttttctgcctgctttatatcc

SEQ ID NO: 31272 - DNA, 22 bp, Artificial Sequence
  chemically synthesized
ttttctgcctgctttatatcct

SEQ ID NO: 31273 - DNA, 22 bp, Artificial Sequence
  chemically synthesized
tttctgcctgctttatatcctg

SEQ ID NO: 31274 - DNA, 22 bp, Artificial Sequence
  chemically synthesized
ttctgcctgctttatatcctgg

SEQ ID NO: 31275 - DNA, 22 bp, Artificial Sequence
  chemically synthesized
tctgcctgctttatatcctggc

SEQ ID NO: 31276 - DNA, 22 bp, Artificial Sequence
  chemically synthesized
ctgcctgctttatatcctggcc

SEQ ID NO: 31277 - DNA, 22 bp, Artificial Sequence
  chemically synthesized
tgcctgctttatatcctggcca

SEQ ID NO: 31278 - DNA, 22 bp, Artificial Sequence
  chemically synthesized
cctgctttatatcctggccaca

SEQ ID NO: 31279 - DNA, 22 bp, Artificial Sequence
  chemically synthesized
ctttatatcctggccacactgg

SEQ ID NO: 31280 - DNA, 22 bp, Artificial Sequence
  chemically synthesized
tatatcctggccacactggcaa

SEQ ID NO: 31281 - DNA, 22 bp, Artificial Sequence
  chemically synthesized
atatcctggccacactggcaac

SEQ ID NO: 31282 - DNA, 22 bp, Artificial Sequence
  chemically synthesized
tatcctggccacactggcaact

SEQ ID NO: 31283 - DNA, 22 bp, Artificial Sequence
  chemically synthesized
gccacactggcaactgattaga

SEQ ID NO: 31284 - DNA, 22 bp, Artificial Sequence
  chemically synthesized
gcaactgattagatggtgccca

SEQ ID NO: 31285 - DNA, 22 bp, Artificial Sequence
  chemically synthesized
attagatggtgcccacccagat

SEQ ID NO: 31286 - DNA, 22 bp, Artificial Sequence
  chemically synthesized
gatggtgcccacccagattaag

SEQ ID NO: 31287 - DNA, 22 bp, Artificial Sequence
  chemically synthesized
agggtgggtctgcctttcccag

SEQ ID NO: 31288 - DNA, 22 bp, Artificial Sequence
  chemically synthesized
cctttcccagcccactgactaa

SEQ ID NO: 31289 - DNA, 22 bp, Artificial Sequence
  chemically synthesized
tcccagcccactgactaaaatg

SEQ ID NO: 31290 - DNA, 22 bp, Artificial Sequence
  chemically synthesized
cccagcccactgactaaaatgt

SEQ ID NO: 31291 - DNA, 22 bp, Artificial Sequence
  chemically synthesized
ccagcccactgactaaaatgtt

SEQ ID NO: 31292 - DNA, 22 bp, Artificial Sequence
  chemically synthesized
actaaaatgttaatctcctttg

SEQ ID NO: 31293 - DNA, 22 bp, Artificial Sequence
  chemically synthesized
aaatgttaatctcctttggcaa

SEQ ID NO: 31294 - DNA, 22 bp, Artificial Sequence
  chemically synthesized
atctcctttggcaataccctca

SEQ ID NO: 31295 - DNA, 22 bp, Artificial Sequence
  chemically synthesized
ctttggcaataccctcacagac

SEQ ID NO: 31296 - DNA, 22 bp, Artificial Sequence
  chemically synthesized
tggcaataccctcacagacaca

SEQ ID NO: 31297 - DNA, 22 bp, Artificial Sequence
  chemically synthesized
ggcaataccctcacagacacac

SEQ ID NO: 31298 - DNA, 22 bp, Artificial Sequence
  chemically synthesized
gcaataccctcacagacacact

SEQ ID NO: 31299 - DNA, 22 bp, Artificial Sequence
  chemically synthesized
acagacacactcaggatcaata

SEQ ID NO: 31300 - DNA, 22 bp, Artificial Sequence
  chemically synthesized
aggatcaatactttgcacactt

SEQ ID NO: 31301 - DNA, 22 bp, Artificial Sequence
  chemically synthesized
tgcacacttcaatccaatcaag

SEQ ID NO: 31302 - DNA, 22 bp, Artificial Sequence
  chemically synthesized
gcacacttcaatccaatcaagt

SEQ ID NO: 31303 - DNA, 22 bp, Artificial Sequence
  chemically synthesized
cacacttcaatccaatcaagtt

SEQ ID NO: 31304 - DNA, 22 bp, Artificial Sequence
  chemically synthesized
caatccaatcaagttgacactc

SEQ ID NO: 31305 - DNA, 22 bp, Artificial Sequence
  chemically synthesized
aatccaatcaagttgacactca

SEQ ID NO: 31306 - DNA, 22 bp, Artificial Sequence
  chemically synthesized
acactcagtattaaccatcaca

SEQ ID NO: 31307 - DNA, 22 bp, Artificial Sequence
  chemically synthesized
agtattaaccatcacaagtcca

SEQ ID NO: 31308 - DNA, 22 bp, Artificial Sequence
  chemically synthesized
accatcacaagtccatcgcttg

SEQ ID NO: 31309 - DNA, 22 bp, Artificial Sequence
  chemically synthesized
gtcaacttgagcctatacacat

SEQ ID NO: 31310 - DNA, 22 bp, Artificial Sequence
  chemically synthesized
tcaacttgagcctatacacatc

SEQ ID NO: 31311 - DNA, 22 bp, Artificial Sequence
  chemically synthesized
gagcctatacacatcccctgag

SEQ ID NO: 31312 - DNA, 22 bp, Artificial Sequence
  chemically synthesized
agcctatacacatcccctgagg

SEQ ID NO: 31313 - DNA, 22 bp, Artificial Sequence
  chemically synthesized
tacacatcccctgaggtcatac

SEQ ID NO: 31314 - DNA, 22 bp, Artificial Sequence
  chemically synthesized
aggtcatacattatcttcaaat

SEQ ID NO: 31315 - DNA, 22 bp, Artificial Sequence
  chemically synthesized
tcttcaaataaagacaacaata

SEQ ID NO: 31316 - DNA, 22 bp, Artificial Sequence
  chemically synthesized
caaataaagacaacaataagtc

SEQ ID NO: 31317 - DNA, 22 bp, Artificial Sequence
  chemically synthesized
aaataaagacaacaataagtca

SEQ ID NO: 31318 - DNA, 22 bp, Artificial Sequence
  chemically synthesized
tgcctaacatactaaaactatc

SEQ ID NO: 31319 - DNA, 22 bp, Artificial Sequence
  chemically synthesized
acatactaaaactatccttcgt

SEQ ID NO: 31320 - DNA, 22 bp, Artificial Sequence
  chemically synthesized
aaactatccttcgtgcaattga

SEQ ID NO: 31321 - DNA, 22 bp, Artificial Sequence
  chemically synthesized
tccttcgtgcaattgaaaatgc

SEQ ID NO: 31322 - DNA, 22 bp, Artificial Sequence
  chemically synthesized
cgtgcaattgaaaatgcaccaa

SEQ ID NO: 31323 - DNA, 22 bp, Artificial Sequence
  chemically synthesized
gtgcaattgaaaatgcaccaat

SEQ ID NO: 31324 - DNA, 22 bp, Artificial Sequence
  chemically synthesized
aaaatgcaccaatccccattgc

SEQ ID NO: 31325 - DNA, 22 bp, Artificial Sequence
  chemically synthesized
caaatgctattacataaactta

SEQ ID NO: 31326 - DNA, 22 bp, Artificial Sequence
  chemically synthesized
ttacataaacttaacaatactt

SEQ ID NO: 31327 - DNA, 22 bp, Artificial Sequence
  chemically synthesized
cataaacttaacaatacttaaa

SEQ ID NO: 31328 - DNA, 22 bp, Artificial Sequence
  chemically synthesized
aacaatacttaaatgctgatat

SEQ ID NO: 31329 - DNA, 22 bp, Artificial Sequence
  chemically synthesized
acaatacttaaatgctgatatg

SEQ ID NO: 31330 - DNA, 22 bp, Artificial Sequence
  chemically synthesized
aaatgctgatatgaagtcaata

SEQ ID NO: 31331 - DNA, 22 bp, Artificial Sequence
  chemically synthesized
aatgctgatatgaagtcaataa

SEQ ID NO: 31332 - DNA, 22 bp, Artificial Sequence
  chemically synthesized
atatgaagtcaataaatcttat

SEQ ID NO: 31333 - DNA, 22 bp, Artificial Sequence
  chemically synthesized
atgtcacatgataaaggaaaaa

SEQ ID NO: 31334 - DNA, 22 bp, Artificial Sequence
  chemically synthesized
tgtcacatgataaaggaaaaag

SEQ ID NO: 31335 - DNA, 22 bp, Artificial Sequence
  chemically synthesized
tcttagtacaagtgtatacaga

SEQ ID NO: 31336 - DNA, 22 bp, Artificial Sequence
  chemically synthesized
cttagtacaagtgtatacagac

SEQ ID NO: 31337 - DNA, 22 bp, Artificial Sequence
  chemically synthesized
ttagtacaagtgtatacagaca

SEQ ID NO: 31338 - DNA, 22 bp, Artificial Sequence
  chemically synthesized
agtacaagtgtatacagacacg

SEQ ID NO: 31339 - DNA, 22 bp, Artificial Sequence
  chemically synthesized
gtacaagtgtatacagacacga

SEQ ID NO: 31340 - DNA, 22 bp, Artificial Sequence
  chemically synthesized
ttaacaaaagaaggaggaaata

SEQ ID NO: 31341 - DNA, 22 bp, Artificial Sequence
  chemically synthesized
taacaaaagaaggaggaaatac

SEQ ID NO: 31342 - DNA, 22 bp, Artificial Sequence
  chemically synthesized
aacaaaagaaggaggaaatact

SEQ ID NO: 31343 - DNA, 22 bp, Artificial Sequence
  chemically synthesized
acaaaagaaggaggaaatactc

SEQ ID NO: 31344 - DNA, 22 bp, Artificial Sequence
  chemically synthesized
atgacaattacagtccttgtat

SEQ ID NO: 31345 - DNA, 22 bp, Artificial Sequence
  chemically synthesized
cagtccttgtatctgcaattgg

SEQ ID NO: 31346 - DNA, 22 bp, Artificial Sequence
  chemically synthesized
gtatctgcaattggtcacgtga

SEQ ID NO: 31347 - DNA, 22 bp, Artificial Sequence
  chemically synthesized
tatctgcaattggtcacgtgat

SEQ ID NO: 31348 - DNA, 22 bp, Artificial Sequence
  chemically synthesized
caattggtcacgtgatcgtagc

SEQ ID NO: 31349 - DNA, 22 bp, Artificial Sequence
  chemically synthesized
gtcacgtgatcgtagctggtat

SEQ ID NO: 31350 - DNA, 22 bp, Artificial Sequence
  chemically synthesized
gtattgatgactaccttcttct

SEQ ID NO: 31351 - DNA, 22 bp, Artificial Sequence
  chemically synthesized
atgactaccttcttctgctaca

SEQ ID NO: 31352 - DNA, 22 bp, Artificial Sequence
  chemically synthesized
ccttcttctgctacatattctg

SEQ ID NO: 31353 - DNA, 22 bp, Artificial Sequence
  chemically synthesized
cttctgctacatattctgtatt

SEQ ID NO: 31354 - DNA, 22 bp, Artificial Sequence
  chemically synthesized
ttctgctacatattctgtattc

SEQ ID NO: 31355 - DNA, 22 bp, Artificial Sequence
  chemically synthesized
ctgctacatattctgtattccc

SEQ ID NO: 31356 - DNA, 22 bp, Artificial Sequence
  chemically synthesized
tgctacatattctgtattccct

SEQ ID NO: 31357 - DNA, 22 bp, Artificial Sequence
  chemically synthesized
ctacatattctgtattcccttt

SEQ ID NO: 31358 - DNA, 22 bp, Artificial Sequence
  chemically synthesized
catattctgtattccctttgcc

SEQ ID NO: 31359 - DNA, 22 bp, Artificial Sequence
  chemically synthesized
tgtattccctttgccctcagca

SEQ ID NO: 31360 - DNA, 22 bp, Artificial Sequence
  chemically synthesized
tattccctttgccctcagcaag

SEQ ID NO: 31361 - DNA, 22 bp, Artificial Sequence
  chemically synthesized
cctttgccctcagcaagcacct

SEQ ID NO: 31362 - DNA, 22 bp, Artificial Sequence
  chemically synthesized
tgccctcagcaagcacctcagc

SEQ ID NO: 31363 - DNA, 22 bp, Artificial Sequence
  chemically synthesized
gccctcagcaagcacctcagca

SEQ ID NO: 31364 - DNA, 22 bp, Artificial Sequence
  chemically synthesized
ccctcagcaagcacctcagcag

SEQ ID NO: 31365 - DNA, 22 bp, Artificial Sequence
  chemically synthesized
agcaagcacctcagcaggtctt

SEQ ID NO: 31366 - DNA, 22 bp, Artificial Sequence
  chemically synthesized
agcaggtcttgtcttttttttt

SEQ ID NO: 31367 - DNA, 22 bp, Artificial Sequence
  chemically synthesized
gtcttttttttttttttttttc

SEQ ID NO: 31368 - DNA, 22 bp, Artificial Sequence
  chemically synthesized
tcttttttttttttttttttcc

SEQ ID NO: 31369 - DNA, 22 bp, Artificial Sequence
  chemically synthesized
ttttttttttttttttcctggt

SEQ ID NO: 31370 - DNA, 22 bp, Artificial Sequence
  chemically synthesized
tttttttttttttttcctggtg

SEQ ID NO: 31371 - DNA, 22 bp, Artificial Sequence
  chemically synthesized
ttttttttttttttcctggtgg

SEQ ID NO: 31372 - DNA, 22 bp, Artificial Sequence
  chemically synthesized
tttttttttttttcctggtgga

SEQ ID NO: 31373 - DNA, 22 bp, Artificial Sequence
  chemically synthesized
ttttttttttttcctggtggag

SEQ ID NO: 31374 - DNA, 22 bp, Artificial Sequence
  chemically synthesized
tttttttttttcctggtggagt

SEQ ID NO: 31375 - DNA, 22 bp, Artificial Sequence
  chemically synthesized
ttttttttttcctggtggagtg

SEQ ID NO: 31376 - DNA, 22 bp, Artificial Sequence
  chemically synthesized
tttttttttcctggtggagtga

SEQ ID NO: 31377 - DNA, 22 bp, Artificial Sequence
  chemically synthesized
ttttttttcctggtggagtgac

SEQ ID NO: 31378 - DNA, 22 bp, Artificial Sequence
  chemically synthesized
tttttttcctggtggagtgacc

SEQ ID NO: 31379 - DNA, 22 bp, Artificial Sequence
  chemically synthesized
ttttttcctggtggagtgaccc

SEQ ID NO: 31380 - DNA, 22 bp, Artificial Sequence
  chemically synthesized
tttttcctggtggagtgaccca

SEQ ID NO: 31381 - DNA, 22 bp, Artificial Sequence
  chemically synthesized
ttttcctggtggagtgacccaa

SEQ ID NO: 31382 - DNA, 22 bp, Artificial Sequence
  chemically synthesized
tttcctggtggagtgacccaaa

SEQ ID NO: 31383 - DNA, 22 bp, Artificial Sequence
  chemically synthesized
ttcctggtggagtgacccaaac

SEQ ID NO: 31384 - DNA, 22 bp, Artificial Sequence
  chemically synthesized
tcctggtggagtgacccaaacc

SEQ ID NO: 31385 - DNA, 22 bp, Artificial Sequence
  chemically synthesized
cctggtggagtgacccaaacct

SEQ ID NO: 31386 - DNA, 22 bp, Artificial Sequence
  chemically synthesized
ctggtggagtgacccaaacctt

SEQ ID NO: 31387 - DNA, 22 bp, Artificial Sequence
  chemically synthesized
gtggagtgacccaaacctttat

SEQ ID NO: 31388 - DNA, 22 bp, Artificial Sequence
  chemically synthesized
tatttgtagtcctgcctggaat

SEQ ID NO: 31389 - DNA, 22 bp, Artificial Sequence
  chemically synthesized
atttgtagtcctgcctggaatg

SEQ ID NO: 31390 - DNA, 22 bp, Artificial Sequence
  chemically synthesized
tttgtagtcctgcctggaatgg

SEQ ID NO: 31391 - DNA, 22 bp, Artificial Sequence
  chemically synthesized
gtagtcctgcctggaatggcct

SEQ ID NO: 31392 - DNA, 22 bp, Artificial Sequence
  chemically synthesized
tagtcctgcctggaatggcctg

SEQ ID NO: 31393 - DNA, 22 bp, Artificial Sequence
  chemically synthesized
cctggaatggcctgtagtagtt

SEQ ID NO: 31394 - DNA, 22 bp, Artificial Sequence
  chemically synthesized
gaatggcctgtagtagtttccc

SEQ ID NO: 31395 - DNA, 22 bp, Artificial Sequence
  chemically synthesized
tagtagtttcccactgacctta

SEQ ID NO: 31396 - DNA, 22 bp, Artificial Sequence
  chemically synthesized
cccactgaccttaattccagga

SEQ ID NO: 31397 - DNA, 22 bp, Artificial Sequence
  chemically synthesized
ccactgaccttaattccaggac

SEQ ID NO: 31398 - DNA, 22 bp, Artificial Sequence
  chemically synthesized
accttaattccaggacatggta

SEQ ID NO: 31399 - DNA, 22 bp, Artificial Sequence
  chemically synthesized
aattccaggacatggtaaaact

SEQ ID NO: 31400 - DNA, 22 bp, Artificial Sequence
  chemically synthesized
attccaggacatggtaaaacta

SEQ ID NO: 31401 - DNA, 22 bp, Artificial Sequence
  chemically synthesized
caggacatggtaaaactaagag

SEQ ID NO: 31402 - DNA, 22 bp, Artificial Sequence
  chemically synthesized
agagacaccctaatggatctcc

SEQ ID NO: 31403 - DNA, 22 bp, Artificial Sequence
  chemically synthesized
atggatctcctatattccatgc

SEQ ID NO: 31404 - DNA, 22 bp, Artificial Sequence
  chemically synthesized
ctatattccatgcatacgcttc

SEQ ID NO: 31405 - DNA, 22 bp, Artificial Sequence
  chemically synthesized
tattccatgcatacgcttcctt

SEQ ID NO: 31406 - DNA, 22 bp, Artificial Sequence
  chemically synthesized
catgcatacgcttccttacctc

SEQ ID NO: 31407 - DNA, 22 bp, Artificial Sequence
  chemically synthesized
ccttacctccattgtggagttg

SEQ ID NO: 31408 - DNA, 22 bp, Artificial Sequence
  chemically synthesized
cttacctccattgtggagttgt

SEQ ID NO: 31409 - DNA, 22 bp, Artificial Sequence
  chemically synthesized
acctccattgtggagttgtaga

SEQ ID NO: 31410 - DNA, 22 bp, Artificial Sequence
  chemically synthesized
cctccattgtggagttgtagac

SEQ ID NO: 31411 - DNA, 22 bp, Artificial Sequence
  chemically synthesized
cattgtggagttgtagactgat

SEQ ID NO: 31412 - DNA, 22 bp, Artificial Sequence
  chemically synthesized
tggagttgtagactgatttcat

SEQ ID NO: 31413 - DNA, 22 bp, Artificial Sequence
  chemically synthesized
tagactgatttcatcttgatag

SEQ ID NO: 31414 - DNA, 22 bp, Artificial Sequence
  chemically synthesized
atttcatcttgatagtctgggt

SEQ ID NO: 31415 - DNA, 22 bp, Artificial Sequence
  chemically synthesized
catcttgatagtctgggttaat

SEQ ID NO: 31416 - DNA, 22 bp, Artificial Sequence
  chemically synthesized
atcttgatagtctgggttaatc

SEQ ID NO: 31417 - DNA, 22 bp, Artificial Sequence
  chemically synthesized
gatagtctgggttaatcaccgc

SEQ ID NO: 31418 - DNA, 22 bp, Artificial Sequence
  chemically synthesized
atagtctgggttaatcaccgca

SEQ ID NO: 31419 - DNA, 22 bp, Artificial Sequence
  chemically synthesized
ggttaatcaccgcagccaacac

SEQ ID NO: 31420 - DNA, 22 bp, Artificial Sequence
  chemically synthesized
atcaccgcagccaacactgtaa

SEQ ID NO: 31421 - DNA, 22 bp, Artificial Sequence
  chemically synthesized
taactctcttcttagcctgttg

SEQ ID NO: 31422 - DNA, 22 bp, Artificial Sequence
  chemically synthesized
tcttcttagcctgttgacttaa

SEQ ID NO: 31423 - DNA, 22 bp, Artificial Sequence
  chemically synthesized
ttcttagcctgttgacttaaag

SEQ ID NO: 31424 - DNA, 22 bp, Artificial Sequence
  chemically synthesized
cttagcctgttgacttaaaggt

SEQ ID NO: 31425 - DNA, 22 bp, Artificial Sequence
  chemically synthesized
ttagcctgttgacttaaaggtg

SEQ ID NO: 31426 - DNA, 22 bp, Artificial Sequence
  chemically synthesized
agcctgttgacttaaaggtggg

SEQ ID NO: 31427 - DNA, 22 bp, Artificial Sequence
  chemically synthesized
gcctgttgacttaaaggtggga

SEQ ID NO: 31428 - DNA, 22 bp, Artificial Sequence
  chemically synthesized
ttgacttaaaggtgggaggagc

SEQ ID NO: 31429 - DNA, 22 bp, Artificial Sequence
  chemically synthesized
acttaaaggtgggaggagccca

SEQ ID NO: 31430 - DNA, 22 bp, Artificial Sequence
  chemically synthesized
aaaggtgggaggagcccaaagt

SEQ ID NO: 31431 - DNA, 22 bp, Artificial Sequence
  chemically synthesized
aaggtgggaggagcccaaagtg

SEQ ID NO: 31432 - DNA, 22 bp, Artificial Sequence
  chemically synthesized
aatttgcagtttaatggaatca

SEQ ID NO: 31433 - DNA, 22 bp, Artificial Sequence
  chemically synthesized
atttgcagtttaatggaatcat

SEQ ID NO: 31434 - DNA, 22 bp, Artificial Sequence
  chemically synthesized
gcagtttaatggaatcattatt

SEQ ID NO: 31435 - DNA, 22 bp, Artificial Sequence
  chemically synthesized
cagtttaatggaatcattattg

SEQ ID NO: 31436 - DNA, 22 bp, Artificial Sequence
  chemically synthesized
aatggaatcattattgtgtcac

SEQ ID NO: 31437 - DNA, 22 bp, Artificial Sequence
  chemically synthesized
atggaatcattattgtgtcacc

SEQ ID NO: 31438 - DNA, 22 bp, Artificial Sequence
  chemically synthesized
ttgtgtcacctggcggcagtgt

SEQ ID NO: 31439 - DNA, 22 bp, Artificial Sequence
  chemically synthesized
tgtcacctggcggcagtgttcc

SEQ ID NO: 31440 - DNA, 22 bp, Artificial Sequence
  chemically synthesized
gcggcagtgttcctccctctgg

SEQ ID NO: 31441 - DNA, 22 bp, Artificial Sequence
  chemically synthesized
ctccctctggaactaagacctc

SEQ ID NO: 31442 - DNA, 22 bp, Artificial Sequence
  chemically synthesized
cctctggaactaagacctctaa

SEQ ID NO: 31443 - DNA, 22 bp, Artificial Sequence
  chemically synthesized
tggaactaagacctctaagcca

SEQ ID NO: 31444 - DNA, 22 bp, Artificial Sequence
  chemically synthesized
gaactaagacctctaagccagc

SEQ ID NO: 31445 - DNA, 22 bp, Artificial Sequence
  chemically synthesized
agacctctaagccagcagaaca

SEQ ID NO: 31446 - DNA, 22 bp, Artificial Sequence
  chemically synthesized
taagccagcagaacataatgcc

SEQ ID NO: 31447 - DNA, 22 bp, Artificial Sequence
  chemically synthesized
agccagcagaacataatgccat

SEQ ID NO: 31448 - DNA, 22 bp, Artificial Sequence
  chemically synthesized
tgctagtggaacactaggggtg

SEQ ID NO: 31449 - DNA, 22 bp, Artificial Sequence
  chemically synthesized
gctagtggaacactaggggtga

SEQ ID NO: 31450 - DNA, 22 bp, Artificial Sequence
  chemically synthesized
ctagtggaacactaggggtgat

SEQ ID NO: 31451 - DNA, 22 bp, Artificial Sequence
  chemically synthesized
gtggaacactaggggtgatggt

SEQ ID NO: 31452 - DNA, 22 bp, Artificial Sequence
  chemically synthesized
ggggtgatggtgagtggtgcca

SEQ ID NO: 31453 - DNA, 22 bp, Artificial Sequence
  chemically synthesized
ccacttccacttccaccctttg

SEQ ID NO: 31454 - DNA, 22 bp, Artificial Sequence
  chemically synthesized
cacttccacttccaccctttga

SEQ ID NO: 31455 - DNA, 22 bp, Artificial Sequence
  chemically synthesized
ccacttccaccctttgattcct

SEQ ID NO: 31456 - DNA, 22 bp, Artificial Sequence
  chemically synthesized
cacttccaccctttgattcctg

SEQ ID NO: 31457 - DNA, 22 bp, Artificial Sequence
  chemically synthesized
ccaccctttgattcctggaccc

SEQ ID NO: 31458 - DNA, 22 bp, Artificial Sequence
  chemically synthesized
caccctttgattcctggacccg

SEQ ID NO: 31459 - DNA, 22 bp, Artificial Sequence
  chemically synthesized
tgattcctggacccgtgaatcc

SEQ ID NO: 31460 - DNA, 22 bp, Artificial Sequence
  chemically synthesized
gattcctggacccgtgaatcct

SEQ ID NO: 31461 - DNA, 22 bp, Artificial Sequence
  chemically synthesized
attcctggacccgtgaatcctg

SEQ ID NO: 31462 - DNA, 22 bp, Artificial Sequence
  chemically synthesized
ctggacccgtgaatcctgtcta

SEQ ID NO: 31463 - DNA, 22 bp, Artificial Sequence
  chemically synthesized
gacccgtgaatcctgtctatgg

SEQ ID NO: 31464 - DNA, 22 bp, Artificial Sequence
  chemically synthesized
tctatgggagaaacagtaccat

SEQ ID NO: 31465 - DNA, 22 bp, Artificial Sequence
  chemically synthesized
tgggagaaacagtaccatatat

SEQ ID NO: 31466 - DNA, 22 bp, Artificial Sequence
  chemically synthesized
gacactgattcagagcatacac

SEQ ID NO: 31467 - DNA, 22 bp, Artificial Sequence
  chemically synthesized
attcagagcatacacagccttc

SEQ ID NO: 31468 - DNA, 22 bp, Artificial Sequence
  chemically synthesized
agagcatacacagccttctgga

SEQ ID NO: 31469 - DNA, 22 bp, Artificial Sequence
  chemically synthesized
ctggagaactttgccccaggcc

SEQ ID NO: 31470 - DNA, 22 bp, Artificial Sequence
  chemically synthesized
tggagaactttgccccaggcct

SEQ ID NO: 31471 - DNA, 22 bp, Artificial Sequence
  chemically synthesized
gagaactttgccccaggcctgc

SEQ ID NO: 31472 - DNA, 22 bp, Artificial Sequence
  chemically synthesized
tgccccaggcctgcaaagtatt

SEQ ID NO: 31473 - DNA, 22 bp, Artificial Sequence
  chemically synthesized
gccccaggcctgcaaagtattg

(The sequence listing continues in the following parts.)
